United States Patent Application Publication US 2005/0228172 A9 - sequence listing, part 205

SEQ ID NO: 928715 - DNA, 795 bp, Homo sapiens
tgaagactgatgctgccccatcgcttcggaagccccgtagaccatcaaggatgccgagctttaagtaactctcacagtggagggtaagtccatccccttcttaatcaatacggaggctgcccactccacattaccttcttttcaaggacctgtttcccttgcctccataactgttgttaagtattgacggccaagcttctaaacctcttaaagctccccaactctggtgccaacttagacaatactcttctaagcactcctttttagttwtccctacctgcccagttcccttattaggctgagacactttaactaaattatgtgcttccctgactattcctgggctacagccgcactgcattgccaccttttcccccagttcaaagcctccttcacatcctccccttgtatctccccaccttaacccacaagtataagatatctctactccctccttagcaaccgatcttgcaccccttaccatcccattaaaacctaatcactcttaccccactcaatgccaatatcctatcctacagcatgctttaaaaggattaaagcctgttatcactcacctgctacagcacaggcttctaaaacctataaactctccttacaattcccccattttacttgtcctaaaaccagacaagacttacaggttagttcaggatctgcgctttatcaatcaaattgttttgcctatccaccccacggtgtcaaacccatatactctcctatcctcaatacctccttctacaacccattattccattctagatctcaaacatgctt

SEQ ID NO: 928716 - DNA, 795 bp, Homo sapiens
tgaagactgatgctgccccatcgcttcggaagccccgtagaccatcaaggatgccgagctttaagtaactctcacagtggagggtaagtccatccccttcttaatcaatacggaggctgcccactccacattaccttcttttcaaggacctgtttcccttgcctccataactgttgttaagtattgacggccaagcttctaaacctcttaaagctccccaactctggtgccaacttagacaatactcttctaagcactcctttttagttatccctacctgcccagttcccttattaggcygagacactttaactaaattatgtgcttccctgactattcctgggctacagccgcactgcattgccaccttttcccccagttcaaagcctccttcacatcctccccttgtatctccccaccttaacccacaagtataagatatctctactccctccttagcaaccgatcttgcaccccttaccatcccattaaaacctaatcactcttaccccactcaatgccaatatcctatcctacagcatgctttaaaaggattaaagcctgttatcactcacctgctacagcacaggcttctaaaacctataaactctccttacaattcccccattttacttgtcctaaaaccagacaagacttacaggttagttcaggatctgcgctttatcaatcaaattgttttgcctatccaccccacggtgtcaaacccatatactctcctatcctcaatacctccttctacaacccattattccattctagatctcaaacatgctt

SEQ ID NO: 928717 - DNA, 474 bp, Homo sapiens
agtgggcagtccacactcagtaatgctatggctcttgcagactggctgaggtaccaccttggtggtcttgggtaagatctgggagaatttcctggattactaggcagacattcttgttctcttctcttaccttcctccaaaaaaatggagtctctttctctgtgctgagttgcctggagacgggggaggtgtgatacaagcrcccctatgtccaccaccactggggctgtgctgggtcagactcaaagccagcacagcactgggtcttgcccaaggcccgcagtgaccactgcctggctactgcttctgttcctcaaggcccaagggctctacaatcagaatatggcaaatccagcaaggcttgtgttcttcccttcaaggtggcgagttcccctcggccccagatggatccagaggtgctatctaagagccaggcctggagttgggaacctgaggaatctacttggtactcta

SEQ ID NO: 928718 - DNA, 585 bp, Homo sapiens
tcagccctcatggaattgttggtgtggacgcaccaagattctgaactgggtcccctttccctctgtccttctctggggccagattctgagctctccattccaatttttcccccaatttgcccttgcatttatttatctggattactgtctgcctgtcccaaagaayaaaagctttatcacagtggggactttgtttaaaaaaataataataacagctatatttttaggacccatgacactgaccagcatatcggtggtatctgataaaaaatgtttgttgactgaatgaacaaatatattattcacaattcacattatcctgaactggctagaaaattaaatacctgatatcagtattggcaacattatgaagtaaatataattctgatacagtgctcgtgaaagtctaatatgaaatgctcattttagaaaacattttcttgtagatttgaaaatgtttcatctccatgaactagttgtatatctgcaagttgtgtatctttgggttaggcagaataattgccccccaccaaagacagccacatcccagtcttcagataaggtgaacatgctaacataagttag

SEQ ID NO: 928719 - DNA, 622 bp, Homo sapiens
tgcaaaaccccgtctctactaaaactacaaaaattagccaggtgtggttgcaggtgcttgaaatcccagctactcaggaggctgaggcaggagaattgctagaacctgggaggcgcaggctgcagtgagccgagatcgtgccactgcactccagcctgggtgacagagcgagattccaactcaaaaaaaaaaaaaaaattggtgacagaaacattcttatcatgggtgcattacaaatgtcaccactggctactgaacatctctttaktctttagaactttattatgtgtttatgttctcatttactccacccaaatcccctcacagattgatatcattttcattattttacaagtgaagaagctggggttcagagaggtgaagtaacatggcagaagtcacacagcccaaactgatatatcagagcataaggcttttctctgccagcttcagaaccagggaggagatggcatgttgcttaaaatgtcaatggaaataaaacgttcttgttggcacactgtcctgaattattctaggacacatctgtgagaaattcctagggtttgcaatctccgctcctctgtggagtcagccaaacatggcctcattgttgatcttcaga

SEQ ID NO: 928720 - DNA, 484 bp, Homo sapiens
acatcagggccagcatagaagagagagggtcctcagccctttttgtctttattgtcaaggaggaagagtcaccgagcaggccttccttaccagtgggctgagcagtaccccagaaaactgagcctatgccctaacctcagaacctgtgaccgtgaacttatttgaaatgagggttttatagagtaattaggaatttcaagatgagatcaccctggattatccaagtgacccccaaatccagggacaactgtaaaggacacacagaggagwgacacaggtagaagaggaaaaggccaggtaaagacagcggcagagattggggtgatgtgccttagccaagggacacctggagtcaccagggactgtacggggcaaggaaggattctactccagatccttccaagggagtgtggcctgattggcaccttgattttggacttctggcctcctaatggtgagggaataaatttctgttgctgaaggc

SEQ ID NO: 928721 - DNA, 658 bp, Homo sapiens
acaacaaaataaagtgattaaaaaatggacaaagaacatttatccaaagatgcaaagatgatataaaaatagccaacagatacatgagatatatgagaagatgtgtaacatcactagtcattaaagaaatgcaaatagaaaccacaatgggacatcacttctaacccaacagatagtaacaagtgcaggtgaaactgaaacccttgaacactgttggtggaaatatgaactggctcctcaaaaaaaaataaaataaaatgaccatatgatccagccatccaacttctacagagacagaataactagtagcaggamctcaaacagatatgtgcacacctatgttcacaggagcattacacagccacaagtggaagaaaccaaaacgtccatccaggaatagatggataaacaaaaggatatatatatatagagagagagagagagaaaaatatatatatatatatatgaagaaatattattcagcaatagaaaggaagaaaatcctgacacttctgacacataacatggaacctacttacaaaacaacaaatattatataaccctaggtatataagccaaagttttagaaatacaaagtagaatagtacttgccaggaggtggaaggaacgggaaattaatagttgttgaatgagtata

SEQ ID NO: 928722 - DNA, 658 bp, Homo sapiens
acaacaaaataaagtgattaaaaaatggacaaagaacatttatccaaagatgcaaagatgatataaaaatagccaacagatacatgagatatatgagaagatgtgtaacatcactagtcattaaagaaatgcaaatagaaaccacaatgggacatcacttctaacccaacagatagtaacaagtgcaggtgaaactgaaacccttgaacactgttggtggaaatatgaactggctcctcaaaaaaaaataaaataaaatgaccatatgatccagccatccaacttctacagagacagaataactagtagcaggaactcaaacagatatgtgcacacctatgttcacaggagcattacacagccacaagtggaagaaaccaaaacgtccatccaggaatagatggataaacaaaaggatatatatatatagagagagagagagagaaaaatatatatatatatatatgaagaaatattattcagcaatagaaaggaagaaaatcctgacacwtctgacacataacatggaacctacttacaaaacaacaaatattatataaccctaggtatataagccaaagttttagaaatacaaagtagaatagtacttgccaggaggtggaaggaacgggaaattaatagttgttgaatgagtata

SEQ ID NO: 928723 - DNA, 565 bp, Homo sapiens
cctcgggcctgctaggggtaacacaaggcgggcagaaatcccatgaggggcagttgaggtttgaggaaggagaggtgaggcacctgtggcagaaaaaaaaactgcaccacgaagaagcagagcctgggtccccaacggacgaaagtgtcttcccatcagcacttgcgctgggcccaggggaccctggcattcctggttcgagaccagggtgtgcttcaggccgctagggrtacccaaaagcaagcagaaggcccatgaggggaaggtgatgcacgtggggcagagaaaaaaacaacaaccgtgccgcggataagcggggcctgggtcccccacagaagaaactgtcttcccatcagcgcttgcactgtgccccggggaccctggtatccctggctcgagcccagcgtgcgcctcggcctgctaggggtaccccaagacagacagaaggcccatgagggaaaggtgagacacctggggcagagaataaaataaaaaactgcgccgcccagaagtggggactgggtcccccatggacgaacgtccctacccatcagccctgcactgg

SEQ ID NO: 928724 - DNA, 726 bp, Homo sapiens
acattaatttcatctgtttttcctaacgttcattataatgtatctgtagaatatttaaaattatttatgtggcttacatttctactggacagtaataaaattactcatctagtttcatactcatctagtcttgcatgacatctgtatttatacaagttcacggagagctgacacaagttattcaagaggcatgtgacttatagttatctataatttggttgttcttgctcctgttttattttttcctcaaatcagggaaacaaaagttatctgagaagagtcatcctggaaacaactgaattaattttttaatccgttaattgaatatatattcattgttatatatggttacatataacaatgaattatatatgccttatatatgtatcatggactacactttactaaagacatctgaatgtaaaaagacattatcctttattctaaagcgtactttatgcctttattttgtatkttcactataaatttctctagatagttatttttacatttcaaatttagtatattaaggtctattatatataataaagtcaattcattttaaataaacagttcgactcacatcggcatatgaatataccaatgtggccattaccccatcaagatatacgggttaggcataattctaaagagtctccccctttcccatggagattctagtctcctagttattcagtcaaacactaatctaggtacttctgtgag

SEQ ID NO: 928725 - DNA, 726 bp, Homo sapiens
acattaatttcatctgtttttcctaacgttcattataatgtatctgtagaatatttaaaattatttatgtggcttacatttctactggacagtaataaaattactcatctagtttcatactcatctagtcttgcatgacatctgtatttatacaagttcacggagagctgacacaagttattcaagaggcatgtgacttatagttatctataatttggttgttcttgctcctgttttattttttcctcaaatcagggaaacaaaagttatctgagaagagtcatcctggaaacaactgaattaattttttaatccgttaattgaatatatattcattgttatatatggttacatataacaatgaattatatatgccttatatatgtatcatggactacactttactaaagacatctgaatgtaaaaagacattatcctttattctaaagcgtactttatgcctttattttgtattttcactakaaatttctctagatagttatttttacatttcaaatttagtatattaaggtctattatatataataaagtcaattcattttaaataaacagttcgactcacatcggcatatgaatataccaatgtggccattaccccatcaagatatacgggttaggcataattctaaagagtctccccctttcccatggagattctagtctcctagttattcagtcaaacactaatctaggtacttctgtgag

SEQ ID NO: 928726 - DNA, 726 bp, Homo sapiens
acattaatttcatctgtttttcctaacgttcattataatgtatctgtagaatatttaaaattatttatgtggcttacatttctactggacagtaataaaattactcatctagtttcatactcatctagtcttgcatgacatctgtatttatacaagttcacggagagctgacacaagttattcaagaggcatgtgacttatagttatctataatttggttgttcttgctcctgttttattttttcctcaaatcagggaaacaaaagttatctgagaagagtcatcctggaaacaactgaattaattttttaatccgttaattgaatatatattcattgttatatatggttacatataacaatgaattatatatgccttatatatgtatcatggactacactttactaaagacatctgaatgtaaaaagacattatcctttattctaaagcgtactttatgcctttattttgtattttcactataaatttctctagatagktatttttacatttcaaatttagtatattaaggtctattatatataataaagtcaattcattttaaataaacagttcgactcacatcggcatatgaatataccaatgtggccattaccccatcaagatatacgggttaggcataattctaaagagtctccccctttcccatggagattctagtctcctagttattcagtcaaacactaatctaggtacttctgtgag

SEQ ID NO: 928727 - DNA, 726 bp, Homo sapiens
acattaatttcatctgtttttcctaacgttcattataatgtatctgtagaatatttaaaattatttatgtggcttacatttctactggacagtaataaaattactcatctagtttcatactcatctagtcttgcatgacatctgtatttatacaagttcacggagagctgacacaagttattcaagaggcatgtgacttatagttatctataatttggttgttcttgctcctgttttattttttcctcaaatcagggaaacaaaagttatctgagaagagtcatcctggaaacaactgaattaattttttaatccgttaattgaatatatattcattgttatatatggttacatataacaatgaattatatatgccttatatatgtatcatggactacactttactaaagacatctgaatgtaaaaagacattatcctttattctaaagcgtactttatgcctttattttgtattttcactataaatttctctagatagttattkttacatttcaaatttagtatattaaggtctattatatataataaagtcaattcattttaaataaacagttcgactcacatcggcatatgaatataccaatgtggccattaccccatcaagatatacgggttaggcataattctaaagagtctccccctttcccatggagattctagtctcctagttattcagtcaaacactaatctaggtacttctgtgag

SEQ ID NO: 928728 - DNA, 609 bp, Homo sapiens
tatgttgaataggggtggtgaaagagggcatccttgtcttgtggcagttttcaaggggaatgcttccagcttttgcccatttagtatgatattggctatggatttgtcataaatggctcttattattttgaggtacattcctcaaatgtacctttctttattgagagttttaacatgaagggatgttgaattttatgaaggccttttctgcatctattgagaaaatcatgtgttttttgtctttagttctgtttatgtaatgaattacatttattgatttgcatatcttgaaccagccttgcawcccggcaatcaagccaacttgattatagtggataagctttttgatgtgctgctagatttggtctttcagtattttgttgaggatttttacattgatgttcatattggtctgaagttttctttttttgtcaggttttggtatcaggatgatgctgccaggttttggtatcaggatgatgctgccagcttttggtatcaggatgatgctggcctcataaaatgatttagggaggattccctctttttctattgtttggaatagtttcagaaggaatggtaccagctcctttttgtacctctggtaaa

SEQ ID NO: 928729 - DNA, 778 bp, Homo sapiens
ccctctacatttgcctttgagcacagttgaggcactgccttcccaaaggaccccattcctgtcccttcctgcaatcttcagtcacatagaaagacatctcccctggcatcatcagtgtccagtacaataaaaagtcaccagaatcatcaagctggatccaatgccagcccaggtgagatttttccttcctgygtgtggccttctggcatctgttttctctttgaagctcttttctcttcctgggatgagaacccagaattggggctctgatctccattcaccaaatcatcccaggctgaagctttcttctctagatgcccaggaaaggcacgatagttcagtcatattaggttcctgccagctaataagcctaagtttcaaagaaaaaggcaccattcatcccaaattcaccatggttctgacttttgtaaaggtcctaaaatacaattagtaacacaattgcatcttaacttagaattttccacttggtggcttttctcaggttgactgtcattgaaaagctgcttttgctttttttttttaaatttaaacctaaagaacactataatgctttactcttagttgctaatgtccagatgagttctgctcggcatagatactgaaggttccccagtagaaaggaatcgttctcatcatttattgtaaagtgtgtgcctggcagttgtaactgagttcaatttgaaaagaaatcaaatgtttggatgaaagtgacacaatgatgtggcatgaggcataatccatacatttctaacagatg

SEQ ID NO: 928730 - DNA, 760 bp, Homo sapiens
attgtaccagttttctcaattggcattactctgcaatgcacggacaacattactggcaaatgctgtagtttctatatctgaccctccaaacttcatgttgaaatttgatctgcaatgttggaggtcaggcctgccggcaggggtcatggtggcttggtgtcatccttgcagtattgagtgagttctccctctattagttccctcgagagttctttctagagatggtttcttagcaactttttctcttgcttcctctcttgcccacgtgatctctgcacagccagctctccttttccttcggccatgagtgaaagccacctgaagtcctcaccagaagcagacgttggcaccatgcttcttgcaaagcctgcagaaccatgagccaagtgtactagggttctctagagggacacgactaataggatagatgtatatctggaagggagtttattaaggagtattgactcayatgatcacaaggtgaagtcccaccataggccgtctggaagctgaggagccaggaagccagtctgagtcccaaaacctgaaaattagggaagccgacagtgcagccttcagtctgtggccaaaggcctgagagcccctggcaaactactagtgtaggtccaagagtccaaaagctgaagaacatgcagcctgatgtttaaggtcaggaagcatccagcatgggagaaagatgaggtagaagactcagcaagttggcttttcccaccttcttccatctgctttatcctagccg

SEQ ID NO: 928731 - DNA, 609 bp, Homo sapiens
aatgaaattgaaataaacaatacaaaggatcaatggaacaaaaagctggttttatgaaaagttaaacaaaattgataaaacattagacagactaagaaaaaagagaaaatatccaaataaataaaatcagagatgaaaatggagacatatctgatactacagaaattcaaagtaccattagtggctactatgagcaactatatgtcaataaactggaaaatctagaagaaatggaaaaatccatagacacaacctaccaagattgaaccatgaagaaatccaaaatctgtacagaccaataacaaataatgagagcaaagctrtaataaaaagtctcccaggaaagaacacctggggccctacagtttcactgctgaatcctacatttaaagaactcataccaatcctcttcaaactattccaaaaaatagaggaggagggaatacctccagctcattctatgaggccagtattaccctgatatcaaaaccagaaaaaaagacacattgaaaaaagaaaactacagaccaatatctctgataaatattaatgcaaaaatcctcaaaaaataccattatagtaagccaaatccaacagtatattaaaaag

SEQ ID NO: 928732 - DNA, 635 bp, Homo sapiens
gagagaacagggattactttgttccctttgagaaatactaaattcattagagcacagaacctttttttctggggtgtcgtttattaacttgcatcacatgcaaatattttgggaaccgtattactgccctactctaacgggggttcagccacctccctcatcaaatttttaaaaaggtaaccagtggtcaaataaaggatttattttcttactttctctaattcaagctcaaagatgttaaataagtacactgwaaacagaacagactaaaaccaaaatgacatggttacatcacagtgtttattgtctgcacctaagcaggcagaaaggtgattctgcaggcgttccaataaactgagcctggactaattgcagttttgtccaacaaacaaattgtttttattttaaaatctactatagttatattttacaatgggcatgccaatgcagtagtagtctactttatttcaaaaaaaattcatgcattcttccactatgactaaatgaaaatatcaagattttaaaaaaataccaagtcttgaatgatgtgcaaataaactagtcagtgtcaatgcaccctcatccctactcaaaaagacttcctcttcttcaactgctttttcttcccaattcca

SEQ ID NO: 928733 - DNA, 612 bp, Homo sapiens
cataaggagaagccaaatgttaatagccaaaacaatggggaaaatgtctccagagcctgtcagaggtctccacagcagcccctcccatcacaggcccagagacctaggagaaaaaatggtttcatgggctgggcccagggccttgctgctttgtgcaatcttgggacttggtgccctgagtcacagccatggctaaaaggggacaacgtagagctcaggccattgcttcagagggtgcgagccccaagccttggtggcttccacatggtgttgggactacgggtgcacagaagtcaagaaytgaggtttgggaacctccacctagatttcaaaggttgtatcaaaatgtctggatgtctaggcaaagatgtgcttcggggcagagccctcatggagaacctctgctagggcagtgtggaagggaaatatggggtgggagccccccacacagaattcccactggggcactgcctagtggagctgtgagaagagggccactgttctccagacctcagaatggtaaatccactgagagcatgcaccatgcacccagaaaagctgcagacactcaatgcccacccatgaaagcagccggaatgggggctgtactgt

SEQ ID NO: 928734 - DNA, 670 bp, Homo sapiens
ccctgggctcaaacaatccttctgcctcagcctcccaagtatctggaactccaagcatgccccaccacaccttttttttttttttaatttctttttacagatggggtctcactatgttgcccaggctggtcttgagttcctatcctcaagtaatcctcccacyttgtcctcccaaagtgctgggattacagtggggagctactggcacctggccataaattggatttttttttgctttttctttttttttttctttttttgagatggagtctcactctgtcacccaagctggagtacagtggcatgatcttgcctcactgcaacctctgtctcccaggctcaagcgattcttgtgcttcagcctcccaagtggctgggactataggcgtgtgccaccatgctcggctaatttttgtatttttagtagatacagggttttgccatattggccaggctggtctagaatggctgacctcaagtgatctgcctgcctctgcctcccaaagtgctgagattacaggcatgagccactacacctagacataaattagattttattgatttgttaaatcagcattgatcatgtccaccaaaaagaatatgggaggatagtagggaaaaggtaataaaatacagtgctggttttcaaactgtgctgtaagaaacccta

SEQ ID NO: 928735 - DNA, 569 bp, Homo sapiens
atggaaaatatttgaaaaaataataaacaataacaatacaacaacaaaatataaaattttaaaacccaataacaactatttacacagcattcacattgtattaagtattctaagtaatttagagctgatttggagcacatacaggaggatgtgcataggttatatgcaaatattatgccattatatataaggaacttgagtatccacagattctggtatgtgtggggttcctggaaccaataccctgcacatagcagaggcaaactgtatcctttttgctttttctttctttttctttctttttttttctttttagatggastctcactttgtcacccaggctggagtgcaggggcacaatctcgactcactgcaacctccacctcccggcttcaagcgattctcatgcctcagactccccaagtggctgggattacaggcgtgcatcaccatgccgggctaatttttgtattttttagtagagatggggtttcaccatgttggccaggctggtctcaaactcctgacctcaagtgatcggcccgcctcagcctcccaaagagctgaga

SEQ ID NO: 928736 - DNA, 618 bp, Homo sapiens
ttgctagacttaaaaaaaagtctttcaagccacttttataaataagctcataaactaaaggaaacaacgtataaagaattatagaaaggaataatgacaacgtcttatcaaagaaagactatcaataaggaaattaacatttgaaaaaattctggaattgaaaactttaataagtgaagtaaaaaatttactagagggggaaaaagtagatttcacctggcagaagaaagaatcattgtatttgaatataaatcaacagagatcatacagwgtgaaaaattgacataaaaattaataaaaaatgtgaagagcctcagagaattgtggaatgccataaacatactaacatctgcataataagaataccagaaatagagaagaaagggaaagaagcagaaaaaaaattcaaatcataatggctaaaacatttcaaaattggttaaaagaaacattaagccatatagtcaaaaaactaagcaaactccaatctgaactcaaagatattcacaggttgattcaatgttagtcataataaaaatgttggatgacaaagatgaaaaaaatcataaaagcagtaagagaaaagaatgacttatcatatttgaggaaatcctaatg

SEQ ID NO: 928737 - DNA, 557 bp, Homo sapiens
tggccgaataggaacagctccagtctacagctcccagtgtgagtgacgcagaatatgggtgatttctgcatttccaactgaggtactgggttcatctcactggggagtatcggaaagtgggtgcaggacagtgggtgcagtgcaccaagcatgagctgaagcagggcgaggcatcaccttacatgggaagtgcaaggggtcagggaataccctttcctagtcaaagaaaagggtgaaagatggcacctggaaaatcgggtcactcccaccctaatactgcacttttccaacagtcttagcaaacggcacaccaggagactatatcccgcatgtggctcggagggtaccacacccacggagccttgctcattgctagcmcagcagtctgagatcaaactgcaaggtggcagcgaggctgggggaggggcgcccgccattgctgaggcttgagtaggtaaacaaagcagccaggaagctcgaaccctgtggagcccatcgcagctcaaggaggcctgcctgcctctatagactccacctctggggacagggcatagcca

SEQ ID NO: 928738 - DNA, 615 bp, Homo sapiens
gaaaccaggttgcccaacatgatacctggtcagataacaaatggatgagcagatgagaagaatgggatttaatgatgcgaagcatggttgtgaattatgacatcaagcttcctttcagttgtcagttggtatatttttgagtttctgtttttagagataatggaaaaaagaatattatcagaagtccaggggtgggagcagcgttgaaaactttcaaacttaatttgtccccataatttcagatatgagaaattcrtatgaaaaatcaaagcactagaaaggtgagcaaaggcaactactttagaataccatatggaagatctccttggttggtggggaagatggagaatcattaccaccagtgaaattttacagcatggtgtattaactattattgtcactcagctaacaacacttacgatagtgtaaaaggtctctttttcacctacgcaatttgtgggccaagattaagaactatttaatcatacactttcaaatctctgagcaatgcatgctttacacaattttctgatccctcattgtgaggtttattttattttattttttattttttgacacaggatctccctctgttgcccaggctagagtgcagtg

SEQ ID NO: 928739 - DNA, 595 bp, Homo sapiens
acttaggcggtaatgcttacttgtgctctattcatcttttgctgtgcagcccggttcctaacaggtcacagatcagaaccagtccatgcctgggtgttgggacccctggattaaagacttaaatgtaaaacctaaaactataaaaaccctacaaaataacctatggaatagcattctggacataggaactggcaaagatttcgtgacaaagataccaaaagaaattgcagcaaaaacaaaaattgacaagtggaaccttattaaactaaagaacttctgcacagcaaaagaaacaatcaacatagtaaacagaaatgggatgggacaaacagcttacagaatgggagtaacatttgcaaactatacatccaacaaagggctaatatccagaatctataggggacttaaayaaattaacaagccaccccattaaaaagtgagtaatggatatgaacacttaccaaaagaaaacatacaagcatatgaaaaaacgcccatatcactaatcactagagaaatgcaaatcaaaaccacaatgagatatcatctcacagcagtcagaatggctataataaaaactaagaaaatagcacat

SEQ ID NO: 928740 - DNA, 535 bp, Homo sapiens
gctgggctctgcgtgttttctcatgtcagggttcacactgaagaagaaacctctgttgtgactgaggcggagagacacacttacacacacacacacacacacatacacacacacatacatacccacacatacacacacacacacacacacacacacagaggggaagcagtaagcatgtaatcacatttaacccagatagaaacaattacccatttacaacactattattaactgtttggtatgtactccctcagacattttctaaagcatgtcaaatatttaatatgtcttcaaaaaatagaatcacactttatgttttgctgtatgcttttgctatctaatagtatatcttggaaatttttacaaaygaaagcattcatcctatttgcttttctgtgtttcctgaaaaattcacatcttgcttctaaaatatattgattttattccagttttacatgaatcttgatacatttaccattccccattgtttgagttctgagtgaagggtgaacagatcctgcatcagatgacctaa

SEQ ID NO: 928741 - DNA, 631 bp, Homo sapiens; identical to SEQ ID NO: 928670

SEQ ID NO: 928742 - DNA, 786 bp, Homo sapiens
tcgaagagtcaacttgacttctgaggagagaagtagaaagtcaacttgacttcaggggagagtgacctgcccttcccatctgctttccagctcccttctctactgagagccactttcattgctcagtaaaaatcttcgcattcaccagccttcagttgtccacgtgacctcacttttcttgggtactggacaagagttcgggacccaccaagtgcagtacccaaaaaggctcacactagccctttgctctcactggtggagggccgccaccccatgcaatgaggcaaagggaccactgagctgatagcactctgctgtcctcagatggtgaagctaagasagcactgtaacataccctctggggttttggggtcacaggcacccccatctggatgctgctgcaggcctgcctggagtttgctcctgccagcgccaaagcagccagccagttcctacactcattcgctcatgtgctccctcccacaaggagttgagtgtggaagcctgagtaaatggggcacccctgttgcaagtcctgcaaaggggtcaaggaaaaatcctgcatcaatttccagatgattttccttacagggtttagaaggaactttcttattatgctggctcagtacaactaattgctctgaatcttctgtttcttgggaaaatggcctttttcaaagttcagtttgattatgtggcacttagcatgagtgagtccatttaggtttggccgggtctgctgggaactagagcagaagcttagtccaaataatggccttccataaa

SEQ ID NO: 928743 - DNA, 786 bp, Homo sapiens
tcgaagagtcaacttgacttctgaggagagaagtagaaagtcaacttgacttcaggggagagtgacctgcccttcccatctgctttccagctcccttctctactgagagccactttcattgctcagtaaaaatcttcgcattcaccagccttcagttgtccacgtgacctcacttttcttgggtactggacaagagttcgggacccaccaagtgcagtacccaaaaaggctcacactagccctttgctctcactggtggagggccgccaccccatgcaatgaggcaaagggaccactgagctgatagcactctgctgtcctcagatggtgaagctaagagagcactgtaacataccctctggggttttggggtcacaggcacccccatctggatgctgctgcaggcctgcctggagtttgctcctgccagcgccaaagcagccagccagttcctacactcattcgctcatgtgctccctcccacaaggagttgagygtggaagcctgagtaaatggggcacccctgttgcaagtcctgcaaaggggtcaaggaaaaatcctgcatcaatttccagatgattttccttacagggtttagaaggaactttcttattatgctggctcagtacaactaattgctctgaatcttctgtttcttgggaaaatggcctttttcaaagttcagtttgattatgtggcacttagcatgagtgagtccatttaggtttggccgggtctgctgggaactagagcagaagcttagtccaaataatggccttccataaa

SEQ ID NO: 928744 - DNA, 786 bp, Homo sapiens
tcgaagagtcaacttgacttctgaggagagaagtagaaagtcaacttgacttcaggggagagtgacctgcccttcccatctgctttccagctcccttctctactgagagccactttcattgctcagtaaaaatcttcgcattcaccagccttcagttgtccacgtgacctcacttttcttgggtactggacaagagttcgggacccaccaagtgcagtacccaaaaaggctcacactagccctttgctctcactggtggagggccgccaccccatgcaatgaggcaaagggaccactgagctgatagcactctgctgtcctcagatggtgaagctaagagagcactgtaacataccctctggggttttggggtcacaggcacccccatctggatgctgctgcaggcctgcctggagtttgctcctgccagcgccaaagcagccagccagttcctacactcattcgctcatgtgctccctcccacaaggagttgagtgtggmagcctgagtaaatggggcacccctgttgcaagtcctgcaaaggggtcaaggaaaaatcctgcatcaatttccagatgattttccttacagggtttagaaggaactttcttattatgctggctcagtacaactaattgctctgaatcttctgtttcttgggaaaatggcctttttcaaagttcagtttgattatgtggcacttagcatgagtgagtccatttaggtttggccgggtctgctgggaactagagcagaagcttagtccaaataatggccttccataaa

SEQ ID NO: 928745 - DNA, 613 bp, Homo sapiens
atttcaagttaatttttaaaggtgttctttgcggagattttaaacaccttaagggtagggaccagaccctcttccttttatcttgtccttgcctctcattttctcaggtgtggtcttttaggcagaatgagcactattagtgtatttgacaaaatgatgatctgtattttactatttgaaacaagttcccctaaagatctcaaaggagcctgtggtgatggaaggcagtgttaagaaagggatgtggactagatgtgtgcaaatagagaacttttgagagtgcctgtaggagacgcaaaagcatcctggaaatgctaaaaaagatcctggaccaattttttcatccctcagctatatgattgtaggcaacttgctcaaactctcagtaacttagtttcctcatctataaaactagaataatacatctacaacacagggttgtttytgggattaaatcacgcctgtaatcccagcactttgggaggctgaggcgggtggatcacgaggtcaggagatcgagaccatcctggctatggtgaaaccctgtctttactaaaaaaaaaaaaaaaaaaaaaaaattgcaaaaaattagctgggcatggtgatgggtgcc

SEQ ID NO: 928746 - DNA, 599 bp, Homo sapiens
ccccttctttcttctctttcagcagggagcatttactgggcactgtcagccctgagttaggtgagagtgattcaggggcagatcagacataatccctgcgtttgtctaagtctggaagaaagagttagaaatgtaaacacataggtgtaattaaatttttatttttccctctttaataatctggacrtacaattctaggtgactgggatttttcctcggaagataccacttcagcgccttttggacttcgttattgctgatgagaagtgtgttaaactctaagattatctgctgttctttgcagataatctgttgtttttctttttcatgttaaagacttttagaaagaaacattgatagtatatagtttcactatgatgtacccaggtatgggtttatctttatttttgatctcagaatttgaagtacaccctaaatatgagggtttttgttttctttaattctagaaaaatctaagctgctatcttttcaaatattgcttctccaccattgatattattatggacctttttcttctctcttccacatctctcttaactgtgtctatctgagctgagattggtctatgctgaatttcc

SEQ ID NO: 928747 - DNA, 599 bp, Homo sapiens
ccccttctttcttctctttcagcagggagcatttactgggcactgtcagccctgagttaggtgagagtgattcaggggcagatcagacataatccctgcgtttgtctaagtctggaagaaagagttagaaatgtaaacacataggtgtaattaaatttttatttttccctctttaataatctggacgtacaattctaggtgactgggatttttcctcgsaagataccacttcagcgccttttggacttcgttattgctgatgagaagtgtgttaaactctaagattatctgctgttctttgcagataatctgttgtttttctttttcatgttaaagacttttagaaagaaacattgatagtatatagtttcactatgatgtacccaggtatgggtttatctttatttttgatctcagaatttgaagtacaccctaaatatgagggtttttgttttctttaattctagaaaaatctaagctgctatcttttcaaatattgcttctccaccattgatattattatggacctttttcttctctcttccacatctctcttaactgtgtctatctgagctgagattggtctatgctgaatttcc

SEQ ID NO: 928748 - DNA, 544 bp, Homo sapiens
aagtgctagctctgtgtgacatttgccatgcatttccttatttgatctttctagcagacctggtaggtaattgaggcttagagagattaagttgcctgaggttgtacaactaatgttagaatgagattgggacccacctggtgtgactccagaattagagctcttaatcaataacatcctgtaagagacttaaggcaggtgaaatgaycttttaagtttctgtttatccctgtcttcagtggttgctgttatcacactatggccagaaaagaagcaagtgtgtgctgtgtaataaattctttctgttcttccatagaagacatcaggggtgaggtccacaaagttgcgcaaagcaaatgtaaagaaagtagttacttataaagaaatgtttgtaatgacctcaactcatatgcttgttgaactatgtcttaagatgtagaattagcgcttgtttattttcatgcttgccatttgaaactgctagaggtggagtcaaagatcttaaactctttgctcaatagcaaagtcaagaaataattgattc

SEQ ID NO: 928749 - DNA, 708 bp, Homo sapiens
gtggccagtggtccgcacactccctctggagtcggatcaggagtatggcactggtggtgtttcctgcagtctctggttactacctccccacctcagtggcatccctcccttgttctgtctccctcccttttataacctgcttcttttagggcatgaattcacagagggttagccaagagcaacagtggatttgtcatgtgggggatttgcctattaacagaggggcaaagctttagaaagcttcaactgggaaagtttctctgagcagctcagcttttcttgacagaacaccacctgcaggaagaaccatgtcactctgcctccataggccatagactgcttttccaaaatgcctctctcaggactttagcagtaaagtctaaaaagaggggtctctgtggtccagcacacttcagccctgtcctaagctatgcgctgtgaactggtgggcatgaggagctagttactatttccatggtccagmacactttagacccatcctaagcaagatgctgtgaactggtgggcgcgaggagctagttatatatttctatgattattattattatttttagacagagttttgctcttgtcacccaggctggagtgcaatggtgccatctcggctcactgtaacctctgcctcctaggtttaagcgattctcctgcctcacccttctgagtagctggggttacaggcgcatgcca

SEQ ID NO: 928750 - DNA, 647 bp, Homo sapiens
cttattgcaaccaccacctcccaggttcgagagattctcctgcctcagcctcctgagtagctgggtgggactacaggcatatgccaccacgcccggctaatttttgtatttttagtagagacagggtttcaccatcttggccaggctggtcttgagctccagaccttaggtgatctacccacctcggcctcccaaaatgctgggattacaggtgtgagccaccatgcccggccaattttagttaattttaacatgaaatgtaaaagccacatagagctagtggctaactatgtagaacagtacagctctagacaatacctgcttatatgaaagaaaacactggtctaattacattgttttagcatttcttaagtcaaagttttagtgcattctgattcttaaaaattgcatcagtagtaccaaaacagcagattcctgcccyatcttttagtctcactcggcagaggcaaccactttcacttctcttgggcatttcttttgatatttacctctatatgtaaagaatatgcttaaactgttattttaaaatttatcctttttggccactatcaatttatttcctgttacaatagatgaagatttagcaagtattagagaatagatagtacccaatctttttagcatca

SEQ ID NO: 928751 - DNA, 765 bp, Homo sapiens
cagctgactcataggaacccctccttagccctaggtatctggtggtaaatgttctttcaaaaagaagcattaggatgcatgacctatgaggccatagacagcaaccaaatctagcccttgtcaaacggttacacatctggtccacctatacctgatcaacctggcagaaaagctactatcagcagagaccctctgtccatactcagtgaccacggacagcttctgatttcccctcacctttaggcatgctcaagtccaagtcaggtaccagtccctgtgtctctccaaacacaaaagtcaagttggaggaatggttctgagaaactcttcacttggctgtaattaacaaagcaacagttccttctgccaccagagggtgtgcagcaaggatgggcagcacaacctgctaccaactctctctaaagaaattcttttctctttttttttttttttttttgagacggagtttcactcttgatgcccaggctggagtgcaatggcgcaatcttggctcactgcaacctccgcctcccaagttcaagtgagtctcttgcctcagtctcctgagtagcygggactatgggtgcgcaccactgcgcctggcaaatttttgtattttttttaaagacagggtttcaccatgttggtcaggctggtctcaaactcctgacctcatgatccgccctcctcagcctcccaaagtgctgggattacaggcatgaggcaccacactcagaccccttgccctcatttttgacagatagt

SEQ ID NO: 928752 - DNA, 460 bp, Homo sapiens
tggcatacttagggggtcctggaaacaatcccccacagatagtgagggacaactcttaaccacaaactttatggcttaacacaacacaaatttaggatcgttcttacaggtgtggtgatcagaaatctgaaacgaattttgtgcactaaacttaagctgtcggcggggtcagttcctctggaggctctgggggagagtccactccccgccctccagcttttccaggtggcctgcattcctcggcttatagccacatcacttggatctctgtgtctgccgtcatgttgccttcctcctactcactgttgtggaggacccctrtgattacactgggcccctggataacctaaaataatctcctcatctctagatcattaatttagtcacatctgcaaggtcccttttgtcatttaaaatgacagtcacaggttctggggattaggatgtggacatcttccac

SEQ ID NO: 928753 - DNA, 582 bp, Homo sapiens
catatatttatataaaataaaaacatataaaatatgaaatatataatacagtataaaatctattttatgtaaaatctattttatgtaaacatgataattaaatatatatttaaataatataaatataataaatatttgaagcaattgtattttttaaaaatttcttctaaagaaaaccaggatacatgtgcagaacctgcaggtttgttacataggtatacgtgtgccatggtggtttgctgcacctattgacccgtcctctaagttccctcccctcacctcccaccccccagcaggccctggkgtgtgttgttcccctctctgtgtccatgtattctcgcctcccacttatgagtgagaacacgcgatgtttggttttctgttcctgtgttaatttgctgaggatgatagcttccagcttcatccacgtccctgcaaaggacatgatctcattcctcaatactatggctacgtagtattccatggtgtatatataccacattttcttcatccagtcatgcaaatttatatgaatgtcaattcttttatagtgatcttctggggctattacaatatataggg

SEQ ID NO: 928754 - DNA, 553 bp, Homo sapiens
agtcaaatctcatcttgaatttctatgtgtttggagaggtacccggtgggaggtaattgaatcatgagggcaggtcttttctgtgctgttctcatgatggtgagtaagtctcatgagatctgatggttttataaaggggagtttccctgcccaagttcttctcttgtctgccatcatgtgcgatgtgcctttcacctctgccatgattatgaggcctccctggccatgtggaactgtgagtccattaaacctctttcttttgtaaattgcccaatcttgggaatgtctttatcagcagtgggaaaayggattaatatactaatttatagctagtaggtaaaaagccagggacttgccattagcgttggaagtggggttgtgggggcagtcttgtggaactgagcccttaacctgtggggttgaatgatatctccaggtatatcatgtcagaattgaattcaattagaggatacctagcttgcgttcaatgcagaattgcttgctggtgaggagaaatccctatacacattttggtgaccagaggtaaagcatt

SEQ ID NO: 928755 - DNA, 631 bp, Homo sapiens
tcttgggacatgtctgtctacagtggttggtggttccaggttgcaagtttctccagtgctttggctgaattacatggaaacataaagaaaatccaggcacctcaccgtagtgccaacctcaagtcccaaggtctctaagaagtcaccttgctctttccacctctcagagtcttcctaggtttgactgtttttactgtagtaaaatatacataacacaaaatgtatgatttaaccagttttaggtgtatggttctaagtatacttagtatagcacttaagtacattaacaytgtggggcaaccatcactaccacccttctctagaatacttttcatcttgcaaaactgaaactgattcattaaacaccatttctccctatttctgcctccccccagcccttggaaaccaccattctaataactgttgctatgatttttgaagtatttgtccttttgtgactggcttatctcacttgaaataatgtcctcagcgttcatctatgttgtagcatgtgtcaggatttcctttctaaggctggatgacattccattgcatatactgcattttgtttatctccttctttgttgatgggacactcaggttgcatctgcctcttggctattgtgaataa

SEQ ID NO: 928756 - DNA, 762 bp, Homo sapiens
ctagccccactggcatccccaattccagatgtccctggtgctacaaattcttgagctttgggggttccacaaggtaaatcaggtcacttcttgagggtctgcttctcccactctccagacctgctaagtcagaccccatgcattgattcattattgtcacgtctctcaaaacaaagcccycctactaccttgctgtgcttgagtgatgtttcaggagggcatgggatttcattgtgtgtgaccaatccattaacccaaatccagcatgcttttctatagtttctacattccctttgattagcatatattattattattttttaagagacagggtctcactctgttgcccaggctgcagtgcagtggtgtcaccatagttcaccacagtcttgaactcctgggctcaagcggtcctcccacctcaacctcccaagtagcagcgactaaaggcgtgcaccaccattcctggctaatttttaatttttttgtaggacaggatgtcactatgtggcccagactggtcttgaattcctaaagtgatcatcttgcctcagcctcccaaagtgttgagattataggcatcagtcactgtgcctggccacattatttttataatcagaaaagaaaaagcaatgagagggagacagatagagattttggaggtggactggaaagaccctggatcctgcctgcaagcaggagcgacagccaggcaggaattgacaagactcagagagatgggagatgaggtgccattagcag

SEQ ID NO: 928757 - DNA, 599 bp, Homo sapiens
cccgtggcagtactttcgtgggccgcctgccctccccctcagcccgcccttatccgcggctccgctttcagagcagggtttctcacccgcggggcttcgggctcctcacccggcacctctgccagaggggaccgcctcccggcgcgtcgggcatycgtctctttcaccccttccctcttcaggagaaactgaacacgttttccagcctaaactcggcagggcaaaccagaacattccccgtctaagcagttccggggagttttaacaatttcctcgtaaactcgtctacagaactcactgtatactgtttaaatgtcgcctgtgtgtggagcaacagttttattgtgccgtgcaatcctcaacaagaaattgtagtccagggagatgaaaatcccttatttggcattcaggcgttgatcaaggtcgtgcaaccctcgctaaaaggatttaggttcatctccgtcattctcagccggggtgaaggggtgtagtctgacatttggaagcttaagaaccaagtctgctgccgtccaattcttttttaaagccttccatcatgtgtgtactttgcttgaatgattattttaaagtacatgtcc

SEQ ID NO: 928758 - DNA, 593 bp, Homo sapiens
tgagaaggtctcagatgaagatgaggaagttattgggaaccagagctaagttcactcttgctatgctttagcaaagagactggtggtgcccctgttctagagatctgtagaactttaaacttgagagagctgatttaggatatctaattggaaaagtttctaagcagcaaagcattccagatgtagcctggctgattctaaaagcctacactcatttgcataaacaaagaaatgacccaaaactaaatcatatttaaaaggaaagcagagcataaacgttaaaaaaaatttgcagcctgaccaggcggtaaacaaacaaacaaaaacattttctggggaggacttcaagcctgctgcagaaatttgcataagtaaagaggagctaaatgtaaatactcaagccaatgggaaaaaggcctccaaracatttcagagacctactcagtaacccctcccatcacaggcctggaggtctaggaggaagaaacaattatatgggccaggcacagggctccattgctctgtgcatccttgagacatgattccccacatcccagtcactccagctttagctgtggctaaatgaggccaag

SEQ ID NO: 928759 - DNA, 591 bp, Homo sapiens
agggaatatgcataatactgttggtgtgaattggaactgagaaggtaatgtaacagaagtggaaaccatgaacatttataccaatttttcatgtaaatggcttttgccttaaggacctgctcaagaataattccatatataccacttctttttgattatggagtgctgatgcacatgtctgattcaatggactgagggttgaggaaactttcacttcatgataaccagattaggttgtatggtaagttcatgaccagtgattaaacattcattatctactaaggccctgtggcaagtccaaatctgcttctcaaaacaaaagttcttgtctgcagaagatggcagcaatttcctttaaaatcctaggggcttctgctatattagcctgtaaaaggcttagaacaccatctctatctgccactgacacatcaagaaccattggatagattggctaatatgacccaaaaggcagagtagcttgcactgcaccctgaactttatgcaaaactttgttttattgtggggccaacaaraatctttttgtgtcacttggtaaatggggcagaatagcacaccaaaatgagaaacatg

SEQ ID NO: 928760 - DNA, 613 bp, Homo sapiens
aataacaattccaaattcatcttatgaggtcatcattaccgtggtatgaaagccacacaaagactacaagagaagaaacctataagtcagtatccatgataaatatgaatgcaaacatctttctcaaaatactaacaacytaaattcaacaacacattaaaaggatcatataccatgactaagtggaatttatccctaggatgcaagtatagttcaacaaacacaaattgagtgatatgctgtattaacaaaataaatgataaaaattacttgatcatttcaatagatgtagaaaagcaatttgacaaaaattgacacacttttatgattaaaaaccgaataaactagatatagaaggaatgtactggctacctatcaggcactacgttcactaccttggtgacaggatcatgtatacaccaaatctcaatgacacacaatttacccatgcaacaacttgcacatgtaccccaaacctaaaataaaagtaggcaaaaaagaagtttacctcaacataataaaggccatatatcacaagcccacagctaacatcacactcaatgttgaaaaagagaaatcttttcttctaaagttaggaagaaggcaaaggatg

SEQ ID NO: 928761 - DNA, 613 bp, Homo sapiens
aataacaattccaaattcatcttatgaggtcatcattaccgtggtatgaaagccacacaaagactacaagagaagaaacctataagtcagtatccatgataaatatgaatgcaaacatctttctcaaaatactaacaacctaaattcaacaacacattaaaaggatcatataccatgactaagtggaatttatccctaggatgcaagtatagttcaacaaacacaaattgagtgatatgctgtattaacaaaataaatgataaaaattacttgatcatttcaatagatgtagaaaagcaatttgacaaaaattgacacacttttatgattaaaaaccgaataaactagatatagaaggaatgtactggctacctatcaggcactacgttcactaccttggtgacaggatcatgtatacaccaaatctcaatgacacacaatttacccatgcaacaacttgcacatgtaccccaaacytaaaataaaagtaggcaaaaaagaagtttacctcaacataataaaggccatatatcacaagcccacagctaacatcacactcaatgttgaaaaagagaaatcttttcttctaaagttaggaagaaggcaaaggatg

SEQ ID NO: 928762 - DNA, 646 bp, Homo sapiens
gtcagccattttgaacctttcttccaaataagttacttttaccttctaaagccatagacaagtagtaactcttttccactgaatagaggacattagtaagatgagacgtttttggcagcagacaacttgatattcaaagacatcataccttctctagtttttgcaatgtacacgtctgagcagtagcaagtggaacctcaagagggagagtgagaaaacatttacataatatttgtccacctgaagtttgaggctatatgaagaagctgaactatctgcaagagaaatcagctataaaataaagaattatagtcttgcgtggactgccaggcacaagtgttaggtgaagactcagaagaacatatgaacaaattaggtaggagagacaggacaaaactgaagaacaggttatggcctcagttaaggacctatccagtaatggcctatgtgttttgccaattttcagattaaaaattgttttaaatattagaaatatagacagatgtgcrtgtagggtgtgtgtgtgtgtgtgtgtgtgtgtgtgtgtgtgtgcgcatatgttttgtatcactggttcttagtccctcctaatattgccacatatttcattcctgcaacttccagatatttcaagtatgtcttcagg

SEQ ID NO: 928763 - DNA, 649 bp, Homo sapiens
aagtcatactaaaaagatacttgcacacacatgtttatagcagcacaattcacatattgaaaaaatgtggaaccaaccccaaatgcccatcaatcaaggagtggataaagaaactgcagtgtatctatacatatgtatgtgtaggtgtgcatatatatatatatatatrtaactcagctataaaaaggaatgaattaatggcttttgcagcaacctggatgggattagagactattattctaagtgaagtaactcagaaatggaaaccaaacatcgtacgttctcactcataagtgagagctaagctatgaggatgcaaaggcataagaatgacacaatggacttggggactcggggaaaaattgagaggcaggtgagggataaaagactacaaactgggttcagtgtatactgctccagtgatgggtgcaccaaaatctcacaaatcaccactgaagaatttactcatgtaaccaaataccacttgttccccaaaaacctatggaaataaaaaaattttttaaatagggaaaaaaagaaatgtaaaaaacaaaataaatacacagatcaactcaaactcagctgtgttgtgaaggaagaaaggtttcaatagcttgtaaggaaaatgacttgatctgggggtcaagga

SEQ ID NO: 928764 - DNA, 590 bp, Homo sapiens
cccagccattaggcccaagtcccagggaggaaataaagaaaaatagaagagccaaaggttatatgcctccttgctgagtcagccccccttaggacactttttaaaagtctcattcaacaatttccatttttaccccactagccatttttatctgcaaaggatgccgggaggcatagttttctagctgggcacattgagacctttgacaatagaggagtctgttgtcaaggcagaggagagaataggtatggggtaagcaaccatagcctctaccacatatgagaatttaattatctgatgcccatgaaaatgcagactagaaaacaaaatgcaggaagagttaccacacagagttgctgcgttgccctagacagtcatggcagcctagccactggcctgtyggtggactccctcaggctcctcttacctggacccgccccgttcatttaccattcacactctctctatttccagcactgccctctctcaggctccagacttgcatagcaattactgaccatatggctcctcacaggacactaaattcaagatgctcccaaatgagccaggaactgctcctcttagtacct

SEQ ID NO: 928765 - DNA, 593 bp, Homo sapiens
tggagatttgtcgttttcattgatctttcccaaagaacacgtttttggattcattgattttttttcctttttttatttcattgattcccattttgatctttattattccctttcttttggttactttagatttaatttgctcttcctcatatatattttgagacagaatcttgctctgttgcccaggctggagtgcagtggcacaatctcggctcactgcaaccaccacctcctgggttcaagtgactctcctgcctcagcctcccaagtagctgggattacaggtgycagccaccatacccagctaatttttgtatttttagtagagatggagtttcaccatgttgggtaggctggtctcgaactcccacctcaggtgatctgtctacctcgaccttccccaagtgttaggattacaggcgtgagcctctgcgcatgggcgatattcttcaattagaaactgaggtcgctgatgtgagaccattattcttttctaatacagtaatatcataaatttcccttcaggtactgcttcagtgacaaccgacaaattctttgttgtttttctatttccaataacttcaaataacttt

SEQ ID NO: 928766 - DNA, 787 bp, Homo sapiens
ggtgccagctccatgcaaggctgcagctagaccaggcataccataagcagcttccacggctgacaccagggaatgtggtggtgcccagaaccctgaagatgccaggaacccacagagccctaaagagggtgtcacagccctggctcggagttcctaggtctgggctccctgaagagccacagctcttctcttctctcttctcattgcttgcartgtgacaaacaaggggcatgtttcagcgctgtttgtgttatagctattttagctccgccattcagcaggtctccagttcttgtcctgagaccaggaagaatgatatatgcagacaagtggaaggtgaacaagatgaagaggagctttaccgagagataagacagctcagaggagacccgcagtgggtagctcctctccatagccagggtgtcctgttgagtactgagctctcagcagagagggcagctcctctctgcaggcaggtcatcccgttgtctcttcagctctcagcacagagggtatctcctccctgaagactggcggcccaccccctaggcttcagccccaccccagcttgcaggtggggcttcattggaaacctgctcccttccacccaagagcctgtttgcctcctgtcattgttcatggcacccacgttattcatgccaaggagtacctgcaggccagtgccaagctgtcctcagccccacttcagcctccttcccatgcttgtcagcctccacagtccaaagggggccaaggggctggcatgtcagcactactccaagcatgc

SEQ ID NO: 928767 - DNA, 787 bp, Homo sapiens
ggtgccagctccatgcaaggctgcagctagaccaggcataccataagcagcttccacggctgacaccagggaatgtggtggtgcccagaaccctgaagatgccaggaacccacagagccctaaagagggtgtcacagccctggctcggagttcctaggtctgggctccctgaagagccacagctcttctcttctctcttctcattgcttgcaatgtgacaaacaaggggcatgtttcagcgctgtttgtgttatagctattttagctccgccattcagcaggtctccagttcttgtcctgagaccaggaagaatgatatatgcagacaagtgsaaggtgaacaagatgaagaggagctttaccgagagataagacagctcagaggagacccgcagtgggtagctcctctccatagccagggtgtcctgttgagtactgagctctcagcagagagggcagctcctctctgcaggcaggtcatcccgttgtctcttcagctctcagcacagagggtatctcctccctgaagactggcggcccaccccctaggcttcagccccaccccagcttgcaggtggggcttcattggaaacctgctcccttccacccaagagcctgtttgcctcctgtcattgttcatggcacccacgttattcatgccaaggagtacctgcaggccagtgccaagctgtcctcagccccacttcagcctccttcccatgcttgtcagcctccacagtccaaagggggccaaggggctggcatgtcagcactactccaagcatgc

SEQ ID NO: 928768 - DNA, 761 bp, Homo sapiens
actttctcagtgaatcaacctggactccctgaggccaagttagcaattttccattacacttggttctctttctctgtaagaatatctaatgcaacaattcaagtgtttctttccctcctggtaatgcggggaactccttttggctgagaccaagacttaaaaccttgttctttcaacattaatgaagatctatttagaaagcctccatttttgcagaaaagatatataaacaccaatgaaaatcaatatgaaattatatgacatacaattatattgtggaaagactgaataaataagtgaactaagctctaagaaaaaaagatgatgatataaaatgatatagaagtaaaaacctgggctggtatagcataattaatgtatcagtaaagtatgtacattgtagaagtggcaggaagacagcatagagagtgagacctgaccaaaagctttaaggaaagttctatacccttaaacgagattaaagtggactcaggaaaacatgggccacatgaggggaaggacacatgttccagatgagccaaagctcagagcatctctaccttctccaggaggaaaggggaggcaaagcagcaggcagaagacagcayggccaggtcagcacagggcacccaggccaagccaggtgggctccatcatacaggtagtgaggagtcactgccaggtgggctttattcattagtttgttttgtttcttttagtaacgaagacacatgatcaaagttgacctttgtaagtgttgc

SEQ ID NO: 928769 - DNA, 602 bp, Homo sapiens
aagatggataagaccagtgttttaaaaattatgttgtatagagcactagcctcagtgagatattagtagaacacacaggcacacacacacacacacacactcacactaagcccagattattctggcaaatgctgggttaagcaaactaraagaaacatctttagtgctggacttctcagaacctggaatgtcgctatatgactcataaaacagcaaggttaagacagaacatgtcattttttcccagaaatgctgaaacactttccttcccttggcttcagtgtcaccttctttctcctggttctccatcaacctctttggctgatccttcttgatttccttcttgacaatctgctgctgctcagccattctcttttcattccccatggatttctcaagtgcgtttctattcctgcattttaaactttccttgtttttcctgacacctctccttgtctgactcacccctgttctaaggcaggtgttccatctgtgtgcgcttttggcaccctgggatgctcccagcatgttccctgccacactccatcaggttttctccgcagactctgtgagggcagcagccttgtctccaccattccttc

SEQ ID NO: 928770 - DNA, 585 bp, Homo sapiens
tcacccctgttctaaggcaggtgttccatctgtgtgcgcttttggcaccctgggatgctcccagcatgttccctgccacactccatcaggttttctccgcagactctgtgagggcagcagccttgtctccaccattccttcaatgctcagcacataacacagaagctgactccataacatttagttggccaactgagactaaatatatgttcctctagatcttaaaaagttacagaaacayagcacaatagacaaaatattctctttagtcaggagttctctatatatgtacaacagtttgaagtcattattaaagcaaagtgaaagagaaactgtcacagaattccccaagataaattattttgctttagtcttcatcatgtgagataatcaagaccatgtgttattgtaaatatttctagcttacaacacaacgacctgatttttattgtgtgaaataaccgcaatataaatcagttaattaaaaattgcataaataatcctttcaaataaaattctgcctaaattttacattactcatatgttcaaatgataatgagctcataggcttttccaatacctcag

SEQ ID NO: 928771 - DNA, 585 bp, Homo sapiens
tcacccctgttctaaggcaggtgttccatctgtgtgcgcttttggcaccctgggatgctcccagcatgttccctgccacactccatcaggttttctccgcagactctgtgagggcagcagccttgtctccaccattccttcaatgctcagcacataacacagaagctgactccataacatttagttggccaactgagactaaatatatgttcctctagatcttaaaaagttacagaaacatagcacaatagacaaaatattctctttagtcaggagttctctatatatgtacaacagtttgaagtcattattaaagcaaagtgaaagagaaactgtcacagaattccccaagataaattattttgctttagtcttcatcatgtgagataatcaagaccatgtgttattgtaaatatttctagcttacaacacaacgacctgatttttattgtktgaaataaccgcaatataaatcagttaattaaaaattgcataaataatcctttcaaataaaattctgcctaaattttacattactcatatgttcaaatgataatgagctcataggcttttccaatacctcag

SEQ ID NO: 928772 - DNA, 723 bp, Homo sapiens
ggaaggagcatgtgtattggccctagaaagaggaaaacctcccatcctagtgttgggagcttgagtttttacaagtcttgccatcatgagttgacgtgctattggactctaagagaacttaaggggcagtctaggccacaaggacttcaattattaggcaagtcttattccaagctgggctcagagccagtggaatgtggagggtggggagtayggggtctaccaagacagcagccagagcaactaaagggagtgctcacaacaccactcccccaccccccacctagcagcagccacacaacacacagaaacctgtgaatttgggagagggagagcacagtgactggaggactttacatcaaactcagtgctgctatgtcagtaaagacctggcagaattcatcacctgctgactaaagaacccctgtacccagaataaaaaacagtgacaaccaggtaatacaccatgggcattgggatctgagaagtgctaagttcaggtgtgacccagtacatttctagctgtggtagctatggtgaaagacttctgtttgagaaaggcaggggggaaagtaaagggaactctacattgcacctggtataccagctcaaccacagtggggtagatcaccaagcagattcttagagtccttgagtccaggcctagggtcttcttggtcagcatttctgcacttgccctgggccaaaggtcgagtcccaggc

SEQ ID NO: 928773 - DNA, 718 bp, Homo sapiens
ccctgtacccagaataaaaaacagtgacaaccaggtaatacaccatgggcattgggatctgagaagtgctaagttcaggtgtgacccagtacatttctagctgtggtagctatggtgaaagacttctgtttgagaaaggcaggggggaaagtaaagggaactctacattgcacctggtataccagctcaaccacagtggggtagatcaccaagcagattcttagagtccttgagtccaggcctagggtcttcttggtcagcatttctgcacttgccctgggccaaaggtcgagtcccaggcattgcagaatttatcacaagctaactaaagagtccttgggctttaagtgagaaagtgatgatgatttggtggaaaccccccatgggccagtagtgtgggmagtcatagaagaagctcttctgcctgcagagaggggaaagaagagtagaaaatactttgtcttattccctaagtgccaggttagctacaataaaatagaagagcagctaaattttgaagattctatgctttaatctctggctcccaggtagcatctgtggacccactcatggctaggggaactttcaaccctataggcagagacacaaacctggctggcattgccaactattaatcacagagtcctggggctttgaataaacttatatggtagccaagtagtggttgcagtgggccttgggtgagaccaagttctgt

SEQ ID NO: 928774 - DNA, 718 bp, Homo sapiens
ccctgtacccagaataaaaaacagtgacaaccaggtaatacaccatgggcattgggatctgagaagtgctaagttcaggtgtgacccagtacatttctagctgtggtagctatggtgaaagacttctgtttgagaaaggcaggggggaaagtaaagggaactctacattgcacctggtataccagctcaaccacagtggggtagatcaccaagcagattcttagagtccttgagtccaggcctagggtcttcttggtcagcatttctgcacttgccctgggccaaaggtcgagtcccaggcattgcagaatttatcacaagctaactaaagagtccttgggctttaagtgagaaagtgatgatgatttggtggaaaccccccatgggccagtagtgtgggcagtcatagaagaagctcttctgcctgcagagaggggaaagaagagtagaaaatactttgtcttattccctaagtgccaggttagctacaataaaatagaagagcagctaaattttgaagattctatgytttaatctctggctcccaggtagcatctgtggacccactcatggctaggggaactttcaaccctataggcagagacacaaacctggctggcattgccaactattaatcacagagtcctggggctttgaataaacttatatggtagccaagtagtggttgcagtgggccttgggtgagaccaagttctgt

SEQ ID NO: 928775 - DNA, 562 bp, Homo sapiens
gagagaaaaaaaagacaaaatttaccaacatcagtaatgagagaggtgatctcactacatacattacatatattaaaaggcataataagagattacaatgcaaagctgtatgccagtatgtttgacagcttagaagtaaagacaaattccttgaaagatgtaaactactaacactgmctcaagaagaaatagacgacatgactagtctattaattacattgagtttatagttaaaaaccttcccacaaaaaaaattccaggcccagatggcttcgctggagttttctagcaaacatttaaggaagaaataacaaataaacataaactcattcagaaaattgaagaggagagaatacttttgaactcattctacaagtccagcattattctgacaccacattcagacagacatttttttttcttttttgagacggagtctcgctctgtcacccaggctggagtgcagtggcgtgatcttggctcactgcaacctccacctcctgggttcaagtgattctcctgcctcagcctcctgagtaggtgggattacaggtgcccccca

SEQ ID NO: 928776 - DNA, 472 bp, Homo sapiens
gaggaatgaaaatcacttgaaaccaggaggttgacgttacagtgagccaagatcgcaccactgcactccagcctaggcattagagtgagacttcctctcaaaaatgaaaaactggttaaatatagcctgtcatttaggtaatagtattatacaatgttaatttctyatttttaataaatgtgccatggttacgtaagaggttaacatcagaagaaactaagtgaagagtgtatagaaactgtctttaccatctttgcaactctatgtaaatctaaaattattccagagaatgacttcacaaggtggcagaatagaatttctccagctccacacccccacacggaaatccaactagcaactatccacaggcaagaatacctttctgaatatcccagaactcaggggtgagactgagacacccaattgtactgcagaactaggaaaagctgtgctttgaagggtaagaggaaca

SEQ ID NO: 928777 - DNA, 622 bp, Homo sapiens
atttctccagctccacacccccacacggaaatccaactagcaactatccacaggcaagaatacctttctgaatatcccagaactcaggggtgagactgagacacccaattgtactgcagaactaggaaaagctgtgctttgaagggtaagaggaacagttcattttgagcatgccacccctccaccaagctggcacagcacgacacacagaggatttcaccggacccactatttctacagtgggaaaagaaagttggaggtggacgttcagcttgcccaccattctaggacccttcacaggaggctcactcttgtcttataccacaggaaacattaggagtgccatcggggctagaccacctggagtcagctagaaacaaagaatgggagtagatctcacagagactagcrtgtagttagtctgcattctggctaatggaggcatcatatgagagagactagccaacagcgttgtaccacaggaagtacagctgacaggtgtacccagctcgcatccctcgccagctttcctacatagacctggtgctttctacagcattgcccaggctagaaggcaagtgaacgtcagcacttctctgcagagagtacatctggtccccac

SEQ ID NO: 928778 - DNA, 622 bp, Homo sapiens
atttctccagctccacacccccacacggaaatccaactagcaactatccacaggcaagaatacctttctgaatatcccagaactcaggggtgagactgagacacccaattgtactgcagaactaggaaaagctgtgctttgaagggtaagaggaacagttcattttgagcatgccacccctccaccaagctggcacagcacgacacacagaggatttcaccggacccactatttctacagtgggaaaagaaagttggaggtggacgttcagcttgcccaccattctaggacccttcacaggaggctcactcttgtcttataccacaggaaacattaggagtgccatcggggctagaccacctggagtcagctagaaacaaagaatgggagtagatctcacagagactagcatgtagttagtctgcattctggctaatggaggcatcatatgagagagaytagccaacagcgttgtaccacaggaagtacagctgacaggtgtacccagctcgcatccctcgccagctttcctacatagacctggtgctttctacagcattgcccaggctagaaggcaagtgaacgtcagcacttctctgcagagagtacatctggtccccac

SEQ ID NO: 928779 - DNA, 757 bp, Homo sapiens
tgtgtatctaatgtatctaaacatatgaaaggtacaataaaaatgttataaccttatgggaccaccgttgtatatgtggcccatcattgaccaaaacatccttgtgtggcacatgatagcatacaatgttttatgtaagcctcatgataaacacaaagacaaaacatgtaacagatacacaaatgagaattttaccacatgtttaaaaaagaattaatacaaaggcacagcaaagaatcaaagtataccactacagaaaataatcaacgtaatcaaatcacgcacagcaagagagaaataaaagaacaaaaaaactacaaaatgcctatcaatagttactttaaatatcagtggaccaaattagtgaaacaaaagacacagagtggctgaatggatagtaaaacaagaaccaaatatatgccacctataagagactcacttcacctttagagacacacatagacwgaaagagagggaacaaaaaaagacagagtagctattcttacaacaaacaaaatagactttaagtcaaaaactgtaacgagacaaagtcgttatagaatgatacaagggtcaattcattgagaggatataactactgcaaatatatattctcccaacattggagcacctaattatataaagcaaatattaacaaatctgaagagagaagtagacaacaataatacaataacagtaggggacttccatgtcccactttcaacaatggattgatcactcagacagataatcagta

SEQ ID NO: 928780 - DNA, 610 bp, Homo sapiens
agatgtaccctctgcagagaagtgctgactttcacttgccttctagcctgggcaatgctgtagaaagcaccaggtctatgtaggaaagctggcgagggatgctagctgggtacacctgtgagctgtacttcctgcggtacaatgctgttggctaatctctctcatatgatgcctccattagccagaatgcagactaactacacgctagtttctgtgagatctactcccattctttgtttctagytgactccaggtggtctatccccgatggcactcctaatgtttcctgtggtataagacaagggtgagcctcctgtgaagggtcctagaatggtgggcaagctgaatgtccacctccaactttcttttcccactgtagaaattgtgggtctggtgaaatcctctgtgtgtcgtgctatgccagcttggtggaggggtggcatgctcaaaatgaactgttcctcttactcttcaaagcacagcttttcttagttctgcagtacaattgggtgtctcagtctcactcctgagttctgggatattcagaaaggtattcttgcctgtggatagttgctagttggatttccgtgtgggggtgtggagctggaga

SEQ ID NO: 928781 - DNA, 674 bp, Homo sapiens
ttctagctgactccaggtggtctatccccgatggcactcctaatgtttcctgtggtataagacaagggtgagcctcctgtgaagggtcctagaatggtgggcaagctgaatgtccacctccaactttcttttcccactgtagaaattgtgggtctggtgaaatcctctgtgtgtcgtgctatgccagcttggtggaggggtggcatgctcaaaatgaactgttcctcttactcttcaaagcacagcttttcttagttctgcagtacaattgggtgtctcagtctcactcctgagttctgggatattcagaaaggtattcttgcctgtggatagttgctagttggatttccgtgtgggggtgtggagctggagaaattctattctgccaccttgtgaagtcattctctggaataattttagatttacatagagttgcaaagatggtaaagacagtttctatacactcttcacttagtttcttctgatgttaacctcttacgttaccatggcacatttattaaaaayaagaaattaacattgtacaatactattacctaaatgacaggctatatttaaccagtttttcattcttgagaggaagtcttactctaatgcctaggctggagtgcagtggtgcgatcttggctcactgtaacctcaacctcctggtttca

SEQ ID NO: 928782 - DNA, 361 bp, Homo sapiens
tgtggatagttgctagttggatttccgtgtgggggtgtggagctggagaaattctattctgccaccttgtgaagtcattctctggaataattttagatttacatagagttgcaaagatggtaaagacagtttctatacactcttcacttagtttcttctgatgttaacctcttacgttaccatggcacatttattaaaaatragaaattaacattgtacaatactattacctaaatgacaggctatatttaaccagtttttcattcttgagaggaagtcttactctaatgcctaggctggagtgcagtggtgcgatcttggctcactgtaacctcaacctcctggtttcaagtgattttca

SEQ ID NO: 928783 - DNA, 618 bp, Homo sapiens
taggtctggtggagtcagccagtggtcaaaaaggcagaagtctgaaaagacatctcaaaaagccagtatgaacaaggacatcttggaggttagcctcaagatggagtcaactatgtcatatttcttttactgtcataattttgtagaggcagtttcaaaatcagtagtaytttctttattattgcttagtggtatattattctaaatttaaaaagtttatttacccaatttcccattaaaatttttagattttggaatttataaataggtgaataaatagtttctacaaacagttttgaacaagtatcttttgaatctatgtttctgttagccttgggtaaaatcctacaagaggaattcttagaccattgatacttatttaacttataagaaactactaaattattttccaaagtggttgtaccatattacacaaccaccaaaaatatctgaaattcacagttgttccatatgctcaccaacattttatgttgataatctctttaatcatagtgattctagagacagtaaagtggtatcacctggtttaatttgcatttctctgatattgagcccctcttcacatgcatttagtcattgatatgcatgcttttgtga

SEQ ID NO: 928784 - DNA, 593 bp, Homo sapiens
tgagaagagggccactgtcctccagacacgagaatgatatatccaccaacagattgaaccatgtgcctggaaaagccacagacactcaaccccagcccatgaaagtagccgggagggaggcagtaccctgcagagccacaggggcagagctgccgaagaccttggaaactcacttcttgcatcagcatgacccaggtgcaagacatggagtcaaaagagatcttttggaatctttaagatttgactgctctgctggatatcagacttgcataggacctatacccccttkgctttggccaatttctcccatttgtaatggctatatgtacctgtacccccattgtatctaggaagtaactaacttgcttttgattttacaggcccataggcagaagggatttgacttgtctcagatgagactttgggccagggacttttgagttaatgctgaaatgagttaagactttggggaactgttgggaaggcaagacttgttttgaaatgtaaggatatgagatttaggaggggccaggagtgtaatgatatggttggtctgtgtcctcattcaaatctcatcttgaattgtaactccc

SEQ ID NO: 928785 - DNA, 593 bp, Homo sapiens
tgagaagagggccactgtcctccagacacgagaatgatatatccaccaacagattgaaccatgtgcctggaaaagccacagacactcaaccccagcccatgaaagtagccgggagggaggcagtaccctgcagagccacaggggcagagctgccgaagaccttggaaactcacttcttgcatcagcatgacccaggtgcaagacatggagtcaaaagagatcttttggaatctttaagatttgactgctctgctggatatcagacttgcataggacctataccccctttgctttggccaatttctcccatttgtaatggctatatgtacctgtacccccattgtatctaggaagtaactaacttgcttttgattttacaggcycataggcagaagggatttgacttgtctcagatgagactttgggccagggacttttgagttaatgctgaaatgagttaagactttggggaactgttgggaaggcaagacttgttttgaaatgtaaggatatgagatttaggaggggccaggagtgtaatgatatggttggtctgtgtcctcattcaaatctcatcttgaattgtaactccc

SEQ ID NO: 928786 - DNA, 607 bp, Homo sapiens
aaagctctgttctggatgctggggatgcagcagtggataaagagacaaaagtctaaactagtgtcatgaaatttatattgtacaggaggaggaaaatcaaaataaatttttaaaaaatacggtacataaattggtaataaatgctttgaagaaaaatctagtagtraagaggaatttgttgggagttggggaaggtgcgattttaaagtgcagtcaggaaaggtgatatttaagtacagccttgaagaaggggggaaaaaatgaacctagtggagactcacaggaagatggagcctgtaataggggcctggaacagcaagaacttgagacagaagcctgagctgggaacttgcctctcctgtgtgaaatcacaagccggtgaggctagagaagagtgaacaagagggcaaaatgttgcagatgaggttatagcagtaagtgctactgtcaggacttgcttttgctctggatgagataagaagctattgcagggcattgaaacaaaggagtgtgatccaacgtacatgatctaactcctttgaaaagaatcactgtggctggtacgttgagaatacacacagaagaacaagagtggcaacagggagct

SEQ ID NO: 928787 - DNA, 547 bp, Homo sapiens
aatgtacaagaaaaaacaaacaaccccatcaaaaagtgggcaaaggatatgaacagacagttctcaaaagaagacatttatgcagccaacagatatatgaaaaaatgctcatcattactggtcattagagaaatgcaaataaaaaccacaatgggataccatctcatgccagttagaatggtgatcattaaaacgtcagggarcaacagatgctgtaaaggatgtggagaaataggaatgcttttacactgttggggggagtgtaaattagttcaaccattgtggaaggcagtgttgtgattcctcgaggatctagaaccagaaataccatttgacccagcaatctcattactgagtatatacccaaaggattgtaaatcatgctactataaagacacatgtgcatttatgtttattgtggcagtattcacaataaccaacccaaatgtccatcaataatagactggataaagaaaatgtggcacatatacaccatgaaatactatacagccataaaaaggatgagtttacgtcctttgcagagact

SEQ ID NO: 928788 - DNA, 591 bp, Homo sapiens
gcagtcatctacttgaacattctaccaggcaaaaattccagttgtcgtaacacatgacgaggtactatcaaaacataacaagaaataaattaatatcaaatccttgcttttgtgtgtgctctggctaaaaactacttcctataaaatggataacaggtataagaatgtgaagtactctaaaatatttctcccaaaactaaaggtgccaagaagagcaggggcaataaataagtaaatgtatttcctgaatggtcaattttctatcaaaaaaaaccrttttatttctttttaaactctgtctgttagactcctgaactaacttccattcaaactgagatactctttcacatgactattggatataaacctctgtctgtaataaaactactaattatctacccgtaagggaatacaaccattcaggaaagatgtcttcatttaagatccaaacaaaccttttcttcattccttctcccaacatgcaatgggcagtgtcaaaaattttaaataaacacataccagtgcacttctacaaacattttccaatgatatatttttaaagattgctttggaagctaggttaccatggaa

SEQ ID NO: 928789 - DNA, 622 bp, Homo sapiens
gtgcaatttctgaaaataagacaatactaaagtttgctgcattgattgactcttctttgatgaaagatttctctgtagcatgcgatgctgtttgataacatttaacccacaatagaatttctttcataattagagtcaatcctctcaaaccctgcccctgctttatcaactaaatttatgaactattctaaatcatttgttgttatttcaacaatgttaacagaatcttcaccaggaggagattccatctcagggaaccactttctttgctcatccataagaagcaactcctcatctctttaagttttatcatgaaaatacagcaattcagtcatatttccagactccccttctatatagttctctggctttttccaccrtatctgtagtgacttcctccacagaagtcttgaaccctcaaaatcatccataaaggttggaatcaccttcttccaaaatactgttaatgttgatattttgtcctttcaggagtcaggaatgttcttaattgtacttagaatggtgaattctttacagaaggttttcaatttacttttctaagatccatcagaggaatcactatcaatggcagctacagccttacaaaaagtatttcttaaat

SEQ ID NO: 928790 - DNA, 591 bp, Homo sapiens
ttaagctcttctctacactggttattctagttagtcattcatctaatcatttttcaacgtttttagcttccttgcaatgggttagaacatgctcctttagcttggagaagtttgttattatcaaccttctgaagcctacttctgtcaattcatcaaactcattctccatccagttttgttcccttgctggtgaggagttacgttcctttggaggagaagaggtattctggtttttggaattttcagcctttctgctctggtttctccycatctttgtggttttatttacctttgatctttgatgttggtgacctacagatggggttttggtgtacatgtcctttttgttgatgttgattgtattcctttctgtttgttagttttccttctaacagacaggctcctcagctgcaggtttgttggagttttctgaaggtccactccagaccctgtttgtctgggtagcacagcctgcagaactgcaaagattgctgcctgctccttcctctggaagctttgtcttggaggggcacctgcctgtatgaggtgtctgtcggcccctactgggagatgtctcccagtcaggctaca

SEQ ID NO: 928791 - DNA, 645 bp, Homo sapiens
accttatccttcctggtctctgttatctatctttctattctctacctccatgtgatcaaattttttttacctcccacatgtaagtgggaacatgtgatatttgtctttctgtgcctagcttatttcacttaagattagtggccattagtatatcttcttttgagaaatgtctgttcatgtctttgctcagtttttaatgggattatttgtggtttttttttcccgttgagttgagttccttgtatattctggatattagtcagatgaatagtttgcaaatagtttctcccattcaatagattgtctcttcactctgttgattatgtctttgctgtgcagaagcttcttagtttcattaagttccattttttctgtttttgtttttgttgcatgtgcttttgaggccttagtcataaattctttgcccagaccaatgtccaagagtgttttccctaggttttcttttagtatttttgtagtttcaggtcatasatttaagtctttaatccattttgagttgatttttgtatatggcgagacagaggggtctagtttcattcttctgcatgtggctacctaattttcccaggactatttattgaatagcatattctttccccagtggaagtctttgttggctttgtc

SEQ ID NO: 928792 - DNA, 590 bp, Homo sapiens
tcctagaagtaatcctgtcatccccactggcaagggtccacagacccctgttggaactttttgcagggattccccaggcagaaggctcacagcttttgtgcagcataaatctactctggcactcccggctgtggtgggggacagacattgtactggkgtgagggaatggcatgagccggaaatgccccagtttggaacagggcccgggatgggcccctcacggtgtttcccaaatagggttcccacctttatcaaacatacactgattatcccagtgttttccttttttacattttgggcatattgcaggctcagcagttttcttttttcccctatctagcgtcctgactcactgattttttctacattcttttttagtatgaccatgcttcccacagttaaaacaagctccaggaaacggagcatttcctttacccactctcagtcctgccattgcctgggctagcagagtagccttatgcagattacatccgatactgtcacaggccttgatataatcaactaaatgtactttccctctaataggtcacagagcagcctggcactcgggattagcattgtcaaaagct

SEQ ID NO: 928793 - DNA, 590 bp, Homo sapiens
tcctagaagtaatcctgtcatccccactggcaagggtccacagacccctgttggaactttttgcagggattccccaggcagaaggctcacagcttttgtgcagcataaatctactctggcactcccggctgtggtgggggacagacattgtactggtgtgagggaatggcatgagccggaaatgccccrgtttggaacagggcccgggatgggcccctcacggtgtttcccaaatagggttcccacctttatcaaacatacactgattatcccagtgttttccttttttacattttgggcatattgcaggctcagcagttttcttttttcccctatctagcgtcctgactcactgattttttctacattcttttttagtatgaccatgcttcccacagttaaaacaagctccaggaaacggagcatttcctttacccactctcagtcctgccattgcctgggctagcagagtagccttatgcagattacatccgatactgtcacaggccttgatataatcaactaaatgtactttccctctaataggtcacagagcagcctggcactcgggattagcattgtcaaaagct

SEQ ID NO: 928794 - DNA, 467 bp, Homo sapiens
ttagtattctctggtaccatgattcttacagcagtcacatgaatgcacctcacaaacttcctgctacaaggattataaatgactacaagcttcaggtactgaactttgaaatccaccatagtatttttgccactggattattaaaatcttcctttgctgaggtcacccgttgatgagcagtcatatgggatacaaatmtcttcatagtttttgactactcagagaggtccctccacatacctctaccctaaatttctttgttaccacttttccaaacatgcttttccaagtccctgaccatccagccaaacgattggctaaagcccattaatcagtatataattgcagatctggccacttctccttccatgcaaagtgcacaatcaggtgcactgctcaaagttctgcccactaggaagatttcccttcaccactgtccttcagggatgtcctagaaaggggctgta

SEQ ID NO: 928795 - DNA, 775 bp, Homo sapiens
tatgaaaaagtgatcctaaattttcctcctgctctaaaatttcatgacttcatgatattaatgaacttgtcggtctaacaatagctctttttcatttcttattttaggcatgagtttaaaatgaatgctctgaattatagaggattgttatactggcttccatgattccattgcctacaaagttcttttgtaatttgttccttagctttatcattgtaacttaaaaagctcatagaggagcccatagaaatacttcatatccctgacagcatccattaaaaatagttacaggccgggcgcagtggctgacgtctataatcccagcactttgggaggccaaggtgggcggatcacgacgtcaggagatcgagaccatcctgactaacacggtgaaaccccgtctctactaaaaatacaaaaaattagccgggcgcggtggcaggcgcctgtagtcccagctactgggaagcctgaagcaggagaatggsgtgaacccgggaggcggagcttgcagcgagccgagatggcgccactgcactccagcctgggcgacagagcaagagtctgtctcaaaaaaaaaaaaaaaaaagttacaaagaatcagtccatcagatctaggaaaagcttgcaccatagcttgcatttagcatcacctatacaattctgacctgaagtacagcagtgctctgagtttgggtgccaatagcatggctgaatgtgtcagtcttcaatgctgcacttttttttactgggtacaagtgagacaatgacaagt

SEQ ID NO: 928796 - DNA, 725 bp, Homo sapiens
attaaaagcattcagtttaataaggaaaggagtgcataaaaattcagaaaatttgcagcttgacaatgtgataaaaaagaaaatcccattttctgaggagaaattcaagctgctgcagaaatgtgcataagtacatttatttggcttctcatgagaagccaaatgttaatccccaagacaatggggaaaatatctccagtgcatgtcagaggtcttcacagcagcccctcccatcacgggcctggaggcctaggagaaaaaagtggtttcatgggctgggaagggtccccatgctgtgtacagtctaggacttgatgccccatgtcctakctgctccagccatgactaaaagggatcaaagtacacctcagtccgtggcttcagaggatgcaagccccaggccttggcaggttccctgtggtgtttagccacagaatgtcaatgcacagaagtcaagaattggggtttgggaacctctgcctagatttcagaggatgtatggaaaagcctggatacccaggcagaagtttgctgtaggggcagggccctcatggagaacctctgcaagagcagtgcagaagggaaatgttggagccactacacagagtccctactggggcaccatctagtggagctgtgagaagagggccactttcctccagaacccagaatggtagatacaccaacagcttgcactgttcacctggaaaagctgcagacactca

SEQ ID NO: 928797 - DNA, 578 bp, Homo sapiens
tctaccagagatacaaagaggagctggtaccattccttctgaaatattccaatcaatagaaaaagagggaatcctccctaattaattttatgaggccagcatcatcctgataccaaagcctggcagagacacaacaaacaaagagaattttagaccaatatccctgatgaacattgatgcaaaattcctcaataaaatactggcaaactgaatccagcagcacatcacaaagcttatccaccatgatcaagtgggcttcatccctgggatgcaagcctggttcaacatacacaaatsaataaacgtaatccagcatataaacggaaccaataacaaaaaccacgtgattatctcaatagatgcagaaaaggcctttgacaaaattcaacagcccttcatgctaaaatgtctcaataaactaggtattgatggaacccaccacaaaacaatcagagctatttatgacaaacccacagccaatatcatactgaatgagcaaaaactggaagcattccctttgaaatctggcacaagacagggatgccctctctcaccactcctactcaacataatgttgg

SEQ ID NO: 928798 - DNA, 671 bp, Homo sapiens
aagaagagctgagagtacactgtccttacctctccatgctatggtcagtgcaggaaagagagtgtgaagtctgttcctgcttttaaagcaaaccataccttctaggacactggactcaacctaggggataacagagtgttacccatcaggttaactactcctcctcccttagagaataccatgcaagtgatcaaaagaaacacagaaaccccctctcaggaactccctagaaaggatggaaggataaatgggacttccttttcatatgggctcagagaaatatgggtggggaagaaaagagtcttcccactagaatgcacctaaattttttgttattaatttcagaaaacattacactttcaggttttctgctaataaacaacatgcaaatatcttcaccccattcctcagcaaagctgatgytgaatgacagaatgggggaaggttttggaccattttgtggtggtcatttctctgaactaagtgaaacagtctatttataaagactctgctacacgtggcacagggcctcataatctgcttgaagcataagcgacctgggcctattttgttcatcagcagccagaatagcagcagcagcaataaacatccatggactgtctactggacatggggcactgtgtgaggtcctgaaggaagaaaggtataaa

SEQ ID NO: 928799 - DNA, 706 bp, Homo sapiens
acaatgcctagtgggcctattgggattttggaggcaacacattcctcatttgggtgtgttactccagcctatttatcgagtgactcaaaagtctctcagttttgagtggggtccagaacaggagaaagctctgcaataggtacaggctgctgtgcaagctgctctgccacttaggccatatgacccagcagatccaatggtgcttgaggtttcagtggcagatagggatgctgtttggaacctctggcaggcttccataggtgaatcacagtggaggcctctaggattttggagcaagtccctgccatcttctgcagataactactctccttttgagaggcagctcttggtctgttactgggctttggtggatactgaacgtttagctatgggtcatcaagtcatcatggtgacctgaactgcctatcatgaactggagactttctgacccatctagccataaagtgggtcatgcacagcagcattccatcatcagatggaagtgctatatacatgatcgtgtttgagcagatcctgaaggcrcaagtaagttacatgaggaagtggttcaaatgcccatgttctccactcctgccacctgccttctctcccccagcctgtgccaatggcctcatggggagttccctatgatcaattgacagaggaagagaagactacggcctgtttcacatatggttctgcacga

SEQ ID NO: 928800 - DNA, 651 bp, Homo sapiens
aataatgaagtctccatgagtctcaatagtgggggcaggcatgatgtttctaatttgagagtatctggcttgtgcagaaaaaaggcaaaagacctagaaagactaaactgggattcagtcccagctttgccatgcaatagctgtgtggccttgaacaartcacttaacctctctgtacctcatttcctcacctgtaaaatgtggataattctgccttgcagcattgtggttgggatttgagaaaacataggcaaaacacataccacagctccaggtatgtggtaaatgatagctgttaatattggttgtactgggcatgttagttttctattgctgacttaagaagttaccacaaacgtagtggcttaaaacaacacaaatatatacttttatagttctgtggatcataggctgatagctgttctcaaagggctaaattaatcaagatattggtaatgttgttttcctttctggaggctctatgggagaatttctctccttcttactcaggttattggcagtattcaattccttgtggttgtaggatgggggttccccatttctttgaagactgttacctgagggctgttcctagcttctagaggctacccaccttccttggcttgtggccccctgcctccatcttcagtg

SEQ ID NO: 928801 - DNA, 763 bp, Homo sapiens
gcaaagaggtttgactgcacagagaccataataaatcaattgcttgcagattcatatcaaaaccctgtcagtgagtgtcaagtgacaaaagctgcactggtggcaagctttatagtggcaagtgagttgatgtatttcagttgtacagttgcatctgatggcaggctttaaagtcttgcgtggcccgcccattattttatttaccacttccgtccgcgcttccttcccacactgagcacttgcctcagtcacagttttggtaagcccacaasctaactctagccaaaacgagtaaaaaacaaatgtcactggagagcttctttgaaaatggggaaagacccaatgatgagaaaatggaaaactctaagactgctaataaaaggaaagctgcatgtgaaagaaaatacctagagtcctacttaaattgcaggttcactgcaacaggtgattcacattctccaagcctgctttatataatatgtggcaagcggctatccaacaaacccatgaaaccttcaaaactgcttcgccacatggagaccaagcaccctacataaaaagagaagcctttggagtttttcaaaagaaaaaatgtggacacgaagaacagaagcaattattgaaggccgccacttccatcaaatgtgtctgcattgacagtgtcattcttagtggctaacagcattgctaagctaagaagctctttactactggagaattgaacctgcctgctgctaaggacatttgtcatgaacttttagga

SEQ ID NO: 928802 - DNA, 763 bp, Homo sapiens
gcaaagaggtttgactgcacagagaccataataaatcaattgcttgcagattcatatcaaaaccctgtcagtgagtgtcaagtgacaaaagctgcactggtggcaagctttatagtggcaagtgagttgatgtatttcagttgtacagttgcatctgatggcaggctttaaagtcttgcgtggcccgcccattattttatttaccacttccgtccgcgcttccttcccacactgagcacttgcctcagtcacagttttggtaagcccacaacctaactctagccaaaacgagtaaaaaacaaatgtcactggagagcttctttgaaaatggggaaagacccaatgatgagaaaatggaaaactctaagactgctaataaaaggaaagctgcatgtraaagaaaatacctagagtcctacttaaattgcaggttcactgcaacaggtgattcacattctccaagcctgctttatataatatgtggcaagcggctatccaacaaacccatgaaaccttcaaaactgcttcgccacatggagaccaagcaccctacataaaaagagaagcctttggagtttttcaaaagaaaaaatgtggacacgaagaacagaagcaattattgaaggccgccacttccatcaaatgtgtctgcattgacagtgtcattcttagtggctaacagcattgctaagctaagaagctctttactactggagaattgaacctgcctgctgctaaggacatttgtcatgaacttttagga

SEQ ID NO: 928803 - DNA, 738 bp, Homo sapiens
gtgattcctgggaggaggtcaaaataacattaccaggagtttggaagaagttgattccaaccctcatggatgactctgaggagtttaagacttcagtgggtgaagtaacagtgaatgtattggcaatagcaggagaattagaagtggaacctgaagatgtgactgaagtcctacaatttcatgttcaaacttgaacagatgaggagwtccttcttctatggataagcaaagaaagtagtttcttgagatgggatctactcctgttgaaaacgctgcaaacattgttattacaacaaagggtaaaacctggttgataaagcagtggcaaggtttgaaaggattgactccagttttgaaagaagttctactatggatataatgctatcaaacagcgtcacatacaacagagaagtcttgtgaaagggaaagtcaatcgatgtggccaacttcattgttgtcttaagaaattgtcatgtgactgggtgaagtggttcacacctttaattccagctacttgggagtctgaggcaggaagatcacttgagaccaggattttgagaccagccctgggcaacatagtgagacccatctctaaaaaacattttaaaagaaattgccacagccacctcaacctgcagcagccatcaccttgatcagtcagtagctatcagcatcaagctaagaccctctaggctcctagaccttcagtctccacttctagttctgatgctgatgttt

SEQ ID NO: 928804 - DNA, 658 bp, Homo sapiens
ctctgaggagtttaagacttcagtgggtgaagtaacagtgaatgtattggcaatagcaggagaattagaagtggaacctgaagatgtgactgaagtcctacaatttcatgttcaaacttgaacagatgaggagatccttcttctatggataagcaaagaaagtagtttcttgagatgggatctactcctgttgaaaacgctgcaaacattgttattacaacaaagggtaaaacctggttgataaagcagtgkcaaggtttgaaaggattgactccagttttgaaagaagttctactatggatataatgctatcaaacagcgtcacatacaacagagaagtcttgtgaaagggaaagtcaatcgatgtggccaacttcattgttgtcttaagaaattgtcatgtgactgggtgaagtggttcacacctttaattccagctacttgggagtctgaggcaggaagatcacttgagaccaggattttgagaccagccctgggcaacatagtgagacccatctctaaaaaacattttaaaagaaattgccacagccacctcaacctgcagcagccatcaccttgatcagtcagtagctatcagcatcaagctaagaccctctaggctcctagaccttcagtctccacttctagttctgatgct

SEQ ID NO: 928805 - DNA, 658 bp, Homo sapiens
ctctgaggagtttaagacttcagtgggtgaagtaacagtgaatgtattggcaatagcaggagaattagaagtggaacctgaagatgtgactgaagtcctacaatttcatgttcaaacttgaacagatgaggagatccttcttctatggataagcaaagaaagtagtttcttgagatgggatctactcctgttgaaaacgctgcaaacattgttattacaacaaagggtaaaacctggttgataaagcagtggcaaggtttgaaaggattgactccagttttgaaagaagttctactatggatataatgctatyaaacagcgtcacatacaacagagaagtcttgtgaaagggaaagtcaatcgatgtggccaacttcattgttgtcttaagaaattgtcatgtgactgggtgaagtggttcacacctttaattccagctacttgggagtctgaggcaggaagatcacttgagaccaggattttgagaccagccctgggcaacatagtgagacccatctctaaaaaacattttaaaagaaattgccacagccacctcaacctgcagcagccatcaccttgatcagtcagtagctatcagcatcaagctaagaccctctaggctcctagaccttcagtctccacttctagttctgatgct

SEQ ID NO: 928806 - DNA, 696 bp, Homo sapiens
tcatgaacggataccttttcattgtgtccccacatggtggaagggagttgggtgtgtttttgtttgtttgtttgtttgtttttttgagatagaatttcgctcttgtcacccaggctggagtgtagtggcgtgatctcggctcactgcaacctctgcctcccggattcaagtggttctcctgcctcagcctccccagtagctgggattacaggtgcctgcyaccacgcccatctaatttttgtatttttagtagagatggggtttcatcatgtaggccagggtggtctcgaactcctgacctcaagtgatccgcccacctcggcatctcaaagtgctgggattacaggtgtgagccactgtgcccggcaggaagggaaccttttttcagagcactaatcacatccaaaagggcttgcccattatcataccaacgggttaggatttcaacatacaaattttggagtacatacacattcagttgactgcaaacccctctcagatgttcaaaaggtgatgctgctttgctcttttgagtcatagaaacataaagttgtgagaggaaaataaaacttgggacccccaaatcactaagccaaagggaaaagtcaagctgggaactgcttagggcaaacttgcctcccattctattactaaaaaggaaagctactaagttagaaaagctactttcctccctct

SEQ ID NO: 928807 - DNA, 696 bp, Homo sapiens
tcatgaacggataccttttcattgtgtccccacatggtggaagggagttgggtgtgtttttgtttgtttgtttgtttgtttttttgagatagaatttcgctcttgtcacccaggctggagtgtagtggcgtgatctcggctcactgcaacctctgcctcccggattcaagtggttctcctgcctcagcctccccagtagctgggattacaggtgcctgccaccacgcccatctaatttttgtatttttagtagagatggggtttcatcatgtaggccagggtggtctcgaactcctgacctcaagtgatccgcccacctcggcatctcaaagtgctgggattacaggtgtgagccacygtgcccggcaggaagggaaccttttttcagagcactaatcacatccaaaagggcttgcccattatcataccaacgggttaggatttcaacatacaaattttggagtacatacacattcagttgactgcaaacccctctcagatgttcaaaaggtgatgctgctttgctcttttgagtcatagaaacataaagttgtgagaggaaaataaaacttgggacccccaaatcactaagccaaagggaaaagtcaagctgggaactgcttagggcaaacttgcctcccattctattactaaaaaggaaagctactaagttagaaaagctactttcctccctct

SEQ ID NO: 928808 - DNA, 696 bp, Homo sapiens
tcatgaacggataccttttcattgtgtccccacatggtggaagggagttgggtgtgtttttgtttgtttgtttgtttgtttttttgagatagaatttcgctcttgtcacccaggctggagtgtagtggcgtgatctcggctcactgcaacctctgcctcccggattcaagtggttctcctgcctcagcctccccagtagctgggattacaggtgcctgccaccacgcccatctaatttttgtatttttagtagagatggggtttcatcatgtaggccagggtggtctcgaactcctgacctcaagtgatccgcccacctcggcatctcaaagtgctgggattacaggtgtgagccactgygcccggcaggaagggaaccttttttcagagcactaatcacatccaaaagggcttgcccattatcataccaacgggttaggatttcaacatacaaattttggagtacatacacattcagttgactgcaaacccctctcagatgttcaaaaggtgatgctgctttgctcttttgagtcatagaaacataaagttgtgagaggaaaataaaacttgggacccccaaatcactaagccaaagggaaaagtcaagctgggaactgcttagggcaaacttgcctcccattctattactaaaaaggaaagctactaagttagaaaagctactttcctccctct

SEQ ID NO: 928809 - DNA, 597 bp, Homo sapiens
agacttcatctaaaaaaaaaaaaaaagaaaaagaaaaagaagactgtttgagccttctttacagtaaggtggctctgtgactatgttgtaacaaatggaatatgtttagaaattatatatcaatatacaaattatatgcacttaagaaaaagagtatgttrttacttttcattaatcactgccttttggctgaaaggcagatttgaaggtgggagccttattgggccacaaaataaaactacatattgagaatgggagagcaacaaaataggaacccacatctctgatggccattgagctgacttctcctacattttacatataaaaataaatatttatcatatttaactactcatttggggactctttaaacagaaactaccacagtctaatgtaagaatagctatacctatttaggtgttaaagtgttcatacaggattgtaaggaattatctgcagataattttctgctagcataagtttaggggcctaggagttgatttagaaatgaaatcatagaatttagggataaggatttgttttatttataaataaaatcccctcaagtcttagtaggcttcttctagttattttgct

SEQ ID NO: 928810 - DNA, 614 bp, Homo sapiens
ccttgccttccaccttgattatgaggccttcccagccacatggaactgtaactttattaaacctctttcttttgtaaattgcccagtcttggggataactttatcagcagtgagaacagtaaattagtagcagtagagtggagtgctgctaaaaagatactcaaaaatgtggaggcaactttggaactgggtaacaggcagagtttgaaacagtctggagggctcagaagaagacaggaagatgtgggaaagtttggaacttcctagagacttgttgaatggctttgcccaaaatgctgaataaygatatggaaagtaaagtccaggctgagattatttcagatagaaatgaggaacttgtgaactggagcaaaggtgactcggatataatagcaaagagactggcagcatttcgcccctgccctagagatatgcagaactttgaacttgagagagatgatttagggtatctggcagaagaaatttctaagcagcaaagcattcaagaagtgacttgggtgctgttaaaggcgttcagttttaaaagggaaacagagcatagaagttcgaaaaatttgcagcctgacaatgggataggaaagaaaatctcattt

SEQ ID NO: 928811 - DNA, 794 bp, Homo sapiens
caagctctctttttgcctgctgccatccatgtaagacgtgacttgtttctccttcccttctgccatgattatgaggcctccccagccaagtggaattataagtccattaaaacttctttcttttgtaaatcacccagtgttgggtatgtctttatcagcagtgggaaaacagactaatacacatatgtttaagttactgcacttaatctcatgaatagtttgactaccttgaataccaagatttaacaatgtaaagtgactaaaataatacttttatgaagctactctgagtattaaattagatcaattctatgcctggtcagakaagaactcattaaatgctaataattatgatgattatcataattttaaaaatgttctcaaattctatatcaagacttagtaaagtcttggtacaggcatggctttcctatattatatctaagatcaaccttgagttctttattcatctatggtcttctttctttggagatcatggcttcctttcactacatgagagaaaaaagtggagacttactcttttattcttcactcccagagttctaaggaaatggaccctcactaagaatatgagcaagatgtggtagaagagtgtggcctgatagcaatttacagaatactccttccatgattatatccccctattctatttgttctaaacactttagatgctaaactaccttgagaatcaagtacaagaaagaccacagataaaatattctgtcttccaaagctttcagaatacattttagtttctaatagagtctgaacta

SEQ ID NO: 928812 - DNA, 672 bp, Homo sapiens
gggccggggccggggccagcagggcgcgccgcctacctccggggccacgccactgccctcgctgtagttctcggagatgagctgatcgaagagcaggtggatctcggtgcgggcggagctgctgtcatccgggcgcagggcgcagagcctggcagacaagaggcgaaacccattgcctcgctcagggattgcttcccgcggtgcctcccgcggctgcacggaaggccacgaaccgacaacttgcacagcagccatcttttctacgggcggggggggtgggtggggtgatcccagggaaatacttccgggacatcctcccgttccgcgcgctctagttccgaaagtaccttttttagaccggactggggctcagaggggtttccatgactacgggactcctccgaccrgtaccctgcagatgcttgtcagaaattggcttggaggccgggctcggtggctgacgcctgtaatcccagcactttgggaggccgaggcgggcggatcacgaggtcagaagatcgagaccatcctagctaacacggtgaaaccccgtctctactaaaaatacaaaaaaaaaaaaaaaaaaaaaattagccgggagtggtggcgggcgcctgttgtcccagctactcgggaggctgaggcaggagaatggcgtgaacccgggaggca

SEQ ID NO: 928813 - DNA, 467 bp, Homo sapiens
atttttagcatgaaatcactggactgggagccacaagacctaggttctgcttacagcaacatcataaaatatttgtgtgatctttacagttacattagccatctgggtttcagtttcatcatctgtaaaaggagaaggaaacatgagcattatgttgatagttcacaggcagtctgaagtattttgtcatccaccagtctttttttattttttttatttttttgagtgggagttttgctctcgttgcccaggctggagtgcaatggcgagatctcggctcaccrcaaactccgcctcctgggttcaagcaattctcctgccttagcctcccaagtagctgggattatcatcatgggccaccatgcccagctaattttgtatttttagtagagatgggatttctccatattgttcaggctggtctcaaactcccgatctcaggtgatccacttgccttggcctcccaa

SEQ ID NO: 928814 - DNA, 606 bp, Homo sapiens
gccacaagcacatgctaccacgcccagctaatttttggatttttttcttttgcagagatgggtttagctatattgcccaggctggcctcgaactcctaagctccagaaatcctcccacctcagcctcccaaagtactggggttacaggcatgagccactgtgcttgaccttacgtgttctcattctttacaaaactaccttggtcttctcttggtggctaagmggttcctgtggtagagaagacaatccccagtgcacaagcacatttcaattaacacttattaaaatgctattagctgagacacatcacatgattatacacaggtttaatggataaagaggtagactttaactgtgatgaaagaaaaagcaaagtcaatttttcttcaaaagtaaacttatcttttaatgaactttatttcttagagcaatttccatttcatgggaaaatcaaatagaaagtagggtttccatacactcactctcccccaggccttgctcatggaatcatctatagtgatatattgcattagtgtggtatgtgtgtggttacaattgatgaaccaatattgatatctcattatcaaatacagtgcatatctttca

SEQ ID NO: 928815 - DNA, 606 bp, Homo sapiens
gccacaagcacatgctaccacgcccagctaatttttggatttttttcttttgcagagatgggtttagctatattgcccaggctggcctcgaactcctaagctccagaaatcctcccacctcagcctcccaaagtactggggttacaggcatgagccactgtgcttgaccttacgtgttctcattctttacaaaactaccttggtcttctcttggtggctaagcggttcctgtggtagagaagacaatccccagtgcacaagcacatttcaattaacacttattaaaatgctattagctgagwcacatcacatgattatacacaggtttaatggataaagaggtagactttaactgtgatgaaagaaaaagcaaagtcaatttttcttcaaaagtaaacttatcttttaatgaactttatttcttagagcaatttccatttcatgggaaaatcaaatagaaagtagggtttccatacactcactctcccccaggccttgctcatggaatcatctatagtgatatattgcattagtgtggtatgtgtgtggttacaattgatgaaccaatattgatatctcattatcaaatacagtgcatatctttca

SEQ ID NO: 928816 - DNA, 580 bp, Homo sapiens
tgtagggaagcatctcactaaggagtgttagaatgaacctactattggatttagaattattttacatgatttgggagagtttaagtaagtagggctttctttaaattgtatgctctcaggaagtgaagtaatcctgtgattggatgtcacagtaaatctagaaggagagaacattagataaaggttaaagatataattgataaggaaaaaactgtcactcttattagacaagataggaagatgctggtcacatttgtggtttgaaaaatattcgtgttttgtctgtgttcagacatgattacatagtggtctttatttctcttatttcatcatggtcacagagtggacttstctcatcttgatgttctatgaaactgcttatgttcaacaggaaaaaccaaggcctatctgtgagtgctaggaccaacaccaagactttactaccaggccacgtgttccagaatgctgattttgggctgctatctatctgtctatctatccatccatccatccatccattaatatctatctaatcttctatctatcgtctgtccatatattgctttgacccttgaacaac

SEQ ID NO: 928817 - DNA, 677 bp, Homo sapiens
ttccagtcactcatatctccaaaaccacagggcctttcaagtcatataacccaacccaagcagcaagattgcctgcactgaagcctggaattacttcagagccctctcctgctctggagcctgttgtgggtgtgactgactggggttggtgtcacaagaggtaaaagaatttgccaacacggttgtgggtaaagaagacagatttattagaggaagtatgacgatacgttgcaagaaagcaacaggcagcacagcagaaaaggggctgactgcaaagagtcaggggctgcagggacatttcatagggttgtgctgctgggkctacatgcaaaactaggtagttgtgccagcaagttgattaactgactctcagaacaattgttctcccctacccagggccccttccttgttgttgcttacttattaggactccacattcccaccccccaaccccaactgacacaacaacaatgacaaatctttgacattggggtgaaggtctcatcttccaactgcttcctgctggcctgggacatagaattgaccctacctatggttactggtctatcaggagaccctgtgtgttactgttactgtcctagaatgtgggacttatgatattggatcttgctggaggaaggggttcatcagagagggagaacatgtcagggcaaaac

SEQ ID NO: 928818 - DNA, 600 bp, Homo sapiens
caccctagccagaggggaatcacagatcccagcagtgggaacttgagttcctgtaaacctcaccactgagggctagggtgccatggtctctaagtaaacttgaaaggcagtctaggctgtaaggactgcaactcttaggtaagtcctagtgctgaactgggccaaaagacagtggactgtaggggcatgtgacctactgagacatcagttggggtggctaatggagtgccggcatcaccccttccctaagcccaggctgaatatctcaaggctccaaaagagaccccttccttcctcttgaggagaggaaaggcaagagtgatgaggactttgtcttgcattttggatactagctcagccacagcaggatacaccagtcagagctgtgaggcccctgttacagggcttagctcccagacaacatttctaaacacaccctgggccagatggaaacttgctgyctttaagaaaattatccagtcttggcagcattcatcacttggtaactgaagaacccttgggtcctgaataaccagcagtgatacccaggtactacgtcaggggcctcgggtaagcctctgagacttgctgtcttcagga

SEQ ID NO: 928819 - DNA, 612 bp, Homo sapiens
tcttatcggtcatgagagaggggcataacatatttaaagtgctaagggaaaaaactcttttaccctagaattgtatatctgatgaaaatatccttcaaagatgaagaagatatactttccaagacaaacaaatgctgaaggatttcaacaccagacctgtcctataagaaatgctaacaggagtacttaaattagaaagaataggatgttagtgagtgtattagtccattttcacgctgctgataaagacatacccgagactgggaagagaaaaggtttaaytggacttaacagttccacacggctggaaggcctcaaaatcatggcaggagacaaaaggcacatcttacatggcagcagcaagagaaaatgagaaagatgcaaaagcagaaacccctgataaaaccatcagctctcgtgagacttattcactaccacaagaacagtatggagaaaactgcccccaggattcaaattatctcccaccaggtccctcccacaacacctgggaattatgggagtacaactcaagatgagatttggctgaggacacagtcaaaccatatcagtgagcaataagaaatcatcataaggtataaaactggtaatagt

SEQ ID NO: 928820 - DNA, 780 bp, Homo sapiens
catcctccattactgcttgatattctagtcaaccccaatcaggtccgactcccattaactgttcaaagtaaacaggcacaggtggttgtgcttgttattttcccttgcctgagtttgagcttcatcagcccaccaggttttaaactgcaactactgagatggagtgagaacagattttgttaaagtatcccaatcatatgatattaatctattatcaagagaaacattttttaataaagtttgcacaaaagragagttttacccatattgactaatggcttgcttgaattcctttaacagttgaaaaggaaaggtagtccagttagctatattctgtcctccctgctggattatagttacaggaaattgccatgcttcaagatctccattggctctagccttttgaatagagttttgtatagcaccaccaatggctccaggttttaatgttgcaactacaggagcagtaagttttgtagctaattcatcttctcacccattaatgggagagagaggaggtggcctttcacttaattcagcagtaaaacatactttgttcagtttccctttcttttctttaatttcctccatttcctgttcctcacattcagaatctgaatttagttctttacactcatcctcctcttccgcatctgaatctgcctcatcatctgtttgaaatggctcaagagctgcttttattagcacccacattgaccaaaactgagactggaatttttgctccatctttatacacttttaaaaaatctctgacaattc

SEQ ID NO: 928821 - DNA, 792 bp, Homo sapiens
cacttaattcagcagtaaaacatactttgttcagtttccctttcttttctttaatttcctccatttcctgttcctcacattcagaatctgaatttagttctttacactcatcctcctcttccgcatctgaatctgcctcatcatctgtttgaaatggctcaagagctgcttttattagcacccacattgaccaaaactgagactggaatttttgctccatctttatacacttttaaaaaatctctgacaattctctcccattgatccaactccatagtcccttgttccaggaaccgtgggcaaaactgctttactgcactaaagagtgataacaaattctgaatactaactttcactccctctcttcgtaataaatgccttaagaaatttaaataagcagaatgtctgctttcactttgtcccattattacyctggttcttccgagtgctcagctttcccaccgagcttcttttagatgtcctcgggtgtcctttgacgatgcgtcctccactttcacatgctctggcattccttcactgggttctttgtcaccccatgttgggcaccaggaatgttggagtggccagacccaacaccaggtcatgggggtgatgaagtctgatggagtcaaaggattgagaaaagacagtttgagagagagaagtgggaccaggaggccatcgtgattatggagcctgcaaagtccccgagctctgggagcccatgctatttgttggtaatccaacaaagaaacaggtggtgagaatatggaggttgaaagggcagttgca

SEQ ID NO: 928822 - DNA, 581 bp, Homo sapiens
ctgttaaagatcccacttcttaaaactgtcacattcacaattaaatgtcaacatgagttttggtggaggcattcaaaccatagcattctgcacctaccctcccctctctgccaaattcacatccttcatacaatgcaaaatatattcattccatcctagtaggctcaaaagtcactccagtattaactcttaatactgttagttaatacttatctaaatctagttaatcgagttatctaggtaatacttatctaaatcaaatatgggtgwgacttcatcctgaaggcaaatgttctgcaaccacgagcctgtgaaatcaaaataagctatctgcttccaaaatacaatgtgcgaaggtatagaagagacattcccattctaaaatggggaaataggcaagaaaagagggataactcatctgaaacaagtccaaaacccaacagggagaacaatattaaatcttaaagttggagaataatttcctttcactccatattctgcatcctgggcacactgggtgggggttggacccctaaggcctcaggcagctcagctcccatagctttcctaggctcagccta

SEQ ID NO: 928823 - DNA, 552 bp, Homo sapiens
atctggtcctgggctttttttggttggtaggctgttaattactgcctcgattttagaactgtttattgatcttttcagggatttgacttcttctttgttcagtcttgggagagtgcatgtatccaggaatttatccatttcttctagattttcttgcttatttgtgtgaggcatttataatattctctgatggtagtttgtatttctatggggtcaatggtgatatcccctttwtctttttttattgtgtctatttgattcttctctcttttattctttgttagtctaggtagcagtctatctattttgttaattttttcaaaaaaccagctcttgggtttactgatttttttggagggtttttttgtgtctccatctccttcaattctgctcttatcttagttatttcttgtcttctgatagcttttggattagtttgctcttgcatctctagctcttttaattgtgatgttagggtgttgatttgagatctttctagctttctagtgtgggcaattggtgctctaaatttccgtcctgacactgttttag

SEQ ID NO: 928824 - DNA, 453 bp, Homo sapiens
tttatgttttccttttacaaatatctatgcaggtatttacccattttataatcaagctatgtgtttacttgctattgagttgtctgagtttttacatatttttcatattacttccttatcgtatatgtggcttgcaaatatttcttctttactctggtgatttttttttttttagctcatttcatcccatttgtctgtttttgcttttgttgctactgggatcatagccagaaattattgcccagaccaacagcatagagcttttatccactkttttttttttgtagtacttttatagcttcaagctttacatttaagtctttaattggttttgagttgatttttgtatacagtgtgagataagcatcgtctgcatgtagatatatggttttctcaacatgacttactgaagaaactgtattttctccattgtgtgttcttaactcctttgtc

SEQ ID NO: 928825 - DNA, 645 bp, Homo sapiens
aaagtgagcaaaggacatgaagaaacacttttcaaaagaagacatacatgctgccaacaagcatatcaaaaaatgctcaacattagtaatcttagagaaatgcaaatcaaaagcacaatgagatactatctcacgccagtaaaaatggctattattaaaaagtcaaaaagtaacacatgctggcaaagttgtagagaaaagggaacacttatacactgttcgtgggagttcaaccgttgtggaaagcagccgtatgatgaatcctcaaagagctaaaagcagaactaccattcaacccagctgttctactactgaccctcagggagtttctaaccctctatatacctagmggaatagaaatcattctaccataaagatacatgcacacgtatgttcattgcagaactattcacaatatcaaagacatgcgatgggcaacctaaatgcccatcaacagtataccggttaaagaaaatttgatatatatacaccatggaatatgcagccataaaaaagaataagatcatgtcctttgcaggaacctggatggagctggaggccatcttcattaacaaactaaagcaggaacaaaaagccaaataccgcatgttctcactgataagtgagctaaataataagaacaca

SEQ ID NO: 928826 - DNA, 608 bp, Homo sapiens
acttattttgggaccttgagagagaattcacttaattcatacaggtatctcgtagaaacagataaatccttggttgggctcaggatgcttttaagaggtctaatatgagattctttacaaaaaagaatgttccagcaaagccattttttaaaaaggagcctatatagtaaataattattcttgctgcccttyatgcaaaaaatcagaccaagtatagtaacaaaacttattttgcaaataaatcagttctactgtgtgtcaggcctctgagcctaagctaagccatcatatcccgtgacctgcatgtacacatccagatggccggttcctgccttactgatgacattccaccacaaaagatgggaaaatggcctgttcctgccttaactgatgacactgtcttgtgaaattccttctcctggctcatcctggctcaatagctcccctactgagcaccttgtgacccccactctgcctgccagagaacaacccccctttgactgtacttttcttttatctatccaaatcctataaaatggccccacccttatctcccttcactgactctcttttaggactcagcccgcctgcacccaggtgaaataaac

SEQ ID NO: 928827 - DNA, 597 bp, Homo sapiens
aaaaggagcagcaaatgaaagtgatgggatcaaaatgctgggtggcctgctttcattcccatcccaaacgtctggaaatgacagagaagatatttgctagaataaatagactcagagatgcagcagaaaacaagggaagtacactcagtgggccaaaattgatacggaattcctaacacaggaaagccagatgtcattgtggtgatattggaaaagctgatccaaagttgttccaggagagaatgctgaaacctgtgacatcaaccacaagctccaagattatggagacaggaagcaagaaragaccctagctcaacagcctactatccccaaacatcttcctttcccctgcaatggcatttaaaatattccatttataaacatttgatccatatacccctttcaggtgcttagatatgaatgcaagaagcatctataagattataagattatactggtcaaaatactatcctacaatgtcaaagaaaaaaatacttgaaccaattaagtaaataattgaatttcccatatctggtataattatatcgtttgtatcccttttaggacattagtttttaaatgtcatatttttattca

SEQ ID NO: 928828 - DNA, 612 bp, Homo sapiens
aagaatatcatcatttcacttaggtaaatcctaatagtgggatttctgggtcatgtggcaagtgtatgtttaacttcataaaaaactactaaagtattttccaaattggttctatcatttcacattttcacggcaatgtatgagagatccagttactctaaatctttgtctgcccttcatattttcagttaatttgtttttattttagcctttttaatatgtagtggtattttacaaraaaaaataaaaagtgtaggagtattttattatcattttaatttgaatttctctaatgactaatgatgttcatatacatttatgtacatcttgtttggtgaaattttactttagggtttctagtagagatgacttataacagtctgccttcaattaatattatattacttcatttatagaagggcttgaaaatagtacaatttatttccattttccctgcctttgtgctattgtcatatagtttatttccatagctgttatagataacacaatctttttattatttttatttgaagatttgattatcttttaaagtacttcagaatataaggaaacatcattttatatttactcacatacttaccatttctggtt

SEQ ID NO: 928829 - DNA, 559 bp, Homo sapiens
actgacaatatgattttatacctagataaccccaaagactccaccaaaatgctcctggaactgacaaataactttagtaaagtttcaggatacaaaatcaatgtacaaaaatcaatagcatttttatacattaataatattcaagctaagagccaaatcaagaatgcaatcctatttacacttgccacagaaaaactaggaatacttctaaccaagatggtaaaagatctctccaaggagaactacaaaatattgctgaaataaaccttagataacacaaaaagaattccatctcatggattggaagaatcaatatcattaaagtaaccatactgcctayggcaatctatagatccaatgctattcctatcaagctatcaacataattttagaaaaaattattctctaattcatgtggaaccaaaatgagcctgagtagccaaagcaatcttaagcaaaaagggcaaagctggaggcatcatattaccagactttaaactgtgctgtaaggctacagtaaccaaaatagcatggtactggtacaaaaacaggtacatag

SEQ ID NO: 928830 - DNA, 614 bp, Homo sapiens
cattgtttacatgcttgtctccccttctgacatatgtatttttcatgggtaatgataatttctcttttgttttcctctagtgtctactacaatgcttggcacatagtagggttttttttttttttttttttttttttttttatgaaacggaatcttgctctgtcccccaggctggagtgcgggggcgtggcatgatcttggctcactgcaacctccacctcctgggttcaggcgattcttytgtctcaacctgctgagtagctgggactacaggcgcatgccaccacatttggctaatttttgtatttttagtaaaaatgagttttcaccatattgaccacgttagtcttgaactcctcacctcatgatctgcccacctcagcctcccaatgtgttgggattataggtgtgagccaccgagcccagaccatagtagattcttaatacatatttgaaggaatccccatcttacagccattcattccttcttattacttcaactatgaagcacttcatgcctaatatcatttatcaagtgtgtaaagataaagattcctattatttcctcttattcaatataacctgacccttttctgcagatttcatccatcaat

SEQ ID NO: 928831 - DNA, 614 bp, Homo sapiens
cattgtttacatgcttgtctccccttctgacatatgtatttttcatgggtaatgataatttctcttttgttttcctctagtgtctactacaatgcttggcacatagtagggttttttttttttttttttttttttttttttatgaaacggaatcttgctctgtcccccaggctggagtgcgggggcgtggcatgatcttggctcactgcaacctccacctcctgggttcaggcgattcttttgtctcaacctgctgagtagctgggactacaggcgcatgccaccacatttggctaatttttgtatttttagtaraaatgagttttcaccatattgaccacgttagtcttgaactcctcacctcatgatctgcccacctcagcctcccaatgtgttgggattataggtgtgagccaccgagcccagaccatagtagattcttaatacatatttgaaggaatccccatcttacagccattcattccttcttattacttcaactatgaagcacttcatgcctaatatcatttatcaagtgtgtaaagataaagattcctattatttcctcttattcaatataacctgacccttttctgcagatttcatccatcaat

SEQ ID NO: 928832 - DNA, 593 bp, Homo sapiens
aacaaagtgaataaatctcaagtgtactgcgatttgaattctacaagtgtatagacaatgggtacaaccaccacccagatcaatggattaaacattttccagaatgcttttcatgcctcttcccagtcaatagctatcccctgttcttgaacttcatataaatggaatcatagagtgtgtattctttggtttctggcttccttcactcaacataatgtctgygagattcatccatgctgtggagtatagcagtaattcattctttttattgcttcatagtatcctttaaaaaaaaaactacaatttattgatttatttttttctgatagacatttaggctattctgaataaagctgttatgtatattcttatacatgtcttttggatgacatatttatacttcaaaaaatataaactaggagaggcataactaaatcatagagtaaggcatactttcagctttaaatgcagagtaaacatttttaaagttttattttgcttttggagagggggcctacttttaaattgatctccaaaacagctgtaccaatttgaactccaactatccaatgtcatgagtgtacccttcccct

SEQ ID NO: 928833 - DNA, 565 bp, Homo sapiens
ttaactaggagcttatcaattttattgatcttttcaaaaatcggtttttggctgcattgattttctctattgttgtctgttttctattgaattaatttccactcttgtctttatttccttccttctattttggacttactatactgttctttttctagcttcttttttttgagacggagtctcattctgtcacccaggctggagtgcagtggtgtgatctcrgctcactgcaacctccacctcccaggttcaagctattctcctgcttcagcctcccgagtagctgggatgacaggcatgcaccaccatgcctggctaattttgtatttttagtagagacggggtttctccatgttggtcaggctggtcttgaactcctgacctcagagctcaggtgatccgcccaccttggcctcccaaagtgctgggatcataggcatgagccaccgcgcccagcctttttctagcttcttaatgtggaagcttagctcattgatttcagcactttcttattttctaatacaagcacttaaactctaaattgtattcttagcgtcacataagc

SEQ ID NO: 928834 - DNA, 578 bp, Homo sapiens
tgcagctctcagcagagagggtagctcctctctgcaaatggttgttctgtcatctccagctatcagcagagagggtactcctctctgctgctggccatccagtcttctctccaatgtcttcatcctctcctgtcctctgccctgctctggctgagcccagggcttttatggacctcagaggggaggaagtgrgtgccaactggtctatgggcagccatgggcagaccggaagaggtaccacgagttcccactctggtcagcgggactggcaaccaggtccccagccttcagacccttcctggcctgaaagtgagaacttactggggacctgccccatcctgcccagtaaacaatctgccttccactaccattcatggcccctgggccttggccctaacccctgctctgagattagagcaggcactggaagcagcctgggggccatcgggcggccaccccccaccgtgaccaggctccagggtgtctgctcctgctgcttggcttctctctgctctgcaggagaagtgtgggggtccttcctggggcacccaagggttcaggctgcagagacacccggg

SEQ ID NO: 928835 - DNA, 592 bp, Homo sapiens
atgaaccagctataatttggaagatccccctcacctccttcccaggttcaataatttgctagcacagctcatagaaaacaatttacttactaaatcacaagtttattataagactacaactcaggaacagccagatagatgagctgcatagggcaaggtattggggaggggtgcggtgctttcatgcattctcctgggtgtgctaccctcccggtatgtggatgtgtttaccacctggaagctctgtgaacctcattcttttgggtctttagggaaattttattgattgcatcattggccatggtgattagctcaatctccagcccctctcccctccccaaaaggtagggrtggggatgaaattgcatctctctacacggttgggtcttctggcaactgatcccccatcctttgggcttttcaaaaatcacctcgtgaacagaaacagtgtaattggaagggacttgttatgaataacaaaaggtgttcctttcacctttattgctcttatctcgtaggaaattccaaaagttttagaagctctacaccaggaactgggatgaagaccaaatatatttctcattataagtca

SEQ ID NO: 928836 - DNA, 591 bp, Homo sapiens
cccacttcccaagcagtaactataggcagtttgtattatttaactgtcatttcttacaaggttgtatttgttacaggataatgcaataacagttttatagtgaatccttttagaattccaacaattacccacatttggttactcagttatttaacaaatgtttattcagtacctacaatgacccaggtgttatactagaaatcagaaaatacttgaaggtggcaagaatatgatttctgtcttcatagaatttgctgccttggctgagtgcggtggctcacgcctgtaattccagccctctgggaggccaaggcaggcggattgcttgagttcaggagttggagaccagcctggataacatggtgaaaccccgtctctactaaaaatataaaaaattarctgggtatggtggtgtgcacctgtaatcccggctattccaaggctgaggcaggaggatcccttgagcctgggaggcagaggttgcagtgagcccagattgcgccactgcactctagcctgggcaacagagcgagactctgtccccccccacccaaaaaaaagtaatatacaaatagttattagaatccagaa

SEQ ID NO: 928837 - DNA, 664 bp, Homo sapiens
ggtgctgataaagacatacccaagactgggaagaaaaagaggtttaattggacttacagttccacatagctagggaggcctcagaatcatggcaggaggtgaaaggcacttcttacatggcagcagcaagagaaaatgagaaagatgcaaaagtggaaacccctgataaacccatcagatctcgagacttattcactaccatgagaacagtaaagggggaaaccacccccatgattcaaattatctcccaccrggtccctcccacaacatgtgggaattatggaaatataattcaagatgagatttgggtggggacacagagccaaaccgttatcagtggtcaagaggtacaaagtttcagttatgcaagataataaagctctggagattctggagatgtgatgtacaacaacgtgacactatagttaacaatattgtactgtatatttgaaatttgctaagaaggtagatattaagtggtctcaacacacacacacaccaatataactatgtgaggtgatggatatgttaattagcttgattgtggtgaatatttcacaatgtatacacataccaattcatccagttgtataatttaaatatatacaatttttaactggcagttatacatcagtgaagttgaaaaaaagtggtgaagcaacag

SEQ ID NO: 928838 - DNA, 627 bp, Homo sapiens
tcaacctttagggcaggaagctcccctccagcccagggcaggtccagagatgctgtccgagaatccagtgctgaaatcggggacccccccccccccacacccccaggagcctgcttggtgctctaccctgccgtggttgagttagtacctgaggtgcaagacaaagtctcctttactttttcctctgcttttctcaagtagaaggaatttcatcccttcaccaccactgctggtaatatgttgaatctcacctraagccagtaagcctcagaggctcacccaaggcccttgacagtatctgggtgtagatctggttgttcagggcccaacggttcttcagttaggtgataaatgttgtcaggacttgtttcttgacttcaaggcagaggatttattttctggctcaggccgtgtctagaaatgtggtctgggagctaaggcctgtatcaaaggacttacaactctaactagtgccccatcctgctgtggctgagctagcatccaaaatgcaagacaaagtcacccacactcttcctctcttctcttcaagtggaaggatggggactattttcgagctgtgagctgtgcatcctggggttagagaaggggtgatgtcaacgctctctt

SEQ ID NO: 928839 - DNA, 627 bp, Homo sapiens
tcaacctttagggcaggaagctcccctccagcccagggcaggtccagagatgctgtccgagaatccagtgctgaaatcggggacccccccccccccacacccccaggagcctgcttggtgctctaccctgccgtggttgagttagtacctgaggtgcaagacaaagtctcctttactttttcctctgcttttctcaagtagaaggaatttcatcccttcaccaccactgctggtaatatgttgaatctcacctaaagccagtaagcctcagaggctcacccaaggcccttgacagtatctgggtgtagatctggttgttcagggcccaacggttcttcagttaggtgataaatgttgtcaggacttgtttcttgacttcaaggcagaggatttattttctggctcaggccgtgtctagaaatgtggtctgggagctaaggcctgtatcraaggacttacaactctaactagtgccccatcctgctgtggctgagctagcatccaaaatgcaagacaaagtcacccacactcttcctctcttctcttcaagtggaaggatggggactattttcgagctgtgagctgtgcatcctggggttagagaaggggtgatgtcaacgctctctt

SEQ ID NO: 928840 - DNA, 603 bp, Homo sapiens
accacataattggaagtaaagcattgctcagcaaatgcaaaagaatggacatcataacaaagagcctctcagaccacagtgcaatcaaattaaaagtcaagattaagaaactcacacaaaattgcacaactacatgaaaactgaacaacctgctcctgaatgactattgggtaaataaaaaaattaaggaagcactttgggaggctgaggccagtgaatcayggggtcaggagatcaagaccatcctggctaacacagtgaaaccacatctctaccaaaaatacaaaaaaaaattagccaggtgtggtggcgggtgcctgtagtcccagctactcaggaggctgaggcaggccaggaggcggagcttgcagtaagccaagattgcatcgccacaccccagcctgggtgacaaagcaagaatcagtctcaaaaaaaaaaaatttaaggaagaaataaagaaggtcattgaagccaacgagaacaaagacaaaatgtaccagaatctctgggacaaagctaaggcagtgtttagagggaaatttatattatgaatgcccacaggagaaagtgggaaagatctaaaattggcaccataacatcaaa

SEQ ID NO: 928841 - DNA, 703 bp, Homo sapiens
tcactttgtcttaactttagataacctgatgacaaagtggctaggcaatgatctttctgtgatgaattttccaggtgttctttgtgcttcttgtatttggatgtctaggcttctagcaaggctgggtaagtttttcttaattattcccccaactatgttttccagacttttagatttctcttcttaggttcctgttcttcaggaacaygaattattctcaggtttggtcatttaacataatcccagacttcttggaggctttgttcatattttcttatgcttttatctttgtctttgttggattgggttaattcgaagaccctgtctttgagctctgaatttctttcttctacttgttcaattctcttgctgagactttccagagtattttgcatttctataagtgtgtccattctttcctgaagttttgattgttgtttatttatgttacctatttccttgaatatttctgtgttcacttcttgtatcactttttgtagttccttagattgggcttcacctttctctggtgcctccctgattagcttaataattaaccttctgaattctttttcaggtaaattggggatttctacatggtttgagtccactgatggtgagctaatgtgatttttttggaggtgttaaagaatctcattttgtcatattaccagagttggttttctggttccttctcatttgg

SEQ ID NO: 928842 - DNA, 580 bp, Homo sapiens
cagccctaacgccacagccggggtctctcggaagctctgtggttttggccccctatgagagctgtagtacacgttccttcgttctcttccccagcctcctcccattaccactgtaccccttaggaacatcttaagagttccagaacttcccaggaccttcaaagcggttttatgccaccatgcctgcttatgaccytcctccaatacgcatgccctgttttgccagccaagccagcacctcacctcaggctcagctcatccatgaagtcttgactgactcaagtccccatccccaagaagaattggccctgtcctcctctgctcccattccatgcctcgtagagactctgaacctggccgcagttcaagggcaggagagcctggctgtggaggatgcagggttctggaaaggcaccaaaaagtcatagcaaatgatgtgggacaggggaggctgatcagggcttagcttgcaaataaaatttaaaattgtgaaacagattgggcatggtggcttacacctgtaatccccacaatttgggaggccgagtcggggggatcatttgaggtcagcagtttgaga

SEQ ID NO: 928843 - DNA, 580 bp, Homo sapiens
cagccctaacgccacagccggggtctctcggaagctctgtggttttggccccctatgagagctgtagtacacgttccttcgttctcttccccagcctcctcccattaccactgtaccccttaggaacatcttaagagttccagaacttcccaggaccttcaaagcggttttatgccaccatgcctgcttatgaccctcctccaatacgcatgccctgttttgccagccaagccagcacctcacctcaggctcagctcatccatgaagtcttgactgactcaagtccccatccccaagaagaattggccctgtcctcctctgctcccattccatgcctcgtagagactctgaacctggccgcagttcaagggcaggagagcctggctgtggaggatgcagggttctggaaaggcaccaaaaagtcatagcaaatratgtgggacaggggaggctgatcagggcttagcttgcaaataaaatttaaaattgtgaaacagattgggcatggtggcttacacctgtaatccccacaatttgggaggccgagtcggggggatcatttgaggtcagcagtttgaga

SEQ ID NO: 928844 - DNA, 783 bp, Homo sapiens
ctgcaacgactatcattacaggggagatggagtccatggaagcccataacggccccctgacctcctctgaccaaaggctgagttggtagaagtgtcagaagcagggagggttgccggagccttggggtcactcacaccctgcataccctgcaccctccaccyccctgcctttgtcctttcacctgtacctgcttagccccctccactcagcttggccaaatcccgacccttcctccaggtccacatctccagggccgctcttagctcagagtctttctgagggaaactgcctggcaccagtccgtgatgaaggtgtcagcctattggaacctgccctctcagataggtaagatccaaagatgtcagccgcaagcttccagtccctggatgagaacttagagtagggccaagagagctctctcaggtatgtgaaagagctgcttagctgtgtgacctctgggttagtgtgttgacctctctgggccttgtccttccacttacaaaaagacctaaacatctcctggccagctcatagagtcactgaaaggctcagataaaatacaggatgggaagtggctttatcttctggggtgaatgataaaaacctggaattaaggttgaccctgctgcactaactccactcaagagcagaaaacttctggaaagtccactcaccttttttagtcagaaaaaaaaaaaaacaaaaaaacagttctgcaggtttccttggtgccaggcactgcaccatgcacttcccatgctttctgtagtttattcctcaca

SEQ ID NO: 928845 - DNA, 783 bp, Homo sapiens
ctgcaacgactatcattacaggggagatggagtccatggaagcccataacggccccctgacctcctctgaccaaaggctgagttggtagaagtgtcagaagcagggagggttgccggagccttggggtcactcacaccctgcataccctgcaccctccacctccctgcctttgtcctttcacctgyacctgcttagccccctccactcagcttggccaaatcccgacccttcctccaggtccacatctccagggccgctcttagctcagagtctttctgagggaaactgcctggcaccagtccgtgatgaaggtgtcagcctattggaacctgccctctcagataggtaagatccaaagatgtcagccgcaagcttccagtccctggatgagaacttagagtagggccaagagagctctctcaggtatgtgaaagagctgcttagctgtgtgacctctgggttagtgtgttgacctctctgggccttgtccttccacttacaaaaagacctaaacatctcctggccagctcatagagtcactgaaaggctcagataaaatacaggatgggaagtggctttatcttctggggtgaatgataaaaacctggaattaaggttgaccctgctgcactaactccactcaagagcagaaaacttctggaaagtccactcaccttttttagtcagaaaaaaaaaaaaacaaaaaaacagttctgcaggtttccttggtgccaggcactgcaccatgcacttcccatgctttctgtagtttattcctcaca

SEQ ID NO: 928846 - DNA, 783 bp, Homo sapiens
ctgcaacgactatcattacaggggagatggagtccatggaagcccataacggccccctgacctcctctgaccaaaggctgagttggtagaagtgtcagaagcagggagggttgccggagccttggggtcactcacaccctgcataccctgcaccctccacctccctgcctttgtcctttcacctgtacctgcttagccccctccactcagcttggccaaatcccgacccttcctccaggtccacatctccagggccgctcttagctcagagtctttctgagggaaactgcctggcaccagtccgtgwtgaaggtgtcagcctattggaacctgccctctcagataggtaagatccaaagatgtcagccgcaagcttccagtccctggatgagaacttagagtagggccaagagagctctctcaggtatgtgaaagagctgcttagctgtgtgacctctgggttagtgtgttgacctctctgggccttgtccttccacttacaaaaagacctaaacatctcctggccagctcatagagtcactgaaaggctcagataaaatacaggatgggaagtggctttatcttctggggtgaatgataaaaacctggaattaaggttgaccctgctgcactaactccactcaagagcagaaaacttctggaaagtccactcaccttttttagtcagaaaaaaaaaaaaacaaaaaaacagttctgcaggtttccttggtgccaggcactgcaccatgcacttcccatgctttctgtagtttattcctcaca

SEQ ID NO: 928847 - DNA, 796 bp, Homo sapiens
gtgtttgaacattaaaaggacatacaacttaaaaagtactgccacattactagaatccatttaatcagtaataattagtccagtccatcatattgtattaatgtgtccagaattggtgggttcttggtctcactgaggcagtgcaccgttgtcctctggggcagtgcaccttccagtgattgccttggcatagtggacatggacgagagggcagcttgtttcttattggacaatcttttttaaagtgtcctagtaaaccacactgtaaagagccctaccgggtgattggcctgctctgttttctgtcctctctgaaccaccaaggtttgtttgcctgagggccatgactaaggctgtggcctttctctgatcttgcttttctttttgggcctgttcctcttggtccctattatagaacactgaggttgccaggtttaataatgcctccaaattttcttcagggcccagggcttgcttttggagctttctcctgatatctgyggctgtggctgattgggtaataaacttatcttttagaatcaattgaccctcgagtgattcggctgacaggggagtatattttcttaaggcctcccatagctgctcgaggaaggcagaaggattttcttcctttccctgagttatggtggacatcattgaataattcatgggcttttttctaattctccttagtccttctagaacacaggtcaacaaatgtttacaactccagtccccatgatctgagtaaaggtcccagtggggatccatactggggatggcttgctgaccggta

SEQ ID NO: 928848 - DNA, 737 bp, Homo sapiens
acagagccatggtagaaaaattagaaaacagaattgtgcataagaagaaactcagttctccataatcatccggagtataagaacatttaacattttaacctgtgttcccaggatcactgttgataaacacctccactgaagaatcagatagacctaggttgggtgcggtggcttttggctgtcatcccattactttgggaggctgaggcaggcagatcacttgaggccaggagttcaagacccgcctgtccaacatggcaaaaccccatctctacaaaaaatacaaacgtttagccaggcatggcggtgggtgcctgtaatcccagctactcaggaggctgaggcrggagaatcgcttgaacctgggaggtggaggttgcagtgagctgagattgtgccactgcactccagcttgggcaacagagcaagactctgtctaaaaaaaaaaaaaaagtctgatagacctgggttgtaacaaccctggtcctcctgcttactaattttatgtgatgtggggatcttacctctctgtattacacctcagtgtcttcaacaacaaaatggcaataatggtagttcctacctcctgctgtggtcatgaggattcactaagagaacatttgtaaagcactcagcacaatggtgggcatgagaaatccttgataaatgccagctattattatcagaaaagaaaataatgcagaaccgtgctgtaggaatgcaatgtccagacatct

SEQ ID NO: 928849 - DNA, 737 bp, Homo sapiens
acagagccatggtagaaaaattagaaaacagaattgtgcataagaagaaactcagttctccataatcatccggagtataagaacatttaacattttaacctgtgttcccaggatcactgttgataaacacctccactgaagaatcagatagacctaggttgggtgcggtggcttttggctgtcatcccattactttgggaggctgaggcaggcagatcacttgaggccaggagttcaagacccgcctgtccaacatggcaaaaccccatctctacaaaaaatacaaacgtttagccaggcatggcggtgggtgcctgtaatcccagctactcaggaggctgaggcgggagaatcgcttgaacctgggaggtggaggttgcagtgagctgagattgtgccactgcactccagcttgggcaacagagcaagactctgtctaaaaaaaaaaaaaaagtctgatagacctgggttgtaayaaccctggtcctcctgcttactaattttatgtgatgtggggatcttacctctctgtattacacctcagtgtcttcaacaacaaaatggcaataatggtagttcctacctcctgctgtggtcatgaggattcactaagagaacatttgtaaagcactcagcacaatggtgggcatgagaaatccttgataaatgccagctattattatcagaaaagaaaataatgcagaaccgtgctgtaggaatgcaatgtccagacatct

SEQ ID NO: 928850 - DNA, 435 bp, Homo sapiens
cactgttggcgagattataaaacgaaacaactgtaatggaaaacagtatggagtttcctcaaaaaatcaaaagtagagctactatataatctagtaattccggttctggtatatagccaaagaaattaaaagcagggtctcaaagagatttgcacrcccatggtcatagcagcactaatcccaatcgtcaaaaggtagaggcaacccagatgccccgtgataaatgaatggataaaccaaacatggtgtacacatacagtggagtattatttcaccttaaaaatgaaggaaatcatgttacatgctacaacactgatcaactattaagacattctgctatgggaaataagccagtcacaaaaacacaaatacaatatgactccagttatatgaggtatctaaagtagtcaaattcatagacaccagaatgtagaa

SEQ ID NO: 928851 - DNA, 609 bp, Homo sapiens
attctacagagggatgtgtcatactttacccagtccttctttgatggatatttaggttatttcaggttttttgctagttcggacaatgctgtaataaacaatcttctatacacattatttggcaaaatatatatatatccaaaggagaatacatttctagaaataaaactattgagtcrgggatagcttcattttaaaataggtaaccattgccaaattgccctccacagaggttgcaccaatttacatttctaagagaaatttacaagagtgactgtttccccatattcttacctaagaaatcacacataaggtattaagaaactttttgatttttgctgaactgagagattaaatggtaaacatctgagtatctctttgtatgaataagcatattttaaatgtttaaaaaatgtttatactttctttctgtgatctgactattcatattgtctactttttctaatggttttttattctcattcctattgatttgcaggaaattttaatatattaagaaaagtagctctttgagtggattataaattactattttccatttgtgtcttgactttattatttgttttatcatgtagaaatgttgatttt

SEQ ID NO: 928852 - DNA, 609 bp, Homo sapiens
attctacagagggatgtgtcatactttacccagtccttctttgatggatatttaggttatttcaggttttttgctagttcggacaatgctgtaataaacaatcttctatacacattatttggcaaaatatatatatatccaaaggagaatacatttctagaaataaaactattgagtcggggatagcttcattttaaaataggtaaccattgccaaattgccctccacagaggttgcaccaatttacatttctaagagaaatttacaagagtgactgtttccccatattcttacctaagaaatcacacataaggtattaagaaactttttgatttttgctgaactgagagattaaatggtaaacatctgagtatctctttgtatgaataagcatattttaaatktttaaaaaatgtttatactttctttctgtgatctgactattcatattgtctactttttctaatggttttttattctcattcctattgatttgcaggaaattttaatatattaagaaaagtagctctttgagtggattataaattactattttccatttgtgtcttgactttattatttgttttatcatgtagaaatgttgatttt

SEQ ID NO: 928853 - DNA, 609 bp, Homo sapiens
attctacagagggatgtgtcatactttacccagtccttctttgatggatatttaggttatttcaggttttttgctagttcggacaatgctgtaataaacaatcttctatacacattatttggcaaaatatatatatatccaaaggagaatacatttctagaaataaaactattgagtcggggatagcttcattttaaaataggtaaccattgccaaattgccctccacagaggttgcaccaatttacatttctaagagaaatttacaagagtgactgtttccccatattcttacctaagaaatcacacataaggtattaagaaactttttgatttttgctgaactgagagattaaatggtaaacatctgagtatctctttgtatgaataagcatattttaaatgtttaaaaaatgtttatactttctttctgtgrtctgactattcatattgtctactttttctaatggttttttattctcattcctattgatttgcaggaaattttaatatattaagaaaagtagctctttgagtggattataaattactattttccatttgtgtcttgactttattatttgttttatcatgtagaaatgttgatttt

SEQ ID NO: 928854 - DNA, 603 bp, Homo sapiens
gccttattcctttccattgcccaataatattatatgggtttgccacattttgtttatccatttaatagttgatggacatttgggttttttccactttggggccattatgaataatgctgttatgaatatttgtgtacagtttttgcttggactggtgttttcattttttkggggggtatatacctaagagtgacacatttgttcttgagtttcttccaagagttgagtatttttgattaagatgggatctcaactaaaaatcgatttctggttgcacatgagtgtacatcctgcagttgttaaacagattttaatgaaatttgttaggtagttaaaagatatatatatatatatatatatgctaccaaatcatatacatatatgcactattgggtagtctcaggttgtattctttggatattcatattgtggttctatgaactgcagacctctggccagtagcctatattttgcttccatccacaaggcaaatttcaactaaaaaatccattgaaagactgcagcaactgtatgtatttcaaaggaaatcttccaccatttagtagaaggtgacagattatgcacagcacatcaacctaagtt

SEQ ID NO: 928855 - DNA, 589 bp, Homo sapiens
ctaagtgtgtggcttttttccaagttctctattctgttccattggtctatgagtctctttatgtaccagtaccattctatttgggttactgtagccttatagtatagtttgaagtcagataatgtgatgcctccagctttgttctttttgtttaggattgcttttgcaaggtgrgctctttttgggtctcctgtaaattttaaaacatgattctaattctgtttaaaataacataggtagtttgataggaatagtgtttgtactagttggggttctctaaagggacagaattattatgatagatagatagatagatagatagatagatagatagatagatagatggatagatagatagatagatagatacatagatagatgaaggggagtttatgaactcacacaatcacaaggtcccacaataggccatctgcaaactgaggagcaaggaagccagtctaaatcccaaagctgaagaacctgcagtctgatgtttgagggcaggaagcatccaacacaagagaaacatgtaggctggaaggctaagccagtctctccttttcatgtttttctgcctgctttatattct

SEQ ID NO: 928856 - DNA, 589 bp, Homo sapiens
ctaagtgtgtggcttttttccaagttctctattctgttccattggtctatgagtctctttatgtaccagtaccattctatttgggttactgtagccttatagtatagtttgaagtcagataatgtgatgcctccagctttgttctttttgtttaggattgcttttgcaaggtgggctctttttgggtctcctgtaaattttaaaacatgattctaattctgtttaaaataacataggtagtttgataggaatagtgtttgtactagttggggttctctaaagggacagaattawtatgatagatagatagatagatagatagatagatagatagatagatagatggatagatagatagatagatagatacatagatagatgaaggggagtttatgaactcacacaatcacaaggtcccacaataggccatctgcaaactgaggagcaaggaagccagtctaaatcccaaagctgaagaacctgcagtctgatgtttgagggcaggaagcatccaacacaagagaaacatgtaggctggaaggctaagccagtctctccttttcatgtttttctgcctgctttatattct

SEQ ID NO: 928857 - DNA, 582 bp, Homo sapiens
gacccaaaaatctatacaaataatcaacaaaaccataagttggttctttgaagggataccaaaaaaagatcaatataccactaactagattaacaaagaaataaaccaaagaagatccaaataagcataattagaagtgacaaaggaggcactacaaccaatcccacagaaatgcaaaagttcctcatatattattctgaaggcttctatgcacacaaactagaaaatctagaggaaaytgataaatttttgcaaacacacaacctctcaagatgaaatcaggaggaagttgaaactctgaacagaccaatactgagttctgaaatcaaatcagtaataataataatagaaaaacctaccaactatagaagcactggactagagggattcacagccaaattccaccagacatgcaaatgagttggtatcaatactaatgaaactgttccaaaaattcgaggatgaggtacttctccctacttcatttgatgaagccagcattattctgataccaaaacctggcagaggcaacgaaaaaaaacaaaaaaccaaaaagaaacaaacaaaaaaacacttaaggcc

SEQ ID NO: 928858 - DNA, 582 bp, Homo sapiens
gacccaaaaatctatacaaataatcaacaaaaccataagttggttctttgaagggataccaaaaaaagatcaatataccactaactagattaacaaagaaataaaccaaagaagatccaaataagcataattagaagtgacaaaggaggcactacaaccaatcccacagaaatgcaaaagttcctcatatattattctgaaggcttctatgcacacaaactagaaaatctagaggaaattgataaatttttgcaaacacacaacctctcaagatgaaatcaggaggaagttgaaactctgaacagaccaatactgagttctgaaatcaaatcagtaataataataatagaaaaacctaccaactataraagcactggactagagggattcacagccaaattccaccagacatgcaaatgagttggtatcaatactaatgaaactgttccaaaaattcgaggatgaggtacttctccctacttcatttgatgaagccagcattattctgataccaaaacctggcagaggcaacgaaaaaaaacaaaaaaccaaaaagaaacaaacaaaaaaacacttaaggcc

SEQ ID NO: 928859 - DNA, 637 bp, Homo sapiens
ccagaagatacacccttgaccaatgccttctgaaatagatttgtgagggcagaacctgcatctttgaagagccctgtaattgctcttctctgtatgtcagacctaacagtgggaaccacagtcactcaactayaaaatttaaatacaatgggaataattggatctcgaggtggcaggggccaagtggtggcactcaaccatcaaaggcaaggggagcatagctaccgtaatggacagtagaggtaaagcagcaatcagaatagtctgacttgtgtagagctctggcattggctaattgatcacggtattcctagaagtgaaattgatagaagcctattccattcctatttaatttgtataggcagaaaacttctaggtcaaacgaacaaaagactaatttgagttataaaaatagaatcatggcccctcagtcaatttccagacttaagccagtttacagacccaaaaccctttgaatgaagtggaagctgggtccccttgaggaaggaccaaactacactagcaacaatttatgctgttaatctttctcccatccttccccaaggggaccttcagacttttgccagagtaactgtgcattggtgaaagggaaatgatcagacattttgaggactac

SEQ ID NO: 928860 - DNA, 484 bp, Homo sapiens
tcacgaactcctgacctcaggtggtctacccgccttggcctcccaaagtgctgggattataagtgtgagccactgcacctggcctctctttttaaaattttatttgcagattgttcattgttagtttatggaaatgcaactgacttgtgtgtgttactgtatcctgaaactttgttgaatttcattattttaccagtattttggraatttcaggatttttacccattacatcctgttgtctgtgaacaaaattttgtactttttcctttccaatttgcatcctttttattactttctcttgactaattattctgagtagaaattccagtactgtgatgaatagaagtggcaggaagagatgttgctatcttattcctgatcctagaggaaaagattttagtctttcaccattgagtatgatgttagctgtgagcttttcctgtataatctttatttactgaggagtttccatatattactaatt

SEQ ID NO: 928861 - DNA, 694 bp, Homo sapiens
gaactcctgacctcaggtggtctacccgccttggcctcccaaagtgctgggattataagtgtgagccactgcacctggcctctctttttaaaattttatttgcagattgttcattgttagtttatggaaatgcaactgacttgtgtgtgttactgtatcctgaaactttgttgaatttcattattttaccagtattttgggaatttcaggatttttacccattacatcctgttgtctgtgaacaaaattttgtactttttcctttccaatttgcatcctttttattactttctcttgactaattattctgagtagaaattccagtactgtgatgaatagaagtggcaggaagagatgttgctatcttattcctgatcctagaggaaaagattttagtctttcaccattgagtatgatgttagctgtgagcttttcctgtataatctttatttactgaggagtttccatatattactaattctttgagtgtttttattacaaaaggtgttcatctggctctggaaccagataaaygttgacctgataaatggattggaatgtccccttctggtttttgaacatttttggaatattttgcagaggattggcattaattcttcttgaaatatttggtaaaattttccagtgaagttatctggacatggaattttctttttggtggggtttttgatta

SEQ ID NO: 928862 - DNA, 644 bp, Homo sapiens
tccctttagtactgcctttgttgcctcctcctgagtttgggtatgtcatggtttcgttttcatttgcttaaacattttttgtcctattgtaatataattgtgttgtttttaataaaggtaattaatgaaacacataatgaattgtgcttctgtttttataacattttaagcattcttaactcagaaatgtaaattttagaaaaaaattccaggccaggcacagtggctcacacctgtaatcccagcacttgaggaggccgaggcrggaggatcatctgaggtcaggagttggagaccaccctggccaacatggtgaaaccctgtctttactaaaaatagaaaaaaaaatatataaaagttagctgggtgtcatggcgggtgcctgtaatcccagctaatctggaggctgaggtaggagaatcacttgaatctgggaggcggaggttgcagtgagctgagattgcaccactgcactccagcctgggtgacagaatgagagtctgtctcaaaaaaaaagaaaaaagaaaaaatttcagacatatttatttgtatttcaatttagaaactatgatctcctaagtgtattgacacagcaacctgacataaatataaagaataataagcatataacaaaacggaaactt

SEQ ID NO: 928863 - DNA, 822 bp, Homo sapiens
tcaggaaaggcctccagactctagtcgctcctgatccctgcctggctgcactgcccttcagcatctccatgcctaggaggcttggcagcccagagcctggaggatcccacaccaaattcacacaatcgccatctgtgcacagttctcccccacccacacccagggcgggagcacagggactcagggctggtcttccacacagaacatatggatttaataaaaagtgctaatgaggtccaggcccrcccgactgcacaggaaaggctggaagacaggccccaagggctctgctgactgtgaagactgggaggcagcagagggggcatcgctagggaccctgccagaaagccacagccctgcccacagagagcgccctcagggtcctgggtctagggtccctgcaagagggaaaggcagctgccagcttggaaatgaattagaggagggtggctggactccagccctcccagcccaggtgctgtctcctcatggctgccagctctgcctggctggagaaacagggagagaaggagtgaggggaatctgtccaccccaaggcctgagtcacagaacagggagccatggccgagggcactgtgacctgccatggtcgccggtcactggcagaagcagggctgcttcagctcctggacctgctgtcaggctcaggcctacgaaccggcagctttacagcaggggaaggagggcaggggaggagggaacatgatgacaggaatggccattgatcgcccttttgaggtatcaggcttgacggccctgatcttgttcagtgactcctcccagcaggaggcaggtagggac

SEQ ID NO: 928864 - DNA, 753 bp, Homo sapiens
  misc_feature 689, 720, 721, 751, 752: n = A,T,C or G
aatagggcaataattaaaccttaaatttccaaaatgatctcctttggctccatgtatcacatccaggtaatgctgatgcaggacctggatcagtgtctgtgcctgtgactttgcaggatatagcccccctcctggctgctttcacaggctggcattgagtgtttttggcttttccaggtacacagtgcaagctgttggtgaatataccattctagggtctggagtackgtggccatcttctcacagctccacttggcagtgcccccatggggactctgtgtgggggctcctactccacatttcccttctgcactgcctgagcaggggctctccatgagggctctgtccctgcagcaaacttcttcctggacatcctggcacttccatacatcctctgaaatataggtggaggtccccaaacctcaattcttgttttttgttcacctgcagtttcaacaccacatggaacccgccaaggcttggggcttgcactctctgaagcaatgtcctgagctgtccattggtcccttttagccactactggagctgaagtagctgggacatagggcatcatgtcctgaggctgcacagagcaaaggggccctgggcccagcccacagaaccatttccctcctaggcctccaggcctgtgatgggaggtgctgccatgaaggtctctgacatgcctnccccaccttttccccattgtcttggtgattnntattcagctcctcattacttatgctaactnnc

SEQ ID NO: 928865 - DNA, 556 bp, Homo sapiens
atttctccccagaaaatagttttttcttttctattgcatcaccaggttgcaaattttctgaacttttatgctctgctgcttcttgaatgcttaaattttctctgtctgacaccctaaattatccctcttaaattcaaagttccatagatctctagggcagggacaaaatgtcaccagtctttttgctaaagcgtagcaagaatcacctttattccagtgcccartaagttcctcatctccatataagaccacctcagccaggatttcattgtttatatcactatcagcattttggtcaaagccattcaacaagtctctaggaagttccaaactttcccaaatttttctgtctttgggccctccaagtctctaggaagttcttaactttcccacaatttgctgtcttcttctgagccctccaaactgttccagccactgcctgtggactgcagttccagaagtgcttccacattttcgggtgtccttatagcagggccccactccctcaataccaatttactgtattagactgttctctcattgctatgaagaaata

SEQ ID NO: 928866 - DNA, 576 bp, Homo sapiens
aaggacaacagcaacaaaacctagagctagtctcacaccttgtacagaaattaactcaaaatgaatcacatgccttaatacaaaatgtaaaaccataaaactcttgggggaaaaaaaaggtgaaaaatctagatctagggttaagcaaagtgttcttaracttgatactaaaggcataatgtataaaaggaaaaattataaattgaatcttacaaaattgcaatctcacacctgtaatcccagcactttgggaggctgatacgggcagaccacctgaggtcaggagttcgagtccagactgacaaacatggagaaaccctgtctctactaaaaatacaaaattagctgggtgtggtggcacatgcctgtaatcccagccactcgggaggctgaggcaggagaatcgtgtgaacccgggaggcagagattgtggtgagtcgagattgtgccattgcactccagcctgggcaacaagagcaaaactacagctccaaaaaaaaaaaaaaaagtaacaatcttatgctctgtaaaagtgcatgagaacatagtgaatagtcaagctacagattgagagta

SEQ ID NO: 928867 - DNA, 786 bp, Homo sapiens
tgggaactgtagttaaggtcactactgctttagtaaagagactggtggcattgttcccttgccctagaaatctgtggaaatttgaacttcagagaaatgatttagggtatctggccttaaaaatttctaaagcaacaaagtgttaaagatggggcctggctgtttctaatagtgtatgctaatatctctgaagaaagatatggtttgaatttggaacttatattgaaaagagaagcagagcataaaagtttgaatcactcacctgaggtcaggagtcagcctggacaacatggcgaaacctcatctctactaaaaatacaaaaactagctggatgtggtggcacgtgtctgtaatcccatctacttgggaggctgaggcaggagaatcgcttgaacctgggaggtggaggttgcagtgaactaagattgtgccaccacactcyagccttggggacagagtgagagtccatctcaaaaaaaaaaaagaaaagaaagaaagaaaaaagaaaaacccattttataggaaggaattcagggctgcagaaatttgtgtaagtaaagaggagcagaatgttaatagccaagacaatgcaaaaaatgcattcaaggtgttttgaaaccttcatggtagcccctcccattacaagcctggaggcctgggagggaaaaataatccctgaaccaggacaagggccctatccctatttctctgtacagtctcaggacacagcactttgcatcccagcagctccagctctaggcatggctaaaaggggccaagataga

SEQ ID NO: 928868 - DNA, 588 bp, Homo sapiens
cagactggattccgtttatggacggaagttttttttgtagaaaaaggaactcacagagcagggtatgcaatagttactctgaatgatgttgttgagagtgcacctctctccttgggcacaaatggtcagctagttgaactaatcaccctcacgagggtgctcgaattaagcaaaggaaaaacgttaacttttatattgattctaagtatgctttcctggtcctcgatgcccataccactatctggaaagaggaacttcctcatagctaatgggtctcctattaaatataatcagaaaattaatagactattatcctcagttttcctcccacaggaagtggcaataatacattgtaaagactrccaaagagggacagatgaaatagttgagggaaataggctggcagaccaagcagtttaatcagcagcaagtgggccccaggtctctgacccatttgaagtcccactgatctgggagtgccccgtgatagaaataaaacctcaatattctcttgtggaaatagaatgggccacctcttagggatacatcctgcagtcctcaggatggctataatcagaggatagtaag

SEQ ID NO: 928869 - DNA, 577 bp, Homo sapiens
ctcaatttctgatagatctttggagtgtttctagttttggctgattacaaatagcgctgctgtgaacattcttctccatgttttttttttttttttcctgtatccagcaacctggctaaactacacaagaatttcaacatatgtagcatttcttttgggtataaaaagttaggagtggaattgctgggttatatggtatgatcatggtcagttttagtaaatactgccagttctccaaagttattgcctcaattagaccagcagtgtgtgagttcctctttctccatatctctgccagggcttgatattttcagtcttaaattttagccactctggtgggtatgtggtaggactccatggtgattttaatttgtattttcctggtgactaacgggattgtgcctctttctatattttaatggcaattgayaaatcctttttttgtgaatttcttgttcaattattttgcccatttaggggttggggtgggtattgtctatcttttaattattgtttctaggatttctttatatattctttataactatcttatgtattgtcaatatcttcttctcct

SEQ ID NO: 928870 - DNA, 587 bp, Homo sapiens
atttatgtctttatgtttaaagtagctttccccactgggtacacatgaacataaaggtgggaacaatggacagtgtagagtccaaaacgggggagggaggaaggggagccaggattaaaaaataatcttctgggctctgaattcactatttgggtgatgggttcagttgaaagcccaaacctcagtatcatgtaatatatccatgtaacaaacctggacacgtagcacttgaatctaaaatttaaaaaatagaaaggktttcctgtgggcagcatatagttgaatcttcccttttcatacaatctgacagtatctgtcttctaattggattgtttaggtaacttactcttaatgtatttattgatctgtttgggtttaagtctgttacattgctgtctgttttctatttatccatctgctctttgtttccttcttcttttcttttctggcctatatgtatttcttttatgcccccattttattttctttgttggcttactagctataaatttcttttgcattattaaatttctcaattctcagcaactatatattgaaaattctatatcttacccttctatttgttc

SEQ ID NO: 928871 - DNA, 671 bp, Homo sapiens
acggtggatttttttggcaatttcaatgagaaagatggaaaatcgagctatttgatcagagctccagctttcaacacagtgctcactagaatcacatgatgagctgtttaaacaaataaagactagctgtacctagaccaactaaataatatctcagcagtaaagctcaggcccctgtattttgctaaagctccccaggtgattgaaccatgtggtcagtgctgagaatcacaagactagattcttgctgcttaaagtgtggttcagggatcagcagcatggacactacctgggaatatgttggatctacggaatctcaggtccctccttacctgcccaagacttgctgaatcagaatctgcactccagaaagwttcccccagggacccatatgcacacggatgtttgagaagcactgagttagatgatttccaaggtcacttcttgctctaaagtaggtgtaaaagcaatgctaattgagataatgaggacagccaatgtcccagaagagtctcaggcagagaggctttcagaacctggacccacagagatactgttggagccaaaggctgatgtttccccaggcatggaaatcttgacaagaacacacctgtgctcacaggtcaaggcaattatttagcagggtgcccctggcactcaagccttggcgc

SEQ ID NO: 928872 - DNA, 572 bp, Homo sapiens
gatacaattgcttaaaaccagggggattctgggatgacctcaggtcaccctgagacatccagagggtctgacagggtccccacgaggcccactggggagccctcctgcacgaccactctcgaggctccccttacgagctgtgacagctccctgctctggaactccagcccatccctcacgcgcccaacatgacgaggctcaagggcttcgctggagcgagggttccccgctgcctgatgcagtgggtgcgggcagtgaactggtctgagcgagtctcctcrcactcacgctaacaggcagcaggcttcatctgagagaggcgagcacggggaaaaccacaaaagaacccaggacctccgggctgtagtcccaggtcttcccctaaatggctttccctgtcaggggcatccatcgcaccaggcttactaagctgatggcaacagaagccccttctctattctgtaggagcagaggaaggactcaggagaacactcaccctggcaagggcacggaagccactgaggtttcctcaggaaagaaggggaggagctgcacacaccccgttatcctcc

SEQ ID NO: 928873 - DNA, 588 bp, Homo sapiens
cagggggattctgggatgacctcaggtcaccctgagacatccagagggtctgacagggtccccacgaggcccactggggagccctcctgcacgaccactctcgaggctccccttacgagctgtgacagctccctgctctggaactccagcccatccctcacgcgcccaacatgacgaggctcaagggcttcgctggagcgagggttccccgctgcctgatgcagtgggtgcgggcagtgaactggtctgagcgagtctcctcacactcaygctaacaggcagcaggcttcatctgagagaggcgagcacggggaaaaccacaaaagaacccaggacctccgggctgtagtcccaggtcttcccctaaatggctttccctgtcaggggcatccatcgcaccaggcttactaagctgatggcaacagaagccccttctctattctgtaggagcagaggaaggactcaggagaacactcaccctggcaagggcacggaagccactgaggtttcctcaggaaagaaggggaggagctgcacacaccccgttatcctcccggagagcgagtgaggggctaatgactgagaaat

SEQ ID NO: 928874 - DNA, 588 bp, Homo sapiens
cagggggattctgggatgacctcaggtcaccctgagacatccagagggtctgacagggtccccacgaggcccactggggagccctcctgcacgaccactctcgaggctccccttacgagctgtgacagctccctgctctggaactccagcccatccctcacgcgcccaacatgacgaggctcaagggcttcgctggagcgagggttccccgctgcctgatgcagtgggtgcgggcagtgaactggtctgagcgagtctcctcacactcacgctaacaggcagcaggcttcatctgagagaggcgagcacggggaaaaccacaaaagaacccaggacctccgggctgtagtsccaggtcttcccctaaatggctttccctgtcaggggcatccatcgcaccaggcttactaagctgatggcaacagaagccccttctctattctgtaggagcagaggaaggactcaggagaacactcaccctggcaagggcacggaagccactgaggtttcctcaggaaagaaggggaggagctgcacacaccccgttatcctcccggagagcgagtgaggggctaatgactgagaaat

SEQ ID NO: 928875 - DNA, 586 bp, Homo sapiens
agggagtaatcgcgtgctctaagccacagtggtcggggctgggcatgggcctctggagaagagaagatttgaggagaactgtcctagaggcaggaggagcagatgtgtttcagaatgggcagaattaggaaattgagaaagattttggctcaacagaatccagcaactgctccagatgttggagatgtttaagcagaagctggttgmgcacttaatgaggaatgttgttgaaaatggtcattggaagaagtttaaggtcccttttagcctggagattgtacaaatcagcattccacatctggagttagctacccgcattaagcctgaacagacatcttggtctgaaaggaagtggtttggattcatgatgccaagctccacactatggagctgggaattccagaattgctttgactcagatattaatggagaaagtcatatccattaatggataaagccgtatctgttatggataaagccgtatccagagttgctttgactcggatgttaatggataaagccaattattgatttctatttgcctaacctgccagcttttgtccaagtggggaatggagagccatag

SEQ ID NO: 928876 - DNA, 701 bp, Homo sapiens
aagggaaactggttctctttaagaggcagagggaggtttccagtgccagtttgtttggaggcaaaatggctgttgtagtaaaattgcccaaacttgggctggtgccttgtgtgtttagagctcaaagccacgattggtttctttttcttttcttttttttttttttttttggtggttggttttccatccttttgcttggcaggtttctgctaatagcttcaacctcaagagtcccattacacagacactaatagcacctactatgkgccaggcattggagataatataatgatgaacaagataaacatgacatttggaaaagagagtctggttcccactctcagcccaccccaaagagaggccagaattgggcttccaaagaaatcagatgcccttgcatcacctccctgaagaggacgggtgaagctttggtgtctgcagagaatttggctggacaatcccccagttttggaatgatgggaaggagctgccatctgtgtttaagatgagaagtgggggagtggctggatatcagcagaagccaagatgaagagaaggtttttgtgagttcctatgcatagtggagacctgttctagtgagggtccctggggctgagcctgtgggtcagtggaatgatgctgtgaggagggtcttgctatagcaggtggcccaaagaaggttgatggatcatgagcagctg

SEQ ID NO: 928877 - DNA, 658 bp, Homo sapiens
agagggaggtttccagtgccagtttgtttggaggcaaaatggctgttgtagtaaaattgcccaaacttgggctggtgccttgtgtgtttagagctcaaagccacgattggtttctttttcttttcttttttttttttttttttggtggttggttttccatccttttgcttggcaggtttctgctaatagcttcaacctcaagagtcccattacacagacactaatagcacctactatgtgccaggcattggagataatataatgatgaacaagataaacatgacatttggaaaagagagtctggttyccactctcagcccaccccaaagagaggccagaattgggcttccaaagaaatcagatgcccttgcatcacctccctgaagaggacgggtgaagctttggtgtctgcagagaatttggctggacaatcccccagttttggaatgatgggaaggagctgccatctgtgtttaagatgagaagtgggggagtggctggatatcagcagaagccaagatgaagagaaggtttttgtgagttcctatgcatagtggagacctgttctagtgagggtccctggggctgagcctgtgggtcagtggaatgatgctgtgaggagggtcttgctatagcaggtggcccaaagaaggttgat

SEQ ID NO: 928878 - DNA, 622 bp, Homo sapiens
gtgcgcgttggctcacgtgtgtaatcccagccctttgggaggctgagacaggcgaatcacaaggtcaggatttcgagaccagcctggccaacatggtgaaaccctgtttctactaaaaataccaaaaaaactcaaaaaaattagccaggcatggtggcatacgcctgtcatcccagctactggggaggctgagacaggaractcctttgaagccgggagacagaggttgcagtgaatcgagatcacaccactgcactcctgcctgggcaacagagcaagactccgtctcaaaaaaataaataaataaaaattacgaaaaaatggcaaactttagccgttagctcacgtaccactttggaagggcatacctttagtcacttcaccctttaatccctttgctcaagactaaagttctgagaggaagactaatcggctgagttgtgtccatgtgggcagtgcaggaaaggatgcagcgggacgctgctccagggatgtctttggcttccatcatgggggagcaggcgcctggattacccaccctaacaaatctggacaaaggaaaacgaggttctccgaggaaggagacatagagcccaaggagctaaccaagagacaaatggtc

SEQ ID NO: 928879 - DNA, 598 bp, Homo sapiens
tctgagaggctacactcttcctcctcaggctgtcctctaagagatgacccaggggatgatattcattagacactccaagagatatggccactgtgggcatcttgggttatccctgacggttctgaaaatcatgaacaagaaaagacctgagggctgccacaaagggccctggaatttctccaaagcaaaacttcaaccgaaagacctactaacaaggtgtatgcaccagggaagataaaaggacagtcacagagattttttttctttttaacagtggagttccagaggattattttctcacgtaamatgtttacagacttcggaggttgaggcgggtggatcacctgaggtcaagaattcaagagcagcctggccaacatgaggaaaccccgtctctcctaaaaatacaaaaattagccgggcatggtggtgggagcctgtaatcccagctacttgggaggctgaggcatgagaatcgcttgaatctgggaggcggggattgcactgcactccagcctgggcaacaagagtgaaactccatctccaaaaaaaaaaagaaaaaaaaaaaattgtatacagacaacaattattttaaaac

SEQ ID NO: 928880 - DNA, 598 bp, Homo sapiens
tctgagaggctacactcttcctcctcaggctgtcctctaagagatgacccaggggatgatattcattagacactccaagagatatggccactgtgggcatcttgggttatccctgacggttctgaaaatcatgaacaagaaaagacctgagggctgccacaaagggccctggaatttctccaaagcaaaacttcaaccgaaagacctactaacaaggtgtatgcaccagggaagataaaaggacagtcacagagattttttttctttttaacagtggagttccagaggattattttctcacgtaaaatgtttacagacttcggaggttgaggcgggtggatcacctgaggtcaagaattcaagagcagcctggccaacatgaggaaacccygtctctcctaaaaatacaaaaattagccgggcatggtggtgggagcctgtaatcccagctacttgggaggctgaggcatgagaatcgcttgaatctgggaggcggggattgcactgcactccagcctgggcaacaagagtgaaactccatctccaaaaaaaaaaagaaaaaaaaaaaattgtatacagacaacaattattttaaaac

SEQ ID NO: 928881 - DNA, 472 bp, Homo sapiens
atggtggtaaaggatgtggaaggcatacttggaatcagtatagatattgacagctagtccctttgcaagaatgagggcttaagttaaggcaatgagttctgcttgttgagaggtagtggaagggggcagggctgtagcctcaatgatagatgtggaagacactatagcataacctgcctttgccrgtgattggcaattggacctggaagaactaccatcagtaaaccaagtgtggtctgggtggggaacaggaaagggggaaatagattttgaaagctatgggaactgtagagagtaagtggagcatagcttgtgattttgagggtgcctaaaagtattaaagcagtggcagcttctgcacatagacatgagggctaccccagaattgtgaggtcaagttgttttgatagaaaggcaacaggtcatgggcctggctcctgtgtgaggactccagcagcacagccttgtattt

SEQ ID NO: 928882 - DNA, 667 bp, Homo sapiens
ctaatgccttttctcaactctttttttttttttttttttgagacagagtcttgctctgtcaccaggctgggccaggtcgaagtgcaatggtgcaaacttggttcacagcaacttctgcctcccgggttttcaagtgattctcctgcctcagcctcctgagtggctgggattacaggcgtgtgccaccactcccagctaatttttgtatttttagtagagacagggtttcatcatgttggccaggatggtctcgatcccttgacctcatgttctgcctgcctyagcctcccaaaatgctgggattacaggggtgagccaccgtgcctggtctctcaactctttatgtaactggtttcctcattgattttacattactgggcaggctaatagctcccgttctaatgctacttgcttaagacagggttgcattgctgtagtgtatccctcatcttttttcctatttatttgaggaggaggcttaggtaaaacctctgtttcttctttgttattttggggctgagggagaaggaggtggtaaggcaggtgatgattcctcctttttcccctttttaggctcttctgtgtataatgggaccaaggccaccctcactagagcccataatattaaagatgatactgggatgcgttacccttgcacatggtgttg

SEQ ID NO: 928883 - DNA, 765 bp, Homo sapiens
atgttttgcctggccaattgattctggttagcttgttgttctcataactcatcatgttatgccctccagaggaggtattgactggcctctgaagttgttttagctagcactaaccagtcccatggggtcatgtggaagttatatgctatggcctcaattaatcctttcataaatgggctagtggctccattttctctaatgctctttcttatttctttataagtcttgaaagcaatgggttcatgtacatgattgccttgttgatcttccatcatcaggcaagccaagagctccccctctaatgctgcttgcctaagacagggtcccataactgtagtgtatcccttgtctttttctcaatttactgggggaggggctcagggaaaatctatgtctcctctgtggcaccttyactcggtaatggcggggctgagagaggaggagatagtaaggtaggtgatgattcttcctcccttcccattttatgctcttctgtgtagagtggggccaaagcagtcctaacttaaggcccataacattaaagaacattaaagatgctactgggactcattgtccttgtgcataatgtcatttaagatttcttcccacttgttcccagagctctaggtctagtgtgccttcttctaggaattattggttacagaaaataacagtttgcattagggcccttaattgagcctttgaaaccaaggcttcactagctttaagcagttgtttcaatacttttatatactgttgctgttg

SEQ ID NO: 928884 - DNA, 575 bp, Homo sapiens
tgggagcatggctgtgagaggaaaggagaatcacatcttctaagtgctgcccccagagatatgtcacaatctctcctataggccaaacccaagtaaaagagtcatagcactaagatggtaggttcacagatatgtcactatgcctgctgtgagcagagtttcgacagacggctcacattaccttgttcagtccagcagtatgtcatgatctacattgtgagcagaacctatttagaagagaagagtcacttcagctaggtgctgggaccagtaatagaaaaaaaatcatttatgtgtgaagggacctggtagaaaaagagagtcacattacttcagtgattggtacagaggtgggtcataatgcttcctgtaggcaggacccaggaaggaragttacatcacctggatgttggacatagcaatatgtcacaataatccataattgcagggcacaatcaggagagtcacataaccaaggtgtgggtctcagtcacatgtcacaaagccctctgtgggcagtgtcaaggcatatgtacagtcataccacctaggtgttgggtccagcgatgtgtcac

SEQ ID NO: 928885 - DNA, 549 bp, Homo sapiens
gtcccgttcactcagtgctcagtgttgcccaggctggagtgcagtggagtgatctcggctagctacaacctccacctcccagccgcctgccttggcctcccaaagtgccgagattgcagcctctgcccggctgccaccccgtctgggaagtgaggagtgtctctgcctggccacccatcatctgggatgtgaggagcccctctgcccggctgcccrgtctgggaagtgaggagcgcctcctcccagccgccatcccgtctaggaagtgaggagcatctctgcccggccgcccatcatgagatgtggggagtgcttctgccccgccaccccgtctgggaggtgaggagcatctctgcccggccgccccgtctgagaagtgaggagccccttcgcccggcagccgccccatctgagaagtgaggagcccctctgcccggcagccgccccttctgagaagtgaggagcctctccgcctggcagccaccccatctgggaagtaggaagcgtctccgcccggcagccgccccgtccgggagggaggtggggggg

SEQ ID NO: 928886 - DNA, 565 bp, Homo sapiens
tttggtcttttccatagtcccatatttcttggaggctttgttcgtttctttttaatcttttttctctaaacttctcttctcgcttcatttcattcatttcgtcttccatcactgataccctttcttccagttgattgcattggctactgaggcttctgcattcttcacgtagttctcgtgccttggttttcagctccttcaggtcctttaaggacttctctgcattggttattctagttatccatttgtctaatttttttwaaagtttttaacttctttgccatttgtttgaacttcctcctgtagcttggagtagtttgatcctctgaagccttcttctctcaactcgtcaaagtcattctccgtccagctttgttccactgctggtgaggagctgcgttcctttggaggaggagaggtgctctgatttttagagtttctagtttttctgctctgttttttccccatctttgtggttttatctacctttggtctttgatgatgttgacatatagatgggtttttggtgtggatgtccttcctgtttgttagttttccttctaac

SEQ ID NO: 928887 - DNA, 565 bp, Homo sapiens
tttggtcttttccatagtcccatatttcttggaggctttgttcgtttctttttaatcttttttctctaaacttctcttctcgcttcatttcattcatttcgtcttccatcactgataccctttcttccagttgattgcattggctactgaggcttctgcattcttcacgtagttctcgtgccttggttttcagctccttcaggtcctttaaggacttctctgcattggttattctagttatccatttgtctaatttttttaaaagtttttaacttctttgccatttgtttgaacttcctcctgtagcttggagtagtttgatcctctgaagccttcttctctcaactcgtcaaagtcattctccgtccagctttgttccactgctggtgaggagctgcgttsctttggaggaggagaggtgctctgatttttagagtttctagtttttctgctctgttttttccccatctttgtggttttatctacctttggtctttgatgatgttgacatatagatgggtttttggtgtggatgtccttcctgtttgttagttttccttctaac

SEQ ID NO: 928888 - DNA, 828 bp, Homo sapiens
atgaggaggagaaagacaatgatctctaaacatgaaattaagaaattcagcttaacattaagaaagcatctgcatcctccactccggccacttgtgaaaagcactaaatacaacactgtatttaagaaacatggaatacatctgaatctatgctatatttttttctcccagacgtttttttctttgaatgtgatacaaagcagaaattgaaccacgtaaaagtttaattttgctccacctgttggactttctggtgttctggcaagactgcttsaagtgccaaagttttctggctgcttacctgcccaactacaggtgcactgaatttctttgaccactgtgggatgtcaccactataaaatcactcctcttttcaaagagccttccatggagaaagtaaagactcctcagtatataaattaatttttactggcataaaatataaaaagctattcaaaacagagaatcaggtcagaaaatatcttatggcatcttccaactaggtactcacaatgcaaaattatccatacctacaaataagagtcacccttaacctacttccttgtgccagagctgggtgctgtggcctgagagccatctgatgatagccatgagctctcaggggatctggattcagaaggagaaaccttgaaagggttataaagaccttggtgtcttccacctggtggctgtcctcactcttagagccaacaggtgtacagtcagtcctttcagtcaaaatgtcttatcccctggtcccagagcatttcatgttgctttggtacactgccctaaatcctaataagttgcaatgtgcttgttctacag

SEQ ID NO: 928889 - DNA, 628 bp, Homo sapiens
tcccatgaatcttgaatgttctagaatggcatccagaatggtgaatcctttccaagaagttttcaatttactttgtccagatccatcagacaaatcactatctatggtagctatagtcttatgaaatgtttttgtttgtttgtttgttttgttttgttttgtttttttgagactggagtcttgctctgtcacacaggctggagtgcaatggcatgatctcatctcactgcaacctctgcctcccacgttcaagcaattctcatgcctcagcctcctgagctgaaatgtatttcttaagtaataagatgtgaaagtcatggactgcagaatggatgttgtgctgggcatgaaaacaaccttcacctccttgtacatatccaccagagctcttgggtaaccaggagcactgtcaataagcactaatattttgaaagggatctttttttctgagcagtaagtctcgtcagtagacttaaaatactckgtaaaccgtgctataaacagatatactgtcattcaagcttcattgttctatttatagtgcacagggagagtagatttaacataattcttaaaggtcctaggatgtttagaatggtaaatgagcattggcttcaacctaaagtca

SEQ ID NO: 928890 - DNA, 561 bp, Homo sapiens
aataggagtggtgagagagggcatccctgtcttgtgccagttttcaaagggaatgcttccagttcttgtccattcagtatgatattggctgtgggtttttcataaatagctcatattttgagatactcccatcaatacctaatttattgagagttttcagcatgaaggttgttgaattttgtcggagccttttctgcatctattgagataatcatgtggtttttgtctttggttctgtttatatgatggattacgtttattgatttgcatatgttgaaccagccttgcatcccagggatgaagcacacttgatcatggtggataagctctttgatgtgctgctgsattcagtttgccagtattttattgaggatttttgcatcaatgttcatcaaggatattggtctaaaattctctttttttgttgtgtctctgccaggctttggtatcaggatgatgttggcttcataaaatgtgttagggagaggaaatattccctctgtttctattgattggaatagtttcagaaggagtggtaccagctcctctttgtacctctgg

SEQ ID NO: 928891 - DNA, 660 bp, Homo sapiens
tacccaagaatagagaggtcactgtaaactcattattacccctcctaccaacacttaaaacagcattccacgttcaatgtttcccccaaggcaatttcaagcccatgcacgtctgtatcatcttacctaaaaacccttctgtaccctagtctaatctcactcttaagacttgccctgagggtggagccaagatggatgaayaggaacagctccagtctacagctcccagcagaagcgacgcagaagatgggtgatttctgcattaccaactgaggtaccgggttcatctcactggggagtgccggacagtgggtgcaggacagtgggtgcagcacaccatgcatgagccaaagcagggtgaggcatcacctcacctgggaagtgcaaggggtcaaggaattccctttcctagtcaaagaaaggggtgacagacggcaccaggaaaatcaggtcactcccaccctaatactgcgcttttccaatgggcttaacaaacggcacaccaagagattatatcctgcacctggctcggagcatcctacgcccacggagccttgctcattgctagcacagcagtctgagatcaaactgcaaggcggcagcgaggctgggggaggggtgcctgccattaacaaggcttgagtaggtaaacaaagcagc

SEQ ID NO: 928892 - DNA, 660 bp, Homo sapiens
tacccaagaatagagaggtcactgtaaactcattattacccctcctaccaacacttaaaacagcattccacgttcaatgtttcccccaaggcaatttcaagcccatgcacgtctgtatcatcttacctaaaaacccttctgtaccctagtctaatctcactcttaagacttgccctgagggtggagccaagatggatgaataggaacagctccagtctacagctcccagcagaagcgacgcagaagatgggtgatttctgcattaccaactgaggtaccgggttcatctcacyggggagtgccggacagtgggtgcaggacagtgggtgcagcacaccatgcatgagccaaagcagggtgaggcatcacctcacctgggaagtgcaaggggtcaaggaattccctttcctagtcaaagaaaggggtgacagacggcaccaggaaaatcaggtcactcccaccctaatactgcgcttttccaatgggcttaacaaacggcacaccaagagattatatcctgcacctggctcggagcatcctacgcccacggagccttgctcattgctagcacagcagtctgagatcaaactgcaaggcggcagcgaggctgggggaggggtgcctgccattaacaaggcttgagtaggtaaacaaagcagc

SEQ ID NO: 928893 - DNA, 725 bp, Homo sapiens
gggtgaggcatcacctcacctgggaagtgcaaggggtcaaggaattccctttcctagtcaaagaaaggggtgacagacggcaccaggaaaatcaggtcactcccaccctaatactgcgcttttccaatgggcttaacaaacggcacaccaagagattatatcctgcacctggctcggagcatcctacgcccacggagccttgctcattgctagcacagcagtctgagatcaaactgcaaggcggcagcgaggctgggggaggggtgcctgccattaacaaggcttgagtaggtaaacaaagcagccgggaagctcgaactgggtggagcccaccacagctcaaggaggcctgcctgcctctgtaggctccacctctgggggcagggcacagacaaacaaaaggcagcaataacctctgcagactcaaatgtccccgtctgacagctttgaagagagtagtggttctcccagcacacagcttgagatctgagaacggrcagactgcctcctcaaatgggtccctgacccctgagtagcctaacggggaggcaccctccagtaggggaggactgacacgtcacacggccgggtactcctctgagacaaaacttccaggggaatgatcaggcagcagcatttgcggttcaccaatatccgctgttctgcagccaccgctgctgatacccaggcaaacagggtctggagtggacttccagcaaactcca

SEQ ID NO: 928894 - DNA, 607 bp, Homo sapiens
tggattgcttgagatcaagattttgagaccagcctgggcaacatggcaaaaccccatctctacaaaaaacacaaaaattagccaggcatgttggcacgtatttgtagtcccagatactcaggaggctgaggtaggaggattgcttgagcctgggaggttgaggctgcagtgagtcatgatcataccactgcactccagcctgggtgacagagcaagactctctctttaaaaaagcaggagatggccaggcagtggctcatgcctgtaatcccagcactttgggaggctgaggcgggtggatcacctgaggtcaggagttcaagaccagcctggccaatgtggtgaaaccccatgtctactaaaaatgcaaaaattagctgggtgtggtgacgggtgcctgtaatccyaggtactcgggaggctgaggtaggagaattgcttgaacccaggagacggaggttgcagtgagctgagatcacgccactgcactccagcctgggtgacaagagcgagactcggtctcaaaaaaaaaaaaaaggagaggaggattcaacacagttgatgatgacaaaaaaaaaaataataaggatagtgagactcaatcagg

SEQ ID NO: 928895 - DNA, 607 bp, Homo sapiens
tggattgcttgagatcaagattttgagaccagcctgggcaacatggcaaaaccccatctctacaaaaaacacaaaaattagccaggcatgttggcacgtatttgtagtcccagatactcaggaggctgaggtaggaggattgcttgagcctgggaggttgaggctgcagtgagtcatgatcataccactgcactccagcctgggtgacagagcaagactctctctttaaaaaagcaggagatggccaggcagtggctcatgcctgtaatcccagcactttgggaggctgaggcgggtggatcacctgaggtcaggagttcaagaccagcctggccaatgtggtgaaaccccatgtctactaaaaatgcaaaaattagctgggtgtggtgacgggtgcctgtaatcctagktactcgggaggctgaggtaggagaattgcttgaacccaggagacggaggttgcagtgagctgagatcacgccactgcactccagcctgggtgacaagagcgagactcggtctcaaaaaaaaaaaaaaggagaggaggattcaacacagttgatgatgacaaaaaaaaaaataataaggatagtgagactcaatcagg

SEQ ID NO: 928896 - DNA, 584 bp, Homo sapiens
agagtgtactaaaaatgtacaaattggggccctgcctggggaatcagaatctcaagagttagggcttaaaaatatttttttaaaggatcatggatgaaaaccattattttatagattacatttatttatttatttatttatttatttatttatttatttgagaagtagtctcactctgtcacccaggccagagtgcagtggcgcaatctcggctcactgcaagctccaccccccggcttcacgccattctcctgcctcagcctcccaagtagctgggactacaggtgcccaccaccacacccggctaatttttttgtatttttagtagagacggggtttcactgtgttaaccaggatggtctcgatctcctgacctcgtgatccgcccacctcggcctcccaaagtgctgggattacaggcgtgagccaccgckcccagcctatagattacatttatgtggctagctcatgattctgcttccttctgaggttcaaaaaaacactttcactattccagcagcagctgcaggcggaggctgaccacctgggtaaggagctgcagagtgtgtcagcaaagctccaag

SEQ ID NO: 928897 - DNA, 485 bp, Homo sapiens
gcggcagcaggaggagaagatgcaggaacaccaggtgaggctgcaggagctggaggagaggctggggaagctggggcagaaggtcgagctcttggggggagcaggcggaggtgtgtgcaaaccctggagatcatacagaacgacctcaccacaacttagcagatggtggttggctccctctgcttttccaccagtctgtggcctacagtttaaatggtgggaagaagggtgtgagatttgaggctggggagggaggcatgggcctctaggcaagggaggcagtcatttaggcctggaggaaggggccagggccaggggcctgrgtaggcgacagagccccgcagtgccctcactaccctgtttatgggcccagaatctggaagccagccactacctaccctgacgcctatcctgcaggtggagctgaagagccaagaggctgagtctgcagcagcagcgagaccattacctgggtcacctgcagc

SEQ ID NO: 928898 - DNA, 485 bp, Homo sapiens
gcggcagcaggaggagaagatgcaggaacaccaggtgaggctgcaggagctggaggagaggctggggaagctggggcagaaggtcgagctcttggggggagcaggcggaggtgtgtgcaaaccctggagatcatacagaacgacctcaccacaacttagcagatggtggttggctccctctgcttttccaccagtctgtggcctacagtttaaatggtgggaagaagggtgtgagatttgaggctggggagggaggcatgggcctctaggcaagggaggcagtcatttaggcctggaggaaggggccagggccaggggcctgggyaggcgacagagccccgcagtgccctcactaccctgtttatgggcccagaatctggaagccagccactacctaccctgacgcctatcctgcaggtggagctgaagagccaagaggctgagtctgcagcagcagcgagaccattacctgggtcacctgcagc

SEQ ID NO: 928899 - DNA, 666 bp, Homo sapiens
cccctgctcgagtccttgctacacacgccctggggttgttgcctcttggggaagtgctagcctgactggttgtcaagggccccgtatttctgccatgactcagtccctaatttgctctttgattctggacaagccacctctcctttttgggctcgtgtttccagaggaggtagtgagtatcaaaggtctctgttagctctcgagtctgagatttaaaggcccccgagaatggaaacctcagggctaagggctcctgtctgtccttttctatcctatatctgctgtgaagaaccgtacctggcccatacrtgctcagtaggtgtttattgaatgaacccacttttctaaatcacaagctgccagaaggaggggcctttctgaaactccatctctagaggtttatgttgctgtcctctcaagagattccagattcagactttgagttctgtggctgtgggcaaaagcccacaaagacccaaatcctctgtccttgggagcttgaggagagtttaccagttcgtgttcccattatgtctgagaactttgcctttaaaatccattcctggcccctgcctaccgcttcctggtctggggaatagagttgagggggccaccctccatcaccttatttgactctccccacagaaacaacagaagaaacaagtg

SEQ ID NO: 928900 - DNA, 731 bp, Homo sapiens
gactcaaaaacaattatttgataaaaaaacaaaaaaataactctaaagagaataagatgcaaactattttttcttaaattcttgctacaaactacatcctactaaaggccatgatcctaattctgctttttcactgtaaaaagagaaagaagaaggaaaaagttaaaaaatattaaggatgcgttaaaggtgtgattgcatcaaatttggactttttccttggcatattttcagggaattagaagagaattgaccaagggaattatttccttggtttgaaacttatttgttgaaacaactaaaatcatccaggggagctgggcatggtggctcatgcctgtaatcccagcagttttggaggccaagrtgggataatcacttgaggccaggagtttgaaaccagcattgggcaacatattgagatgcccctccccacctaaaaagaaaattaaaaattagcagcgcgtggtggttcatgcctgtcctcccagctactctggaggctaaggcaagaggatcactttagcccaggagtccgagtctgcagtgagctatgatcatgccactacactctagcctgggtgacagagcaagactatgtttcttaaaaagaattatataaataaattcatccagagaactaccagtgtgcatgtctcacactctgggaaacagtcatctagtgatctcccttttcctgaacttctacaacttttgtcacatgtgcatcc

SEQ ID NO: 928901 - DNA, 767 bp, Homo sapiens
tcacatgtgcatcccatgcattctgcacacaaaatatatctttggtattttttttattttggtgtttttaactaaccttaaacactgcttaagagctaagtcaactaattttttactattccaaactacttattagggcatgttacacattaaaatgtccctcagtatttgttcatgaagtggttgtacacctagctttccaacatgcatggagggcacataaacatattattagttatgcttgaagtagcctcatgttatattctgtttcataagcagatttatttttcaaggcagcatatgttccaaaagccactaaaatacacatgtttgctcaaataaagctgacaatttgatagatttaagaaatgaattttaagtctctactccacagaattatgacatataccccatccaaatccmtagtttgtttgagattgtgtgtgatttactctacatcttacatctactggctgtctttcatggcatttgacttatttgagtctttgcaaccttttttctgtgaatacatcttctgcagtaattatatttttaaattttccataatcaatactattgagatataatttatataaaggaaaaagtaccagacaactagtatgtagaacattttcggtacccaaaaaaagtttttttcttaatctcttgctgtcagttatcccaccctacaaaaccattgataatgggattgctgggtcaaatggtatttctgtctttaggtctttgaggaatcaccacacggtctt

SEQ ID NO: 928902 - DNA, 767 bp, Homo sapiens
tcacatgtgcatcccatgcattctgcacacaaaatatatctttggtattttttttattttggtgtttttaactaaccttaaacactgcttaagagctaagtcaactaattttttactattccaaactacttattagggcatgttacacattaaaatgtccctcagtatttgttcatgaagtggttgtacacctagctttccaacatgcatggagggcacataaacatattattagttatgcttgaagtagcctcatgttatattctgtttcataagcagatttatttttcaaggcagcatatgttccaaaagccactaaaatacacatgtttgctcaaataaagctgacaatttgatagatttaagaaatgaattttaagtctctactccacagaattatgacatataccccatccaaatccctagtttgtttgagattgtgtgtgatttactctacatcttacatctactggctgtctttcatggcatttgactwatttgagtctttgcaaccttttttctgtgaatacatcttctgcagtaattatatttttaaattttccataatcaatactattgagatataatttatataaaggaaaaagtaccagacaactagtatgtagaacattttcggtacccaaaaaaagtttttttcttaatctcttgctgtcagttatcccaccctacaaaaccattgataatgggattgctgggtcaaatggtatttctgtctttaggtctttgaggaatcaccacacggtctt

SEQ ID NO: 928903 - DNA, 604 bp, Homo sapiens
cttcatataaaaactagacagaagaattctcagaaacttctttgtgatatgtgcattcaactcacagagtggaacattcctttcgatagggccgttttgaaacactcaattcgttgaatttccaagtggatatttagagcactttgaggcctatggcagaaaaggaaatatcttcgtagaaaaactagacagaatcattatcagaaactactttgtgatgtgtgcgttcaagtcacagagtttaacctttcttttgattgagcagttttgaaacactctttttgtagaattagcaagtatgtatttagagccctttgagggctatggtagaaaaggaaacatcttcatwggaaaactacacagagtcattcacagaaagtactttgtgatgtgtgcattttactcacagagattaaccattctttagatagagcaggtttgaaactctctttttgtaaagtcttcaagtgtatatttggagcgctttggggccttctttggaaaagggagtatcttcacataaaagtagacagaagtattctcaggaactactttgtgatgtctgcactcaactcacagagttgaaatttccttttgatagagc

SEQ ID NO: 928904 - DNA, 604 bp, Homo sapiens
ggcctatggtaggaaaggaaatttcttcctataaaaactagacagaatcattctcagaaactactttgtgatgtgtgcgttcaaatcacagagtttaaactttctgttgattgagcagttttgaagcactctgtaaagtctgcaagtgaatatttggagcactttgaggccttctttggaaatgggagtaccttcatataaaatgtagacagaagtattcttagaaacttctttgtgatgtctgcactgaacacagagagttgaaccttccttttgatagtgcagttttgaaacactctttttgtagaatttgcaagtgratatttagagggctttggggcctatggtagaaaaggaaatatcttcatagaaaaactacacagaatcattctcagaaactactttgtgatgtttgcattcaactcacagggtttaacattccttttgatagagcagttatgtaacactcttttcgtagcaactgcatgtggatatttggacctctttgaggccttctttggaaacgggaatttcttctataaaaactagacagaagaattctcagaaacttctttgtgatgtgtgcattgaactcagaaagttg

SEQ ID NO: 928905 - DNA, 490 bp, Homo sapiens
tggattcctaggtattttattctctttgaagcaattgtgaattggagttcactcatgatttggctctctgtttgtctgttattggtgtataagaatgcttgtgatttttgcacattgattttgtatcctgagaccttgctgaagttgcttatcagcttaaggaaattttrggctgagacaatggggttttctaaatatacagtcatgtcgtctgcaaacaggaacaatttgacttcctcttttccaaattgtctgatgctagggccaaagggcaggccacaggctgcaactgcctccagcagtgaagccactgtgcactttcacgtgcccagatagagtttcctgcctatggctgttactgctgtggactgctgcatgtggactaaagcatgtgtggaacacaagctgccactactggagatacagtgcaagtcaagcatgggctgatgccgttagggctgaagtacgagtgaagcagtttcccactttc

SEQ ID NO: 928906 - DNA, 673 bp, Homo sapiens
ccaaaagttaaaaattttagatgctccagattctgaaactttttaagtaccaatgtgatgtcacaagtggaaaattttacatcttgaccttatgtaatgtgttgcagtcaaaatgcaggtagtcaacacagtttattcagcatcctaaagggaaaaaagaccctcccagctatcttcatctgtaatatatctttcctgtgcaytcccagattcttctatgcaaacattcccacaaagggtaacacaatgacacagctacaggtcagatgtgccaatggcaagtttccatgatgctccacatagggccaagactgatgtgcattactgtttttttgcttattgcctgctttgtctagtggttaagataacaaaaacaaaaaacaaaacaaagaaaatgtcagaaaggcctgcagtaacagtgataagaaaaagaggaatcacttacgtttatatgtaacacagaaagtcaagctattggagaaactggataatggtgtaagtgtcaaaggtcttaaagaagcctgtgctgttagaatgactgccagatatgacctaaagaaacaaacggataaactgttgcagttctatgctgaaagtgatgaacagaagctaatgaaaaatagaaaaacactgcataacattttaaaaaaaagaaagaaagaatggatccatc

SEQ ID NO: 928907 - DNA, 605 bp, Homo sapiens
tctgcatacattctccagataatcattgttatttctctgattgaatgctgtgatattctgtacatgttgataagaattataccttcgttatttggtaattcccttcattataccaatgtacctatgatcaatttaactatctcatattttaaaactgacattttctgaaaatattgctaytcagctttgtttatattttcacttgtatataatattttcttcattgtagttttctgtggtgcctaaagggtgtcttgatgtcatttataattattaccactttagggaatggctggttaatttcttaacttttgataaatatcccatggtgctggaaaaggctggcattaggggaaactgagtaaaagatatgtggaaactcttctataaacctacaattattttaaaatataaagttagtattatcatttttgtttcaaagctgcggactgccataactagactaagaaaaacagagtagaaaactacacaagagaccttgggcaaaagacaaggagcctgtgctgtgagcaccgagtctgcttgtgaacaggtcagagccatgagcgggcaatgaccgggaaggaagacagcaacacccaggc

SEQ ID NO: 928908 - DNA, 769 bp, Homo sapiens
ataatgaggagacccgcagtgggttgcttccttctgcaggcaggtggccccaaagtttctgcagccctcagcagagaggagacccaaggtaggtaggtcctatttgcaggcaggtcggtctgtcatctctgcaaccctcagcagagaggagacccagagtgggtagctcctatctgcaagcagattgtcctgttgtatacaggattctggctcagtccagattttttatgggcttcagaggggatcaggtgcatgctgattggtcaakaggtggtcataggcaggtccagaaaaaccaccataagttctcacttcagtctgcagacttggcagcccagcccccaggctacctacaggccatccctgccttaaaggtttgggcttcaccagttacctgcctcttttcacccaggaccctgtctgccttctgctgccatcaagctgctgtccatggcacccaggctcttcatgctgagaggtgccttcaggctcgtgccaagctgacctcagccccactcaagcctccctcccacgcttgttagtgtccaaagtctggagggggacagagggagtaggggtctgccatgtcagcactgccccaagagtgtgcacacctggccagatcatgacagtacctgtgctaggcctcaactttgctccaaaattggagtaggcaccaggagcggggagaggtcaggcagcaggagcaggcacttctgagcctgtgggacaggagggcttcctgggtctccaagaatgcagagattcc

SEQ ID NO: 928909 - DNA, 634 bp, Homo sapiens
tgtatgtaacagtgattctctaagttctcccccaaaggaacttatagccatttactcaggcaaacttacatgaaggaaaggggagtacactgttggatatggggcaccagttaatgctaactcaggcacctaaaacactattatggtccctctgttaaagcagagatatatatgtgtcaagtagcaattaggtttctagctcatgtctacctcacagacagccctaggattcatcttgtgatcatttcctcacttttcaaataaatagttgtaatggatatactaagcattggtagagtcctcactctgatgctttgataaataaaataagagttattatagtaaggtacagcaagtggaagcctctgagactacctttctactccaccaacataattaatcaaaaacaacattgcaattcagaagaatggcagagattagtaycaacttcaaggatttaaaagatacagggattgcatttcccatatcaccatttaattcacccatttggttttgagaaaagtagatattttgtgacaaatgacagtggactaccataaacctaaccaaatagtaacttcaaacacagcctcaggtacatgatatctagctactgatatggcaaatgcatttt

SEQ ID NO: 928910 - DNA, 467 bp, Homo sapiens
ccctcaactccactagctccaaccccagcacagcactagacttgcctaagaattgcagttcttgtgtactagactacctttcacatttatttaggaccccagaggactctagcttatggtggtgaggcttgccaaaactcaatctctgactgctaggatggacaatccccctctggctagggctgctctaaatgctccctctgtggtcaggcattggctgagttcagccaagtgttctttctgctgtgatagggccacattgagttcaatgcaaagtcctacagttgctgtgctgtccctcccccaggtgcacagattgtctctccacaccaagtaactgctgctgggaaatgagggaggtgtggtgtcaatgaytcaagaccatctttcttaccctcttcagtgcctctttcagcaatatgaagctaaaaccaggtactgtgatagctcatctgattttttgttct

SEQ ID NO: 928911 - DNA, 712 bp, Homo sapiens
aaatggagatgagaaaaaaaacacacaaaagatcaatgaaactaaaagtttatttgaaagaataaataagattgatagaccactagctagactaataaagaagaaaagagacgactcaaataaacacaatcagaaatgacaaaggggatgttaccactgaccccacagaaatacaaacaaccctcagaggtttttttttttttttttttttttttttttgagacagagtctcgctctgtcgcccaggctggartgcactggcgcgatctcggctcactgcaagctccgcctcccggattcacgccattctcctgcctcagcctcctgagtagttgggactacaggtgcctgccaccacgccaggagaattttttgtatttttagtggagactgggtttcaccgtgttagccaggatggtctcgatctcctgacctcgtgatccgcctacctcggcctcccaaagtgctgggattacaggcgtgagccaccgcgcccagccacaaccctcagaggtttttgaggtttttattatgaacacctctatgcacacaaactagaaaacctagaagaaatagaaacattcctggaaacatacaacgcccaaagattaagccaggaaaaatgaaaactctgaacagactaataatgagttctgaaattggatgagtaattaaaaaacaaacaaacaaaaagaaaaagctctggaccaga

SEQ ID NO: 928912 - DNA, 781 bp, Homo sapiens
aaaagcaagagcaaaccaaccccaaagttagcagaagaaaagaaataactaaaatcagagctgaaatgaatgaaatggagatgagaaaaaaaacacacaaaagatcaatgaaactaaaagtttatttgaaagaataaataagattgatagaccactagctagactaataaagaagaaaagagacgactcaaataaacacaatcagaaatgacaaaggggatgttaccactgaccccacagaaatacaaacaaccctcagaggtttttttttttttttttttttttttttttgagacagagtctcgctctgtcgcccaggctggagtgcactggcgcgatctcggctcactgcaagctccgcctcccggattcacgccattctcctgcctcagcctcctgagtagttgggactacaggtgcctgccaccacgccaggagaattttttgtatttttagtggagactgggtttcaccgtgttagccaggatggtctcgatctcctgacctcgtgatccgcctacctcrgcctcccaaagtgctgggattacaggcgtgagccaccgcgcccagccacaaccctcagaggtttttgaggtttttattatgaacacctctatgcacacaaactagaaaacctagaagaaatagaaacattcctggaaacatacaacgcccaaagattaagccaggaaaaatgaaaactctgaacagactaataatgagttctgaaattggatgagtaattaaaaaacaaacaaacaaaaagaaaaagctctggacc

SEQ ID NO: 928913 - DNA, 597 bp, Homo sapiens
atgagcggtcacagctgaaactgccacagacagcccccactaaggcagtgcttaatggagccaagggagcaggaccgccacagagaccccagaacataaagttaccagcattcaactccagcctaagagagctgcaggcataagactccaacccatgaaagctgcttggtggactgagcccaggaaaaccacagggacaggactgcccaaggccttggaggcccattcctaggcccagtatgcacaggatgcaggacatggaaacaaagataattctgaagctttaaaatttaaatgatgttttcyctgttgagttttgaatctgtacttaaggcctgttactcctttcttcttccctatttctcccttttggtacgggaatggcagtcccatgcctgtctcaccactgtattttggaagtctataatttgttttgagttcacaggcttgtaccaggagataaatttgcctcaaggtgaatcatcccttgagcctcacccatatctaatttagatgagactctagactttggatctttgaggtgattctggaacaagctaagactctgggggctaatgggatagaataaatgcgtta

SEQ ID NO: 928914 - DNA, 695 bp, Homo sapiens
cttgtacatcctgtggaactgggagccaattaagcctggtttctttataaattacccagtctcaggtatttctttatagcaatgcaaaactaatgcgactcatacagggaccatgtcatcccaaggctccttgtaagagtgggcaggagggtcagtcagagaagatgatgcgagggcaggaaccaaggaatgtggcrcctctggaagctgggagaaacacgcagacggattctccgctagagcctccagatgaaacgcagccctgcttgtaccataatctaaggacttctgacctttagaactataggatagtaaggccgggagcggcggctcacgcctgtaatcccaacattttgggaggccaaggcgggcagatcacctgaggtcaggagttcgagaccagcctggccaacatggtgataccccatctctactaaaaatacaaaaattagccaggcctggtggcacatgcctatagtcccagctacttgggaggctgaggcaggagaatcgcttgaacccaggaggcagaggttgcagtgaacagaggttgcaccagtgcactccagcctggacgacagagagagactccatctcaaaaaataaaaataaataaaaaaaaagaactatacaatcataaattttgtgtgtgtgtgtgtgtgtgtgtgtgtgtgtgtgtgtgtgtttaggctgct

SEQ ID NO: 928915 - DNA, 695 bp, Homo sapiens
cttgtacatcctgtggaactgggagccaattaagcctggtttctttataaattacccagtctcaggtatttctttatagcaatgcaaaactaatgcgactcatacagggaccatgtcatcccaaggctccttgtaagagtgggcaggagggtcagtcagagaagatgatgcgagggcaggaaccaaggaatgtggcgcctctggaagctgggagaaacacgcagacggattctccgctagagcctccagatgaaacgcagccctgcttgtaccataatctaaggacttctgacctttagaactataggatagtaaggccgggagcggcggctcacgcctgtaatcccaacattttgggaggccaaggcgggcagatcacctgaggtcaggagttcgagaccagcctggccaacayggtgataccccatctctactaaaaatacaaaaattagccaggcctggtggcacatgcctatagtcccagctacttgggaggctgaggcaggagaatcgcttgaacccaggaggcagaggttgcagtgaacagaggttgcaccagtgcactccagcctggacgacagagagagactccatctcaaaaaataaaaataaataaaaaaaaagaactatacaatcataaattttgtgtgtgtgtgtgtgtgtgtgtgtgtgtgtgtgtgtgtgtttaggctgct

SEQ ID NO: 928916 - DNA, 695 bp, Homo sapiens
cttgtacatcctgtggaactgggagccaattaagcctggtttctttataaattacccagtctcaggtatttctttatagcaatgcaaaactaatgcgactcatacagggaccatgtcatcccaaggctccttgtaagagtgggcaggagggtcagtcagagaagatgatgcgagggcaggaaccaaggaatgtggcgcctctggaagctgggagaaacacgcagacggattctccgctagagcctccagatgaaacgcagccctgcttgtaccataatctaaggacttctgacctttagaactataggatagtaaggccgggagcggcggctcacgcctgtaatcccaacattttgggaggccaaggcgggcagatcacctgaggtcaggagttcgagaccagcctggccaacatggtgawaccccatctctactaaaaatacaaaaattagccaggcctggtggcacatgcctatagtcccagctacttgggaggctgaggcaggagaatcgcttgaacccaggaggcagaggttgcagtgaacagaggttgcaccagtgcactccagcctggacgacagagagagactccatctcaaaaaataaaaataaataaaaaaaaagaactatacaatcataaattttgtgtgtgtgtgtgtgtgtgtgtgtgtgtgtgtgtgtgtgtttaggctgct

SEQ ID NO: 928917 - DNA, 724 bp, Homo sapiens
ttccagacttttaaaggtgtcagactctctcttagaatctctgttagatccaggaaaggcctggaaagggaggcctggctgcgttactgaagattctctacagaggcaaatttcccccacaaaagacggctttgcagggccgtttmtaaatatgtcaaaaaatatattttggcataaaatgttttgatgtacttcagtggtcacttctgaagtccccaagtatcagttgaatttggtacaattggtgtttggaggaacctccatattgggtctgtgtcctgtgtggtaagaatttttatagtgaggaagtcacagtggaaacctctgaaactacctacctaggtaagataacaaattaaaaaaaaaatctcatgttggagaagcaggagaaagcaaaaataaatggattcattaaaggtctaaagggggctgtggtggtcccttttataactccactgaattcaccagggatcagcaggaaaggagagggtctcctgtattggcaagagtgtctactgattagtgacacctaccaggaggtgacatagggctgcatttatgcaggggcaggaaggcgtggacgtggagctcgtgtgacctgcatggatgcctcctgatgctcccccaccccactgttacagtgagtgggcaaaggcagcaaccccagcctaaaggttctgctcagactgcagtgagacaccaaggcctgcccaagagatagctg

SEQ ID NO: 928918 - DNA, 881 bp, Homo sapiens
tcccatggcgatggcaggagaaacagcagagggcttcttagaatcaagttcacaactggcacatcatcctttccacacacaccccagtggcagcagcaggtgccatggccagacccaaaggcgtaaggggcagggacgtgctctcccctccgatgaggctgtggcaagggtgtggacacggggagggtgacacactgtaggtgtacttccctcctctgcactccctctcacacctcgttttcttcacaccacctttccctgtttgaaattacctaatttatgtatttgtgactggttatgttgtgttttcattttcatgcggctcacaatactttctattaataatcccctttgtgatttcttctttgacccatggattatttaaaactgcgtcgtgtaacttccaagtatttgtgtgkttcccacatctcctgctgctgatttctaatttatccttctgctaatcccattgtggttggaaaacatattttttatggtttcagtccttttaaatttacttaaatgtattttatggcccagcatacgccctagcctacctggagaatgttccatgtgtatttgagaaggatgggccctctgctcttgttgagtggggtgttctgtggatgctgcataggtcgagctgacggatcctgttgagtcttctgcatcctcactttttgtctattgttgagagaggcgtattgacctgtcagccatgattattgggttgtatgtctctccgtcagttgtcaggttttgcttcatgtgttttggggctctttttaggtgcttgtttgctgtctgccttcatcactaaactctgagctccttgagggcaaagagctggacccgtacccttgttcccagtggcttgtgat

SEQ ID NO: 928919 - DNA, 657 bp, Homo sapiens
cacacctcgttttcttcacaccacctttccctgtttgaaattacctaatttatgtatttgtgactggttatgttgtgttttcattttcatgcggctcacaatactttctattaataatcccctttgtgatttcttctttgacccatggattatttaaaactgcgtcgtgtaacttccaagtatttgtgtgtttcccacatctcctgctgctgatttctaatttatccttctgctaatcccattgtggttggaaaacatattttktatggtttcagtccttttaaatttacttaaatgtattttatggcccagcatacgccctagcctacctggagaatgttccatgtgtatttgagaaggatgggccctctgctcttgttgagtggggtgttctgtggatgctgcataggtcgagctgacggatcctgttgagtcttctgcatcctcactttttgtctattgttgagagaggcgtattgacctgtcagccatgattattgggttgtatgtctctccgtcagttgtcaggttttgcttcatgtgttttggggctctttttaggtgcttgtttgctgtctgccttcatcactaaactctgagctccttgagggcaaagagctggacccgtacccttgttcccagtggcttgtgatgcct

SEQ ID NO: 928920 - DNA, 651 bp, Homo sapiens
gtctatgcaaaatgattaggagtattttttttttttttgcgattttagatagagtgaccagcataggcttcactgagaggacatgtgagcaaagacacgaaagtggtgaggaaagctaggactcacttggcatccaagaaacagcgaagaggccggcaaggccagatgggacggagtgatcgagcaggagaagcagatgaggcgaraggaatcataggagggtgcagattatgcagggctttgactcagagtgatgtgggaagccactgcagggttttgagcagagggacatgcacattctggctaatgtgttgaaataaactgaaatggtgaggaagaaagcagggagaccagtgaggagactcctgcaattatccaagcaagagatgatggaggcttggaccaggctgaggtgaaaagaggtcagattctcaacaggaagggagagctgaggggatctgctgaccatatgaatgtggggtgtaaaagaaagagaaaagtcaagaacgacaccaaggttttgagtctgcgcaactagaaagctgaagtttctgccaactggaacaggaaagactgcaggtgctggggagggaaatccagaatttcagtttgcacgggtcaaactccattcacagtcacctactacacacc

SEQ ID NO: 928921 - DNA, 484 bp, Homo sapiens
cgagcaggagaagcagatgaggcgaaaggaatcataggagggtgcagattatgcagggctttgactcagagtgatgtgggaagccactgcagggttttgagcagagggacatgcacattctggctaatgtgttgaaataaactgaaatggtgaggaagaaagcagggagaccagtgaggagactcctgcaattatccaagcaagagatgatggaggcttggaccaggctgaggtgaaaagaggtcagattctcaacaggaagggaragctgaggggatctgctgaccatatgaatgtggggtgtaaaagaaagagaaaagtcaagaacgacaccaaggttttgagtctgcgcaactagaaagctgaagtttctgccaactggaacaggaaagactgcaggtgctggggagggaaatccagaatttcagtttgcacgggtcaaactccattcacagtcacctactacacaccctggtggagatgt

SEQ ID NO: 928922 - DNA, 703 bp, Homo sapiens
cacataatagacccccttttcatttctattgttcatagaggcataaacaagaaaaaaaattcaaatataagagtctcatgatagtagaagttttgatccgtgatcttgtggaaaagctgttcacatcaaggatgccatcttcttctggggagaaactttcctgattagttttaccttaagggttccaacaggtgtacagttgcaggagtgtggagggacccttctcagttgtgagattataaacccaaggttcgaggctccaaagtttttctgtagtgtggatggcaaagacggcctttctctgatgttctcagaagatccaatcttcaggttctagattgtgargggactgtcctcagtgaaccataaaaagctttctttacctggttaaaatacactgtagcataataatctactgctataagatcagccctcttgcatggaaaagcttttatacaccagaaaacatgcattgaaaatgacaattgagtgaaattcctttataaatgtttaaatggcccatcaggtagccaaatgtacctgaagctttgattgtcttcctgggaatatggaaccaaacattggttttaaactatttccttaatttataagtcaccacattaatatattcaatttggattattttatcttttccatgaccagtcatggaatgaaaaacctttaataacaaaagctttaagga

SEQ ID NO: 928923 - DNA, 560 bp, Homo sapiens
actattgtgaatagtgctacaataaacatgggagtgcagatatcccttctgtatactaatctcctttcttttgggtatatacctagtagtgagatttctagatcctacagtagctctattcttagtttttggggaacctccaaactgttttccatagtgcttatactaatttacatagccaccaatagtgtatgagggctcccttttctccacatcttcaccagcattcgtgttgcctgtctaatcagccatttcaattggggtgaggtgatatctcattgtaattttgatttgcacttctctgatgattaatgatgttgagtaccttttcatatgcctgtttgccatttttatgacttctttggagaaatatctgttcaaaccctttgccyattttttaatcaaattattagatattttcctatagagttatatgagctccttacatattctggttattaaccccttgtcaaatggatagtttgcaaatattttctccctttctgtgggttgtcacttcactttgttgattgtttcctttactgtgcagaaacttttta

SEQ ID NO: 928924 - DNA, 603 bp, Homo sapiens
ctctgtagggacatggatgaagctggaaaccataattctcagcaaactattgcaaggacaaaaaaccaaacaccacaggttctcactcataggtgggaattgaacattgacaacacctggacacaggaaggggaacatcacacactggggcctgttgtggggtgggggaagaggggagggaaagcattagcagatatacctaatgtaaatgacgagttaatgggtgcagcacaccaacatggcacatgtatacatatgtaacaaacctgcacgttgtgcacatgtacccaagaacttaaagtaaaataatacrtaaataaataaataaaaataaaaaaagaaaagtggctgcttatacttctaggtcatgttcacagtccaggcaggaagaaggcagaaaggaaagaatttgcaccatcagacctctactcacatatttttggccagaatgctgtcaaatggccatatttggtttccatagaatctgagaaatgtgtgtgtgtgtgtgtgtgtgtgtgtgtgtgtgtgtgtgtgtgtgtgtgtatggctaacccaactaccattttctagaggcagattcacgcttaatctggtgggtgtaat

SEQ ID NO: 928925 - DNA, 824 bp, Homo sapiens
tagtgagattaactaaaaagagaagcaagatccaaaaaagctcaattagaaataaaacaggagatagtagaactgataccacagacatacaaaagagcattctaggctattatgaacaactttatgcacataaaatagaaaaccaagagtagatggataaattcctggaaatatacaaccctcctagattaaacaaggaaaaaaatataaactctgaacagacaaataacaagcagtgagatygacagggtaattaaaaagttaccaacaacaaaaaaaagtccaggaccagacagattcatggctgaattatattagacattcaagcaaaaatggtaccaatcctattgacactattccacaagacagagaaggagaaaatcttccctaagtgattccatgaagccagtatcattctaatactaaaaccaaaaggggacataacaaaaaaagaatactacagaccaatacacagacccggatgaacatatatgcatcagacccttatgaacacgatctaggacagttgtatatttccaggaatgtatccatctcctcttggttttctagtttactatgaacaaagttgttcacagtagcctagagttctcttttgtatgtctgtggtatcagttgtaatatctcctgttgcatttctaattgagcttgtttggatcttcttgcttctcttcttggttaatctcactaatgttctatcatttttatttatctttttaaagaactagctttttgtttcatttatctattgtactgtgtgttttttgtttcaatttaatttagttctgctcagatctttgttattt

SEQ ID NO: 928926 - DNA, 824 bp, Homo sapiens
tagtgagattaactaaaaagagaagcaagatccaaaaaagctcaattagaaataaaacaggagatagtagaactgataccacagacatacaaaagagcattctaggctattatgaacaactttatgcacataaaatagaaaaccaagagtagatggataaattcctggaaatatacaaccctcctagattaaacaaggaaaaaaatataaactctgaacagacaaataacaagcagtgagatcgacagggtaattaaaaagttaccaacaacaaaaaaaagtccaggaccagacagattcatggctgaattatattagacattcaagcaaaaatggtaccaatcctattgacactattccacaagacagagaaggagaaaatcttccctaagtgattccatgaagcyagtatcattctaatactaaaaccaaaaggggacataacaaaaaaagaatactacagaccaatacacagacccggatgaacatatatgcatcagacccttatgaacacgatctaggacagttgtatatttccaggaatgtatccatctcctcttggttttctagtttactatgaacaaagttgttcacagtagcctagagttctcttttgtatgtctgtggtatcagttgtaatatctcctgttgcatttctaattgagcttgtttggatcttcttgcttctcttcttggttaatctcactaatgttctatcatttttatttatctttttaaagaactagctttttgtttcatttatctattgtactgtgtgttttttgtttcaatttaatttagttctgctcagatctttgttattt

SEQ ID NO: 928927 - DNA, 735 bp, Homo sapiens
taagttaaaaccagtgctcgtgtaccattccagcaatcctagggcccttaagaattatactaaaatctactctgcctgtgctctggtaccagtccatggcctgttaggaaccaggtcacaccacaggaggtgagcagcaggtgagtgagcattatggcctgagctccgcctcctgtcagatcagcagcattagattcttacaggagcacaaacccttttgtgaactgctcatgtgagggatctaggttgcatgctccttatgagaagctaatgcctcatcatcttaggtagaacaggttcatcccaaaaccatccccccagccscactctgggtccatggaaaaattgtcttctacaaaactggtccctggtgacaaaaagatcagagatggctgctctgatggatttggattttcaagtacattgaaaaccttctggaaattattcgccactctagatgccattaagaacatgtgcaattcatgggaggaggtcaaaatatcaacattaacaggagtgtgcaagaggttggttctaaacttcatggatgactctgaggggttcaagtaaccacacatgtggtagaaatatcaagagaactagaggtggaccctgaagatgtgactgaattgctacaatctcatgatacaacttgaacagatgaggagttaattcccatggatgagcaaaaaatggtttcttgagatggaatctacttccagtgaagatacagtg

SEQ ID NO: 928928 - DNA, 860 bp, Homo sapiens
attagattgtgcccacccagcttgagggtgggtcctcctctcgcagtccgctgactcaaatgttaatctcctttggcaacaccctcacaacacagccaggaacaatactttgcatccttcaatccaatcaagttgacactcaatattaaccatcagaagtctaccttttgtcaacttgaacgcatatacatctcctgaaatcatacataatcttcaaataaagacaataataaggtcataattatgcctaacataatacagctatccctatcctttgtaaagctggaagcacattaatccttaaactaaatgctattacataaagttaccacttaaatgctgatatgaagtcaataaattttatgtcacatgataaagsaaaaaggaaaatgaagatattttcttagacaaactgtatacatgcataaacatgttcttaacgaaataaggaggaaatactcatgagaattacagttctcatttctgcaactggtaatggtggtcatagtcagtactgatgacaaccttgttctactacccattctgtattccctgtgtctcttcagcaagcacctcagcaggttgtggttttgtacctggtagagtgacccaaaccttcattccggaggggtatgggtcatttttagtcctgcttggattgggttgttgtagtttcccattgaccttaatcactgggcatggtaatactaagagaggccctaaaggatctcctgtattccatgcatactcttccttacctccatcaggtaaggaagagtagactgatttcaagatgagtagtagactgatttcatcttgatagtccaagccaatcaccccaggcaacactgtaactccct

SEQ ID NO: 928929 - DNA, 846 bp, Homo sapiens
actgtatacatgcataaacatgttcttaacgaaataaggaggaaatactcatgagaattacagttctcatttctgcaactggtaatggtggtcatagtcagtactgatgacaaccttgttctactacccattctgtattccctgtgtctcttcagcaagcacctcagcaggttgtggttttgtacctggtagagtgacccaaaccttcattccggaggggtatgggtcatttttagtcctgcttggattgggttgttgtagtttcccattgaccttaatcactgggcatggtaatactaagagaggccctaaaggatctcctgtattccatrcatactcttccttacctccatcaggtaaggaagagtagactgatttcaagatgagtagtagactgatttcatcttgatagtccaagccaatcaccccaggcaacactgtaactcccttcttagcctgctgacttaaaggtaggaggagctcaaagtgtccaggtggtaatattaacttccagtttaatggaatcattgttgtgtgtcctggtggcagcactctccactctggacctaagacttttaggccagcagaacgtaatgttgcgggaacaggaagcaaaaatttttctaatgggccactaggggtgatggtgagtggtgccacttccacttccaccccttgattcctggacccgtgaatcctggctatgggagaaactgtaccatatattggacactgattcagagcatacacagccttctggagaactctgcgccagccctgcaaagtattgtcacctagttgatgttgtaattgtgacttcaaaaggccattccaccgttctatcaa

SEQ ID NO: 928930 - DNA, 846 bp, Homo sapiens
actgtatacatgcataaacatgttcttaacgaaataaggaggaaatactcatgagaattacagttctcatttctgcaactggtaatggtggtcatagtcagtactgatgacaaccttgttctactacccattctgtattccctgtgtctcttcagcaagcacctcagcaggttgtggttttgtacctggtagagtgacccaaaccttcattccggaggggtatgggtcatttttagtcctgcttggattgggttgttgtagtttcccattgaccttaatcactgggcatggtaatactaagagaggccctaaaggatctcctgtattccatgcatactcttccttacctccatcaggtaaggaagagtagactgatttcaagatgagtagtagactgatttcatcttgatagtccaagccaatcaccccaggcaacactgtaactcccttcttagcctgctgacttaaaggtaggaggagctcaaagtgtccaggtggtaatattaacttccagtttaatggaatcrttgttgtgtgtcctggtggcagcactctccactctggacctaagacttttaggccagcagaacgtaatgttgcgggaacaggaagcaaaaatttttctaatgggccactaggggtgatggtgagtggtgccacttccacttccaccccttgattcctggacccgtgaatcctggctatgggagaaactgtaccatatattggacactgattcagagcatacacagccttctggagaactctgcgccagccctgcaaagtattgtcacctagttgatgttgtaattgtgacttcaaaaggccattccaccgttctatcaa

SEQ ID NO: 928931 - DNA, 738 bp, Homo sapiens
gtgcttgcgtatcatgcagaaccatctgtaaaccaggcccttgtcttctcttcctttttcaactgttcacagggagctccccatgaggccactggtgcaggctgggggaaagagagctagatggcaggagcagggaccatgggcatttgagccacttsctcacataacttacttgtgccctcaggacttgctcaagcctgatcacatatataccacttcgatttgatgatggaatgccgctgtgcatgccccactttatggctagatgggtcagaaagcacgagtttatgacaggcagtttaggttacatggtgacttgatggcccatagtcaaacattcagtttctaccaaagcccagtaaccagccaagaactgtctctcaaaaggagagtagttatctgcagaagataggtccttgctccaaaatcctagaggcctctgctgtgattcacctatgggggcctgctaaaggctccaaatagcatccctatctgccactgacatctcaagcaccattgaatctgctaggtaatatggcccaagtggcacagcagctttcacaacagcctagacctgttgcagagccttctcctgttctggaccctactcaaaactggcagccttttaggtcactcgataaatgggctggagtaacacaccagaatgaggaatgtattgcctccaaaatccaaatagacccactaggcgttgtccctctttcttggttgtaggagggg

SEQ ID NO: 928932 - DNA, 573 bp, Homo sapiens
catgaggccactggtgcaggctgggggaaagagagctagatggcaggagcagggaccatgggcatttgagccacttgctcacataacttacttgtgccctcaggacttgctcaagcctgatcacatatataccacttcgatttgatgatggaatgccgctgtgcatgccccactttatggctagatgggtcagaaagcacgagtttatgacaggcagtttaggttacatggtgacttgatggcccatagtcaaacattcagtttctaccaaagcccagtaaccagccaagaactgtctctcaaaaggagagtagttatctgcagaagataggtccttgctccaaaatcctagaggcctctgctgkgattcacctatgggggcctgctaaaggctccaaatagcatccctatctgccactgacatctcaagcaccattgaatctgctaggtaatatggcccaagtggcacagcagctttcacaacagcctagacctgttgcagagccttctcctgttctggaccctactcaaaactggcagccttttaggtcactcgataaatgggctggagta

SEQ ID NO: 928933 - DNA, 815 bp, Homo sapiens
ttttgggtggtgcttgcgtatcatgcagaaccatctgtaaaccaggcccttgtcttctcttcctttttcaactgttcacagggagctccccatgaggccactggtgcaggctgggggaaagagagctagatggcaggagcagggaccatgggcatttgagccacttgctcacataacttacttgtgccctcaggacttgctcaagcctgatcacatatataccacttcgatttgatgatggaatgccgctgtgcatgccccactttatggctagatgggtcagaaagcacgagtttatgacaggcagtttaggttacatggtgacttgatggcccatagtcaaacattcagtttctaccaaagcccagtaaccagccaagaactgtctctcaaaaggagagtagttatctgcagaagataggtccttgctccaaaatcctagaggcctctgctgtgattcacctatgggggcctgctaaaggctccaaatagcatccctatctgccactgacatctcaagcaccaytgaatctgctaggtaatatggcccaagtggcacagcagctttcacaacagcctagacctgttgcagagccttctcctgttctggaccctactcaaaactggcagccttttaggtcactcgataaatgggctggagtaacacaccagaatgaggaatgtattgcctccaaaatccaaatagacccactaggcgttgtccctctttcttggttgtaggagggggcaaatgcagcaacttatccttcaccttagaaggaatatcttgagaggccccacaccactggaccact

SEQ ID NO: 928934 - DNA, 696 bp, Homo sapiens
gccaagaactgtctctcaaaaggagagtagttatctgcagaagataggtccttgctccaaaatcctagaggcctctgctgtgattcacctatgggggcctgctaaaggctccaaatagcatccctatctgccactgacatctcaagcaccattgaatctgctaggtaatatggcccaagtggcacagcagctttcacaacagcctagacctgttgcagagccttctcctgttctggaccctactcaaaactggcagccttttaggtcactcgataaatgggctggagtaacayaccagaatgaggaatgtattgcctccaaaatccaaatagacccactaggcgttgtccctctttcttggttgtaggagggggcaaatgcagcaacttatccttcaccttagaaggaatatcttgagaggccccacaccactggaccactagaaattttactgaggtagaaggtccctgaattttagttaatttcccatcccctggcatgcaaatgtctcatcaataagtccagtgtgttggctacttcttgctcactagatccggtcacatactgtcatcaatgtaatgaactaatgaactggtgtgatatcctgcggaagggaaaagtgatcaagatctctgcaaacaagattatgacacaaacccggagagctgatatacctctgaggtacgacagtgaagg

SEQ ID NO: 928935 - DNA, 682 bp, Homo sapiens
tagacagcctcccacttcccttacaatactgtttctccatgagacaggggcgaggtcacgcagtccttaccaaatattccaggggccctgggtacacgcaaagcactgctttagggtctggaaatacatagcgaagtaacaaacatagatcaaaattcctgccttcatggggcttaccttctagttggaggtggggtgggacagaggaaaagacagtaaatgaatatacgtatatatgaggtgctaagaagataaacaaatcaggaagggagatggggtgtcctgggcaggggaaggtttgcacttgcatgtggaggagtcagagaaggcccctctgaaagatgacattgagcagacactgaagggagggaaggaggctcacagacatctggggcaagaggtcccaggcagagggagtaacccatgcagatgtcctggagcagagatgcacttggtgcattggagcagcagcaaggagaaagccaggaggagctggggagatccagcsgggaagcgagagaaagaacggcaggaaacggagggcccaagccacaggcctttccagctttgtaaggactttggtttttaccctgggtcagattaaaagccaatggagtgttttgagcagagaagtgacatgatctgacttccattttgccaggctgctggatggggaattgga

SEQ ID NO: 928936 - DNA, 590 bp, Homo sapiens
gagaccaaatggcctgcaatgcctaaaatatttgctacctagccctttacagaaacagtttgctgacccctcatgtataaggttattcactgcagtgttgcttgtaataattaaagattagaaacaacctaagtggccatcaatagaaaactggttaaatgatgatgtgttcatgccgtgaaaatgtaggcagttgtaaaaacaaaatgaagaagctttttaagtattgatatgaaaaaaatctccaaaataggccgggcgcggtggctcaacaacttgggaggctgaggcaggccgatcatctgaggtcaggagttctagaccagcctggccaacatggtgaaaccccgtctctactaaaattacaaaaattagccaggtgtggtggtaggtgcctgtaatcccagctawtcaggaggctgaggcaagagaatcgcttgacattaggagatatacctaatgtaaatgaccagttaatgggtgcagcacaccaacacggcacatgtatacatatgtaacaaacctgcatgttgtgcacatgtaccctagaacgtaaagtacaataaatatatatacaaaaaaaaaaaaag

SEQ ID NO: 928937 - DNA, 570 bp, Homo sapiens
tggtgagagggggcatcctgtcttttgctggttttcaatgggaatgcttccaacttttgcccattcattataatgttggatgtgagtttgtcataggtggctcttattattttgaggtatgttctttcaataatttattgagagtttttaacatggagggttgytgaatgtatcttttcttggagggttattgaatgtatcttttctgcatctgttgagataatcatgtggtttttgtctttagttctgtttatgtgttgaatcacatttattaatttgcatatgttgaacaaaccttgcctcccagggatgaagcctacttgatcatggtgcattcactttttgatgtgctgctggatttggtttgcaagtattttgctgaggatttttgcattgatgttcatcaaggatattggcctgaagttttctttttttggtcatgtctctgccaggtttttgtatcaagatgatagtggcctcatagaatgagttggggaggagtccattcttctgaattttttcaaatagtttttgtagaaatggaaccagctcttctttgtacatcttgtg

SEQ ID NO: 928938 - DNA, 655 bp, Homo sapiens
tcgcggagaacgccccatcttctccaccgcggtcttttaagttcccgctcagcccaccgcccccacctcgcctccccgactttcctccccgatcccctttccgccggccgtgctccgccggcttccccctgcccctcgcggctaagccggggactgccgggcggccctgcgcgctcggaagagcaggttcctcaacccaggccccggcccctcccgctaagctcgtccctcccggcgccccgcagggctggctgcgagggagggggcgttgggtgcctggcggaggcgccctcccctgtccattttgcccagctttctgtctggggcgcacggagcaatcggaagaggggaccgagcgcccaccccaggactccctcggccagtaccctccctgggaccttgcccaagttcaaagcrgaggccagtgagcaggcggcaagggggcggcaagggggcgcccgggccatcccgaacccgttccccgccttctgcgccatcgccctccgggaccgggactcgccccggttgccctcgccccctgggccggcctcccgtggtaagttgggaaggaagccgtgcaaggcagcgttgtgcagacttgctcagaaagattcctgggttcagacctgtgaatcgccccagggtcaccctctaa

SEQ ID NO: 928939 - DNA, 909 bp, Homo sapiens
accacatggccttccagttcttctcccatccccacccacccatgcctccgtggggagggcggcaactctcccaggtctttgcctctggagggctgaggccccactctcttcccaggatttgtgccaattgctttggtgacacagacacatgggatcccgtctgtcctgtcactccctgtcccctctcggagcttcctttttttctgaccccttctggatgcattcagggcaggacacagtgggcagtgggagctgcgaggagcctctgagcacatggagctgtctcctccaggactgtcctgaggggcagtggacacagcccacagcagacaccggccttgctgagcagggagactaaggacagcagcctggtgagaccaggagctcggctgagaaaagccgcgccctctccggggaaagccctgcgcctcccgtgcggcgtctgttatggtggatgccgccggcagagagcgacactgtggactaagccgtgtcctccaaagtcataggtgaggccccagcccccacgggactgtatctggagctaggacattagggagggaattaaggttaaatgaggttgtgaggagggccctgacccgataggacatgtccttgtaagaagagaaatcgacaccagggatgcgcgtgcrcagaggagtggccgtgggaggacacgggagaagccacagtctgtaggccatgaagaagcctcgggagaaaccgcccagtggccccttggtcttgaactcccggcccccagactgggagggaacagtttctggtgttgaagccccggcccgtggtactttgttacaactgcctgagccaacaaggccagatgaagaggaaggacagcagtgtgccaggtgtgtgtgggccttgcacagccggggaggctctggtgtc

SEQ ID NO: 928940 - DNA, 623 bp, Homo sapiens
tctttgatgatagattcccatggttatattttgacaaataattcaaaaggagttcaaagagttgagtggtatttctataataaactccttttatccctgtctacttcttatgtgaacaaattttctcagcattcacatctatagaaattgaattgatgctgaaatcctgcctcattatagcaatacagagataaatgcaataattgaaaaaatacatccaattaatgatatgtcttctaataaaaactttacttatgtatttatttatcaaaatttgtaatatgtatatattcttccaatcagtcactgaaactaataattattgtaatgtaacgaacattaaatccagaagaaaattttctttctgatcatagaaacaaattaataaactttcatatacatgtttttgctgtagagatatataatacagtatataatttwaaaatactcttaagcataaaatatcttttaaaatatattaggatatattaaaatatacattaagataaagttctaaaggggaatgagcacattgaattaaaagaggggaaaatgatataaattttgactatagagccagttcatgtattttttaaatgcataatggtagttacctaattgct

SEQ ID NO: 928941 - DNA, 621 bp, Homo sapiens
ttaaactattcttgatgatagattcccaggttatatttgacaaataattcaaaaggagttcaaagagtgagtggtatttctataataaactccttttatccctgtctacttcttatgtgaacaaattttctcagcattcacatctatagaaatgaatgatgctgaaatcctgcctcattatagcaatacagagataaatgcaataatgaaaaaatacatccaattaagatatgtcttctaataaaaactttacttatgtatttatttatcaaaattgtaatatgtatatattcttccaatcagtcactgaaactaataattattgtaatgtaacgaacattaaatccagaagaaaattttctttctgatcatagaaacaaattaataaactttcatatacatgtttttgctgtagagatatataatacagtatataatttwaaaatactcttaagcataaaatatcttttaaaatatattaggatatattaaaatatacattaagataaagttctaaaggggaatgagcacattgaattaaaagaggggaaaatgatataaattttgactatagagccagttcatgtattttttaaatgcataatggtagttacctaattg

SEQ ID NO: 928942 - DNA, 601 bp, Homo sapiens
atttatctttgtttctaattgcatttgcttttcagttcttagttacaaaattctttcctaagccaaagtctaaaagggttttcccaatgttgttttctagaattagaatttttatagtttcaggtcttagatttaagtctttgatccatcttgagttgatttttgtataacgtgacagatgagaatccagtttcattcttctatrtgtgacttaccaattagtccagaaccatttgttgaataggatgtcctttccccacttcatgtttttgtttgctttgttgaagtcagttggctataagtatttgggtttatttctggattctctattctgttccattggtctatgggcctatttttatactagtaccatgctgttttggtgactattgccttatagcatagtttgaaatcaggtaatgtgatgcctcaatatttgttattttttcttagtcttgctttggctatgtgggctccttttggttccataagaattttaggattgctttttctagttttttgaagaatgatggtggtattttgatggaaattgcattgaatttgtagattgctttcggcagtatggtcattttcacaatat

SEQ ID NO: 928943 - DNA, 524 bp, Homo sapiens
cgattcataacattccttgtttggaagcatcggggcatgttggggcatgtccttctccttacgcctcaagagcaaatcacacaaactccacggaagggactgactcaagttgttagacatggatgtgcaattggtctacagtcagaacttcctggaaactttatctaaaatgtaggcctaaggtcttacaggtaatttttwatttttttctttccagaattgcccatgttctttcttctggtctggattaaagattgaattattgaaggattcagagggaggctgttccagaagccggaaggattagatctcaccaaaaaatctgctttggtgcaattcccagaaagattttagagcctgaagaggtttataaagttggctgaatttggaataaacatctccaaaatgttgggcctgtttccaaactgaaatgaaatttgaggtccacccatttcactagttattaagataaagagaaatcccctgctgaaactggattacacaattggtagttcttgccattg

SEQ ID NO: 928944 - DNA, 576 bp, Homo sapiens
gagttgtcaggtgtgctgtcctgagccaatatatacacatatacaaatgaattggctcatgtagttatggaggttgagaaatcccaagatctgcagttgccaagctggagacccaggggaacaaatgatgtaaattccagtccaagtccaagcccaaaggcagaagcctaatgttcccagcgcaaaaacagtcagccagagagaacaaatgttgttatattcagcctttttgttgtattcaggccttcaacgattgaatgaggcccacagacatgggggagggcaatttgcttaactcagtcaacctatagaaatgttcatytcatccagaaacaccctcagcgttacactcagaataatgtttaaccaaatatctgagcatcccgtggtccagtccagttgacacataaaatgcacagataaaatccagactttttttttttcttttgagacggagtctcactctgttgcccaggctagagtgcagtggtgcgatcttggctcactgcaagctctgcctcctgggttcatgccattctcctgcctcagcctcccaagtagctgggactacaggca

SEQ ID NO: 928945 - DNA, 576 bp, Homo sapiens
gagttgtcaggtgtgctgtcctgagccaatatatacacatatacaaatgaattggctcatgtagttatggaggttgagaaatcccaagatctgcagttgccaagctggagacccaggggaacaaatgatgtaaattccagtccaagtccaagcccaaaggcagaagcctaatgttcccagcgcaaaaacagtcagccagagagaacaaatgttgttatattcagcctttttgttgtattcaggccttcaacgattgaatgaggcccacagacatgggggagggcaatttgcttaactcagtcaacctatagaaatgttcatttcatccagaaacaccctcagcgttacactcagaataatgtttaaccaaatatctgagcatcccgtggtccagtcmagttgacacataaaatgcacagataaaatccagactttttttttttcttttgagacggagtctcactctgttgcccaggctagagtgcagtggtgcgatcttggctcactgcaagctctgcctcctgggttcatgccattctcctgcctcagcctcccaagtagctgggactacaggca

SEQ ID NO: 928946 - DNA, 606 bp, Homo sapiens
aagtaagccactcatgtttgttgtaaatagcctacttgactgatctacttgacttctagatcctcactgatttttcactatgcaacattttccctgggttgctttcagccagtatctgagtacagcatgggtacttgtgctgacccatccctgcccaacaaagtagtcatataacagaaaacttttgctcatgactcatcatcagactggctcaaactttttcagaactgtgctattgtatgaggatcttctaactcaatccttttatttcactctattttacagatctcagactgcatcacagtcagaaggctttccttatcttatcttctcctgttccttcacccttttatccttcgcaataattccccacgataaatcctttgcatccaacacaggtaataccctaagtcctgcaggaaaacrggaaataaaataagattttggaactggttctttctttgtctagctgtcaggaaggacctcatacaaaatgtttatgcggtattgacagtctctggtactgatgacccaattgccgaggatatcatggatatcaattttgaaaatatatgggtggagtggaatgcccttggtgatgtagtg

SEQ ID NO: 928947 - DNA, 648 bp, Homo sapiens
tggcgctcaatggattatgctatgacctaaacttaataataagaagagaaaacagcagaatatcctaaaggaggcagatattgtctagtagaggagaagcttctcgattgctttctagcaatggggggataaaagaaacagctcttatgcaatcacagataattcagaagaatcttagaattcaagatttttayttgcacattggtgttttcatctcaaacaggttccgaccttgatatagctgatctgcctagttttaaaacttaaacttctttggggtttagctattcttataattgaatattggacccaaacctcagttctctatgcccttagaacaagagacaagatcttcattatatactactaaagaactgctctgggtctcatacttaacttttaatttctaattaaccactcagatttcttctcttgtaaaacacaggttagcaatagatacacaattccactgcccttaaagtaccatttctccacatttccttcatatttctcaaataccaggtatatgcatcagttaatgcattcttcttcacttgtattccattccagcttactcatagtgagaatcttaacagttacactcgcatcttgtgccaggggtttctttgctacacaagcattagtgat

SEQ ID NO: 928948 - DNA, 488 bp, Homo sapiens
tttttgtatttttagtagaaacgggtttcgccatgttagccaggctggtctcgaactcctgacctcaggagatccacctgccttggcctcccaaagtgctgggattacaggcattggccaccgtgcctggcctgctttttttttttctaagttaagcatcctctgcccctcttgggccagacaccagagagttagtccctctgtaccttttactatttaggtttctttattgaaatttataagacctccagttcagtgttgaataagtgataaatgcaggcagacttttgtsttgttcttgattctaaagacaatgcattctcttcctgccttctgtcctccctttttctctctgcctttctctgtctttctcactctcattctctctgtctctctcctagctctctttcttattctctatttttatcattccctctacccagggtcttttattaatgaatatcctgcaagattgaggaaggagactg

SEQ ID NO: 928949 - DNA, 599 bp, Homo sapiens
aattttataatttgaggtcttaaatttaaatctttaatccatgttgggttaatgtttggttatgctgagaggtaggagtccagtttcattcttctgcatatggctagccagttatcccagcaccatttattgaacaggaagtcctttccccattgcatatttttkttgattttgttgaagatcagatggttgtagatatgcaggtttatttctgggttctgtatgctattctgttggtctgtgtatctttttttgtaccagtaccgtgctgtttgggtaactgtagccttaaagtatagttcgaagtcaggtaatgtgatgcctctggctttgttcttttcgattaggattgctttggctattcaggcttttttttggttccacatgaattttagaatagatttttctaattctgtgaaaaacagcgttagtattttgatagggatagcactgaatctgtatgttgctttgggcagtatcatcattttaacaatattgattcttccaatccatgagcatggtcttaatatgtttttccatttatttgtttcatctctgatttctttcagcagtgttttgtagttctctctgcagagatc

SEQ ID NO: 928950 - DNA, 584 bp, Homo sapiens
tcttgaactcctgacctcatgatctgcctgtctcagcctcccaaactgtcaggattacaggcgtgagccaccacgcccagccgagtttcaaatatatattctggatacaagtttcttatcagatacatgttttgcaaatattttctcccattctttgatttgtcttttcactttattgagtgtcctttgaagtacaaaaaagttttaatttttatgaagtcctagtttatccacttctytcttttgctacatgtgcctttggcgttgcagctaagaaggcattgcctaacccaagttcacaaagatttagttatgagttttatagcttcagttcttgcattttgtatatcgtgtaaggaaggagtctaatttcattttttttttttttaccagttatctacatcccgttgctctagtatcatttgttgaagactatttttttttttctttgagacagggtttgctctatcacccaggctggagtgccatggcgcaattatggctcactgcagccatgacctcctgggtccaagtgatccttcttcctcagcctccaatgtagctgggaccacaggtgtgcacca

SEQ ID NO: 928951 - DNA, 565 bp, Homo sapiens
ttcaccacatgtacaaagaaaaactaatacgaatcctattgaaactattccaaaaattaagggagtaggggctcctccctaaattactctatgaagccaacatcaccctggtaccaaaatctggcaaaaatacaatgaaaaaaggaaacttcaagccaatatccctgataaacatagatataaaaatccttgacaaaatattagcaaacmaaattcagcagcacatcaaaaagttaattcgccacaatcaagcaggctttaatcctggggtgtaggactgcttcaacatgcccaaattaataaatgggattccccacataaacagatttaaaaaaagaccatatggtcatcacaatagatgtagagaaaaacacctttgatataatccgacatgctttcatgataaaaactctcaacagactggctatcaaacaagcatacttcaaaataacaagagccatctatggaaaacatatagatgaatgagcaaaagctggaacgttctccttgagaactggaacaagataaggatgctcactttcaccacttgtattcaacatagtac

SEQ ID NO: 928952 - DNA, 565 bp, Homo sapiens
ttcaccacatgtacaaagaaaaactaatacgaatcctattgaaactattccaaaaattaagggagtaggggctcctccctaaattactctatgaagccaacatcaccctggtaccaaaatctggcaaaaatacaatgaaaaaaggaaacttcaagccaatatccctgataaacatagatataaaaatccttgacaaaatattagcaaacaaaattcagcagcacatcaaaaagttaattcgccacaatcaagcaggctttaatcctggggtgtaggactgcttcaacatgcccaaattaataaatgggattccccacataaacagatttaaaaaaagaccatatggtcatcacaatagatgtagagaaaaacacctttsatataatccgacatgctttcatgataaaaactctcaacagactggctatcaaacaagcatacttcaaaataacaagagccatctatggaaaacatatagatgaatgagcaaaagctggaacgttctccttgagaactggaacaagataaggatgctcactttcaccacttgtattcaacatagtac

SEQ ID NO: 928953 - DNA, 555 bp, Homo sapiens
gccatgactgaaagggacacacatacagctcaggccactgtttcagatggggtaagccccaaggcttggcagcttccatgttgtgttgggcatataggtgcatagaagtcaagaattgaagtttggggacctcctcctagatttcagatggtgtacggaaaactcctagatgtccaggcagaagtctgctgcaggggtggagccctcatggagaaactctgctaggacagtgaagaagggaaacatggggttggagaccccacacagagttcccactgtggcactgcctaggggagctgtgagaagaggaccaccatcctccagacccaakaatgatagatccactgacagcttgcaatatatgcctggaaaagccacagacactcaatgccagcctgtgaaggcagccagaaggggggctgtaccctgcaaagccacagaggaggtgctgcccaaggctgtgggagcccacctcttgcatcagcatgacctggatgtgagacatggagtcaaaggagaacattttggaactttaatgtttaatgactgccctat

SEQ ID NO: 928954 - DNA, 616 bp, Homo sapiens
tgtccatttgatatggacggattgctcattatcttgaaaaaggaaaaataaaccaattcaatttttaaaataaaagagtatacatagagtacatttaaatatatcaaagatttgtaactgagattgagtaaaatttagtttctctgagtaaataataatagccataatgtggctaagtctcctaacmaaataaaattaatgatggctactaaataatgactttatgcctttacagttggtattttgttcatatagtttagaatgcaaaaatgaataatctaaaatgtaaggtgtatgcatgtatattacatcagttgtggaaaatgcaatacttctagcaggtaaatttttcttcttaggacaaaaatgagtcataatatacaatgatggacctaaaatgtacaatcaagattgagccacaaggtatttttaaacatagaatgaaattatttttaaccaacatcaacattgccttgatttgatttgagcaaaagctgctacatttgacaaccctcctatagatacaactgattgtaatatattgctgtttttaaaagatcctaataatttgccctccacagaagaggtttataatcttaatttttctatgtagttg

SEQ ID NO: 928955 - DNA, 616 bp, Homo sapiens
tgtccatttgatatggacggattgctcattatcttgaaaaaggaaaaataaaccaattcaatttttaaaataaaagagtatacatagagtacatttaaatatatcaaagatttgtaactgagattgagtaaaatttagtttctctgagtaaataataatagccataatgtggctaagtctcctaacaaaataaaattaatgatggctactaaataatgactttatgcctttacagttggtattttgttcatmtagtttagaatgcaaaaatgaataatctaaaatgtaaggtgtatgcatgtatattacatcagttgtggaaaatgcaatacttctagcaggtaaatttttcttcttaggacaaaaatgagtcataatatacaatgatggacctaaaatgtacaatcaagattgagccacaaggtatttttaaacatagaatgaaattatttttaaccaacatcaacattgccttgatttgatttgagcaaaagctgctacatttgacaaccctcctatagatacaactgattgtaatatattgctgtttttaaaagatcctaataatttgccctccacagaagaggtttataatcttaatttttctatgtagttg

SEQ ID NO: 928956 - DNA, 616 bp, Homo sapiens
tgtccatttgatatggacggattgctcattatcttgaaaaaggaaaaataaaccaattcaatttttaaaataaaagagtatacatagagtacatttaaatatatcaaagatttgtaactgagattgagtaaaatttagtttctctgagtaaataataatagccataatgtggctaagtctcctaacaaaataaaattaatgatggctactaaataatgactttatgcctttacagttggtattttgttcatatagtttagaatgcaaaaatgaatamtctaaaatgtaaggtgtatgcatgtatattacatcagttgtggaaaatgcaatacttctagcaggtaaatttttcttcttaggacaaaaatgagtcataatatacaatgatggacctaaaatgtacaatcaagattgagccacaaggtatttttaaacatagaatgaaattatttttaaccaacatcaacattgccttgatttgatttgagcaaaagctgctacatttgacaaccctcctatagatacaactgattgtaatatattgctgtttttaaaagatcctaataatttgccctccacagaagaggtttataatcttaatttttctatgtagttg

SEQ ID NO: 928957 - DNA, 575 bp, Homo sapiens
agctgccctctcactgtgtcatcacatggcagacatgtaagagagcaagctgtctaccgtctcttcttatagactctaataccatcatctgggcctgttgtgctttctattgttatggtttatttctaatttggtcttgaggttgctctctcgggagtgagcaaaagccaaaattgttactcctaggaaagccctgactagacagggaaagtacgattctggtgtgtccatcagatgaggcacaacgaatagatgaaattaaaatttataaaacagaaggcattcattactcacagttctagagaagtaagggatgccagtggggggacaatgggratttctgaggtgacagggagcttaactaacatgtgagaagctagagagagtgagagaaaaaatattatatatatatagagagagagagagagagagagaaagagagagagagaagacatgtgggactgtgtgtttattaaggtccatgggcactattccttagacttttttgcaggggttctggatttgctagtttaaataaaacacttgcaaaagggggagattattcacatgactct

SEQ ID NO: 928958 - DNA, 575 bp, Homo sapiens
agctgccctctcactgtgtcatcacatggcagacatgtaagagagcaagctgtctaccgtctcttcttatagactctaataccatcatctgggcctgttgtgctttctattgttatggtttatttctaatttggtcttgaggttgctctctcgggagtgagcaaaagccaaaattgttactcctaggaaagccctgactagacagggaaagtacgattctggtgtgtccatcagatgaggcacaacgaatagatgaaattaaaatttataaaacagaaggcattcattactcacagttctagagaagtaagggatgccagtggggggacaatggggatttctgaggtgacagggagcttaactaacatgtgagaagctagagagagtgagagaaaaaatattatatatatatakagagagagagagagagagagaaagagagagagagaagacatgtgggactgtgtgtttattaaggtccatgggcactattccttagacttttttgcaggggttctggatttgctagtttaaataaaacacttgcaaaagggggagattattcacatgactct

SEQ ID NO: 928959 - DNA, 523 bp, Homo sapiens
gtgaatgtgtagatttttttctgagatctctattcttttccatgtgtctatgtctgttgttgtgccagtactcaactgttttgacaaatgtacatttttaatatgttttgaaattagcaagtgtgatgcctctctctgtattcttgttcaagattactttggctatttgggggcctttctgattccatgtgaattttaagattattttttatatatctaaaaagaataccactgggactttgatarggattaaagtaaatctgtgatacctttgagtggtatggacattttaacaatattagttattcaaatcaataaacatggagcatctttgcatttacctgtggtttctttaattttttacataattcttttattattttcagtgtaaaaacctttcacttctttaagtttattcctaagtatattttttgctattttaaatggtattgttttgttaattttttcagatagttcattactactgcatagaaaccactgatttttgtattttgatgacatc

SEQ ID NO: 928960 - DNA, 630 bp, Homo sapiens
cagctgcatgctgcgtgattcaaactgcataaccacattcctctaaaggctcagaataatttaaagttccaacaacttttatttaatttcacaccagtaatttatgacataggaataacacgtaataactttctgttagaaattagtattgcatacccctaaaaatgtgaaactttgagagacttcacaatttacttaactatatatttcatctaatttaagcaatattcacttactgtggtatggatgtcatctatttaataattttagctttgcagcttatatwattctataattacatcatatatttgttatttaattgaatttttactatgcattaggcatttatactatgtaaaattattctctgtgagtctaggtttgaaagaagaaagttttaaatagaaagtatagtcttacctgtatcaagcaaactaaagtttgataaaccaagctgaagaacaaatgcatattttagtttccaaaaatcaactggaaagctgtgaaaagtcaagaagctcacatcaaatttcaaaaagctaagatagttttaaaatattgccaagtcaatcctaagccaaaagaacgaagctggagccatcacgctacctgacttcaaactatactaca

SEQ ID NO: 928961 - DNA, 581 bp, Homo sapiens
caaaaatataactttactgtcctacctcagaggtatatcaactctggctttgtgtcataatcttatttggagagactttgattgttttccacttccacaaaatatcacactggttcattacattgatgacattatgctgattggatccagtgagcaagaagtagcaaactcactggacttattgatgagacatttgcatgccagaggatgggaaataaatatgaytaaaattcagggaacttctacctcagtaaaatttctaggagtacagggatgtggggcctgtcaagatattccttccaaagtgaaggaaaagtttctgcatttggcctctcctacaaccaagaaagaggcacaatgcctagtgggcctacttggattttgctggcaacacattcttcatttggatgtgttaccccagcccatttatttagtgacccgaaaggctgccagttttgagtggagtccagaacagaagaaggccctgcaacaggtccagtctgctgtgcaagttgctctgccacttgggccatatgagccagcagatccaatgatgcttgaggtgtcagtggcagatagag

SEQ ID NO: 928962 - DNA, 725 bp, Homo sapiens
ttatttatttctctccttctctcctctccctcagagacttcggctgcacctatattaggccacaggaagttatctaacagcttcctgatgctttgttttagccttttatttttctctctgtgtttaattctgggtagtttttattgctatatcttcaaattcactagttttccttctgcaaagactaatctgctgttaatcccattgagtatgttttttcctcccagaaattgtatttttcatctttataacttcatgcaggtcattaaaaaaatcttccatgtgtttatttaacatgttaaatctttcctctagctttctgaagatatggaatacaatyataataattattttaatgaccttgtctgttaattctatcatctatatcagttctgggtcagtttgaatgattaattttttttctccttatgagttgtagtctcttgttttgtatgcttggaaacttttgagtggatgtcatatgttgtgaattttaccttctgtgagctggatatttttgtattcctataaaaattttttggctttgttctggttaggttacttgggaacagtttgattatctctggttgtgctttcaagatttattaggtaggatcagaacagtgtttggtcaagggctagttataaccccctactgaggcaatctcttgtcagtactctattcggtgcctcataaatcatgaggttttccagtctggctggtg

SEQ ID NO: 928963 - DNA, 594 bp, Homo sapiens
ctgagatgaccatttttgaagctgtcatgtttaaaattctagcttttctgaaattttgtcttaagaattaaagaaaagctactatcaccaccaacaaggagaaaaattagttttaaaggtagaaaaattacttggtctcctgctaaatgctaatggagcatagcctctggcctgaagaagataatttaggttcaaatacctccccaaagaggatgttacatctgataacacattctagtctcatataagaaaagcacatcttggttgttaacatgaagtcagctctgcagtttctgcatcaaccccactactgtcaggttaagagctcttgattccctcctaaccctgggttaagtcacaaaattcattcaattaacagtgaataatgaggcgtcaggagccagttacaatctttctgattccaaatctctcatctaayaggaagtgactggaattaacttatccagctacaaaaataatatttaaaaagtgcttgttttcaagttgtgagaattttaacttcatgcctctgataagttttttatttagtttttttttctttttctttattttttgagacaaagtctcactctg

SEQ ID NO: 928964 - DNA, 597 bp, Homo sapiens
gggccaatttatcaagaagatataaaaatcataaacatgctcccaacattggagcactagatatataaaacaaatattaatgcaactgaaaggagaaacagacagcaatatgatagtagggatcattaataccccactttcaataattaacagatcatttagatggaaaataagtatggaaatggaagacttgaacaacactayagaccaaatagacccagtagatatagataaagcattttatccaacaagtgcagaatatacattctttttaagtgtacagagaacgttctccaggatatatcacctgttaggccacagagcaagttttaacaatttaggaagattgaaatcatatcaagtatcgcttataattacaatgctatgaaactagaaataaataacaggagaaaaatagaaaattcacaaatatgtgaaaattaaagaatgcactcctaaagaacaaatgaatcaaagtagaaataaaaaagaaattttaaaaaaatctggagacaaatggaaacaaaaacacaacatatcaaaacttagggaatgcagtaaaatcagttctaagaaggaattttgtagcaataaatg

SEQ ID NO: 928965 - DNA, 646 bp, Homo sapiens
cctgtggcccccagggaggcatgcagatagcttttacaagtgagaggagagctaggatctgcagagaccactggactgcctgcctccctccttgctctgggagtcctccatggttctgagggaggcacagataatctctacaagctgtctgggctcccagrtatttgctacagaaggtctcgtgtgttcagaggacctaaagctacggtacccttgaggatgaggagaaaggtgtactttctcccctgtacagaaggcatgtggagagctgtggcttgggaggagaataccagtgtgcctcccacttccttagcagccgggcctccctccccagaggggctgcaccacttctcaactagtggcagctcatgaaatcctcaagtaggaagtgtattagtcagggttctctagagggacagaactaataggatggatttatatataaaggggaatttattaagaggattgactcacacgatcacaagatgaggtcccataataggctggctgcaagctgaggagcaaggagcaagtctgagtccccaagctgaataacctggagtctgatatttgagggcaggaagcaaccagcatgggaggaagatgtaggctgggaggctaaaccagtctagtcttttcacgttct

SEQ ID NO: 928966 - DNA, 749 bp, Homo sapiens
cattccagctgcttcacctccagccatggctaaaagggaccaaggtacagctcatgccatagcttcagagggtgcaagccctattccttggcagcttccatatggtgttggtcctgcaggtgtgcagaagacaagaactgaggtttggaaacctctgcctagatttcagaggatgtacggaaatgcctggatgtccaggcagaagtttgctacaggggcggagccctcatagagaacctctgctaagagagatgtgtaagggaaatttgggttcggagcccacacagtcttcactggggcactgcctagtggagctgtgagaagagggccaccatcctccagacctaagaatggtagatccaccaaaagcttgcactgtragcccagaaaagccacagacactcaatgccagcccatgaaaccagccataagggaggctgtaccctgcaaagccacaagggcagagctgcccaaggctgtaggagcccacctcttgcaccagcatgacctggatgtgagacatggagtcaaaggagattattttggagctttaatatttaattattgcttcagtggatttcagacttgcaaggggcctgtagcccctttgttttggccaatttctcccatttgaaatgggtgtatttacccaatgcttgtacgtctattgtacctaggagataactaacttgctttggattttacaggctcataggtgaaagggacttgctttgtcacatatgagactt

SEQ ID NO: 928967 - DNA, 670 bp, Homo sapiens
acgctctggcgtcaggagagagatggttcaagaagggcgatcacgtaactgggttttcttgcagtgggcttgacccgatttgccttttgcacgcggtgtcctcacagcagcctccgcagcaggccccaggtcaacgctagtgagtggcagagccgagcctggccccaggtagccaggcttggtgcccaccactgccccgtccctcaggaaacagccccctttccccaggacaaaaggcggaaacgagcaggtccccagtggtggttaggtacagcgtctggcaggtggtgtggagcgtgaagaacatgtgagggcaaactctgttcatatttctactttggtgacaagtaggttttggacttcaggattcccccaggtgccaatggccagaakactggtttctaacaaaacacctcttttttttttttttctgagacagagtctcactctgttaccaggctggagtgcagtggcacaatctcggctcactgcaacctccgtgcccctggttcaagcgattctcctgcctcagtctcctaagtagctgggattacaggcgctgcccaccacgcccggctaattcttgtatttttagtagagatgggattgcaccatgttggccaggctggtctcgaactcctgacctcaggtgattccccccccgcccccg

SEQ ID NO: 928968 - DNA, 670 bp, Homo sapiens
acgctctggcgtcaggagagagatggttcaagaagggcgatcacgtaactgggttttcttgcagtgggcttgacccgatttgccttttgcacgcggtgtcctcacagcagcctccgcagcaggccccaggtcaacgctagtgagtggcagagccgagcctggccccaggtagccaggcttggtgcccaccactgccccgtccctcaggaaacagccccctttccccaggacaaaaggcggaaacgagcaggtccccagtggtggttaggtacagcgtctggcaggtggtgtggagcgtgaagaacatgtgagggcaaactctgttcatatttctactttggtgacaagtaggttttggacttcaggattcccccaggtgccaatggccagaagactggtttctaacaaaacacctcttttttttttttttctgagayagagtctcactctgttaccaggctggagtgcagtggcacaatctcggctcactgcaacctccgtgcccctggttcaagcgattctcctgcctcagtctcctaagtagctgggattacaggcgctgcccaccacgcccggctaattcttgtatttttagtagagatgggattgcaccatgttggccaggctggtctcgaactcctgacctcaggtgattccccccccgcccccg

SEQ ID NO: 928969 - DNA, 670 bp, Homo sapiens
acgctctggcgtcaggagagagatggttcaagaagggcgatcacgtaactgggttttcttgcagtgggcttgacccgatttgccttttgcacgcggtgtcctcacagcagcctccgcagcaggccccaggtcaacgctagtgagtggcagagccgagcctggccccaggtagccaggcttggtgcccaccactgccccgtccctcaggaaacagccccctttccccaggacaaaaggcggaaacgagcaggtccccagtggtggttaggtacagcgtctggcaggtggtgtggagcgtgaagaacatgtgagggcaaactctgttcatatttctactttggtgacaagtaggttttggacttcaggattcccccaggtgccaatggccagaagactggtttctaacaaaacacctcttttttttttttttctgagacrgagtctcactctgttaccaggctggagtgcagtggcacaatctcggctcactgcaacctccgtgcccctggttcaagcgattctcctgcctcagtctcctaagtagctgggattacaggcgctgcccaccacgcccggctaattcttgtatttttagtagagatgggattgcaccatgttggccaggctggtctcgaactcctgacctcaggtgattccccccccgcccccg

SEQ ID NO: 928970 - DNA, 547 bp, Homo sapiens
agtgtggcatgttatactcatactcaccctggcagtggcaggttgtcagggtttatacacacacaccagtggggcccatgcagttgcagtgaggactctgcatatgtgcacactggcgaaacagtgattggagactgtgcacagtgcatgccggcaatgcagtgaggggggactgtaagtaggtgtgcactgttggaggtatatttgcagaagctctccaatgagagcagagtagagtctgctgctatggtgatggccactgagaagcaacctcattgggcatgcaaagctgccctccaagagggtatggcctggcggggaccccaggagagtccagtcgacaggagagcatctaatcacaytggcatatcccatgggcaagacagcccttctctgtgcaggtctgacaatcaataatgacctaagtcactcagaggcgtgtggtaagccttaggaaatgggtgtccctggctgtgcttcactggaacctttcttatgtcaaactatctgggctctacacatactggaatcctgtctttgctacttc

SEQ ID NO: 928971 - DNA, 722 bp, Homo sapiens
ccctgggagactctccagagcacattctttgagccccagcttcttagataatgctatcgagactttgcctgggtctgggctttgcctgttactgcctttgggatgagtcagcctaatacagaaagattgtttctttctctttttaattttacttttctttctttaatttccagcctcaagggtgatgggagaagatgtaagaaaagttatagggaaaaatgcaaacctccttggtaggccaaaaactttggagaataatttagctgaaggcagctaaattctcttaagggcaaaggttagataacaagggaatgtaaagaaacatatctagaaaaattggtttacttatgtctcaggaaaccaacctttgatcattcatgtgcaagactgctctctactcaggggtcaacaatgttaatttcccacaaattatgtttgctccaggcctttgtcttcaaatctgtactaaattaatacaaagttytctggcttagtgggactgtactctcattggtgatgctaagcagtgcagtcccctagctgcattctcaggcaaaataactgtgtctgaatactttcttcattggtcgctcagccagagtgtgcgggatggacccgacacaagagaacaaagctggggcctaatacaagtcccccagagttagagcacacagtccagaagttgggagctgagtgttggtgccataaaatatcccagaaat

SEQ ID NO: 928972 - DNA, 722 bp, Homo sapiens
ccctgggagactctccagagcacattctttgagccccagcttcttagataatgctatcgagactttgcctgggtctgggctttgcctgttactgcctttgggatgagtcagcctaatacagaaagattgtttctttctctttttaattttacttttctttctttaatttccagcctcaagggtgatgggagaagatgtaagaaaagttatagggaaaaatgcaaacctccttggtaggccaaaaactttggagaataatttagctgaaggcagctaaattctcttaagggcaaaggttagataacaagggaatgtaaagaaacatatctagaaaaattggtttacttatgtctcaggaaaccaacctttgatcattcatgtgcaagactgctctctactcaggggtcaacaatgttaatttcccacaaattatgtttgctccaggcctttgtcttcaaatctgtactaaattaatacaaagttctctggcttagtgggactgtactctcattggtgatgctaagcagtgcagtcccctagctgcattctcaggcaaaataactgtgtctgaatactttyttcattggtcgctcagccagagtgtgcgggatggacccgacacaagagaacaaagctggggcctaatacaagtcccccagagttagagcacacagtccagaagttgggagctgagtgttggtgccataaaatatcccagaaat

SEQ ID NO: 928973 - DNA, 630 bp, Homo sapiens
agtacccagttatcatgtgcatttgatctgctctgttggaagtatggttcagttagtctagtagtcagggctaacgagctcccttttaaggaaaggaaaatgaaaattcattcatttacaaatgtttattggatgctacaacctagctgtgtgaacacagcaaagtcattcaacctcttgtgccttgactttctcatctggggataataagagaacctgttttataggatggctgggaggatcaaatgaagggcttagaacagtgcatggcacaaggcaagacttcaataaatgttagttttgtgtgtagggctttgtgctccgactgggggcatagcagcgagtaagcrcgtagtaaagggcttaacagagtggggacggtcagtcgcatttaaattttagtgtaggacattgatgtcctcctggatccagtcatattcatctcctacatcaatcaagataatcattttgttttattcaatagataaagtattttctttctgctgatttatttgttacaatatctggtttttttgttttttttgtgtgtgtatgttttttttttttttttgagacacagtctcactctgtcgcccaggctggagtgcagtggcacgatctcagctcact

SEQ ID NO: 928974 - DNA, 645 bp, Homo sapiens
ggtctctattcaaacactgtacttttgtttcttgattacatcttcaattattttagttatttctgagattctcccctgtaatttctccaactatctagggcataaagagtgcatgaataacattatgaaggctgtgagacttcaaataaatgagtagcctttctgagtctcagttttctcctctgtaaaccaggaataattttcactgaacaaagttgttctaaggrttagtgaaatgtatgtacagcctttagcatttaataggtgatcaaatggtaagtgatggttataaaatgtttttatcatggtaaaatatacaaagcataaaacttaccagccttttaatctaaattgtcttattgtgataggcttgcttatagtaaaacaaactcttatctttttagtatctgtaggatctatagtgataactgttcactccttatattctaacttgtgcctaattagttaggcacaactcttactaattagttatctattgctgcataagaaattacctgaaacttaatgtcttcaaacaacaacaagtatttattatctgtgataggcagacttctaagatgtttcccatgatctcgatgtcctggtgttatactctgtatgatctcttccttttttagtgtggat

SEQ ID NO: 928975 - DNA, 607 bp, Homo sapiens
tttttatattttctctattatgtctttggtttttttttttttcattgatttcagcttttatccttattatttccatcattttaatttcattcagcttaatttgctgggatttttgagatggatgcatagatcattggagttttttctttttcttttttttgagacagggtcttactgtgtcactcaggctatagtgcagtgatgaatcatagctcatagcagccttaaatkactgagctcaagtgatccaatcctccctcctcagccttccaagtagctgggaccacaggtgtgtgtcaccatgcccaattaattttttttttttttttttttttttttttttttttttttttttttttttttgctgtgacaggtctcactatgttgcctgggctggtattgaagttctggcctcaagcaaacctcctgccttggccttccaaaatgttgggattatacatgtgagccaccacacctatcatatcagtttttcagtactttttttgttttgttttcaaatacatgtgtttacgattatagattccccccaccccagatttagtcacatcccacaagttttctacttttgtaaaatattattgaagta

SEQ ID NO: 928976 - DNA, 607 bp, Homo sapiens
tttttatattttctctattatgtctttggtttttttttttttcattgatttcagcttttatccttattatttccatcattttaatttcattcagcttaatttgctgggatttttgagatggatgcatagatcattggagttttttctttttcttttttttgagacagggtcttactgtgtcactcaggctatagtgcagtgatgaatcatagctcatagcagccttaaattactgagctcaagtgatccaatcctccctcctcagccttccaagtagctgggaccacaggtgtgtgtcaccatgcccaattaattttttttttttttttttttttttttttttttttttttttttttttttttgctgtgacaggtctyactatgttgcctgggctggtattgaagttctggcctcaagcaaacctcctgccttggccttccaaaatgttgggattatacatgtgagccaccacacctatcatatcagtttttcagtactttttttgttttgttttcaaatacatgtgtttacgattatagattccccccaccccagatttagtcacatcccacaagttttctacttttgtaaaatattattgaagta

SEQ ID NO: 928977 - DNA, 607 bp, Homo sapiens
tttttatattttctctattatgtctttggtttttttttttttcattgatttcagcttttatccttattatttccatcattttaatttcattcagcttaatttgctgggatttttgagatggatgcatagatcattggagttttttctttttcttttttttgagacagggtcttactgtgtcactcaggctatagtgcagtgatgaatcatagctcatagcagccttaaattactgagctcaagtgatccaatcctccctcctcagccttccaagtagctgggaccacaggtgtgtgtcaccatgcccaattaattttttttttttttttttttttttttttttttttttttttttttttttttgctgtgacaggtctcactatgttgcctgggctggtattgaagttctggcctcaagcaaacctcctgcyttggccttccaaaatgttgggattatacatgtgagccaccacacctatcatatcagtttttcagtactttttttgttttgttttcaaatacatgtgtttacgattatagattccccccaccccagatttagtcacatcccacaagttttctacttttgtaaaatattattgaagta

SEQ ID NO: 928978 - DNA, 751 bp, Homo sapiens
aggccctggcttccagagccccgctagcaggcacacggccaccactgcacttgtgagagcctctgcaccagcaaagcagtgcacacggatcactgcattggcgaccatggcggtaggcctcccgtgtgcccagggcacaggatgagaagtcctttggaatgcccctgtgagtacagcatcctcagggaggaaccatggaactcggagtatgtatttgcctagacctgacagaatccttgcagggtttcagcttctggtgcagatgaattccacctcagcaacgtaccagtcgactttagtcccacgcacccgccctgccccaatccccccaagccaccgctgctgccctcgcccctgcagcagcgctggtccctctctctcccctctggatcygcaatattcggtaccatcagcctagcctgcctaatgaagtgagatgtttcatgtgttccctgtgggttagttaatgtcttgccacactcaggatgccagttagggtgtaggtcttccatgcccacaattgcaaagggctcacagttcgcgtgtgccttaatccaccgcggcccgccacgcggcacaagcgtggtctcggaagagttaccgcgagatgatggagccgcaggcctgctggggcggagcggcctcaggacacgcccacagcctttgcagtaactggctgacgcccaccgccttcgcaatgattggccgctggaggtaggcgggatttccgggcacggcttccggcgtcctt

SEQ ID NO: 928979 - DNA, 731 bp, Homo sapiens
ctcggcaagaatagaaagcgaaggtttgggattttgtctataaaaggggatgggttttctatgtgtgggtgttgaattacgggaggagtcagtggggaaagaactcctcagtgctattaagagactcactttcgttaaactcattgatttttcctgaggattctacctttaactgcctaatgtgtccgactagttgtgggagatggtgctaagccgccattggttttcatgtgcactttttattaaagcgggttttctctgtgaatgtggtgataattcagaatacaggcaatacacttaamcactgcgattaaaaagtcacacttttagttagcacgtgtcgcgtgtctgatttgcttggaagaattatcaaattttgacataaattgtgttactttagtgtatgtagaaatatggggccacaaataatctgagtttcagtttgcctctgtaaagcctgtgattgtctccttcgttgtatgacagtatttgaaacgtttcatgtgtctttggcaccgtaaatagtttaaaccgaataagtgggtgtaatcgagacaaatggagttagatagccgaaaactggaacaaaatagatgcgcttaagttattctgttaacctggcacactgccttactcctgtagtcctagcattttgggaagtggaggtcggaggatggcttgaagtcaggagtttgagaccagcctgggtaacgtactggactctttcattg

SEQ ID NO: 928980 - DNA, 731 bp, Homo sapiens
ctcggcaagaatagaaagcgaaggtttgggattttgtctataaaaggggatgggttttctatgtgtgggtgttgaattacgggaggagtcagtggggaaagaactcctcagtgctattaagagactcactttcgttaaactcattgatttttcctgaggattctacctttaactgcctaatgtgtccgactagttgtgggagatggtgctaagccgccattggttttcatgtgcactttttattaaagcgggttttctctgtgaatgtggtgataattcagaatacaggcaatacacttaaacactgcgattaaaaagtcacacttttrgttagcacgtgtcgcgtgtctgatttgcttggaagaattatcaaattttgacataaattgtgttactttagtgtatgtagaaatatggggccacaaataatctgagtttcagtttgcctctgtaaagcctgtgattgtctccttcgttgtatgacagtatttgaaacgtttcatgtgtctttggcaccgtaaatagtttaaaccgaataagtgggtgtaatcgagacaaatggagttagatagccgaaaactggaacaaaatagatgcgcttaagttattctgttaacctggcacactgccttactcctgtagtcctagcattttgggaagtggaggtcggaggatggcttgaagtcaggagtttgagaccagcctgggtaacgtactggactctttcattg

SEQ ID NO: 928981 - DNA, 731 bp, Homo sapiens
ctcggcaagaatagaaagcgaaggtttgggattttgtctataaaaggggatgggttttctatgtgtgggtgttgaattacgggaggagtcagtggggaaagaactcctcagtgctattaagagactcactttcgttaaactcattgatttttcctgaggattctacctttaactgcctaatgtgtccgactagttgtgggagatggtgctaagccgccattggttttcatgtgcactttttattaaagcgggttttctctgtgaatgtggtgataattcagaatacaggcaatacacttaaacactgcgattaaaaagtcacacttttagttagcacrtgtcgcgtgtctgatttgcttggaagaattatcaaattttgacataaattgtgttactttagtgtatgtagaaatatggggccacaaataatctgagtttcagtttgcctctgtaaagcctgtgattgtctccttcgttgtatgacagtatttgaaacgtttcatgtgtctttggcaccgtaaatagtttaaaccgaataagtgggtgtaatcgagacaaatggagttagatagccgaaaactggaacaaaatagatgcgcttaagttattctgttaacctggcacactgccttactcctgtagtcctagcattttgggaagtggaggtcggaggatggcttgaagtcaggagtttgagaccagcctgggtaacgtactggactctttcattg

SEQ ID NO: 928982 - DNA, 608 bp, Homo sapiens
atctagggaatagtcacaaaacttttggaaggctaaaaggttacgtagcttgtaattgaacaggctgaaggcagccagttcttcccttagaacattaggtcatagggtaaatataagagacaataggggcttccctagttaagtctgtttatcttacctccattaactaactttttagccagaaggccctctcaggaggtcgaccaagaatattttcccgaatggtattcactttagaccagggtacctgagctttaattattcatagaactactgtcttaaccatgttcattatcctcaagcgtatttccacaaagcttctgtttgtaattgcttactaaataaatgcttggagtgcctgctgcttagggccggccacagtgagaaacctyttttagtgtgcaggcagttggacacagcaggactggcaaaacagaatatctgtgtgtcagtttacattttattcatccatcatttgggtcagggtccacgggcagacccctgcagctaatgcccttgtgtgaggagaaataccgcagttaggaaactcaaactactggtagttcaactcagggtagttgagtttgagtcccactaagttagagaga

SEQ ID NO: 928983 - DNA, 635 bp, Homo sapiens
aaatgggtggatcatccaacaaacaagcatttaggtttcatgatctgatatggtttggctgtgtccccacccaaatctcatcttgaattgtaggtcccacaattcccacacgtgggagggacccggtaggaggtagccaaatcatgggggctggtctttcctgtgctattctcaygatagtgaataaatctcatgagacctgatggttttataaagtagagttttcctgtacaagttctcttcttctcttgtctgctgccatgtgagacgtgccttttgccttctgctatgactatgaggcctccctagccatgtggaactgtgagtccattaaacatctttcttttgtgaattgcccagtcttgggtatgtctttactggcagtgtgaaaatggactaatacggtaaattggtattgggagtggggtgctgctgaaaagatacccaaaaatgtggaagcaactttggaactgggtaacaggcagaggttggaacgatttggagggctcaaaacaagacaggaaaatgtgggagtttggaaccccctagagacttgttgaatggctttgaccaaaatgctgataaagatatggacagtaaaatcgaggctggtctcatatggagataagaaactt

SEQ ID NO: 928984 - DNA, 792 bp, Homo sapiens
aagtcttgatctgtgatcttgggaaaagctgttcacatcaaggatgccatgttcttctggggagcgacttccttggttagctttaccttaagggttcctatgggtgtacagttccaagagtgtggagggaccctcctcagttgtgagattatgaacccaaagttcagggttccaaagttttgctgcaatgtggatggcaaggacaatctttctccaatgttctcagaagatctaatctttaggctctagatttgtgaaggggttgattgtcctcagcaaaccataaaaagctttctgtacctagtgaaaatacactgtggcgtaatgacttagttttataacatgagccctcttgcatgggagagcttttatataaccagaaaacatgcattgaaaataataattgaataaaatcccttaaatggcccatcaggtgaccaaatgtacctgaagctttgattattttcccaggaatattgggcccaaacattggctataaagtatttcagtaatttataagccaccacaccaatatattcaatttggatcattctatcttttgctatgatgagtcatggaatgcagaactttyaataataaaagctttaaggactcagaaaggacaaggtgaccaacctggtcctccatgaagtccatgcttaattaatattagacttatatcctcttgaataccagttgtttctccacattaggtgcatagcactggtaactgatgggttatcataggtaaattgacttagatcgtggagttcattcaaaatatgtatctaa

SEQ ID NO: 928985 - DNA, 674 bp, Homo sapiens
tcctgggcttttttgttgttgttgctgttagtaggctatttattactacctcaatttcagaacttgttattggcctattcagggattcaatttcttcctggttcaatcttgggaggctgtatgtgtccaggaatttatccatttcttttaggttttccagtttaygtgcataaaggtgtttgtagtattatctgatggtttttatatttctgtggggtcagtggtgatatccccctatcatttctgattgtgtttatttgatttttttcttttattcattagtctggctagcagtctatctattttattttttccaaaaaccagctcctggattcattgattttttgaagggtttttcatagctctatctccttcagttcagctatcattttgactatttcttgtcttctgctagctttagggtttgtttgctcttggttctctagctcttttagttgtgatgttaggttgttaacttgatatctttctagctttttgatgtacccacagagataattaatacagtgctaaagtagtcttatatttcaaattttcactttgagaagccaaggtgggtggattgcttgagcccaggagtttgagaccagcctgggcaacatggcaaaaccctgtttccgcaaaaattacaaaatttagcccagtgtggtggcgca

SEQ ID NO: 928986 - DNA, 615 bp, Homo sapiens
aggtatgaatcctcatacctcatgttttgcatatggatacacaatcattccagcatcatttgttgaacatattacctttcctccattttattgccttcgaatcttaattaaaaatcagttgtccatatatttgtgtctatttctagactctgttttgctgatttatctatctagaccagcatgattactgtagtttctcataattcttgaaacmaagcatagtgactcttccaaatttgtttttatctttcaaagttcttttggctattctaggttcttgtgctttctatacgaattttagaatcagcatgtcaactcttacagggaaaaaaggtctgcttgggtattgactgggattgtactgactttatagatcaacttggggataactgatattttaataatatttagtcttccaaaccacgaacaaggtatatttcatttatttaggccttctttaaatttatctcagcaatgttttaaagttttcactgtataggttgtgtatgtatgtattactcagcttgggctgccagaacaaaaatccataggctgtgtggcttaaataagaatcatttattcttcacagttctgcaggctgggaaatccaagatc

SEQ ID NO: 928987 - DNA, 615 bp, Homo sapiens
aggtatgaatcctcatacctcatgttttgcatatggatacacaatcattccagcatcatttgttgaacatattacctttcctccattttattgccttcgaatcttaattaaaaatcagttgtccatatatttgtgtctatttctagactctgttttgctgatttatctatctagaccagcatgattactgtagtttctcataattcttgaaaccaagcatagtgactcttccaaatttgtttttatctttcaaagttcttttggctattctaggttcttgtgctttctataygaattttagaatcagcatgtcaactcttacagggaaaaaaggtctgcttgggtattgactgggattgtactgactttatagatcaacttggggataactgatattttaataatatttagtcttccaaaccacgaacaaggtatatttcatttatttaggccttctttaaatttatctcagcaatgttttaaagttttcactgtataggttgtgtatgtatgtattactcagcttgggctgccagaacaaaaatccataggctgtgtggcttaaataagaatcatttattcttcacagttctgcaggctgggaaatccaagatc

SEQ ID NO: 928988 - DNA, 615 bp, Homo sapiens
aggtatgaatcctcatacctcatgttttgcatatggatacacaatcattccagcatcatttgttgaacatattacctttcctccattttattgccttcgaatcttaattaaaaatcagttgtccatatatttgtgtctatttctagactctgttttgctgatttatctatctagaccagcatgattactgtagtttctcataattcttgaaaccaagcatagtgactcttccaaatttgtttttatctttcaaagttcttttggctattctaggttcttgtgctttctatacgaattttagaatcagcatgtcaactcttacagggaaaaaagrtctgcttgggtattgactgggattgtactgactttatagatcaacttggggataactgatattttaataatatttagtcttccaaaccacgaacaaggtatatttcatttatttaggccttctttaaatttatctcagcaatgttttaaagttttcactgtataggttgtgtatgtatgtattactcagcttgggctgccagaacaaaaatccataggctgtgtggcttaaataagaatcatttattcttcacagttctgcaggctgggaaatccaagatc

SEQ ID NO: 928989 - DNA, 615 bp, Homo sapiens
aggtatgaatcctcatacctcatgttttgcatatggatacacaatcattccagcatcatttgttgaacatattacctttcctccattttattgccttcgaatcttaattaaaaatcagttgtccatatatttgtgtctatttctagactctgttttgctgatttatctatctagaccagcatgattactgtagtttctcataattcttgaaaccaagcatagtgactcttccaaatttgtttttatctttcaaagttcttttggctattctaggttcttgtgctttctatacgaattttagaatcagcatgtcaactcttacagggaaaaaaggtctgcttgggtattgactgggattgtactgactttatagatcaacttggggataaytgatattttaataatatttagtcttccaaaccacgaacaaggtatatttcatttatttaggccttctttaaatttatctcagcaatgttttaaagttttcactgtataggttgtgtatgtatgtattactcagcttgggctgccagaacaaaaatccataggctgtgtggcttaaataagaatcatttattcttcacagttctgcaggctgggaaatccaagatc

SEQ ID NO: 928990 - DNA, 645 bp, Homo sapiens
agagctaccttgctggaggacacactcttccctgtaaggcctatacccagttacttgagtgggattaattgttggcacaacataaatctttgatgaaaacactttgatacgggagtgactttaactgatacagatcagacagcaagagtgtttcatatgttactcaaaaaatgtggactttgccctggaagtaagagtctattaaaccattttgacatgcttttgtgttagaaaggtcacataacagaaatatagagtaaaatttggaagtgatagaaagcaatagaaagagagactattaggagattggaaataatcctgaaatggagtgtgcttttgccagatgayacagtaaaaatcctattaacctacaagttatgggtaaaatacaggaacttagggatccttgtgtccagagacaaaccatatatgctatatgggtagctgaggcatttttgtcactgtgttgcatttcatctctcctacccaagacttttaaactaaaagtcttatagaaatttcattaatcttcataagaattataaatttaatgaatatataactgctggttgtaataacatacaatcacagtattgttgtgcaatttggctatttgtagtattttggttttcttttaatgagact

SEQ ID NO: 928991 - DNA, 585 bp, Homo sapiens
gactgtatatgtgtaagtttatttctgggctttattctactcattagtctatatgcctgttcttatgtctctgataaactattttaattattgtagctttgtggtatgttagaaaatcagaaagcatgacgcagatttgttctttttttctcaagatcgatttagctactaggggtattcataagagttttacgtgattttttcctttttttttttttttttgagacggagtctcgctctgtcgccyaggctggagtgcagtggcgcgatctcggcttaatgcaagctgcgcctcccgggttcacgccattctcctgcttcagcctccagagtagctgagactacaggtgcccaccactatgcacggctaatttttttgtattttagtagagacggggtttcaccgtgttagccaggatggtctcgatctcctgacctcatgatccgcccgcctcggcctcccaaagtgctgagattacaggcgtgagccaccgctcccgaccctactttttccatttctaaaaaaaatggatttctacagagattgcattgaatttgtagatcattttgggtgatatgaacatt

SEQ ID NO: 928992 - DNA, 678 bp, Homo sapiens
agattttttgagattaggaaatgcaaagaagtcacaaggagctgaatcagactgtaagatggattcctaacgtattcctatcaaagatcttgcaaaattgcccttgtttaatgagaagaatgatcaggagcattgttgtggtgaagaaggactccctggtgaagctttccwggaagttttactgtgaaagctttggctttctcaaaacactctaagaacaagtagttattatttttcttcagccctccagaaagtcaagaagcaaaatgcctcaagaatccccaaaacttttgccataaccttgactcctgattggtccactttggctttaaccagaccaccgtcacctcttggtaaccgttgctttgattgtgctttgtcttcaggatggtactggtagagccatgtttcatcttctgttacaattcttcaaagaaatgcttcaggatcttgatccaacttgcataaaattttcattgaaagctctgctgttgtcaggagctgatctggacacaacagttttggcacccattgggtggaaagcttgctcaactttaatttttcagtcagaattgtgtgagttgaaccaactgagatgtctgtggttctggctattttttgcactgttaatcgctagtcctctttaattagggcatgcacaagattaattttttcctc

SEQ ID NO: 928993 - DNA, 725 bp, Homo sapiens
tgcagtcattttagcactattaactgaagaaaaatgagtgccctttaaagattttttgagattaggaaatgcaaagaagtcacaaggagctgaatcagactgtaagatggattcctaacgtattcctatcaaagatcttgcaaaattgcccttgtttaatgagaagaatgatcaggagcattgttgtggtgaagaaggactccctggtgaagctttcctggaagttttactgtgaaagctttggctttctcaaaacactctaagaacaagtagttattatttttcttcagccctccagaaagtcaagaagcaaaatgcctcaagaatccccaaaacttttgccataaccttgactcctgattggtccactttggctttaaccagaccaccgtcacctcttggtaaccgttgctttgattgtgctttgtcttcaggatggtactggtaragccatgtttcatcttctgttacaattcttcaaagaaatgcttcaggatcttgatccaacttgcataaaattttcattgaaagctctgctgttgtcaggagctgatctggacacaacagttttggcacccattgggtggaaagcttgctcaactttaatttttcagtcagaattgtgtgagttgaaccaactgagatgtctgtggttctggctattttttgcactgttaatcgctagtcctctttaattagggcatgcacaagattaattttttcct

SEQ ID NO: 928994 - DNA, 631 bp, Homo sapiens
gatggtcgacagcatgctggggctgagcacagtcccggggtggggtggaggagacagacgcgtatgagaatgatagcaatgccatggtgtgagggcagtgacgctcatgtgcaggtgttgaacccgcataagggttgttttacccatccccaggcggaaggtcgtttagtgatggattttttttttttttttttgagacggagtctcgctctgtcgttgggctggagtgtagtggcgggatctcggctcactgcaagctscgcctcccgggttgacgccattctcctgcctcagcctccggagtagctggtactacaggcgcctgccgccacgcccggctaattttttgtatttttagtagagacggggtttcaccgtgttagccaggatggtcttgatctcctgacctcgtgatctgcccccctcggccttccaaagtgctgggattacaggcgtgagccaccgcgccctgcctgagtgatggttttctaaggaagagtggctctgttgagaagtagcagttggacgatttggaggcacagatatgagaacatgtaaatcagtgaacacagagtgagaagtccagggtgcagggcagagccagtaagagtttcagcagcgagaagagtga

SEQ ID NO: 928995 - DNA, 622 bp, Homo sapiens
ttgtggttgtagaaggtctggacaacgagaaccctcctggttccgtccatgttctgtccccagggtaaggaagtaccttgccaatacagaactgcttttaaaaaaaaaagagagatagggcattactccatcgcccaggctggagtgcagtggcacaatcatagctcactgcagcctcgaactcctgggcttaagtgatgtgactgtgtcagcyacctgagcagctagggctgcaggctcaagccatgtgcctggcagtaaagtaccttttaaagttgttttgattctggacaatgtctctctttggccacctatgaaccctatgagttcaaccctataaaggtgtcaaggtggtttactcgtcctcaaacacaacatctccaatttaacctctagatcgggggtcacagaggacctttaagattcagcacacatggcactctacgcagtggtccccaacctttttagcaccagtgagcggtttcgggaaagacaacttttgcgtggtgtggggtcgggtgggaaggtttcaggatgaaactgttccacctcagatcatcaggcattagactctcataaggagtgggcgacctagagcccgcgcatgcacagttcacaatag

SEQ ID NO: 928996 - DNA, 622 bp, Homo sapiens
ttgtggttgtagaaggtctggacaacgagaaccctcctggttccgtccatgttctgtccccagggtaaggaagtaccttgccaatacagaactgcttttaaaaaaaaaagagagatagggcattactccatcgcccaggctggagtgcagtggcacaatcatagctcactgcagcctcgaactcctgggcttaagtgatgtgactgtgtcagccacctgagcagctagggctgcaggctcaagccaygtgcctggcagtaaagtaccttttaaagttgttttgattctggacaatgtctctctttggccacctatgaaccctatgagttcaaccctataaaggtgtcaaggtggtttactcgtcctcaaacacaacatctccaatttaacctctagatcgggggtcacagaggacctttaagattcagcacacatggcactctacgcagtggtccccaacctttttagcaccagtgagcggtttcgggaaagacaacttttgcgtggtgtggggtcgggtgggaaggtttcaggatgaaactgttccacctcagatcatcaggcattagactctcataaggagtgggcgacctagagcccgcgcatgcacagttcacaatag

SEQ ID NO: 928997 - DNA, 730 bp, Homo sapiens
tagcatgactgggcattgaattttattgaaggccttttctgcttctctggggataatcaggtggtttttgtcattggttctgtttatgtgatggattacgtttattgatttgcgtatgttgaatcagccttgcatcccagggatgaagccaacttgatcatggataagctttttgatgggctgctgcatttggtttgccagtattttattgaggatttttgcatcgatattcatcaggaatattggcctgaaattctcttttttttgttgtgtctccaccaggttttggtatcaggatgatgctggcctcataaaaygagttagggaggagtccttctttttctattgtttgaaagagtttcagaaggaatggtaccagcttctctttgtacctctggtggaatttggctgtgaatccgtctggtcctgggctttttttggctggtaggctatttattactgcctgaattttagaacttgttccttgcctattcaggtaaccttcttcctggtttagtcttgggagggtgtatgtgtccaggaatttatccatttcttctagattttctagtttatttgcatagaggtgtttatagtactctctgatggtagttcgtatttctgtgagatcagtggtgatatcctctttatcactttttattttgtctatttgattcttctctcttttattctttattagtctggctagtggtctatctattttgttaat

SEQ ID NO: 928998 - DNA, 618 bp, Homo sapiens
gccagttcaatcaatgggaagaaagggtatcagtgattgaagatcaaattaatgaaataaagggagaggagaagtttagagaaaaaagagtaaaaagaaacatccaaagcctccagaaaatatgggactatgtgaaaagaccaaatctatgtttgattggtgtacctgaaagtgacagggagaatggaaccaagttggaaaacactcttcaggatattatccagaacttccttaacctagaaggcatgccaacattcaaattcaggaaatacagagaacaccacaaagatgttacctcctcaagaagagtaaccccaagacacataattgtcagattcaccaaggttgaaatgaaggaaatgttaarggcagccagagagaaaggacggttaaccacaaagggaagcccaagacactaacagcggatctcttggcagaaatgctacaaggcagaagagagtgggggccaatgttcaacattcttaaagaaaagaaatttcaacccagaatttcatatccagccaaactatgcttcacaaatgaaggagaaataaaatcctatacagacaagcaaatgctgagagattttgtcaccaccagacctgccatacaagagct

SEQ ID NO: 928999 - DNA, 598 bp, Homo sapiens
agagcaagagctcacttattaccaaggagatagcccaagccattcgtgagggatcgacccccgtgatccaaacacttcccaccaggccccacctctaacattggggattacgtttcaaaatgagatttcagtaaggaaagatatccaaataatatcattccaccttgttccctcccaaatctcatgtctttctcacactgcaaaacgcaatcataygttcttaatagtcccctaaagtcttaactcattccaacattaactgagatctcccaactcctaagttctatctgagactcaagccaagtttctttcacctataagcctgtaaaatcaaacacaggttattaacttccaagatacaatggtgttataggcattgggtaaacattcctgttccaaaagggagaaattggctaaaagaaaggggctacaggcctcacacaaaactgaaacacagcagtcactaaacattaaagctccaaaataatcttctttaactctatgtcccacgtccagggcaactgataagagaagtgggttccaaagacctttggcaactccacccctgtggctttgcagggttcagcacccaaggcta

SEQ ID NO: 929000 - DNA, 547 bp, Homo sapiens
cagaatctctaggacacaactatagcactaaatgcccacattgaaaagttagaaagagctcaagttaacaacctaaacaactaaggaactagagaatcaagagcaaagaaatccaaaagatagcagaaaacaagawataaccaaaatcagagctgaactgaaggagatagagacgtgaaaaaccattcaaaatatcaacaaatcctggagctgattttttttaaaaattaataaaatagaccactagccagagtaacagagaagaaaagagagaagattcaaatgagcacaatcagaagaacaaggatgatactgcactgacccaacagaaatacaaacaaccattagagaatattatgaacacctctatgctcataaactagaaaatctggaagaaatggataaattcctggacacatacatcctcccaggactgacctaggaaaaaatggaatccctgaatagagcaataacaagttatgaaactgaggcagtaataaatggcccacaaaccaaaaaaaaaaaaaaaaaaaaaaaagcccaggac

SEQ ID NO: 929001 - DNA, 610 bp, Homo sapiens
tgggtttggtccccctaactgaaagtgggaaagtttccttgtatagctgggtctggggccttttatggactcagaatagggagtgcattctgattggtttatgaatatacaaaaaagattaaagtaaagataccatttgaagacaggcacgacagtgtagaaaaccaattagaaaggggtaggtwtatgtaaaataggtcaagggtggagacaaacctgaggaaagcacgccaaagaggaagatacattctcattccagtctagtgatttaaccctttgcttggctttcaggctttaaactgtcttcagcgtggaggtggggtttcactggggacctgcttctatttgcctaggcatttggctgcttcctgtctctatcagtaccagtgaaaatcctccaaagcattagattagattagatttggttttggataccattttccacttaaaggaataagggttcctaagagaaatatctgattccagggatggggaaggaaaagttaagatatgcttgaaagattttgctgtgctggaaagcaaggaagtcctccaagagggagggtgccatgtcaaaaagggacacaggagtcagcttcaagaagctccc

SEQ ID NO: 929002 - DNA, 592 bp, Homo sapiens
attttctaggccaagactcatgcacatttagattatcctcaaagactagtactgaaaattgcctagccttgtgaaaaagaaatttaaaagtgttcgaatctacagccatggaaaggaatgcagaaaatgtcaaaaaacaacttttttccttctgctctcagaagagagtgtgtttcyctgtttataatgaagagatgagtatgggatggtactactgaatacatttgatttcagcatcttgaaattacagaaaccaactccctcaactattgccaaattctagaggcttcttccaactcttaattgtagtatgtatttagtttttataagactagtaatatgaaaattatgtcaaaattgttattatgtgcattccatgtaaaaggtatgatgtctgtctttttgacttttgtatgctcaatccttaacagagtacctggaatatagtcagtattccatgtatatttaattccccaataaataatgaaagtcatagatgacttatttatttacaacattcaaaatggattatttacatagcactttatgttttaaaatgtgctttttatagatgctcaaatttatgctttat

SEQ ID NO: 929003 - DNA, 680 bp, Homo sapiens
tgcagaaaagcgaatattgctggacagcacatgttgctgtctgatcattcctctggaggttttgtctcaaaggggtacctggccgtgtgaggcgtcagtctgccccttctgggagctgcttcccagttaggctactcgggggtcagggacccacttgagggggcagtctgtccattctgagatctcaaactccgtgctggcagaaccactactctcttcaaagctgtcaggcagggacattkaagtctgcagaggtttctgctgcctttttttgggctatgcccagcccccagaggtggagtctacacaggcaggccggcctccttgagctgtggtgggctccacccagttcgagcttcctgactgctttgtttacctactcaagcctcagcaatggtgggcaccccacccccagcctcgctgccgccttgccgttcgatctcagactgctgtgctagcaatgagcgaggctccgtgagcgggaagcttccgagccaggcacaggatataatcttctggtgtgccatttgctaagaccgttggtaaagcgcagtattagggtgggagtgacccaattttccaggtgccatctgtcacagctttgcctggcttgaaagggaattccctgatcccttgcatttcccgggtaaggcgatgactcaccctgctctggcacgctc

SEQ ID NO: 929004 - DNA, 590 bp, Homo sapiens
ctatattttctagcttgtgtgcatagaggtgttcatagtagtctctgacgatcttttttttttttgtgggatcgattgtaatgtcaactttgtcatttctgattgtgcttatttgtatcttttctctttttttctttcttaatctaggtagctgtctattgatcctgcttaacctgtaaaaaaaaaaaaaaaagcccacttttggttttttttattctttgtatggatttttgcatctcaatttccttcagttctgctctgattgtagttatttactttcttctgctagctttggagttcatttgttcttgtctttctagttcctctagttstgatgctggatcattaatttgagatctttctaactttttgaggtagacatttagtgccataatctttccttttaacactgcttttgctgtatctcagaaattttgttactttatgtctctgttctcatttatttcagatttgttttgatttttgcattaatttcattgtttacccaaaagtcatttaggtgcaagtcattcatgagaggaggtttcactcttttgatatactgtaattaccaaaataagttcaattta

SEQ ID NO: 929005 - DNA, 580 bp, Homo sapiens
aagtatgtctcttccagaatcgaagttgtaaaactacaaatggttcttcaaatggagccccagatgcagtccatgactaagatctactgcagacccctggaccagcctgctagcccatgctctgatgttaatgacatcaaaggcacccctcccgaggaaatctcaactgcacgacccctactacgccccaattcagcaggaagcagttaagagyggtcgttggccaacctccccaacatcacttgagttttcctgttgagagtggggactgagaggcagtactagctggatttcctaggctgactaagaattcctaagcctagctggggaaggggaccgcacctacctttaaacacggggcttgtaactcacctcacacccaaccaattaggtagtaaagaggactcactaaaataccaattaggctaaaagcaggaggtaaagaaatagtcaaatcatatattgcctgagagcgtgggggagggacaatattcgggatataaaccctaggcattcgagacgggagtgggcaaccccctttggctcccctcccattgtatgggagctctgttttcactct

SEQ ID NO: 929006 - DNA, 627 bp, Homo sapiens
gtggaggttgcagtgagctgagattgcaccactgcactccagcctgacaacagagtgaggctccatctcaaaaaaacaaaacaaaataaaacaaaacaaaatcccattttaaaaggtaaacagcataaaagttcagaaaatttgcagcctgacaatgcagtagaaaagaaaaccccattttttgaggagaaatttaagctggctgcagaaattgcataagtagcaaggagcctaatgttaatcccaagaccatggggaaatgtctgcaggccatgtcagagaccttcatggcagcccctcccattgtgtccagaatttattccttctggtgggttcttggtctcgctgacttcaagaatgaagccggggamccttgtggtgagtgttacagctcttaaaaatggtgtgtctggagtttgttccttcagatgttcagatgcctccggactttcttccttctggtgggttcttggtcttgctgacttcaggagtgaagccgcagacctttgcagtgagtgatacagctcttaaagatcgtgcatctggagttgggtgtttgttcctcccagtgggttcatggtctcactgacttcaggaatgaagctgcagaccttcgcagtgagtgtt

SEQ ID NO: 929007 - DNA, 717 bp, Homo sapiens
tcccaagaccatggggaaatgtctgcaggccatgtcagagaccttcatggcagcccctcccattgtgtccagaatttattccttctggtgggttcttggtctcgctgacttcaagaatgaagccggggacccttgtggtgagtgttacagctcttaaaaatggtgtgtctggagtttgttccttcagatgttcagatgcctccggactttcttccttctggtgggttcttggtcttgctgacttcaggagtgaagccgcagacctttgcagtgagtgwtacagctcttaaagatcgtgcatctggagttgggtgtttgttcctcccagtgggttcatggtctcactgacttcaggaatgaagctgcagaccttcgcagtgagtgttacagcttgtaaaggtagtgtggacccaaagagtgagcagcagcaacatttatcatgaagagcaaaagaacaaagcttccacagcctcgaaagggacccgagcaggttgcttggcactgctggctcgggtggccaggttttattcccttatttggccctgcccacatcctgattggtccattttacagagtgctgattggtccactttatagagtgctgattggtatgtttttacagagtgctgattggtgcgtttataatcctttagctagacacagagtgatgattggtacattcacaatcccttagctagacacaaaagttctccaagt

SEQ ID NO: 929008 - DNA, 621 bp, Homo sapiens
ttcaagaatgaagccggggacccttgtggtgagtgttacagctcttaaaaatggtgtgtctggagtttgttccttcagatgttcagatgcctccggactttcttccttctggtgggttcttggtcttgctgacttcaggagtgaagccgcagacctttgcagtgagtgatacagctcttaaagatcgtgcatctggagttggktgtttgttcctcccagtgggttcatggtctcactgacttcaggaatgaagctgcagaccttcgcagtgagtgttacagcttgtaaaggtagtgtggacccaaagagtgagcagcagcaacatttatcatgaagagcaaaagaacaaagcttccacagcctcgaaagggacccgagcaggttgcttggcactgctggctcgggtggccaggttttattcccttatttggccctgcccacatcctgattggtccattttacagagtgctgattggtccactttatagagtgctgattggtatgtttttacagagtgctgattggtgcgtttataatcctttagctagacacagagtgatgattggtacattcacaatcccttagctagacacaaaagttctccaagtgcccacccgaccc

SEQ ID NO: 929009 - DNA, 437 bp, Homo sapiens
cacattttgaaaaaagaaaaaaaaaaaacaataatatattttaaacctaacatctaaaatataatcatttcaacatattcttaagataaaattgataatgagagttttacattatttttgcaatttttattgtgataaacatacataaaataaaatttaacattttaaacattaagtgtacaattcagtaacattaagcagattcatattgttgtacaaccataaccactatcyatttccagaactttttttatcatcccaaactgaacctctgcacccataaacaataactctccatcctcccctcccccagcccctggtaacctgtattctactttctttctttatgaatttgcctattctagataccttatatgagtggaatcatatattatttgtccttttatcatctcgcttattttatttagcataatgtt

SEQ ID NO: 929010 - DNA, 615 bp, Homo sapiens
ttcaagcgattcttctgcctcagcctgcgattcttctgcctcagcctcccgagtagctgggactacaggcacgtgctaccacacctggctaagtttttgtatttttagtagagatggggtttcaccagattagccrggatggtctccagctcctgacctcgtgaaccgcccgccttcgtcttacaaagtgctgggattacaggcatgagcttccgcgcccggccccgaaactttctttcaacaagagttagaggagtacagagaagagaataaattggtgaggaatttcatggaagaggtgaaatttaagaagaattttaaagaataggtagaatttggttatgtggaaaggagtcaaaaagtttttccaggcagaaggaaaattgagtaaaaactttgagtcagaaaaaagcatgatccagaaatgtgagaaaactagtctgggacactgagttgtttttttctttgcatgtattcaacaaatatttattgaataactaccaagtttccagcgccatactaggtgagcaagaaacaagataaataatgcgtagttttgctctcaataatctcattgtctggctagagaaactctattagtaagaaattatgttc

SEQ ID NO: 929011 - DNA, 809 bp, Homo sapiens
tgtgccggagaccagagttttattgttactcaaatcagtctccccaagcatttggggatcagagttttatttttattttattttattttttattatactttaagttctagggtacatgtgcacaacgtgcaggtttgttacacatgtatacatgtgccatgttggtgtgctgcacccagtaactcatcatttacattaggtatatctcctaatgctaacactccaccttcccccaaccccatgacaggccctggtgtgtgatgttccccaccctgtgtccacgtgttctcattgttcagttcccacctatgagtgagaacatgtggtgtttggttttctgtccttgcgatagtttgctcagaatgatggtttccagctttatccaygtccctgcaaaggacatgaactcatccttttttatggctgcatagtattccatggtgtatatgtgccacattttcttaatccagtctatcattgatggacatttgggttgattctaagtctttgttattgtgaatagtgccacaataacatacgtgtgcatgtgtctttatagcagcatgatgtataatcctttgggtatatacccagtaatgggatggctgggtcaaatggtatttctagttctagatccttgaggaatcgccacagtgtcttccacaatggttgaactagtttacagtcccaccaacagtgtaaaagtgttcctatttctccacatcctctccagcacctgttgtttcctgactttttagtgatcaccattctaactggtgtgagatggtatctcattgtggttttgattt

SEQ ID NO: 929012 - DNA, 758 bp, Homo sapiens
ctgcttcctgtcactgtagattattttgcatcatctagcattttatataaataaaatcatatggggctgggcacggtggcttacacctgtaatctcaacattttggaaggccaaggcaggcggatcacttgaggtcaggagtttgagagcagcctggccaacatggcgaaaccctgtctgtactttaaaaaaaaaaaaaaaaaaaaaaaaaagcctgatgtggtggcaggcacttgtaatcccagctactcaggaggctgaggcaggagaattgcttgaacccgggaggttgaggtagcagtgagccaagatcgcaccactgcactccagcctgggcaacagagcaagactctgtcttaaaaaaaaaaagaaaagaaaaagaaaagaaataatatggtatgtactctctgttgtctagcttctttcactcagcgtaattatttttgacattcatccctacagtatatatcaatagttcattcctttttattgctaagtagtgttcattgtatggatgtaccataccaatggatgatataccatccattcgtcrttgataggcatttgggttgtttctagttttaataattacaagataaagtttctatgaatatctacaaacaagtctttctgtggacatttgacttcatttctcttggaaaaatacttgggaatggaatggctagaccatatatatatatatatatatatatatatatatatatatatatatatattttggccaacatttggcatac

SEQ ID NO: 929013 - DNA, 729 bp, Homo sapiens
attcatcacgtctcccagcccagccggtacagcctcagctatttccaggcctgggtatgcagcagcttatgtaacgggctggaagtcagggctgggctaaggggcacttgtggtagggatggggctgctcccacctcccactgtaaggcccacccctcagtccctagtctccctatggagatttgtggggggcccacagctctggctggaatccctgtggacagccactgtgcctatcaacacacctctcacttcctggccagaagatgcctggccatctgcggtccatggagttgaggccaccaagcagcctcttcctcaaccccatcagccctgcccagcctctgtgctctcaccttcccctccccgctcagaggaagagtgggtatgtctgctgctgccctccgagagaacctgtgcacattcctgaagcccctcctagctcctgcaggcctagtttggtgggtggttaagctgggctcaaatacacatattcccagtgtggctttaggcgggctttgtacatctgctaagcctcagttgcttgtttgggaaatggaatgataataayaatatctcccttttggtgtggctgtgactgtggggctttaagagcacattccaggaggcagattgcccagccctgtctatctatgtggccttgggccagtcacttaagctgtccgggcctcagtttccttgtgtagaacgggacagcgatatgaccta

SEQ ID NO: 929014 - DNA, 564 bp, Homo sapiens
agcacaacgggatgagaacccaggtcagactggaaactactgggtgcggggtaggaggtaggggaggttgactacctgcaaagtggaagctgtagggggttggggttggcgccgggagtagggacttgtccagcaggcggctggccttagttcagtctcctagggtgcccaactgggcgcacggtgctctgaacttgggtgggtgtggatgggggtcacagcaccgtgggggaacaggtacacagagctttggcgctgctgggatccgtacgattctaactgggattggatttccaaaaggccctccttcctcccagcctgtcagctccctcccagtgtcccggttgttttcttaacactttagaggctgtggctgagttggcaggggttcccyaccctgaactttctgtctgaggtgcgttaggaagcctccggatcattgaaggaagtgactggcttggtggctgacctgtggagggctgcttgctgtgtattgaataaaggaggcttcttggggtcggggcagggtctctgtaagcacagggagaattgatttcgctgggg

SEQ ID NO: 929015 - DNA, 644 bp, Homo sapiens
aaagagacagggcagaggggaaaagaagttcatagactgtgatgtgggtccagccctaagattaagacggtttacaaggccaggcacggtggctcacgcctgtaatcccaacactttgggaggccgaggcaggcagattacgagatcaggagttcgagaccagcctgaccaatgtggtgaaaccctgtctctactaaaaatacaaaaattagccaggcatggtggcgcatgcctgtagtcccagctacttgggaggctgaggcagaagaatcgcttgaacccaggaggcggaggttgcagtgagccgagatcatgccactgtactccagcctgggagacagagcgagacaccgtctcaaaaaagaaaaaaaaagaatttgaaaaagaaaaaaaagaaggcttacgaaaatggacacttacyggggccttcagggatggtgaggagaactagcaggaagcatccttgggccaggctgtgggaaggagcgaagggcacaggtagggattaggcagtctctatgtagcgcgggacctaaaaggaaggtagacacatcacctaggaaagctctagtttggagatgccccaaactctcacaaatggggtgtgaggcatatgattaacccctcccctgctccacctcatt

SEQ ID NO: 929016 - DNA, 467 bp, Homo sapiens
ggatgccaaacaactggactcctcatacattgttgatagaaatgaaaaataatatagatactttggaaaacagtttggcagtttctaataaagttgaacatatttttactctacaatccaggacacccgctcccaggtatttaccaaaatgaagtgaaaacttacattcaccccaaaacctgtgtgtgawtgtccgtggtggctttattcttaattgccccaaactggaaacaaacccagatgtctttcagttagtgaatagctaaacaaactgtgtctagccacagaatggagtactgcaaaggattataaaggaaagaaactactgatacaggtaatgacatggatgcatctcggattcattatgccaagggaaagaaacaagacttaaaaaggtacatactggttacatactgtatgattccaattatatgacataaaggcaaaattatagacacagaaaacag

SEQ ID NO: 929017 - DNA, 539 bp, Homo sapiens
aaagaataatgacagtcatggcttataacacatcgaatattaaaaaaaatccatacgtttgtagtgataattggagaaggggagtagaggcacgagatcagaggataaaatagggaaggctcccttttttttatagaacactagctaataagtttagaaaatctttgttttgtaacctccaggtatactcatcaatagatgcaaaaataagttggtgaaagattattgtaggatattctcaaagtatcaccccagcggattactgattctaaagggacagtaccttcacagtggagtaggcaggcagccagcatttcaaccaagtgatccaacctaacttcaccaatagtggaacgagctgatgttacatgacttctgaggtgattcacctaagaggtgcrcatcacatatgtaatattcatgccaaacttgtttaactgaatctaataataaggaaacagaaaaccaaaatgtgggacattctgcaaaacaattggcctgaatccttcaataaattcaatgttatttttaaaaaagat

SEQ ID NO: 929018 - DNA, 634 bp, Homo sapiens
agaacatttacatcactccccgcattcttcatgttgtccttttatagccatgccatctcgctttccctcccatccctccttgacccaactagtgtacttctctctggtttttaaattttatcatttccaggatggtatatagatggaatcatacagaatgtaaccttttggaattggcttttttctctcagcattgttctctggagattcctccaagctgctgcatgtatcaacaggttctttcctttttattgctcagtggtattctrtagtatagatgcaccacagtttgttcaaccattcactcattgaaggacttatgggatgtttcttgttttgtactattataataaagcttctatgaacacagctttttgtgtgaatatgttttaatttttttctgggataaataggagtgtgaatatgttttaatttttttcttggataaatatctaggagtgtgaatgtgatttaatttttttctgagataaatatctaggagtgcaattgctaggatgaatggtaattacatgtttagcttttaaagaacctgcaaaactactctccagaatggctgcaccattttgcattcccaacagcaatgtatgagtgacccagtttctctgaattgttc

SEQ ID NO: 929019 - DNA, 560 bp, Homo sapiens
ccacagccagtgaccagctcacggggcacgcagaaaggctggtcccctccttcaagggaggaccactctggttcagtttatgctccagatcctcccacagatcaagctgagcctagactttacctaagaccacatccttgtttaactttttcctccttccttttaaaatttaatttattttmctattttctagagctggagtctcactatattacccaggctggtcttgaactcctggtctcaagcgatcctcccgtctccacctcacaaagtgctgggactacaggggtaagccacccacccaccacgcccagcctttcctttttctttttctattttctccttttcctacatgttccaaatcctccttccttatcccactttccctgcagacttttcctaacacagttctctcaatgcttcgcgagctcttcaatacatccctgcctcaggctctgcctccaggaaacaggacctaaaagacaccgaggcacagaaaactgtgctgcagatagccggtaagtggctgggcaggattggaaccctggcaggctgtgctc

SEQ ID NO: 929020 - DNA, 647 bp, Homo sapiens
cattcccacgtactttgtccaaattctgcacaatagcttttccgcagggtctgttattaccaacaaagatgatgacggtgactaacgtcaccatgctctcccggaagccaggcctgggctcgaacattctgtgcagaatctcactgaatcctttcaacaaccctataaggcaggttctgttaccatccccctcttatagaggaggacccctgaggctcagagagggaatgygactcactccaagtcacacagtgaacaactgagctgaatcccaacccaggcctgtctgattccagagctgggatgtggaccggccatgaatcctcagcctggatgccagccccgagacgggggacccacacctgaactgtctgttcctgaactggaaacaagaatgaatgaatgaataaatgatagaataaatgggtggaggctcaagccaacggcactgatctcaaagcccagaagttctcggcggttagccctccacagaaagccttgaacaccacacagaagtgttcagcgacggacttttccttcctggagaggaggaatgagaagaaggcaaaagccaagagaaaaacaagaggcagaggaaagcagcctggagaatcttcccgtggagtgagcatgattgctttggatac

SEQ ID NO: 929021 - DNA, 585 bp, Homo sapiens
ccttcactgccaaacatacctggggttggatcattggcctgacgtttgcaaattgaggaaccttagggcaaatcagtgaacttctgaactgccttcgtcttcagttatatggggatttccccacttttgagatmcttgtaaggattatatgagatgaagagatgagacaaggtatataaaagtcctagcacagagcgtgtcatataatatggcttcacaagtaccctcatctcctttccagtcgtttttttttttttttttgagaccatctcactctgttgcccaggctggagtgcctcttcatttttatttctttattcagcaagtattgatcaaatgtgctttgtaccaggtactgagctctacgttgggatataatggtgatcaaggagattgtagattctggcagggaaaactgacatcaaacacggcgacccgacatagtgagaccctgtctctactagaagaattttaaaaatcacctaggtgtgggccgggcacggtggctaacgcctgtaatcccagcactttgagatgctgaggcgggtggatcacgaggtcaggagatcaagaccatcctggata

SEQ ID NO: 929022 - DNA, 601 bp, Homo sapiens
ctatgactcaactggtccttcactgccaaacatacctggggttggatcattggcctgacgtttgcaaattgaggaaccttagggcaaatcagtgaacttctgaactgccttcgtcttcagttatatggggatttccccacttttgagatacttgtaaggattatatgagatgaagagatgagacaaggtatataaaagtcctagcacagagcgtgtcatataatatggcttcacaagtaccctcatctcctttccagtcgtttttttttttttttttgagaccatctcactctgttgcccaggctggagtgcctcttcatttttatttctttattcagcaagtattgatcaaatgtgctttgtaccaggtactgagctctwcgttgggatataatggtgatcaaggagattgtagattctggcagggaaaactgacatcaaacacggcgacccgacatagtgagaccctgtctctactagaagaattttaaaaatcacctaggtgtgggccgggcacggtggctaacgcctgtaatcccagcactttgagatgctgaggcgggtggatcacgaggtcaggagatcaagaccatcctggata

SEQ ID NO: 929023 - DNA, 633 bp, Homo sapiens
agcctttcaataacagctagtcaagtatttttttagttggttcctattgatcatcatcttattttagtggaatccattatattgaagatgtcaagttcctcatttcccatacaaagaatgtgagattcatctttcttgaatcttagctgctaagtgttkaaggggacttttggcatcttttcaggaggactataattgggccctctaactaaaaagtctcctatgccccttacataaatgagattttttttttttgaccttgtacccaccaacattggtgggaggctcagaagggactgtgtttgtaactttgtagcactttctaaacagtgacctgttgtgtgggcgttataggacagaccgtggggtggggcgggggatgggggaggtggacaaatgaggtctggatgagaagtgtgaccaggcgtgtttgactcatgcctgtaatccagcagtttgggatgctgaggcaggaggatcacttgagcccaggagtttgaggttacagtaagctatgattgtgccactgggctccagcctgggtgacagaactagaccctgtctctaaaaaaagaagaagaggtgtgtatccttctaaatgataaaacagatcactcccctgcttacataaaa

SEQ ID NO: 929024 - DNA, 771 bp, Homo sapiens
gctgaggcaggaggatcacttgagcccaggagtttgaggttacagtaagctatgattgtgccactgggctccagcctgggtgacagaactagaccctgtctctaaaaaaagaagaagaggtgtgtatccttctaaatgataaaacagatcactcccctgcttacataaaactttccggtggctggccaggcacggtggctcacgcctgtaatcccagcactttgggaggccgtggtgggcagatcacaaggtcaggaaatcgagaccatcctggctaacgtggtgaaatcctgtctctactaaaaacacaaaaaattagccaggtatgatggcatgcacctgtagtcccagctactcgggaggctgaggcaggagaattgcttgaaccagggaggtggaggttgcagtgagctgagattgtcccactgcactccagcctgggtgacagagactctgtctcaaaaaaaaaaaaaaaaaaaaaaattwgatgggtgtggtggcatgtgcccgtaatcccagctactggggagcatgaggcaggagaatcgcttgaacctgggaggcagaggttacagtgagccgagattgcaccactgcagtctgcctgggtgacagagctagactctgtctcaaaaacagaaaaacaaaaaacaactttccagtggcttctcactgctctgagaataaactccaggctcttccattgcaaccaacaggatctgttgattcgaccccagcccctctttccaggccctcatcactttgatcctc

SEQ ID NO: 929025 - DNA, 784 bp, Homo sapiens
taaaatacaaattaaaaatcagctttattgaggtaaatgatacgatccacccattagaagtaaacgatgtgtggccgggcacggtggctcacgcctgtaatcccagcactttgggaggccgaggcaggcggatcacgaggtcaggagatcgagaccatcctggctaacacggtgaaaccccgtctctactaaaaatacaaaaaaaaaaaaaaaaaaaattagccgggcgtggtggcgggcgcctgtattcccagctactcgggagtctgaggcgggagaatggcgtgaacccaggaggtggagcttgcagtgagccgagatcgcaccactgcactccagcctgggtgacagagcgagactccgtctcaaaaaaagaaaaaagtacacaatgtgttttggccaaggtatacagggtcacaaccaccacccgtcaaagtgtagacattgtcagcaccgaatgtcattactgcyctggtggccagtccctctccctccagctcccggccacacccctgcaccagggagcttctttctgttgctctgattttgctttttcagcaaaattatggcgccgtggcagggtgtggtcttgggtgtctggcttctcactctgcgtcatgtgttggagactcagccgtgttgtggagcgtgtttgtttattctttcaaatcctcatgcagcattccattctgtggatacgtgacaacgggtttgtcccaggaatcggttctacaggcagctaaccccaaatgagtggtccacggaggacgatgcctcccagcat

SEQ ID NO: 929026 - DNA, 527 bp, Homo sapiens
ctgtgcctggcctctgtttttttttaaactaagtaattatcttctggagagatatattgagactatgtaaatagcctattccccataaaaacttcacccagtagtttttgcctctattgatgattctttcttgagacaagtattttatgatggttgccaaaggtgaactttctaactccactgtgctttccgcatttattagttggcrttgtactgtaaggaagagatttcccttttcctccatttatttatttatttgcatacacacatgcatatgtgtgtgtataatgatatatgtgtatgttatatagttgatatatatttatatgtgtgtcatgcagatatacgatctctatctagatacatattatgtatatatgatatatagatgtagatatgatatgattatatcactgatctataatatagacacacatatacattggcatggactcaggaattcttattttatgcagtggattaaaatgctttcctatcagttttatttggatgctcaaactgtccca

SEQ ID NO: 929027 - DNA, 605 bp, Homo sapiens
ataactaaggtcattaatgggcagggaagtgtctggtcaggcttgggttttcaggtaatgattctggctgcaaagtggagaccagagaagaggaacaattaaaataattaacatgtgtaggtttttctttaaaaaaaaaaaaaaagaaagaaacagccaggcattttacatgcctaatttgaacctcacagcaaccgagtgaaataggcattattggctgggcgcggtggttcacgcctktaatcccagcactttgggaggccgaggtgggcagatcactaggtcaggagatcgagaccatcctggctaacatggtaaaaccccgtctctactaaaaaaatacaaaaaattagccgggcgtggtgacgggcgcctgtagtcccagctacttgggaggctgaggcaggagaatagcatgaacccgggaggtggagcttgcagtgagccgagatcgagccactgcactccagcctgggcgacagagcgagactccctctcaaaaaaaaaagaaataggcattattaattttaattttagcataaaaagaaatatatttgcattcatttaaaaatctttcctcattggccaggcttgaccagctggga

SEQ ID NO: 929028 - DNA, 605 bp, Homo sapiens
ataactaaggtcattaatgggcagggaagtgtctggtcaggcttgggttttcaggtaatgattctggctgcaaagtggagaccagagaagaggaacaattaaaataattaacatgtgtaggtttttctttaaaaaaaaaaaaaaagaaagaaacagccaggcattttacatgcctaatttgaacctcacagcaaccgagtgaaataggcattattggctgggcgcggtggttcacgcctgtaatcccagcactttgggaggccgaggtgggcagatcactaggtcaggagatcgagaccatcctggctaacayggtaaaaccccgtctctactaaaaaaatacaaaaaattagccgggcgtggtgacgggcgcctgtagtcccagctacttgggaggctgaggcaggagaatagcatgaacccgggaggtggagcttgcagtgagccgagatcgagccactgcactccagcctgggcgacagagcgagactccctctcaaaaaaaaaagaaataggcattattaattttaattttagcataaaaagaaatatatttgcattcatttaaaaatctttcctcattggccaggcttgaccagctggga

SEQ ID NO: 929029 - DNA, 605 bp, Homo sapiens
ataactaaggtcattaatgggcagggaagtgtctggtcaggcttgggttttcaggtaatgattctggctgcaaagtggagaccagagaagaggaacaattaaaataattaacatgtgtaggtttttctttaaaaaaaaaaaaaaagaaagaaacagccaggcattttacatgcctaatttgaacctcacagcaaccgagtgaaataggcattattggctgggcgcggtggttcacgcctgtaatcccagcactttgggaggccgaggtgggcagatcactaggtcaggagatcgagaccatcctggctaacatggtraaaccccgtctctactaaaaaaatacaaaaaattagccgggcgtggtgacgggcgcctgtagtcccagctacttgggaggctgaggcaggagaatagcatgaacccgggaggtggagcttgcagtgagccgagatcgagccactgcactccagcctgggcgacagagcgagactccctctcaaaaaaaaaagaaataggcattattaattttaattttagcataaaaagaaatatatttgcattcatttaaaaatctttcctcattggccaggcttgaccagctggga

SEQ ID NO: 929030 - DNA, 641 bp, Homo sapiens
gaggaggtctgtggttcgtgaccctataatggaggggaggtagttggcccccagggacagaggagtcaaggtagcttgctggaaaactctgggtctttgtaatcatcatttcgaatttcagcatctctgcttaccaggaggccggccctgggcttgtcttgtcaccacactaagccatagcttgctttttttttttttttttctgagacggagtctcgctctgtcgcccaggctagtgtgcagtggcgcaatctcggctcactgcaagctccgcctcccgggttcacgccattctcccgcctcagcctcccaagtagctgggactacaggcgcgygacaccacgcccgggtaattttttgtattttttagtagagacagggtttcatcgtgttagccaggatggtctcgatctcctgaccttgtgatccgcccgcctcggcctcccaaagtgctgggattacaggcgtgagccaccgcccccggccagccacaggtttcttatctgtaaaatggggatgagaacagcctgacctcctgggttgccatggtgattgagaataacataaacgaccggcctgtgtaggtgctgatgaagggttttctgagggaacaaaaggctgaggccttggctggacgtggt

SEQ ID NO: 929031 - DNA, 636 bp, Homo sapiens
caggtagtgcctgcgtatcatgcagaatcatctgtgaaccaggccctagtcttttttcatctgtcaactgatcatagggaactccccatgaggccattggtacaggctgggggaaagaaggcagggtggcagcagtggagaccatgggcagttgagccacttccttatgtaactaacttgtgctttcaggacttgcttgagctcaatcacacatatgccacttccatttgatgatggaatgctgctgtgcacracccgctttatggctcgatgggtcagaaagcacccagttcatgatgggcagttcaggtcacatggtgacttgatgacccatagtcaaacgttcagtttccaccaaagcccagtaacaggccaagagctgtctctcaaaaggaaagtagttatctgcagaagatggcagggccttactccaaaatcctagaggcctctgctgtgattcacctatgggagcctgccagaggctccaaacagcatccctatctgccactgacacctcaagcaccattggatctgctgggtcgtatggcccaagtggtagagcagcttgcacagcaacctggacctgttgcagagccttctcctgttctggaccccactcaaaactggcagcctttt

SEQ ID NO: 929032 - DNA, 637 bp, Homo sapiens
caaaatcctagaggcctctgctgtgattcacctatgggagcctgccagaggctccaaacagcatccctatctgccactgacacctcaagcaccattggatctgctgggtcgtatggcccaagtggtagagcagcttgcacagcaacctggacctgttgcagagccttctcctgttctggaccccactcaaaactggcagccttttgggtcgcttgataaatgagccagagtaacgcacccagatgaggaatgtgttgcctccagaatcctaattggcccactaggcrttgtgcctctttcttgattgtaggaggggccaaatgcagcaacttctccttcaccttagaaggaataccttaacaggcctaacaccactagacccctgtaaattttaccaaggtagaagtttcctgaattttagtcaaatttatttcccatcctctggcacacaaatgtctcaccaataagtccaacgtgtttgctacttcttgctcactggatccaatcagcaaaatgtcttcagtgcaatggagcagtgtgatatcttgcagaagcgaaagcaatcaagttctctctgaatcagattatgacacaaagctggagaattgatatacccctgagcttaggacaataaaga

SEQ ID NO: 929033 - DNA, 637 bp, Homo sapiens
caaaatcctagaggcctctgctgtgattcacctatgggagcctgccagaggctccaaacagcatccctatctgccactgacacctcaagcaccattggatctgctgggtcgtatggcccaagtggtagagcagcttgcacagcaacctggacctgttgcagagccttctcctgttctggaccccactcaaaactggcagccttttgggtcgcttgataaatgagccagagtaacgcacccagatgaggaatgtgttgcctccagaatcctaattggcccactaggcgttgtgcctctttcttgattgtaggaggggccaaatgcagcaacttctccttcaccttagaaggaataccttaacaggcctaacaccactagacccctrtaaattttaccaaggtagaagtttcctgaattttagtcaaatttatttcccatcctctggcacacaaatgtctcaccaataagtccaacgtgtttgctacttcttgctcactggatccaatcagcaaaatgtcttcagtgcaatggagcagtgtgatatcttgcagaagcgaaagcaatcaagttctctctgaatcagattatgacacaaagctggagaattgatatacccctgagcttaggacaataaaga

SEQ ID NO: 929034 - DNA, 613 bp, Homo sapiens
tagaatccctgagttcatcattttctttcatcactttgtccggtgaacttagaagcaaccaatcagcttcattatgttccttggttctccacatatagtcagaggtattcagtctagagtcactgaactcccctctcaggagcgctgaatcaggagtgtcaaatgcatttattgtgcataactctccaaatagctcatgccaaggactcccagtgttctccatactattagaagtagagtccttagcattttgggatctaatcatattaagcagccaactccagaaaccctaaaaccaatgaaagaactccatccttaatattgtgttcctctagaaccactcctgrtaccaaaatctgtattcgtcggggttctctagagcaacagaactaataggatatatatatataggggagtttattaaggagtgttaaactcacacaatcacaaggtcccacagtaggctgtctgcaagccgaggagcaaggaagccagtccgagtcccaaagctaaagaacttgaagtctgatgttcgagggcaggaagcatccagcatgggacaaagatgtaggttgagaggctaaggcagtctcgccttctcacatttttcttc

SEQ ID NO: 929035 - DNA, 637 bp, Homo sapiens
ctgaaggatgcaactgacgttaactgagatggggaagatgcaggtggggcaggtccagaggaaaagatcagaacttcgattttagaaatgtggaggccaggagcagtgctcattaactggaatcccagcactttgggaggccgaggtgggtggatcacttgaggtcaggagtttgagaccaggctggctgacacggtgaaactccgtctctactaaaaatwcaaaaaattagccgagcatggtggtggcacctgtagtcccagatactcaggaggctgaggcaggagaatcacgtgaacccaagaggtggagcttgcagtgagctgagatcacgccactgcactccagcctgggtgacagagccaggctcctttccatctcaaaaagaaaaaaaaaaagaaagaaatgttgaatgtgaggtatgtatttcatcaacatccaagtggagagattaagaattgaaatgaatacacagtatacattaataataatagctgtatataaggctgggcacagtggctcatgtctgtaatcccagcactttgcgagtctgaggcaggaggactgcttgagctcagaagatcgagaccaacctggtcaacatggtaaagccccttttttacaaaacaaagtacaa

SEQ ID NO: 929036 - DNA, 539 bp, Homo sapiens
tgttaaccttcagccaagacaaaacctcagttcagctacttacctagggatgggtctcaggctgaagactgctctctaccatccttgaagcaggaaaaaaactcgaacttgtcttccctgctgggagcaagctcaaactccataaaagagttgtcagccttccatcatcacggacccaggaaatcttgccttccttcttggaagcaaataaaactccaaaagaaggrgagggggagttgtacatcaaataaactttagatcacgaccaagttttgagagatcagggactctctggagggggtgctcccagacctcagcaaattgtcctgttggtttgagccataaggttagctcatgctgctaccaagcaccaatagatctgtcaaaggtcaggggcacctcaactcagaatccctccatggttaccaaaatgtgaaccccccaaatctgagacaggtctcagttaatttagaaagtttattgttccaaggttgaagatgcacacccgtgacacagcctcaggatgtcctgacgacatg

SEQ ID NO: 929037 - DNA, 752 bp, Homo sapiens
gagggaggaaggctggccggccaagtgctgggcaccgagaaggggaaaacagaagccttggttctttaagttggaaattagtcgttaaaaggaaaggatggggcctggtgtgatggctcacgcctgtaatcccagcactttgcgaggccaaggtgggtggactgcctgaggtcaggagttcaggaccagcctggccaacatggcaaaaccctgtctctacaaaaaatacaaaaattaaccaggcttggtggcgggcaactgtaatcccagttactgtggaggctgaggcaggagaatcgcttgaacccgggaggtggaggctgcagtgagccaagaytgcgccactgcactccagcctgggcaacagagtgagactccatctcaaaaaaaaaaaaaaggaaaggatggaaggctgggtgtggtggctcatgcctgtaatcccagcactttggaaggctgaggtgggaggatcgcctgaacccaggagtttgagatcagcctgggcaacatagcaagaccctgtctctaaaaataaataaataaacaaacccataaataaatgggaaaagatgctgcattcatcctccttttttaggaggaactgcgtagttcatctcagcgttgaggaaagttctttacagaagaatgccagctaataaaagtagaaataatgactgaattagaaagtcaccattttggaatcaccaacagaaatgacggagtcaaacaacaatcaggaaaggccgtgaaat

SEQ ID NO: 929038 - DNA, 550 bp, Homo sapiens
tgcctcagtttccccatttgttaagcatgaattatcactgtcactatctgccaggactgtgaagggggtgtaaatgcatgaacatcataaagtgcttagaagcatgcctggtacaaagaaagttctctaggaaaacaaaaaacaaaaaacaaacaaaaaaaaacaaaacagaaatgtatctagaggtcagataccagtcccacatcgagtgcagataatgggctaagtaaccaaggagcaatggagacaaggatgtaaatggggtggggcacgatggctcacmcctgtaatcccagcactttgggaggctgaggcgggtggatcactttaggtctggagtttgagaccagcctgggcaacatggcgaaaccccgtctctactaaaaatacaaaaattagccaggtgtggtggtgtgtgccagtaatcccatctactctggaggctgaggcaggagaatcacttgaacccaggaggcggagtttgcagtgagttaagattgcaccactgcactccagcctgggtgtcagagcaagactccatctcaaaaag

SEQ ID NO: 929039 - DNA, 624 bp, Homo sapiens
gaggcagagagatagagagagttggggagatgagggagaaagggatggagccacccagaaaggatggagagagaaggagcaacacacacagatggagggacagagagggagaggagagaaggtggggcgagggaaaaatgagaagggaaacaagacaagagaaaacagggagagaacctaaggacaacrgaaaggagacatggatgaatgaatgagcgagtgaaggaatgaataatctaaggcatgtataaaataaatggtgaggctggttgcagtggctcacacctgtcatcccaacaatttgggaggctgaggcaggaggatggcttgagcccaggagtttgagaccagcctgggcaacatagtgagtctctcattagtacaaaaaatacaaaaattaaccaggcgtggtggtgcatgtctgtggtcccagctacttgggaggctgaggcaggaggattgactgacctgggaggtcgaggctgcagtgagctgattgtgccactgcactccagcctgggcaacagagcaagatcatgtctcagtaaataagcaaataaataaataaaggacaaatggatgagccagggaccaggagcgaggacgcaggctttcagatgctgt

SEQ ID NO: 929040 - DNA, 677 bp, Homo sapiens
acatgtctgcgttctggacgccaatatacagtcataatagaaagaaagtaaatctacattttctgttgtcaatcatgtttattaaattgaaaaaaaagtctcctctcccaggcagtctgaaaagtgggaggaagatgaatttattctatgttggaggactaggctaaaaatgtaattaacagatgcaattatgcattctgatgcaaagcgctccaagctgacagggaacttatagtggagctcccaggccacaggctccaaaacctctaacaactttattcttatacgctggcctacggttcaatcttgcttcctttgagtatcttctgcaaataaaaggccctattcttcagcttcccccagctttattcggaatgaaaacaccactttgtgcccacgttgtgttaaaataacagatttgtgttcgttcctgtaggtttctgatggcaggagggaggcggtctatcttcactgcggatggcgaggtgccttttggaggagsaggatggagagaaagggtctccaacagcgaacctttgtcctgcaatgcaaatgaacctctgcaaaacagggcgcagacaatgccagcctagtcctctgcgcgaagcgatccatctgcagctattttgttaacctgatgtttcttacattctttctctcatacaaaatacttgatt

SEQ ID NO: 929041 - DNA, 538 bp, Homo sapiens
ctttgtatccccattgactttgtaaccagaaatctctcatgggcctatttataactgaaacactactactagtaataatagcaataactcaatcccaatagtccaacaaaatagctatgtgtcttggatcttagatataggaggctcaaaataatcaaagtgtaagatcccaaacaaattgcctacctgaaaactctctggatagaaatgaaatatcaagacaagcaggtactgctcacagagttatagaccactatttttcagttgcagtccattagtgggtggcwaattcaatttagtggaccatgaccagcatttaaaaatatggaataaaatagtatagaaaagaaagtattggccaggcacaggggctcatgtgcctttgagataattccagcactttgagaggctgaagtgggaggattgcttgagcccaggagttcgagaccagcctgggcaaaatggcaagaccctgtctctaaaaaaaataaataaataaaaaataaaaataaaaataaaaaaattagctgggcgtggc

SEQ ID NO: 929042 - DNA, 538 bp, Homo sapiens
ctttgtatccccattgactttgtaaccagaaatctctcatgggcctatttataactgaaacactactactagtaataatagcaataactcaatcccaatagtccaacaaaatagctatgtgtcttggatcttagatataggaggctcaaaataatcaaagtgtaagatcccaaacaaattgcctacctgaaaactctctggatagaaatgaaatatcaagacaagcaggtactgctcacagagttatagaccactatttttcagttgcagtccattagtgggtggcaaattcaatttagtggaccatgaccagcatttaaaaatatggaataaaatagtatagaaaagaaagtattggccrggcacaggggctcatgtgcctttgagataattccagcactttgagaggctgaagtgggaggattgcttgagcccaggagttcgagaccagcctgggcaaaatggcaagaccctgtctctaaaaaaaataaataaataaaaaataaaaataaaaataaaaaaattagctgggcgtggc

SEQ ID NO: 929043 - DNA, 538 bp, Homo sapiens
ctttgtatccccattgactttgtaaccagaaatctctcatgggcctatttataactgaaacactactactagtaataatagcaataactcaatcccaatagtccaacaaaatagctatgtgtcttggatcttagatataggaggctcaaaataatcaaagtgtaagatcccaaacaaattgcctacctgaaaactctctggatagaaatgaaatatcaagacaagcaggtactgctcacagagttatagaccactatttttcagttgcagtccattagtgggtggcaaattcaatttagtggaccatgaccagcatttaaaaatatggaataaaatagtatagaaaagaaagtattggccaggcacaggggctcrtgtgcctttgagataattccagcactttgagaggctgaagtgggaggattgcttgagcccaggagttcgagaccagcctgggcaaaatggcaagaccctgtctctaaaaaaaataaataaataaaaaataaaaataaaaataaaaaaattagctgggcgtggc

SEQ ID NO: 929044 - DNA, 696 bp, Homo sapiens
tttggttctgtgtcctcacccaaatctcatcttgaactgtaatccccacatgttgagggtggggcctggtgggaagtgattggatgatgggggcagttcccccatgctgttcttgtgacagggagtgagttctcacaagagttgatcgttttaaagtgtggcacttccttgtgctctcactttctctcacctgctaccatgtaagatatgccttgctttcccttcaccttccaccatgattataagtttcctgatgcttccccacccacgtggaactgtgagtcaattaaacctcttttgtttatgaattacccagtctcaggaagtatctttatagcagtgtgaaaacagactaatacagatrattggtactggcaaagtggggtactgctataaagataacctgaaaatgtggaagtgactcttgaattgggtaacaggcagaggttggaacagtttggggactcagaagaagacaagaagatgagggaaagtttggaacttcttagagacttgttgaatggttttgaccaaaatgctgatagtgatatgaacaatgaagtcgaggctgaggttgtcttagatggaaatgaggaacttattgggaactggaatcgaggtcactcatgctatgctttagcaaagagactggtgccatttttcccctgcccagagacctgcggaactttgaatttg

SEQ ID NO: 929045 - DNA, 566 bp, Homo sapiens
ttcacctatttattatccagaattgtaaaatggcagaattcaattcaaatatttttaaagcatctcccaaagtttggatatttgtcccctccaaacatcatgttgaaagtggatccccagtgttggagatgaggctgagttggaggtgttggcatcatgggagcggatccctyctgaatagatttatgtcctcactgtggggaaggggaagtgaatgagtttttgctctattggttcccataagagctggttgttaaaaagagcctgccatttcttccccaccttgcttcctgtcttgccatgtgacctctgtacatgccagctccccttcaccttccaccatgagtggaaatagcctgaggtttacaccagatgctcagcgttccagccagcagagttgtgagccaaataaaccttttttatttataaattatcccatttcagttatttctttttcttttcttttactttttttcttgagacaaggtctcactctgtcacccaggctgtagtgtagtgggatgatcacagctcactatagccttgaccacctgggctcagatgat

SEQ ID NO: 929046 - DNA, 712 bp, Homo sapiens
atattcccactgttacaaatcagtaagaaataggcaaacaacccaatataaatatagacaaatgacataaatattctcttcacagaagaatacttaatgtccaataaatctgtgaaaaagacaggaaaatacaaataattcagactacagtaaraaactatggaaaactattaaattattagaactttaaaaatctgataatactaagcatttggcaagggtgagggacaaggtgcactcttattcaatgttaatgggaacacaaattgtcacaacactttggaaaacaattgggctttaggctgtgaagttgaatatgtgcatacgctacaatttaagaatttcattcctaatatatactccagagaaactcttacccacgtggccaaaaagacacatacaagaatgctcataacagcatcactcataatagcagaactctaagaacaactcagatatccattaacaggaaaatggataatttgtggtatagtcatacaaccgaatgttatatatacagcagtgaaaatgaatcagtcacatggatgcatttttacaacataattttgaatttaaaacaagcaagttatggaagaatacatatagtataatacaatttcactaaagcccaaagtcaagaaaaactaatttttttgtttctaaagaatatacagattaaaacaaaacaaaaagtaatttaaaagggaaagat

SEQ ID NO: 929047 - DNA, 734 bp, Homo sapiens
attcacacatattttgtatgttatatgtattatatactatacttttacaataaagcaacctagaagaaatgttaagaaagtcataaagaagaaaaaatatattcttcattaaatgggagttgatcatcaaagtagtcttcctccttgtgttcatgttgagtaggctgaggaagaacaagaggagttgattttgctgtattgtgggtgacagaggtggaagcgttgaaggaggtagaaggggaggcaggagaggcaggggatgatctgtgaaactttacagaaatacatggtaatttctgtctgactttttaatttttttagtatctctgaaaatgtttctacattgagacaaatttttcttccatcatttgctttagtttcaaaaaagggcctatgmcctaaaagaagtcaaaagcagtcctgaataatcagaactcctctgcagattgtctaatgtcaatttgttttctggcagtgcttcttctatgttttctttctcattgtctggcactgattagaagcactcatctacatcatgtcatcttctgttaatttctctgctgtggtgtctaatagctttttaatttctccaagatccaactcttaaaacccctcatccttccccgccccacttttttttttttttttttttttttttgccatatccaccaagtctttcattatttcctttatcagcactttcataaatcctctgaagacacacataacttctg

SEQ ID NO: 929048 - DNA, 547 bp, Homo sapiens
ttacaggatgcaacaaaagcaattctaagaacaaaatttatagcaataaatgcctacatcaaaaaagaagatctcaaattaacaacctaatattgtatctcaaataaccagaaaaaaagaaactaatcccaaagttaacagaaggaagaaaataaagaccagagmagaaataaatgaattagaaacttgaaaaacaatacaatgaaacaacaacaacaaaaaaactacagtttttttttgtaaagataacaaaactggcaaacctttagctagactaagaaaagactcagtaaataagatcagaaataaaacaggaaacattacaactgatgccacaggaatgcaaagaaccataagagcctactatgaacaactatttgccaacaaattgaataacttagaagaaatggatacattcctagacaaatgcaacctaccaaaactgaatcataaagaaatagaatatctgagcagaacaataatgaataagaagattgaatctgtgataaaatgtctctcattgaagaaaagctcagaacctaatggc

SEQ ID NO: 929049 - DNA, 580 bp, Homo sapiens
ggtcgctaggccagcagcagaaacattacctggtatgcaggttaatttcacgtgccaacttgactgggcaaacggatgcccaggcagccggtaaaacattacttctgggtgtgccaagaagagatcagcatttgaattagtagacttcactaactctcttcctgtttgccctgagaatacttgcccatggtgcttgcagctgcagtgtttaccccaagataaccttgccacgaaagatctcgttttttaaattttcacatcrttctagtatatcgactttggaaacaaaagacatcatcctatttataggattctgtttttagtagtggcatttccatttacaaaatatagtaattctcaattgctgaaaatgtcaaatcctagaaaacatagcattcctatgagtgatgttaacatcgttctctaacagttgatggaagattcatttgatgaatccgatttttctgaaatagatgattctgataattcagatggttgtgatgttagttctgtttagaaataatattttctattttattttcacactgaaaatcagtccgatttgctttagcctccaaga

SEQ ID NO: 929050 - DNA, 472 bp, Homo sapiens
tatatttaatggtgaaaagactgaatgcattactcaaaattggaaacacggcaaatgtatctgttctcactgctcttattcaacttagtgcttgtagttctagccagtaaaaataaaataagaaaataaaataaaagacayacagatttgaaagaaaaaaaatctgttcttattatcagatgacatgtttgtctatgtagaaaatcctaaagaatctaacaaaaaattaatctacaactaataagtttgcaaatgtttcaagatacaataggaatataaacaaaccaatttcatttctatatattagcaatgaacacatgtacacttaaaaacactgtataaataacagcaaaaattaagtacttagatacaaatctaacaagttatctattcatatatagtatcacctatatacagaatactacaaattgttgaaagaaatacaagatctgaataaaacagacattctatg

SEQ ID NO: 929051 - DNA, 641 bp, Homo sapiens
tctccacatcctgaccaacatatgctcttccctctttctgacaaaagtagttctaactggggtgagattatctcttactgtggctttgatttgcatttccctgataattaatgatgttgaacattttttatgtacctactggccatttgtatgtcttcttttaagaaatgtctattcagatttttggcccatttttaagctggatttttttgtattgtttgagctctttatatattctggttattaatctttttcagatggagagtgtgcaaatattttcttccactctgtggattatgtttctttgttgattattctctttgctgtgtagaagacttttagcttkatggcattacatatatgtatttttgcttttgttgtctgcttttgaggtcttacagaaaaagtctttgcccagataaatgtcctggactctttccttaccaatttttttctggtagtttcatggtttggggacttagattcacatctttcattcatttggatttgatttttgtatatagtgagagacaggggtccaattttattattctgcacacagtcatccagttttctcagcaccatttattgaagaaattgctgttttcctattgtgtgtcttggtgcctttgtcaataaaa

SEQ ID NO: 929052 - DNA, 619 bp, Homo sapiens
atttttgggaactctaggaaataattcatcttctcgtctttttttttttttttttttttttttttttgaaacggagtctcgctgtcccccaggctggagtgcaggggcgcaatctcggttcactgcaggctccgccccctggggttcacgccattttcctgcctcagcctcccgagtagctgggactacaggcgcccgccacctcgcccggctaattttttgtatttttagtagagacggggtttcaccgtgttagccaggatggtctcgatctcctgacctcgtgatccgcccgcctcggcctcccaaagtgctgggattacaggcgtgagccaccgcgcccggccgtcatcttctcgtcttctccgtcttccagagactgcccagttccttggctcattgttagcatcactctgacactagttattctgcccccttctttcacattaaaaaaaaaacaaaascaaaaagacttccaattgcaatgacacgtcaggataatctagaataatatcattattttaaggtcagtaaaatatcaaacttatttgtgtttttagccttacatcttcttgctatgtacatgctataacatattcatttttttcagagattagac

SEQ ID NO: 929053 - DNA, 772 bp, Homo sapiens
cagaccttaacgtatgatacatataaaataatttaactttttcttgtaatgtcatgactagtctcagctttttggaagcacttccttcctcaccagtggcactttgtattggtcccatagtgttattctaggtttatggtattgcatgagacactaacactataagaactgcaagagatcatcttttactacaatatgcaatttactggagagacaaactgctcatgcagagatgattagtgtgaaatggtgttttaagcagattgagctcactgcaatagcaatgggagctggctatgaaattattacggtaatatagtatacactaaagttaactttatgcagttgtgatttaatgctacacctttacatttgtttatatttttctcagttgtaaatgkttccatgtctagtctgtgtttgtgcataagttttgataaattttcactttttataatagatttgtatacattttattatagcaaatgatgaatagtatgtacatacatttttgcatctaggacatacctgaccttttttttaaactttttaaaaatatttctagactacaggtttatatgtatatttttttcaacgtgtcacaaatcttcaaaaaatcttccagtatatttattgaaaaaaatccacatataggtagacctgtgcagttcaaatatgtgttgctaaagtcaactgtattaaaatatgggtcagaaaactttttatataaagagctagataataaatattttagactttgtgggctgtatgt

SEQ ID NO: 929054 - DNA, 552 bp, Homo sapiens
agttatttgtgtattttagatactagtcccttaccagacacgttttgcagctattttctctcagtctgtggtttgtcttttcttttctttttaaactgtgccctaatatgcctttttttttttgttccagcataccattcaggatatcacattaaatttaatagtcatttctccttaggctcctttggctttcagtttctcagacttttttttgttttaggtggctttcacagtgttgccaattattggtcaggtatttcatagactgtctcccacttgggatttgtctgatgtttttctcataattaaattatggtaattatttttgagagkaatcccactaagatataatgtcattctcacaatatactttaagcatgcgtactatcagtatgacttgccactcttgatgttaacctttatcactgggcttgaggcatgtcaggtttctccactatatagttattcctttttctctttttatataatcctctttatagccaccatgtatatagttcacactaaaggagtggaaagttacactctgcgttc

SEQ ID NO: 929055 - DNA, 554 bp, Homo sapiens
aactaaatataagttcttattgatgtatccaactctaatccattaccatatggatccttctagtcttcccttgcttatttgagcctttcattttagcagcaagaagtctgattccaaccatttgccatcaatttgcctaattgttcaattctagtatgtatgtttagtgacttcaaaattgctaatctgtaccattaagggaaacaactttatcagctacagtacagtgtacatacaatttatttccctttaactttacagattacactcattcccaatgttaagtgggtcagcaccttattccctaaccaccttcagtgaagttgttttataaacytgtcatatacttagacttgtcactttctgcattccatccttgtattctccaaactaattttttttaaatttgtacctgttaaggtttatattttgccataaaatcctatggattttgataatgcttaatatcttgcattcaccactactgtattatacaaaatattttcaccaccctaaaaattcccctgtgttttatatatttagctagtccttct

SEQ ID NO: 929056 - DNA, 613 bp, Homo sapiens
gattgggctaaggaatccaggccttctcaatagtctttatcttgcttagattgtagaaccatcattacaggcaattgaaggttagctttctcattgtcattattttcttgtggcttttcatactactctaaactagggtgaacaaagcaaatttatttatggtccttcaatgttggggacccataggggttcccactggtccactctacttccaagagtgttgcattaagacttttatcttcatcctatcaatgtctgatttattcatctaatttcttaataactatttaaatatttcttttcttttcttttytttttttgagacagagtctagctctatcacccaggctggagtacaatggcacaatctccactcactgcaacctctgcctctagggttgaagcgattctcctgcctcagcttcccgattaatggggactacaggcacgtgccaccacacccagctaatttttgtatttttagtagagatggggtttcatcatattggtcaggctggtctcaaactcctgacctcaagtgatccacccatcttggcctcccaaagggctgggattacaggcctgagccacagtgcccggcctatttaaagat

SEQ ID NO: 929057 - DNA, 613 bp, Homo sapiens
gattgggctaaggaatccaggccttctcaatagtctttatcttgcttagattgtagaaccatcattacaggcaattgaaggttagctttctcattgtcattattttcttgtggcttttcatactactctaaactagggtgaacaaagcaaatttatttatggtccttcaatgttggggacccataggggttcccactggtccactctacttccaagagtgttgcattaagacttttatcttcatcctatcaatgtctgatttattcatctaatttcttaataactatttaaatatttcttttcttttcttttttttttttgagacagagtctagctctatcacccaggctggagtacaatggcacaatctccactcactgcaacctctgcctctagggttgaagcgattctcctgcctcagcttccygattaatggggactacaggcacgtgccaccacacccagctaatttttgtatttttagtagagatggggtttcatcatattggtcaggctggtctcaaactcctgacctcaagtgatccacccatcttggcctcccaaagggctgggattacaggcctgagccacagtgcccggcctatttaaagat

SEQ ID NO: 929058 - DNA, 672 bp, Homo sapiens
ggcattgacacaggggaggactgggggttctgtaggcagatgctatgaaaggagaaaaagccaattaagcctagcatatttgcgataggatgattgtaatgatgggctcaggaatctaagctggtgtgggagaagggaaggcaaaagggcatgatggcaaaaatgtggaaaggatcatagatcaaaaagcctgacccaggcacagtggctcatgcctgtaatcctatcactttgggaggctgaggcaggaagatcatttgagctcaggagtttaaaaccagcttgagaattatagcaatacctccatctctaccccccmaaaaaaaaaaaaaaaaaaaattagctaggcatgatggcatgcacctgttgcttgtgaggctgagtggggaggatagctggagcccaggagttcgagattgcagattgcagtgagccatgatgacattactgcactctaccctgggcaacaaagtgagaccctctctcaaaaaaagaaaaaaaaaatctaatgaagctaagcaggaaagctggaaggaagagataatggatgactgatatggtttggctgtgtccacacccaaatttcatcttgaattgtagctcccataattcccacatgttgtgggagggaccctgtgggagatcattgaatcatgggggtggtttccccca

SEQ ID NO: 929059 - DNA, 598 bp, Homo sapiens
cagctgaaagatctagagagggcaggctttatgtaaggaaaagattttaggaaaactcaaagacatcaggagaaacaaaaagacactttggtatctacaactacagcaaacattaagcatagaccatctacttgtcagagtatacaaccatatgctgaaaacctatttacctcagttcctattactcaccatattacatagtacatccaacaagaaattataagacatgtmaaaaggcaagaaaaaacacagtaaaaagaaagaaagcaagtatccgaaccagactcacatatagcacaggttttttttgaattaccagacaggaaattaaaaataacgattgttactatgttaagggctccattagtcttgctaacggtctatcaattttgcaagtgggcgaaggatatgaacagacacttctcaaaagaagacatttatgcagtcaaaagacacatgaaaaaatgctcatcatcactgaccatcagagaaatgcaaatcaaaaccacaatgagataccatctcacaccagttagaatggcgatcattaaaaagtcaggaaacaacaggtgctggagaggatgtggagaaataggaa

SEQ ID NO: 929060 - DNA, 686 bp, Homo sapiens
tgccgatgcaagagatgggtgagcatggtcttgggtagcttcacccctgtggctttgcaggctacagcctccctcctggctgctttcatgggctggcactgagtgtctgtggcttttccaggtacacagtgcaagcagtctgtggatctactattctgggttctggaggatggcagccctctctcacaactccactaggcaatgccccagtaggaactctgtgttgggactccaaccctacatttcccttctgcactgccctaggagaggttctccatgagatccccacccctacagcaaacttttgcyggcacatccaggcatttctatacatcttctgaaatctaagtggaggttctcaaacctcaattcttaacttctgtggacctactggctcagtaccatgtggaagctgccaaggcttggggcttttaccctctgaagccacaacccgagctgtacattggctccctttcagccatagctggagtggctgggacacagggcaccaaatccctaggctgcacacagcatggagaccctggacctagcccatgaaaccattttttcctcctgggcctctgggcctgtgatgggagggggtgctgtgaaggtctctgacatggcctggagacattttcccattgtcttgggagttaacattaggatccttgctacttatgtaa

SEQ ID NO: 929061 - DNA, 638 bp, Homo sapiens
tttaaattcatctactagacagtttaaatttaatgaccaatttctttttaataatcttagcaggcccccctagagtttcagccatttaaacagaacataacagaaatttccaaagaaataaaaggtgatttctttatacagcttctcacattcaaacacatttgcatacatggcccatctgaaaagctagaactaatgaaattatgaatgagattctcatttttctattctcagaatcctctccctcctggcatctttcaaaactctaatctgaaattattccctccaggaagttatccttgattaatcactcccaactctaattatgtatttcttcattatataaacaagagctgtggatacagttccagttaggttcaccttctctcrttcatatatggatttaaagtttcctgagtcttgggatgtgagtgtgttcttgggcagggatgtcttctgtctctgtgtagccattccttccctctaccctcatccccaggactgctttaagcaaagacaaaagaggaacttatttactggtgtaataaaaaatcctgggccctgcaaattgccagaactgaagtgaaatttgagctctgctgatactagcggtatgggggaaaagttaatttttttaa

SEQ ID NO: 929062 - DNA, 785 bp, Homo sapiens
ttcttttctgagtgaaaccaagaacccaccaagctaagctccagttttggggtgcatctgcatcactacaacatggatgaaccttgaaaacattatgctaagcaaaataagccagtcgcaaaagatcatatatgataggattccatttatacgaggtatccagaaaaggcaaatctatgcagacagaaagtagactagtggttgcccggggctagggatgggaataggcgatggaggtgttctaaaattggattgtggtgagggttgcatacttgtgactttactaaaaatcatctaatcgtacacttaaagtgagtgcattttattatatgtaaattatacctcaataaagcttttttgaaaaatgaaatgtggctagacatggctcactcrtgtaattccagcattttgggaggccaaggcgggcagatcacttgaggtcaggagtttgagatcaacttggccaacatagtgaaacccagtctctactaaaaatacaaaaattagccaggcatggtggctcatgcctgtaatcccagctacttgggagaatgaggcaggtgaatcgcttgaacccaggaggcggaggttgcagtgagcccacatcgcgccactgcactccagcctgggcaataaagcaagactctatctcaaaaaaaaaaaggaatatgatgattataaagtataaaaaattgattttggggtgacatatgaaccaattctaaaggcaaatggaaagggttagaaaattcttccctctcagagttctaaaaatcagttgagca

SEQ ID NO: 929063 - DNA, 822 bp, Homo sapiens
gcagtacgaggacaaggtgactgcagacctgtgggaggggccaccggtgcagctttgggagcacatgcctgtcagtccagtgtttcagacacaaaaatgatgcccaggctcctgcaggaagctgcatgtgggatctttgccttgcatttcgtgatgtagagttcatcacaggagtgggaaggggcatccttgctgtggccaacccctggccccagccctcgcattccattccctggatgatgagtcttatttcacagtatttctgtttcatgcaaatcttctatcagggttgtaatttgtttaaaagcagaagcaacatggaaatgcacacttgtatttcctgtgtcaaaacaggcaaataaacctttggaagtgggcctgatggggaagagcaaagggcaccctgagagcagttgccagcctctcagcagttggaggtaggacagagaggaaaaggagcaaaaacaaagctataactgctgccagttaaacacattccataggccacattccagctaattaaaattcctcattattgattctgatgttcagtgtggaccctgctgtccacgtgcctataagttttctgggccttgtttgtgtyggggagatgtccacagactcagtgccacatcacgtctcagccactgaccacacagacgcccacagtgacccagctccttaccgaaggcacaggatgaagagaaggtggatttgaataaaagtatgttgttctgacggtaaacagttgaccctcgtattagtctgttcagtttgccataacaagtaccgtatattgggtggcctaaacaatgggaatgt

SEQ ID NO: 929064 - DNA, 635 bp, Homo sapiens
taaaatcacctaagcattaaaaaaaaaaaaaacaagctacacctggtcctcatttccaaagattctaatttaattggtcacaggcactagtattttccaagagctcccggagaattacaaaatgaggcctgggtttaaaatcactgctgtacagtaaaatatacaatatatagtatatatagagagaaatatatgatatatattctatatacacagtataatatagtatacatacagtaatatagtatataacatatgtattatatattcagtaatataatattatatatacaactatataaattatccagggaaaaaaggtcctggataattggatgcaattcttctatgatggctaattttatgtgtcaacttgagtgagctaagggatggtcaaataactggtaaacatttctgggtatatctgtgaaggtgttcccggaagagcgtarcatttgaattggtagactgagtaaggaggatctgccctcaccagtgtagtcggctattgtccaatctgttgaaggcctgaatagacaaagaaaacagaggaagagtgaatttgttctgtcttcattagctgggaatccatcttctcctgccctcagacattggcactcctagttcacaggctt

SEQ ID NO: 929065 - DNA, 633 bp, Homo sapiens
acaggaaagccagtcagagtcccaaaactgaagaacttctagtctgatgtctgagggtaggaagcttccagcatgggagaaggatgtaggctgggaaactaggccagtctagtcttttcacgttgttttgcctgctttatattctagctgtgctggcagttattagatggtgcctatccagattaagggtgggtctgcctttcccagcccactgactcaaatgttcatctcctttggcaacaacctcacagacacacccaggatcaatactttgaattcttcaatccaattaagttgacactcagtattaaccatcacaagtccaccccttgtcaacttgaacccacgtacatctcctgagatcatacataatcwtcaaataaagacaataataaggccataattacatctaacataatacaactattgtttgtacaactggaaatgcaccaatccccaacccaaatactactacataaagttaacaatactttaatgctgatatgaagtcaataaattttatgtcacataataaaggaaaaaggaaataaaatgaagatattttcttaatacaagcgtatatatgcttacacatgtttttaacaaaagtaggagggaatactcatgacaatt

SEQ ID NO: 929066 - DNA, 713 bp, Homo sapiens
gcatccctatctgcccctgacatctcaagcaccattggatctgctgggtcatatggcgcaaatggcagagcagcttgtacagcagcctggacctgttgcagagccttctcctgttctggaacacactcaaaaccggcagtcactcaataaatgggcgggagtaacgcacctaaatgaggaatgtgttgcttccaaaatccaagtacacccactaggcattgtgcctccttcttggttgtaggaggggccaaattcagcaacttattttttaccttagaaggaatatcttgacaggccccacaccactggacmcctaagaattttactgaggtagaagttctttgaattttagttggatttatttcccatcctctggcatgcaaatgtctcaccaataagtccagtgtgtttgctacttcttgctcactggatccaatcagcataatgtcatcaatgtaatgggccattgtggtatcttgtggaagcaaaaagctatcaagttctctccaaataagattatgacacagagctggagagttgatatacccctgaggtaggacagtaaaggtctattgttgaccttgctggctgaaggcaaattgtttctgatgggtcttatgaacaggaatggagaaaaagtcatttgccaagccaatggctgcatagcaggtaccaggagttaatttgctcaagcaatgataccatatctggta

SEQ ID NO: 929067 - DNA, 713 bp, Homo sapiens
gcatccctatctgcccctgacatctcaagcaccattggatctgctgggtcatatggcgcaaatggcagagcagcttgtacagcagcctggacctgttgcagagccttctcctgttctggaacacactcaaaaccggcagtcactcaataaatgggcgggagtaacgcacctaaatgaggaatgtgttgcttccaaaatccaagtacacccactaggcattgtgcctccttcttggttgtaggaggggccaaattcagcaacttattttttaccttagaaggaatatcttgacaggccccacaccactggacacctaagaattttactgaggtagragttctttgaattttagttggatttatttcccatcctctggcatgcaaatgtctcaccaataagtccagtgtgtttgctacttcttgctcactggatccaatcagcataatgtcatcaatgtaatgggccattgtggtatcttgtggaagcaaaaagctatcaagttctctccaaataagattatgacacagagctggagagttgatatacccctgaggtaggacagtaaaggtctattgttgaccttgctggctgaaggcaaattgtttctgatgggtcttatgaacaggaatggagaaaaagtcatttgccaagccaatggctgcatagcaggtaccaggagttaatttgctcaagcaatgataccatatctggta

SEQ ID NO: 929068 - DNA, 629 bp, Homo sapiens
ggagtcaccacttggttaagcttatgataatccactgtccttctccaagatccaactgtcttctgcacaggccaaataggagagttgaatggggatgtagtgggaattgccacccctgcatctttcaagtccttggtgttggcactaatctccacaatccctccagggatgcaatattgtttttgatttactgtttttctaggtagagggagatctaatggtttccatttggcattcccaccataatagccctcactctaccagtcayggagccaatgtggaggttctgccagcttgcaagtatgtctatgccaattatgcattctggcactgcagaaatgaccacaggatgagtccggatacactgtaagtcagatccaagctaaagctccatgaattacctgatctctataagcccctactttaactggaggaccacaatgaccttttgggtcccctgaaatcgatgtcagttcagagccagtgtccagtaatccctgaactgtctgaacattttcctttccccagtgcacagataccctggtaaaagactggaggtctccttggggaaggagagagaaaaattaacagtataaattgttggtagtgtagtagggtccttcctcaag

SEQ ID NO: 929069 - DNA, 629 bp, Homo sapiens
ggagtcaccacttggttaagcttatgataatccactgtccttctccaagatccaactgtcttctgcacaggccaaataggagagttgaatggggatgtagtgggaattgccacccctgcatctttcaagtccttggtgttggcactaatctccacaatccctccagggatgcaatattgtttttgatttactgtttttctaggtagagggagatctaatggtttccatttggcattcccaccataatagccctcactctaccagtcatggagccaatgtggaggttctgccagcttgcaagtatgtctatgccaattatgcattctggcactgcagaaatgaccacaggatgagtccggatmcactgtaagtcagatccaagctaaagctccatgaattacctgatctctataagcccctactttaactggaggaccacaatgaccttttgggtcccctgaaatcgatgtcagttcagagccagtgtccagtaatccctgaactgtctgaacattttcctttccccagtgcacagataccctggtaaaagactggaggtctccttggggaaggagagagaaaaattaacagtataaattgttggtagtgtagtagggtccttcctcaag

SEQ ID NO: 929070 - DNA, 629 bp, Homo sapiens
ggagtcaccacttggttaagcttatgataatccactgtccttctccaagatccaactgtcttctgcacaggccaaataggagagttgaatggggatgtagtgggaattgccacccctgcatctttcaagtccttggtgttggcactaatctccacaatccctccagggatgcaatattgtttttgatttactgtttttctaggtagagggagatctaatggtttccatttggcattcccaccataatagccctcactctaccagtcatggagccaatgtggaggttctgccagcttgcaagtatgtctatgccaattatgcattctggcactgcagaaatgaccacaggatgagtccggatacactgtaagtcagatccaagctaaagctccatgaattacctsatctctataagcccctactttaactggaggaccacaatgaccttttgggtcccctgaaatcgatgtcagttcagagccagtgtccagtaatccctgaactgtctgaacattttcctttccccagtgcacagataccctggtaaaagactggaggtctccttggggaaggagagagaaaaattaacagtataaattgttggtagtgtagtagggtccttcctcaag

SEQ ID NO: 929071 - DNA, 599 bp, Homo sapiens
gcactattcacaatagcaaagacttggaacctacccaaatgtccatcaataatagactggataaagaaaatgtggcacatatacacaatagaatactatgtagccataaaaaagaatgagttcatgacttttgcagggacatggatgaagctataaaccatatttttaagcaaactttcacaagaacagaaaaccaaasaccacatgtttctcactcataagtagaagttgatcagtgagaacacatggacattgggaggggaacatcacacaccagggcctgtcagggagtggggggctaggggagggataacattaggagaaatacctaatgtaggttatgggttgatgggtgcaacaaaccaccatagcacgtatatacctatgtaacaaaactccacgttctgcacatgcaccccagaacttaaagtataattaaaaaaagaagcaataaaaacaatctaaatatctaaaaaagaaaaaagaatgaggagcaaatatgaatatatggaaagaattttgtgtaagagaacttaattttttttagatttaagatttaaatacagaaaattgaaaactaaaaaccatgatttggcagt

SEQ ID NO: 929072 - DNA, 591 bp, Homo sapiens
cctgaaaaggagtgtgacaattatttctcaaagaacctgaaacggaaatatcatttgacccagcaatcacattacaggatatatacccaaaagaatacccaaaagaatatatattgctctgccataaaggcacatgcatgcatatgtccgttgtagtactattcacaacagcaaagacatggaatcaacctaaatacccatcaatggtagactagatttaaaaaaaagtgtttwtatatatatatatatatatatatatatatatatatataccatagactactacaccaccagaaaaaaagaatgagatcatgttctttgctgtaacatggatggaactggaggccattatctcaaggaaacaaatgcagaaacagaaaatcaaatatctcatgttcttacttataagtggaagccaaacaagaaaacatggacacaaagatcagaacaatagacaacaaggcctacttgagggtggaggtgggtaagagggagagggttagaaaaatacctactggataccattcttactatctgaatgatggaataatctgtacatcaaacccctaggacacgcagtttacctatatg

SEQ ID NO: 929073 - DNA, 635 bp, Homo sapiens
tccttgttctgaagtccactttgatactactatactaagccagctttcttttttcagtgtttgcattatataccattttctctcttttacttttaacctatctgtgtatttatgtttaaagtagctttctttgttaacaacctatatttgggtcttttaaaatcaaattaaatttaattaaaaaaatttttagagacagggtctcactctgtctcccaggctggaatgcatggtgtgatcatagctaactgcagcctctaactcctgggctcaagagatcatcctgcctcagcctcccaagtagccagactacaggtgcacacccttttcccaagtaattttttactttttgtagaggcgggatcttgcaatgtcatccaggctggtcttgaactcctggctccaagcaatcctcccaccttggcctcccaaagtgctcagattacaggcatgagccrccacacttggccagatattttttaaaaaaaaaatctaatatgagaacctcttccttttagttggaatatttagactatttacatttaatgtaattattgatatagttaggtttaaacctactatcttgttgttttctatttcttatctttcttcctttttccctttttttcctttac

SEQ ID NO: 929074 - DNA, 640 bp, Homo sapiens
aattgcctctatcggtcttctgtgtcagtgagatattaagtcgccatgagccaggcattttgcacagatgacaaatgtgtttggcgttcactgcagaacccgctcatgtaaaagcgacgctcaatcatcagttctcaaagtgaaacagagaccaccagcctcagaattggcctgatagaatcatcacggggcagcgatcaagagcaggttcccaggacagcccgacccactgaaccagaattactcagggtggtgtctgggaaccmgcattgcatcagattcccgctgtgattcttacatacactgaacattgagaaatgctgtcaggtgaaaggcaaagcaacattcctgctatcctgcccccggcacttgggaaaccaccctctgtaaggtttacagtagctacttcctgagtgcctactatgtgccaggtaccatgctatgtgctttccttgtgggctctcatctaatcctcaaaatgaccctgagaagtagactttattgttgtccccattttgcagatgaggaaactaaggcctgaagggctcaagtgattaggccaaaatagaagtagaatattctggtcagtctgggaagagaaccaatgaagccaactggttcaaagaagggagaggccagg

SEQ ID NO: 929075 - DNA, 640 bp, Homo sapiens
aattgcctctatcggtcttctgtgtcagtgagatattaagtcgccatgagccaggcattttgcacagatgacaaatgtgtttggcgttcactgcagaacccgctcatgtaaaagcgacgctcaatcatcagttctcaaagtgaaacagagaccaccagcctcagaattggcctgatagaatcatcacggggcagcgatcaagagcaggttcccaggacagcccgacccactgaaccagaattactcagggtggtgtctgggaacccgcattgcatcagattcccgctgtgattcttacatacactgaacattgagaaatgctgtcaggtgaaaggcaaagcaacattcctgctatcctgcccccggcacttgggaaaccaccctctgtaaggtttacagtagctacttcctgagtgcctactatgtgccaggtaccatgctatgtgctttccttgtgggctctcmtctaatcctcaaaatgaccctgagaagtagactttattgttgtccccattttgcagatgaggaaactaaggcctgaagggctcaagtgattaggccaaaatagaagtagaatattctggtcagtctgggaagagaaccaatgaagccaactggttcaaagaagggagaggccagg

SEQ ID NO: 929076 - DNA, 661 bp, Homo sapiens
aaacttctgcactcaagcaatcctcctgcctcagcctccccagtagctgggactacatgcatgttccaccatgcctaattttaaatttctttttttttttattttttgagacagagtatcgctctgtctcccaggcagtggtgcgatcttggctcactgcaacctctgcctcccaggctcaggcaattctctgcctcagcctcctgagtagctgggattacaagcgcataccactatgaccggctaatttttgtattttttgtagagaaggagtttcgccrtgttggccaggctgttctcaaactcctggccccaaacaatcctcctgccttggcctcctaagatattgggatcacaggtgtgagccaccgcgcctggccctgcccacgttatttaacctgcagcccttaccttccggacttgctatatattaatatttcgcttgcttatctgtttattacccggctccccatctagagtgtgagcaccacaagggcagagatttttattttatttcccatctaaggcacagttggtgctccaaaaaatagctgttgcccaggtcaatgaataacagctcccatttaccaggcgcctgggatgtgctgagccctttacatacctgcgacccctggtcctcatagaaaccctgcaaagtggt

SEQ ID NO: 929077 - DNA, 661 bp, Homo sapiens
aaacttctgcactcaagcaatcctcctgcctcagcctccccagtagctgggactacatgcatgttccaccatgcctaattttaaatttctttttttttttattttttgagacagagtatcgctctgtctcccaggcagtggtgcgatcttggctcactgcaacctctgcctcccaggctcaggcaattctctgcctcagcctcctgagtagctgggattacaagcgcataccactatgaccggctaatttttgtattttttgtagagaaggagtttcgccatgttggccaggctgttctcaaactcctggccccaaacaatcctcctgccttggcctcctaagatattgggatcacaggtgtgagccaccgcgcctggccctgcccacrttatttaacctgcagcccttaccttccggacttgctatatattaatatttcgcttgcttatctgtttattacccggctccccatctagagtgtgagcaccacaagggcagagatttttattttatttcccatctaaggcacagttggtgctccaaaaaatagctgttgcccaggtcaatgaataacagctcccatttaccaggcgcctgggatgtgctgagccctttacatacctgcgacccctggtcctcatagaaaccctgcaaagtggt

SEQ ID NO: 929078 - DNA, 630 bp, Homo sapiens
caccacagcttgccacagtgggcaggactgttcctagttttgagtggaaccaagagatttggggaaggattgcaaaagaagataaaattatcgagggctcccaggaggtgctggcctcatcactctcaagctggaggcagcatcatttcccgcccctgctgatgaagctatagtgactatagtcactgcaagtggaggcccaagatccttccccaaatcactgagatccaacygcaggtgaacaaaagggctccagttactctgcttatattacagatataagagaagtgaaacagcctgtctaggtcccatagtaggtaagtggaaaccacgtgttatgcgtcaacctcattcactcatttgtccactcaaaagacattcaatgaacaccaactatccgaaagccaccaggagggaagcaccatgtcctcagtgaccctacaattgagaccagtgctgtcccatagagggagatatcatgcaggccacacttacaatctaaaatgttctagcagccaccttcgaaagcaaaaagaggcaggtggaataaattctaatcatttatttcactcaatatatccaaaatatcattttaacatgtaattaatatttaacaaatattaatgaaag

SEQ ID NO: 929079 - DNA, 561 bp, Homo sapiens
agagactgcattgaatctgtagatcaatttagggagtattgccatcttaatattatccttcaatccaagaacatgaattccatgctttcttgggggaaagccttagtctgtcatcattacgtatcatattacctgtaggttctttgtaaatgcctcttaccagattgaagttgttctcgtttttgtttgtttttggagagtaagttttgtcaaatgatcctacgcttttgtcctttgttctactgatacaatacattacattaattggataaatcccacttggtcatggtgcaaaatccttttttatatattgctgaatcctattttgctagtatgtttttgaggacttttggatctatatttaaaagtgattggtatgtagttttctttgagatatctttgtctggttttgatatcagsgtaatactgacctcacagaatgagttaaaaagtgttccctcttctactttttgaagtttgtgaggaattggtatcagcttaaatacttgataggattcaccagtgaagccatcagggcctatgcttttcattttgtagttt

SEQ ID NO: 929080 - DNA, 766 bp, Homo sapiens
tctgatgggctttgtaggtgacctggcctttctagcagcatttaacattctttctttcatgtcaaccttggaaaatctgaggactgtgtatctttgggatggtcttctcatggaatatcctattgggggtctctgcatttcctaaatttgaatgttgacctctgtagctaggttggggaagttctcatgaatgatatcctgaaataagttttccaagttggttccattttccccatctcttgtaggtacaccaattgatcatagattcagtcttttaacatgatcccatatttctcagaggtattgtttattcactcctttcattcttttttctcttttcttgtctgcctgtcttttcttgtctgactgtcagaaaggcagtcttcgagatctgagattgtttcctctgtttggtctattctgytattaatacttgtgattgcatcatgaaatacttgtcttgtgtttttcagttctatcaggttggttacattcttgcctacagcggctgttttgactgtcagctcctgcaatgttttatcatggtctttagcttccttgcattgggttacaatgtactcctgtaactcagtgaactttgttattatccataggaatgatgactactgctgtcatttcagccatctcagcttcagttcagttccaaacccttgcaggagaggtgatgcagtcatttagaggaaagaaggaactctggcttttgagttttcagcattcttgcacatacatttgttttctcatcttt

SEQ ID NO: 929081 - DNA, 766 bp, Homo sapiens
tctgatgggctttgtaggtgacctggcctttctagcagcatttaacattctttctttcatgtcaaccttggaaaatctgaggactgtgtatctttgggatggtcttctcatggaatatcctattgggggtctctgcatttcctaaatttgaatgttgacctctgtagctaggttggggaagttctcatgaatgatatcctgaaataagttttccaagttggttccattttccccatctcttgtaggtacaccaattgatcatagattcagtcttttaacatgatcccatatttctcagaggtattgtttattcactcctttcattcttttttctcttttcttgtctgcctgtcttttcttgtctgactgtcagaaaggcagtcttcgagatctgagattgtttcctctgtttggtctattctgctattaatacttgtgattgcatcatgaaatacttgtcttgtgtttttcagttctatcaggttggttacattcttgcctacagcggctgttttgactgtcagctcctgcaatgttttatcatggtctttagcttccttgcattgggttacaaygtactcctgtaactcagtgaactttgttattatccataggaatgatgactactgctgtcatttcagccatctcagcttcagttcagttccaaacccttgcaggagaggtgatgcagtcatttagaggaaagaaggaactctggcttttgagttttcagcattcttgcacatacatttgttttctcatcttt

SEQ ID NO: 929082 - DNA, 635 bp, Homo sapiens
cagtactaaaaatatataaaacagctctagctaattggctaaaatataaaagcacttaaatcggataatcaaaagaaaagactagtcaaatgctttttcaagttaatgtgatttaagtaaaatttttaataaaataatctggctttaaaattattggtaaaataatattagagatgtcttaaaaattgttagcatttttgatctactggttttgtgctcactcctgcagaattctataagccataagggttataaaactatagcatttttgatcaagtggttttgtgcttactttggcagaatactataagccataagggttataaaactataaaatccagctcaagacaaaatgatctttgcttgtataattttcgacaagtaagacatggaatattcttggtttaatgaaaacagctaaatcccaagttattggtaaaaatacccttatatttaaccttaagtttcttacttaagtaarcacctaaaattcacagctataaaaatagttaacagggaaataaagaatgactatcacagtttttgtaaataatctaggtaaattatttaataaatcaatcgatcaggtaaatgtaatggaataaacaaatgcctgtaaacaaacatgttatata

SEQ ID NO: 929083 - DNA, 540 bp, Homo sapiens
tcccaatatccctcataagcacagatgcaaaagtaataaacaaactactagtaaatcaaatccaacaatatgagaatacgtcatgaccaagtagagatatccaggaatacacaactggtttaacattcaaaataaatgcaatttaccatcttaatgttataaaagaaaactacatgattatttaaacagacacaaaaattgtatgtgataaaatccaacatccattactgattaaaaaaaaacaaccctttataaattaagaatagaaaggaactcctcactctggtgaaacacatcttatgagaaacctaaagctaaaatcatgctaaataatgaaagactgaatgctttycctccaagttcacaaacaagagaaggatatctattctcaccacttctattcaaccctgtattggaagttctagccagtgcaatagagcaaaaataaataaaatgtattcagattgtgaagcaagacttaaaatggtctttatctgcagatgacatgattgtctaattagaaaattcaatagaatctac

SEQ ID NO: 929084 - DNA, 559 bp, Homo sapiens
tagcaaccatttgctaaagagattcatattgatacaagggacccagaggctattcatcaggacaattagagaaagactccaaaaggcatttcacacatcttcaaagctgctcctcccatcagaggcccagaggcctaggagtgcagaatggttttgtgggagcccatggcatccatggcattctgcacagcccgctgtccaggactgcctcaggactctgctccctgcaccccacagcaatgctctgtggctgccccagtcaygacccaagtagcagcaagtgtggctcaactcaccactctggaaggcacaagctataaattttggtggcatccacaaggtgctaattctgcagctgtacagaatgtaacagaagtggggctatggtagtttcacctagatttcaaaggatataccaaaaagactggtgccctggcagagacttgtcaacaagggtagactcattgctgagagcccctcgtagggcaatgcctagtgcagccagaagcaaggccgcagcagagtccccactaaagtaatgcctaatggagctgtggga

SEQ ID NO: 929085 - DNA, 716 bp, Homo sapiens
ggaataatgaatgcacttgagggcagatgagaaggtgccctcaaaagagctctgggaatagcaccaagctgaagcatgtgtgcaaagggctcttctgttttctggggctccagcctccctcaaggttgatgggccttctccactcmgccccatcctgcctgccccgccggcccctctccttgcctgctgtggcaccactgagccaccactggaaaatgacctgactgtggtcttctttgacaaactcagtaacaaagatgcccgcccaacagtggacctcatggtcgcttaaagagttgagaagccacctccccacatcttcaaggggcacaacagacctgggcgttttagtgtaatatttaatttattagaatgacaaatgtaaaagcccagtttcctagagccttttttttgtttttgttttgttttgttttgtttttttttttgtagagacagagtttcgctatgttagccaggctggtctccaactcctggcctcaggcaaattctctgttacccaggctggagtgcagtggcgcaatcatagcttactgtaacttcaaactcctggcctcaagggatcctcccccatcagcctcttccaaaacactgggattgcaggcatgagccacctcacccagccctttgagtagtttttgactggcttgagttgaaaggactaaattccccttaaactattagtgccatttatgtta

SEQ ID NO: 929086 - DNA, 619 bp, Homo sapiens
gcctaaggtatcatgacaactaaatgtaatgtggtgttctgggtgggatcctggaatggaacgttaggcaaagctaaggatatctgaatacactctgggccttagttagtaataatatatccagtatattggtacatttgttaattgtaacaaatgtaccatactaatgcaagatgttaacaatagggaatctgggtgagggatacatgggaacttgctatacatcttctcgatttttctgtatatctaaaactgttcttaaaaaaaagtgaaattttttttttttttgagacaagatcccactctrtcacccaggctggagtgcagtggcaggatcatggctcactgtagccttgaactcctgggctcaagtgatcctcccacctcagcctcttgagaagttgggactacaggtgtgcatcaccacgtctggctaattttttaatttttaaaatgttttgtagaggtgaggtcttgctatgttgcccgggctggtctcgaactcctgggctcaagcaatccttctacctcagcctcccaaagtgctggggttacaggtgtgaaccaccatgcccagacaaatgtagttttaaaaaagtcttattttacctaaaagaga

SEQ ID NO: 929087 - DNA, 610 bp, Homo sapiens
tcagagccaaaccatgaactgaattccttcccaaagttagttcggcctatgcccaggaaagaacaaggacagcttgaagcttagaagcaagacggagacgcttaggtctgatttctttcagcgtcataatttcctcagttatgattttgcaaaagcggtttcattacctgcacctccccyggcatctgtccttgtagattcgccatcaccatcaacctgcagacctgctctgccctctcacctgcatccttacctgtcctcatttgcatcccttctgccctcccgcagcctcacctcactctcccagaccccgtttctagatgggcctgagccaagaatccatgctttggggtgagctgtgtctggtgactgaacccgagaggaggcagtaggggctggcaggcagggcagtgtttccggctggagccccagggaggggaagacatgagtcagcagttagggagggagtgcgggggctttgtggtcacagcacacaaagtgctttctggtgacagcgctgcttggggagcagcagccttgggtttggagagcaggggcgctgttgctaaaggggactggggccctgagcacctcctctcactgcacctct

SEQ ID NO: 929088 - DNA, 685 bp, Homo sapiens
gaaattccaaagtgaaggatatattttcatagcccagtaaaggagaattttgtacactagcaacagccataaatggtattctcattttctttgttgaattttctttatgtgtgtagatccttaatcggaggcagaactgcctgacctgaggcaatcccccatggaaagcccacttaggccctttcatttctctttgatcacatctcactggtcggtcagactttccagattcctcattttagtctaattctcctcctgcgtgcactgtgaaatgctctgtgaattttggttagtggtaatattttggacaagcctgcaaataaaatgttgcgttacatcactgcataaggtaatttaaaacagtccacgtagtagagatgaaaaggcaaaagtacatttaataagaaatattacaagtcacaactattttttctttatcagatgcgttgaaagaaagcggtgccagcctttmtatacttcagaattctttttcaaagaaaaggcttattgcaatcacctaaaagactttattagtgtctttaaaataaatgttcaaaagagtaatgttaacatttgtaatgaaattatctccaatcgttttagtttgtggttcattccaaatctatgactaatgattcttggggagaaaaatgcaggtacctcagaggaagaaagggtggagaac

SEQ ID NO: 929089 - DNA, 642 bp, Homo sapiens
cagggagaaccaaacttcagcctttctgttggccaacaaaaggcctgtggttgcctttctgcttccacccctacaattaggggagaggccacgtttcttcctgaaatgggatctacagagaggccccttgttccaggcaggaccctgccggtagcactgtcaggggataggacagcccatggaggcagccagrgtgaaaatgtgagcagagacaccaggaggctgggacccttggtcttccccaacccaaggtgacatgtgactgctttggggctccactgcacactctgtctgagacccagagatccagagagaatgatcggagcttgagatccctggacataatccagatttgggagaccaacccaagggagagtgagagacatgggctcatctgctgcagcccaagagggtcactgcatcagcacagagctggcagagggagggggagtttcttcatcagtggcagcctgggatcatttgtttacctgttataatgggagctcacacctaattttaagtaaaaatgtgtgttttcaagtttatggcccttctttccccaacttccttaactgtgctggttgttttagggagaatgatgaaccgtgttgcctcctggcctgtgccagctcccgccctgtc

SEQ ID NO: 929090 - DNA, 625 bp, Homo sapiens
ggaggggaacatcacacaccagggcctgttgaggggtaggggactaggggaggaatagcattagcagaaatacctaatgtagatgacaggttgatgggtgcagcaaaccaccatggcacgtgtatacctatgtaataaacctgcatgttctgcacaagtaccccagaacttaaagtataataataataataataataataataataataataataataataaagtgggcagacatttaactgtgtctttccttggtggtactctgatacttgacacctacttttccctgactacttatcactttatctttgccttatttcctgtctttctcttttgtcttcacagggctgtattttattcaktgtatttgtatttaattcttgtatttcttgcacttacaaggaatcaagggtaactctggtttttacctgtccaatatctttttccccttcttcagttcttctctagggagccactcctccctgagtcttgttccttgttgagtggctgggcttacctcaaagcagagggaccaagggacttgcctgaacaatcagagtattccatccacctttctacagtgatgagtttgagaaccagtgtgtcattcaagtggatggaatga

SEQ ID NO: 929091 - DNA, 664 bp, Homo sapiens
aaaatcaaaagcaggttagttacttcctagatacactgggagtacaggcattgggtaactacagccattcaaaatgggagaaatgggccaaaacaaaggggctacaggccccctgcaagtctgaaatcaagtggggcagtcatatcttaaagatccaaaatgatctcctttgactccatgtctcacatctaagtcatgctgatgcaagaggttggttcccatggtcttgggcagctctgcccctgtggctttgcagggtacagcctccctctggctgctttcatgggaaagccatgttgagtgtctgcagcttttccaggtgcacggtgcaagctgtcagtggatcyaccattctgtgatctggaggacagtggccctcttctcacagctccactaggcagtacctcagtaggaactctgtctgggggctctgaccccacatttccctttcgcaccaccctagcagaggttctccgtgagggcactacccctgcagaaaacttctgcctggacatccaggcatttccatacatcatctgaaatctaggcaaagattcccaaacctcaattcttgacttctgtgtactagaaggctcaacaccacgtggaagctgccaaggctggaggcttgcaccctctgaagccacggccccagctctatgtt

SEQ ID NO: 929092 - DNA, 745 bp, Homo sapiens
tccagggaatgtaaagaaacaaagtttgttttcacccttcatttccactctccccagcacttttttttcttttgcagagctagatatttaaggattaggatattgtaaagcaactgcacatgtggaggaatttagaaagtcactgcccatgcccagggaaagacaccagctcagaatactaccctaagtttacacctcaagctgatcctagcacagagacaccctgtaacagttaaaaaaacaaaccaaacaaaaacaaaaacagaaaaacagcaaaccctggggaaggggttgaatctgatttccatagttgccacactataagattcaaatgtccagttttaaacaaccaccaaaagaattacaagtcatataaagaaatagtaaaatatgggttactcaaaggaaaaaaataaatcagaaaaaaatctrtaagaaagattagatggtatctttactagacaaagacatgaaaacaactgtctcaaagactctcaaaggactaaagtaagacatggataaactcaagaaaataagatatgaacaaaatataaataccattaaagagataacataaaaaacgaatcataaaattctggagtttggaattacaataatggaaattttaaaaattcactagaaaaattcaaaagcagatttgagcaggcagaagaatcaatcaactgaaagacagataactgaaattttgagtctaagaaacacacagacacacacaaattgaaga

SEQ ID NO: 929093 - DNA, 778 bp, Homo sapiens
ttaagctcgtggagcctcaatttcctcatcagtaaggaaaaaaaaaatagagataacatcaacctcatggggcatctctatgtggattaaatgtttgtcaagactataagtcaatgccttgacactgagaagagtgatccttttaaaggcataaatcagattaagcttctctgtgactcaaaatcctttggtggttccccatctcactcagtgaaggccagtgtttacacagtggttcataaatcccaagcagtccctccctttcaacctgtcaccctttaacaatctcccactatttcccacacactccattccagccatgccggcctccaagtattcaacaagcactgccaggcctgcccatgcctcaggacctttgcactggctgttcctctgcctaggtctttgatcaactgttgccacctcagagcggtcttccatgatcacctcctactgcccaggatttccaacccttcttccctgcttaatttttctccatgtcacttaccacctctgtagttctgtatattttattgcttacttaatgcccractctggccacggagggttgggatttattttttgttgtctgcatcttcccaaggatctaaaacaatacctgacacacaggtggtaaccaacgtatttgctgaatggagtaattaagtgtcatttcctgtcttagtctgtttgtgttcctataaaggaatacctgaggctgggtaatttataaagaaaagaggtttatttggctcacgtttctgcaggctgtacaaga

SEQ ID NO: 929094 - DNA, 591 bp, Homo sapiens
ctgaacttctcagtggcttcctttacactgtgaggggaaaactgcctactcacgcctcagtaatggtggacgcccttcccccaccaagctctagcatcccaggttgacttcagactgctgtgctggcagtgagaatttcaagtcaatggttttagcttcctgggctccatgtgggtgggacccactgagcaagaccacttggctttgtggtcagcaccytttcaaggggagtgaatgcttctgtcttgctggggttccaggcaccactggggtatgaaaaaacaaaacaaaacaaaaaaactcctgcagctagctcggtgtctgcctgaacagcctcccagttttgtgcctgaaacccttggccttggtggtgtaggcacacaagggaatctccttgtctgtgggttgcaaaaactgtgggaaaggtataatgtctgggccagatagcacagtccctcacggcttcccttggctggggtgagggaggtccctggcccattgcacttcccgggtgaggcaacacatcaccctgcttctgtttgccctccttgggctgcacccactctctaaccagtcccagtgagatgaatc

SEQ ID NO: 929095 - DNA, 591 bp, Homo sapiens
ctgaacttctcagtggcttcctttacactgtgaggggaaaactgcctactcacgcctcagtaatggtggacgcccttcccccaccaagctctagcatcccaggttgacttcagactgctgtgctggcagtgagaatttcaagtcaatggttttagcttcctgggctccatgtgggtgggacccactgagcaagaccacttggctttgtggtcagcaccctttcaaggggagtgaatgcttctgtcttgctggggttccaggcaccactggggtatgaaaaaacaaaacaaaacaaaaaaactcctgcagctasctcggtgtctgcctgaacagcctcccagttttgtgcctgaaacccttggccttggtggtgtaggcacacaagggaatctccttgtctgtgggttgcaaaaactgtgggaaaggtataatgtctgggccagatagcacagtccctcacggcttcccttggctggggtgagggaggtccctggcccattgcacttcccgggtgaggcaacacatcaccctgcttctgtttgccctccttgggctgcacccactctctaaccagtcccagtgagatgaatc

SEQ ID NO: 929096 - DNA, 602 bp, Homo sapiens
aacaaatagttctgatgagattttataattgttttaaaatgtgtattaaagataagctacacaaaagggcaatagacataaacaagcacttcatagaaaaggaaattcaaatgaagaaataatcctatgaagatatgctatactttcttaacaatgtggtaaatagaaattgagctacaatgagatgaaattttttacaaccactagataggcctcaaccaaagtacaggcaaagagatggaaaaatagcatcctccagcacaactaatggaagtgtaattggtacaactactttaggaaataacttgaacttgtttgataaagctgatcatgcatacaacctatgaccaagcaatttcaatcttagttacataatgtagacaaattatacatrtatgtattatatatgttatatatacatatatacacacacatatacatatatacatcagttgacaggcagggcagaaggctgttcataacaacattttttataatacaaaaattgaaaacattctatggatacattaacaggaaaatcaaaaattatacatataaaatataacaaaaatgtaataaaaatgaatggaacaaaactactc

SEQ ID NO: 929097 - DNA, 601 bp, Homo sapiens
ctattcacaatagcaaagacttggaaccaacccaaatgcccaccaatgatagactggattaagaataagtggcacatatacaccatggaatactatccagccgtaaaaaagaatgagttgatgtcctttgcagggatatggatgaagctggaaacccatcgttctcagcaaactaacgcaggaacagaaaaccaaagaccgcatgctctcaytcctaagtgggagctgaacaatgagaacacatggacacagggagggaaacctcatataccggggcctgtctgggagtgggggctagtggagggatagcattagaagaaatatctaatgtagatgacgggttgatgggtgcggcaaaccaccatagtaggtgtatacctatttaacaaacctgcacgttctgcacatgtatcccagaacttaaagtataattttaaaaaaatagctgggcgcggtggctcatgcctgtaatcccagcactttgggagaccgaggcgggcggatcacctgaggtcaggagatcgagaccagcctggccagcatgacaaaaccccgtctctactaaaaattcaaaaattagccaggcgtggtggcgggctgt

SEQ ID NO: 929098 - DNA, 549 bp, Homo sapiens
agtcagctcaaaagagaatatgagaatgtgattaacagaagggcgacatgaagaatccttgtggtgatggagctgttctgtatcttggttgcagtggtggataagtaaaagtgcacatgtaataaaatcatataggattaagtacaaatatacaaatgagtacaaattaaacctggggaaatctaaataggacgggtggattgtaccaatgtcagtaccctggataggatcttgtactacaattctgtaagatgttaccattgggggaaattagaaaagagcacacagatcactctgtasgatttcttacaacaatctatagatgattttgaaataaaaagtttaatttaggctgggcacagtgactcacgcctgtaatcccagcactttgggaggctgaggtgggcggatcacaaggtcagaagttcaagaccagcctggccaacatggtgaaaccctgtctctactaaaaatacaaaaattagctgggtatggtggcgtgtgcctgtaatcccagctactcaggaggctgaggcaagagaattgctt

SEQ ID NO: 929099 - DNA, 615 bp, Homo sapiens
ctggagaatgagaacactaagagagggctgtgacatggaagtttataaaagagattacttcaaaaggataactgggtcagcattacagagtgctgatgagaggtcaggtaagaagagtaaaaaatatgtattggattcggtgatgtaaagtcagcaccgtcctcacaaaaaaactatttcagtggactattgggaactgaagccagattggcatactctagagaaaagaaaatacagactataagtatagataactcctttaaaaaaattgggctatggaagaaagaaggcattcgctggaggagaacacaggatcggtatttttwaaaaattattgatttaggtttgttttcatatgttgattgcacaaacttgtgaatgtttaaaatacgatgggaaggaatcatgtaaaaggaagaggttgaatatgtaattctgcaaaggaatcatctagtttatgatgtccaggatgcaggatgagatgaaagctgtagttcaggtggtgagcatggctttacataggcatgggacaacctctttattgtagtagaagagatgacagaaagtgtaggtgcatatgcaagttggtttgtaagatggtttgtacgaatattg

SEQ ID NO: 929100 - DNA, 592 bp, Homo sapiens
aaactgctgattattgtagccacctccatctacctttgctagatcttccggataacgtgttacagcttctccatcagcacttgcttcttcaccttgtacttcattgttatgcttcttttcttaaacctcgtttaagaaatcaaactctgctagcttcaaacttttctacagtttccttacctctccacccttgagttagggccttgctctggattaggctttggcttaaaggaatgttggggctggtttgatcctctatgcagaccgctaaaactttctccatatcaggaataagactgtttcactttcttatcattcaggtatgcgttagaacagcatttttaatttccttcaagaactttttgtttgcattcacaatttggctaactgtttggcaccrgacgtctaacttttgcttatctggatttctgacatgccttcctcactaagtttatcatttctagcttttgatttgaagtgagagaagtatgactcttcctttcacttgaacacttagaggccatggtaaggatattaattggccgaatttcaatattgttgtgtctcagggaatagggaggagcaggagagg

SEQ ID NO: 929101 - DNA, 780 bp, Homo sapiens
tacaggatggggggcaggatgggccatgggtggttttggcaaaggcaacattcaagcaggaaaacaggaatgcatgttctcactttgggccgcagttctaggcttaagggtggggattcaccagggaccccatctttttctgcctagaatttatctgcctcttgtccctatcactttcagtgagtagctagcagcttatatcatgagtgtcaagggaatatggacacaggtgaaactgccattgcaaaattgtaactaagacagtgacagagatctgacctaaccaactccatcttgcttctaacctcctagctgttcttgttcattcctgggtgtaggctgaactaactataggaggaaagtttatagttaaaacaaaggtgataacaggcctttcccaaagcaaactcctttttttttttttttttttttttttttttggggaaacaaagccttactctgtcacccaggctytagtgcagttgtgtgatctcagttcgctgaaacctctgcctcccggattcaagcaattctcctgactcagcctcctaagtagctgggactacaggtgtgcaccaccatgcctggctactttttccaagctggtctcaagctcctgacctcacgtgatctgcctgcctcagcctcccaaagtgctgggattacagatgtgagccaccaccaccggccaaatccccttcttgcctggggactagattgcctttgtaggatgaatgaattagccaaaagattagaaattatggtttaagaatcatacag

SEQ ID NO: 929102 - DNA, 596 bp, Homo sapiens
catctggaatgttgtagactgctctgcgtttagtatattattaacctgctatgcaaccactcttgtgatcaccttcagcaaggtaggaaatctctggcaggcactctcaagggcagtgacttcaacacattcatgcctaccccaccctcaacacatttttgggtcatttgtttccccacacggccatgggcaaatctcttaccctctgtggccatcatgtgtaaagaatttttttttttttttaggcagagtcttgctctgtcacccaggctggagtgcagtggtgtgatcttagctcactgcaacctctgcctcctgggctcaagcaattctcctgcctcagcctcccaagtagctgggactacaggcacccgccaccactcccagctaatttttgtatttttagtagagatggggtttcaccatkttggccaggctggtcttgagctcctgaccttgtgatctgcccccctcggcctcccaaagtgctgggattacaggcgtgagccaccatgaccagcctgtttaaagcatttttaaattgggaaccggaataaagttctgttcttctcccttgagatcagggagcacttctc

SEQ ID NO: 929103 - DNA, 688 bp, Homo sapiens
tctgcgggaaagagaaaaggacaatgagacacaggtacacctcctgggaggctcggccacggacagaaaatgaagtggagggcagagaaaagggcactggactcttactgttgtcagtgaatgatgcacagttaccgctggaacaaaaggcctttcatctaccagcaacccctccacactattagtcttcacaaacgactacccgtgtcttttcttccaactgcagacatccattttgcttaaaactaggcgaccacacgctccagtgtcggcctgctgtcctgatgtaactgttaaccgtgcaccatttcactctcaaaagtatctcatttggatgataccttatgtggacaccctgcttccctacataaaactcaaagcgggccgggcacagtggctcacatctgtaatcccagcattttgggaggccgaggcgggtagatcacgaggtcaggagtttgagaccagcctgaccaacattgtgaaacccygtctctactaaaaatacaaaaattagctgggcgtggtggcaggtgcctgtaattccagctagtcagtaggctgaggcaggagaattgcttgaacccaggaggcagaggttgcagtgagctgagatcgcgccactgcactccagcctgggcaacagagcaaggcgccatctcaaaaaaaaaaaaaaaaaaaaaaaacc

SEQ ID NO: 929104 - DNA, 762 bp, Homo sapiens
tgcaggatctctgcgggaaagagaaaaggacaatgagacacaggtacacctcctgggaggctcggccacggacagaaaatgaagtggagggcagagaaaagggcactggactcttactgttgtcagtgaatgatgcacagttaccgctggaacaaaaggcctttcatctaccagcaacccctccacactattagtcttcacaaacgactacccgtgtcttttcttccaactgcagacatccattttgcttaaaactaggcgaccacacgctccagtgtcggcctgctgtcctgatgtaactgttaaccgtgcaccatttcactctcaaaagtatctcatttggatgataccttatgtggacaccctgcttccctacataaaactcaaagcgggccgggcacagtggctcacatctgtaatcccagcattttgggaggccgaggcgggtagatcacgaggtcaggagtttgagaccagcctgaccaacattgtgaaaccctgtctctactaaaaatacaaaaattagctgggcgtggtggcaggtgccygtaattccagctagtcagtaggctgaggcaggagaattgcttgaacccaggaggcagaggttgcagtgagctgagatcgcgccactgcactccagcctgggcaacagagcaaggcgccatctcaaaaaaaaaaaaaaaaaaaaaaaaccctcaaagcatccaggtgtttcctctttggagcacaggtgataaataacccacacaagagagaagt

SEQ ID NO: 929105 - DNA, 593 bp, Homo sapiens
aagctatcaaacagctgtcatgattgcaatcgcctaaccctgattatgaaaacctatctctgccaattggactgtccttctcctccttacatgcttgtaaatccgtttcatccatccttgcaaatagactctcaagcccaaaccccaaacaatgatctgttttattcaaattttggtctgcgcttcccttgcatgtaaattctagatgggatagttgatagtggtatcaaaccttacatttatagaataattgcatgaaattcaacaaaattgctcatattcaatcatttttacttacaaaaaaggcaatttacaaaggttgaacataatatgtaagactgtaagaaaccaagaggaaaaacacaaatattgaacatttattaagtgccagatactgtgctgtcttttacaagaagttaacaatttaatcctcacaaaaactatataaagtaggtwatcactgtattttatgggtaagaaaagcaagcctttaaaagtttcagaatttgcctaagagcatttggagaatattttctattttggattaaaatatttgctcatttgttctttgtcagtttatattgaactcttcc

SEQ ID NO: 929106 - DNA, 704 bp, Homo sapiens
ctcataatagtgagtgggttctcacgagatctgatggttttataagtgtttgacatttcctccttcacacactcacactctcctgttgccttatgaagaagatgcctgcttcctcttctgtcacgactgtaagttccatgaggcctactcagccatgtggaactgtgagtcaattaaacctctttcctttataaattacccagtctcaggtacttctttatagcagtgtgagaatggactaaaagaggaattggtactgcggagagtggggccctgttatcaagatacctgaaaatgtggaagcaactttggaactgcataacaggcagaggctggaacagtttggagggctcagagagaagayagaaagatgtgggaaagtttggaacttcctagagacttgttgaatgcttttgaccaaaattctcataatgatttggacaatgaagtccaggctgaagtagtctcagatggagatgaggaactcaatgggaactggagcaaaggtcaatcttgctatgctttagcaaagaggctggtggcatgttgctcctgccctagagatctgtggaactttgaacttgagagagttgatatgaaattggaacttatgtttaaaagggaagcagagcctaaatgtttggaaaatttgcagcctgacgatgtgatagaaaattaaaaaccattttctggggagaaattca

SEQ ID NO: 929107 - DNA, 759 bp, Homo sapiens
agaattcatcacctactgactaaagagccctagagccatgaataatcagcagcagtacccaggtagtatatgctgtggatatactacacagcatatactagtttgtaaacctagattacaacacccaagtccctgtgaatacctcgaaagctttcccaagaaggaagggtacaaacaagcccagactgtgaagactacaataaatacctaactcttcaatgcccagatgctgacaaacatccacaagcatcaagaccatccaggaaaatatgacgtcaccaaaagaactaaataaggcactagggaccaagtctcaacttgggtgagactctgaaacatgctggcttcaggtgtgacccagcacattcccagcagtggtggctacaaggagagactccttcaagcaaagggaagagtaaacaggattttgccttgcagcttargtaccagtgtgaccaccgtggagtagagcaccaggtgggctcttggggtccttggttccaagaccgggctgttggatggcatttctggacctgtcctgggccagaagggagcccaatgccctgaagggtgagtcccaggcatagcagtattcaccacaagctgactgaacagcccttgagccttaagcgaacatcagcagtagcttggcagtactccggtgggcctatggcgatggtggcatggaaagaagctcctctgcctgtggaaaggggaggtaagagtgggaagaactttgtcttgtgatttgggtgccag

SEQ ID NO: 929108 - DNA, 541 bp, Homo sapiens
aattcatctgagaaaggaacattttgggacccccaaattactaagctaaaggcaaaagtcaagctggaaactgctcagggcaaacctgtctcccactctattcaaagtcatccctctgctcactgagatagatgtgtatctgattgcctcctttggaaaggcttatcagaaactcagaagaatgcaacrctttgtctcccacctcccagtaacctggaagccccttccctgctttgagttgtctccacctttctggatggaaccaatgtacttcttacatatattgattgatgtttcaggtctccctaaaatgtataaaaaccaagctgtgtcctgaccaccttgggcacatgtcttcaggacttactgaggctgtgtcacgggcacgtgtcctcaaccttggcaaagtaaactttcttttttttttttttttttttttttttttgacactcgctctgtctcccaggctggagtgcagtggtgcaatctcggctcactgcaagctccgcctcctatgttcacgccattctcctgcctcagc

SEQ ID NO: 929109 - DNA, 541 bp, Homo sapiens
aattcatctgagaaaggaacattttgggacccccaaattactaagctaaaggcaaaagtcaagctggaaactgctcagggcaaacctgtctcccactctattcaaagtcatccctctgctcactgagatagatgtgtatctgattgcctcctttggaaaggcttatcagaaactcagaagaatgcaacgctttgtctcccacctcccagtaacctggaagccccttccctgctttgagttgtctccacctttctggatggaaccaatgtacttcttacatatattgattgatgtttcaggtctccctaaaatgtataaaaaccaagctgtgycctgaccaccttgggcacatgtcttcaggacttactgaggctgtgtcacgggcacgtgtcctcaaccttggcaaagtaaactttcttttttttttttttttttttttttttttgacactcgctctgtctcccaggctggagtgcagtggtgcaatctcggctcactgcaagctccgcctcctatgttcacgccattctcctgcctcagc

SEQ ID NO: 929110 - DNA, 578 bp, Homo sapiens
cgcctcccaggttcatgccattctcctgcctcagcctcccgagtagctgggactacaggcacccaccaccatgcccggataattttgttgttgttgttgtatttttagtagagacggggtttcaccaggttatccaggatggtctcgatctcctgacctcatgatctgcctgccttggcctcccaaagtgctgggattacaagtgtgagccaccactcccggccggaagatatcatttttaatctggactcatgcagtcactcattgattgatgatctggcagtggtgtctgtcacaagcagtttagtctccagccagagattagagcatttgctctggagtgtgggaagactgcccaaagccaaaattgartggcaaatgtagagtgcaccccagaagtaggtgctagaattgggctttctcccatcactgaacttgagcaggaggagaattgccgaagctgcaggttctcctgagtggtgtaatctctggccaggaacagctttgtagcttgagactggactgcctctgtcattgctgggtgccccagattgctcccttggtcaatcaggagacag

SEQ ID NO: 929111 - DNA, 578 bp, Homo sapiens
cgcctcccaggttcatgccattctcctgcctcagcctcccgagtagctgggactacaggcacccaccaccatgcccggataattttgttgttgttgttgtatttttagtagagacggggtttcaccaggttatccaggatggtctcgatctcctgacctcatgatctgcctgccttggcctcccaaagtgctgggattacaagtgtgagccaccactcccggccggaagatatcatttttaatctggactcatgcagtcactcattgattgatgatctggcagtggtgtctgtcacaagcagtttagtctccagccagagattagagcatttgctctggagtgtgggaagactgcccaaagccaaaattgagtggcaaatgtagagtgcaccccagaagtaggtgctagaattgggctttctcccatcactgaacttgagcaggaggagaattgccgaagctgcaggttctcctgagtggtgtaatctctggccaggaacagctttgtagcttgagactggwctgcctctgtcattgctgggtgccccagattgctcccttggtcaatcaggagacag

SEQ ID NO: 929112 - DNA, 812 bp, Homo sapiens
ttcaggatgatgggagtcttggtaagactggtgaattccatgagtatgagcccactgccacacttctttagctgtaaagtgagtaccttggtcagaggcaatgctgtgtggaataccatgacagtggataaggcattccatgagttcacagatggtagtcttggcagaagcattgcatgcaggataggcaaacctatatccagaataagtgtccattccactgaggacaaacctctgccctttccatgatggaagagcccaaatataatcaacctgccaccaggaatctggctgatctacccgaggaattrtgccatatcgagggcccagtgttggtctctgctgctggcaaattgggcactcagcagtagctatagccaggtcagccttggtaagtggaagtccatgttgctgagcccatgcataacctccatccctgccactgtggccactttgttcatgggcccattgggcgatgacaggggtggctggggaaagagactgagtggtgtccacagaacgggtcatcctatccacttaattattaaaactttcttctgctgaggtcacctgttggtgagcactcacatggatacaaatatcttaacagtttttgaccactcacaaaggtccatccacatacttcttccccaaatttctttgtcaccaattttccaatcatgcttcttctaagtccctgaccatccagccaaaccattggctacagcccatgaattagtatataatcgcacatctggtcatttctccttccatgcacagtgtgcagccaggtgcactgctcaaacttctgc

SEQ ID NO: 929113 - DNA, 669 bp, Homo sapiens
aagaagagtagttatctgcagaagatggcggggcctcgtttcaaaatcctagaggcctccactgtgatcgacctgtgggcgcctgccaaaggctctgaacagcatccctatctgccactgacacatcaagcaccattggatctgctgggttgtatggcccaagtggcagagcaacttgcacagcagcctggacctgttgcagagccttctcctattctgaaccccactcaaaactggcagcctttcaggtcactcaaaaaatgggccagagtaacacacacaaatgaggaatgtgttgcctccaccacccaaataggcccactaggcattgtgcctctttcttggctgtaggaggggccaaatgcagcaacttatccttcaccttagaaggaatakctcaacaggccccaccccactggactcctagaaattttactgaggtataaggtccctgagttttagttgaatttatttcccatcttctggcatgcaaatgtctcacaaataagtccagtgtgtttgctacttgttgctcactggatccaatcagcataatatcgtcaatgtaatggaccagtgtgatatctcacggaagtgaaaagcgatcaacgtctctccgaataagattatgacacaaacctggagagttgatatatccctgaggtagga

SEQ ID NO: 929114 - DNA, 597 bp, Homo sapiens
caattcaactcacttctgaccctaactacctggaattagcacaggacccacaagttaaggattcagtcttacaaaactgctccccatttcaaaccctgatagcaagtccaggccaccagtacctctgacgaaccagctataaagtcaagaggtttctacaacccccgctcagcttcaataatttgctataacagctcataggattcaggaaggcattttacttgctattattggtttattatgaaggatacaactaaggaatggcccaatggaagagatgtatagggcaaggtttgasggcaggagcacagagcttccatgctgtatgcaggtatgccactctcccagagccctgatgtgttcagcaacccagaagcacttagaatcctgtcgttcaggggtttttatggacatttcattacataggcatgattaagtcattggccattggtgactgaactcaatctccagaccctctctccttcctagagattgtgtgtggggctgaactttccaaccctctaatcatgtcttggtctgtctggcaaacagctccatattgaagctacttaagggcccactgagagtcacattagc

SEQ ID NO: 929115 - DNA, 737 bp, Homo sapiens
ccagactgagcaaagagctcaccacatttgaaagcttgaacaaagggggcctaggctaagtccagaggcctagaacaaatgcttttttattttctacataacaaggggaaattccttgttatgtagaaaatagctggagacaaatggtgctatagagtgactcataacaaactacggtgatataggtctagggacaaaagcaggccactgataagtggcagatgcctgatccccctaggtagtggggagtgtgagactgggttataagaagccttcactatcttttaggaccctcccttgaggaggccagtctaccacaattgctttagaatgaaggtcttttggttgctcacaagactataatggtaatttttggctcatcatttttgtgtgtgtgggttttatcttaattcattgttaaagagatagtgggtttcccmtgagctagtttcctatcatctgtgcctatgtttgcttcactgagctatggggaaagagtcactggctgctttgtttacaaaaagaaaggacaggctgagccttaaggagtaggaaggagttccttggcctacccttcatctccacaagtgaaaagccccttagcgtagcagaaaattccaggttgaaggtctctttggagaaggcagaaggagtgacctagactcctgttcacacatctaatcactttccgtcaagatttaaattccaggttgtcatcaatggccgagagtttcccc

SEQ ID NO: 929116 - DNA, 634 bp, Homo sapiens
atttatacatttaacttgtcataggtatgtatgtacagaaaaaaccccagtgtatatacagttcagtattatccatggtttcaagcatccactagggatgttggaatgtatctccatgagtaagagggggctctgtatttttatggatagttgtacggaagtatgtctggaggacaaaaggctacggtctaatggtaatagactgcgggagtggggggtggaatttagcaaggcctgtttgttcagtcttctcttgtcttctttcctttcttccgggtatagggagggcccttctgaaatgagagttttacgaccgattttcaggggaaggtcagtgaggtttaatggcccatttcaggggaaagagggtgagggaagatcagagcgtgaccttctgyttttacggttttctcaatttccttcaagtctaaaatatatagtatgacaagatgacgtattctggggtagcgtgttctgaactccgtcagtatcctcatttgtaaactggggataataatgttacctaactcagaaagatcttgtgatcacgaagttcatacttgtaatacactcagaacagtggctggtaattgcatcagcaacaaatcccatctgaggaaggggaaacaacagg

SEQ ID NO: 929117 - DNA, 605 bp, Homo sapiens
aaacattagagtaatgacatggccaaatgaatataaacatgactgattcaacttcataagtatgaagaaacagactggtcacctgtggaatcatcaggggtccatggatgacttcgagttggcttttctgaggttggtcctgaggtagtaatcattctgacactgggactggatgacctactgctcacctacaggaagaagtcacaggaraaacaaaatgtgattttttgattaaaaaaaatgatgagaacgtttccattaaaaggcaagaagagacttagagatccccccaaaactcttgtaaacaacaaaataaatcctctcttatatatatgtaaaaatttatattcactcacgcatgatacctattaaaaactgatgagcttgcaagaaactaagaaatactctgagattagaaacaaaacaatatcaggaaactagtaagtgcttaagctgacagccctcggaatttcaactaaacaccaatggcctagagctactgttttcacaggctgctgcactcagaggaatggaccataaagccttgggcctttgtaggatggaagtaagactggagaaacctctgcttaaagctaaaactcagc

SEQ ID NO: 929118 - DNA, 528 bp, Homo sapiens
gtttggaacttcctagaaacttgttgaatggctttgaccaaaatgctgatagtgatatggacaataaagtccaggctgaggtggtctcagatggagatgaggaacttgttgggaactggagtaaaagtcattattgctatgcaaagagactggtgacattttgtccctgctctagaggtctgtggaactttgaacttgagagatatgatttagggtatctggcaaaagaaatttataaatggcaaagcgttcaagagatggcagagcataaaagttcagaaaatttgtagtctgacaatgtgatagaaaataaaaacccattttctragaagaaattcaagccagccgcataaatttgcataagtaatgaagagccaaatgttaatcaccaaaacaatgggaaaaaagatctgtagagcatgtcagaggtctgcacagtagcccctcccatcacaggtccagatacctaggaggagaaagtggttttgtgagccaggcccagtgtccctatgctgtgtgcagcctagg

SEQ ID NO: 929119 - DNA, 735 bp, Homo sapiens
cttcattttggccaatttctcccattttgaaagggtgtatttacccaatgcctatacccccattgtatctagaaaataactaaattgcacccagttgagccaagatggccgaataggaacagctccggtctacagctcccggcgtgagtgacgcagaggatgggtgatttctgcatttccatctgagataccggtttcatctcactagggagtgccagacagcaggcacaggacagtggtgcagcgcaccatgtgtgagccaaagcagagtgaggcattgcctcacctaggaagcacaaggggtcacggagttccctttcctgttcaaagaaaggggtgacagacagcaactggaaaattgggtcactcccaccctaatactgtgcttttctgacaggcttaaaaaacggtgcaccaggagatwatatcccacacatggcttggagggtcctatgcccacagagtcacgctgattgttagcacagcagtctgagatcaaactgcaaggcggcagcaaggctgggggaggggcgcccgccattgcccaggcttgattaggtaaacaaagcagccgggaagctcgaactgggtggagcccaccacagctcaaggaggcctgcctgcctctgtaggctccacctctgggggcagggcacagacaaacaaaaagacagcagtaacctctgcagacttaaatgtccctgtctgacagcattgaagagagcagtggttctc

SEQ ID NO: 929120 - DNA, 604 bp, Homo sapiens
taaaaacattgcctctccaccaacaccacccagtggcattctgccagtggcctagaggttgccccattcctgcctaccatggccaacacctgtacacagaactgcagggccctgaggaccagccagcctagcccagcttcaccctcccctccatgccagagcatacagtccaagggccaggggattgcccagcctagtctaccaccactggcacctaaaccctcctcccaagggcctgaagttgagcttacccaccaagccactacaaccacagctggcacctaccagcatgtgctgcctgcaggcctggaractagtgtgcctagcccattgcagccaccaccaacaccagcatgcattacttgggacttagaggttagtcctacaactgccactaccatcactcaaacataccagctgctcaggggcatgagaacccttctacctgtccagcccatggttgtcactactggcatccaagtaagccacttggaggcccaagaatagacccaactggacctgctaacactagtggcagtgtatgccatctagggtccccaggataggcatgatatcccactgatgcctccccaggagactgaag

SEQ ID NO: 929121 - DNA, 648 bp, Homo sapiens
aaggcctggatgagagccctttttctggattggtcccatcagtgcattgttcctgaagtcaggaagtaccttgccagtaagggactgccttttaaaatctttttgatattagacaatgcatctggccacccaaaacctgtgagttcagcaccaaaggtgtcgaagtggtctacttgcacccaagcacaatgtctctaattcagtctctagattagggggctgagaacctttaagtcttgwtacattagatgctatgtagaaaagattattaatgctgtggaagagaaccttggaaagcaaggacatcatgaaagtctgcaaggattacaccgttgaaggcaccatcattattatagaaaaagccaggaacgttatcgagcctgaaacaataaattccttcttggagaaaactgtccagatgttgtgcatgacttaacaggttttacagcagagccactcaaggaaattgtgtatatggcaaaaaaggtggaggttgaagggtttcaagatgtggatcttggagaagctcaaaaactagtaaacaccacatcagaggagttaacagaacacaacttgatggagatgagtgcttaaccggtactggtgatgaggacaaagatatagaagtagtagtgccagaaaacaaat

SEQ ID NO: 929122 - DNA, 370 bp, Homo sapiens
gctaagtccctcactgcccgctcccagtacggggcccgccaagcccacgcccacccagaactctagctggcctgcaagtgccacacgcagccctggttcccgcccgtacctctctctccacacctcccctaaacctgagcggctccggcctcggccatcccaggtccgagccggctccggcctcggccatcccaggaaggarctcccacagcacagcgtgggctgaaggactcctcaagcacggccagagtgggcgctgaggctgaggaggtgccaagagcgagcgagggctgcgagggctgccagcaggctgtcacctcttaagattttcttactgtcttttaaatgctttaagaatttgtaagatggg

SEQ ID NO: 929123 - DNA, 611 bp, Homo sapiens
ggcttctttgtagacgaagctgattctaaaattcatatggaattacaagaggctccaaatagtcacaacaatcttgaaaacaaagaccaaagttagagaactcacacttctccatttcaaaacctactaaaaagcagtagtactcaagacagggtactggcataagtgcagacatatagatcaatgaacaactgagcatccagaaataaagccatacatctatggtcaactgattttcaagaaggatgttaagatcactcaacggggaaagaatagtctcctcaacaaatggtgctgacygggcacggtggctcacaactgtaatcccagtactttgggaggctgaggcaggcagatcacttgaggccagaagttcaagaccagcctggccaacatggcaaaaccctgtctctagtaaaaatacaaaaaattagccgggcatggtggcacatgcctgtagtcccagctacttaggaggctgagggaggagaatcgcttgaacccaggaggcagaggttgttgcagtgagccaaggtcgtgccactgtactccatcctgggtgacagagtgagactctgtctcaaaaaaaaaacaaaaaaatggtgctggga

SEQ ID NO: 929124 - DNA, 597 bp, Homo sapiens
aagtggaatggctcccatggagggactaagatgactggcaggctttaaacagatctttagaggcaaggaactgagagtggatggaggaaagacacacaaactgggctgaagggagaaagagctgggaaccctgaactacacacaggaactaattttttttttttttttttttttgagacagaatctcattctgtcgccaggctggagagcagtggcttgatctcagctcattgcaacctccacctcctgggttcaagcgattctcctgcctcagcctcctgagtagctgggactacaggtgtgtgccactatgcttggctaatttttgtacttttagtagagacagggtttcaccatgttggccaggatggtctygaactcttgacctcatgtccgcctgccttggcctcccaaagggctgggattacaggcgtgagccactgtggctagcacagaactcattcttgaaccacaacagctctgggggaatggagtcgccgactctcactaccagcctctggaactctggcaggaggagaacccttgaccaccatggacaattgaggtggcagggagagctgctttgagaagtggtag

SEQ ID NO: 929125 - DNA, 570 bp, Homo sapiens
tcacgggctgcgtttgagtgtctgtggcttttccaggtgcatggtgcaagccatcagtggatctactgttgtggggtctggaagatggtggccctcttctcacaactctactaggcagtgccccagtagggactttgtgaaggggctccaaccccacatttccatctgtactgccctagaagagattctcgtgaggtccctgtccctgcagcaaacttttgcctgtgcatccaagagtttccatatatcttctgaaatctaggcaaaggttcccaaacctcaattcttgacttctgtgtaccttcaggctcaagaccacgtggacactgccaaggcttggggcttccaccctctgaagccacagcctgagctgtacattggccttttcagccacacctggagtggctgggacacagagcaccaagtccctwggctgcacacaacacagagaccctgggcctggcccatgaaaccactttttcctcctgggcctctgggcctgtggtgtgaggaatggccgtgaagctctccgacatggcctggagatattttccccatagtcttgaggat

SEQ ID NO: 929126 - DNA, 691 bp, Homo sapiens
atgtgctttgttaaacagatgcttgaaggcagcatgctcgttaagagtcatcaccactccctaatctcaaatacccagggacacaaacactgtggaaggccgcagggtcctctgcctaggaaaaccagagacctttgttcacttgtttatctgctgaccttccctccactattgtcctatgaccctgccaaatccccctctgtgagaaacacccaagaatgatcaataaaagaaaaaaaaaagaaaaacagtataaagtttcctcaaaaactaaaactataactaccatatgatccagcaatctcaytacttggaattaatccaaaggaaatgaaattattacatcaaagagacatctgcacccccatgttcccagtggtactattcacaatagccaagatatggtatcaacctaagtttccaataactgatgaataaagaaagtgtggtatatatactcaatggaatgctattcagccataaaaagtaaagaaactgtcatttgcagtaatatggaaggactggaggaggttatgttaagaaaaataggccaggaacagaaacatacactgcagattctcactcatatgtggaagctaaaaagaagttcatctcacagaagcaaaaaagtaaaacagaggatactagatgctgggaagagtagggggaagtgaggaatagggagagattt

SEQ ID NO: 929127 - DNA, 426 bp, Homo sapiens
aaaaaaagaaaagaaaactgtaataggctgaaggtgggaatgacttaaaacaggtaaaagagatcattttggtgtgacagaaatgttctaaaacgggattgaggtaatagttgcatggcactgtaattttactaaaaagcactgaattgtgcacttaaaaagaattaatatgactaacaaattcccccaaaaaacytattaatataataaatattgtgacccccccccccatattactcccttgaaattaacaccagcatttaggtctattatcaagcaaatctccatgttttacttgaattaaactccaaagcataattttagtacatgggagcctccagatactgaattgcattgttgtcctctttaataaaccagtactgtccttgaacatacaacatgcaattttttttttttggggggggg

SEQ ID NO: 929128 - DNA, 584 bp, Homo sapiens
taaaattgtactcttggtcaattgtttataaaataagatatggaaacactaatacattgctggttgcagggtaaaatggtgcacccactgtggataacagtttggtggttcctcaataagttaaacatagaattaccatatgattcagcaattccacatttatttatttattttttgagatggagttttgctctgtcacctaggctggagtgcagtggtgcaatcttgtttcactgcaacctccgccttctgggttcaagtgattctcttgcctcagcctcccaagtagctgagactacaggtgcttgtcaccacgcctggctaatttttttttttttttttttcagtaaaggcaggktttcacgtgttggcttggctggtctccaatgcctgacctcaaatgattcacccacctgggcctcccaaagtgctgggattacaggcatgagccaccacgtctggctcagcaattccacttttagatgtatactccaaataatgaaagataggtgtttaaacatgaacttgtacacagatgttcacagcagcacaattcacaatagccaaaaggtagaaacagttca

SEQ ID NO: 929129 - DNA, 652 bp, Homo sapiens
gccatgactgtaattttcctgaggcttccccagccatgtggaactgtgagtcaattaaacctctttcttttttttttttttttaataaattacttagtcttgagtatttcttcaaagcagcatgagaacagactaatacagtaaattggtactgaggtggtggggcactgctataaagatacttgaaaatgtggaagtgactttggaactggctaacaggcagtgttgaaacagtttagagggctcagaagaagacagaaaaatgtgagaaagcttggaacttcccagagacttggagggctcagaagacagaaaagtgtgggaaagtttggaacttcctagagacttgttgaacggctttgactaaaatgctgatagtgatatagacaatgaagtccaggctaaggtggtctcagatggacctgaggaacttatcgggaactgaagtaaagatcactcttgctgcgctttagccaaaagactggwgactttttgcccctgccctagagatctgtagaactttaaacttgagagagatcatttagggtatctggaggaagaaatttctaagcagcaaagcattcaagaggaagcagagtataaaagtttggaaaatttgcagcctgacgatgagacagaaaagaaaagccca

SEQ ID NO: 929130 - DNA, 652 bp, Homo sapiens
gccatgactgtaattttcctgaggcttccccagccatgtggaactgtgagtcaattaaacctctttcttttttttttttttttaataaattacttagtcttgagtatttcttcaaagcagcatgagaacagactaatacagtaaattggtactgaggtggtggggcactgctataaagatacttgaaaatgtggaagtgactttggaactggctaacaggcagtgttgaaacagtttagagggctcagaagaagacagaaaaatgtgagaaagcttggaacttcccagagacttggagggctcagaagacagaaaagtgtgggaaagtttggaacttcctagagacttgttgaacggctttgactaaaatgctgatagtgatatagacaatgaagtccaggctaaggtggtctcagatggacctgaggaacttatcgggaactgaagtaaagatcactcttgctgcgctttagccaaaagactggagrctttttgcccctgccctagagatctgtagaactttaaacttgagagagatcatttagggtatctggaggaagaaatttctaagcagcaaagcattcaagaggaagcagagtataaaagtttggaaaatttgcagcctgacgatgagacagaaaagaaaagccca

SEQ ID NO: 929131 - DNA, 709 bp, Homo sapiens
ccagctgggctcctgagtctggtgggaacttggagaatctttatgtctagctaagggattgtaaatacaccaatcagcactctgtatctagctcaaggtttgtaaacacaccaatcagcaccctgtgtctagctcagggtttgtgaatgcaccaatcggcactctgtatctagttaatctggcggggacttggagaacctttatgtctagctaagggattgtgaatgcaccaatcagcactctgtatctagctcaaggtttgtaaatgcatcaatcascactctgtgtctagctcagggtttgtaaatacacaaatcaacactctttatctagctaatctagtggggacgtggagaacttttgtgtctagctcagggatagtaaacgcaccaatcagcatcctgtcaaaatggaccgatcagctctctgtaaaacagaccaatcggctctctgtaaaatggaccaatcagcaggtcagcaggatgtgggtggggccagataagagaataaaagcaggctgccagagccagcagtggcaacccgctcgggtccccttccacactgtggaagctttgttctttcgctctttgcaataaatctcgctgctgcttactctttgggtccatactgcctttatgagctgtaacactcactgcgaaggtctgcagcttcactcctgaagccagcgagaccatgaaccccccgggag

SEQ ID NO: 929132 - DNA, 700 bp, Homo sapiens
ctcctgagtctggtgggaacttggagaatctttatgtctagctaagggattgtaaatacaccaatcagcactctgtatctagctcaaggtttgtaaacacaccaatcagcaccctgtgtctagctcagggtttgtgaatgcaccaatcggcactctgtatctagttaatctggcggggacttggagaacctttatgtctagctaagggattgtgaatgcaccaatcagcactctgtatctagctcaaggtttgtaaatgcatcaatcagcactctgtgtctagctcagggtttgtaaatacacmaatcaacactctttatctagctaatctagtggggacgtggagaacttttgtgtctagctcagggatagtaaacgcaccaatcagcatcctgtcaaaatggaccgatcagctctctgtaaaacagaccaatcggctctctgtaaaatggaccaatcagcaggtcagcaggatgtgggtggggccagataagagaataaaagcaggctgccagagccagcagtggcaacccgctcgggtccccttccacactgtggaagctttgttctttcgctctttgcaataaatctcgctgctgcttactctttgggtccatactgcctttatgagctgtaacactcactgcgaaggtctgcagcttcactcctgaagccagcgagaccatgaaccccccgggag

SEQ ID NO: 929133 - DNA, 571 bp, Homo sapiens
tccatgagtagcaagaatggaaacctaagttctctacacaaagaaaacttgagatgggatgtctgcataaagcctgaagcttcaaaggactgtctgaattcgggtcccagaataaacactgccactgcccgagggatgcagggagtaagccagacaaccactttggaataagtcacctccgagaagttagacgcccaggcctgctctgtgcatgggcatcaagtccaaatgcacacagttcacatgccgtagaaatcctgaactgagaaacaaacctaaaaatgcatccttgaagtctttagggcactgagcaaagacaaactcaaaacctctcaatacagatgtatttacagcttagggcatgtgttagacaattactactagagataagctcagagtaaaagaaagattacaaaacaaagaagaaacaacyctttgcctgtctgagaaataatagcaaacacagcaaatgattaaactcacataacaggaaccacaggagcagtttgaaagggaacagggaaagcaggtttgaaaaagagctgaataaaaatttcagaaaggaaataaa

SEQ ID NO: 929134 - DNA, 644 bp, Homo sapiens
gtggaaattagaattctttcctcccacagaggctggaagacagacaaaggcccatccttcccgttgattacatttcaatggaatggctcttgggttttagagaaagacacttctaagtagtaagagatggatattcacatttgtaagctctttttagtacctgctctaagaaaggaaatttgggggcctacataaggtgtttgctagaacaaacatattctcctggccatgatgctctttctcaggcaggcatttctacgacggacagagggttagggtcatcctagggacctgaccctctycttcccccccacctttttttttttttttcattttttgagttttgctcttgttgcccaggctggaatgcagtggcgcgatcttggctcactgcaacctccgtctcctgggttcaagctattctcctgcctcagcctcctgagtagatgggtttacaggtgtgcgccaccacgcccagctaagtttttgtgtttttagtagagacaagctttcatcatgttggccaggatggtctctatctcctgaccttgtgatccacctgcctcggcctcccgaagtgctgggattacaggcgtgagcaactgcgcccagactcaagtttttcttataagtgtaaccgccca

SEQ ID NO: 929135 - DNA, 644 bp, Homo sapiens
gtggaaattagaattctttcctcccacagaggctggaagacagacaaaggcccatccttcccgttgattacatttcaatggaatggctcttgggttttagagaaagacacttctaagtagtaagagatggatattcacatttgtaagctctttttagtacctgctctaagaaaggaaatttgggggcctacataaggtgtttgctagaacaaacatattctcctggccatgatgctctttctcaggcaggcatttctacgacggacagagggttagggtcatcctagggacctgaccctctccttcccccccaccttttttttttttttycattttttgagttttgctcttgttgcccaggctggaatgcagtggcgcgatcttggctcactgcaacctccgtctcctgggttcaagctattctcctgcctcagcctcctgagtagatgggtttacaggtgtgcgccaccacgcccagctaagtttttgtgtttttagtagagacaagctttcatcatgttggccaggatggtctctatctcctgaccttgtgatccacctgcctcggcctcccgaagtgctgggattacaggcgtgagcaactgcgcccagactcaagtttttcttataagtgtaaccgccca

SEQ ID NO: 929136 - DNA, 501 bp, Homo sapiens
gctttaatgcttagtcctcaacccctaaccctccccacagtgcttcctccactagtcctctttacatagtccaaatcccccggggccggggccgcaggctttctctgcccagaggacgtgcagggtgtcataagatgacacccttctattcctaawctgattaagggcacaggctttgtaatgtgacaggcttgagttttaatccagattcagccatctccttgctgtgtggccttgagaaagtgacttcacttctccgaactcagcttcctcatctctaaaatgggagaatagcctgtggcttgtgggactgttggaggacaaaggacaaatgaattaactgatgtaaagggacagcatagggacttatttttatctctgctaccatctcccagccaagcagcctcaagcacagaagcccacacagctccctctggcccttactctcaacatctggttaatcccaggtcttatcaattcagccacttcctccgaagtgtc

SEQ ID NO: 929137 - DNA, 501 bp, Homo sapiens
gctttaatgcttagtcctcaacccctaaccctccccacagtgcttcctccactagtcctctttacatagtccaaatcccccggggccggggccgcaggctttctctgcccagaggacgtgcagggtgtcataagatgacacccttctattcctaaactgattaagggcacaggctttgtaatgtgacaggcttgagttttaatccagattcagccatctccttgctgtgtggccttgagaaagtgacttcacttctccgaactcagcttcctcatctctaaaatgggagaatagcctgtggcttgtgggactgttggaggacaaaggacaaatgaattaactgatgtaaagggrcagcatagggacttatttttatctctgctaccatctcccagccaagcagcctcaagcacagaagcccacacagctccctctggcccttactctcaacatctggttaatcccaggtcttatcaattcagccacttcctccgaagtgtc

SEQ ID NO: 929138 - DNA, 706 bp, Homo sapiens
tcccctgctgccctctggtgcctctccacttcccagctcatccatccattcctcccacacgcatgtccactcactcacagtcccctgcctgccccattctaccagccacagaaactacagtcctaagacagagggaccccttgggtggggaccctgcctggagtggcacccagaagtcttcactcgagatgaaatttgttcacaacttttctgattctggtttttggtgcgttttttttttttttttttttttttttggagacagagttttgctctgtgttgcccaggctggagcacagkggcacaatcttggctcactgcaacctccacctcccaggttcgagcagttctcctgccttagcctcccaagtagctgggattactggcatgagccactacacccagccaatttttgtatttttagtagagacagggtttcaccaggttggccatgctggtctcgaactcctggcctcaggtgatccacctgcctcagccttccaaagtgctgggattacaggcatgagccaccacgcgtggctctagtttttgtatttttattttatttatttatttatttgtttatttatttattttttttttgagacagagtctcgctctgctgcccaggctggagtgcagtggcgcaatctcagctcactgcaagctccgcctcccgggttcaggccattctcctacctcagcc

SEQ ID NO: 929139 - DNA, 706 bp, Homo sapiens
tcccctgctgccctctggtgcctctccacttcccagctcatccatccattcctcccacacgcatgtccactcactcacagtcccctgcctgccccattctaccagccacagaaactacagtcctaagacagagggaccccttgggtggggaccctgcctggagtggcacccagaagtcttcactcgagatgaaatttgttcacaacttttctgattctggtttttggtgcgttttttttttttttttttttttttttggagacagagttttgctctgtgttgcccaggctggagcacaggggcacaatcttggctcactgcaacctccacctcccaggttcgagcagttctcctgccttagcctcccaagtagctgggattactggcatgagccactacacccagccaatttttgtatttttagtagagacagggtttcaccaggttggccatgctggtctcgaactcctggcctcaggtgatccacctgcctcagccttccaaagtgctgggattacaggcrtgagccaccacgcgtggctctagtttttgtatttttattttatttatttatttatttgtttatttatttattttttttttgagacagagtctcgctctgctgcccaggctggagtgcagtggcgcaatctcagctcactgcaagctccgcctcccgggttcaggccattctcctacctcagcc

SEQ ID NO: 929140 - DNA, 592 bp, Homo sapiens
gatcagatggctgtaaatatgtggtgttatttctgaggactcggttctgttccattcatctatatatctgttttggtaccagtaccatgctgttttggttactgtagacttgtagtattgtttaaagtcaggtagagtagtgcctttttgcttaggtttcttgttctttttgcttaggattgtcttaactatatggcctctttttttggttccataggaaatttcaagtagttttttctaattctgagaagaatgtcaatggtagcttgatgggwataacattgaatctataaattgctttgggcagtatggccattatggccattttcatgatattaattcttcctatccatgagcatggaatttttttttttttttgcatttgtttgtgtcctatcttatttccgtgagcagttgtttgtagttccccttgaagaggtccttcacatcgcttgtaagttgtattcccaggtgttttattctctttgtaacaactgtgaatgggagttcattcatgatttggctctctccttatctattgttgatgtatagtaacactcgtgatttttgcacattgattttgtatcctgaa

SEQ ID NO: 929141 - DNA, 615 bp, Homo sapiens
gagtttttgggctgagatgatggggttttctaaatatagaatcatgtcatttgcagacaaggacactttgacatcctctcttcctatttgaatatgctttatttctttctcttgcctgactgccctggccagaacttctaatacaatgttgaataggagtggtgagagaggacatcattgtcttgtgctggttttcaaagggaatgcttccagattctgcccattcagcatgatattggctctagsttgtcataaatagctcttattattttgagatatgttccattaatatctagtttactgagagtttttaaagtgaagggatgttgaattttatcaaagacattttctgcatctattgagataatcatttgtttcttgtcattggttttgtttatgtgatggattacatttattgattttcctatgtggagccagccttgcaacccagggatgcaactgacttgattgtggtggataagcttttaataactgcttagtgtaattgtttaataattgctaagtgtattttgatacagaaagcatcaaatttttaagggaagaaaataaaccatcgaaatggttctttgtagatcaataattgttttagcagag

SEQ ID NO: 929142 - DNA, 566 bp, Homo sapiens
tgcaaaggacattatttcattctttttggtggctgtgtagtattccatagtgtatatgtaatatattttctttacccagtccaccaattatggccacctaggttgattccatgtctttgctgttgtgaatagtgctgcaatgaacatgccagtgcatgtgtctttttggcagaacactttgggttttttgggaggtatatgcccagtaacgggattgctggattggatgatagttatgttttaagtcctttgacaaatctccaaactactttccactgtggctgaagtcatttacattcccaccaayaatgtataagtgtccccttttctctgcagcctctccagcatatattattatttgactttttaataacaggcattctgattggtgttagatggtatctcattgtggctttgatttgcatttctctgatgactagtgatgtgtagcatttttttttcatatgtttgttggttgcttgtgtgtcttctcttgagaagtgtctgttcatgtcctttgcccatttattaatggggtgatttgctttttgcttgttgatttaagt

SEQ ID NO: 929143 - DNA, 755 bp, Homo sapiens
cgtagggcgagattccccaattctgacttttcactactatcccccacaggggcggggctccaactccaggtaaccagaccaggcaacctggacttccaattagcaggggagtccccaagccagcctggccaatctcggccggctagccaagacgaccagacgtgacgtcagacatgattaagttggcgcgtcacctagacgtcagcctcttacctctcggacgtcccgtcccaggagcaaaactctagtgactttgggcccgcccccgtgagagtggagggcggccgatgagggcggttctgaagggaacaagaccaatgagacgakcccggggcggggcgcggggccggagggtggggcgggtggcggcggtggcagtccgaggtctggctccgcgcagtatatgacagtacgtcagcagcgggatggccctagcagtggcggcggctgcagaagcccaagcagccgcggccgcagtggaggctagagccggagcggcggcggcggcggcaccccggggagtttaagatggcggcgggggggacagggggcctgcgggaggagcagcgctatgggctgtcgtgcggacggctggggcaggacaacatcaccgtactgcatgtgaagctcaccgagacggcgatccgggcgctcgagacttaccagagccacaaggtgagcgggccggccggcaggctgggctcagagaggcagagcgcacccctcacggcctggccgcgcccgggtgcggggcc

SEQ ID NO: 929144 - DNA, 659 bp, Homo sapiens
gtttggacccaaccagtgaagctgtggatttaagatgtccacaaaatattaaagcaagtcactccaagatggaacttccagatttgttttgaaataataataataataatttgggcggaaatgatgcttaatgcacaatcatttcccaccaaagtgggggctaccaactgcaagtgtcagagcccaacagggaggaaacagtctcttctggcatggtccatgactcacttctccctggacctrgaaagggaaggcaggaggtatttatcttcctggtttgctgcactgtttcttcccttcttgtgtaggaagatactctgtgctccatctattttagtcacgctgagtccctctccatttattacattctaatctgaacttcttggattttcaaatccccactttgtaaaactgatcagttttgtatgtgtgaacacatttccatgctggctgcctcaggcaggctcagtcttgagagctgactgataactgaggtcccagctactgccaactcttctcaggcaacaggtggctctctttcggctttcctttccatgaagtattagactagatagtaacataataggaaacgcttctatttttattttctttctcttctttctctttttctttttggtttgttttgacttgaaatgttg

SEQ ID NO: 929145 - DNA, 597 bp, Homo sapiens
tgccgcaacctgcttctgctttgggtgccggcgtctggatgaggggaatgtggtggtggccaaaaatcttggagatgccagcaaccctgaagccccaaagtgggtgttacagcatgctgcagttttggctcagggagccccaaagtctargcccccagaagggttgtagctcttctttccttcctgctgctcacagcacggtgaatggggagcaaggcagtatttcagcctatttgtgctatagctctttcagtcctgctgccccactctggcttgcggcactggggctggcctggccctgccactgcttcccgttgcatggggctgctggacaccagcggagggtggagagttacagtgttacagtagctcctttgtcactgctgtttggcaggtctcgagtttttgtcctgcatccaagaagaatgaggttacgcagacaaccagaggatgagaagggaggagaagagttttactgagccatggaacaagctctcagtggagagctgactcaaggcgggtggtcccccaccaggaggcaggtagtttgccagtgtggctcagaatgggagagtgcatgctgattgggttgtgagt

SEQ ID NO: 929146 - DNA, 586 bp, Homo sapiens
tagtttagtaagttgggtgataaaatctttgagaagccatgcttttcattggaactacaacctactccagacagagaaagaagataataaacttctacaaaatacagatacagccaaccacttatgctgaagaggatgacatagaaaaaaaggcagatggggaattaaaagtttttgtttattttaatctttccttgttcatcagtaaatcaaatgtagaagatactggtagaatgtgcatatgtcaagaaatgaaataaaaacagttgagatagttgcagcatccccmctgttcttgtagttagctcattggatctgatattgcatgatacaaatgaatgataaaatccttggtaataattctaatttaaattttctttacttacaattatattaaatagctaaaaaaattaccattataaggttaagaaagagagaccaggatatacatttaaaggttctatattttagtatatttaatgtactttttctgcttttctggctttttaaagagatctcaatttttagttagctttggtccctccaaattgtataatgaacttagtgtcacatgaatatgtatttc

SEQ ID NO: 929147 - DNA, 645 bp, Homo sapiens
tgttggaataccctgccgtgtgaggtgtcagtgtgcctctgctggggggtgcctcacagttaggctgctcaggggtcaggggtcagggacccacttgaggaggcagtctgtccgttctcagatctccagctctgtgctgggagaaccactgctctcttcaaagctgtcagacagggacatctaagtctgcagaggttactgctgtctttttgtttgtctgtgccctgcccccagaggtggagcctacagaggcaggcaggcctccttgagctgtggtgggctccaccmagttcgagcttcccagttgctttgtttacctaatcaagcctgggcaatggcgggcgtccctcccccagcctcgctgccgccttgcagtttgatctcagactgctgtgctagcaatcagcgagactctgtggggtaggaccctccgagccaggtgcgggatataatcttgtggtgtgccgttttttaagcctgtcagaaaagcgcagtattcgggtgggagtgacccgattttccaggtgccatccgtcacccctttctttgactcagaaagggaactccctgaccccttgcgcttcccaagtgaggcaatgcctcgccctgcttcggctcgtgcacggcgcgcgcacccactgacct

SEQ ID NO: 929148 - DNA, 644 bp, Homo sapiens
cctgactgtatctcacaggggccctcgagggagacagccagcagaatcagggaggagtcgcaggattaaagaagcttccaactgaaattagtaatagttttgacagggtacaaattttcttgagcagaatctggaggtcatacgtgaactgctgcagatacaagcacaggagccaccaatgacagtgtgggcagatggggatgggcgatgtttggaagctgtgcttgctttctcagtggggaagctcagggtctggggcaaggtctgagcagggcactgcaaaagtgacatgagccttgccaactgcctaggacctaggtgaggcctctcactaccagttatccrccacttccctggtgaactatataacatagcagaggcagccataatcccctctggaaaataaccccattaacctgagaaccacctccccttccccctcagtggccacagcaagccctgcccaagaagaatctgaggccagacccacctaaccctgcccccacctggtggcatttctttacccaccctggtagctgaacataaaagacagaaacttttggaaggcttatagccccacctattgcctgagaaaacaaaatacttaccttggccaacttagggcaagtttagatatccctgct

SEQ ID NO: 929149 - DNA, 619 bp, Homo sapiens
cctgcccacattaggtgatggtggctcttccttattcagtccattgattcaaatgttgatctcttctggtaataccctcaccaacatacccagaaataatgctttatcagctatctggtgaagttaacatctaacttgcatcagctaggtcttctagtataatgttaaataggcctggtgagcgtcaacatccttgccttattcttgatcttactaagaaagcatcaaatttcttattgtatatgctataggttttgtacatgctctttatcaagttgaggtartccctctctattcttagtttgctaagagcttttgtcataaatgggcattggattttaacaagtgattattctgaatctacctatatgatcatatgatttttctccattagactattgatgtgaggatctttgaatgttgaaccagcctcatatactttcaaataaatcatatttggtcatggtgtataattgtttgtaaacagtttcgtattcaattagctaatatcttgttgaagatttttgcatgtatgttcatgagagatattggtttgtagtttttcttttctgtcaggtctactttggtatcacggtgatattggcctcgtagaatgagt

SEQ ID NO: 929150 - DNA, 617 bp, Homo sapiens
agctggattggttacagattgccatttacctcatttgaacacaatttgaacactcagcagtgtattactggttgaagtatggctgttaggattggccaagactcaaccactgttatgggtgcatactcctaagtcagggtttcaatcttgtctacccrctaagttaggttgcagttcgtccacaaggactcaaatatagaagtacaaagtccttctcaggccatatttagtttgctttaacaccatattttagctattgtgaataatgctatgtgcatggatatacaaatacccttttgaaaccttgttttcaattattttaagtacatattcagaactggaattgctggatcatatggtaaatctatttttaattttttgagaaattgctttactgtttcccacagtggctgtactagtttatgttcccactaacagtacacaagtgttccaatttctccacatctttaccaacacttattttttttttcctgttagcagccatcctaatgggtgtgaggtagtatcttattgtagttttgatttgaattttcctagtgatattgagcatcttttcatgtgcttattggctatttgtatgtcttctttggagaaat

SEQ ID NO: 929151 - DNA, 689 bp, Homo sapiens
tgtatgaagtgtctgtcagcccctgctgggaggtgtctctcagtcatgaggcatgggggtcagggacccacttgagaaggcagtctgtcccttagcagagctcaagtgctatgctgggagatctgctgctctcttcaaagccagcaggctggaatgtctaagtctgctgaagctgcacccacagcagccccttcccccaggtgctctgtcccagggagatgggagttttatttataagcccctgactaccggctgctgcctttctttcagagatgccctgccagagaggaggagtctagagaggcagtctggctacagcggctttgctgagctgctgtgggttccacccagttcgaacttcccagwggctttgtttaaactgtgtttgtgtttatgctttgtttacactgcatttgtgtttacactttgtttacactgtgtttgtgtttacaccgtgtttgtgtttacactttgtttgcatgcccactcaggcctcagtaatggtggacacccctcctcccaccaagcttgagcaccccaggtggacttcagactgctgtgctggcagcaagaatttcaagccagtggatattagcttgctgggctctgtgggggtggatctgctgagctagaccacttggctccctggcctcagccccctttccagggtagtgaacagttctctctca

SEQ ID NO: 929152 - DNA, 702 bp, Homo sapiens
taagggtgcaggaattcttccttgagtgatttgttttagcccttggaatatctgcttttcctacattccttaaaattctctttctttctagcctatctcttgttatagttaataatttgttcatattaaactttcaaattatctggtttctgtctcctaataggaccytgattaatattaataataaatgaataaatgaaacattaacattcccaattgttctgggaagtttaaatgttttatgtaagatgaagatgcagattttcagaattaactttttgtgttgaatagatatactgttatctatgattaaaatatgtgttaagacaatatgtagattgtgatcctgtttctgttctaaaaaattggtgtgtgccggttccaagatggccgaataggaacagctccagtctacagctcccagcgtgagcaacacagaaaacgggtgatttctgcatttccaactgaggtactgggaccatctcactgtggcttgtcagacagtgggtgcagtccatggagcgtgagctgaagcagggcagggcgttgtctcacccaggaagtgcaaggggtcggggaattccctttcctagccaagggaagccgtgacagacagtacctggaaaatcgggacactcccaccctaatactgcgcttttccaatggtcttagcaaacggcacaccagaagattatatcccat

SEQ ID NO: 929153 - DNA, 860 bp, Homo sapiens
gtaagggtgcaggaattcttccttgagtgatttgttttagcccttggaatatctgcttttcctacattccttaaaattctctttctttctagcctatctcttgttatagttaataatttgttcatattaaactttcaaattatctggtttctgtctcctaataggaccttgattaatattaataataaatgaataaatgaaacattaacattcccaattgttctgggaagtttaaatgttttatgtaagatgaagatgcagattttcagaattaactttttstgttgaatagatatactgttatctatgattaaaatatgtgttaagacaatatgtagattgtgatcctgtttctgttctaaaaaattggtgtgtgccggttccaagatggccgaataggaacagctccagtctacagctcccagcgtgagcaacacagaaaacgggtgatttctgcatttccaactgaggtactgggaccatctcactgtggcttgtcagacagtgggtgcagtccatggagcgtgagctgaagcagggcagggcgttgtctcacccaggaagtgcaaggggtcggggaattccctttcctagccaagggaagccgtgacagacagtacctggaaaatcgggacactcccaccctaatactgcgcttttccaatggtcttagcaaacggcacaccagaagattatatcccatgcctggcttggagggtcccacacccacagagcctcgctcactgctagcacagcggtctgagattgaacagcaaggcggcagtgaggctgggggaagggcgtctgccattgctgaggcttgaataggtaaacaaaatggccaggaagctcgaactggg

SEQ ID NO: 929154 - DNA, 735 bp, Homo sapiens
gtattccatggtgtatatataccacactaaaaaaaaatccaaaccaccattaatgggtacctaggctgattccatgtctttgctactgtgaatagtgctacaatgaacatacaagttcatgtgcccatttggtagaaagatttatttttcttggggtacatacccagtaatggatttgttgggtcaagtggtagttgtgctttaasttctttgaaatcttgaaactgctgtccacagaagctgaactaatttacatttccaccaatagtgtaaagtgttccttttttttcctgctgcctcaccagcatctgctgttttttgtatttttaataatagccattctgactggtgtgagatggtatctcattgtggctatttgatttacattcctttgatgattaatgatgttgagtattttttcatatgtttgttggtcatttgtggttttttttgagaagtgtctgttcatgtcttttgcccatttttaatggttttttttttgcttgttcaattatttgagttccttatagattctggatattagacttttgtggggcatagtttacaaatattttctcccattttgtaggttgtctgtgtactctgtgaatagtttcttttgctgtgcaggaagtctttagtttaaataggtcccatctgtcaattcttgtttttcttgcttttttttttgagtgcttagtcataaagtatttcccaaggctgatgttcagaatg

SEQ ID NO: 929155 - DNA, 694 bp, Homo sapiens
ccatctatcaacatgattaatttgattatcaatatgattaatttacagaattcactcctcagaagaaccaggacccaaacagtctgcttaggtccaaaatttaggagtcagcctccactcacttttcttcacaacctgccgggtcccatccaatccactttggggagcccctggaacctctttccagaaggtctagaatctaagtccttccatgatctttgttgatgctactccctcaatccacccccacctttatgctggaggtttgcagctctctgctcctcctcccaggcccataagccatgccacacggcagtctgaggggccttctaaaaatataaaccacagcatgtcccccataagcaccaaaatgcttgctagcagctccccatgggacttagaacccaaatgtcacttcagcctggaaggtycttcacgtctggccctcccccatcccacccgtctctgccctacccacactgctccttgtgcagctctgatgagctcattcccaccccaggacctttgcactggttgcaaaactcttctcccaaactcagacatcacctccatggcctccttacagagaaacactcttcctgttcctcccacagccacactgtatttgcttagcttatttaatcaaacagaattattttatatctattccaggttgtggtttttgtttgtttgt

SEQ ID NO: 929156 - DNA, 793 bp, Homo sapiens
gttctgcatccacagctacaccgctgcccaccctcatctgtctaatacctacccacccgtgctgttcagacaaggaaaccgctacctcggtggagtaacttaccaagatccattgcacagagagcagcactgggctcaatgtaggcaggtctatttccatgccccatccatgatattccacctgcagggagaacgaggatggagcttgcttaaatttgtcatgaaatggacagtttaagtgaaaccgtttgactgtttttgctgcataagccttagtgtttcttttcagtctgcaagatgagcaccattggagaaaaaataacttccagacatcagctacccaggtgaagaacaagggctcctttctctgcctgggtttggcaggtgtctgatttttatcacatggcattaatgtatggctctgcactctgggccactgttatgaattatcatttcccatgtctccagcacctggaaagatggtttactacattgaaagaaataataattcaggtatgtattgacaagcaaagcagtatatactcactccatgtgaagggagatgaatatcgctcagcgttatttaaataataggtatctcaatagacatacaaatctaagtggacttaatccatgtctatttgactgacaagcaygtaatccatgctgtgtggcctcaaattgaccatagaacaattgatgtggcggttttgaattgttgatcaacggcacagccattgatggaatccactgtgccatgacctgtgggactggaacctggatccagagtacc

SEQ ID NO: 929157 - DNA, 566 bp, Homo sapiens
agggcccatagaagtcagaaatccagcagggccatcaaatttatagttccaaaataatctcttttgactccaggtcgcatatcaggtcactctgatgcaagaggtgggtccccatggtcttgggcagctctgtccccatggatttgcaggagwcagcctccctcctagctgctttcacaggcttgtgttgagtgtctgtggcttttccaggcacactgcacaagctgttggtggatctaccattctggagtctggagaactgtggccctcttctcacagctccacctaggcagtgccccagtagggactctgtgtgggggactccaatcccacatttcccttctgcactgccctagaagaggttttccatgagggccctgcccctgcagcaaactcttgcttgggcatccaggcatttctgtacatcttctgaaatccaggtgcaggttcccaaacctcaattcttgacttctgtgcacctgcaggctcaaccccacatggaagctaccaaggatagaggcttccgcctctgaatccaccacccaagctgtacattggtccctttc

SEQ ID NO: 929158 - DNA, 689 bp, Homo sapiens
tatcaacatgattaatttgattatcaatatgattaatttacagaattcactcctcagaagaaccaggacccaaacagtctgcttaggtccaaaatttaggagtcagcctccactcacttttcttcacaacctgcccggtcccatccaatccactttggggagcccctggaacctctttccagaaggtctagaatctaagtccttccatgatctttgttgatgctactccctcaatccacccccacctttatgctggaggtttgcagctctctgctcctcctcccaggcccataagccatgccacacggcagtctgaggggccttctaaaaatataaaccacagcatgtcccccataagcaccaaaatgcttgctagcagctccccatgggacttagaacccaaatgtcacttcagcctggaaggtycttcacgtctggccctcccccatcccacccgtctctgccctacccacactgctccttgtgcagctctgatgagctcattcccaccccaggacctttgcactggttgcaaaactcttctcccaaactcagacatcacctccatggcctccttacagagaaacactcttcctgttcctcccacagccacactgtatttgcttagcttatttaatcaaacagaattattttatatctattccaggttgtggtttttgtttgtttgt

SEQ ID NO: 929159 - DNA, 611 bp, Homo sapiens
ccgcctcggcctcccaaagtgctgggattacaggcttgagccaccgcgcctggcctctgtctttatttttagaaatgtgtgtggaaaagattagattctgcaaagtggcaaatggctgaaagatgttctttggagatcacttttccagtcctgggaagcatgcggagagggatggacccacagcctcaactgctccaggggcaagggcaatgcggaaagacatggcagggtacatcgccataactcacaaagggtaaagascatgaggctagttgaggactgtaccacatctgcctctcactgaagcaagaggaagatcatctcttttcctttttctcacttagaggggagtgcactcccaaatctgcaattctttggctgctattggttgttgttgctgctgcttgcattctctggattaaaatgaaacacacgttccaaaccgtgaaaggtcagcaagaaagagagaagtgtccacaggctgcagtctgaggatttgatgagctggttcttgaacttttgtgggaaaatctgagaagggaaagccggttaaagggccagggttcagcaagcctggcttcttggggcagcatctctccacttgcaggggt

SEQ ID NO: 929160 - DNA, 617 bp, Homo sapiens
tgcaggtttttgtacagaactaagttctcatctcttttgggtagatatccagaagtgtgatttctgtatcacatggcaacagtgtgtttagttttgtaagaaactgccaaactgttccccagagtggctgtaccatcgtgcatttctaccagcaataaaggagagttcctgttgctccacatcctcaccaacatttgatgttgtcagtggtctagattttggccattctgataggtaagtggtctcattttattgatttttttttttttagaccaagtctcactcttatcccccaggcacggtctcagctcactgcaacctctgcctctcggcttcaagagattctcatgcctcagcctcctgagtagctgggattaccgacggctgccaccacaactggctaatttttgtatttttagtagagatggggtttcaccatgttggccaggctggtttcgaactcctgacctcaggtcatccaytcacctcagcctcccaaagtgctgggattacaggcgtgagccactgtgcccggccttattgatgttttcatttgcgcttctctgatgacatatgaagtggagcatcttttcctatgcttacttgccgtgtgtata

SEQ ID NO: 929161 - DNA, 714 bp, Homo sapiens
gtattttctaatatctgtgtttcttcttcctgtcctttattatcatatctcaaatcaaagagtgtttcctctcaagggtggcatctaacctcagccgcattttgcacagcctcctgactgaaagtggtctgccttgcttgggctgacttttctgtgtgtgactggaacatctgtatggcacttggcagcttgatgcctcccactttgcctctctgggcatgcagctccctctgcaatgacattctaaatgacttgagtgaagccgccatgttttgcctttgtgggccaccgagcagcacttctcaaatctgtaaatgacatatcacaggtagaaatgttaaactgtacagagtaaattaaggaggctttagaagratgtgtgtagagtttagtgaaaattttaccatttaaaaattgtataaaataaaaaataaacttattagatagtatattgcattttgggtttgtgtataacttccaatgaaagtattttctattattggtaataacaatttgttattagtatatttttaaccatcaaatatcttgcatgaaatgactatgcacaacttatttttatgccctggtgattttttttttttttggattgtggacagttattaagttgaaagttgatttgcacaaataagtacaaaattttgaacactgttctttaaagcaaccattgaaaaattcacaattgtattcaaagtg

SEQ ID NO: 929162 - DNA, 569 bp, Homo sapiens
tgcagctgttaacattccttttaaccaggcagatgccttgggactgtgggaaattgcagtagcaattagaggaaaatagggaagggtgggctggtcagtcttggagagcaggaacaatgcagaatttaaacataggaatgtcatgtgtcaattagggatacagcaaaacccttctataacactatraaaggagccccaaatattcagttgtgtaaaatatgagatgacattaaacatagggttatgtaataaaattgattaaataactaggttgagcctcttgtggaggttgggagccaactgccagtcctgtttcatccaaattagtattaaggagtaatatggaggggtttcactgggcttaatatttcgttttccttttaaaaatgcaattgtatgttagagatgaaatcattgagattttgattttagacctgtgtaactgctaaaaataaaagatcaggtgaattgaattaactctatctggtggtacttgaatatggaatgaaatctatggccagccagcatggttacctgttgtttcaaaacagcaaagttagtgcttgaaa

SEQ ID NO: 929163 - DNA, 736 bp, Homo sapiens; identical to SEQ ID NO: 920925

SEQ ID NO: 929164 - DNA, 590 bp, Homo sapiens; identical to SEQ ID NO: 925245

SEQ ID NO: 929165 - DNA, 740 bp, Homo sapiens
attttattgcttgagcaaattaacacatctcctcatacctggtttgcagtcattgacttggaaaatgactttttctccattcttgtctataaggcccaccagaagcaatttgccttagctggcaaggccaacaatatacctttactgtcctayctcaggggtatatcgactctccggatttgtgtcataatcttattcagagagaccttgatcacttttcgctcccacaagatttcacactggtccattttattaatgacattatgctgattggatccagtgagcaagaagtagcaaacacactgaacttattggtgaaacatttgtgtgctagaggatgggaaataaatccaactaaaattcagggaccttctacctcagtaaaatttctaggggtccagtggtgtggggcctattggaatattccttctaaggtgaagggtaagttgctgcatttcacccttcctacaactaagaaagaggcacaaacctagtgggcctatttagattttgaaggaaacattcctcttttgggtgtgatactcagcccatttatcgagtgacctgaaaagatgccagttttgagtggggtccaggacaggagaaggctctgcaacaggtacaagcttctgtctaagctgctctggcatttgggccatatgaaccagcagatccaatggtgcttgaggtgtcagtggcagatagggatgctctttggagcctttgtcaagcccccatag

SEQ ID NO: 929166 - DNA, 544 bp, Homo sapiens
ggcaggtcctgaaagcacaagtaagttacatgagggagtatgctcatggtctccattcctgctaccctgccttctcttgccccagccctgcactgatggcctcttggggagttccctataatcagttgacagaggaagacaagactagggcctggttcacagatggttctgcatgatactcaggcaccaccggtaagtggacagctgcagcactacaacccctttataggacatccctgaargacagcaatgaaggaaaatcctcccagtcagcagaacttcaagcagtgcacctggttgtgcactttgcatggaaggagaaactgccagatgtgagattatatactgattcatgggctgtagccaatggtttggctggatggttaggaacttggaagaagcatgattggaaaattggtgacaaagaaatttggagaagaggtatgtgtatggacctccctgagtggtaaaaaactgaagatatttgtatcccatgtgagtgctcaccaatgggtgacctcagcagaggaggagtttaataatc

SEQ ID NO: 929167 - DNA, 544 bp, Homo sapiens
ggcaggtcctgaaagcacaagtaagttacatgagggagtatgctcatggtctccattcctgctaccctgccttctcttgccccagccctgcactgatggcctcttggggagttccctataatcagttgacagaggaagacaagactagggcctggttcacagatggttctgcatgatactcaggcaccaccggtaagtggacagctgcagcactacaacccctttataggacatccctgaaggayagcaatgaaggaaaatcctcccagtcagcagaacttcaagcagtgcacctggttgtgcactttgcatggaaggagaaactgccagatgtgagattatatactgattcatgggctgtagccaatggtttggctggatggttaggaacttggaagaagcatgattggaaaattggtgacaaagaaatttggagaagaggtatgtgtatggacctccctgagtggtaaaaaactgaagatatttgtatcccatgtgagtgctcaccaatgggtgacctcagcagaggaggagtttaataatc

SEQ ID NO: 929168 - DNA, 834 bp, Homo sapiens
tgtgtggaaactctgtatctaactaatctgatggggacgtggataacctttgtatctagctcagggattgtaaatgcaccaatcagcgccctgtcaaaacaggccactgggctccaccaatcagcaggatgtgggtggggccagagaagagaataaaagcaggctgccccagccagtagtggcaacccgctggggtctccttccacagtgtggaagctttgttctttcagtctttgcaataaatcttgctactgctcactctttgggtccacactgcttttatgagctgtaacactcaccgcgaagatctgcagcttctctcctgaagccagtgagaccacgagcccaccaggaggaacgaacaactccagacgtgctgccttaagagctgtaacactcacagcgaaggtctgcagcttcactcctgaggcagcgagaccatgaacccaccagaaggaagaaactccgaacacatytgagcatcagaaggaacaaactccagacacgccaccttaagagctgtaacactcaccgccagggccgcagcttcattcttgaagtcagtgagaccaagaacccaccaatcccggacacactgctctgtgctcttttagtttttccattgataggcagcttaccttaaccagctcagttagaccctctaccttgttgcaaggacagagagctttttgtatctcaggttcttgctttggtgtaccggaagaatcggatcacacctgggcttggagaataagtgcaagtttttattgagtggaggtagctctcagcagatgggggaagcccgaagggtgacgggagtgggaaggttttccc

SEQ ID NO: 929169 - DNA, 834 bp, Homo sapiens
tgtgtggaaactctgtatctaactaatctgatggggacgtggataacctttgtatctagctcagggattgtaaatgcaccaatcagcgccctgtcaaaacaggccactgggctccaccaatcagcaggatgtgggtggggccagagaagagaataaaagcaggctgccccagccagtagtggcaacccgctggggtctccttccacagtgtggaagctttgttctttcagtctttgcaataaatcttgctactgctcactctttgggtccacactgcttttatgagctgtaacactcaccgcgaagatctgcagcttctctcctgaagccagtgagaccacgagcccaccaggaggaacgaacaactccagacgtgctgccttaagagctgtaacactcacagcgaaggtctgcagcttcactcctgaggcagcgagaccatgaacccaccagaaggaagaaactccgaacacatttgagcatcagaaggaacaaactccagacacgccaccttaagagctgtaacactcaccgccagggcckcagcttcattcttgaagtcagtgagaccaagaacccaccaatcccggacacactgctctgtgctcttttagtttttccattgataggcagcttaccttaaccagctcagttagaccctctaccttgttgcaaggacagagagctttttgtatctcaggttcttgctttggtgtaccggaagaatcggatcacacctgggcttggagaataagtgcaagtttttattgagtggaggtagctctcagcagatgggggaagcccgaagggtgacgggagtgggaaggttttccc

SEQ ID NO: 929170 - DNA, 834 bp, Homo sapiens
tgtgtggaaactctgtatctaactaatctgatggggacgtggataacctttgtatctagctcagggattgtaaatgcaccaatcagcgccctgtcaaaacaggccactgggctccaccaatcagcaggatgtgggtggggccagagaagagaataaaagcaggctgccccagccagtagtggcaacccgctggggtctccttccacagtgtggaagctttgttctttcagtctttgcaataaatcttgctactgctcactctttgggtccacactgcttttatgagctgtaacactcaccgcgaagatctgcagcttctctcctgaagccagtgagaccacgagcccaccaggaggaacgaacaactccagacgtgctgccttaagagctgtaacactcacagcgaaggtctgcagcttcactcctgaggcagcgagaccatgaacccaccagaaggaagaaactccgaacacatttgagcatcagaaggaacaaactccagacacgccaccttaagagctgtaacactcaccgccagggccgcagcttcattcttgaagtcagtgagaccaagaacccaccaatcccggacacactgctctgtgctcttttagtttttccattgataggcagcttaccttaaccagctcagttrgaccctctaccttgttgcaaggacagagagctttttgtatctcaggttcttgctttggtgtaccggaagaatcggatcacacctgggcttggagaataagtgcaagtttttattgagtggaggtagctctcagcagatgggggaagcccgaagggtgacgggagtgggaaggttttccc

SEQ ID NO: 929171 - DNA, 584 bp, Homo sapiens
gggcctacacaagtccaaaatccaatagagcagtcattaaaccttaaagttttaaaataatctcttttgactccatgtctcacatccagggcatgctgatgctaaaagtgggctcccacggccttgggcagctccaactctgtggcttagtagggtgcagcccctcttccaactgctttaacaagctggcattgagtgcctatggcttttccaggtgcatrgtgcaagctgtcagtggatctagcattctggggtctgcagaatggtggccgtcttctcacagctccactaggcagtaccctggtagggactctgtgtgggagtgccaactccatatttcccttctgcgctccctagcaaatattctccacgagggttccacccctgcagcaaacttctgcctggacatccaggcatttccatgcactccctaaaatctaggcagaggttcccaaaccccaattcttgacttatgttcacccacagggtcaacaccacatggaagcagccaaggcttggggcttgcacactgaaaagcagtgtaccaagctgtaccttggctccttttagacatgtctagagca

SEQ ID NO: 929172 - DNA, 719 bp, Homo sapiens
gcacacctaagcattcaaacgtatttatggattcgttgactaccagcacatgctatattgttataattattaattaatacattcaacaaatattattgaacccctactatgtgctaagcattgttttagttcccggatacatcagtgaacaaaataaagacccctggaatctttgggagggagaaagacagtatatataccataaaaaatgagtaaatatatagtacattagaagatgataaatactgtgacaacattaaagacgagaagagcatgctcaggaagatgaaaagtgggtgctgagacaggaatgggggagcaggttgtgatgaaaacaggatgtctaggagaggccttactgagaagatgatatttaaacaaagacatgaagaagtcaaaggaggtaggcaagctaataccttgtaaagaggttttactccaaatggcaagaacagccagtgcgatgccctaaggcaggtgcatgttcaaggaattgcaaggaggccygtgtgactggagcagattaaggggcagagaaatagaagatgaggtcttggaagcaaggggaaggacctgtagcctttgtaagaattggggagctgttttgagcagagttttgagcagcggggtgacacaatctgacttctgatttagaaggatcacttgcttctttgttgaagggtacaaagcaggaggcaggaaactgattaggaggcctc

SEQ ID NO: 929173 - DNA, 630 bp, Homo sapiens
gctacaataaagcaggcaggagaagatggaagagcagacttgctgagtcttctggccttcatctttctcctgtgctggatgctttctgccctcaaacatcagactccgtgttcttcagctttcggactcttggactcatgccagtgatttgcccaaggctcttgggccttcgacaacagactgaaggctgcgctgtcggcttccctacttttgagattttaggacttggactggctttcttgctcctcagcttgcagacrgcctattttgggacttcgcttgtgattgtgtgagtcaatactccttaattaactccacttcatatatacatctaccctattagttctgtccctctagataaccctgactaatacagccacttaaaagaaaaatacacaaagcactagcagacactctcctgttctgttgtccttgaagaagcaaactacctgttacagagtgggctgcatggcaggaaattctaggtccccctaggagctgacagcctcaatcttacaaccacaaggaactgaaatttgccaacaatctgaataagcttagaagagaatctgagctccaaagagagtgcaagttggcagacatcttgattttgacttaataagacagtga

SEQ ID NO: 929174 - DNA, 630 bp, Homo sapiens
gctacaataaagcaggcaggagaagatggaagagcagacttgctgagtcttctggccttcatctttctcctgtgctggatgctttctgccctcaaacatcagactccgtgttcttcagctttcggactcttggactcatgccagtgatttgcccaaggctcttgggccttcgacaacagactgaaggctgcgctgtcggcttccctacttttgagattttaggacttggactggctttcttgctcctcagcttgcagacggcctattttgggacttcgcttgtgattgtgtgagtcaatactccttaattaactccacttcatatatacayctaccctattagttctgtccctctagataaccctgactaatacagccacttaaaagaaaaatacacaaagcactagcagacactctcctgttctgttgtccttgaagaagcaaactacctgttacagagtgggctgcatggcaggaaattctaggtccccctaggagctgacagcctcaatcttacaaccacaaggaactgaaatttgccaacaatctgaataagcttagaagagaatctgagctccaaagagagtgcaagttggcagacatcttgattttgacttaataagacagtga

SEQ ID NO: 929175 - DNA, 577 bp, Homo sapiens
taaattcctgctttttaatatttatcatttctgatactaaataggcaaatcaaaataccagctattgattctgaaatgcctcaagtttccacatcaaattctgtcttattctttccttagtatttattagccactcacagttcttgaggttacatggagtaacttttctctcacataacttttgtgacaaggaaatagacaatgcacctcatggattgtgttaggtgaagaatctcagatgtggagttactgttttgatacttcctggtcctcactcacctatttaagcttctcygggggcagttgaacagggggcatgtgaggcctgctgatatgaggtgggtattgaagactcaggaaggtgtggagagtggtgaggagatgggcacagggcagaagtggagaagcgagcaaggctttgtttgactggagtgcaaaatgcagacagagaaaggagtgaagggtgggagtcctagttcacccagagaccagtgaatggacttgaactatttaggaagaattagctgagtttcataggaaaatcaaagggattccaaataaaggggtcagacattga

SEQ ID NO: 929176 - DNA, 577 bp, Homo sapiens
taaattcctgctttttaatatttatcatttctgatactaaataggcaaatcaaaataccagctattgattctgaaatgcctcaagtttccacatcaaattctgtcttattctttccttagtatttattagccactcacagttcttgaggttacatggagtaacttttctctcacataacttttgtgacaaggaaatagacaatgcacctcatggattgtgttaggtgaagaatctcagatgtggagttactgttttgatacttcctggtcctcactcacctatttaagcttctctgggggcagttgaacagggggyatgtgaggcctgctgatatgaggtgggtattgaagactcaggaaggtgtggagagtggtgaggagatgggcacagggcagaagtggagaagcgagcaaggctttgtttgactggagtgcaaaatgcagacagagaaaggagtgaagggtgggagtcctagttcacccagagaccagtgaatggacttgaactatttaggaagaattagctgagtttcataggaaaatcaaagggattccaaataaaggggtcagacattga

SEQ ID NO: 929177 - DNA, 472 bp, Homo sapiens
ggatatggaattctaagttggttccttcctctcaatacattaaatatttatttccatttttttcttgtttatatggttactggtgagaagactattttaattcctacctttgttcctctatgggtaagagctattttttcctcttgctgtcctcttttttttctttaattttttgattcrgtgtgtgtttgggggggggggatattttatttatttatttttggtagacaccctggtttgtgtcttagagcttcttgaatctgtggttttgtgtccatcattagtttttaaaacttctcagattcttcattctttcctcttgaatggcatttcaaagatgcatatattataccttttaatattgtcctgcatttgttgaatggatgttgtattattgtttattgatttattctttctctctgcatttcaatttaggaagtttttattgacctattttcaagttcattaattc

SEQ ID NO: 929178 - DNA, 572 bp, Homo sapiens
gatcttcccatgtggtgataggtatgggctgagaaagagaaggccgagtagcagaagtgaggaccttaggctttgggaccacttcttcatgtaacttacctgtttccttacggtctatttgggtcccctcacatatatatcacttccactttattatggattgctgatgggcatgcccaactttaggccttggtgggtcagataacacctaattcataatggacagctcagatttcatggtaacctggcggtccatgcttaagtgttcagtctctactaaggyccagtagcacgccaagagctgtttctcgaaagagagtgtttacttgaagaagatggcagagctttgctccaaaatcctcagggccttcttcatgattcaccagtgggggcctgccaagggtttcaaaaaacatctttatctgccactgaaacttcaagcaccaatggatgcaatggatcatatggctcaagtgtcagagcagcttgcacggcagcttggaactgttgcacagccatctcttgtctccattcaaaactagcaacttttggggtcatttgataaatgatcc

SEQ ID NO: 929179 - DNA, 656 bp, Homo sapiens
ccagcctggtcaacatggtgaaaccccgtctctaataaatatacaaaaattagccaggtgtggtggcacacacctgtaattccagctacaccagaggctgaggcagaaaaatcgcttgaacctgagacgcagacgtttcagtaagctgtgatcacgccactgtactccagcctgggtgacaaagcaagactctgcttcaaaaaaacaaacaaacaaaaaacattaacaatgataataaaataggataattagaacaatattatatttaaaagttatgtaactatagtctgtctctttctcaaaatatcttattattacacacgcaaatttaatacctttccacttaactaagcacttgtyatatactgtggccacaacttaacttttgtagtttgagttgtgacagcaaagctagcaagaatttatttttccttcttcacaatttttgagatagaagattcatgcatactgtagatcttagcaaccacgccatacatttttttctttgcttattaggtaatgaactttcaccttttcaattgaaggaagcattttatggcttatctttggcatatcagaattgccagcatcactactcttgcattttggggccattattaagtaaaacaagggttacttgaatacaagtgctgtga

SEQ ID NO: 929180 - DNA, 752 bp, Homo sapiens
aaacattaataaaatagcctgtggtttgtggggtggcaaactcctgtaattccagcactttgggaggccaaggctggttagatggcttgaggcaaggagtttgaaccagcctggtcaacatggtgaaaccccgtctctaataaatatacaaaaattagccaggtgtggtggcacacacctgtaattccagctacaccagaggctgaggcagaaaaatcgcttgaacctgagacgcagacgtttcagtaagctgtgatcacgccactgtactccagcctgggtgacaaagcaagactctgcttcaaaaaaacaaacaaacaaaaaacattaacaatgataataaaataggataattagaacaatattatatttaaaagttatgtaactatagtctgtctctttctcaaaatatcttattattacacacgcaaatttaatacctttccacttaactaagcacttgtcatatactgtggycacaacttaacttttgtagtttgagttgtgacagcaaagctagcaagaatttatttttccttcttcacaatttttgagatagaagattcatgcatactgtagatcttagcaaccacgccatacatttttttctttgcttattaggtaatgaactttcaccttttcaattgaaggaagcattttatggcttatctttggcatatcagaattgccagcatcactactcttgcattttggggccattattaagtaaaacaagggttacttgaatacaa

SEQ ID NO: 929181 - DNA, 579 bp, Homo sapiens
acaaagttgcccaggctggccttgaactcctgggctcaagtaatccaccttcctcagcctcctgagtagctggaactataggtgcatgccactgcagtcaacttctcctaatatgtttgcatagttgtctctaaaaacaattttcactattcttgttacatttagaagctgattcatggtactttttatactaccaatccagaagcrgctaggtcacatttcttctaaaatgtctgtctaccttctcgtcgtaagtttgttttgcctcagcattgatttttaggcttaacatgagttgcttaagacctagtcataggttgtcactattgcctttgttaaaacttcccttctttgagatagagtctacatgtttctcatcctaatgacccagaaacgcaacacatcacagaggtgatgaccatgatataacctaatgatcaataccagagtcatatgataattttccccttcatgtgtgttcccttaagctagccattcctcaactcctgcggagaagcctaggaaataatacctaaggtccttaataaaagccttcctacaagggttccccctcgcact

SEQ ID NO: 929182 - DNA, 608 bp, Homo sapiens
cacaggctggtcatcccaatgtctgttagagtctgactgtatctggaggtttttatgggctcagaagggaggaactgcttgccgattggtccatgggctgaacatgagtgggcatggaaaaggcaccataatttcttacttccagcagcagccttcatcttcaactgacatatcagcccctaggctttagggtgcccctagcttgaagatggggcttcatcagggatctgcctcttaccgcccaggagtctgtctgtctcctgtgccatgaacaagtcatctatggcactcaggctgttaataccgaggggcacctgcaggatggtgctgagccatcctcagtccccatttagctgccttcctgtgttcrtctgtgctcaaagtctggagggggctgaggtgtcatggggctggtgtgtcagccttgccccaagcatgcacatgtccagccacatcacaatagtgcccaggcttggacacaactttgctctaccccagactgggttccgggagtaaggagaagccaggcagcgggagctggcacttctgagctttcaggagcagggggacttcctgaacccccatgaatacagggatgcccaagtctg

SEQ ID NO: 929183 - DNA, 705 bp, Homo sapiens
aaagggtacaaagagaggaattttaaagcagggccactggggatgacatcacatatccgtaggactgtgatgcccaccagagcatcacagagcccctttgtcttggccaatttctaccatttagaaggagagtatttacccagtgcctgtttcttcattgtatctagaaagtaactaacttgcttttgttttttaggctcataggcaaaaaggacttgccttatcccagatgagactttggattgtggacttttgagttaatgctgaaattagttaagactttggagaactgaagggagtgcatgattggttttaatatgtgaggacctgatatttggaaggggccaagggaagaatgatatgatttggctgtgtcctcacccaaatttaatcttgaattgtagctcccataattcccacctgttgtgggaggaacttcgtgagaggtaattgaatcatcgtagcacatctttcccatgatattcccatgatagtgagtaagtgtgttgagatcttatagttttataaaggagagtttccctacacaagycttcttgcctgcctccatgtattacataacattgcttctcatttgcctttgtcatcattgtgaggccgcccaagccatgtgtaactgtgaatctattaaacctctttcctttataaattacccagtcttgggtatgtcttaagtaacaacatgag

SEQ ID NO: 929184 - DNA, 678 bp, Homo sapiens
aaagattataagagcctactatgaacagttattaaccaacaaactggacaacgtagaagaaattgatatattcataagaacgtacaacctactaagactgagtcatgaataaatatattttcagaacctaacaataatgaataaggagattgaattagtaatcaaaacttcccaacaaagaaaagccagcaccagatggcttcactaccaaacacttgaaaaataattaatgctttttctttataatcttttccaaaaatctgaaaagaaaaagatactttcaaactcattttatgagagcagcattatactgataacaaacccagacaaacacgcgacagaaatagaataatgagaagaagaagataaaaaacagtccaatattgttaataaacatagatgaaaaattcctcaacagaaaattgggaaacttaattccrcagcatattaagaggttcattcatcatgactaaatgaaatttatccctagaatgaaggattgttgaacatacaaaaatcagcaaatgtgatacacattaacagaatgatgaatgaagaccacacaaacatctcggcagatgcagatagagcatttgacacaactgaacaatagtttatgaataaaaaagaaaaaagtctctcaacaaaatagaaatagaaggaaattaccttaaaata

SEQ ID NO: 929185 - DNA, 732 bp, Homo sapiens
agtctggtcacttttctgtagggctgctgcagtatgctgggggcccactccagtccctagttgcctcagattttccagtacctgaaggtattaccagtgaaatatgagaaacagcaaagatggcagcctgccctttttccgaatagctctgtaccagggaggtacagacctgttgctggcccaaacacacctctaagaggtgtctgaagaccccagttgggaggtctaacacagtcagaaggactgtgttaatacctcggtgatgggttgatagctgcagcaaaataccatggcacatatttacctatgtaacaaaccttcacatcctggacatgtatcctggaacttaaaataaaacaaatacaatgaacaacaacaaaaataaattattaataaataacaactgaatgaagaaaagaaagaagaaagaaagaaagagaaagaaagaaagaaagaaagaaagaaagaaagaaagaaagaaagaaagaaagaaagaragagaaagaaagaaagaaaagaaggaaggaagggaaagagagacaaggcaggatgatgtcccacccaggagcaatgcagaggcaaatgaacctcccagggaagtgatgagtcaatgtgaagccccaggtaacatgcttctcccacagatctctgcaaccctcgggtcaggaagttccctcatgagcccactccaccagggctttaagtgtgacacacagagctacgtggagtcta

SEQ ID NO: 929186 - DNA, 621 bp, Homo sapiens
atactggatggggaaaagttgaaagaactccccctaagaactgaaataaaacaagttgtccattcttaccacttctattcaacatagtactgtagcagcatttactctagttttggtttagtcctactattaaaaagtgatccttctaggttctctactgaatgtttcagttgctsagagatctctctaccaagctagtgagagcttgaacatttcccagccctgtttcaggtctgagaattatctgtcttatagtgcctgtagtctctgattattccagtataattccatcatatgatcatgtagcatagtattttcttaaaaaagacacagtggattcctatgcaaatttctgcagctattactctgggcaactctttcctctcctgcagtgacccccaaattccaactgcttcatctttcttgaactctgatttctgactgcataattcagtgacacctctgtgctctgtttgggtccatcttacttttgccactgtatgaaaagtgactccagtcagaaatctagggcaattatagaaataatctcatttgttttccttttcttagggggtcacaaccttgctctgcctattacccaatgtctgaaaagagttgttc

SEQ ID NO: 929187 - DNA, 609 bp, Homo sapiens
gtgttggcttttattaataagcatgaaaagcagattattagatgaaggaagaaaatatgagaagatgatcaggaggattaactactaaagtaaggatcattgagtggagaacgtctttggggtacttcaagacttacagacatacaacatacattattgtgtcatagccagatataaaagtaattaaaatttttaaggagaaaattttagacatttttgaaattaaaatatccttttggagtcagctttattaagtccagtttccttcaccttataagaactcaatgagaattcatattcagaatgatgatccaaaagcaccgtaatattctaaattgtcaaataatctacattaggagtattatrgttatttttaagaatgaggaaaattacactaaaaacttttgtgagggctgaaataatcaatttttgttgtttcagttcactagaaaattatattcatatgtctatttcattacctgagtattcagtaaattaagcattttattatatttttatttaaaattttgatcacttgtattttccatgcatattatgtatatattttattttacatttacccagggatgtgtgtaaatattaaagtac

SEQ ID NO: 929188 - DNA, 763 bp, Homo sapiens
gaaatacaactgatttttgtacattgattttgtatcctaaaactttactgaagtcatttatcaattttgggacccttttggcagtatctttagggtttcataggtatacaatcatatcattagcaaagggaaaattggcttcttcttttcctatttggatgccttttcttcctttctcttgcctgattgctctggctaggacttccagtaccacgttaagtaggagtggaggtagtgggcatccttgtcttgttctagttctcaaggagaatgcttccagtttttgcttattcagtataatgttggctgtgtttgtcatagatggctcttattagtttgaggtatgttctcttgaagcctagtttgttgagggtttttatcatgaatggatgtcagattttatcaaaagctytttctgcatctgttgagatgatcatatggtttttatttttaattctgtttatgtggtgaaacacatttattgatttgcatatgtgttgaactaaccctgtatcctaggaataaagcccacttgattatggccaattaattttttgtcgtgtttctggatttggttgaggatttttgcatctgtgttcagcagggatattggcctgtatttttcttttttagttgtgtctttgacatattttagtatcagagtcatggtggctttgtagaatgagttgaggaggagtttcttctcctcaattatttggtatagtatcagtaggattagtgccagctcttctttgtatgtctg

SEQ ID NO: 929189 - DNA, 624 bp, Homo sapiens
aaggcccaggtgtggtggctcacgcctgtaatcccagcactttgggaggccaaaacagacagatctcctgacgtcaagggttcaagaccagcccggctaacgtggtgaaatcccgtctctactaaaaatacaaaaattagccgggcgtggtggcacaygcctgtaatcccagccactcaggagggtgagccaggagaattgctttaatctgggagggagaggctgcagtgagccgagatcatgcccctgcactccagcctgggcaatagagtgagaccctgtctcaaaaaaacccaaatatatatatatatatatatatatatatatagagagagagagagagagagagagagagagagagagagaaataaagagaaggaaagaaagaaagaaagaaagaaagaaagaaagaaagaggaaagaaagaaagaaagagagaaagaaagaaagagagaaagaaagaaagaaagaaagaaagaaagaaagaaagaaagaaagaaagaaaagaagggagggagggagggaaggaagaaaggaaggaatgaaggaagggaggaaggaaggatcaacaatcacagactagaggaagccacaagctttcactcccagagcagaggccacagc

SEQ ID NO: 929190 - DNA, 624 bp, Homo sapiens
aaggcccaggtgtggtggctcacgcctgtaatcccagcactttgggaggccaaaacagacagatctcctgacgtcaagggttcaagaccagcccggctaacgtggtgaaatcccgtctctactaaaaatacaaaaattagccgggcgtggtggcacacgcctgtaatcccagccactcaggagggtgagccaggagaattgctttaatctgggagggagaggctgcagtgagccgagatcatgcccctgcactccagcctgggcaatagagtgagaccctgtctcaaaaaaacccaaatatatatatatatatatatatatatatatakagagagagagagagagagagagagagagagagagagaaataaagagaaggaaagaaagaaagaaagaaagaaagaaagaaagaaagaggaaagaaagaaagaaagagagaaagaaagaaagagagaaagaaagaaagaaagaaagaaagaaagaaagaaagaaagaaagaaagaaaagaagggagggagggagggaaggaagaaaggaaggaatgaaggaagggaggaaggaaggatcaacaatcacagactagaggaagccacaagctttcactcccagagcagaggccacagc

SEQ ID NO: 929191 - DNA, 744 bp, Homo sapiens
ggcagtgttgttataggaccgccaggtttgtatgtccattggaaaacaataggccaatacattgagacagcaggatttgcagcagagaaagagtttaatgattgcagggcactgagcaaggagatgggagaagatcctcaaatccatcttcctgaggagttctggcctgggtttttttttttttttttttttggagayagggtctcactctgtcacccagactggagtgcagtggtgtgattatagttcactgtagcctttacctcttgggctcaagcaatcctccaacctcagctccctgagtagctgggactacaggtgcctgccaacatgcctagctatttttttttttttttggtagagatgggggcctcactatattgcccaggttggtcttgaactcctggactcaagcaatcctcttgcttcagcctcccaaattgttgggattataggtgtgagccaccaagtctggccgagttctgggctgcgatttttaaggggacaatggagagcaaaggattggaaaattggcgtcattgattgattggggtaaaggagatgaaatcctcaggatgtggaaactgcattctttggtgagtcagcttgtcatgcagtccttcagaccagttggtgtcagcatgcaggacctgaaagaacatctcagatggaaaacgtaatgtttgataatgttcaagttggtatctatagagctgttaaggggacctataattttctaacagg

SEQ ID NO: 929192 - DNA, 684 bp, Homo sapiens
cagtgttgttataggaccgccaggtttgtatgtccattggaaaacaataggccaatacattgagacagcaggatttgcagcagagaaagagtttaatgattgcagggcactgagcaaggagatgggagaagatcctcaaatccatcttcctgaggagttctggcctgggtttttttttttttttttttttggagacagggtctcactctgtcacccagactggagtgcagtggtgtgattatagttcactgtagcctttacctcttgggctcaagcaatcctccmacctcagctccctgagtagctgggactacaggtgcctgccaacatgcctagctatttttttttttttttggtagagatgggggcctcactatattgcccaggttggtcttgaactcctggactcaagcaatcctcttgcttcagcctcccaaattgttgggattataggtgtgagccaccaagtctggccgagttctgggctgcgatttttaaggggacaatggagagcaaaggattggaaaattggcgtcattgattgattggggtaaaggagatgaaatcctcaggatgtggaaactgcattctttggtgagtcagcttgtcatgcagtccttcagaccagttggtgtcagcatgcaggacctgaaagaacatctcagatggaaaacgtaatgtttg

SEQ ID NO: 929193 - DNA, 556 bp, Homo sapiens
ggcagcaatgcttgctcacctgttcacctcctgctgtgtggcccagttcctaacaggccacaggctgataccggtccataacctgggggttgaggactcctgctgtagccctacacagaggcacactcagcgcacaaggacttttccacacccccaattaatcagcagcacccattccctcagccctgcccaccaaattgtccataaaaactctaacctctagagggcttcaggaagactgatttaagtgataactgcctctttggcatggctggccttgagtcaattaaactctttcttactgcaatgccacgatctcagggaattgattttgtctgtgcagctggcaggaagaagccatcatagctcactactcctaggctcaaatggatcctccygcctcagtctcccaagtgctcagattataggtgtaagccaccatgccctgcctcagtgtgatttctaacaactgatctggtccattctcattaaacagaagaaatcaaagcacagaggttaaataacttgtcctagagaatataattaggaaattgtg

SEQ ID NO: 929194 - DNA, 661 bp, Homo sapiens
acactgagtatgtcatcaatctgccgactgttgaagttggacaggcccagcgcctgcaccagccccttagccaccagtgcctccagagccttccaagtctccttgtagtgggtggagtcgtagcatatagtcccatcagcattcttggggaaggggttgtctccccgcctgagtgagagacagccccaccaagtgtggacacaaatgccaggcttctaccctacctgcccatccagccactctatgtcccaaactccaatcccagagaggacaaagggccaagaatttttaaaaagccatgctttttctttttttttttttttgagatggagtctcgctttaccgcccaggctggagtgcagtggcactatctcagctcactgcaagctccacctcctgggttcacgccattctcctgcctcagcctccccagtagctgggactacaggcgctcaccaccacgcgcagctaattttttgtatttttagtagagacggggtttcaccgtgttagccaggatgrtctcgatctcctgacctcgtgatccgcccgccttagcctcccaaagtgctgggattacaggcgtgagccaccgcgcctggccaaaaaaagccatgctttttcatccttccagatcgtaacccaggtgttaagtttacat

SEQ ID NO: 929195 - DNA, 701 bp, Homo sapiens
caccacgcgcagctaattttttgtatttttagtagagacggggtttcaccgtgttagccaggatgatctcgatctcctgacctcgtgatccgcccgccttagcctcccaaagtgctgggattacaggcgtgagccaccgcgcctggccaaaaaaagccatgctttttcatccttccagatcgtaacccaggtgttaagtttacatggaatgcctatgccccctcctcttcctagacgtagatatctcctctcccctaggaagtcttccttaactcatcctcagggagttatccacccttcttccagcacagggcacggcactaatggtgagctcttctcacatcttctgctgagacttacttattactgtaaccccaggtgctcaacagaaragtcagcaccttttctaaatgaataaagggagcaggagggttacaggtgcataccctggggtacacaccatgtgagactgccttcctttttccagagttaaactcctgtagctacagctaagctgctgtagcagaagaggctaagatcccatgtcaagctcctcagcttggcatgcaaatgagtgttcctatcctgctctgctgctgtgacttacaataagttactaacaccatcctgctcaaccccctgattccccagatgaggctctggcaaggctcactcaaaggcataaggccagtgcatcaggt

SEQ ID NO: 929196 - DNA, 462 bp, Homo sapiens
gccctgatcccttacttccacaccccaacctcttatatctctgtgccccgatcccttatttccgtgcccctacctctcccgcttttctggagggtaagaacccccaaaccccttccctccatttctctactctctcttttctctgggcttgcctccttcactgtgggcaaccttccaccctccattsctccttctcccttagcctgtgttcttaagaacttaaaacctcttcagctctcacctgacctaaactctcagcatcttattttcttccgcaatgccacctgaccgcaatacaaactcgacagtagttccaaatagccagaaaacggcactttcaatttttccatcctgcaagatctaaataattcttgttgtaagatgggtaaatggtctgaggtgcctgacgtccaggcattcttttacacgtcggtccctctctagtctctgttcccaatgcaa

SEQ ID NO: 929197 - DNA, 551 bp, Homo sapiens
  misc_feature 209: n = A,T,C or G
gtcattatatatttgtcaaaatccataaactatacaacacagtgaaccctaatgtaaactatgaactttagttaagtaatattaatgtattaatattggttcattcctgggagacagaggttgcagtgagccaacatcgcacacatatgtgtgtgtatatatatgtgtgtgtgtgtgtgtatatatatgtgtatatatatgtatgtgtnatgtgtatatatacacatatttttgcattgcatgggcatatatatatatatatatatatayatacatgtttattaattgggacaaatgttctacacccatgcaagatattaataatagggggaaattacagggtgggcagaggcagcgtatgagaactctgtactttccactgaatttttctggaaacctaaaactgctaaaaaaaaaaaagtagtttttgaagattttgtacttattcacatatatgaattacacatatcctagaatccttgaatgcttaattttctttctttttcaatgttttctgcagacacaggcacaatccttctcactgaaaccgt

SEQ ID NO: 929198 - DNA, 712 bp, Homo sapiens
ccagaggggcagcccctcatgaagttcattaccagaggaggtagcagaattggtctggggttagtatcaggggaacctgccccaataatttaacgttatttcacgcaggttcttttctatttccctaagagttggccggtctgagaaataaagggaaagagtacaaaaggcagaaattttaaagttgggtatctgggggagacatcacatgtcagcaggttccatgatgccccccaagccgcaaaaacagcaagtttttattagtgattttcaaagggagggagtgtccgaatagggtgtgggtcacagagatcacatgcttcacaaggtaataaaatattacaaggcaaattgaggcagggcaagatcrcaggaccggggcaaaattaaaaatactaatgaagtttcatgtcccactgggcatgcattgtcattgataacatcttatcaggagacagggtttgagagcagacaactggtctgaccaaaatttattaggcgggaatttccttgtcctaataagcctgggagcgctacgggagaccagggcttatttcttcccttatctgcaactgtaaaagacagacattcccagagtggccatttcagaggcctatccctaggaacgcattctctttctcagggctgttccttgctgagaaaaagaattcagcgatatttctcctatttgcttttgaaagaagagaactat

SEQ ID NO: 929199 - DNA, 772 bp, Homo sapiens
ggtaataaaatattacaaggcaaattgaggcagggcaagatcgcaggaccggggcaaaattaaaaatactaatgaagtttcatgtcccactgggcatgcattgtcattgataacatcttatcaggagacagggtttgagagcagacaactggtctgaccaaaatttattaggcgggaatttccttgtcctaataagcctgggagcgctacgggagaccagggcttatttcttcccttatctgcaactgtaaaagacagacattcccagagtggccatttcagaggcctatccctaggaacgcattctctttctcagggctgttccttgctgagaaaaagaattcagcgatatttctcctatttgcttttgaaagaagagaactatggctctgttctgcctggctctcaggcagccagacttaatggttatctcccttgttccctgaacatcactgttatcctgttcttttttcaaggtgcccagatttcatattgtttaaacacacatgctttatgaaaaatttgtgcagttaacgcmatcatcacagggtcctgaggcaacatacatcctcagcttacgaagatgatgggattaagagattaaagtaaagacaggcataggaaatcacaagagtattgattgggggaagtgacaaatgtccatgaaatcttcacagtttatgttcagagattgcaataaagacaggcgtaagaaattacaaaagtattaatttggagaactaataaatgtccatgaaatcttcacaattta

SEQ ID NO: 929200 - DNA, 772 bp, Homo sapiens
ggtaataaaatattacaaggcaaattgaggcagggcaagatcgcaggaccggggcaaaattaaaaatactaatgaagtttcatgtcccactgggcatgcattgtcattgataacatcttatcaggagacagggtttgagagcagacaactggtctgaccaaaatttattaggcgggaatttccttgtcctaataagcctgggagcgctacgggagaccagggcttatttcttcccttatctgcaactgtaaaagacagacattcccagagtggccatttcagaggcctatccctaggaacgcattctctttctcagggctgttccttgctgagaaaaagaattcagcgatatttctcctatttgcttttgaaagaagagaactatggctctgttctgcctggctctcaggcagccagacttaatggttatctcccttgttccctgaacatcactgttatcctgttcttttttcaaggtgcccagatttcatattgtttaaacacacatgctttatgaaaaatttgtgcagttaacgccatcatcacagggtcctgaggcaacatacatcctcagcttacgaagatgatgggattaagagattaaagtaaagacaggcatargaaatcacaagagtattgattgggggaagtgacaaatgtccatgaaatcttcacagtttatgttcagagattgcaataaagacaggcgtaagaaattacaaaagtattaatttggagaactaataaatgtccatgaaatcttcacaattta

SEQ ID NO: 929201 - DNA, 764 bp, Homo sapiens
gcagtatttttgtttgtttgtctgtttgttttgtgtgactcagctcccaagcttaaaactttcccctttggcatagtgagcttggggtcccagagattttattttcctttcacatgtggatgtctgaaacctcagatagaaccaaaccccctgtgtaccatgttattttgacctgaacatatactgtgttttttctatgtgatatctcacacgtctactagcgggtgggtagcatacacagtatggatacacgggataaatggatgattcatgtcttggataggagggagcagaatggcatgagagttcatcrtgcaagtctgagggtgcacaatttaaaacctagaaattatttattcctcgaatttttccatttaaaatttttggactgtggctgactgcaagtaactgaaaccaaggaaaacaaagccatggataaggggcactactgtactcacagcatttgtgacaccaattgtgtgtaggtttccttccccacaccaacaaattccctctctgggtatcctgcaatttaattcaattctgacaagaactacctggagttggtatcagactccacaggcttaagggttcagtcccacaaaactgccctcactttggaggctacttgcaaatagagggtccccaggttactcacacttctgtctgacttggctacaaatcaggggttcccatgactccccttcagtttcagtaatttgctagaatggctcacaaactcagaaaaattatttactttctct

SEQ ID NO: 929202 - DNA, 620 bp, Homo sapiens
tcttgtgtctttatttcttacaatctctcgtctctgcacacggggagaacaccctcaaagccccgtagggctggaccctacaccatagattagttttgcttagctttaaacgctttataaatggaattacacaggatgcattattgtgcctgcattcattcaacactatgtatgccagatttacccatattattgtatgtagctgtattgttcatacatttgtattgctgtataatattccagtgtatgaatatgccataatttatttatccattacactgtcattgaatattgggttgtttccagtttgggtttattacaaataatgctgccatgaacctctttcatatctttarttatacttgtgtaaccatttatttaatacatatagataggcaggaagttactggattatacaatacatgcatactcttctttagtacataatgtcaaacattttccaaagtggttctaccaatctacatacccagcatcagggtataagagctccagttgctccataatcttgccagtatttgatatagaccatctttttaattttagccattctgatgggtctgtagtattaactcattgtggttttaatgtgtattttcctg

SEQ ID NO: 929203 - DNA, 578 bp, Homo sapiens
ctcaaaagctttacctaatagtagccccaaatacagctgctgtgctggtctgctgtctttgctggaacagattaatattgtttcaggttcatagtatgcagctattgatttggcaaatgtgttcttttctatcataaccaggaaagaagataaagcagttcacatgcacacagaatgaacaataatctactttatagttttatcccagggctgtgttaattctcttgctccttttcacaatatagtccaaggagaatcgtcctgcagaacacctggccatcctgcagaacatcacactgctccaygacacccatgacgtcatgctgaccaggaggataagccgaggtggacagcacactggaggccttgataagacaagtgctccagggggtgggaggtaaaccttgcaaacattcaaagcctgtcatatctgcaaagatatgagggatctaggagtcagggtcatgctggcatatccgaccaaaagcaaaagacaaacagctgctgtttgcttctgccaccataaagaaggaagcccaatgccacttaggcctctttgggttctggaggcacacatt

SEQ ID NO: 929204 - DNA, 587 bp, Homo sapiens
gtgtgaaggtcccgaagtgcaaacagggtcagcaagatcaaagtacagtcaaaaaggaagagttgctagagtatagttaggaggagaatggaaccaacatgaggtcagaagtaatcaaaaccaaggtcatgaagggccatgaaagctgtagtgaaaacttggatttgatctacaggcttggagaagtatgggaggattttaagsaggggagcaatgtgctgattcccgtgctgtgtttactttggctgctgtgtggaaagtggattttcagagtgaaggcagaaagacaagttggcagtttattgcaataatcagatgagaattagtgtgacatgagctggtagatggtggtaaagaaggaaagaagtggttggattcaggatatagtttggcagaagagcccatgagacttgctgatgagctagatgtggggtaaagaaagacaagggaccaaagaagtttcctaggcttcttgtcctgagcaacagggtatacaggggacacagggaagacaggataataaataaatccatttttcacatgctaagtttgaggtgcctattggatatctatgtggagatatcaag

SEQ ID NO: 929205 - DNA, 625 bp, Homo sapiens
tttcctagttcacccccatggcgactgcagactcagctcttcatggatgttggactgagagcctcagttgccttataggtatctctattgcgcagctcacaacaaggtatctgttttttgttgtttttgttttttcaagtgagtaagagagagaagaagagaaagggaaggagaaaacacgatggaagtcacagtcttcttataacttactcttggaaatatcccatgatttttgctgtgtgttattccctagaagaaattttctagacacaacccatatgcaaggggaggggattacacaagggatagaataccaggaggaaggaatcactggtgrcatcttagaggttgcctactacatgcatttatgttgatgagattgattactgggatgagcagtcagactacttgagttcacatcttagctttattatttgctagttatgggatctcccgcaagttactgttctttgttcctcagttccctcatctgtaaaatgaaactattaatattaaatgtatttgttctcaaggacttaatgtggattaaattactaataaatgattaaaaaactagaatagtgccaggcatgtggtaggcattccatgaatgttagctagcatt

SEQ ID NO: 929206 - DNA, 679 bp, Homo sapiens
tcctgagttccaccatcttgtctcgggcctaggatggccactaatatccagtgcgcaggcaggggctgggcactcacttcagggcaggagctgggaaagaaggcaaaaaaaagcttccgcaagtccatcttatggagcacaaagggccagcgtccaagttgccagacttggcctgcagggcctcactttacttgctgtgcagaaaagagaccgcaagggggcaatggccaggcaggggccagggaggaactgttgcttggactggggtggtggacaggaaggtgaggacaagaggttggattctagagacattctcaaagtggaactggtagaaatgtctgatcaataaratgaggaggtgagagagaaaagaggagtggaagatgatgcctgggttgctggcctgaacaactggaaaaatggaggttccatccacggtgacagggacacagggatggccagtgggagcaggtttggagggatgatgaggcaaggcagaacggggggactccgactggtcaaacagaacaactgtggcttggctctggctgatggctgctctgtaggaataagggctctgatttttcagatatcagaaatccaggtttttacgtaacagctcttgatttttatatgtttgcaataaattcaaatttacaatgatatgtaggttaatcct

SEQ ID NO: 929207 - DNA, 607 bp, Homo sapiens
tagtttcaaatagcgagaaggaggctattgaatgtctccaacacaaagaaatgaccgatgagatgatggctgtgctaaccaccctggtctgatcaccaggaattatatatatccaaacatcatgatgtaatccatgaatatgtacagttattatgtgtccatttaaaaacttaaatataatttaaaaatcaaacacagaattatcatctgatttagcaattctacttctgggtatagaccccaaagaactgaaagcagggtctcgaacagatgtttgcacacacatgttcataacagcattatttacagttgccaaatggtgaaaacagccaaagtgaccaytgatgggtgaaccgatagacaaatttcgtccatatatacaacagagtattatttagccttaaaaggaagggatttctgacccaggctactacacggatgaccttgaggacattgtgctaagtggaatcagccagtcacaaaagaacaaatactgaatgatttcatttatatggggtccctggcgctgtcaaattcagagacctgaagtagaatggtgcttgccaaaggctggggaggagggaatagaaagttattgtttaatgga

SEQ ID NO: 929208 - DNA, 737 bp, Homo sapiens
ttgcaatggattaggctttggcttaagggaatattatggctgttttgacttttttttttatccagaccgttgaaactttctctcaacaataaggctgttttgctttcgttttggggggctttgtttttttgtttgtttttgttggttggttggtttgtttgtttttgagacaggatctctctttgtcactcagactgaagtgcagtggcataattacagttcattgcagcctcgaatttccagactcaagagatcctcccacctcagcctccttagtagctgggactacaggtgcacaccacaatgcctggctgatttctgtattttttgtagagatgggattttgcccaggttcaggctcatctcaaactcctgggcaccagcagtctggctgctttggccttccaaagtggtggaattataggcttgagccagagcgtttggcccattttgctttcttaccattcatatgtgactggaatatcctycaagaaaatttcctttacattcacaacttgactgctctttgacatagaaggcctagcttttggcctttctcagcttttgatatgccttcctcactaaacctaatcattcctagctttagttaaaagtgagagatgtgccactcttcctttcaattaaatacctagaggccattgtagattattaattggcctaatttcagtaattgttttgtctctgggaatagggaggcccaaagagaggaagagagg

SEQ ID NO: 929209 - DNA, 824 bp, Homo sapiens
gggctcctgagtcgggttgggacttggagaacttttatgcctagctggaggatggtaaatgcaccaatcagcaccctgtgtctcattcaaggtttgtgaatgcaccaatcagcactctgtatctagctaatctggtagggacttggagaacctttatgtctagctaaaggattgtaaatacaccaatcaacactctgtgtctagcttaaggtttgtaaacataccaatcagcaccctgtgtctaccttaaggtttgtaaatgcaccaatcagtgctctgtgtctagctaatctaggggggacttggataactttygtgtctagctcagggattgtaaacgcaccaatcagcaccgtcaaaacggaccaatcagctctctgtaaaacagaccaatcagctctctgtaaaatggaccaatcagcaggatgtgcgtggggccagataagggaataaaagcaggctgcctgagccagcagtggcaacccacttgggtcccttttcacactggcgaggctttgttctttcactctttacaacaaattttgctgttgctcactttttgggtttgcactgcttttatgagctgtaacactcaccgtgaaggtttgcagcttcactcctgaggccagcaagaccacaaactcacctggaggaatgaacaactccagaagggaggaacgaacaactccagacacgctgctgtaagagctgtaacactcaccgcgaaggtctgcagcttcactcctgaagccagtgagaccatgagcccaccagaaggaagaaactctgaacacatctgaacatcagaaggaacaaactccgga

SEQ ID NO: 929210 - DNA, 601 bp, Homo sapiens
gtgagatcgcgccactgcactccagcctgggtgacagagagtgagactctgtctcaaaaaaataaaaataaaaataaaaatttgaagtttcttagttctccatgtgagggggaaaatgcctacagaccacgcaaccctaaatttttgttgtaggtaatacttaatgctaatgtccacactgtttcttaactcttggcctgccaattgtggtggcttaaaatgaattctacctttctgctttatttcagaagttctggtccgtgttttgtttcataggtttgcagtgttgggatgtaacagagagttggtgattactcagtagtaaaaaaaaaaaaaaaaatttaaaaatcacaggtaggagaattgaggacatagtctacttggtactgactcttttgtgggtggggagggtggggaaaatcacaattgttttycagtgtcacacaggggggctatatttgctacacaatgtggaaaatatgtacattagcctatacacaaaggaagttaaagatataaattgcagagtgagtattaccagctccattttagagatgaagcagcaggaactcaccatcatgtaaatgttctagatgtaccc

SEQ ID NO: 929211 - DNA, 566 bp, Homo sapiens
tccctcctctttgtggccctcagcatcccctccaacccattctgcctgctgctgttaggatgatcttcctacaacttcactttcaaccggcccctcccttgtttgggcatctctaaagcctacgtgttcctttccaaatcaaatccaaactcctctgtctgcttttcaaatcctcctgaaacccagccccagcctattccccactcctcccagcgccgaggcctgcatctctcctgttccctactatgatacacttcccgccggtccttgctttttaaaaacattaggttaggctctcctctcccctcctgcttttccttcttcctttctcattacttaaaaaagaactccaaagactgtcttaaattacattttcttcttctcatcmcttctcattatctaatatgatatactgtacttcacttattcaattatttatttttatttatttatttttttgagatggagttttgctcttattgcccaggctggagtgcaatggtgctatcttggctcaccacaacctccactcccgggttcaagtgattctcctgcctcaggctgcc

SEQ ID NO: 929212 - DNA, 584 bp, Homo sapiens
aactcttaattacttgactggggcctaacgatctgccaaaccctgacactcccttttctgtgggctgagtcctggccattagtgaaggtcttaacccaaaatatggacaaccccagagaaaacagttgttgcaaacagagagttatgcaaaccaaggttttcagcaagtggatgacattttggggtttatgtttcaggaggatgaattattaaaaaaaaaaatagggggaaatgcagcaaagcatttagaaactggtgtcggccgggtgcggtggctcacgcctgtaatcccagcactttgggaggccgaggcgggtggatcacgaggtcaggagatcgagaccatcctggctaacacggtgaaaccctgtctctactaaaaaaaacatacaaaaattagccgggcgyggtggcgggcacctgtagacccagctactcgggaggctgaggcaggagaatggcgtgaacctgggaggcagagcttgcagtgagccgagatcccgccactgcactctagcctggacgaaagtgcgagactctgtctcaaaaaaaaaaaaaaaagaaaaaagaaactggtgtcatag

SEQ ID NO: 929213 - DNA, 663 bp, Homo sapiens
aagaccgctcaaggagagtctgaggtcagacacgcctgccactgcctctacctgatggtccttccctacctaccctggtaactgaagacaaagggcatatactcttgggagttcaagggggtggtggtgccccccaccacctgttcctccccattctactaccgctgatgctcttgaaatcaccaccttccgcaggaggacaaccarcccaaaaatagtgcattaagcaaccaaagccaaggaccctcacagagcccattttactcccccaccacctccaccagagcagatgctggtatcaatggcagaaagactcacagatggttcacatcagaggattctgtgcagacaacctccagtaccagcccagagcctggtagacttgctgggttgctagatccagaagagagataacaatctttacagcttggctctcaggaagccacatccctaggaaaagggggagagtactacatcaagggaacactccatgggacaaaacaatttgaacaacagcctttggccttagacctctgtgacaaatgagaagaaaccagaaaaccaactctggcaatatgacaaaacaatgttcttcaccacccaagaaaaaatcacactagcccaccagcaatggattccaaccaagaagaagtccctgattta

SEQ ID NO: 929214 - DNA, 624 bp, Homo sapiens
gaaggaattggaaccaggagctagaatgccatagaactttctgtgtctgcacattgctatccttccagacctttttgtttcttcatccactggcaggccagaaaacagccaacccacagctcctgcatttagatctcttctagagcataagatctgccaattggctatgtaatacctccagattgccaggcaagaatctcaytggttctgtttgggtcagctctggtgaaaggtgggtacaggggtaactggcaaactcttatgtcagggcaaaaaaagtttgtaaaaagtaggcttggcagacatcctaaaaagtgtccactaaaactggcaaaacaactattaccctacagttggaaattagttgctttttttactaattagttgttctcccctcccccagttgttttatgttatactaagaaacatcatcttatatttttgttgttattcagatatattcccaaatggaattatggcatcaaaagttactggtattcatacttttaaaactaaagacacacagaagtgatctgcttttcaaaagtagtttctcttacaggaaaaaatcttcaatagtatcctttcgtaatagtaagatagtcactttgtttcacttactgt

SEQ ID NO: 929215 - DNA, 601 bp, Homo sapiens
ttttactaattagttgttctcccctcccccagttgttttatgttatactaagaaacatcatcttatatttttgttgttattcagatatattcccaaatggaattatggcatcaaaagttactggtattcatacttttaaaactaaagacacacagaagtgatctgcttttcaaaagtagtttctcttacaggaaaaaatcttcaatagtatcctttcgtaatagtaagatagtcactttgtttcacttactgtgagtttcttagtgttaaatttatgcagtaactctgcatctgtattttttttgtttcaaagtttttttgtttgtttttgtytgagacagggtctcactctgtcgcccaggctggagtgcagtggtgcaattttggctcactgcaacctctgcttcctgggttcaagcgattcacctgcctcagtctcctgagtagctgggactacaggcatgcatcaccacacctggataattttttatatttttagtagagacagggtttcaccatgttgcccaggctggtctcgaactcctgagctcaggtagtctacccacctcagcctcccaaagtgctgggattacaggcgtga

SEQ ID NO: 929216 - DNA, 544 bp, Homo sapiens
gtttgttggaggtccactccagaccccatttccctgggtatcaccagtggaggctgcagaacagcagaaattgctgtctgatccttcctctggatgctttgtcccagaggggcaccctcatgtatgagttgtctgttggcccctactgggaggtgtctcccagtcaggctacacgggggtcagggacccacttgaggaggcagtctgttagcagatattgaacaccgtgctggcaaaaccactgctctcttcagagctgtcaggcaggaacatttaagtctgcagaagctgtctgctgccttttgttcaaatatgccctgcccccagaagtggaatctagagaggcagtagaccttgctgagctgcagtgggctttgcccagtttaagcttccctgmctctttgtttacactgtgagcacagaaccacctactcaagcctcagcaatggctgacgcccctccctccaccacgctccagcatcccaggttgatctgagactgctgcactagcagtgggcaagtctccatgggcgtaggacctgcc

SEQ ID NO: 929217 - DNA, 625 bp, Homo sapiens
caggactgacattggaggtgcacttattgagagtcatgctgaagtttatgcatgtgagatttgaggcctgtgtgactggtaaatcggtgactatgggaccgattaatttggtggtgtttaggaatggggcggataagttccactctctggggacagggactgggacatatggttgaatacacaaggggagacayatccaaaagttggttggattactaggaaaggcctctagtattcctgaaagagataccgttaaacagcctccagagacaagaatgagagttaagtgtttcttgtagcctggaaaggtctaccttcttgtatggactgggagtacaggagagctggactaagtttttaattacttgttgagtatgccattctttagcctcatcttggacgcctcttctgtcagacatacctatatgggtataacatgtccaacaagcattggccccccatttctcagggtagtcacctcggatcatttttccttggtgatgtgtatggcctttgtgagagcagagagaagcagttttataacattcttttctcatgtaagtatatgtggcaaaagatgcgggtgctcggaaggggctacctaatccccaagagtttctgagag

SEQ ID NO: 929218 - DNA, 558 bp, Homo sapiens
acctgggatttgtccagtggtaggcactgacaagaaattggaagaagggaggaaagaagaaaagccctgttccctagctcagtcctgaggcctgatgcatttcctttgtagctttcctccccatgaatatgttcactgggattctctagcttttgccagtgaccctatcccctcagctccagaacaacatcttcccccatttgtcctttagcctagggatggtagaagctttcagctttctaatcttttaggacttagagaagtgaatctttcctttttggctttttagctcttccataatttgtgtaaccaatttcctggattctctgttttgtttttgtttttgttttttgagacggagtctcattctgttgccaggctggagtgcagtggtgtgatcccagctcactgcaacctctgactccctggttcaagtgattctcctgcctcagmctaccaagtactgggattacaggcacgtgccaccaagcccagctaattttcgtatttttagtagagatgtggtttcaccatgttggctaggatggtctccatctc

SEQ ID NO: 929219 - DNA, 484 bp, Homo sapiens
cagaaagtatatgtgtcaggtgtgaggaagaaaatagattttggaagttatgagaactgtagagagtgagttgagcatagtttgtgattttaagggcctctaaaagtattagggcagtggcagccgccacacgcagacttgagggctaggcmaaacagtaaggtcaagttgtttggataaaaaggctacagggtgcggtcctggtcctagtgtaagaattctgaccacactaaccatgcctaggaaggaaaggagttgttgttttgtaagggattgaggtttgggagattagtcagacacgctcagcagggagagcacatgtgtttttatgagaattatgccgagataggtaacagatgaggatgaaatttgggcttaactgaagtaatgggggctgtctgtgaagccttgcagcagtacagcccaggtaatttgctgagcctaatgagtgtcagggtcagtccaagtgaaagcaaagagaggc

SEQ ID NO: 929220 - DNA, 719 bp, Homo sapiens
catgtcctttgcagcagtatagagggagctgcaagtattatacaatggtatacaattataccaagccaagtaatgcaggaacagaaaaccgaataccacatgttctcacttataagtgggagctaaatgttgagttcacatggacacagttctacttgggaaaaacagacacaggtctacttgagtgtggagtgtggaaggagaaagaaaatagaaaaactacctatcagttactacagttactgtgcttattaccttagtaacaagattatttgtataccaaacacgggtgacatgcaatttccttatgtaacacacttgcatatttagtcctgaacctaaattaaaagttaaaaaaaattaaaaagtaaaatgcataagataataacaaaacaatttttatttttcctatccatgaccataraatgtctttactttttttgtcctcttcaatttctttcatcaatgactcatagttttaaatgtagagagctttcacttatttggccaagtatattcccaggtattttattttatcttttgctattataaatggaatttttttttctttttcagattgtttgctgttgacatattgcagtgctactggtttttgttggttgattttgtatcctgcaattttactgaatttgtttattagttctaagtcttttttgatggagtcttgaggtttctctaaatataagattatatcagca

SEQ ID NO: 929221 - DNA, 554 bp, Homo sapiens
tgagtatctttgttgggttccagaacttagaggaaaggctttcagtttttcagtatgataatattcgtgggtttgtcttatatggatttttagatttttgagatttgttccttctacacccagtttgttgagagtttttatcataaagagatgtagactttatcaaaagttttatcagcatcagtagaaatgaccatatgtattttactctttattcttttgatgtgatctctcacagttttcratttgcatatgttgactcatccttgcatttacgggaagaatcccaccttttatggttaatggtcttttgaatagttgttgaattcagtttgctagtattttgttgaaggtttctgcatatatgttgattggtgatattgatcaccaaaccaacaacagtttgttgctgctgttttatctttgttggattttgacatcagggcaatactggtcttgcatgatgaaatgagtttgagtttatgaaatgagtttgagagtattccctcattctcaactttttggaatagtttttgagtaggattgattttatt

SEQ ID NO: 929222 - DNA, 554 bp, Homo sapiens
tgagtatctttgttgggttccagaacttagaggaaaggctttcagtttttcagtatgataatattcgtgggtttgtcttatatggatttttagatttttgagatttgttccttctacacccagtttgttgagagtttttatcataaagagatgtagactttatcaaaagttttatcagcatcagtagaaatgaccatatgtattttactctttattcttttgatgtgatctctcacagttttcaatttgcatatgttgactcatccttgcatttaygggaagaatcccaccttttatggttaatggtcttttgaatagttgttgaattcagtttgctagtattttgttgaaggtttctgcatatatgttgattggtgatattgatcaccaaaccaacaacagtttgttgctgctgttttatctttgttggattttgacatcagggcaatactggtcttgcatgatgaaatgagtttgagtttatgaaatgagtttgagagtattccctcattctcaactttttggaatagtttttgagtaggattgattttatt

SEQ ID NO: 929223 - DNA, 742 bp, Homo sapiens
tagtaagtctcatgagatctgatggttttataagagttttccccttttgctctcatgagatctgatggttttgtaagaggtttcctcttttgcttggatctcatcattctctctctttcctgccaccacgtaagacatatcttttgccttctgccatgattgtgaggccttcccagccacatggaattgtgagtccattaaacttctttttctttataaattacccagtctcaggtatgtctttatcagcagtgaaaatggactaatacagtcaattggtactgagagtggggtgctgctgtaaggatacccaaaaatgtggaagcgactttggaacgaggtagcaggcagaggttggaacagtttggcgggctcagaagaagacaagaatatgtgggaaagtttagaacttcctagasacttgttgaatggctttgaccaaatgcttctcatctcagatggagatgagaaacttgatgggaactagagtaaagatgactcttgctatgttttagcaaagggactggtggcattttgcctttttcctagagatttgtggaactttgaaaatgagggagatgacaaacggtatctggcagaagaaatttctaagtagcaaagcattcaagatgtgactttggtactgttaaaaacattcagttttaaaagggaaataaagcataaaagttcagaaaatttgcaacctgatgatgcaatagaaaagaaaaacccattttctaag

SEQ ID NO: 929224 - DNA, 666 bp, Homo sapiens
gaggtcagggctgcagtgggccatgatctcaccactgcactcagcctgggcaacacagcaaggccctgtctcaaaaataaataaataaataacacaaacttatttaacagtttactataaaataggctttgtgtcagatgattctgcccaactgtaagctgctggcagtgtaaatgttctgagcacgtgtaagccaggctaggtgtcttaaatgcattttcagtttcaacttagaattggtttatcaggacgtagccccttggtgttgaggggcatgtgtattaacagtctccttagtgacttttttttttttgagatggagtcttgcactggccgtagtgcagtggcrcaatctcagctcactgcaacctcttgtctcccgggttcaagcgattctcctgcctcagtctcccaagtagctgggattacaggcacccacaccacgcccagctaatttttgtgtgtgtgtatttttagtagagacgggggtttcactatgttggccaggctggtctcgaactcctgaccttgtgatctgcccacctcagactctcaaagtgctaggattccaggcatgagccaccgcgcccagagtccttagtgatttttacaccatgaattgttgaagccctaagccagagccaagggcaagagtatagagaatct

SEQ ID NO: 929225 - DNA, 720 bp, Homo sapiens
ttttggtatatacttttatgagttttaacacactcatgtatagattcatgtattcactgccacagtcaggatacagaatagttccatcacaccagtgcaagccctttgtaaacaaaccttccccctcctcctacacctggcaaccagtgatctgttgcctagagtccccgtagttttgcctttcccagaattcatgtgctagctgagtgcagttgcacttcatgtaaatttgagactggctttgtttacagaccctaaggccacctttcagattcatccatgtcattgtcaacagttctttcttttcactgtggagtcgatccatggcctggatagaccacagcttgcgtctccattcccctgtcaaaggacacttgggggtgtctccatttcggggtgattctgaatagagctgctgcagacatttgcctatgggtttgggttcctctcctcttaaaataagtcattatttctgtagggtaaatacctaggagtggkattgctgggtcatgaggtcagtgttagtttaactagataagacaccgcccaagtgtttgcactgtgatggatgggagttccgggtgctccatacatcgccgtaacttggcatcatcaggtcttattcccactgtgataggcacatagtggtatctcattgtgcttttaatttgcatttccatagtgggtaatgaggttgagcatatttcatgcttatttgct

SEQ ID NO: 929226 - DNA, 587 bp, Homo sapiens
catcaagtgtagggtctgaaaaatacttcaagcaccgatcttaggttttaaaatagcgatattattcctatgagcaattgggaaggtttagaatcttgtggcccctagctgcatgactcctaaaacataatttctaatcctgttgctaatgtgttagtcctatgaaagcagtctggtacccaggaaaacaagggtttgttttggaaggggggtgttacattatctttgtttcaaagttaaactataagttcctcccaaagttggtttagcttacgtccagaaatraacaagaacagcttggagattagaagcaagagggagtcggttatgtcagatctctttcactgtcatattttttctcaccattataatttttgtaaaggcagtttcactaccatcgtcagcaaggtatagttacaggaaaggggccccaatccaaaccccaagagagggttcttggatcttgtacaagaagtaattcagggcgagtccatagagtaaagtccatagagttcacagagtaaagaaagaaagtagaggaataaaagaatgtctactccatagacagagcagccccaagggatgtt

SEQ ID NO: 929227 - DNA, 581 bp, Homo sapiens
taatgctcttggacttctcagcctcacgaactgtgagagataatttctttgctttgtaaattatcaagtctgtagtattctgatacagcagcagaaaacaaactaagatagaaaattgatattgggaggtatttgtttctataacaaatatctaaaaatgtggaatggctttggaactgggtaatggctagaagctggaagaatttagaggagcaggctaaaaaaaaaaaaagccagattgctgtgaatggaacattaagggtgattytgatgagggctcagaagagagctgtataaaaaatctgaatcttcttagagattgcttaaatgattgtgaccagaatgttagtagaaatatgaacagaaaaggtcatgctgatgaagtcttagacagaaatgaggaataaggttttggaaactagagtaaaggtcattcttgttataaagtggcaaagaccttagtagaactgcttcaatgcctgagggctttaaggaatacagaactcaagagcaatgaattaggatatatggcagaagtaatatctaagcaacaaagcattcaggctgatttctggatacct

SEQ ID NO: 929228 - DNA, 550 bp, Homo sapiens
tggatttgctatttttaatcttcctgtggatctcagttttaccccaaatgataattaccaaattaacctttcaatgcacagttgaatgcaattaatcactgtagtagtatattatttctttcttttttaaaaatcagccccactttatagttgaaatgtagtagtagattataatcaggctctgttaacagagaacttgggaaaaataagattgctcacaatgaatccatcccattatgttgccaaagcctagtttcaatttaacttctgtcagtgcaatttgtggaaatatttctatatagtgatcttgtttttcagaagtagacagaggagttcttcacagcttagctgcctraagttttaaggtttggtccacatagccaggccaatgtttatagtatactttggaatgtgagtgactgaggattcactttaatagtttttaaagcaggtaagtccatgtagccagtgcagttgtgcagtcagccttgttagcattttttttttttttcctgggacagagtcttattctgctgcccaggctggagtg

SEQ ID NO: 929229 - DNA, 550 bp, Homo sapiens
tggatttgctatttttaatcttcctgtggatctcagttttaccccaaatgataattaccaaattaacctttcaatgcacagttgaatgcaattaatcactgtagtagtatattatttctttcttttttaaaaatcagccccactttatagttgaaatgtagtagtagattataatcaggctctgttaacagagaacttgggaaaaataagattgctcacaatgaatccatcccattatgttgccaaagcctagtttcaatttaacttctgtcagtgcaatttgtggaaatatttctatatagtgatcttgtttttcagaagtagacagaggagttcttcacagcttagctgcctaaagttttaaggtttggtccacatagccaggccaatgtttatrgtatactttggaatgtgagtgactgaggattcactttaatagtttttaaagcaggtaagtccatgtagccagtgcagttgtgcagtcagccttgttagcattttttttttttttcctgggacagagtcttattctgctgcccaggctggagtg

SEQ ID NO: 929230 - DNA, 638 bp, Homo sapiens
gcctagtggatcccgcgccagggccgtgggtggagctgcccaccagtcccgcacggcgcctgcacttctcagcccttgggcagtcaatgggactgggtgccgtggagcagggggtgatgcctgttggggaggctcggtccatgctggagcccaccgccagggggctcggccatggcgggctgcaggtcccgagccctgccccgcggggaggtggctgaggcctggcgagagttcgagtgtggcacgggcagtctggcactgctgggggatccggcgctccctggcctgggtgctaagtccctcactgcccggggccggccggcttctctgagtgtggggcctgccaagcccacgcccacccagaactttcactggcccamgagcaacgcacgcagcccgggttcccacccgtgcctctccttccacacctccccgcaagcagagggggctggctccatacttggccagcccagagaggggctcccacagtgcagcagcggactgatgggctcctcaagggtggccagagcagacgccaaggccgaggaggcgctgagagcgagcgagggccgccagcacgttgtcacctctcagtatgagtgtgttgtagtgtatgtgtgaaagggagttttgcaatg

SEQ ID NO: 929231 - DNA, 621 bp, Homo sapiens
gcctctccttccacacctccccgcaagcagagggggctggctccatacttggccagcccagagaggggctcccacagtgcagcagcggactgatgggctcctcaagggtggccagagcagacgccaaggccgaggaggcgctgagagcgagcgagggccgccagcacgttgtcacctctcagtatgagtgtgttgtagtgtatgtgtgaaagggagttttgcaatgggagtatgggatgatgtgttagtcatagttctacagagaaatagactatctatctatctatatctcagagagagagagagagagagattgagtgtaaggaattggctcatgcaattatggagaccaagtgccaagatatggagacrgcaagctggagactcaggagagctgtggcgtagtagtttctgtccaagtccagaggcctgagaaccaggagagccagtagtataagttctagtctgaaagctggcaggcccaagaccaagaagagcccaagtttcagtttgagtcccgaagcaggaaaagactgatattccatttcaagcagtcagacaagtcttatggcagggtcagccttttagttctcttcaggccatcaactgattggataaggg

SEQ ID NO: 929232 - DNA, 786 bp, Homo sapiens
gacagcataaatatagtaggctgaacctgcacattcaaaacaagatcaattggtcaacacgtatatggtaagtgcctatcacatgcaagacaatgctctaggtactgatgcagacaagagagacataatctttgccctcaaagagcttaccttctagagaaagaaacaagtagatattcaaccaaaaatacwttacaaagctaatgttaatttttaaaaagtgttatgaaaaagattaaattgatccataagttaaacagtgcctgagggagttgctggggatgaaaagctccacagaaatgtcatctcatttaagctcaacacaaatgtcatctcaacataaatgagatgacatttgtgttgactaagtaacaagaagaaggcagtcatgcgaaggtttacagaaggcacttcaaatagaaggaacagcagatacaaaggtcctgaaatgagtgcacttagtataccattccaagggctgcaagagggtcagggtggttggagcttgggatgagaaagagagtggcctgagatgaaattcatgacagaagcaggggccacttcatgaagggccttgtagggcatagtaaaagcctagggcatggttttacgcagggaagcttacaccgtctgattataaggctcactcaggcatccgtgtgcagagctgcctgtaagacacgtgggtggagatgaggaccatcatcaagataatggcacttgatctgggggatggactatgctgacccggattaggatttcagtggcaaagataatagcaaaaga

SEQ ID NO: 929233 - DNA, 619 bp, Homo sapiens
tataagacagcataaatatagtaggctgaacctgcacattcaaaacaagatcaattggtcaacacgtatatggtaagtgcctatcacatgcaagacaatgctctaggtactgatgcagacaagagagacataatctttgccctcaaagagcttaccttctagagaaagaaacaagtagatattcaaccaaaaatacattacaaagctaatgttaatttttaaaaagtgttatgaaaaagattaaattgatccataagttaaacagtgcctgagggagttgctggggatgaaaagctccacagaaatgtcatctcatttaagctcaacacaaatgtcatctcaacataaatgagatgacatttgtgttgactaagtaacaagaagaaggcagtcatgcgaaggtttacagaaggcacttcaaatagaaggaacagcagatacaaaggtcctgaaatgagtgcacttagtatacyattccaagggctgcaagagggtcagggtggttggagcttgggatgagaaagagagtggcctgagatgaaattcatgacagaagcaggggccacttcatgaagggccttgtagggcatagtaaaagcctagggcatggttttacgca

SEQ ID NO: 929234 - DNA, 583 bp, Homo sapiens
agtccagaagaaatacaaaatcattgagcccaagtcaagatgttagcaggctgcactccctccggaggctctagggaagaatctgttcattgtctcttccagcttctggtggctgccagcccagcattccttggctagtggcctcatcatttcagtctcaacaatcacatgtccttctctgccaggtcctcacgtggccttctttgtgtaactgagtgtcaatcactctctgcctctttcttataaggatacttaggattttatttagaacacaggtagatatcacaggatattctgtccgtctaagttgagatcttaaattgatcacatttgtaaagactttttctgaatggagtaacatttacagattacagagatgaggagctcttatctttgcggggcattttttagtctgctrcaccttccttgatctttttcttccagttctagctgggcttccaaggctggactatggacttttttttttttttttttttttttggagacagagtctcactctgtcgcccaggctggagtgcggtggtactatctcggctcactgcaccctctgcctcccaggttc

SEQ ID NO: 929235 - DNA, 607 bp, Homo sapiens
tgacgtgggacaattgtttgagcccaagagtttgaggctgcagtgagctattttactactgcactccagcctggataacacactgagacattatctctaaaagtattttttaggcagggcacacgtggctcacgcctgtaatcccagtactttgggaggcccaggcgggtggatcacaaggtcaggagatcgagaccatcctggctaacatggtgaaaccctgtctctactaaaaatataaaaaaaatagccgggcgtggtagcaggcacctgtagtcacagctactcgggaggctgaggcaggagaatggcatgaacctgggaggtggagcttgcagtgagctgagatcgcgccactgcaacccagcctgggtgacagagcgagactccgtctcaaaaaaaaaaaaaamcaacaacaaaaataaccaatactttttaattgatagagaatgcaatcctgagtattgggatgtgaatatatgggtaaatcctaatgaagctggtagattcaaaccccttaactctcttaactctcctttgccaatagaggcagcccttcttcccctaaggagattagtctcctcttatctgaagagcctatcattac

SEQ ID NO: 929236 - DNA, 724 bp, Homo sapiens
tttgggctgagactatggggttttctagatagaaaatcatgtcatttgcaaacggagatagtttgacttcctctctttctttttggatgccctttatttctttctcttgcctgattgctctggctaggactttcaatactatgttgaatagaagtgatgagagagggcatccttgtcttgtgctggttttcaaggagaatgatgctagtttttgcctattcagtgtactgttggctgtgacctttacagaactcttcacccaaaaacaacacagtatacattctcctcatcaccacatggcatgtactctaaaattaaccacataattggacataaaacaatcctcaacaagtgtaaaaagaaccaaaatcatatcaaacacactctaggaccacagcacaataaaaataawagttgagactatgaaaattgctcaaaaccaaataattacatggaaattaaacaatacaatatgtcctgagtgacttttgggtaaataatgaaattaaggcagaaatcaggaagttctttgaaaataatgagaacaaaaatacaatataaaatacaatatactagcatgcacaaccggttcccccaaacatggagtcctgcagcccagttcttacctgaatcaggatggagggtgtggtgggtccaagtggagctgttggccatgtgcctacttgctgcgtacctgcagatcccactccctcaggtctccctg

SEQ ID NO: 929237 - DNA, 582 bp, Homo sapiens
tttatttaggttaaattaaaaaataataataataagcaaggtgtagttttagcatgcaagcactgcacatgttttggtagactgacttttttactttttgaagtatttgtaaatgatatgcatttttaggttctctgtatatcctttcattgctaatatatagaaatataattgatttgtgttatgtcagtcttataccctgaaaccttgttaaacatattaattctagaagcttttattttaagattccttgggtttttttttttcttttgagatggagtctcacactgttgcccaggctggagtacaacggcgagatctccgctcactgcaacctccgcctcccagggtcaagcrattcgcctgcctcagcccccagaatagctgggactacaggcgcacaacaccactcccagctaatttttgtagttttagtagaaacagggtttcgccatgttggccaggctggttttgaactcctgacctcaagtgatccgcctgcctcggcctcccatagtgttgggattacaggcatgagccaccacgcccagcctgggattttctatgtaaacagtcatgtga

SEQ ID NO: 929238 - DNA, 587 bp, Homo sapiens
gattgcacccaccccgactgagggtgggtctacctctcccagtccactgactcaaattttaatttcctttggcaacaccctcacagacacacccaggaacagtattttgcatccttcaatccaatcaagtttacactcaatattaacaataatacattactgggaaaaaaaaatcaaacaaaggaagtataagagttctacactaaaaactacaaatattgctgaaagaaattttagaagatctacataaatggaaaaaacagtcatcttcatgaatcagaagactagaaccagaagactactgctaggatcataataaaccccaatttgctctacagattaaatccaattcctatcaaaatcccaggtgacttcttcatagaaattaacaggctgattctaaaaatcagatggaatagsagaaaactcagaatagtcaaaataaacttgaagagaacaaagtttaagactcacactttcatacttctaacttactacacagcaacagtaattaaaagagtgtagtaccagcatgaggatacacagacaaatcaacagaatagagagtccagaaataaacccaagca

SEQ ID NO: 929239 - DNA, 608 bp, Homo sapiens
tggggaggctgaggcaggagaatggtgtaaaacccgggaggcagagcttgcagtgagtcgagattgcgccactgcactccagcctgggagacagaacgagactccgtctcaaaaaacaaacaaaaaaaatttatcagtattaaaaaaaaaaccccatttttgtgctgtccccccaaagtagttgtttttccactgattattaaaatattaataaaatacctttattttattgaatttacttgaacagatcaagtaaactcrtatctcctaggccaggcgaagtggctcacgcctgtaatctcagcactttgggaggctgaggcgggtggattgcttgagtacaggagttcgagaccagcctgggcaatacagtgagaccccgtctctacaaaaaaacataaaaaattagctgggcgtggtggcacatggctatagtctcagttacttgggaggtatggtgaaaggatcacctgagcccagaaggttgaggttgcagtgagccatgatcatgttacagcactttagccttggcgacatagtgaggccctgtcaaatcaatcaatcaatcaatctcttagataccttattattgacagccacttgttgac

SEQ ID NO: 929240 - DNA, 573 bp, Homo sapiens
gtaacatcaaaccttatctgaatctccagcctgctagccacactgtatattttggatttgctagcctccgcaattgcatgagccaattccttaaaataaaaataagtttctctgtctctccccgccatacctcctccctctctcgttctcactccctgtcctctttcccttctccattcccttcttccctcccgctgtcttcccctgttcccttctctccccctctccactcttatgcctcagcttctctctgtccccacctccttcttttcctccttcctactttcttccccattctatttctcgggaagaccctgactaatatgggtgacccaattcttttgcatcctcaccggcattttatatatatatatatatatatatrtgtgtatatatgtatatgtatatacgtgtgtatgtagtatatatgtgtgtacatatgtatatgtgtgtatatatatgtgtatatgtgtgtgtgtgtgtgtatatatatatatttaaattctctttatttttattttttagtagagatgggttttgccacgttgcccaagctggtcttgaactcctggg

SEQ ID NO: 929241 - DNA, 748 bp, Homo sapiens
gcgtgcaggttagttacacatgcatacatgtgccatgttggtgtgctgcacccgttaactcgtcatttaacattaggtatatctcctaatgctctccctgcccccacccaccccacaacaggccccagtgtgtgatgttccccttcctgtgcccatgtgttctcattgttcaattcccacctatgagtgagaacatgcggtgtttggttttttgtccttgcgatagtttgctgagaatgatggtttccagcttcatccatgtccctacaaaggacatgaactcatccttttttatgagaatttaaatttacattgccacaggtggccaggggccatgtccgagagcatagcctggcagtggccaccagctctgctgggagtctcccccaggagtctctctggttccaggaaaactctctacttgaactccacccaggctgtgactgtaccctgccctttgccctgcccrccagggctggttttgaaggtctacaggaacaagaagccatctctggtcacctaggatggtcttggagggccgagctaggaacctgtcagaggagagggagccgagacaggggtcctatgggaagggagagggcagggctggtgacaccataacgctcgaaagaagccactgctcccgcccggctcccactccatgcaccccatcctggacacccagagcaaccgtgacatccctagttccttttccaaaaagtgaggaataaactgcccaacacattct

SEQ ID NO: 929242 - DNA, 686 bp, Homo sapiens
ctggagtgcagtggcgtgatctcagctagctacaacctccacctcccagccgcctgccttggcctcccaaagtgccgagattgcagcctctgcccggccaccatcccgtctgggaagtgaggagtgtctctgcctggctgcccatcgtctgggatgtgaggagcccctctgcccgtctgcccagtctgggaagtgaggagcgcctcttcccggccgccatcccgtctaggaagtgaggagcgtctctgcccggccgcctgtcgtctgagtggggagcgcctctgccccgcagccccgtctgggatgtgaggagcgtctctgcccagccgcgaccccgtctgggaggtgaggagagtctcttaccggccgccccgtctgagaagtgaggagcccctccacccggcagccgccccgtccaggaagtsaggagcatctccgcctggcagccgccccgtccgggaggaaggtagggggtcagcccccgcccggtcgccgccccgtccgggaggtagggggcgcctctgcccagccaccccttctgggaagtgaggagcccctctgcccggccaccaccccgtcagggaggtgtacccaacagctcattgagaacaggccatgatgacgatggcggttttgtggaatagaaaaggaggaaaggtggggaaaagatagagaaatcagattgt

SEQ ID NO: 929243 - DNA, 686 bp, Homo sapiens
ctggagtgcagtggcgtgatctcagctagctacaacctccacctcccagccgcctgccttggcctcccaaagtgccgagattgcagcctctgcccggccaccatcccgtctgggaagtgaggagtgtctctgcctggctgcccatcgtctgggatgtgaggagcccctctgcccgtctgcccagtctgggaagtgaggagcgcctcttcccggccgccatcccgtctaggaagtgaggagcgtctctgcccggccgcctgtcgtctgagtggggagcgcctctgccccgcagccccgtctgggatgtgaggagcgtctctgcccagccgcgaccccgtctgggaggtgaggagagtctcttaccggccgccccgtctgagaagtgaggagcccctccacccggcagccgccccgtccaggaagtgaggagcatctccgcctggcagccgccccgtccgggaggraggtagggggtcagcccccgcccggtcgccgccccgtccgggaggtagggggcgcctctgcccagccaccccttctgggaagtgaggagcccctctgcccggccaccaccccgtcagggaggtgtacccaacagctcattgagaacaggccatgatgacgatggcggttttgtggaatagaaaaggaggaaaggtggggaaaagatagagaaatcagattgt

SEQ ID NO: 929244 - DNA, 715 bp, Homo sapiens
acttaactactaatagcccactattgactggcagccttatgataacataaacagttggttaatacatattttatatatgtattttatattgtattcttataatctatagaaaagaaaatgttaagaaaatcacaaggaagagaaaatatatttactgttcattaagtggaagtggatcatcttgaaggtcttcattctcaccatcttcatgttaagtaggctgaggagtaggaacrgaagaagaggggttggtcttgctgtttcaggggtattagaggcacaagaagtgaaggagatggaaggggaggcaggagaggcaagcacgcttggtcttttattgaaaaaaatccgtgtgtaagtgaacctgcactgttcaaacctgtgttgttcaagggtcaactgtatttgactatacatccctaatgagatttaccctaagaaccaaaggaaaccttgtacagattgattatcctttatccaagatgcttgggaccagaagtgctttgaatttcagatggggtttttttttgaacttaagagagatgatttagggtatctggtggaagaaatttctaagcagcaaagcattcaagaggtgacttgggtgctgttaaaggcattcagttttataaggaaagcagtcgcccaggctaaaggtgcagtggcgtgatcaccactcactacagcctcaacctcccaggttaaagcaatcctt

SEQ ID NO: 929245 - DNA, 717 bp, Homo sapiens
acttaactactaatagcccactattgactggcagccttatgataacataaacagttggttaatacatattttatatatgtattttatattgtattcttataatctatagaaaagaaaatgttaagaaaatcacaaggaagagaaaatatatttactgttcattaagtggaagtggatcatcttgaaggtcttcattctcaccatcttcatgttaagtaggctgaggagtaggaacggaagaagaggggttggtcttgctgtttcaggggtattagaggcacaagaagtgaaggagatggaaggggaggcaggagaggcaagcacgcttgstcttttattgaaaaaaatccgtgtgtaagtgaacctgcactgttcaaacctgtgttgttcaagggtcaactgtatttgactatacatccctaatgagatttaccctaagaaccaaaggaaaccttgtacagattgattatcctttatccaagatgcttgggaccagaagtgctttgaatttcagatggggtttttttttgaacttaagagagatgatttagggtatctggtggaagaaatttctaagcagcaaagcattcaagaggtgacttgggtgctgttaaaggcattcagttttataaggaaagcagtcgcccaggctaaaggtgcagtggcgtgatcaccactcactacagcctcaacctcccaggttaaagcaatccttcc

SEQ ID NO: 929246 - DNA, 573 bp, Homo sapiens
ctgcgggatagtctgctgtgtccatggagcagccattgtgctgtgcaatgttactctaataaacttgttttctttcactgtcagtttgctcttgaattcttcctgagtgtggccaagaaccttcccaaacccattccsaatttgtgggttcactggcatcagcttacatccagttttacagcaatcttctccacctttgaaatgctacaaacatgtttgtatttttatcatcagtaatatttttcaatcttgtgagaatgtttctttcaaaagaaggtactttatttccatcccatattgctttctatattttatttgatcagtttgaccatggcaagaacaagtatgactttgatggtatggggtattagaattttacttttaaataagaaactctagaataaccacctaaatctttaccattaagggtatttccacagaattattgtgttaagcatggactgacttgttaaaaaattactatagtaattgttcttcatatactagacagtaaattttgaaatcttttgctaataattacggcttaatcctattattttctagtatctcagg

SEQ ID NO: 929247 - DNA, 611 bp, Homo sapiens
cagtccatctggagtttcagacttgctaagttagaggtctgggtttaaacatttcaggctttccactgaaataccaaaagggtcatggtctaggagtaaagaccatatgctagggctaatggattttccctaaggctatgcgaaaatcagaaagatagcaaacattaaaaaaaagaataatcaggtctccacaagctcacatttaaccaactgctagaacgaaactttttttttttttttgagacggagtctcgctctgtcgcccaggctggagtgcagttggcgcgatctcagctcactgcaagctctgcctcccgggttcacgccattctcctgcctcagcctcccaagtagctgggactgcaggcgcccgccaccgcgcccggctaattttttgcatttttagtagagatggggtttcactgtgttagccaggatggtctcaatctcctgayctcgggatccacccgcctcagcctcccacagtgctgggattacaggcgtgagccaccgcgcctggccaagaaagaaacttaatgatattcaaagacaacagaatccagagtctctacaatgtaacaatatctaccatacaataaaaaattactaga

SEQ ID NO: 929248 - DNA, 503 bp, Homo sapiens
ctcggtggcagaacggcagaaagtggctgcagccaccctcaccaaggctcggtggcagaacggcagaaagcggctgcaggcaccctcaccaaggctcagtggcaggatggcagtgcccccccgggaaggtggtttcccactgcagccacctgagtgagcaggagcaccttcggactgagaagcagacaggcctcctgggtgaggccgcagtccctggaggccctctggcactcctctytgctgcccccacttgctcagttcccgggtcagtgacatgcacctagaggggccttcagagcacttgggtgactgagctgtcacactgccgggctcccgtggggaataggaagacattcaatactttactccaaagcctcatcctagcaagggcagcttgactgagcagtgtgagaagctaaatggcaagaccagacgcacgcggggcaggggcggctgctgctccgtaaagggaccaagaagagctgattccctggtgaatgaga

SEQ ID NO: 929249 - DNA, 558 bp, Homo sapiens
agcctcagggtagtttttgtttgtttgttttttgtttttgagacagactctctttctgtcacccaggctggagtgcagaggcgtgacctcagctcactgcaacctccgcctcctgggttcaagtgattctcttgcctcagcctcccaagtagctgggatcacaggtgcgtgccaccacgcccagctaatttttgtatttttagtagagacaagagttggccaggttggtctcgaactcctgacctcaggtgatccacccaccttggcccctcaaagtgctgggactacaggtgtgagccacccttcctgggctagggtagtttttaaaatgcctgatggcgcaaggacagcactacccagccaaggggtggytcccaataggcctggcaggacctgccctctattatcccaagggcacaacactgggcagcagcaggaggaggaaagtttccagggaagggaaacagggccccaggggagcgggagaggggaggctggggcagcggaaggttcttgtgggtcaggtagccggacgtaagcaggacacgtagggcaacc

SEQ ID NO: 929250 - DNA, 762 bp, Homo sapiens
aaatcagtgattgcgggaacaaacagtattttcagcttcttacggtgccatgcaggctttaccaagaccttggttaagtcccagtcacatttactttctgtcttacatctagaaaagggtgaggaaagaggggaggggagaaaggtgctcaggtgctaggtaaagcttactgatcagcagcctagactccaccactgttccttctctttggtctgtctagaacagtgactataaattaggaaaaacaaaattatgctggcctgtgggaaataatgggggaaggaaggcagggaggaaaagggcattgggaagccctgcttcaagactgaagacagacaaatagacaaccacccagactgcttaagtgtcacagacagcccccaccccaagctcccttccaggtatccccataaatcatttgggcacactccctcttggaattgcaatttccatcttccacttatccctaaggagctggccctgtggagaggtgtgttggttgttttgtttttgccaaaggccctcgctctaggtgctcctgtaaaggtaccttggcccctgataygggatgaatggatgaacgaagccccagatgctccagtgccaaggaggtcagaccgggaacaggcccccactcccacaccctgggatcggagcttgcttggttcttgccatcttgcaggatgacttcgagtctggagggagatacacagtgcctctccatccctggggtggggggaagggattctgctgggactcttg

SEQ ID NO: 929251 - DNA, 594 bp, Homo sapiens
gcttctgcaattagcagcaggggttgtattacctgcatagtttggccttgaaggtgcaggcgatctttgcaggccacctcgtagaagtcgtaatactccagaaaggacttctccatcacccctctggaaaacaagcagaaaagtgtaagtgagaaacccaggggtacaggtcaccccttccttacctaaccttttttttttttcagatggagtcttgctctrtagcccatgttggagtgcagtggtgcaacctcagctcactgtgacctctgcctcccggattcatgcaattctcctgcctcagcctcctgagaagctgggattacaggcatatgccaccacgcctggctaatttttgtttttagtagagacggggtttcaccatgttgcccaggctggtcaggaactcctgacctcaactgatctgcctgcgtcggcctcccaaagtgctaggactacaggcgcaagccaccacacctggcctctttacctaaccttaatgccaaattaaatacctaccattcccaagtccagatctgttttctacaaagatcttttcattttatttattttttatttttttgagactgagtc

SEQ ID NO: 929252 - DNA, 592 bp, Homo sapiens
acttgaaaaataataaataaatgaatatgaaataattttaatctagtttagaatactagatttctaaaacttaagtaccctccaaaaagcaatctctttaataattatttatattgattgcatgttgagataattttttatatattgggttaactatctttaaaattaatttcacctgtttctttaatatgactcgtagaaaatagaaacttacatgtatggctcacattgcatttctattggacagtgctgggcactgtgctacagtacccagcacataggcatggtccctgctttgacagggtttacagtccagcaggggacctggtttgatttgatttggtctggtttggtttgggataagaggacaaagctaaccagggagtgagggagrgctgctcactggaccccttcagaagtaggtgattctgctgactcttcaacaagagggttccatgtggctgacaccagagtagaagccccctcccaaagctggcccctctcccagttgtcgctcccatctggaagttgccctaaggtgccaacctctgccttttccagaaaatcaccactgactcagtccttcctcccc

SEQ ID NO: 929253 - DNA, 572 bp, Homo sapiens
  misc_feature 1, 2, 3, 4, 5, 6, 7, 8, 9, 10, 11, 12, 13, 14, 15, 16, 17,18, 19, 20, 21, 22, 23, 24, 25, 26, 27, 28: n = A,T,C or G
nnnnnnnnnnnnnnnnnnnnnnnnnnnntggggtctggagggtggctccccacagctccactaggcagtaccccaggagggactctgcatggagcctccaaccccacatttcccgtctgtactgccctagtagaggtattctgtgaggctccacacctgcagcaggattctgcctggggacccaggcttttccatacatcctctgaaatctaggtggaagctgacaagtgttctccactgttgcattttgcatacctacaggcttaacactacatggaaactgccaagagttatggcttgcattctccaaagtggcagcccaagttttagctgggcccrtttgagccacagctagagttggagcagccaggatatatggggagcaatatcatgaggctgccctggcctggcccacaagttaattcttccctcctaagcctctgggcctatgatgggaggggctgccatgaaggtctctgaaatgcctttgaggccttttcctcattatcttggatgttagcacttggctcccttttagtcatgcaaatatctctagtaagtagttgctctac

SEQ ID NO: 929254 - DNA, 559 bp, Homo sapiens
tatctggttaaagaataggaagaaaaatggccttaaatacataattggaagggtagtagtatttttcatagccttttccaataattatggatattcttctgtaaaactatatctgaacaagtagtagtttctgaaaagttagttggcatgtggaatctgaaaccatattaactagatgtctgtactttgttatgtaacaattcattggtctatcttgcacattgaatggatcttttacctaagaatgtttttgtaatgtcattcattgatcattgagagattattggttcrttgagttaataagaacttcaaaatcttgacacatttcattataaaatagtttaaaaatcacatttgttagtatagacaggttaatcagaaaagtctttaagtactgggaagctgtcgagctcccagtggcagctaaacatttttcaaaattctgattttcacttgaaaggtcaaatttcattattggcaacaaatactatcacttgaagtgaaaggcttacttttttcatttttttcatttcatttttttcatttgttcaagttaacc

SEQ ID NO: 929255 - DNA, 559 bp, Homo sapiens
tatctggttaaagaataggaagaaaaatggccttaaatacataattggaagggtagtagtatttttcatagccttttccaataattatggatattcttctgtaaaactatatctgaacaagtagtagtttctgaaaagttagttggcatgtggaatctgaaaccatattaactagatgtctgtactttgttatgtaacaattcattggtctatcttgcacattgaatggatcttttacctaagaatgtttttgtaatgtcattcattgatcattgagagattattggttcgttgagttaataagaacttcaaaatcttgacacatttcattataaaatagtttaaaaatyacatttgttagtatagacaggttaatcagaaaagtctttaagtactgggaagctgtcgagctcccagtggcagctaaacatttttcaaaattctgattttcacttgaaaggtcaaatttcattattggcaacaaatactatcacttgaagtgaaaggcttacttttttcatttttttcatttcatttttttcatttgttcaagttaacc

SEQ ID NO: 929256 - DNA, 472 bp, Homo sapiens
caagaagtgagctctcatggccttgggcagctctgcacctgtggctttgcagggaatagcagccctcccagcctctttcatgggctaggattgagtgtctgtggcttttcccagcacacagtgcaaaatgtcagtggatctaccattctggggtctggaggatggtggccctcttctcacagctccactaggcagtacaccagcggggactctgtgtgggagttccaatcccacatttcccgtccgcactgccctagcagtggttctctatgagggctatgcccctcagcaaacttstctctggacatgcaggcatttccatacatcctctgaaatttaggtggaggttccccaacctcaattcttctgtgcaccctcaggatcaataccacatgaaagctgacaagtcttggggcctgcatcctttgaagcaatggcctgagctgtaccttggcccaatttaaaaatgttc

SEQ ID NO: 929257 - DNA, 596 bp, Homo sapiens
ccagggctgcaaaaagcagcaaggtcctgggccccggcccatgaaaccagattttttcttctaggcttcttggcctgtgatgggtggggctgccatgaagacctctgacatgccctggagatattttccccattttcttggtgattagtatttggctcctcattacttatgcaaatttctgtggtgagcttgaatttctcctcagaaaatgaggttttcttttctatcgcatcatcargctgcaaattttccaaacttttatgttctgctttctttttaaacataagtttcaattccaaaccatatctttgtgaatgcataaaactgaatagcttctaagagaacccaagttacctcttgaatgctttgttgcttagaaatttcttctgccagataccctaaatcatctctctcaagttcaaagttccacagatctccagggctgggacaaaatgccatcagtctatttgctaaagcatagcaagagtgacctttaccacagttcccaacaagttcctcatctccatttgagaccacctcaacctggtcttcattgtccatatcactatcagaattttggtcaaagtcattcaaca

SEQ ID NO: 929258 - DNA, 634 bp, Homo sapiens
aacatccttccctgtgtataaatagaaagaccaagtttgacggcaaggaaaaaaagacaattacatatgctttcaaaaagaaagattcaaatcttctctctctctcttttttggagacggactcttgctctgccgcccaggccggactgcagtggcactatctcggctcactgcaagctccgccctccaggttcacgccattctcctgcctcagcctcccgagtagctgggactacaggcgcccaccaccgcgcccagctaatttttcgtattttcagtagagatgaggtttcaccgtgttagccaggatggtctcgatctcytgacctcatgatccgcccacctcggcctcccaaaatgctgggattacaggtgtgagccactgtgcctggccaagtcttctctctctttttggttgatatttctattgagtggctgtgtttacctcaccattgcttcctcatctttagagagcacttcacacttgcaaacacctccatagctaggttcttatgtgactctccaaacaaagtgatatctctgaagatagattaacatatcttccattcagcttaatctacataatgtgtaaagaaagggttatcttttgggaggatcatgagttatgaatgca

SEQ ID NO: 929259 - DNA, 677 bp, Homo sapiens
tcacctaaatgagccttttttctcaataaacaaaagagcctaaggaaacaacatccttccctgtgtataaatagaaagaccaagtttgacggcaaggaaaaaaagacaattacatatgctttcaaaaagaaagattcaaatcttctctctctctcttttttggagacggactcttgctctgccgcccaggccggactgcagtggcactatctcggctcactgcaagctccgccctccaggttcacgccattctcctgcctcagcctcccgagtagctgggactacaggcgcccaccaccgcgcccagctaatttttcgtattttcagtagagatgaggtttcaccgtgttagccaggatggtctcgatctcctgacctcatgatccgcccacctcggcctcccaaaatgctgggattacaggtgtgagccactgtgcctggccaagtcttctctctctttttggttgrtatttctattgagtggctgtgtttacctcaccattgcttcctcatctttagagagcacttcacacttgcaaacacctccatagctaggttcttatgtgactctccaaacaaagtgatatctctgaagatagattaacatatcttccattcagcttaatctacataatgtgtaaagaaagggttatcttttgggaggatcatgagttatg

SEQ ID NO: 929260 - DNA, 636 bp, Homo sapiens
aaccttctttctatcttccttccttctgacagcaatttactcctacctttaactcagactggataaaatgatctcgtctttcagagcaccctcgttaccttcccatttactctttgcctagttatmcttcccgcttctttagatgtctcatacaatcacccatcctcttccactagctcctaattacctctacaagactctcaacgtaacccactctctgttaaaccagtccaatccttccctggcaaatgactgttggctttgtatctctctatcaacctctgcttatgttgacactcccattcccgcaaaaaaattgggtctttaccaacttaaactaccaccctcattatgaaggaaaagaccctttctgacttctaaatatgcaatcattagccaacttccctatctctgataggaccaagactaccctaacaggacatgcaatccaaatttgtgtccttacttttccaacctcacctattacacaagcaatgaaaagcccatacacggccctgtaactatgaataccatcttaactttccaagcccctttatgcatccaatgcaacctgttaacaggcctgcccctggggcacctactaccgcatcagtgtaattataccctacaacttga

SEQ ID NO: 929261 - DNA, 636 bp, Homo sapiens
aaccttctttctatcttccttccttctgacagcaatttactcctacctttaactcagactggataaaatgatctcgtctttcagagcaccctcgttaccttcccatttactctttgcctagttatccttcccgcttctttagatgtctcatacaatcacccatcctcttccactagctcctaattacctctacaagactctcaacgtaacccrctctctgttaaaccagtccaatccttccctggcaaatgactgttggctttgtatctctctatcaacctctgcttatgttgacactcccattcccgcaaaaaaattgggtctttaccaacttaaactaccaccctcattatgaaggaaaagaccctttctgacttctaaatatgcaatcattagccaacttccctatctctgataggaccaagactaccctaacaggacatgcaatccaaatttgtgtccttacttttccaacctcacctattacacaagcaatgaaaagcccatacacggccctgtaactatgaataccatcttaactttccaagcccctttatgcatccaatgcaacctgttaacaggcctgcccctggggcacctactaccgcatcagtgtaattataccctacaacttga

SEQ ID NO: 929262 - DNA, 822 bp, Homo sapiens
ggacaggcacctgcaccttagtctttctaagtcccaacattaacattgccccaggaaatcagaccctatcagtacccctcaaagctcaagtccgtcagcgcagagccatacaactaatacccctacttatagggttaggaatggctactgctacaggaaccagaatagccagtttatctacttcattatcctactaccacacactcagaggatttttcagacaatttgcaagaaacaacaaaatctatccttactctacaatctgaaatagattctttggcagcagtgactctccaaaaccaccaaggcctagacctcctcgctgctgagaaaggaggactctgcaccctcttaggggaagatgttgtttttacactaaccagtcaggggtatgagatgccaccctgcactcacaggaaaaggcttctgaaatcagacaacgcctttcaaactcttatactaacttctgcagttggacaacctggcttctcccctttttaggtcccgtggcagccatcttgctattacttgcctttgggccatgtatttttaacctccttgttaatttgtktcctctaggatcaaggccatcaagttacagatggtcttacaaatggaaccccaaatgagttcaactaacaacttctaccgaggaaccctggactgacctgctggccctttcactggcctagagagttcccctctggaggacactacaattgtagggccccttcatcaccccatccagcaggaagtagctagagcggtcactgcccaattcccaacagcagttgggttgtcctgtttagaggggggattgag

SEQ ID NO: 929263 - DNA, 625 bp, Homo sapiens
tgggtgcccctctgggacaaagcttacagaggaaggaatatgcagcaatttttgctgttctgcagccaacactggtaatacccaggcaaacagggtctggagtgaacctccagcaaactccagcagacctgaagcagaggggcctgaccgtaaaaggaaaactaacaaacaggaaggaatagcatcaacatcaaaaaggatgtccactcagaaaccccatccaaaggtagataaatcaaagaccaaaggtagataaatccacaaagataaggaaaaatcagtacaaaaaggctgaaaattccaaaaaccagaatgcctcttctcctccaaaggatcacaactcctctccagcaagggaacraaactggacggagaataagtttaacaaattgacagaagtaggcttcacaaggtgggtaataacaaattcctccaagctaaaggagcatgttctaacccaatgcaaggaagataagaatcttgaaaaaagttagatgaattgctaagtagaataaccagtttagagaagaacataaatgacctgacggagctgaaaaacagcacaagaacttcgtgaagcatacacaagtatcaatagctgaatcaaccaagctgaagaaaggat

SEQ ID NO: 929264 - DNA, 685 bp, Homo sapiens
ttggagtcaccacttggttaagcatatgataatccaccgttattctctaagatccatctgtcttctgtgcaggccaaataggagagttgaatggggatgtggtgggaatcaccatccctgcatcttttaggtccttgatggtggcattaatctcttcaatccctccagagatgtgatgttatttttgytttactatttttctaagtagaggcagctctaatggcttccatttggccttttccaccataatagccctcaccctaccagtcagggagccaatatgggggttctgccaactgctaagtgtgtctatgccaattatgcatcctggcacaggggaaatgaccacaggatgagtccagggacccactggactcactgtaagttagatctaagctaaaactccattaattacctgaccttcaaaagcccctactttaactggaggacaacaatgatgttttgtgtcctctggaatcaatgtcagctcagagccagtgtccagtagtccctgaaatatctggtcatttccctttccccagtgcatagttaccctggtaaaaggctgaagttttccttggggaaggatgggagaaagaataacagtataaattttcggcagtgtagtggtgtccttcttcaaggggacctggtcccaccccttcatctaaggggttctgggtct

SEQ ID NO: 929265 - DNA, 746 bp, Homo sapiens
agagagtcagcaaagggagataggggtggggctgttttgtaggatttgggtagataaaggagaaggggggttgttctctggcgggcaggagttggggggtcacaaggtgctcagtaggggagcttttgagccaggatgagccaggagaaggaatttcacaagataatgccatctgttaaggcagraacaggccattttcacttcttttgtggtggaatgtcatcagttaaggcaggaactggccacctggatgtgtacgtgcaggtcacaggagatatgatggcttagcttgggttcagaggcctgacatttctgtcttcttatattaataagaaaaataaaatgaaatagtggtaaagtgttgggacggcgaaaatttttggggatggtatggagagataatgggcaatgggctgctttgagcgggattaggggcggcgtgggaacctagagtggaagagattaagctgaaggaagattttgtggtaaggggtgatattgtgggactgttagaagaaacatttgtcatttagaattattggtgatggcctggatacggttttgtatgaattgaaaaactaaacggaataagagaaggagaaaaacaggtattaaaggtctaagaattgggaggacccaggacatctaattagagagtgcctaaggagattcagcatagtcctgccagcaaagattatttatttacttcaagagttaagagtggcggtttggggatagcaccagga

SEQ ID NO: 929266 - DNA, 592 bp, Homo sapiens
tgctctggcgaggacttccagtactatgttgaatagaagtgctgaaagtgggcatccttgtcttgttgcagttctcagaggaaatgctttctacttttccccattcagtataatgttggctggtggtttgttgtcaatggtttttattaccttaaggtatgtcccttctatgccgattttgctgagggttttaatcataaaggatgctggattttgtcaaaagctttttctgcatctattgagatgatcatgtgattttcgtttttaattctgtttatgtggtgtagcacatttattgacttatgtatgttaaaccatccctgcrtccctgataagaaacccacctgatcatggtggattatctttttgatatgttgttggatttggttagctagtattttgttaaggatttctgcatctatgttcatcaaggatattggtctgtagttttaattttttgttatgtcctttcctggttttggtattaaggtgatactggcttcatagaatgatttagggaggatttcctctttatcttgtggaatagtgttaataagattggtaccaattcttctttgaatgtctgatagaa

SEQ ID NO: 929267 - DNA, 531 bp, Homo sapiens
attcaaatttcccatggctatatggacacacacaaaaacaatcaccaaaacacaatccaactgctgcagcaacaaacaagccccaaaagtgtccaaactgaaagagttagggtgcttcatctcttcattggttgagcttgatcaacctacaaacagaaattccttcagaatttctcagttgagaggagccaatctctctgtctggtacccacaaaagatactcacttgcctggacacacacatacaacacrattacaaacaagaccccaagaatgtttatactgaaacagccagggtgcttccctcatgtcagttgggcttgttcaacctgcaaatgaaaattactgaaaaaatttcccgaattgagaggaatagaccctgctgcctgggcacacaaagaactctcacctatccagatgtggatgccaaatctcaaaggcagttcttcctgggtaatcaggaatgcaactggggccagcagcagcagcagggccggagagaaacagaaactcacctccagccaaaattggg

SEQ ID NO: 929268 - DNA, 741 bp, Homo sapiens
ctcccacgcgttcgaacctccccgtggctttgtttacactgtgagggtaaacctgcctactcaagtctcagaatgtggacgcttcttccccccaccaagtttgagtgtcccggcttgccttctgactgctgtgctggcagtgagaatttcaagccagtggatctgagcttcttgggctccgtgggggtgggaccttccaagccaaccacttagctccctggcttcagccccctttccaggggagtgaacggttttgtctcactggcattccaagcgccactggggtatgaaaaaaaactcccgcagctagcttggtgtctgcccaaacaactgctcagttttgtgcttaaaacccaggkccctggtggcataggcactggagggaatctcctggtttgcaggttgcaaagaccatggggaaagcacagtatctaggccagagtgcactgttcacagtccctcatggcttcccttggctagggcagggaattccttgactccttgcacttcctgggtgaggcaataccccaccctgctttggctcaccctccatgggctgcacccactgtccaaccagccccagtaagatgaactgggtacctcagttggaaatgcagaaatcacctgccttctgcgtcgatctcgctgggagctatagactggagctgttcctactcaattattttgccagcgatctcattcaccggtttttaagttgtctttaaagcatgcagtttctaa

SEQ ID NO: 929269 - DNA, 848 bp, Homo sapiens
ctgtctcagggagattggggttttatctctaagcccctgactgggactgctgccttttttcagagatgccttgcccagagagggggaatctaaagaggcagtctttccacagcagtgtgctcccacgcgttcgaacctccccgtggctttgtttacactgtgagggtaaacctgcctactcaagtctcagaatgtggacgcttcttccccccaccaagtttgagtgtcccggcttgccttctgactgctgtgctggcagtgagaatttcaagccagtggatctgagcttcttgggctccgtgggggtgggaccttccaagccaaccacttagctccctggcttcagccccctttccaggggagtgaacggttttgtctcactggcattccaagcgccactggggtatgaaaaaaaactcccgcagctagcttggtgtctgcccaaacaactgctcagttttgtgcttaaaacccagggccctggtggcataggcactggagggaatctcctggtttgcaggttgcaaagaccatggggaaagcacagtatctaggccagagtgcactgttcacagtccctcayggcttcccttggctagggcagggaattccttgactccttgcacttcctgggtgaggcaataccccaccctgctttggctcaccctccatgggctgcacccactgtccaaccagccccagtaagatgaactgggtacctcagttggaaatgcagaaatcacctgccttctgcgtcgatctcgctgggagctatagactggagctgttcctactcaattattttgccagcgatctcattcaccggtttttaagttgtctttaaagca

SEQ ID NO: 929270 - DNA, 743 bp, Homo sapiens
gaaactatccccatcctccccctggctgtggaaaaattgtcttccatgaaactggtccctggtgctaaaaaggatggggaccgctgccctagaggacagcctgaccgttccttgattcattcactccactaatatttcctagaactctactatgtgccasatacctgctaggtactggaaaaacaatggcaagcaaaacagatataatcccagccattttggaagtttcattcttctggaggagatagatgttaattaaatgatcatactaatgaaagtaaaattacacagtaatgagtaccatgaaagagggaaactcacacccatgtccttattccatggacttctgggggtaaaagctggagccgacacaccttcagcatggtccgagccagggggaaggctgggggccttactttccagttaaccggtttcccagaaactccagttcccaaaaacaaacctattcagaatgggaaactcaggaggggaaacctagtatgttcccaggtccagtttccccagagtccatccctaccccaaaataaataaagcccctgccaggctgcctcttcagcaactctaagcagcctcccccaggaaaaactgatcctgctacagctccaccatgaagttcttcatggtcctgctgccagccagcctagccgccacctctctcgccatccttgatgttgaatctggcctccttccacaactctcagtcccctaagggttattgagct

SEQ ID NO: 929271 - DNA, 567 bp, Homo sapiens
cttctacagggcctgggtgttcagttcaacaggttcccctgtgacctctggttgtccattggagacatcgggtttggcacccttgaggacagacagtctctcagaaatactcttgagccgggggaagagaagaaagtcgtacaggaggctgcccagaccccctccaatgattgggcctacccagtacacctgtagaaagagaaaaggaatactcaggcttggggaggggacagagcagcaacrctgctctttttccagccaccttagtggaaaacaagatattgtacacttgatatctacaataaactcaccatttattttctgattcatcaaattactcctttatcccacaccttagcatgtgtatattctatttgttatcaatttgcactagtttgtatgttgctttcaaaaaaattttatacattgtggtaaaacacatataaaatttaccatattaaatatttttggacaggcgcagtggcttatgcctgtaatcccagcactttgggaggctgagacgggcggatcacaagacgggcggatcacaaggtcagccatttgaga

SEQ ID NO: 929272 - DNA, 582 bp, Homo sapiens
ttatttgtgctgctataaaggaaatacctgaggctgcgtaatttataaagaaaagaggtttattttgctcatgattctgcagactgtacaagaagcatggtgtggctgggtgtggtggctcatgcctgtaatcttagctttttgggaggtgaaggtgggtgagtcaggctgaggtcaagagtttgagactagcctggccaacatggcaaaacaccatctctactaaaaatacaaaaattagccagrtgtggtggcaggcgcctataatcccagctactcaggaggctgaggcagaagaattgtttgaacccaggcggcagaggttgcagtgagctgagatcatgccacttcacttcagcctgggtgaaagagtgaaactccatctcaaaaaaaaaaaagcatgctgccagcatctgcttctgggcctcagaagcttccactcatggtagaaggcaaaagggagcaggcagcacacagcaagagtggaagggaacaacaggggagggaagtgtcaggctcttcttaataatcagttcttgcaggaactaagacaactcactcattccctcgagaatggcacca

SEQ ID NO: 929273 - DNA, 666 bp, Homo sapiens
tcagccaacagagatagtttgactccctcttttccaatttgaacacctttaatttctttctcttgtctgattgctctggctaggacttccagtattctgttgaatagaagtgaatgtaggtgtccttgtcttattttagttcttagggggaatgctttcaactttttcccattcagtatgatgttggctttatgcttgtcatacagagtttttattactttgaggtatgttctttctgtgcctagtttgttraggtttttttttttatcatgaatggatgatggcttttatcaaatgctttttctgaatctagtgagatggtcatatagtttggttttaattctgtttttgtgatatattgcatttattgacttgtgtatgttaaaacatccctgcatccctgggatgaaacgtgcttgattatggtatattatctttttaatgtgatgttggattcgatgtgttagtattgtgttgagaatttttgtaccgatgttcatcagggaaattggtctatagctttctttttttttgtaatgtcctttcctagttttggtatcagagtgacactgacttgatagacttagttagggaggattccctttttctcactcttttggagtagtttcagtgggattggtactaattctcccttcaatatctggt

SEQ ID NO: 929274 - DNA, 666 bp, Homo sapiens
tcagccaacagagatagtttgactccctcttttccaatttgaacacctttaatttctttctcttgtctgattgctctggctaggacttccagtattctgttgaatagaagtgaatgtaggtgtccttgtcttattttagttcttagggggaatgctttcaactttttcccattcagtatgatgttggctttatgcttgtcatacagagtttttattactttgaggtatgttctttctgtgcctagtttgttgaggtttttttttttatcatgaatggatgatggcttttatcaaatgctttttctgaatctagtgagatggtcatatagtttggttttaattctgtttttgtgatatattgcatttattgacttgtgtatgttaaaacatccctgcatccctgggatgaaacgtgcttgattatggtatattatctttttaatgtgatgttggattygatgtgttagtattgtgttgagaatttttgtaccgatgttcatcagggaaattggtctatagctttctttttttttgtaatgtcctttcctagttttggtatcagagtgacactgacttgatagacttagttagggaggattccctttttctcactcttttggagtagtttcagtgggattggtactaattctcccttcaatatctggt

SEQ ID NO: 929275 - DNA, 605 bp, Homo sapiens
tacaaatagaataatgagaagaattatttaattatcttcatagacaccaaaatgctttgaatgaaattaaacacctattcctgaaaaaacaaaaaataattaataaaataaaaatctatggatactcaacacatacatcagaccccaatttgatattttactcagtggggaaacctagaaaaaccaatgctaaagctaatataatcaatgatggtatattaggattttctagagaaacagacccagtaggwtatatagagatatataggaggagatttattataggaattggcttatgtaattatgaaggctgagaagtcccacaatatgtcacctgcaaactgtagaatcaaaaaagctggtagtgtaattcgtcttaagtccagaggcctgaggaccagaggagccaatgatgcaatgtccagtccaaggctactcatgtattagtgctatcagatattaaaaacatattctaaagcctctatacttaaaacaatatgacattgaggaataaatagataaaaaattttataaatagactcaaagccacctaaaaattttgtttatggtaaaagtggcatcttaaatcatggggatacatgagg

SEQ ID NO: 929276 - DNA, 638 bp, Homo sapiens
tcatcagaaaaaaccactttcattaaaatgaagatgaaaaagaaagaaagaagagaggaccatgaaacaaccagaaaacaaacacaaaatggtcagagtaagttcttatgtataacattgaatgtaaatagactaaactctctgatcaaaagacatagagtggttgaatggatgaaaaaataagamccattgatctgttgcctgcaagaaacacacttcacctataatgacacacgtagactgaaaatgaagggatggaaaaaaaatattccatgcaaatggacccaaaaaaaaaaaagcaaaaatagctatacttttatcaggcagaatagatttcaagacaaaaactatacgaagagacaaagaaggtcactatataatgataaacggataaattcagcaagaggatatatcaattttaaacatgtatgcacccaaaactggagtacccagatatataaagcaaatattattagaaataaagaagacagagacagattccaatacaatagttgctggaaacttcaacaccccactttcagcattggacagatcttccagacagaaaataaacaaagaaacatcagacttagtttgcactaaagaccagatagatctaagaaatatttaaagaacat

SEQ ID NO: 929277 - DNA, 638 bp, Homo sapiens
tcatcagaaaaaaccactttcattaaaatgaagatgaaaaagaaagaaagaagagaggaccatgaaacaaccagaaaacaaacacaaaatggtcagagtaagttcttatgtataacattgaatgtaaatagactaaactctctgatcaaaagacatagagtggttgaatggatgaaaaaataagacccattgatctgttgcctgcaagaaacacacttcacctataatgacacacgtagactgaaaatgaagggatggaaaaaaaatattccatgcaaatggacccaaaaaaaaaaaagcaaaaatagctatacttttatcaggcagaatagatttcaagacaaaaactatacgaagagacaaagaaggtcactatataatgataaasggataaattcagcaagaggatatatcaattttaaacatgtatgcacccaaaactggagtacccagatatataaagcaaatattattagaaataaagaagacagagacagattccaatacaatagttgctggaaacttcaacaccccactttcagcattggacagatcttccagacagaaaataaacaaagaaacatcagacttagtttgcactaaagaccagatagatctaagaaatatttaaagaacat

SEQ ID NO: 929278 - DNA, 581 bp, Homo sapiens
ggtggaccatagtgaccttttgggtcttctggaattcatgtcagttcagagccagtgcctcaaaattcctgaaagatctgattcttttcttttccccaatgcagagttaccctaataaaaagctataggtacttttggagaagagtggaagaacatattgatagtatagacttttagcagtgtgccagggttcttcctcaagaaacctggcctcccctatactgtagtgatactgggtctgtaaactggwtcaaggtatcaaattggttgtggggctgtgattctttgtttttattattcaggttagacattgattcacttgacctagaatgtttttgcttcttatcaaatcaggtgaaaacttagtaagtttcttatccatttcactcccaaggacaccatgatcaaccagccaatgccacaggactgcatgactcagactattctgattgctgctttcactcatctgtccattacagtaaccacgtccaccttgcctttggtacttgagtgctgccacttggtccctgccattccaggatccagttactctccttgcatttaggtttaccaattcaggg

SEQ ID NO: 929279 - DNA, 626 bp, Homo sapiens
ctgtagacaattctgtcttcaacctgactgacgttggaagcagcacttcatgcaggtaatctcaccttcctttagaaagctcatttcctttacttggtttccggcagccacacatttctggtttgtctcctgcctcactggttgctygtcttcagtctcccttatgggtttcttttttctttcttccaagagcatctctgggtttggtccttaggctttttttccctgggctctaaatatcacccatactctgaagggtgctgagttgaatccttagcactggcctctcttttaaactccagacatgtgtacctgcctacctgacatctatgtggatatccaacaggaatctcacacttaacatatcttgttatttccacaccatcttcccactccagtccagattcctgttattcatctcatccctacctctccacctcattttagtcaatatcatcatccactctagcaaaaaacctggaaatcatttatgattcctctttttgtgtcatacctcacattaaatccattatgttggtcctgcatccaacatttatctgcacacttttcactcctttcaccctttacgtagttcaagccactatcttctctctcctggactgctg

SEQ ID NO: 929280 - DNA, 578 bp, Homo sapiens
agtgttgcagttattagcttttgacaatgctaatcccgattgccaggctgctctgtgacctatcagagggaaagcacatttacttgattatatcaaggcctatgatggtatcggaggtaatctgcataaagctactctgctagcacaggcaatggcaggactgagagtggacaaaggaaatactccatttcctggagcttgttttaactgtgggaagcagggtcacactaaaaaagaatgtagaaaaaaatcagccagtcaggccgccagatgggggaaaaaagaaaactgctgatcctgaaasatgtccaaaatgtaaaaaaggaaaacattgggctaatcagtgtcactctaagtttgataaagaagggaacccaatttcaggaaatgccatgaggggcccatcctgggccctgttctaaactgcggcatttccagctcaggccattccctcacccccgtacaatgtctgtcccccaccacagccggtggtgccgcagtagatttatgctgcacaaaagctgtaagccttctgcctggggaaccacgcaaaaggtcccaacaggagtctgtggacc

SEQ ID NO: 929281 - DNA, 556 bp, Homo sapiens
atattattcctagtttacagaagaagaaacttctagttcaagagagtaacttactctccaaaaggtcatatagatggatctcagatttgaacaaaagatgatttagccacgaagttctaagtggtaagaactaaagcaaacaaataggatcagcccctcactgagataaggaagaaaaaattcccttctgacaaatttctttctatacccaaaatggacctttaagtcaggtgtacaaccrgtacaacagtactatccagctatgttaagggtctgtctgtctatctatctatctatctatctatctatctatctatctatctatatgtttttgttttatttttatttttttattttttttgagacggagtttcgctcttgttgcccaggctggaatgcaatggcaccatcttggctcaccgcaacctctgcctctcaggttcaagtgattttcctgcctcagcctcccaagtagctgggattataggcggccgccaacatgcccaggtaatgttttgtatttttagtagagatggggtttcaccatgttggccag

SEQ ID NO: 929282 - DNA, 523 bp, Homo sapiens
caccccaatcaagatacacaactggctgggcacagtattttactaaaaatacaaaaaaattagctgggtgtggtggcgcacgcctgccatcccaactactaggaaggctgaggcaggagaatcacttgcaccaaggagatggaggttgcagkgagccgagatcccgccactgcagtccagcctgggtgacagagtgagactcaaaacaaaacaaaacaaaacaaaaacaaaaaagatacacaaatatttcatcaccacaaacatctcccttgtgctactcctttagtgcatacacacctctccacaacatgcctggcaatattatgttttcatctctataatttgatcatttcaagaatattacataaatagaatcatacaatatatgacctttagagattgttttttcgtcactcagcataatgcctttgagatccatccaagttattgtgtatatcaatagtttgttcctctttattgttgaacagtattccatggcatggatgtaccacagtttgcttca

SEQ ID NO: 929283 - DNA, 635 bp, Homo sapiens
tcttggaggcctagtgggaggatggcttgaggctaggcgtttgagactagcctgggcaacatagcaagactttgtctctacaaaacaattaaagaatttagcctggcatgctggcacatacctgtagttccatctacttgggaggctgaggcaggagaatcgcttgaggccatgagtttgaggcggcagcgagctatgcttgtgccaccgtgctctggattaggtgacagagtgagattctgtctcyataaaaaaaaaaaaaaaaaaaaattaaggctgggtggggtggctcattcctgtaatcccagcactctgggaggccaagtcaagtggatcacctgaggtcagcagttcgagacaagcctgaccaacatggcgaaaccccgactctactaaaaatacaaagattagccgggggtagtagcagcacacacctgtaatcccagctactcgggaggctgaggcaggagaatcacttgaacccgggagggggacgttggcagtgagccgagatcatgccattggcactccagcctgggcaacaagagcaaaactccgtctcaaaataaataaataaataaataaataaataaataaataaataaataaaaagggcagtgatgtttatgtcaaca

SEQ ID NO: 929284 - DNA, 589 bp, Homo sapiens
gggaggctgaggcaggagaattgcttgaacctgaaaggtagaggttgcagtgagtctagatcgtgccactgtactccagcctgggcaatagagagagactccgtctcaaaaaaataaaataaaataaaatatgaaaagaaaaaaccttccccacaaaagtgtcagtcgtgaggactaaataagagcacgtgcagaagagaatgacaagactttctagtcttcaggaatttctgcagagacccaaggctgagaacaagggatgagcagtgcccacatctcaagagaggtgccagcacaccttcaggactcggcgagagaacagagctatcccatttggccccscactgcttgcgtggaagtcatgctcaggggaggatttattgaaagagttctgctcttgaccaggcgcggtggctcatgcctgtaatcccagcactttgggaggctgagatgggcagatcacttgaggacaggggttcgagaccaggctgggcagcatggcaaaaccccatctctactaaaaatacaaaaattagccgggtgtggtggtgcacgcctgtagtcccagttgttcaggaggctgaggcaa

SEQ ID NO: 929285 - DNA, 643 bp, Homo sapiens
cattctccccatcactttctggtatacctatcagatgtaggtttggtctttttacatagtcccatatttcttggaggctttattcatttcttttcactctttttgtctctaatattgtcttctcactttatttcattaatttgatcttcgatcactgatatcctttcttccacttgattgagtcggctattgaagcttgtgcatgcgtcacgaagtacttgtgccatggttttcagctccrtcaggtcatttaaggacttccctacactgtttattctagttagccatctgtctaaccttttttcaaggtttttaccttccttgcaatgggttagaacatgctcctttagctcagagaagtttgttattactgactttctgaagcctgcttctgtcaactcgtcaaactcattcttcatctagttttgttcccttgtttgcgaggagctgcaatcctttaggggagaagaggcactctgttttttggaattttcagcttttctgctctggtttctctccatctttgtggtgttatctacctttggtctttgatgttggtgacctacagatggggttttggtgtggatgtcctttttgttgttgttgatgctattcctttctgtatgtcagttttccttctaac

SEQ ID NO: 929286 - DNA, 726 bp, Homo sapiens
ccagagataaaaactggaagaatctctcacccagcaagctgggctcccagccttcacactgctttctttaaacgaaacattcattctgttttttactggtacataatattatacattttatggaatacatgtaatattttaatacaggtatacaatgtgtgatgattcattgtatacatgtatttcaaatattcacacattgtatacatgtatttcaaatattctctattgaatatttcaaatattccacattctctattttctcgctattttgaaatatacaatataccattgttacccyactgtggtattgaacgccagaactcattccttccatctaactgtatgtttgtacccattaaccaatctttctttatttctctaccctgttccccacatgcacccccttcccagcttctgggaaccatcattctactctctacctccatgagatcaactattttagctcccacatataagtgagaacatgcaatatttgtcattctgtgcctggcttatttcacttaacataatgatttccagttctattcatgttcctgcaaatgacagaccattcagacattggccctcgaactcaaagtgaccacctttcagtcacagcgtgacctcctggaactagtacctgcttgctttaaacccaccaattaaaactccctgcaggaaatctgtttggataatgccctgtacccagtaaaggcgttggcc

SEQ ID NO: 929287 - DNA, 742 bp, Homo sapiens
gataaaaactggaagaatctctcacccagcaagctgggctcccagccttcacactgctttctttaaacgaaacattcattctgttttttactggtacataatattatacattttatggaatacatgtaatattttaatacaggtatacaatgtgtgatgattcattgtatacatgtatttcaaatattcacacattgtatacatgtatttcaaatattctctattgaatatttcaaatattccacattctctattttctcgctattttgaaatatacaatataccattgttaccctactgtggtattgaaygccagaactcattccttccatctaactgtatgtttgtacccattaaccaatctttctttatttctctaccctgttccccacatgcacccccttcccagcttctgggaaccatcattctactctctacctccatgagatcaactattttagctcccacatataagtgagaacatgcaatatttgtcattctgtgcctggcttatttcacttaacataatgatttccagttctattcatgttcctgcaaatgacagaccattcagacattggccctcgaactcaaagtgaccacctttcagtcacagcgtgacctcctggaactagtacctgcttgctttaaacccaccaattaaaactccctgcaggaaatctgtttggataatgccctgtacccagtaaaggcgttggcccctgggtcccttctctctctg

SEQ ID NO: 929288 - DNA, 583 bp, Homo sapiens
tcagttaacaaataaacaaacagtggccctatcacttcgttagtgaaaagggaaatagaatggaatgacgaaaccttgtggggaaagaagggatatgtttaaggaagtcccacaaggggctgattctcagttccactgtgtggctgacttcttccagttggcctccaggtcagcttctttcacyccccattgtcttgcccattagatgcctcatgcccttctgccttatcaaaatcttaggcatttggcctccttgcatcttattaattcttccttctaactctgagaaaaccctatgactgctttacttggatttagcaaaggtcaatacaagaggagactggcaaattggtggtggtacatagactgccatgctcgcgggctgaatagctcttgtgctctctgtaactttggactctcaactcagatagctatatttctatcttatttttctcccttttgaggtcattttgatcatttgttttctctcagaaaatgaaattatttcatccagatgtcaaatgtattttatataattaatctcttttttaattttttattttctcagtttctataattatat

SEQ ID NO: 929289 - DNA, 728 bp, Homo sapiens
agctgacactgaaaccacaacccacagaaggctgcttggagcttgtggcctgcacccaccgggtcaaggcctgctaaggtaaaagtatcaacatgattcacagcatttacacatggcacagactgcctaacatgataggaggatccaaaagctaaaattacttcacatacaaaaaccaggaacacctcaatttacctgggaaaagacaatcaacaggtgccagtgtcaccgtaccacagatgttggaattatctgaaaaaggactattataaaaatgctcctacaactaaggggaaacactcttaccatgaacagaaatagggaaaatcttagcaaaggaacagatgataagaagaatgacaaaaagcaaaactcagaaaagaaaagtayaataaccaaaatctagcaattcaatggatgggctcaacagcataatggagatgacgaaggaaatcatcagggaccttgaagacagagcaacagaaatcacccaatccaaacaagagcaagaaaaaaaaaacctggaggaagaaaggaccagagcctcagaacctatgagagaatacacagggtctaaccctggagtcccaggaagagaggagacagggcgtggggcagaaaaagtactagaagaaaagaatgcctgaaaacttcttaaatttggtgaaagatacaaaactacagatttaagtttagcaaaacaaaaacgggataaatacaaagaaatt

SEQ ID NO: 929290 - DNA, 748 bp, Homo sapiens
cttaaaaacctagagaaaatggatacattcctggaaacatacaaccctataaaccagaagagactgtggccctatgttcagtcttaaagggaaaaaaactatcagacatgcattttgtatactgctaaacaaggcttaatacatgaaggagaaatagtctttttcagccaaacaaatgctaaggaaattcatcactattagactggtcctacaagaaatcctcaaaggagttcaaacatggagataaaagggtgatgcttgccatcagaaaaacacacagaagtataactcacaggtcttataaaataagtatacaattgagactgcaaagcgaccaggtaaaaacmctatgacaggaacagactcacatatcaatattaaccttgaacatgtaccaagtgttcacttaaaagatagagattggtgtaatggaaaacagcaacaacaacaacaaacccaaaaaacaaaaacagggttcagccaaatgctgctttcaagaaacacacttagctgataaagacattttcagactcaaggtaaaggggtggaaaaagatatgccaatggaaaccaaaagagaacaagagtagttatacttacatcagatagaataggctttatatcaaaaaacagtaaaaaaaaaaaagacaaaagaggtcatcagataatgatacagggttcaattcaataaaaagtaaaacaattgtaaatatatatccacccatcaccagagcacccagattcataca

SEQ ID NO: 929291 - DNA, 539 bp, Homo sapiens
ttgactgtgtgagtgaatagtagaatacacattttggtagaaaaactatgctatcacgtcttaatttgtatcatttaaaatgtatgcatctgcttaaccaatggttttatcccactcccctaactgacagaatgaatattataccactgtatcaatcagtaaataagtgggttttatgtcttctcactccacctgttctgttccttcttttactgcacagctacatctacaaaagattaattttttttctttttttctttgtgtgtgtgtgtgtgtgtgtgtgtgtgtgtgtgtgtgtgtgttttgtttgtttgtttgagacggagtctcgctctgtcgcccaggcagaagtgcactggcgcgatctcggctcactgcaagcttcgcctcccggsttcacgccgttctcctgcctcagcctcctgagtagctgggactacaggcgcccgcctaagtttttttgtatttttagtagagacggggtttcaccgtgttagtcaggatggtcttgatcgcctgacctcctgatctgcccgcct

SEQ ID NO: 929292 - DNA, 582 bp, Homo sapiens
attttaaaggtaagcttgactgccctcatttaatttgcctctggagtcaggagtttacagttcttcctctgtatctattaataagcagtttgactaatattactagaagctttaatctttaattttggcatttgttttgcrgatgctctacccatggtaccccaggaccagaaggcaaccatatttcagatttaccacttctagacagtcccaagtaaggttaattgataagttatgggcctccaaagctaagttgctgcttagcattgaaaacattaaggctgagtgcagtggctcatgcctataatcccagcactctgggagactgaggcgggtggatcatctgaggtcaggagttcaagaccagcctagccaacatggcaaaaccctgtctttactaaaaatacaaaacttagctgggcatggtggcgcatgcctgtgatgccggctactcatgaagctaggacaggagaatcgtttgaacctgggaggcagagattgcattgagccgcgatcatgccactgtactccagccggggcgacacaaaaaaaaaaaaaaaaaagagaataagagaatgttaa

SEQ ID NO: 929293 - DNA, 633 bp, Homo sapiens
gtcctagaggcccgcaccgtgattcacctatgggggcctaccaaaggctcaaaacaacatccctatctgccactgacacctggaacaccattggatgtgctgggtcatatggtccgagcagcagagcagcttgcgcagcagcctggacctgttgcagacccttgccctgttctggatcccactcaaaactggcagcctttccgatcactcgataaatgggctggagtaacacacccaaatgaggaatgtgttgcctccaaaatccaaataggcccactaggcattgtgcctctttcttggttgtaggagaggccaaatgcagcaacttrtccttcaccttagaagaaatatctcaacaggccccacaccactggacccctagaaattttactgaggtagaagttccctgaattttagtcagatttatttctcatcctctggcatgcaaatgtttcaccaataagtccagtgtgtttgctccttcttgctcactggatccaatcagcataatgtcattaatgtaatggaccagtgtgatatcttgcagaagcaaaaagtgatcaagttctctctaaataagattatgacacaaagccagagagttgatacacccctgaggtaggacaacaaagg

SEQ ID NO: 929294 - DNA, 611 bp, Homo sapiens
gccttctttgtctcttttgatctttgttggtttaaagtctgttttatcagagactaggattgcaacccatgtctttttctgttttccatttgcttggtagatcttcctccatccctttattttgagcctatatgtgtctctgcatgtgagatgggtttcctgaatacagcacactgatgggtcttgactctttatccaatttgcagtctgtgtcttttaattggagtatttagtccatttacatttaaggttagtattgttatgtgtgaattttatcctctcattatgatgttagctggttattttgctcattagttgatgcagtttcttcctagcctcgacgatstttacaatttggcatgtttttgtagtggcttttaccagttgttcctttccatgtttagtgcttccttcaggagctcttttagggcaggcctggtggtgacacaatctctcagcatttgcttgtctgtaaagtattttatttctccttcacttatgaagcttagtttggctggatatgaaattctgggttgaaaattctttcctttaagaatgttgaatattgacccccactctcttctggcttgtagagtttctgctgagagatc

SEQ ID NO: 929295 - DNA, 561 bp, Homo sapiens
gagaacgacttctctcttcaaagctgtcagacagagacatttaagtctgcagatgttattgctgtcttttgtttgtctgtgccctgcccccagaggtggagcctacagaggcaggcaggcctccttgagctgtggtgggctcgacccagttcaagcttcctggctgctttgtttacctactcaagcctcagcaatggyggacgcccttcccccagccttgctgctgccttgcagttcgatctcagactgctgtgctagcaatgagtgaggctccatgggcttaggaccctccaagccaggtgcgggatataatctcctggtgtgctgtttgttaagcccattggaaaagcacagtattagggtgggagtgaccagattttccgggtgccatctgtcacccctttctttcactaggaaagggaattccctgaccccttgtgcttcctgggtgaggcaatgcctcgtcctgctttggctcatgctcggtgtactgcacccactgagggaccgagttttaacacaaattttggaggggacatgaacattgaaatcacagctagg

SEQ ID NO: 929296 - DNA, 644 bp, Homo sapiens
ataatctcctggtgtgctgtttgttaagcccattggaaaagcacagtattagggtgggagtgaccagattttccgggtgccatctgtcacccctttctttcactaggaaagggaattccctgaccccttgtgcttcctgggtgaggcaatgcctcgtcctgctttggctcatgctcggtgtactgcacccactgagggaccgrgttttaacacaaattttggaggggacatgaacattgaaatcacagctaggactttagcttcttttctgaggagtggattagtgtgttttcagttgtatggactgttgtatcatgctggagaaattatcacattgctattgtctttatttgaagagcaagtatagtttaaggagatgcgtatgggtgccaaattgacaaggggtggattgtgataattaatgttatctgtcaacttgactgagctaagggattctcagatagctggcaaaacattattcctgggtgcatctgtgagggtgcttctggaagacgttaacatttcgattagcagaccgagtagagaagatccatctcctcttatgtatatctatatctatatcatctaaatctatctatctatactgtatttatcctattggttctatttttctagaacacctt

SEQ ID NO: 929297 - DNA, 644 bp, Homo sapiens
ataatctcctggtgtgctgtttgttaagcccattggaaaagcacagtattagggtgggagtgaccagattttccgggtgccatctgtcacccctttctttcactaggaaagggaattccctgaccccttgtgcttcctgggtgaggcaatgcctcgtcctgctttggctcatgctcggtgtactgcacccactgagggaccgagttttaacacaaattttggaggggacatgaacattgaaatcacagctaggactttagcttcttttctgaggagtggattagtgtgttttcagttgtatggactgttgtatcatgctggagaaattatcacattgctattgtctttatttgaagagcaagtatagtttaaggagatgcgtatgggtgccaaattgacaaggggtggattgtgataattaatgttatcygtcaacttgactgagctaagggattctcagatagctggcaaaacattattcctgggtgcatctgtgagggtgcttctggaagacgttaacatttcgattagcagaccgagtagagaagatccatctcctcttatgtatatctatatctatatcatctaaatctatctatctatactgtatttatcctattggttctatttttctagaacacctt

SEQ ID NO: 929298 - DNA, 501 bp, Homo sapiens
taggtggcactgggattggaataagttccgtctcaccctggaccaccatttccatgctgtgtctccactagatgatcctttctttggttattctaagtcattagtcatcaataatttacctccaaactgtaggtttcacaggaggagatgccacttgaagcttcatggcttaaaatggagatggaatgtggaacatggtgggaagcaccgggaggggtttattgataaatttcaagtactttgtggggctctgaaagactgtctccaaattatttgtcctactayctctttcatattagttcaaatgtcatatgggtatatcttttgggttaaattaaggaaaatctccatgaaaagtaaaaaacaacaaaaaaaccccaaaagactagaaagagatactatgaaaaatccactcagatttctcagagttttattaactcaaagaagccttggtccagttggaagaagacagaattaattgtgacaacctctagcaaaccc

SEQ ID NO: 929299 - DNA, 578 bp, Homo sapiens
caatgcctgtacccccattgtatctaggaagtaacaaacttgcttttgattttacaggcttataggggaaagggatttgccttgtctcagatgagactttggattgtgaactgttgagttaatgctgaaatgagctaaaactttggggtatttcgaggaaggcataattagttttgaaaacttgtctcacagaagacttgggactgtggacttttcagttaatgttgaaatgcattaagactttgggggactgttgggaaggcatgattggttttgaaatgtgaaaacatgaaatttgggaggggtcaggtgcagaataatatggtttggctgtgtgtccacaccctaatttcaccttgaatagtaatatttcctrtgtgtcaagggcaggaccaggtggagataattgaatcatggggacagtttcccccatactgttcttgtgatagtgagtgagttctcacaagatctgatggtttttataaggggcttcgccctttgattggctctcacttctcattctgccaccatgtaaaatgtgcctttgctcttccttcatctaccaccatgattgtgag

SEQ ID NO: 929300 - DNA, 727 bp, Homo sapiens
cacagagtgcaggagaacagttgatgtcctggaaatcaaatgaagaacatgttttaagagaaagggagctgggcatgatggctcatgcctgtaatcccaacactgtgggaggctgaggtggacagattgcttgagtctagaaattcaagactagcctgggcaacatgctaaaatccagctctatcaaaaatatacaaaaattagccaaacactgtggcgcatacctgtagtcccagctacttggaaggctgagatgggaggattgcttgagcctgggaggtggaggttgcagtgaactgagatcacaccaccgcactccagcctgggtgacagccacatgctgtctcaaaaaaaaaaaaaaaaaaaaaaaaaargaaggggccaggtgcagtggttcatacctgtaataccaacactttggaaggctgagttgagaggatcacttccaggagtttgagaacagcttgggcaacatagtgagatcctgtctctatgaaaaatttaaaaattatccaggtgtgatggtgcatgcctgtagtcccagctacttgggaggcggtggtgggagtatcacttgagtccaggaggttgaggctgaagtgagccatgatcatacccctgcactgtagcctgagcgacagagtgagaccctatctcaaaaaaaaaaaaaaaaaaaaaaaaaaaggaatcagtttggtcaaatattgctgaatcagcttggtcaaat

SEQ ID NO: 929301 - DNA, 727 bp, Homo sapiens
cacagagtgcaggagaacagttgatgtcctggaaatcaaatgaagaacatgttttaagagaaagggagctgggcatgatggctcatgcctgtaatcccaacactgtgggaggctgaggtggacagattgcttgagtctagaaattcaagactagcctgggcaacatgctaaaatccagctctatcaaaaatatacaaaaattagccaaacactgtggcgcatacctgtagtcccagctacttggaaggctgagatgggaggattgcttgagcctgggaggtggaggttgcagtgaactgagatcacaccaccgcactccagcctgggtgacagccacatgctgtctcaaaaaaaaaaaaaaaaaaaaaaaaaaggaaggggccaggtgcagtggttcatacctgtaataccaacactttggaaggctgagttgagaggatcacttccaggagtttgagaacagcttgggcaacatagtgagatcctgtctctatgaaaaatttaaaaattatccaggtgtgatggtgcatkcctgtagtcccagctacttgggaggcggtggtgggagtatcacttgagtccaggaggttgaggctgaagtgagccatgatcatacccctgcactgtagcctgagcgacagagtgagaccctatctcaaaaaaaaaaaaaaaaaaaaaaaaaaaggaatcagtttggtcaaatattgctgaatcagcttggtcaaat

SEQ ID NO: 929302 - DNA, 727 bp, Homo sapiens
cacagagtgcaggagaacagttgatgtcctggaaatcaaatgaagaacatgttttaagagaaagggagctgggcatgatggctcatgcctgtaatcccaacactgtgggaggctgaggtggacagattgcttgagtctagaaattcaagactagcctgggcaacatgctaaaatccagctctatcaaaaatatacaaaaattagccaaacactgtggcgcatacctgtagtcccagctacttggaaggctgagatgggaggattgcttgagcctgggaggtggaggttgcagtgaactgagatcacaccaccgcactccagcctgggtgacagccacatgctgtctcaaaaaaaaaaaaaaaaaaaaaaaaaaggaaggggccaggtgcagtggttcatacctgtaataccaacactttggaaggctgagttgagaggatcacttccaggagtttgagaacagcttgggcaacatagtgagatcctgtctctatgaaaaatttaaaaattatccaggtgtgatggtgcatgcctgtagtcccagctacttgggaggyggtggtgggagtatcacttgagtccaggaggttgaggctgaagtgagccatgatcatacccctgcactgtagcctgagcgacagagtgagaccctatctcaaaaaaaaaaaaaaaaaaaaaaaaaaaggaatcagtttggtcaaatattgctgaatcagcttggtcaaat

SEQ ID NO: 929303 - DNA, 715 bp, Homo sapiens
aatattactctagatgctatgctgagactagactgtagggggttaacgatggaggcagagacacgtaaggaggctgttgcagtaatctaggtgagaggtgctggtggcttagaccaggactgtagctgtggagattccggatgtattttgaaggcaaagctaacaggatattttgacagatttgctgtggatgtgaagaaaagagagggcatcaaggataatgtcatggtttttggcctgagcacctggaaggatatgtatgtatacacatatggaagacactggagaagtaaatttggggagaagatgaggagttcagttttkgtcatgttcaatttgacatttattagatatccaagggaaatgtcaaattggtaattgtatatatgttttctggagttcagagaagaggttaagattggaaaattttaatttaagggtttcaacatataaattaattttcaaccatgagggagatcaaaggaatgagtttagatagagaagaagaccaaggacttagcctgtgctcaataataattggttaggataagagaacgaaccagcaaagagactgagaaggcacaggcacagagtgcaggagaacagttgatgtcctggaaatcaaatgaagaacatgttttaagagaaagggagctgggcatgatggctcatgcctgtaatcccaacactgtgggaggctgaggtggacagattg

SEQ ID NO: 929304 - DNA, 551 bp, Homo sapiens
aaccctatcctttataaatcacccagtctcaggaagttctttatagcagtgtgagaatggactaatatagtaaattggtacggggagtggggtgctgctataaagatatccaaaaatgtggaagtgactttggaactatgtgacatgcagaggttggaacagtttggagggctcagaagatgacaggaaaatgtggaaagtttgcaactkcctggagacttgttgaatggttttgaccaaaatgctgatagtgatatggacaatgaagtctaggctgagttggtctcagatgcagatgaagatgagaaacttgttgggaactgaagcaaaggtgactattattatgctttagcaatgagctaaaggtagcattttgaccctgccctagaggtctgtgggactttgaacttgagggaaatgatttagggtatctggcagaagaaatttctaagcagcaaagtgttcaagaggaagcagagcatgacagttggaaaaatttgtagcctgacaatgtggtagtaaagaaaagcccattttttggagagaaattc

SEQ ID NO: 929305 - DNA, 743 bp, Homo sapiens
cagttccagccatggctaaaaggggtcaaggtacagcctgggccattgccaaagaaggtgcaagccccaacccttggtggcttccacacagtgatggtcctgcaggtgtgcagaagacaagaattgaggtttgggaatgtccacctagattttagaggacatattgaaatacctggatgtccaggcagaagactgctgcagggcacagccctcaaggggaacaactgctaggacaatgtggaagacacatgtggagttggaattcccacacataagggcactgcctagtggagctgtgagaagagggccaccatcctccaggccccagaatcgtagattcactggcagcttgcaccatgcacctggaaaaactgcagacactcaatgctaacccatgaaagcagccaggagcggggytgtaccctgcaaagccacaggggtggatctgcctaaggctgtgggagcctacctcttccatcagcatgacatgggtgtgagacatggagtcaaaggagatcattttggaactttaaattttaatgactgccctattggattttgggctgcatggggcctatagccccttcattttggctaatttcttccatatggaatgggtatatttaactaatgcttgtacccccattgcatctaggaagtaactaacttgcttttgattttacaagctcataggtggaagggccttgccttatctcagatgagactttggacttggacatttg

SEQ ID NO: 929306 - DNA, 714 bp, Homo sapiens
ctcatctgagacaaggcgtctcttttgcctatgagcctgtaaaatcaaaagtaagttagttacttcctagatacaacagtggtacaggcactgggtaaatacacccattccaaatgggagaaattggccaaaacaaaggggctactagccccactctagttcaaaatccagtggagcagtcaaatcttaaagctccaaaatgatctccttttattccatgtctcatatccagttcatgctgatgcaagaggtaggttcccatggtcttgggcagctctgcccctgtggctttgcagggtacagcctccctcctggctgctttcacagtctggcattgagtgtctgtggctgttccaggtgcatggtgcaagctgtagatctaccattctggggtctagaagatggtggccctcttctcacagctccactaggcagtgcccagtaggaactttgtgtggggtctctgatcccacatttctcttgtgcaatgccctagcataggttctccatgaaagccctgcccctgcagcaaacttctgcctggacatccaagcatttccatacatcttcygaaatctaggcagagggtcccaaacctcaattcttgacttctgtgcccccacaggctcaacaccacatggaagctgccaaggtgtggggcttgcaccctctgaagccacagcctgagctgtaccttggcccactttagtcaca

SEQ ID NO: 929307 - DNA, 703 bp, Homo sapiens
gtaagcccagttttcaaatccaaagtgagagggggaaatagaatgaaggcgcggagcagtggaggggtaggctggaggagcttcgtggaaaaagggaaggggcgacaccccatgcctgtgaggcctcctgccctgagtgactggagcacctctagggtaccttattctgttgattcctaaatcggccagcggaaattcctttggactgggctttagccatgtttactaagaggcagatgccattttatgccaatgccaggacccgagagaaatcatacttgaataagacgccttcccctctccttttctccttccccagtcgcttctccagatattgcacccgctcctaattcgcgccctttgtgttactgtactatatttgacactttacttgatagttccttagtggcgcaaaaaaaaaaaaaaaaaaaaaaaaacccgggggctgggggggtttcaatattaaaaacccattgggggaaacagggggggtcccatccggggggggggggagctgggaaacaaggggrgggggcacccctggatgaaaacacctttgggaatctgcccaaaaaaatctgctcatcccatttttaaccacaaatcactttggactgaaattcatggcttaacaaggtttctcctagcccctgtggtgaagggaataacttatgctaacagcctccctcccttgtgttaacag

SEQ ID NO: 929308 - DNA, 625 bp, Homo sapiens
acaagcacgtgccaccatgcccagctactttttgtacttttagtagagatggggttttgccatgttggccaggctggtctcgaactcctgacctcaggtgatctgcccaccttggccagtgctgagattaaaggcataagccaccatgcccagcctgtgagcttgtgtttggttttgagcttctggagtctggacaggtggccatggtgaggcttagggtcatgtcctcactgcctagaccagtaacttcaaagcagagtcacgcccaagagtcaccccttcttggtcatcctgggagtgatcagatcctccaggcatcctctttaaaactgtgtactgtgtcctgagttgtatacctggagcgtaatttcaggactcagaatggyccagccctcgtagctgtcctaggtaccatgtgagtactcagaacccaggactgctagggaagacattagggaatatacctgtgttagtttctaaattattttaagtaatttaaaatcttaaaattatgttatattacaataagtaatagatgattatgagataaccgagtgatttctaaataagttaaaaatctgaaagattattaaacataagtttatatatgttggcatcttatttt

SEQ ID NO: 929309 - DNA, 624 bp, Homo sapiens
ggaggctgaggcaggagaatggtgtgaactcaggaggaggagcttgcagtaagccaagatcatgccactgcatgccaacctgggcaacagagcaagactccatcaaaaaaaaaaacaactttcaactttgtgacctgaatccacacatcacaagccatttcacagatagcttttttctagttgttatggagggatattctttttttactataggcctcactgagctctgaaatgtccctttacagattatattaaaaaaagtgtttccaaactcctgaatcaaaagaaagacttaactctgtgagtggaatmcacacatcaaaaagagtttcacagatagcttgtttctagttttcatcatggaatattcagattctcactacaggcctcactgtgctctgaaatgtccctacacagattctacaaaaagagtgttcccaactgctgaatcataagaaaagtttaactctgtgagctgaatccaaacaacatgaagcagtttcacagataacttctttctagtttttaaggcaggatatttgttttttttactataggcctcagtgccttctgaaaagtccctacacagattctccaaaaatgtgtttccaaactgctgaatca

SEQ ID NO: 929310 - DNA, 721 bp, Homo sapiens
cctgacctcatgatccacccgccttagccttccaaagtgctgggattacagaggtgaaccactgtgcttggcctgaagactttttgattatttgtctttcgtatgtgttcttttttgcccattctgtcttgagaacttaaaggatctctttatctctggtgttctaaaatttcatgattatgtcatttgatttgggtttattttcatccatttgtgtgggcattcaataaattttcaaatctgaaaaaatatgctatttctatatattcttgaattatttttagatgcctctctttaatttttttttgttctccttttccaggacttttaaaagattacatgtcatcaccatgtaatgtgtacatatggtggtataattatgactttgtcatatacttygatgacattggcaattaaaaaaatttttgttgtataaatttaaggtgtacaacatgattttttgatatacatatgtatagtggaataattgctataggtgagcaatttaacatatccattatctgacatagttaccttattctttggtggtaaggccacctaaattctactcttttagtatagtcctcatgcaatactgtagacctctgtatttactcattctacataactgcaactttttactcttagacctgcaactccctatccccttcacccctagctgcctttgataatcaccatctaccttcttttttctgtgtat

SEQ ID NO: 929311 - DNA, 724 bp, Homo sapiens
ttcataataatcccttttaatcctttcaatgtctgtagggtctgcaatgatattctgttttttatttctgatattgataatttgtggcttgttttcttttttttgagacagagtctcgctctgtcgcccaggctggagtgcagtggcacaatctcggctcactgcaagctccacctcccgggttcatgccattctcctgcctcagcctcccgagtagctgggactacaggtgcccaccaccatgcctggctaattttttgtatttttagtagacacggggtttcaccatgttagccaggatggtctygatctcctgacctcgtgatccgcccgcctcagcctcccaaagtgcttggattacagtggcttgttttcttaaaatcagtctcactagaggcttatcagttttttaatctttcagaaacagtttttggtttcactgattttttttttcaattttattgagtctgccctttgttttttctcttttgcttaccttgggttcattttgcttttctttttttttttaggttttaaggtgaaaattattcatctgagtcttttcttcttttctaatgttaatatttaatactataatttttctctaagcaatgctttaactgcagctcacagatttggtatagtatatttttattcagttcaaattattttactatttttcttgacactttctctttgatctactgattattaagaagtgtac

SEQ ID NO: 929312 - DNA, 606 bp, Homo sapiens
ctgaccccatgactaacactgagtatgtgcaagcttggcttatttttgtttctctccctcccttctcttctgattaattgtataaagtttctagggacagtttcaggggtgatagatgatgatggtacgagatttgcagtagaagggaaggagaaggytctggaaggggaaaagaggaccagcagggtccctccatcacctccaggtctgcaggaggtggcaggagggcctggaatgaaaaacagccagtggctgggcgcagtggctcacgcctgtaatcccagcactttggggggctgagacgggcagatcacgaggtcaagagattgagaccatcctggtcaacatggtgaaaccccgtctccactaaaaatacaaaaattagctgggtgtggtggtgtgtgcctgtaatcccagctacttgggaggctgaggtaggagaaccacttgaacccgggaggtggaggttgcagtgagctgagaccgcaccactgcactccagcctggctacagagggagactccatctcaaaaaaagaaaaagaaaaacagccagcgcatgagagaagatgtgagcatcgtcctcagggaagagtcagtttttgtc

SEQ ID NO: 929313 - DNA, 576 bp, Homo sapiens
tgagtctggtggggacgtggagaacctttgtgtctagctcagggattgtaaatacaccaatcggcactctgtatctagctcaaggtttgtaaacacaccaatcagcaccctgtgtctagctcagggtttgtgaatgcaccaatccacactccrtatctagctactctggtggggccttggagaacccttgtgtctagctcagggattgtaattacaccaatgggcactctgtatctagctcaaggtttgtaaacacaccaatcagcaccctgtgtctagctcagggtttgtgaatgcaccaatggacactctagctactatggtggggccttggagaacctttgtgtggacactctgtgtctagctaatctggtggggaggtggagaacctttatgtggacactctgtgtctagctaatctggtggggaggtggagaacctttgtgtcttcctcagggattgtaaacgcaccagtcagcgccctgtcaaaacagaccactcagctctaccaatcagcaggatgtgggtggggccagataagagaataaaagcaggctgcctgagccggcactggca

SEQ ID NO: 929314 - DNA, 636 bp, Homo sapiens
cactctttgggtccacactgcctttatgagctgtgacactcactgggaaggtctgcagcttcactcctgaagccaacgagaccacaaacccacggggaggaatgaacaactccagacacgccaccttaagagctgtaacactcaccgygaaggtccgcagcttcactcctgagccagagataccacgaaccccctcagaaggaagaaactctgaacacgtccaaacaccagaaggaacaaactccggacacgccgcctttaagaactgtaacactcatcttgagggtccgcggcttcattcttgaagtcagtgagaccaagaacccaccaattccggacacactatcttgatggatatggagtcatagcgtttgaaaagaaaaaaaatattgagaactgagaaaaggcactttgggaggtcgaggtgggcagatcacctgaggtcaggagttcaagaccagcctggacaacacggtaaaaccccgtctctattaaaaatacaaaaattagatgggcgtggtggcaggtgactgtaatcccagctacttgggaggctgagacaggaggatggctgaaacccaggaggcagaggttgcagtgagccgagaccatgccattgctctgcagcctggcaac

SEQ ID NO: 929315 - DNA, 636 bp, Homo sapiens
cactctttgggtccacactgcctttatgagctgtgacactcactgggaaggtctgcagcttcactcctgaagccaacgagaccacaaacccacggggaggaatgaacaactccagacacgccaccttaagagctgtaacactcaccgcgaaggtccgcagcttcactcctgagccagagataccacgaaccccctcagaaggaagaaactctgaacacgtccaaacaccagaaggaacaaactccggacacgccgcctttaagaactgtaacactcatcttgagggtccgcggcttcattcttgaagtcagtgagaccaagaacccaccaattccggacacactatcttgatggatatggagtcatagcgtttgaaaagaaaaaaaatattgagaactgagaaaaggcactttgggaggtcgaggtgggcrgatcacctgaggtcaggagttcaagaccagcctggacaacacggtaaaaccccgtctctattaaaaatacaaaaattagatgggcgtggtggcaggtgactgtaatcccagctacttgggaggctgagacaggaggatggctgaaacccaggaggcagaggttgcagtgagccgagaccatgccattgctctgcagcctggcaac

SEQ ID NO: 929316 - DNA, 735 bp, Homo sapiens
agtcagtgctcatttaccattcaaaaaatcgcaggacatttaagaattatgctacatctactattcctgtgttctctaaatggaacaacaaagcctaatgacagtatatctgtttacagtatgatttactgaatattttaagcctgctgttgagacctactgctcagaaaaaaagatttctttcaaaatattactgctcaacaatgcacctcatcccccaagagctctgatggagatgtacaaggagataaatatcgttttcatgcccactaacacaacatccattctgcagcccatggtcaaggagtaattttgactttcaagtcttattatttaagaaatamgttttgtaaggctatcagtgccatagataatgattcctctgatgcatctgccaagtcaattgaaaacattctggaaaggatttaccattctaaatgctattaagaacattttttattcatgggcggaggtcaaattatcaacattaacaggagtttggaagaagctgattccaactgtcatgcacaaatttgaggaattaaaaacttcagtgaatgaagtaactatagacatggtggaaatagcaagaaagctagaatcagaagtggagtctgaagatgtgactgaattgctgcaatctcatggtaaaacttgaatgagaagttgcttcttatggatgagtaaagaaagtggtttcttgagatagaatctactcctggtgaagatgctgtg

SEQ ID NO: 929317 - DNA, 735 bp, Homo sapiens
agtcagtgctcatttaccattcaaaaaatcgcaggacatttaagaattatgctacatctactattcctgtgttctctaaatggaacaacaaagcctaatgacagtatatctgtttacagtatgatttactgaatattttaagcctgctgttgagacctactgctcagaaaaaaagatttctttcaaaatattactgctcaacaatgcacctcatcccccaagagctctgatggagatgtacaaggagataaatatcgttttcatgcccactaacacaacatccattctgcagcccatggtcaaggagtaattttgactttcaagtcttattatttaagaaatacgttttgtaaggctatcagtgccatagataatgattcctctgatgcatctgccaagtcaattgaaaacattctggaaaggatttaccattctaaatgctattaagaacattttttattcatgggcggaggtcaaattatcaacattaacaggagtttggaagaagctgattcyaactgtcatgcacaaatttgaggaattaaaaacttcagtgaatgaagtaactatagacatggtggaaatagcaagaaagctagaatcagaagtggagtctgaagatgtgactgaattgctgcaatctcatggtaaaacttgaatgagaagttgcttcttatggatgagtaaagaaagtggtttcttgagatagaatctactcctggtgaagatgctgtg

SEQ ID NO: 929318 - DNA, 622 bp, Homo sapiens
  misc_feature 409: n = A,T,C or G
gtttcttcttcttcttcttttttttttttttttttttttttttgaaacagggtctcactcttggaccctaagctggagtgcaggggggcaatctcgggtcactggaacctccacctccccactttaagcgattctcctgcctcaacctcccgagtagctgggactacagtcacccgccaccacacctggctaatttttctatttttagtagagatgggggtttaccacgttggccaggctggyctcaaactcctgacctcaagtgatccacaagcctcggcctcccaaagtgctgggattacaagcgtgagccactgcacccggccataaaagtatttgttttttataaatcgagtgtaacctaagtgtacagggtttataaagtctacagtagtgtacaggaacatcntaggccttcacattcactccccacccagtcactgactccctcagggcaactttcagtccttcaagctccatccatattaagtgccctatacaggtgtatcatgttttatcttttatatcatatgtttgccacacctcttctatgtttaaattcacaatacttctaagtttaaatatacaaatacttacacctctgtgttaaaagtgactacag

SEQ ID NO: 929319 - DNA, 572 bp, Homo sapiens
gtgatccacccacctcagcctctgaaagtgctgagattacaggtgtgagccaccatgcccagcctataattttcttaaaaagttaaattaaagggtaaaatattcctcaacccaataactccacttttagatttttatccaatagaaatgaaaataaatggcaacaaaaagatgtggacaagaatgtgtgtagcacctttttttgtagtagtctaaaactagaaacaatccaaaagtccatcagcaaaaggatggataaaaatttgaagtattctcatacaagatgctactctggaataaaaaagaacaaattactgatatggggaacaacctggatgcctttcataaccattatgctgaatgaaaaaagctgaacaaaaagaatacatggttatgatatgggagctaaaaagaaattatttaggtagytagtgatggtaagagattcattggtaaggtttcccttttaataaaaagcagcctccaaatcatttatttcctaaaaaagagcagcctgaaaaattaagctgcagacataaataagcaagttagaagcttgcatggatgaatgt

SEQ ID NO: 929320 - DNA, 590 bp, Homo sapiens
gtgcccatctttgagtgctggctttttttagcctttttttttcatctttttttcatactcacaaaacaattatcactcactcctccatttggagccaataaaagccctggactcagccacactttggggagctacctgactttgggtagggggccgtctccttcaggtcccctctctgcwgaaaactgttccattgctcaatacaactctctgctctgctcaccctccagttgtcagcataacctcattcttcttggtcagggaactagaactcgggaaccacggaatgcaggtatgaaaaaggttgtaacattgtagccctcctccctctctgctaccaccaggcggttgccccacatgatgggaaacagcctcaggacccagcccaggagtcgcgggccaggtcggagcaatggaactgaaagagttgttaacacacccccatccaccaagcagatggtgggaataacatgcactctggggctctgcggtcactggtgtctgagtttctccagcaccaccccattccccttgtccagacaccagcgcccaaggtggaagcaggtcacaggataaccagcccagctgca

SEQ ID NO: 929321 - DNA, 590 bp, Homo sapiens
gtgcccatctttgagtgctggctttttttagcctttttttttcatctttttttcatactcacaaaacaattatcactcactcctccatttggagccaataaaagccctggactcagccacactttggggagctacctgactttgggtagggggccgtctccttcaggtcccctctctgcagaaaactgttccattgctcaatacaactctctgctctgctcaccctccagttgtcagcataacctcattcttcttggtcagggaactagaactcgggaaccacggaatgcaggtatgaaaaaggttgtaacattgtagccctcctccctctctgctascaccaggcggttgccccacatgatgggaaacagcctcaggacccagcccaggagtcgcgggccaggtcggagcaatggaactgaaagagttgttaacacacccccatccaccaagcagatggtgggaataacatgcactctggggctctgcggtcactggtgtctgagtttctccagcaccaccccattccccttgtccagacaccagcgcccaaggtggaagcaggtcacaggataaccagcccagctgca

SEQ ID NO: 929322 - DNA, 590 bp, Homo sapiens
gtgcccatctttgagtgctggctttttttagcctttttttttcatctttttttcatactcacaaaacaattatcactcactcctccatttggagccaataaaagccctggactcagccacactttggggagctacctgactttgggtagggggccgtctccttcaggtcccctctctgcagaaaactgttccattgctcaatacaactctctgctctgctcaccctccagttgtcagcataacctcattcttcttggtcagggaactagaactcgggaaccacggaatgcaggtatgaaaaaggttgtaacattgtagccctcctccctctctgctaccaccaggcggttgccccacatgatgggaaacagcctcaggacccagcccaggagtcgcgggccaggtcggagcaatggractgaaagagttgttaacacacccccatccaccaagcagatggtgggaataacatgcactctggggctctgcggtcactggtgtctgagtttctccagcaccaccccattccccttgtccagacaccagcgcccaaggtggaagcaggtcacaggataaccagcccagctgca

SEQ ID NO: 929323 - DNA, 604 bp, Homo sapiens
ttttgaaaagaacaacaaaattgatagaccgctagccatactaataaagaagaaaagagagaagaatcaaatagatgcaataaaaaatgataaaggggatatgaccaccgatcccacagaaatacaaactaccatcagagaatactacaaacacatctatgcaaataaactagaaaatctagaagaaatagataaattcctggacaaatatatcctcccaagactgaaccaggaagaagttgaatttctgaatagaccaataacagactgaaattgaggcaatgattaatagcygaccaccaaaaaaattccagggccagacagattcacagccaaattctaccagaggtacaaagaggagctggtacctttccttctgaaactattccaatcaatagaaaaagagggaatcctccctaactcattttatgaggccagcatcatcttgataccaaagcctggcagagacacaacaaaaaaagagacttttagaccaatatcccttattgggaaaacccatctccaatatttcaacataggttctttctattttccctaagtgtcgaccagtctgagaaacaaaaagaaagagtacaaagagagg

SEQ ID NO: 929324 - DNA, 605 bp, Homo sapiens
aactgcagagatagtgaccatgcctctgcctgggcactcaaacctgtctcagatggactccaacccactgttgttggctggctgggattccaagccagtgggttttaaattgtgaagtaccatggaagtgtgatccatggaacaacactgtttggctccttggattcagccccctttctagggatatgtatggacaaatttcccatcttccggggatcccygggccagagtatgtaaagctcctggatctctgtatgttcctgagcagccgctctgccaagcctccacacagctctgcatatcagacccagggccaccgtggcatgggctcatgaggggatctactgatctgtgggttgcaaagatccatgggagaagtatggtttcccatgcagggttgcactatcactcactgatttccttggggctggggtgggtgctcctttggctttgtgctgctcccagttgggcccactttccccaatcgcaagcttttctttgttctccatgagtcaccttatttgcctggttcgtcccagtgtgagaacatggatatttcagtcgaaggtgttgaattcacttgccccttttcatacctcttggtg

SEQ ID NO: 929325 - DNA, 655 bp, Homo sapiens
gttgaggattattctggaattttcttcaggtctttgttgtttgcttggttgcttgtttgcttgctttttaaatctctgtagctactaagctttccttttgagtgtgacagtggtaagggtctctcttatgtcttcgggcattttatttcaaaagttcacatgatgtaatctttattatgcttctcccctcataacaggtaagtccttgagttcacgaccatgaagaagtgattagtcaattatctgagaaccacttcctcctaagtgagaagaagaaacaagccaaagatagaagaggcagcagtgtgggaaaaattaaatgaagagaccttcccaaattgttctcttttcctggttctcctgtaaggtgagaatgggctgtatacactckgaaatgcatgcaacatctatggagtggttatctgttactcattatattgtagttctctgttgtcatcgctgaatctctggtaaatgcttgttagaggctacagtgtgatctcaactgtactgcaggaaattcaggaagggttgtatgccctaaataggcctgggtgggaaaggtggaaacatccacattttccttggtgccagggtgggagtgggaacagtgactaatgagttctttgaggagcagagggcagaagtcctgagt

SEQ ID NO: 929326 - DNA, 632 bp, Homo sapiens
cttaaaatggagccagcctacctaatcctgatagaagaataaaataatgtatgtatggtaagctgcataatgatcccgatcccaatgtcctaatccctggaacatgtgtgaatttttccttaaatggcaaaaaggacttttcagatttgactaagttaaagatctcgaaacaggtaacttaccctggattatccatgtgggctcagtctaatcacaaggttcctttttttttttttttttttgagacggagtctcgctctgtcgcccaggttggagtgcagcggcgagatcttggctcactgcaagctctgcctcccgggttcacgccattctcctgcctcagcctcccaagtagctgggactacaggtgcccgccaccacgcccrgctaattttctgtatatttactagagacggggtttcactgccttagccaggatggtcttaatctcctgacctcgtgatccacctgcctcggcctcccaaagtgctgggattacaggcgtgagccaccgtgcccggccacaaggttccttttaagaagagggatctgagccagaaaaggcaatctgatgatggaagcagaaattagagtgatgcacgttgaagaggtaggaagccaaggaatacagg

SEQ ID NO: 929327 - DNA, 639 bp, Homo sapiens
taggaggcacatgttctagtgttctatagcactgtaggatgactatagttaacaatgatacatagtttcatatatatatatatatatatatatatatatatatatatatatatatatatatatatatatatgagaaaagtttacagagtctcttgtctgttgcccacgctggactgcagggggggcatctctgctcactgaaacatctgcctcccaggttcaagcaattttcctgcttcaccctcccgagtagctgagactacaagggtatgcccccagggcccagctaatttttgtatttttagtagagactagctttcatcawgttggccaggacggtctcaaactgacctcaagcaatccacccaccttggcctgccaaaatgctgggattacaggcgtgagccactgtgcctggccatgagccactgtgcctggccacatcatatatatcgaagcatcactcggtaccccataaatatgtacagtgattatttgtctattaaaaaagaaaagacatggttcctaacctcgatgtgtttaaacccccttcagtggataacaggacttagaggtgtgaccgagtgtcagtgtaggtgttacaggcctgcagatgaccaggaagtctagggcactcaa

SEQ ID NO: 929328 - DNA, 634 bp, Homo sapiens
cttaactgtgttaccttgaatagatagcctcttttgtaagctctgcttcaaaagttctctgtgcttatttttatacatgggtggtttttttccttaatggaatttccattcataagttcatattcattttcaggattgtagttaaagaaawaaatttactgggcagaaagtgctaaaaattaatacagcatctcatcagttttagatcccaagcttggcttaaggccatcttgaatagataaatggcaccttggtcattggaagtcttctgtgaagtgaaggtagtcacatggttgtgactctgctcatagagttaatattacctaaacattaaactaagctaaatttaaggcagtggtacaggtgacagatcctgatgcccacagatctattttctagtgttgaaatatgtttacttgattttaattttatattttaaataacatttactgttttaaaaaaccacttacctattatagaaaacttaagaaaaaactagcacagcacaaagactatcattaaaatcactcacaatcctaacacctaggcagagtgaaattggttattttttcagagaagtgaagcagattaggtttaacagcatttctagagtaacttctatgatatgccagaa

SEQ ID NO: 929329 - DNA, 644 bp, Homo sapiens
acctatgacttattagcatttctagcagagactaagaaaatgctacctggaaaacatatttgagggtgtaattcaggaaaatttttccaatcttgctagagaggtagacatgcagatacaagaaatttagagaactcctatgagatactatacaagatgaccatccgcaaggcacatagttactagagtatctgatacagtgttggctgtcctctccaaatctcatgttgaaatgtattcccaaatgttggagatgtgaggcttgttgggaggtgaatggatcactggggcagattttttcataatgcttttccaccatccctttggtgctatcctcataacaatgagtgaattcacacaagagctggttttgtaaaagcgtgtggtatcttcccccttactctctcttggcaccactttcactatgtgacatgcatgctaccatttscaacatgagtaaacgcaccctgaggcctccccagacggagagtagatgccagcaccatgctcgttcagcctacagaactgtgagccaattacacctcttttctttataaattactcagtctcagatgtttctctatagcaatgtaaaaatggcctaatccactatacagggtaaatgaaagagaaaaaaaaactta

SEQ ID NO: 929330 - DNA, 618 bp, Homo sapiens
gaaggcctgcggtaaccagtgcctggataccacttgtgttcactcaaggccttagggctctacaatcagcaggtggtaaagccagccaagtttgtgttcttcctgttagggcagaaagatcccccccaggttagagatgctgtcctggagccagggcctagagttggaaaccttaataatctacctgattctctattctactgtagctaagctggcacccaagccacaagggaaagtcctcctgaatcttccctctcctttccaccagcagaggagtctctcctcatggttaccactgccccaagtctgcagtgagtactgcctggctaccaccattgttccttcaagacccaagggctcttcgttcaacttgtggtggatacagccagcctagaactctcccttcagggcagtgaacttcyctctggccagtgctggtccagaaatgccgtgcaagagtcaacacctggaattgagaaccacaagagccagcatgatgctctatcccactgtgccactgtgacggagctggttcctaaactgtaagacaaagtctcctttactcttccctttccttttctcaagcgtaaggggtccttccccatagccacttcagct

SEQ ID NO: 929331 - DNA, 691 bp, Homo sapiens
aggggtgacataagcatccctgtggccaccattattgggattgtgctgtgtgagacctgaagccagcacagcactgggtcttgccgaaggcctgcggtaaccagtgcctggataccacttgtgttcactcaaggccttagggctctacaatcagcaggtggtaaagccagccaagtttgtgttcttcctgttagggcagaaagatcccccccaggttagagatgctgtcctggagccagggcctagagttggaaaccttaataatctacctgattctctattctactgtagctaagctggcacccaagccacaagggaaagtcctcctgaatcttccctctcctttccaccagcagaggagtctctcctcatggttaccactgccccaagtctgcagtgagtactgcctggctaccaccattgttccttcaagacccaagggctcttcgttcaacttgtggtggatacagccagcctagaactctcccttcagggcagtgaacttctctctggccagtgctggtccagaaatgccgtgcaagagtcaacacctggaattgagraccacaagagccagcatgatgctctatcccactgtgccactgtgacggagctggttcctaaactgtaagacaaagtctcctttactcttccctttccttttctcaagcgtaaggggtccttccccata

SEQ ID NO: 929332 - DNA, 618 bp, Homo sapiens
ccagtcatatatagaaaaaggaaatgtctcaataatgagaagaaaacttgatcaatagatacagaaatggcaaataagatggaattagtaggcaacaatattaaaacagttattgtaatgataacattccacaagaagaaggtaaagggaagctagaacatggaagtagagacatggaagacccagcttgaatytctagaggtgaaaaatacaatgtctgagatgaaaaatatactaaatggcatttaaaatagaatagatattatataaaaaaggattggtcaactggaagatgtagcagtagaaactatcaaaaatggaacatggagaaaataatggaaaaaactgaacagaaaatcagcaccaacaggactaatatatgtggaattggagttcctgaagaaggtggggaggagtagaagaaaaaatatttgaaaaaactgtggctgaaaaaatttaaatttgagaaaaactgtaaacccagagatctaagaaccaacgaacccctagcacaagagacatgaggatgacacactgaagcatatcataatcaaattgcccgaaaccagtgacaaagataaaatctgaaaggttaccaaagggaaaaggacattatac

SEQ ID NO: 929333 - DNA, 677 bp, Homo sapiens
aaaaaggaaatgtctcaataatgagaagaaaacttgatcaatagatacagaaatggcaaataagatggaattagtaggcaacaatattaaaacagttattgtaatgataacattccacaagaagaaggtaaagggaagctagaacatggaagtagagacatggaagacccagcttgaatttctagaggtgaaaaatacaatgtctgagatgaaaaatatactaaatggcatttaaaatagaatagatattatataaaaaaggattggtcaactggaagakgtagcagtagaaactatcaaaaatggaacatggagaaaataatggaaaaaactgaacagaaaatcagcaccaacaggactaatatatgtggaattggagttcctgaagaaggtggggaggagtagaagaaaaaatatttgaaaaaactgtggctgaaaaaatttaaatttgagaaaaactgtaaacccagagatctaagaaccaacgaacccctagcacaagagacatgaggatgacacactgaagcatatcataatcaaattgcccgaaaccagtgacaaagataaaatctgaaaggttaccaaagggaaaaggacattatacagagaggaacaaagatgaaaataggctgagcgtggtggctcacacctgtaatcccagcactttgggaggctga

SEQ ID NO: 929334 - DNA, 580 bp, Homo sapiens
tcaatagatacagaaatggcaaataagatggaattagtaggcaacaatattaaaacagttattgtaatgataacattccacaagaagaaggtaaagggaagctagaacatggaagtagagacatggaagacccagcttgaatttctagaggtgaaaaatacaatgtctgagatgaaaaatatactaaatggcatttaaaatagaatagatattatataaaaaaggattggtcaactggaagatgtagcagtagaaactatcaaaaatggaacatggagaaaataatggaaaaaactgaacagaaaatcagcaccaacaggactaatatatgtggaattggagttcctgaagaaggtggggaggagtagaagaaaaaatatttgaaaaaactgtggctgaaaaaawttaaatttgagaaaaactgtaaacccagagatctaagaaccaacgaacccctagcacaagagacatgaggatgacacactgaagcatatcataatcaaattgcccgaaaccagtgacaaagataaaatctgaaaggttaccaaagggaaaaggacattatacagagaggaacaaa

SEQ ID NO: 929335 - DNA, 786 bp, Homo sapiens
actatcaaaaatggaacatggagaaaataatggaaaaaactgaacagaaaatcagcaccaacaggactaatatatgtggaattggagttcctgaagaaggtggggaggagtagaagaaaaaatatttgaaaaaactgtggctgaaaaaatttaaatttgagaaaaactgtaaacccagagatctaagaaccaacgaacccctagcacaagagacatgaggatgacacactgaagcatatcataatcaaattgcccgaaaccagtgacaaagataaaatctgaaaggttaccaaagggaaaaggacattatacagagaggaacaaagatgaaaataggctgagygtggtggctcacacctgtaatcccagcactttgggaggctgaggcagggtgatcacttgagaccaggagttcaagaccagcctgggcaacatgacaaaaccccgtctctactaaaaatacaaatattagcagggcatggtggcacgcatctgtaacctcagctactcaggaggctgaggcagggagaatcgcttcaacctgggaggcggagattgcagtgagctgagatggcgccattgcactccagcctgggcgacagagtgagactctgtctcaaaaaaaaaaaaaaaaagaaaaagaaaagaaaagatggcagacatctgtttagaaagaacgcaaggtcaggcgtggtggcacatgcctgttatcccagcattttgtgaggtcaaggcaggatgatcagttgagcccaggagttctagaccagcctgggcaacatggca

SEQ ID NO: 929336 - DNA, 606 bp, Homo sapiens
tgtaggtcatgtgtagagattttatttatttgtttgtttgtttatttatttatttatttatttatttgcacgggaaggtggggggacggagtttctctcttgctgcccacgctagagtacaatggcataggggactcaaggagttaacctrtggcagagacgacacgtcattctgagtgtaagggccgcaacgaaaagtgtcatggctcctgtttttaaaggctgaaatcccggcggctcaggcctgtcgtcccagaactttgggaggcacaggaaggtggatcacttgaggtgaggagttcaataccaacgtggccaacatggagcaaccccgtctctactaaaaatagaaaaattagccggctgttgtggtgcgcgcctgtaatcccagctaccgaagaagaaacactggaacccgggaagaagaggtttcagtgagccgagagagcgccacttcaacgcaggctgggtgacagagcgagagagactcagtccaaaaaaaagaaaagaagaaaaaagaaaaagaacaggcccaaatactgcattgtcgctgaatgttcccccaaaaggccggaaaccccctgactcaggtacaggaggtgctgt

SEQ ID NO: 929337 - DNA, 579 bp, Homo sapiens
atgtacaacgccttagaatggaattcagcagtccttattgaatccccaatctgtctttctcatttatctcctccaaccacaaccctcgactccaggtaccaaactgaagctgcttcaaagctgtgtctttgctggcgggcttttctctgcttggaatgtcacttccactgccactcattcaacccagcaaacccccrcttatcctccaaagataagttcaagtgctgccacttctctagtttttcatgaccctccaaggcagaattaattgttcctgtctctttgtccccgtgtccacatacacacaacagaaattttaaatttatgcatccatcttttcaactaaatagtgagatatggaagaataggaatgctttcttgaaaaatagctttatctccaatgtctagaaatatgacctattgcctaaccatgaagatcctcaacacattcttcaattgaattgttaaattgtttatcttttattttattttattttattttatttttttaaaattttttttattattatactttaagttttagggtacatgtgcacattgtgcaggttagttacatac

SEQ ID NO: 929338 - DNA, 579 bp, Homo sapiens
atgtacaacgccttagaatggaattcagcagtccttattgaatccccaatctgtctttctcatttatctcctccaaccacaaccctcgactccaggtaccaaactgaagctgcttcaaagctgtgtctttgctggcgggcttttctctgcttggaatgtcacttccactgccactcattcaacccagcaaacccccacttatcctccaaagataagttcaagtgctgccacttctctagtttttcatgaccctccaaggcagaattaattgttcctgtctctttgtccccgtgtccacatacacacaacagaaattttaaatttatgcatccatcttttcaactaaatagtgagatatggaagaataggaatgctttcttgaaaaatagctttatctccaatgtctagaaatatgacctattgcctamccatgaagatcctcaacacattcttcaattgaattgttaaattgtttatcttttattttattttattttattttatttttttaaaattttttttattattatactttaagttttagggtacatgtgcacattgtgcaggttagttacatac

SEQ ID NO: 929339 - DNA, 622 bp, Homo sapiens
ttgacgtaaaattaaccattacgactggtgactattctttttgtcttagtaaaagctctgatttagatcaaatgtaacaaaactttcaggtagataataagggaaatagttctgcttttttcaaaattaatttctaaagaactggcatttggtgcttcagcttagatgtgacttggggtgtattttaaggaaacaaccacactctaagcacaattaatatgagacactcagggttgtttgccaggaatagaatatatactgcaagtgatttaagaaaatattataataaattaaatggtggcctttttctcccctctcggtagttttcgtatagtattaaagacttcctgagattmcttagataaatatgatataaaaataaaatttaagaagaaaatctacaattaggtttttccccttataattttcaggcttttaggctgtatctcttgaaatgatatataaaaatgataatgactcagatatggttaacacagataatcagcttagataattaccgcagaagagtggctctctttatttcaactggctattttaatagatcagctaagcctaataataatcaagcaatttctccttaatttgtgctgggcacataaaa

SEQ ID NO: 929340 - DNA, 818 bp, Homo sapiens
caaagggatggggaggatgggccccagcttggggattctggcaccgggaccaatgacaccatgcgcaggaggtgagagccaagggggtgatagggagagcaagggaagactccatcaggaatgaactcagcactgggggcactgcgaagagaatggctttgtaaatctagccactgtgcaaactatctgaggagagggggaaggggaggtgggggagccagggaagaggccaactgcattatgaaggtcctggtgacaataaccttttgtcctcaaaacaatttgagcctgccaagctgctccacagtctccgtgaaagcatgagggtgggaaaaaaaaggatccccattaagaggcaacagactcatccttaattatgagacaagccttcccagagctgacatcctctcccacacttcctcctgcagcagacacaccackgagtgccggcgtggtgctcctctaatgagagcaggcaatttttctaagaactggtccttttgggatcttccccagaacccccacccccaaatgacacaagctcttagtgagaagtgtgaagcatcagtttaatttgagcaatggtctacagggtcagactggggactagaaaagggacggcctcagcagtcctaaaatgcttcattccatcctcttgaccctataggatcgtcaagacaccagtcctggtggacagagggcccctgcttaaatgtacaccgaagctcgaaactgaatgatcatgtctaattatcctaaagaaaagctgactggcacactgtattagaaagaaccccaacaaaaagtcagaaacctgg

SEQ ID NO: 929341 - DNA, 818 bp, Homo sapiens
caaagggatggggaggatgggccccagcttggggattctggcaccgggaccaatgacaccatgcgcaggaggtgagagccaagggggtgatagggagagcaagggaagactccatcaggaatgaactcagcactgggggcactgcgaagagaatggctttgtaaatctagccactgtgcaaactatctgaggagagggggaaggggaggtgggggagccagggaagaggccaactgcattatgaaggtcctggtgacaataaccttttgtcctcaaaacaatttgagcctgccaagctgctccacagtctccgtgaaagcatgagggtgggaaaaaaaaggatccccattaagaggcaacagactcatccttaattatgagacaagccttcccagagctgacatcctctcccacacttcctcctgcagcagacacaccactgagtgccggcgtgktgctcctctaatgagagcaggcaatttttctaagaactggtccttttgggatcttccccagaacccccacccccaaatgacacaagctcttagtgagaagtgtgaagcatcagtttaatttgagcaatggtctacagggtcagactggggactagaaaagggacggcctcagcagtcctaaaatgcttcattccatcctcttgaccctataggatcgtcaagacaccagtcctggtggacagagggcccctgcttaaatgtacaccgaagctcgaaactgaatgatcatgtctaattatcctaaagaaaagctgactggcacactgtattagaaagaaccccaacaaaaagtcagaaacctgg

SEQ ID NO: 929342 - DNA, 818 bp, Homo sapiens
caaagggatggggaggatgggccccagcttggggattctggcaccgggaccaatgacaccatgcgcaggaggtgagagccaagggggtgatagggagagcaagggaagactccatcaggaatgaactcagcactgggggcactgcgaagagaatggctttgtaaatctagccactgtgcaaactatctgaggagagggggaaggggaggtgggggagccagggaagaggccaactgcattatgaaggtcctggtgacaataaccttttgtcctcaaaacaatttgagcctgccaagctgctccacagtctccgtgaaagcatgagggtgggaaaaaaaaggatccccattaagaggcaacagactcatccttaattatgagacaagccttcccagagctgacatcctctcccacacttcctcctgcagcagacacaccactgagtgccggcgtggtgctcctctaatgakagcaggcaatttttctaagaactggtccttttgggatcttccccagaacccccacccccaaatgacacaagctcttagtgagaagtgtgaagcatcagtttaatttgagcaatggtctacagggtcagactggggactagaaaagggacggcctcagcagtcctaaaatgcttcattccatcctcttgaccctataggatcgtcaagacaccagtcctggtggacagagggcccctgcttaaatgtacaccgaagctcgaaactgaatgatcatgtctaattatcctaaagaaaagctgactggcacactgtattagaaagaaccccaacaaaaagtcagaaacctgg

SEQ ID NO: 929343 - DNA, 637 bp, Homo sapiens
gcggctcacacctgtaatctcagcactttgggaagctgaagcggatggatcacttgaggtcaggagttcgtgaccaccctggccaacgcagtgaaaccctgcctctactaaaaatacaaaaattagccgggtatggtggtatgcatctataatcccagctacccgkgaggctgaggcacgagaatcgcttgaacctgggaggcagaggttgcagtaagccgagatcgcgccactgcactccagactgggcaacagagtgagactttgtctcaaaaataagtaaatagataaaaaaagccaggtctagaaactcaaatattgcttggtctcattcacatgtgggagctaaacaagctgatttcatagaagtagagagtataatggtagttaccagagactagggtggctagaggggtagggtataggaagatgctggtcaaaggatacataattacagttagataggaggagtaaatttcaagatatctattgtatagcaaggtgactatagttgatggtatattgtattattgaaaaatgtaaacagtggaagttatgtgctctcattacaaaaatgacagctatgtgagttaatgtatttttaaactagctagagttgttaaccattctacaatgt

SEQ ID NO: 929344 - DNA, 637 bp, Homo sapiens
gcggctcacacctgtaatctcagcactttgggaagctgaagcggatggatcacttgaggtcaggagttcgtgaccaccctggccaacgcagtgaaaccctgcctctactaaaaatacaaaaattagccgggtatggtggtatgcatctataatcccagctacccgtgaggctgaggcacgagaatcgcttgaacctgggaggcrgaggttgcagtaagccgagatcgcgccactgcactccagactgggcaacagagtgagactttgtctcaaaaataagtaaatagataaaaaaagccaggtctagaaactcaaatattgcttggtctcattcacatgtgggagctaaacaagctgatttcatagaagtagagagtataatggtagttaccagagactagggtggctagaggggtagggtataggaagatgctggtcaaaggatacataattacagttagataggaggagtaaatttcaagatatctattgtatagcaaggtgactatagttgatggtatattgtattattgaaaaatgtaaacagtggaagttatgtgctctcattacaaaaatgacagctatgtgagttaatgtatttttaaactagctagagttgttaaccattctacaatgt

SEQ ID NO: 929345 - DNA, 637 bp, Homo sapiens
gcggctcacacctgtaatctcagcactttgggaagctgaagcggatggatcacttgaggtcaggagttcgtgaccaccctggccaacgcagtgaaaccctgcctctactaaaaatacaaaaattagccgggtatggtggtatgcatctataatcccagctacccgtgaggctgaggcacgagaatcgcttgaacctgggaggcagaggttgcagtaagccgagatcgcgccactgcactccagactgggcaacagagtgagactttgtctcaaaaataagtaaatagataaaaaaagccaggtctagaaacwcaaatattgcttggtctcattcacatgtgggagctaaacaagctgatttcatagaagtagagagtataatggtagttaccagagactagggtggctagaggggtagggtataggaagatgctggtcaaaggatacataattacagttagataggaggagtaaatttcaagatatctattgtatagcaaggtgactatagttgatggtatattgtattattgaaaaatgtaaacagtggaagttatgtgctctcattacaaaaatgacagctatgtgagttaatgtatttttaaactagctagagttgttaaccattctacaatgt

SEQ ID NO: 929346 - DNA, 621 bp, Homo sapiens
attttatgtgcccagcacaaattaaggagaaattgcttgattattattaggcttagctgatctattaaaatagccagttgaaataaagagagccactcttctgcggtaattatctaagctgattatctgtgttaaccatatctgagtcattatcatttttatatatcatttcaagagatacagcctaaaagcctgaaaattataaggggaaaaacctaattgtagattttcttcttaaattttatttttatatcatatttatctaagkaatctcaggaagtctttaatactatacgaaaactaccgagaggggagaaaaaggccaccatttaatttattataatattttcttaaatcacttgcagtatatattctattcctggcaaacaaccctgagtgtctcatattaattgtgcttagagtgtggttgtttccttaaaatacaccccaagtcacatctaagctgaagcaccaaatgccagttctttagaaattaattttgaaaaaagcagaactatttcccttattatctacctgaaagttttgttacatttgatctaaatcagagcttttactaagacaaaaagaatagtcaccagtcgtaatggttaattttacgtc

SEQ ID NO: 929347 - DNA, 711 bp, Homo sapiens
gttcttctctaagaagaatagaatagctggctattctggttatcaactcctgtattattttatcatggttcttagattctttgtgttttgttagaacattcttcttttgctcagcaaagtttgtattacccattcatgtagtttggctctgtgtccccacccaaatctcatcttgaattgtaataatcactgcatgwcatgggagggaccttgggggaaataatcaaatcaagggggtgagtttttctcattgtgttcttgtgctgatgagtaagtctcatgagatctgatggttttataaagggagttcccccgcacatgcccttttgcatgctaccatgtaagacacgcctttccttctcctttgccttctattatgaaggtgaggcctcctcagccatgctgaaccttgagtccattaaacctctttcttttataaattacccagtcttgggtatgtctttatcagcagcatgagaacggactaatacacccaccttctgaagtctgcttctgtcaattcagtgatcttagcctctgcccagtcctgtgtccttgccagagaggtgttttggtcttttggaggagaagtgggacctggctttttgagttttcagcattttcccattttttttgtttctcatctttgtgagccttcaatctttcaggttgctgaaatttgaatggggtttttgtggggaattttttagt

SEQ ID NO: 929348 - DNA, 810 bp, Homo sapiens
catgagatctgatggttttataaagggagttcccccgcacatgcccttttgcatgctaccatgtaagacacgcctttccttctcctttgccttctattatgaaggtgaggcctcctcagccatgctgaaccttgagtccattaaacctctttcttttataaattacccagtcttgggtatgtctttatcagcagcatgagaacggactaatacacccaccttctgaagtctgcttctgtcaattcagtgatcttagcctctgcccagtcctgtgtccttgccagagaggtgttttggtcttttggaggagaagtgggacctggctttttgagttttcagcattttcccattttttttgtttctcatctttgtgagccttcaatctttcaggttgctgaaatttgaatggggtttttgtggggaattttttagttgatgttgttgttgttgttgctttctgtttgttttcttttaacagtcaggccactcttctgtagggctgttgtggtttgctgggggtccacttcagaccctagttgtctcagtccctcctacatctggaagtatcaccagggaaggctgttccttcctcwgggatctccctcccagggggaaccaacctgatgctggcccgaatgcatcaggaggtgtctggagacccctgttgggaggtctcacccagtcaggaggaatggcatcagggacctatttaaggaggcagtctagctgccctttggcagagcaggtgtgctgtgggggtaatccactttgctcatatcacctggactctccagagccagcaggctggaa

SEQ ID NO: 929349 - DNA, 603 bp, Homo sapiens
tagtaaacaggcatatgaagaggtgctcaacatcactgatcatcagagaaatgctggtcaaacctgcaatgagatataatctcactccagttaaaatggcttttcttcaaaagacaggcaataacaaatgctggtgaggatgtggagaaaaggaaacccttgtrtactgctggtagaaatgtaaattggtaaaaccactaggcagaagagtttggaggttttttaaaaaactaaaaattgagctactgtgtgatccagcagttccgctgctgggtatatacccctgaaaaaggaattcaatatactgaagagatatctgtactcctgtgtttttgtagcactgtttacagtaggtaagatttggaggcaacctaagtgtccatcaacagatgaatggataaagaaaatatggtacatatatacaatggagtactattcagtcataaaaagaatgagatccagtcatttgcaataacgtggagggaagtggagattattaagtaaaataagccatgcacagaaagagaaacatcagatgttctcacttgcttgtgagatctaaagtcaaaacaattgaactcatggacatagagagtagaagga

SEQ ID NO: 929350 - DNA, 722 bp, Homo sapiens
gatctgcaaaggctggccacgaacgtgatcctagtttcctggctgcacttcttcatgcttcgctttgctccactgtccagccggggcagccagccagtagtactcggccctgaccatggctgagttcacccagcagatgtttgatgctaagaatgatggttgcctgtgagccccgtcatggccactacctgacagtggctgccgttttcagaggttgcatgcccatgagggaggtggatgagcaaatgttcaatattcaaaataagaacagcaggtactctgctgattggctccctcacaatgtgaaaatggctatctgtgccatcccacccaaggggctaaaaatggccacttgcattggcaaygacacggccatccgggagctgttcaagtgtgttccagaccttcctgcactggtacacgggcgagggcatggacgtgatggagttcaccgaggcggagagcaacatgaacgacctgctgtctgagtatcagcagtaccaggacgccacagccgaggaggaggaggtggcctaaagcctgccctttctggttaaaggggggaagtggtgtggattctctaatgtgttctgatagccatgtgtcactaggcacttgtttgtgtcttcacatctccttctgttgcattttaaagcctttttatagtatgtggttttgcctgataaaacatcctaacagcatctggtttcacctccaacttc

SEQ ID NO: 929351 - DNA, 722 bp, Homo sapiens
gatctgcaaaggctggccacgaacgtgatcctagtttcctggctgcacttcttcatgcttcgctttgctccactgtccagccggggcagccagccagtagtactcggccctgaccatggctgagttcacccagcagatgtttgatgctaagaatgatggttgcctgtgagccccgtcatggccactacctgacagtggctgccgttttcagaggttgcatgcccatgagggaggtggatgagcaaatgttcaatattcaaaataagaacagcaggtactctgctgattggctccctcacaatgtgaaaatggctatctgtgccatcccacccaaggggctaaaaatggccacttgcattggcaatgacacggccatccgggagctgttcragtgtgttccagaccttcctgcactggtacacgggcgagggcatggacgtgatggagttcaccgaggcggagagcaacatgaacgacctgctgtctgagtatcagcagtaccaggacgccacagccgaggaggaggaggtggcctaaagcctgccctttctggttaaaggggggaagtggtgtggattctctaatgtgttctgatagccatgtgtcactaggcacttgtttgtgtcttcacatctccttctgttgcattttaaagcctttttatagtatgtggttttgcctgataaaacatcctaacagcatctggtttcacctccaacttc

SEQ ID NO: 929352 - DNA, 676 bp, Homo sapiens
gttcaagtgtgttccagaccttcctgcactggtacacgggcgagggcatggacgtgatggagttcaccgaggcggagagcaacatgaacgacctgctgtctgagtatcagcagtaccaggacgccacagccgaggaggaggaggtggcctaaagcctgccctttctggttaaaggggggaagtggtgtggattctctaatgtgttctgatagccatgtgtcactaggcacttgtttgtgtcttcacatctccttctgttgcattttaaagcctttttatagtatgtggttttgcctgataaaacatcctaacagcatctggtttcacctccaacttctttctctaggccctctgggtgctgctgccagatgggcatagtggtcctgcaaggctgcagctatcttggtcttatatgcccaggaacaagcattccagtggctccagggttgggggggtcagcatgggctttggacatgkcagacaggcttcacacaaacttgggcgtgccctgggccttgggcatctacttggtgggaaacctgttcctgaaggcaagctgcagcttatcccatgtactgaactctgaggggactagctgatcttctgtttttggaactttaaaagtggccagtgatcccggtggacaatgtccccaaagtcccacctctgggtaggg

SEQ ID NO: 929353 - DNA, 676 bp, Homo sapiens
gttcaagtgtgttccagaccttcctgcactggtacacgggcgagggcatggacgtgatggagttcaccgaggcggagagcaacatgaacgacctgctgtctgagtatcagcagtaccaggacgccacagccgaggaggaggaggtggcctaaagcctgccctttctggttaaaggggggaagtggtgtggattctctaatgtgttctgatagccatgtgtcactaggcacttgtttgtgtcttcacatctccttctgttgcattttaaagcctttttatagtatgtggttttgcctgataaaacatcctaacagcatctggtttcacctccaacttctttctctaggccctctgggtgctgctgccagatgggcatagtggtcctgcaaggctgcagctatcttggtcttatatgcccaggaacaagcattccagtggctccagggttgggggggtcagcatgggctttggacatggcagacaggcttcacacaaacttgggcgtgccctgkgccttgggcatctacttggtgggaaacctgttcctgaaggcaagctgcagcttatcccatgtactgaactctgaggggactagctgatcttctgtttttggaactttaaaagtggccagtgatcccggtggacaatgtccccaaagtcccacctctgggtaggg

SEQ ID NO: 929354 - DNA, 608 bp, Homo sapiens
attcctgctgaaactcttccaaaagcttgaggagaagggactgctccctaacacattctctgaagccagcatcatcctgataccaaaacctggcagaggcagaacaaaagaagaaaacttcaggctgatacttttgatgaacatcaatgcaaaaacctcagcctcaacaaaatactggcaaacygaatccagcagcacatcaaaaagcttatccaccatgatcaagtaggctttatccccgggatgcaagtttagttcaacatatggaaatcaacaaatgtgatctatcacataaacagaactatagacaaaaataacatgattatctcaatagatgcagaaaaggccttcaataaaattcaacaatgcttcatgattaaaactctcaataaactagatattgaaggaacatacctcaaaataataagagccatatacaagaaacccacagccaatatcatactgaatgggcaaaagcttgaagcattccccttgaaaactggcacaagacaaggatgccttctctcaccactcctattcaacatagtaatggaagtcctggccagggcaatcaggcaagagaaaaaaataatgggcatgcaaatagg

SEQ ID NO: 929355 - DNA, 608 bp, Homo sapiens
attcctgctgaaactcttccaaaagcttgaggagaagggactgctccctaacacattctctgaagccagcatcatcctgataccaaaacctggcagaggcagaacaaaagaagaaaacttcaggctgatacttttgatgaacatcaatgcaaaaacctcagcctcaacaaaatactggcaaactgaatccagcagcacatcaaaaagcttatccaccatgatcaagtaggctttatccccgggatgcaagtttagttcaacatatggaaatcaacaaatgtgatctatcacataaacagaactatagacaaaaataacatgattatctcaatagatgcagaaaaggccttcaataaaattcaacaaygcttcatgattaaaactctcaataaactagatattgaaggaacatacctcaaaataataagagccatatacaagaaacccacagccaatatcatactgaatgggcaaaagcttgaagcattccccttgaaaactggcacaagacaaggatgccttctctcaccactcctattcaacatagtaatggaagtcctggccagggcaatcaggcaagagaaaaaaataatgggcatgcaaatagg

SEQ ID NO: 929356 - DNA, 608 bp, Homo sapiens
attcctgctgaaactcttccaaaagcttgaggagaagggactgctccctaacacattctctgaagccagcatcatcctgataccaaaacctggcagaggcagaacaaaagaagaaaacttcaggctgatacttttgatgaacatcaatgcaaaaacctcagcctcaacaaaatactggcaaactgaatccagcagcacatcaaaaagcttatccaccatgatcaagtaggctttatccccgggatgcaagtttagttcaacatatggaaatcaacaaatgtgatctatcacataaacagaactatagacaaaaataacatgattatctcaatagatgcagaaaaggccttcaataaaattcaacaatgcttcatgattaaaactctcaataaactagatattgaaggaacatacctcaaaataataagagccatatacaagaaacccacagccaatatcatactgaatgggcaaaagctygaagcattccccttgaaaactggcacaagacaaggatgccttctctcaccactcctattcaacatagtaatggaagtcctggccagggcaatcaggcaagagaaaaaaataatgggcatgcaaatagg

SEQ ID NO: 929357 - DNA, 633 bp, Homo sapiens
aaacggctgtgtcacctctccaagaagggttctgaaccaagctgagatcactgaaatgacagaaataggattcagaatatggatagaaatgaagatcatctgagctatgggcatacattgaaacctaatgcaagaaagctaaaaatcatgacaaaacaatgcaagagctgtcagacaaaatagccagtatagaaaagaacataactgtgacagaactaaaaaacccattccaagaattttgtaatgcaatgacaagtattaatagcagaatacaccaaatggagaaaagaatctcagtgcttgaagactgactttctaaaataagacaatcagacaagaatagtgtaaaaaaaagagttaaaaggaacaaataaaacatccaagatatatcatgttatgtaaagagaatgaatctaagactcactggtgtccctgaaggaaatggggagaatgaaagcaagttggaaaacrtatttcaggatgtcatccacgagaactttcccaacatagctagagaggccaacattcaaattcaaaaaatgcagaacgcaccagtaagacacatcaaaacaagatcatctttaagacatataatcatcagattctctgaggttgaaataaaaggaaaaatgt

SEQ ID NO: 929358 - DNA, 613 bp, Homo sapiens
ggcccaaaagaatcaccctgatcacttctaggtcctaaaagcctcaatgattaggcaatactgtatagcaagagtggggaaggagttcacccttcctgtaggaagaccacatggtggagttcaaacgacacagagtaaatttccaaagctgcagaccatttaggcctacccagaattccactgggactggacggcccccaccgggctataatggatatgtggacatagagcctacactaagctgcctgatcagtggacaggtagttgtgttattggcactattaaaccatctttcttcctactgcccataaaaacaggcgaactcctgggcttccctgtctatgcttcctgcgaaaagagaagcatagccatagataattaaaaagatgataaacrgcctcctgaaaaaattatacaatactatgggcctgccgcttgggcacaagacggctcgtggggataccgaacccccattaacatgctcaaccaaatcatgtagttgctgtcttggagattatcactaataaaactggtaaaaccttgactgttctggcccggcaagaaactcagatgagaaatgttatctatcaaaataaactgactctcgactact

SEQ ID NO: 929359 - DNA, 613 bp, Homo sapiens
ggcccaaaagaatcaccctgatcacttctaggtcctaaaagcctcaatgattaggcaatactgtatagcaagagtggggaaggagttcacccttcctgtaggaagaccacatggtggagttcaaacgacacagagtaaatttccaaagctgcagaccatttaggcctacccagaattccactgggactggacggcccccaccgggctataatggatatgtggacatagagcctacactaagctgcctgatcagtggacaggtagttgtgttattggcactattaaaccatctttcttcctactgcccataaaaacaggcgaactcctgggcttccctgtctatgcttcctgcgaaaagagaagcatagccatagataattaaaaagatgataaacggcctcctgaaaaaattatacaatactatgggcctgccgcttgggcacaagacggctcgtggggataccsaacccccattaacatgctcaaccaaatcatgtagttgctgtcttggagattatcactaataaaactggtaaaaccttgactgttctggcccggcaagaaactcagatgagaaatgttatctatcaaaataaactgactctcgactact

SEQ ID NO: 929360 - DNA, 563 bp, Homo sapiens
tatttctagaaataaaccatatactggttgataaacataagctttatttttctatttccagaagttttactcttatgcccagagcaaaatttatcatttcaaaaattgcagtacataagcattgaattcagtgtatatattatagagctttccttgttattcctttgatattgttgctaacaaaagcattttccacaatggaaagtgtaggtagtcaagaatttatttatatgaattatacacatacataaagtaggcatacagatttatgttttgtgtgacccttttaactctctatacttgctgttaagttgtatatttttccatsggagcacgtaactcatgagaaaatgagtaacattgaaaactcagttaagtctcaaaaataggcattagttctcagacatgactctccttttgggaaatcaaagattttattgctggataaattaatgtttcaaatgtatgaatacagatgctgtttgcaaatttgtcacaatctgtctcccagcagaagaatttatactgtatacagtaatagaaaacagaaaactgcatatttc

SEQ ID NO: 929361 - DNA, 594 bp, Homo sapiens
tattgataacctagaggaaatgaacaaatttctagaaaaaaaatacagcctaccaagattgaatcaacacaaaataggaagcttaaacaaaccaataatacaataaagaggttgaagaagacattaaaaacttttaaacaaagaaaagcctagagccagattacttcatggttgaattctgccaaatattcaaataattattgccaatccttctcaaactctttcccaaaataatgggatgttccaaaaacatcttacaaggctagaattacctttctacttaagctagagaaagatcccacaggaaaagaaaactggaagtcaatatgtctaatgaacattagtgtaaaaatactcaataaaacactagcaaaactaattyagcaacacagcaaaaaaattatgtctaatgaacattaatgtaacaatactcaatgaaacactagcaaaactaatttagcaacacgtcaaaaaaattatacatgatgaccaagtgtgatatatccctggcatgcaaagccagtttaatatatgcaaatcagtcactgtgatatatcacattaacagaatgaaaaataaaagcatgatcagctc

SEQ ID NO: 929362 - DNA, 792 bp, Homo sapiens
gaaggcagtatccgaaggctgggggggttgcttttcttcccaggtgtcttttgaagaggcagtcaagtcagcagctcgcggtgaccttctggtaacatcgtatgggctgggttacagcacatgccgactgctaagccggtcactggggaaaaccatgtgattgctgtgatgagcttagaatgatcattcctccttcgggagctggggtgggttgagggagtgataaagatcacgataaccttgcatttctccagcgagaaagaagaaagaaattccgtggatagggagccagccaggtttcctgcagaaaatcatgggaagcttttgagcaggggagtcagaagatgagcggtgagtattagggctttccggtcacggtgtgacacagggattggccagctcttcctgtaaagggccaggtgggaagcactcgtaggccccrtggtctctgtcgtgtctgctgaagcctgccgtagtagcatggaagcagtcagagatgacgtgtaagcaaatggtcccgactgacctccggtaaagcattgattccggaagcatttaacagacctaacaacctttcaaaccgcatggcgtttctttcccggatcccgtttcaggaacgtttctgttggctacaaggaccgtctccaacatgcttaggctctgtgaactttcccaggatcctgagtagggtatccgccattcgtccttagggctccgggatgtctcgttcttactgtgtccctgccaaccctggtcccatctcgtcatgatcacccactgcagaagagagga

SEQ ID NO: 929363 - DNA, 792 bp, Homo sapiens
gaaggcagtatccgaaggctggaggggttgcttttcttcccaggtgtcttttgaagaggcagtcaagtcagcagctcgcggtgaccttctggtaacatcgtatgggctgggttacagcacatgccgactgctaagccggtcactggggaaaaccatgtgattgctgtgatgagcttagaatgatcattcctccttcgggagctggggtgggttgagggagtgataaagatcccgataaccttgcatttctccagcgagaaagaagaaagaaattccgtggatagggagccagccaggtttcctgcagaaaatcatgggaagcttttgagcaggggagtcagaagatgagcggtgagtattagggctttccggtcacggtgtgacacagggattggccagctcttcctgtaaagggccaggtgggaagcactcgtaggccccrtggtctctgtcgtgtctgctgaagcctgccgtagtagcgtggaagcagtcagagatgacgtgtaagcaaatggtgccgactgacctccggtaaagcattgattccggaagcatttaacagacctaacaacctttcaaaccgcatggcgtttctttcccggatcccgtttcaggaacgtttctgttggcttacaaggaccgtctccaacatgcttaggctctgtgaactttcccaggatcctgagtagggtatccgccattcgtccttagggctccgggatgtctcgttcttactgtgtccctgccaaccctggtcccatctcgtcatgatcacccactgcagaagagagg

SEQ ID NO: 929364 - DNA, 571 bp, Homo sapiens
gacaggtcaggtctttcctttcccacgaggccatatttcagactatcacatggggagaaaccttggacaatacctggctttcctaggcagaggtccctgcggccttctgcagtttttgtgtccctgagtacttgagattaaggagtggtgatgactcttaaggagcatgctgccttcaagcatctgtttaacaaagcacatcttgcaccgcccttaatccatttaactctgagtttgacacagcacatgtttcagagagcacgaggttgggggtgaggtcacagaatctcaaggcagaagaatttttcttagtacataacaaaatggagtctcctatgtctacttctttctacacagacacagtaacaatctgatctctcttgcttttccccacayatttgttttaacattgtcatatgtaggggtcagtttttcatatttggaagctcaagctccctgagtgaaaatattttaaaataactggggtttaagcatcactgtaacaaagatttgttggttcagagttcgaggagatcagtaaagaaaagtaggagtccaagccaggtcttga

SEQ ID NO: 929365 - DNA, 593 bp, Homo sapiens
aaagcactgaattctaaagtagactatagattagaggtaaattatccagatatggatcagaagactaaagcatacacataagcattaaagggagctataaaaattaagtttatatgtattaaaatattttaatttgcacatgggtctgttatagcacrtgcattaactacattatgaacatctcataaagaacataaagcaaaaactatcataaagcagagagaggccagaatgtaaaaactgttcagtacttacagaagtccaaatccttcatctgaaatatttaaaccctggctggtcaaagaaatatattatatataccatgtaaaactaggctaaaataaatagatggtattgtacataaaaaataactggacaatacatagtaatgctctaagtcccatcttgtgtatttgagtgaaattcttaaggtctgaccgattaaacatttttaattactaccaaggcctaagtagaaagaaaatgagcatatacagataagaagaacataagaaagaaaaagtcaaacagaaaaatatatatatggctataaactaaaatagaaaagacatcaaaaagatattaaaatatac

SEQ ID NO: 929366 - DNA, 593 bp, Homo sapiens
aaagcactgaattctaaagtagactatagattagaggtaaattatccagatatggatcagaagactaaagcatacacataagcattaaagggagctataaaaattaagtttatatgtattaaaatattttaatttgcacatgggtctgttatagcacgtgcattaactacattatgaacatctcataaagaacataaagcaaaaactatcataaagcagagagaggccagaatgtaaaaactgttcagtacttacagaagtccaaatccttcatctgaaatatttaaaccctggctggtcaaagaaatatattatatataccatgtaaaactaggctaaaataaatagatggtattgtacataaaaaataactggacaatacatagtaatgctctaagtcccatcttgtgtatttgagtgaaattcttaaggtctgaccsattaaacatttttaattactaccaaggcctaagtagaaagaaaatgagcatatacagataagaagaacataagaaagaaaaagtcaaacagaaaaatatatatatggctataaactaaaatagaaaagacatcaaaaagatattaaaatatac

SEQ ID NO: 929367 - DNA, 577 bp, Homo sapiens
ttttctacagatatccctaaaattcccagaatactgaaaactagtatataaagcatatctccatatttccctccatatctccccatatgacattatattagttgtctgcaatatattattattaaaatgtcaatttctccaagctgctggcttgtaaactacttctgattcaaatgtgaaactctcaaaacacggttgtattgaggaggggtatatgtgcatctgacagtagcttctagttgttggtaccaggtttttcttttaragtgactgaaagcattctttctttcaggaaatacaaatgaagtatttccacaagaagcagctaagaaagacaagatctttcttcacacctgatccttaggttttgacagtcctggaaaatgttgacacatgtactcattagtctaaataacattctctgaccctgtgtatgtagctgcaaagaagttggtaacttttggcatcttggtagattcttgaccaccagaagtatcaatcatattaatagtacacctaagaactctaaattttttttaaaaaagggtaccaccaaagagcttttaaaagctaaatc

SEQ ID NO: 929368 - DNA, 690 bp, Homo sapiens
cggggtgaccatcacttaagtgattccatgccttggggagcctaagttagggctttcatgttcaaaggacatggtccattgaagacttggaatatggacttgctctgatcttcatagtcttcagttctcggagccaaagcaggctgactttaaaaaggtggcttgtattctcttcctctcttccccatcccccatattatcaactgttcaagggcagaggaagataatggaatataggattggaggagctgkggccacaccggcagaatttaactcttgggcttttcagagcttttctccccaataggcaaacctttcctaagacacccttttgtcatgaaaagcaaaccatgtcagccaaacttttcaaccagactttgagggctggatctgaaataaaaggaaaatggttttgaaatctgtattcagccagcatagtttgatattccaaatttgcacaaattcagaggagggtgcaaattctttcctttccttgggagaataatggggcggggaggggtatggtattaatgattgttccaggtcaagacatcaatttgagctggtttagttcagatcaagaataggttctaacatttgagacagtcacaccgggcaaggagggacctgcaccattgatgaatggcataacactgcagggtgggtagaagccacacacgtagcaacagt

SEQ ID NO: 929369 - DNA, 563 bp, Homo sapiens
cccctcccatacgtttgcaatgagtgggggtgtggggtggttggctggagcaaggggccagcgactcctggaacactgagttggcctttcctcccaggttcaaggacggctccactactacgcagtgagggtcactggccacaggggaggagggcacagtcaggcgtggtacccaggccacagaggtgccctcgtcctggttctccaccaaagagttcaggccccactacaaagcagtgactgttctgaagatgagagacgaagggttccaaagagatgcagagaggggtgagaccatggtcctgtgggcccaagaatgcaggggactctgtccttaaaactccagcagggggtgtggtgtgggtctcgcctctgyagtggtcttccccactgcctgtttttcaccttctttcctgactcaggaccaggcaaagccctggggagaggagaaaggggaggagctggtgcctgtgcccggctgtcaggacacgagaaggggcagcaagcagggcacctggccccagctctgagcaagttgtccccccgcaagctgcccaggggtg

SEQ ID NO: 929370 - DNA, 728 bp, Homo sapiens
atggtaaaattgctttccacaaaattatacaccaaggtcttttgtaatttttaaaaaaacttctacgggtacatagcaaatgtatatatttataggacgcatgagatatgtggatacaggcatgcgtgtgtaataatcactcagggtaaatggggtatccatcacctcaagcatttatcctttctctgtgttacaaacaacctaattacactcttttagttatttttaaatgtacaacaaattattgttcactacagttactctgttatgctatcaaacactagatcttattcattctatttcattatattgttgtacccattaaccatccccactgccctytgccacccccattacccttctctgcctttggtaaccatcattctactctctatccccatttgttcaattgtgttaattcttggctcccacaaataagtgagaacatgcacagtttgtctttctgagcctggcttaattcacttaacataatgatctcagttccagccatgttgtagcacataactggatctcattcttttttatggctgaatagtactccattgtgtatatgcaccacattttctttgtctagtcatctgttgatagacacagctttcttccacattttggccattgtgagcagtgctgcaacaaacatggaagtgcagatacctagcggtgggattgctgggtcctgtagctgttctacttttagttttttggga

SEQ ID NO: 929371 - DNA, 605 bp, Homo sapiens
catgcgtgtgtaataatcactcagggtaaatggggtatccatcacctcaagcatttatcctttctctgtgttacaaacaacctaattacactcttttagttatttttaaatgtacaacaaattattgttcactacagttactctgttatgctatcaaacactagatcttattcattctatttcattatattgttgtacccattaaccatccccactgccctctgccacccccattacccttctctgcctttggtaaccatcattctactctctatccccatttgttcaattgtgttaattcttggytcccacaaataagtgagaacatgcacagtttgtctttctgagcctggcttaattcacttaacataatgatctcagttccagccatgttgtagcacataactggatctcattcttttttatggctgaatagtactccattgtgtatatgcaccacattttctttgtctagtcatctgttgatagacacagctttcttccacattttggccattgtgagcagtgctgcaacaaacatggaagtgcagatacctagcggtgggattgctgggtcctgtagctgttctacttttagttttttg

SEQ ID NO: 929372 - DNA, 681 bp, Homo sapiens
tgtgtttgggtgacatagtgtacagagaaactatacgatacagaaaacaggttgcacaactcagacgagaggtgaagggagtcccccagagtggcaggtacaactcaggtccagagaatcaagactccagaggaaggggcaaaggtccgaagagggaaattgccaggagaaaaggaaaatggaaacaatggattatctggtgtatttcagygtttgaaaatgtattgctgacatttgagaattctgttaaaacatttggaatataaataggcacatagaaagctaactttttgtttttaaataaaagcaaggcaataactaactccaggaaaataaaaatgtgctcagaaagaaataccattagaatgcactacctagctcagtgttatgttttacttacatgatcatgatcccatgaggcatgaatattgatttaacccaaaccatgatatagctatactgggaggaagaggaaatgaaaatcagtgtgagacagcaacaattcaacagataaggtctaagatgacaaagagagagtggtgcattagttacctatttcagagtaacaaattactcccaaaacacattggctctagaaaacagaccccaaatcacaagtgtttattagttcatgagtgggtcaggaatccaggcacaagaccactgggtcttctgactcag

SEQ ID NO: 929373 - DNA, 707 bp, Homo sapiens
ctctactagaactgtgtttgggtgacatagtgtacagagaaactatacgatacagaaaacaggttgcacaactcagacgagaggtgaagggagtcccccagagtggcaggtacaactcaggtccagagaatcaagactccagaggaaggggcaaaggtccgaagagggaaattgccaggagaaaaggaaaatggaaacaatggattatctggtgtatttcagcgtttgaaaatgtattgctgacatttgagaattctgttaaarcatttggaatataaataggcacatagaaagctaactttttgtttttaaataaaagcaaggcaataactaactccaggaaaataaaaatgtgctcagaaagaaataccattagaatgcactacctagctcagtgttatgttttacttacatgatcatgatcccatgaggcatgaatattgatttaacccaaaccatgatatagctatactgggaggaagaggaaatgaaaatcagtgtgagacagcaacaattcaacagataaggtctaagatgacaaagagagagtggtgcattagttacctatttcagagtaacaaattactcccaaaacacattggctctagaaaacagaccccaaatcacaagtgtttattagttcatgagtgggtcaggaatccaggcacaagaccactgggtcttctgactcagtgtctcttgcaggt

SEQ ID NO: 929374 - DNA, 651 bp, Homo sapiens
gagaaacagaacaaatagaatatcagtaggatgtgtgtgtgtgtggagagagagagagacttatttaaggaattaatccatgcaattgtggaggctggcaaactcaaaagtccatagagcaggcagcaggctggagacccagggaagagctgaggttgccatcttgggtataaagactgtttggaggcagaattccttctctggggaaactcagtcttttctcttaaagccttcaactaattggatgagggccactcccattataaagagggatctgttttaatcagtcaaccgatgtaaatgttaatctcatktttttttttttttttagatggagtctcgctctcttgccctggctggagtgcagtggtgtgatctcagctcactgcaagctctgactccctgattcaagagattctcctgcctcagcctctcgagaagctgggattacaggcatgtgccaccacgcccagttaatttttgtatttttagtagagacagagtttgaccttgttggccaggctggtcttgatgtcctgacctggtgatccgcccgcctcagcctcccaaagtgctgggataacaggcatgagccaccgtgcctggacaatctcatttttaaaatgcctttgcattgacatctagacaggg

SEQ ID NO: 929375 - DNA, 631 bp, Homo sapiens
aagcagacagaaaaatgtgcaaaggcgagactggcctagcctcccagcctacatctttctcccgtgctggatgcttcctgccctcgaacatcacactccaagttcttcaagctttgggactcagactggcttccttgcttctcagcctgcagatggcctgttgtgggaccttgtgatcgtgtgagttaatactccttaataaactcccctttatgtaatatatatatatwttttttctattagttctgtccctctagagaaccctgactaatgtagttgccaactttttgcctgctgccatccatgtaagatgtgacttgctcctctttgccctccgccatgattgtgagccctccacagccacatggaactgtgagtacaattaaacctctttcttttttaaattgaccagtcttgggtatgtctttatcagcagcatgaaaacggactaatacacaccccctccccaatacaccccgggtttccatccctgactccaggcccagagtcctggacatctgtcaggacagtcctcacctgttcaaggatcccattcccatcccagccatcacccattctccaaaattcagagtcccttacagccttcaagatgcggttcaaatgctcttgc

SEQ ID NO: 929376 - DNA, 479 bp, Homo sapiens
tttattgaggcagagacacccatttccaagatggcgcacacacgtggctgctggtgggtgtgttcatcagctcgggctgctgtcacaaaagaccacaggctgtgtggcttcaacaacagacatttattttctcacagttctggaggctgaaaactccaagatcaagggttagcaggtttggttttcccttctggggccacgaatgtgttctggagctagctckcgatgatctggaagtccccaagcacatggtggaggcacttaatgtcactgagctgtacactttcagatggttacgatggagaattttatatcatgtacattttcacacacacacacacacacacacacacacacacacacacacaatctgcatcaggggtttggggatcatgtctcagctctgccactaaatgagtttgtctttgagaaagtgactttctctccctggccttggtttctctcctcccactctccaa

SEQ ID NO: 929377 - DNA, 594 bp, Homo sapiens
agcaccggtcctgggcaggcagtcagccagagggctaagagcacaccaggggctggggagagatgaggacgggagcctacggtcagtttcagatcttgctatgaacaaatgctatcgaccactaccagggaatcacctcacccttcagtgggaccctgcctattctcccagtccttacacacacacacacacacacacacacacactctctctctctctctctcactacccctagtacctccatcttaattatagactctagagactttaaaaaaccatgacaaaaataactgactacagacctcctgtcatgtagragattgacagctttcatccagggacagatgtttttcattattttgttttttggggggctttgtctttgtttttctttctttctgtcttttttttttcttacaaatacatcctgagcacctctgaatggtctttgctggagaggactaaggttctcctaggcaacaggagacaggaaaactaaactaactggtgtgcagaccagtgcctggcaggtggtaagcactcaataaatacttgttttgtaaatgaatgagtgtcctcaaaaagtgaaagaaa

SEQ ID NO: 929378 - DNA, 576 bp, Homo sapiens
gccattatcctaagcaaacaaacacaggaacagaaaatcaaataccacatgttttcactcataagtgggagctaaacaaccagaacatctggctcttagaagaggaacatcagacactgcggcctacttgagagtgaagggtgggaggaagaagaggttcagaaatacctaccaggtactatgcttattacctgggtaataaatgatctgtacaccaaacccccattacacacagtttacctgtatatcaaacctgcacctgtacccttaaacctaaaataaaagttaaaaaaaaaagaaaagaaaagaagatggtctgaatggcaaaatggataaaattaaaatcaaaactagtgaactgaaatagcaaggtgagaagttcttctgaawtgcagtataaaagataaaaagaaatacaaagaaaaagtcatgaaggacagatccagtggacgaaacatgatttggcacaaacagatttagcgtcttttgggtaaggtattttttcctcgtaaggaacaccccacattatcttaatagtcccttgtatctaatattccatttgcctgatattaacat

SEQ ID NO: 929379 - DNA, 834 bp, Homo sapiens
tgctgaggttgacaataagagaacagacttgggaggaggaatagggcaggcaagattctggtggcttctgcgtggtcacctgtgccatctcatgccagatttcagagcagggaacatttcagaggtggagaagtggctctgtcatagagatcacagaagcacagatggttacggtgctccatgccactaccctggttggtggaaacatccataacataggttgtcctgtttgctctgaaggctaccagaggggatggcaatgtccacaggagctgctgacaggcctgagacttaagtgagggagatgacagaataggaagaggagaaagacataaagacaggagaccaaggggtaaccacatctgggccaaagctgacctttctttctttccttccttccttccttcctccctccctccctkctttctttctttttttttttagacagagtctcactcactctgtcacccaggttggagtgctgtggtgcaatctcggctcactgcaactttcacctcccgagttcaagcagttctccctgccttagcctcctgagtagctgggattacaggcacccgccaccgcgcccggctaatttttgtattttttagtaaagagggggttttgccatgttggccaggctagtcttgaactcttgacctcaggtgacccgcctgcttcagcctcccaaaatgctggcactacaggcatgggccaccacacccggcctctcgtgtgcttttagaagaccgtgtctgctgggccccatgcctggaatgtctgaggggcagagcagtgcggaggttaagagtgcgggctctgctggggatagcg

SEQ ID NO: 929380 - DNA, 834 bp, Homo sapiens
tgctgaggttgacaataagagaacagacttgggaggaggaatagggcaggcaagattctggtggcttctgcgtggtcacctgtgccatctcatgccagatttcagagcagggaacatttcagaggtggagaagtggctctgtcatagagatcacagaagcacagatggttacggtgctccatgccactaccctggttggtggaaacatccataacataggttgtcctgtttgctctgaaggctaccagaggggatggcaatgtccacaggagctgctgacaggcctgagacttaagtgagggagatgacagaataggaagaggagaaagacataaagacaggagaccaaggggtaaccacatctgggccaaagctgacctttctttctttccttccttccttccttcctccctccctcccttckttctttctttttttttttagacagagtctcactcactctgtcacccaggttggagtgctgtggtgcaatctcggctcactgcaactttcacctcccgagttcaagcagttctccctgccttagcctcctgagtagctgggattacaggcacccgccaccgcgcccggctaatttttgtattttttagtaaagagggggttttgccatgttggccaggctagtcttgaactcttgacctcaggtgacccgcctgcttcagcctcccaaaatgctggcactacaggcatgggccaccacacccggcctctcgtgtgcttttagaagaccgtgtctgctgggccccatgcctggaatgtctgaggggcagagcagtgcggaggttaagagtgcgggctctgctggggatagcg

SEQ ID NO: 929381 - DNA, 834 bp, Homo sapiens
tgctgaggttgacaataagagaacagacttgggaggaggaatagggcaggcaagattctggtggcttctgcgtggtcacctgtgccatctcatgccagatttcagagcagggaacatttcagaggtggagaagtggctctgtcatagagatcacagaagcacagatggttacggtgctccatgccactaccctggttggtggaaacatccataacataggttgtcctgtttgctctgaaggctaccagaggggatggcaatgtccacaggagctgctgacaggcctgagacttaagtgagggagatgacagaataggaagaggagaaagacataaagacaggagaccaaggggtaaccacatctgggccaaagctgacctttctttctttccttccttccttccttcctccctccctcccttctttctttctttttttttktagacagagtctcactcactctgtcacccaggttggagtgctgtggtgcaatctcggctcactgcaactttcacctcccgagttcaagcagttctccctgccttagcctcctgagtagctgggattacaggcacccgccaccgcgcccggctaatttttgtattttttagtaaagagggggttttgccatgttggccaggctagtcttgaactcttgacctcaggtgacccgcctgcttcagcctcccaaaatgctggcactacaggcatgggccaccacacccggcctctcgtgtgcttttagaagaccgtgtctgctgggccccatgcctggaatgtctgaggggcagagcagtgcggaggttaagagtgcgggctctgctggggatagcg

SEQ ID NO: 929382 - DNA, 794 bp, Homo sapiens
tggctcatgcctgtaatccctttttttggtagagacggggtttcaccatgggaggctgatgtgggcagatcacctgaggtcacctcgtgtctactaaaaatatgtacctgtcccttggaacttacagtccagtgatgaaaatgatggcctggataattaggggtagtgtggtgatacagtttggatgtttgtcccctccaaatctcatggtaaaaagtgattccccattgttggaggtggcgcttagtaggagttgtttgggtcacaggggtgaatctcmtgtgaatggcgtggtaccctccccaaggtgatgagtgagttattgctatattagttcatgcacgatctgactgtttaaaagagcctggcatctcttttgcttgctctctcaacatgtgacacacctgctcccccttcaccttctgccatgagtaaaagcttcctgaagcttcaccagaggccgagcatatgcaggtgccatgctccccctacagtctgcagaaccatgagccaagataaacctcttttctttacaaatcacctagtctcagccgggcatggtggctcatgcctgtaatccctgcacattgggaggccagggcgggcagatcatttgaggtcaggagttcgagaccagcctgaccaacatggtgaagctctgtctctactaaaaatacaaaaaattggccgggcacagtggcttacacctgtaatcccagcactttggaaggctgaagcgggcagatcacctgaggtcacgggttcaagtccagcctggccaacatggtgaaact

SEQ ID NO: 929383 - DNA, 794 bp, Homo sapiens
tggctcatgcctgtaatccctttttttggtagagacggggtttcaccatgggaggctgatgtgggcagatcacctgaggtcacctcgtgtctactaaaaatatgtacctgtcccttggaacttacagtccagtgatgaaaatgatggcctggataattaggggtagtgtggtgatacagtttggatgtttgtcccctccaaatctcatggtaaaaagtgattccccattgttggaggtggcgcttagtaggagttgtttgggtcacaggggtgaatctcatgtgamtggcgtggtaccctccccaaggtgatgagtgagttattgctatattagttcatgcacgatctgactgtttaaaagagcctggcatctcttttgcttgctctctcaacatgtgacacacctgctcccccttcaccttctgccatgagtaaaagcttcctgaagcttcaccagaggccgagcatatgcaggtgccatgctccccctacagtctgcagaaccatgagccaagataaacctcttttctttacaaatcacctagtctcagccgggcatggtggctcatgcctgtaatccctgcacattgggaggccagggcgggcagatcatttgaggtcaggagttcgagaccagcctgaccaacatggtgaagctctgtctctactaaaaatacaaaaaattggccgggcacagtggcttacacctgtaatcccagcactttggaaggctgaagcgggcagatcacctgaggtcacgggttcaagtccagcctggccaacatggtgaaact

SEQ ID NO: 929384 - DNA, 794 bp, Homo sapiens
tggctcatgcctgtaatccctttttttggtagagacggggtttcaccatgggaggctgatgtgggcagatcacctgaggtcacctcgtgtctactaaaaatatgtacctgtcccttggaacttacagtccagtgatgaaaatgatggcctggataattaggggtagtgtggtgatacagtttggatgtttgtcccctccaaatctcatggtaaaaagtgattccccattgttggaggtggcgcttagtaggagttgtttgggtcacaggggtgaatctcatgtgaatggcgtggtaccctccccaaggtgatgagtgagttattgctatattagttcatgcacgatmtgactgtttaaaagagcctggcatctcttttgcttgctctctcaacatgtgacacacctgctcccccttcaccttctgccatgagtaaaagcttcctgaagcttcaccagaggccgagcatatgcaggtgccatgctccccctacagtctgcagaaccatgagccaagataaacctcttttctttacaaatcacctagtctcagccgggcatggtggctcatgcctgtaatccctgcacattgggaggccagggcgggcagatcatttgaggtcaggagttcgagaccagcctgaccaacatggtgaagctctgtctctactaaaaatacaaaaaattggccgggcacagtggcttacacctgtaatcccagcactttggaaggctgaagcgggcagatcacctgaggtcacgggttcaagtccagcctggccaacatggtgaaact

SEQ ID NO: 929385 - DNA, 799 bp, Homo sapiens
gtctgcagaaccatgagccaagataaacctcttttctttacaaatcacctagtctcagccgggcatggtggctcatgcctgtaatccctgcacattgggaggccagggcgggcagatcatttgaggtcaggagttcgagaccagcctgaccaacatggtgaagctctgtctctactaaaaatacaaaaaattggccgggcacagtggcttacacctgtaatcccagcactttggaaggctgaagcgggcagatcacctgaggtcacgggttcaagtccagcctggccaacatggtgaaacttttctctactataaatataaaaaatcagccgggcatggtggtggttgcctgtaatcccagctactcgggtggctgaggcaggagaattgcttgaacccaagaggcgggaggttgcagtgagccgagataatgccactgccctccagcttgggtgacagagcaagactctgtctcaaaaaaaaaaaatggtttaaaaatgcaaaaaattagctggcactgtggtgcgtgcctgtaatcccagctactcagggggctgaggcaagagaattgcttgagccygggaggtggaggttgcagtgagctgagattgtgccgttgcactccagcccaggtgacagagcaagactccatcttaaaataaaataaaataaaataaaataaaataaaataaaataaaataaaaaccatttaacagataaaacagaggctcagggaggctaaccagtttgtgaagggtcactgctggaaggtgacaaagtaggactcaactcagcttga

SEQ ID NO: 929386 - DNA, 616 bp, Homo sapiens
gcagggtaacctccccatgccgatatccttaatcacatctgcaaagacatgattattttctaaataatgtcacattcacagcttcctggtatccttgagtggccgttatttcctttactacactgaggctgaaagagaggtgagatagtttgtccaaaaaacacccagttgctcagttatagaatcaaaatgaaaatccaactcttccaactcccaagcccgtggctacttctgaggaccaggagatcatctgccagatyggccaggtgctagagggcctaggccattcctaacctgcaattttccagccatggtgccttgagcaagtcgcttaatgtgagcattttcctcctgcagaaaatcgagatgttaacagtagcgttctttagatactgtaaaggtaaaaagacttgacagggcacagtggctcacacctgtaatccctgttttgggaggccaaagtgagaaggttgcttgaggccaagagtttgagactagcctgggcaacacagcaagatgccatctttataataaaaataaaaataaaaatcaattagctgggcatggtggaacgcacctgtagtcccagccaattgagaggctgaagtgggaggat

SEQ ID NO: 929387 - DNA, 750 bp, Homo sapiens
gtagtacacagtaatgtgctaggccttcacgagttcactcaccactcactcagtgactcatccgcaacaacttccagtcctgcaagctccactcacggtaagtgttctttatgggcgtaccatttttactcttatattttttgaaacacagtctcactctgttgcccaggctggagtgcagtggcgtgatctcggctcactgcaacctccacctcccaggttcaagcgactctcctgcctcagcctcctgcatagctgggattacaggcgtgtgccaccacacctggctaatttttatatttttagtagagatggggttttgccatgttggccaggctggtctcgaactcctgacgtcaagtgatctgcctgcctcagactcccaaactgctaggattacaggcrtgagccatcgcacccagcccattttatatcttttatacagtatttttactgtaccttttctatgtttagatctatttagatccacaaataccttccatcgtgttgcaatcacctacagtattcagtacagtcacatgctgtacaggcttagagcctaggaggaataggctatgccacatagcccaggggtgtagcaaaatcacctaaagatgcatttttcagaatcttgagcgacgcatgactataatcttaaaatgaagatgatgtatcagggtagtgaaaaggtggttgtagggaaggtgacagagtggacagcacctgagccaagaggtgaaaggttagcag

SEQ ID NO: 929388 - DNA, 592 bp, Homo sapiens
tgcacataaatctataattacagtagtccccctttacctacggtttcactttccaagatttcagttacccaccatcaactgacttctggaaatattaaatggaaaattccagaaataaaaaattaatggccaggcacagtggctcatacctgtaatcccagcactttgggaggccaaagcaggtgaatcacttgaggtcaggagtttgaggccagcctgtccaacatgatgaaactccgtctctactaaaaatacaaaaattagccaggcatggtggcgagcacctgaaatcccagctacttggtaggctgaggcaggagactcacttgaacttgggaggcggaggttgccatgagccaagaacgcgccactgcactccagtctagaggacaagaacgaaacttcgaatcaaaaaaaaaaaaaaaaawatatatatatatatatatatatatatatatatatgttttaaattgggcagtattctgaatagtgatgaaatctctcgtcaccctgctccattgctccatcctacctaggatgtgtgtcatccctctttccagcacatccatgccatagatgctaccagtccatt

SEQ ID NO: 929389 - DNA, 490 bp, Homo sapiens
gggtgcttgtgtcaccacttccccagctccaggcagctcagcacagagagagactctgtttgtttgggagaaaggtaaggaaagagaacaagagtctctgcatggtaatctagataattcttccagatcttatattcagtaccaccaaggcagtacctctaagagtctgtggttacctctaagagtaaccacagtgttactgggctyggggggcccctaaggcagatatggctgtagtgaccaaaagcttagatcacaacactcaagtcccatctgatatgcacaaagccttcctaagaaggacaggtacaaacaagcccagacagtgaagattataataaatactaactcttcaatgcccagataccaatgaacatccacaggcatcacgaccctgcaggaaaacatgccctcaccaaatgagctacataaggaaccagagacccatcctgaagaagcagagatatttgactttttggacacagaattc

SEQ ID NO: 929390 - DNA, 596 bp, Homo sapiens
catgtggtgctaactctgcagacacaaagagtgcatgagctgtggggccatggcggcctccactgagatttcaaagggtgttgtggacagcctgggggctcagacagaaacttgctgcaggagtgaagctgccacagagaatccctacctaggcaatgactagtgaagccatgggaatgaggccaccgcagaaaactcccactatggaaatatctactggagctgagggaacaagaccaccaccaagactccaaaattggtgtctcagttcattttgtgctgccataacagaatatcrctgcctgggtgctttagtgtaatctaggctgggattgccgcagataccagactccagcttgagagagatgaagcttggctgagcccagcaaagttgtgggggtagggctgcctgggccatgggggcttaacctccacccaggtgtgcccaggattcaggatttggagtcaaaggagattattctccagctttaagacatactgttgctttccctgttgggttttatagttagttaggaccagttactcctttcttcttgcctatttctcccttttggaatgggaatgtttattatatg

SEQ ID NO: 929391 - DNA, 644 bp, Homo sapiens
gctctaccacttaccgtcagtgtgagctcaggaaaaccatttgatttctatatgcctcagtcttctcagatgtaaaatgcaatttatttatttgagacagggcctctctcctgttatccaggctggagtgcagtggcacaatcatagctcactgtaaccttgaagtcctgggctcaggtgatcctcctgcttcagccttctgagtagctaggactmcaggcatgtgccaccatgcccagctaattagaaaaaaaaaatctgtagagacaaggtctggctgtgttgcccaggttggtctcaggctcctggcctcaagtgatcctcccaccccagcctcccaaagcacggggattataggcatgagccaccatgcctggctaaaaatgaagtttaataatcacagctatgtcacagggtacttaggactgaatagataatgtatgcagtgcactgaaaacagttcttggcatatgctgagtactcaaagaaggctggtcatcactgcctataaagctgtggtttggattatccaaaagttacctgcattttgctctagaatactaagatgcgtgttttagttagcaggagaattattttcttatttgacttagtttgcagtaaggtgaatctgtatttgttacttg

SEQ ID NO: 929392 - DNA, 644 bp, Homo sapiens
gctctaccacttaccgtcagtgtgagctcaggaaaaccatttgatttctatatgcctcagtcttctcagatgtaaaatgcaatttatttatttgagacagggcctctctcctgttatccaggctggagtgcagtggcacaatcatagctcactgtaaccttgaagtcctgggctcaggtgatcctcctgcttcagccttctgagtagctaggactacaggcatgtgccaccatgcmcagctaattagaaaaaaaaaatctgtagagacaaggtctggctgtgttgcccaggttggtctcaggctcctggcctcaagtgatcctcccaccccagcctcccaaagcacggggattataggcatgagccaccatgcctggctaaaaatgaagtttaataatcacagctatgtcacagggtacttaggactgaatagataatgtatgcagtgcactgaaaacagttcttggcatatgctgagtactcaaagaaggctggtcatcactgcctataaagctgtggtttggattatccaaaagttacctgcattttgctctagaatactaagatgcgtgttttagttagcaggagaattattttcttatttgacttagtttgcagtaaggtgaatctgtatttgttacttg

SEQ ID NO: 929393 - DNA, 644 bp, Homo sapiens
gctctaccacttaccgtcagtgtgagctcaggaaaaccatttgatttctatatgcctcagtcttctcagatgtaaaatgcaatttatttatttgagacagggcctctctcctgttatccaggctggagtgcagtggcacaatcatagctcactgtaaccttgaagtcctgggctcaggtgatcctcctgcttcagccttctgagtagctaggactacaggcatgtgccaccatgcccagctaattagaaaaaaaaaatctgtagagacaaggtctggctgtgttgcccaggttggtctcaggctcctggcctcaagtgatcctcccaccccagcctcccaaagcacggggattataggcatgagccaccatgcctggctaaaaatgaagtttaataatcacagctatgtcacagggtacttaggactgaatagataatgtatgcagtgcactgaaaacagttcttggcatatgmtgagtactcaaagaaggctggtcatcactgcctataaagctgtggtttggattatccaaaagttacctgcattttgctctagaatactaagatgcgtgttttagttagcaggagaattattttcttatttgacttagtttgcagtaaggtgaatctgtatttgttacttg

SEQ ID NO: 929394 - DNA, 610 bp, Homo sapiens
aaaattcttttctttaagaatgttgaatattggcctccactctcttctggcttgtagggtttctgcagagagatccactgttagtctgatgggcttccctttgtgggtaacccaacctttctctctgactgcacttaacattttttccttcatttcaaccttggtgaatctgacaattatgtgtcttggggttgctcttctcgaggagtatctttatggtgttctctgtatttcctgaatttgaatgttggcctgccttgctaggttggggaagttctcctggatgatatcctgaagagtgttttccaacttggttccattctccccatcactttcaggtacacctatcaaacatagatttgatctttttacatagttccatatttcttggaggctttgtttgtttctttttactcttttttctctaaccttgttttgttgcttcatttcattaatttgatcttcaatcactgataccctatcttccacttgatggaatcgggtattgaaggttgtgcatgcatcacaaagttctcatgccatggttttcacctccrtgaggtcatttaaggtcttctctacactgtttattctagttaaccctttgtct

SEQ ID NO: 929395 - DNA, 604 bp, Homo sapiens
aaagaaaagaaaatgaataggaaataagtaattgataaaaatagacaattcataggcggagaaacctgaaaggctaataaatatatgaaaagatgttcaacttcactattaataatagaaatacacattaaaactataccgagaccatttttgcaatagtttcacagttgtgcaaccatcactacaatgaattttctttccttatttgagatggaatttccctcttgttgcccaggctggagtgcaatggcgctatcttggctcactgcaaccttcacctcccgggttcaagcaattctcctgcctcagactcctgagtagctgggattacaggtatgtgccaccacacctggctaattttgtagttttagtagagacagggtttcaccatgttggtcaggctggtctcgaactcctgacctcaggtgatccacccacctcggcctcccaaarttctggggttacaggtgtgagccaccgtgtccagcacaatcaattttagaacgtttcatcacccccaaaataaatacagtagcctttagttatcatccttagcccctctctccctgcaccccacattcttgcaaaacagtaatctactttc

SEQ ID NO: 929396 - DNA, 664 bp, Homo sapiens
acatgggtggagctggaggccattatcctaagcaaattaacacagaaaaacagaaaaccaaatactgcatgttctcacttataagtgagagctaaacatggagtacacatggagacaaagaaggaaactatagataccagggcctacttgagagtggaggatgggaagsattgaaaaatgacctatcaggtattattctggttcctcaggtgacaaaattgtctgtacaccaaacccccatgacatgcaatttacccatgtgacaaacctgcatgtataccacttgaacctaaaataaaagttggaaaagaaaaacaatacccaaagcaatctatagattcaattcaatcactatcaaaatcccagaattccaaaattctgtttcatacagaaataaaaataagccattttaaaatgtacatggaatttcaaggaaccccaaataatcaaaaccatctttaaattgtagagcaaatgtgaaggtctcatacctcctgatttcaaaactcactacatacctacactaatcaaaacagtgcagtactggcataaaaacagacatataaatcgatggagtagaatagagcccagaaacaaacccttataatatgtagccaaatgatttcaacaagggtgccaaaactattctgaagtaaaaagtttt

SEQ ID NO: 929397 - DNA, 604 bp, Homo sapiens
ggattgctgggtcaaatggcatttcagcctctaggtctttgaggaatcggcacactgtcttctgcaatggttgaactaatttgtactcccatcaacagtctaaaggtgttccttcttctccacaaccttgcaaccatctgttgggttttactttttttttttttttttttttgagatggagtctcggtctgtcgcccaggttggagtgcagtggcgcaatctcagctcactgcaagctccgcctcccgggttcaccccattctcctgcctcagccacctgagtagctgagactacaggcacccgccaccatgcccggctaattttttgtagttttaatagagacgggatttcaccgtrttagccaggatagtcttgacctcctgaacttgtgatctgcccacctcagcctcccaaagtgctgggattacaggcatgagccaccgcgcccggccccgggttttgttttttagtaaaagccattctgactggcatgagatggtaacttattgcgattttgatttccatttctctaatgatcagtgattcaacataggaacatttacagggacacaaacattcagtctgtgataccagacttgatgg

SEQ ID NO: 929398 - DNA, 611 bp, Homo sapiens
agagtctttcgttcatctcacaaaggcctaccctcaggagaaagtatttattgagagcctaacctgctggggtttgtcagagcctaacagacctgggagaagtgtgccagccaactccagcccatgccaaccatcctgttccacctaagggtgggaagagatgcacttgtaaacttcacagttcartgaagcaggctttctgaaagactgagtcctgattatagtgctatagaaagattacccctgctgccttactacaatattattgaagacctgtttacagcagttccttttacccaggatatcatgttcagcattcaagaaaaaattacaagacactaacaggcaaaaggtagttcaaagacacacagtaagcatcaaaaccaggctcagatatggcagagttgttggaatcatcagactggggatctaaaatgtctgtgataactatgctaagggttctaatcgataaagtaaacagcctgtaagaataagttggcaatgtaagcagagagatggaaattcaaagaagtgccaaaaagaaatgctagaaatcaaaacactgtaacagacataaagaatgcctttgatggggttattagaagactgga

SEQ ID NO: 929399 - DNA, 599 bp, Homo sapiens
cagaatggacgttgtgttagtgggcataaaaacattaggtcaggcacggtgactcacgcccgtaatcccagcactttggaaagctgaggcaggtggatcacctgatgtcaggagtttgagactagcctgtccaacatggcgaaaccctgtctctactaaaaacacacaaattagtcaggtgtggtagcaygcacatgtaatcccagctacttggggggctgaggcaagacgattgcttgaacctgggaggtggaggttgcagtgagccgagattgtaccactacactcctgcctgggtgacagagtgagactgtctccaaaaacacaaaaacagcattaatcttcttgcatatctccatcagaactcttggctgaccaggtgcattgccaatggtcagtaatattttgaaataaatcttttttctttttaactgtaggtctcaacagtgggcttaaaatattcattaaaccataccataaacagatgtgctatcatccaggctttgctgttccatttctagagcacaggcagagtagatttagcataattctgaagggctctaggattttcagaatggcaaatgagcactgatttcaat

SEQ ID NO: 929400 - DNA, 599 bp, Homo sapiens
cagaatggacgttgtgttagtgggcataaaaacattaggtcaggcacggtgactcacgcccgtaatcccagcactttggaaagctgaggcaggtggatcacctgatgtcaggagtttgagactagcctgtccaacatggcgaaaccctgtctctactaaaaacacacaaattagtcaggtgtggtagcatgcacatgtaatcccagctacttggggggctgaggcaagacgattgcttgaacctgggaggtggaggttgcagtgagccgagattgtaccactacactcctgcctgggygacagagtgagactgtctccaaaaacacaaaaacagcattaatcttcttgcatatctccatcagaactcttggctgaccaggtgcattgccaatggtcagtaatattttgaaataaatcttttttctttttaactgtaggtctcaacagtgggcttaaaatattcattaaaccataccataaacagatgtgctatcatccaggctttgctgttccatttctagagcacaggcagagtagatttagcataattctgaagggctctaggattttcagaatggcaaatgagcactgatttcaat

SEQ ID NO: 929401 - DNA, 665 bp, Homo sapiens
tctgttgaggctagacgcatttggtttatgttaatataatgcttcaaattctttaatttaaaataaattttatagaatgccctttaattgattataattatctcatacaattcaaacttgtaaatttgtgtaagttctttatagattctggatattagaccttcgtcagatgcatttcccccacttctctaggttgtctatttactctgttgatagtttcttttgctgtgcagaagctctttagtttaattagcccccatttgtgaatttttgattttgttgtaattgcttttggcgtcttcatcatgaaatctttgctcgtttctgtgtccggcatggcattgcttaggtggtcttccaaagtttttatagttttgggttttacatgtaagtcattaatacatacaggattaatttttgtacayggtacaaggaaggagtccgcatatggctagccagttatcccagtatcatttattgaataagtagtcctttccctattgcttgtttttgtcaagtttgtcaaagatcagatagttgtaggtgtgcattcttatttctgggctctctattctgttccattggtctatgtgtctgtcattgtaccagtaccatgctgtttggttactgcagccccgtagtataaagttggatagcgtgatgcc

SEQ ID NO: 929402 - DNA, 763 bp, Homo sapiens
tacaaggtcaggagatcgagaccatcctaggtaacacggtgaaaccccgtctctctaaaaatacaaaaaattagccaggtgctgtggtgggtgcctgtagtcccagctactcaggaggctgaggcaggagaatggcatgaacccgagaggcagagctttcagtgagccgagattgcatcactgcactccagcctgggcaacagagcaagactccatctcaaaaaataagaataaataaataaataaaaataattagtgatatttttatacatcaacaacgagctagctgagaaaaaaatccagaagccaaycccatttacaatggctacagaaaataaataaaatatctgggaataaatttaactaaagaactgaaaggtctctacaaggagaactgcaaaacactgatgaaagaaattgtagataaacaagtggaaaaacatcccaaactcacggattagaaggctcaatgtcattaaaatgaccatattgtccaaagcactctgcagattcaaggcaatgcctatcaaaatgccaacgtcatttttcacagaattagaaaaaaaaaccattctaaaattcatatggaaccaaaaaagagcccgaataggaaaagcaatcctaagcaaaaagaacaaagcgggaggcataatattacctgacttcaaattatattacaaagctctagtaaccaaaatagcatggtactggtataaaaatagacacatagatcaatggaaaagactagagaactgagaaataa

SEQ ID NO: 929403 - DNA, 761 bp, Homo sapiens
agatcgagaccatcctaggtaacacggtgaaaccccgtctctctaaaaatacaaaaaattagccaggtgctgtggtgggtgcctgtagtcccagctactcaggaggctgaggcaggagaatggcatgaacccgagaggcagagctttcagtgagccgagattgcatcactgcactccagcctgggcaacagagcaagactccatctcaaaaaataagaataaataaataaataaaaataattagtgatatttttatacatcaacaacgagctagctgagaaaaaaatccagaagccaatcccatttacaatggctacagaaaataaataaaatatctgggaataaatttaactaaagaactgaaaggtctctacaaggagaactgcaaaacactgatgaaagaaattgtagataaacaagtggaaaaacatcccaaactcacggattagaaggctcaatgtcattaaaatgaccatattgtccaaagcactctgcagattcaaggcaatgcctatcaaaatgccaacrtcatttttcacagaattagaaaaaaaaaccattctaaaattcatatggaaccaaaaaagagcccgaataggaaaagcaatcctaagcaaaaagaacaaagcgggaggcataatattacctgacttcaaattatattacaaagctctagtaaccaaaatagcatggtactggtataaaaatagacacatagatcaatggaaaagactagagaactgagaaataaagctatatat

SEQ ID NO: 929404 - DNA, 595 bp, Homo sapiens
tttttagtagagatggggtttcaccgtgttagccaggatggtctagatctcctgaccttgtgatccgcccgcctcggaaatactttgcattgttggattgattgggtttgagcccctgttgtacttaagtgattatgaacaagtcttttataatctgaatttccctttcctagtttgtaatattgaggataataattyctaacttgcatgattgttgtgaagattaaataagacaatgatattggtaggagctctttataatctttctctcttatgtacaattcaaatatatgtcggtttaaataccaaaataccactttaaaaaatctgggctgaaatggacacttctaatgtaggagtagtgctttagaaaataatgctttgtttcgtattcttttcctagtattttatgtctagtaactcataaggaaaaaatgatcagataagtatattttttagatgctgattacagcattatttaaatagtagaaataacaactgttcagtgataagacaatgaataaattctgttcataaacattacaaatgttttttaaatatttttcatatgtgtgaaaagtaggattaaaaataa

SEQ ID NO: 929405 - DNA, 595 bp, Homo sapiens
tttttagtagagatggggtttcaccgtgttagccaggatggtctagatctcctgaccttgtgatccgcccgcctcggaaatactttgcattgttggattgattgggtttgagcccctgttgtacttaagtgattatgaacaagtcttttataatctgaatttccctttcctagtttgtaatattgaggataataatttctaacttgcatgattgttgtgaagattaaataagacaatgatattggtaggagctctttataatctttctctcttatgtacaattcaratatatgtcggtttaaataccaaaataccactttaaaaaatctgggctgaaatggacacttctaatgtaggagtagtgctttagaaaataatgctttgtttcgtattcttttcctagtattttatgtctagtaactcataaggaaaaaatgatcagataagtatattttttagatgctgattacagcattatttaaatagtagaaataacaactgttcagtgataagacaatgaataaattctgttcataaacattacaaatgttttttaaatatttttcatatgtgtgaaaagtaggattaaaaataa

SEQ ID NO: 929406 - DNA, 718 bp, Homo sapiens
aggagtggcataagcatctctggccactaccactgggactgcactaggtcagacctgaagccagcacagcactgggtcctgcccaaggcccaatgtaatcactacctaatcactacatcactactgcctatattcactcaaggccctagggttctataattagcaggtggtaaagccacccagtcttgcgtttttcccttcagggtgatgagttcccccaggccccaggcaggtccagagattctgtccagtagccagggcctggagttggaaaccttagcaatctatctggtgttctagtctactgtgactgagctggcacccaaaccacaagacaaagtcttttccattattttcttccctttccccaggcagagaagtcttctccacatccatgatcaccacaggcccatggggagtactgccaggataccactgatgtttacttaacccaagggctcctcagtcagcttgcggtgaatgctgccaggcctgggactcamccttcagggcagtgagctcccctctggcacagggtaggtccagaaatgccttctaagagtcaagtcctggaattagggaccccaaaagcctgcttattgctctctccctttgaggctgagctggtacctaagctacaagacaaagtcccctttactcttccctctgcttttttcaagcagaaggcatcccttctgatagctaccacagctttgaa

SEQ ID NO: 929407 - DNA, 714 bp, Homo sapiens
aggcccatggggagtactgccaggataccactgatgtttacttaacccaagggctcctcagtcagcttgcggtgaatgctgccaggcctgggactcacccttcagggcagtgagctcccctctggcacagggtaggtccagaaatgccttctaagagtcaagtcctggaattagggaccccaaaagcctgcttattgctctctccctttgaggctgagctggtacctaagctacaagacaaagtcccctttactcttccctctgcttttttcaagcagaaggcatcccttctgatagcwaccacagctttgaatgtgctgggtcacacctgaagcaagcgtgtctcagagtctcacccaaggtccatgatgtgtactacctcatcaccactgctgattattcatggcccaggggctctttagtcagaaggtgatgagtcctgccaggactgggtccttcccttcaaggccgtgagttcccttctggcctagggtgtgtatagaagcgtcatctgggagctagggcctggaatggaggcctcactactctgtcttgtgccctagcctactgtggctgatctggtatccaagtagtaagacacagtcctctatactcttccctttcctctcctcaagcagaatgaaggagtctattttggagctgtgagttgcattgcccaggactgagggagtggtgatgcaaacactctcttag

SEQ ID NO: 929408 - DNA, 714 bp, Homo sapiens
aggcccatggggagtactgccaggataccactgatgtttacttaacccaagggctcctcagtcagcttgcggtgaatgctgccaggcctgggactcacccttcagggcagtgagctcccctctggcacagggtaggtccagaaatgccttctaagagtcaagtcctggaattagggaccccaaaagcctgcttattgctctctccctttgaggctgagctggtacctaagctacaagacaaagtcccctttactcttccctctgcttttttcaagcagaaggcatcccttctgatagctaccacagctttgaatgtgctgggtcacacctgaagcaagcgtgtctcagagtctcacccaaggtccatgatgtgtactacctcatcaccactgctgattattcatggcccaggggctctttagtcagaaggtgatgagtcctgccaggactgggtccttcccttcaaggccgtgagttcccttctggcctagggtgtgtatagaagygtcatctgggagctagggcctggaatggaggcctcactactctgtcttgtgccctagcctactgtggctgatctggtatccaagtagtaagacacagtcctctatactcttccctttcctctcctcaagcagaatgaaggagtctattttggagctgtgagttgcattgcccaggactgagggagtggtgatgcaaacactctcttag

SEQ ID NO: 929409 - DNA, 661 bp, Homo sapiens
cctaaagattctgatcgaaactgtctaggttgcagcctaagcatggggatttttagcagctcccaggtgatgctaatgtgcggccaagctttagaagaagggatgtctttcagtcccctccttttatggacccaacttcagagaggggaggggcatgcccaggattctccatgggttattgacagggctgaccccaaatccagtgagtgctgctctctacccaaaaggcatctccattatctgttcagaaaatgcattttagggtctcctggctctttcagtagaaagttcttccttaagtcacatccttcaagcttttccttgatctgcccagagtagatttagtttgaatccagcagaaagtgcagcttcactgaggtcctcccstctgctcagttctgtcctccctttaaaatcctgtgcatagctgggggcggtggctcaagcctgtaatcccagcactttgggaggccaaggtgggtggatcatgaggtcaagagaccgagaccatcctggccaacatggtgaaaccccgtctctactaaaaatacaaaaattagctgggcgtggtggcacgtgtctgtagtcccagctactcgggaggctgaggcaggagaatcgcttgaacccaggaggcagaggttgcagtgagtcaagatcg

SEQ ID NO: 929410 - DNA, 546 bp, Homo sapiens
agtggaattcatctgagaaaggaacattttgggacccccaaattactaagctaaaggcaaaagtcaagctggaaactgctcagggcaaacctgtctcccactctattcaaagtcatccctctgctcactgagatagatgtgtatctgattgcctcctttggaaaggcttatcagaaactcagaagaatgcaacrctttgtctcccacctcccagtaacctggaagccccttccctgctttgagttgtctccacctttctggatggaaccaatgtacttcttacatatattgattgatgtttcaggtctccctaaaatgtataaaaaccaagctgtgtcctgaccaccttgggcacatgtcttcaggacttactgaggctgtgtcacgggcacgtgtcctcaaccttggcaaagtaaactttcttttttttttttttttttttttttttttgacactcgctctgtctcccaggctggagtgcagtggtgcaatctcggctcactgcaagctccgcctcctatgttcacgccattctcctgcctcagc

SEQ ID NO: 929411 - DNA, 546 bp, Homo sapiens
agtggaattcatctgagaaaggaacattttgggacccccaaattactaagctaaaggcaaaagtcaagctggaaactgctcagggcaaacctgtctcccactctattcaaagtcatccctctgctcactgagatagatgtgtatctgattgcctcctttggaaaggcttatcagaaactcagaagaatgcaacgctttgtctcccacctcccagtaacctggaagccccttccctgctttgagttgtctccacctttctggatggaaccaatgtacttcttacatatattgattgatgtttcaggtctccctaaaatgtataaaaaccaagctgtgycctgaccaccttgggcacatgtcttcaggacttactgaggctgtgtcacgggcacgtgtcctcaaccttggcaaagtaaactttcttttttttttttttttttttttttttttgacactcgctctgtctcccaggctggagtgcagtggtgcaatctcggctcactgcaagctccgcctcctatgttcacgccattctcctgcctcagc

SEQ ID NO: 929412 - DNA, 614 bp, Homo sapiens
gtgtggcatctgggtaaccattgtgtaaaccagaaccacacatccaggggcatctctgcaggaagatgtactcaatgtccggtttctgaccttggaaattatccccaaatgttaaaaaaaaaaaaatagacaagatagcactaatgactgagaagataccctgaaagtagatgcagagctgctacatgcagaggaaggaaactgatcatagctctgggatagcaaatgagcaaatgcttacagccagacactgaacttacgtgtgccaggaaactgaggcacagaaaagggaacaatcttgccctcatccctgaactaccaagtgagctgtcgggatttcctccctggggaacaagtactaagaactaagaagtctgtgtcaggcattgatatttttatgcagcacacgagatggtaactatttctgttatcatctctccttcacttttcccttctytccatatccaagaactacagatgacagttctccttttattcctacactttcacccagattttgtcatacataacagatcatactttctgaccaatcttacctgattgttttttaggcgtactttattagttgcattttgtcaaagtcttttcagaca

SEQ ID NO: 929413 - DNA, 652 bp, Homo sapiens
atccttatcctctaaggctccggtgccttccgtcttcccccacccctaccatcctcagcacatgggccgtgtctccccccatggttcccactggctgccacatttacagccacatccagaggtggaaaagtggtgaatcactattctaaaaaaagtagtgaatcactattctataaaactttttaagagtgaggaaaacttccccagaatcccaccccaacccctcagcccccagcacactgctcagcaataagtggtctatcacaggtccttggccacagcaaccagaggccaaaagaatgaaattaagggggaggagccaagatggctgaataggaacagctctggtctacagctcccagcgtgagagacgcaaagacgggtgatttctgcawttccatctgaggtaccgggttcatctcactagggagtgccagacagtgggtgcaggtcagtgggtgcgcgcaccgtgcgcgagccgaagcagggcgagcattgcctcacttgggaagcgcaaggggtcagggagttccctttccgagtcaaagaaaggggtgagggacagcacctggaaaatcgggtcactcccacccgaatactgcgcttttccgacgggcttaaaaaacgtcacaccacaagattatatccagca

SEQ ID NO: 929414 - DNA, 652 bp, Homo sapiens
atccttatcctctaaggctccggtgccttccgtcttcccccacccctaccatcctcagcacatgggccgtgtctccccccatggttcccactggctgccacatttacagccacatccagaggtggaaaagtggtgaatcactattctaaaaaaagtagtgaatcactattctataaaactttttaagagtgaggaaaacttccccagaatcccaccccaacccctcagcccccagcacactgctcagcaataagtggtctatcacaggtccttggccacagcaaccagaggccaaaagaatgaaattaagggggaggagccaagatggctgaataggaacagctctggtctacagctcccagcgtgagagacgcaaagacgggtgatttctgcaattccatctgaggtaccgggttcatctcactagggagtgmcagacagtgggtgcaggtcagtgggtgcgcgcaccgtgcgcgagccgaagcagggcgagcattgcctcacttgggaagcgcaaggggtcagggagttccctttccgagtcaaagaaaggggtgagggacagcacctggaaaatcgggtcactcccacccgaatactgcgcttttccgacgggcttaaaaaacgtcacaccacaagattatatccagca

SEQ ID NO: 929415 - DNA, 759 bp, Homo sapiens
tttagccactaaataatctggagctattctgttatttagcataactttcacaagagaatttaaagtctattgtgtaaccacagcctttacagtagaatctgctataaagcctttcatgagggatacatttctaatcattgcctcttttattccaaatcatggaaaagggacctagcaaatgatgcccttctagaagagtgaaggcctcctagcaatgttctctttaacccatgatatggattaagagaagtgaaccgatgttctgtttctgactgattacaaagcaacacatgtaccattagtttttcatctacattgggccttaatttttcatctatcaaggtatgaggttatccatgtataaggytggctgcaaaatccttcacaaataaaagtataacccatgagtgcacacaacagacccctctttcacttctgttgtccacagaagcataaccaaggagaaaaaaatatccaaagataagagtctcatgatagtagagaagtcatgatctgtgatcttggaaaaagctcttcacatcaagtatgccgtcttcttctggggagaaactttcctggttagctttacctaaagagttccagtggatgtacagttccaagagtgtggaaggacccttctcagttgtgagattatgaacacaaggttcaaggtcccgaagttttgctgcagtgtggatggcaagggcaggctttctctgatgttcccagaagatccaatcttcaggttctagatcatga

SEQ ID NO: 929416 - DNA, 498 bp, Homo sapiens
ggcaggaggatagcttgagcccaggagtgcgaggttgtagtgagccatgatttcgccactgcactccagcctgggtgacagagcgagacgctatctcaaacattttttaaaaaggcacaagcaactcacagcggtacccaacacatggaatgtgctcaataaatgtatgctaatatactattagtgttgctatttttgtggacgaggtagagagataggcatgactatagacatttctaggtgatatcatcctaacttagagaccccaaaggaaaaaggggaacatttatatcccagtatctatataaacaatttccaggagggactgattagctatgtgttatagagttcaccacaagccaggcactacrgtaggtgcttcctatgcatcatctcagtgaatttttaccacagttctatgatgtaagtactttttttttttttttccatgagacagagtttctctctgttgccccggccagagtgcagtggcaggat

SEQ ID NO: 929417 - DNA, 722 bp, Homo sapiens
atcatctcagtgaatttttaccacagttctatgatgtaagtactttttttttttttttccatgagacagagtttctctctgttgccccggccagagtgcagtggcaggatcttggctgactgcaacctttgccttccaggttcaagcaattctcctgtcttagcctcccgagtagctgggactacaggcgcacgccaccacgcccagctaatttttgtatttttagcagagaccaggcttcaccatattggccaggctggtctggaactcctgacctcaggtgatccacccaccttggcctcccgaaatgctgagattacaggcgtgacgactgcacccatacgtaagtatcatttagwtcctcactttacaggaaaaccaaggcttagacaagtttattattgataaaaccaaggcttagagaagtatattactgataattcaggggttgtaaaactctcttctgtaaagaaccaggtattaaatattttaggatctgcaggctagatggtttctgtcacaactactcaaccctgtcactgtagaactgaaagcagtaatagacaatatgcaaacaaatgaacatggttgcgttcccaccaaacttattttatgggcactgaattttgaatttcatataattttcatgtgtcataaaatattatttttcttttttttttttcattcacttaagaatataaaagctattcttagcttaagaa

SEQ ID NO: 929418 - DNA, 490 bp, Homo sapiens
atggtgcctcaggcctataatcccagcgctttgggaggccaaggggggcagatcacaaggtcaggagatcgagaccatcctggctaacccagtgaaaccccatctctactaaaaatataaaaaattagccaggcatggtggcaagcgcctgtagtcccagctactcgggaggctgaggcaggagaatggcataaacccrggaggtggagcttgcagtgagccaagatggtgccactgcactccagcctgggcaacagagagagagactctgtcttaaaaaaaaaaaaaaaaaaaaagaaacatcaaagtcaaacttctgaaaactagagattggattaagttaagtttgtacttaatccaaggagattaagatccaagaaaaaatactgaaaacagctagataaaaacaacagtttacttacgagagaaaagcaattcaaatgacagcagatttctcatcagaaaccatggaggccagaaggaagtggcc

SEQ ID NO: 929419 - DNA, 596 bp, Homo sapiens
ggtgcctcaggcctataatcccagcgctttgggaggccaaggggggcagatcacaaggtcaggagatcgagaccatcctggctaacccagtgaaaccccatctctactaaaaatataaaaaattagccaggcatggtggcaagcgcctgtagtcccagctactcgggaggctgaggcaggagaatggcataaacccaggaggtggagcttgcagtgagccaagatggtgccactgcactcyagcctgggcaacagagagagagactctgtcttaaaaaaaaaaaaaaaaaaaaagaaacatcaaagtcaaacttctgaaaactagagattggattaagttaagtttgtacttaatccaaggagattaagatccaagaaaaaatactgaaaacagctagataaaaacaacagtttacttacgagagaaaagcaattcaaatgacagcagatttctcatcagaaaccatggaggccagaaggaagtggccttttttcacatgctgaaagaaaagaactgtcaactcaaattcctatattgagtgaaataatcctttaagaatgaaaagaagatcaagacattctcacatgaaggaaaa

SEQ ID NO: 929420 - DNA, 490 bp, Homo sapiens
atggtgcctcaggcctataatcccagcgctttgggaggccaaggggggcagatcacaaggtcaggagatcgagaccatcctggctaacccagtgaaaccccatctctactaaaaatataaaaaattagccaggcatggtggcaagcgcctgtagtcccagctactcgggaggctgaggcaggagaatggcataaacccaggaggtggagcttgcagtgagccaagatggtgccactgcactccagcctgggcaacagagagagagactctgtcttaaaaaaaaaaaaaaaaaaaaagaaacatcaaagtcraacttctgaaaactagagattggattaagttaagtttgtacttaatccaaggagattaagatccaagaaaaaatactgaaaacagctagataaaaacaacagtttacttacgagagaaaagcaattcaaatgacagcagatttctcatcagaaaccatggaggccagaaggaagtggcc

SEQ ID NO: 929421 - DNA, 590 bp, Homo sapiens
tagaagcgcaaatctcagcatcacaaaaaatatccttttaacaaacctgcacatgtagcccctgaatctaaagtaaaaactccacataaattaaaaataaaaacaaaaaagtaggtaaaagatctgaagagacacctcaacagagaagatatatagatggcaaataaggattaaataaaattctcaccatcttatgatatgaggattacaaattaaaaacaacaaaagtttacctttacatacatattagaatagctaaaatccaaaacactgacagaacaaaaagctggtgaagatgtggagcttcaggagcacttattcattgccagtgggaatgtaaaatgctacagccacttyggaagacttgtggcaatttctttaaaaaataaacgtaattttaccgtatgatctagaatctatgcccaagtgagttgaaaacatatattcatagaaaaacttgcacacaaatacttgcagcaatttatttatatataattgccaattatcagtgaccaagatgtccatcaacatgtgattaaactgtgatacattcaaataataaaacattatttaataacaagaaataaact

SEQ ID NO: 929422 - DNA, 738 bp, Homo sapiens
gactgagtgataaatttatcatttaagattagttggccttcgttagagttaggtgacagaggtatgcttcctcaactcctctctttgtctctccagaaaggcggtaggattttcttcctttccctgtgttatagtggtttcttcctagttttccttagtccttctaacactcaagttagcaaacgtctgcggcaccaatctccatattctgattctgcgtcccactacactgggaactgcctgctggcctgtggggagttgttctctttcctctgttgtcatcttatcattgacctgactgagataccagagattgccaaaatctcaggctgcagttatggcggcacttgaggttaactctctcatttgaggttagtgtctgatgtagcagtaacattatatctatgtcaaatcaaaggwttgtcctaacccttgtaaaacatcaactagagccatcagggttatctgagaatttacctaggtctattttgtttcaggtctgagagggagaaaggttcatacactctgactgggccgaattctccagaatacatattaggggagtttttgccttggggggaacgtttcccatctgaaaaaaagaacacagggatgccagcacccctagtcattttccgaagccgatgagcattagtcctagagcgtcctctatgatcctaatgcttattctcttccagggtgcgtaaccacccatagacctctgcttatcggattagt

SEQ ID NO: 929423 - DNA, 656 bp, Homo sapiens
gcacaacttccatagcagcctactaatctgctgttcacatagacttgagaagtagatcaaaacagtgggggggaggggggaaggaaaacatacattccctggctgtagagggagagccaattttgtggcattatgaatttgagttaccaaactgtaatgacatactttcctgtataagacaattagtataaatggaaaatgaaatgaaaattatcactttgtaattgtgaatgaaatcagttatttgctcattttaaagtagaatttaaattatacctacataagtattgttttgattttcaagcatgcaataaatcagaccagacaggaaaactacaaagaacctcccactgcaacacacacatgccttgtatttaggattagcatggcaaatcctattaaaatgtatttaaaattctttttttwaaaaaatggcattagcatctgaaggttgactgacttctaaaaattatactcccccatctctactaaaaatacaaaaatatgctggaaatggtggcaggcgcctgtagtcccagctactagggaggctgaggcaggagaatggagtgaacccatgaggcggaggttccagtgagctgagatcgtgccactgcactccagcctgggcgacagagcaagactccgtctcaaaa

SEQ ID NO: 929424 - DNA, 543 bp, Homo sapiens
gtgaacccagaaccgctggactgcagtggaatgagacaccctgtagcctgcagggagaggagtcaggaaggttcatgccagttccaccctcccacacaccagctctcctaccatgctgggaggcattccttaccgaggatgccaacacagtgctccttcatgatgatttcactgtggaaataaaggttgggatgaaaggaaatcatcctgccaccggtaaccgggatggctgtgttcctccacctgccggatcaaggagaaagaggatggattcaatgggaccatctcaactagctgggctgaggtggcctacttgctgtagtgagccatgagtttccctttcccagctctgccactgagacraccctggtcccagggggacctcaaactgactcagacactggactcctcccacagacccaggctccccagcctgacctgcaaatccatcacgtagcaaagcaggacttccgcatgctttctgacccacgccgacatctcgtgtgccaaacaatctacctctgcgcaagaactctccagagg

SEQ ID NO: 929425 - DNA, 549 bp, Homo sapiens
ttttggcaaaagcactaagaacgcacattggggaaaagacagtcctttcaactaaaggtgttcggaaaactggatatccacgtatagaagaatgagactacacccctatttctcaccatatacaaatatcaagtcaaaatggattaaagacttaaatgtaaaaccagaaactataaaactgctagacgaaagtatagggaaaatgctccatgatattgtctggacaagagtttttagacaagaactcaaaagcaaaaaaagatagatgggatttcattaaactaaaaagcttctgcatagtgaagaaaacaatcaataaagtaaagacaaaaacycacagaatggaagaaaatatttgcaaactacacatctgattaatagcacaaggattaatatgcagaatatgtaaggaactcgaataactcaaggaaaaggcaaacaatctgatttttaaaatgagcaaaagatctaaatagacatctctcaaaataagccatacaaacggccgatagatacataaaaagatggttaacattgggaagccaaagt

SEQ ID NO: 929426 - DNA, 609 bp, Homo sapiens
gggcttggggatcacactgcccctgcctgccacagccagaacctgtacgcactactaggggacttgaggactggccttcttagtctagctccaccccctccccaagtacccaagcatgatactagaaaactaacaaagaaacattagatgttcctaccactgatgccagcaaatackgccctggggcccaaggacaggtaggctcagtctgctgctgccaccactgggctcaaggactggcctacctaatgtcctcatccctggcaaaacttcatcacagcctctgctaacaactgcatcctaagcaaccaaagaaatcataaatgctactgacactgcatatagccaaagaaatcatatggagactacaatactgcatacacccagaatcaaagccaaagttccttgtccaatcaacaccatagaaacaccttcaagaaaaattccttctctatgaaagcaaatgttaaaaattggaagaggtgatggttacaccagatgtgcaggtgtcagtgtaaggatataaaaaatttgaaaaagcaaggaaaaatgacacctccaaaggaatacagtcattatcaagcaacagatgccaatgaacaaaaaatt

SEQ ID NO: 929427 - DNA, 484 bp, Homo sapiens
gacttcctgggtcgagtggggacttggagaacttttctgtctagctagaggattggaaacgcaccaatcagtgctctgtgtctagctaaaggattgtaaatgcaccaatcagcactctgtaaaaacgcaccaaatcagtgctctgtgtctagctaaaggattgtaaacacatcaatcagcactctgtaaaatggaccaatcagcactctgtaaaatggaccaatcaaygctctgtaaaatggatcaatcagcaggacatgggaggggacaaataagggaagaaaagcttgccaccccagccagcagcagcaacccacttgggtccccttccacgctgtgaaagttttgttcttttgctcttcacagtaaatcttgctgttgctcactctttgggtccacaccacctttaagagctgtgacactcatcacgaacgtccacggcttcattcttgaagtcagcgagaccacaaacccaccaaaagga

SEQ ID NO: 929428 - DNA, 472 bp, Homo sapiens
gaggttgctggaggtccactccagaccctatttgcctgggtatcaccaacagaggctgcagaacagcacatgttgctgcttgatccttcccctggaagcttcatccctgaagggcacctgcctgtatgagctgtcagtcagcccctactgartggtgtctcagagttaggctacacgggggtcagggaccacttgaggaggcagtctgtccattctcagagctcaaacaccatgccgggagaaccactgctctcttcagagctgtcagacagggacgtttaagtctgcagaagtttctgctgccttttgttcagctatgccctgcccccagaggtggagtctacaaaggcaggtgggcctagttgagctgtgcgtgggctctgcccaattcgagctttcccagccgctttgtttacctactcaagcctcagcaatggtggacacccctccccctgccaggctgctgccctgc

SEQ ID NO: 929429 - DNA, 472 bp, Homo sapiens
gaggttgctggaggtccactccagaccctatttgcctgggtatcaccaacagaggctgcagaacagcacatgttgctgcttgatccttcccctggaagcttcatccctgaagggcacctgcctgtatgagctgtcagtcagcccctactgaawggtgtctcagagttaggctacacgggggtcagggaccacttgaggaggcagtctgtccattctcagagctcaaacaccatgccgggagaaccactgctctcttcagagctgtcagacagggacgtttaagtctgcagaagtttctgctgccttttgttcagctatgccctgcccccagaggtggagtctacaaaggcaggtgggcctagttgagctgtgcgtgggctctgcccaattcgagctttcccagccgctttgtttacctactcaagcctcagcaatggtggacacccctccccctgccaggctgctgccctgc

SEQ ID NO: 929430 - DNA, 469 bp, Homo sapiens
ctcctaagttcatcagcattgaagtagaaaacagaagtggcagaaatgcaagttaaaaatgcaacgagatctcacccattagaatgagatctcctaacggagatccaccccatcaggatggatatattaaaaaattgcggccgggcgyggtggctcacgcctgtaatcccagcactttgggaggccgaggtgggtggatcacaaggtcaggagatcaagaccatcctggctaacacggtgaaaccccgtctctactaaaaatacaaaaaattagccaggcgtggcggcgtgcgcctatagtcccagctactcgggaggctgaggcaggagaatggcgtgaacccgggaggcggagcttgcagtgagctgagatcgcgccactgcactccagcctgggtgacagaccaagactctgtttcaaaaaaaaaaaaaaaaattgcaaaaggacaataacaaatgttggcaagga

SEQ ID NO: 929431 - DNA, 576 bp, Homo sapiens
aacaaactgatacaaatggataaacagaatgtggtctatccatacaacagaatattattcagccttaaaaaagaatgaagttctgatgcatgccacaatatggatgagcctcaaaacatgctaagtgtaagaagtcgggcacaaagatcatgtattgtataactcaatttatacaaaatgcccagaacaggcaaatcaatagagacagaacccagaccgggggctgccagggggtgggggygggggaatgaggatgactgcttaataggtagagtatttttggagtatgaaaatgaaagtgttctggaactagataaggtgatggttgtacaacattgcaaatgtactaaatatcactgaattgtatatgttaagatggttagttttttgttatatgaatcttgcctccattttttaaacagtatgagaggaacagtttcttggtttagtaaatatctatcgcataatttgagggatctacatcacagagcagacctcagaacccaaggcaggtttttcattcagatgcaacattctcccaattccttagctgtcaaaagggttgggggagcttca

SEQ ID NO: 929432 - DNA, 759 bp, Homo sapiens
ggcatacttctgctaacctttcacctcttggctcaggtgctgtccactctgtcaccttccctacaaccaccttttcactaccctgatacatcatcttcattttaagattatagtcatgcgtcgctcaagattctgaaaaatgcatctttaggtgattttgctacacccctgggctatgtggcatagcctattcctcctaggctctaagcctgtacagcatgtgactgtactgaatactgtaggtgattgcaacacgatggaaggtatttgtggatctaaatagatctaaacatagaaaaggtacagtaaaaatactgtataaaagatataaaatgggctgggtgcgatggctcaygcctgtaatcctagcagtttgggagtctgaggcaggcagatcacttgacgtcaggagttcgagaccagcctggccaacatggcaaaaccccatctctactaaaaatataaaaattagccaggtgtggtggcacacgcctgtaatcccagctatgcaggaggctgaggcaggagagtcgcttgaacctgggaggtggaggttgcagtgagccgagatcacgccactgcactccagcctgggcaacagagtgagactgtgtttcaaaaaatataagagtaaaaatggtacgcccataaagaacacttaccgtgagtggagcttgcaggactggaagttgttgcggatgagtcactgagtgagtggtgagtgaactcgtgaaggcctagcacattactgtgtactac

SEQ ID NO: 929433 - DNA, 614 bp, Homo sapiens
aggacatgatttcattctttttttatagctgcatagtattccatggtgtatatgcaccacattttctttatccagtccactgttcatggcacctaggttgattccatgtctctgctattgtgaatagttcttcaatgaacatgcaagtgcatatgtctttttggtaaaatgatttgttttcttttgcatatatacccagtaatgaatgggattactagatcgaatggtagttctgttttaagttcttttagaaayctccagactgtttttcacagtggttgaactaatttacattccctccaacagtgtataagcattcccttttctctgcagcctcaccagcatctgttgttttttttttacctcttttttttttgtttgttttttgtttttgtttgttgcaacagagtcttgctctgtcgcccaggctggagttcagtggcacaatcttggctcactgcaacctccgcctcccaggttcaagcaattctcctgtctcagcctcccgactagctgggactacaggcacccgccaccgcacccagctaatttttgtatttgtagtagagacagggtttctccatattggtcaggctggtctcgatctcctaacg

SEQ ID NO: 929434 - DNA, 614 bp, Homo sapiens
aggacatgatttcattctttttttatagctgcatagtattccatggtgtatatgcaccacattttctttatccagtccactgttcatggcacctaggttgattccatgtctctgctattgtgaatagttcttcaatgaacatgcaagtgcatatgtctttttggtaaaatgatttgttttcttttgcatatatacccagtaatgaatgggattactagatcgaatggtagttctgttttaagttcttttagaaatctccagactgtttttcacagtggttgaactaatttacattccctccaacagtgtataagcattcccttttctctgcagcctcaccagcatctrttgttttttttttacctcttttttttttgtttgttttttgtttttgtttgttgcaacagagtcttgctctgtcgcccaggctggagttcagtggcacaatcttggctcactgcaacctccgcctcccaggttcaagcaattctcctgtctcagcctcccgactagctgggactacaggcacccgccaccgcacccagctaatttttgtatttgtagtagagacagggtttctccatattggtcaggctggtctcgatctcctaacg

SEQ ID NO: 929435 - DNA, 614 bp, Homo sapiens
aggacatgatttcattctttttttatagctgcatagtattccatggtgtatatgcaccacattttctttatccagtccactgttcatggcacctaggttgattccatgtctctgctattgtgaatagttcttcaatgaacatgcaagtgcatatgtctttttggtaaaatgatttgttttcttttgcatatatacccagtaatgaatgggattactagatcgaatggtagttctgttttaagttcttttagaaatctccagactgtttttcacagtggttgaactaatttacattccctccaacagtgtataagcattcccttttctctgcagcctcaccagcatctgttgttttttttttacctcttttttttttgtttgttttttgtttttgtttgttgcaacagagtctygctctgtcgcccaggctggagttcagtggcacaatcttggctcactgcaacctccgcctcccaggttcaagcaattctcctgtctcagcctcccgactagctgggactacaggcacccgccaccgcacccagctaatttttgtatttgtagtagagacagggtttctccatattggtcaggctggtctcgatctcctaacg

SEQ ID NO: 929436 - DNA, 614 bp, Homo sapiens
aggacatgatttcattctttttttatagctgcatagtattccatggtgtatatgcaccacattttctttatccagtccactgttcatggcacctaggttgattccatgtctctgctattgtgaatagttcttcaatgaacatgcaagtgcatatgtctttttggtaaaatgatttgttttcttttgcatatatacccagtaatgaatgggattactagatcgaatggtagttctgttttaagttcttttagaaatctccagactgtttttcacagtggttgaactaatttacattccctccaacagtgtataagcattcccttttctctgcagcctcaccagcatctgttgttttttttttacctcttttttttttgtttgttttttgtttttgtttgttgcaacagagtcttgctctgtcrcccaggctggagttcagtggcacaatcttggctcactgcaacctccgcctcccaggttcaagcaattctcctgtctcagcctcccgactagctgggactacaggcacccgccaccgcacccagctaatttttgtatttgtagtagagacagggtttctccatattggtcaggctggtctcgatctcctaacg

SEQ ID NO: 929437 - DNA, 589 bp, Homo sapiens
ctctctgattgtacacccacatttcaagggtgtcagaccacgcagggacgcctgccttggtccttcacccttagcagcaagtcccacttttctggggaaggggcaagtaccccaaccccttctctccttatctctaccccttctccacttttctgggagaggggcaagtacccctcaacgccttctccttcacccttagtggcaagtcccgcttkcctggggcaggggaaagtacccctcaacctcttctccttcacccttagtgtcaagtcccactttcctagggggcaagaaccccccaatcgcttatttctgcaccccaacctctgatctctgtgccccaatcccttatttccatgccccaaccccttctctgcttttctggagggctagaaccccccaccccttctccatgtctctactcttttctctgggcttgcctccttcactatgggtaagcttccaccttccattcctccttcttctcccttagcctgtcttctcaaaaacttaaaacctcttcaactcacacctgacctaaaacctaaatgacttattttcttctgcaatgctgcttgaccccaataca

SEQ ID NO: 929438 - DNA, 641 bp, Homo sapiens
ggaaggccaggcgcagtgggtcatgcctataatcccagcactttgggaggccaaggtgcttggatcacctgaggtcaggagttccaaaccagcctggccaacagggtgaatccggttctctaataaaaatacaaaaattagccaggtgtggtgcgaatgcctgtaatcgcagctactcaggaggctgaagcatgagaattgcttgaacctgggaggtggaggttgcaatgaggggaggttgcagtgagcggaggttgcagtgagctgagattgtgtcactgcactgcctgggtgacagagcaagactccatctcaaaataataaataaataaataaataaataaatraataaataaagtcggccctcagtatctgtgtggcggggggactggttccaagacccacctccccagtgctcaagtccttgatataaaatggcatagtttttgcatataacctatatacatcctcttgtatacttcagacttgtggagttttttttttaatggagaactgggtctcactatgttgcccaggctggtcttgaagtcctgggctcgggtgatccgctcccccttgcctccctaagtgctgggattacaggtgtgatccacggcacccagccaaggggcaactacatt

SEQ ID NO: 929439 - DNA, 641 bp, Homo sapiens
ggaaggccaggcgcagtgggtcatgcctataatcccagcactttgggaggccaaggtgcttggatcacctgaggtcaggagttccaaaccagcctggccaacagggtgaatccggttctctaataaaaatacaaaaattagccaggtgtggtgcgaatgcctgtaatcgcagctactcaggaggctgaagcatgagaattgcttgaacctgggaggtggaggttgcaatgaggggaggttgcagtgagcggaggttgcagtgagctgagattgtgtcactgcactgcctgggtgacagagcaagactccatctcaaaataataaataaataaataaataaataaatgaataaataaagtcggccctcagtatctgtgtggcggggggactggttccaagacccacctccccagtgctcaagtccttgatataaaatggcatagyttttgcatataacctatatacatcctcttgtatacttcagacttgtggagttttttttttaatggagaactgggtctcactatgttgcccaggctggtcttgaagtcctgggctcgggtgatccgctcccccttgcctccctaagtgctgggattacaggtgtgatccacggcacccagccaaggggcaactacatt

SEQ ID NO: 929440 - DNA, 615 bp, Homo sapiens
acatggtagcatgtatccatacttcattcctttttatggctgaataatattccatcattatctatctctctatctgtctatctatctatctatctatcatctatctgtctatccatcccacattttgtttattcattcatcaggtgatagacattcgtgttgtttcctccttttggctattgtgaatagtgctgttacactgtgatacaacttctgtttgaacacctgttttcaattcttttgcatatagacctaggactggaattaatgggtcatatggaaattttacatttactgggaagctgcttatccttgctttctccaagcctcaacaacatgctgggtctatttaactgctttcacgctgagagagcccaaggttcttagaagggagygatttcatcttgtcgtctcctgatggcaatccctaaaggatgttcctagtttttaatactgccctcttgctgtttagagctttcctttgtctaagctatttcagacatattatttaatttattcctcacagaaatactgtaaggaggaaacgattacgtctgctttttgatgtggaggctgacagattcagaggatgaagtgatgcggcaaggtcacaca

SEQ ID NO: 929441 - DNA, 615 bp, Homo sapiens
atttttttttagttcccccacttttacttagggtgtaatcttttaagggttccaatgtgggcccaaagcctctaatcctgtttctgtgtgaacattaagacacaattcactggaatatatcagccaccactacctgggtagtcttagcatgggcttaaatgcctgttcttcagattattagatagctcagctattcatttatgaggacatttactgtgtgtgtgtgtgtgtgtgtgtgtgtgtgtgtgtgttttcagacctgcaaatctaggtgtttttagcaggagggttttctggttattcaaatctgccagaactaagatttctatcagagtgttttactgacagtcaaattaggtgtgttgacctttattcccagttcttacctaaaggagcattttatgtaattttaaattcctgaaactatagtgatgttttggagatgaatakttattgaaaccccagaggaaactatgacacagagtattctaagacaactgcccaggcaactgtaatgataaattataaccctaaaacttttgcctaatgatgatttatcctaatatttcataaacaagccttattttaataattaatggggaaaagtataattta

SEQ ID NO: 929442 - DNA, 614 bp, Homo sapiens
ttatgtaaacttcaggccctacagaatctggaactttcccgagtaacgtgcttagaaaagtcacgtcaccctaggccgggcacggtgactcacgcctgtaatcccagcactttgggaggctgaggcgggcagatcacctgaggtcaggagttcaagaccagcctgaccaacatggcaaaaccctgtctctactaaaaaatacaaaaattggccgggcgttgtggcaggcgcctgtaatcccagctactcgggaggctgaggcagggagaattgcttgaacccgggaggtggaggttgcagtgagccgagatcatgccaytgcactccagcctagaagaaagagggagactctaaaaaaaaaaaaaaaaaaaaaaaaaaaaaaaagaagcaaagcaaagaaaagaaaagtcacctcaccccaaattatgaaaaattttaataggcttagctttatatcttttcttttggcttattttctaattttttagtactaaagtagattactaattttcttcaaagaatttttctcagaacaaaatagagctccactgctcattcattcactcattttatttactggttcgtccaagctcttccctcacctttctgtacct

SEQ ID NO: 929443 - DNA, 631 bp, Homo sapiens
aataaacttccagttaagaggaaccattcttggattttctgggttagagcatgtctcccttagataaagagttctacataggcaaagctcaaagttgtgaaaatagaaagcaaaacattttgagtgcatcagtgggtatcrtagtgggaagtgtttatctcaagcctgggtttcccagcagatatagataagggaaaaaccgcgctttatgttggttgctggttcacagcacattgctgtagcacaggagttggcatgcttttttctgtaaaggaccagataataaatattccaagctttaaagaccacacatgattgatatctgtcatgtattcttttttgttgttactgttacaacccttaaaaagtgtaaaaaaaaaattcttaaaatctgtccaaaaataggatttagggcatatttgccctcagactataatttgctaatctctgctatagggcgacatcctaactttgcaaagcattccttccctgctgggaaacaaaagacacatacacacaaatgttcattgcagcactgttcacaatagcaaagacatggaatcaacttaaatgcccatcaatgacagactgggtaaagaaaatgtggtacatatacaccatggaatactaa

SEQ ID NO: 929444 - DNA, 616 bp, Homo sapiens
ttctttatgggaatggtaggggaaaggctgaatatactcatcctgaatactgtgaaataggggatacctctctacttatgatcctcccccacttttttaaaaatatgctggccactatctggtgtggaaaattggcctgtgcttgtctttagaacatgctccaaagcatgcctctgactttgccggaaaggcgttctcctgtctgttgatatctttttctacattctccatttgcgtaaatctgatgsaatcttttagactagctcaattgccttccttcatgaagtcctgctcgggttggactgcatcaattgctgatctcagagttctagtttgctagatgtctttaaaaatatttattaccaacatggcacatgtatgcatatgtaacaaacctgcacgttgtgcacatgtaccctagaacttaaagtataataataaaaaatataatatttattatacaattaatacatatacaaatttgaaactaacagacataagtgtaaagcataaaacaatcacttgcaatttcactagccagaagaaagtgcgctcacatttttcaagcatgaatgtgtgtatgtgtaaagaaatacttgtatgtatgtgtgtatat

SEQ ID NO: 929445 - DNA, 675 bp, Homo sapiens
ttcctccatgcacgccccattctgggaaatgcagggtcccctgagaagacccagccttggccccaaaatagtccctggttggggagatacagatatcctcagcctatggggtcagggcctgaccagagggggacttggggctgcccaggggtacaggcagagaggacttcctggaggagagggcatcagagctagggttttgagggatgcataggagctaggcaggagaaaggatgttaccttctgatggccagcaggcagcctgggccttgaggggtggtgctgggttcctggccacagcactgacggtgaactcatggctytgatccccaccactctctaccagtcaagctcatcctcccgggaacgtctccaccagcttcccttccagccgacgccggacgagctgcacttcctgtccaagcacttccgcagctcagagaatgtgcttgatgaggaaggcggccggtcaccccgcctccgaccccgctctcgcagtctcaggtgggccgcgacctctggccccagccccggcccctccctgggctggtgtggaggcccaagttgtggctcctccttcaccccagccctgaccctgcctgagcctagcctctgattcttgtccctcaaccctggctcagatcccccaacatcctcccctggggttggtctcag

SEQ ID NO: 929446 - DNA, 621 bp, Homo sapiens
caatcacaacggctggttattaagcacttatggcatacccagcccattccatccactcacatgattccctaccaaatccctacaaccaccccctgaaaggaaccatgactgttgtactttacagatgtgatcgttgaggctcagagagggtgagtgactcgcccgaggctacgtagcacacacaggagtcacatttggacccaaataacccagagctcctccaggctccagtgcacctgcctcctytctgccccgtgcctgttgccacccatcctgcggggggaaccctagatgctgccatgaaatggaagctgctgcaccctgctgggcctggcatccgtggggcaggagcagaccctgccatttacctgttctggcgtagaatggactgggaatgggggcaaggggggctcagatggatccctggaccctgggctgggcatccacccccaggagcactggatggggagtctggactcaagggctccctgcagcattgcggggtcttgtagcttggaggatccaggcatatagggaagggggctgtaaacattgtgggaaaaatgacggtcctcccatcccaccccccaccccaccctcacccccctataaaatgggggt

SEQ ID NO: 929447 - DNA, 621 bp, Homo sapiens
caatcacaacggctggttattaagcacttatggcatacccagcccattccatccactcacatgattccctaccaaatccctacaaccaccccctgaaaggaaccatgactgttgtactttacagatgtgatcgttgaggctcagagagggtgagtgactcgcccgaggctacgtagcacacacaggagtcacatttggacccaaataacccagagctcctccaggctccagtgcacctgcctcctctytgccccgtgcctgttgccacccatcctgcggggggaaccctagatgctgccatgaaatggaagctgctgcaccctgctgggcctggcatccgtggggcaggagcagaccctgccatttacctgttctggcgtagaatggactgggaatgggggcaaggggggctcagatggatccctggaccctgggctgggcatccacccccaggagcactggatggggagtctggactcaagggctccctgcagcattgcggggtcttgtagcttggaggatccaggcatatagggaagggggctgtaaacattgtgggaaaaatgacggtcctcccatcccaccccccaccccaccctcacccccctataaaatgggggt

SEQ ID NO: 929448 - DNA, 607 bp, Homo sapiens
acgagttctgaggtggattggaagggcattattcctatagaatgtggacctatctaagttttttgatgggctatttcttggtaacttacagtcaatgcaagatcatttcctaaaacgtgaatcgtccttccttcccaataggcttgtatgggagatactggcaccgagcaagtttatggggaactgggtgagtgccctcaccagaaactcaccaggtcacaactatcctaaaaaggtcccagcagaaacgaggccgaggactcccacattggagcaaaatggccgctaggattttcccaaagaccacaaatactttgtrttccatcatcatttttacacagcacatatttttaaaagaccacattttacctagagcaatatttaccaccctttctgcattactgcatgcactgaaaataatcgcatttatacagcacactgcagtcaagggataggattcctttttttttttgagatgaagtttcacgctatcgcccaggctggagtgcagtggcacgatctcagctcactgcaacctctgcctcccgggtttaagcaattctcctgcctcagcctctccagtagctgggactacaggcgtctgcca

SEQ ID NO: 929449 - DNA, 466 bp, Homo sapiens
cccaccatcacacctggttaatttttgtatttttagtagggtttcaccatgttggccaggctggtctccaactcttgaccacaagtgatccacccacctcagcctcccaaagtgctgggattacaggcatgagccaccgtgccaggacgaatttatgtttttatataattaatayatttgtggggtatgacatgatgttttgattcatgtatgcattgtatagtgatcaaatcagagcagttaacatatctgtcaccttaaacatctatcatttcttttttcttttttttttttttgagacaggggactcactctgtcacccaggctggagtgcagtggcgcaatctcggctcgctgcaacgtctacctactgggttcaagcaattctcccactttggcctcctgagtagctgggattacaggcatgagccaatgcacccagctaatttttttgtatttttagtag

SEQ ID NO: 929450 - DNA, 650 bp, Homo sapiens
gttagaaggaaaactaacaaacggaaaggaatagcatcagcatcaacaaaaaggacatccacaccaaaaccccatctgtaggtcaccatcatcaaagaccaaaggtagataaaaccacaaagatggggagaaaccagagcagaaaagctgaacattctaaaaatcagagcacctcttctcttccaaaggatcgcagctccttgccagcaaaggaacaaagctggatggagaatgactttgacgagctgacaggagtaggcttcagaagtttggtaataacaaacttctccgagctaaaggaggatgtttgaacccatcgcaaggaagctaaaaaccttgaaaaaagattagacgaatggctaactagaataaacagtgtaaagaagaccttaaatgaactgatggagctgaaaaccatggcaygagaactacgtgatgcatgcacaagcttcaatagctgatttcatcaagtggaagaaagggtatcagtgattgaagatcaaattaatgaaataaagcaagaagagaagtttagagaaaaaggagtaaaaagaaacaaacaaagcctccaagaaatatggcactatgtgaaaagaccaaatctacgtttgattggtgtacccgaaagtgatggggagaatagaaccaac

SEQ ID NO: 929451 - DNA, 615 bp, Homo sapiens
tctctcggcagaaactctacaagccagaagacagtgggggccaatatacaacattcttaaagaaaagaattttcagcccagaatgtcatatccagccaagtaagcttcataagtgaaagagaaataaaatcctttacagacaagcaaatgctgagagactttgtcaycaccaggcctgccttacaagagctcctaaaggaagcactaaacatggaaaggaacaaacggtaccagccactgcaaaaacatgccaaattgtaaagaccatcgatgctaggaagaaactgcatcaattaacgggcaaaataaccaactaacatcataatgacaggatcaaattcacacataacaatattaaccttaaatgtcaatggcctgaatgtcccaattaaaagacacagactggcaaattggataaagagtcaagacccatcagtgtaccatattcaggagacccatctcacgtgctgagacacacataggttcaaaataaagggatggagaaagacctaccaagcaaatggaaagcaaaaaaaagcaggggttgcaatcctactctccgagaaaacaggctttaaaccaacaaagatcaaaagagacaaagaaggccattac

SEQ ID NO: 929452 - DNA, 653 bp, Homo sapiens
  misc_feature 521, 650, 651, 652, 653: n = A,T,C or G
atttgaaacctctctgggacaaaactcccagagagagaggcaggccaccatctttgctgtttgggtgatttagccatttcattcttcaggctttggagagtccaagccaactgaggggagacatgataccctagcacagcacacctgctctatgaaaacatagtcagactactattactttttgaagaaggccctcaatcccattccttttcactggaaaggacctcccaactgaggtttacagccacctcctataggtgcattcgagccaacaataggttcatgcctccctgggatagagatcccaaaggsagagacagactaccatatttgctgttttgaagccttcactgttgatatctccaggtattggaaaatctgaggtgactaaagactgcagtgggcccccagaatacttcagaagccctacgaaaaagtggtcagactgctacatgggtgattgttcccacatctccttattgggcaggtcctccaggccaccagcctccccctgcagagcntatgagccagtagcagctctgcaagttactgggcagaacccaggaacaactgaaagcctctctgccactttctctgtagtggaactgcccttgcacccttgaactaatgaagaaggaaataccctaaannnn

SEQ ID NO: 929453 - DNA, 616 bp, Homo sapiens
cagagaaaaagagaattttaccagcagattacacctggaccaaaactgcatctcttttctgcgtttccagcctgctggcctcccaggcgtaatttggacctgccagtagccataattgcatgagtcaattctttaaagtaaatctccctgtttctcttgagaattgtgactaatacaccataaaaggacattattaagaaagtgagagataacccatagaatgggaaaatatttgcaaattatatatctgataagagtttgatatccagatcataaaagtactcctacaacttaacaaacatcaacaacaaaaataaaaaccctaattttaaaaatggtccaagtacttgaataagtgtttctctaaagaaggtatacaaacagccaayaagaaattgtaaagatctgtttcattaactattagggaaatgcatatctcatatccatttgacataaaggacaaatattctatgattccatttatatgaaatgtgtaaaataggcaaattcatagattcgtttagatgtcgatctaatccaaactaatctaacctaggaagtatattagagattaggggggttaaaaaaagaagggaatgcagatttattgctttgt

SEQ ID NO: 929454 - DNA, 592 bp, Homo sapiens
tgtttataaagtaacaagcaattccttttcctatttttagttattcatttgtacctattttccaatcagagtttctaatcagtatgagttaatcagagttaacatttatttatttactgagcaccttctgtgtgactgacctataccaggtgctggcactaggaaagtgaacaagattcagtcttagcaggggtttccaatgcataataatatttctgttaattcacattaatttgggtaaaatttattgctcacccatggcatgtgtggggtggtgccaagtgccttatgtataccccttctttaatcttcagggcaatgctgtgagtttgtcattagagataccactttgcagatgtggagactgaaacttgtacagttgagtcgagccattcactcraagtcacacgttcaattacagggtagaggcaggatttgaaccctggattgtcagactccaaaacttgccccatggagattatagtcaccagctccctgcattccttccttcactctcctactggataggtgtttgcttttgtggacatgaggagtgtcctatgttctctccatgttccgtggcttttggttt

SEQ ID NO: 929455 - DNA, 603 bp, Homo sapiens
tggcatctattgattccaatttttcatttagtttgatgtcagcctggttctttgtgtgatgagtggattttgactgaaacctataccttttgagtattatattgtatgactctggatcttatttaagttttctgtcttagctgacctcttctggcaccttttctgcaggggaaatgaaggggctgcctcctcagtgctgggtcggagaatccagattgcccacgtgggctcagttgaactctggagatgggggcatctgttcctgctgggctgggcagcagttggcttctccccatgctccaccccacccatccccacctccactgatgtccctgatgcctcccttggtggggcaggctggaaggcctcattatgctccccacacagcctccagtgacactgccgggagaagagcctccttactactgcmcattggtgaaagctggctctgcactaggcctgctcagccgccaccccagcagggagagggacatgtgcctggtgacagcacagtaaaggtggaggtctaggcccccaacctggccctgctttctgtggtgatgagtggagtgaagcagctattgcctacaggtgttctgtctt

SEQ ID NO: 929456 - DNA, 630 bp, Homo sapiens
gaaatcattctgcaccactaaaaataaaatccacgtagaacctgaaagaaccaatgccaattactggagccaaattcaggttgtatttttaaaagtgtctatgaaaccatctataaatagaaaggctttcctgttatttttaattacttcattttaatggaaacagactccagttggtgaggatgtggttaggatgccatggcacagggcctgcccttccggacagaaggctgactccagccaaaggaagccagggggtggctcaaagcagtcaaagcatcttcagtgcttactcttggttgttgatcccaaagcctcmttagaaacctcctagcgtgtctcaaaccctttcaaacatgtgtatatttctataagtccaatgacaagttgattttcttatatttaaggtaaatgtggaccacagagagtttctctgtgagctggaagaggaaacattcctgagtcaaatgctagggcagtgccacagctccagggtctgctggcagaggggtgtgtctcagacaggcatctctgagaggcagtgtgccagtccagtcccccagagccagggagcctcccaccccatgccgcctcacagggcaggaagagggcgcattactgcctcacact

SEQ ID NO: 929457 - DNA, 815 bp, Homo sapiens
cttccagtgaatataaagcaggcagaaaaacatgaaaaggagagatgagcctagcctcccagcctacatttttctcctatgctagatgcttcctgccttcaaacatcagactccaggctcttcagttttgagacttggactggctctccttgctcctcagcttgcagatagcctattgcgggaccgtgtgatcacgagtttctctgcacaagctctctctctttgcctgccgccatccacgtaagacatgacttgctcctccttgtcttctgccatgattatgaggccccccaaccgccatgtggaactgtaagtccattaaacctctttcttttgtaaattgcccaatctcgggtatgtctttatcagcagcatgaaaacaaagtaatacactagccgtgactgacacacctcctcccaaattcagcacaaccactatgttccacaactgcataaaccactaagtatgtgctgggtagaatactgaccctcaaagatgtccacatgtgaacttgtgaccacattagattacctggcaaaggcagatgaaattaaggttactaatcagttgaccttgagatggggagattatcctggattatctgggaagggtcagtgtaatctcaagggtcraagtggatgagaaaattggagagagacccagaagatggtggctcaaaaggactcagtccaacattactggccttgaaggtggagcgatgtgggtggaaaactgtggatggaaaaggcaaggaaatggtttttccagaaaagaacacagccctgacaacacctggattttagtccagtgagat

SEQ ID NO: 929458 - DNA, 652 bp, Homo sapiens
gaggctgtgtccccttcagaaagaaccccattacattactgaaaagttatgtagtgaatctttctcccatccttccccaaggataccaccaaccttttaccagggtaactgtgcactgaggaaaggaatgtgatcagatattttggggactcctggacactggctctgagctgacattgattccaggggacccaaaatgtcatcctggtcctgcagttaaagtaggggtttatggaggtcaggtaattgatggagttttagcacaagtctgacttacagtaggtccaatgggtccctggactcatccttttgtaacttccccagtgccagaatgcataattaacatagacataattagttgctggcagaacacacacattggctcccygaccggtaggttgaggcaactatggtgggaaaggccaaatggcagccactagacctgcctatacctaggaaaatagtaaataaaaaacaatattgcatccctggagggattgtggagattagtgccaccatcaagaacttgaaagactcagggttagtgattcccaccacattccattcaactctcccatttggcccgtgcagaagacagatcaatcttggataatggcagtagattgtaagcttgaccaagtggtgactccaa

SEQ ID NO: 929459 - DNA, 652 bp, Homo sapiens
gaggctgtgtccccttcagaaagaaccccattacattactgaaaagttatgtagtgaatctttctcccatccttccccaaggataccaccaaccttttaccagggtaactgtgcactgaggaaaggaatgtgatcagatattttggggactcctggacactggctctgagctgacattgattccaggggacccaaaatgtcatcctggtcctgcagttaaagtaggggtttatggaggtcaggtaattgatggagttttagcacaagtctgacttacagtaggtccaatgggtccctggactcatccttttgtaacttccccagtgccagaatgcataattaacatagacataattagttgctggcagaacacacacattggctccccgacyggtaggttgaggcaactatggtgggaaaggccaaatggcagccactagacctgcctatacctaggaaaatagtaaataaaaaacaatattgcatccctggagggattgtggagattagtgccaccatcaagaacttgaaagactcagggttagtgattcccaccacattccattcaactctcccatttggcccgtgcagaagacagatcaatcttggataatggcagtagattgtaagcttgaccaagtggtgactccaa

SEQ ID NO: 929460 - DNA, 591 bp, Homo sapiens
aagaggctgacagttttgagtggggtccagaacaggagaaggctctgcaacaggtccaggctgttgtgcaagctgctctgtcatttaggccatatgacccagcatatccaatggtgcttaaggtgtcagtggcagatagggatgctgtttggagactttttcaggccctcataggtgaatcaaagtggaggcctctaggatttgggaacaaggccattttctgcagatagctactctccttttgagagacagctcttggcctgttactgggctttggtggaaactgaacgtttaactatgggtcattaagtcaccatgcaacctgaattgcctatcataaactgggtgctttctgacccatctagccataaagtgggtcgtgcacaggagcattccatcatcaaatgaagtatatacatgatcgggcttaagcagttcctgaaggcacaaataagttacatgaggaagtgactyaagtgtccataatctccactcctgcagccctgcctcctccccgagcctgcaccaatggcctcatgtggagttgcctatgatcagttgacagagcaagagaagactagggccacagat

SEQ ID NO: 929461 - DNA, 778 bp, Homo sapiens
aagctcaaagactggcctcaaaaactacctctgccagaatttaattggatcaaactaccaagcaatttatattccaggacattatcaaaaacaatgaaataatcagcctgtaattagtggagaatgagtactgggcataataccacatgagtcagacaccttaaaaaaagacatagagcaagcaataaaacagtagaagaaagacccatgaaaaccactgtcttagcttgtgcaaaaccccaagactgcaccttctgagtagcaacaccaaaggcttcacattgtgggggatctagactttactacattagtctaatgaattaataaaacaaataaacaagaaaacaagaattgaaaccagccccaaagagaaggaagcaaatcagtgtctacagttgctacattacctaagatgtccaagttttaacaaaaatgtatgagatatgaaaagaaacaaaattgtacgtacatattagtattgacagctatgcagtytaaagaatagagaaaaatagaataaagacaaatgaatagaatctcagagaaatggaggactcattaaaggagcactagcacacacatagtgggaagagcagaaggagaagagagaaagaaaagggagcagaaaaatatttgaagaaataatggctgaatatttctcaaattgcctgaaaaacattaatctacacataaaagaaactcaacaaaatccaaatagaaaatttgaaagcagcaagcaaaacaatgattcatcatatataagggaaccccaataaaa

SEQ ID NO: 929462 - DNA, 785 bp, Homo sapiens
ttggtggagtcacagaaagtgtatgttatccaaattagtttgtgtttttttcttttcatgatactgtaacataaagttaggagtactttgacctatacacatttaaatacatttcagttgccttaagattcagctttaatacagtctgaaagtggtttttttttttagacaaagtcttgctctgtygcccaggctggagtgcagtggcaccatctcggctcactgcaacctccgcctcctgggttcaagcaattctcttgcctcagcctccagagtagctgggactacaggcacgcaccaccacgccagactaattttttgtattttagtagaaacgggatttcacagtgttgcccaggctggtctcgaactcctgagctcaggcaatccacccacctcagcctcccaaagtgctaggattaccgcgccccacctgaaagtgattttaataatcaacttttcacagcaaacagcaagtctcgaaaataaattaaagtttcattagtattaactggtggaagatccacaaagctcaaaccataaactaatgctataactgaattcccattttcaatactaagactgaagtagcatcaatcagtcctttgtgatgattattaaattttatacccaattgtgccaaactatttctcatttttcttgtaatgcaaagtggtttcatcacatattaggaatgtttcttggcaagcaggcagtaaaagcaccataataattacatatgttgttagaatgtttgcataattaattcatctggtaaattatgt

SEQ ID NO: 929463 - DNA, 685 bp, Homo sapiens
tatatttcccaagtcttcataatctcctgctgagactccatttctgagtctaaatctgaattcctatgtcgttaataatctacagtgtccaaaggagactggataattgtattctttttttttttttttttttcttttctttgagacggctggagtgcagtggcgcgatctcggctcactgcaccctcacccttctggattcacgccattctcctgcctcagcctcctgagtagccgggactacaggcacccgccaccacgccccgctattttttttttttgtatttttagtagagacggggtttcaccgtgttagccaggatggtcttgatctactgaccttgtgattcaccggcctttgcttcccaaagtgctgggattacrggcgtgagcgactgcgcccggcccgtattcttaaaatctgctctttttcttccattttctgtgtcattaaatggcacaaaagccaaggaattacaatagactcttctgctgctctttttctgccacatccaatgagtcatttcatttttataaaattatctcaatgttaccttcttctctctgtcttcggatcattgtcttaggtcacagcagtcttgcttcccacttgcattttagatctagcatggaatggacttccatctctaggcttatcctgacccagtaactcctttcaatctac

SEQ ID NO: 929464 - DNA, 644 bp, Homo sapiens
tggaaaatcgggtcactcccaccctaatactgcacttttccaatggtcttagcaaatggcacacctggagattttatccagtgcctgtcttggagggttccaagcccgcgcaaccttgctcatagctagcacagcagtctgagatcaaactgcaaggcagcagtgaggctgggagaggggcacccaccattgctgaggcttaagtaggtaaacaagtgactgggaaactcaaacttggtgcagcccaccgcagctcaaggargcctgcctgcccctgtagactccacctctgggggcagggcatagccaaacaaaaggcagcagaaacctctgcagacttcaatgtccctgtctgacagctttgaagaaagaagtggttctcccagcatggagtttgagatctgagaatggacagactccctcctcaactgggtccctgaatcccaagtagcttaattgggaggcaccccccagtagcggctgactgacacttcatatgatcaggtacccctctgagacgaaacttccagaggaacaatcaggcagcaataattgctgttcagcaatatttgctgttctgcagcctcccctgctgatacccagacaaacagggtctgaagtggacctccagcaaacaccaacag

SEQ ID NO: 929465 - DNA, 644 bp, Homo sapiens
tggaaaatcgggtcactcccaccctaatactgcacttttccaatggtcttagcaaatggcacacctggagattttatccagtgcctgtcttggagggttccaagcccgcgcaaccttgctcatagctagcacagcagtctgagatcaaactgcaaggcagcagtgaggctgggagaggggcacccaccattgctgaggcttaagtaggtaaacaagtgactgggaaactcaaacttggtgcagcccaccgcagctcaaggaagcctgcctgcccctgtagactccacctctgggggcagggcatagccaaacaaaaggcagcagaaacctctgcagacttcaatgtccctgtctgacagctttgaagaaagaagtggttctcccagcatggagtttgagatctgagaatggacagactccctcctcaactgggtccctgaatcccaagyagcttaattgggaggcaccccccagtagcggctgactgacacttcatatgatcaggtacccctctgagacgaaacttccagaggaacaatcaggcagcaataattgctgttcagcaatatttgctgttctgcagcctcccctgctgatacccagacaaacagggtctgaagtggacctccagcaaacaccaacag

SEQ ID NO: 929466 - DNA, 724 bp, Homo sapiens
agactctgtctcaaaaaaaaaaaaaaaaaaagaaaaagaaaatgtgttatatacatacaatgaagtattattcagccttaaaaaaagaaggaaatgctgtcacaggtgacaatagggaagaaccctgaggacactatgttaagtgaaataagctaatcaaaaaaagacaaatacagcatgattctacttataatagaaggtatctaaagtaatcaaacacactttaaaaaaatagtagaatggtgattgccagggccagggggaaaaggaaaagaggtgttgttcaaaaggtgtagagtttcagttatgcaagataaacaggttctaaagttctgttgtacaataatgtgcatacagttaaaaatactgtactatagccttaaaactgttgaggataaatttacattatatatttttaccagtttttttaagtataaaatctatagttttcatagaaaatagtgcataaagcattagtattcaagtgttttcacacaaggtataatgtcaaacaaaataaagaaattcaatcttgggtttcyggaatttcatataccatacactataccgaatggttttcaaggttctaagaataagaataaagaaatatatgtgaaagaatattgctaaagaaaaaaaatgcttccttcctgtaggagatagctaaaaataaagaaaaaaaaggaaaaaaatgctgcaaagtatttattattaaattatatga

SEQ ID NO: 929467 - DNA, 699 bp, Homo sapiens
ataacattgggaatgtactaaatgccactggtttgtacacataaaaaaggatagcatgaatcctagcactttgggaggccgaggcgggcagatcacctaaggtcaggagtccgagaccagcctgaccaacatggagaaaccccatctctactaaaaatacaaaattagccaggtgtggtggcacatgtctgtaatcccagctactcaggaggctgaggcaggagaattgcttgaacccaggaggcgaaggttgcagtgagccaagatcgcaccattgcactccagcctaggcaacaagagcgaaactgtgtctcaaaaaataaataaaaaataaaataaataaaaagataccatgggccgggcgcagtggctcacgcctgtamtcccagcactttgggaggccgaggcaggtggatcacctgaggttgagagttcgagacagcctgaccaacatggagaaaccctgtctctgctaaaaatacaaaattagccaggcgtggtggcacatgcctgtaatcccagctactcaggaggctgagaaaggagaattgcttgaaccccggaggcagaggttgcggtgagctgagatcacgccattgcactccagcctgggcaacagtgaaactccatctcaaaaaaaaaaaaaaaaggatagcatgataaattttatgttaggtatattttcccaaaatttataaa

SEQ ID NO: 929468 - DNA, 699 bp, Homo sapiens
ataacattgggaatgtactaaatgccactggtttgtacacataaaaaaggatagcatgaatcctagcactttgggaggccgaggcgggcagatcacctaaggtcaggagtccgagaccagcctgaccaacatggagaaaccccatctctactaaaaatacaaaattagccaggtgtggtggcacatgtctgtaatcccagctactcaggaggctgaggcaggagaattgcttgaacccaggaggcgaaggttgcagtgagccaagatcgcaccattgcactccagcctaggcaacaagagcgaaactgtgtctcaaaaaataaataaaaaataaaataaataaaaagataccatgggccgggcgcagtggctcacgcctgtactcccagcactttgggaggccgaggcaggyggatcacctgaggttgagagttcgagacagcctgaccaacatggagaaaccctgtctctgctaaaaatacaaaattagccaggcgtggtggcacatgcctgtaatcccagctactcaggaggctgagaaaggagaattgcttgaaccccggaggcagaggttgcggtgagctgagatcacgccattgcactccagcctgggcaacagtgaaactccatctcaaaaaaaaaaaaaaaaggatagcatgataaattttatgttaggtatattttcccaaaatttataaa

SEQ ID NO: 929469 - DNA, 578 bp, Homo sapiens
gcaattctctgcctcagcctcccgagtatttgggattacaggtgcccgccatcacacctggctcatttttgtatttttagtagagatggggtttcaccatcttggccaggctggtcttgaactcctgacctcatgatccacccgcctcggcctcccaaagtgctagattacaggcatgagccactgcgcccagtccttgtgttgtttttgttttttttttttttttgaracagagttttgctcttgttgcccaggctggagtacaatggcgtgatcttggctcaccacaacctccatctcctcggttcaagtgattcttgtgcctcagcctcccgagtagctgggattacaggcatgcgccaccacacctggctaattttgtatttttagtagagacggggtttctccatgttggtcaggctggtctcaaactcccaacctcaggtgatttttttttttttttaatgaaaaactgaaacttctaattcccaagatagtgtttatgaaattgggtggcatcttttttcttttctttcttttttaaaagagatagggtctcactctgtacatagtggtac

SEQ ID NO: 929470 - DNA, 578 bp, Homo sapiens
gcaattctctgcctcagcctcccgagtatttgggattacaggtgcccgccatcacacctggctcatttttgtatttttagtagagatggggtttcaccatcttggccaggctggtcttgaactcctgacctcatgatccacccgcctcggcctcccaaagtgctagattacaggcatgagccactgcgcccagtccttgtgttgtttttgttttttttttttttttgaaacrgagttttgctcttgttgcccaggctggagtacaatggcgtgatcttggctcaccacaacctccatctcctcggttcaagtgattcttgtgcctcagcctcccgagtagctgggattacaggcatgcgccaccacacctggctaattttgtatttttagtagagacggggtttctccatgttggtcaggctggtctcaaactcccaacctcaggtgatttttttttttttttaatgaaaaactgaaacttctaattcccaagatagtgtttatgaaattgggtggcatcttttttcttttctttcttttttaaaagagatagggtctcactctgtacatagtggtac

SEQ ID NO: 929471 - DNA, 602 bp, Homo sapiens
tttccactacctctgcagtaacttcctccacttaagtcttgagccactcaaagtcattcatgagggttggaattaacctcttccaaattcctgttaatgttgatattttgacctcccatgaatcatgaatgttcttaatggcatctagagtggtaaatcctttccagaatgttttcaatttactttatctagatcaattagaggaatcactatctatggcagctatatccttacaaaatgtaattcttaaataataatacttgaaagctgaaatttctcyttgatccatgggctgcagaatggatgttgtgttagcaggtgtgagaacaacattcatctccttgtacatcttcatcagaactctttggtgactcggtgcattgtcaatgaggagtaacactttgaaaggaatctcttttctttgagcagtaagtctcaacagcagggttaaaatattcagtaaaccatgctgtaaatagatgtgctgtcatccaggctttgttgttccatttctagagcacaggcagagtagatttagcataattcttaagggccctaggatttttggaatagtaaatgagcattggcttcaacttaagtca

SEQ ID NO: 929472 - DNA, 602 bp, Homo sapiens
tttccactacctctgcagtaacttcctccacttaagtcttgagccactcaaagtcattcatgagggttggaattaacctcttccaaattcctgttaatgttgatattttgacctcccatgaatcatgaatgttcttaatggcatctagagtggtaaatcctttccagaatgttttcaatttactttatctagatcaattagaggaatcactatctatggcagctatatccttacaaaatgtaattcttaaataataatacttgaaagctgaaatttctccttgatccatgggctgcagaatggatgttgtgttagcaggtrtgagaacaacattcatctccttgtacatcttcatcagaactctttggtgactcggtgcattgtcaatgaggagtaacactttgaaaggaatctcttttctttgagcagtaagtctcaacagcagggttaaaatattcagtaaaccatgctgtaaatagatgtgctgtcatccaggctttgttgttccatttctagagcacaggcagagtagatttagcataattcttaagggccctaggatttttggaatagtaaatgagcattggcttcaacttaagtca

SEQ ID NO: 929473 - DNA, 532 bp, Homo sapiens
tggccagtttgaagactgtatgtcatgcccacaggtagactcaattgttagcatgttgacatttgaactaaggagacaaggtatgtgggctgtgtgctaggactcatttgagaataaaacctttaagattgttcaggtggctatgtgaacasaaggatgaacttttatttcccattccccaggcaacactgtgtctaagagttcatccttccatcagtgctgtaagataggtactagtgcccttacctggtcctagaattgagttgcagaacttgcccaatgtcagaaagctattgagaggagaactgagcaagcagttaagaataaactctagtctactgtgattgaagtccccagtctctctcattgttctgaagcttcaaccttgaagaaaagttggaagttagacagagtcaggaattgcctctgtttgaatgaccaggagacacagaggtaactcttatcatgtaaatgactaactgtgtaggcaagggtgtgggtgcccacatgtagaaggtagcactattgtgag

SEQ ID NO: 929474 - DNA, 532 bp, Homo sapiens
tggccagtttgaagactgtatgtcatgcccacaggtagactcaattgttagcatgttgacatttgaactaaggagacaaggtatgtgggctgtgtgctaggactcatttgagaataaaacctttaagattgttcaggtggctatgtgaacacaaggatgaacttttatttcccattccccaggcaacactgtgtctaagagttcatccttccatcagtgctgtaagayaggtactagtgcccttacctggtcctagaattgagttgcagaacttgcccaatgtcagaaagctattgagaggagaactgagcaagcagttaagaataaactctagtctactgtgattgaagtccccagtctctctcattgttctgaagcttcaaccttgaagaaaagttggaagttagacagagtcaggaattgcctctgtttgaatgaccaggagacacagaggtaactcttatcatgtaaatgactaactgtgtaggcaagggtgtgggtgcccacatgtagaaggtagcactattgtgag

SEQ ID NO: 929475 - DNA, 812 bp, Homo sapiens
tgtcagctgtctttgtgctgagaatgagcctaaggtataatcttaaggtctttgtaggtcttttctgatcctgcacatttccacaggcatgcatagtgattttccaatttttcctgtgtatgtgattgctttggaatgttccgatacttaatgtctagcccctgaaaagaggacaagataagaataaagggggttaagaatcactagtcctttatatcccttagaaaccacttcaactagagatttggggggcttgcaacaatggggggatgcaaaaatgatagctatctgcctctgtatctgtacctctgtaatcaagcacagcaatcaataattagatcatacttccccaatatttgggggacagctycttattgcctactcttgtttttgcatgctgcatgcaagctgttctaggaacatgagcatggctgcctgccgggaggctagggttcagggatgggtagctgctgtcaaaataagacctgaaattgactgatattatctgtaatttgttaaccaggacttcccctgtaaattataagccttcagtggagtctacagtttcaaaatagttacaacaaacagattctgctggagtaattgttatatgtgtgtggtatgtggtgatttctactccaccatcttcctataatactgtttctctggtgcttttaagtttgaatttcttccctcgctccctaaaagctatgtagattatatagggagtcattatctctccttccattttcagagtaggaatgataatttaacagtaaaaagcattctcaattgttgtgtcctgcttacca

SEQ ID NO: 929476 - DNA, 588 bp, Homo sapiens
gataattatgtggtttttatcttttattctattaatacgattaattatattgatcttgtatgttaaacctaccttgcattcctgggataaattccacttggccatggaatataacactttgtagatgttactggatttgtttgctatatttaattgagaattttttcttctacatttataagagatattggtctgaagttttctctattttgtgatgtgtttgtctgacaacggccttagggaaataytggcctcatagaaccaactgggaaaaaaaaggagaagtaatatgcaattatactgcctttatgattacctacctgtttttaccagtgctctttttgttgagtgtgtggggattcaaattactgctggatgttacttgctttctgcctaaaatacttatttcatatttctcgtatggtgtatctactagcaagaaattacttcacttaaaatctggaaataatttgtttttacctcagtttttgaaaaatttgctatttataagattcttggctgacaggccttttttagtcactttgaatcattgcatcataccactgtcatctgaacttcattgtttct

SEQ ID NO: 929477 - DNA, 588 bp, Homo sapiens
gataattatgtggtttttatcttttattctattaatacgattaattatattgatcttgtatgttaaacctaccttgcattcctgggataaattccacttggccatggaatataacactttgtagatgttactggatttgtttgctatatttaattgagaattttttcttctacatttataagagatattggtctgaagttttctctattttgtgatgtgtttgtctgacaacggccttagggaaatattggcctcatagaaccaactgggaaaaaaaaggagaagtaatatgcaattatactgcctttatgattayctacctgtttttaccagtgctctttttgttgagtgtgtggggattcaaattactgctggatgttacttgctttctgcctaaaatacttatttcatatttctcgtatggtgtatctactagcaagaaattacttcacttaaaatctggaaataatttgtttttacctcagtttttgaaaaatttgctatttataagattcttggctgacaggccttttttagtcactttgaatcattgcatcataccactgtcatctgaacttcattgtttct

SEQ ID NO: 929478 - DNA, 615 bp, Homo sapiens
ttactttcatcagtgtcgctatgtacatttctaagaagtggcaaataaatcatctaatcacaggtcaaatacgaaagggacataggtctcatctagcccaacgacccgtctgatgaataaagagaaaacagacttcaaaacacagtagaaattaagggcagggttgaaaaaaaaaaaaaaaaagcccagtttcctctgagggaatcagtatcaacctggaaaaaattatgtacctgttgaaagctgatgtttataggttgctttaaaacaatccatgtgacactctcaaraagaggtggaactgtaagaaaaccaggatatgtccagtagtcccaggatggtggaagcagagacaataggtcaaaatttgtgaatcgagtttgtttaccctggaggatcaaaaagaattcccacaaattacaatgggatagctctacatagacctcaaaaaacatacatccatgtacttccattataattccataaacaatacagaatatctgcatctagaattatgtaatatcttcctttagtatctttaaaaaagcatctacatcttaaaaattttagataaagtaacatatcatagatttatttaagaagcataaggtttgt

SEQ ID NO: 929479 - DNA, 615 bp, Homo sapiens
ttactttcatcagtgtcgctatgtacatttctaagaagtggcaaataaatcatctaatcacaggtcaaatacgaaagggacataggtctcatctagcccaacgacccgtctgatgaataaagagaaaacagacttcaaaacacagtagaaattaagggcagggttgaaaaaaaaaaaaaaaaagcccagtttcctctgagggaatcagtatcaacctggaaaaaattatgtacctgttgaaagctgatgtttataggttgctttaaaacaatccatgtgacactctcaaaaagaggtggaactgtaagaraaccaggatatgtccagtagtcccaggatggtggaagcagagacaataggtcaaaatttgtgaatcgagtttgtttaccctggaggatcaaaaagaattcccacaaattacaatgggatagctctacatagacctcaaaaaacatacatccatgtacttccattataattccataaacaatacagaatatctgcatctagaattatgtaatatcttcctttagtatctttaaaaaagcatctacatcttaaaaattttagataaagtaacatatcatagatttatttaagaagcataaggtttgt

SEQ ID NO: 929480 - DNA, 768 bp, Homo sapiens
cagaaagaatgaggtacatggacaagctgagagtgaggtaggtaaagaggggctttattgagctatagaacagctcagaggaggcccacaatgggtatctcccctccacaggcaggtcatcctaacatctgctcagctctcagaagagaggagactcacagtgggtaactcctctctgcaggcaggtcgtcccgctgactgtgggagtctggctgagcccagaggtttttataggcttcagggggagaaagtgcatgctgattggttcatgaatggccatgaacaggccgggaaaaagcatcataagttctcactcaggtccacagaactggtggtctggccctcaggcctcaggccatcgctggccgtaggtggagtttcactggggacctgcccgtttccttccaggaaccctgtctgcctcctgccaccattaacctgccatccatgttgtccacagccccaggctgttcgagccaaggagtgcctgcaggcctacacagrgccaaatttagctccccctcgacctcccccccatgctcattggcacccaaagtcaagatggggccgaggcagcagggggctggtgtgtcagcactgccccacacgtgtatacacccaaccaggtcatgacagcaccctggctcggggacaactttgttccaacatcacagtgggtgctcggagtgggaagctgccaggcacttcgaagcctgcaggggcaggggagctttctgtgcccctgagagtgcagagatgcccagatct

SEQ ID NO: 929481 - DNA, 768 bp, Homo sapiens
cagaaagaatgaggtacatggacaagctgagagtgaggtaggtaaagaggggctttattgagctatagaacagctcagaggaggcccacaatgggtatctcccctccacaggcaggtcatcctaacatctgctcagctctcagaagagaggagactcacagtgggtaactcctctctgcaggcaggtcgtcccgctgactgtgggagtctggctgagcccagaggtttttataggcttcagggggagaaagtgcatgctgattggttcatgaatggccatgaacaggccgggaaaaagcatcataagttctcactcaggtccacagaactggtggtctggccctcaggcctcaggccatcgctggccgtaggtggagtttcactggggacctgcccgtttccttccaggaaccctgtctgcctcctgccaccattaacctgccatccatgttgtccacagccccaggctgttcgagccaaggagtgcctgcaggcctacacagggccaaatttagctccccctcgacctcccycccatgctcattggcacccaaagtcaagatggggccgaggcagcagggggctggtgtgtcagcactgccccacacgtgtatacacccaaccaggtcatgacagcaccctggctcggggacaactttgttccaacatcacagtgggtgctcggagtgggaagctgccaggcacttcgaagcctgcaggggcaggggagctttctgtgcccctgagagtgcagagatgcccagatct

SEQ ID NO: 929482 - DNA, 768 bp, Homo sapiens
cagaaagaatgaggtacatggacaagctgagagtgaggtaggtaaagaggggctttattgagctatagaacagctcagaggaggcccacaatgggtatctcccctccacaggcaggtcatcctaacatctgctcagctctcagaagagaggagactcacagtgggtaactcctctctgcaggcaggtcgtcccgctgactgtgggagtctggctgagcccagaggtttttataggcttcagggggagaaagtgcatgctgattggttcatgaatggccatgaacaggccgggaaaaagcatcataagttctcactcaggtccacagaactggtggtctggccctcaggcctcaggccatcgctggccgtaggtggagtttcactggggacctgcccgtttccttccaggaaccctgtctgcctcctgccaccattaacctgccatccatgttgtccacagccccaggctgttcgagccaaggagtgcctgcaggcctacacagggccaaatttagctccccctcgacctcccccccatgctcattggcacccaaagtcaagatggggccgaggcagcagggggstggtgtgtcagcactgccccacacgtgtatacacccaaccaggtcatgacagcaccctggctcggggacaactttgttccaacatcacagtgggtgctcggagtgggaagctgccaggcacttcgaagcctgcaggggcaggggagctttctgtgcccctgagagtgcagagatgcccagatct

SEQ ID NO: 929483 - DNA, 578 bp, Homo sapiens
ataaggctcaaagttctgatgcttataccacatagttggttctcctagcaaccagtccccattctgaggctatctaggggccccagccaccagttatcatattagcattaaaaaacactcttatctccagagatttcacaagttttaggaattgtgcacccggaaccaggggcagaggccaaatatgtttattatatcaaaatatcacaaaagtattcgatcttccaacactgtgttgaatagtagcggtgagagtcaccatctttgactttttcccaaccgtaaagaaaagcattcagtctttcaaygttaagtatgttacttttttgcagatattctttatcaatttgaaaacattctcttccttttatagtgttctgtttttatcacaaagtggtattaaatttcaccacatgctttttctgtgggaattgatatgatcatgtcatttttctttcttagcctgctaatgtgtatgaaattagataatttaaacttaaaataagtcaacttaaagctgttagagctttaaatcattctgaaccttgagaggtggctctgcagcctgagtcaagtgg

SEQ ID NO: 929484 - DNA, 578 bp, Homo sapiens
ataaggctcaaagttctgatgcttataccacatagttggttctcctagcaaccagtccccattctgaggctatctaggggccccagccaccagttatcatattagcattaaaaaacactcttatctccagagatttcacaagttttaggaattgtgcacccggaaccaggggcagaggccaaatatgtttattatatcaaaatatcacaaaagtattcgatcttccaacactgtgttgaatagtagcggtgagagtcaccatctttgactttttcccaaccgtaaagaaaagcattcagtctttcaatgttaagtatgttacytttttgcagatattctttatcaatttgaaaacattctcttccttttatagtgttctgtttttatcacaaagtggtattaaatttcaccacatgctttttctgtgggaattgatatgatcatgtcatttttctttcttagcctgctaatgtgtatgaaattagataatttaaacttaaaataagtcaacttaaagctgttagagctttaaatcattctgaaccttgagaggtggctctgcagcctgagtcaagtgg

SEQ ID NO: 929485 - DNA, 579 bp, Homo sapiens
ttttattcttttcttctttttttagaactcttctatgcatgtggtttactacaaatctcaaatcttatataataacacaaatataaaaaaaaacttagacaaacacacaatatatcactaattgtattagtctgttctcatgctgctataaggayacacccaagactagataatttataaagaaaaagagctttagaggactcacagttctacatggctgggcagcgaggcctcacaatcatggtggaaggtgaagaaggagcaaaggcacatgttacctggtggcaggcaagagagaagtgcacaccaaagcttgggggagccccttataaaaccatcagaccttgtgaaactcactcactatcatgagaacagcatggaggtaaccactcccatgattcaataacctcccaccagttccctcccacaacatgtgggaattatgagaactacagttcaagatgagatttgggtagggacacagccaaactgtatcattccaccctggcccctccgaaatctcatgtcctcacatttcaaaacacaatcgtgccttcccaacagtcctccaaagtctca

SEQ ID NO: 929486 - DNA, 571 bp, Homo sapiens
ttacctaagagaatgcccagtttttgactgcatggaccatggtagaatgaagagtcatttcccagcctcctggcagctcggagtgaccatgcaactaagttctgtttaatgtgatatggcagaagtgactcattcacctacaggatcatgccctaaaagggacaggcatgccctcttctttctctttccacccctcctgatagctgatatgcagactggatggtcaaccatcttggacagtacaaataagaatgatgaatactttagggatggcagagctcctagacaggaagatcctgggtccccaacatggtaaagccaccctatcagccctggacatgagatggagaaataaacttytctcttatttaatccactatttatttatttatttatttattttagagaaagggtcttgctctgtgacccaggctggagtacaggggcactaccatggctcattacagccttcaactcctaggctcaagtgatcttcctacctcagcctcccaagtacctgggattatgagcatgaaccacagcaccccaatctgatctactttatattggt

SEQ ID NO: 929487 - DNA, 613 bp, Homo sapiens
caaagcaggcacagaggcagggctgcctaagcccttgcgagcccatcccacacaatcatgtatccaggatttgggacatggggtcaagggagattatattgaagctttaagatttaatgtcttccctgctgggtttcagacttgcagaggcttgttgcctctttcttgtggccaatttctctcttctgggatgggaatattyactcaatgtctgtgtcaccattgtatcaatatattgggagtaaacaacttgtttttgatcttacgggctcataggtggaagggaattgccttgagtctcagatgagactttggacttttgagttgatgctggaatgagttagaacttttggagactattggggaaggatgactgtattttccaatgtgagaaggacatgaatttggggggcaaggaatggaataatatagtttggatttttgtcccctccaaatcacatgttgaaatctgatccctcatgttggaggtggggcctggtgggagatgtttggatcatgggggtgaatcctccatgaatggcttggtgacctcttcatggtagtgagtgagttctcactccattagttcatgtgatagctgttgtttaaagag

SEQ ID NO: 929488 - DNA, 601 bp, Homo sapiens
gccttaagagctggctctcaactctatccaagcataggttgtcaggaatgcagaatcttgggctccacaaatgaatcagctaataagccagctaatgaatcagagcctgcattttaacaagatcctcaagagattcctatgtacagtaaatttttgtttagaaacaaggtcttgcgaggctggagtgcagtggtgtgatcacagctcactatagccgtgacttcctgggctcaagcgatcctcccacctcagcctcccaagtagctgggattacaggcatgcaccaccatgcctccttatacaagtaaagtgtgagaagcattactcctaggtcagtgattctcagacttgcgcatgcatcagaatcacctggagtggttgttaaaacacaggttgctttttattcagtcataaaaaaggaatgaaattttggtatrtgctgcaatacaatatgaatgaaccttgggaacattacgcttggtgaagtaagccagacacagaaaggcaaatattgtattattccacttatatgaggtacctagaataggcaaatccgtaaaaacagaatgtagactagaggttaccaagggtgaggaaaagg

SEQ ID NO: 929489 - DNA, 661 bp, Homo sapiens
cctctcaggggtcatatgtgctcactatgccctgtgattttcccgagttgcttccagtctatactctcaagccccatgcagccagcctatctccgcggcacatttcagaccatgggtagttgtgcggcactttcactcacccacgtgggaaggaggccccactgaaagtctcctggtcactggactgcctgcttcaaaccctagctctgccactgattagctacatggctgtgggcaagtcggcttccctgagcctcagtctcctcagttgttagacagggataccagcagcacatgccttgaagcgtgctttagatgttttacatttgatcacaaatttaaatcgcttagctggcacccargaaaagttaaacttttagggactattattattattattttgagtcagggtctcactctgtcacccaggctggagtgtggtggcgagatctcggcttgttgcaacctccgtctcctgggttcaagtgattctcctgcctcagcctcccaagtagctgggactacaggcgtgagccactgtgcccagccttatggactattattttaaaagacacgttaaagaatctacacttagagaagagagagccagacttggttagggtttttaggcttcgaatgcactctattttcccattttctc

SEQ ID NO: 929490 - DNA, 777 bp, Homo sapiens
ttggagaaacagtgtaaaccggcagtgtaaacaagagcagggcatttatgagtagttgagaatggtgaataggagtatgactagacagaagatagcagggatgacaagtagtttttttttgtggggggcggggcgcagtctaagttggtctggtgtctggaatgagactggggcctaataaaaaggagtgtctatacaggagctcaaatgggctgtaccttgtagcattctgagaacaagcttgaattctgagaagggcaagtggtaaaagtattatccagtcctttttaagttgayggctgagcttggtgaggtgtgtttttaaaagaccattagttcactgaatactaagagtctgagaaactgcttgggtgatttgactaataaaggccggtccattatacgtctgtatagaggtgggaaggccaaatcgaggaattatgtctgacagaagggaagaaatgaccgtggtggccatcttagaccctgtgggaaagtcctctacctatccagttaaagtgtctacttagaccaagaggtattttagtttcctgactcggggcatgttgagtaaagccaatttgccagtcctgggcaggggcaaatcccagagcttgatgtgtagggaaggtagggggcctgaataatccctaaggagtagtagaatggcagatggaacacagagaaattatttccttaaggatagatttccacgatggaaaggaaatgagagcttctaagaggtgggctagtggcttgtactatagcatagcctgc

SEQ ID NO: 929491 - DNA, 578 bp, Homo sapiens
tagtgttagaagtggaacattagagagaatgagttggaaagataagaacttttggccggagaatgagatatttaaaactgagattacagaagtgtttcagttaatggtaatgacattcgttaagtggctactggtgatggaagacaacatcattgcatgagagtagatcagggaaacatgagtaagagtaacaaagtaatgaacatctttctgcatgttgtcatcatccatattatggcaggmgttattaggcattgaggaggccatagaagaactgatgatggcatcaaacagggattagcacatagctaatttgataacatgagattttttaaaagagaaaggagaataacctagaaacagcagtgaggagcaagagcccttgctccacctccacaaagtgtagatcagggtgcattagaaaaaaaagaaagtgtcattccttgagagagctgcaagaaaactaatatcatcagaaatttgctttatttcatatagcaggaatgtaaagagaaatttcacagaagatttgaggattcttttttgtttttctctctttttattttttttaaattttt

SEQ ID NO: 929492 - DNA, 800 bp, Homo sapiens
tttgattcagctgaagacagagttctttgtcccatagccatgaaaattcaaactcgcagacaatttgaatggtaagtaagacagttttattgggcgaaaaggaagaaaggggggaaacaggaactctagctaggcagagtccctgatagagtgctccatacttgcagcctgaatcgcaggttccccacaggaagagtaggagccaggctcctccttggtgctaatggagggaacttcctgaggccccaccccattggataagctggttggagttgctctagggacctcctcccacctgactgtctcattagaacctaatataggtcttttgaaaatattttttagatgtctacattctggcaaatgacagaatctacccagacccatgacttatgactcaacctgttccctgtccacacycagatgtggactccatgcaggagaactcttttccacacccctgtgatttcatcctcatccaatcagcagcacccatccctagctctctgcccataggtaacttatgtcatgggggtttgttgtacagattatttttcacccaggtattaagcctagtacccaattgttattttttctgcttctctccctcctcccacctcctacactccaccctcaagtagatcccagtgtctgttgttctcttttttgtgttcgtatattctcacttttagctcccacttacaagtgagaacatgcagtatttggttttctgttcctgtgttagtttgctaaggataatagtctccagctccatatatgttctcgcaaaagacatgatc

SEQ ID NO: 929493 - DNA, 659 bp, Homo sapiens
agcaatatacctttactgtcctacctcacgggtatatcaactctccagcttcgtgtcataatcttatttggagatatcttgatcgctttcacttccacaacatatcacactgctccattacattgatgacattatactggttggatccagtgagcaaaaaatagcaaacacactggacttattggtgagacatttgcatgccagataatgagaattaaatccagggaccttctacctcagtaaaaattttatggktccagtggtgtggggcctgtcgagatattacttgtaaggtgaagagtaagttgctgcatttggcctctcgtacaaccaagaaaaaggcacaatgcctagtgggcctatctggattttgagggcaacaaaatcgtcatttgggtgtgttactccaacccatttatcaagtgatccagaaggcttctagttttgagtggggtccagaacagaagaaggctctacaacaggtccaggctgctgtgcaagctactctgccacttgatccgtatgacccagcagattcaatggtgcctgaggtgtcagtggcagataggaatgctgtttggagcccctggcaggcccctataggtgaatcacaggggaggccactaggattttggagcaaggcgctgctatcttctgca

SEQ ID NO: 929494 - DNA, 445 bp, Homo sapiens
ttttgagtggggtccagaacagaagaaggctctacaacaggtccaggctgctgtgcaagctactctgccacttgatccgtatgacccagcagattcaatggtgcctgaggtgtcagtggcagataggaatgctgtttggagcccctggcaggcccctataggtgaatcacaggggaggccactaggattttggagcaaggcgctgctatcttctkcagaaaactactcttttttttttttttttttttttttttttgaaaaggagtctcgctctgtcgcccaggctagggtgcgggggctcaatctgggctcactgcaacctctgactaccgggttcacgccattctcctgcctcaacctcctgagtagctgggactacaggcacacaccaccacacccggctaattttttatatttttagtagagacagggtttcactggttag

SEQ ID NO: 929495 - DNA, 445 bp, Homo sapiens
ttttgagtggggtccagaacagaagaaggctctacaacaggtccaggctgctgtgcaagctactctgccacttgatccgtatgacccagcagattcaatggtgcctgaggtgtcagtggcagataggaatgctgtttggagcccctggcaggcccctataggtgaatcacaggggaggccactaggattttggagcaaggcgctgctatcttctgcagaaaactactcttttttttttttttttttttttttttttgaaawggagtctcgctctgtcgcccaggctagggtgcgggggctcaatctgggctcactgcaacctctgactaccgggttcacgccattctcctgcctcaacctcctgagtagctgggactacaggcacacaccaccacacccggctaattttttatatttttagtagagacagggtttcactggttag

SEQ ID NO: 929496 - DNA, 445 bp, Homo sapiens
ttttgagtggggtccagaacagaagaaggctctacaacaggtccaggctgctgtgcaagctactctgccacttgatccgtatgacccagcagattcaatggtgcctgaggtgtcagtggcagataggaatgctgtttggagcccctggcaggcccctataggtgaatcacaggggaggccactaggattttggagcaaggcgctgctatcttctgcagaaaactactcttttttttttttttttttttttttttttgaaaaggagtctcgctctgtcgcccaggctagggtgcggkggctcaatctgggctcactgcaacctctgactaccgggttcacgccattctcctgcctcaacctcctgagtagctgggactacaggcacacaccaccacacccggctaattttttatatttttagtagagacagggtttcactggttag

SEQ ID NO: 929497 - DNA, 775 bp, Homo sapiens
agacaatccctgggaaggacactaaacagaaccgccatcccttaagtgagactctgtggacggtggaagatttgggctttgtgcctgggtgaggaggagcattacaatccatccttcagttacctctgccttgattctccaatgatattgtacaagactctgatccctgagagatttttagagcactggcttcggagtctgacagacgatgggcctaatcctggccttgcaacttactagctttgtgaccttgatctctctgtgtctttttttccttatctgtaaaatgggaataacaataataagtgtctggaatatagtagacattattatggtgggccattattatgtaacattttaatgtaatatttgaatcttttttttttttgagacagagtctgggagtcttagtctgtcacccaggctggagtgcagtggcatgatcttggctcactgcaacctccgcctcccaggttcaagagattctcctrctttagcctcccaagtagctaggattataggtgcccactaccatgcctagctaattttttgtattcttagtagagatggggtttcaccatgttggccaggctggtgtcgaactcctgacctcaggtgacccacctgcctaggcctcccaaagtgctgggattacaggtgtgagccactgcactcgacctaaattattattatgtaccacttaaatagcactttacagcttataacacatttcatgagcaatatttcactcaatcctctaaaccaatggtctcca

SEQ ID NO: 929498 - DNA, 670 bp, Homo sapiens
tcaagtctgggcaataaggcagactgaactaacacaatctgttatgttcttctctcctgcccaacttccacctttttttcagatgataaaatatgcataacaaagaatttgccatattgtttttaagtatactattcagtgacattaagtacactcccattgttgtgcaaccatcaccaccacccatctccagaaccttcttcatcttcccagactcaaactatacgaatcaaaccagaactctccattcttctctccctgcagtcctcacaaccacccttctatattctgtctatgaatctgaccactctacgtagttgacataagtagaatcatacagtatttgtccttttgtgactcgcctttttcactaagtataatgtcttcaatgttcatccatgttgtagcatttttcagaatttccttacttttttaaggctgaacaatattccattgtatgtatataccacattttgtttatctgttcattcaytgatgaacatttgggttgcttccaccttttggctattgtaaataatgctgctatgaacacgggggttttacaaatgtctcttcaaaatcctgctttcaatttttttgggtatatacccagaagtgaaattgctggattgtttgacagttctatttttgatattttgaggaaccacta

SEQ ID NO: 929499 - DNA, 579 bp, Homo sapiens
gaggaaacgtagagcctttgggctcatggatgccaatctctgcagcctttcttgtcagcttggaattagatcatggccttcaggttggaactgagagaagaattgtgtgtgagtgaggtaggtttggaaaaagtttagtttgagaattttgttctctttcttttttggttttggttttaattcttaaatgatgtaacacattcctcctggggaccaagagtgattctgaaaactaataagaagaggaaacacttgtgggagaagcaaaaacmcagtagatatgatttataatctacaggaacaattattcattactccctggagattttcttccagaacttctcctctgcttactagagcatgttttgcttatttctgggtgcaaacccttaaagaaggcaaaagtgctggtttatctgcagcagagagtctgcttcggggactatgacatgtagctgaggagaactgcggcactagttggagcactttgagtttattgccagagaggttgcctttgagattactgatgatctatataaacccaacagactgaaatgcctgaagattagcaggcagagc

SEQ ID NO: 929500 - DNA, 582 bp, Homo sapiens
aaagatatatgacataccagaatctctgggacagagctaaagtggtgttaagagggaattttatagcaataaacatccacaacaaaaagttagaaagatctcaaatgaacatgacatcagaactagaggaattagagaaacaaaagcaaatcaactytaaagcttgcagaagacaaaaaataagcaacatgaaggctgaactgaaggaaattgagaggcaaacatctatacaaaagatcaacaaatccagaagttggatttttgaatgtattaataagatagatggactactagctagactaataaagaaaaaagagaagatccaaataaacacaatcagaaatgacaaaggggacgttactagtgaccccacagaaataccaaaaaatgctcagagactaatatgaacacctctatgcatacaagctagaaaacttagaagaaatgattaagttcctagaaacatacaacatcccaagattgaaccagaaagaaattgaatccctgaacagaccaataatgagttatgaaattgaatcagtaataaaaagccaaccaaccaaaaaaaagcccaggactaga

SEQ ID NO: 929501 - DNA, 675 bp, Homo sapiens
tacagctcctacctagcacagaccattccaaccacaggcatatcttagagacattttgggttcaattttggaccacctcaataaagcaaacgtttcaataaaacagattacagacattttttgggtttcccagtgcatataaaagttatatttacactatactttagtatattaggtgtgtagtaatattatrtctaaaaagaaacaatatacatatctcaatttaaatatatattattgcttaaaatcccgacaatcatctaacctttcagcaaattatgtaatctttttgactgctgagggtcttgcctcaatgcggatggctgctgattgatgagggtggtggctgctaagtctggggtaactgtggcatttttaaaaaaaataagacaacaatgaagtttgtcacatcaactgacttttcctttcacaaaagaattttctgtagcataaaatgctatttgatagcattatacccacaataagcttccttcaaaattggagtaaattctctcaaaccctgccactgctttatcaaacaggtttagtggacccttgaacaatttgtgggttaggagtactggcacccctcctcgtgcagtcaaaaatctgcatctaattttgactcctgtaagttttaattactaattgcctactgttgaccagaaactttac

SEQ ID NO: 929502 - DNA, 570 bp, Homo sapiens
tggggaggccagttaagggcaggtgaccaggaaaagtaaggcacacaagagtaagtttggttaggcacacttaagttgctgctttttccatcgataagcctcttgcgaattatagtcattcttatctttctggtagrgagaaagacactatgacaaaagaagatttattttataaatgtaaacttattttacaaagtgttatttatgctgttttcagagcttctcttaagtctgctgtttctcaaaataatcagctcaaaataatctatatcccaaaaaggcatagttggggtggcatattctggtctcccacaagttccagcaaaagaaagcactgtctaaatgccaggtggaaggatagaaagagaagactagcctttattttgttacctcagtaaatatatgtacttactctactctgatcagtttcactgactgagatgaactgtaatccatttcaaggatgggagagcaggttgcaaacatcgttttgttcaaagagaccaaacaactagaggagacaaaatgttctccacaatgtttccccttccattcaaacctgtctggttt

SEQ ID NO: 929503 - DNA, 502 bp, Homo sapiens
cgtgcactatcagctgtccgtcccggcagatccctggcccttctgccctccctctgaccctgcggagagcagccctgcacttgcactgcctggtctgcttgagtacctttcacatccttttccaccccctcctccaggctcacttcaaatccttytgaagcagccacacttgtacacacacaatccacgtagttaatccatgaattagaacaggtagcaattagaacagcactgccaggtagtaagcactagataaacatgattattagcacctccatctccaactacaacattagttccttaagaggacagatacacttgatttccaatgctgggaagcagagggttttatacagtatggacctagtaatgtctgactcggcaatgttgctgatgtttttcactgaaaattgaatagggcaagaaactcagtgagagtacttgagtaagcagaggacatcttcagaaatgtccctatctgcctacgcagactactgctgcc

SEQ ID NO: 929504 - DNA, 760 bp, Homo sapiens
cggaaactttgagataaccccaccccattccctccctttgccccagggagtattcaagacatgctccaggggaacagaaaaggagggagggtggctttgaggtccctgccaggaatcaccagcagcaaggggtgggggcggrgtggggggttccaagctgctaacagcagttggctctagaaaaaaggtaagggagaagtcctaaaatctgtggggttttaggtttttgttttgttttgtttttgcttatttgtatttcttccttttcctaaaatttatttttgacctatacagttaagtaatctagaaacttaaattgttttgtaaatgtttgggtggcagcaatttaaaaaataagaatatgaatgtatttgttttgtttacagtgcatatacattgaaaacactagtattagcaaggaagaaacaatgaagttcacagtcccaactttctagattatctataactcagcaaagttctataactcagccaattaagcaaagctatcagcaggcgtatgacgttcatgcccaattttaagagaaggaacggactagcaaaacaaaacacacaaaataaatgaaaatacaaaaatcaaatggtacttcttgatatttcaaaaacttacataataaaatccatcttcatcaatttcaccaaaaactgtaataatatctcctgtgcaaaatgtaagttcggcctgtggagatgaaacataaaattaatcgtatttttctacacaacagtagtagttttttaa

SEQ ID NO: 929505 - DNA, 574 bp, Homo sapiens
ccaaaccaagaatgcaatcccatttacaataaccacaaaaacaaacaataaaatacctaggaacacatctaacgaaggtggtgaaagatctctataaggagacttacaaaacactgctaaaagaaataatagatgacacaaacaaatggaaaaacattccatgctcattaattggaagaatgaacatcattaaaacggccatactgcccaaagcaatctacggattcaagttattcctatcaaactatcaatgtcatttttttcacacaactaaaaatactatcctaaayttcatgtggaaattaaaaagagcctggatagccaaagcaatcctaagcaaaaacaacaaagccagaggcatcacattacccaatgtcaaactatactataaggctacagtaatcaaaacagcatggtattgatacaaaaacagacacatagaccagtggaacagaatagagaactagaaataaagctgcaaacctacagtcatctgattttcaacaaagttgacaaaaataagcaatggagaaaggacaccctcttcaataagttgtgctggaatagctggcta

SEQ ID NO: 929506 - DNA, 823 bp, Homo sapiens
ctgcggggtacacgggtgctgggaccctgactgctgggctgggctgagctgcctgcggagacaagaggcccgccgcccagcgaccccaggctctaccttctgtcctggagaccctggttctgagccacacaccgcagccaaggccctggccagtggttctgagccacacaccacagccaaggccactgtggcaagtggttcggagccacacaccrcagccaagtccaccgtggccagtggttctcagccacacaccacagccaaggccactgtggcaagtggttcggagccacacaccgcagccaaggccaccgtggccagtggttctgagccacacaccacagccaaggccaccgtggccagtggttctgagccacacaccgcagccaaggccaacgtggccagtggcgaacagcctaggacatagaggtgggggctttccaggttgaggcacacccagccaagcagtaggccaggggacaagccaggaaggcaggactcatccccaagtccccaggggcccagtccagggaggaaacggaggtacagtcggtcctgctccctcgggggccacatgccataagaaggaagcgcagcagaagtggcagggctcctgcccacctcatgcccccaaccgcaggtgcagccagccgggaaggaagtgaaggcagtgggcctgggccccatcaccttggcaccccttccctgagcagggctgggtggccccgcaggactcttcctgctggagcccaggatccaaacctactccactcagagtctggctaccagccacagacctgggcccatagtcccgtttctagat

SEQ ID NO: 929507 - DNA, 641 bp, Homo sapiens
taagaatgatttgttccctcttattttctgctccctcctaatcctactacctcatatgcataaagggcagatgagttttggggtcttttccagttataatggcatattgctcttgttgagtgcatagccaggagcayatagatacatgctcagcaaatcttggatgaatagatggccctgagagagagtggatgagtggtggatggatggaggggtggatgaataggtgggtgggtgggtaaatgatgaaagggtggatggatggatgggtggatgggtgggtggataaatgggtagatggatgggtacatgtatagatggataggtgagaggacggatgggtgggtagatgcatgggtgggtagatggatgggaggatggatgtgtgggtggatggatgaatgggtggatggattggagggtgattggatggatgggtgggcagatgaggaaggggtggatggatggatgaggtgggtggccagataaatgggtagatggatgaatgggtgggtggctgggtagatggatgcatgaataggttgagtggtggatggatggatggatgggtgggtggatgggaggatggatggatggatgagttggtgggaggatggatatagatgcatatgtggatggag

SEQ ID NO: 929508 - DNA, 753 bp, Homo sapiens
ctgccggctccggggctccaggcatctctggtgcatgtccacagcactctaatctcagctcccggtcacacaaccccatccaccatcttaactgcccttccctccctctaacaaggaccctttacaaggtatgtttctcctcccaaaatcctccaattaaacacatcggcaaacaacagttttccaaatagcaccccgtgcacaggttccagtgatcagagtgtgaacatctcttggggggctactttcagtccctgacagtggggagctgagagttgagcatggctggtgggcgcaggagggccgcttccccagctcctccgctgtcacctcgctgaggctgagcagctycctccatctggttccaggagacaccccctcatcatccaggcagctcttcttgactggggctgggccactctgccccctctgccatgtggtcccaatagcagggctgaaagtgtctaaggacatccctggggaggggcttctggttcaggcagcccaagcctggctcctttgggtcaccgggtggacaatggatgggaaggcagagacagagcagagcgtgggctccaggaggcagcccaggaagaaactggaacatggggcatggggcgtggagggaagtgtgggaaaggatagtggaaggaaaaggtggccgcggactggatgatggcagatccagggcccctttgtgcttcctgcagatctagggctgctgtctactcaggagcctccatttcttcacct

SEQ ID NO: 929509 - DNA, 647 bp, Homo sapiens
ggagggggagctcagggggtaatgcttatgcttcctggctcaccacttacctcctgctctgcagccgggttcctaacaggccttggatgggtattggtctgtagcccggaggttggggacccctgctttagagcacccttaggcttcagcttctccaagctctgttgcaggtgaagtcagttcctttgaaaagaaatgaggagctccctgttttatggcctacttgtcttttccgccctcctttccccctcccccgacaatatccctgagccaggactagagctgaaattggrgacaatggcagttttctctctgagtgacatcctctgccctaggagctgagttttcagtggacttgtggggaagagatgaggaatagcctcaggccctcttgagtaacctcctggtgtagaaccatccccctcatgagccagagaaagagtcatcggggcccagcattttcaacacactgtgcccaaggtgagcccctgttccatgaatggggctgactggaggaagggatcccccacctcacaattgcatttgtccaggatataactgcagccacagggagctggggacaaaatgagaaactctgatgtcctggtcctcctgggagggaagcttctgactcggagttgggggaa

SEQ ID NO: 929510 - DNA, 592 bp, Homo sapiens
aggttccagttctgtgcatcctcaccaagacttgttattgtctttgtggtcattgccatcctcatgcatgtgaagtgataacttattaggatttctctctataaaatgaaattatacattattagtaaccccagcatcttttcatgtgtttcttgaccatttgtatatattatttagagaaatatctattcaagtcttttgctctttttttttctgcaacagggctttgctttgttgcccaggctggaktgcaatggtgtaatcatggctcactgcagctttgacctctctggctcaaatgatcctccccactcagcctcccaagtggttaggactacaggtatgtgccactgtgcctgaataattttaaaatattttgtagagatgggatctcaccatgttactattgttcattttttaattgagttgtttgtctttatgttgttgagttgtaagagttcttaacgtattttagataccagattctcctcagatatatgatttaaaaatacattctaacattctgtaggttgtcttttcactttcttgataatgttctttgctgcacagaagttttaaattataatgaagc

SEQ ID NO: 929511 - DNA, 764 bp, Homo sapiens
ctggctcaaatgatcctccccactcagcctcccaagtggttaggactacaggtatgtgccactgtgcctgaataattttaaaatattttgtagagatgggatctcaccatgttactattgttcattttttaattgagttgtttgtctttatgttgttgagttgtaagagttcttaacgtattttagataccagattctcctcagatatatgatttaaaaatacattctaacattctgtaggttgtcttttcactttcttgataatgttctttgctgcacagaagttttaaattataatgaagcctaatttatctgtttattttcttttgttgcttgtgtttttggtgtcgcagttcagaatccattgcctaatccaagcataaagatttatatctgcttttttgtgttttacaattttaactcttacatttaggactttgatagagtttgagttaatttttgcatgtggatatacagttgtctcagtattatttgttgaaaagactattcttttcgcattgwattaccttggcacgcttgttgaaaataaatggatttctgagctctaaattctattccattgatatatatccctatctttatgctagcaccatacagtcttgcttagtgtaactttgtagtaagttttaaaattgagaagtttgagtgctacaactttgttctttttcgaagtgttttggctatttggagtgccttgaatttccaaatgaattctagggtcagcttgtcaatatctgcaaaaa

SEQ ID NO: 929512 - DNA, 729 bp, Homo sapiens
ctgtggctcagagaggttaatcaacttcatcaaagtcacacatagtgctatgggtggaattgtctccccacaaaagatatgttgaaaccctaacccctactccctcctcagtacctgagaatgtgaccttatttggaaatagggttgttgcagatgtaactagttcagatgaggtcacatggagtccagtgggccctaagtccaacaygactgctgtccttataaaaagagaaagatttggacttggacacagagacagagaagacagtcatatgaagacaggggccaagattggagtgatgccgccacaagcaaggaatccctccctggggctgccagaaactggaagaggcagggaaggatccttcctagagggtttggagggaggtggtcctactaacagcttgatttcagatggagctgtaagggaacacatttctgttgccttaagtcacacagtttgtgatggtctcttatggcagccctagcagactcatacagccagtaagggccaaagccagaaatgtagcctaacatggcctaaccttgaacctcaagctagctcaactctgtcactcagtgactgctgcccgtgaaccttcagtggagtcagaggtccaggcctgccttagagctggtgggaggaggcaatgaatcagaagtgggtgaagtgattggaagccaaacccagttctgggcatttggtgacccctcagcctcctggaaggc

SEQ ID NO: 929513 - DNA, 604 bp, Homo sapiens
ttttcaacacaccagccatgcctagtaggctgagtgtgcagtgatgggcctcagcttttagaatttctaacttcttctttccctttagagcttagctcagatattgcctcctctgaaaatcctttctctgactaccacaacttggatgcccctcaccaatgcttttataggctctcccaactcagacttgattacattgtgatgaaattgctattgtctgtctcttccagcagactgcaagcttttgagggagagagtcatctgtattggttgttgtattacttgcctcagcacaatgaaaatcctgaaataagtatttgttgactaaattttttttgttgttgttttctttttaaaataattttgagtactgggataccaaatttttaaatgaatacatgatttgtgatttttcccatgtgtaaaaatggcagtactgccccctwctaccagaatctaacatccatgcatagaaccaatgatctaaacatttgtgattctcatctctatttacctgttctaacagattggtggagaactgcaatagcttgctgtcctccacatataaaacgggttttagtgtcccactaggaggatgtatagc

SEQ ID NO: 929514 - DNA, 687 bp, Homo sapiens
cttcatgcccaggcagatctccaggtatttggagtgcctgctccctggtcaagcagcctgagccgcctcactattcctggacatagatcatggtgcagtggggtcctctgcattccaagccaagacagatctccaggcacccaaagcacctcattacacagattggcagcctgagctgccaaactctttctgtgaagagatttgggtaaatgcgggccctctatgcttcatgcccaggcagatctctaggcattcagagcacctgtttgcctggtttagcagcctgagttgccccacttttcctgtgcagagatccaagtggagaggagccttctttgctccatgcccaggcagatctccaggcatccagagcatccactctcctggattaggaatttaggcttccccctacatcactgtgcagaggacttggagcctaggaggttttccagattcagacttaggcacacatctgggtgcttggtggctgctcgttggattctccctcwgcactgatgcttgtgcctaccatcaagagacctttaggtgagctggctcagcctggccctgcccactgtggctgctgcctccctgggagctgagcagggagttcagaccactgtgtactccacaagtcagcccatttcctgaggcaacagagaacttttgccagtaaacaaggatcaa

SEQ ID NO: 929515 - DNA, 551 bp, Homo sapiens
tctggactctctatcctcttccattaatctatttgtctgttctttcaccaataccacactgtcttcatgattgtatctttttacagtaagtctagaagttggtcggtgtaagtcctccaattttgttcttttccttcaatattatgttgtttattctgggtcttttgcctctccatataaactttataattagtttgtcaacatctacaaaataacttgaagggatttttattgggtttgtgtttaatctgtagatcaagttgggaataactgacatcttgataatactgagtctttctgtccttgaatatttctctattcatttagttcttttttgacttagtatgagagtttttagttttactcttrtagatcttgtatatattttgttagatttttacctaggtatttcattttggagggtgctcatttaaatagtattgcatttttaattttaaatttcacattcattgctgatatataggagaataatcgacttttgtatattagcctgtctcctgaaaccttcctgtatccttagtatgatagct

SEQ ID NO: 929516 - DNA, 621 bp, Homo sapiens
atagccaaataaccactatagagagaaacataaccgacctgagagttgaaaaacacatggcaagaacttcacaatgcaatcacatgtaataacagaagagacgagatggagaaaagaatctcagaacatgaaaactgtctttytgaaataagacaagcagaccagaatagaaaaaaaaatgaaaagaacaaaacctccaagaaatatgggattatgttaagagacccagactatgactgattggcatacctgaaagagacggggagaatggaatcaatttgaaaaaaatatttcagtatatcatccagagaaattcctcaacctagcaagacaggccaacattcaaattcaggaaatgcagagaaccccattaagataacccacgaacagatcatccccaagacacataatcatcagattcttcaaggtcaaaatgatagaaaaaatgttaagggcagccagagaaaaaggccaggtcacctgcaaagggaagaccatcagactaacagtgaacctctcagtgggaactctacaagccagaagagactgtgggccaatattcaacatttctaaataaaagaatgtccaacccagaatttcatattaggccaaactgagctt

SEQ ID NO: 929517 - DNA, 546 bp, Homo sapiens
ctgtgtgtggtgtgtgccagcccagacaccatcccagatgaacagctcttatccaaaggtaaactgatgatactgacaaggcctaacacagaaagatgaagccaaagagactaggagaatcagaaaatttatgtaataaagacttgagattattttaagtggtcatttggaaatacaaaaatacagctatttttcccactgccatttttgttaatgtcgacagtgtgccaaaattcattcttccttactatgagacgtacttgacagatgccacagttgatttgagaaagagttaaagttggtgctcaggaaaatgaaaatgaagkcatttacatgtctttatgcctagattttagctatgtgattttatgtaaaaatcctcaaagttagaggcagcaaaccaacatggcacatgtatacccgtgtaacaaacctgcacattctgcacgtgtatcccagaacttaaagttaaatttaaaaaagattacatataatggtgtcaaaaaaatcctctaagttaaccttgtccttgcaattttccgcaat

SEQ ID NO: 929518 - DNA, 622 bp, Homo sapiens
tcaaagacctaaatgtgagagctaaagcaatagaaaactatataggtggtggttccccaacactgtgaatgccctatgattacagaatggaaaactacaacaaccaatcaggtaggactactcacggccaagcccttttaggagtaaaaatttgggtagccccaccaggttaagatccacagccagctgaagtgtgtgctgagggcaacaggaatatggaatgggtagtggaagaagatagtaataagtactacctatgactacatgaccagtgatagaaataaggactgtacttgagtattttttccttgtttggttatgaatatgttttggaaatattttttccctctcttatccctcatcatgtaacgtacagwgtgtttgactttatgtcatagtatttaagtatggttaactttacatcatagcatttaagttatggcacatcaagcagaagagcaaacatcacctaaagacttttcatcttctggggaaaggattagtgcactttcagttgtatgcaggggtttatcctgttaggcagaagtatgacctttagttgtcttggtttggagattgaatatggtttaagcagatacatatgcatgtcaagttgacatag

SEQ ID NO: 929519 - DNA, 550 bp, Homo sapiens
tgatctttaatttgtcttaggagtcatatctttgcaaactgccaagctttaaaaatcttccatttgtattcatggaaaaaaaaaaaaagtcaaggctgtttgtgcagtcaagggcaatttactcttcctttctacaagtgagttaacagaccagagaaactggccttaagcactgtgcaaaaagaagaaaatgttaggatttcagcccagtgtgccagagagatctaaaaatctcaaaagaagagttcaggtagctttcttatgcttgtcaggataattgatgcccatataattaggaggctggttggaaattttacttctkgattacattaggcatatacagctaactatatatactgttagatatataattgtacgtattatacaaaattatacatggcattaattaaaatattctttttttattctggctaattaaaacacagatgtttatccaaattgttgttgtagttctgaaagtataatgcctgaagaaaacacaggttgaggaaacaacacaacgtaatgcacgcgttctgtccaggtaatc

SEQ ID NO: 929520 - DNA, 667 bp, Homo sapiens
ctactaagtttatgtaatattctaaatcctttactgccatttcaacaatgttcacagcatcttcaccaggaacagattccatctcaagaaaccactttcttcaaactgagactgccaaaaaaaaaaaaaagaaaaaagaaaccactttctttgcttgtccataaaaagcaatgtttcatctgttcaagttttatcatattacaacagaactaattctagttctattgctgtctctaccatatctgcagttacttcctcctcttaagtcccaaactcttcaaagtcatccatgagggttggaatcaacttcttccaaactgttaatggtgacattctgacctcctcccatgaatcctgaatggtcttaacagcatctaaaatggtgagtcctttccagaagcttttcctttttttttytcctaaatccatcagaggaatcactatctatggcagctagggccttaagacacgtatttttaaaataataagacttcaaggttgaaagtattccttgatccatgggctgcagaatggatgttgtgctagcaggcacaaaaacaacataaatctccttgtacatctccctcagaactcttgcttgaccagatgcattgtcaatgagcagtaatattttgaaagaaaacttttctgagcaggtctcgagagt

SEQ ID NO: 929521 - DNA, 723 bp, Homo sapiens
ggttggaatcaacttcttccaaactgttaatggtgacattctgacctcctcccatgaatcctgaatggtcttaacagcatctaaaatggtgagtcctttccagaagcttttcctttttttttctcctaaatccatcagaggaatcactatctatggcagctagggccttaagacacgtatttttaaaataataagacttcaaggttgaaagtattccttgatccatgggctgcagaatggatgttgtgctagcaggcacaaaaacaacataaatctccttgtacatctccctcagaactcttgcttgaccagatgcattgtcaatgagmagtaatattttgaaagaaaacttttctgagcaggtctcgagagttataatattcagtaaaccatgctgtaaacagatgtgctgtcatccaggctttttgttccacttttagaaaacaagcaggatagacttagcataatccttaagggccctaggattttcagaatggtaaattctttaggttggcttcaacttaaaggcacctgctgcattggcacccaaaatgaggggatagcctctctttcgaagcctcgaagctgggcattgacttctctctagctattaaattactagatggcatcgtcttccaatagacagctacttcatctgcatcaagaatctgttgtttagtataatcaccttcatcaattatcttagttagatattcttgataa

SEQ ID NO: 929522 - DNA, 421 bp, Homo sapiens
tgcactgactaggaattccaatacaatgattcataaaaatggcaatagcagacatccttgcttcatttttgacaccaggggcaaggtttttagtgtttaatcattaaaagtgacatttgtggttagcttttaaaaatactttttattattaagaaagttactttctatttctactttgcaaaggattttttcatgaaytggtgttaaattttatcaaatgctgtttcttaattttttgagatgatcatatttattttctcctccatcctgttaaaatttatacagaattccactatgttcagagaacatactccatatgattttgactttttgaaatttgttgagacacattttatgacccagcttacagtgtattgtggcaaatgtttctcatgtacttgaaaagaaactatacgtctac

SEQ ID NO: 929523 - DNA, 666 bp, Homo sapiens
catgtcatccgcaaacagagacaactggacttcctctcttcctatttgaatactctttatttctctctcttgcctgattttcctggccagaacttccaatactatgttaaataggagtggtgagagagggcatcctcgtcttgtgccagttttcaaagggaatgcttccatcttttgcccattcagtatgatattggctgtggtttgtcataaacagcttttattatkttgagatatgttccatcaatacctagtttattgagtgtttttagcatgaagggtgttgaattttatcaaaggccttttctgcatctattgagataatcatgtggtttttgtcattggttctgtttatgtgatggattacatttattgatttgcatatgttgaaccagccttgtatcccagggatgaagcccacttgatcatggtggataagcttttaaatgtgatgctggatgtggtttcccagtattttattgaggatttttgcatagatgttcatcagggatattggcctgaaattttttttgttgtgcctctgccaggttttggtatcaggatgatgctggcttcagaaaatgagttagggaggaatccctcattttcaattgtttggaatagtttcagaaggaatggtaccagctcttctttgtacctctggta

SEQ ID NO: 929524 - DNA, 748 bp, Homo sapiens
cctcaggtctacagaaaagttcctctttttccactgcactatgtacccatgaagcagtgaaactctggagaataggaattaaccaccctcacctgtgcctccatttcttcctgctgttggcaaactttgagttttctgggcctgtttatgccatgaagcatggcctccttctttggggtggagggttcagttggcaggaattggtcatgcccgtttacattgtgcctgttgcctggctttggacccactaagacctggtttttctttctagggcctctgcctgaagcttggaatagagttaggtattgaaaaggcattttagaggctgtttgtatctgtttggagtgtctcaaatgtgtcccgtcaaagttctcagccagcaggcgtcattcctctgttaagttccctatcagaaacacagttgggtgttgcggggtggggggccctttcacttagaaaaggaaaaaagagaaaaacagtttaaagggaaagaggggaagattctgggggaagaaaaccttgcttagtgcaagtgggtgcccctaatctctatatcwtttccccaaaccgggttgaattccatggccaggagagaaaaggttccatcggcttggcaggctagaagcaccctgtagggtcatggctaccatctccgctttctcccgccccgctcatagctgttgggctcggcctttgcctgctgtgggcacggctaggcacctgtgggaaaggataaggagaggtgtcc

SEQ ID NO: 929525 - DNA, 693 bp, Homo sapiens
gatgggcttgcctttgtgggtaacccgacctttctctctggctgcccttaacattttttccttcatttcaactttggtgaatctgacaattatgtgtcttggagatgctcttctcgagaagtatctttgtggcgttctctgtatttcctgaatgtgaatgttggcctgccttgctagattggggaagttctcctggataatatcctgcagagtgttttccaacttggttccattctccccgtcactttctaggtacaccaatcagatgtagatttggtcttttcacatagtcccatatttcttggaggctttgttcgtttctttttattcttttttctctacacttctcttctcatttcatttcatcatttcatcttccatcactgataccctttcttccagttgatcgcatcrgctactgaggcttctgcattcatcacgtagctctcacacgttggttttcagctccatcatgccctctaaggacttctctgcattagttattctagttatccattcttctaatttttttcaaagcttttaacttctttgccattggttcgaatttcctcctgtagcttggagtagtttgattgtctgaagccttctctcaactcgtcaaagtcattctccatgcagctttgttccattgctggtgaggagctgagttcctttggaggaggagaggcactc

SEQ ID NO: 929526 - DNA, 584 bp, Homo sapiens
atgaacctgggcacttaggtgtgcaggaacaatggcaagcttttagcccaatcaggagtggcaatgggtgccttgctggatcagaagtgcagtggacaccctgccagatctggaggggtggaagtcaatggtgggtctgtgatggcagcrctcagccgtggtggacggcgaatgaaagctcagctcgagccagaacaaacacggaccagaagagtgtacagttgcaagatctaatagagtgaaaacagagctcccaaagggggttgccctcagagatttcttgatcttaccaaatttcccagtgctctttcaaatcctggacttgtcatcagcaagcatcctatgccctcatccttttctctgaacatgtctttcatcttcttgccctactgagacccagatgttttctgtgaacattgttttcctgcaacatctagatggaagttcatgttccacaccttgctctcctttgttgcttccgagtcatttcttctctattctccttcaaagatctcagctcctttgaatgtcatgtcgttagattacaccaccgaacccttgtttgttgcaaacatctagtgacc

SEQ ID NO: 929527 - DNA, 584 bp, Homo sapiens
atgaacctgggcacttaggtgtgcaggaacaatggcaagcttttagcccaatcaggagtggcaatgggtgccttgctggatcagaagtgcagtggacaccctgccagatctggaggggtggaagtcaatggtgggtctgtgatggcagcgctcagccgtggtggacggcgaatgaaagctcagctcgagccagaacaaacacggaccagaagagtgtayagttgcaagatctaatagagtgaaaacagagctcccaaagggggttgccctcagagatttcttgatcttaccaaatttcccagtgctctttcaaatcctggacttgtcatcagcaagcatcctatgccctcatccttttctctgaacatgtctttcatcttcttgccctactgagacccagatgttttctgtgaacattgttttcctgcaacatctagatggaagttcatgttccacaccttgctctcctttgttgcttccgagtcatttcttctctattctccttcaaagatctcagctcctttgaatgtcatgtcgttagattacaccaccgaacccttgtttgttgcaaacatctagtgacc

SEQ ID NO: 929528 - DNA, 584 bp, Homo sapiens
atgaacctgggcacttaggtgtgcaggaacaatggcaagcttttagcccaatcaggagtggcaatgggtgccttgctggatcagaagtgcagtggacaccctgccagatctggaggggtggaagtcaatggtgggtctgtgatggcagcgctcagccgtggtggacggcgaatgaaagctcagctcgagccagaacaaacacggaccagaagagtgtacagttgcaagatytaatagagtgaaaacagagctcccaaagggggttgccctcagagatttcttgatcttaccaaatttcccagtgctctttcaaatcctggacttgtcatcagcaagcatcctatgccctcatccttttctctgaacatgtctttcatcttcttgccctactgagacccagatgttttctgtgaacattgttttcctgcaacatctagatggaagttcatgttccacaccttgctctcctttgttgcttccgagtcatttcttctctattctccttcaaagatctcagctcctttgaatgtcatgtcgttagattacaccaccgaacccttgtttgttgcaaacatctagtgacc

SEQ ID NO: 929529 - DNA, 584 bp, Homo sapiens
atgaacctgggcacttaggtgtgcaggaacaatggcaagcttttagcccaatcaggagtggcaatgggtgccttgctggatcagaagtgcagtggacaccctgccagatctggaggggtggaagtcaatggtgggtctgtgatggcagcgctcagccgtggtggacggcgaatgaaagctcagctcgagccagaacaaacacggaccagaagagtgtacagttgcaagatctaatagagtgaaaacagagctcccaaagggggttgccctcagagatttcttgatcttaccaaatttcccagtgctctttcaaatcctggacttgtcatcagcaagcatcctatgccctcatccttttctctgaacatgtctttcatcttcttgccctactgagacccagatgttttctgtgaacattgttttcctgcarcatctagatggaagttcatgttccacaccttgctctcctttgttgcttccgagtcatttcttctctattctccttcaaagatctcagctcctttgaatgtcatgtcgttagattacaccaccgaacccttgtttgttgcaaacatctagtgacc

SEQ ID NO: 929530 - DNA, 608 bp, Homo sapiens
ggaaaataagaggtctgaatactaaaaaaatcaatttttgtgttatctgagagaagcaaaatgataaatgtctacaaaagccttaggtgccagaaaaacagttttatatgaaaataaaaatgagtcaattcactggttgtatctctcttaaacataaagcaaagaagcaatagtattagcttgttttaaagtccaaatcttattgtcccggccgattcttaggaggactgaaacattgttatgcatgtgctgtgtgtgtgtgtgtgttgtggggaagaggtgtatagtgtgaaactttttcttttacactggcttctttcttwgtatggcaaactttagagcagtcatctgcccccttaacattggtgaccagcacacgatagtaagaattttttgtactcagaattttttatacaacactggttgtatacaccaaccagtgagattccttttttatcttcattttagattaaatatatcaacaacgggtatgcttctgttaacttagatgacatagtgttatttcctgagctgtaactcatctctgcagattctgcttttaaatgggacattccttcaatcctgaagtaaagccacatctgcagaga

SEQ ID NO: 929531 - DNA, 608 bp, Homo sapiens
ggaaaataagaggtctgaatactaaaaaaatcaatttttgtgttatctgagagaagcaaaatgataaatgtctacaaaagccttaggtgccagaaaaacagttttatatgaaaataaaaatgagtcaattcactggttgtatctctcttaaacataaagcaaagaagcaatagtattagcttgttttaaagtccaaatcttattgtcccggccgattcttaggaggactgaaacattgttatgcatgtgctgtgtgtgtgtgtgtgttgtggggaagaggtgtatagtgtgaaactttttcttttacactggcttctttcttagtatggcaaactttagagcagtcatctgcccccttaacattggtgaccagcacacgatagtaagaaytttttgtactcagaattttttatacaacactggttgtatacaccaaccagtgagattccttttttatcttcattttagattaaatatatcaacaacgggtatgcttctgttaacttagatgacatagtgttatttcctgagctgtaactcatctctgcagattctgcttttaaatgggacattccttcaatcctgaagtaaagccacatctgcagaga

SEQ ID NO: 929532 - DNA, 619 bp, Homo sapiens
agctgccttggaaaacactacagaagacactaaaaaagttcaacatactatatggtccagcaattccactcctaggaatactctcaagagaaatggaaacatacgtctacaccaatacttgcatatgaatgcccacagcagcattatccatagaagtcaaagagttgaaacaatccgartgtccaacaactgatgactggacatcactgaccataaaatgtgtgatatggtttggctgtgtctccacccaaatctcatcttgaattttagctcccataattcccacgtgttgtgggggggacccggtgggagataactgaatcatggggatgggttttttcccatgctgttcccacaacagtaagtctcacaagatctgatggttttataaagggcagttcccctgcacatgctctttcttgcctgctgccatgtaagacatgcctttgcttctcctttgccttccaccatgattatgaggactccccagacatgtggaattgtgagtccactaaacctcttccctttataaattaccaagtcttggttatgtctttatcagcagcatgagaacagactaatactgtaaactggtattgggaggggggcattgctgtaa

SEQ ID NO: 929533 - DNA, 606 bp, Homo sapiens
gtaggtgtcttcagtgattggtttgaggagcctatttgtttttctgtggttgattctgagttgcaagagtcctgaccatttggggctgattgctgctgaggttgtggttttcttgcaggacaggcaagccccaaattgggccttagcccatgagggttcctggctttacccaggaaagaattcaagggtgagccagtggtaaggtggaagaaaacaacttcatkaaagaggcagtgtgacagctccgtgacttttcctgcagagtagggctgctccgcaggcagtgtgctgaaagcagctcagggcagttgtgcagtcagatctatatctacttttaattgcacgcagattaaaggacagtttctgaagacatctgtaggaaaagggtagtaacttctgggttgttgggtcattgccatggaaaggggtggtaaatcctgggtgttgcgatggcaatggtaaactgacatggcaaactggtgggcgtgtcttaaggacggctgcttcggcccctccctgttttagctagtcctcaatttggtcggctgtctgaaccccacctctggagtcgaatctcgccttctatctcattttgagttccttgga

SEQ ID NO: 929534 - DNA, 606 bp, Homo sapiens
gtaggtgtcttcagtgattggtttgaggagcctatttgtttttctgtggttgattctgagttgcaagagtcctgaccatttggggctgattgctgctgaggttgtggttttcttgcaggacaggcaagccccaaattgggccttagcccatgagggttcctggctttacccaggaaagaattcaagggtgagccagtggtaaggtggaagaaaacaacttcattaaagaggcagtgtgacagctccgtgacttttcctgcagagtagggctgctccgcaggcagtgtgctgaaagcagctcagggcagttgtgcagtcagatctatayctacttttaattgcacgcagattaaaggacagtttctgaagacatctgtaggaaaagggtagtaacttctgggttgttgggtcattgccatggaaaggggtggtaaatcctgggtgttgcgatggcaatggtaaactgacatggcaaactggtgggcgtgtcttaaggacggctgcttcggcccctccctgttttagctagtcctcaatttggtcggctgtctgaaccccacctctggagtcgaatctcgccttctatctcattttgagttccttgga

SEQ ID NO: 929535 - DNA, 607 bp, Homo sapiens
gctcggttttcacacaagccatttgtttatcaaactagatctgctaatactgaagacagtcgatttggtgattgtagttctcatacaattataaatatcttattgaggtaacattttgacagtttcactgactttccaaataaacatttgattggaagaaaacagatcaaatatggatttcacaaaccaaaagtttataaactcaatgcaatacaaatcctttttattgtaaaagctgagttgaractaaaagatttataaaaactattacttttggccttaaacagtaccaactcttatgatcaaaaaaggccacaacatttaagactgtattgctcgattttattttacactaggtggtgggcacaaagcaatcctccttaataaaggtgacaattgcttcactcaacatttttaataatgcacattaaaaaaaagttcatcttacaaattcttctgcaatccaaacatacaattgcttggagaacaacatttagaaaacaaaagccaatgtaaaaagacagattaaaacaactagaaaagtacaggttttgtttgtatgactcggattttacagttttcttactgcatcatcaatgacagaaat

SEQ ID NO: 929536 - DNA, 607 bp, Homo sapiens
gctcggttttcacacaagccatttgtttatcaaactagatctgctaatactgaagacagtcgatttggtgattgtagttctcatacaattataaatatcttattgaggtaacattttgacagtttcactgactttccaaataaacatttgattggaagaaaacagatcaaatatggatttcacaaaccaaaagtttataaactcaatgcaatacaaatcctttttattgtaaaagctgagttgagactaaaagatttataaaaactattacttttggccttaaacagtaccaactcttatgatcaaaaaaggccacaacatttaagactgtattgctcgattttattttacactaggtggtgggcacaaagcaatcctccttaataaaggtgacaattgctycactcaacatttttaataatgcacattaaaaaaaagttcatcttacaaattcttctgcaatccaaacatacaattgcttggagaacaacatttagaaaacaaaagccaatgtaaaaagacagattaaaacaactagaaaagtacaggttttgtttgtatgactcggattttacagttttcttactgcatcatcaatgacagaaat

SEQ ID NO: 929537 - DNA, 757 bp, Homo sapiens
aacgagagctcaagttgactgcctttccactggaagtgtccttcagaactggaaccgggccgggtgcggtggctcactcctgtaatcccatgggaggccaaggcaggcagatcacctgaggtcaggagttcgagaccagcctggccaacatggtgaaacgccgtctccaccaaaaatacaaaaatatcaggctgggcacggtggcaggtgcctggaatctcagctagtcagggaggctgaggcaggagaatcgcttgaacccgggaggcagaggttgyagtgatctgagattgcgccactgcactccagcctgagtgacagagtgagacaacgtctcaaaaaaaaaaaaaaaagaagaagaagaagaactggaactggaacaggagcttcctggaagattgactggggttaggggttgcaggcgagtaagcctgtcagagaatggagcctcctgccaacagagggggagctggcatacagaggccgggtgggagcgtggccgggcctgccatcagagtggctgtggtactactgggccagatgcaaatctggagccaagggtggagactgagctttgcccaagccttcatgatgaatcagcgcattagctcaagaccggggcaggaagtgaaccagggtctgtgtgtctcagacagtcctgagttaattcagacagaactattgtgctctgttcatttatcccttttattcttttttcttttcacggatgggctttagatttccatttgtggcctct

SEQ ID NO: 929538 - DNA, 629 bp, Homo sapiens
gaaaaatcctgtgtcccaattgccctcactccagcttacttgtaaggaacagtttctccaccaggagaggcaaggcaagaagttacctttcccaccctgtgccctacttgtaagcagaggttttactacaaaggagcaggccactctcactctccacagcttcagagcagtgaggcacatttaaccaagaggtagagggaggccatgaaaatacacagcttggtagccctccccaagtgaactgatttctatttggaacagagcacagataagtttaagctagtggtatgaagatattggcagtaagcaattaagagaatgttgataactccaagagagtaatgagttaagccagggaagtttaacagagaaaagaaaaaagaatcagcaaacttgaagcaagatcagtagagattatgtatcctgaagartacagagaaataataatgaaaaaaataaacagatcatcagagaaatatcagacataactaagcacaccaacatatacgtaattgaaaataccaggagagagagaaaggatcagaaaaaaatatttgaaaaataatggttgaaaacatccccaaattaataaaaatcattaatctaagatacagaagctcagtgaaata

SEQ ID NO: 929539 - DNA, 587 bp, Homo sapiens
acaaacccacaaccaatatcatactgaatgggcaaatgctggaagcattccctttgaaaaccagcacaagacaaggatggcctctctcaccactcctattcaacatagtattggaagttctggccagggcaatcaggcaagagaaagaaataaagggtattcaaataggaacagaggaagtcaaattgtctccgtytgcagatgacatgtttgtacatttagaaaaccccattatctcagcccaaaatctccttaagctgataagcaacttcagcaaagtctcaggatacaaaatcactgtgcaacaatcactagcattcctatacaccaataacagacagagaaccaaataatgagtgaactcctattcacaattgctacaaagagaataaaatacctaggaataaaacttacaaggggtgtgaaggacctcttcaaggcgaactagaaaccactgctcaaggaaataagagagaacacgaacaaatggaaaaacattccatgcttatggataggaagaaccaatatcgtgaaaatggccatactgcccaaatgaatttatagattcaatgctattcccatcaagc

SEQ ID NO: 929540 - DNA, 644 bp, Homo sapiens
ctctactctactgcacctgagctggcacctaaccacaagacaaagtccttccttctttttcctcccattttcacaggcagaagattctcttcccatggccaccaccccacaggcccatggggaacactgccaggctaccactggyattcacttaaggcccaagggctctttagtcagcctgtggtaaattctgcctggtctaggattcaccctttggggcagtgggcttacctctggcccaatgcaggtccagaaatgccatctaagagccaaggcctggaatcagtgactgcaagagcccacttggtgttctttcccactgtggctgagctggtacctaacctacaagacaaaatcccctttactctttcctctgctattctcaagcagaagtctctcccatagccaccacatgtaggaatgttctgggtcacatctgaaaccagcacatttttggagtcttgccaaaggcccacggcaagtagtacctggctattgctggtgattatttagggttcaaggggtccttagtcaacagttgatgaatcttttgtggactgggtccttcccttcaaggcattgggtttccttttggccaaaggtgtgtctcaaaatgttatgcaggagctagggcatggaatggg

SEQ ID NO: 929541 - DNA, 596 bp, Homo sapiens
tctacttgtcttaggctgtttctggtttatagggtttttattattgactcaatatcaagactcattattggtcagttcagggttttaattcctggttaaatcttgggaggcttatgtgtacaggaatatatctatttcttttagattttctacttctgtgcatagaggtgttcataacagtctctctgtgttttttgtatatttgtggggtcagataatgttctctttttcatttctgattatgtttatttggatcatctctgttttattattagtctggctagcagtctatctactgcattgattctttcaaataacmagctcctggattcattgatattttgtatggctttaaacacctcaatttccttcagtttaggtatgattttggttatttcttgttttctgctagctttgatattggtttgctcttgtttatctagggcctctagttgtgatgttaggttgttaatttgagatctttctaaatttttgacgtgggcatttagtgctataaccttccttcttttttattttactttattttatttttttattattattatactttaagttctagggtacatgtgcacaac

SEQ ID NO: 929542 - DNA, 545 bp, Homo sapiens
tatagctcaccaggcagctgagtaggctttggctcgcaacatcattatatattaaaaacatttatcaaaagcacagtaataacctgacttctacaaaatttagaagtccttgtgtttaagtaattagtaaacttagtatctcttgccttccaagtcggtagtcattgtcttgyggaaggattatcatttaaataaagtataaacataagacaatttgttcttctcactgggtgtgcacaggtactaacaatttcaccatcttcccaaacatatacggtggggaaaacagagcttcagtccttctctaccttaggtgatctcctgagactatgagaatgctctcctgtaattataccagcccctattaaacaagtcacaaattcaattgacaaatttattgaacacctgctatatatcattcactatgctggcagcaaaaccaaacacggtcccttttctccaaaggcaggagacacccatcaatcaaatatgtgcaaacaaatctaaaattcaaatttgataaggactgcagagaagcatttgga

SEQ ID NO: 929543 - DNA, 594 bp, Homo sapiens
cttcctgctcccaaaccagttcttcctgcaatattctcaatcttggtaaacttatatccaattgatatagtttggatatctgtacccacccaaatctcaggttgaattgtaatccccagtgctggaggtgggggccggtgggaggtgattggatcacgggatggatctcwcatggcttggtgccgtcttcatgatagtgagtaagttctcgcgagatctggtcatttaaaggttgtgtgtacccccctcaccctccctctctcttgctcctgcttttgccacttgaggtgcctgctcccctttagccttccaccatgataggaagcttcctggggcctccctagaagccaagcagatgccagcatcatgcttcctgtaaagcctacagaactgtgagccaattaaacttctttttcttataaattatccagtttcaggtatttctttatagcaatgtaagaacagcctaagaaatcaatccatcagcaaactctcttagttctacctctggaacattttgcgaatctcaatctttctccacatctgatgccttaatattccaagccactgccatctcttacctccccttctgtg

SEQ ID NO: 929544 - DNA, 735 bp, Homo sapiens
cccccctcacttcccaagacaacccccagcttcaggtcctcatggggaggggagggcacgttcttgatacatgggaacttcgctcaggagggcctccccttcccctctccctcagagttttcactgccgtctcgtctttagaaagctgtttgaattccccccgcccccagtttggaccgtgtagatataactggatatacggatttttctctttgtgcaggcttcttatgccgttggtatacagggcaggaaagagaggaataaagggagagagcagtgtggaaaccacggtggttttgctttgttcttactaggttttggtgccaccttccctgcctgcgcttgtgccccctctcctccttggcactggcggcctccttgcctcccttccaccmgtgctgccatcccgtgcctgtcgtgttggttcttcacacgtgctctgttctcggggttgttccattcatgccttcttggagggtgagggtggcttgggaaccgacccagtgatcatgcctactttcttctttgtatctccctccttcccagcccacccgggcagcagactctgatggaaggaaggtgccgtaggtgggcttttagaaactaacgggactggttttcaaagcagttatcttgggaaactgtttattccagcgatgtgacttttttcagaatatttcttggaatcatattcagagtctggggctgtgtgttgagcagccttaaggatgctag

SEQ ID NO: 929545 - DNA, 599 bp, Homo sapiens
taggccaggcatggtggctcacgcctgtaatcccagtactttgggaggctgaggcaggaggatcacttgaggtcagggattcgagcgcagcctgggcagcatggcggaaccctgtctccactaacaatacaaaaattagctgggcgtggtggcacatgcctatggcgggtgcgggggaggcaggaggatggtttgaacctaggaagcaaaggttatagtcagccaagrtcgcaccactgcactccaggctgggcaacagcgtgagactctgtctcaaaaaaaaaaaaaaaaaaaaaaaggaaaaatgcatttaaagtaactttggaaaaaatgaattaagaacttttcccttcctaattaaaaaacagcgaattgactacctaataaagccagtaattgtgactagggagcattatcattgcctagcagagtttcccaaatcgtggctccgaagccctgtggctctctttcagcacattatgcaagtctttggcacgaagtagaaaggaataagggtggaattcaaagttcatatatagtagtaaggatttagaaaagagatgaagatacacactcaaggaaaattaatataaaatgga

SEQ ID NO: 929546 - DNA, 487 bp, Homo sapiens
aagacaaggatgtctgctgttgccacttttattcaattcagtactagaatttctagccagggtgattaggcaagaacacaaaataaaagccatctaaattggaaaaggacaaagtaaaattagtctcagatgacattttgtgtagaaaatctcaggaattcactaaaacactattagaactaaagaacaagttcgcaatgttataagatatgcaagatcagtacaccaaattgtatttctctatagtagcaatgagcaaactaaagattaagaaattgtttcaaaaagagataaatttttaaaaagaagtgcagtacttgtacaytgcatcccacaaaacatttttggaaaaaaatttaagacccagttaaatgggaagatgttccacattcatggattggaagacttaatactgttaagatgtgaatacttcccaaattgatctattaattcaacataatccctatcagaatctcagctggctctt

SEQ ID NO: 929547 - DNA, 589 bp, Homo sapiens
ttaaatcttttctctcttttcacattttaatgtaggctgtcaagagaagccaagccacaactttcacactttgcctagaaatttccttatccaaatatgtaatttcagtgttcaccgctctaccttctgcaaaacactagaatacaggcacaattcagccaagttctctgacgctttttaaaaaaatttgttttcttttactttaagttctgggatatatgtgctgaacgtgcaggtttgttacacaggtatacatgtggtttactgcatctatcaacctgtcatctaagttttaagccctgcatgcattaggtatttgtcctgatgctctcccttccctttcccccccaccccgatggctttttctccattgtccaataacatggtcctcatttccctctgagaccttatcagactggcctttattacccatatttctgccaamgttctgttcatgatcacttaggtattttctaggaggattaaggctttctttatagctctcctcttttctttctgagccttcaccagaatcacctttaaaggtcaattcacagcaatgtaggctttttctagtgtgcacctccga

SEQ ID NO: 929548 - DNA, 569 bp, Homo sapiens
gaaggattgataccatatagactttttttttttaggcggagtctcgctctgtcacccaggctgaagtgcagtggcacaatctcggctcactgcaacctcaccctcccaggttcaagcgatagaatcactttttgagaaataaaaaagcaaaagacagagagaaattatgagacgtttccataaagttacaccaagtgttcctacctctcctgcctccccttccaccttcatgtcttcygcctctgccacccgtaagacagcaagaccaactcttccttttcctcctcagcctactaaacatgaaaatgatccactcccacttaatgaatagtaaatatatgttctctgccttatgattttcttaataacattttttctgtatcttattttgttgtaaaaatactgtatataatacatgtaacacaccaaatatgtgttaattgactttgtgttattggtaaggcttctggtcaacagcaggatattaatagttaagttttgggggagtcaaaagttatacgtagatttttgactacataaagggtcagtaccccaactcttatgttgtt

SEQ ID NO: 929549 - DNA, 569 bp, Homo sapiens
gaaggattgataccatatagactttttttttttaggcggagtctcgctctgtcacccaggctgaagtgcagtggcacaatctcggctcactgcaacctcaccctcccaggttcaagcgatagaatcactttttgagaaataaaaaagcaaaagacagagagaaattatgagacgtttccataaagttacaccaagtgttcctacctctcctgcctccccttccaccttcatgtcttctrcctctgccacccgtaagacagcaagaccaactcttccttttcctcctcagcctactaaacatgaaaatgatccactcccacttaatgaatagtaaatatatgttctctgccttatgattttcttaataacattttttctgtatcttattttgttgtaaaaatactgtatataatacatgtaacacaccaaatatgtgttaattgactttgtgttattggtaaggcttctggtcaacagcaggatattaatagttaagttttgggggagtcaaaagttatacgtagatttttgactacataaagggtcagtaccccaactcttatgttgtt

SEQ ID NO: 929550 - DNA, 464 bp, Homo sapiens
cgtctcctacctcccctccagccacgttgtcttccttgctgtttctgggacatgccaagcatgatcctgtctcagggtctttgctgtccctcatctcttatgtgtctttattcaaatgtcaccttctcaatgactgctccatttaaaacttcagcctagtgcacctgtcccctgttcctgctccactttctcctttcccataacacttcctgtcatctaacatgttacataatttacttgctatgttttttgtttactgtccrtcttaccctatcacatccaataccttgtgagatccaggagagcaggaatttgggcctgttgcatgctgaatatcccacatactgagaacagtgctcaacatatactaggggctcagtatatatgtgttagggagagagggagagagagcctactatgtgcaactacttttactgacactatcttgcttaatcctcataaca

SEQ ID NO: 929551 - DNA, 761 bp, Homo sapiens
tgtctgatctgccctgagagccaagttcccatccaagagtctgctgcctgacaacctgtcagtcactccccaaggagagctccttcccagggtagctccttcccaggctcccttggcctcagggcctgctaggacccaagcaaatgggcaacatgtacagggctttgacaaggaagggaggcagccactcagacgccaacaacagacagacgcacgctttttcagcctcctgctttttaagccgattctctgaacacttagtcccaattctaaattccttaagctcctttgcttactgctttaagagatgcaaacttttcttargcatttctccttcccctggacttcatcctcacttcctaggttggcctacttggttggacatgcctggccactgcacatcctgccctgtgtatcctgttggcctgaatgtgggaccaggaagaaaggagggagggaaagacccagaccatctagggtggggtcatgctgctgaggtcgaatccagagggaagggtgactgttggaattacagactctgctcatcactcctttggggagctgaagttgaggggagtgctgccctgttgtgcttctgtactggttccatttcaacaaacaggcattgatgcctgctctgtgacagaccctatgctaggcccctggtccaggcatgattccagctcctgaagggcttttagactgatagggacaagagctcagcaaacaaataatgaggacgcagatgatcattgctctga

SEQ ID NO: 929552 - DNA, 702 bp, Homo sapiens
ggctgggagtgaagaggtgaatctcactgaggttggagcttttcaagaagagtataataaagcaagaaagggaaaatatagttgaagagagaaattatgatgatgagaatatgctctaagctagatatggaagggaggggagtgaagcctccacaggtactgatagttggggcgrgggggtggtgaaaaggagtggtatctgtagattggaggtctctgtggggtcaaaaacttgctggaattgggacactcaaactggaaagataagaggggggatgatcagagagtgggttgcttgaaactcaaattaggtaaaatttgcaagtattgggaataataaggtgcagtacatgaccatgggaatgatggctagacgagggtgtgagacaatggaggagatgaggtcaatgaatacatgagccaggatacagggaggaagagctgcatgattatttaaattatgtctcagtgaaattattgatttaaactaaatgagagcaaaagtgagatataatcttcaagaaatgagggagcatgacttagaggtcagtagatgacagcaatgaagtgggaataggggattgtatagcctggtgatgtgattaaaagcagagtgttaaggcagaggggtgaagtggtcaacaagcatcaagatgggcaaggaaaacttttacccccaccagggatctgtgtggtacaagg

SEQ ID NO: 929553 - DNA, 664 bp, Homo sapiens
cctcacttctgttttctgtacgtcactttcctttttctgtccatgtatctttttttttttttcccaaggtggagtcctgctctgttccaggctggagtgcagtggcacaatctcggctcactgcaacctctgcctcctgggttcaagcgattctcctgcctcagccttctgagtagctaggattataggcacgtgctaccacgcctggctaatttttgtatttttagtagagatggggtttcaccatgttagccaggctggtctcaaactcctgmccttgtgatccgccggccttggcctcccaaaatgctgggattacaggcatgagccactgcgcccagcctctgtccataaatcttcttccacctcatggctccgctggagtccccaagcctactctggctcagaaggctgctggattcaccagtcactcattgctcaattaaacctctttaaatttaatttggctgaagtttttcttttattaaaacaatagctggagtaatttctttctaattctgcttttctttgtcattcttactgtcttcattgtacagataaggaaactgggatccaggtggaatgagcgaagcaggggagggagatgcggtggattaactttggcccgtgaggaaggacctgggacctgtcggagcactggttt

SEQ ID NO: 929554 - DNA, 664 bp, Homo sapiens
cctcacttctgttttctgtacgtcactttcctttttctgtccatgtatctttttttttttttcccaaggtggagtcctgctctgttccaggctggagtgcagtggcacaatctcggctcactgcaacctctgcctcctgggttcaagcgattctcctgcctcagccttctgagtagctaggattataggcacgtgctaccacgcctggctaatttttgtatttttagtagagatggggtttcaccatgttagccaggctggtctcaaactcctgaccttgtgatccgccggccttggcctcccaaaatgctgggattacaggcatgagccactgcgcccagcctctgtccataaatcttcttccaccwcatggctccgctggagtccccaagcctactctggctcagaaggctgctggattcaccagtcactcattgctcaattaaacctctttaaatttaatttggctgaagtttttcttttattaaaacaatagctggagtaatttctttctaattctgcttttctttgtcattcttactgtcttcattgtacagataaggaaactgggatccaggtggaatgagcgaagcaggggagggagatgcggtggattaactttggcccgtgaggaaggacctgggacctgtcggagcactggttt

SEQ ID NO: 929555 - DNA, 664 bp, Homo sapiens
cctcacttctgttttctgtacgtcactttcctttttctgtccatgtatctttttttttttttcccaaggtggagtcctgctctgttccaggctggagtgcagtggcacaatctcggctcactgcaacctctgcctcctgggttcaagcgattctcctgcctcagccttctgagtagctaggattataggcacgtgctaccacgcctggctaatttttgtatttttagtagagatggggtttcaccatgttagccaggctggtctcaaactcctgaccttgtgatccgccggccttggcctcccaaaatgctgggattacaggcatgagccactgcgcccagcctctgtccataaatcttcttccacctcatggctccgctggagtccccaagcctactctggctcagaaggctgctggattcaccartcactcattgctcaattaaacctctttaaatttaatttggctgaagtttttcttttattaaaacaatagctggagtaatttctttctaattctgcttttctttgtcattcttactgtcttcattgtacagataaggaaactgggatccaggtggaatgagcgaagcaggggagggagatgcggtggattaactttggcccgtgaggaaggacctgggacctgtcggagcactggttt

SEQ ID NO: 929556 - DNA, 650 bp, Homo sapiens
ataggcccacctccggtcccctgagtcagccagagagagaagaaaacgaaggaggtgacaaagcagaaaaaaggaccgggaggaggatgaaaagaaataaagagtggagaagaggaagaaaaaatcagagggctaaaaatcaaacagtgaaggaggaaaagggaggaactggagaaggaaggaaagagaggaggaaatgaagtacaaggagaagatggaaaagcaagaggagaaaggaaagaaggaaggagggagagagagagagggcagaggctggaaggctggagcccaagcccaagctatcattcttaatagctgaagatgctgaagggaggggaaaaaacagggttggggaggactggcgggaggaggagaccrcacaggcaggaagggaagtacgaggttgctccaggtacgaagcatgagcctggatggagcctcacccacccagctcccagctctggaaacacagccctccccctggacgaaggtccctcggtgcaatgccgcagactgtgtccacggccatgcaggctgcagacagaggaatctctcacttggggtggtcagagttgtgggaccggttggatggagccctacactctcttcctaggatggcaacagcgtccgccccaggctgcatgaccatg

SEQ ID NO: 929557 - DNA, 650 bp, Homo sapiens
ataggcccacctccggtcccctgagtcagccagagagagaagaaaacgaaggaggtgacaaagcagaaaaaaggaccgggaggaggatgaaaagaaataaagagtggagaagaggaagaaaaaatcagagggctaaaaatcaaacagtgaaggaggaaaagggaggaactggagaaggaaggaaagagaggaggaaatgaagtacaaggagaagatggaaaagcaagaggagaaaggaaagaaggaaggagggagagagagagagggcagaggctggaaggctggagcccaagcccaagctatcattcttaatagctgaagatgctgaagggaggggaaaaaacagggttggggaggactggcgggaggaggagaccgcacaggcaggaagggaagtacgaggttgctccaggtacgaagcatgagcctggatggagcctcacccacccagctcccagctctggaaacacagccctccccctggacgaaggtccctyggtgcaatgccgcagactgtgtccacggccatgcaggctgcagacagaggaatctctcacttggggtggtcagagttgtgggaccggttggatggagccctacactctcttcctaggatggcaacagcgtccgccccaggctgcatgaccatg

SEQ ID NO: 929558 - DNA, 728 bp, Homo sapiens
gtggtgcgatctcagctcactgcaacctccacttcccaggttcaagcaattctcctgcctcactcagcctcctgagtagctaggattacatgcgcataccaccatgcctggctaatttttgtatttttagtagagacagggttttgccatgttggccaggctggtctcaaactcctgacctctggtgatcctcccaccttggcctcccaaagtgctggaattacaggcattagccactgtgcccagccaagtgtcctgtctctcttaagggggtggctccttccagtcaggtagaacaagagagaagagagcagaggctcaggctctcaggcacgcttccgacacttttggagccccagttttctcatctcctcaatggtacgagtaatattaaatagtatctgtccaggwttcttgagagaactcagtgtgactgtgccaggagcctgtgcagtgcaggctctccacacacgcccgtggcttcctcatgccctgaagcatgagggtgggctacgtgcttgttaattgatggaaatgcctgggtggaggacatcacatcttgaggtagctggaactgcacagggcctctgctctgcgcctggcctgcacgtgacatggtgtgagtaaggagtccttttttcttcttcccctacccactgcctgtcctctcttgccctggggaaggaccagccccctcagagcttaagcaggtaaaggacgcggagcag

SEQ ID NO: 929559 - DNA, 728 bp, Homo sapiens
gtggtgcgatctcagctcactgcaacctccacttcccaggttcaagcaattctcctgcctcactcagcctcctgagtagctaggattacatgcgcataccaccatgcctggctaatttttgtatttttagtagagacagggttttgccatgttggccaggctggtctcaaactcctgacctctggtgatcctcccaccttggcctcccaaagtgctggaattacaggcattagccactgtgcccagccaagtgtcctgtctctcttaagggggtggctccttccagtcaggtagaacaagagagaagagagcagaggctcaggctctcaggcacgcttccgacacttttggagccccagttttctcatctcctcaatggtacgagtaatattaaatagtatctgtccaggattcttgagaraactcagtgtgactgtgccaggagcctgtgcagtgcaggctctccacacacgcccgtggcttcctcatgccctgaagcatgagggtgggctacgtgcttgttaattgatggaaatgcctgggtggaggacatcacatcttgaggtagctggaactgcacagggcctctgctctgcgcctggcctgcacgtgacatggtgtgagtaaggagtccttttttcttcttcccctacccactgcctgtcctctcttgccctggggaaggaccagccccctcagagcttaagcaggtaaaggacgcggagcag

SEQ ID NO: 929560 - DNA, 728 bp, Homo sapiens
gtggtgcgatctcagctcactgcaacctccacttcccaggttcaagcaattctcctgcctcactcagcctcctgagtagctaggattacatgcgcataccaccatgcctggctaatttttgtatttttagtagagacagggttttgccatgttggccaggctggtctcaaactcctgacctctggtgatcctcccaccttggcctcccaaagtgctggaattacaggcattagccactgtgcccagccaagtgtcctgtctctcttaagggggtggctccttccagtcaggtagaacaagagagaagagagcagaggctcaggctctcaggcacgcttccgacacttttggagccccagttttctcatctcctcaatggtacgagtaatattaaatagtatctgtccaggattcttgagagaactcagtgtgactgtgccaggagcctgtgcagtgcaggctctccacacaygcccgtggcttcctcatgccctgaagcatgagggtgggctacgtgcttgttaattgatggaaatgcctgggtggaggacatcacatcttgaggtagctggaactgcacagggcctctgctctgcgcctggcctgcacgtgacatggtgtgagtaaggagtccttttttcttcttcccctacccactgcctgtcctctcttgccctggggaaggaccagccccctcagagcttaagcaggtaaaggacgcggagcag

SEQ ID NO: 929561 - DNA, 629 bp, Homo sapiens
gctgcctaacgacccctcgcccccatttcccctttcccatcccaacaagagcacaaatcacgagccttcaggttttgcacaattttgctcaatttcctgcctgaatggcacagggcctgaccctctgcaggtgctcaggaaatgttcgtggaatcaataaaggacagctaaatctcccatcttctgaaagctctttgtctcctccctccctcctgctccccacactccatcagggtggctggtggcctcctcctctggaaagcctctcgaatggctcctttctcttctttgcccctgctgctgctctagtggagtccttgctagcacttacgcgggccactgcactaggctgctcagaggtctctctacctccatttcccrcctctgatgcagtcgccctgagctgccagcgctctctcaggagcatcctgccagcaccactccctaacttacagctccagcggcccccactgctggagaaatggcgcccgcctgcccttccagatctggcatgctggcctcttcttcctctctgagagccccgcctgctatttaacatgcaggtcaacacttgtctgtctccagggctttgctgtcccttctgcccagtgtccttccattcctcacag

SEQ ID NO: 929562 - DNA, 619 bp, Homo sapiens
tgatccactaatatcctgcatcagaattatctatgatgcttgttaaaaaaaaaaccccagattcccgtattccatttgacactgattaaatcagaatcactgggatttcctaaggggagtcttctaagtgccaatttgagaaccacttgccaggctattgaaattgcttaatagagatgaaacacaagccacctggattgcartggatgaaatatggccagggctgctattaaaggatgatttcaaagatgagagaggacttgttgggcaagaatattgactactctctgtggctgctgtgtctgacattaccacatttagaaatctgagagtccttaggatatacctttgaactttttttttttttgagacagagtctggctctgtcacccaggctagagtgtagtggcgtaatatccactcactgcaaactctgcctccggggttcaaacgattcttatgccttagcctcccaagtagctgagattacaggtgcatgccactgcacccgggtaatttttgtatttttagtggagatggggttttgccatgttggccaggctggtgtcaaactcctgggatcaagtgatatgcctgcctcagcctcccaaagtgctgg

SEQ ID NO: 929563 - DNA, 846 bp, Homo sapiens
ttattttgtgcattagtcaatgcaatttcctcatagttttgatggtctttacattttggtacgtttttgtagtggctgttacctgtttttcctttctatatttagtgcttccttcttgagctcttgtaaggcaggcctggtggtgacaaaatccctcagcatttgcttgtctgtaaaggattttatttctccttcacttatgaagcttagtttggttggatgtgaaattctgggttgaaaattcttttctttaagaatgttgaatattggcccccactctcttctggcttttagggtttctgcagagagaytggagagatccaccgttagtctgatgggcttccttttgtgggtaactcgacctttctctctggctgtccttaacattttttccttcgtttcaaccttggttaatctgatgattatttgtcttgtgattgctgttcttgaggagtatctttgttgtgttctctgtatttcctgaatttcaatgttggcctctcttgctaggttggggaagttctcctggataatatcctgcagagtgctttccaacttggctccattctccctgtccctttcaggtacaccaatcaagtgtaggtttggtcttttcagaaagtcccacatttcttggagcctttgtttgttccttttcattcttttttctctaattctgtcttcacactttatttcgttaagttgatcttcaatctctgatatcctttctcatgcttaattcagctattgatacttatgtatgcttcatgaagttcttgtggtgtattttttagctctatcaggttatttatgttcttctctaaactcataattttataattttag

SEQ ID NO: 929564 - DNA, 719 bp, Homo sapiens
actgacctgcgcccactgtctggcactccctagtgagatgagcccggtacctcagatggaaatgcagaaatcacccatcttctgcgttgctcacgctgggagctgtagactggagctgttcctattcggccatcttggctcgtccctctaggtttttattttcataccagcctttttaatgtgaagttgcctgtctgagactcagtaacgctaatagattttcctgccagtgctatgaaatccattgtgaagctgaggggtaatcagattagtattaaaactgaacagcctggagagtcatttctgtagcttctgaggtcagaaataaattattgttcttcagaaagccaggccaggctgcttgtatctctgatttcaggttccctccctgcagtgtgagctggcttgggattttgcccataaacacttaggggtgatttttaggtaacttgttcccatctctggggttcctcgctccaagtggcctrttgtcacaaagggaatgccagaatttctgaagtacaaagtcacagcataagaagtgatcaaaatatttggactgttggtagtttgggggaagccaggtacaatgtttcaagtcagattagcacaaattccctggcactttccacattgcaagcctagtgtcaaggtgacctgactcctccctaggggtcatatccaaatcactctctctttttcccatcttaagtccagag

SEQ ID NO: 929565 - DNA, 588 bp, Homo sapiens
ctcacttattaccaaggagatagcccaagccattcgtgagggatcgacccccgtgatccaaacacttcccaccaggccccacctctaacattggggattacgtttcaaaatgagatttcagtaaggaaagatatccaaataatatcattccaccttgttccctcccaaatctcatgtctttctcacactgcaaaacgcaatcataygttcttaatagtcccctaaagtcttaactcattccaacattaactgagatctcccaactcctaagttctatctgagactcaagccaagtttctttcacctataagcctgtaaaatcaaacacaggttattaacttccaagatacaatggtgttataggcattgggtaaacattcctgttccaaaagggagaaattggctaaaagaaaggggctacaggcctcacacaaaactgaaacacagcagtcactaaacattaaagctccaaaataatcttctttaactctatgtcccacgtccagggcaactgataagagaagtgggttccaaagacctttggcaactccacccctgtggctttgcagggttcagcacccaaggcta

SEQ ID NO: 929566 - DNA, 705 bp, Homo sapiens
aaggcgctctttagttgagcggggtggggggtggggggtggcgggaccagggtgggaccagggaccggaatgtggggcaggatgcagagtggagaggctcgctcaggtgaaggcactactgtgtcaccattggctcctgggtcctggctccaggtggggagaagcagtttctctttctggggcaacaaataaaatccctccgggcacaggagtgctcattgctggttggttatgccagtctgtctctatttttagaaagaaccacaagaaggaggaaaagaatctagagaaataagtacagttggttcctccctgaggcagaagctgggktctgtgggatgaagcacagatgcaaagccattgtcctgccacccagcagtgcagtcggagatggatggcatgaatctagaataccatgggaatgggtccttgccctgggccagtaaacatttgagactcagagccaggagataggatgagaagattgcagtgatgagacccacaaagggcagcagccatctcttaagggatcaacttggagaccaaatccatcacttcttggaggtccagtagcccctgcaccctctgcgctttgcagagacatcctgcagttcagggaagaaacggagctgaagggcatgtggaagaagaatgtcacagagatgcaaggggttggattattggttggcttaaggtcaaatcatt

SEQ ID NO: 929567 - DNA, 418 bp, Homo sapiens
ctgtgtcaccattggctcctgggtcctggctccaggtggggagaagcagtttctctttctggggcaacaaataaaatccctccgggcacaggagtgctcattgctggttggttatgccagtctgtctctatttttagaaagaaccacaagaaggaggaaaagaatctagagaaataagtacagttggttcctccctgaggcagaagctgggttctgtgggwtgaagcacagatgcaaagccattgtcctgccacccagcagtgcagtcggagatggatggcatgaatctagaataccatgggaatgggtccttgccctgggccagtaaacatttgagactcagagccaggagataggatgagaagattgcagtgatgagacccacaaagggcagcagccatctcttaagggatcaact

SEQ ID NO: 929568 - DNA, 671 bp, Homo sapiens
aaagtgtggcacttccttgttttcttgctctctgtctcctaccaccaggtaagaagtgccttcttccccttgaccttttgccataactgtaagtttcctgagtcctatccagccatggggaactgggagtcaattaaacctcatcttttttttttttaaataaattactcagtctcaagtaatgctttataagcagtgtaaaaacagactaatacagatacatagttaatgaatatkttctcccattccataggttgtctgcttattctgttgctgtgcagaagctgtttagtttaattaggtatcacttgtcaatttttgtttttgttgcaattgcttggggacttagccaaaaattatttgccaaggccagtgctgacatgagtatttcctaggttttactctagtgcttttatagtttgagatcttacatttaaatatttaatccatcttgagtaaatatttgtattagtgaaagataagaatttggtttcatttttctgcttatggcaagccagttaacctgaaacatttatcaaatggcaaatcctttccctattgcttgttttcattgaccttgtcgaaaatcagatggttgtaagtgagcagctttatattttagctttctattctgttccattagtctatgtgtctgtttttgtatcagtact

SEQ ID NO: 929569 - DNA, 548 bp, Homo sapiens
cctacctgatggtcctgagtgccccctggtggtgctgagcaccccctggtgtcctgagcccctcctggtggttctgtgcaccctccctgatggttctgagtgccccctggtggttctgagcagcatctaccgcatagtcccctcctgtctccctgcagtgagctttgtgtctgggctcacacagggtttccctcactgtgtcactcacagtaatacatggccttgtccttggctttcagattggtcattgtaaggcagactgcacttgaaagggtgttgcttgagattgttaatttatttgtattcatggagagtaaccctgagaattcatacttgatygctcactgttggcatccacacctatccctgttgtgaagcgtgctggaccaagctcatgctgtagccagtaaaggtgaaaccagaggctttgcaggagaatctcaaccgctgggctgtaaaatttttccccctctgactccatcagtaaacttcacacaggacttccatgaacacagaaaacagactgagaaaatccccatgaggagcag

SEQ ID NO: 929570 - DNA, 670 bp, Homo sapiens
cagaagaatggccccagtgagcccagcctaaatggctgaccatctcaattattacctaataagttttggatggttggttatgctgcaatagctaactaatacatgcacccagtgcagataggtgccatgatttaatgacaggttgattactagttaccttctaacagtgggctccataaaggtactaatattttcccctgatttaaagttagatgtgttgtaagataatgttgagtaacgctgcaatacatgtagatatgtatgcatgtgattggtccttagtcccygcacgcacaggagaaaacgtaaaactacatcctgacacttagggccaaggccaaatagcaaaataattttgcctttaatctgttttcttcatatctaacattggaggtcaagactgtggacagatctgaagacatagagttttcttcccctgtggccccatcatcctttgttcagtgtctgatctctggaagaaaggtggtcaccagatagtgatctacctgtggttattctgctttttcttttcttttcttttcttttctttctttctttcctttctttccttatttcttttctttctctcttttctttctttctttttctctctctctttctctcctcctcccttcctcctttccttccttcctttcatctcactctgtca

SEQ ID NO: 929571 - DNA, 580 bp, Homo sapiens
gagtcatcacttggttaagcttacaataatccactgtcattctccaaaatccatctgtcttctgtacaggccaaacgaaagagttgaatgaggatgtggtaggaatcaccgcctctgcatcctttaagtccgtgatggtggcactaatctctgcactccctccatggatacaatattggttttgatttactattttcmtaggtagaggcagatctaatggcttccatttggcttttcccaccataatagccctcaccctactagtcagcaagccaatttgggaattctgccatctgctaagtatgtctatgccaattatgcattcgggcactggggaaatgaccacaaaatgagtcttgggactcactggaccaactctaagttggacctgtgctaaatctctattaagtacctgacctccataagcccctattttaactggaggaccacagtgatgttttgggtccccaggaatcaatgtcagctcagagccagtgtttagtagtccccaaaatatccaatcatttcccttttcccagtgcacagttacccccataaaaggccagagatctacttgggg

SEQ ID NO: 929572 - DNA, 803 bp, Homo sapiens
aatagtaaagaaagcatgtttgagatccagaacagaataacgggttgtggaggggttgtggagggaggtattgaggataggagagtatatgggtttggctccacggagtggataggcaaaacaatttggttgataaggtgcagatcctgaactaacttgtaagacttgcccagtttttggacaggtaaaatgggggaattgtaagaagagtttataggctttaaaagaccatgctgtaacaggtgagtgataacaggctttaatccttttaaagagtgctgtgggatgggatattggcattcagtggcataagggtggttaggttttaacaggatggtaaggggtgcatgttcggttgccaaggaaggagtagaggtgtcctatacttgtggattaaggtggggagaaacaaggggaggaggcaaaggaggctttgaactgggaaaaagggtrgcaatgaggtgtggctgtagcctaggaatagtcagggaagcaaataatttagttaaaatgcctagacctgataagggaactgggcaggtggggataactaaaaaggagtgcataaaagaatattgtccaagttggcaccagagttggggagttttaagaggtttagaagcctggccatcaatacccacaacagttatggagacaagggaaacaggcccttgaaaagaaggtaatatggaatgggcagcctctgtgttgattaagaaggggaaggacttaccctccactgtaagagttactcaaagtgtctatgatggtccaggaggcttccgaggtgatcagagcagcat

SEQ ID NO: 929573 - DNA, 594 bp, Homo sapiens
ttgtaaaacatgtgtgtttgaatgatatgaaatctgggcatcctgaaaaagaataagataacagcgattttcagggaacaagggagataaccataaggtctgactgcctgcggggccgggcagaacagcgtcatatttctcttcttgcagaaagcaaataggagaaatatcactgaatccttttctcagcaaggaataaccctggggaaggaatacatttccagggatgggtctatggacagccactctgggagtgtctgtcttatgtggttgaagatgagggatgaaatacgccctggtctcctgaagtgccctcaggcttgctaggattaggaaattccagcctggcaaattctagtcagacyggttgtctgctctcgaaccctgttgcctgttaagatgtttatcaagacaatacgtgcccagcgggacatggaacctcatcagtattctaattttgccctggccttgtgatcttgctctgcccttctgcccttgtgatctttgaagcatgggatctttgtgacttactccctgttcataccccactccccttttgaaatccttaataaaaacttgctggttttgcagctc

SEQ ID NO: 929574 - DNA, 633 bp, Homo sapiens
agtaaataaacaatctacagagaggtagaagatattcacaaccatgcatgtgacaaaagtctaacatccagactctgtaagaaacttaaacaattcaacaaacaaaaaataacctcattaaaaagtgggcaaaggacatgaacagacacttctcaaaagaagacatgcatgcagccaacaaatatatgaaaaaatactcatcattactaattattagagaaatgcaaatcaaaactgcaatgagataccatctcacaccagtcagaatgggtactattaaaaagtcaaaaaccaacagatgtcggtgaggttatcgagaaaagagaacacttacacattgctggtgggaatataaattagttcagccactgtggacagcagtgtggagattcctcaragaatttagagctaccatttgagccagcaatctgtccactgggtatgtacccaaaggaatgtaaatcattctacctgaaagacatatgcacttatatgttcatcacagcactgttcacaatagaaaagacatggaatcaacccaaatgaccatgaacagaagactggataaataaaatgtggtacctacacaccatggaatactatgcagccaaaaaaacaaacaagatcatgtcc

SEQ ID NO: 929575 - DNA, 623 bp, Homo sapiens
ctccttttaatagatatctaagagtggatgctagattgatttgaactattttagtgggcataaaatggtatctcagtgtggttctggtttgtatttctctaatgactaatggtgttgagcaccttttcatgtgctaattatattcatctatgttatcttctttggtgaaacatcttgtttggggacttgcttgagggactcacagacctcagaggcagttgcatccatgcaatggttaccatagtgaaacaccacacaacaggaggaaaggcacataaggtagagtctggaggtgtccacrtgcaggcttttaaagttctgtcttctagggtggggtttgcactgaacatgcttctctccccagcagtgaaatgcagcaacagtgcatgctgtttctgcctgggggccttgcttgagactcgacatccagagttttttgtggcctagtgatgtaggcactcttctgccacacaaccaatggtgattactgaaattccaaactcctaggagaaaagcaggtgtgcaccattaatcatactgtttgtacaaacagtttaggcaagctggtactgtaggattcagtgccctgggaaggcaaaacagccttatcagctggaaacata

SEQ ID NO: 929576 - DNA, 585 bp, Homo sapiens
accaatcagacgtagatttggtcttttcatatagtcccatatttcttggaggctttgttcgtttctttttactctttttcctctaaacttctcttatcatttcatttcattcatttcatcttccatcactgataccctttcttccagttgatcgcatcggctccygaggcttctacattcgtcaggtagctctcgtgccttggttttcagctccatcaggtcctttaaggacttctgtgcattggttattctagttatccattcgtctaaatttttttcaaagattttaacttctttgccattggttcagatttcctcctgtagctcggagtagtttgatcgtctgaagccttcttctctcaactcgtcaaagtcattctctgtccaactttgttccattgctggtgaggagctgcgttcctttggaggaggagaggcactctgatttttagagtttccagtttttctgctctgtttttttcccatctttgtggttttatctacctttggtctttgatgatggtgacgtatagatgggtttttggtgtggatgtcctttctgtttgttagttttccttctaacag

SEQ ID NO: 929577 - DNA, 657 bp, Homo sapiens
attactggaagtgtgatcatctgccctctctcctcagtgcccttggaatatgtgctcttctgtctggcttcaatttctcttacttctttgtgtgtgaagagtcttcctttcaatcagcaaactcttcctgcacactataaagcccactttggtcttcagaatctttcagtgcctgagcttgtcagtatgaggtttctctttctttatttccaaatgtcctgctttctttgtgtgcaacttcttaagaatttggcaaagtaaacaacaaagcagcaatatttcatagggtttaaacttccctttggtcctggatagaaaggattttttttttttttttgagacggagttttgctcttgtagcactggctagagtgcaatggcgcaatcttggctcactgcaacctctgcctyctgggttcaagggattctcctgcctcagccttccgagtagctgggattacaggcacccccccccacgctggctattttttttgtatttctcaggagagacagcatttcaccatgttggtcaggctggtctcgaactcctgacctcaggtgatccacccaccttggcttcccaaagtgctgggattataggcctgccacctggatctattcttctccctgctcctggctttttcaatccagtcacaa

SEQ ID NO: 929578 - DNA, 560 bp, Homo sapiens
accaagcagaagagaggatatcagagtttgaagaccaccttactgaaataaggtatgcatacaagaaaaagaatgaaaaggaatgaataaagcctcccagaaataagggacttcaatgaaaagactgaacctacaattgattggagtaccagaaggagatgaggagaatggaaacaagctggaaaacacgcttcaggatattatccaggagaacttccctagcctagcaagacaggccaacatgcaaattcaggaaatacaaagaacactattaagatactccatgagaaagtcaaccgcaagacacataatcatcagattctccaaggtcgaaatgaaggacaaacyattaaggacagccagagagaaaggccaggtcacttacaaagggaagcccatcagactaacagtggacctctcagcagaaactctacaagccaaaagagattggggaccaatattcaaaattcttaaagaaaagaattttcagcccagaacttcatatccagccaaactaagcttcataagcaaaggagaaataaaattctttccagacaagc

SEQ ID NO: 929579 - DNA, 616 bp, Homo sapiens
agttttgagtggggtccagaacaggagaaagcttgcagcaggtccaggctgctgtgcaagctgctcttccacttgggccatatgacccagcagatccaatgttgcttaaggcttcagtggcagataaggacgctatttgaacatttggcaggcccccataggtgaatcacagaggaggcctcaaggattttggggcaagtccctgccatcttctgcagataactactctccttttgagagacagctcttggcctgttactgggctttggtggaaacygaatgtttgactatgagtcatcaagttaccatgcaacctgaactgcctatcatgaactgggtgctttctgacccatctagccataaagtgggtcatgggcagtagcatcccatcatcaaatggaagtggcctatacgtgatcgggctcgagcaagtcctgaaggcacaagtaagttatataaggaagtggctcaaatgcccatggtctccactcctgccaccctgccttctctcccccagtctgcactgatggcctcatggagagttccctaagatcagttgacagaggaagagaagactagggcctggttcacagatagttctgcttgacatgcaggc

SEQ ID NO: 929580 - DNA, 622 bp, Homo sapiens
tgtcctgtgattaaggttaatgagaaactacaacagcccaatccaggcagtactacaaatggcccagatccctcaggaataaaggtttgagtcactccacctggtgaaaaaccacaacctgctcaggtgcttgctgaaggcaaagggaatacagaatgggaagtagaagaaggtagtcatcaataccagctatgaccacgtgaccagctgagaaatggggcctttaattgttatgagtatttcctcctccttttgctaaaaatatgtttgtgcatgtatacacttgtactargaaaatatctttatttttttcttttatcatgtgatatgagatccattgacttcatatcagcctttaaatattgttaagtttatgtaatagcatttgagttggggattggtgtgtttccggctgtacaaaggatacttgtattatgttaggcataattatgaccttattgttgtcttcatttgaagattatgtatgatctcaggagatgtgtatgggttcaagtttacaaggggtggacttgtgatggctaataccgagtgtcaacttgattagattggaggctacaaagtattcatcttgggtgtgtctgtgaggatgttgataaaagag

SEQ ID NO: 929581 - DNA, 598 bp, Homo sapiens
caagtagtttatagattcagtgctatccccatcaagctatccctgactgactttcttcacagaattggaaaaaactactttaaatttcaatggaaccaaaaaagagcctgcagagccaagacaatcctaagcaaaaagaacaaacctggaggtatcacgctacctgacttcaaactatactacaagcctacagtaaccaaaacaacatggtacttrtaccaaaacaggtatatagaccaatggaacacaacagaggcctcagaaataccacacatctacaaccatctgatctttgacaaacatgacaaaaacaagcaatgaggaaaggattccctatttaatatatggtattgggaaaactggctagccatatgtagaaagctgaacctggatgccttccttacaccttatacagaaattaactcaagatagattaaagacttaaaggtaagacctaaaaccataaaaaccctgtaagaaaacctaggcaataccattcaggacataggcatgggcaaatacttcatgtctaaaacaccacaagcaatggcaacaaaagccaaagtagacaaatggaatctaattaaactaaagagct

SEQ ID NO: 929582 - DNA, 598 bp, Homo sapiens
caagtagtttatagattcagtgctatccccatcaagctatccctgactgactttcttcacagaattggaaaaaactactttaaatttcaatggaaccaaaaaagagcctgcagagccaagacaatcctaagcaaaaagaacaaacctggaggtatcacgctacctgacttcaaactatactacaagcctacagtaaccaaaacaacatggtacttataccaaaacaggtatatagaccaatggaacacaacagaggcctcagaaataccacacatctacaaccatctgatctttgacaaacatgacaaaaacaagcaatgaggaaaggattccctatttaatatatggtattgggaaaactggctagccatatgtagaaagctgaamctggatgccttccttacaccttatacagaaattaactcaagatagattaaagacttaaaggtaagacctaaaaccataaaaaccctgtaagaaaacctaggcaataccattcaggacataggcatgggcaaatacttcatgtctaaaacaccacaagcaatggcaacaaaagccaaagtagacaaatggaatctaattaaactaaagagct

SEQ ID NO: 929583 - DNA, 609 bp, Homo sapiens
cacatgttctcactcataggtgggaattgaagaatgagaacacatggacacaggaaggggaacatcacacactggggactgttgtggggtggggggacggtggagggatagcatcaggagatatacctagcattaggagttaatgggtgcagcacaccaacatggcacatgtatacatatgtaacaaacctgcacgttgtgcacatgtaccctaaaacttaaagtataataataataagaaaaagaaataaagcaagwagacaaggttagagaaaaaagagtaaaaagaaacaaacaaagcctccaagaaatatgggactatatgaaaagaccaaatctacatttgattggtgtaactgaaagtgatggggagaatggaaccatgttggaaaacactcttcaggatattatccaggagaactttccaaacatagcaaggcaggccaacaatcaaattcaggaaatacagaaaacaccacaaaaatactcctcaagaagtgcacacaagacatgtaattgtcagatacaccaaggttaaaatgaaggaaaaggtgttcagggcagccagagagaaagggcgagatagtcacaaagggctgcccatcagac

SEQ ID NO: 929584 - DNA, 565 bp, Homo sapiens
aatactgtcttataacccattattttaatgtgatagcaacttaacactatttgtaaaaacaaaccaataacaatattatacctgaacttcatcctcctactttttaacattttgttgtatctatttatatcttattggattgactatgtcttgcaaagttgttgtagttatcattcagtctttctacttargataagagtagtttacacaccacaattacagtattataatacctgtgttttctgtgtatttactattaccagtgagttttataccattgctcattaatgtcctcttctttctgattgaaatattccctttagcatttcttgtaggagatatctggtattgataaaatctctaagcttttgtttgtttgggaaactttatttctccttgatatttcaaggatattttcactggatatactatgctggagtaaaagtttttgtttccttcagcactttatgctacatcagtctcttctggcctatgaagtttctactgagaagtctgctgcaggtatattggagttccattgtatgttgctgttaggatcctttat

SEQ ID NO: 929585 - DNA, 607 bp, Homo sapiens
aaatactgcattttctggttcttattaaatatgttaatcatcaattaagcattctttttcttactggggaagcctagtaaccataaaataaatttaaaaattaaaaataaaaaaacttgataagatgattaaacaaatccatacgtatgcttggaatcatatctatagatataattaaaattttgataatataaggtaaaggcataaaacaagagtagtgacaaaatatttttatacaacgattatgagagtattttatttttaaaaggttactgattttctgacatgtagtgatatgccatagaatcatgaggctgaaagagtcttggtatcgctagtcttctaaatttaggtgcagccrtattttgaatactattgacaagtagacataaaaatactacagataagtagaaatgaaaaaataatcattgtaagaacatatcttaagtaactttaggaaacagttgaccatcatgttgatccccacttttcaaaatatattttttaaaatcttttcttattaaccttcattttgtatttcttaaatcatactagaaaataggcaaacatacctggaaaaatagctatctgtcatcttctttacctt

SEQ ID NO: 929586 - DNA, 719 bp, Homo sapiens
tcctgttaagtctgtggaactgagtcaattaaatatcttttcttcataaattacccagtctcaggtagttctttatagcagtgtgaaaatggacaaatacatgatcctacaacctttcaagatttaaattaactaatgcgtttttgtagacgtgcatagttttaaataaatataaaagcatatcactcaataaggaaacaatttgtgaaaaatgaagcatcaaggtgcctcaagttatataaaataggaaataggtayggtggtggctgaatttactggaaatataaaaattatgttaaaaaataagatatttcaaaatgttattcacacttacgaatgtacaccctgttgtattaaaatattattaatataaatactgactctatcatggtgtctatcataattttaattaatttatctcattggttcttcaatacttacgtttcattaaaatttttttttcaatttgtatttctagcacaaaaccaaaagaaaaaataacattggcacagatatatgaaggaaagtcaactatttccctctactcctctattctttcttaggtaacacatgataccactgcgcagtgtttctcatatacaaatatgcaaacatataaaatacactttttataaaaatgagattattttatcttcattactctgttacttgttttccttttaagaggatataatctctcaaataaaaacaagcacaca

SEQ ID NO: 929587 - DNA, 610 bp, Homo sapiens
cggctatacccactttaaattttgagattctgcactttgaattgatgctgtaattgaatgatactttgaatggccttgggaggggctgagtgtactttgcatatgagaggaatacaccattgactggtagacagcctccaaaatggaccacaatgttccctacctcctggtattcatactttacatattgttcttccatgctaaatcaagtttgatctttgtgaccaataaatttgacaaaagtgatggtatattacttctgagactaggttacaaaagacattgtgcattttgtcttctctctctcarattgtgtagtcagggggaagccaactgccatgttgaccagcgaaaaggctacatggtaaggaactgaggcctcttgagcaccagcagtgaagaactgagtcctcctgccacagcaagtgagtgaactaggcagtagatcttcaagtttagccaagaattcatgactacagccattgttgacatcctgagtgcaaactaatgagacgccttcagccataacccataggtaactactctcaaactcctaaccatagaaactttgaaataacaaatattgatttagtctactagattttacagc

SEQ ID NO: 929588 - DNA, 808 bp, Homo sapiens
actcagccaaaccttaaagtacttacagtatcaggaaggagccatctataccaactctaagttaatatggactgaacgaggtcttattaatagcaaagaataattgaaatcccaaacttacaagtttttcaacaaaagtaaagtttgctaaaagttaacagtgtaacatgtattatcctactaccacacactctcaagggatctctcagtttacaagaaacagtgaaatctatccttactctacaatcccaaatagactctttgacagcagtgacactccaaaacctctgaggcctagacctcatcactgctgagaaaggaggactctccaccttcttaggggaagagtgttgtttttacactaaccaatcagggatagtacgagatgcctcccagcatttacaggaaaaggcttctgaaatcagacaatgcctttcaaactcttataccaacctctggagttgggcaacatggcttctcccctttctaggtcccgtggctgccatttgctattactygccttcaggccctgtatttttaacctccttgtcaaatttgtttcctctagaatcgaggccgtcaagctacagatggtcttacaaatggaaccccaaatgagctcaacttctactgaggacccctggaccaacccactggccctttcactggcctaaagagttcccctctggaggacactacaactgcagggccccttcttcgctcctatccagcaggaattagctagagcagtcatcgcccaattcccaacagcagttggggtgtcatgtttagatgggggattgagaga

SEQ ID NO: 929589 - DNA, 605 bp, Homo sapiens
atatggcctgtctgccaactgtggcccttgcctgagagagccccattgatcagaacacttaataaaagaaatttgggcatagagacaataactggaggggacacctccaagacccaggagtagaatagaatcaaaactagtcgactgaactcataccacaagcaaatttgcaagggcatcacagaatataaaagcaaataaacaaaaaacccccaaaaawcaaaacaaaaacaaaacaaaacaaacaaaaaaacttctaaaggacagcaacttcaaggactgaaggaatatcagctcacacagatgagaaaaaaaaaaacagtgcaaaattctggcaactcaaaaaggcaaagtgtccttcttacctctaaacaaccatactacttacccaaaaatggttcttacctgggctgaaatggctgaaatgtcagaaatagagttcagaatatggattggaatgaagattatcgacattcaaaagaaagaagaaacccaattcaatgaatctaagaaatataataaaatggtacagaaactagaaggtaaaatggccattttaagaaagaaccaaactgagctgatagaagtcaaaaatccacttcaac

SEQ ID NO: 929590 - DNA, 654 bp, Homo sapiens
taggtatacatgtgccatgttggtttgctgcacccatcaactcatcatttacattaggtatttctcctaatgctatgattcccctagccccccacctgccgacaggcctctgtgtgtgattttccccaccctgtgtccaggtgatctcattgttcagttcccacgaatgagtgagaacatgtggtgtttggttttctgtccttgtgatagtttgctcagaatgatggtttccagctttgtccatgttccagcaaaggacatgaactcatcgacgaggcacccttaattgtgataactcaaatggtatcagatctgaaccagaatttgaagagtttccaacagtgacccgatgtcctgaagggaagcacatggacccactttgggaatgcagtgagtcagccatctgactygttagattttgttctgtgtcattcagcaaaagggaaagcatcctgaagaattacaaagtgaagatgggaacacatgcttgatggaatctccatctgttctttgaaagggcttagctaaatctttaaaatacgggggtaaaatgtttcaacagaaggtagaattgaagaggtataaagaaactggtagtcatctcctttaaggatgggaacaccaaggctcaaagacaaatctgaagagtttttc

SEQ ID NO: 929591 - DNA, 757 bp, Homo sapiens
agctgtccactatcaggtagtgcctgcgtatcatgcagaatcatctgtgaaccaggccctagtcttttttcatctgtcaactgatcatagggaactccccatgaggccattggtacaggctgggggaaagaaggcagggtggcagcagtggagaccatgggcagttgagccacttccttatgtaactaacttgtgctttcaggacttgcttgagctcartcacacatatgccacttccatttgatgatggaatgctgctgtgcatgacccgctttatggctcgatgggtcagaaagcacccagttcatgatgggcagttcaggtcacatggtgacttgatgacccatagtcaaacgttcagtttccaccaaagcccagtaacaggccaagagctgtctctcaaaaggaaagtagttatctgcagaagatggcagggccttactccaaaatcctagaggcctctgctgtgattcacctatgggagcctgccagaggctccaaacagcatccctatctgccactgacacctcaagcaccattggatctgctgggtcgtatggcccaagtggtagagcagcttgcacagcaacctggacctgttgcagagccttctcctgttctggaccccactcaaaactggcagccttttgggtcgcttgataaatgagccagagtaacgcacccagatgaggaatgtgttgcctccagaatcctaattggcccactaggcattgtgcctctttcttgattgtaggag

SEQ ID NO: 929592 - DNA, 757 bp, Homo sapiens
agctgtccactatcaggtagtgcctgcgtatcatgcagaatcatctgtgaaccaggccctagtcttttttcatctgtcaactgatcatagggaactccccatgaggccattggtacaggctgggggaaagaaggcagggtggcagcagtggagaccatgggcagttgagccacttccttatgtaactaacttgtgctttcaggacttgcttgagctcagtcacacatatgccacttccatttgatgatggaatgctgctgtgcaygacccgctttatggctcgatgggtcagaaagcacccagttcatgatgggcagttcaggtcacatggtgacttgatgacccatagtcaaacgttcagtttccaccaaagcccagtaacaggccaagagctgtctctcaaaaggaaagtagttatctgcagaagatggcagggccttactccaaaatcctagaggcctctgctgtgattcacctatgggagcctgccagaggctccaaacagcatccctatctgccactgacacctcaagcaccattggatctgctgggtcgtatggcccaagtggtagagcagcttgcacagcaacctggacctgttgcagagccttctcctgttctggaccccactcaaaactggcagccttttgggtcgcttgataaatgagccagagtaacgcacccagatgaggaatgtgttgcctccagaatcctaattggcccactaggcattgtgcctctttcttgattgtaggag

SEQ ID NO: 929593 - DNA, 637 bp, Homo sapiens
caggtagtgcctgcgtatcatgcagaatcatctgtgaaccaggccctagtcttttttcatctgtcaactgatcatagggaactccccatgaggccattggtacaggctgggggaaagaaggcagggtggcagcagtggagaccatgggcagttgagccacttccttatgtaactaacttgtgctttcaggacttgcttgagctcagtcacacatatgccacttccatttgatgatggaatgctgctgtgcatracccgctttatggctcgatgggtcagaaagcacccagttcatgatgggcagttcaggtcacatggtgacttgatgacccatagtcaaacgttcagtttccaccaaagcccagtaacaggccaagagctgtctctcaaaaggaaagtagttatctgcagaagatggcagggccttactccaaaatcctagaggcctctgctgtgattcacctatgggagcctgccagaggctccaaacagcatccctatctgccactgacacctcaagcaccattggatctgctgggtcgtatggcccaagtggtagagcagcttgcacagcaacctggacctgttgcagagccttctcctgttctggaccccactcaaaactggcagccttttg

SEQ ID NO: 929594 - DNA, 603 bp, Homo sapiens
cgatactgttcacagcagctttgttcataatacccccaaactgaaaacaacccaaacccgtcaacaggaaatagataacaaacattggtgtattcatataatggcatacttctgagcaaaaaagcaggaaaatattactgatacaagcaacatggctaaatctcaaaaatattatgctaagtgaaagaagccagacacggaagaatatatagtgtgattctatgtgtatgatattctaaatgaggcaaactcgtttatttagaaagaaatcagaataaggatttgagcacaagtagaagtgactgtggagagggccaaggtaacattgtaagttgacagacatgcctgtatcttgagagggaagtgggtgacacaggcataygcgtttgtcaaaacaaaatacaattcgctgtttaaaaaaagcccaatagactatacactttaaattgtggggccgggcacagtggctcatacctgtaatcccagtgctttgggagtccaaggcaggatcacttaagcccaagagttcaagactaatctgggcaacatggcaagaccctgtctctacaaaaaaaattttttaaaaattggctgggcagggcc

SEQ ID NO: 929595 - DNA, 749 bp, Homo sapiens
cctttttttttagacggagtcttgctctgtcaccgaggctggaatgcagtggcgcaacctcggctcactgcaacctccacctcccgggttcaagggattctcctgcctcagcttccctagttgctgggattacaggcacacaccaccatgcacagttcatttttgtattttttagtggagatggggtttcaccacgttggccaggctggtcttgaacctctgacctcaagtgatcctcccacctcggcctcccaaagtgctgggattacaggcgtgagccagcacgcccagccccctccattcatttcttttttttattttttatttatttattttttagacagagtctccttctgttgccaggctggagtgcagaggttcgatctcggctcactgcaacctccacctcctgggttcaagtgattctcctgcctcagcctcccgagtagctgggactacaggcacgcggcaycacgcccagatttttgtatttttagtagagacggggtttcagcatgttagccaggatggtctccatcaccctcccaaagtgctgggattacaggcgtgagccaccacacccagacccctctgttcatttcaatccacatttcttgaaggcctgctctatgccaggccacttcacctctgtaaactcatttaatcctctctagccctggaaggaaaagctaatattgcctccatttttgcagaaacaacgtgaggctcagagagaagaaatgactaaa

SEQ ID NO: 929596 - DNA, 479 bp, Homo sapiens
aagcactggcacaggagtgggctctgtgcagggcttgtgactggaccaggcgtgttgcggtggactccaacgtctagacaaggggaatgcagtggcacccaaacagggatgcccatgaccctgaagccctagagtgggtgttacagcatgctaatagctcttttgtcctgccatccatggcccgatgaacgggggtgtgttaacagctctgtcagtcctgttgctccactccggtcctaggctctgggactggcccagacccaccactgcttccygccatgtggggcagctaccctctgccagcagaggccaggagggttatagtgttacagacttcttcatatctgtgtttggtgggtcttaagctcttgtcccgcatccaagaagaatgagattacactgacaactggatggtgaggagggcagagaagagttttattgagtgacaaaacagctctcagtggagaggggacatgagg

SEQ ID NO: 929597 - DNA, 657 bp, Homo sapiens
gtgtttggtgggtcttaagctcttgtcccgcatccaagaagaatgagattacactgacaactggatggtgaggagggcagagaagagttttattgagtgacaaaacagctctcagtggagaggggacatgagggtggtccaccacctgaagtcaggtggtctgtctctcagtgtggctgggtccggggcttttatgggctaagaattggggactgcatgctgattggtttgtgagtatgcaaaaaagsctaaaacaaaagtgccactcaaaggtgggcacaacagtgtaataaactaattagggaagggcaggcatatgtaaaataggtgaagagtggggatcaatcagaggaaagtgtgccaaacaagaagaaaggttctcgatccagtccgtggatttatctgggacttatggctgggctttaaactgtcctcggcttgaaggtggggttccactgggaacccatccctgtctgcctaggatttgtctgcctcctgccactatctattcattcctctagggtttgttgagtgctggctctgtgccagccaccccccaaggcactgggggtatagcagtggagtagacaaatctctgtcctgttggagattgtattctagaggggaggtggttggcagtcaaacgaagtcaataga

SEQ ID NO: 929598 - DNA, 657 bp, Homo sapiens
gtgtttggtgggtcttaagctcttgtcccgcatccaagaagaatgagattacactgacaactggatggtgaggagggcagagaagagttttattgagtgacaaaacagctctcagtggagaggggacatgagggtggtccaccacctgaagtcaggtggtctgtctctcagtgtggctgggtccggggcttttatgggctaagaattggggactgcatgctgattggtttgtgagtatgcaaaaaagcctaaaacaaaagtgccactcaaaggtgggcacaacagtgtaataaactaattagggaagggcaggcatatgtaaaataggtgaagagtggggatcaatcagaggaaagtgtgccaaacaagaagaaaggttctcratccagtccgtggatttatctgggacttatggctgggctttaaactgtcctcggcttgaaggtggggttccactgggaacccatccctgtctgcctaggatttgtctgcctcctgccactatctattcattcctctagggtttgttgagtgctggctctgtgccagccaccccccaaggcactgggggtatagcagtggagtagacaaatctctgtcctgttggagattgtattctagaggggaggtggttggcagtcaaacgaagtcaataga

SEQ ID NO: 929599 - DNA, 601 bp, Homo sapiens
acagcccgccaccacgcctggctaatttttgaatttttagtagagacggggttttgtcatgctggccaggctggtctcgatctcctgacctcaggtgatccgcccgcctcggtctcccaaagtgctgggattacaggcatgagccaccgcgcccagctatttttttaaaattatactttaagttctgggatacatgtgcagaacgtgcaggtttgttaaataggtatacacctactatggtggtttgccgcacccatcaacccgtcatctacattagatatttcttctaatgctatccctccactagcccccactcccagacaggccccggtatatgaggtttccctccctgtgtccatgtgttctcattgttcagctcccacttaggartgagagcatgcggtctttggttttctgttcctgcgttagtttgctgagaacgatgggtttccagcttcatccatatccctgcaaaggacatcaactcattcttttttacggctggatagtattccatggtgtatatgtgccacttattcttaatccagtctatcattggtgggcatttgggttggttccaagtctttgctattgtgaatag

SEQ ID NO: 929600 - DNA, 587 bp, Homo sapiens
atgggagaaattggccaaaacaaaggggcagtcattaaaccttaaagttccaatatgatctcctttgactccatgtcttacatccagggcacgttgatgcaagagttggactctcatagccttgcatagttacacccctgtggctttgcagggtaargcccctcctcctagctgctttcccaggttggcattgagtgtctgtgcttttccagatgcacagtgcaagctgtcagtgaatctaccattctggagtctggaggacggtggccctctttcacaactccaccaggccctgccccagtggggactctgcatgtgggctccagccccacatttcccttatgcactgccctagcagaggttttccatgagggctctgtcccttcagcagacttctgtctgtatatccaggtgtttccatacatcctctgatatctaggcagaggttcccaaacctcaattattgacttctctgtacctgcaggtcaaatactacatgcaagccaccaaggctttgggcttacaccctctgaagcaatggcctgagctataccctggccccttttagccaatgctgggaggcagga

SEQ ID NO: 929601 - DNA, 587 bp, Homo sapiens
atgggagaaattggccaaaacaaaggggcagtcattaaaccttaaagttccaatatgatctcctttgactccatgtcttacatccagggcacgttgatgcaagagttggactctcatagccttgcatagttacacccctgtggctttgcagggtaaggcccctcctcctagctgctttcccaggttggcattgagtgtctgtgcttttccagatgcrcagtgcaagctgtcagtgaatctaccattctggagtctggaggacggtggccctctttcacaactccaccaggccctgccccagtggggactctgcatgtgggctccagccccacatttcccttatgcactgccctagcagaggttttccatgagggctctgtcccttcagcagacttctgtctgtatatccaggtgtttccatacatcctctgatatctaggcagaggttcccaaacctcaattattgacttctctgtacctgcaggtcaaatactacatgcaagccaccaaggctttgggcttacaccctctgaagcaatggcctgagctataccctggccccttttagccaatgctgggaggcagga

SEQ ID NO: 929602 - DNA, 765 bp, Homo sapiens
cagagctaatcaaacttctctgtcaatcatgtttctaactgtaactaccctggatattttgctattcaaaaattgttgttttattttaatccttttcaaaagatggtttataataagctatagaactgtaacaggtgctctcaaatacaggtttctgataactttggagactgtgaaattggaataaagaaaaatatataggactcataaagagctgaaatattaatgaatacaagcaaaacaaaaactaaatggactaaacttagaaactgaagcaatccttttaaccttgtttggaatattgctgatccttgttttgtttttcagagtaaaggaaacttattttgaactattttcagactttaataattaagtaagstatacactcctgtgattaaaatttagaacatgtttgtttctctctgcctggttcctctagaatttggagaatatctgtgagtattcttaacttatggcaatgtagttgtttgcatcaatgcaataaaaatccatttttcttttgcaaaaggacacaattggaaaaatggttattttaccaaggctttgactggaagggtatgtttccctttaaggagtaaagcttgacttacagagctgataaaagacccgtgggagactggcctcataccctcatctacacagtccctgtacagggttcttgacttgttgtcagtaagaatgtcactttctaacaggtccaggagctccaagtttattgtgggaccttaagaggaaagggttacc

SEQ ID NO: 929603 - DNA, 739 bp, Homo sapiens
tatagttttagctcttaatttacgccttcaattcattttgtattaattgttatatacatggtgaggtaggtgtccaaattcattcttttgcatgtggctatccaggtgtgctagcattggttgctgaggagactattctttgtccattgagttgtcttggtacactttttaaaaaccagttgacaacagatgtatagttttatttctggattctcaattctgttccattggcctatatgtctctttatgccagtgtcatacagttttgattactgtagctttgtggtaagttttgaaataagagaaaaatgagagtctcactttgttctttttgcacacttgttctggctmttctataataggtcccttgaatttccatgtgaattatattttattttatttttgagacagagtcttgctctgtcacccaggttcaagtacaatggcacagtctcagctccctgcaacctgcacctctcgggttcaagcaattctcatgcctcagcctcccaagaaactgggaatacaggcatgtgccaccatgcctggctaatttttgtatttttagtagactcagggttttgccatgttggccaggctagtctcggactcctggcctcaagaaattcccccatctcagcctcctaaagggctgggattacaggcgtgagccactgtacctgactgtgaattttaatttgtcagtttctgaaaaaaaaaaaaaaaaaaaaaaaaaaca

SEQ ID NO: 929604 - DNA, 594 bp, Homo sapiens
tggctttttgttgttgttgttgttgcagaaattgacaagctgatcctaaaattcactgcaaaggacccagaatatctaaaacaatctttaaaaagcatgaggttggagggtttatacttcccaatttcaaaagattttacagagaaacagtcatcaagacagcgtgttgctgtcataagaataaacatatggtttaatggaatggaatctagagtttagaaatcaatgaatatatttatggtcaactgatttttttttttttttgacacggagtcttgctcwgtcgcccaggctggagtgcagtggcgcgatctcggctcactgcaagctctgcctcccgggttcacgccattctcctgcctcagtctcccaagtagctgggactacaggcgtctgccaccacgctgggctattttttttttttttttttttttttgtatttttagtacagacggggtttcaccatgttagccaggatggtctcaattccctgacctcgtgatccacccgcctcggcctcccaaagtgctgggattacaggcatgagccaccacgcctggccagtcaattgatttttgaaaagggtgtcaacac

SEQ ID NO: 929605 - DNA, 633 bp, Homo sapiens
aaacttccccaactgaaattaaaagacaaaaaataaatttttacagaaaaacatccaagaactgtaagataatttcaaatgatataaatacatgtaaatagaatcctaggagaggaaaaagagaatagagcaaataaagaaaagaaaggtttgaagtaataatggctaagaattttctaaaattagtgacagacactgttttggtgtctttgttttactataaaagaatacctaaggtatgtgcagagatcacatggtgacacagaaagtaagagagagagggaagggagatgccagtcgtttttcaaacaactaactctcatggaaatgaacatgagtgagtactcactcaactgccccactgcaagcycagggagggcattaatttattcataagggctccaactccatgacccaaacacctcctattaggcctcaccactggggatcaaattttaacgtgaggttttgagtagtcaaatattctgcattctactcctggcccctcaatactcatgttcttctcatattgtaaaatataatcatctcttcccaatagtcccaactcttaactgcttgtagcattaacttaaaagtccaaagtctcatttgagtccaaggcaggtttcttac

SEQ ID NO: 929606 - DNA, 619 bp, Homo sapiens
ggctttgtgtgagcaacatggctgtttatttcacctgggtgcaggcgggctgagtctgaaaagagagtcagcaaagggagatggggtggggccgttttataggatttgggaaggtaatggaaaattacagtcaaagggggttgttcactggtgggcatgggcgggggtcacaaggtgctcagtgggggagcttctgagccaggacaaggaaattcgcagggttaatcactcagttaaggtggggcaggaacaaatcacaatggtggaatgtcatcagttaaggcagggcagggccttttcacttcttttgtgattcttcagttacttcaggccatctgggcatatatgtgcaagtcacaggggatgcgatggcttggcttgggctcagaggcstgacaattacaaccaacaccacagaaatacaaaagatcattcaaggttactatgaacacctttatgcacacaaactagaaaatttagaggacagggataaattcctgaaaatatacaactcagctagattaagtcaggaagaaatggaaactctaagcagaccaataacaagcagcgagattgaattactagtaaatataaaatgccaacaacaaaaaaaagtcca

SEQ ID NO: 929607 - DNA, 611 bp, Homo sapiens
  misc_feature 611: n = A,T,C or G
ttctaattctagttatcttgctgtttccaccacatctgcagttacttcctccactgaagtcttgatgccttcaaagtcatccatgaaagtggtaataaacttcttgctaagctcctgttaatgctgatattttgacctcctcctacaaatcatgaatgttcttagtggcatctaayatggtgaattgtttccagaagattttcaatttattttgcccagattcttcaagtggaatcactgtctgtggcagctagggccctacagaatgtattctcaaatattaagacttgaaagtcaaaatgactccttgatccttgggctgcagaataggtctgctaatagacatgaaaacattcatctcattgtacatctgcatcagagctcttgcataaaaaccaggtgagttgtcaatgagcagtagtattttggaagagatatttttttctgagaagtaggtctcaacaatgggcttaaaatattcaggaaaccatgctgtaaacagatgtgctatcatccaggctttgttgtttcatctataaaacgtaggcagagtagatttagcatcattcttaatggctctacgactttcagaatgttaaatgagcattggn

SEQ ID NO: 929608 - DNA, 451 bp, Homo sapiens
tcaggggctgggggtgagaatgaagagtcactgaaagtagacacccgatttctttttggggtgatggaaacatcctaaaacatcctaaaattagactttgatggtggttggacaactccgtaaagttactaaaagtcatcaaattatacacttaaaatggatgaattttatggtatgtaaattttacctcaaaaaaattgtgtttaaaaaggataatgcctgttaatttatgttttaacaaatgtttattaagcactaatctttgaaagagatacatgaggccttttcccacatactytttcattgcaagagggtagctaggatgcatgaagccaacagacaggagaggggcattaagctctggtggagatccctgggcaattcaccagatgttctcctgaacccctttctttacctttgacagggggtaccgctatgctcctgacggtcc

SEQ ID NO: 929609 - DNA, 558 bp, Homo sapiens
atttatttatttatttattttgaaacagaatcttgttctgtggcccaggttggaatgcagtggcatgatctcagctcactgcaatctctgcctcctgggttcaagtgattcttgtgcctcagcctcccgagtagctgggactacatgcccycaccaccacgtccggctaatttttgtatttttagtagagatggggtttcactgtgttggccaggctggtttcgaactcctgacctcaagtgatccacccacctcaacctcccaaagtgctgggactacaggcatgagtctgtgtgcctggctgagagatttattataatgaatttgctctagtgattatggaggagagcaagtcttaaggtagagcataagtcagcaagctggggacccaggagagccaatgagttagttccagtttgaaggccagcaggctcaaggcccaagagctaatgcttcgatttgagtctgaaagtaggaaataagttgctatcccagtttgaaggtagtcaagcaggaagaattctctcttacttgaaagagggtcagcctttttgttct

SEQ ID NO: 929610 - DNA, 640 bp, Homo sapiens
tctgtacaaaatgcttggcatcttcctcagtttctctttttctcttatattagatatgagataacctatcaagaaatcctgttggctcttccttcaaaatatatacagaccctgaccacttcctatccttttgttgctgttaccctgggacaggctaccattatttcttgtctggatatttggacacaggtttgccttctccatctaacagtctgttctttatttagcagccagagtgatcctgctaaacgctagtcaacttgggtcatactcttrctgaaatcctccaatcactcctcatttctcctggagagtaagccaaatccattacaatgatctctaaagccctgaatgatcaggctgtcctcttgaataccaaatctttctctattttttcatgtggcagttgtaaaacatggtcctcaagttccttgacagtcttcccattgagaggccagtggtctttgtctcctacctttgaatctgctctctgtaattacctgatcaataggttacagcagtttccactttccgccttttgggacagttgctctttgaacccagccaccatgggtgaggcagtctagctgcctggaaagcagcccatgtggagaggaactgaggcccctggctagtagcc

SEQ ID NO: 929611 - DNA, 640 bp, Homo sapiens
tctgtacaaaatgcttggcatcttcctcagtttctctttttctcttatattagatatgagataacctatcaagaaatcctgttggctcttccttcaaaatatatacagaccctgaccacttcctatccttttgttgctgttaccctgggacaggctaccattatttcttgtctggatatttggacacaggtttgccttctccatctaacagtctgttctttatttagcagccagagtgatcctgctaaacgctagtcaacttgggtcatactcttactgaaatcctccaawcactcctcatttctcctggagagtaagccaaatccattacaatgatctctaaagccctgaatgatcaggctgtcctcttgaataccaaatctttctctattttttcatgtggcagttgtaaaacatggtcctcaagttccttgacagtcttcccattgagaggccagtggtctttgtctcctacctttgaatctgctctctgtaattacctgatcaataggttacagcagtttccactttccgccttttgggacagttgctctttgaacccagccaccatgggtgaggcagtctagctgcctggaaagcagcccatgtggagaggaactgaggcccctggctagtagcc

SEQ ID NO: 929612 - DNA, 594 bp, Homo sapiens
cagaactatgaggagttcttgtgtcatgctttgagaaccactgacgtaagtgcatggtatctggtccacacttttacatattctcagtttggccatcaagtccccacagttatgactttgcagcaaagatcttgataaaacaaaaaactggaccctaatgtaagaaatgatgtactgagattctctgagggtttgaagcctaaagagtattacccacaagacccacttaccactttatattatgcccaaaataaygaacagtgctgaataagagcacaggctctggagacaaaagaattgggctctattccaagtcctaccatgtaaaaattgtgtgtattgagaaatggcttaatctatctacaccttaatttcttcatctgtaaaatactcaatttcatagggttctcatgaagattaatgagataatgcatttgaagtttttcatatagagttgacattaaatgcttcacaaatgttagttcttagatcaacagcactcgatttctcactaagatcaacattctatgagctttaatacaagccaacagcaagacctttctttaaaaagacactaagagtggctggcaggat

SEQ ID NO: 929613 - DNA, 445 bp, Homo sapiens
tttgacaaaattgacaaaaacatacactggggaaaggatactctttataataaatggtgaggggaaaattagtttgccatatatggaagaataaaaccagagccctatttattaccattacaaaaatttaccattaaaaaaccagacccctatttattacctattacaaaaattaattcactataaattaaagrcttacatgtaagacctgaaattagaaaaatactggcagaaaacctaggggaaattcttctggatattggtctaggcgaagacttcatgaccaagacctcaaaagcagaggcaacagaaacagaaatacacaaatgcgacttaattaaactaaaaagcttctgccagaagaagatataacagagtgaacagatcaccttcagaatgggagaaaatatttgcaaactataaatctgacaggatactgatatat

SEQ ID NO: 929614 - DNA, 603 bp, Homo sapiens
tctgtcatggtaaatttgggggttaagagagcaccttttacatgggtgccccacagaatcaaatctgctgtccctcataggtcttacagattcaactccctcctgggaacccaaaccccttttcaccagaaaaggtaaaatggtctggggttacaaaagacttcctgggaagaacatgaaaacatacaggttaataaatttataaaatgtaagatgtttaaacaagctttatgtaaggtagytgtgaccccctttacctaaatgtcttatgaaaatgggtactatatctaactggggaatgttttcccctttctaggactataaaactgaagacatgtgaatctgctcatgtaaatcctccactgtgtaacttttctgtggagcatttatctgagctgatggcaaaaactgtgagtacttttcaataacaacaactgagctagagaagttctacttgatggggcatttactgtcttgctatggaatattaattgacactacccctatactactggaaataatgtttcccaaaaagttccatgatacaaaaaaatggtttacataaaatcttgctacctaataggcagagagcctcttttctag

SEQ ID NO: 929615 - DNA, 602 bp, Homo sapiens
catcttgtggcaaaaaagcaaaagcacaagttcaaggcgttgtgttttccagccccagttaaaatgctttcttcttaactttctactgagtcagtgggctagggcagggtttccatttttcactccttttaattgcaggattcaagtttcttcaagagttgttagtgcggaggttaaaagggagcgggaggggggcgggggagttaataggaagagcgaggagtgggtaaaggagaaagtcctgttgagctttgtgatctggtcagagctgtccaaaagaaatwaacaaataaaaaaagccaaaatgctttataccctaaaataaataataatacgatcgtgctttctagttctattagattaagtccccacacttacaactcaatttaaccttaattatctgtttaaaggccctgtcttcaaataccaaccacactgagggctgggacttcgacatgaagttgttttcttttgttttgttttttgagacagagtctcactctgtcgcccaggctggagtgcagtggcgcaatctcggctcactgcaacttccacctcctgggttcaagtgattcttcttcctcaacctcctgagtagctga

SEQ ID NO: 929616 - DNA, 609 bp, Homo sapiens
aaaagctagaaagatctcaagttaacaacctaacatcacaagtaaaacaactagagaaccaagagcaaataaaccccaaagctggcagaagacaagaaataaccaagacaagagcagaactgaaggagatagagacatgtaaaacctttcaaaagattaacaaaccaagtgctgatttttttaagaaaattaataaaatagatagaccattagccagactaataaagaaaagagggaagactcaaataaacacaatcagaaatgataaggggggatattaccactgaccccacagaagtacaaacaaccatgagaggatattatgaacacctctggacataaattagaaaatatggaagaaatagatatattcctggrcatctgcacacttacaagactgaaccaggaagaaattaaatccatgaatagaccaataatgagttctaaaattgaggcagtaataaataccctaccaaccaaaaaaatcccagaaccagacagattcacagcttaattgtaccagacgggtggaaaaaaaaaaaaggctgtaccattcctactgaaactattttttaaaaaaattgtgaagaagggctgtggtggctcaca

SEQ ID NO: 929617 - DNA, 722 bp, Homo sapiens
tcaggaccatgtgataattgcattaactgcacaaattgtacagcatgtgtgcttgagcaatatgaaatctgagcaccttgaaaaaagaacaggataacagcagttgttcagggaataagagagataaccttaaattctgactgctggtgagccaggcagaatagagctgtatttctcttctttcaaaagcaaatgggagaaatatcactgaattctttttctcagcatagaacttccctgagaaagagaatgcacacctgcgggtgggtctctacactggtccccccgggggtgtggycatctcttagggtccagtctgcagagatgaaataagctccagtctcccatagtgctcccaggcttattaggaagaggaaattcccacgtaataaattttggtcagaccagtttatctcaaaaccctgtccctgataagatgttatcaatgacaatggtgcccgaagcttcattagcaattttaatctcgcctcggtcctgtggtcctgtgatctcgccctgcctccacttgccttgtgatattctattaccctgttaagcacttgatatctgtcacttacagctattcacacactccctccccttttgaaaatctctaataaaaacttgctggtttttgctgcttgtggggcatcacggatcctaccaacgtgtgatgtcgaccagctttaaaatttctctcttttgtactccgtgcctttatt

SEQ ID NO: 929618 - DNA, 451 bp, Homo sapiens
caccctgctataattcatatgtttgtcctcccaaacatcatgttgaaatttgatgtccaatgttggaggtggagcccagtgggaggtgtttgggtcatgggggtggatccctcattaacagattaatgacctggagcaggggaggcgagttctcattctattagttcccacaagagctggttggtaagaagagcctgccaccttcctctcctctctcttgcttcctctcttgccatgtgatccctgcacatgccatggctctgctctgatttccaccatgggtgggarcagcttgaggccctcatcagaagctgagcaggtgccagtgccaagcttcatgcacaccctgcagaaccctgagccaaataaacctcctctttataaactacccagcctcagatactcctttacagcaacaccaaagacatatatcaaccttcagcaagcacta

SEQ ID NO: 929619 - DNA, 492 bp, Homo sapiens
cacttgagaccaggagttggagaccaggagttagagaccagcctggggaacatggtgtgaccctgtgtctactaacaaaagaaaaaaaaaaaaaaacagccaggaatggtggtggtgcagaactgtagttccagctacttgggagtctggggtgggaggatcccttgagcctgggaagtctaggctgtggtgagccaagatcatgccrctgcactccagcaggggtgacagagtgagaccctgtcttagaaaaaaaagaaaaagaaagtgataatctaatttccctgctggaatctcctcttcacctgccctctctggaacctcacttgtcagttgttcctccaacttccctgtatctttaacctgtcccccaccaatccttttggtcactgtggtggccaaagtaatgccccctaccaattgctcacgtcctaggttacacagcacagtttcagaggaagggggatattaagagtgcagatggaattaatg

SEQ ID NO: 929620 - DNA, 492 bp, Homo sapiens
cacttgagaccaggagttggagaccaggagttagagaccagcctggggaacatggtgtgaccctgtgtctactaacaaaagaaaaaaaaaaaaaaacagccaggaatggtggtggtgcagaactgtagttccagctacttgggagtctggggtgggaggatcccttgagcctgggaagtctaggctgtggtgagccaagatcatgccactgcactccagcaggggtgacagagtgagaccctgtcttagaaaaaaaagaaaaagaaagtgmtaatctaatttccctgctggaatctcctcttcacctgccctctctggaacctcacttgtcagttgttcctccaacttccctgtatctttaacctgtcccccaccaatccttttggtcactgtggtggccaaagtaatgccccctaccaattgctcacgtcctaggttacacagcacagtttcagaggaagggggatattaagagtgcagatggaattaatg

SEQ ID NO: 929621 - DNA, 656 bp, Homo sapiens
gtctacacagtcttaatgagctgtaatacgtgaaggtctgcagcttcactcaccaggagcaatgaacaactccagacgcgcctccttaagagctgcaatacaccgcgagggtgtgcagcctcactcctgaaccagtgagaccacgaacccaccagaagggaaaaactctgaacacatctgaacatgagaaggaacaaactccggatacgttgcctttaagaagtgtaacactcaccccgagggtctgtggcttcattcttgaagtcagaccaagaactcaccaatttgggacacagcttacctcccttcctcctgagtgtggggtggccttagtgattcactgatactagaacgtgtcagaagcgaaggtgtgcaacttccaagactaggtcgtaaaaggccttgtgtcttcctccttgctctgttcctgggttctttyaatctggaaagccaactgccatgccctcatataagggcacttaagcggccttggggagaagaccacatggtgaagaactgagacgtcttgtcaacagccaggtgagtgggttttttttgttttgttttgttttgttttgttttgttttgttttgttttgttttgttttgttttaacgagacggagtcttggccctgttgcccaggctggagtgcagt

SEQ ID NO: 929622 - DNA, 575 bp, Homo sapiens
gcaagcaccaagtccctaggctacacacagcaggagggccctgggccttggccacaaaaccatcttttcttcctagacctctggggctatgaagggaggagctgccttaaagacctctgacatgccctggaaacattttccccattgtcttggcaaattacatttggctcctcttacttatgcaaatttctgcagcaggcttgaatttctcctcagaaaatgggattttcttttctatcactttgtcaggctgcaaattatctgaactttatgctctgtttcccttttaaaaccgagtgcctttaacagcatccaartcacttcttcaatgcttttctggttagaaatttcttccaccagataccctaaatcatctctctcaagttcaaagttccacaaatctctatggccggggcaaaatgacacgtttctttgctaaaacatagaaagagtcacctttactccagttcccaacaagtttctcatctccatctgacaccacctcagcctagattttattgtccactttattatcagcattttggtcaaagccattcaacaagtctttaagaagt

SEQ ID NO: 929623 - DNA, 591 bp, Homo sapiens
aattctcctgccttagcctctcgagtagctgggaccacaggtgcatgccaccacactgggctaacttttttgtattttgtttagtagagacagtgtttcaccatgttagccaggatggtctcaatttcctgacctcgtgatccacccrcctcagcctcccaaagtgctgggattacaggcgtgacccaccatgcctagctgcaacatttatttttaatatggccattctacctattatatttgaatcacagaatgttagaaagaactttctgaaatcattaattacaattcttcattttacaaataggggagatatctattccttttgaatagataaaagattttgccaagcattgcaactcactgccagaaccagtaagggctcctgtgccacttgacttatgtttttaatgtcaacttaggaaagaagtctttatataacaaaggccctaggaggcacttgttatatatccaggcaggagtgacaaacattatcattgctttattcccttgtgtttcataccttcatcttgtgcagcaagattctgttttcttctcatataatgttatgtgctatgatgagaggaaagc

SEQ ID NO: 929624 - DNA, 591 bp, Homo sapiens
aattctcctgccttagcctctcgagtagctgggaccacaggtgcatgccaccacactgggctaacttttttgtattttgtttagtagagacagtgtttcaccatgttagccaggatggtctcaatttcctgacctcgtgatccacccacctcagccwcccaaagtgctgggattacaggcgtgacccaccatgcctagctgcaacatttatttttaatatggccattctacctattatatttgaatcacagaatgttagaaagaactttctgaaatcattaattacaattcttcattttacaaataggggagatatctattccttttgaatagataaaagattttgccaagcattgcaactcactgccagaaccagtaagggctcctgtgccacttgacttatgtttttaatgtcaacttaggaaagaagtctttatataacaaaggccctaggaggcacttgttatatatccaggcaggagtgacaaacattatcattgctttattcccttgtgtttcataccttcatcttgtgcagcaagattctgttttcttctcatataatgttatgtgctatgatgagaggaaagc

SEQ ID NO: 929625 - DNA, 600 bp, Homo sapiens
caccattcaaattgtctgtgagcctaaattttcatgtctgtgggacggataaggaccccatatttagctgaactaaggaaaagtccagcaacattttttctgtgcaatgtgggggctcaagaaatggtgaatgaaatggagactcaaaacctctctttgtcacttctaagccttttcatgctgggattcctaagggtaggggaaactatgcccccaccccctgttgctcccaggggtcaggaaccaacccgacctttcratagccctgagaggtgacagtgtgctggcagccgtcacagccctggctcactctgggcgcctcctcggccttggcgcccactctggccgtgctagaggagcccatcagcccaccgctgcactgtgggagcccttttctgggctggccaaggcctgagctggctccctcagcttgcgaggaggtgtggagggagaggcgtgggcgggaacctgggctgcgcgcagagcttgcgggccagtgcgagttccggtgggtgcgagttcaggtgggtgtgggctccaagggccccacactcggagcggccggccggcccaccagccccaggcagtgaggggcttagc

SEQ ID NO: 929626 - DNA, 598 bp, Homo sapiens
agtagtgtttcactataataagccatcttaaaataatccagactctggatgatttatattaaataaatcagaatgctgattctgatgtgcagatgcttgaatgcaaggaccatttttctttatagaaatatgttcatttgaaaaaccaaaaagtcgtaacactcagaagttgaaactgatacttcctcccacttagaacttgaaaagctagtcttatcatatagtgatatttaaagacgtaagatactaaaggataggaccaataaacttgtaagctatccctggtattaggttttatgatactaacaatattgtaacaaaagtctacttcayagatttttttaaagtcaccttaaagaataccaaagatgacacttactctgaactctgctacattacacaaaaaagccctgagcactcaccattgcagttctggacttaagaaaccagtcaaatctgaactgaggagagttgcgaatacactgtcgcaattcatcataaacattttctttgtcaaatccaagtttgtgaagcatacaaatcagaaaacgatcttcttcttcagtatagttttttcctttgttagtaccatatgata

SEQ ID NO: 929627 - DNA, 598 bp, Homo sapiens
ctcagacttttccatctgctctttgacaaggacctgccaagtgacgacggaatgctgtgtgtgtgcccggccttgtctgggtcatctgtctcatgcgttgggctggggtggcaggttctccagccgggagggtgggggtaagctccttgggaagggagaactcggctgccggcttcctcctgcagcatagttcgagcctgagatggtctgactgctactcaratggaaatggggcgggcggggcaaaagccaaacagcatttggtctccatcaacgctcaaaaagcaagttggatcaacactgcagtcggttaggtctatagtgagggagatggccgggacattttccagagtggttggacctgctcgcaatgaacaggacaggggcaggagagccctgagaagtggtctccgctgggcagggagggatggaatgatgtagggtgtgctgggacagaggagcatagaaatcaattcttattttaaaaattagacctgcctctttcctcaaggaaatgaacattgggcttttgtttgtgtttttaaagcctttggaaaaaagtagccatgtgaacttggacagtcacgcaggctctgtg

SEQ ID NO: 929628 - DNA, 598 bp, Homo sapiens
ctcagacttttccatctgctctttgacaaggacctgccaagtgacgacggaatgctgtgtgtgtgcccggccttgtctgggtcatctgtctcatgcgttgggctggggtggcaggttctccagccgggagggtgggggtaagctccttgggaagggagaactcggctgccggcttcctcctgcagcatagttcgagcctgagatggtctgactgctactcaaatggaaatggggcgggcggggcaaaagccaaacagcatttggtctccatcaacgctcaraaagcaagttggatcaacactgcagtcggttaggtctatagtgagggagatggccgggacattttccagagtggttggacctgctcgcaatgaacaggacaggggcaggagagccctgagaagtggtctccgctgggcagggagggatggaatgatgtagggtgtgctgggacagaggagcatagaaatcaattcttattttaaaaattagacctgcctctttcctcaaggaaatgaacattgggcttttgtttgtgtttttaaagcctttggaaaaaagtagccatgtgaacttggacagtcacgcaggctctgtg

SEQ ID NO: 929629 - DNA, 590 bp, Homo sapiens
ccacagagcctgcgtgactgtccaagttcacatggctacttttttccaaaggctttaaaaacacaaacaaaagcccaatgttcatttccttgaggaaagaggcaggtctaatttttaaaataagaattgatttctatgctcctctgtcccagcacaccctacatcattccatccctccctgcccagcggagaccacttctcagggctctcctgcccctgtcctgttcattgcgagcaggtccaaccactctggaaaatgtcccggccatctccctcactatagacctaaccgactgcagtgttgatccaacttgctttctgagcgttgatggagaccaaatgctgtttggcttttgccccgcccgccccatttccatytgagtagcagtcagaccatctcaggctcgaactatgctgcaggaggaagccggcagccgagttctcccttcccaaggagcttacccccaccctcccggctggagaacctgccaccccagcccaacgcatgagacagatgacccagacaaggccgggcacacacacagcattccgtcgtcacttggcaggtccttgtcaaagagcagatggaa

SEQ ID NO: 929630 - DNA, 592 bp, Homo sapiens
attctgggaaacttctttgtgatgtgagcattcatctcaccgaggtgaacctttcttttcattgagcagtttggaaatactctttttgtagaagctgcaagtggacatttgtagtgctttgcgtcctgtggtagaaaaggaaataccttcacataaaatctagagagaagcaatytgagaaacctgtttgtgatgtgtgcactcatctcacagagttcaacttttattttgattgagcagttttgaaacactctttttgtagaatctgcaagtggacatttggatcactttgtggcctatgttagaaaaggaatatctttgcataaaatctagacacaagccatgtgagaaacttctttgtgacgtgtgcattcatctcacagggttaaacctatcttttaattgagcagttttgaaactctctttgtgtagaatctgcaagtagacatttggagggctctgaggcctatagtggaaacagaaatatcttcacataaaaactagacagaagaattgtgagaaacttatttgtgatgtgtgcgttaatctcacagatttgaacatttcttttgattgagcagttaggcaatgc

SEQ ID NO: 929631 - DNA, 780 bp, Homo sapiens
cttttttgtagaatctacaagtggacattttgagcgctttgtggcctatggtagaaaaggaaatatcttcaactaacatctacacagaagcaaagtgagaaacttctttctgatgtgtgcattcatctcacagagttaaacctttcttttgattragcatttatgaaattctctttttgtaaattctacaagtggacatttggagcgctttgaggactatgatggaaaaggaaatagcttcacataaaaactagacagaagaattctgagaaacttctttgtgatatgtgcgttcatcacacagagttgaacctttctttgaattgagcagtttggaaacactctttttgtagaacctgcaagtggacatttggagcgctttgaagcctgtggtggaaaagcaaaaatcttcacatgaaaactggatagaagaattttaagaaacttctttgtgatgcgtggtttaatctcacagagttgaacatttcttttgatggagcagtttggaaacactctttttgtagaatctgcaagcagacatttggagtgcttttgggcctattttagaaaggggaatatcttcatataaaaactagacagaagaattctgagaaacttttttgtgatgtgtgcattcatctcacagagttgaacctttccttgaattgagcagttttgacactctttttgtagaacctacaagtggacattcggagctctttgcggcctctgttagaaaaggaaatatcttcacataaaatctacacagtagcaatctca

SEQ ID NO: 929632 - DNA, 780 bp, Homo sapiens
cttttttgtagaatctacaagtggacattttgagcgctttgtggcctatggtagaaaaggaaatatcttcaactaacatctacacagaagcaaagtgagaaacttctttctgatgtgtgcattcatctcacagagttaaacctttcttttgattgagcatttatgaaattctctttttgtaaattctacaagtggacatttggagcgctttgaggactatgrtggaaaaggaaatagcttcacataaaaactagacagaagaattctgagaaacttctttgtgatatgtgcgttcatcacacagagttgaacctttctttgaattgagcagtttggaaacactctttttgtagaacctgcaagtggacatttggagcgctttgaagcctgtggtggaaaagcaaaaatcttcacatgaaaactggatagaagaattttaagaaacttctttgtgatgcgtggtttaatctcacagagttgaacatttcttttgatggagcagtttggaaacactctttttgtagaatctgcaagcagacatttggagtgcttttgggcctattttagaaaggggaatatcttcatataaaaactagacagaagaattctgagaaacttttttgtgatgtgtgcattcatctcacagagttgaacctttccttgaattgagcagttttgacactctttttgtagaacctacaagtggacattcggagctctttgcggcctctgttagaaaaggaaatatcttcacataaaatctacacagtagcaatctca

SEQ ID NO: 929633 - DNA, 719 bp, Homo sapiens
cattctgagaaacttctttgtgatgtgtgcattcatgtcccagagatgaacctttcttttgaaggaccagtttcgaagtactctttttgtagaatctgcaagtggacacctcgagctccttgaggcctatattggaaaaggaaatatcatcacataaaaactagacagaagaattctgagaaacttctttttgttatgggcgttcatatctctgagttgaacttttcttatgattgaacggtttggaacactctttctgtagaatctgcaagtggacatttggagcgccttgcaacttwaggtggaaaaggaaatatcttcacataaaatccagacagaagcaatctgagaaacttctttatgatatgtgtattcatctcaaagggttaaccctttcttttgattgagcagttttgatactctctttttgtagaatctgcaattggacatttctatcgcttagaggcctatggtggaacagggtatatcttcacataaaaactagacagaagaattctgagaaacatctttgtgatgtgggtattcatctcacagagttgaacctttcttttgattgagcagtttggaaacacactttttttggactctgcaagtggacatttggagcgctttgcggcctatggtaaaaaaggatatatcttcacataaaatctagacagacgtaatttgagaaatttctttgtgatgtgcacattcat

SEQ ID NO: 929634 - DNA, 431 bp, Homo sapiens
gttgaacctttcttttgattgagtatttttgaagaactctgtttgtagaatcttcaagtggatatttggagtgctttgtggcctgtggtggaaaaggaaatatcttcacataaaaactagacagaagcattctgagaaacttatttgtgatgtgctcattcaactyacagatttaaacttttcttttgattgagcagtttggaaacagtcttttagtagtacctgcaaacggatatttggagtgctttggggcctgtggtggaaaaggaaatatatacacatgaaaactagacagaaacattatgagaaactgctctgtgatgcttgcattcatcaccagagttgaacctttcttttgattgaacagttttgaaacattctttctgtggaatctgaaggggatatttggagcgctttgcggcctatggtga

SEQ ID NO: 929635 - DNA, 740 bp, Homo sapiens
agaaggaaatatcttcacataaaaacgagaaaaaagaattctgagaaactcctgtgctgagtgtgttcatctcacagagttgagcctttctttttattgagcagtttggaaacactctttttgtagaacctgcaagtggacatttggaacaatttcaggcatatggtgaaaaaggaaatatattcacataaaaactagacagaagggttctgacaaacttctttgtgatatgtgcattcatctcaccgaggtgaacctttgttttgattgagcagctttgaaacactctttttgtagtatatgcaagtggacatttggagcgctttgaggcctatagtggataaccaaatatmttcatataataactagacagaagcattttgagaaacttctttgtgatgtgtgcattcatctcacactgatttgaacctttcttttgattgatcatctttgaaacactctttttgtaaaatcagcaagtggacatttggagtgctttgaggcctatggtggaaaaagaaatatcttcacataaaaaccagacagaaacattctgacaaacttctttgtgatgtgtgcattcatctcacaaagttgaaccttacttttcattgagcaattttgaaacactctttttgtagaatctgcaagtgaacaattggaggactttgagtcctattgaggaaaaggaaatgtcttcacataaaaactagacagaagcctgctgagaaacttctttg

SEQ ID NO: 929636 - DNA, 740 bp, Homo sapiens
agaaggaaatatcttcacataaaaacgagaaaaaagaattctgagaaactcctgtgctgagtgtgttcatctcacagagttgagcctttctttttattgagcagtttggaaacactctttttgtagaacctgcaagtggacatttggaacaatttcaggcatatggtgaaaaaggaaatatattcacataaaaactagacagaagggttctgacaaacttctttgtgatatgtgcattcatctcaccgaggtgaacctttgttttgattgagcagctttgaaacactctttttgtagtatatgcaagtggacatttggagcgctttgaggcctatagtggataaccaaatatcttcatataataactagacagaagcattttgagaaacttctttgtgatgtgtgcattcatctcacactgatttgaacctttcttttgattgatcatctttgaaacactctttttgtaaaatcagcaagtggacatttggagtgctttgaggcctatggtggaaaaagaaatatcttcacataaaaaccagacagaarcattctgacaaacttctttgtgatgtgtgcattcatctcacaaagttgaaccttacttttcattgagcaattttgaaacactctttttgtagaatctgcaagtgaacaattggaggactttgagtcctattgaggaaaaggaaatgtcttcacataaaaactagacagaagcctgctgagaaacttctttg

SEQ ID NO: 929637 - DNA, 441 bp, Homo sapiens
ttgaggtctatggttaaaaggaaatatcttcacataaaaactataaagaaggtttgtgagaaacttctttatgatgtgtgcattcatctcacagagttgaaccactcctttgactcagcggtttggaaacagtctttttttaggatctgcaaagggatatttttgagcactttgaggcccatggtgaaaaaggaaacacttacacataaaaaaaacatagaagytttctgagaatcatctttttgatatgtgcattcatcccacagaggtgaacctttcttttgatgagcattttggaagtagtatttggtagaatttccaaagggttattagttagtgttttgtgtcctatgttggaaaaggaattatttttacataaaaactagacagaatatttctgagaaactgacttgtgatgtgtgctttcatctcacagaggta

SEQ ID NO: 929638 - DNA, 639 bp, Homo sapiens
acataaaaactagacagaagctttccgagaaacttctttgtgatgtgtgcattcatctcgtagagttcaaccattctactgattgaacagtttggaaacactctttttgtagaatcggcaaagggatatttatgaatgttctgaggcctatggtgaaaaaggaaatgtattcacataaaaagtataaacaakgtttctcaaaaacagctttgtgatgtatgcattcatctcaaagaagtaaacgtttcttttctctgatctgtctggaaactgttcttgtagattctgcaaagggatatttgtgagtgctttgaggcctatggtgaaaaacgaaatatcttcacataaaaattagagagaggttttctgagaaacctctttgtgatgtgggcattcatctcacaaagttgaaacttacttttgattgatcagtatggaaaccatctgtttgtgcaatctgcaaagggacatttatgagagctttgaggccaatggtgaagaaggaaatatatttatataaaaggcataaagaaggtttcttaaaaagagctttgtggtgtgtgcattgatctcagagaggtaaacgtttattttctatgatcagtctggaaactctgttcttgtagaatctgcaaaggg

SEQ ID NO: 929639 - DNA, 672 bp, Homo sapiens
cttgaggctcatggggaaaaaggaaacattcacataaaaacttaatagaagctttctgagaaactgctttttgacgtgtgcaatcatctcacagagttgaacctttcttttgatgagcagtgtggaaacaatctttttgtagaatctgcaaaaggacaattttgarcgctttgcatcctgtggtggaaaaggagatgccttcacataaaaactagacagaatatttctcagaaactgctttgtgatatgtgcattcatctcccagatgtgtctgtttcttttcattgagaagattggaaactcttttcttgtaagatctgcaaagggatatttgtgagccctttgaggtgtatggtgaaaaaggaaatatcttcacataaaaactacacagaagctttctgagaaacatcctagtgatgtgagcattcgccttacagtgttgaaacttcttttaattgagcaatgtgtaaagagtctttttgtagaatctgcaaagggatatttgtgaatgctttgaggcctatggtgaaaaaggaaatatcttcacataaaaactacaaagaagctttctgagaaacctctttgtggtgtgcatacatctcacacagttgaacctttcttttgattgagcaatttggaagaagtatttttgtagaatctgtaaagggatat

SEQ ID NO: 929640 - DNA, 587 bp, Homo sapiens
atttttgctctctgtatttctctagcatgtgttgctggtggccctggttatgctaacaagtagatagtgtagctgcagcagcagaacagaaaagactctcctggattctcagttccaggctggcctcggaacaggcttagggatgtttcaatgcttgaatgcaggtgagctggagatctgtggcaattcttttgacatgaggctggacattctttatagcttccccagacacaggaatttgcagagcttgaaaaagaatcactggcaggaggttcattttctttattgctacytccccagccataaaactaaaagctttttacctaaatcacgttagccatctcgtgacagtaggagatcatttccttcagagtctttcccgattggagtctagtcctagggtggtttgaacggtccgtttgaatttgaagagctttctaattgatgcttctcatcccctctccaaccagtcttatttggtgtcatctgcctttccccttcctccctaccaaacctcagagtcttgaaacaaaaatctttgtattgtaaacttcatcatgttaatttcatcacttcaaatgaaattt

SEQ ID NO: 929641 - DNA, 838 bp, Homo sapiens
gtgaaatatcttcacataaaaactagacagaagctttctaagaatcttctttgtgatgtgtgctttcatctcacagaattgaaactttcttttgagtgaggagtttggaaacactctttttctaaaatctgcaagtgaatatttggagagcttctgaggcccatggtgaaaaacgaaataacttcacataaaaactaaacagaagttttctgagaaactttcttgtgatgtgtgcaytcatctcacagagttgaacctttcctttgattgagcaggttggaaagaggcttattgtacaatctgcaaagggataattctgatccgtttgaggcctatggtgaaagagaaatatcttcacataaaaactagacagaatcattccgagaaatttctttgtgatgtgtccattcatctcacagagttgaacctttcttttgattgagcagtttggaaacagtctttttgtaaaaccttcaaagggatatttgtgagccctttatggcctcaggtgaaataggaagtatcttcacatacatactagagagaagctatctgagtaacatttttgtgatgtgtgctttcatctcagagaggtaaaaaatttttttgattgaacagtttggaaacagtctttttgtagaatctgcaaatggatgtttggattgctttgaggcctatgttgagaaaggtaatatcttcacataaaaacaagacagaagatttctgagaaactcctcttttatgtgtgcattcatctcaccggtttgaacctttcttttgattgagcagtttggaaacattctttttgtacaatctgcaaagggatatttctgagcca

SEQ ID NO: 929642 - DNA, 695 bp, Homo sapiens
tgagaaacttcttcatgatgtgtgctttcttctcacagatttgaatctttcttttaattgaacagtttggaaactctctttttgtagagtttgcaaaagatatttggattgctttgaggcctatggtgaaaaaggaaatattttcacttaaaaactaaacagaaactttctgaaaaacttctctgtgatgtgagtattcatgtcacagtgttgaacctttgttttcattgagcagtttggaaaccatctttttgtacaatctgcaaagggatatttctgagcagtttgaggcctayggtgaaaaacaaatatcttaacacaaaaactagacagaggcattctgagaaacttcttattcatgtgtgcattcatctcccagagttgaacctttcttttcattgagaaattcagaaacagtctttttgtagaatttggaaaaggatatatgtgagcccactgaggcccacggtgaaatgggaaatatcttcacaggaaaaccagacagaagcattctgagaaacttctttgtgatgtttgcattcatccacagagttgaaactttcttttgattgagcagttcagaaaaactctttttgaagtatctgcaaaaggatatttggagcactttgtggcttgtggtgaaaaactaaatatcttcacataaaatctagtgagaagctttctgaagaacttct

SEQ ID NO: 929643 - DNA, 695 bp, Homo sapiens
tgagaaacttcttcatgatgtgtgctttcttctcacagatttgaatctttcttttaattgaacagtttggaaactctctttttgtagagtttgcaaaagatatttggattgctttgaggcctatggtgaaaaaggaaatattttcacttaaaaactaaacagaaactttctgaaaaacttctctgtgatgtgagtattcatgtcacagtgttgaacctttgttttcattgagcagtttggaaaccatctttttgtacaatctgcaaagggatatttctgagcagtttgaggcctatggtgaaaaacaaatatcttaacacaaaaactagacagaggcattctgagaaacttcttattcatgtgtgcattcatctcccagagttgaacctttcttttcattgagaaattcagaaacagtctttttgtagaatttggaaaaggatatatgtgagcccactgaggcccrcggtgaaatgggaaatatcttcacaggaaaaccagacagaagcattctgagaaacttctttgtgatgtttgcattcatccacagagttgaaactttcttttgattgagcagttcagaaaaactctttttgaagtatctgcaaaaggatatttggagcactttgtggcttgtggtgaaaaactaaatatcttcacataaaatctagtgagaagctttctgaagaacttct

SEQ ID NO: 929644 - DNA, 801 bp, Homo sapiens
atcttcacataaaatctagtgagaagctttctgaagaacttctttgtgatgtgtgctttcatctcacagagttgaaaatttcttttgattgagcagtttggaaacagtgttttgtagaatccgcaaatcgataattggattgctttgaggcctatcgttagaagggaaatatcttcacataaatactagacagaagatttctgagaaacttctttgtgatgtgtgctttcatctcacagagtagaactgttcttttgattgagtagttaggaaattgtctttatctacaatctgcaaagggatatttctgaggggtttgaggcctatggtgaaaaagaaatatcttcacataaaaactagacagaagcattctgagaaacttctttgtgatgtgtgctttcatctaacaggtttgaaactttcttttgattgaacagtttggaaacagtctttttgtacagtctacaaagggatatttctgaacggtttgrtgcctatggtgaaaaaggaatatcttcacataaaaactagacagaagaattctgagaaacttcttttttatgtttgcagttttctcacagggttgaacctttctttgcatggagcagtttgaaaacaatctttttgtagagtctgcaatgggatatttgtgagctctttgaggcctatggtgaaatatgaaatatcttcacataataaccagacagaagcattatgaagaacttctttgtgatgtgtggtttcatctcacagagatgaaggtttcctttgattgaacagttttcaagcagcctttttgtt

SEQ ID NO: 929645 - DNA, 562 bp, Homo sapiens
ctctccagaaaatgggttttccttttctatctcatcatcaacctgcaaaatttttaaaacttttatgctttgcttcctcttgaacactttgctacttaggaatttattctgccagataccctaaaccatgtctctcaagtttaaagttccacagatttctagggcaggggcaaaatgccatcagtctctttgcagagcaagagtcacctttattccagttcccaacaagttcttcgtctccatatgagrccacctcagcctggacttcattgtccatgtcactatcagcattttcctcaaaaccattctgcaagtctctaggaagttccaaacttcctcacatttttctctcttcttccgaaccctgcaaactgttcaacctctgcctgttacccagttccaaattcacttccacatttttagatatccttatagcaacgccccactacctcagtacacatttactgtatcagtccattctcatgctgctaataaagatataaccaagcttgggtaatttataaagtaaagaggtttaattgactcacagttcatcatagct

SEQ ID NO: 929646 - DNA, 562 bp, Homo sapiens
ctctccagaaaatgggttttccttttctatctcatcatcaacctgcaaaatttttaaaacttttatgctttgcttcctcttgaacactttgctacttaggaatttattctgccagataccctaaaccatgtctctcaagtttaaagttccacagatttctagggcaggggcaaaatgccatcagtctctttgcagagcaagagtcacctttattccagttcccaacaagttcttcgtctccatatgaggccacctcagcctggacttcattgtccatgtcactatcagcattttcctcaaaaccattctgcaagtctctaggaagttccaaacttcctcacatttttctctcttcttccgaaccctgcaaactgttcaacctctgcctgttacccagttccaaattcacttccacatttttagatatccttatagcaaygccccactacctcagtacacatttactgtatcagtccattctcatgctgctaataaagatataaccaagcttgggtaatttataaagtaaagaggtttaattgactcacagttcatcatagct

SEQ ID NO: 929647 - DNA, 639 bp, Homo sapiens
attttgctcgttagttgatgcagtttctttgtagcctcaatggtctttacaatttggcatgtttttgcagtggctggtaccagttgttcctttccatgtttagcgcttctttaaggagctcttttttttttaacattgtttttctctttatttaaacgaggttgaccttaaaaatcaaagcaatatgagagtgattttacactagcaatattatttttagttattcagatgaacaaaaagaacattcatccgttgaagctatgattaaataattctttatctatttaaactgaatagtatacacttgcattatcctaatacttatcaagcagagcaaaaaataaaactcactctaaacttaagtcatataactacaggttatttctcatctttgtttttggtttttttaaatttttttattattattatactttaagttttagggtacatgtgcacaatgtgcaggttagttacatatgtatacatgtgccatgctgctgcacygcacccactaagtcgtcatctaacattagatatatctccgaatgctattcctcccccctccccccaccccacaacagtccccagactgtgatgtttcccttcctgtgtccatgtgttctcattgttcaattccca

SEQ ID NO: 929648 - DNA, 591 bp, Homo sapiens
ttcaggtacaccaatcagacatagatttggtctttttacatagtcccgtatttcttggaggctctgttcatttctttttattcttttctgctaaacttctcttctcgcttcatttcattccttttgtcttccatcactgataccctttcttccagttgatcgcatcggctactgaggcttctgcattcatcacgtagttctcatgccttggttttcagctccatcaggtcctttagggacttctctgcattgrttattctagtgatccattcatctatttttttttcaaagtttttatcttctttgccattggttcgaatctcctcctgtagctcagagaagtttgatcatctgaagccttcttgtctccactcatcgaagtcattctccatccagctttgttccattgctggtaaggagttgtgttcctttggaggcggagaggtgctctgaagtttagagtttccagtttttctgctctatttgtttcccatctttgtggttttatctaacttgggctttgatgatggttatgtacagatgggtttttggtgtgaatgtcctttctgtttattagttttccttctaaca

SEQ ID NO: 929649 - DNA, 596 bp, Homo sapiens
tggagtttactggaggtccattccagaccctgtttgcctgcttatcagcagcgctcactgcagaacagcagatattggtgaactgcagatgctgctgcctgattgttcctctggaaattttgtctcaaaagagtaccaggctgtgtgaggtttcagtccwaccatacttgggggtgcctcccagttaggctactcaggagtcagggacccacttgaggaggcagtctgtccattctcagatctcaagctgcaagctgggagaaccactacactcttcaaagctgtcagagagggatatttaagtctgcagcggttactgctgtctttttgtttgtctgtgccctgcccccagaggtggagcctacagaggcaggcaggcctccttgagctgcggtgggctccacccagttcccgcttcctggccactttgtttacgtactcatgccttagcaatggcgggcatccctcccccagcctcactgccactttgcagtttgatcttagactgctgtgctagcaatgagtgaggctccgtggacgtaggactctctgagccaggtgcaggatataatctcctggtgtgacattttttaagc

SEQ ID NO: 929650 - DNA, 596 bp, Homo sapiens
tggagtttactggaggtccattccagaccctgtttgcctgcttatcagcagcgctcactgcagaacagcagatattggtgaactgcagatgctgctgcctgattgttcctctggaaattttgtctcaaaagagtaccaggctgtgtgaggtttcagtcctaccatacttgggggtgcctcccagttaggctactcaggagtcagggacccacttgaggaggcagtctgtccattctcagatctcaagctgcaagctgggagaaccactacactcttcaaagctgtcagagagggatatttaagtctgcagcggttactgctgtctttttgtttgtctgtgccctgcccccagaggtggagcctacagaggcaggcaggcctccttgagctgyggtgggctccacccagttcccgcttcctggccactttgtttacgtactcatgccttagcaatggcgggcatccctcccccagcctcactgccactttgcagtttgatcttagactgctgtgctagcaatgagtgaggctccgtggacgtaggactctctgagccaggtgcaggatataatctcctggtgtgacattttttaagc

SEQ ID NO: 929651 - DNA, 596 bp, Homo sapiens
tggagtttactggaggtccattccagaccctgtttgcctgcttatcagcagcgctcactgcagaacagcagatattggtgaactgcagatgctgctgcctgattgttcctctggaaattttgtctcaaaagagtaccaggctgtgtgaggtttcagtcctaccatacttgggggtgcctcccagttaggctactcaggagtcagggacccacttgaggaggcagtctgtccattctcagatctcaagctgcaagctgggagaaccactacactcttcaaagctgtcagagagggatatttaagtctgcagcggttactgctgtctttttgtttgtctgtgccctgcccccagaggtggagcctacagaggcaggcaggcctccttgagctgcggtggsctccacccagttcccgcttcctggccactttgtttacgtactcatgccttagcaatggcgggcatccctcccccagcctcactgccactttgcagtttgatcttagactgctgtgctagcaatgagtgaggctccgtggacgtaggactctctgagccaggtgcaggatataatctcctggtgtgacattttttaagc

SEQ ID NO: 929652 - DNA, 637 bp, Homo sapiens
gagtagaacatttctttcgattgagtaattgcggaactctctgtaaaatctgcaactggatatttggagcactatgaggcctatggttgaaaaggaagtatcttcacttaagatctagacagaaacattctgacaaacttctttgtgatgtgtgcattcatctcacagagttgaaccattcttttgattgagcagttttgaaacactctctttgtagaatctgcaaatggacatttggagggctttgtgacctatggtggaaaaggaaatatcttcacataaaaactattctgaaacattctgacaaactcctttgtgatgcatgcattcatctcatggagttgaaacttcctttgcattgagcagttttgaaaaaccctttttgtagaatctgcargtgtacacttggagtgctttgaggcctattgtcgaaaaggtaaaaaagtcacataaaatctagacaggatcattcttagaaaattcttactgatgtgataatttatctcacagagtttaatctttcttttgattgagtagttgtgaaacactctttgtagaatttccacgtggacgtttggccacttagaggcctatgttggaaaaggaaatatcttcacattaaaactagacagaagct

SEQ ID NO: 929653 - DNA, 637 bp, Homo sapiens
gagtagaacatttctttcgattgagtaattgcggaactctctgtaaaatctgcaactggatatttggagcactatgaggcctatggttgaaaaggaagtatcttcacttaagatctagacagaaacattctgacaaacttctttgtgatgtgtgcattcatctcacagagttgaaccattcttttgattgagcagttttgaaacactctctttgtagaatctgcaaatggacatttggagggctttgtgacctatggtggaaaaggaaatatcttcacataaaaactattctgaaacattctgacaaactcctttgtgatgcatgcattcatctcatggagttgaaacttcctttgcattgagcagttttgaaaaaccctttttgtagaatctgcaggtgtacacttggagtgctttgaggcctattgtcgaaaaggtaaaaaagtcacataaaatctakacaggatcattcttagaaaattcttactgatgtgataatttatctcacagagtttaatctttcttttgattgagtagttgtgaaacactctttgtagaatttccacgtggacgtttggccacttagaggcctatgttggaaaaggaaatatcttcacattaaaactagacagaagct

SEQ ID NO: 929654 - DNA, 547 bp, Homo sapiens
ttttaaacaccctttttgtaggatctgctaggggacatttggagcgatttgaggcctatggtggaaaaggaattatcttcacataacaactagacaaaagaattctgagaaacttctctgtgatgtgtgtgttcatgtcacagagttgaacctttcttttgattgagcagtttggaatctctttttgtagaatcagcaagtggacatttggagggctttgcagctatggtagaaaaggatatatcgtcacataaaatctagacagaagcaatctgataaacttgtttttttattattattattatacttyaagttttagggtacatgtgcacaaactgcaggttacttacatatgtatacaagtgccatgctggtgagctacacacactaactcgtcatctagcattaggtatatttcccaatgctatccctctcgcctcctcgcaacccgcaacagtcccctgagtgtgatgttccccttcctgtgtccatgtgttctcattgttcaattcccacttatgagtgagaatatgctttgtttgttttt

SEQ ID NO: 929655 - DNA, 547 bp, Homo sapiens
ttttaaacaccctttttgtaggatctgctaggggacatttggagcgatttgaggcctatggtggaaaaggaattatcttcacataacaactagacaaaagaattctgagaaacttctctgtgatgtgtgtgttcatgtcacagagttgaacctttcttttgattgagcagtttggaatctctttttgtagaatcagcaagtggacatttggagggctttgcagctatggtagaaaaggatatatcgtcacataaaatctagacagaagcaatctgataaacttgtttttttattattattattatactttaagttttaggktacatgtgcacaaactgcaggttacttacatatgtatacaagtgccatgctggtgagctacacacactaactcgtcatctagcattaggtatatttcccaatgctatccctctcgcctcctcgcaacccgcaacagtcccctgagtgtgatgttccccttcctgtgtccatgtgttctcattgttcaattcccacttatgagtgagaatatgctttgtttgttttt

SEQ ID NO: 929656 - DNA, 547 bp, Homo sapiens
ttttaaacaccctttttgtaggatctgctaggggacatttggagcgatttgaggcctatggtggaaaaggaattatcttcacataacaactagacaaaagaattctgagaaacttctctgtgatgtgtgtgttcatgtcacagagttgaacctttcttttgattgagcagtttggaatctctttttgtagaatcagcaagtggacatttggagggctttgcagctatggtagaaaaggatatatcgtcacataaaatctagacagaagcaatctgataaacttgtttttttattattattattatactttaagttttagggtacatgtgcacaaactgcaggttacttacatatgtatacaagtgccatgctggtgagctacacacactaactygtcatctagcattaggtatatttcccaatgctatccctctcgcctcctcgcaacccgcaacagtcccctgagtgtgatgttccccttcctgtgtccatgtgttctcattgttcaattcccacttatgagtgagaatatgctttgtttgttttt

SEQ ID NO: 929657 - DNA, 620 bp, Homo sapiens
atctcacaaagttgaacatttcttttgattgagcactttggaaacactctttttgtagaatccacaagtggacaatttggagtgctttgcggcctttggtagaaaatgaaatatcttcaactaaaatctacacaaaagcaatctgagaaacttmtttgtgatgtgtgcattcatctcaaagagataaacctttcttttgattgagcagttttgaaactctctttttgtataatctgcaagtggacatttggagtgctatgaggcctatggtggaaaaggaaatatcttcacataaaaactagacagaagcattctgagaaacttctttgtgatgcatgcattcatcgcacagagttgaacctttcttttggttgagcagtttggaaacactgattttgtagaatctgcaagtggacatttggagcgctttgtgacctatggtagaaaaggaaatatcttcacataaaacctagacagaagcaatctgcgaaacttctttgtgagatgtgaattcatctcataaagttataccattcttttgattgagcagttttgaaactctcttattgtatactcttcaagtggacatttggatcgctttggatcctatggtggaaaag

SEQ ID NO: 929658 - DNA, 620 bp, Homo sapiens
atctcacaaagttgaacatttcttttgattgagcactttggaaacactctttttgtagaatccacaagtggacaatttggagtgctttgcggcctttggtagaaaatgaaatatcttcaactaaaatctacacaaaagcaatctgagaaacttctttgtgatgtgtgcattcatctcaaagagataaacctttcttttgattgagcagttttgaaactctctttttgtataatctgcaagtggacatttggagtgctatgaggcctatggtggaaaaggaaatatcttcacataaaaactagacagaagcattctgagaaacttctttgtgatgcatgcattcatcgcacagagttgaacctttcttttggttgagcagtttggaaacactgattttgtrgaatctgcaagtggacatttggagcgctttgtgacctatggtagaaaaggaaatatcttcacataaaacctagacagaagcaatctgcgaaacttctttgtgagatgtgaattcatctcataaagttataccattcttttgattgagcagttttgaaactctcttattgtatactcttcaagtggacatttggatcgctttggatcctatggtggaaaag

SEQ ID NO: 929659 - DNA, 600 bp, Homo sapiens
agaagcattcatagaaacttctttgtggtgtgtgcattcatctcacagagttgaaactttcttttcattgagcacttttgaaaccctgtttttgtagtatctgcaatggaaatttggagcgctttgagccctactgtggaaaagcaaatatcttcacataaaaactacacagaagcattctgagatacttctttgtgatgtctgcattcatctcacagagttgaaactttcttttgaatgagcagttttgtaacactctttttgtataatatgaaagtggatatttgcagtgctttgagtcctattgttgaaaagggttagtaaatatcttaacaaaaaaaatacacagaagcatcctgagaaactactttgtgatgtgtgcattcaactcacagagttgaaccaatcttttgattgtgaagtttttaatctctcttcttgtagaatctggaagwggatatttggagccctttgtggcctatggacgataaggaaatatcttctagtaaacactacagagacgcatactgagaaacttcttcgtgatgtgtgccttcatatcacagagttgaacctatcttatgattgagcagatttgaa

SEQ ID NO: 929660 - DNA, 658 bp, Homo sapiens
tttggagcattttgaggccaactgtggaaaagcaaatatcttcacataaaaactacaaagaagcattctgataatcttctttgtgatgtgtgcattcatctcacagagttgaacctttcttttgattgagcaattttgcaacacactttttgtagaatctgcaagtggatatgtggaggcctttgaggtctcctgtgtaaaaggaaatatcttcacataagaactacacagacgcattctgagaaacatctttgtgatgtgtgcattcaactcacagagttgaacctgttttttgattgaggagtttkgaatttctctttttgcagaatctgcaagtggatatttggagccctttgctgcctattttggaaaaggaaatatcttcaaataaaaactacacagaaacattctgagaaacatctttgttatgtcagcattcatctcacagagttgaatctatcttatgattgagcagttttttgaaactctgtttttgtagaatcagcaaatggatattttgagtgctttgtggcccattgtggaaaaggaaatatcttcacataaaaactacacagaagcattctgagaaactcctttgtgatgcgtacattcatctcaaatagttgaacatttctttcaatttagcagttatgaaaca

SEQ ID NO: 929661 - DNA, 533 bp, Homo sapiens
gtgatgtgggcattcatctcacagagttgaacctttcttttgattgagaagtttttaatctctctttctgtagaatctgcaaggggatatttggagggctttgaggcctgttgtggaaaagtaaatatcttcacataaaaactaaacagaaacattctgagaaacttctttgtgatgtatgcattcatctcacagaattgaactcttcttttgattgagcastttggaaacacgctttttctagaatctgtaagtggatatttggagctccttgaggcctattttggaaaaggatatatcttcacataaaaactacacagaagcattctgagaaactgcattgtgatgtgtgcattcatctcacagatttgaacctttttttgattgagcagttttgaaacactctttttgtagaatctgcaagtggatatttggagtgcttttaggtctattgtggaaaagaaaatatcatcacataaaaactatagagaatcattctgtgaaacttctttgcgttgtgtttactcacctca

SEQ ID NO: 929662 - DNA, 533 bp, Homo sapiens
gtgatgtgggcattcatctcacagagttgaacctttcttttgattgagaagtttttaatctctctttctgtagaatctgcaaggggatatttggagggctttgaggcctgttgtggaaaagtaaatatcttcacataaaaactaaacagaaacattctgagaaacttctttgtgatgtatgcattcatctcacagaattgaactcttcttttgattgagcactttggaaacacgctttttctagaatctgtaagtggatatttggagctccttgagrcctattttggaaaaggatatatcttcacataaaaactacacagaagcattctgagaaactgcattgtgatgtgtgcattcatctcacagatttgaacctttttttgattgagcagttttgaaacactctttttgtagaatctgcaagtggatatttggagtgcttttaggtctattgtggaaaagaaaatatcatcacataaaaactatagagaatcattctgtgaaacttctttgcgttgtgtttactcacctca

SEQ ID NO: 929663 - DNA, 426 bp, Homo sapiens
ttttgggttcttggtcacaaaatctttgtctaatccaatgtctaaagtttttatggtttcagttcttagatttaagactttgatacatcttaagttgattttcatttaaggggaaagttgaggattcagtttcatttttttatatgtggcttgccagttaccctagcaccatttgttgaatagggytttttccccccactttatgttttggtttggtttgtaaatgctcagttcactttaagcatttggatttatttctgttctctattctgttccattggtctatgtacctatttttataccagtaccacactgtttcagtgactatggccttatagtatagtttgaagttgggtaatgtgatgcctccagatttgttccttttgcttagtcttgctttggctgtgtgggttcctttttggtttc

SEQ ID NO: 929664 - DNA, 426 bp, Homo sapiens
ttttgggttcttggtcacaaaatctttgtctaatccaatgtctaaagtttttatggtttcagttcttagatttaagactttgatacatcttaagttgattttcatttaaggggaaagttgaggattcagtttcatttttttatatgtggcttgccagttaccctagcaccatttgttgaatagggctttttccccccactttatgttttggtttggtttgtaaatgctcagttcactttaagcatttggatttatttctgttctctattctrttccattggtctatgtacctatttttataccagtaccacactgtttcagtgactatggccttatagtatagtttgaagttgggtaatgtgatgcctccagatttgttccttttgcttagtcttgctttggctgtgtgggttcctttttggtttc

SEQ ID NO: 929665 - DNA, 712 bp, Homo sapiens
gtgcataatctgccctttctctctggctgccattaacattttttccttcatttcaaccttgatgaatctgacaattatgtgtcttggggttgctcttcccaaggagtatctctgtggtgttctctgtatttcctgaatttgaatgttggcctgccttgctaggttggggaagttctcttgaataacatcctgaagagtgttttccagcttggtgccattctccccgtcactttctttctttttttttttttgtttttttgagatggaktcttgctctgtcgcccagagactggagtgcagtggcgccatctcggcttactgcaagctccgcctcccaggttcaggccattctcctgcctcagcctcctgagtagctgggactacaggcgcccgccaccatgcctggctatttttttgtatttttagtagagacggggttataacgcgttatccaggatggtctcgatctcctgacctcgtgatctgcccgccttggcctcccaaagtgctgggattacaggcctgagccactgcacccggcctccccatcactttcaagtacaccaatcaaatgtagatttggtcttttcacattgtcccatatttcttggaggctttgttcatttctttttactcttttttctctaaacttctcttctctcttcatttcattcatttgaatttcaatcactgataccctttcttctacttg

SEQ ID NO: 929666 - DNA, 516 bp, Homo sapiens
gctgattccaaggcctatgccactagctattaagtaatgaatagcctttgtcactaatacatgcaaaagggacccagcagagattggaccgtgacagagcctcagcaaatattaaggccaatacaacggaaagacacttstgatttcactgcaattggcctgcattacctgcagcctgggattatgaattagattaataaaggacagaaatgacaaccaaatgatccaacccagaatgacgctgaacaatatataattgcttttacaatttggaaagattatcctttccaaaataatccttcaactactgtgtgtaacattcctagtatttattgcctattttctcagcctccatgtgtgtatgaactcccccgccccacccaattttagaaactcctttattgtttaggaacatttattctactcaatgaagtttcaattgcattcattcatggtgggccagctctgggggcttggatcaatcatgtgctttatgggcattctgctggtgccgtg

SEQ ID NO: 929667 - DNA, 633 bp, Homo sapiens
atcttctgagggcctcaggctgcttcaactcatagtggaaagtggaaagggagaagggatgtgctaagaagtcacacggtgagagacagagcaagagagataaaaactaaggaagccaggctgtttttaacaacctgctcagtggaaactagctagagtaagaactcactcatcctcatgagagagcattaatctacttataagggatccacaatcacgggcccaacacctcccaccaggcccccattccaacactgccacackggcatcaaacgtcaacataaggtttggtggaaacaaaacagatccaaactataaggtttgagtataaggttaagagacttgagatggggagattagcctggcttacccgggtgagcccagtctagctatattggatcaccatcttcttaaaagtagagaatcttttctggctgaagagggtcaaagaaatttagtaagaacagcctgatacttcatcatttgttttaagaatggaggaaggaaggcagaagccaaggaatgtggcagtctttagaagctggaaacagctctcaatctagaagctaggaaaaaaaaatggggactttaactgttacagggaaatgaacagaaattgtattctttcctgga

SEQ ID NO: 929668 - DNA, 610 bp, Homo sapiens
cactgcaatctccacctcccgggttcaagcaattctcttgccttagcctcccaagtagctgggattacaggcgcccaccaccatgcctggctaatttttgtatttttagtagagatggcctctcaccatgttggccaggctggtcttgagctcctggcctcaagtgatccacctgccttggcctcccaaagtgctgggataacaggcatgaaccactgcccccaggcctatttatttatttatttatttatttatttatttatttatttattttttgagacggagtcttgctctgtcacccaggctggagtgcagtggcacgatctcggctcactgcaacctctgcctcccaggtttaagcgattctcctgccttgcctcagcctcccgagtagctgggactacaggctcgtgccrccacgcctggctaattttttgtatttttagtagagacagggtttcaccatgttcgccaggatgttctcgatctttggacctcatgatctgcctgcctcagcctcccaaagagctgagattataggcgtgagccactgcacccagccttatttacttttttaaagacaagttctcactatgtcgcccaggctgga

SEQ ID NO: 929669 - DNA, 588 bp, Homo sapiens
gtgaagcctacattctccactcctgtggtctgtgctagcagacagtgagctacacacaggcccagccactcccgtgaagagctgggaagaggaggtgctctcacagtggctcaaaggcctcaacagggcagttcttgaaaccaaagtgtagagagcagagcattatctcagctctaacatttacacacatgcaagggattatgaagcaattgggagtggtagaaacacactggacctgtgatctgagccttgctttcactgtctgtgaagtggggtgatactatctcctgccaactcatggccagtcccagaatcaggcaggatggggcagcagagtgcctatgtgactgcaatgagctggataaaagtgaggttattatggggacccccagcccattctgagcaccttgggtggaggasgggcaggtgggcaggccaagggttggacgcttacctgcaaaggcgggcatcgctgctgactggccatagctggcccgcaggacagcagaaacgacatcatcaataaagcgctgcgtgacgcccacctgcagcagggactcagccacagagtgctgggtcatgttaaca

SEQ ID NO: 929670 - DNA, 588 bp, Homo sapiens
gtgaagcctacattctccactcctgtggtctgtgctagcagacagtgagctacacacaggcccagccactcccgtgaagagctgggaagaggaggtgctctcacagtggctcaaaggcctcaacagggcagttcttgaaaccaaagtgtagagagcagagcattatctcagctctaacatttacacacatgcaagggattatgaagcaattgggagtggtagaaacacactggacctgtgatctgagccttgctttcactgtctgtgaagtggggtgatactatctcctgccaactcatggccagtcccagaatcaggcaggatggggcagcagagtgcctatgtgactgcaatgagctggataaaagtgaggttattatggggacccccagcccattctgagcaccttgggtggaggaggggcakgtgggcaggccaagggttggacgcttacctgcaaaggcgggcatcgctgctgactggccatagctggcccgcaggacagcagaaacgacatcatcaataaagcgctgcgtgacgcccacctgcagcagggactcagccacagagtgctgggtcatgttaaca

SEQ ID NO: 929671 - DNA, 716 bp, Homo sapiens
ttagaaggaaaactaacaaacggaaaggacatccacaccaaatccccatctgtacatcaccatcaacaaagaacaaaggtagataaaaccacaaagatggggaaaaaacagagcagaaaagctgaaaattctaaaaatcagagggcctctccccctccaaaggaatgcagctcttcaccaggaatggaacaaagctggatggagaatgactttgacgagttgagagaagaaggcttcagacagtcaaacttctctgagcaaaaggagcaagttcaaacccaacacaaagaagctaaaaaccttgaaaaaagattagatgagtggctaattagaataaccagtgtagagaagtccttaaatgacctgatggagctgaaaaccatggcacgagaactctgtgacaaatgcacaagcttcagtggccaatttgatcacctggaagaaaragtatcagtgactgaagatcaaatgaatgaaatgaagtgagaagagaagtttagagaaaaaagagtaaaaagaaatggacaaagcctccaagaaatatgggactatgtgaaaagaccaaatctatgtctaattggtgtacctgaaagtgacagggagaatggaaccaagttgggaaacactctgcaggatattatccaggagaacttccccaacctagcaaggcaggccaacattcaaattcaggaaatacagagaatgccacaaagata

SEQ ID NO: 929672 - DNA, 619 bp, Homo sapiens
ataccttaatcggtttatcattttccatagcagataaaataatttagataatatataaaaagagagaaacaatcttcatggatatattttgctttcctttaaaagggcctgtaattcaccataacagtattcccctataagcttctgtgaagcaggttccctgtgcactgggtactaacttgtctgagtccagcaggacagatcacacatatatacaacaaacagcacaaagtgagtttattacttacagatagacatcaagagacaacagaagcttaggattcagggtgagtcggtcacccaagactcaggaaaacactatccagaacagatttcttgtctgcaggtgccccacttgcacagcagctgaargaccacagaatgcagcccactctgggttttataccctgggtccatgtgattcactgggctaaagtattgtaaaggacattctgtttcttagaggagaggggactagaacagagtccaggctatctggccggtctcttcctatctcatgacattgcattctcacaacattctagagttattctgagaactataagcaaaaaagaggaaaaattggatcagtccaaggctgcccacagaactgctcttt

SEQ ID NO: 929673 - DNA, 607 bp, Homo sapiens
gattgctgaaggcaaagggaatacagaatggtttacagaaggtagttacaaatatcaactatcacagcatgaccagttacagaaaagagaactatttcatgactatttcttccttacttggttaagaatatgtttgtgtgtatatagacatatattaggcaaatatctttgttttcattcttttcttattcctttatcatgtaacataagacatattgactttataacaatatttaagtactgttcattttacatcatagtatttaagttatgggmtatccagagaatagtaaacattacccaaggacttcacttgagggaaggattagtacattttcagtaggaactattaccttgttgttacctttgtttggagattaagtatggtttaaagaaatacatatgggtgccaagttgacttggggtggacttgtgatggttaattttagttgtcaacttgacaggatttcgaaatacccagagagtttgtaaggcattgcttctggctgtgtctgcaagggtgttttcagaggagagtggcatgtgagtcagtgaactgagtgaggcagatctgccctcaatgtgggtgggcaccatccatttggat

SEQ ID NO: 929674 - DNA, 607 bp, Homo sapiens
gattgctgaaggcaaagggaatacagaatggtttacagaaggtagttacaaatatcaactatcacagcatgaccagttacagaaaagagaactatttcatgactatttcttccttacttggttaagaatatgtttgtgtgtatatagacatatattaggcaaatatctttgttttcattcttttcttattcctttatcatgtaacataagacatattgactttataacaatatttaagtactgttcattttacatcatagtatttaagttatgggctatccagagaatagtaaacattacccaaggacttcacttgagggaaggattagtacattttcagtaggaactattaccttgttgttacctttgtttggagattaagtatggtttaaagaaatacatatgggtgccaagttgacttggggtrgacttgtgatggttaattttagttgtcaacttgacaggatttcgaaatacccagagagtttgtaaggcattgcttctggctgtgtctgcaagggtgttttcagaggagagtggcatgtgagtcagtgaactgagtgaggcagatctgccctcaatgtgggtgggcaccatccatttggat

SEQ ID NO: 929675 - DNA, 566 bp, Homo sapiens
gaacttccaatactatgttgaataggagtggtgagaaagggcatccttgtcttgtgccggttttaatggggaatgcttccagtttttgcccattcagtatgatattggctgtgagtttgccataaatggctcttattattttgagatatgctccatcaatgcctaatttattgagagtttttaacatgaagggatgttgacttttaccgatgcccttttctgcatctttgagataatcatgtggtttttgtctttagttctgtttacatgatgaattacacttattgatttgtgtatgttgaaccaaccctgcagaccagagatgaagccgactagatcatgatggataagcttttcaatgtgcttctggatttgctttgccagtwtattattgaggattttttcatcgatgctcatcagagatattggcctaaagttttccttttttgttgcatctctgccagattttggtatcagggtgatattggcctcataaaatgagttagggagaagtccctccttttcagttgtctggaatagcttctgaaaaaatggtaccagatcct

SEQ ID NO: 929676 - DNA, 566 bp, Homo sapiens
gaacttccaatactatgttgaataggagtggtgagaaagggcatccttgtcttgtgccggttttaatggggaatgcttccagtttttgcccattcagtatgatattggctgtgagtttgccataaatggctcttattattttgagatatgctccatcaatgcctaatttattgagagtttttaacatgaagggatgttgacttttaccgatgcccttttctgcatctttgagataatcatgtggtttttgtctttagttctgtttacatgatgaattacacttattgatttgtgtatgttgaaccaaccctgcagaccagagatgaagccgactagatcatgatggataagcttttcaatgtgcttctggatttgctttgccagtttattattgaggattttttcatcgatgctcatcagagatattggcytaaagttttccttttttgttgcatctctgccagattttggtatcagggtgatattggcctcataaaatgagttagggagaagtccctccttttcagttgtctggaatagcttctgaaaaaatggtaccagatcct

SEQ ID NO: 929677 - DNA, 786 bp, Homo sapiens
tggctcacacctgtaatcccagcattttgggagtctgcggttggtggatcatttgagctcaggagttcaagaccagcctgggcaacatggggataccccatctctataaaaaaaatacaaaaaattagctgggcatggtggcacgtgcctatagtcccagctactggggaagctgaggtgggaagatcacttgagcctgagaggcagaagttgcagtgaactgagatcatgccactgcactccagcctgggtgacagagtgagaccccacctcaaaaaataaaaataaaaaataaattatccagtctcaggtatttctttatagcaatgcaagagcagattaatacagcatgtctaaccaccttattctttagaaatgccttggctattttyttgatctttattcttatacacatatttcagaatcagtatgtcaagttccttagaaatccctgttggaatatcagattggagttgcattaaatttatttatttatttatttatttatttatttattcatttatttatttattttttagacggagttttgctcttgttgtatttttggtagagacagggtttcttcatgttggtcaggctggtctcgaactcctgacctcaggtgatcggcccacctcggcctcctaaagtgctgggattacgggcatgagccaccgcccccggctatctattcatttaaggagaatttatacctttatcattgttaagtctttctcaccatttatttaagtctttttaatgcccttcagttaaatattaactttt

SEQ ID NO: 929678 - DNA, 605 bp, Homo sapiens
gctggtataatctcatctctattcttgatgtttttttgagatggctgattaagtccatgattcacatctgcactaatctccttattaaaatgtcagcttgccacctacttacagttttcttctagaacatactttctcactttcgtgttatgaaawggctgagaattttccaaatctttaagttctggttcctgtttgcttaacaattctgtccttaagtcatttctttcctcttgcattttaccacaagaagtcaggacacaccatgcctctccttcaacattttacttaaaaatctgctcagctaaatatccaggatcattgcttgcaagttctacattccacaaaacaatagaatttgaacacaattcagccaagctctttgctactctataacaaagatgggcttttcttcattgtcctatgtgctcctcatttccatctgagacctcatcagaatggcctttaccatacatatttcaaccaatattgtgctcatgataacttacatattctccaaaaaatacgttttctctacaggtctcccctctccttgtgaacctccaacagacctccctttagccgtccctttgcagcaatattgg

SEQ ID NO: 929679 - DNA, 737 bp, Homo sapiens
ctcctctcttcctctctttgggcctccctattcccagagacaaaacaattactgaaattaggccaattaataatctacaatggcctctaggtatttaattgaaaggaagagtggcacatctctcacttttaactaaagctaggaatgattaggtttagtgaggaaggcatatcaaaagctgagaaaggccaaaagctaggccttctatgtcaaagagcagtcaagttgtgaatgtaaaggaaattttcttgraggatattccagtcacatatgaatggtaagaaagcaaaatgggccaaacgctctggctcaagcctataattccaccactttggaaggccaaagcagccagactgctggtgcccaggagtttgagatgagcctgaacctgggcaaaatcccatctctacaaaaaatacagaaatcagccaggcattgtggtgtgcacctgtagtcccagctactaaggaggctgaggtgggaggatctcttgagtctggaaattcgaggctgcaatgaactgtaattatgccactgcacttcagtctgagtgacaaagagagatcctgtctcaaaaacaaacaaaccaaccaaccaacaaaaacaaacaaaaaaacaaagccccccaaaacgaaagcaaaacagccttattgttgagagaaagtttcaacggtctggataaaaaaaaaagtcaaaacagccataatattcccttaagccaaagcctaatccattgc

SEQ ID NO: 929680 - DNA, 753 bp, Homo sapiens
taaaaatctgaatggcacgcctaccaggaaaaggctaacgtcaaaagaaaatactttttccccctcacgtacaaaccatcaatgagacttcaatgcagcataaagtcacgattttatattgttgtctaccaatgtgtgaaaaaacaggtactcagatatggggacaaaccctagttctactgtctttctaagataataaaactcaattaattttaattttttcgtctgtaaattcaaagtgatgaaaccaaagtttttaggcaattttaaaagttaaatcggggaggagccaagatggccgaataggaaaagctctggtctacagctcccagcgtragccacgcagaagacgggtgatttctgcatttccatctgaggtaccgggttcatctcactagggagtgccagacagtgggcgcaggccagtgggtgcagtgcaccgcgcaggagctgaagcagggcgaggcattgcctcactcgggaagcacaaggggtcagggagttccctttcctagtcaaagaaaggggtgatggacggcacctggaaaatcgagtgactcccacccgaagactgcgcttttcctaccggcttaaaaaacggcgcaccaggagattatatccgcacctggctcggagggtcctacgcccacggagtctcgctgattgctagcacagcagtctaagatcaaactgcaattcggcagccaggctgggggaggggcgcccgccattgcccaggcttgattaggtaaa

SEQ ID NO: 929681 - DNA, 753 bp, Homo sapiens
taaaaatctgaatggcacgcctaccaggaaaaggctaacgtcaaaagaaaatactttttccccctcacgtacaaaccatcaatgagacttcaatgcagcataaagtcacgattttatattgttgtctaccaatgtgtgaaaaaacaggtactcagatatggggacaaaccctagttctactgtctttctaagataataaaactcaattaattttaattttttcgtctgtaaattcaaagtgatgaaaccaaagtttttaggcaattttaaaagttaaatcggggaggagccaagatggccgaataggaaaagctctggtctacagctcccagcgtgagccacgcagaagacgggtgatttctgcatttccatctgaggtaccgggttcatctcactagggagtgccagacagtgggcgcaggccagtgggtgcagtgcaccgcgcaggagctgaagcagggcgaggcattgcctcactcgggaagcacaaggggtcagggagttccctttcctagtcaaagaaaggggtgatggacggcacctggaaaatcgagtgactcccacccgaagactgsgcttttcctaccggcttaaaaaacggcgcaccaggagattatatccgcacctggctcggagggtcctacgcccacggagtctcgctgattgctagcacagcagtctaagatcaaactgcaattcggcagccaggctgggggaggggcgcccgccattgcccaggcttgattaggtaaa

SEQ ID NO: 929682 - DNA, 546 bp, Homo sapiens
ccagaaagcaattaacaaaaggataggaataagtcctcacctaccaataatcgtcttgaatataaacagactaaattccctacttaaaagatatagattagctgaaaggattttttttaagcaataatatgctgcctacaagaaactcacttcagtggtagacacatatggactgaaagtgaagagagggaaaaagatattccatgcaaatggaaaccaaaaacaagcaggagagtactagtatcagataaaacaaactttaagtcaaaaacagtaaaaagagacaaagaaagtcattatataataataaagagatcaattcatcaagaagatataacaattgtaaatatgtgtgtacycaataccaaagcagccagatatataaaacaaatattactggatataaagagagaaatagagtccaatttcaattttagttgggtacttcaatactccactctcagcactagacagaaaatcaacaaagaaacactggatttaaactgcacattacaccaaatggatctaacagacatttacagaaca

SEQ ID NO: 929683 - DNA, 708 bp, Homo sapiens
agaagtggtatatacataattgggctcaagcaggtcctgaaggcacaagttacatgagaaagtggctcaaatgcccatggtctccactcctgccttctctaccccagcctgcaacaatggcctcatggggggttctctatgatcagttgacagaggaagagaagactagggcctggttcacagatggttctgcactatatgcaggcactaccaaaagtggagagctgcagcactacagcccctttctaggacatccctgaaggatagcagtgaagtgaaatcttcccagtgggcagaacttcgagcagtgcacctggttgctcactctgcatgtaaggagaaatggtcagatgtacgattatacaccgattcatgggctgtagtcaatggtttggctggatggtcagggacttggaagaagcatgcttggaaaactggtaacaaatttggggaagaggtatgtggatggtcacctctaagtggtcaaaaactgtgaagatgcttgtattccatgtgatattaaccaacatgtgacctyagcagaagagaattttaataatcaagtagatagaatgacctgttctgtcaacacaactcagcctctttcaccagccacctctgtcatcgcccagtgggcccatgaaaaaagtggccatggtggcagggatggaggttacgcatgggctcagcaacatgtacttccactca

SEQ ID NO: 929684 - DNA, 702 bp, Homo sapiens
tcaatggtttggctggatggtcagggacttggaagaagcatgcttggaaaactggtaacaaatttggggaagaggtatgtggatggtcacctctaagtggtcaaaaactgtgaagatgcttgtattccatgtgatattaaccaacatgtgacctcagcagaagagaattttaataatcaagtagatagaatgacctgttctgtcaacacaactcagcctctttcaccagccacctctgtcatcgcccagtgggcccatgaaaaaagtggccatggtggcagggatggaggttacgcatgggctcagcaacatgtacttccactcaccaaggctgacctggttatggccactgctggatgcccgatttgccagcagcagagaccaacactgagccctcaatatggcaccattcctcrgggtgatcagccagctacctggtggcaggttgattatttcggacctcttccatcacggaaagggtagaggtttgtcctcactggagtggacatttactctggatatgggtttgcctatcctgcacacaatgcttctgccaagactaccatctgtggacttatgggatgccttatccatgatcatggtattccacacagcattgcctcagaccaaggcattcactttatggctaaagaagtgtggcagtgggctcagattcatggaattcactggtcttcccatgtt

SEQ ID NO: 929685 - DNA, 725 bp, Homo sapiens
tataaaacattggaatggcctttggaagtcacaaatacaatgtcaactaggggactatactttgcagggctggggcaaagttctctagaagaccatgtgtgctctgaatcagcatacaatatatggtactgtttctcccatagccatgattcatgggtccaggaatcaaggggtggaagtggaagtggcaccactcaccatcatccctagtgatccactagcacagtttttgcttcctgttcccgtgacattacattctgctggcctagaggtcttagttccagagggaggaacgctgccaccaggagacacaacaattccattaaactggaagttatgatcgccacctggacactttgtgctcctcctacctttaagacaacaggctaagaagggagttacagtgttggtttgggtgacttacttgcactatcaagatgaaattaatctattactccagcatggaagtaaggaagagtatgcatggaatataggmgatccattagggcttctcatagtatgaccatgccctgtgattaaggtcaatgggaaactacaacagcccaattcaggcaggactacaaatggtccagacccctcaggaatgaaggtttggtttactccagcaggaaaaaacccgcgacctgctgaggtgcttgctgaaggcaaggaaaacacagaataaatagtagataaaaggtaatcatcaataccagctataacca

SEQ ID NO: 929686 - DNA, 596 bp, Homo sapiens
tacaaatgatgctggaatgactagatagccacatgtaaagaacaaaattctacttctgctcacatgataccaaaccaagccccatcataatgaatcaaggacctaaatataagaactaaaactacaaaaatctcagaagaaagcatggaagtaaatatttgtgactttaaattagacaatggtttcttagataaaatactatatagaagacatatagatgaattagacttcataacattaaattttttgtgcttcaaaaaacacctatcaagaaactctaaagataactcacaaaatcagagggcatattttcaaattatatatctcacaagtgacttgtgttgcagctatataaattattyttgcaatccaacaacaaaaagacacataataaaatgagtaaattatttaataggcatttcttcaaacaagatatgcaaatggacattaagcacatgaaacaatgctcaacaccattagtcattaggaaaatgcaactcaaaatccaaataagaatctacttcacatgcagtaaaattgttgtaatgaaaaagacagtaacgattgttggcaagaatgtggagaaactggaaccc

SEQ ID NO: 929687 - DNA, 529 bp, Homo sapiens
tctagttcttatcatgggatattctgtttctcactacagacctcaaagtactccgaaatgtcccttcacagattctacaaaaaaactgtttcccaactgctgaatcaaactaaagtttaactctgtgagctgaatccacacacyataaagcagtttcacagatagcttcattatagtttcttttttttttttccacgggatattcagtttttcactggaagactcaatgagctctgaagtgacttctggcagattcctcagaaaaagtgtttccaaacttccgaatcaaaagaaaggtttaactctctgagctgaatgcacacactgcaaatcagtttcacagatagcttctttctagtttttatcactgcatattctgttttccactggaagacttggtgggctttgatatgtccctttgcagattttacaatgagagtgttttcaaagtgctgaatcaaaatgcattattagctctgtgaaatgaatgtacgcatcacaaagcagtttctcagatagcttctttcta

SEQ ID NO: 929688 - DNA, 593 bp, Homo sapiens
gtttctctcacggaaggcccccacaagtgaaaatgcggccctgggttgtcttgagcaggctgcaggaacccagggaaatgttgaggcaggcataaaagagaagcagcgagatggcagggaatgctgggagcctctcattgtggcctctcttatcccagaagcccgcagggctgtcttgggaggcttgtaaagctgcaggctttggaacagggtgtctgtgtctcttgcggaargcccttaaaagcgaaaactgggtcgtaggatggcgtgggccaggcactgggactgagggggacattcaggcaggcaaggggcagaaagggcaagacagcagggaaggctgggagcctcccaaagacacctgtcccatcgcaaaagcacccagggttgtcctgggcaggctgtaaagccccaggctttggaacagggtgcctgtgcctcttgtgaaaggtctccacaagccaacaaaatgcctcacatttccttgggcagggagcagacactcagggggacgttgaggcaggcagaggggagaagtggtgaaacagcagggaatgcttggagcctccccaaaagcctctcttatcccaaaa

SEQ ID NO: 929689 - DNA, 586 bp, Homo sapiens
gggaagctcccagctttccctgtgtggtctcaccgcttctcccgtctgcttgcctcactgttttcctgagtctctgcagtccagccatgccaccctgctgccaccatttcacttgtggttgtctcgcgagagacacaggcatacttctgcaaaacccagggctttacagcctacccaggacagccctgggatctcctctgatgggagaggcctccttgggagtctcccagcattccctgtggcctgtctgcttctaccctctgcctgcctcagtgtcccactgaggccctgcggcaaacccaagccaccctttgggtccgttttcggwggtggggatctgccactagagacagaggcaccctgctccaaagccttgggctgtacagcctgcccgggagagtgctggtggcttctggtatgggagaggcttcttgggaggcccccagcattccctgcagtctcatcacttctttcctctacctacgtcaaagtccacctgaatccctccatcccacccacaccacactgtggccccgtttttccttgtggaggccttccatgagagacacaggcaccccgctccaag

SEQ ID NO: 929690 - DNA, 632 bp, Homo sapiens
acctcacttttgattcagcagtttggaaacacatttttggagaatctgtgtagggacttttcagaaggcactgaggcctatagtaaaaaaaacaaatatcctgccttaaaaactagaaagaagttatctgtgaaactgcttcatgttgtttggattcagctcacagagttaaacttttcttatgattcagcagttgggaacactctttttgtagaatctgtgtagggacatttcagagcacagtgaggcctgtagtgagaatctgaatattccatgatgaaaactagaaacaagctatctgtgaaactctttttgatgtgtgkattccactcacagagttaagtctttcttttgattcaggagtttggaaacactttttttaatataatctgtaaagggacatttcagagctcagtgaggcctatagtaaaaaaagaatatccctccataacaactagaaaaaagctatctgtgaaatggcttgtgatgtgtggattcaggtcacaaagttgaaagttgtttttttttttgatggagtcttgctctgttgcccaggttggcatgcagtggcatgatcttggcttactgcaagctcctcctcctgagttcacaccattctcctgcctcagcct

SEQ ID NO: 929691 - DNA, 590 bp, Homo sapiens
tgtgtatagcaatttctttgaaaaatacatgtttacaagggcctttcatatcttatcttgtttaatccccctcacacgccataggtgatgttgttaacccctttttatgaggaagaaactgggccacagagagatgaaacagtatgctcaaagtcacacctccaggcctggcrcagtggctcacgcctgtaatcccagcactttgggaggctgaggtgggcagatcatgaggtcaagagaaccagaccatcctggccaacacggcaaaaccccgtctctactaaaaatacaaaaattagctgggcgtggtggtgcacgcctgtagtcccagctacttgggaggctgaagcaggagaatcgcttgaacctgggaggcggagattacagtgagccgaaatcatgccactgcactccagcctggcaacagagtgagactccatctcaaaaaaacgaaaaacgaaacaaaacaaaaaaagtcacacctccagtaaaagaatgaattcagttgcccagagtctgtggtctttctataaccctcataagtataacagtaaaactccagccaaggaagacaaagagacctttagaga

SEQ ID NO: 929692 - DNA, 635 bp, Homo sapiens
ccagaccatcctggccaacacggcaaaaccccgtctctactaaaaatacaaaaattagctgggcgtggtggtgcacgcctgtagtcccagctacttgggaggctgaagcaggagaatcgcttgaacctgggaggcggagattacagtgagccgaaatcatgccactgcactccagcctggcaacagagtgagactccatctcaaaaaaacgaaaaacgaaacaaaacaaaaaaagtcacacctccagtaaaagaatgaattcagttgcccagagtctgtggtctttctataaccctcataagtataacagtaaaactccagccaaggaagacaaagagacctttagagaccaaagagaactttatttaattcaggcatccaggcccacagcagactcatgcccaaaatggctgctgactctgacaaagaaagcaggcttgcttatatgtcgtttgaggygggaaaacaaggcaggatacaggtttcaggcaaagacagtaaattatttaacccgtgacaattctgagaaaacttacaatttagttatcttaaccagtcaatcttgaagctagacagagatggggtaaggtaaaacaggagttacagaaatatgtgggggtctgggggcaggcaag

SEQ ID NO: 929693 - DNA, 795 bp, Homo sapiens
tctggatcaagtggacctgatagatacctacagaactctctacgccaaaacaacagaatatacattctcctcggcaccacgtggcacttactgtaaaaccagtcacataattggaagtaaaatactcctcagcaaatgcaaaagaactgaaatcatgacaatctttcagaccacagcacaatcaaattagaactcaagattaggaaactcactcaaaaccacacagctatgtggaaattgaataacctgcttctgaatgactcctgggtaaataatgtaattaaggaagaaatcaagaagttcsttgaaaccaatgagaacaaagagacaatgtacaagaatctctgggatgcagctaaattagtattaagagggaaatttatagcactaaatgcccacgttaaaaagctagaaggatctccgattgacaccctaacatcacaactaaaagaactagagaactaagagcaaacaaatcccaaagctagtaagaatacaagaaataaccaagatcagagtggaactgaaggggatagagacacaagtgacccttcaaaaaaatcaataaatccagaagtttttttgaaaaaattaataaaatagatagacttctagctagactaataaagaagaagagagagaagaatcaaatagatgcaataaaaaatgataacggggatatcaccactgaccccacagaaacacaaccattggagaatagtataaacacctctatggaaataaactagaaaatctagaagaaatagataaattcctgggtacatacaccctccc

SEQ ID NO: 929694 - DNA, 605 bp, Homo sapiens
taccagaggtacaaagagaaactggtaccatttcttttgaaattattccaaacgattgaaaaaaaggaattctaactcattccatgaggccaagattatcttgataccaaaacctggcagagatactacaaaaaaagaaagcttcaggccaatatccctgataaacatcgatgcaaaaatcctcaataaaatactggcaaactgagtctagaagcacatcaaaaagcctatccacaacaacgaagttggcttcatccccagaatgcaaggctggttctacaaacacaaatcaataaatataattcatcacattaacagaactaaagacaaaaaccacaagattatctcattagatgyagaaaagatcttcaataaaattcaacattccttcatgttaaaactcaataaactagggattgatggaacatgtctcaaaatattagagccatttatgacaaatccacagccaatatcatacttaatgggcaaaagttggaagcattccccttgaaaactggcacaaaacaaggatgccctctcttaccactcctatttaatatagtattggaagttctggccagggcaatcaggcaagagaaagaaat

SEQ ID NO: 929695 - DNA, 621 bp, Homo sapiens
attctaccagaggtacaaagagaaactggtaccatttcttttgaaattattccaaacgattgaaaaaaaggaattctaactcattccatgaggccaagattatcttgataccaaaacctggcagagatactacaaaaaaagaaagcttcaggccaatatccctgataaacatcgatgcaaaaatcctcaataaaatactggcaaactgagtctagaagcacatcaaaaagcctatccacaacaacgaagttggcttcatccccagaatgcaaggctggttctacaaacacaaatcaataaatataattcatcacattaacagaactaaagacaaaaaccacaagattatctcattagatgcagaaaagatcttcaataaaattcaacatyccttcatgttaaaactcaataaactagggattgatggaacatgtctcaaaatattagagccatttatgacaaatccacagccaatatcatacttaatgggcaaaagttggaagcattccccttgaaaactggcacaaaacaaggatgccctctcttaccactcctatttaatatagtattggaagttctggccagggcaatcaggcaagagaaagaaataaaaggtattca

SEQ ID NO: 929696 - DNA, 802 bp, Homo sapiens
gggttcatctcactggggcttgtcagacagcggatgcaggatagtgggtgcagcccactgagcatgagccgaagcagggcgaggcattgcctcacccgggaagcccaaggggtaagggaattccctttcctagccaagggaagctgtaacagaaggcacctggaaaatcgggtcactcctaccctaatactgcgcttttccaatggtcttagcaaagggcacaccaggagattatatcccacgcatgcctcggagggtcccatgcccatggagccttgctcattgctagcacagcagtctgagatcgaactgcaagttggcagccaggctgggggaggggcgcccaacattgctaaggcttgagtaggtaaacaaagtggccaggaagctcaaactgggtggagcctaccgcagctcaaggaggcctgcctgcctctgtggactccacttctgggggcagggcataactgaataaaaggcagcagaaacctctgcagacttaaatgtccctgtctgacagctttgaagagagttgtggttctcccagcatggagtttgagatctgagaacgggcagactgcctcctyaagtgggtccctgactcctgaatagcctaactgggaggtaccccccagtaggggcagactgacacctcacacagccaggtacccctctgagacgaagcttccagaggaacgatcaggcagcaacatttgcggctcagcaatatccgctgttctgcagcctctgctgctgataccaaggcaaatggtctggagtggacctccagcaaactccaaca

SEQ ID NO: 929697 - DNA, 559 bp, Homo sapiens
ttaactcctggcctcaagtgatccttctacctcagcctcccaaagtgctgggattataggcatgagccactgtgcctagcatagactttttttttttttccgagacggagtcttgctctgtcaccgaggctggggtggaagggcgtgatctcggctcactgcaacctccacctcccaggttcaagcaattctcctgcctcagcttccctagtagctgggattacaggtgtccgccaccacgcccagataatttttgtattttcagtagagacagggttttaccaatrttggccaggctgatctcgaactcctgacctaatgatctgcccacctcagcctcccaatgtgctgggattacaggcgtgagccaccacacacagccttgactactttttgttgttgttgttgttattatactttaagttctagggtacatgtgtacaacgtgcaggtttgttacataggtatacatgtgccatgttggtttgctgcacccatcaactcatcatttacattaggtatttctcctaatgctatccctcctccagcccccgaccct

SEQ ID NO: 929698 - DNA, 523 bp, Homo sapiens
attgtaggcacctgtggtttcttcccctccctgccccatccactcccttctgccatttatgaaccctcaatctgggttggttttcctgggagaggagggacataccccctcccccattctccttccatgcatctgggatgggctctccccttggcttcagtgatgaaccgtgtggcccagkcctggccaaccaaagctctgcattccctggccctatggagcttgtattctgattaaaaagatggatgatgagcaaattaacagataacataatgtcagattaatgcagtgaagagaaacaagtgggataggagaaagagggtgctgtggtctgaatgcttgtgtccctgcaaaattcatgtgttgaaatctaaccttcaaagtgttggtattaacaagtgaggcatcagcctggccaacatggtgaaaccccgtctctactaaagttagccaggcgtggtggtgcatgcctatagtcccggctacttgggaggctggggcaggagaatcgcttggacctggg

SEQ ID NO: 929699 - DNA, 523 bp, Homo sapiens
attgtaggcacctgtggtttcttcccctccctgccccatccactcccttctgccatttatgaaccctcaatctgggttggttttcctgggagaggagggacataccccctcccccattctccttccatgcatctgggatgggctctccccttggcttcagtgatgaaccgtgtggcccaggcctggccaaccaaagctctgcattccctggccctrtggagcttgtattctgattaaaaagatggatgatgagcaaattaacagataacataatgtcagattaatgcagtgaagagaaacaagtgggataggagaaagagggtgctgtggtctgaatgcttgtgtccctgcaaaattcatgtgttgaaatctaaccttcaaagtgttggtattaacaagtgaggcatcagcctggccaacatggtgaaaccccgtctctactaaagttagccaggcgtggtggtgcatgcctatagtcccggctacttgggaggctggggcaggagaatcgcttggacctggg

SEQ ID NO: 929700 - DNA, 577 bp, Homo sapiens
gctcttggacttctcagcctcacgaactgtgagagataatttctttgctttgtaaattatcaagtctgtagtattctgatacagcagcagaaaacaaactaagatagaaaattgatattgggaggtatttgtttctataacaaatatctaaaaatgtggaatggctttggaactgggtaatggctagaagctggaagaatttagaggagcaggctaaaaaaaaaaaaagccagattgctgtgaatggaacattaagggtgattytgatgagggctcagaagagagctgtataaaaaatctgaatcttcttagagattgcttaaatgattgtgaccagaatgttagtagaaatatgaacagaaaaggtcatgctgatgaagtcttagacagaaatgaggaataaggttttggaaactagagtaaaggtcattcttgttataaagtggcaaagaccttagtagaactgcttcaatgcctgagggctttaaggaatacagaactcaagagcaatgaattaggatatatggcagaagtaatatctaagcaacaaagcattcaggctgatttctggatacct

SEQ ID NO: 929701 - DNA, 639 bp, Homo sapiens
tagcccctgtcaagagagtcaacctgtcctttgaagctttgaagccaagcgttgatttctcctctccagctataaaagtcctagatggtatgttcttctaatagaaggccgttttatctatattcaaaatctgttgtttagcacagccatcttcagtgatcttagttagatttttctggataacttgctgcagcttcttcatcagcacttgctgcttcaccrtgcaattttaggttgtagggatggtttctttcctcaaacctcatgaatcaacctctgctagcttccagcttttttttctggagcttcctcacccctctcagcctttatagaatggaagagagttagggccatgctatggcttagattttggcacaagagaatgttgtggaggtttgatcttcatccagaccaaactttctccatatcagtaataagactgttttgctttcttatcattcatgtgttcactgaagtagcatattttatttccgtcaataactttcctttgccttcacacttggctgtttggtacaagaggcctatcatttggcctatctcagcttttgacatgtctttctttgtttaatcattgctttgttttgattaaaaatgagagatatgggacttttcctttca

SEQ ID NO: 929702 - DNA, 562 bp, Homo sapiens
aggttcaggagaaacatacaccgtatacaggtggggagccaagcggccaataccaagatgcagagacacaggtttcactttcaccaactggcccccaaaaccatcaatgaatgcagctttgcccagaaatttttccatgttgctataagcaaaactgctattttgccccgtcttggaacttctgttccaaggacaaatggaattgctgcgttctctggaactgctgctccagggacaattgcctctgcagagtcaaccagtatctaccagtgctaggacctgctgtacattggtgggggaccarttgccagttccacataaggcctccagtcatccaccccccagcccccaacctgagccaggcacctcagccagttccctaatcaaacaggaaggtctctttgcccatttgcaaatagtccttgagctgcaacatctgggcagggctgggttgagccgcagtattttgccccctcttgaacattctctggaattgctgctccagggacagttgcctccacagagccagcagcattccactgggttgcctgtcagttttctc

SEQ ID NO: 929703 - DNA, 578 bp, Homo sapiens
atgctggcaaatgcctaacagatcttcagagggaaggcactgagattgaacagagggaagacacagaagctgagctgaagtgggaggaagctgggaatcctacacaggctacagcacacctggacttgttcctggcccccaacagctcctgggagacaggtaagttgaactggcaagtagcagcccactcttgccaggggcctctggaatcctggcaggaggagaccccttgaccaccacagacattcaaattggctgctcagagaagtggtggggcagcaagccagttgatatggagcccagagggattggtgtggatgtgtcagtactggagcatggccagggacagccatcccataggctcaacttgctcccacaggagactttagccttaagggagatgttggacctgaactctgcaaggttgtcttgaccatcagacggactggtctgaactaagcaccccttggtctgctggcctctcctggggccccagactgattgtgcckgcatgcaggggaacctcaggtgccctgggcgcctgcatcgtagcctctgcactggcagaccatacctgt

SEQ ID NO: 929704 - DNA, 616 bp, Homo sapiens
aggttgtcttgaccatcagacggactggtctgaactaagcaccccttggtctgctggcctctcctggggccccagactgattgtgccggcatgcaggggaacctcaggtgccctgggcgcctgcatcgtagcctctgcactggcagaccatacctgtggagagctctagtgaggcagccctaatggctatgcaccagcctgcccactccctctccatagtgtaacttctcctgggcacctggyaacccaccacatcactttgctgacacatgtgtgcacaactcacatgtctgcacgcactgtaccctgccactgctgctggcaggagtgaagtctgcccccatactccttgtggctccttgtaggaccatcattgcagtctgagctttggtgggcacacagccatccagccatgtccctaccagtgccccacccttgtgccaaaattgccacactagtgaaaatagacacagagaacatcagatcatcccctgacctgagtgaccacccctgcctgtggcacacagaaagtgcacacaaacacgtgcctgtctgcaccctgcccccatgctaacaccatcacctgaacaaccatgtgcacattcacccgcagagt

SEQ ID NO: 929705 - DNA, 709 bp, Homo sapiens
agccccccaagtcttaacttgttccagcatcaactcaaaatctacagttctgagtcttatctaaatcaaatatgggtgagagttaaggtatacttcatcctgagatgagttctcctgctgtgagcttatgtaatcaaacaagttatgtaatttgaaaatacaattgtgggataggcataggatagacttctcattacaggaaggcagaaatagacaagagaaaagaggtaacaggtcccaagtaagtccaaaacacaggtcaaacaacatcgaatctttaagcatgagaataatcttccatatctggcttttcatacacactgggttaagggttgggcccctatcgctttgggaggccccactttcacagctttactgtgggtacagctcacacagccactcttcaggagttgcattcgagtgtctgtggctgtcctgggctggtgttacactacacactggtggctctacargtctagggtcttggaagttgccctgtccccatggcttcactaagtactgtcctagtaggggctctctgaggtggcctgtcctatggcagctctatgcctggacctggaggctatccaggatatcatttggaatctgggtggatatagccatgcttccacagcttgtacactctgtatccctgcagagttagcaggacataccaaggtttcccggaatcctctctggagtggaggcc

SEQ ID NO: 929706 - DNA, 618 bp, Homo sapiens
agcgctggccacaggcaggcactacgttagtcactggattcaggagtgtgcaaagtagacacagagtttgccctccgcgactttagtctactgcaagtttgggagacaaaacacaaatacagtagttcagcagatggttaagtttgggggaaaaaattaaacaggaaagggagatggggaaaggtgaggcagatcactctgtattgggggggggtcacaaaaagcatcaaataaaatgtcacttggagaaggaagagggggtcataaggatatctggagttaaggcaatccaaagaccctgaggctggatgtgcctggtgagttcaaggttaagtgaggcggccagtgtacctggagcacggagggcacagaggaggcaggtcagcrgggcaaagagggattcctgtcattcagccccttccttacaggtctctatagaaggggagctcactggaagtttggaggagagttaaaccatctgattgtattaaaagccaactctcatggttgagcggagaaagaattttagggaggcaagggtagcagtaagaggccccactggaaggccagtgcggtcatccaggtgtgagatgggggtggctgggacacagtaaatgc

SEQ ID NO: 929707 - DNA, 712 bp, Homo sapiens
gggtggtgcctgaatatcgtgcagaaccatctgtgaaccaggctcgagtcttctcttcctctgtcaactgatcatagggaacctcccatgaggccttcagtgcagactggggaagagaaggcagggtggcaggagtggagaccatgggcatttgagccactttctcatgtaacttacttgtaccttcaggacctgctagagcctgatcatatatataaccacttctatttgatgatagaacgctgctgtgtatgacccactttatggctagatgggtcagaaagcaaccagttaatgataggcagtacaggtcgcatggtgacttggtgacatrtagtcaaatgttcagtttccaccaaagtccagtaacaggccaagagctgcctctcaaaaggacagtaattatatgcagaagatggcagggcattgctccaaaatcatagaggcctccactgtgattcacctatggtggcctgcaaaaggctccaaacaacatccctgtctgccactgacacctcaagcaccgttggatctactgggtcatgtggcttaagtggcagagcagcttgcacagaagcctggatctgttgcagagccttctcctgttctgtatcccactcataattggcagactttcgggtcacccaataaatgggccagagtaacacactaaacgaggaatgtgttgcctccaaaacctaaatagccccac

SEQ ID NO: 929708 - DNA, 571 bp, Homo sapiens
cctgcagctgaaggcagtagtagtagggacactttaaacctaattaacaaatccctggaggctccatgtggccaagagttaaaaactgcggatggccaggtgcggtgcctcatgtctgcaatcccagtgatttgggaggctgtaggtgggagaatcacttgaagccagaagtttgagaccagcctgggcaacatagggagacccccatctccacaaaaaaaaaaaawtttttaatcagccatataaaccgggcgcgatggctcatgcctgtaatcccagcattttgggaggccaaggtgggcagatcatttgaggtcagcagttcgagaccaacctggtcaacatgatgagaccccatctgtactaaaactataaaaattatccaggcatgggctgggtgccgtggctcatgggctgggtgcctgtaatcccagcactttgggaggccgaggcgggtggctcacaaggtcaggagatcgagaccatcctggctgacatggtgaaaccctgtctctactaaaaatacaaaaaaattagccaggcctggtggtgtgcacctgtagtcccagct

SEQ ID NO: 929709 - DNA, 622 bp, Homo sapiens
aggcaagagaatcgcttgaacccaggaagcggaggttgtggtgagctgagactgcaccactgcactccagcccgggcaacagaatgatacgtttcaaagaaaaaaataaatgaaggcttaaaccttaaacacaattttacctcaattgcatttctttacgtttctgcatttcttgattgtgaagttcttccatgcgtcttaattcttcctgtcgtctcatcagatctgaacattggaaaatatttggattcacattaacaaggttctaataaggtgaaaaacaattgaccttagcaatgatrttcacgcacaggtctttttaccttggcgcaaaagatttgcctgatgttcatgataggcatcttccatttcactttccaatttgtcttttgcatctttcatgtttttttcaacttgttccctttgctgtttttccatttcatccaaagacttccatcgctgagaatattcgtactcaaacgtgccatgctgggcaaaacgaggaggggtttctctctccctaacaatacacaaaattttaacatgaaccgatttgtgaatgcataccagaaaatacttgccctagtactgatctttttcctgttctatttcttgtaaagag

SEQ ID NO: 929710 - DNA, 622 bp, Homo sapiens
aggcaagagaatcgcttgaacccaggaagcggaggttgtggtgagctgagactgcaccactgcactccagcccgggcaacagaatgatacgtttcaaagaaaaaaataaatgaaggcttaaaccttaaacacaattttacctcaattgcatttctttacgtttctgcatttcttgattgtgaagttcttccatgcgtcttaattcttcctgtcgtctcatcagatctgaacattggaaaatatttggattcacattaacaaggttctaataaggtgaaaaacaattgaccttagcaatgatgttcacgcacagrtctttttaccttggcgcaaaagatttgcctgatgttcatgataggcatcttccatttcactttccaatttgtcttttgcatctttcatgtttttttcaacttgttccctttgctgtttttccatttcatccaaagacttccatcgctgagaatattcgtactcaaacgtgccatgctgggcaaaacgaggaggggtttctctctccctaacaatacacaaaattttaacatgaaccgatttgtgaatgcataccagaaaatacttgccctagtactgatctttttcctgttctatttcttgtaaagag

SEQ ID NO: 929711 - DNA, 555 bp, Homo sapiens
ttaactaggagcttatcaattttattgatcttttcaaaaatcggtttttggctgcattgattttctctattgttgtctgttttctattgaattaatttccactcttgtctttatttccttccttctattttggacttactatactgttctttttctagcttcttttttttgagacggagtctcattctgtcacccaggctggagtgcagtggtgtgatctcrgctcactgcaacctccacctcccaggttcaagctattctcctgcttcagcctcccgagtagctgggatgacaggcatgcaccaccatgcctggctaattttgtatttttagtagagacggggtttctccatgttggtcaggctggtcttgaactcctgacctcagagctcaggtgatccgcccaccttggcctcccaaagtgctgggatcataggcatgagccaccgcgcccagcctttttctagcttcttaatgtggaagcttagctcattgatttcagcactttcttattttctaatacaagcacttaaactctaaattgtattcttagcg

SEQ ID NO: 929712 - DNA, 591 bp, Homo sapiens
aacaaagtgaataaatctcaagtgtactgcgatttgaattctacaagtgtatagacaatgggtacaaccaccacccagatcaatggattaaacattttccagaatgcttttcatgcctcttcccagtcaatagctatcccctgttcttgaacttcatataaatggaatcatagagtgtgtattctttggtttctggcttccttcactcaacataatgtctgygagattcatccatgctgtggagtatagcagtaattcattctttttattgcttcatagtatcctttaaaaaaaaaactacaatttattgatttatttttttctgatagacatttaggctattctgaataaagctgttatgtatattcttatacatgtcttttggatgacatatttatacttcaaaaaatataaactaggagaggcataactaaatcatagagtaaggcatactttcagctttaaatgcagagtaaacatttttaaagttttattttgcttttggagagggggcctacttttaaattgatctccaaaacagctgtaccaatttgaactccaactatccaatgtcatgagtgtacccttccc

SEQ ID NO: 929713 - DNA, 600 bp, Homo sapiens
attgccattttaacagggatagaatgacatctcattgtgaatttcttttgtttttttgagacagagtctcactctgtcaccaggctggagtgcagtggcacagttacagcccactgccatctctgccttctaggtggaagtgattctcctgcctcaacctccctagtagctgggattacaggcatgcactaccacgcccagcaaatctttgtatttttagtagagacggggtttcaccacattggccaagctggtctcaaactcgtgacctcagatgatccacctgccttggcctcccaaagtgctggggttacaggcatgaaccaccatgcctggccatcattatggattttatttgcatttcccaagtgactagtcaggttgagcatcttctcatatacttattgggcatttgtatttcttttttggargaatgtctattcaagttctttgttcatttttaattggtatgattgtttcattgaataacacagttattttaaagtctttacctagtaaatctgtgttttggggaggatgggaaaggaatttatttctggaaatttattttcttgtttggaatgggttttacatgttttc

SEQ ID NO: 929714 - DNA, 656 bp, Homo sapiens
atcttttgctggagaattactgtgttcttctggggatgttgtattttcttgctttgtgtctgtgtccttgcattaatatctgtgcatctggtttaatagtcacttcttcctatttttaaatttactttcatatgggagaatttttcctgaagatgtatctatgatgttggttgagyaaggcacttcaactttgattctgggtacatgcagtaggtagtctccatatgatttctttagctgtaaacagtgttattggtttctgcgatttccgcaattggttagggtgtagttattagtggaggatacagtgaagttgtactggggactaagatgccaggtaggccagtcttaaggccccagtggtgacagtggtgggctgagcatgcctatctttgcgcttcaagatgatgtacccgagaacctatgttggttgttactggtggcctgattcttgggcctcaaggtggcttgctcagatgccagtagtggcaggggtagaggggttctcaggctcctagatagctgctgtggcatgggcaatagcagtagccatggcaagatgatttctctgggtcctaatctgtgtgcattgatattggcagtagctgtgatgggctgggcgggcctgtctccaggtccacagttggtgcttgcag

SEQ ID NO: 929715 - DNA, 559 bp, Homo sapiens
agctctgattttggttatttcttttcttctgctacctttggagttggtttgctctcttttttccagttcctctagatgtaatgttagcttgtttatttgaggcctttctaacttcttgtgttggcatttagtgctataaacattccttttagtactgctttagctgtgagattctggtatgttgtatctttgttttcatttgtttcaaagactgtattcatttctgtcttaatttcattatttacacgaaagtcattcagaagcagattgcttaatttccatttaattgtmtggttttgagagatcttggtattgatttctatttttattgcactgtagtccgagagtgtggttggtatgatttggatttttttgaatttgttgagaattgctttatggttaagggtgtggtcaattttagagtatgtgtcatgtgcagatgaaaagaatgtgtatcttggtttttgttgggtggaatattctgtagacgtctattaagtctatttagtcaagtgtcaaatttaggtcaaaaatatcttgtattaatagtattctgcct

SEQ ID NO: 929716 - DNA, 799 bp, Homo sapiens
gtttggcagtcaggaaatgcagtagtaactattttaccataatacatttatgtatgtttaattctgtatcctttgtataggtaaggttattatccataatttataaatgaggaaactgagggttacaaagattaaggacatggggcaaggttgcacaagtagtagatgttgaagccaggttttgaaacaaggcaatctgactctacttgaaatttaaagtctgtattcttttttttttttttttgagatggagtcttgctctgtcacccaggctggagttcagtggagcgatctcagcctactgcaacctctgcctccgaggtttaagtgattctcctgcctcagcctcctgagtagctgtgattacaggtgtgtgccaacatgcctggacaatttttggatttttagtagagatggggtttcaccatgttggccagrctggtcttgaactcctgacctcaggtgatccatctgccttggcctcccaaagtgctgggattacaggtgtgagccaccttgctgggcctaaagtctgtatttttaaacatgaagctgactgtctttattctggcatgtaaagtaaactctttacatacataacaatgtagctggaaagatgggatacataaaccaaaacataactaataaagtaagattgcataattaggggctaacaaaatgtgcaaaatatattgtatgtgtgttattaggctccagaggaggaaagaacactgtgagctaaagtggtcagaaggaaatgggatttctcatagctttggaaaaatggagagatgagcaa

SEQ ID NO: 929717 - DNA, 799 bp, Homo sapiens
gtttggcagtcaggaaatgcagtagtaactattttaccataatacatttatgtatgtttaattctgtatcctttgtataggtaaggttattatccataatttataaatgaggaaactgagggttacaaagattaaggacatggggcaaggttgcacaagtagtagatgttgaagccaggttttgaaacaaggcaatctgactctacttgaaatttaaagtctgtattcttttttttttttttttgagatggagtcttgctctgtcacccaggctggagttcagtggagcgatctcagcctactgcaacctctgcctccgaggtttaagtgattctcctgcctcagcctcctgagtagctgtgattacaggtgtgtgccaacatgcctggacaatttttggatttttagtagagatggggtttcaccatgttggccaggctggtcttgaactcctgacctcaggtgatccatctgccttggcctcccaaagtgctgggattacaggtgtgagccaccttgctgggcctaaagtctgtatttttaaacatgaagctgactgtctttattctggcatgtaaagtaaactctttacatacataacaatgtagctggaaagatgggatayataaaccaaaacataactaataaagtaagattgcataattaggggctaacaaaatgtgcaaaatatattgtatgtgtgttattaggctccagaggaggaaagaacactgtgagctaaagtggtcagaaggaaatgggatttctcatagctttggaaaaatggagagatgagcaa

SEQ ID NO: 929718 - DNA, 623 bp, Homo sapiens
cttctcgctgctgaaactcttactggctctgccctgcaccctggacttctcactctgtgttcactgatttacatgttctcatatctgtgcctccaaatcgtccaactgctacttctcaacagagccactcttccttagaaaaccatcactcaggcagggcgcggtggctcacgcctgtaatcccagcactttggaaggccgaggggggcagatcacgaggtcaggagatcaagaccatcctggctaacacggtgaaaccccgtctctactaaaaatacaaaaaattagccgggcgtggcggcaggcgcctgtagtaccagctactccggaggctgaggcaggagaatggcgtcaacccgggaggcgsagcttgcagtgagccgagatcccgccactacactccagcccaacgacagagcgagactccgtctcaaaaaaaaaaaaaaaaaatccatcactaaacgaccttccgcctggggatgggtaaaacaacccttatgcgggttcaacacctgcacatgagcgtcactgccctcacaccatggcattgctatcattctcatacgcgtctgtctcctccaccccaccccgggactgtgctcagccccagcatgctgtcgacc

SEQ ID NO: 929719 - DNA, 812 bp, Homo sapiens
cctgctgtcagcatttccaagcgtgggttctacaagacacatacaaatatagtgcctgaaaacaaaaataggaacttattaccttcagatgccaaaccaaagtcctcctaagctcatctaaaaatgggagtccttagaactttcttccatctagcacttttcttcaaagtaatgttgaatagattcttacaattaccctatggaagagtaataataagcataatttctcttttttagatgaggaaacaaggccagagtgacaaaatgacttttttgtgtcacagagatggtagaagagccaggttagtgcccaggttctctgacttctcatccacagttcttcccactaaactgctgtgccccccaaaacagcatccctttatactgcagctttgagaggcttcaaaataaggtttgtctaaaaaatctcaaatgttttccatgtattttttctcccacttccctttcccttccagtagttctgtcttttcatgcaggcttttctcttcttctcctctcagctcattccgagagcggagagaaagaatagatcctggagctgggctgccacagtcagagcctcactcccacctactagctctgtgacctggagtgagcyacttacacccccatcctcagtttccccacctgaaaaatggggataataacagaactaactacatgaggtcatgcctgtaagacactagcatagcgtctgacacttagtaagtactatataagtgttggatttcattattattatttattttatttatttatttttttttagatggagtttcactcttgtcacc

SEQ ID NO: 929720 - DNA, 585 bp, Homo sapiens
acaggcatctgccaccacacacggctaattttttgtatttttaatagagatggggtttcaccatgttggccaggctggtctcgaattcctgacctcaggtgatccccccgggccagcctcccaaagtgctgggattacagacgtgagccaccatgcccagccaccttttttagacgtgatgttttcagcaggtgacagaaaaccagttttaaccgctacaacttaaggatgttatcattcaccaactagggagtccagaagcaagttcgtcttcagaattactgatttacatgttcagtcatcatgtctaggacccagagctttctacycctctggtctgtcagctacagcctcagcattatcctaaacctctcctcctttatggtcataagacagcaaattggttcttcatgcttccttgtgtatacatagccccagatcaggggaagaacgggactgggggtctggcttgtgtctagggaaatgtttctccaaagcttccatcaaagcactcccatcattgaccagaatggggcaatatgcttagtctcaatcattgttgaaaacaatagggctaccaacagg

SEQ ID NO: 929721 - DNA, 619 bp, Homo sapiens
tagaaagtttcacctcttcagctatttgttcatattcagagtttttgttactttctgtttattgaaagtggatagaaccaaatttggggaaaaaaatcttaatttttcagaaggttttatttcaatttcgaaggtgtcatcatttctaaagttcacaagtttagtcacacyactagctctcttccagcaagacccatacctttgttaataaaaataacaatctggaaaccagtgtttacacattttgtgttctgagctgggggtgggagggggatggctgatcccagggaatggtgttgatggagaatctcccatgtgaatgttggggtggctacattctaaaatggagaacacagactttcttatgtaaaaggatgaagtatgtgttccactacagagtcatcaggatcctggaaagaaaagataaatatgacttccaagaaataaaagttaagctgttcatagtggctcctgcctgtaatccaagcactttgggaggccaagatgggtggatcacttgagcccaggagttagacactaccttgggaaatatggtgagaccctgtctttgtaaaaaataaaagataaaaattaactgagcatggtggcacatgcctgt

SEQ ID NO: 929722 - DNA, 672 bp, Homo sapiens
atggcacacgcctgtaatcccagctactcgggaggctgaggcaggagaatcccttgagcctggggaggcagaggttgcagtgagccaagatcacaccactgcactccagcctgggtgacagagtgagactctgtctcaaataaaataagaaaaaaaaaaaaaaacagtttwtttttccaatgcctggacaaatttctttgctgctaaaaacaataacaaaaacccagaaaataagcttaaacttctgttaacttatttataatttaaaaaacagtgacacctctttgttaagaaaaaaatctttgccacagtggagtccattagaattaaggcctcatacatgagtagaataacataagttttcaaatagtaaatcacctaggtttcagctcattggagatttgactttcaatttttcagtattactgattcaaaatacttaggaagctatattgtcaaattaaaatatttctaaagttaactgagcagaagtctcttctttcctaacagcaccataggcttttattatgtaacaggctattagatggaaacaaaaaaagttatgctcttttgtgttgagaccacctaattttcctcaattatctctacttctcagttatgttatttcgtttcagtgtggtggatcctttatttcccaggatcttcttttgc

SEQ ID NO: 929723 - DNA, 594 bp, Homo sapiens
taaagtttgctttatgtatacaatgtcaaggtttttatttgtatttaggagaaataaggaaacgtatgttttcttcatcttccctgaagtgaatgttgtccatatatacttttataaaggttaaaacactggctctgagtaatctgaaaaggctacagactttatgatttcaactatatggcattctagaaaacacaaaactatggaaacagtacaaagatcagtggtttctagaggctggggggaaggtgggatgaataggtggagcacagggattttaggctgggaaaactattctgtatgataygacaatggtggatacttgccattatacacctgtacaaacccataaaatgtacaatacaatgagtgaaccctaatgtaaactacagactttgggtaataatgatgtatttatgttgtttcatcattctaccaaatgtaaccctggtgggggaccttggggtgggggtgggctgtgtgtgtggtggggaagagcatgggggagctccgtattttctgctcaattttgctataaatctaaaactgctctcaaaaaataaagtctgttaattaaaacaattgggtctatat

SEQ ID NO: 929724 - DNA, 582 bp, Homo sapiens
ggacatggtaagaccagtgaattccatgaacatgagccactgctgcacttcttcagccataaagtgagtgccttggtcagaggcaacgctatgtggaataccatgacagtggataatacattctatgagttgatggaaggtagtcttggcagaagccttgcatgaaggataggcaaactcccatccagagtaagygtctattccagtgagcacaaatctctgccctttccaagatggaagaggtccaatataatcaacctgccactgggtagctggctgatcaccctgaggaatggtgccatatcgaggtctcagtgatggtctctgctgctagcaagttgggcactcagcagtggccgtaacaaggtcagccttggtgagtggaagtccatgttgctgagcccatgtgtaacctccatccctgccaccatggccactttgtccatgggccaaagacgtgggcgatgacagaggtggctggggaaagaggctgtgtggtgtccatggaatgggtcattctgtccactttattattaaaatcttcctctgctgaggtcaaccattgctgagaacttacatggg

SEQ ID NO: 929725 - DNA, 582 bp, Homo sapiens
ggacatggtaagaccagtgaattccatgaacatgagccactgctgcacttcttcagccataaagtgagtgccttggtcagaggcaacgctatgtggaataccatgacagtggataatacattctatgagttgatggaaggtagtcttggcagaagccttgcatgaaggataggcaaactcccatccagagtaagcgtctattccagtgagcacaaatctctgccctttccaagatggaagaggtccaatataatcaacctgccactgggtagctggctgatcaccctgasgaatggtgccatatcgaggtctcagtgatggtctctgctgctagcaagttgggcactcagcagtggccgtaacaaggtcagccttggtgagtggaagtccatgttgctgagcccatgtgtaacctccatccctgccaccatggccactttgtccatgggccaaagacgtgggcgatgacagaggtggctggggaaagaggctgtgtggtgtccatggaatgggtcattctgtccactttattattaaaatcttcctctgctgaggtcaaccattgctgagaacttacatggg

SEQ ID NO: 929726 - DNA, 650 bp, Homo sapiens
gctttggctttggttctggatatgcaccatactgtagccactgtatgatttcttttactgttatcaatgtcagtagtttctgtgcgttccttagtggcttaggttgcagttgtttgcagatgctttggctagcctttgctgaagatgaggacacaaggttgactggtgcttaggccttttggtggtgtgtgcaagtgctagctgtagtggcagcaaaccctcagkaggccagtctttagacctttgagtgtgtaacaaggatgctggctgtagaaacagcaggctggacaggctggccctcaggctcctgggtggggtgtgtgggttccagtaggctggacacaccactcttcagcctctggacagtgtgtgcaggtgcctacatgtgtacttacatggatctctcatttaccttttttccatatgagaagggaagtacttcctggctcctagcccatccaactggctgccttacttccttctctatgctgccattttgaatttccatacctcagaaggttccttttgcttccctgctggataccagcattctctcctagacagtgccgtcaacatttggctatttacttgctatctcagtccttctttgtggagtaggtgagtgctgggcatttctagttagccatctt

SEQ ID NO: 929727 - DNA, 661 bp, Homo sapiens
tccattgaattactttcaaacttttgtcaaaaactagttaggcatgttcttatggatctatttctatggtctttattctgttccattgatctatgtgtctcttcaccaatatcactgccatgcttactttatactaagccttaatatcaagtaaaatgattctcctactttatttttctctgtcaagattgttttagatgttttagtacctgttactttccatatattttagaataaatttatttttacaaaaaccttgctgggattttgatagaaaatttattaaacctatagatcacagtttgaggaaaattgacatctttactttgttgagttttcaaatctayagcatggtatttttctccatttattagatatttgatttctttcataagaatttcataattttcattatatagcctctaaacctgttttgttaaatgtatatctatttcatttcctttcatgcaattgaaaaaaatagacatttgttcttatttttattaatttttaattgacaaatagtaattgtgtacatttatgaggtgcaatctgacatgttgatatacgtacgtgtacgttatagaagattcaatcaaactaattaacatgtctatgaccttgccaacttatcatttttttgacgtgagaacattaaaaa

SEQ ID NO: 929728 - DNA, 701 bp, Homo sapiens
aaggataagttgctgcatttggcccctcctacaaccaagaatgaggcacaatgccaagtgggcctattaggattttagaggcaacacattcctcatctgggtgtgttactctggcccatttatcaagggacttcaaaggctgccagttttgagtggggtctagaacaggagaagggtctgcaacagattcagkctgctgtgcaagctgctctgccacttgggccatatgacccagcagatccaatggtgcttgaggtgtcagtggcagcagatagggatgctgtttggagcctttggcaggctcccacaggtgaatcactgcagagccctctaggattttggagcaaggccctgctatcttctgtagataactactctccttttgagagacagctcttgtcctgttactgggatttggtggaaactgaacatttgactacgggtcaagtcgccatgcaacctgaactgcctatcatgaattgtgcttttttacccgtttagccatagagtggggtgtgcacagcagcactccatcatcaaatggaagtggtatacacatgatcaggcttgagcaggtcctgaaggcacaagtaagttgcatgaggaaatggctcaaatgctcatggtctccactcctgccaccctgccttctctcccctagcctgaagcaatggcctcatggggagttccctatgatcagc

SEQ ID NO: 929729 - DNA, 657 bp, Homo sapiens
cctttccaggtcatttctgaaggacagcggtgaagggaaatcttcccagtgggcagaagtttgagcagtgcacctggttgtgcactttgcatggaaggagaaatggccagatatgcgattatatatggattcatgggctgtagctaatggtttggctggatggtcagagacttggaagaagcattgttggaaaattggtgacaaagaaatttggggaagaggtatatggatggacttctctgagtggtcgaagattgtgaagatatttgtatcccatgtgagtgctcaccaaygggtgacctcagtagaggaggattttaataatcaaatggataggaagattctttcagtggacaccactcagcctctttccccagccacccctatcattgcccaatgagcccataaacaaagtggccatggtggcagggatgaaggttgcacatgggctcagcaacatgggcttccactcaccaaggctgacctggctacacccactggtgagtgcccaatttgccagaagcagagaccaacactgagcccttgatatgacaccattctttggggggtgattatccagctacttggtggcaggttgattatgttggacctcttccatcatgcaaagagcagcagtttgttctcactggaatagat

SEQ ID NO: 929730 - DNA, 765 bp, Homo sapiens
aaactacaaaagaaaaaaatcaataaattggatttcatcaaaattaaaaactttgtgttataaagacatttacaaaaatggaaaggtggcccatagactgtgcaaaacatattttgtttggcaaaatacatgcaaaacatatatccagtgaagaatttttatccagaatatataacaaactcttaaaacttgacaatatagaggtaaacatctcaaaaaatgagcaagagatctgaacagactctttattaaagaagatatgtaagaggtcttcaaaaagttcatggaaagaactatgcatggatttctatttyttttcgcaccaaaaaaaaacttgttttaacttgttataacatgcctgcacaagatctagtgtaaggcacaaaatcagtttgaaagagcccctatcagaattaaagcaagaacaagcattacatttatagtgaagttttggtggaagaatggtgaaattgttgatgctttatgaaaagtttgtggagacaatgccccaaagaaattggagtttacaaatggatagcttgttttaagaagaacaaaactacgttgaagatgaacctaaggtggcagaccatccatgtacctttgcaaggaaataaataatcttcttcatgccctaattgaataggactgattattaataacgacagccaacattatagacatctcaattgtgttcgatgtacataactctgactgaaaaattaaagttgagcacactttccactcaatggatgccaaaactgt

SEQ ID NO: 929731 - DNA, 464 bp, Homo sapiens
tgagctacacaaatagttgttaaggtattatgcaagaaatctgcatctgcagttatttttgtttagacttgaaatgtgtttgctttttttttcctaatgaacactaatcgctgaagaaaatagaattagacagatggtatagtaattacaaacatggagtcttccacacagattttctgagttcaaatcctgattattctgcttcctatatgcatgaactgaagtctattacttaaacttgatttgttcagcttctgcatctgtaaaatggggtaaataaaagtgyttagaacatactaaggattttcttaaacaggttcagtctaaattttctgggtgcatctttctttatttccaataccaatcacaaatttggaagctccgatatacatgtatcttcttctctatagaccattgctttatagtgtcctctttaagaatacatgtgactttcgctgggcgcg

SEQ ID NO: 929732 - DNA, 586 bp, Homo sapiens
tacttagaaattcagttggcaaaacagtataaaatgagaagactcacactttagcctattagtacctctatgcctaaagttttataatctcaaactcaattatttttaggattataacttcttctctacttaatatgcttctgttctccttgtatgtcatgtttctttgatttagcaacattaaacaatatctttgattctcaatatgtactataatatattcagtggtaaacatttataagtatgcaaatatttttctttgtactataagtagtacaattggttacatagagaaggaactataatctaaatccttaaactttgctcttcaaaggggaattttcagagtatcaatgycagatgcatgatccttttgatttttcaaaatattttgttttctactaagatcatagctggttttgttattgttttttcttagctttaacttgcaattccgcctgtttcattgttgaaggaaatgatgcaagaagagctggcctcctgattttacttcactttctcattaaagatatttattattcatggaaacttccaacttcctgttttagtttaaacaagattattt

SEQ ID NO: 929733 - DNA, 566 bp, Homo sapiens
acatggcgaaaacctgtctctactaaaaatacaaaattagccaggcatggtggcacatgcctgtaatcccagctccttcggaggctgaggcaggagaatcacttgaacccgggaggcggaggttgcagtgagctgagatcgtgccattgcactccaccctgggcaacaaagagcaaaactccatctcaaaaaaaaaaataaataaataaataaaataaaaaaagaaagaaagaaagaaagaaatactatgtcatggcaacaatctatatcattgctaagacatyaccggaaatctaatgatttaatgatggagaatgtattagcttcccattgctgctgtaacaaattattacaaatttagtgcttaagcaacacaaatatattatcttatggttttggaggtcagaagttcaatgtgggtctcactaggtgtcttagtctactagagatgtcataataaaataccacagaccatgcagtttaaacaggaatttatttttcttacaattctagaggctggaaagtccaaaagcaaagttgtggtcagttcagtttcaggtgagggc

SEQ ID NO: 929734 - DNA, 649 bp, Homo sapiens
ttctcctcagaaaatggggttttctttcctactgcatcatcaagctgcaaattttctgaacttttatgctctgtttcccttttaaaactgaatccttttaacagcatccaagtaacctcttgaaggctttgctgcttagaaatttcttcyatcagataccctaaatcatttccctcaagtttgaagtcccacaaatctctagggcaggagcaaaatgccaccagtctctgctaaagcatagcaagagtcatgtttactccagttcctaacaagttcctcatctccatctgagactacctcagtctggatttcatagtcgatagttatcagcattttggtcaaagccattcaacaaggctctaggaagttccaaactttcctaaattttcccgtcttcttctgagccctccaaattgttacagcttctgtctgttatccagttccaaagttgcttccacatttccgagtatcttaacagcagcactccactctactggtaccaatttagtgtcttagtccattttcatgctgtgtactggagactgagtaatttataaagaaaagaagtttaattgactcacagttccacatggctcgggaggcctcacaatcatggtggaagatgaaggaagagcagagggacaaaatt

SEQ ID NO: 929735 - DNA, 560 bp, Homo sapiens
aaactgaatccttttaacagcatccaagtaacctcttgaaggctttgctgcttagaaatttcttccatcagataccctaaatcatttccctcaagtttgaagtcccacaaatctctagggcaggagcaaaatgccaccagtctctgctaaagcatagcaagagtcatgtttactccagttcctaacaagttcctcatctccatctgagactacctcagtctggatttcatagtcgatagttatcagcattttggtcaaagccattcaacaaggctctaggaagttccaaactttcctaaattttccygtcttcttctgagccctccaaattgttacagcttctgtctgttatccagttccaaagttgcttccacatttccgagtatcttaacagcagcactccactctactggtaccaatttagtgtcttagtccattttcatgctgtgtactggagactgagtaatttataaagaaaagaagtttaattgactcacagttccacatggctcgggaggcctcacaatcatggtggaagatgaaggaagagcagagggaca

SEQ ID NO: 929736 - DNA, 774 bp, Homo sapiens
cccaattcctgccacacccacagcctactcctccccattcttccttgtttctgtgcatatcactcagcttgctaaagacaaacacctaaaatcactttcggttcctcttcttccctttccacccttctcctggctagacccttcatgcacatataagcaattcatcaatatgtcttggctcaattgccaaaaacttatccctgttgcagtgrcagtgattcatccctccctatcttctccacattgcccttcctctcaaagtcactgtgaatgttcacctggaccattgcaaaggctttctcacccttcactctcttctcactcttgtccccacctccagctcccagtcgatgtgcacacagaagttagagtgacccagaatcataactaccacctccaaaagctctgcagtggctccaacacaccacttagagtacatctggcttgctgcaatggtccctggcctgcatgagtgagtgctttttctttctcccgaatcttatctccatcactctgtctgctgcttactctgctccaggtgcactagaatggtctttgtcctcaaacctctcaatctcctttcaagccctctagaggatgatccttctgcctgtaaactcttcttcagagatgtgcttacctggctcctcctccacattcaggcctttgctcacatatcaacttctcacagataaaatatctgaaaactctatccaaaacagctaccctggtccatctaactcattagccagctttttttttttttctctacag

SEQ ID NO: 929737 - DNA, 607 bp, Homo sapiens
ttcatgttctcccgtgtgcaaaatacatttacccatgtcccccaaattcttaacccatttaagcgttaactctaaaaaatgtcacattaatatcaactcaaaaagttacaaatctcatcattgaaatgatctaaattaggtatgggtgagactcttagttttcatccatactggggcaaagtcccttcatccacagaactgtaaaactaraaaacaaattatctgcttccaaaacacaatggtggaacgtatgaggttgtctctattttgccttcatattctgaagaatacatttgttggatgtagaattgtgggttggcagtttctttccttgcattaccttataatatttttcaactgtcttctcacatctaaaatttctgacaagaaaaagatatttgaaacattttttgcatgtatgtaatatgccatttttgtctggcttgtgaaaacattctttctttggctttaaatactttgactattacatacttgctcattttaatgatgtttgctcacacttggaatttactgagcttctataatctgtaaatttatcttttacctaattgaaaaagttcagtttttttttttcaataattgtgtg

SEQ ID NO: 929738 - DNA, 665 bp, Homo sapiens
tttcgcttctctttaagggccttatagtatgttctaatttctcatttggtagtatgcaacattcaatatttctagctctaaagttccatcattaattatttctttttttctttttttttttctttttttgagacggagtcttgctctgtcgcccaggctggagtgcggtggtgtgacctcagctcactgcaacctccgcctcccgagttcaagtgattctcctacctcagcttcccaagtagctgggattacaggtgcccgccaacacgcccggctaatttttgtattttagtagagacaggatttcactatgtaggtcargctggtctcaaactcctgacctcaaacgatctgcccgcctcggcctctcaaagtgctgggattacaggcgtgagccaccgcaccccgccaatcacttctttatcagctatacttctttcctacctttactgtaatacttatgatcttgcttgggtcataggttttcttttagtttgttcagctatagatgacctttatgttggagcaaaactaggtccaaggtaggaatgtcattattagatgtaaaacatgttagctgatttaacccatttatgtttgaatgcaactttgaaaacccttggttaacagtgtaaagctagctttcctaaaaatagaaattttgt

SEQ ID NO: 929739 - DNA, 753 bp, Homo sapiens
ttatcatgagctgggcattatgaatgcaacaaaagaaaaatatggattctttggggccttatattcaaggggtggggtggaataaataaaaatatagcaggcagtggtataatactgcaatagagaaacatgaatacaaaactatgagggaaaatgggccctgggatggggcatggggaaagaggagctgctgttgtaagcagtgggagagggggtcaaggaaagcctcactggtacctgagctttgagcagagatctgaaggaggtgagagagcaagtcctttgtctatcagggtgctatagactgacagtttatattcctctaaaattcttagttgaaatcctatcgccaaaggtatgacattaggaaggagggtgtctaggaggcgattaggtcatgaaggtgaacagagccctcattaatgaaattagtgcccttatgaaagagaccagagagctccctttgccccttctccataacagagcatggtgagaagagagccatctatgaaacagaaaggggaccctcaccagacacygaatgtgccagcaccttgatcttggacttcctagcctctagaaccataagaaatgcatttctgttaattataagccacccattctatggtatttttgtcgtaacagcccaaacggactagaacactagaactttcaggcagagggaatggaaaagacacatataccaaagaaggagccttcttgttttggttcagagaattttacagaggctag

SEQ ID NO: 929740 - DNA, 786 bp, Homo sapiens
gacacataagagctatagtaactataaaacatgttttatagatcttttttaaaattgtgtaattagtgccttaatatgtatgacaaagagtaaaaattcatccagcacgccatgatcttcagccaattcataccagtaactagtgatcaggcatcccaattttcttttctctatttttttttttgagataaggtctggctctatcacccaggctggagtgcagcagcaactactagagattgtcttaaatgtctctagttaatttctaaatcattttgattaattccaaaataaagttccaaatgctgttcaccaaaatgaaagcaatttgaatatttttcttttttttttttttttttttttttttttttgagacggagtctcgctctgtcacccaggctgcagtgcagtggcgccatctcggctcactgcaagctccgcctccygggttcacgccattctcctgcctcagcctcccgagtagctgggactacaggcgcctgccaccacgcctggctaattttttgtatttttagtagagacggggtttcaccgtgttagccaggatggtctcgatctcctgacctcgtgatccgccagcctcggcctcccaaagtgctgggattacaggcctgagccaccgcgcccggccaaacatcttaatccactctaaaaagtcccccatattgaaatcccaacatgccttcatacacctgcagcttcaccaaagcaacttcacactgtgctgccagccacagcctgaggctgagtgactccggagtggca

SEQ ID NO: 929741 - DNA, 567 bp, Homo sapiens
ccccttatttgccccttagaagtatgacatgggaggacaaactggaatacaaactacttattggcaattggcgtggaagggaaaactttttttataacactcacccattgaacagccttaagaaattgttaactgatgaactgaactccttagccccttccacacgtgtcattggttgtggccatcttaragccattccaccccacgcccacatggaccatgtttctcatcactggactgtgcttgacttcactgaccctcatggctgtgtggcttccagggagatcagccggcaatcatttctatggattagtggaaagggaagagtcaggctgggcatggtggcttacgcctgtagtcccagcactttaagaagctgaggtgggatgattgcttgagcccaggagttcaagaccagcctgtgcaactcactgaaaccccatcgctactaaaaatacaaaaagttagccgggcatggtggtatatgcctgtagtcccagctactcaggaggctgaggtgggagaatcacctgagcctaggaggttaaggctgcagtgagctgagat

SEQ ID NO: 929742 - DNA, 567 bp, Homo sapiens
ccccttatttgccccttagaagtatgacatgggaggacaaactggaatacaaactacttattggcaattggcgtggaagggaaaactttttttataacactcacccattgaacagccttaagaaattgttaactgatgaactgaactccttagccccttccacacgtgtcattggttgtggccatcttaaagccattccaccccacgcccacatggaccatgtttctcatcactggactgtgcttgacttcactgaccctcatggctgtgtggcttccagggagatcagccggcaatcatttctatggattagtggaaagggaagagtcaggctgggcatggtggcttacgcctgtagtcccagcactttaagaagctgaggtgggatgatygcttgagcccaggagttcaagaccagcctgtgcaactcactgaaaccccatcgctactaaaaatacaaaaagttagccgggcatggtggtatatgcctgtagtcccagctactcaggaggctgaggtgggagaatcacctgagcctaggaggttaaggctgcagtgagctgagat

SEQ ID NO: 929743 - DNA, 773 bp, Homo sapiens
tgactgatagaaggaaaactaacaaacagaaaggacattcacaccaaaaccgcatctgtacgtcaccatcaccaaagaccaaaggtagataaacccacaaagatggggagaaaccagagcagaaaagctgaaaattctacaaatcaagagtgcctcttctcctccaaaggaatgcagctcctcgccagcaacggaagaaagctggatggagaatgacgagttgagagaagaaggcttcagatgattggtaataacaaacttctccgagctaaaggaggatactggcaaactgaatccagcagcacatcaaaaagcttatccaccacgatcaagtcagctttctccctgggatgcaaggctgattcaacataccttgaatcaataaatgtaatccatcacatacagaaccaacgacaaaaacttatgattatctcaatagatgcagaaaaggccttcagcaaaattcaacagtkcttcatgctaaaaactcaataaactaggtattgatggaatgtatctcaaaataatagctatttatgacaaacccacagccaatatcatactgaatgggcaaaatctggaagaattccctttgaaaactggcacaagacagggatgccatcactcaccactcctcttcaacatagtgttggaagctctggccagggcagtcaggcaagagaaggaaataaagggtattcagttaggaaaagaggaagtcaaattgtccctgtttgcacatgtcatgattgtttatttagaaaaccccatca

SEQ ID NO: 929744 - DNA, 600 bp, Homo sapiens
agtagattactgttttgcaagaatgtggggtgcagggagagaggggctaaggatgataactaaaggctactgtatttattttgggggtgatgaaacgttctaaaattgattgtgctggacacggtggctcacacctgtaaccccagaaytttgggaggccgaggtgggtggatcacctgaggtcaggagttcgagaccagcctgaccaacatggtgaaaccctgtctctactaaaactacaaaattagccaggtgtggtggcacatacctgtaatcccagctactcaggagtctgaggcaggagaattgcttgaacccgggaggtgaaggttgcagtgagccaagatagcgccattgcactccagcctgggcaacaagagggaaattccatctcaaataaggaaagaaaattcattgtagtgatggttgcacaactgtgaaactattgcaaaaatggtctcggtatagttttaatgtgtatttctattattaatagtgaagttgaacatcttttcatatatttattagcctttcaggtttctccgcctatgaattgtctatttttatcaattacttatttcctattcattttcttttctt

SEQ ID NO: 929745 - DNA, 738 bp, Homo sapiens
tctatcactatgttgcctaggctggtttcaaactactgttctcaaatgatcctactgtctcagtctcataaagtgctgggattatagacatgagccaccacatctggctccggcctgcaaattttatctgctcttagaaaatatatctaaaagccaaatggtgcttatcacctcttcagttaccccgtggtccaagacaccatgcactcccatctgccctcaatccatcttcagcctattctcagcacccayagttatcccttaaaacagactgtaccactcctacgcatatgaccctgatgccatctcaacctcacacagagtaaaagtcaaacttctgacaaaggtttactaggccctctctgatatggcccttgtgtcacctccacgactttatcttctatcatttactcacttcggccacactaaccgccccccacccaggctgttcctcaatccaccaggcaagacacattctcattttgggctctgcacttgctgtttcatctacccagaacactcttctccttgtttctaacggggctcaccccttcaccttcaatcattttatttcaaactccaccgactccagcctactccccagcacattgcccagcgccacattccctgctttcttcttctccacagcccttattgtagttgacccactatatattcgcactttattttactgtccctcccttgtgcctacaccactactttgtaggctccataaag

SEQ ID NO: 929746 - DNA, 633 bp, Homo sapiens
ctccgtcctctccatagatccttggccagtgggtggtaacccagtcagaggctggtggacctgagccaccggccttccgtaccaggacaggtggcctggcgttgggaaggagcactggttagggagtcaggtgaccacagttcaagtcccagtcattctttatgcagcctttgtatctgcattgtacctttgcttttgccatactttgtccattgtcacattgatacaatgatatagatattagtgtccccaatttgtgaatgaggaaatggaggctcagagaagggaggtcacttgcgttaggaatgggagcatcggccgggcgcagtggctcacgcctgtaatcccagcactttgggaggctgaggtgggtggatcacttgaggtcaggagttcaagaccagcctggccaacatggtgaaaccccatctctactaaaaatrcaaaaattagccaggcgtggtggcgggcgcctataatcccagctactcaggaggctgaggcaggagaatcacttgaacctgggaagcagggttgcagtgagctgagaccgcaccactgtactccattgtaggcaacaagactgaaactccgtctcaaaaaaaaaaaaaaaaaaagaatgtgagtatcaag

SEQ ID NO: 929747 - DNA, 587 bp, Homo sapiens
tgtccgcgccacctactgtcctgaatgttgaactgcacagcccagtgcaaaatgctgacactagggcatgatgcagaacaaggttagttttctgcgtagtcctccataccagcccttcaggaggcagtaagcctcgtcatacacccagtacataactactacaaccagcaattaagaaagccatcatacaaaagttatctctaaccaakgtactcaaacagagtctttaccactgaaagaacccagaacctaaaccaaatagccctatacaacatacatcgtagtcatattctcaaaggggaaaaaaaaatcctgtctgttggaaactggacttaaaaataagaagggatagttcatctggatgagaagaaaccactgaaacatttctggaagtatgatttaaaacagcgtattacaacactcgcaaaggatcacactaactcttcagcaataagtcctaaccaaaataaaatctttgaaataccaaagaatttaaaatatttattttaaagtagctaaatggagtccaagagaaagttgaaaagcaacacaaagaaattagaaaaaaaactcaggatatgaatgaa

SEQ ID NO: 929748 - DNA, 587 bp, Homo sapiens
tgtccgcgccacctactgtcctgaatgttgaactgcacagcccagtgcaaaatgctgacactagggcatgatgcagaacaaggttagttttctgcgtagtcctccataccagcccttcaggaggcagtaagcctcgtcatacacccagtacataactactacaaccagcaattaagaaagccatcatacaaaagttatctctaaccaatgtactcaaacagagtctttaccactgaaagaacccagaacctaaaccaaatagccctatacaacatacatcgtagtcatattctcaaagggraaaaaaaaatcctgtctgttggaaactggacttaaaaataagaagggatagttcatctggatgagaagaaaccactgaaacatttctggaagtatgatttaaaacagcgtattacaacactcgcaaaggatcacactaactcttcagcaataagtcctaaccaaaataaaatctttgaaataccaaagaatttaaaatatttattttaaagtagctaaatggagtccaagagaaagttgaaaagcaacacaaagaaattagaaaaaaaactcaggatatgaatgaa

SEQ ID NO: 929749 - DNA, 774 bp, Homo sapiens
ccagaaatgactgagatgttgaaactatcagtcagcaactttaaaagaactataacttatgtgttaaatggtttagtgtaaaaggtggacaacatgtattaataaatgggaaatttcatcagagatgaaatcgctaaaaaagattcaaatagaaaatccagtgtatacataatggagaattctttccaggcttatcagcagactggacacaatagagaaaagaatcagtgaacttgaagataggctgatagaaattatccaaactcaaccacaaagaaaaatagtaaggaaaaaagaacagattatcccaaagatgtggggccatcaaatggtcttgcatacatatacttggagtaccagacaaaatatagaaaggggaggacaggacagaaagagtatctgamgaggtaagcttcaaaattaatgaaagaaaacaaaccatagatccaagaagttcagagaatctaagcagtataaataccaagccaagcacatcacagtcaaactgctaaaaccatacataaagggaaaatcttgaaggtaaccagagaaaaaaagaaacatttccagcagaggcacaaagataggaattagcacaattttttttatcagaaatcatgtaagcaatagacaatggaataacatcatgaaagaattgaagggaaaaaatctgtcaagccagaattctgtttctagtgaaaatacctttctaaaatgagggtgaaatgaattttttttttcagacaaacaaaatctgagagtaattatttgcca

SEQ ID NO: 929750 - DNA, 621 bp, Homo sapiens
ctttctctctctttccttcacttaatatttgttgtgagcctactgtgggctaggtacttgtctaattgctgggataagagcattgggtaaaataaagattctagcctcatgagtttggattatagtggaggggaataatcaataaagaaaactctatatatgtgtctcagaattaagtgctgataaatgatttagagatgtcaagacagggctctcaagatgacacttggcacaagtccagaaggaagtgtgggaatgagtcatttggatacatgtggggaagggtattccggkcagagggaaagtgccagtgctctgaagaagcagcatggctgacatagtcaaggagcaagagggagatgatggctgaagcagagtgtcaggggtagagtggtactcaatgaaggcagaaggatacaggaatgggaaaagaaatgaagagccagtctcctcatttttttaactcctccaaaatcaatagaattgttaacataagctggatattgaaatggtagatttttgattgttacaagatagccaggtaccagccactgcaaaatcatgccaaaatgtaaagaccatcgagactaggaagaaactgcatcaactaatgagcaaaat

SEQ ID NO: 929751 - DNA, 789 bp, Homo sapiens
cagctgatatctcctggtgctatccccaaactgccactcttaactcttaaagtaaataaataatctttgctggcaggactatgctgaatctccttaggcactctctaattagatgtcctgggtcctcccaattcttagacttttaatacctgtttttctctttctcttattccatttagtttttcaattcatacaaaactgtaaccaggccatcaccaataattctaaatgacaaatgtttcttctaacaaccccacaatatcacccacaatatcaccccttaccacaaaatcttccttcagcttaatctctcccactctagcttcccacgctgcccctaatcccrcttgaagcagccctgagaaacatcgcccattgtctctccataccacccccaaaaattttcaccatcccaacactttaccactattttgttttatttttcttatttatataagaagacaggaatgtcaggcctctgagcccaagctaagccatcatatcccctgtgacctgcatgtacacatccagatggccagttcctgccttaactgatgacattccaccacaaaagaagtgaaaatggccagttcctgccttaactgatgacattccaccacaaaagaagtgaaaatggcctgttcctgccttaactgatgacgttatcttgtgaaattccttctcctggctcatcctggctcaaaagctcccctactgagcaccttgtgtcccccactccttcccaccagagaacaacccccctttgactgtaattttcctttacccacc

SEQ ID NO: 929752 - DNA, 644 bp, Homo sapiens
ccacaatatcaccccttaccacaaaatcttccttcagcttaatctctcccactctagcttcccacgctgcccctaatcccacttgaagcagccctgagaaacatcgcccattgtctctccataccacccccaaaaattttcaccatcccaacactttaccactattttgttttatttttcttatttatataagaagacaggaatgtcaggcctctgagcccaagctaagccatcatatcccctgtgacctgcatgtacacatccagatggccagttcctgccttaactgatgacattccaccacaaaagaagtgaaaatggccagttcctgccttaactgatgacattccaccacaaaagaagtgaaaatggcctgttcctgccttaactgatgaygttatcttgtgaaattccttctcctggctcatcctggctcaaaagctcccctactgagcaccttgtgtcccccactccttcccaccagagaacaacccccctttgactgtaattttcctttacccacccaaatcttataaaacggccccaccccatctcccttccctgactctcctttcggactcagcctgcctgcaccaaggtgattaaaaagctttattactcacacaaagcctgtttggtggtct

SEQ ID NO: 929753 - DNA, 622 bp, Homo sapiens
gttagaaggaaaactaataaacagaaaggacatccacaccaaaaccccatctgtacatcaccatcatcaaagaccaaaggtagataaaaacacaaagatggggagaaaccagagcagaaaagcggaaaattctaaaaatcagagagtctctctctcctcctccaaaggaatgcagctcctcgccagcaacagaacaaagttggatagagaatgactttgacgagttaagagaagaaggcttcagataatcggtaataacaaacttctccaagctaaagaagggtgttcaaacccatcgtaaagaagctaaaaaccttgaaaaaagattagacgaatggctaactagaataaacagcatagagaaggccttaaatgacctgatggagctaaaaaccatggcacgagaactacrtgacacatgcacaagcttcagtagctgattcaatcaagtggaagaaaaggtatcagtgactgaagatcaaatgaatgaaatgaagtgagaagagaagtttagagaaaaaagagtaaaaagaaatgaacaaagtctcgaagaaatatgggactatgtcaaaagaccaaatctacgtctgattggtgtacctgaaaatgacggggagaatgg

SEQ ID NO: 929754 - DNA, 606 bp, Homo sapiens
ggcctccagctgcaactatgttgctgcaaaagacataatttcattcttttttatgactgcatagtattctatggtatatatataatgttttctttatccagttcactgttgatgggcacataggttgattctgtgtctttgctagwgtgaacagtgttgcaatgaacatttgagtgcatgtgtcttttcagtagaacaatttattttcctttgggtatatacccagtaaagggattgctgggtcgaatggtagttctgttttaagtcctttgagaaatctccaaactgctttctacagtggctgaactaatttatattcccaccaacagtgtataagcgttcctttttctccacagcctcaccagcatctgttattttttaatttttctggagacacggtctcaatctgttgcccaggttggagtgcagtggcatgatcatggcttgtaattatggctgcagcctcaaactcttgtgctcaagcaatcctctcacctcagcctcccaagtagctgggaccacagggacacactaccatgtccggctaatttgctattttgtagagatgagggcctcgctatgttgcccaggctggtctcaaactcc

SEQ ID NO: 929755 - DNA, 543 bp, Homo sapiens
tggaacttgagaataggcctgcccagcctgccaccaccaccactgctggcaatcttctgcatgcactacctggaggattggggactgggctgcccagcccattgcagccaccgctaatatcagtgagtgcccatggggagcctgaggactcatccagtcatctggcacactgctgccataaccagcacccaagaaagctgcctggaggccccaaaatcagcccgtctggacttgctaacactggcgcccacatatgccaccccgggacccaagaayaggcatgcttggtctgccgctgccaacagcagggcctgaggactggcccacctggcgtcctatccccaggaaaacctcagcataatctccactaacaactgcagcctacgccactgaggaaatcacagacaccactgatggtgtatagccaaagaaatcctatggagactacaccactatatatgcccagaataaaagaaaagtaccctaaccaaccaacaccatagatctatctacaggaaaatgtcttcccctatgaaaaccaat

SEQ ID NO: 929756 - DNA, 617 bp, Homo sapiens
cattagtgcagaggtggtacttaccatacccatacctttatcttagtctcttacaaggtaattagtataaccactcataaaatatttgctgaagtatttattgaatgagcagttgtaaaagaatacataaacttttttctctttggtgttaataaccctttttactatagctcctctatttttgtttccaatttatagaaaatttgcaagtatcttttgcatcagaactatgagtaaagaagtacaagggtaactacaagtagcacttttaaaccattaaatgttgctgcctttacaatctgtgttrtagttggctgacctcttgagcttgaaggttatcaggttaaaaccaatttccagtacatagcaccctgattacaggacagtttggattctttttctgttcaacagacattgccagtactcggatttgtctcgctgctttatcatgattccattgaaataggtaggggagctccatatctgaagtgtgaaaatgttctggggttaattgtacagttaaggacatgttctaaaaagctctttcattggctgtctttatcatggtaccagccttggattgagaaacagcccataagaaaattaattagtggtct

SEQ ID NO: 929757 - DNA, 566 bp, Homo sapiens
accagggtcctgggtttcatgcacaaaactgggtggccacacaagcagacactgagctagctgcaggagttttcttttgtacctgrgtggcacctggaacaccagtgccactttccattcactgccctggaaagggggctgaagccagggagccaagtggtctttctcagcaggtcccaaccccatggagcccagcaagctaagatccactggctggaaattctcactaccagcacagcagtctgaagtcaacctgggacacttaggcttgatgggggcaggggcatccactctcactgatgcctgagtaggcggttttctcctcacagtgtaaataaagccgctgggaagtttggactgggcagagcccactgcagtgtggcaaagctgctgtagccagactgcctctctagattcctcctctctgggcatctctgaaagaaaggcagcagtcccagtcagggccttatagataaaactcccatctccctgggacggagcacctgggggaaggggcagctatgtgtgtagtttcagaagatgtaaatgttcctgcctgaaagctc

SEQ ID NO: 929758 - DNA, 566 bp, Homo sapiens
accagggtcctgggtttcatgcacaaaactgggtggccacacaagcagacactgagctagctgcaggagttttcttttgtacctgggtggcacctggaacaccagtgccactttccattcactgccctggaaagggggctgaagccagggagccaagtggtctttctcagcaggtcccaaccccatggagcccagcaagctaagatccactggctggaaattctcactrccagcacagcagtctgaagtcaacctgggacacttaggcttgatgggggcaggggcatccactctcactgatgcctgagtaggcggttttctcctcacagtgtaaataaagccgctgggaagtttggactgggcagagcccactgcagtgtggcaaagctgctgtagccagactgcctctctagattcctcctctctgggcatctctgaaagaaaggcagcagtcccagtcagggccttatagataaaactcccatctccctgggacggagcacctgggggaaggggcagctatgtgtgtagtttcagaagatgtaaatgttcctgcctgaaagctc

SEQ ID NO: 929759 - DNA, 634 bp, Homo sapiens
agatggcttaagacaaaaagttttcttcaatctggaaaacaaaacattgaggaaaagaaccagcaatgtttcaaataaataggctataaaattttttatcagttcatttaatttcatgtaattaattcttttcctgcttgagcttgattattagtttcataaatttattagtttcttcattagagttctgaaaatttttatttagtacataattttgatttatttgattatctaataactttgatcttaaagttattagaaacttatatttaagactacttyttagagtcttttccatgaatctgattgagtatgtctttagaaaagaactcaaaccagtaaccgtggatgacaaaaagatagaaaacaaccgtggcttaaaatctgatgaaatcagaaaaatagagtgcaaagcataaataaataaataaataaataaataaataaataaataaataaaatttgatgaaagttcatgataaccagaaattgacaaggaaatttggttactttgcggcatacaacataataagaattctgactgatatattagatttctaagagttttatatgatcttggaacattcatatcaataacatactcataaatgtaactgaaaaaagatctagcatc

SEQ ID NO: 929760 - DNA, 582 bp, Homo sapiens
tttttgtatttttattaaagagggggtttcaccatgttggccaggctggtcttgaactcctggcctcaagtgatccacctgccttggcctcccaaagtcctgggattacaggtgtgagccaccgtgccctgcttatttcagtcttattcccccaccccggtaatgtatttttattttaacatgcacgatcaacttttggtggcaaaaatttacgtcatttaatagcatgaatcacaaagaaagctatttttaaaaattacttttaaatcatcctaactatctcagtttggtgttatttcacatttaaaacatttgctaagctwcctttatatacagatggttaaaacacaagtagagtatctgggaaataatattttaaaaaatagtttcacttagagcaaataatgttattttacatttaaggtagtgatataaaatttccttttaaaataaatgtatctgagtaacagcagttcatattttctgtagataactacttttgaaagttagatcattattctgacaggaaacattttttagtgaaattggggtagttcatttatatgcacgataccacatttt

SEQ ID NO: 929761 - DNA, 601 bp, Homo sapiens
ctgggcttctgggttgggtggggacttggagaacttttgtgtctagctaaaggattgtaaatgcaccaatcagcactctgtgtctagctaaaggattgtaaacgcaccaatcagcactctgtaaaaatgcaccaatsggcattctgtaaaatggaccaatcagcactctgtaaaatggaccaatcagcactctgtaaaatggactaattggcacgctgtaaaatggaccaatcggcactctgtaaaatggaccaatcagcaggatgtgggcagggacaaataagggaataaaagctggccaccccagccagcagcagcaacccactggggtccccttccatgctgtggaagctttgttctttcgcttttcacaataaatcttgctgctgctgatcactttttgggtctgcactgcctttatgagctgtaacactcactggtggcttcactcctgaaggcagcaagaccacgaacccactgggaggaacaaacaactccggacgtgccacccttaagagctgtaacgctcactgcgaaggtctgcggcttcactcctgaagtccccgagaccatgaacccaccgggaggaacaaacaactct

SEQ ID NO: 929762 - DNA, 610 bp, Homo sapiens
cattgtatgttataataagtcagatttttaaaataatactacttaaaagattaactgttacattttcagacagaatttacaagaaacataaaagagtcagaacttgtgggtgtcaaagatgaaaatggtttccctttccagtctctgcaaagagctaagtactctaaaagtaagagtggtcatcaaattaaaagtcattctgaacttgtgggtgtaaagacactatgaataaacttcagaaaaatttaatggtgggtcacgtaactatcttaaactagacaaatttaattccaaggttcttaagagtattatctgactgcacagagagtttcagctcaagtctgagaaggggcagtttcaaagatatttgtgaatatggtgcttgcctattccacaaagtctttaaataaattacacagaaggaagcaccatagccttsccttttgaacaggagcatctattttaattacctattcctccttttctccactctgtgctgggaatacaggagaaatgtcctgtctcaatagatgtgtaatagagaaaatacataatttaaaatgtacacaataggacctgcacccaagcatccccatccactctcagttct

SEQ ID NO: 929763 - DNA, 636 bp, Homo sapiens
caccaggagcctcaagcttcgggtgtatactgacaatgaaaaccacagggaaaagacgtccatgtcagagactgccctcagacatggtgagatctgtgacgactcctcagaagcaggcacaccaaatcactgattcaatcctccctgatgtcaatgtagacccatctaactaatcccacttctcctgattaccttttcttttcttcttacaaacctaaaaatctcaccatttctattggcctgaaaataacatccctctgttcttctcttcctcctttagcattcaatctcacttacaatgggttttatttaatgattctcctccttatactttctatcttaccagtttcctctcacaatggtttacctgctacacaaaattattctttttgkgcttatgtgccttttcctccacttattcgacctctcacctggatagatactcctgcagaaatctacactagtgatagtgtgtggatgcctggagctacagatgacttttgccctgctcaaccaggagaagaaagtactgcatttaatattaccatgggttataaataccccactctgtgcctcagacatgcacctggttgtatccatctagaaactcaagtctgggctgtttatcttctggag

SEQ ID NO: 929764 - DNA, 592 bp, Homo sapiens
tgctttgtgatgtgtgcatttatctgacagagttaaacctttctcttcattcagcagtttagaaacactgtttttgtacaatgtgggaagggacagttgggaatgcattgaggtcaacggtgaaaaagaaaatttcttcagataaaaaatagaaagaagcattctgagaaactgctttgtgatgtgtgcwttcatctgacagagtgaaacctttcttttgattcagcagtttggaaacacggtttttgtagaatctccaaaggtgaatttggcaggtcattcacaccaatggcaaaaaagggaatatcctgagatataaactataacaaaactgtctgacaaactgcattgtaatgtgtgcattcatctcacagagttaaagctttcttttgtttcagtagtttggaaacactgtttttgtacattctgtgaatggacatttgggagcgtgttgaggcctacaatgagaaggaagataacttctgataaaactagaaagaagctttctgagaaagtgttttctgatgtgtgcattcaactcacaggttttaaactttctcttgattcagcaataaggaaaagctgattttgt

SEQ ID NO: 929765 - DNA, 606 bp, Homo sapiens
ggagtttgctggaggtccactccggaccaagtttacctgggtatcagccgcagaggctgcagaacagctaatattggtgaaccgcaaatattgctgcctgatttttcctctggaagttttgtcacagagctgtaccctgccatgtgaggtgtcagtctgcccttactggggggtgcctcccacataggctactcgggtgttaggggyctacttgaagaggcagtgtgtgtgcattcttagatctcaaggtgtgtgctgggagaaccactactctctttgaagctgtcacacaggaacatttaagtctgcagaggtttctgctgccttttgtttgcctatgccctgccccaagaggtgtagtctacagagacaggaaggccttcttgagctgtggtgggctccaccccgtttgagcttcctggccgctttgtttacctactcaagcctcagcaattgcgggcacccctcacccagccttgctgtcgccttgcagtttgatctcagactgctgtgctagcaatgagtgaggctctgtgggcataggaccctccaagccatgcacagaatataatctcctggtgtgccgtttgctaagaccattggaaa

SEQ ID NO: 929766 - DNA, 560 bp, Homo sapiens
gttggagtttgctggaggtccactccggaccaagtttacctgggtatcagccgcagaggctgcagaacagctaatattggtgaaccgcaaatattgctgcctgatttttcctctggaagttttgtcacagagctgtaccctgccatgtgaggtgtcagtctgcccttactggggggtgcctcccacataggctactcgggtgttaggggcctacttgaagaggcagtgtgtgtgcattcttagatctcaaggtgtgtgctgggagaaccactactctctttgaagctgtcacacaggaacatttaagtctgcagaggtttytgctgccttttgtttgcctatgccctgccccaagaggtgtagtctacagagacaggaaggccttcttgagctgtggtgggctccaccccgtttgagcttcctggccgctttgtttacctactcaagcctcagcaattgcgggcacccctcacccagccttgctgtcgccttgcagtttgatctcagactgctgtgctagcaatgagtgaggctctgtgggcataggaccctccaagcca

SEQ ID NO: 929767 - DNA, 713 bp, Homo sapiens
gtgcatttatctcacagtgctaaaactttgtttggtttcagccgtttggagaaactgtttttgtccattctgtgaatggacatttgggagctctttgaggccaatggtgaaaaagcaaatatcccaggataaaaactagaaggaaactatctgagaaacagcattgtgatgtgctcattcatctcacagtgttaaaactttcttttcattcagtagtttggaaacactgttttgatagaatctgtgaagggatatttgaaagctcattgaggccataggtgaaaaagcctatatcccaggataaaaattagaaggaagttatcttacaaaccgctttgagatgtgtccattcatctcacagagttaaaccttttattcagcagtttggagaccatgtttttgtataatctgtgaagggatatctgtgattgcatggaatcctatgctgaaaaaggaaatatctttggatactgactagaaagaagctttctgagaaactgctttgtgatgtgtacrttattctcacatagttaaaactttcttgtgattcagcagtttagaaacactgctttgtagaatttgtgaagggatatttgatagctcattgaggccactggtgaaaacttgaacaccccaggataaaaactggaaggaagctatttgagaaacctcttagtgatgtatgcgtacatctcacagagttaaacctttat

SEQ ID NO: 929768 - DNA, 545 bp, Homo sapiens
aaggaaatacctggcgtgtgataagtatccaacatatgacagctattattatgctgggttctgtatggaagggtttgtttctttttctctataataagtgagtagaatacatataatccttttatcattttccataacatttagcaagcctggcactatagttgagctcttttagctttgaggtaaaacatatatgctgaaaacttttaaatatttactgcaaaaatttctagggagttagtgaagcttcttcctgtattttgaaaaatagtatcgtatcattatatgttctaagtctgtgttctactgtattctgcagtaattctcaccataggaggaatttattattctgcrggaattctcacagtaagaatatcttccttccttccttccttccttccttccttccttccttccatccatccttccatccctctgtccctccttccctccttcccctttccctcccctccccttctctctttccttcgagagtctcgctctgtcacacagcctggagtgcagtggtatgatctcagctcact

SEQ ID NO: 929769 - DNA, 554 bp, Homo sapiens
gtgttcagatgaaagaaagagttgcatgtctctcactttaaatcaaaagctacaaatgattaagcttagtgaggaaagcatgaagaaagccaataaataatgaaagaaaggcctcttattccatactgttaacaaaggaaaagttcttgaaagaaattaaaagtgttactccagtgaacatatgaattataaggaagtaaaayaaccttattgctgatatggagaaagttttagtaatctgaatagaagaccaaaccagccacattgtctcaagctaaagagaaatcaagagaaaggtcctaactttcttccgttctacaaagcctgagagaggtgaagaagctgcagaagaaaagtgtgaagttattagaagttggttcacaaggtttaaggaaagaagctgtctccataacatagaattgtaaggtgaagaagaaagtgctgatgtagaagctgcagcaagttattcagatattcagaaggtctaatgaagagaatagatgaaattcaatgcctgatttaaaaggctaaaaggataggctgattctcttgtt

SEQ ID NO: 929770 - DNA, 586 bp, Homo sapiens
aattacaaaaattagctgggtgtggtggctcatgcctgtagtcccaactacttggggacatgagactggaagatcacttgagcccagaagccataggttgcagtgagaccagatggcaccactgcactacagcatgggtgacaaaaggagaccctgtctttaaataactaaagaaaaaagaaagtatacaattgagtggtttttagaatattcaaggagctgtgcatccatcaccacagtctttcttagaagtgattacccacttgtgagttacccacttatgagtgagaaaccctcacctcttagccgctacctcctacgtaccccatgttcataggcaaccactgatttattttctgtcattgtagttttgcctaatctggaccttttatagaaatagaattgtacaatgtgtgatcttttgtamtttgcttttttttttctcttagcagaatgttttcaaatttctttcatgttacagtgtgtatcaggatttctttccttttgtagctgagtaatagtttatgtttatccattcattagttgacggacatttgtgttgtttttgcgtattcaccatcatgag

SEQ ID NO: 929771 - DNA, 618 bp, Homo sapiens
ttcatttttccttaaatgattcttaatgacttgcagtttttaaaaacttaccctgagagtaaaccaaattacccactaaatagtgttttcacacagaagatgtgtaagagcatatctgttgtaaggaattataattttaaaatcgttctaaagaagcaccattgtttctaaggtgatttctactgaacaagcagttcaaacaaagtagacagggaagagaaatggctatcagtgatgtatggctcaacaggtaaaacttcctgccttctaaaatggctctacttgtaagattctgaagattccattagaaatacttgtatttaaagggtaataatgtgggaaaatgaatatgttgatttgcttgattataagaaccacttcactagaaataattatatcaaaacatcatgttgtactccttaatgtaggtkaagaaaactaaaatgaatgaaaaaaaatctaggaatacttgtgtttagtaaaccagttttggatttcactcttgtacatttcacccatgtatgtagggaccgattaaacatttggcacggaggaataatgcagagcaacaactcctaggggagaactagattgtctggttggtgatcaaaaagaact

SEQ ID NO: 929772 - DNA, 697 bp, Homo sapiens
aataaaaatatgcttagtgacttgggataaaccagtagatgttcacaactgatggagagccgtgaaagagagatagcggtaaatagttacaataacacaagtttcctgcacctgtcgaggatttccccaaaaaaacgcagaatgtgggatgcacctaaggcatatgaaagagagagggcagaaggagtaagagakaaataggaggaaggaaggaaggaaggaaggaaagaaggaaggtaggaaggaaggaaggaaggaaggaaagaaggaaggaaggaaggaagcaaagaaggacgaacggaaggaggaaacacccggtgttactaaaatcccccaaaaatatggtttccccctgtgggtaagcctacaatgtggatgaatcttgaaaatattgtgctacgtgttatgtcagtcataacagctcacctattgtgcaattccgtttataggaaatgtccacaatatggaaatctatgcatatggggttgatcgcactaggtagttgctacctagggctgagggtcagggagagggtttgagacagaatgaggagtgactaatgtctacagggtttttctctggtcgggggtgataagacgttctacaatggattgcgaattaaaattgaatgtgcacaaccacaggtatactaaaagccactcaattcatgacttttaatgggggaatcttatgtggc

SEQ ID NO: 929773 - DNA, 697 bp, Homo sapiens
aataaaaatatgcttagtgacttgggataaaccagtagatgttcacaactgatggagagccgtgaaagagagatagcggtaaatagttacaataacacaagtttcctgcacctgtcgaggatttccccaaaaaaacgcagaatgtgggatgcacctaaggcatatgaaagagagagggcagaaggagtaagagataaataggaggaaggaaggaaggaaggaaggaaagaaggaaggtaggaaggaaggaaggaaggaaggaaagaaggaaggaaggaaggaagcaaagaaggacgaacggaaggaggaaacacccggtgttactaaaaycccccaaaaatatggtttccccctgtgggtaagcctacaatgtggatgaatcttgaaaatattgtgctacgtgttatgtcagtcataacagctcacctattgtgcaattccgtttataggaaatgtccacaatatggaaatctatgcatatggggttgatcgcactaggtagttgctacctagggctgagggtcagggagagggtttgagacagaatgaggagtgactaatgtctacagggtttttctctggtcgggggtgataagacgttctacaatggattgcgaattaaaattgaatgtgcacaaccacaggtatactaaaagccactcaattcatgacttttaatgggggaatcttatgtggc

SEQ ID NO: 929774 - DNA, 697 bp, Homo sapiens
aataaaaatatgcttagtgacttgggataaaccagtagatgttcacaactgatggagagccgtgaaagagagatagcggtaaatagttacaataacacaagtttcctgcacctgtcgaggatttccccaaaaaaacgcagaatgtgggatgcacctaaggcatatgaaagagagagggcagaaggagtaagagataaataggaggaaggaaggaaggaaggaaggaaagaaggaaggtaggaaggaaggaaggaaggaaggaaagaaggaaggaaggaaggaagcaaagaaggacgaacggaaggaggaaacacccggtgttactaaaatcccccaaaaatatggtttccccctgtgggtaagcctacartgtggatgaatcttgaaaatattgtgctacgtgttatgtcagtcataacagctcacctattgtgcaattccgtttataggaaatgtccacaatatggaaatctatgcatatggggttgatcgcactaggtagttgctacctagggctgagggtcagggagagggtttgagacagaatgaggagtgactaatgtctacagggtttttctctggtcgggggtgataagacgttctacaatggattgcgaattaaaattgaatgtgcacaaccacaggtatactaaaagccactcaattcatgacttttaatgggggaatcttatgtggc

SEQ ID NO: 929775 - DNA, 672 bp, Homo sapiens
tataagaaagaagttgaagcaaaacaacttgaaccaactgttcaatcactagagatgaaactgaagactacaagaaatactccaaatcagataaatcaatctttggtaaaaattctatattttaaactttattttatcaatgttacttataatatcctcttgatttaatatataatattttggtctaaaacaaaccagaaatgttatctcattktcaaaaaatgaatgatgacacttacaggtacaattattaatatttattataaatcatggcatccacataggatattattttattacaaagagcttttgaaaacaataatatgccataatatatacttagtgataacctattgataaagattttttcccagtaaaattgttccttgtacttcccactatttcatattgattactgtacctaatactataaagaggaaacaaattattgcaatcacaagtaatctcattatattctaagaagagctctataaattttatcttatttaccattggtgttttgaaataaaagttttctttcgtattgatacatttacaccacagaagtaactgtgatctgtcagagaactagaagtagagtcagaagtcctggggaaaatcctgtagcttgcttatatttttaacatctctttttcaaaattgtggtaacta

SEQ ID NO: 929776 - DNA, 697 bp, Homo sapiens
aattatcttgatcctgcctttggattttaaaaacagtttcactgagatatcattcacatttgagagagttcaaccatttaaaatgtacaactgagtatctattagtatattcacagcattttcatcaccctgaaaagcaaccccacatctcctaggcatgactgcagccttcctccatgtccctccacctacctctgttgtaggcaaccaccatctatctacttttgtctccatatgtttgcctgttctgcttatttcatatacatagagttatacaatacgtagtcctctgtgactggctttttcacttagcataatgttttcagaattcacttagcgtaatgttttagcacacattggtagtttatttcttcttatagttaaatgatattctattccatggctatactggttttccattcattcatcagttgatggacctttaggttagtttccactttttagctcttatgaaaaatgctgctgtgaacattcacttacaggttattatgtggacacaggtttttatttmtctgccattggactttatcctcagagttaattgggcagatttcagcacttgtcttgctcatgctattctttctaccttttcagtttctgttcatctggcctcattcactcagatgtggcagacaatttattgttttcatgaagctttctctgactgttctctcat

SEQ ID NO: 929777 - DNA, 642 bp, Homo sapiens
tcccccaatgacttaactcattccagcatttactgaaatgtacaaggacttacagaccccatgcaagtcaaaaacccagcaggccagtcattgaatcctacagctccaaatcatcttttctgaatctacatctcacatctagagcacaggtgtgtgatgcctgggcttccaaggccttgggcagctctgcacctgtggctgtgcagggtctataccccacagctgccctcatgggctgggctgatgttgagtgcctgtagcatttccatactaagggtgccagctgttggtgagtctatgaatctggagtctggagaatggtgcctccatatttagggactccagccctaaattctccttctgtactgccctagtaaaagtttcccaygaggctctgcctcttggaaaagattctgtgtgaacacccaggtttttccgtacatactctggagtctagacaaaggcttgcaagcgtctagttttgtgctgtgtgcagctgctggcttaacacaatgtggaagccaccaagccttgaagcttgcaccctctgaagcagtgacccaagctgtacctgtgcatctttcagccaaggctggagctggagcctcaggaatgcagccagcagtgtcctgaggttggaca

SEQ ID NO: 929778 - DNA, 642 bp, Homo sapiens
tcccccaatgacttaactcattccagcatttactgaaatgtacaaggacttacagaccccatgcaagtcaaaaacccagcaggccagtcattgaatcctacagctccaaatcatcttttctgaatctacatctcacatctagagcacaggtgtgtgatgcctgggcttccaaggccttgggcagctctgcacctgtggctgtgcagggtctataccccacagctgccctcatgggctgggctgatgttgagtgcctgtagcatttccatactaagggtgccagctgttggtgagtctatgaatctggagtctggagaatggtgcctccatatttagggactccagccctaaattctccttctgtactgccctagtaaaagtttcccacgaggctctgcctcttggaaaagattytgtgtgaacacccaggtttttccgtacatactctggagtctagacaaaggcttgcaagcgtctagttttgtgctgtgtgcagctgctggcttaacacaatgtggaagccaccaagccttgaagcttgcaccctctgaagcagtgacccaagctgtacctgtgcatctttcagccaaggctggagctggagcctcaggaatgcagccagcagtgtcctgaggttggaca

SEQ ID NO: 929779 - DNA, 642 bp, Homo sapiens
tcccccaatgacttaactcattccagcatttactgaaatgtacaaggacttacagaccccatgcaagtcaaaaacccagcaggccagtcattgaatcctacagctccaaatcatcttttctgaatctacatctcacatctagagcacaggtgtgtgatgcctgggcttccaaggccttgggcagctctgcacctgtggctgtgcagggtctataccccacagctgccctcatgggctgggctgatgttgagtgcctgtagcatttccatactaagggtgccagctgttggtgagtctatgaatctggagtctggagaatggtgcctccatatttagggactccagccctaaattctccttctgtactgccctagtaaaagtttcccacgaggctctgcctcttggaaaagattctgtgtgaacacccaggtttttccgtacatactctggagtctagacaaaggcttgcaagcktctagttttgtgctgtgtgcagctgctggcttaacacaatgtggaagccaccaagccttgaagcttgcaccctctgaagcagtgacccaagctgtacctgtgcatctttcagccaaggctggagctggagcctcaggaatgcagccagcagtgtcctgaggttggaca

SEQ ID NO: 929780 - DNA, 628 bp, Homo sapiens
attttgggccttacatttcagtcttcaatcgattctgagtttatgttgttatatggtgttacataggaagctaatatcattcttctccatatggatatttagttttcccagtgtcattcatttgaagaggctgtcctttccccagcgtatgttcttggcatgttcgtccaaaatcagttggctggaaatatgtggatttatttctgggtgccgtattctatggtctttaccccaagaatcattacttcttaaaatgcaattcaaattagcatgaaacatttgcagtttaaggaaaggcttatagcatcagaatccttaatcatagatttcattattttgtgtttttttttttgagatagggtctttgtctgtcatccaggcagaagtgcagygataataattcactgcagccctgaactctgggtacaagccatccttttgcctcagtatcccaactagctgggtctacaggcatgagccaccatgcccgggtaattaaaaaacatttttttttttgtagagatgggggtctcactatgttgctctggctgatctcaaattcctggcctcaagtgatctttctgccacagctttttaaagtgctaggattacaggaatgagccaccat

SEQ ID NO: 929781 - DNA, 715 bp, Homo sapiens
acaaatgtgctgcaaatggagccacatagaggaaatgagcagcaggctcagaactggggtgtgtgccgcctttggggctccagtccaagcatcggggcttctacagcactgtgggcttctcgggtgccaagaggcagaccacaggccatcttgaggaggactctggtaagagcttccttgtgtatgtggatgatgtccagaatgttggcctggtgtccctgagacagcactaacaggtccatgactgggtccagatcctgcctgggttgatgggcaaagagctcactgacagtgtggaaggcatctatggygaagtggatctatgttcaagtgcagaaagggcccaatcttgtagatgaaccacacagccagcttctggatgcaggtgcagtgccacattttttgtcacttcctgatgtgccccaccagcactgaagagatagcctggagacagggcaagaggaaggctgagaaagatgagatggtgagtgccagattcttcctggccctgagcccacccccagtgtgacactcaacttttaggagtgggagagcaagactgatggcttcaagtgcttcaccaagaagatggacaacagggcactcagctcaacttcacagccaatgagtggtggcaggctttgagaaagagcatcagaagcctgacagttcttcttcagcctcagccaggccttggagctggaccaggccatcc

SEQ ID NO: 929782 - DNA, 715 bp, Homo sapiens
acaaatgtgctgcaaatggagccacatagaggaaatgagcagcaggctcagaactggggtgtgtgccgcctttggggctccagtccaagcatcggggcttctacagcactgtgggcttctcgggtgccaagaggcagaccacaggccatcttgaggaggactctggtaagagcttccttgtgtatgtggatgatgtccagaatgttggcctggtgtccctgagacagcactaacaggtccatgactgggtccagatcctgcctgggttgatgggcaaagagctcactgacagtgtggaaggcatctatggtgaagtggatctatgttcaagtgcagaaagrgcccaatcttgtagatgaaccacacagccagcttctggatgcaggtgcagtgccacattttttgtcacttcctgatgtgccccaccagcactgaagagatagcctggagacagggcaagaggaaggctgagaaagatgagatggtgagtgccagattcttcctggccctgagcccacccccagtgtgacactcaacttttaggagtgggagagcaagactgatggcttcaagtgcttcaccaagaagatggacaacagggcactcagctcaacttcacagccaatgagtggtggcaggctttgagaaagagcatcagaagcctgacagttcttcttcagcctcagccaggccttggagctggaccaggccatcc

SEQ ID NO: 929783 - DNA, 673 bp, Homo sapiens
gactgtagccttgacccagatgagactttggactttgtaactttgagttaatgctgaaatgagttaagactttgggagactgctggcaaggcatgtttgtattttgcaatgtgaggacatgagattcatcgggtcaaggacagaataatayggtttttgtctatgtccctaccaaaactcatgtggaattatattttggaatgttacaggcaaggtctaggtggaaaaagatttagtcataaaatggtgcaggtagatacttcacgaatgataaagaaccatcaccttgatgctatcctcctgataatgagtgagttcccatgagatctggttgtttaacagatctcatcctcctgctcctgctttaggagacatctcattgtcccttggctttctgatataatgaggaggcttcctgattcctcccagaaacagaagacactatacttccttcacagcttgcagaaccatgagtcaattacacctcttttatttacaataatacagaaaagtagaactgcagagaggagctgtgaaatgccttcaaggcctttttccctttgttttggctattagcacagggattctttatatgcaaatttctgaaatcttcttgaatgtttccccttaaatgggatttttgttattgctacatagacaacctgctatacag

SEQ ID NO: 929784 - DNA, 639 bp, Homo sapiens
cagcagcccttgctgtcacaggccctggggcctaggagaaaagtatggtttcctaggccagtcccatggctctgctgctgtgctcaaccgcaggacactgctgccagcatccgtgcagctccagcaccagccatggctgaaagatgcacaggtaaacttgggtcattgcttcagaggtggctcaaagtcttgatggtttccatatagtgttaagccagtaggtgcacagagaaagagattagaggcttgggaactcccgtctagactccagaagatgyacagaaaatcctggatgttcaggaagaagcttttccaagaggcagagcttcatggggaacctctactagaggagcaaagaagggacctatagggttgaagcccccacacagggaggcatcattctctaaaccccagattcatagacccataaacagcttgcaccctcagtgtggaaaagctatgggcactcaacaacagccctgtccatgagagacagccgcagaggctgaacgctgcaaagccacaggtgcagatctgcccaaggccttgggagctcagccctcacagccctgtgccatggatatgggacaaggattcaaaaatggtgattttggagctgtagcattaagtgactggcct

SEQ ID NO: 929785 - DNA, 639 bp, Homo sapiens
cagcagcccttgctgtcacaggccctggggcctaggagaaaagtatggtttcctaggccagtcccatggctctgctgctgtgctcaaccgcaggacactgctgccagcatccgtgcagctccagcaccagccatggctgaaagatgcacaggtaaacttgggtcattgcttcagaggtggctcaaagtcttgatggtttccatatagtgttaagccagtaggtgcacagagaaagagattagaggcttgggaactcccgtctagactccagaagatgtacagaaaatcctggatgttcaggaagaagcttttccaagaggcagagcttcatggggaacctctactagaggagcaaagaagggacctatagggttgaagcccccacacagggaggcrtcattctctaaaccccagattcatagacccataaacagcttgcaccctcagtgtggaaaagctatgggcactcaacaacagccctgtccatgagagacagccgcagaggctgaacgctgcaaagccacaggtgcagatctgcccaaggccttgggagctcagccctcacagccctgtgccatggatatgggacaaggattcaaaaatggtgattttggagctgtagcattaagtgactggcct

SEQ ID NO: 929786 - DNA, 639 bp, Homo sapiens
cagcagcccttgctgtcacaggccctggggcctaggagaaaagtatggtttcctaggccagtcccatggctctgctgctgtgctcaaccgcaggacactgctgccagcatccgtgcagctccagcaccagccatggctgaaagatgcacaggtaaacttgggtcattgcttcagaggtggctcaaagtcttgatggtttccatatagtgttaagccagtaggtgcacagagaaagagattagaggcttgggaactcccgtctagactccagaagatgtacagaaaatcctggatgttcaggaagaagcttttccaagaggcagagcttcatggggaacctctactagaggagcaaagaagggacctatagggttgaagcccccacacagggaggcatcattctctaaaccccagattcatagacccataaacagcttgcaccctcagtgtggaaaagctatgggcactcaacaacagccctgtccatgagagacagccgcrgaggctgaacgctgcaaagccacaggtgcagatctgcccaaggccttgggagctcagccctcacagccctgtgccatggatatgggacaaggattcaaaaatggtgattttggagctgtagcattaagtgactggcct

SEQ ID NO: 929787 - DNA, 684 bp, Homo sapiens
cccccacacccaggaatcacctacaaactcacgagcctcacggtgctccacccctgtgtctttcatctcttcacccccaggcctcagggactctcctgtggctcccagttactctccagccatccccaggttcctgcgggagtcagccccatgcacccaggagtcccccagagactcacaggtctcgggagaatatgagcggtcccccagccctgactcctcaagattcatgactgcctcacccagcttctccctctcccctcccagaaactcagacccaaggggcagctcctcaccagggatgtggaaatactctacatcatcccgcagggcttcaccactctcacatccatcatcaacaaaattccacagctttacgtctccctttcctaaccaagcaggacagtaactcatgtcattstgttctcccgttccctcctctggagatttttcacagtcacctcattcatcaataatataccatatgttcttactgccatcatccagcagctcacccccagccacccatgactctcctgtctgtcccagctactctccaaccacgcccagatttcagcgggagtctgtaccccacatcccagaaaaagctacaaactcacagacctcagtgagatcctggccagtgtctctcacgtcttcacccccagcccttatggaccctcc

SEQ ID NO: 929788 - DNA, 644 bp, Homo sapiens
cacggtgctccacccctgtgtctttcatctcttcacccccaggcctcagggactctcctgtggctcccagttactctccagccatccccaggttcctgcgggagtcagccccatgcacccaggagtcccccagagactcacaggtctcgggagaatatgagcggtcccccagccctgactcctcaagattcatgactgcctcacccagcttctccctctcccctcccagaaactcagacccaaggggcagctcctcaccagggatgtggaaatactctacatcatcccgcagggcttcaccactctcacatccatcatcaacaaaattccacagctttacgtctccctttcctaaccaagcaggacagtaactcatgtcattctgttctcccgttccctcctctggagatttttcacagtcacctcattcatcaataatrtaccatatgttcttactgccatcatccagcagctcacccccagccacccatgactctcctgtctgtcccagctactctccaaccacgcccagatttcagcgggagtctgtaccccacatcccagaaaaagctacaaactcacagacctcagtgagatcctggccagtgtctctcacgtcttcacccccagcccttatggaccct

SEQ ID NO: 929789 - DNA, 564 bp, Homo sapiens
gggtctgatggggacttggagaacatttatgtctagctaagggattgtaaatatgccaatcggccctctgtatctagctcaaggtttgtaaacacaccaatcagcaccctgtgtctagctcagggtttgtgaatgcaccagtccgcactctgtatctagctactctggtggggacttggagaacctttgtgtccacattctgtatctagctaatctagtggggaggtggagaacttttgtgtctagctcagggattgtaaatgcaccaatcagcacmttgtcaaaacagaccaatcagctctctgtacaatggaccaatcagcaggatgtgggtggcgccagataagagaataaaagcaggctgcgggagcagcagtggcaacccaggtccccttccacactgtgaaggtttgttctttcactctttccaataaatcttgctgctgctcactctttgggtccacactgcctttatgagctgtaacactcaccacgaaggtctgcagcttcactcctgaagccagtgaaaccgcgaacccaccagaaggaagaaactccaaacac

SEQ ID NO: 929790 - DNA, 564 bp, Homo sapiens
gggtctgatggggacttggagaacatttatgtctagctaagggattgtaaatatgccaatcggccctctgtatctagctcaaggtttgtaaacacaccaatcagcaccctgtgtctagctcagggtttgtgaatgcaccagtccgcactctgtatctagctactctggtggggacttggagaacctttgtgtccacattctgtatctagctaatctagtggggaggtggagaacttttgtgtctagctcagggattgtaaatgcaccaatcagcaccttgtcaaaacagaccaatcagctctctgtamaatggaccaatcagcaggatgtgggtggcgccagataagagaataaaagcaggctgcgggagcagcagtggcaacccaggtccccttccacactgtgaaggtttgttctttcactctttccaataaatcttgctgctgctcactctttgggtccacactgcctttatgagctgtaacactcaccacgaaggtctgcagcttcactcctgaagccagtgaaaccgcgaacccaccagaaggaagaaactccaaacac

SEQ ID NO: 929791 - DNA, 447 bp, Homo sapiens
tactttctagtttgcctgcgtggattgattttgcacaaagtttgctataattccaagtggtaatagctactctggaggtgaagaggaagagaagtccaagattagttcctggaagaaaaaaagactgaagagataataggcctctgaacaccacacaaatcaacagaatggaaaagggcccaaggggagttacctccatgcaattgtttgcagagtgattatcaagycctggcatctggagcttagaatgattactgaatttcttagaattcaacatagagctgaactgaaatttgcaggttgatttactgaggaagctccctgaaatccttaccaacttaagttgtgggaacttcagacaaagctccttgtcccttctcttacctccttatttagagttttctttcagttcgtcacttttcaatgcagtatgtagatgcctcaacg

SEQ ID NO: 929792 - DNA, 574 bp, Homo sapiens
gcattgattttgtatcctgagactttgctgaagttgcttatcaggttataagaagattttgggctgaggcaatgggattttctaaatatgccatgatgtcatctgcaaacagagacaatttgacttcctctcttcctatttgaatacttttatttctttcccttgyctgattgccatggccagaacttccaatactatgttgaataggagtggtgagagagagcatccttgtcatgtgccagttttcaaagggaatgcatccaccttttgccctttcattatgacattggctacgggtttgtcatacatagctcttattattttgagatatgttccattaatacctagtttattgagagtttatagcatgaagcggtgttgaattttatcaaaggccttttatgcatctattgagataatcatttggcttttgtcaatggttctgtttatgtgatggattatgtttattgatttgcatatgttgaatcagccttgcatctcagggatgaaaccaacttgatcgtggtggataagctttttgatgtgctgctggatttgatttgccagtatttta

SEQ ID NO: 929793 - DNA, 574 bp, Homo sapiens
gcattgattttgtatcctgagactttgctgaagttgcttatcaggttataagaagattttgggctgaggcaatgggattttctaaatatgccatgatgtcatctgcaaacagagacaatttgacttcctctcttcctatttgaatacttttatttctttcccttgcctgattgccatggccagaacttccaatactatgttgaataggagtggtgagagagagcatccttgtcatgtgccagttttcaaagggaatgcatccaccttttgccctttcattatgacattggctacgggtttgtcatamatagctcttattattttgagatatgttccattaatacctagtttattgagagtttatagcatgaagcggtgttgaattttatcaaaggccttttatgcatctattgagataatcatttggcttttgtcaatggttctgtttatgtgatggattatgtttattgatttgcatatgttgaatcagccttgcatctcagggatgaaaccaacttgatcgtggtggataagctttttgatgtgctgctggatttgatttgccagtatttta

SEQ ID NO: 929794 - DNA, 599 bp, Homo sapiens
agcaagaccacgaacccaccaggaggaatcaacaatatggacgtgccacctttaagagctgtaacactcactgtgaagatctgcagcttcactcctgaagtcagcgagaccacaaacccactgaaaggaagaaactccagacacatctgaacatctgaaggaacaaacttgggacacaccatctttaagagctgtaacactcaccgcgaaagtctgyggcttcattcttgaagtcagcgagaccaagaacccaccggagggaataaagtccagacacactgggttcacgcccttctcctgcatcagcctcccgagtagctgggagtgcaggtgcctgccactacgccaggctggttttgtttttgtatttttagtagagacggggttgcaccatgttagccagcatggtcttaatctccttaccacgtgatctgcccaccttggcctcccaaagtgctgggattataagtatgagccaccctgcccagcccttattttttttattttttatttttaaaaaaatatatataggctaagatgttgacgtactttcacagccaggtaaaaggaagttaaatcttttatgtgtggtaatgact

SEQ ID NO: 929795 - DNA, 599 bp, Homo sapiens
agcaagaccacgaacccaccaggaggaatcaacaatatggacgtgccacctttaagagctgtaacactcactgtgaagatctgcagcttcactcctgaagtcagcgagaccacaaacccactgaaaggaagaaactccagacacatctgaacatctgaaggaacaaacttgggacacaccatctttaagagctgtaacactcaccgcgaaagtctgcggcttcattcttgaagtcagcgagaccaagaacccaccggarggaataaagtccagacacactgggttcacgcccttctcctgcatcagcctcccgagtagctgggagtgcaggtgcctgccactacgccaggctggttttgtttttgtatttttagtagagacggggttgcaccatgttagccagcatggtcttaatctccttaccacgtgatctgcccaccttggcctcccaaagtgctgggattataagtatgagccaccctgcccagcccttattttttttattttttatttttaaaaaaatatatataggctaagatgttgacgtactttcacagccaggtaaaaggaagttaaatcttttatgtgtggtaatgact

SEQ ID NO: 929796 - DNA, 615 bp, Homo sapiens
aggttgaggcaggagaatcacttgaaccccggaggtggaggttgttgtgagccgagatcacaccattgcacttcagcctggacaacaagagggaaactccgtctcaaacaagcaaacaaacaacatcaacaaaaaacctttatagaacttgcattctagtacaataggaarctgataaataagtaaaatacatagcatattagatgatgacgtgtaaaaagagaaaaacaaagctttgaagagggatagtaagtgtttatatacactaaaagtttaaaattgtaagtttggtggtaagcgaaagcatgctgaaaagctgatctgaagaaaggcaggagtgtgctgtgtggatatggtcagaggaaaggccgttctagtagaagaaagagtaattgtgaatgctgtgagttggttaagtgcatagagtaaaaacaatcatgaggacagtgtggctgttccagaaggaacaagaggaagagcggtaatatgatataccaaagagttaatgagtagaggggattacacggggctgctaaattatgaggacttgccttttactccacatggaaatttgagatagaaatttattgagacgttttgagcagaggagtgtag

SEQ ID NO: 929797 - DNA, 581 bp, Homo sapiens
tgatgaagggtaccccagatcccagggaggagaatgtcagcacaaacccccatgatggtatctggctgataaaagtgagtgaagtcccagcacattagagaggtagagagccaccctctgtaacttaactttccactaggaatctgaccaacccaagctgagagagagcactttgtttcttctaaactctgtatttaacrtggagtgaggtttggagacactgtgagggaaacacaatgggaaaagctgtaaacgttttcccagacacagggctgagggcaggacatcatttttaatcaaggcacttacaaagtcagccattcaagctgagaaccaaataaagaacacaatcacatttacaatagccactccccaaaataaaatagctaagaatacagctaacctaatgagaaggatctcaaggaaaactacaaaacagtgttaaaaggaattatatatgacaaaatcaatggaaaaactttaaatgtttatgaattgaaagaattaatattctttaaatgaccatactgcccaaagcaatctacagacttaatgctatttctatcaaactaccaatgtca

SEQ ID NO: 929798 - DNA, 626 bp, Homo sapiens
aagatatatccttgaccaatgccatgtgaaatagatttatgagggcaccacctgcatctttgaagagccctgtaattgctcttctctgtatatcagatctaataacagtgggaactgcagtcattcaactacaaaatttaaatacaatgggaataattggatgccgaggtggcaggggtcaagtggcagcactcaaccgtcaaaggcmaggtgggtgtagctactgtaatggacagcagaggcaaagcagcaatcataatagtctgacttgtgtagagctctggcattgaccaattaatcacagtgttcctataagtgaagttgataggaagcctactgcattcctacttaattcatacaaggagaaaacttctaggcctaatgaacaaaagacaaatttgaattataaaaacagagaatcatgacccatcaatcaatttccagacttgagccagtttacagactcaggaccccttgaatgaatgggaggctgggtccccttgaggaaagaccccactacattactgacaatttatgctgttaatctttcttccatccttccccaaggagacctctggccttttaccagggtaactgtgcactggggaaaggaaaatgatcagaca

SEQ ID NO: 929799 - DNA, 713 bp, Homo sapiens
agaagatatatccttgaccaatgccatgtgaaatagatttatgagggcaccacctgcatctttgaagagccctgtaattgctcttctctgtatatcagatctaataacagtgggaactgcagtcattcaactacaaaatttaaatacaatgggaataattggatgccgaggtggcaggggtcaagtggcagcactcaaccgtcaaaggcaaggtgggtgtagctactgtaatggacagcagaggcaaagcagcaatcataatagtctgacttgtgtagagctctggcattgaccaattaatcacagtgttcctataagtgaagttgataggaagcctactgcattcctacttaattcatacaaggagaaaacttctaggcctaatgaacaaaagacwaatttgaattataaaaacagagaatcatgacccatcaatcaatttccagacttgagccagtttacagactcaggaccccttgaatgaatgggaggctgggtccccttgaggaaagaccccactacattactgacaatttatgctgttaatctttcttccatccttccccaaggagacctctggccttttaccagggtaactgtgcactggggaaaggaaaatgatcagacatttcagggactactggacactggctcggagctgatgttgattccaggggactcaaaacatcactgtggtcctccagttaaagtag

SEQ ID NO: 929800 - DNA, 713 bp, Homo sapiens
agaagatatatccttgaccaatgccatgtgaaatagatttatgagggcaccacctgcatctttgaagagccctgtaattgctcttctctgtatatcagatctaataacagtgggaactgcagtcattcaactacaaaatttaaatacaatgggaataattggatgccgaggtggcaggggtcaagtggcagcactcaaccgtcaaaggcaaggtgggtgtagctactgtaatggacagcagaggcaaagcagcaatcataatagtctgacttgtgtagagctctggcattgaccaattaatcacagtgttcctataagtgaagttgataggaagcctactgcattcctacttaattcatacaaggagaaaacttctaggcctaatgaacaaaagacaaatttgaattataaaaacagagaatcatgacccatcaatcaatttccagacttgagccagtttacagacycaggaccccttgaatgaatgggaggctgggtccccttgaggaaagaccccactacattactgacaatttatgctgttaatctttcttccatccttccccaaggagacctctggccttttaccagggtaactgtgcactggggaaaggaaaatgatcagacatttcagggactactggacactggctcggagctgatgttgattccaggggactcaaaacatcactgtggtcctccagttaaagtag

SEQ ID NO: 929801 - DNA, 606 bp, Homo sapiens
tatatctttactatcctacctcagtggtatataaactctctagctttgtgtcataatcttattcagagagaccttgatcactgttcactgtcataggatatcacactggcccattacattgatgacattaggctgattggatccagtgagcaagaagtagcaaactcactggacttgttggtgagacacttccatgccagaggatgggaaataaatctgactaaaattcagggaccttctacctcaataaaatttctaggagtccaatggtgtggggcctgttgagatattccttctaaggtgaaagagaagttgctgcatttggcccctcctacaaccaaaaaagggacacagcacttagtgagcctatttggattttggaggcaacacattcctcatttgggtgtgttatgcyggatcatttattaagtgacccaaaaggctaccaattttgagtggggtccagaacaggagaaggctctgcaacaggcccaggctgctgtgcaagctgctctgccacttgggacacatgacccagcagatccaatggtgattgaggtgtcagtggcagatagggatgctgtctggagactttgccaggccacc

SEQ ID NO: 929802 - DNA, 814 bp, Homo sapiens
gagggtgccaggtgcctactgaaaccaagaacaatcctattacacggtatcttagggtccaaagagaaaagagtttccaactgaaactatgcaggaaactcaggtgggcagatggtaatcatcaaagcagggatctggcaaagaacacccccccacttgcagacaaagaaaaaacctagaggaaagtrtattcctgaaagcagagaattttcatgggagcaagaacatgaagtcattcttgctgccagtgaggtgccaactaaggctgcttcccagagacactgacatcacgttagaaaggagaagaggctggtgctgtggctcatgcctgtaaccccagcactctgggaggctgaggtgggcagatcacctgaagtcaggagttcaagaccaatctggccaacatagtgaaaccccatctctactaaaaattagccaggtgtggtggcaggcgcctgtaataccagctacttgggagtctgaggcacgagaatcgcttgaacctgggaggtggaggttgtagtgagctgagatcgcaccactgcactccagcctgggcaacaagagcgaaactccgtctcagaaaaaaaaaaaaaaaaggagaagatatgcaatgtgatagtgggacccgagtgacttgcttttgcttgctcaggtccacgttccttgatccatgtgtcccattccactctccatgctctgtcttctgatcctcactgtgtggccaggacatagaaggtcttcactgctatcacgtgacactatagttcctgagggcaggaactatattttccatttctaagagtgccttgac

SEQ ID NO: 929803 - DNA, 553 bp, Homo sapiens
aactaggtaattgggctaaggactgttagccaagactgttgagggtactgcctcatagcttgctgcttatagtaaaatgctagaggaaagattgtttgtttgtttgtttgtttttaaaaaggagccgggcacagtgsctcacacctgtaatcccagcattttgggaggctgaggtgaacagatcactagggcccaggagtttgagaccagcctgggcaatgtggcaaaacctcatctctacaaaaaattcaaaatttagctaggtgtagtgttgcatgtctgtagtcccaactactcaggaggcttaggtgggaggatcgcttgagcccaggagatcgaggttgcagtgagccatgttcacgccactgcactccaacctgagtgacagagcaagaccttgtctcaaaaaaaaaaaaaaggagacagggcttgctatttatgaagattcccacctctctagatagcaagcaatgctaacattaagaaatagcttctggggcaaatattaaacccaggggcctctcaggaaattgtgttcttaggatgaagctga

SEQ ID NO: 929804 - DNA, 695 bp, Homo sapiens
gaaagtatatgcatcaggtatgaggaagagaatagattttggaagttatgagaaatgtagagagtcagttgggcatagtttgtgattttgagggcctctaaaagtattagggcggcacacgctgcacggagacatgatggctaggctagaacagtaaggtcaagttgtttgcacagaaaggctacagggtgcggtcctggctcttgtgtaagaattgtgaccacaytaaccatgcctaggaaggaaaggagttgttgttttgtaagggattgaggtttgggagattaattggacatgatcagcagggaaagcacgtgtgtttttataagaattatgccaagatacgtaacagatgaggatgaaatttgggcttgactgaagtaatgggggctgtctgtgaagccttgcggcagtacagcccaggcaatttgctgagcctaatgggtgtcagggtcagtccaagtgaaagcgaagagaggctgggatgatgggtgcaaaggaatagtaaagaaagcttgtttaagatccagaacagaataatggattgtggagggaggtattgaggataggagagtatatgggtttggcaccatgggtggataggcaaaacaatttggttgataaggcatagatcctgaactaacttgtaaggcttgtctggttttaggacaggtaaaatgggggaattgtaagga

SEQ ID NO: 929805 - DNA, 695 bp, Homo sapiens
gaaagtatatgcatcaggtatgaggaagagaatagattttggaagttatgagaaatgtagagagtcagttgggcatagtttgtgattttgagggcctctaaaagtattagggcggcacacgctgcacggagacatgatggctaggctagaacagtaaggtcaagttgtttgcacagaaaggctacagggtgcggtcctggctcttgtgtaagaattgtgaccacactaaccatgcctaggaaggaaaggagttgttgttttgtaagggattgaggtttggragattaattggacatgatcagcagggaaagcacgtgtgtttttataagaattatgccaagatacgtaacagatgaggatgaaatttgggcttgactgaagtaatgggggctgtctgtgaagccttgcggcagtacagcccaggcaatttgctgagcctaatgggtgtcagggtcagtccaagtgaaagcgaagagaggctgggatgatgggtgcaaaggaatagtaaagaaagcttgtttaagatccagaacagaataatggattgtggagggaggtattgaggataggagagtatatgggtttggcaccatgggtggataggcaaaacaatttggttgataaggcatagatcctgaactaacttgtaaggcttgtctggttttaggacaggtaaaatgggggaattgtaagga

SEQ ID NO: 929806 - DNA, 695 bp, Homo sapiens
gaaagtatatgcatcaggtatgaggaagagaatagattttggaagttatgagaaatgtagagagtcagttgggcatagtttgtgattttgagggcctctaaaagtattagggcggcacacgctgcacggagacatgatggctaggctagaacagtaaggtcaagttgtttgcacagaaaggctacagggtgcggtcctggctcttgtgtaagaattgtgaccacactaaccatgcctaggaaggaaaggagttgttgttttgtaagggattgaggtttgggagattaattggacatgatcagcagggaaagcacgtgtgtttttataagaattatgccragatacgtaacagatgaggatgaaatttgggcttgactgaagtaatgggggctgtctgtgaagccttgcggcagtacagcccaggcaatttgctgagcctaatgggtgtcagggtcagtccaagtgaaagcgaagagaggctgggatgatgggtgcaaaggaatagtaaagaaagcttgtttaagatccagaacagaataatggattgtggagggaggtattgaggataggagagtatatgggtttggcaccatgggtggataggcaaaacaatttggttgataaggcatagatcctgaactaacttgtaaggcttgtctggttttaggacaggtaaaatgggggaattgtaagga

SEQ ID NO: 929807 - DNA, 695 bp, Homo sapiens
gaaagtatatgcatcaggtatgaggaagagaatagattttggaagttatgagaaatgtagagagtcagttgggcatagtttgtgattttgagggcctctaaaagtattagggcggcacacgctgcacggagacatgatggctaggctagaacagtaaggtcaagttgtttgcacagaaaggctacagggtgcggtcctggctcttgtgtaagaattgtgaccacactaaccatgcctaggaaggaaaggagttgttgttttgtaagggattgaggtttgggagattaattggacatgatcagcagggaaagcacgtgtgtttttataagaattatgccaagatasgtaacagatgaggatgaaatttgggcttgactgaagtaatgggggctgtctgtgaagccttgcggcagtacagcccaggcaatttgctgagcctaatgggtgtcagggtcagtccaagtgaaagcgaagagaggctgggatgatgggtgcaaaggaatagtaaagaaagcttgtttaagatccagaacagaataatggattgtggagggaggtattgaggataggagagtatatgggtttggcaccatgggtggataggcaaaacaatttggttgataaggcatagatcctgaactaacttgtaaggcttgtctggttttaggacaggtaaaatgggggaattgtaagga

SEQ ID NO: 929808 - DNA, 760 bp, Homo sapiens
gaacagaataatggattgtggagggaggtattgaggataggagagtatatgggtttggcaccatgggtggataggcaaaacaatttggttgataaggcatagatcctgaactaacttgtaaggcttgtctggttttaggacaggtaaaatgggggaattgtaaggagagtttataggctttaaaatgccatgctgtagcaggcgagtgataacargctttaatcctttcaaagcatgctgtgggatgggattttggcattgatcggggtaagagtgattaggttttaatgagatggtaaagggtgcatgatcggtcgccaaggaggaagtagaggtatcttatacttgtgggttaaggtggggggaatacaagaggaggacgcaaaggaggctttggattgggaagaagggcagcaatgagatgtagctgtaatccaggaatagtcagggaagcagaaaatttagttaaagtgtctcagcctaataagggaactgggcaggtggggataactaaaaggagtgcttaaaagagtattgtctaagttggcaccagagttggggagttttaagaggtttagaagcctggccgtcaatacccacagcacgttatggaggcaagggaaacaggcccttgaaaagaaggtaatgtggagtgggtagcctctgtattgattaagaagggggcgggcttaccttccactgtgagaattacctgaagctcagcgtccgtgatggtttaggaggcttctgaggcaatcgg

SEQ ID NO: 929809 - DNA, 760 bp, Homo sapiens
gaacagaataatggattgtggagggaggtattgaggataggagagtatatgggtttggcaccatgggtggataggcaaaacaatttggttgataaggcatagatcctgaactaacttgtaaggcttgtctggttttaggacaggtaaaatgggggaattgtaaggagagtttataggctttaaaatgccatgctgtagcaggcgagtgataacaagctttaatcctttcaaagcatgctgtgggatgggattttggcattgatcggggtaagagtgattaggttttaatgagatggtaaagggtgcatgatcggtcgccaaggaggaagtagaggtatcttatayttgtgggttaaggtggggggaatacaagaggaggacgcaaaggaggctttggattgggaagaagggcagcaatgagatgtagctgtaatccaggaatagtcagggaagcagaaaatttagttaaagtgtctcagcctaataagggaactgggcaggtggggataactaaaaggagtgcttaaaagagtattgtctaagttggcaccagagttggggagttttaagaggtttagaagcctggccgtcaatacccacagcacgttatggaggcaagggaaacaggcccttgaaaagaaggtaatgtggagtgggtagcctctgtattgattaagaagggggcgggcttaccttccactgtgagaattacctgaagctcagcgtccgtgatggtttaggaggcttctgaggcaatcgg

SEQ ID NO: 929810 - DNA, 671 bp, Homo sapiens
tagcaatatacctttattgtcctacctcgaaggtatatcaactctccagctttgtgtcataatcttatttggagagaacttgatcacttttcacttctgcaagatatcacactggtccacttaattgatgacattatactgattggatccagtaagcaagaagtagataacaccctggacttattggtgagacatttgcatgccagaggatgggaaataaatctgactaaaattcagggaactgctacttcagtaaaatttctagtggtccagtggtgtggtgcctgttaagatattccttctaaggtgaaggataagttgttgcatttggcctctcctacaatcaagaaagagacacaaggactagtgggcctatttggattttggaggcaacacattcctcagttgggtatgttacttcagcccatttattgagtgacctggaagcctgccarttttgagtggggtccagaacaggagaaggctctgcaacaggtccagactgctgtgcaagctgctctgccacttcagccatatgactctgcagatccaatggtgctgcaggtgtcagtggcagataggaacgctgtttgaagcctttggcaggctcccataggtgagtcacagcagaggcctctagaattttggagcaaggacctgccatcttctgc

SEQ ID NO: 929811 - DNA, 661 bp, Homo sapiens
tgggtatgttacttcagcccatttattgagtgacctggaagcctgccaattttgagtggggtccagaacaggagaaggctctgcaacaggtccagactgctgtgcaagctgctctgccacttcagccatatgactctgcagatccaatggtgctgcaggtgtcagtggcagataggaacgctgtttgaagcctttggcaggctcccataggtgagtcacagcagaggcctctagaattttggagcaaggacctgccatcttctgcagataactactctttttttgagagacagctctttgcctgttagtggactttggtggaaactgaacatctgactatgggtcatcaagttaccrtgcaacctgaactgcctatcatgaactgggtgctcttacccatctagccataaagtgtgtcatgcacagcagcattccaccatcaaatggaagtgttatatatgtgatcaggcttgagcaggtcctgaaggcacaagtaagttacatgaggaagtggcttaaatgcccatggtgtccactcttgccaccctgccttttctcccccagcctgcaccaatggcctcatggcgagttccctatgatcagttgacagaggaagagaagactaggacctggttcaaagatggttctgcacgatatgcag

SEQ ID NO: 929812 - DNA, 638 bp, Homo sapiens
ctgcatccctcaccagctcccaggtgacatgaggccaccagcacttgcaccacactctgtctggatagactccacactgccttatctccccagctcagcctcccgtaggacggatttgctttattcctccaggaactgtactaagtgctgatgtgccagcgctatggtaaatcctccaggcatggcgggaaacacagacacttgggggccatgcctggagtttactgtctggcagagaccagggtcttggctgtgaaaaggaaggttccagaaaggtttctaaaacagttcttaaattctttttttttttttttgagatggagtcttgctctgtcacccaggctggagtacagtggcgtgatctcagctcactgcaacctccacctcccaggttcaagtgattttcctgcctcagcctccagagtagctgggactacaggcacttgccaccatgcccggctgatttttttgtatttcyagtagaaacggggattcaccatgttggccaggctagtcttgaactcctggcctcaagtgatccacccacctctgcctcccaaagtgctgggattacaggtgtgagccaccgcacccggcctcttaaagacttctccgctgtttcccaggtgactcacagc

SEQ ID NO: 929813 - DNA, 776 bp, Homo sapiens
tcacatcctgttaacggtacggactgtaacatgctttatgcaaatggaggcagggtgagatcacaggaccgcaggacagaggcaaaattaaaattgctaatgaagtttcaggcacgcattgtcattgataacatcttatcaggagacagagtttgagagcagacaaccggtctgaccaaaatttattaggcgggaatttcctcctcctaataagcctaggagcactgtgggagactggggcttatttcatccctacagcttcaaccataaaagacgcccgtccctgaagcggccattttagaggcctactctcagggatgcattctctttctcagggatgttccttgctgagaaaaagaattcagtgatatttctcccatttgcttttaaaagaagagaaatatggctctgttccacccagctcactggcagtcagagtttaaggttatctctcttsttccctgaacattgctgttaccctgttcttttttcaaggtgctcagatttcatattgttcaaacacacatgctctaccaacactttgtgcagttaatgcaatcatcacagggtcctggggtgacatacatcctcctcagtttaggaatatgatgagattaagagattaaagtaaagacaggcataggaaatcacaagggtattgattggggaagtgataagtgtccatgaaatcttcacaatttatgttcagagatttcagaaaagacaggtgtaagaaattataaaagtctgaatttggggaactaataaatatctat

SEQ ID NO: 929814 - DNA, 644 bp, Homo sapiens
tagtgcatgggagagcttcagctagtcactgaaaattacagaatatcaatagctattgacgtgggtggcaacatattacaaaatggaactgtagatcatttggggaaaatattttgatgaaattcacccctctgggtgatgtgctgaatcttaaaccagaaagaaagaacatcaaaccaaacaaaaaaggttatttttttcctttgaatggacagatagcaacatctttaaatgctaaataaagtagccctgagcttctgagggtgcccctcagggactattgkctgaactgtcaatcaagtctcttggatttctgccctcaatgcttctttccttttccagctttccttcaaatgttcagcagtgataaatagagagttgtttgtcttttatttcaaatgccttccttataatatcagagctatgttagcatcatttacaaatcaatctagcaggatggcttaatgtcatcacaattttatggcagccagtgatatccaaactatctctagagtcttgatttatttctgtttggctctaaattaggttatttctcctccaaaggttaccaagtgctttagaaactgatgccctgatgccccttactcccacacgtgagagaaatgcctccagggtcaggatga

SEQ ID NO: 929815 - DNA, 505 bp, Homo sapiens
atgacttggtaagatgagaggaaggagaaacaatcgggggtggaggacctggattctggtttcaggcggtgccatctggggtgtgggctcgcaggacatccggagttttccgtcccttacctgggaatcgcgacttccacagcttacttgaaagctcatatgaggctctgtgacacttctaagggttaagattgctgctgtgtgtcttcaaagaaagagccacctttgggtcctcmaagccctcacccagcatgttggtcaaagcctccgccttttgtgtgcggcatgtgcggcagttcccctccccacgaaactggacaggccctggtgggctggccagagcctcccctgccgagccttcctccttctcctgggatagatggctgctccagaccccaaggtcgctgtccaagggcgcatcctcaattgctgtgtgaaaacaggcagggtttcaaggtggaggagagggagcactggcctgtacacccccaattccctagactgc

SEQ ID NO: 929816 - DNA, 565 bp, Homo sapiens
aaaaccctatctctacaaaaaataccagaaaaattagctgggcgtggtggtgtgtgcctgtagtcccagctacttggcaggctgaggtgggaggattgtttgagcccaggaggttgaggctaccgtgacctaggattgcaccactgcactccagcctgggtgacaaaagtgagaccctgtctcaaaaaaaagaaaaaagtccgggtgtggtggctcatgcctgtaatcccagcactttgggaggccaaggtgggcagaccacctgacgtcaggagttygagaccagcctggccaacatggtgaaaccctgtctctactaaaaatacaaaaaaataaagttagccaggtgtgttggcatgtgcctgtaatcccagctactcgggaggctgagaggcaggagaatcacctgaatctgggaggtggaggttgcagtgagccgagatcacaccattgcactccagcctgggtgacagagtgactccatctcaaaaaaaaaaaaaaaaaaacacagaaatgtcaggatgagtaagctgagtacagagtaaaacttgacattaagaagaaa

SEQ ID NO: 929817 - DNA, 583 bp, Homo sapiens
tcaccagttgttttaccaaggctttgactgaaagggtatgctttactccaaagaatcaagctcgacttgcagagccaataaaagccccttaggaaaaccgacctcataccttgtctacacagtccctgtacagggtccctaacctgtggtgagtaaataatgtcactttctaacaggcccaggaacctcatattcttgggacctcaagaagagaggaattcacccaactcatagrtgtttgaggacacaaacccatggctgggctcagctttaaaaagtcctatgtgagattccttgtgggacaaagttccatcaaagccaatttaagaagcctatgtaaaaataattatccttactgcactttatgcaaataatcaggccaagtataagaccaagtttattttgcaaacaacttagtcctatcacgatttgttttcaacaaaaatgaggactggagaaagaaattatgtttcaaaacttatcatacatttgtcattaaattctagattcatcagttgtttttaagtttttcacctacattttaaagtaaccctgcttattcctgtgaaccaactagtgatct

SEQ ID NO: 929818 - DNA, 653 bp, Homo sapiens
ttacgtttggcactttggtcaatctcccaacacttttgcatataccttactctttttctccacccattatgcaaacaagctagataggaaatcacatttgacaggtgagaaaatggaggcactgatatttcaagtatctgacccaatggcaaacacaaggtaaaacacctggtactacaatttaggctttctagagatcagtgctccaatgagaagctttgtagttaaaatgttatttttaatgcagaatgagtacttcgtgctcataagaattcaaataagaaaggaatagttggccgggcgtggtggctcacacctctaatcccagcactttgggaggccgaggtgggtggatcacgaggtcaggagatcgagaccatyctggctaatatggtgaaaccccgtctctactaaaaatacaaaaaattagccgggcgtggtggcagatgcctgtagtcccagctactcagaaggctgaggcaggagaatggtgtgatcccaggagatagagcttgcagtgagtcaagatcgcgccactgcactccagcctgggcgacagagcgagactccgtctcaaaaataattagaataaaataaaataaaataaagaaaggaatagtttacctgtagtcgtgaagctatacttctcttca

SEQ ID NO: 929819 - DNA, 732 bp, Homo sapiens
cagctggccagccaagccagacaagccacccggccatccaagccagccagccaaaccagccaagccagccaagccagccaagtcagtcagccagccagccagccaagacagccaagcctcccagccagcaaaaccagccaagccacccagccagccaagccagccaagccacctagccagccaggcccgccagccagccagccagcgagccaagccagccaaacaagccagcctgccaagccagccggccagccaagctaggcaatccwctcagccactcaagccagccaagtcacccgaccatccaagccagccaagccagtcagccagcccggacagccaagccagccaagccagccaagcccgccaaccagccaagacaggcatgctagccaagccagccaggcagccaagccagccaagccagccagcaagcaaagccaggcatgtcagccaaccagccaggcagccaagccagccaagccagccagccagccaagccaggcatgccagccaagccatccagccaactatgccagccggctagccaagccagccaagccagccaagcagccaagccagccagccaagccagccaagccagccaagtcagtcagccagccagccagccaagccagccaagcctcccagccagcaaaaccagccaagccacccagccagccaagccagccaagccacctagccagccaggcccgccagccagccagccag

SEQ ID NO: 929820 - DNA, 723 bp, Homo sapiens
caagccagccaagccacctagccagccaggcccgccagccagccagccagccagccagcgagccaagccagccaagtcagccagcctgccaagccagccggccagccaagctaggcaatccactcagccactcaagccagccaagtcacccgaccatccaagccagccaagccagtcagccagcccagacagccaagcaagccagccaagccagccaagccagccaagccagccaagcccgccaaccagccaagayaggcatgctagccaagccagccaggcagccaagccagccaggcagccaagccagccaagccagacagcaagcaaagccaggcatgtcagccaagccagccaggcagccaagccagccacgccagccagccagccaagccaggcatgccagccaagccatccagccaactaagccagctggctagccaagccagccaagccagccaagcagccaagccagacagctagccaagctacccagccagccaagccagccaaaccagccaagccagccagctagccaagccacccagccagccagctagccaaaccagccaagccacccagccagccaagccacccagccagccaagccagccaagccaatcagccagccaggcagccagccacccaagccagccaagccagccaagccagccaagccagccagccacccagccagccaagcctcccagacagccaagccag

SEQ ID NO: 929821 - DNA, 867 bp, Homo sapiens
aaccagacaagccacccggccatccaagccagccagccaagccagccaagccagccaagtcagtcagccagtcagccagccaagccagccaagcctcacagccagcaaaaccagccaagccacccagccagccaagccagccaagccacctagccagccaggcccgccagccagccagccagccagccagcgagccaagccagccaagccagccagcctgccaagccagccggccagccaagctaggcaatccactcagccactcaagccagccaagtcacccgaccatccaagccagccaagccartcagccagcccagacagccaagccagccaagccagccaagccagccaagcccgccaaccagccaagacaggcatgctagccaagccagccaggcagccaagccagccaagccagccagcaagcaaagccaggcatgtcagccaagccagccaggcagccaagccagccaagccagccagccagccaagccaggcatgccagccaagccatccagccaactaagccagccggctagccaagccagccaagccagccaaccagccaagccagccagctagccaagctacccagccagccagctagccaagccagccaagccacccagccagccaagccacccagccagccaagccagacaagccaatcagccagccaggcagccagccacccaagccagccaagccagccaaaccagccaagccagccagccacccagccagccaagccagccaagccacccagccagccaagccagccaagcctcccagccagccaagccagccaagccacctagccagccaggcccgccagccagccagccagctagccaagccagccaa

SEQ ID NO: 929822 - DNA, 534 bp, Homo sapiens
gccaactaagccagccggctagccaagccagccaagccagccaaccagccaagccagccagctagccaagctacccagccagccagctagccaagccagccaagccacccagccagccaagccacccagccagccaagccagacaagccaatcagccagccaggcagccagccacccaagccagccaagccagccaaaccagccaagccagccagccacccagccagccaagccagccaagccacccagccagccaagccagccaagcctcccagccagccaagccagccaagccacctagccagccaggcccgccagccagccagccagctagccaagccagccaagccagccaggcagccaagccagccaagccagtcaagcccgccmggcagccaagacaggcatgccagccaagccagccaggcagccaagccagccaagccaggcagcaagcaaagccaggcaggccagccaagccagctaggcagccaagccagcaaaaccagccagccagccaagccaggcatgcca

SEQ ID NO: 929823 - DNA, 823 bp, Homo sapiens
agctggccagccaagccagagaagccacccggccatccaagccagccagccaagccagccaagccagccaagtcagtcagccagccagccagccaagccagccaagcctcccagccagcaaaaccagccaagccacccagccagccaagccagccaagccacctagccagccaggcccgccagccagccagccagcsagccaagccagccaagccagccagcctgccaagccagccggccagccaagctaggcaatccactcagccactcaagccagccaagtcacccgaccgtccaagccagccaagccagtcagccagcccagacagccaagccagccaagccagccaagccagccaagcccgccaaccagccaagacaggcatgctagccaagccagccaggcagccaagccagccaagccagccagcaagcaaagccaggcatgtcagccaagccagccaggcagccaagccagccaagccagccagccagccaagccaggcatgccagccaagccatccagccaactaagccagccggctagccaagccagccaagccagccaaccagccaagccagccagctagccaagctacccagccagccagctagccaagccagccaagccagccaggcagccaagccagccaagccagtcaagcccgccagccagccaagacaggcatgccagccaagccagccaggcagccatgtcagccaagccagccagcaagcaaagccaggcatgccagccaagccagccaggcagccaagccagcaaaactagccagccaaccaagccaggcgtgccagccaagcc

SEQ ID NO: 929824 - DNA, 586 bp, Homo sapiens
cagaaatctcattttccggtggctggggaatacgcatttttttttttttttgagacagagtttcgctcttgtcacccaggctggagtgcaatggaatgatcttggctcactgcaaactccgcctcccgggttcaagcgaytctcctgcctcagcctccccagtagctgggattacaggcatgtgccaccacacctggttcattttgtattttcagtagagactgggtttcatcgtgctggccaggctggtctcgaactcctgacctcaagtgatccacccacctcagcctcccaaagtgctgggattacaggcgtgagccaccgagcctggccaaccctctcctctttcaggggcttaaataaaatttgcttttctccccaaaggcgggtccccaccccattcagcccagtttcaaagggtggagtgtaaacggtgggttgcccaattcctgctgccgtgaagtacttcagcttacagcggaaagccgggcgcagacaccatgctttatttctatttccacgaacaagaagcgtctcttgcagtctgcaatatttgtcgtcaaaaatttcactggctgttgtatca

SEQ ID NO: 929825 - DNA, 581 bp, Homo sapiens
gttgacttgtattagcagcacactggtcataagcgttttgctttcatcaaatatgaggtaagctactttaaagtgtggtggggctttcttccgcatggctcctggaggtgttgagtcccaatttagccaattaattggggtttagttttgatatggataagggagaccggcttcattcatgatgcacacacagttttgccagtaaggaaaaaaaacgcaacctgaatgtttctactcattagatgctatctggagagctcctaccccaatgccacaaaggcccagkcccttaaaaagactcaatgcagcctttgtgtgtctcatactgtattctgcaagatactcctgtgaaagaaatttgtgctgcatcagccatctccctcctgaagatccctgcggatgacgatttgtgttttaaaggttctgagaagtcctgcaaaaacagttctcaaacttatttgtccaggggatcttttcttccactgaacatagttgggtagacacggccttaagccttgagcagagaaagagacaagaaactgttggctcacttacaaccaagtgttgtgtttatgttttag

SEQ ID NO: 929826 - DNA, 581 bp, Homo sapiens
gttgacttgtattagcagcacactggtcataagcgttttgctttcatcaaatatgaggtaagctactttaaagtgtggtggggctttcttccgcatggctcctggaggtgttgagtcccaatttagccaattaattggggtttagttttgatatggataagggagaccggcttcattcatgatgcacacacagttttgccagtaaggaaaaaaaacgcaacctgaatgtttctactcattagatgctatctggagagctcctaccccaatgccacaaaggcccaggcccttaaaaagactcaatgcagcctttgtgygtctcatactgtattctgcaagatactcctgtgaaagaaatttgtgctgcatcagccatctccctcctgaagatccctgcggatgacgatttgtgttttaaaggttctgagaagtcctgcaaaaacagttctcaaacttatttgtccaggggatcttttcttccactgaacatagttgggtagacacggccttaagccttgagcagagaaagagacaagaaactgttggctcacttacaaccaagtgttgtgtttatgttttag

SEQ ID NO: 929827 - DNA, 583 bp, Homo sapiens
ggtggaccatagtgaccttttgggtcttctggaattcatgtcagttcagagccagtgcctcaaaattcctgaaagatctgattcttttcttttccccaatgcagagttaccctaataaaaagctataggtacttttggagaagagtggaagaacatattgatagtatagacttttagcagtgtgccagggttcttcctcaagaaacctggcctcccctatactgtagtgatactgggtctgtaaactggwtcaaggtatcaaattggttgtggggctgtgattctttgtttttattattcaggttagacattgattcacttgacctagaatgtttttgcttcttatcaaatcaggtgaaaacttagtaagtttcttatccatttcactcccaaggacaccatgatcaaccagccaatgccacaggactgcatgactcagactattctgattgctgctttcactcatctgtccattacagtaaccacgtccaccttgcctttggtacttgagtgctgccacttggtccctgccattccaggatccagttactctccttgcatttaggtttaccaattcagggat

SEQ ID NO: 929828 - DNA, 624 bp, Homo sapiens
gtagacaattctgtcttcaacctgactgacgttggaagcagcacttcatgcaggtaatctcaccttcctttagaaagctcatttcctttacttggtttccggcagccacacatttctggtttgtctcctgcctcactggttgctygtcttcagtctcccttatgggtttcttttttctttcttccaagagcatctctgggtttggtccttaggctttttttccctgggctctaaatatcacccatactctgaagggtgctgagttgaatccttagcactggcctctcttttgaactccagacatgtgtacctgcctacctgacatctatgtggatatccaacaggaatctcacacttaacatatcttgttatttccacaccatcttcccactccagtccagattcctgttattcatctcatccctacctctccacctcattttagtcaatatcatcatccactctagcaaaaaacctggaaatcatttatgattcctctttttgcgtcatacctcacattaaatccattatgttggtcctgcatccaacatttatctgcacacttttcactcctttcaccctttacatagttcaagccactatcttctctctcctggactgctg

SEQ ID NO: 929829 - DNA, 438 bp, Homo sapiens
atgaacccactgtcgcactgctttgtccataaagtgagtgccttggtcagaggcaatgctgtgtggaataccatgatggtggataaggcattccatgagcccacagatggtagttttgccagaagcactgcatacaggataggcaaacccatattyggagtaagtatctatcccagtgaggacaaacctctgcccttttcatgatggaagaagttcagtataatcaacctgccaccaggtagctgtctgatcaccccaaggaatggtgccatatcgagggctcagtgttgatctatgctgctggcaaactgggcactcagaagtggctgtagccaggtcagccttggtgagtggaagtccactttactgagcttatgagtaacctccatccctaccaccatggctactttgttcatgggcccatcgggcaatgacagg

SEQ ID NO: 929830 - DNA, 833 bp, Homo sapiens
cttttgggtggtgcctgcatattgtgcagaataatctgtgaatcagaccctagtcttctcttcctctgtcagttggtcatagggaactccccatgaggccattggtgcagactgggggagagaaggcagggtggcaggagtggagaccatgagcatttgagccacttcctcatataacctacttgtgccttcaggacccgcttgagcccaatcacatatataccacttccatttgatgatgaaatgctgctatgcatgacccactttatggctagatgggtcagaaagcacccagttcatgataggcagttcaggtcgcatggtgacttgatgacccatagtcaaatgttcagtttccaccaaagcccagtaacaggccaakagctgtctctcaaaaggagagtagttatctgcagaagatggcagggtcttgctccaaaatcctagaggtctctgctgtgattcacctataggggactgccaaaggctccaaacagcatctctgtctgccactgacaccttaagcaccattggatctgctgggtcatatggcccaagtggcagagcagcttgcacagcagcctggacctgttgcagagccttctgttctggaccccactcaaaactggccacctttcaggtcactcgataaatgggccagagtaacacacccaaatgaggaatgtgttgcctccaaaatccaaataggcctactaggcattgtacctctttcttggtttgaggaggggccaaatgtagcaacttatctttcactttagaaggaatatcttgaaaggtcccacaccactggacccctagaaattttactgagg

SEQ ID NO: 929831 - DNA, 574 bp, Homo sapiens
actctgtcgcccaggctgaagtgcagtggtacaatctcgcctccctacaacctccacttcctggggtcaagcaattctcccgcctcggcctcccgagtagctgggattacaagcacgcatcaccacgcctggctaattttttttgtatttttagtggagacggggtttcgccatgttagccaggctggtctcgaactcctgacctcaagtgatccgcctgcctcggccccccaaagtgctgggattacaggcttgagccaccatgccctggccacccctktaaattttatgcttcagtaatagtgttgattttacctccaaaatacagagctgtttcatgcttctgtgcctttgtggactcttccctctgccagaaatgccttcttactgtgtcttcctggaaatatcttatttgacttttaaaaactggtgcagacatcaccgcttcatctccctccagtgtttttcatttaattggtctgggatgtggcctgagccctgggagttttaagtgctccccaggtgattctaatctgcaccagagtttgccaatcactgcttaaggccagcagtt

SEQ ID NO: 929832 - DNA, 819 bp, Homo sapiens
gaaattgaagtttctttctttgctattttttaattgatatataatagttgtacatattttaggggtacatgtgatattttgatacccatatacaatgtgtaatgatcaaatctgggtaactgggatatccatcacctcaaacaattattttttcttcatactgggaaccttacaattcttctgttttgaaatatacattattgttagctataattttcctactgtactactgaatactaaagcttattccttctaaatttttttatttttttgagacagaatcttgctctgtcacccaggctggagtgcagtggcgcgatcttggctcactgcaacctctacctcccatgttcgagcaattcccctgactcagcctccrgagtagctgggactacaggcacgtaccaccatgcctggctaatttttgtatttttagtagagacggggtttcaccatgttggccaggctggtctcgaactcctgacctcaagtgatctgcctgcctcagcctcccaaagtgctgggattataggcatgagccactgcgcccagccttttttttttttcttctttagagacagggtcttgttttgttgctcaggctggaatgcagtggtgtgatcagagctcactgcagccttaaactcctgggctcaaatgatcttccagcctcagcttctcaagtatctgggactacaggtgcaagccactgcacctggcttattccttctacctaactgtatttttatagcccttaaccaacttcttttcatccttcctattccccttcccttcctagcctttggtaaccatcactct

SEQ ID NO: 929833 - DNA, 625 bp, Homo sapiens
gaccccctcctcaggttcagtaatttcccagaacagttcacaaaactctaaaaagcactttacttacatttaccagtttatttataaagactatcataagctaagtgtggtgaatcacacctgtaatcccaacaatttaggaggctgaagcaggaggattgcttgaggccagaagtctgaggctgtggggagctatgaacataccactgcactccaggctgggtgacagagcaagaccctgtctctaaaagagagaaaaagagagagagaatattgtatgacccagggagtggcggattggtttcagaatgaaatttttccacttcggatcatcaggcattagattatcttaaggagtgggcaacctagatcccttgcatgagcaattcacaatagggttcttgctcctakgagaatctaatgccaccactgatcagacaggaggtgctgctcaagcaatagtgctcacatgcctgctgctcacctcctgctgtgcagcccagtttctaataggccacagactggtatcagtttacagcccagggtttgggaaccactgttatagaggatacaaaagataaacagccagataaagaggtacttagggcagggtatgagggaagga

SEQ ID NO: 929834 - DNA, 764 bp, Homo sapiens
ttctcccatactgttcctgtggtagtaagtctcatgagatctgatggttttataagagttttccccttttgctctcatgagatctgatggttttgtaagaggtttcctcttttgcttggatctcatcattctctctctttcctgccaccacgtaagacatatcttttgccttctgccatgattgtgaggccttcccagccacatggaattgtgagtccattaaacttctttttctttataaattacccagtctcaggtatgtctttatcagcagtgaaaatggactaatacagtcaattggtactgagagtggggtgctgctgtaaggatacccaaaaatgtggaagcgactttggaacgaggtagcaggcagaggttggaacagtttggcgggctcagaagaagacaagaatatgtgggaaagtttagaacttcctagasacttgttgaatggctttgaccaaatgcttctcatctcagatggagatgagaaacttgatgggaactagagtaaagatgactcttgctatgttttagcaaagggactggtggcattttgcctttttcctagagatttgtggaactttgaaaatgagggagatgacaaacggtatctggcagaagaaatttctaagtagcaaagcattcaagatgtgactttggtactgttaaaaacattcagttttaaaagggaaataaagcataaaagttcagaaaatttgcaacctgatgatgcaatagaaaagaaaaacccattttctaag

SEQ ID NO: 929835 - DNA, 718 bp, Homo sapiens
tctctactaaaaatacaaaaattagccgggtatggtggcacaagcttgtaatcccagctactcgggaggctgaggcaggagaatcacttgaacccaggaggtggaggctgcattgagctgagatcgtgccactgcactccaacctgggtgacagagtgagactccgtctcaaaaaaaaaaaaaaaagamagacaaaagattagttatgactaataaatacaagtacgaagtggcccttgggtcaagataagtctgttgtagacttttttttttccccttgagacatggtctcactctgtcacataggctggagtgcagtggcaggatcacaccacaacctatccgggctcaagccatcctcccagctctggctcccaagtagctaggactataggtgagtgccaccacgcctggctaatttttttttgcaatttatagagacagggtttcgccatgttgctcaggctggtctcaaactcttggcctcaatagatcctccagccttggcctcccacagtgctgggattacaggtgtgagccttgtttgcagagtttaggtcccagagaatataaagacactcaaagtatctcaacctcttggaacacctcttgggcatcaagaacaacgctactagaaataagcagtttgcctctagagaaacttcaagtaagcacaacaaagggcaaagtgacacaagataactgtggaatgcaagca

SEQ ID NO: 929836 - DNA, 718 bp, Homo sapiens
tctctactaaaaatacaaaaattagccgggtatggtggcacaagcttgtaatcccagctactcgggaggctgaggcaggagaatcacttgaacccaggaggtggaggctgcattgagctgagatcgtgccactgcactccaacctgggtgacagagtgagactccgtctcaaaaaaaaaaaaaaaagaaagacaaaagattagttatgactaataaatacaagtacgaagtggcccttgggtcaagataagtctgttgtagacttttttttttccccttgagacatggtctcactctgtcacataggctggagtgcagtggcaggatcacaccacaacctatccgggctcaagccatcctcccagctctggctcccaagtagctaggactataggtgagtgccaccacgcctggctaatttttttttgcaatttatagagacagggtttcgccatgttgctcaggctggtctcaaactcttggcctcaatagatcctccagccttggcctcccacagtgctgggattacaggtgtgagccttgtttgcagagtttaggtcccaragaatataaagacactcaaagtatctcaacctcttggaacacctcttgggcatcaagaacaacgctactagaaataagcagtttgcctctagagaaacttcaagtaagcacaacaaagggcaaagtgacacaagataactgtggaatgcaagca

SEQ ID NO: 929837 - DNA, 588 bp, Homo sapiens
tatgaacattggtgtataagtatctgtttgaatagctgttctcgttttttttaggtatgtacttcaaagtggaattgcagattatatggtaattctatgttgaactttttgaggaatcacaaaagttaatttgttattaactttatggatgtgttcaagcaaataaggaagccattaggcccatgcggtgcctcacacctgtaatccaagcactttgggaggccgaggagggatcacttggggttagaagttcaagaccagcctggccaacatggtgaaacacatctctactaaaayttcaaaaattagctgggtgtggtggcccgtgcctgtaatcccagctactcggaggactgaggcaggagaatcgcttgaacccaggttgcatgagccgaggtcgcaccactgcactccagcctgggtgacagagcaagactgagtctcaaaaaaaaaaaaacaagaaggaggccattagcctgaggttgtctctgcacctagagctcttatataagcaaactgaaactgaagtggaagcagttcttgtaattaacttaaaaaaaaacaaaacccaccagcttctgccaatca

SEQ ID NO: 929838 - DNA, 550 bp, Homo sapiens
agaacataaattgtgaagatttcattttaatatggacatttatcagttcccaaataatacttttataatttcttatgcctgtctttaatctcttaatcctgttatcttcgtaaactgaggatgtacgtcgcctcaggaccactgtgataattgtgttaactgtagaaactgattgtaaaacatgtgtgtttgaacaatatgaaatcagtgcaccttgaaaaagaacagaatgacagggatttttatggaacaagggaagacaaccataaggtctgacagcctgcagggtcagacaaaaagagccacatttttcttctttcagagagcctataaacagacgtgcaagtaggaaagatattgytaaattcttttcctagcaaggaatattaatattaataccctgggaaaggaatgcgttcctggggggaggtctgtaaacggcccctctgggaatgtctgtcttgtgcagttgagataaggactgagatatgccctggtctcctgcagaaccctcaggcttactagggttggaaaaactccgccctggtac

SEQ ID NO: 929839 - DNA, 607 bp, Homo sapiens
atttagagtcctctgattttcttacagaaattctgagattatagttgtaaggatatgcagcatgtgagaattgtggtcttgcaaagatgttaacatcctaatgcccagaacctgtgaatatattactttacatggcaaagaggaagtaaggctgcagatggagttamggttgatcatcagctaacgttaaaataagaagattatccttcctagattatcaagtgggcccaatattatcacaagggtgtttgaaagtgcaaaaaaggccaggcgtggtggctcacgcctgtaatcccagcactttgggaggctgaggaaggcagatcacctgaagtcaggagtttgagaccagcctggccaacatggtgaaaccctgtctctactaaaaatacaaaaattagctgtgtgtggtggcacgcagctttaatcccagctactcaggaggctgagacagaatcgcttgaacctgggaagtggagattgcagtgagccgagatcacaccattgcactccagccaaggttacaagagtgaaactccgtctcataaagaaaataaataaaagtgcaagagagagtcagagaaagaaatgaaatgacagaagcaaa

SEQ ID NO: 929840 - DNA, 633 bp, Homo sapiens
agggaaaatcacctcaagtgaaaggaagaaagaaagaaaaaaaaaagaagattacaaaacaaccagaaaacatgtaacgaaatggcaggagaaagtacttacttatcaataataacattaaatgtaaatggactaaactctccaaacaaaagagacagagcacctgaatgaattaaaaaataagactgaatgatctgttgctgataagaaacacacttcctcaatgaagacacatatagactaaaaataaaggaacagaaaaaatattccatgcaaatggaaaccaraaaagcaggaatagctgtacttacattggaaaaaaacagacttcaagacaaaaactagaagaggacacaaagaaggtcactatgtaatgataaaggggtaaattcagcaagatgatatggcaattataaaaatatatgtacccaatactggaaaaccatgatatataaataaatattgctagagctaaagagtagagctactactccaatgcagtaatagacggagactgcaacaaccaattttcattattggacagatcttccagataggaaatcaacaaagaaacttcaggcataatctccactatagaccaaatggacctaataaatatttacagaacatttc

SEQ ID NO: 929841 - DNA, 617 bp, Homo sapiens
agtgaaaggaagaaagaaagaaaaaaaaaagaagattacaaaacaaccagaaaacatgtaacgaaatggcaggagaaagtacttacttatcaataataacattaaatgtaaatggactaaactctccaaacaaaagagacagagcacctgaatgaattaaaaaataagactgaatgatctgttgctgataagaaacacacttcctcaatgaagacacatatagactaaaaataaaggaacagaaaaaatattccatgcaaatggaaaccagaaaagcaggaatagctgtacttacattggaaaaaaacagacttcaagacaaaaactagaagaggacacaaagaaggtcactatgtaatgataaaggggtaarttcagcaagatgatatggcaattataaaaatatatgtacccaatactggaaaaccatgatatataaataaatattgctagagctaaagagtagagctactactccaatgcagtaatagacggagactgcaacaaccaattttcattattggacagatcttccagataggaaatcaacaaagaaacttcaggcataatctccactatagaccaaatggacctaataaatatttacagaacatttc

SEQ ID NO: 929842 - DNA, 560 bp, Homo sapiens
ctgcctcgattgggctcttgtggtttcccattgacgttaatcacagggcatggtaatactaagagatgccctaatggatctcctgtattccatgtatactcttctttaccttcgttgtggaataatacatcatcttgatagtctgggtcaatcactccagccaactcccttcttagcctgttgacttaaaggtaggaggagcccaaagcgcccaggcggcaatcttaacttccagtttaatggaaccattgttgtgcctmctagtggcagtcttcctccctctggaactaagacctctaggccaggagaacataatttcgtgggaataggaagcaaaaattttgctagtggatcactaggggtgatggtgagtggtgccacttccacttttaccctttgattcctggacccatgagtcctggctatgtgagaaacagtactatatatcagatgctgattcagagcaaacacagccatccggagaactttgccccagccctgcaaactactgtcacctagttggtgttgtaattgtgacttcaaaacgccattccacagtt

SEQ ID NO: 929843 - DNA, 560 bp, Homo sapiens
ctgcctcgattgggctcttgtggtttcccattgacgttaatcacagggcatggtaatactaagagatgccctaatggatctcctgtattccatgtatactcttctttaccttcgttgtggaataatacatcatcttgatagtctgggtcaatcactccagccaactcccttcttagcctgttgacttaaaggtaggaggagcccaaagcgcccaggcggcaatcttaacttccagtttaatggaaccattgttgtgcctcctagtggcagtcttcctccctctggaactaagacctctaggccaggagaacataatttcgtgggaataggaagcaaaaattttgctagtggatcactaggggtgatggtgartggtgccacttccacttttaccctttgattcctggacccatgagtcctggctatgtgagaaacagtactatatatcagatgctgattcagagcaaacacagccatccggagaactttgccccagccctgcaaactactgtcacctagttggtgttgtaattgtgacttcaaaacgccattccacagtt

SEQ ID NO: 929844 - DNA, 595 bp, Homo sapiens
tgagcagctgaactctagaggcaccaaaactcaaacctccatagctggtgctataaaccttgcctaggcaaggcttcctctgcctttagcctgattcttgcgcttagcttgcttgggctctggctccaggctacgtctgattttctgggctctggtactcaccctggcccaaccttatgcccccattttcacccataaaacatggtgttttaatgttacattaaaacatataacaaaraaaggagataatgaggagaaaaaggaggagaaaaaaaacaatgaaatcagtaaaaagctggggtggaggaataacctacaattttttacattgtttcattttatacactatcaatcctgggaagctgtctgtgacaacagaatagacatgcatccctagaatgcatatttaagaataagtatatgtatctagaaatataatccatattgctaaaaatcaatgaaaacttcatactgaccttagggggtttaaacggatagtctggtgaaaaggtaatgtcaagaaagaacacccctccttcatagacagatcctgggggtcccaatatagttgacctccattcataaatgttgtctc

SEQ ID NO: 929845 - DNA, 551 bp, Homo sapiens
tctggatcagctgcaccctccaatctctgtgactatggtcacattgtctctttatcttctgtctgtcttctcttctttgtgtcttttataaggatacttgtagttgaacttaagatccattcagatgatccatgatgatctctgtatcttatgattcttaactaattaaatacatatattttttagatggagtctcgctctgtcgcccaggctgaagtgcagtggcacaatcttgactcactgcaacctccacctcccgggttcaagcaattctcctgtctcagcctcccaagtagctgggattacaggtgcatgycacgttgtcaccaggccaatttttgtattttttgtagggaccggtgtttcaccatgttggccaggcgggtctcaaacttttgacctcaggtgatccacccaccttggcctcccaaagtgctgggattacaggcataagccactgctcctggcacctaattatatttgcaaagactcttttcccaagtaaggtaacattcatagggttccaggggatcaagacaaggacatatctt

SEQ ID NO: 929846 - DNA, 586 bp, Homo sapiens
ctgccctgcctgacttgttctgtacctgtgcattcttaagccactcgactttgccaagatcatttaaaaatagcatttttggtgttttcttgcaatagggagggcatttaactttttgtgggggtgcaaaaattcactttttgtgggagtcaaggcaaaaatattctccacccttgggtggttcatttctcttctcagaaacacaaacatccattgtaaccttttccttactcctatagttcaggttgtttctgcttaatcacttaatgtttaatttccagtactgctgcagaaaacgaaaaaatgcaagaaaaataagagataaaaaatcactcccctaagaaaacacccgtcacatttcagtgggttgtcttctggtygttaaaattttattcccctttcttaatacaaagtagacagcatactctttccacaggttctttactgcttctttttgctggacactataacaagcattcctccatgatttctgagatctttttgtagatataggtaaaatgacctttcgtgggttttctcttatttcaaatatgaaacatattatttattaacattagaaaagctc

SEQ ID NO: 929847 - DNA, 604 bp, Homo sapiens
tgcagcagatccccagcatggctgtcccatccctgtttaacacaccagccagatccacatctttctgtttcggattccactctgttaatctgatccttattcttctccgcttcctaccttgatagtttggtgttggttcycctgctgtctgccatacagccattgtcggagggccttgaatgaattttatttcatttcctgtatttgttcctattggccattactactttattctatggtcactaacatttgaatgacattttcacttatgtcatgtcttttaattttctcaaaaatgctataaagtaagcagagcagatattatttttaaccttttttattttttattgtttttgagacagagtctcactctgtcacccaggctggagtgcaatggcgctgtcgtggctcactgcaaactccacctcccaggttcaagcgattcccctgtctcagcctcctgagttgctgggatcacaggcgcacgtcaccacgcccgactagttttctgtattttagtagagatggggtttcaccgtgttgcctaggctggtcttgaactcctgagctcaggcaatccacccacctcggcctcccaaagtgc

SEQ ID NO: 929848 - DNA, 457 bp, Homo sapiens
cagctacttgggaggatcaggcaggaggatttcttgagcctgggaggttgaggctgcagtgagccgagattgctccactgcacttcagcccgggcaatagagtgagatcctatctcaaagaaaaaaagagttattgtgttatatcttttttaatccattttcttttaaccctttatatccttatatttaaactagagtttctgtcaagtgcacgtagttagatctttttaaaaaattcattctgtttattaaytgggtaatttagaccattaacatttaatgttgttattgtcatggttggatttaaatctaccatcttgcatttgttttctatttgtcccatttgttttttgcttattacttgcctcttaaaaattaatttaatttttttataattacattttatttcttctttgaggtataagctagaactacttgtttgttgtcatagcattgc

SEQ ID NO: 929849 - DNA, 457 bp, Homo sapiens
cagctacttgggaggatcaggcaggaggatttcttgagcctgggaggttgaggctgcagtgagccgagattgctccactgcacttcagcccgggcaatagagtgagatcctatctcaaagaaaaaaagagttattgtgttatatcttttttaatccattttcttttaaccctttatatccttatatttaaactagagtttctgtcaagtgcacgtagttagatctttttaaaaaattcattctgtttattaattgggtaatttagaccattaacatttaatgttgttattgtcatggttggatttaaatctaccatsttgcatttgttttctatttgtcccatttgttttttgcttattacttgcctcttaaaaattaatttaatttttttataattacattttatttcttctttgaggtataagctagaactacttgtttgttgtcatagcattgc

SEQ ID NO: 929850 - DNA, 626 bp, Homo sapiens
gcctcggcctcccaaagtgctgggatgacaggtgtgaaccaccatacctggcccatcgggtaaattttctatcttccatattatcataggcaacagttttgctattgttgcactactatataatacagattgccatttttcctgagtgctatagcagtttcttaccacttttcttgctcctaacaatttatyctctattttctcaattttggctaacagttttcctgtcacttgtccagcctctatccatcaccttgtcccaaagctaatgctacatatttcaggttgctgtaacagcagcacttcagtcctagtaccattttctttatcagttagcttttgcaccataataaactatccaaagctttgtgaattataataatatctattatttctcacagttttgtgggttgactgtgtatttcttccatcaaaaaagatagctagattgtctaggatggttccacacatgtctggtgattgttctatgtctggtgaagtgatagccatgtatctatcatcattagtagggctagttcaggctcatccatatggtacaaactcatagtgcacaaagtcatcgtggtacaaagtcacatatgcaaatttgtgggccacctttcaca

SEQ ID NO: 929851 - DNA, 569 bp, Homo sapiens
tgtctctaagtctgtgaaactggttcccttggaacctgctcttatcacttctacccatatgcaaatgaccaccaaccctacgttgagatcagggcagtttttatttttattttttttaattttgttattattatactttaagttttagggtacatgtgcacawcgtgcaggtttgttacatatttatacatgtgccatgttagtgtgctgcacccattaactcgtcatttagcattaggtatatctcctaatgctatccctccctgctccccccacaccacaacaggccccagtgtgtggtgttccctgccctgtgtccatgtgttctcattgttcaattcccacctatgagtgagaacatgcggtgtttggttttatgcccttgcgatagtttgctgagaatgatggtttccagcttcatccatgtccctacaaaggacatgaactcatcattttttatggctgcatagtattccatggtgtatatgtgccacattttcttaatccagtctatcattgatggacatttgggttggttccaagtctttgctattgcgaatagtgccgct

SEQ ID NO: 929852 - DNA, 793 bp, Homo sapiens
tgccctattacccccacccaacctgcctatcagaatctgaattactcttaaggattttcccatctaaggccccagctccacccaccagctccctgcccccattggtctgatctcctctgtcctcccagccagatccttagagcatggttgggtctttaagatggatcttgcttcattctgccttgaattctgtcaacttttattactgggtttcaactttttgaagacaggatttgtaccctgcgtgttcgtggagtgaataaagttccatttaaaaataatgagtctcggccgggcgcggtggctcacgcctgtaatcccagcactctgggaggtgaggcgggcggatcacaaggtcaggagattgagaccatcctggctaacacggtgaaaccccgtctctactaaaaatacaaaaaaaatttagccgggcgtkgtggcgggcgcatgtagtcccggctactcgggaggctgaggcaggagaatggcgtgaacccgggaggcggagcttgcagtgagccgagatggcgccactgcactccagcctgggcgacagagcgagactccgtctcaaaaaaaaaaaaaaaaataataatgaatctcttctagacatcctgaagtacaaagagccttgaaacagctacctgctaagaagcacctcagaggcttttaaaaattcatttggtaaaataaaatattctccttttttccccttcccctttggaagggtcaaaaatctccttgtaattcccttttcactgaattggccaaatttggatcacatagtggtatg

SEQ ID NO: 929853 - DNA, 793 bp, Homo sapiens
tgccctattacccccacccaacctgcctatcagaatctgaattactcttaaggattttcccatctaaggccccagctccacccaccagctccctgcccccattggtctgatctcctctgtcctcccagccagatccttagagcatggttgggtctttaagatggatcttgcttcattctgccttgaattctgtcaacttttattactgggtttcaactttttgaagacaggatttgtaccctgcgtgttcgtggagtgaataaagttccatttaaaaataatgagtctcggccgggcgcggtggctcacgcctgtaatcccagcactctgggaggtgaggcgggcggatcacaaggtcaggagattgagaccatcctggctaacacggtgaaaccccgtctctactaaaaatacaaaaaaaatttagccgggcgtggtggcgggcgcmtgtagtcccggctactcgggaggctgaggcaggagaatggcgtgaacccgggaggcggagcttgcagtgagccgagatggcgccactgcactccagcctgggcgacagagcgagactccgtctcaaaaaaaaaaaaaaaaataataatgaatctcttctagacatcctgaagtacaaagagccttgaaacagctacctgctaagaagcacctcagaggcttttaaaaattcatttggtaaaataaaatattctccttttttccccttcccctttggaagggtcaaaaatctccttgtaattcccttttcactgaattggccaaatttggatcacatagtggtatg

SEQ ID NO: 929854 - DNA, 793 bp, Homo sapiens
tgccctattacccccacccaacctgcctatcagaatctgaattactcttaaggattttcccatctaaggccccagctccacccaccagctccctgcccccattggtctgatctcctctgtcctcccagccagatccttagagcatggttgggtctttaagatggatcttgcttcattctgccttgaattctgtcaacttttattactgggtttcaactttttgaagacaggatttgtaccctgcgtgttcgtggagtgaataaagttccatttaaaaataatgagtctcggccgggcgcggtggctcacgcctgtaatcccagcactctgggaggtgaggcgggcggatcacaaggtcaggagattgagaccatcctggctaacacggtgaaaccccgtctctactaaaaatacaaaaaaaatttagccgggcgtggtggcgggcgcatrtagtcccggctactcgggaggctgaggcaggagaatggcgtgaacccgggaggcggagcttgcagtgagccgagatggcgccactgcactccagcctgggcgacagagcgagactccgtctcaaaaaaaaaaaaaaaaataataatgaatctcttctagacatcctgaagtacaaagagccttgaaacagctacctgctaagaagcacctcagaggcttttaaaaattcatttggtaaaataaaatattctccttttttccccttcccctttggaagggtcaaaaatctccttgtaattcccttttcactgaattggccaaatttggatcacatagtggtatg

SEQ ID NO: 929855 - DNA, 793 bp, Homo sapiens
tgccctattacccccacccaacctgcctatcagaatctgaattactcttaaggattttcccatctaaggccccagctccacccaccagctccctgcccccattggtctgatctcctctgtcctcccagccagatccttagagcatggttgggtctttaagatggatcttgcttcattctgccttgaattctgtcaacttttattactgggtttcaactttttgaagacaggatttgtaccctgcgtgttcgtggagtgaataaagttccatttaaaaataatgagtctcggccgggcgcggtggctcacgcctgtaatcccagcactctgggaggtgaggcgggcggatcacaaggtcaggagattgagaccatcctggctaacacggtgaaaccccgtctctactaaaaatacaaaaaaaatttagccgggcgtggtggcgggcgcatgtagtcccrgctactcgggaggctgaggcaggagaatggcgtgaacccgggaggcggagcttgcagtgagccgagatggcgccactgcactccagcctgggcgacagagcgagactccgtctcaaaaaaaaaaaaaaaaataataatgaatctcttctagacatcctgaagtacaaagagccttgaaacagctacctgctaagaagcacctcagaggcttttaaaaattcatttggtaaaataaaatattctccttttttccccttcccctttggaagggtcaaaaatctccttgtaattcccttttcactgaattggccaaatttggatcacatagtggtatg

SEQ ID NO: 929856 - DNA, 532 bp, Homo sapiens
cttgtctggggagcaggtcagcagcgtctctgagtctgcaaaagaggaggctgttggagaatacagggcagggtttgcttctgaggactctgcctgggactacaggtgcatgccactaaacatggctaatttttctatttttttgtagagtcggtgcttcaccatgttgcccagcctgttgtcaaaatcatgggctcaagccacccacctgacttggcctcccaacgtgctggcagtacagtgtgagccactgyggcaggtcagcacccctgtttatgttcctgtcacctgccacagccttgactctcataaccaacaggaaaatgaggaggttctagggccctgtgagtaaaaaactgggatgatagggaaaggagaatggaatctcatctgaatcctccttccttgcctacatttgtttaaatttattgagcaaaagggccagactactgatcatttctggcaaaacatgttgagtacattttagggtttaacagttttgggtacctttcaaagaaaatatttggttata

SEQ ID NO: 929857 - DNA, 451 bp, Homo sapiens
aattctatatatcagtatcctgtcagatttatagtttgcaaatattttctcccattctgaaggtgatctgttcactctgttatatcttcttctggcagaagctttttagtttaattaagtcgcatttgtgtatttctgtttctgttgcctctgcttttgaggtcttggtcatgaagtcttcgcctagaccaatatccagaagaatttcccctaggttttctgccagtatttttctaatttcaggtcttacatgtaagyctttaatttatagtgaattaatttttgtaataggtaataaataggggtctggttttttaatggtaaatttttgtaatggtaataaatagggctctggttttattcttccatatatggcaaactaattttcccctcaccatttattataaagagtatcctttccccagtgtatgtttttgtcaattttgtcaaa

SEQ ID NO: 929858 - DNA, 647 bp, Homo sapiens
agcacaatggctagcgggcctatttggattctggaggcaatgcattcctcatttaggtatgttattctggcccatttatcaaatgacctgaaaggctgccagttttgagtgggatccagaacaggagaaggctctgtaacaggtccaggctgctgtgtgagctgctctgccacttgggccatatgacccagtagatccaatggtgcttgakgtgtcagtggcagatagggatgcagtttggagcctttggaaggcccccataggtgaatcacagcagaggcctctaggattttggaccaaggccctgctgtcttgtgcagataactactctccttttgtgagacagcacttggcctattattgggctttggtggaaactgaacgtttgactagaggtcatcaagtcaccatgcgacctgaactgcctatcatgaactggatgctttctgacccatctagccataaaatgggtcatggacagcagcattccatcatcaaatgaaagtggtagatacgtgtttggactcaaacaggtcccgaaggcacaagtaagttacatgaggaagtggctcaaatgcccctggtctccactcctgcaatcctgcctcctatcctccagcctgcactgatggcctcatggggagttc

SEQ ID NO: 929859 - DNA, 556 bp, Homo sapiens
ccatcgcatattgataggaccgtgatggagacctcgagctgcaaaaccagcgagtttttattagggattttgaaaagggaggggatgtatgaacagggagtaggtcacagagatcacatacttcaaagggcaataaaagatcacaaggcaaaggcagagcaagatcacaaggcaagggcaaaattagaattactgatgagggtccatgtcctgctgggcatgcactgtcttgataaacatcttaacaggaaacagggtttgagagcagacaactggtctgactagaattcaccrggctggaatttcccaatcctagtaggcctgagggcactgcaggagaccagggcgtatttcatcccttatctcaaccgtataagacagacactcccagagcggccattcatagacctccccacaggaatgcattccttccccatggttattccttgctgggaaaagaattcagtgatatttctcctacttgctttctgcaagaaggaaaatatggctctattctgtccaaccccacaggcagtcagaccttatggttatcttt

SEQ ID NO: 929860 - DNA, 592 bp, Homo sapiens
tagtagagaggaggtttcaccatgttgcccaagctggtctccaactcctgggctcaagcgatccatgtgccttggcctcccaaggcctcccaagtgctgggattacaggtatgggccaccatgcccagccacccatctccctcctcttgccaccagatgccctgaggcaacttaagtcttcatgactttctcaccaattacaaaaaggctttattatattttgccaaatgttaatcgctttcattatgtctccaaacattatttcaccactcatttttataacaagtgcagtgaagatatgcttatcgaatattgtacaatactgttgtgttctgtaacmctctttcgggaacagcttagatgtaggtaacaagagatgcctgcgtatgaaagtgcttcataaactgtactgtataaatgtaaactactaccattttcaggtaaaatcagagaataaatgtctcttgttggaagtgtcctctcaggactcatctagtccaatctccccagtgagtggatgagggaaaagactgacgccagaggcaggaggctctggattggagagttagaggccaacgcaagtatagaatct

SEQ ID NO: 929861 - DNA, 588 bp, Homo sapiens
ctttgaaaccaataagaacaaagacccaatgtgccagaatctctgggacatagctaaagcagtgtttagagggaaatttatagcactaactgcccacaggagaaagggggaaggatccaaaacgacaccctaacatcacaattaagagaactagagaagcaagagcaaacacattcaaaagctagcagaagacaagaaataactaagatctgggcagaactgaaggagatagagacagaaaaaaaccctccaaaaaatcaatcaatccaggagctggttttttttaaaagattaacaaagtagacctctagccaaactaatatagaagaaaaaakaatcaaatagacaccataagaagtgataaaagggttatcatcgctgatcccacagaaatataaactaccatcagagaagatgataaacacctctacacaaataaactagaaaatctagaaattcctggacacatacatcctcccaagactaaaccaggaagaagccgaatccctgaatagaccaataacaagttctgaaattgaggcagtaattaatagcctacaaaccaaaaaaaagcccaggaccggatgg

SEQ ID NO: 929862 - DNA, 576 bp, Homo sapiens
ttctcctgtatgtattcaatttctcatccccactgttaagttaactcttccctggcacagatgccctcatctctctgctagggttctgataattctttatcccaggtatgtagatgaaaatggaaattaagtgatttgtccatggtcacrtgataggctattaaaggaattacagtccctgtcctttggcctgttttttgtttgtttgtttgtttttgagatggagtctcactctgtcgcccaggctggagtgcagtggtgcgatctcgggtcaccgcaacctccacctcccgggttcaagtgattctcctgcctcagcctcccaagttgctgggattataggcgagcaccaccacgcccggccaatttttgtatttttagtagagatgaggtttcaccatgttggccgggctgttcttgagctcctgacttcaggtgatccacccacctcggccttccaaagtgctgggattacaggcgtgagccactgcatccagcttctttggcatgtgttaatgataacttaatataattggtgatcaaaacatgaactttaaagttgcttaggtctaggtt

SEQ ID NO: 929863 - DNA, 572 bp, Homo sapiens
atgaagccacaggtgcaggctgggagagagaaggcaacatagcagggttaggaaccgtgggcatttgggtcacttcttcatgtaacttacttgtgccttcggaacctgctcgggcctgatcacagatacaccacttccatttgatgatggagtcttgctttgtccacccaactttatggtgtggtgggtcagataacacccagctyatgacaggcagctcaagttgcatgataatgtcatggcccatgtcaagcgttcagtctctgctgaggcccgctagtaggccaagagctgtttctcagaaggggagtagttatctgcaaatgacagcaggctcttgccatgaaatcttatactctccactgtgattcacctataggggcctgccaaagcctccaagcagcatcgctacctgccactgacactttaagcgccactggatctgctgggtcatgtggcgcaaggggcagagcagcttgcacagcagcctggacctattgcagaaccttatcttattctgggcttcactcaaaactagcagctttgggagttactcagtaaaggggagaaac

SEQ ID NO: 929864 - DNA, 691 bp, Homo sapiens
cctggagcttctggagccatgtttgcctctcatggggggagcctgcatgagcgttaagtcgacactgagggaagaagatataaggcattaagaaagagtgattatggccaggcgcggtggctcacgcctgtaatcccagcactttggaaggctgaggctgggagttcacgaggtcaggagttcaagaccagcctaaccaatatggtgaaaccccgtctctactaaaaatacacaagaattagctgggcatggtggcacacgcctgttgtcccagtagggaggctgaagcaggataatcgcttgaacccaggagacagaggttgcagtgagctgagattacaccactgcactccagcatgggygacacagttagactccgtctcaaaaaaaaaaaaaaaaaaaaaaaaaaaaagaagaaagagtaattgagagggaagaagagagaccacctggatcaagccatacctgaatacctacctcaggtcttttcagttacatgagctaacacactgcctttcttgcttaggccatttggagttagctttctaattcagcactttgaaccaaaaagtcctaatacagttccctcccttaaaagttcttcctgtctgatctcaaagctcttcccatctgcagaccttgacttggactgggcattcctctgtctagtgtacttgtcacctctgcttgg

SEQ ID NO: 929865 - DNA, 585 bp, Homo sapiens
taaactgacaaacctttagctagattgactatgaaaagatactaattgctaaattcagaaatgaaagtgggcacattactactgatcttactacttatgaatacataagaaggattcaaagagagtactattaacaactgtatggcactaaattggataacctacacaaaacagaccacttccyagaaacccaaaatatgccaaaatctaatgatgaagaaatagaagacctaaaagacatacaattaagtagatcagtaatcaaaatctctcgttgaagaaaagccttggacttgatggattcactggtgaattctaccaagcatttaaagaagatgtaatagcactttgggaggctgagggggggcggattgcttgagcccaggagttcaaaagcagcctgggctacgtggtaagaccccctccctacaaaaaattacaaaaattatccgagttggtggcacactcctgtagtcccaagctacttgggaggctgaagtgggaggatcctttgaacccgggaggcagagattgcagtgagctgagatcgcgccactgcactctagcttggcaacagagcaagag

SEQ ID NO: 929866 - DNA, 565 bp, Homo sapiens
cagtgtctttgcagctaaggatcttgagatgaaatcattccagatataaggtagatcctaaatccaatggctggtgtccttataagaagaagagaagatacagagagcagcacagagaggagaagcccatgtgaagatggaggcagagattgcagctaggcaactacaagctagggaatggcaaggattgcttgtaaccactagaggctggaagaggcaaggattggatgggccctacagccttcggagggaacatagcccggccaacacaccttgattttagacttctggcttctaaaaccgtgagaataaatccccccacaccttttttttccttctcttttctctyttttttttttttgtgagacagcatcttgctctgacacccaggctggagtgcgatggggtgatcacagctcattgcagccttaaattcctggactcaggcgatcctcccacctcggcctcccaagtaggtgggactactagtgagcatcaccatgcccagctaatttttaaaaaatttcatagagatggagtctcactgtgttccccaggctggtct

SEQ ID NO: 929867 - DNA, 625 bp, Homo sapiens; identical to SEQ ID NO: 922354

SEQ ID NO: 929868 - DNA, 597 bp, Homo sapiens
cagtctgatccatagattgcacagtgatctgagttacctgctcagccctgccggggggcagggcagttcagggagcaagatgggcagggccagattgagcaggcccgcatagaggtcccctaatgccagacacaagccccagcaccaaggcagaatctagcaggtggccatcaagcacctggtagtgtgcctagccacagagttgaggaatctcttggcctcaagttctctgcatggggaatggaggcaacctagactcctaactcaggggagggagtgctccagatgcctggagatctgtctgtgtgtggagtgtagagggccctgatgcaccacaatctccacacatggagggtgaggttrttcagtctgcaaatccatgcaaatgtgtgctttgaattatttttatacaggtaaatacacctgaacttggggcagggaaggcggcactttaccacagtatgcaaaggaaggatgggccagctcaggctgctgattcaagcaagtggtcacactaaatgcctagagatctgcctggacatggagcagagaggatgctgcttcattataatgtctgtgcgggaaggatgggttagc

SEQ ID NO: 929869 - DNA, 608 bp, Homo sapiens
actccatgctgctctaatccttcaacaggtccatcacacatttttcctatgttgtctacaggcactttttctgcagtgttaataaagtcatttttatcattgctattattacgatcatctagattcaaaagcatattggctatgtcaccatcagtgaatgaatgaacaactgaagtctcattatcaatgttaaacaagttcttcaatattcacttcttccagcttactgatggactctgaaggtgtattttgtgcttttgtaaggaggttagacatcagtttttttcgtcacgtgatgtatggaattcttcaaagttactacctcgttcatcatcactgaacatagtcacaaggcagaggttgtgccagacrtgcacaactgtgtcctcagtcactgtgttccaagcactggcaatggtatatgtggcatccttcatgctaaagtccttttgaaaaccttccagacccatgtctctgttcactgctgctagcgtggtattcaagaaaatacttttatgtttacttttcattgatctaaggagatcctggtcacatgacttaatagtcacgtttgaggaaaagtatatgacataaacatttgttttaat

SEQ ID NO: 929870 - DNA, 691 bp, Homo sapiens
gggggagcagaaagtatatgcatcaggtatgaggaagaaaatagattttggaagttatgagaaatgtagggagtgagttgagaatagtttgtgatttttagggcctctaaaagtattaaagcagaggcagccactgcacgcagacatgagggctaggctaaaacagtaaggtcaagttgtttgcacagaaaggctacagggtgcagtcctggcttttgtgtaagaattctgaccacactaaccatgcctaggaaggaaagaagttgttgttttgtaagggattgaggtttgggagattagtcggacccgatcagcagggaaagcacgtgtgtttttatgagaattatgcccagataggtaacagatgaggatgaaatttgagcttgactgaagtaatgggggctgtctgtgaagccttgcggcagtacggcccaggttatttgctgagcctaatgggtgtcagggtcagtctaagtgaaagtgaagagaggctgggatgaagggtgcaaaggaatagtaaagaaagcaygtttgagatccagaacggaatagtgggttgtagagggaggtattgatgataggacagtatatgggtttggcaccatggggtggataggcaaaacaatttggatgataaggcacagatcctgaactaacctgtaagacttgtctggttctaggacaggtaaaa

SEQ ID NO: 929871 - DNA, 606 bp, Homo sapiens
aacttaaggatgcatttgtttgctgggtaactaaaaaggcaaaaagagagcattaaaatattgtgaaggctgcaactataggaaatggctatgacccgtagagctgaggaaacaacaacaaaaaaaagaggttggaaattttaaaaattagtagcttggagcagaggtctgaaattggagctgcaacttagacttctcaggggacaacatcattcagcttgtgctggttctctgagctcagagaggatgagcccatggggttgtgacccagatccctgaggatggaacactgactaatgctgatatctctgagagakgcacaataaggctgagtctgcaagaattaaaaagaatgtgagctagattcctgagctgccataggaatgaacttatttgccactgctgggtggagaagcaaggctggggcaatgctgataaagagcgtgttaggagcagggagcagacatgaatcctgctggaaggcaacaaggagcagaaaagaaggagaatgtcctttcttctcttccagccttgagtcttcctctagaacccccaatagtcatggcctaatagggagccagatggaaaggcagaaaagtagttttc

SEQ ID NO: 929872 - DNA, 563 bp, Homo sapiens
agcgatttcatctactcaggagccctgggctggcctgcagagcttcagtactatctcagtggtgatcacggtcacacaagtcacctcattcaacagaagaaaacagtctgcccagcaaaaccatgcctgcatgacaaacagccaggcctcccatcaatgggaatcatgttcacgacggaatcctgcttgcatgactggctgaacatggatcaaaacaaactggcttccaggacactggcaggttccaggatgcaaaacgacattcactaygagtggggcatataaaagtaggtcagagaaaaagaacaaaatttatactatgttgccatcaaataaattctaaaatatcaccaatggaaaaaaatcctccttaaagaaatgtcaccccaaactgcccctaagcatctgtttttaatctcttcatgtgactcctcatccctgggtcttcctagtgaccaaaacacaggcccccaattttgttttctctcttaagcttttagttttccgtgtcacttttctaagttgtgggatgtgcttcccatggaccctcttgacggctggca

SEQ ID NO: 929873 - DNA, 774 bp, Homo sapiens
taggcaggaggatgggtaaaccagcccttgaggcccaaagtagcagggtgttagttgcaccagaaagagggaagcaggggacgtttgaagcctggagaagggagtctgatccagcctaaggggcatggaagacttcctggaggaggagatkccctaactgagtcctgatagccttgaatgtcctcttccctactctaaacccggccaagggcagcctctgctccaggaaatatggccaactcagaatgtgaccttcccatccctccagagcccattgtccctgaatctgcttgatggatgaaccaccggaggcccagagagagagggcacttgtcccaaggtcacacagcatgacagggataaatgggacttggtatctaagcagccccattccctctcctcagctctgccttccccaaacctcctagaagttcagagcccaggaggagggctaatgagtgagctttattgagtgtgaaattggtaggaagtgggtggtgtgttggcgcccaaaaataaatcctcctggagaaggacgggactaaggcaacatctgggctggggtgaaggcacatctggaaagggagggtggtggaaactggcaggtcggtttctgtagggctgccccgagagcctctgtggccactgaggctgccgtagggtgggaggaggaagtgactggctctgtttcacaggcagggtgccctggcggctgtgccagcctagatgctctgcaacagattaattgtctccccaaagctgggggctgggatg

SEQ ID NO: 929874 - DNA, 722 bp, Homo sapiens
aggcgcctgtaatctcagctactcgggaggctgaggcaggagaattgcttgaacctgagaggcggaggttgcagtgagtcgagattgtaccactgcattccagccctgggcgacagagcaagactccatctaaaaaaaaaaaaaaaaaaagtctcagggctgtctctgcactgctccaggttcctgaggacggcggttggggctgggggagtcttctgtccctggggtaggctgagaagcaagagctccttttcccaactctgcccaaagctggaaaggttgttagagctgctaagaaagctggcatctgcctctccttttgctcatcttcctttctggtttccatgggaatctgtggctcaggatgatcaggggttgacaggatggcgctgtggaaggagtctgtgtcaggcacagccatcccacktgggaaggagccggctggtaagaaagtgagttccctgtccctgggagtgtgcaagcagggtaggggctgaatggctagagtgactccagaaaggggttcagatggggcagaggaagcagtctggaggccacttccctgagacaatcatgttttgtgtgattggctctgggggccccaccagccccaccttccagacgtccctgggcctcacaaagggggttgctgcaccctaggcactgcctctgatccagccccaactcctgtgctctgtgcctggcctatgctgaacacggac

SEQ ID NO: 929875 - DNA, 617 bp, Homo sapiens
ccctgctggggacccttggaaaggagggcagctatgtctctttccggatttcagtgcatgatttctgaaaaaggctcaaatacttaaatgattgggctgatctttactagatattaattcagatcacatcacctctctgtttaaaaccctccaatgggctgggtgtggtggctcatgcctgtaatctcagctctttaggaggccgaggcgggcagatcacttgaggtcaggagtttcagaccagcctgatcaacatgctgaaaccccatctctactaaaaatacaaaaattagccaggcstggtggcgggcgcctgtaatcccagctactcaggaggctgaggcatgagaatctcctgaacctgggaggtggaggttgcagtgagccgagatcacaccactgcactccagcctgggcaataggttgagactcagtctcagaaaaaataaaacaaaaccttccaatggctgcccgtttcactcagggtgagggtcaaagtcatttcaatgctcacaaggtccccatcgtgtctctgactgcatcgcctcccagtctccctctcggatattcctggccaccttactgctcattgtacccaccaggtgtgttccttcctg

SEQ ID NO: 929876 - DNA, 577 bp, Homo sapiens
ctaaaaatacaaaaattagctgggtgtggtggcgcatgcctgtagtcccagctactcgggagactgaggcaggagaacagcttgaacccaaaaggtggaggttgcagtgagctgagattgtaccactgcactccagcctgtgtgacagagcaagactctgtctcaaaaaaaaaaaaaaaaaaaaaaaaaagttgggggggaaatttggagacagatctatacacatggagactgccatgtgaacataaagacagttctctacaagccaaggggagaggcctggagcaagtccttccttcacggccctcagaaggaaccaatgctgcggacrccttgatcatggatttccagcctgcagaactgtaagccaataagtcggtgttgtttaggccacctcatcagtggcactttgttgcggcagctccagcacatatatatgtctctttggcagcaggttctgaggcagagatgagtatgtagggcttattagggagtgctcttgggataaactcccatggaagaaaagggaagggggcagattgggacaagggataatttgagctgtgatgtagtccca

SEQ ID NO: 929877 - DNA, 575 bp, Homo sapiens
cattctacatgcataggtgtaaaatcctttgaatgtgaggacttctttgatatctgtggtggcatgacagatatcacaaaaattatgcatggacctttttttaaaaaaaaaacaactcatcagctatcgttagtgttagtgtattttatgtgtggctcaagacaattcttcttcttccaatgtggcccagggtagtcaaaaggttggacacccatgctacagcctcgaatttccaggctcaagagatccttccacctcagcctcctgagtagctggaactacaggtgcataccaccactcctgacttcactgtaatgtttaaaatcagatcaytgaaggtttaatttacatacatcacaataaccaaatttgtaaaggtacaattcaatgaatattgacaaaggtagatggggtattaataccaccacaatcagcacacagtattcccatcatgtcagtcgtcaaccaccctccccagtctttaaaaacaatgattctattgctatcccttcaatttcaccttttccaaaatatcgtataaatgaaatcccacagtatgtaactttctttcacct

SEQ ID NO: 929878 - DNA, 575 bp, Homo sapiens
cattctacatgcataggtgtaaaatcctttgaatgtgaggacttctttgatatctgtggtggcatgacagatatcacaaaaattatgcatggacctttttttaaaaaaaaaacaactcatcagctatcgttagtgttagtgtattttatgtgtggctcaagacaattcttcttcttccaatgtggcccagggtagtcaaaaggttggacacccatgctacagcctcgaatttccaggctcaagagatccttccacctcagcctcctgagtagctggaactacaggtgcataccaccactcctgacttcactgtaatgtttaaaatcagatcattgaaggtttaatttacatacatcacaataaccaaatttgtaaaggtacaattcaatgaatattgacaaaggtagayggggtattaataccaccacaatcagcacacagtattcccatcatgtcagtcgtcaaccaccctccccagtctttaaaaacaatgattctattgctatcccttcaatttcaccttttccaaaatatcgtataaatgaaatcccacagtatgtaactttctttcacct

SEQ ID NO: 929879 - DNA, 549 bp, Homo sapiens
acaacctagtgttgcttggtttactttgtatgcctttttctatttgcataaaccctgatctgattacaaacttgtatttacaccattcccttgactccttccaactcaaagtatttattgtccagttaaaacatttatggtcatataagctggcttatctttttttctttgatttttttttgagtcagagtctcaccctgtcgcccaagctgragtgcagtggcccgatctcggctcactgcaagctccgcctcccgggttcacgccattctcctgcctcagcctgcaagtagctgggactgcaggcgcccgccaccatgcccagctaatttttttgtatttttagtaaagacagggtttcaccatgttagctaggatggtctcgatctcctgacctcatgatccacccgcctcggcctcccaaactgctgggattacaggcgggaggcactgcgtccggcctctttttttcttttttttatttggaatagcctctcactctgttgctctagctggagtgcagtggtgcaatcagggctcactatgcct

SEQ ID NO: 929880 - DNA, 820 bp, Homo sapiens
agcaatagtagtgttaagaggaaagtttatagtgctaactgcctacatcgagaagttagaaagattgcaaattaacagtcaaacatcacacctataaaaactagaaaaaaacactatttctatcaaactatcaacatcatctttcacagaattagaaaaaaaaagtattctaaaattcatatggaacaaaaaagagctcaaacaagcaaggtgatcctatggaaaaaaaaaaaaaaaaaagctggagacatcatattacctgacttcaaactgttctacagggctgcaataacggaaacagcataatgctggtacaaaaacagacaggtagtgttgcaggaagtcagggatcccgaatggagggactggctggagccacagcagaggaacataaattttgaagatttcattttaatgtggacatttatcagttcccaaataatacttttataatttcttatgcctgtctttacttcactctcttawtcctgttatcttcgtaaggtgaagacgttatgtcacctcaggaccactgagagacttgtgttaactgtataactgattgtaaaatgtgtctttgaacactatgaaatcagtgcaccttgaaaaagaacagaataacagagatttttatggaacaagggaagacaaccataaggtctgactgcctgcggggtcgggcaaaaagtgtggggtcgggcaaaaagagccatattttttcttcttgcagagagcctataaacagacgtgcaagtagaagagatgttgctaaattcttttcctagcaaggaatattaatattaataccctgggaaaggaa

SEQ ID NO: 929881 - DNA, 820 bp, Homo sapiens
agcaatagtagtgttaagaggaaagtttatagtgctaactgcctacatcgagaagttagaaagattgcaaattaacagtcaaacatcacacctataaaaactagaaaaaaacactatttctatcaaactatcaacatcatctttcacagaattagaaaaaaaaagtattctaaaattcatatggaacaaaaaagagctcaaacaagcaaggtgatcctatggaaaaaaaaaaaaaaaaaagctggagacatcatattacctgacttcaaactgttctacagggctgcaataacggaaacagcataatgctggtacaaaaacagacaggtagtgttgcaggaagtcagggatcccgaatggagggactggctggagccacagcagaggaacataaattttgaagatttcattttaatgtggacatttatcagttcccaaataatacttttataatttcttatgcctgtctttacttcactctcttaatcctgttatcttcgtaaggtgaagacgttatgtcacctcaggaccactgagakacttgtgttaactgtataactgattgtaaaatgtgtctttgaacactatgaaatcagtgcaccttgaaaaagaacagaataacagagatttttatggaacaagggaagacaaccataaggtctgactgcctgcggggtcgggcaaaaagtgtggggtcgggcaaaaagagccatattttttcttcttgcagagagcctataaacagacgtgcaagtagaagagatgttgctaaattcttttcctagcaaggaatattaatattaataccctgggaaaggaa

SEQ ID NO: 929882 - DNA, 820 bp, Homo sapiens
agcaatagtagtgttaagaggaaagtttatagtgctaactgcctacatcgagaagttagaaagattgcaaattaacagtcaaacatcacacctataaaaactagaaaaaaacactatttctatcaaactatcaacatcatctttcacagaattagaaaaaaaaagtattctaaaattcatatggaacaaaaaagagctcaaacaagcaaggtgatcctatggaaaaaaaaaaaaaaaaaagctggagacatcatattacctgacttcaaactgttctacagggctgcaataacggaaacagcataatgctggtacaaaaacagacaggtagtgttgcaggaagtcagggatcccgaatggagggactggctggagccacagcagaggaacataaattttgaagatttcattttaatgtggacatttatcagttcccaaataatacttttataatttcttatgcctgtctttacttcactctcttaatcctgttatcttcgtaaggtgaagacgttatgtcacctcaggaccactgagagacttgtgttaactgtataactgattgtaaaatgtgtctttgaacactatgaaatcagtgcaccttgaaaaagaacagaataacagagatttttatggaacragggaagacaaccataaggtctgactgcctgcggggtcgggcaaaaagtgtggggtcgggcaaaaagagccatattttttcttcttgcagagagcctataaacagacgtgcaagtagaagagatgttgctaaattcttttcctagcaaggaatattaatattaataccctgggaaaggaa

SEQ ID NO: 929883 - DNA, 616 bp, Homo sapiens
tctttatactgtctctctttatttctcagccggccgacacttatggaaaatagaaagaacctatgttaaaatactaggggcggattttccccaataacattgaccaatggaacagaatagacaacccagaaatagagtcacactcttacaaccaattgatctttgacaaagtcaacacaaataagcaatggggaaagactccctattcaataaatagtgtggcaaacactggctatcctatgcagaagcatgaaacttgacrcctacctatcatcatatacaaaaatttactcaagatggattaaagacttaaatttaatacctgaaactataaaaaatcctagaagaaaatctaggaaacaccactctggacattagttttcggaaggaatttataactaagtcctcaaaagcaattgcaacaaaaacaaaaattgacaagtgggactaaagagcttctgcacagcaaaagagacaatctatgaacagaaactataaacaatctatagaatgggagaaaatatttacaaactgtccatctgacagatatctaacatggagaatttataaggaatttaaacaaatcaacaagcaaaaaggaaataatcccattaaa

SEQ ID NO: 929884 - DNA, 566 bp, Homo sapiens
caccaaagaaagtatacagatggcaagtaagtacataaaatattttcaacatcactaatcattagagagatacaaattaaagccacaatgagatacctgtacatttctacctcaatggctaattgaaaaagttgaccatgataagtgttttcaaaaatgtaaaagaactggaattctcataccacgttgataggaatgtaaactggtacaactgcttggaagacgatttctcaatttcttaaaaatttaaacatatgtctcccatatgacttagccattatactgctaggtttttacccaatgtaaataaaagtatgytcatgcaaaaacatgtagatgaatgtttatagcagttttatttgttgtagtttcaactggtacccaaaagcccatcaacagtgaatggataaacaaattgtggtatattcattaatcaggatgttactcagcaacaaacctgaataaactattgacacatacaataacatggatagattaaaaagtaattatattgagggtaaaaagtcaggccccaaacaactacatacttaataattccattcata

SEQ ID NO: 929885 - DNA, 638 bp, Homo sapiens
caggacagtgtatgcagagcaccgtgtgcgagccgaagcagggcgaggcattgcctcactcgggaagtgcaaggggtcagggagttcccttgcctagtcaaagaaaggggtgacagacggcaactggaaaatcgggtcactcccaccctaatactgcgcctttccgatgggctttaaaaacggcgcaccaggagattgtatyccacacctggctcggagggtcctatgaccacggagtctcactgattgctagcacagcagtctgagatcaaactgcaaggtggcagcgaggctgggggaggggcgcccacccattgccaaggcttgcttaggtaaacaaagcagccgggaagctcaaacttggtgtagcccaccacagctcaaggaggcctacctgcctctgtaggctccacctctgggggcagggcacagacaaacaaaaagacagcagtaacctctgcaaacttaaatgtccctgtcctgatacctcacacggccgggtactcctctgagacaaaacttccagaggaacgatcagacagcagcattcacggttcacaaaaattcgctattctgcagacaccgctgctagtacccaggcaaacagggtctggactggacctctagcaaactccaac

SEQ ID NO: 929886 - DNA, 638 bp, Homo sapiens
caggacagtgtatgcagagcaccgtgtgcgagccgaagcagggcgaggcattgcctcactcgggaagtgcaaggggtcagggagttcccttgcctagtcaaagaaaggggtgacagacggcaactggaaaatcgggtcactcccaccctaatactgcgcctttccgatgggctttaaaaacggcgcaccaggagattgtattccacacctggctcggagggtcctatgaccacggagtctcrctgattgctagcacagcagtctgagatcaaactgcaaggtggcagcgaggctgggggaggggcgcccacccattgccaaggcttgcttaggtaaacaaagcagccgggaagctcaaacttggtgtagcccaccacagctcaaggaggcctacctgcctctgtaggctccacctctgggggcagggcacagacaaacaaaaagacagcagtaacctctgcaaacttaaatgtccctgtcctgatacctcacacggccgggtactcctctgagacaaaacttccagaggaacgatcagacagcagcattcacggttcacaaaaattcgctattctgcagacaccgctgctagtacccaggcaaacagggtctggactggacctctagcaaactccaac

SEQ ID NO: 929887 - DNA, 669 bp, Homo sapiens
agaggaaggaggaggcccttccccacagtgacctgctcgccattcacgtgcagcgacaggcccacctctcagaggaggatgctgaggcacaggcaggagcagtgtagagagacactgggaagaggcaccaatcacagctctgagctgtcctctggacctccaggggtgggggaaggagacccgttggtgatgaagacagctcagcgggttgtggcagaggctcttcccaggactgggagacgacagtgactcaatgctgttcacttctagactgtgccttctgaaagtggcccttcagttaccctcacagttaccccacacctgtctgggatggccaggtaggccgagacaagcagagactcagggcgagggcactagggcgtgtgggcagggacagaggccaacggggcaggtgaggggaaattttcatctacttgctggatctgcccctttcctgggctctactttactctttaccctctgcctctggctccctgcctggctcctcctcacgttcttgcctsctcactccagaagtcccaggggctcagcccaccaccatttgtccccaggttgtagctgccccttccatgtccatcccatgaggaccttcatctgcatgagcacacctctggtctcctctgaaatcagaagccctatctccctgac

SEQ ID NO: 929888 - DNA, 573 bp, Homo sapiens
cattctacatgcataggtgtaaaatcctttgaatgtgaggacttctttgatatctgtggtggcatgacagatatcacaaaaattatgcatggacctttttttaaaaaaaaaacaactcatcagctatcgttagtgttagtgtattttatgtgtggctcaagacaattcttcttcttccaatgtggcccagggtagtcaaaaggttggacacccatgctacagcctcgaatttccaggctcaagagatccttccacctcagcctcctgagtagctggaactacaggtgcataccaccactcctgacttcactgtaatgtttaaaatcagatcaytgaaggtttaatttacatacatcacaataaccaaatttgtaaaggtacaattcaatgaatattgacaaaggtagatggggtattaataccaccacaatcagcacacagtattcccatcatgtcagtcgtcaaccaccctccccagtctttaaaaacaatgattctattgctatcccttcaatttcaccttttccaaaatatcgtataaatgaaatcccacagtatgtaactttctttcac

SEQ ID NO: 929889 - DNA, 573 bp, Homo sapiens
cattctacatgcataggtgtaaaatcctttgaatgtgaggacttctttgatatctgtggtggcatgacagatatcacaaaaattatgcatggacctttttttaaaaaaaaaacaactcatcagctatcgttagtgttagtgtattttatgtgtggctcaagacaattcttcttcttccaatgtggcccagggtagtcaaaaggttggacacccatgctacagcctcgaatttccaggctcaagagatccttccacctcagcctcctgagtagctggaactacaggtgcataccaccactcctgacttcactgtaatgtttaaaatcagatcattgaaggtttaatttacatacatcacaataaccaaatttgtaaaggtacaattcaatgaatattgacaaaggtagayggggtattaataccaccacaatcagcacacagtattcccatcatgtcagtcgtcaaccaccctccccagtctttaaaaacaatgattctattgctatcccttcaatttcaccttttccaaaatatcgtataaatgaaatcccacagtatgtaactttctttcac

SEQ ID NO: 929890 - DNA, 588 bp, Homo sapiens
atcaatagatgaattgataaaatgtactctgtaaaaacgcaccaatcagcgctctgtgtctagctaaaggtttgtaaatgcaccaatcagcactctgtaaaaacgcaccaatcagtgctctgtgtctagctaaaggtttgtaaacgcaccaatcagcactctgtraaaacggaccagtcagcactctgtaaaatggaccaatcaacactctgtgaaatggaccaatcagcaggacatgggtggggccaaataagggaataaaagctggccaccggagccagcaggggcaacccgctaggtccccttccatgccatggaaagctttgttcttttgcttttcacagtaaatcttgctgctgctgaaaaaaaaaaaaaaaaaggaaaggaagaaaatgtgctatatatacacaatgggatacaattaagctataaaaaagaattaaatcatgttatttgcaacagcatggctggtactagaggtcattatgttgagtgagataagccaggcccagaaagacagatactgcattttctcactcatatgtgaaagctgaaaaaaaagatctcatggacataaagaacagaata

SEQ ID NO: 929891 - DNA, 588 bp, Homo sapiens
atcaatagatgaattgataaaatgtactctgtaaaaacgcaccaatcagcgctctgtgtctagctaaaggtttgtaaatgcaccaatcagcactctgtaaaaacgcaccaatcagtgctctgtgtctagctaaaggtttgtaaacgcaccaatcagcactctgtgaaaayggaccagtcagcactctgtaaaatggaccaatcaacactctgtgaaatggaccaatcagcaggacatgggtggggccaaataagggaataaaagctggccaccggagccagcaggggcaacccgctaggtccccttccatgccatggaaagctttgttcttttgcttttcacagtaaatcttgctgctgctgaaaaaaaaaaaaaaaaaggaaaggaagaaaatgtgctatatatacacaatgggatacaattaagctataaaaaagaattaaatcatgttatttgcaacagcatggctggtactagaggtcattatgttgagtgagataagccaggcccagaaagacagatactgcattttctcactcatatgtgaaagctgaaaaaaaagatctcatggacataaagaacagaata

SEQ ID NO: 929892 - DNA, 615 bp, Homo sapiens
ggtttgtggtctcgctagcttcaagactgaagctgcagaccttcgcagtgagcgttacagctcttaagggagcgcgtctagagttgctcgttcctcttggtgggttcgtggtctagatggcttcaggagtgaagctgcagaccttcgcagtgagtgttacagctcataaaggcagtgtggacccaaacagtgagcagcaacaaaatttgttataaagggcgaaagaacaaagcttccacrctgtgggagggaacccgagctggttgccactgctggctcacgcagcctgcttttattctcttatctggccccacccacattctgctgattggtccattttacagagagccgattggtctgttttacagagagctgattggtccattttgacagggtgctgattgatgtgtttataatccctgagctagacacaaaagttctccaggtccccactaaattagctagatacagactgtcgattggtacattcacaaaccctgagctagacacagggtgctgattggtgtgtttacaaacgttgagctagatacagagtgccgattggtgtatttacaataccttagctagacataaaggttctccaagtccccacca

SEQ ID NO: 929893 - DNA, 838 bp, Homo sapiens; identical to SEQ ID NO: 928070

SEQ ID NO: 929894 - DNA, 756 bp, Homo sapiens
gcactctcagtgttgaggatgaagttggcgctccatgaatgcttattgagcaactagaggactaaacagacactccactttggcccctgtcaagattgccttgtggtctggcctttagaccaagaagacctgagttgtaactttgccactttctcgggtgagctgtgtctgagtcttcatttgcctatctggaaaatggggataatgacagtccctccctcctgggggagctccgatgacacagrccaatagtggtgatggtgtttgtaaaccctgcggtgtcatgttggtgcacatgtgtggaggaggtggggtggggcctgttattcctgtcctggaatgttggcactcagacgttgtttacggtaacttctgggctctgtgcctgacttcccagggctccggcacttgctggggtagatggcagttccacgtatgagtatgtgatgcctcccagcaatggcatcaccagatttgttaggtgttctgtggaagccccgacctccagccccctccaacccccttccagatttcctgctctgccgagaattcccttgctcctcctgcccaccttgcagagcctccagtgggttcctgggcccctcccaagcaagatcgagccctgttttaagccctttcagtgctgggctctgagtcaggtttggcatccggacaactccaccttttcctgtttctagggacctacctgtaggagttctatacctctgggatgtgggcagcctgacctctagatgt

SEQ ID NO: 929895 - DNA, 635 bp, Homo sapiens
ctttttcctgtactctcacataattctttctcctgtaaccctgtgaaaaggtgccttccaccagaaagaggtgctttctgaggcctccccaggcatgtagaactatgagtcaattatacctcttttcttataaattatccagtctccaacagttctttatagcagtgggagaatggaataatacagtaaattggtacccaggtagtgaggcacgactataaaggtatctgaaaatgtgtaagtaactttggaactgagtaatgggcagagattggaacagtttggaagactcagaagaatacagaaagatgtgggaaagtttggaagttcctagagacttgttgaatggtttccatcaaaatgctgatagtgatatggacaatgaagcccagtctgagggagtctyagatggagatgaggaacttattggggactggagcaaaggtcactcttgctatgcttcagcaaagagactggaggcattttgccactgccctagagatctgtggaactctgaatttgagagagatgatctgaaattggaactcatgtttaaaagggaagcagagtataaaagtctggaaaatttgcagcctgaccatgtgatagaaaagaaaaacccattttctgggaag

SEQ ID NO: 929896 - DNA, 687 bp, Homo sapiens
gggggagcagaaagtatatgcatcaggtatgaggaagaaaatagattttggaagttatgagaaatgtagggagtgagttgagaatagtttgtgatttttagggcctctaaaagtattaaagcagaggcagccactgcacgcagacatgagggctaggctaaaacagtaaggtcaagttgtttgcacagaaaggctacagggtgcagtcctggcttttgtgtaagaattctgaccacactaaccatgcctaggaaggaaagaagttgttgttttgtaagggattgaggtttgggagattagtcggacccgatcagcagggaaagcacgtgtgtttttatgagaattatgcccagataggtaacagatgaggatgaaatttgagcttgactgaagtaatgggggctgtctgtgaagccttgcggcagtacggcccaggttatttgctgagcctaatgggtgtcagggtcagtctaagtgaaagtgaagagaggctgggatgaagggtgcaaaggaatagtaaagaaagcaygtttgagatccagaacggaatagtgggttgtagagggaggtattgatgataggacagtatatgggtttggcaccatggggtggataggcaaaacaatttggatgataaggcacagatcctgaactaacctgtaagacttgtctggttctaggacaggt

SEQ ID NO: 929897 - DNA, 662 bp, Homo sapiens
tcattatttcatatctttaggttaatattgaaagtcttctgccatctgaccaggtgtggtggctcatgcctgtaatcccagcactttgggaggccgaggcaggtggatcatctgaggtcaggagtttgaaaccagcctggccaacatggtgaaacctcatctttcctaaaaatacaaaaattagccgggcatggtggtgcctgtctgtagtcccagctactcaggaggctgaggcgcgagaatcacggtgagctgagatcgtaccactgtactccagcatgggggacagagcaagaccctgtctcgaaaataaattaacaaatacataaatgaaaatgaagtcttctgccatctgattttacctacatctcttactttctgtccaactatgcccattgaattcacagctcttggtgaataagggtctttgtcctccactccaataagtcagttcagaactttataaatgagttatagaataaaaacaytgtaaatcagcaatatgtggattttcaaaaaggctgttgggcccgatttactcagttatacccagatcaatcaagctatgactctaaccttacacagattcatttctctatatttctttcttttatttttttaatcttcaaagcctctacctagtgtttccctcaatctgctct

SEQ ID NO: 929898 - DNA, 610 bp, Homo sapiens
tacttcaaggttcatttgtgttgtagcatggctcagaatttcattcctttttagacagaagaatatttcattgcatagaccacattttgtctatccatcaattgacatttgtattgttttcatcctttgactattgtgaatattgctgccatcaacactggtgtacaaatacccgcttgagtccctgccgccaattattttggatatgtacccagaagtataactgcttattcatgttttttttgtttgttttttttttttgtttttttttttttgaggcagagtctcactgtcactcaggctagagtgcaatggcgygatcccagcttactgcaacctctgcctcccaggttcaagtgattctcctgcctgagcctcccaagtagctacgattacaagtgtgtgcaaccacaccaaactaatttttgtatttttagttgagacagggtttcaccatgttagccaggctggtcttgaactcctgacctcaggtgatccgccctccttggcctcccaaaatactgggattataggcatgagccaccgtgcccaaccctaatcatgtggtaatttgatgtttacttttataggaaccaacatactgttttcc

SEQ ID NO: 929899 - DNA, 579 bp, Homo sapiens
aaattttgtatgctttttctcctattaatctgccttttgtcagttgatttttcagcaaaccttcataggacaaaggggaagttttccttcacccctgcaacagggacaaagacgacccctgtttctgctgccctggctataagagaaccctcaagggctcaagacacttttgctttcatgggcyctttcttccaaaaaaaaagttaaaaattacattttacaattgcatttacaatgcatttacaacagtataaatataaggatgcacatattaatatatatacttaaacattttcttcaacctgaaaggtcagttttttttctgattttaaaagaaaatatttttttggggtactagaagtattgtaggctatgcatagggggcctctgcaccctatgagatagtcagtactggctgctacagaggcagaaagactgaagctccctgagatgatatacataggcactatatggagatatcattgaccactggtgtgtgtgtgtgtgtgtgtgtgtgtgtgtgcatgtgtgtgtatatatatattttttattattttttttttctgagccagagtctca

SEQ ID NO: 929900 - DNA, 579 bp, Homo sapiens
aaattttgtatgctttttctcctattaatctgccttttgtcagttgatttttcagcaaaccttcataggacaaaggggaagttttccttcacccctgcaacagggacaaagacgacccctgtttctgctgccctggctataagagaaccctcaagggctcaagacacttttgctttcatgggctcyttcttccaaaaaaaaagttaaaaattacattttacaattgcatttacaatgcatttacaacagtataaatataaggatgcacatattaatatatatacttaaacattttcttcaacctgaaaggtcagttttttttctgattttaaaagaaaatatttttttggggtactagaagtattgtaggctatgcatagggggcctctgcaccctatgagatagtcagtactggctgctacagaggcagaaagactgaagctccctgagatgatatacataggcactatatggagatatcattgaccactggtgtgtgtgtgtgtgtgtgtgtgtgtgtgtgcatgtgtgtgtatatatatattttttattattttttttttctgagccagagtctca

SEQ ID NO: 929901 - DNA, 734 bp, Homo sapiens
ccattctccctcatgatttactgcccctaaaagaattttctacactccccatctccactctcccctgtgaaaaagggtatataagcttccttctataatacactgggttattggataattactctgactactgcctgcctcctccatgtacattaataaattttgtatgctttttctcctattaatctgccttttgtcagttgatttttcagcaaaccttcataggacaaaggggaagttttccttcacccctgcaacagggacaaagacgacccctgtttctgctgccctggctataagagaaccctcaagggctcaagacacttttgctttcatgggctctttcttccaaaaaaaaagttaaaaattacattttacaattgcatttacaatgcatttacaacagtataaatataaggatgcacatattaatatatatacttaaacattttcttcaacctgaaaggycagttttttttctgattttaaaagaaaatatttttttggggtactagaagtattgtaggctatgcatagggggcctctgcaccctatgagatagtcagtactggctgctacagaggcagaaagactgaagctccctgagatgatatacataggcactatatggagatatcattgaccactggtgtgtgtgtgtgtgtgtgtgtgtgtgtgtgcatgtgtgtgtatatatatattttttattattttttttttctgagccagagtct

SEQ ID NO: 929902 - DNA, 734 bp, Homo sapiens
ccattctccctcatgatttactgcccctaaaagaattttctacactccccatctccactctcccctgtgaaaaagggtatataagcttccttctataatacactgggttattggataattactctgactactgcctgcctcctccatgtacattaataaattttgtatgctttttctcctattaatctgccttttgtcagttgatttttcagcaaaccttcataggacaaaggggaagttttccttcacccctgcaacagggacaaagacgacccctgtttctgctgccctggctataagagaaccctcaagggctcaagacacttttgctttcatgggctctttcttccaaaaaaaaagttaaaaattacattttacaattgcatttacaatgcatttacaacagtataaatataaggatgcacatattaatatatatacttaaacattttcttcaacctgaaaggtcagttttttttctgattttaaaagaaaatatttttttggggtactagaagtattgyaggctatgcatagggggcctctgcaccctatgagatagtcagtactggctgctacagaggcagaaagactgaagctccctgagatgatatacataggcactatatggagatatcattgaccactggtgtgtgtgtgtgtgtgtgtgtgtgtgtgtgcatgtgtgtgtatatatatattttttattattttttttttctgagccagagtct

SEQ ID NO: 929903 - DNA, 576 bp, Homo sapiens
atgcccttcatttcaagataaacaaatccagcataaggaaagaccaacataacgaaagaaaaggaaacgtatgaagccatccctgtggctacaccagcagatgtgaaaaccttgctcttctggggaaatacctttttctgtaattttgaaaatgcagcttttatgtaggtgtatgattgggtataagaaaggcatacatttagagtctaatattattcaagaaaaagcaaagtcattaaaggatgacttaytcaaaaggaaggtgaaggatctaaagctggagaatttagtgttagcaaaggatggtttgataattttacaaagatatttggcttaaaaattgtcaagataatgagaaaaacagcttctgttgcccaagaagcagcagacaagttccaagacaccattaagaaaaccactgaggagaaggaatatttgctgtaacaggtttttaatgtgtgtcaaagtcctctattctgtacagaaaaataccacaaagaacatttattagtaaagaatagaagtgagctctaggatttaaggcaggaaggagtaagctaaccctcctgttttttg

SEQ ID NO: 929904 - DNA, 576 bp, Homo sapiens
atgcccttcatttcaagataaacaaatccagcataaggaaagaccaacataacgaaagaaaaggaaacgtatgaagccatccctgtggctacaccagcagatgtgaaaaccttgctcttctggggaaatacctttttctgtaattttgaaaatgcagcttttatgtaggtgtatgattgggtataagaaaggcatacatttagagtctaatattattcaagaaaaagcaaagtcattaaaggatgacttattcaaaaggaaggtgaaggatctaaagctggagaatttagtgttagcaaaggatggtttgataattttacaaagatatttggcttaaaaattgtcaagataatgagaaaaacagcttctgttgcccaagaagcagcagacaagttccaagayaccattaagaaaaccactgaggagaaggaatatttgctgtaacaggtttttaatgtgtgtcaaagtcctctattctgtacagaaaaataccacaaagaacatttattagtaaagaatagaagtgagctctaggatttaaggcaggaaggagtaagctaaccctcctgttttttg

SEQ ID NO: 929905 - DNA, 494 bp, Homo sapiens
aggtagaggctgcagcgagccgagatcacaccactatacaccagcctgggcgacagagtgagactctgtctcaaaaaaaataaaaaaaaaaaaatcctcctctgctgatgtcaccttttgatgaacattcatgtggacgcaaataccttcrcatcttttgcccactcagagaagtctattcatatacttctcccaatttccttgtcaccaatttgcccatcatgctccttctaagtccctgaccatccagctaaagcattagctacagtccataaatcagtataaaatcacatgtgtctgatcatttctcctgctaagaaaagtgcacaaccaggtgcactggctgaagttctgcctatggggaagacttcccttcaccaacatccttaggggatgtcacagaaaggggctatagtgctgcagcgttgacttctgggtggcacctgcttatcatgcagaaccatcccaagtaaacaagaaaccgagtcttccct

SEQ ID NO: 929906 - DNA, 691 bp, Homo sapiens
attttacctgtcctagaaccagacaagtcttacaggttagttcaggatctgtgccttatcatccaaattgttttgcctatccaccccatggtgccaaacccatatactgtcctatcatcaatacctccctctacaacccactattccgttctggatctcaaacrtgctttctttactattcctttgcacccttcatcccagcctctcttcactttcacttagactgaccctgacacccattaggctcagcaaataacctgggccgtactgccgcaaggcttcacagacagcccccattacttcagtcaagctcaaatttcatcctcatctgttacctatctgggcataattctcataaaaacacacgtgctttccctgctgatcgggtccgactaatctcccaaacctcaatcccttacaaaacaacaacttctttccttcctaggcatggttagtgtggtcagaattcttacacaaaagccaggactgcaccctgtagcctttctgtgcaaacaacttgaccttactgttttagcctagccctcatgtctgcgtgcagtggctgcctctgctttaatacttttagaggccctaaaaatcacaaactattctcaactcactccctacatttctcataacttccaaaatctattttcttcctcatacctgatgcatatactttctgctcccc

SEQ ID NO: 929907 - DNA, 638 bp, Homo sapiens
ccctgtggctttgcagagtacaggctccctcctggctgctttcatgggctgatgttgagtgtctgtggtttttccaggcacacagtgcaagttgttggtggatctaccattctggggtctggagaacagtggccctcttctcacagctccactaggtatgccccagtagggactccatgtgagggctcagaccacatatttcccttccgcactgccctggcagaaattctccatgagagccctgcccctgcagcaaacttctgcctggatatctggacatttccattcatcctctgaaacctagacggaggttcccaaacctcaattcttgactactgtgtacccacaggctcaacaccacatggaagctgccaagggttggggctttccccctctgaagtcatggcctgagctgtaccttggccccttttagtcatggctgaagtggcttggatgcaaggcatcaagtccttagactgcacacagygtgggaaccctgggcccagcccatgattccattctttctttctaggtatctgggcctgtgatgggaggggctgctgggaagacctctgacatgcccaggagacatttttcctattgccttggggattaacattcagctcctcgttatttat

SEQ ID NO: 929908 - DNA, 598 bp, Homo sapiens
agctaacccatccttcccgcacagacattataatgaagcagcatcctctctgctccatgtccaggcagatctctaggcatttagtgtgaccacttgcttgaatcagcagcctgagctggcccatccttcctttgcatactgtggtaaagtgccgccttccctgccccaagttcaggtgtatttacctgtataaaaataattcaaagcacacatttgcatggatttgcagactgaayaacctcaccctccatgtgtggagattgtggtgcatcagggccctctacactccacacacagacagatctccaggcatctggagcactccctcccctgagttaggagtctaggttgcctccattccccatgcagagaacttgaggccaagagattcctcaactctgtggctaggcacactaccaggtgcttgatggccacctgctagattctgccttggtgctggggcttgtgtctggcattaggggacctctatgcgggcctgctcaatctggccctgcccatcttgctccctgaactgccctgccccccggcagggctgagcaggtaactcagatcactgtgcaatctatggatcagactg

SEQ ID NO: 929909 - DNA, 683 bp, Homo sapiens
aaaaagggaatacttacttacaccctgttggtgggaatgtaaattagttcagtcactgctgagagcagtttggagatttctcaaagcacttaaaacagaactaccatttgacccagcaatcccattactggatatatatccaaaagaaaacaatcattctaccaaaaagatacacgcacttatatgttcagcacaacactattaataacagcaaagacatgaartcaatctaagtgcccatccatggtggattggattaagaaaatgtagtacatatataccatggaatactatgcttccataaaaaagaacaaagtaatgtcttttgcagcaacttggatgcagtttgaggactttcttctaagcaaattcacacaggaacagaacaccaaatagtgcatgttcttatgtctaagtgagagctaaacactgtatacttatggacataaaaatggcagcagtagacagtggggaccattagaggagaaagggagggaaggggacagggttgaaaaactaaatattgggtactatgctcactaccttggtgatggcatcaattgtacatactccaaacatcagcctcccacagtaaagctatgtaacaagcctgtgcatgtacctcctgaatataaaataaaagttgaaactactttaaaaataattttattaaagttacttaa

SEQ ID NO: 929910 - DNA, 629 bp, Homo sapiens; identical to SEQ ID NO: 922359

SEQ ID NO: 929911 - DNA, 659 bp, Homo sapiens
agcaagcttcttctggtgatatttgctaatttggtatcggggggaaaaagcatccaccagattcgtagctgcataccaagtgccaagagctctgctgtgttatccaataaaagagactacatctggtctagtaacttgttaatgttgtaagaattcacagtcattctccaataaccatcttccttctgtacatgccagacagaggagctaaatgaggacacagtagaacaactcttgtactgttcaaatgttagatagaagtactaatcgctgtcmtttccccagggataaggtattgctttcagtttactcttacataggaaggggaaatcccaagaagctttcacttggccctgcctaccatactaatactcaccacacaagacagaaaatccatatggagatgggctctttttgtttctgagatgacagctccattcaggaatgggaagataaccacatcgcaggtgaagagacccactggaatccaatgaagcagccacaggtccaaatttcatttactacctgattaccaataagtgatacccccctccaatgggtcagaggcattttgggtctctagagattagcatagactcagaaccaatgtccagaaatctaccaaaagcctggatatgcccccttcctcagtacacagt

SEQ ID NO: 929912 - DNA, 578 bp, Homo sapiens
actagggtgttggagacgaaagtgatgcgaagtggtcagaatctggatatcttctgagggtagaaccaatgagacttcctaatggcctggagtgtgaacaaaagggtgaggtcaagaatgagtgtaagggtttttgtctgagtaaatagaaggatggaatgactgttgcctaatgtggggaagagtatgggaggagcaggttttagggacaagaccaaattttagacatgtttaatttgagatttctctatggtatttgagtagagacatcaagtaggtagcacaagacacaagccttgcstttaagagagacaccaaggccacggacaatttgggtgtctttagggtagaaacagtatttaatgccatgtgattacagtagatcactgatggagggagcacagaagggacaaggtccaaagactgggtcccaggcacaccaacatcaagacatcatggatacaggaacaaatcagcaacagagagttggaaggagcagctaaggtcagaagagggggtggtatcatcaaagccaagtgaagacagtggtccaagaatggatcagctctatcaaaggc

SEQ ID NO: 929913 - DNA, 593 bp, Homo sapiens
taaaagtactattttttcttttgtaattaaaaactgactcatggggagatactttgaggctatctaaataatcttaatttaattcttactcttttttgtgctgttttaaagaattaatctaactatactttatccctttcattttattcaatctctcagatacgttttcccagaattacttttgaaacattagatgaacttaggaaattttattatggtcagtcagaaatcattaaaaatgtatatatatattgscagttatgcttcatttaaccagattgatttgggtcaattaaaggcttaagttcttttaaacctaaaactttcaaattggtaaatttggatttttgaccccgtttactataacacattggactttttgaagtggaaatttagttgtatttatagccatctaccatccctaccagtactgaattttcagttgttttcacttaatattattagaaaaccataaggcaaaatgtacctcgtataacttgactgttgtaccaggtataataatatgatgctcacttgtaactgtcatgggtcagtaataaaattgaggttcttgaagaacttacatatgcatg

SEQ ID NO: 929914 - DNA, 705 bp, Homo sapiens
tgaaatgcactaaggtcttttcagggtgaagggaggagccactgtagttccccaaccaggccagcaggaaagtgatccaactcccagtcacactcctgacccagtgttctagctattcagatgagacaggcatcccttttcttctgtaggaatggtgatgttacatgtagaaaaggactatgactctatccctcatgtaagtctgcacctggagggcactcctcctgtggggatgcagtcacccgaaagtgttccaggaagcctctctacatgtgtacccatgccaagctcttgtgggagaagccacagctatgtttgcagtgatgggcaagaggaagtgtattagtctgttttcaaactgctgaggaagacatacccaagactgggcaatttataaagaaaagaggtttagttgattcacagttccacgtggctggggaggcctcacattcatggyggaacatgaaggaagagcaaagggatgtcttacacagtggccagcaaagagagaatgagagccaagtgaaaggggtttccgcttataaaaccatcagatcttgtgatacttagtcactaccacgagaacataatgggggaaactgctcccatgattcagttatctcccactgggttcctcccacaacatgtgggaattatgggagctacaattcaagataagatttgggtggggacacaaccaaacca

SEQ ID NO: 929915 - DNA, 632 bp, Homo sapiens
agaagagggatataattttgccctacactggccagatgagtgcttaggtttctcaggtgatgggcagggtcacacagctcccaagagattatgtcttttgtctttggttaccaaggtgggcaaagaaaaaccatcaggtaggggcagggttaggtgggtttgagctgagactctccttgggcagggcttgctgcagccactgtgggggtttttggggtggctttcaggccaatgaagttatgttcccagggagattatggctgcctctgctgcattgtacaggtcaccagggaagtgggggaaagctggcagtgacagggctcacccagatgccacatagccagcaaggccaatctcactcccaccatgcttccagaactgcactgagtttatatccaggcagcytgtgagcatggctgaaatcttgccccaggctataagcgtcccaattgagaaagcaagcagggctctcaggcctgggcctgcctacccacaccatctgtggcttctgcacttgtatctgcactacctgttttccccgtctccccctgattctgctcaggaaagtttgtgctcagtcgaaattattacaaagttcacctaggagcttacctcaccctgtgcacctccca

SEQ ID NO: 929916 - DNA, 762 bp, Homo sapiens
ttgcatgcaaatgactggcaaaccagttaggaagtccattggtattcgaaaatgataggagcagtccctagcaagacctggaaagcaaatttactgactgaccatcagtggaggtaaatattcagaatcagaaactacctttaaacaaatggcctgttggagggaaggctggaattcatgtgcrggttaggaactgtaaaaggaaaataaatcttggaacctcaaattcactaagccaaagggaaagtcaagctcggaactgggtcatgaaaacttgcctcccattttgtgtcctaaattagatagctacaaagatgaaaagctacatacctctctcacattttgcccacaaagaaattccttgtggaccccaagatcttcgccctaaagcatttctgttaaagttcaccatggcaatgtaaattcatagcttatcttcataggtgcagggacatagggcagaactcaaagtcatcctctgaccacctgagacaaatgcatatctgattgttgcctctgccttattgtctatgtaatcttttgtaaaaatgcagattcactgagccagacaaaggcatgaatgactctattcccctacccctgctctcacatgaaaattgaatatttctcaatatcctgccctttcccctgtgaatactgaagccctcaaaaccatcttcaggaaaggtctcccaggtgtgtgtccttaagtttggcaaataaacctcctaaaatgattgaggcttgcctgggtcatttttc

SEQ ID NO: 929917 - DNA, 762 bp, Homo sapiens
ttgcatgcaaatgactggcaaaccagttaggaagtccattggtattcgaaaatgataggagcagtccctagcaagacctggaaagcaaatttactgactgaccatcagtggaggtaaatattcagaatcagaaactacctttaaacaaatggcctgttggagggaaggctggaattcatgtgcgggttaggaactgtaaaaggaaaataaatcttggaacctcaaattcactaagccaaagggaaagtcaagctcggaactgggtcatgaaaacttgcctcccattttgtgtcctaaattagatagctacaaagatgaaaagctacatacctctctcacattttgcccacaragaaattccttgtggaccccaagatcttcgccctaaagcatttctgttaaagttcaccatggcaatgtaaattcatagcttatcttcataggtgcagggacatagggcagaactcaaagtcatcctctgaccacctgagacaaatgcatatctgattgttgcctctgccttattgtctatgtaatcttttgtaaaaatgcagattcactgagccagacaaaggcatgaatgactctattcccctacccctgctctcacatgaaaattgaatatttctcaatatcctgccctttcccctgtgaatactgaagccctcaaaaccatcttcaggaaaggtctcccaggtgtgtgtccttaagtttggcaaataaacctcctaaaatgattgaggcttgcctgggtcatttttc

SEQ ID NO: 929918 - DNA, 762 bp, Homo sapiens
ttgcatgcaaatgactggcaaaccagttaggaagtccattggtattcgaaaatgataggagcagtccctagcaagacctggaaagcaaatttactgactgaccatcagtggaggtaaatattcagaatcagaaactacctttaaacaaatggcctgttggagggaaggctggaattcatgtgcgggttaggaactgtaaaaggaaaataaatcttggaacctcaaattcactaagccaaagggaaagtcaagctcggaactgggtcatgaaaacttgcctcccattttgtgtcctaaattagatagctacaaagatgaaaagctacatacctctctcacattttgcccacaaagaaattccttgtggaccccaagatcttygccctaaagcatttctgttaaagttcaccatggcaatgtaaattcatagcttatcttcataggtgcagggacatagggcagaactcaaagtcatcctctgaccacctgagacaaatgcatatctgattgttgcctctgccttattgtctatgtaatcttttgtaaaaatgcagattcactgagccagacaaaggcatgaatgactctattcccctacccctgctctcacatgaaaattgaatatttctcaatatcctgccctttcccctgtgaatactgaagccctcaaaaccatcttcaggaaaggtctcccaggtgtgtgtccttaagtttggcaaataaacctcctaaaatgattgaggcttgcctgggtcatttttc

SEQ ID NO: 929919 - DNA, 608 bp, Homo sapiens
cttcaaggttcatttgtgttgtagcatggctcagaatttcattcctttttagacagaagaatatttcattgcatagaccacattttgtctatccatcaattgacatttgtattgttttcatcctttgactattgtgaatattgctgccatcaacactggtgtacaaatacccgcttgagtccctgccgccaattattttggatatgtacccagaagtataactgcttattcatgttttttttgtttgttttttttttttgtttttttttttttgaggcagagtctcactgtcactcaggctagagtgcaatggcgygatcccagcttactgcaacctctgcctcccaggttcaagtgattctcctgcctgagcctcccaagtagctacgattacaagtgtgtgcaaccacaccaaactaatttttgtatttttagttgagacagggtttcaccatgttagccaggctggtcttgaactcctgacctcaggtgatccgccctccttggcctcccaaaatactgggattataggcatgagccaccgtgcccaaccctaatcatgtggtaatttgatgtttacttttataggaaccaacatactgttttcc

SEQ ID NO: 929920 - DNA, 589 bp, Homo sapiens
gtacattaataaattttgtatgctttttctcctattaatctgccttttgtcagttgatttttcagcaaaccttcataggacaaaggggaagttttccttcacccctgcaacagggacaaagacgacccctgtttctgctgccctggctataagagaaccctcaagggctcaagacacttttgctttcatgggcyctttcttccaaaaaaaaagttaaaaattacattttacaattgcatttacaatgcatttacaacagtataaatataaggatgcacatattaatatatatacttaaacattttcttcaacctgaaaggtcagttttttttctgattttaaaagaaaatatttttttggggtactagaagtattgtaggctatgcatagggggcctctgcaccctatgagatagtcagtactggctgctacagaggcagaaagactgaagctccctgagatgatatacataggcactatatggagatatcattgaccactggtgtgtgtgtgtgtgtgtgtgtgtgtgtgtgcatgtgtgtgtatatatatattttttattattttttttttctgagccagagtctca

SEQ ID NO: 929921 - DNA, 589 bp, Homo sapiens
gtacattaataaattttgtatgctttttctcctattaatctgccttttgtcagttgatttttcagcaaaccttcataggacaaaggggaagttttccttcacccctgcaacagggacaaagacgacccctgtttctgctgccctggctataagagaaccctcaagggctcaagacacttttgctttcatgggctcyttcttccaaaaaaaaagttaaaaattacattttacaattgcatttacaatgcatttacaacagtataaatataaggatgcacatattaatatatatacttaaacattttcttcaacctgaaaggtcagttttttttctgattttaaaagaaaatatttttttggggtactagaagtattgtaggctatgcatagggggcctctgcaccctatgagatagtcagtactggctgctacagaggcagaaagactgaagctccctgagatgatatacataggcactatatggagatatcattgaccactggtgtgtgtgtgtgtgtgtgtgtgtgtgtgtgcatgtgtgtgtatatatatattttttattattttttttttctgagccagagtctca

SEQ ID NO: 929922 - DNA, 732 bp, Homo sapiens
attctccctcatgatttactgcccctaaaagaattttctacactccccatctccactctcccctgtgaaaaagggtatataagcttccttctataatacactgggttattggataattactctgactactgcctgcctcctccatgtacattaataaattttgtatgctttttctcctattaatctgccttttgtcagttgatttttcagcaaaccttcataggacaaaggggaagttttccttcacccctgcaacagggacaaagacgacccctgtttctgctgccctggctataagagaaccctcaagggctcaagacacttttgctttcatgggctctttcttccaaaaaaaaagttaaaaattacattttacaattgcatttacaatgcatttacaacagtataaatataaggatgcacatattaatatatatacttaaacattttcttcaacctgaaaggycagttttttttctgattttaaaagaaaatatttttttggggtactagaagtattgtaggctatgcatagggggcctctgcaccctatgagatagtcagtactggctgctacagaggcagaaagactgaagctccctgagatgatatacataggcactatatggagatatcattgaccactggtgtgtgtgtgtgtgtgtgtgtgtgtgtgtgcatgtgtgtgtatatatatattttttattattttttttttctgagccagagtct

SEQ ID NO: 929923 - DNA, 732 bp, Homo sapiens
attctccctcatgatttactgcccctaaaagaattttctacactccccatctccactctcccctgtgaaaaagggtatataagcttccttctataatacactgggttattggataattactctgactactgcctgcctcctccatgtacattaataaattttgtatgctttttctcctattaatctgccttttgtcagttgatttttcagcaaaccttcataggacaaaggggaagttttccttcacccctgcaacagggacaaagacgacccctgtttctgctgccctggctataagagaaccctcaagggctcaagacacttttgctttcatgggctctttcttccaaaaaaaaagttaaaaattacattttacaattgcatttacaatgcatttacaacagtataaatataaggatgcacatattaatatatatacttaaacattttcttcaacctgaaaggtcagttttttttctgattttaaaagaaaatatttttttggggtactagaagtattgyaggctatgcatagggggcctctgcaccctatgagatagtcagtactggctgctacagaggcagaaagactgaagctccctgagatgatatacataggcactatatggagatatcattgaccactggtgtgtgtgtgtgtgtgtgtgtgtgtgtgtgcatgtgtgtgtatatatatattttttattattttttttttctgagccagagtct

SEQ ID NO: 929924 - DNA, 607 bp, Homo sapiens
tgtaacaattttgactaaactcaaagtttcccggacagaatcggggggagggggcaaactgggagtacagatacaaacacaaaagccatggcaggtaggggggtaaggaacctgaaagttctgcttgctttctcagtggggtggtcttgtagcctggggcaagttctcagccctgctgactggctgccaggaaataaactcagtgctgctggggragcaccatgagagtgaggctggccttttgggctgtgtaggagctgggtgaggtctgtcactgctggctttccctcacttcccaggtgacctgtatgatgcaggagaggcagtcataatcctcctggtaaggtaacttaatcagcctgagaaccactcccccatttcccagggcagcttcagcaaccctgccaaaggagggtctgagatccaacacccctaaccctgcccctaccctggtagtcaaaatcaaaggacataatctctggagagctttatggccccatccaccacctgagaaacctgaatacttatccaggtgaccctagggctagcttatatcccccctatactactgcaactgatgctctcttgaaagcaccacctacctgga

SEQ ID NO: 929925 - DNA, 569 bp, Homo sapiens
ctgaacaatgaaatagaataggttccagaaacagacccatatgtatatgtacatttatgacaaagctgccattgctcacagtgtggaaattcacggtgctgagagtactgagtattcacacaggaaaaaaaaaaaaagaaatatgatcctatttctattggatctatcctattgaacacaaacatcartttcacatagactgtaggcctaaacatgaaaggctaaactataaaacttttagaagataatataggcaatgtgattataacattcagtaagaaagattgcatacaaagttgttgtataaatagtttatacaaaaatataaactataaaggaaatgtttgataagtttggctaagctaaaattggaacatatgttcaccaaaagaaactgttagagaatttaaaaaacaattaaaaatggagaagctatttgttgcaacatacaaatgaggtagtatcaaaatacataaagaagtcatataagtctataagaaaaagacatcttaatagaaaaagataggtgcagccataaaaaagaacaaaatcatgtcctttgtggcaac

SEQ ID NO: 929926 - DNA, 654 bp, Homo sapiens
atgtatttccattttctaatgtaaggcagaagccctgggaaaggattttagttttaggatcatacacatatcatctctcacaagtgtctcagggcctttgcacctcagaaccctctgcctggaattctttccttcccccttttccttcctaactcctacttgtcctattggcccgtcatcacttcttcaggggcgtgtgagctgacctcctgaactggtcaactctcccaatcacatgcttttgtgtggtacgtaagagcatttaattaggagagttgtattgtgttgaccgtatgggaattttgcattttattgtgattacttgattaatgtctttctcctcgaccaggatataatttccatgatgccaggaaccacctctgcttttgcccacagtaggcttttttccaggtttttaatgactattgaatgaatgagtgaatgaatgaacacatcatccagaatttcctagagcttactggattttgatatgtgggccaaactttgaaagamatgggtgatacttggttttctaaggctatagaaagaacataatgatagacagtttgctggcatatccttggtgtccagcacagtctctgcatgcagtaggagcttgtatcagtccattcttgcattgctataaagaaatgc

SEQ ID NO: 929927 - DNA, 614 bp, Homo sapiens
aggagtttgttgctacccaccttctgaatcctacttctgtcaattcatcaaactcattctccatgcagttttgttcccttgctggtgaggagttgtgatcctttggaggagaagaggcgttctggtttttggaattttcagcctttttgagctggtttctccccgtctttgtggatttatctacctttggtctttgatgttggtgacctttgggtgggggtctctgagtggatgtgctcttcctttctgtttgttagttttccttctaactgtcaggcctctctgctgcaggtctgctggagtttgctggaggtccactccagaccctatttgcctgggtatcaccagcagaggctgcagaacaacaaagattgctscctgttctttcctctggaagcttcctcccagaggggcacctctcagatgccagccagagctctcctgtatgaggtgtctgtcagcccctactgggaggtgtcttccagtcatgatacacgggcttcaggggcccacttcaggaggcagtctgacccttagcagagctcgaacactatgctgggaggtctgctgttctcttcagagccgtcaggcaaggacgtttaagtgtgctgaag

SEQ ID NO: 929928 - DNA, 599 bp, Homo sapiens
ccaatagtcttaacaaacggcacaccaggagattatatcccgctcctggctcagagggtcctacgcccacagagcctcgctcattgctagcacaacagactgagatcaaactgcaaggcggcagcaagtctgggggaggggcacctgccattgctgaggcttgagtaggtaaacaaagcagccaggaagcttgaactgggtggagcccactgcagctcaaggaggcctgactgcctctgtagactccacctctgggggcagggcatagagaaacaaaaggcagcagaaacctctgcagacttaaatgttcctgtgtgacagctttgaagagcatagtggttctcccaacacccagcttgagatctgagaatggacagactgcctcctcaactggktccctgacccccgagaagcctaactgggagtcacccccagtagaggcacactgacacctcacacggccgggtactcctctgagacaaagcttccagaggaacgatcaggcagcagcatttgtggttcaccaatatctgctgttctgcagccgctgctgctgatacccaggcaaacagggtctggagtggacctccagcaaactc

SEQ ID NO: 929929 - DNA, 519 bp, Homo sapiens
ccacactctgctggcccaggtccaaagacacccccatcacaccgcaccctcccccaaaaacctgtttctcccacacaacactgcaccctccccgcataatgtaccctccccaacaatgtacaccccaccccacaaagcgccccctacacaccacagtgcaactttctccaacacactgcactctcctcccaccaaaatgtactctccctccccacagcacaccccacccatcataatgcattccccaacacactgsaccctccaccaccacaatgcacccccttgccacgatgcaccccttcacctcacaaccccacaatgcacccttccccccacaccttaccctcccccaagtcttccccatttaagataaattatacccgtaactacctattgctcaagtttgcagtctggaagccacctatgcttctctctcttgagctctatcatgaagtcctgttgtttataattaaaatatgtcctgaaactactcagggtcttcgcccattttgccaccag

SEQ ID NO: 929930 - DNA, 614 bp, Homo sapiens
tcactactatattttttatgtaacttccctttttatgtacataaatcttcttccaccatgttggctgcactggagtccctgagcttactctggctcaggaggctgcttgactcatgaatcttttattcctcaattaaastcttttaaatttaatttggctaaagtttttcttttaacagatggcatcagaagtgggatctgaagcagagcttctaatgactcccaggagtgctgagtgaccaagcaaggtacctgccgggcccacagtgcccactgctttctcgcagcaactggggatcatggaaagttctcagattttgaagttccacggatttgtgttttgagcgctccaagtttctttgagcaaatttctgatccaaactgggtttggaagtcgtgaccaaaactggactgggtcaaggatagaatatggtaattaactgtcttggatccagttagaggcctcttacatctgacggggtcaaaaagaacccaggtaaatggcaatattgcagggggcataaaatttggcttttggaaatttgcagggatttttgtgttctactcctttgtttcatttttcttgtgcacttaggtaggaaaaaaatcactgg

SEQ ID NO: 929931 - DNA, 488 bp, Homo sapiens
cttctgtgtgctccagaaacagccaggagctccrggtagctagagcaggccatggagaggcagggatgcgggaaatgaggtcagcgggatggggtgggggcagatcacggaggtctttacagacccagggaggacttgggctttggctggggtctatgggaaggtgtcaaagggttttaaacaaagacggagcactgtagagtgtttctaaggagtccttctgccgatgtgtgaagagaagtgatgagggtggaaggcaagaacccagtgatgagggtggaaggcaggaacccagtgatgagggtggaaggcgggaacccggtgaggagggtggaaggcgggaacctggcaaggaggctgctggaataatccagccaggggcctgggaagggccggactcagcctctcctgaaggtggagttaccagaactcactggtggttgcatgtgggcagagacagaaccatgaaaagtggttccaatgtttgg

SEQ ID NO: 929932 - DNA, 488 bp, Homo sapiens
cttctgtgtgctccagaaacagccaggagctccaggtagctagagcaggccatggagaggcagggatgcgggaaatgaggtcagcgggatggggtgggggcagatcacggaggtctttacagacccagggaggacttgggctttggctggggtctatgggaaggtgtcaaagggttttaaacaaagayggagcactgtagagtgtttctaaggagtccttctgccgatgtgtgaagagaagtgatgagggtggaaggcaagaacccagtgatgagggtggaaggcaggaacccagtgatgagggtggaaggcgggaacccggtgaggagggtggaaggcgggaacctggcaaggaggctgctggaataatccagccaggggcctgggaagggccggactcagcctctcctgaaggtggagttaccagaactcactggtggttgcatgtgggcagagacagaaccatgaaaagtggttccaatgtttgg

SEQ ID NO: 929933 - DNA, 488 bp, Homo sapiens
cttctgtgtgctccagaaacagccaggagctccaggtagctagagcaggccatggagaggcagggatgcgggaaatgaggtcagcgggatggggtgggggcagatcacggaggtctttacagacccagggaggacttgggctttggctggggtctatgggaaggtgtcaaagggttttaaacaaagacggagcactgtagagtgtttctaaggagtccttctgccgatgtgtgaagagaagtgatgagggtggaaggcargaacccagtgatgagggtggaaggcaggaacccagtgatgagggtggaaggcgggaacccggtgaggagggtggaaggcgggaacctggcaaggaggctgctggaataatccagccaggggcctgggaagggccggactcagcctctcctgaaggtggagttaccagaactcactggtggttgcatgtgggcagagacagaaccatgaaaagtggttccaatgtttgg

SEQ ID NO: 929934 - DNA, 642 bp, Homo sapiens
gagatctgattgcttaaaagtgtgtagcacctcctcctttgctctcttcttcctgcttctgccatgtaagacgtaccagcttctttccttcaccttccaccatgactgtaagtttcctgaggcctccccagaagcagaagcctatataccctgtagaactgggagccaattaaacctcttttttaaaataaattaccattctcaggtagttctttatagcaatgtgagatcagactaatacagaaaattggtatcaagaagtggggaattgctataaagatgcctgaaaatgtggaggcagctttggaactgggtaatgggcagaagttggaacagtttggagagttcagaaaaaaacaggaagatgagggaaactttggaacttcctagagatttgttgaatggttgtgaccaaaatgctgacagtgatatggacaatgaattccaggctgaggtggtctcagatgcagatgaggaaytcatcaagaactggagccaaggtcacttttgttatgtgtgagcaaagaggtgatccgaaactgtaaattatttaaaagtgaagtagagtgttaaagtttgaaaaatttgcagcctgaccatgtggtagaaaaaataaataaataaataaaaatttctggggag

SEQ ID NO: 929935 - DNA, 598 bp, Homo sapiens
gcatgaagtcaaagatattattttggagctttaacttttaatgactgccctgctgggtttcagacttgcatagggcctgtaacctcttggttttggctgatttctcccttttggaacaatagtatttggccaatgcctgtacccccatggtatgttggaagtcactaactagttttgatttcacaggctcacagatagaagggacttgccttgtctcagttgtgactttggactgtggtcttttgagttaatgctgaaatgagttaagacttcggtggctgttgagaaggcatgaatgtattttgaaatgtgagaagaacatgagatttgggagaggtctggtacagaatgattcrgtttggatttgtgtcccagcccaattctcatattgaattgtaatcctcaatgttggaggaggggcctggtggtaggtgattagatcatgggggtggatatctcccttgctgttctcgtgacagtgagtgagttttcacaagatctagttgtttaaaagtttgtagcacctcccccttcactctcttcctcctgctctggccatgtaatatgtgccagcttcctcttcgccttctgccatgat

SEQ ID NO: 929936 - DNA, 601 bp, Homo sapiens
gctgtggtggctatggggcaacactccttctgcttgagaaaaaagaagggaaaaagtaaaggggactttgtcttgcacctcaggcaccagcacagccacagtggggtagagtacaaagtgggctctaggggtccccgattccaggacttcactcatggatggcttttctggacctgtcctgggccatagatgagcccactgacctgaagggtgagtcctaggtcaggcagcatttacaagctgccttaagagaccatgggacttaagggagtattggaggtagtctggcagyatttcctatagcctagagtggcagtggctatggcgggaggctcctctccctttggaaagggaagagaagagtgggaaggaatgtttaatgtggtttgagtgctagcgcagtcacaatacaatagaacaccaggtagacatctaaggattttgactctggtccctgactcttggctggcactcctggaccaacctcgggcttgggcaacctcattgccctaaagggaaggacacaggccaggctggctttgccacgtagtgattgtagagcagcagggccttgagaaaacatagggagtaaccagggagt

SEQ ID NO: 929937 - DNA, 562 bp, Homo sapiens
ctggtctgtgacttttttgattggtaggcttttttttttattattactgattcagttttggaactcaatattggtgtgtttagcatttcactttcttgctgcttcagactcagaacattatatgtttctaggattttatgcagttcctctagagtttcaagtttatgtgcagagaggtgttcagaatagtctttgaggatcttttgcatttcttgaggattaggtgtaatatcacctttgttatttctgattttgcttatttaaatctgctytcttctttgttaatctagctagtagtctattgatcttgtttatcctttcaaaaaaccagtttatgattttgttgattattttatgaaattttgtttctcaattttgtttcattcctctcagatttcagttattgctcttctgctaactttgagatttgtttttgtgtttctatttcctctaggtgctatgatagattattaatttgagatctttctagctttttgatgtaggcatttaccactatcagctttactcttaacattagatttcctgtatccaagagattttg

SEQ ID NO: 929938 - DNA, 616 bp, Homo sapiens
gcacactaaattaagctgacggagtccctgccctgtggaacctttcgttcattcacctactcatttcacaaatatttgctgagagtcctactgtgtgccccacactgccaacaaggcagatagggagcttagaacctagtctgtgacacaggcaacaacagatgacagatccataaacaattaaggcatttcagttaagatatttcagatagtgacaattactatgaagaaaatagaagaagataatgagaaggaaagtggctgggtgcaragcatgccattttaaaataagttcttgctagttgaatggatgaatagtaaattccatgtgacctgaaaggggatatacttaggccatttattgtttctgactctgccttccacagggtaagactgaactttcttacccattgtgagcaattctggccaaggagtagtgagcagaattgacatgtcatttctggccttcatgttggaattctagtgagaaaccctccagaggtcattctctcttctggcctgctgctgatcagtgctatgtgtagaggctgccacgttggcctggtctggatgatgctgagattgagcatgatctcaggttgacctgtgatgaaca

SEQ ID NO: 929939 - DNA, 662 bp, Homo sapiens
agctggacacacctccccagggaagagccttccttagctgcagactgagccacaaacctcgcggctcatctgctgcaaccattatgaatcatactaggattatcaaggaacaatcttctccaggatcagccctttcccyaccactgtcggattcagggaattttaagtggtggggggaggagggaggtagccagtgtattccagacagcaacactaactgcctgtcctgaggacgcaagattttctcatttgtaaggctctgcgtaacacactcatcctagcacacagggcttcaatgtcaggatgcagcctccttcccaggaagctggctggacactaggtcacagacgagctgaagctctcccaagaatacaccccctgtttgaccctgacatttactgctacggccacctgaagacgagactttccatctggaacgtttcggtacctatctccctggcatttctccagcactcttttcctctgtgattgtttagcccaataagcacacagaatggcattacacatagtggtaaagaagctgttacatgtggtgacgaagatgtcattacatgcagcaatgaagggggcttccaggagcctaacagaggtgacagaggcacaaaggggctgctgcccacttcctggggagagcatctacc

SEQ ID NO: 929940 - DNA, 700 bp, Homo sapiens
cataacattgggaatgtactaaatgccactggtttgtacacataaaaaaggatagcatgaatcctagcactttgggaggccgaggcgggcagatcacctaaggtcaggagtccgagaccagcctgaccaacatggagaaaccccatctctactaaaaatacaaaattagccaggtgtggtggcacatgtctgtaatcccagctactcaggaggctgaggcagcgagaattgcttgaacccacgagtgcgaaggttgcagtgagccaagatcgcaccattgcactccagcctatgcaacaagagcgaaactgtgtctcaaaaaataaataaaaaataaaataaataaaaagataccatgggccgggcgcagtggctcacgcctgtamtcccagcactttgggaggccgaggcaggtggatcacctgaggttgagagttcgagacagcctgaccaacatggagaaaccctgtctctgctaaaaatacaaaattagccaggcgtggtggcacatgcctgtaatcccagctactcaggaggctgagaaaggagaattgcttgaaccccggaggcagaggttgcggtgagctgagatcacgccattgcactccagcctgggcaacagtgaaactccatctcaaaaaaaaaaaaaaaaggatagcatgataaattttatgttaggtatattttcccaaaatttata

SEQ ID NO: 929941 - DNA, 700 bp, Homo sapiens
cataacattgggaatgtactaaatgccactggtttgtacacataaaaaaggatagcatgaatcctagcactttgggaggccgaggcgggcagatcacctaaggtcaggagtccgagaccagcctgaccaacatggagaaaccccatctctactaaaaatacaaaattagccaggtgtggtggcacatgtctgtaatcccagctactcaggaggctgaggcagcgagaattgcttgaacccacgagtgcgaaggttgcagtgagccaagatcgcaccattgcactccagcctatgcaacaagagcgaaactgtgtctcaaaaaataaataaaaaataaaataaataaaaagataccatgggccgggcgcagtggctcacgcctgtactcccagcactttgggaggccgaggcaggyggatcacctgaggttgagagttcgagacagcctgaccaacatggagaaaccctgtctctgctaaaaatacaaaattagccaggcgtggtggcacatgcctgtaatcccagctactcaggaggctgagaaaggagaattgcttgaaccccggaggcagaggttgcggtgagctgagatcacgccattgcactccagcctgggcaacagtgaaactccatctcaaaaaaaaaaaaaaaaggatagcatgataaattttatgttaggtatattttcccaaaatttata

SEQ ID NO: 929942 - DNA, 612 bp, Homo sapiens
accaatatgatgcatatatcaatatatacttatgtagaaagagatttattataaggaattggctcacgggattatggaggccaagtcctaagatcagcagaatgtgtcaacaaggacccaggggagccaatgtgttggttcacattttttaaagggaccaaataaaagtggccaagacatgtttggacatcaggcaatgaagatcagtgacccccctgagagatgggaaacaaaagaagcaagccccaagatcgccccatctgaccacctcccattgcctaatgtggcacagamggagcacagaggatggcctcagctaaggaggcttagctgagtcttgggagaccaaggcagcaagagtttgcaagactggggaccacggaagagagctacatagagacagagagggctctggagatttgcaggtggcccccttgagtattcagctgagaagtgactggcacatgcttgggagaagatgactcaagtctatagaaagactcacccaaggattagagagaacagagcccactggtgggtatgctgcctgttaacaccaactagactggaaaacctcatcatttgtgggactttgagtcgactacccagaag

SEQ ID NO: 929943 - DNA, 544 bp, Homo sapiens
caccatggaaagagcttcacctctgagaggtacaggtgctgcctccatttccccccaagcatccattcccctaagttccagtaaatttaactttgctttgggggacaattccactggacttgcatgcaggctggtggatctgtcaatcaagaggctcccccctcacctgtacagggctacacatgtgacccaggctcaatcgactccctagaaatgtgatttgcatagaaatggaagatatttgtggatgccctcaggagaccgaccgtttctgcggtgcaggkgcctggaacccatctggtccccgtactttctgaaatctcatgcttctctttttcctctcattttataaggacaagtgactctgtgtcttcccaatctgtgctcatgttggccagaatcagatatcatattttgccaccagtagaccttaatttattgagatggagtatcttaattatttctcacaacaaccttataaggtaggtattgtgttatcccattgaatagatgagaaaactgcagattgggaagggggtcgccc

SEQ ID NO: 929944 - DNA, 578 bp, Homo sapiens
gaacagtgtgacagccttttggacccaccctcttggtaccctagttcttgtttggcatccaggaaaaatcaggtcatgtgaacaaattgaagggtggtgaatgtggagaattttatcaagtgatggaagtggcccttagtggaatggggagctgaaaaggggatgaagggggaaggtggttttcccctggagttcagcagtccccggctgaactcttctccaaggtcycactgtcaagccatccctctgaagtcatgctgctacttcagatgtctgactgcttcttttctctccttctctgccactctgctgctctgccactccactggtggagcatagggtttttatgggtacaggaatagccagggcaagatgggccagggtggttttggaaaaggcaacattcaggcagaaagataggaatgcatgttctcactttgggctgtgggttcaggcttgagggtggggctttgcagggaccccatccttttctgcctagggtttacctgcctcctgtttgtatcaaagagacaacgattacagtctcaaaaaattaatcaacatcaatattgaaattt

SEQ ID NO: 929945 - DNA, 578 bp, Homo sapiens
aaactgtggcaataatcaatagcttaccaaccaaaaagagtccaggaccagatggattcacagccgaattctgccagaggtacaaggaggagctggtaccattccttctgaaatatacccacacaattttaatatcctgatagcctcatcttactgcctgacccaggaattttgatgacttgaagaggtrttattgccttgtttctttaatgttttcctattacagatgtatggaatagactcattattggacaatttacaaatcctctgacaatatacttcttgaaactcttcatctcttcatgctcctgatcagactagcaaaattctctggatttttgtgttgagtttttgtggggcttttttttcttgctttcctgcctctctccttccctcctttcttctttcctttctcctctctatctattctcttgccatgtgatggttaatactgagtgtcaacttgattggattgaaggattcacagtattgaccctgggtgtgtctgtgaggatgttgccaaaggagattaacatttgagtcagtgggatgggaaaggtaaaacccacccataatct

SEQ ID NO: 929946 - DNA, 584 bp, Homo sapiens
ccagattcataaactgagtcatctgatcttatggccccaacccaggaactgactcagcgttaagaggacagctttggccctgttttgtttgtttttttgtttttttgagacagggtctcactctgtcacccaggctggagtgcagtgacacgatctcggcttactgctacctctacctcccaggctaaaggcatcmtcctgccttagcctctggagtagctgggactacaggtgtgagccaacatgcctagctaatttttgcattttttgtagagatggggttttgccatgttgcctaagctggtctcaaacttctgagctcaatcaatcagtctgcctcagccttccaaagtgctgggactataggcatgaaccaccactgcctggccctatgatttcatctctgacccaaccaatcagcactcccaacttactggttctccacccaccaaattatccttaaaaactctgatccctgaatgctcaggaagactgattagagtaataataaaactccagtttccagcacagccggctgtgtgaattactctttctctattgcaattcctctgtctggataaatt

SEQ ID NO: 929947 - DNA, 764 bp, Homo sapiens
ggcagttgagtctcacctaaactgcctgatttttaaaatttgtctattttttgagataggatcttgcttggttgcccaagctggtgtgcagcggtgcaatctcggctaactgcagcctccaactcccaggctccagcaatcctcccatctcagcttcccgagtaactggaactacaggtgctggccaccacgcctggctaatatttttattttcatttttgtaggacaggktctccccatgttgcccaggctggttgaactactgggctctagcaatcctcctgcctgggcctcccaaagtgctgggaccataggcgcaggccaccacgcctggctctaaattgcctgatttagagctggtctctgtccaggacagcggcagtcccagcttgagcatgcatggcgcagaacctttggctcatcagaaggggggacgggggagaggctggctagaggatcacaggagagaatgtgtctgaggcccaggcctgatgcagggacctcctgccggctggtgagatacggcctccaaggcgctttgtggcaacaccagggcatggcctaggtgaaggccaacaggccctccccacagggctggaacaggaagggagagaagtggtgacccaagaggcccccaagaggctcaaccggggcgggggagggccagaaatcaccgaggggcgtggtgagcagagcaggagccgctgccgccaccagggggcgagggcctagggaatcctgctcgctgccctcacagcgtcccc

SEQ ID NO: 929948 - DNA, 764 bp, Homo sapiens
ggcagttgagtctcacctaaactgcctgatttttaaaatttgtctattttttgagataggatcttgcttggttgcccaagctggtgtgcagcggtgcaatctcggctaactgcagcctccaactcccaggctccagcaatcctcccatctcagcttcccgagtaactggaactacaggtgctggccaccacgcctggctaatatttttattttcatttttgtaggacaggttctccccatgttgcccaggctggttgaactactgggctctagcaatcctcctgcctgggcctcccaaagtgctgggaccataggcgcaggccaccacgcctggctctaaattgcctgatttagagctggtctctgtccaggacagcggcagtcccagcttgagcatgcatggcgcagaacctttggctcatcagaaggggggacgggggagaggctggctagaggatcacaggagagaatgtgtctgaggcccaggcctgatgcagggacctcctgccggytggtgagatacggcctccaaggcgctttgtggcaacaccagggcatggcctaggtgaaggccaacaggccctccccacagggctggaacaggaagggagagaagtggtgacccaagaggcccccaagaggctcaaccggggcgggggagggccagaaatcaccgaggggcgtggtgagcagagcaggagccgctgccgccaccagggggcgagggcctagggaatcctgctcgctgccctcacagcgtcccc

SEQ ID NO: 929949 - DNA, 642 bp, Homo sapiens
ccattgggagtggcctggtgtacagcgctgaggaacttagattctggtcacatgctcaagagtttttaagaaatgagaacaccggatcaaaaaaaaaagtttgccaatgcctgccctacaggagacccttgaacaaaactcaagaataaaataaaggtgtgagtcctctggtatggagaggaggtgtgcagagagtgttgggcagcacatttattggggtgactatttactgactttctatttccacctctggactgtagattttataaatgcagtgcccgtgttagttttgctcatgattttagtattagaactgaacacagtactggtacttagtagatgccctataaatgtatatggctcatgtttttgggtgaccggaaactcagaagagggatcagacatcatccayggtcaggcaatcaaaatgtggggatccttgggctgggccttcgagggcagttagtaacaggcaaattatggcaaagagagatatgttggagaagaaagatcattgatcccaggtatggaggcacaacagggtatagtgcatccagagaactccaagtaagttagtctggctagagtagggtttttcagcctcaatattatcaacatttggggctggataattctttgctg

SEQ ID NO: 929950 - DNA, 656 bp, Homo sapiens
caaaacacatttttaaaaaagataaatgagaacacaagtccaaatatggtgaatgcctaataaaatgaggagaaagaggtcctattaggctctgatgggcagaagaagcttcaggaaggttttggataagatctgagcctctaagaacaggtgaaaatcataaaattggggaggaaggatatggggttgaggaaaggtgaaaaagaatgaaagttacttggggaagaaggaatggtacctgctagtcatgtttggatacaggagtgagtacagcactagctagtgatgtttggatacagcaacacatacaaagggggtttgttctggaaagtggtaaaacagtaagccaggattggtgcaaatatcatagtcatagaattggatgggctcagagtttttccaaaatacataaatatgtttatgcacaagaatatatctggttgctgactgcaaatgagtcatttggccaagtgttgactgagagattatattcrccactggaaacagagttaaaagctgagcagaatgagtctcactagtgccccaggcaacagatggacttcggagtgttgttctttgtggttgatttgcttcttttttgtgaccagccaacagcagaaaacaaataagagggggactaaatgcacttggcaggg

SEQ ID NO: 929951 - DNA, 601 bp, Homo sapiens
aaccactatatgaccatccagggatggtggtaatgagcaaagtcaccattaggtaggattcgcatccagcatggggcctacatgtcccatcaactgacagtaagagtgaatcccaggaacctgggacaggactaggtagggactaggcagaaacttaggacagaagtggtaaactgacaccaacaaaggcagagacttgagacagagkcaggaacttcaagactccaacaaaacaaaaacctcagtgcagaactctcacggctgctggctggctcttttcccagcaggctgctctgcctcatctttaagtgtactctctctgtgtctctttgaataaactcagctactacttaacccttgctgctacttgtgttcccagcggggccagcccactcctctcttggagtggactcttatcaccttaatgagtctttgcttactttcataatgggtctcttggccataacttttctcccaagaagacatctttttttttttttttttttttttttgagacagagtctcgctctgtctcccaggctgaagtgcagtggcatgcaacctccgcctcccgggttcaagtgattatcctacctcagcc

SEQ ID NO: 929952 - DNA, 753 bp, Homo sapiens
tgctgttgcaacccagctgggtatgcgtgcactcaggatggcattgacacaccagcatcctgccgtctcggccccctctggactttgggcacctaggagcacaggagggagtctgaggggtgggctgagggtagctcggcatgagcctgcaggcattcctcatcccttggcacaaatagcctgggcaccatggatggcatgttgacggcaggaggcagacaggctcctgggtggaaaggggcaggtcccaggtgaaacctcaccttcaagccagggacagcctgaagcctggtggccaggctgtcagttctggatgaaatctgtggcttagagtgaaaactcggggtgctgtttccgggcctgctcatggatccctatrgaccaatcagcacacacttcctccctgctgagcccataaaaacccaggctgactgggaaacaagttgggaataccaactgcgggaaggagctcctcactcagggtctcctcaactcatcaggacagcctgcctgcagaaaggaactacccactgcgggtcccctctctgctgagagttgggcaggcggtgcgatgacctgcctgcagaaaggagctacctacttcgggtctcctgcaagctgctctgtcactcaattaagctcctctccacctggctcaccctacagttgtctgtgaatctccttcttcctgaacatggaacccgtctaatggcaggactgaaagagctgtaacacaaacagggctaaaacatg

SEQ ID NO: 929953 - DNA, 753 bp, Homo sapiens
tgctgttgcaacccagctgggtatgcgtgcactcaggatggcattgacacaccagcatcctgccgtctcggccccctctggactttgggcacctaggagcacaggagggagtctgaggggtgggctgagggtagctcggcatgagcctgcaggcattcctcatcccttggcacaaatagcctgggcaccatggatggcatgttgacggcaggaggcagacaggctcctgggtggaaaggggcaggtcccaggtgaaacctcaccttcaagccagggacagcctgaagcctggtggccaggctgtcagttctggatgaaatctgtggcttagagtgaaaactcggggtgctgtttccgggcctgctcatggatccctatagaccaatcagcacacacttcctccctgctgagcccataaaaacccaggctgactgggaaacaagttgggaataccaactgcgggaaggagctcctcactcagggtctcctcaactcatcaggacagcctgcctgcagaaaggaactacccactgcgggtcccctctctgctgagagttgggcasgcggtgcgatgacctgcctgcagaaaggagctacctacttcgggtctcctgcaagctgctctgtcactcaattaagctcctctccacctggctcaccctacagttgtctgtgaatctccttcttcctgaacatggaacccgtctaatggcaggactgaaagagctgtaacacaaacagggctaaaacatg

SEQ ID NO: 929954 - DNA, 768 bp, Homo sapiens
actcagggtctcctcaactcatcaggacagcctgcctgcagaaaggaactacccactgcgggtcccctctctgctgagagttgggcaggcggtgcgatgacctgcctgcagaaaggagctacctacttcgggtctcctgcaagctgctctgtcactcaattaagctcctctccacctggctcaccctacagttgtctgtgaatctccttcttcctgaacatggaacccgtctaatggcaggactgaaagagctgtaacacaaacagggctaaaacatggccccctgctcaccacgttgcaggcaaggagaagtagagaggagttgcggcccttctaggagccgaaacctcggggctccctgaaccagggctgtgacgcactgtattgccctctttgggggtctagggttcctgtcatctccaagattttgggcatcatggcaatccccttgtccaaatgctgctgacctcagtggaagctgcttgcagtatgtcttgtccaggcacagccttgcctgtagctgacacctgtgctggygcctggagctgccctagtcgcagcagccgccagcgtacctggctgtgtgcagtggccagatcccatgctcacttgcccacacacccctctccactctgcgcctgtctcgtccttggcaggtgtgggatccgggagggtatcgtaagccaagcatagcaggtcaggccaagcggacggaacaagcccagcaggcatgagcaaaacccaggcagaggcaccactggccacaga

SEQ ID NO: 929955 - DNA, 768 bp, Homo sapiens
actcagggtctcctcaactcatcaggacagcctgcctgcagaaaggaactacccactgcgggtcccctctctgctgagagttgggcaggcggtgcgatgacctgcctgcagaaaggagctacctacttcgggtctcctgcaagctgctctgtcactcaattaagctcctctccacctggctcaccctacagttgtctgtgaatctccttcttcctgaacatggaacccgtctaatggcaggactgaaagagctgtaacacaaacagggctaaaacatggccccctgctcaccacgttgcaggcaaggagaagtagagaggagttgcggcccttctaggagccgaaacctcggggctccctgaaccagggctgtgacgcactgtattgccctctttgggggtctagggttcctgtcatctccaagattttgggcatcatggcaatccccttgtccaaatgctgctgacctcagtggaagctgcttgcagtatgtcttgtccaggcacagccttgcctgtagctgacacctgtgctggtgcctggagctgcmctagtcgcagcagccgccagcgtacctggctgtgtgcagtggccagatcccatgctcacttgcccacacacccctctccactctgcgcctgtctcgtccttggcaggtgtgggatccgggagggtatcgtaagccaagcatagcaggtcaggccaagcggacggaacaagcccagcaggcatgagcaaaacccaggcagaggcaccactggccacaga

SEQ ID NO: 929956 - DNA, 768 bp, Homo sapiens
actcagggtctcctcaactcatcaggacagcctgcctgcagaaaggaactacccactgcgggtcccctctctgctgagagttgggcaggcggtgcgatgacctgcctgcagaaaggagctacctacttcgggtctcctgcaagctgctctgtcactcaattaagctcctctccacctggctcaccctacagttgtctgtgaatctccttcttcctgaacatggaacccgtctaatggcaggactgaaagagctgtaacacaaacagggctaaaacatggccccctgctcaccacgttgcaggcaaggagaagtagagaggagttgcggcccttctaggagccgaaacctcggggctccctgaaccagggctgtgacgcactgtattgccctctttgggggtctagggttcctgtcatctccaagattttgggcatcatggcaatccccttgtccaaatgctgctgacctcagtggaagctgcttgcagtatgtcttgtccaggcacagccttgcctgtagctgacacctgtgctggtgcctggagctgccctmgtcgcagcagccgccagcgtacctggctgtgtgcagtggccagatcccatgctcacttgcccacacacccctctccactctgcgcctgtctcgtccttggcaggtgtgggatccgggagggtatcgtaagccaagcatagcaggtcaggccaagcggacggaacaagcccagcaggcatgagcaaaacccaggcagaggcaccactggccacaga

SEQ ID NO: 929957 - DNA, 607 bp, Homo sapiens
caggagacaccaggatgggatggctggaaaggacacagggaccgggaggagagggcaggagacgagggccagagaggaggagagggtgggagcaggagggggaagtgctggtcttgacctcccagttctgcctcctgcttcctggggaggggagggtggagtccagccaccgacttctgcttgtggatgctttgtcttcttttctttggacctttcccaccagtcctggataggctgaggaggggccgtgggacctgtctggggtgaggtgaggtcaggtrttgggctggatgtgggaggctgttccttggccgcagcctgtaactgaataaatgccattaaaaggggaatccatttcctccctcactcctggcttccattgccttcccccaggccccagccctggttccagaatccctctgaccactcctcttgtgctcaggagggcagaataactgcagcctttccctgtgccctgccaggctggtcccgggccccctctcagcccactcatccagggatgcagctctggccttggcccacccccatcagagggcctgtggccctgatcaccgcactccccactctgtgaccagacgttctctcc

SEQ ID NO: 929958 - DNA, 483 bp, Homo sapiens
gaataaatttaacgaaagaagtacagaaggctaggcgtggtggcccatgcctgttgtctcagcgctttgggaggccgaggtgggcggatcacctgaggtcgggaggtagagaccagcctggccaacatggtgaaaccccgtctctactaaaaatacaaaaattagctgagcatgatggcgggtgcctataatcccagctactcgggaggtggaggcaggagaatcacttgaacctgggagcrgaggttgcagcgagccaggatccctccactgcactccagcctgggcaacaagagcgaaactccatctcaaaaaataaataaataagtggagaacttatgctttgaaaactacaaaacactgaaagaaatgaaagaagatctaaataaatggaaagacatgccatgttcctgaatcagaagacttaatattattaagatggaatactctgcaaattggtctacagattaagcatggtcccta

SEQ ID NO: 929959 - DNA, 780 bp, Homo sapiens
taaccatagtaatcaagactgtggtactggcaaagggaaagagacctagatcaagggaagaagaatgtagaacccagaaatgtagacctaaagtatgcctgattcttgataaaagttcaaaaagcattcagcaaagtaaggatataatctttaaacaaatggagctacagcaagtggccattcacaggccaagaaaggagcattgacctgcctctcacactttacactaagtcagttgtgacctttatctcttacaccaaatttacttggcatggctcatgcacctaaatgtaaaatgtaaaastatacaacttttaagaagaaacttaagaaaaaaatctttaggatatagggccagagaaaaagttactaggcatgacaccaaaagcttgatccactcaaggaaaattgaatctaatcaaaatttaaaactttcactctgtgaaagcccatgtgaagagaatgaaaaagaacagtaacaggcagaacacagaggattttcagggcagtgaaaatactgtgtatgacagcggtccccaaactttttggcaccagggaccggtttcatggaagataatttttccaacggatggggacggggaaggggatggtttcgggatgaaactgttccacctcagatcattaggcattagattctcataaagagtgcacatcctagatcccccacatgcacagttcacaataaggttcacacttttatgagaatctaatgccaatgctgatctgacagaaggcagagctcagggagtaatgcttgct

SEQ ID NO: 929960 - DNA, 640 bp, Homo sapiens
cacagttgtgtgtatgcatggttatgtgtatgcaggtatgcatgtgtgtgcacggttgtttgcatgcacatgtgtgtaagcatatgcacacaggctctgcacacactagggtggggcagaggtcctgagaagcaggctaagtggtctgttgctgagcagtgacagatgggagagaaaaagaaggatgaacttgacaatccataaggccccatgcagaaagctcaggggctgagagcacagaggtcatcagaaaacaagcccacagctcagtggcagaccagagaggagctttccagcctgggttcttcaaagagactcagaagcctatgatttccctcctgttcctcctcagggatatctgggagaagccactgtctttggtcgtgagtcgaggtttctcatcaatgctggtttctctaagctgatggcttgggagaagagtggtgaagaggggcacaaggcaggtgmcacacatacagctctctaatcttgagggtgtgccttgtggacacacttcataaggcccagaacctggctctaccttttggtggtcagtttcccagccactgaggaccaccctcccatgtgccagggcccttacttgggcggcttctccacggtgcggtaggtgctgaaggcc

SEQ ID NO: 929961 - DNA, 613 bp, Homo sapiens
cattaggagatatgcctaatataaatgatgagttaatgggtgcagcacaccaacatggcacatgtatacatatgcaacaaacctgcacattgttcatgtgtaccctagaatttaaagtataaaaaatatatataaaaaataaaaaaakaaatagatgtcctgtaaaaatatacacaatttttacagacaaatacatttataagttgtttttatcttaaaaattggggatatttcatatttataactaattattgagccttaagttttcttggccatttctaggctaataaactaagaatcatgtaaactaagccaaagtagaatagacataaaagtcctgaacacttcaacttcctatccttcaagaagtataccttgcaaagctcatttgagagaggaaaagctttcctccaccctcggttttacagtgctgaggcttctcatcacatttctatgacttgtagcttaaatccatgttacatggtcactggcattgttagtgcttctcttttaacactgtaggaattaatcaatttggtggcatatttaattaattctatcactaggggattgtaaaattacatatatgaatacctcactttagaggccactt

SEQ ID NO: 929962 - DNA, 664 bp, Homo sapiens
ccgagccatgcatgggatataatctcctggtgtgccgtttgctaagacccttggaaaagcgcagcattagggtgggagtgacctgattttccaggtgccgtctgtcacccctttctttgactaggagagggaattccctgaccccttgcgtttccccggtgagacgatgcctcaccgtgcttcagcttacactcggtgcacagcacccactgtcctgcaccctctgtcctacactccccagtgagatgaacccggtacctcagttggaaatgcggaaatcacccgtcttctgtgtcgctcacactgggagctgtagactggagctgttcctattcggccatcttggctccaccgctcctcattgaatcttaagatctgtaaggtaggagatactcttctcagtttatatakaagaaaattgcatgttagagaggtaaataatttttctttaatcatgtaactacttagggtagagttgggatttgaaaggaaacagtttgactccagagaatgttctcttaactactgtgctaaactgctttctatttgtatgtaccacagtcttgaaccaatgccaagtgcaaattagactgtacttgctttattacaattttatgtcttgccaaaaaagataattgatttatatttctgtgttagatgtgaa

SEQ ID NO: 929963 - DNA, 757 bp, Homo sapiens
gtgcagaaaaagttttattatgctcgaatcctctgaattgatgatgtaaacatttcaatagataaagtctaaggtagacagcattaatatgttgattagagggggaaaatgcccacttatatatatagcaccgaaaaatataccattatttcctacagataattgcaaatacaaaarcttgtaaattagattaaaatttagtagtttgtatgagcatttttttggcaagtggatgtgattaactggtcaaagaaattgaaggtaaatgctgttttgcaaacaaaaccaaaattagggcaaaacagaaaagctcaaagaagacaagtaagcaaaaaacttccatgttcatattttaaactgcaagttttaccctaggtgagtaaagtgggcatatttatttgggattaggtagtaagatttcattttaaaaagtgttttcttatatgcatttacttgtaaatagcagcaattatttaaatttttttcttgtcatataataagtggatctgttttagttttgtcatttgaaattagaaatttaatacaaaatttttgaggaaaaataagatagataaaagagtaaaataaaatcccagaattttcacttggcaacaattcacctatgatttaccaaaaatctgtatgagtaaccgatttatttgaaacaaatcatcctaaacctagtatcttgaaacaatagcaatcaggtgttttcccagaaatctccaactgagtaactctttgtgaagaagatggc

SEQ ID NO: 929964 - DNA, 592 bp, Homo sapiens
ttggggttggagagttcacggtggctcattaataaagctggcaagttgatgctggcttaattcaacaagtaacatcacaatagcccaataattttttcatatacatatgtcataatactggtaataatagaaaacagtgatagagagcttaccttttgatagaggccacacacaactgatctcattgaatctttttttttaaatattaaaaaatgtttattgagtgcatccatcagccattcttttatggcttgtagttttccygtcttgacaatctccttcactgaagatcaaactaaccttttaatattttcatttattttacttttttaaaaaaattttttattatactttaagttttagggtacatgtgcacaacgtgcaggtttgttacatatgtatacatgtgccatgttggtgtgctgcaaccattaactcatcatttaacattaggtatatctcctaatgctatcactccccccttcccccaccccacaacaggccccagagtgtgatgttccccttcctgtgtccatgtgttctcattgttcaattcccacctatgagtgagaacatgcggtgtttggttttt

SEQ ID NO: 929965 - DNA, 642 bp, Homo sapiens
gatgttgagcctgtgagtgcacagaagtcaaaaactggggtttggaaacctccgtctaaatttcagaagatgtatagaaatgcctggatacccaggtagaagcttgctatagcagtggagtcctcctggagaacctctgctagggcagtgcagaagggaaatgtggggtgggagccccacacagagtccctactggggcaccacctagtggacctgtgagaagarggccaccatcctctagaccccagaatgatagatccaccaacaacttgcaccatgcaccaggaaaagccacagacactcaatcccagcccatgaaaacacctgggagggaggctgtaccttgcaaaaccacaggggctgagctgcccaagaccatgggaacctacctcttgtatcagtgtgacctggatgtgagacatggagtcaaaggggatcattgtggagctttacgatttaactgcctgctggattttggacttgcatggagcctgtagcccctttgttttggccaatttctcccatttggaatggctgtatttacccagtgcctgtgcccctatagtatctgggaagtaactaacttgcttttgattttacaggctcataggcagaagggacttgccttgtctcagatgcgat

SEQ ID NO: 929966 - DNA, 768 bp, Homo sapiens
caggctagtatcatttcactgagaactccactccattaatgccaccacagtttcattatctatcaactatccctcacttccctttttgtccagcttagattttatggtagaagtcataatcatgtccctacagacactctcacctcccttattcagttctgcgatgagcacactcatctgccacaactttagcactggttggacctatctaccttctttgtatttagatctgaacaaatgtgtatggctggagaaaaatcaataaggaggctgcctgtttcattaaataaattcatcatcatatttaggtgccttaaataggtactctgcactgcctgacagtgtttccctaataaacttaatcattctcaagagaactgttttatactttctcccctcccccttacatcttactcactctcactgatgacctcatttcttatttcattaacaaaataaaagtaatgagataggaactctttaaacttcccattgtcaggctctgtatggcagacacrcctgatagccgtaacttaagcatacactgagaatgatcctgtatggcagatgcacctgaatatgtgttcagagttacaagttaaggaaactgggagtggccaactcagaaattcatttcttatctatgaagaacatatgaacctccacctgtcccatggaacacgggctgtgcagggggttgaggccctttgttttgggttaaatgaaggctgtgaggtggaggttgctggaggaggatgctatgcaaaa

SEQ ID NO: 929967 - DNA, 732 bp, Homo sapiens
caaaactgtcaggtttctctctttccatagctcttgtttctgctgctgtgtatgttgacagcacccacttctactgcagatggactttcttcatgccgcaggaagcctgcctgcattcaaggctggtgaggcaggagcagttccccaaaggaagtggtgtacatggtggcgaagcaatggttcaagctccaactgataagagtgtcaggaacaaatcaggtaaggatgaagaaccatgtctccccacccacagaggttagctcagggcagcaggagcagcagggaaatatatatatatatatatatatatatatatatatatatatatatacatayacatacacacacacacgcacacgcacacatatatatgtaatcacacacaaacacatacacatatgtacatatatctatgttaatatcatatcatggccacctttccctgtggaatccccacccggaggatttagtgaggagaaaactcgatttcagtggctctgcatcagtcgaggaagactagattatgttgtggtaaccaataacctgcaaatcttagtgacttaacataatgaagctccatctcacaaccctagtgcatggcagtacaagacggtaggtgaataaatgcctgacctatgtcaatgtaggctaattgcacccaattaagctagtcccttcctcccttcctgttcgtcattgcttgctcatcattgtcctcactctgggaccaag

SEQ ID NO: 929968 - DNA, 733 bp, Homo sapiens
ccacggtacatgagggagagaggaaagagtgttctctttccctcttccatccttgcatccccgagtcccggtgaccttggcaggtgccgccatgagtgccaaagtggcttgcacccatgaagcagggagggcctagagaataggaattatccgctctcatctatgcctctatctcctactgtcagtagccttggagttccctagacctcatttatgccatggatatttatgccgtgggtttatccatgaaacaagaagcttgggttggcttaattggcaggaatgagccatgctcacctgcaccgtgccttttaacctctgttgtcatttgtctctggatccctcagatccagttttccttcttaggactttgacccaaagcttgaaattgagtttgggacaaaaatgtgtctcggtggggggtgggggaggtgcatggactccttatcataagccaaatgctaaggtgaaactgtggaattgagtcctcctccaacaagggrgagaaaaagatgtcttgtgacacaaccagataactggtggctatagttatgcttgcgagggtttgggtgcatggtccttggctttgattagctttcttggtcttacttttccaaaaaggaaacctccaagtgatgggcatcctatgtattcaaatcacctagcaggacttgcaggataattgcccagagctagaatattgatccagatttctacattacccatccctttt

SEQ ID NO: 929969 - DNA, 433 bp, Homo sapiens
ggagacaggccagtctctgtttaaattcacaaccgtaaccttaaaggggacccttccaactggcaggaaattcagccatcatttctgagtccatgcattctcgctttcccaaaccattgtttcatatcttctttttcatcaaacctctcacwcctccttacctattttctctctcagttgtcacctttcttcctttttcactgagaaaactgaagtagtcagtagagaatttccacaaactcccaaacatcacatttacccaccccctgcatctgtgctacaaactctttttcctgttagtctgaataaatgcctgagttttgggggggacaccacattccatctcctctcacctattggagaatgtcactccagcaaacctctcctctccttccccactatcagttttcccatctctgagatatctttccca

SEQ ID NO: 929970 - DNA, 627 bp, Homo sapiens
ttcagagagaatagactgtaaatatttctgatcagacctaaggtctgtgttgatgttaatgaatgtgggcttttcctaaattccaaaagggaggagggtataatgggtcatgtccaactccctcttcccatcatggcctgaactagttttcatgttaactttggaatgcccttggtcaagaggasaggtccattcagatggcaggtgggtggggtggggggcttagaatttatttttggtttacacaacccatgcatttttgctggttctttgtccttgagactatgacatattgagattttaactctatttcttttctcttttcattcatccttttccatctcatgtgtttataaatacagttcaacatatgttattgaatacagcttaattttcccatttcgaactttaagtggctccttctaacttaaaaaaaattatatatcaaattatttcttcttttaagtggtcctctattaaggatttcttcagagctcctacttcaccatcttcccctcaaaggacttagtctgccacactgcccacaccatctcggcctggcatcactttgagaaacagagctgaattctatatgattaaaacccctgaggtcctaagcccctattt

SEQ ID NO: 929971 - DNA, 622 bp, Homo sapiens
actaaccttgaatgaaaatggacgaatgccccaattaaaaggcacagagtggcaacttggaaaaagaagcaagacccactggtatactgttttcaagagactcatttcacatgcaatgacacccagaggttcaaagtaaaggsgtagagaaaaatctaccaagcaaacagaaaacagaaaaaaagcaggagttcctagtccaatttcagacaaaacaggctttaaacaaacaaaggcattacataatggtaaataactcaacaaaaagacttaagtatcttaaataaatatgcacccaacacaggagcacccagattcataaagcaagttcttagagacctataaagagatttggcaaaccacacaataatagtgggagacttcaacgtcctacagacagtattagacagataatcaagacagaaaactaacaaagatattcagcacctgaacttgacacttaactgaatggacctaatggacatctacagaactctccaccccaaaacaacagcacatacattcttctcatctgcacatggcacatactctaaaatcaactatacaattggacataaaatactcagcaaattcaaagaaacaaattgtacccaccacactc

SEQ ID NO: 929972 - DNA, 644 bp, Homo sapiens
ctggggggtggggggctggtggagggatagcattaggagaaatacctaatgtaaatgatgagttgatgggtgcagcaaaccaacatggcacatgtatacctatgtaacaaatctgcatattgtgcacatgtaccctagaatttaaagtataatttaaaaattttttttttctgtgggaccatactatttgtttgatttttctcttcccattagaattcaagccatgtaacaatctttgacttaaaggtgaaaattgcattgggatattttttctatcttgatatataggaaggrtacacaattgtcagtatagcctctgaactaacatcttttcttcacaaaattagttttctagaaacaagaaatattctatgtgaaatcatgtatagtagggttaaatatttattttcgatacttatctattcaaataaaaaggtttctttacatcctataatttatatgatcttttcaatgccttgacattgtaggatggaacagagtccccatgtcctcccatccacaccttactatgttcatttgcaatacagtaaactcttcaaatacagcaatttaagtccttttattccagttaacttggaaacttaattctttttgggatgacttaatttctcaaatgttttttc

SEQ ID NO: 929973 - DNA, 690 bp, Homo sapiens
ctcaaagctaccatcatctcccccagtcaatgggggctggcttagctgctccctaaagaatctacatataagaatcatttgttcggctgggcgcggtagctcatgcctgtaatcccagcattttgggaggcgaaggcgggcagatcacctgaggtcaggagttcgagaccagcctggccaacatggtgaaaccccatctctacttaaaatacaaaaaattagctgagcgtgttggcaggcgcctgtaatcccagctactcaggaggctgaggcaggtgaattgctcaaacctgggaggcggaggctgcagtgagctgatctcagcattgcactccagactgggcaacaagagcgaaactccatctcgaaaaaaagaatcatttgttctaccctgacaccacagcttggatgggtccagcttgctgaggtgggaagtgtctaagccctgggagctgtgtatcatgttagcacttgcttccatctactttgcctgcctattgtctgtgggtcaagaagacaccatgcccagtggagggsctgaagctactagaatgttttatttgttttgggtttttttttgttgttgtttttgtttttaccagattctcaagtgtctttccttctccctctattcaagaaatgaagtcccagcccctactttccaggccccaggggcatacactgctcagg

SEQ ID NO: 929974 - DNA, 603 bp, Homo sapiens
catgttgttcactttttccattagagcctttagtatattaatcatacttatttaaaatttccagtctgattattccaaaaatcgctgccataaatgagtctggcaatggttctgattcttgttatgcctcatgcaactttgatttttgccttttagcatgtcttgtaagtttttgttgaaagcagacatgatatactgggtagaagaaactgcggtaaaaagtcctcttgtttgaggctttatgtttctctggctaagagttgggytgtgtttactgttttgtgtagctgtataggttacatttcctttagtgtccttttttaaatcaatttttattttagattcaggggtacacgtgcaggttacaagggtattttgtgtgatgctgacgtctggggtacaactgatcctgctacccaggtcgtgagcatagtacccaataggcagcttttcaaccctttctcccctccctctctcctgtctcttgcagtacccagtgtctactgttcccatctttatgtccatgaatacccaatgtctagctcccacttatgagttcggaacatgtagtttttggttttttgtttcagcattaattcactt

SEQ ID NO: 929975 - DNA, 456 bp, Homo sapiens
tgttctttttagtttttttattttttctttgagaaagagtcctgctctgtcaccaagacttgagtgcagtggcgtgatctctgctcactgcaacctctgcctcctggattcaagcaattctcatgcctcagactcccaagtagctgggattacaggtgcataccaccatgccggctaatttttgtatttttttagtagagatgaggtttcaccatgttggycaggctggtctctaactcctgacctcaggcgatccacccgcctcggcctcccaaagtgctgggattacaggcatgagccaccgcacccggccccttgatacttatttattctaatgacatttattgtgtgcctactatgtgccaagtactatattaggttctgagaatgaacaagatatgactcctactgtagggagcctctgttgtgattcgctgtgagtttgggaggaggaca

SEQ ID NO: 929976 - DNA, 617 bp, Homo sapiens
gcttgactgcaacttcatgaaagatcctgagctagaagcatctaggtagctttgcctggattcctgaaccacagaacctatgagacaacacgtttgttgatttaagccattaatacgttttagaataatttgttatgcttcatatataaatcatacagattttggtatcaggagtaaagttccattgtcacacataccaaaaatgtgggaggaatattagaactgggaaataggttctaataatagggcccagttctaatactttaaggcctttcaggagaggagcrgtaaagcctaaattgccaggaattgatagttggtagattttagattgttaggaggtggactgtgagttttaaggaatgtgaggaacatctgagtagaaactggaggcaagggatctctgttaggtagttgtggaaagtttagcaacccaattttacagtgatgtggaaggtagaaaatgtgccgaatgaattagatggtctagctaaaaagatttccaagcaaagttaactgccaggtttcttcttggtgtttacaataagatgtaagaggacagagaaattgagggaaagatggtttaaaaggagccaggacacaatggttttgaaagt

SEQ ID NO: 929977 - DNA, 614 bp, Homo sapiens
acaagtcatgcttagggttaggaaatgtaactgtattcactatactcaatcctaaaaattgtgtaatacctctatgttcaaggaggtttaagttcgcctccctcatagacctctaaatgcagtgactatgagaaatgtcataggagaggtacaaaatatgtttggagaatagaaaaggaggaacaactgtttcattgattcaaggaaatttcctcaaaaaaggtaacattggagctagatattgataaatttgtttaaacaaagactttctgttttttaagctaaaagaaccaacgtatgcaaaagcagagagaaacatatgaaaagagaactgtgttttccaggaatggagaagatgagaatgtggctagagtgttaggggtgcatagttctgagtagatggatattaggcccttcaggagattgaygcctttttttttctttctttcttttcttttttttttttttgtgagacagagtttcactcttgtcgctcaagctggagtgtgatggtgtgatctcagctcaccgcaacctccacctcccaggttcaagcaattctcctgcctcagcctcccgagtagctgggattacaggcatgtgccaccaccccc

SEQ ID NO: 929978 - DNA, 679 bp, Homo sapiens
ggtgagggcgtctggtcgtcctgagggagggccggtgttggtgagggcatctggtcgtcctgagggagggggtcttcttcacattctcacctcatttcttttcactcagcaggattttttattttattttattttattttattttattttattttattttattttatttattttgaaacggagtctcactcttgcctaggctggagtgcaatggcgcaatctcggctcactgcaacctccgcctcccgggttcaagcgattcatctgcctcagcctctggagtagctgggattacaggcacgcsccaccacgcctggctaatgttgtattttagtagagacggggtttctccatgttggtcaggctggtctctaactcccgacctcaggtgatccacccgcctcggcctctcaaactgttgggattacaggcatgtgccaccacgcctggctaatgttgtattttagtagagacggggtttctccatgttggtcaggctggtctctaactcccgacctcaggtgatccacccgcctcggcctctcaaactgctgggattacaggcacgcgccaccacgcctggcctattttattttattttgagacagagtgtcactctgtcccccagtctggcgtgcaatggtttgatctcggctcactgcaacctccacctcccggg

SEQ ID NO: 929979 - DNA, 596 bp, Homo sapiens
agaaactcccatttttaaaccatcagatctcatgagacccattcactaacacaagaacagcacaagaaagacctggtcccatgattcaataacctcccaccaggtccctcccacaacacatgagaattcaagatgagatttggatggagacacatccaagccatatcattccacccctgacccctcccaaatctcaggtcttcacatttcaaaagcaatcatcccttcccaacagtcccccaaagtcttaactcatttcaacattaactcagaagtccacagtccaaagtcrtctcactgagacaaggcaagtcccttccacctataagcctgtaaaatcaaaagcaagttagttacttcctagatacaatggaggtacaggtattgggtacagccattccaaatgggagaaattggccaaaacaaaggggctacaggccccatgcaaatccaaaatccagaaatacagtgaaatcttaaagctccaaaatgatctcctttgactccatgtctcacatccaggtaacactgatgcaagaggtgggttcccattgtcttgggcagctccatcatggtggctttgcggggtacagcct

SEQ ID NO: 929980 - DNA, 707 bp, Homo sapiens
aatatggctttccttcttccccgacctgtggaatctgcacactggattcacgccctcccccaagttctggccaggaggcttctcagtcggttcaaattgttacaatgttcacatggaaatttcctttgtcctgtggccttttctcagaccctctggccgtcctcttgaaggactcctatgaggcyaggcaaaacccacttgatggggaacacagcaagctcccaggacttttcctgctgcttcctctacccctgtatttctctcagctctctaaatggactcagctccaggtaaggtcaaaatcttctccagtaatctaggccttcagtttccccagtgggggtgtgtgttcggcaatggatgatttccctttcccacttccacagtatgggtactcacagtatttggggtgtctcctgggtcctgcagtagcaatagccttccttcagggggtctgtgagccttctcaggtttcctgatttattcctgcagttgctctggagcaaacattcaagacgtaagcctccacacactgctctgtccacccgagtcggagatgcaatttagtcctgcatcccgtccgccatgatccctgaaacctcagcactgcacaattctaattgaagggccaggaagcacttccaatagatggtgatctcttagctaagccttgcaacatgagaggtgatgggtggatggaggtaaga

SEQ ID NO: 929981 - DNA, 561 bp, Homo sapiens
ccaagctgtacatgagccttttttttttttttttttatgaggtggagtcttgctctgtcacccaggctggagcgcagtggtgcgatctcagctcactgcaagctccacttcccaggttcacgccattctcctgcctcagcctcctgagtaggggactacatgtgcccaccgccatgcccrgctaatgttttttgcatttttagtagagacagggtttcaccatgttagccaggatggtctcaatctcctgaccttgtgatccgtctgcctcggcctcccaaagtgctgggattacaggtgtgagccactgcacccagccacatgagccattttaagaagtgactagagctagagtgaccaggatatgtggagaagtgtcctaaggctgtgtggggcagcagatccctgggcctggctcatgaaaccatcctttcctcttagggccctgggtctgtaatgggaggggctgccttgaagttctccaaaatgcccttgaagccttccctgcctctcccattgtcttagctatcagcgcttggcttctttttagttatgcaaata

SEQ ID NO: 929982 - DNA, 574 bp, Homo sapiens
gttcaagccgtgttcaaataaggtaaactccaagctgtagccagtctggctgtttctgcaccttacttctgttttctgtatgtcattttcctttttctgaccataaatgtgatccaaccacgagatagcccccaggtcgctctggccctattctggttctgggtgttgctctatttacaaattgttttttgctcaattaaactttgtctaaagttttccttttaccaacacagaaatacacaagacagaaacacacattgggaggctaacagggcagagaggctttttgatgtccagtgtgggctggtaagtaggggaggagtagaggccctaaggagatcctgcagggaccctctgagcattccatggaaagttatggcaatagacaggaagaaggtgcaatggtccaaaactattgctttgctasaagaaaatattacatttgttcttcctttccaattattggaaactgtagaggtacaagtagaagattttaaaataagacaaccaattatacagtggaagacgagacattaaaaaataagctggatgcagtggctcatgcctgtaatcc

SEQ ID NO: 929983 - DNA, 731 bp, Homo sapiens
aaaatgatttcctgtcacaagaaagtagatcttgaggacattcactatatcaggttatgattaaataacatggcaccaaattaccattgtgtttcctcaaggaagaatatggttgtcatttcagacttaaaaaatcagcatccttccaaatttatcaattaaggactgaaatgtgtaacagggttcccaagaaaattctttttagcaagaggaattgtcagtaattcactgtgcaggtggatacaataaacaattttggagtagatctttgytcagaaaagtcatttgcatgacactccctcgtgtgcataatgtaaggtttttgtttgtttgtttgtttgttttttatttgagacagagtcttgctctgtcatccaggctggactgcagtggcacgatctcggctcactacaagctccgcctcccgggttcacaccattctcctgcctcagcctcccgagtagctgggactacaggtgcccaccaccacacccggctaattttttgcatttttttagtagagacagggtttcaccgtattagccaggatggtctcaatctccggaccttgtgatctgcccgcctcagcctcccaacgtgctgggattacaggcatgagccaccatgcccggccaatgtaaggtatttttaaaggtattcttaaagggcgtaacagaatcttctgtttggctgaacaaggcaactctgctcttggagtatgggggattagg

SEQ ID NO: 929984 - DNA, 731 bp, Homo sapiens
aaaatgatttcctgtcacaagaaagtagatcttgaggacattcactatatcaggttatgattaaataacatggcaccaaattaccattgtgtttcctcaaggaagaatatggttgtcatttcagacttaaaaaatcagcatccttccaaatttatcaattaaggactgaaatgtgtaacagggttcccaagaaaattctttttagcaagaggaattgtcagtaattcactgtgcaggtggatacaataaacaattttggagtagatctttgttcagaaaagtcatttgcatgacactccctcgtgtgcataatgtaaggtttttgtttgtttgtttgtttgttttttatttgagacagagtcttgctctgtcatccaggctggactgcagtggcacgatctcggctcactacaagctcygcctcccgggttcacaccattctcctgcctcagcctcccgagtagctgggactacaggtgcccaccaccacacccggctaattttttgcatttttttagtagagacagggtttcaccgtattagccaggatggtctcaatctccggaccttgtgatctgcccgcctcagcctcccaacgtgctgggattacaggcatgagccaccatgcccggccaatgtaaggtatttttaaaggtattcttaaagggcgtaacagaatcttctgtttggctgaacaaggcaactctgctcttggagtatgggggattagg

SEQ ID NO: 929985 - DNA, 774 bp, Homo sapiens
ctagccttgttaaatgtcatctttatctttaaaggtggttcgaggaattgtttcccagtcctgccactagttgaggcactggtattgatgctcaatgttctgaacttttttgtgggagaagctgctctattggcaaagaaggaagggttgtgatggttaaatggggtgaggtgaggactgacaaacagcaaaaaattgctaactaaccatagtcgaagatgacaaactggttacaggaaatttttctcaaatctcctcatgtggttcsgaaatactaatcaaaacacaaaaattaattagaagataatatttagctaatgctagtttactttttaacatcaagatttcatgaaagccaagttctaatgactattgtccagtggatttttttgttttgttttgttctgtttttttgagacagtctcactctgttgcgcaggctggagtgcagtggcacaatctcgagtcactgcaacctccacctcccaggttcaagcgattctcctgcctcagcctcccgagtagccaggattacaggcgcccgccatcatgcctggctcatttttgtatttttaatagagagagggtttcaccatgttggccagggtggtctcgaactcctgacctcaagtgatccactgacctcggcctcccaaagtgctgggattataggcttcagccactgcaccttgcctgtccagtggatttttaaattttatttaaatgtcaaactactttaagcatatacacaaatagagaaaataatgtagacca

SEQ ID NO: 929986 - DNA, 738 bp, Homo sapiens
ttttgagaactactggtttaactgttgtttctttgcagttcagtaatctttttttttttttttttttttgagagatggagtcttgctctgttgcccagattggagtgcagtggcacgacctcggctcactgcaacctctgcctcctgggtttaagcgattctcctgcctcagcctcccgagtagctgggactacaggcacgtgccacgaygcccggctaattttttgtatttttagtagagatggcgtttcactgtgttagccaggatgggtctcgatctcctgacctcgtgatctacccaccttggcctcccaaagtgctgggattacaggcatgagccaccacgcttggctgcatttcagtaatcttaaaagagtttcagtaatcttaaaagaggttcagcttaatttcccaaataacatgattctcagacatttcttttttccttttttttttttttttttgaggcagagtctcgctctgttacccaggctggagtgcagtggtgtgatctcggctcactgcaacctccgcctcccgggttcaagtatttctcctccctcagcctcctgagtagctgggactacaggcaagcgccaccacgcccagctaacttttatatttttagtagagacagggtttcaccacgttgggcaggctggtctctatctcttgaccttgtgatccgtccacctcggcctcccaaagtgctgggattataggcatgagccactgcac

SEQ ID NO: 929987 - DNA, 828 bp, Homo sapiens
agaaaactcattccactgagaagcagagatggctcatgtgaccttctatatccccaaaacaaggccaccccaaagtctccatctgcattagagctgaaccaacacttccacaaacacctgcagccaaggctactcagacagctacaaacatgcagacattgattacaaccaaataaatatcatgaagactgcactactgtactcatgcagaatacaaaccaaagcaccctacccaactgacactatgagacacatctacaggaaaaagttttttcctactaaaactacattctaatattaggagaaattgttttgtcagatgtatagatactaatgtaggaacacaagaaatgtctaaaaagcaagaaacatgacacccccaagggaacaaaatcattttctaattscatatcccaaagaaaaggacagctacaaaatgcctatatgatttttaaaataatgatgttaaagatacgccgtgagaatcagtagaataaaaatagacaattcaaaaagtaggaaaacaattcatgatctgaatgagaaattcaacagagatattacacaaaaagaactaagcagaagtcttgaaactgaataataaaatgaatacaatttaaaaaataaaatcaagagcttcaacaacagactagatcaagatgaaaaaagaatttctgaacctggagacaggattttcggaataagccagtcagacaaaaaagaataagtaagaataaggaatgcctacaaaatgtgtggaacaaaatgcaggggacaaatattcccattatgggagttctagaaggagaagagatcagaaaggtgtag

SEQ ID NO: 929988 - DNA, 828 bp, Homo sapiens
agaaaactcattccactgagaagcagagatggctcatgtgaccttctatatccccaaaacaaggccaccccaaagtctccatctgcattagagctgaaccaacacttccacaaacacctgcagccaaggctactcagacagctacaaacatgcagacattgattacaaccaaataaatatcatgaagactgcactactgtactcatgcagaatacaaaccaaagcaccctacccaactgacactatgagacacatctacaggaaaaagttttttcctactaaaactacattctaatattaggagaaattgttttgtcagatgtatagatactaatgtaggaacacaagaaatgtctaaaaagcaagaaacatgacacccccaagggaacaaaatcattttctaattccawatcccaaagaaaaggacagctacaaaatgcctatatgatttttaaaataatgatgttaaagatacgccgtgagaatcagtagaataaaaatagacaattcaaaaagtaggaaaacaattcatgatctgaatgagaaattcaacagagatattacacaaaaagaactaagcagaagtcttgaaactgaataataaaatgaatacaatttaaaaaataaaatcaagagcttcaacaacagactagatcaagatgaaaaaagaatttctgaacctggagacaggattttcggaataagccagtcagacaaaaaagaataagtaagaataaggaatgcctacaaaatgtgtggaacaaaatgcaggggacaaatattcccattatgggagttctagaaggagaagagatcagaaaggtgtag

SEQ ID NO: 929989 - DNA, 586 bp, Homo sapiens
ataactgttgttttaatttacaaatccttaatgatatatgatgtagagcatgttttcatgtgcttatttgccacataccatttttggtaaggttttcatttatgtcttttgyccattttttattcaacttgttcattttcttattgttgagtgtaattggtttgatctttttcttattatttattttcctatagttgagttttaaaggttaaaaatgtcagttatttccaaaatgagctatagtttcaatgaaatctcaattaaaacccagcaaattatttaatgtacattgacaaacggattcaaaatttatatgggaaggaaaaaaatacagagtagccaacataatattaaaagagaggaataaagtcacagtgttacatgatccttggggtatagtttttctggccagaaaggtgcctctgaagccaggggcgcctttggctgcattttgccttggatctgcaaggcttgttttgcccactcagcttatcaagctatgctcagctcaccctagaggcctcagtctcacacctgccaagggagagtcaagtatggaacaaagaggggtgtgtgagtgaatccg

SEQ ID NO: 929990 - DNA, 583 bp, Homo sapiens
caattggtccatgggcagccataggaagcccagaaaaggcaccacaagttcacactcaggtccatgggagtagcagcccacacaccagccttaaggccctctctggcctgaagttgaggcctcgccagggacctgctcccttctccccaggaacttgtctgcttcctgcttcctttcatggagcccagtctgtaggtgccaaggggaacctgcagcccagtgctgaacttcccttagtacccccttggtttccctcctatgctcattggtacccaaaatctagaggggactgaggtgggagggggctggtgtgtcagcactgygccacgtgtgtgtgtgtctcagcaggatgtaacagcgcctgggcttggccctgactttgctctaaaattggagtgggcactgacagcagggagaaaccaggccataggaacagacacttctgagcctgtggaggcagaggggccttcctgggcacccaagactgcagggatgatttgggtggctatagctacacccaggagggtgccccccccattctgtggagagggaggcctgggtctgcagctgtggtttgggcagc

SEQ ID NO: 929991 - DNA, 638 bp, Homo sapiens
gtttccatttgatttagttctagaaagtccttaggttctctgcctccaggccctattctcctgcctcaatcatagatcactgcagccttgaggtcctgggctcaagctcaggtcccacctcagcttcctgagtagctgggaccacaggcccgcaccaccatgcccagctaktttaatttttttttttttgagatggaatcttgctctgtcgcccaggttggagtgcagtgttgcgatctcggctcactgcaacctccgcctcctggattcaagcaattctcttgcctcagcctcccgaatagctgggactacaggcacccaccaccacgcccagctaattttcgtatttttagtagagacggggtttcaccatattggccaggctggtctcgaactcctaaccttatgatccgcacgcctcagcctcctaaagtcctattttttttttttaagaggccaggtgtggtggctcacacctgtaatcccagcactttgggaggccaaggcgggtggatcctctgaggtcaggacttctgccattttcccattcatttattcaagttttaattgagtacttacttgtgctaggcactgttgtggcagcggacaaactgttcaacaagacagagctcttgttc

SEQ ID NO: 929992 - DNA, 577 bp, Homo sapiens
gtgcttaacatctagtgcttaacacaatgcctggcaagtaatagatgctttataaatatttggaatattaatgaatgaatctggaaagaatattatagcttaccaaaaaatgatctttatgatgtatatggtctcccctgtaactgttgggcacccaacaacagtagggatttcataccactgccaataaaatgtccyttgggtcatatggtggcattgatgttgcgattttgagcttttttttttttttttttttttttttttgagacggagtcttgccctgtcgccaggctggagtgcagcagcacgatcttggctcactgcaacctctgcctcctgggttcaagtgattctcctgcctcagcctcccaagtagctgggattacaggcacgtgccatcatgcctggctaatttttgaatttttagtagagacggggttttgccatgttggtcaggctggtctcaaactcctgacatcaggtgatccaccagcctcggcctctcaaagtgctggaactgcaggcgtgagccatcgcgcccggcctaatttttgagctattttgtttcacttcccat

SEQ ID NO: 929993 - DNA, 791 bp, Homo sapiens
ttttatttttgtatttttttttttttggagagacaaggttttggcatgttgtccaggctagtcttgaactcctagactcaagtagtccactgcctcagcctcccaaagtgctgggattatgggcattagccacatgcccatccaagatccacattcttgaagccaaggattaacatactactttcttgtccaaacccttcagtgctttctcattgactttgtaacaaaataaaatgcagaatggcaatcagaggattaaaaaatatcttttaacccatataattaaataattttatttacaaacatttttacttatttgtccaaaggttatattagacaaatcagtgcacatgctttttaaggtattcttctggaattttctgtttataggatggcccttgattgaacactatccactaattcccrtgaactttatattgccaaatcattacttttaattccacattcctgtaattattgaattaatcttcaactacatttgagagataacgtaaaaatatgttttatatatatgactgtttgcatttgtagattagaagagtagcaaatgaccaatataaagccacatacctattaagaaaagttactgggaacatctaagaagcattgaatagctgtaacaattcaagaaacactcctcttgagagaggaagcagttagaggattgttaggcagatagagagggagcatctctggaggtgacaaatatgtgtgagaccacacctgcaccactcctgtagctaatggaaagaagtgtggtccagaacttc

SEQ ID NO: 929994 - DNA, 646 bp, Homo sapiens
aattatacatgagttaatactgatataaataaatgattgaacaaatacataaatgattagataaatagtggagaacagacgaatctctcctgtggaagaattccaaataatttatgtagatactccaccttcaaggaggtgaatcataactcctcacactttacatagtaattttcttccaaagagtactgtgtggaaagtgatacaacacagtaacttcacagtggagaaacctggcaaacactgtcccagccaggtgattacggttagcatcaacaatgttragccatgcagatagtatatacccttggtgtaatgggaggaaaatggtactttgcctctgtgggtcttctttgccaaacacataacctcagcctacaaaacattagacaaatctcaaatgagggacactttaccaaatacctgaccattaattctcaaaactgtcaaggtcatcaaaaacatctgagaaaccgtcacagccaagagaggactatgaagacatgatgaagtgtattgtggtgtcctgggtggatagaaatagggcattaggtcaaagctaatttgaataaatatatgaactttaatttttaaaaattgctttcaatcaacagtcactcatcacatctgtttatttttatttagt

SEQ ID NO: 929995 - DNA, 629 bp, Homo sapiens
catcaagcatattagaaaaaggggtgacttgggagagtgaggggatcagcactttaggccttgtcaaccctcctgcttatctgcttggcagcttctggcatctccttttccctaagtccttgaacctctttcctaagcgtaaacctttctgtttttagtcctaaacctctcttttcacagtattcctgtcaaatgagtacttaaacacatgtttcatctgtgatttgttttgttaattgctttgtggattatttgtggcagaatttaaatcctaattcctttctacaatttagccagtaaattcaargaatgtacctttttacgtttgcagcatgtgccgaagcgccacctcagaagataaaaagaaatgagtctcatatttggcattcttttaggtttgttacctaccttattcattaatgtaaataattgaattacctgtattttaccattcgtaaaccaggttaatagatatatattaatagcaggctttctgtgtgtgtcttttccctcctttctttctatttatttatttatttattttttgagaccaagtcttgccttgttgcccaggctagaatgcagtggtgcaatcttagctcactgcaaactctgcctcctgggttcaa

SEQ ID NO: 929996 - DNA, 753 bp, Homo sapiens
cttaaatgtatacaactgtaatttatttaaaataatattaattttttaaaaaattgttcttacaggtatctagggactattccaggccaagcaacttatttttcaatatagaattaagttggaaaagttagaaaatattcacatggtgatactgtgatcagatgagctatttaaacatttctaaaagacttgtgttttggcctggcgcagtggctcacgtctgtagtcccagcactttgggaggctgaggagggaggatcacttgaggtcaagagttcgagaccagcctggccaatagggtggaaccccaactctactaaaaatacaaaaattagcactatgtagaattgatatgagaaatccctaccttaatgtggcagatgatatttacacacttaaaatagggtttctcctcttctgttgcctatwtattatatagtaccaagtgtcttgaatattttatgttgatggtcaaaatttgaaattttaaaagatgacttttcaaagttataaaaaaggaaagaaaagggtatatgtgagcccttcactcaaagcagttgtatcagggacttctctcatgtcttatctccccacttgctaggacacaataccttatgaaatgggggtcatcaatttggtcagccaatcttctgtctggaatttgcccatttctggccctttatgcagcactctcaactcatctgtcatttatccttgcagcctaagtaacattcgtttttatcttgggaagga

SEQ ID NO: 929997 - DNA, 750 bp, Homo sapiens
taacaacaatcaataacggcaagttttcagtctctacttatgatactgagttttgattgaaaggttactgtccactatatattttttatttttttcctgtagttacataccaatatattttattttatttttattttttatttcttacatgagaagaaacatcagacacagttgagggatcaggaagtgggtcctccagggaagatgaggcattgtgtttgatggcttttaaacgtctcttctagaggcatctgcctcatcaacaatggtttttgtctagaagtctctgtttgattttataagctgacataatttcttgttgctgttatgaatgcrtgctgctgtagtccttccataagcctgtcaaatattttcaccatgtcatctacaggcactttttatgcagtattaatagcatcatcttcattgtcactataatcacaatcaccttgattcagaatcactccagccatttcaccatcagtcaatgaatagacaactggagcctcatcattgatgtcaaaacttcaatatccacttcttccagcctactgacagtctctgaaggtatatttttgcatatgtaaggaggtcagacatctttttttttcacttggcatacagaatcctttaaagttaccacttgttcaacatcatcaataaacacaatcacaggcttgatgttgtgccaggcatgcacaactatgtctttagtcattgtgttccaagtgttggcaacaacatatatgg

SEQ ID NO: 929998 - DNA, 632 bp, Homo sapiens
gcaaaggacatgatcttgtttgtttttttggctgcatagtattccatggtgtgtaggtaccacattttatttatccagtcttctgttcatggtcatttgggttgattccatgtcttttctattgtgaacagtgctgtgatgaacatataagtgcatatgtctttcaggtagaatgatttacattcctttgggtacatacccagtggacagattgctggctcaaatggtagctctaaattctytgaggaatctccacactgctgtccacagtggctgaactaatttatattcccaccagcaatgtgtaagtgttctcttttctcgataacctcaccgacatctgttggtttttgactttttaatagtacccattctgactggtgtgagatggtatctcattgcagttttgatttgcatttctctaataattagtaatgatgagtattttttcatatatttgttggctgcatgcatgtcttcttttgagaagtgtctgttcatgtcctttgcccactttttaatgaggttattttttgtttgttgaattgtttaagtttcttacagagtctggatgttagacttttgtcacatgcatggttgtgaatatcttctacctctctgtagattgttta

SEQ ID NO: 929999 - DNA, 631 bp, Homo sapiens
tcagagctgcttgggtagctttgctcagccccgctctgagcctcggtttcctcatctgtgaaatgagttaataataacgacctcacagggctaatgtgaggacaatggatgatgaatgccagtgccccttcccatttccctccactgcttatcctacaagtgatcagacagaaccaccatctgtatgtgttatcctgctatttcttgcatctgtgcttttgcacagatttttgttattcccactgctttaaattcctgtattttcttctttgctggtcaatttatcctgtttttcttttcttttcttttttttgagacagagtcttgctctgtcgcccaggctggagtgcagtggcacgatctcagctcactgcaaccttcgcctcccgggttcaagyaattctcctccctcagcctcctgagtagctgggattacaggtgcatgccaccatgcctggctaattttttttattatttttagtagagacgtggtttcaccatgttggtcaggctggtctcgaactgaccttgtgatctgtctgcctcggcctcccaaggtgctgggattacaggcttgagccactgtgcctggccaatttctcctgtttcaatactctgttcagtatcattt

SEQ ID NO: 930000 - DNA, 631 bp, Homo sapiens
tcagagctgcttgggtagctttgctcagccccgctctgagcctcggtttcctcatctgtgaaatgagttaataataacgacctcacagggctaatgtgaggacaatggatgatgaatgccagtgccccttcccatttccctccactgcttatcctacaagtgatcagacagaaccaccatctgtatgtgttatcctgctatttcttgcatctgtgcttttgcacagatttttgttattcccactgctttaaattcctgtattttcttctttgctggtcaatttatcctgtttttcttttcttttcttttttttgagacagagtcttgctctgtcgcccaggctggagtgcagtggcacgatctcagctcactgcaaccttcgcctcccgggttcaagtaattctcytccctcagcctcctgagtagctgggattacaggtgcatgccaccatgcctggctaattttttttattatttttagtagagacgtggtttcaccatgttggtcaggctggtctcgaactgaccttgtgatctgtctgcctcggcctcccaaggtgctgggattacaggcttgagccactgtgcctggccaatttctcctgtttcaatactctgttcagtatcattt

SEQ ID NO: 930001 - DNA, 589 bp, Homo sapiens
ggcagaaaaaaatagacaaagaatttagaacactctacatgttaatgtatagttgcagatttttcaaataatgaccatttgagctctgaattttttttgatgtaattttgcccatcagtttataaatgtgcataagttccaggcatgatggctcatgcaagtaatcccagcactttaggaggccaaagcaggcggatcacttgaggacaggagtttaagaccagtcttgtcaacatgatgaaaccctgtgtctactaaaaatacaaaaattagctgggcatggtggtgcatgcctgtaattccagctactcgggaggctaaagcaggagaatcacttgaacccaggaggcgaaggttgcagtgagctgagattgcgccattgcactccagtctgggtgacaagagccaaacgctgtctcaaaaaaaaaaaaaaaaaawatatatatatatatatatatatatagatatatatttaaaaatgaaaatgtgcataagaacaggccataatatgtagctggctggagtcccagaagatctggcatactttaatgtttgagaatcccattttatttcttaataatctcttgag

SEQ ID NO: 930002 - DNA, 636 bp, Homo sapiens
ctaggccagtggaagtgccagcgggtcggtccaggggtcctcggtagaagttgttagttgaactcatttggggttccatttgtaagaccatctgtagcttgatggcttcgattctagaggaaacaaatttgacaagaaggttaaaaatacagggcccaaaggcaagtaacagcaagatggctgccacgggacctagaaaggggagaaaccatgttgcccaactccagaggttggtataagartttgaaaggtgtggtctgatttcagaagccttttcctgtaaatgtcgggtggcatctcataccatccccgactggttagtgtaaaaacaacactcttcccctaagaaggtgcagagtcctcctttctcagcagtgaggaggtctaggcatcggcagttttgtagagtcactgctgccaaagagtctatttgggattgtaaagtaagaatagatttcgttatttcttgcaaactgtctgagaaatcctttgagagtgtgtggtagtaggataatgaagcagataaactggctattccagttcctgtagcagtagccattcctaaccctataagtaggtgtattagttgtatggctctgcactgatggacttgagctttgaggggtactgataagg

SEQ ID NO: 930003 - DNA, 630 bp, Homo sapiens
tagtgcatgggagagcttcagctagtcactgaaaattacagaatatcaatagctattgacgtgggtggcaacatattacaaaatggaactgtagatcatttggggaaaatattttgatgaaattcacccctctgggtgatgtgctgaatcttaaaccagaaagaaagaacatcaaaccaaacaaaaaaggttatttttttcctttgaatggacagatagcaacatctttaaatgctaaataaagtagccctgagcttctgagggtgcccctcagggactattgkctgaactgtcaatcaagtctcttggatttctgccctcaatgcttctttccttttccagctttccttcaaatgttcagcagtgataaatagagagttgtttgtcttttatttcaaatgccttccttataatatcagagctatgttagcatcatttacaaatcaatctagcaggatggcttaatgtcatcacaattttatggcagccagtgatatccaaactatctctagagtcttgatttatttctgtttggctctaaattaggttatttctcctccaaaggttaccaagtgctttagaaactgatgccctgatgccccttactcccacacgtgagagaaatgcctc

SEQ ID NO: 930004 - DNA, 585 bp, Homo sapiens
tggggtacaagagatactttgatacaggcatgcaatgcataataatcatgtcagggtaaatgggcatcacctcaagcatatatcatttgtaatacaaacaatccaatgatactcttttagttactttaaatagagatggggtctcactgtgttgcccggactggtctcaaactcctgagttcaagcaatcctcctactttggtctcccaaagtgctgggattacaggtgtgagccactgcacctggcaatactcttttagttacttgaaaatgtaaaattaaactgttattgatcgtagtcactatgttgtgctatcaaatattaggtcttattcattctttctaactatakttttgtttccattacccattccgacttccccttcccctcaccccgccactactcttcccagcccctggtaaccatcattctattctctgtttccatgagttcaatttttaaatttttagctcccacaaataagtgagagcatgcaaatttgtctttctgtgcttggcttattttacttaacataatgaccgccaattccgtccatgttgttacacgtgacaagatctcactca

SEQ ID NO: 930005 - DNA, 630 bp, Homo sapiens
agggtaagaacccccgaatcccttccctccatgtctctactctcccttctctctggacttgcttccttcactatgggcaaccttccaccttccattcctccttcttctcccttagcctgtgttctcaaaaacttaaaagctcttcaactcacacctgacctaaaacctaaatgccttattttcttctgcaatgccacttgaccccaatacaaactcgacagtagttccaaatagccagaaaacggcactttcaatttttccatcctgcaagatctaaataattcttgtcataaaataggcaaacggtctgaggtgcctgacgaccagacattcttttacacattggtcccttcctagtctctgtgcccgtgcaactcgtcccaaatcttccttttttccctcccgcctgtcccctcaatcccaaccccaagcktcactgagtctttctaatcttccttttctacagacccatctgacctttcccctcctccccaggctgctcctcgccaggccgagctaggtcccaattcttcctcaacctccgctcctccaccctataatctttttatcacctcccctcctcacacctggtccggtttacagtttcattccgtgagtagccctccccca

SEQ ID NO: 930006 - DNA, 617 bp, Homo sapiens
aatatcttccttcattttcacgctcactggctcttccataattcaggttctaacatttccttgcccagataaatcatagcagctccctccttcttttctctgccaacatactttctcttattcaagaaattcttcacactgatacttgagttttcttcctaaattttatcttgctttttatagctcatttatttaaaaacctgtaataactcctcattgcctatggaatgaagtccaacttcttagctaggtgttcaaagccctccccaatctgataaagccttcattcgtagtttattctccaactctgcctttttgtgattccgttatgcatgttcacagctcagtaccttgccatawacttttcctttcctttgtgaggcctctttcatagcacctgttaaaaaccatgctattcttgaaattctgctgaaatgccctttttgatgaaggctaactagattgaaccactttttatgtgccaccgagatagtcctctgcatgcccatcagggctagcgctcatgctgtgcttggtatgagctacatctgctctacagccggcctgtatgttcctagaaattaaagactgtcctacacacacctctgtaactaata

SEQ ID NO: 930007 - DNA, 777 bp, Homo sapiens
atgggtacctgccatcatgcctaactaattcttgtatttttagtagagacggggtttcatcatgttggccaggctggtcttgaactcctcacctcaagtgatccacccacttcagcctcccaaagtgctgggattacaagtgtgagccctgagccaccatgcctgacatgaattttttatgtcagatgttgtacttttcacctttagaatttctatttagatcttttrattgacttctgtctttattgatactctcaatttggtgagacatttttctcataatttcctttaattttccaacataatcctcttcagctctttgagtatatttcaaatagctagtagtatttctcttgtaaatccaacatctggaccttttcagggaaaatttctattgactggtttcttccttcactctatgcattttctgtacttttttgcatgcatcataaatgtttactgaacactgaacattttaaataaaacaatggcaattctggaaatgagttctctctcccctcatcccctcacagtttgtggttgctgtttgctgctggtgtttgtttagtaaattgtctgaaataaatctgtatttttttgttaaatgtggccactgaagtttctgctcacttagttgaagattgaatcacttatgattagacaaagatttacttaaaccctcaaaccattaagacctagtattttctgaacatctctatgtgcatattggagtatactttcaatactcagtcagggagtttacaaatccagcttcac

SEQ ID NO: 930008 - DNA, 586 bp, Homo sapiens
tagcgaacactgcaagcccaataatgatgtggctgttgaagacttgtagaggtatcaccttgttgaacttgggtaaaatctggaataattctctggattaccaggcagagacttttgtactctttccttactttctccaaaacagactccttgtctctatactgagctacctggtgctgggtgaagggggacacaaacacccctgttgccaccaccactaggtcagacctgaaggccacacagcactgggtcttgctcatggcccctggtaaccactgcctggctaccacctatgtttgttcaagaccctaggattctacaatcagcagatgatgaatctagccaggcttcagtccttttcttcgtggcttcgaggtccccctgttcttggtcaagtctggaaatggtgtcttagaaccagagcctggaattrgaacccttaagaatctacctggttctctattacaatatggctgagctggtaccaaaaccacaaatcatagttcttcccactcttgtctcctttttccacaggcagaggaatctttccccatggccaccatcatgtcatgcccacaacgagtac

SEQ ID NO: 930009 - DNA, 777 bp, Homo sapiens
atgggtacctgccatcatgcctaactaattcttgtatttttagtagagacggggtttcatcatgttggccaggctggtcttgaactcctcacctcaagtgatccacccacttcagcctcccaaagtgctgggattacaagtgtgagccctgagccaccatgcctgacatgaattttttatgtcagatgttgtacttttcacctttagaatttctatttagatcttttgattgacttctgtctttattgatactctcaatttggtgagacatttttctcataatttcctttaattttccaacataatcctcttcagctctttgagtatatttcaaatagctagtagtatttctcttgtaaatccaacatctggaccttttcagggaaaatttctattgactggtttcttccttcactctatgcattttctgtacttttttgcatgcatcataaatgtttactgaacactgaacattttaaataaaacaatggcaattctggaaatgagttctctctcccctcatcccctcacagtttgtggttgctgtttgctgctggtgtttgtttagtaaattgtctgaartaaatctgtatttttttgttaaatgtggccactgaagtttctgctcacttagttgaagattgaatcacttatgattagacaaagatttacttaaaccctcaaaccattaagacctagtattttctgaacatctctatgtgcatattggagtatactttcaatactcagtcagggagtttacaaatccagcttcac

SEQ ID NO: 930010 - DNA, 718 bp, Homo sapiens
ccagctgggctcctgagtctggtggggacttggagaatctttatgtctagctaagggattgtaaatacaccaatcagcactctgtatctagctcaaggtttgtaaacacaccaatcagcaccctgtgtctagctcagggtttgtgaatgcaccaatcggcactctgtatctagttaatctggcggggacttggagaacctttatgtctagctaagggattgtgaatgcaccaatcagcactctgtatctagctcaaggtttgtaaatgcatcaatcascactctgtgtctagctcagggtttgtaaatacaccaatcaacactctttatctagctaatctagtggggacgtggagaacttttgtgtctagctcagggatagtaaacgcaccaatcagcatcctgtcaaaatggaccgatcagctctctgtaaaacagaccaatcggctctctgtaaaatggaccaatcagcaggtcagcaggatgtgggtggggccagataagagaataaaagcaggctgccagagccagcagtggcaacccgctcgggtccccttccacactgtggaagctttgttctttcgctctttgcaataaatctcgctgctgcttactctttgggtccatactgcctttatgagctgtaacactcactgcgaaggtctgcagcttcactcctgaagccagcgagaccatgaaccccccgggaggaatgaaca

SEQ ID NO: 930011 - DNA, 718 bp, Homo sapiens
ccagctgggctcctgagtctggtggggacttggagaatctttatgtctagctaagggattgtaaatacaccaatcagcactctgtatctagctcaaggtttgtaaacacaccaatcagcaccctgtgtctagctcagggtttgtgaatgcaccaatcggcactctgtatctagttaatctggcggggacttggagaacctttatgtctagctaagggattgtgaatgcaccaatcagcactctgtatctagctcaaggtttgtaaatgcatcaatcagcactctgtgtctagctcagggtttgtaaatacacmaatcaacactctttatctagctaatctagtggggacgtggagaacttttgtgtctagctcagggatagtaaacgcaccaatcagcatcctgtcaaaatggaccgatcagctctctgtaaaacagaccaatcggctctctgtaaaatggaccaatcagcaggtcagcaggatgtgggtggggccagataagagaataaaagcaggctgccagagccagcagtggcaacccgctcgggtccccttccacactgtggaagctttgttctttcgctctttgcaataaatctcgctgctgcttactctttgggtccatactgcctttatgagctgtaacactcactgcgaaggtctgcagcttcactcctgaagccagcgagaccatgaaccccccgggaggaatgaaca

SEQ ID NO: 930012 - DNA, 609 bp, Homo sapiens
ataataaacagatttttctgagtcaaaatcaggacatgtgattggagacaattttttttctgagttgtaaatgtatttataaagaagtattgccttgggctcttagaaggacaaaaaaagcaatgctgagagacgtgctaaggctgggacaagtgccatgtagcagaagaaggcgggaggttcccttcacacaacagcagatgaggttgcatctgagcacgtttcccaccctggggagccctgggaagtccatcgctgtcctacagactgtccaggtggccatcagagaatgtgtctggagtggcagggcagcaaaagtccaagacaagtcacaacgaagaggcagacagtgacctcctctgaggacaatgaggcagttgcacaaacatytaagtgattagaatatgccccaggaaggtgggggaggaagactaaaaagatctgagggggaattttaacgtgaatgtgactgaattataaacctgaacttgcagagaaaattctgaactggattgagtttacttggaaatgactaaaatcaaaactttctgccaagtcagaaattacatttactataagaaaataaagattacagttttgcatatctga

SEQ ID NO: 930013 - DNA, 527 bp, Homo sapiens
caggctgagcacggtggctcacgcctgtaatcccaacactttggggggccaaggtgggcagctcactggaggccaggagttttgagaccagcctggaccacatagcgaaatcctgcctctactaaaaatacaaaaaaaaaaaaaaaaaattagctgtgcatggtggcatgagcctgtaatcccagctaccctggaggctgaggcatgagaattgcttgagcctgggaggggaggttgcagagagcggagattgtgccactgcactccagcctgggcarcacagcaagactctgaaaataaaaaaagaaaaggaaggaaggaaggaaggaaggaagggagggagggagggagggatcaagggaggaaggaagggaaaggcacaccagatatcaagactagccacccagaaatattttactcccattaatcaaaaccttgcagaagcgataaacagtgagttttaccattcacccaatgatactgcacagagagagaggctgggaccctaactggtaagaaattcttac

SEQ ID NO: 930014 - DNA, 678 bp, Homo sapiens
aattaccaccaactgggtggctgcaaacagcagatatttattctcttacagttctggagaagtctgaaatcaatgtgtcagcagcgccatgatgcctccaagggctctaggggagaatccattcctcgcctcttccagcttctggtggctgttgtcatccttggcttgtggccacatccctctgctttgtcttcatatgcaccttctcctatgtgggcttttgtctgtgagtaaaatatccctctgcatctctcccataaggatacatgtgatgacatttagggcccatggagtaatccaggatgatcttttcatctcaagatctttaatcacatctgcaagatccttttttaaattaaagtaacttgtacagatttgttatgaactgaatgtgtccccccaaaactcctaagttgaaaccctaaacccccagygtgattgtatttagaagtgaggcctttgggaggtaattaggattagatgaggtcataagggtagggttcttgtgacgggatcactgccctgatagaaagagacaccatagagcttgctctctctttcaccccctcatgcacacaaaagtcatgtgagcacatagcaagactgtagccacctacaagccaagagaagatccttcagaatgaaacctaccttgttagcaccttgatcttggacttc

SEQ ID NO: 930015 - DNA, 643 bp, Homo sapiens
tcacataaatatcctcccaaacatgcacatctgtaaaaaacaaattcatcataatcgtctgagcctaactctaactcccttgtacatataaaccctcttaaaaatttctgcatggtttaagtagacattgagttgtaaagggatacaactactaggtcaattgatcaaggattaatcttcgttttgttaagagctttaataaaagttgtgtgctgtttcagaaaatcaggtcatggatagcagccctgcgcatgataggtgacacaacacatctgtacaagtttgtgtttgtagttgtggctctcagagattttatatatagaagtaattatttggcgttatcattatgttttatggtagagtcctatgcaacactgacatattgaaatactatayaggtactatcttactgtaagtgttttcactttattctctattataatactgttaggacgtaatactgattttttgaagttatatgtatatatagattatattatctgtgaaaatcatttccagagagtaaagagggtgctataaaatttttctattataaaaaggggcattgagtctgactaaggactgacatcatctaaatgctactattgagctctggaaagtaaagtatgacccgtgaacttgg

SEQ ID NO: 930016 - DNA, 734 bp, Homo sapiens
  misc_feature 251: n = A,T,C or G
agctgacagacacatgaaaaaatgctcatcattactggtcatcacagaaatgcaaatcaaaaccaccagataccatctcacaccagttagaatggcaatcattaaaaagtcaggaaacaacaggtgctggagaggatgtggagaaataggaatgcttttccactgttggtgggagtgtaaactagttcaaccattatggaagacagtgtggtgattcctcaaggatctagaactagaaataccatttgacncagtgatcccattactgggtatatacccaacggattataaatcatgccactataaagacacatgcacacgtatgtttattgtggcactattcacaatagcaaagacttggaaccaacccaaatgtccatcaatgatagactggattaagaaaatgtggcacatatacactatggaatactatgcagccataaaaaaggatgagttcatgtcctttgcaggggcatagatgaagctggaaaccatcattctgatcaarctatcacaaggatagaaaaccaaacaccgcatgttctcattcataggtgagaactgaacaatgagaacacttggacacagggcggggaacatcacacaccggggcctgtcatggagtgggggcctgggggagggatagcattaggagaaatacctaatgtaaatgacaagttaatgggtgcagcaaaccaacatgatacatgtatacctgtgtaacaaacctgcat

SEQ ID NO: 930017 - DNA, 550 bp, Homo sapiens
ggtaagaatttcttaccagttagggtcccagcctctctctctgtgcagtatcattgggtgaatggtaaaactcactgtttatcgcttctgcaaggttttgattaatgggagtaaaatatttctgggtggctagtcttgatatctggtgtgcctttcccttccttcctcccttgatccctccctccctccctccctccctyccttccttccttccttccttttctttttttattttcagagtcttgctgtgttgcccaggctggagtgcagtggcacaatctccgctctctgcaacctcccctcccaggctcaagcaattctcatgcctcagcctccagggtagctgggattacaggctcatgccaccatgcacagctaatttttttttttttttttgtatttttagtagaggcaggatttcgctatgtggtccaggctggtctcaaaactcctggcctccagtgagctgcccaccttggccccccaaagtgttgggattacaggcgtgagccaccgtgctcagcctggtgtgccttttctttttcttttt

SEQ ID NO: 930018 - DNA, 550 bp, Homo sapiens
ggtaagaatttcttaccagttagggtcccagcctctctctctgtgcagtatcattgggtgaatggtaaaactcactgtttatcgcttctgcaaggttttgattaatgggagtaaaatatttctgggtggctagtcttgatatctggtgtgcctttcccttccttcctcccttgatccctccctccctccctccctcccttccttccttccttccttccttttctttttttattttcagagtcttgctgtgytgcccaggctggagtgcagtggcacaatctccgctctctgcaacctcccctcccaggctcaagcaattctcatgcctcagcctccagggtagctgggattacaggctcatgccaccatgcacagctaatttttttttttttttttgtatttttagtagaggcaggatttcgctatgtggtccaggctggtctcaaaactcctggcctccagtgagctgcccaccttggccccccaaagtgttgggattacaggcgtgagccaccgtgctcagcctggtgtgccttttctttttcttttt

SEQ ID NO: 930019 - DNA, 749 bp, Homo sapiens
caaaaacccctacaattaggtatattatattccaatttcagaaaatcaaatacaaagaaaaaagaagtcaaaggaaaaaaaccttacctataaaggaacaaggctgggaattacagtagtcctctcctctgtagtttttcaccacttcagttacctttgttcaatatttaaaagtattaaatagaaaattccagaaataattcatgtttaaactgtacaccattctgagtagtgtgacgtctcgcaccatcctgctccaccccaccccgaatgtgaattgtcctggcatatctatgctgcgaatgctacccacctgttagtcacttaggagctgtcagatcacctgatgcagtatcgtagtgcttgtgttcaactgamccttattttacttaatcatggccccaaagcacaagaatagtgatgctgacaattcagatatgccaaaaagaagctacaaagtgcttccttaatgggaaaatgtgaaatttcttctccactcaataaggaaaaactctctcatatgctgaggttgctaagattacagcagaatgagtcttctattcatatgaagaagaaaaaaagcaactcagctagtttcgctgttgcacctcaaactgctaaagttgcaaccacaagtgcataagtgcttagttaaggtgtaaaagggccaggcaaggtggctcatgcctgtcatcccagaattttgggaggccaagacaaggggattgcctaagtgcttgaggccagaa

SEQ ID NO: 930020 - DNA, 801 bp, Homo sapiens
ctcacctcaacatcctggggtcaagtgatcctatcacctcagcctcccaattagctggcactacaagcacatgccatcacttctggctaatttttatgtgtggagacatggtctcactatgttcctcagggtggcttccaactcctgggctcaagtgatccttctgcctcagccttccaaagtgctgagaatacaagtatgagccaccacgcctggcctgtctttgatttttgatggtttgattataatatgtcttggtgatattttctacctgattagagacttttgagcttcatgcacataaatgttcatatctatccccagacttgggacattttcagccattagctgcaaaccttgtggggcattgttggattcccctctttttgtggcttcttatcatcttcccgattgctccaaaacctgtcctagcttatcaccctagatgttcaaaagatatttggtttgtaaagtgtctttatttattctcccatctagtttcctctccaggttggctaccctgtttcttcatttactgtgctatcacccatagtgtttcttgttgacatgctttaggttttgaatttgtgagtatgaattctttctagtttctgtgatatttttcactrtttcttcttccatttgaactttcgtttcatgaaattagaaaaactctatgaaattttcagtaggttttttaaagacagggtcccactctctcaccaaggctggagtgcagtggtgtgaccatagctcactgcagccataaactcttggactcaagcagtcctcccacctcag

SEQ ID NO: 930021 - DNA, 634 bp, Homo sapiens
tctccaaaactgagaaataaatttctgttgtttaagctccccagaatatggtattttgttatggcagactgagcagactaacccattctctcatctaatttttctgtaataacacttagcaggatctgaattttttcctgcttacttactaccctgttctttttttgtcctccagcaagtaaacactgtgttggcaggaaatatatatckctaatgctctaatatacccatagtacctagcacagtaacttaaaagaagtcaataaatattctattttatctgaagtagtctagatagaaaagagcatcaggaccaaaactaccatccatagaaagccctgcttgcaagactggcccctggctggcatctgagaacatgggtttcaggaacgtccctactatttcctaactgataattactatgccgagactgtatacaaacaatatgatcaccacatgttaggcagagaatacctacatgaccagctcccagtaaagaccttgggcacttatctccaatggtccttcctgggcagaaacatcaaacacatgtgttactatatttttgctgcagagggatagtaaactttgacccttacaggagggagggagcttaggaagcctgcacatgggt

SEQ ID NO: 930022 - DNA, 727 bp, Homo sapiens
agctgcttgggaggttgagatggaagaatcacttgaatcctggaggtggaggttgcattgagccaagatcatgccattgcactgcagcctgggtgacagagtaagactccatctcaaaaacaaccaacaacaataacaaaaaatactataaaaaaccctcatattcattatagcaatagaaataagctacttagaaatatatcttataaaatgttaaatttaaaatgagaactgtctgggaataaatcttccaaaaaccacatataaactgaaaaattatgaatacaataatgttttaaagtttgtaaaagaaaaactaaaaaatgggccgggcatggtggctcaygcctgtaatcccagcactttgggaggccgaagcaggtagatcacgaggtcatgagatcgagaccatcctggctaacattgggaggctgaagcaggtggatcacgaggtcatgagatcgagaccatcctggctaacatggtgaaaccccatctctactaaaaatacaaaaaattagctggcagtggtggcgggcgcctatagtcccagctacttgggaggctgaggcaggagaatggcgtgaacccgggaggcagagcttgcagtgagccgagattgcgccactgtactccagcgtgggtgacagagcgagactccatctcaaaaaaaaaaagaaaaaagaaaaaatggaaagatatatttgttactgagcaataggcttac

SEQ ID NO: 930023 - DNA, 727 bp, Homo sapiens
agctgcttgggaggttgagatggaagaatcacttgaatcctggaggtggaggttgcattgagccaagatcatgccattgcactgcagcctgggtgacagagtaagactccatctcaaaaacaaccaacaacaataacaaaaaatactataaaaaaccctcatattcattatagcaatagaaataagctacttagaaatatatcttataaaatgttaaatttaaaatgagaactgtctgggaataaatcttccaaaaaccacatataaactgaaaaattatgaatacaataatgttttaaagtttgtaaaagaaaaactaaaaaatgggccgggcatggtggctcacgcctgtaatcccagcactttgggaggccgaagcaggtagatcacgaggtcatgagatcgagaccatcctggctaacaytgggaggctgaagcaggtggatcacgaggtcatgagatcgagaccatcctggctaacatggtgaaaccccatctctactaaaaatacaaaaaattagctggcagtggtggcgggcgcctatagtcccagctacttgggaggctgaggcaggagaatggcgtgaacccgggaggcagagcttgcagtgagccgagattgcgccactgtactccagcgtgggtgacagagcgagactccatctcaaaaaaaaaaagaaaaaagaaaaaatggaaagatatatttgttactgagcaataggcttac

SEQ ID NO: 930024 - DNA, 771 bp, Homo sapiens
cttctgctctgactttgctccctcctcctcctgaaagaatatgtcaccctctcgacttgtcaaggtctgcacttgaccctcgaggctagctcaaggcccatcgtggccaagtaacttcccaagaacctggctctggaacccagggggatttgcttattctttcacctgacttttgaggacccaaagggcaagggccaagccctgttatcttggtatccctgcatgtgctgtgtatttctcattaaaatacaagctcctgggttcaaggcctcagtacagttgagcaggttgtgcactgcacaaaccttggctgagcagaaagcagggactgaagtgtcgagtctgtaggcaggaaaacaccttatgactaatccacagaggtgtgtcatggactgcagtggcccatccatgtcagatatccttgtcttyatcaccaccctcctatattttgggcccccaacagcacaaatcctcatgcctattcactgaataaacaacaaagtcacatgtgtgagccctattctgttaaaaactctgaaatcttccacaaaatgcaagcttttctaataatagctaagtgacatttacgcgttacgaacataacttacttcattacaaaaaacccttaaaaccataaattaagcactattattttcatcttcatgtttaaatcgagcaaatagagtcagagaggttacataagctttcagagaccacacagctcataagtggtggagtcgtgcgaacatccatccagggcatgtgagtttg

SEQ ID NO: 930025 - DNA, 572 bp, Homo sapiens
gggaagctgaggtgggaggactgcttccaggagttcaagatgagaccaaccagggcaacatagtgagacctcatctctctatatatatttttaaattaaaaacaaaaataaaaaaatggattgtcgattctcccatgttagtctgcagctctaccctgagctccatgagcctgagggattcccgccctgccactgtgaggtgagctcagcatgcgaacttttcacttcttgcagtgtggtcctgtggctggtggatgctctgctccctcaggcagagaatacggtggcagcgttagcctgggcactgggtaggtggagaataccaytgcctgcctatgcgaggtgtcagaacctaagcacttcccaggccaccagcctgagtctgagccactccttggctcactgagatctgcagatgagagtcaagatggcagaggtgagagggagactcatcaagcaaggatgggtttctccaccctgaccctgagtgaagcaggaagaagataccaaactcaaggggatgggggagcagagccaagaagagcagcacggagaactgcccacctgagccc

SEQ ID NO: 930026 - DNA, 590 bp, Homo sapiens
atgcttagagaccgtttgcataaatattcattttttttcagcgaatgaatgtatcccatgttatttctgcccacgcccttcactttagttcaggtacactgtttacaacataggaaagtggttctcaaattggttgggtaaagaacttgtagaaattgcataaatagcagacattcaggccctatccccagaggctttaatttgcatgtgcatggggctacaggtcagtctgataccttgccagagttcaggaaatctaaacttgaagatttgtgtgtgtgtgcgcrtgtgtgtttagtatgttttgttggaaatttctgaatgcaaaactttgcccacattctttgacgttcaatttattatatattcgtgtggatgacatccttcttaatatcatggtggaagacatacctgtatatacggacaggacatatttgtatacacaggtagaaattatgtaactctccatcatcactattgttctaaaaagctaatttggtcacaaattcacatagttacatacttacatagcgtaagtaaaataaataatagaaaccctttctagctttttacctgagggcatttttttc

SEQ ID NO: 930027 - DNA, 612 bp, Homo sapiens
ttatgggaatggtaggggaaaggctgaatatactcatcctgaatactgtgaaataggggatacctctctacttatgatcctcccccacttttttaaaaatatgctggccactatctggtgtggaaaattggcctgtgcttgtctttagaacatgctccaaagcatgcctctgactttgctggaaaggcgttctcctgtctgttgatatctttttctacattctccatttgcgtaaatctgatgsaatcttttagactagctcaattgccttccttcatgaagtcctgctcgggttggactgcatcaattgctgatctcagagttctagtttgctagatgtctttaaaaatatttattaccaacatggcacatgtatgcatatgtaacaaacctgcacgttgtgcacatgtaccctagaacttaaagtataataataaaaaatataatatttattatacaattaatacatatacaaatttgaaactaacagacataagtgtaaagcataaaacaatcacttgcaatttcactagccagaagaaagtgcgctcacatttttcaagcatgaatgtgtgtatgtgtaaagaaatacttgtatgtatgtgtgtatat

SEQ ID NO: 930028 - DNA, 611 bp, Homo sapiens
gtctgattattttgctagagtggctgtaattgtctgaagggttcgtcttgcctgctgcacagataaaaccaattcactgagacagcattattgcagtaaagaaagagtttaattactgcaaggacagccaagtggaaggataggagtttactattactcaaatcagcctccctkctaagtcaggctagggtttttatggataatttggtgggcaggagattaaggaatgggtgttgctgactggttggagatgaaatcattggagtgtggaaaacggtcttcatgtactgagtctgccataggatgggagccacagaacccgttgcattatgagtcatgagtctgaatggggtcagtggattaccagaatgcacaagtctaaaaaacatcttaaaagatcaattttaagttctgcaaaagtgatgttatctataggagcaactggggaagtcacaaatcttgtgacctctggccacatgactcctgagaagtaagggaatatagaaactgtatctacattttagctgaattcaggtctctcccatgatcctaatctcatttctggcctttgattagttttacaaaggtagctttgttccctaggcaaagag

SEQ ID NO: 930029 - DNA, 767 bp, Homo sapiens
gtggcagagttcaataagcctgtggtagaattctcgacttgtacccacatcctaaacatcactggtgagtcaggcaatggcaattactcagccctcacataccctgggctaatgtctggtggtattgtgggaaaaggaacctccataacctgttaccctccaattggactgggacttgtgctatagtccaattggccattcccttcaccttggcattccataagataccacaaaatacacatggccaccaaaascagagagatttgacaaattcttttaatctcaatatatgtgttgactcaataggagtccgtagtgcggtgcctagtgaatttaaggcccaaaaccaaatagtggctgagtttaagtgaacactcttctggtggtcaactattaataagaatgtgaattggattaactacatctattataatcaacagagattcatcagttatactcgggacaccctcaaaggggtggttagcctattaaatgccaccagccaaatggcctgggaaaacaggctttcactagacataatcccagcagaaaaagggggtatatgtgttatgctgggtaggaaatgtactttcattcccagcaatactgccccagatgggaccatcacaaaaactttacgaggactgacaactctagccaacaaactggcacaaaatgcttgcattaataacacatttatgggttggctaaaaggttggtttgaaaaataaaaaggcttcaatttttacatctctcataattgtagc

SEQ ID NO: 930030 - DNA, 556 bp, Homo sapiens
gctgtgacttgggcacccctgtgctcttgggagctaggaacaggcaggagccccgccctccaaggcactgctacagccaccctgctgtagctatggatccaggcatctctgcactgtcgggggcctgggaaggtcccccgctgcccacaggcttggaagtacctgctcctgctgtttggcttctccccaytgtcactgcctgctctgatcttggagtaaggttggggccaagcttgggtgctgttgcaacctggccagatgtgtgcatgcttggggcagtgctgacatgctaggccctgtcaccttggccccctctggactttgtgcaccgatgagcacaggaggaaggctgaggaggggggcgctgagggcagctcattcctggcctgcaggcaacccttggcatgaacagcctgagtcccataaacagtggtgggtggtgaacaagctcctgggcagaaagggccaggtccctggtgaagccccaccttcaagctggggaaggcctgaagccaggtggctgggctgacagtcccacgaaccacagggggacctt

SEQ ID NO: 930031 - DNA, 563 bp, Homo sapiens
caggcatttaaaattttttggtgctaatgtaaatggtcttgttttcaatttcaaatttcaagtgttcattgctgttttttttttctttttcttttagacagagtctcactctgttgccaggctggagtgcagtggcgtgatcctggctcactgcaacctctgcctcctgggttcaagtgattctcctgtatcagcctctggagtagctgggattacaggtgcctgccctcatgcccagctaattttttgtatttttagtagacggggtttcaccacgttggtcaggatggtctcgaactcctgacatcaggtgatccaccctacttggcctcccaaagtgctsggattacaggtgtgagccactgcacctggccattgctggtatttagaagagccaagtcttttgtatattagccttgccttctgcaggcttgctatataaattataggagtttttttgtgcattctttgagattttatactgtgagaaccatgtcatctgcaaagatatttttatctcttctttcccaatctttataccttttatttccttttttttttgg

SEQ ID NO: 930032 - DNA, 744 bp, Homo sapiens
attgcctatgaagaactgtctttgaaatttgacatctgcatcccgataggtgagtgtcctttgtgggcccagacagcaggagatgctcctctcaatttgggaaatttttgaaagaatttccatttgcaggttgaacaagcccaactgacagtgagggaagcaccctgtttcactacggacactcttgggggcttgtttgtarttgtttgtgtgtgtgtccaggcaagtgagtgtcttttgtgggtaccagatagcaggatgtgctcctctcaatttgggaaattcctaaggaatttttgtttgcaggttgattaagcccaaccagtggagagaggaaggaccccggctgtttcaatttggacactcttggggctttgttattgctgcagtggtcagactgtgttttggtgattgtgtgtgtatgatgggaaattagaattacataaactgatattcttttgtaataatgcttgtccccaatattgtttggaatcggagtttgctgttgaatgagaaagtgggatggagtttcctgtatccaggcttttatgttgctgttctgagcaggttgggcctggttaataggttccaggtggttttctgtggtgctgtttggccccagtgttccttggagtctgaggaggtttggcctttaaaaatcaaactgctatggaaactgctttacccaaaattttggttcacaccctatgttggattacatatggggcaaataaagtgtaacca

SEQ ID NO: 930033 - DNA, 744 bp, Homo sapiens
attgcctatgaagaactgtctttgaaatttgacatctgcatcccgataggtgagtgtcctttgtgggcccagacagcaggagatgctcctctcaatttgggaaatttttgaaagaatttccatttgcaggttgaacaagcccaactgacagtgagggaagcaccctgtttcactacggacactcttgggggcttgtttgtaattgtttgtgtgtgtgtccaggcaagtgagtgtcttttgtgggtaccagatagcaggaygtgctcctctcaatttgggaaattcctaaggaatttttgtttgcaggttgattaagcccaaccagtggagagaggaaggaccccggctgtttcaatttggacactcttggggctttgttattgctgcagtggtcagactgtgttttggtgattgtgtgtgtatgatgggaaattagaattacataaactgatattcttttgtaataatgcttgtccccaatattgtttggaatcggagtttgctgttgaatgagaaagtgggatggagtttcctgtatccaggcttttatgttgctgttctgagcaggttgggcctggttaataggttccaggtggttttctgtggtgctgtttggccccagtgttccttggagtctgaggaggtttggcctttaaaaatcaaactgctatggaaactgctttacccaaaattttggttcacaccctatgttggattacatatggggcaaataaagtgtaacca

SEQ ID NO: 930034 - DNA, 527 bp, Homo sapiens
agtttaactggaaactatttcaaatatttaaagaataattagcactttgaaaaggaatgaaatgggaagaatcactctacccaattttaagacttatttcatagctatagtaatatgtgatattggcagagggacagacacaaagattaatggaagagagttaaaaaaacccagaagtagccccacacaagtatggcccactggtttttgacagtggtgccaaagcaagtcaatgagggaaggatagtcttttcaacaaatrgtgctagagcaactagatgctcatagaccaaaaaaaaaaaaaaaaaaaaaacaccaaaaatcaaaaccaagaaacctcaatctaaacctttgaccttatacacaaattaactcaaattggatcattgatataaatgtaatggataaactataaaactttaagaagaaaacataagagaaaatctttgagacctaaatcttggtgaagagttcttggacataacaccaaaaatataatacataaaagaaagaatagataaactatt

SEQ ID NO: 930035 - DNA, 527 bp, Homo sapiens
agtttaactggaaactatttcaaatatttaaagaataattagcactttgaaaaggaatgaaatgggaagaatcactctacccaattttaagacttatttcatagctatagtaatatgtgatattggcagagggacagacacaaagattaatggaagagagttaaaaaaacccagaagtagccccacacaagtatggcccactggtttttgacagtggtgccaaagcaagtcaatgagggaaggatagtcttttcaacaaatagtgctagagcaactagatgctcatagaccaaaaaaaaaaaaaaaaaaaaaacamcaaaaatcaaaaccaagaaacctcaatctaaacctttgaccttatacacaaattaactcaaattggatcattgatataaatgtaatggataaactataaaactttaagaagaaaacataagagaaaatctttgagacctaaatcttggtgaagagttcttggacataacaccaaaaatataatacataaaagaaagaatagataaactatt

SEQ ID NO: 930036 - DNA, 441 bp, Homo sapiens
gaacgtttttgggctctgaccccacagcagcatctagggttgagtgtttacagctcccgaaggcccagtgggtgtgtgttacagtgtgctctttcagcttagccgtccacagatggcttgttttaatcagctctaatagaccctttgcgttttctcaaggacagagggctttctgtatcccaggttcttgycctagtgtaccagaaaaatcagatcccatgtgggcttggaggatgggtgcaatgttttattgagtggtggcagtagttctcagtgatgtggatagggagccagaagggggttggagtgggaaggtggtctttccctggagtcaggccacccagcgactggactgtgctccaaccacccccgaccgaattctgcatcgtcccacctcaatggcctgttggtgtctgttaatgtgctcttctgctcctcttg

SEQ ID NO: 930037 - DNA, 604 bp, Homo sapiens
atattttcttaaagagataattgcacaagagtattagtccattcttaaactgacataaagaactacatgacactgggtaatttataaagaaaagaagcttaatcagctcatggttccatgggctatacaggcttctgtttctggagaggcctcaggaaacttacaatcatggcagaaggtgaagcacatcttcacatggctggcaagagagagcragcaaagggggaagtgctacacacttttaaacaaccagatctcatgaaaactcactcactgtgacaaaaacagcaaggggggaagtccacccacatgatccaatcacctcctaccaggcccgtcctccaacattgagaattataaattgacatgagatttgggtggggacacagagtcaagccatatcattctgtccctggcctgtcccaaatcttatgttcttctcacatttcaaaacacaattatgccttcccagttatcccccaaagtcttaactcactccagcattaactcaaaagtccaagtccaacatctcctctgagacaaggcaagtcccttctgcctataagcctgtaaaataaaaatcaagacatccgagacacaatgg

SEQ ID NO: 930038 - DNA, 625 bp, Homo sapiens
aacagtgtaaactggcagtgtaaacaagagcagggcatgtatgagtagttgagaacggtgaataggagtatgactagacagaagatagtagggatgacaagttttttggggcacagtctaagttggtctggtgtctggratgagactggggcctaataaaaaggagcgtctatacaggagcttaactgggctgtaccttgtagcattccgaggacaggcctgaattctgagaagcgaaagtggttaaagtattgtccagtcctttttaagctggtggctgagcttggtgaggtgtgtttttaaaagaccattagtctgttctacttttcctgaagactgaggactgtaagggatataaaggtttcactgaatactaagagcctgaaaaactgcttggctgatttgactaataaaggctggtctgttatcagactgtatagaggtgggaaggctaaaatgaggaattatgtctgacagaagggaagaaatgactgtggtggccttctcagaccctgtaggaaaggcctctacttatctagtgaaagtgtctacttagactaagaggtattttagttatctgactcggggcatgttgagtaaagctaatttgccagtcctggatggg

SEQ ID NO: 930039 - DNA, 629 bp, Homo sapiens
gttaaacagccaaacctaagaataatcagtgtttctgaggaagaagaccaatctaaaagcttggaaaatatatttgggggaataatcgaggaaaacttccccagccttgctagagacttagacatgcaaatacaagaagcacaaagaacacctgggaaattcatcacaaaaagatctgcacctaggcacattgtcatcaggttatccaaagttaagatgaaggaaagaatcttaagagctgtgaaacagaagcaccaggtaacctataaaggaaaacctatcagattaacagcagatttttcagcagaaaccctacaagctagaagggattagggcccatcttcagcctcctcaaacaaaacaattgtcagccaagaattttgtatccagtgaaactaagcatcatatatgaaggaaagatagtcattttcagacaaacaaatgctgaaagaattcaccattaccaarccaacactacaagaactgctaaaaggagctctaaatcttgaaaaaaaatcctggaaacacatcaaaacagaacctccttaaagcataaatcacacaggacctataaaacaaaaacacaagggaaaagaaaaaaaacgtacacaggtaacttacagaactta

SEQ ID NO: 930040 - DNA, 776 bp, Homo sapiens
attgctggtgagctagtgtgattttttgggggtgttaaagaaccttgtttgtcatattaccagagttggttttctggttccttctcatttgggtagcctctgtcagagggaaggtctagggctgaaggctgttgttcagtttcctttgtcccatggggtgttcccttgatgtgatactctcccccttttcctagagatgtggcttcctgggagctgagctgtggtgcttgttgtctctcttctggatctagccacccagcaagtctactaggctccatggtgggactggaagttgtctacacagagtcctgtgatatgaaccatttatgggtctctaagccttggatactagcacctgctatggtggaagtggcagggggtgaaatggactctgtgagtgttcttggctttgatcgtttaattcactatttttgtgcgggttggcctcctgccagtgagaggtgacagagtgctggcagcccttgcagccctcactcactctyggcgcctcctcagccttggtgcccactctggccgcacttgaggagcccttcagcccactgctgcattgtgggaacccttttctgggctggccaaggccagagccagctccctcagcttgcagggaggtgtggaggcagaggcgcaggtgggatctggggctgcgcagcacttgcaggccagcgcgagttccgggtgggcatgggcttggccggccccgcactcggagcagccggacggcccacaagcccggggcagtgaggggcttagcacct

SEQ ID NO: 930041 - DNA, 602 bp, Homo sapiens
tccatgatgcccacctgagctgcaaaacgagcaggtttttattaaggactttaaaggtggggggtgtacaaacagggagtaggtcacaaagatcacatgcttctgaggccaataaagatcacaaggcaaggggcaaagcaaagatcacaaggcaaagggcaaaattagaattactgatgagggtctatattcaactgtgcacgtattgtcttgataaacatcttaaacaacagaaaacagggttggagagcagagaactggtccaacctcaaattgaccagggcgggattttttccccaccctagtaagcctgagggtactgcaggagaccagggcatatttcagtccttatctcaaccacgtaagacagacactcccagagtggctgtttatagacctctccccaggaatgcaattcttttcccagagtattaattatcaayattccttgctaggaaaagaatttagcaatatctctcctatttgcacgtccatttataggctctctacaagaagaaaaatatggctctttttgcctgacccacaggcagtcagaccttatggttgtcttcccttgttccctaaaatcgctgttattctgt

SEQ ID NO: 930042 - DNA, 639 bp, Homo sapiens
tctcagctttgcatatgtaaggctgaaaccaaagtttcacaaaacaatacctacttttgaaaccacctttgcaaaattataactgaggaaatgacaacagtgaaagaaatcagacctaaccgactccatctcgcttctaacctttaagctgtccttgttcattcctgggcatgggctgaacaaactttgggatggaattcagttcatggtttgactstgacacagaattgataatagccgtttccggaaaagaccccctgcttgcctggggaccagtctgcctttgcaggactaacaaattagctacaagatgagaagttacagtttaggggtcatgcagcctctggctccaagagtctaaacccccccagattgctcctaggaataagatcactgttgtaaaacctaagatcagcgcttgagatattttgcagagcctgcattctgatgcaccagctaacaccacccagaccagtcatctggctcagccagttctgctatcccacccaggaacagaagacagcaagaaaaactcacttcaaacccctgattccatctccagtctggccaatcagcactccccatttcccaagcctctaccggccaaattatctttaaaagctctgatccctgaatgct

SEQ ID NO: 930043 - DNA, 576 bp, Homo sapiens
agttctgccacattttttttgagacagggtctcaccctgtcacccaggctggagtgcagtgatgtgatcatggctcactgcagccttggcgttgacctcccaggctcaggagatcctcccacctcagcctcgcaagtagctgggactacaggcacrtgcgatcacgtgcagctactttttgtattttattttggtagagaccgggttttgtcatgttgctcaagttggtctcaaactcctggcctcaagtgatccacctgcctctgccaccccaagtgctgggattacaggcatgagccactgcacctggcagttatttcttaattattcatttaaacaattttttgagctcctatcatgggccaggaattgtgttgagagcgtggggaaggcgacagttaggaacaagacctggtcctggtccttaaagaacatgttctaatggagacagatgacggagcagcagctaccacagactggacaaagctctaggaagggcaagcacaggaacgacgggaaaacatgacctggccgcacacaggaaccagggaaggggtttcagaggaggcagaagtc

SEQ ID NO: 930044 - DNA, 441 bp, Homo sapiens
gattgagtctttctcatatcatgtcactcttggctctgaccctcctgccttcctctttgatttggtttggtttggttttggtttgagccaggatctcactctgtcacccaggctggagtgcagtggcatgattatggcttactgcagcctccgcctcccagacttaggtgatcctcccacctcaggctcctgagtagctgggacgacaggcatgcaataccaatacccggctaattgttttgaatkttttgtacgtatggggtttcaccatgttgcccaggttggtctcgaacttctggactcaagccatctgccctcctcagccccgcaaagtgttgggattacaggcacgagtcaccgagcccagcctgccttcctctttcacatataaagactcttgtgattatattgggcccacccagataatccagggtaatctcc

SEQ ID NO: 930045 - DNA, 628 bp, Homo sapiens
ttgggcaagtcacttcacatttctgtccctagtattttcatctgtgtgaaaggaataataattgatatggtctggctgtgtccccacccaaatctcatcttgaattgcagctcccactattcccacatgttatgggagggacttggtgggagataattgaatcktgggggtggtttcctccatactgtccatgtggtcgtgaataagtctcatgggatctgatggttttataaggggaaaccccttttgcttggttctctcattctcccttgccactgccatgtaagaagtgccttttgccttccaccgggattgtgaggcctccctagctgcttggaactgtgagtccattaaacctgtttttctttataaatcaccctgtcatgggtatgtctttatcagcagcataaaaacagactaatataataatcttgcctgccttgggtggcagtgagcatttgataaatcagcacacttgagaacataacacagtgcctcgctcagtccagtcctttgtaagaaattgcaatgccttgctatctggcctcaatctctccccccctctctctctccttctgtaaacatgtattacgtaccccttcaggtccaatactataaaatagtaaca

SEQ ID NO: 930046 - DNA, 692 bp, Homo sapiens
cagcattttaggcctggttttggagggctgaagcctcacccgagagcctgtgacgcattatgtaactggcgatgagcgcgccggccgatttctcctttgttaaatgggtcgagagcgtccagccggtacgctggagggcaacggtttagttttggtctttgacctcccacgcccacggctggggctgccgaaagtgaagaaactagatttgcagacgccactgctagttggttatgaagctccgggcaacagcgtaaaataaactgccccgaccttacattgttttggatgttcacagaatttaatttttttggatgtttaaatatgtagtgcccatctaacacagcctcccttttcctgctccctgcccgcctctcatcaccttggctttctccttttctttgcactttgaaacgtacagttaatgcagatttcacttcagcaggctccaggtaacctcctgatcaccaaatccagaaacgctgtgattccggacagacaatgtaagggtgtcgttgagaggggactcagtgccagggttggaatcccagcctyatctgtttctcttaatagtgtgctgggatactagccccatggtgttgttgggactgaaataatatacagcctgggcaacatagcaagaccccaactctacaaaaaaaaattggccaggtgtgatggtgtgagcatgt

SEQ ID NO: 930047 - DNA, 513 bp, Homo sapiens
gtggctcacgcctgtaatcccagcactgcgggaggccgaggtgggtggatcacttgaggtcaggagttcaagaccagcccgaccaacatggtgaaacccccatctctactaaaattacaaaaattagccagcatggtggtgtgcgcttgtaatcccaggtactcgggaggctgaagcacaagaattgcttgaacccaggaggcagggactgcagtgggctgagatcatgccactgcactccagcctggctggaagaacgagacyctgtctcaaaaaaaaaaaaaaaactggccaggtatggtggctcatgcttgtaatcctagcactttgggaggccaaggtgggtggattgcctgagctcaggggttcgagaccagcctgggcaacaaggtgaaaccccgtctctactaaaatacaaaaaattggccaggcgtagtggcttacgcctgtaatcccagcactttgggaggccgaggcgggtatatcacgaggtcaggagatagaggccatcct

SEQ ID NO: 930048 - DNA, 513 bp, Homo sapiens
gtggctcacgcctgtaatcccagcactgcgggaggccgaggtgggtggatcacttgaggtcaggagttcaagaccagcccgaccaacatggtgaaacccccatctctactaaaattacaaaaattagccagcatggtggtgtgcgcttgtaatcccaggtactcgggaggctgaagcacaagaattgcttgaacccaggaggcagggactgcagtgggctgagatcatgccactgcactccagcctggctggaagaacgagactctgtctcaaaaaaaaaaaaaaaactggccaggtatggtgsctcatgcttgtaatcctagcactttgggaggccaaggtgggtggattgcctgagctcaggggttcgagaccagcctgggcaacaaggtgaaaccccgtctctactaaaatacaaaaaattggccaggcgtagtggcttacgcctgtaatcccagcactttgggaggccgaggcgggtatatcacgaggtcaggagatagaggccatcct

SEQ ID NO: 930049 - DNA, 587 bp, Homo sapiens
gacttctgcctcctctgaaaccccttccctggttcctgtgtgcggccaggtcatgttttcccgtcgttcctgtgcttgcccttcctagagctttgtccagtctgtggtagctgctgctccgtcatctgtctccattagaacatgttctttaaggaccaggaccaggtcttgttcctaactgtcgccttccccacgctctcaacacaattcctggcccatgataggagctcaaaaaattgtttaaatgaataattaagaaataactgccaggtgcagtggctcatgcctgtaatcccagcacttggggtggcagaggcaggtggatcacttgaggccaggagtttgagaccaacttgagcaacatgacaaaacccggtctctaccaaaataaaatacaaaaagtagctgcacgtgatcgcaygtgcctgtagtcccagctacttgcgaggctgaggtgggaggatctcctgagcctgggaggtcaacgccaaggctgcagtgagccatgatcacatcactgcactccagcctgggtgacagggtgagaccctgtctcaaaaaaaatgtggcagaacttcattagatat

SEQ ID NO: 930050 - DNA, 450 bp, Homo sapiens
gcaatggccgattgagtctttctcatatcatgtcactcttggctctgaccctcctgccttcctctttgatttggtttggtttggttttggtttgagccaggatctcactctgtcacccaggctggagtgcagtggcatgattatggcttactgcagcctccgcctcccagacttaggtgatcctcccacctcaggctcctgagtagctgggacgacaggcatgcaataccaatacccggctaattgttttgaatkttttgtacgtatggggtttcaccatgttgcccaggttggtctcgaacttctggactcaagccatctgccctcctcagccccgcaaagtgttgggattacaggcacgagtcaccgagcccagcctgccttcctctttcacatataaagactcttgtgattatattgggcccacccagataatccagggtaatctcc

SEQ ID NO: 930051 - DNA, 647 bp, Homo sapiens
ttgcaacatacatatgtacttttttacatctgacttctttcactcatcatgttgctacatggacctgtagtttgtttctgttgaagagcaatattccattgtatagatggaccaccatttgtcatctattcacaatccatgcacattgggttgtttccgtttgagggttataatggctacagctgcaatgaacattcttttgcaaatttttcagtagacaaatgattttatttctgttgggtaaataggaatgcaatggcttagttgtatggtatgtatatattgaaattctgtagaaactacctgttttccaaagcagttgtacaattttccatgtcccccataatatatgagggttttggttgttctgcatcctgggaacatttagcattgtcagtcttttaaaattttaktcattctagtgtgaaatggtatctcattgcggttttaacttgcatttttctaatggctaatgatgttgagtacttatgtgtttattggtcatttggataatctattttgtgaagtgcctgttcaagcctttttgtgtctgcaatttttactagcgagtttatttcttcttatttaaacctcactctgggctccggacaaatatatcaatggaattcttcatactgctgcttgta

SEQ ID NO: 930052 - DNA, 452 bp, Homo sapiens
gggagtgaagtggactctgtcagagtccttggttgtagttttgtttagtgtgctgtttttctcgaatgctggttatactagcaatgaagttgctacatggacagactcagggcctctggggacccaagatgttacaggcagtggaattggctgttgttttctccttttttggagcagtgctgttctgttatgagttgctgtaatggcttgagttggttggcctcccactaggaggtggtgctttcaagagagcattagctgtggtagtataggggtggatacaagcttgctctaaggtcacctggrtaagtatttgggtttctcaggtgatgggcagggccatagagctcccatgagttcgtcttttgtcttcagctaccagggctggtaaagaaacaccattaggttggggcagtgttaggcatgtctgagctcagactctcctagggctg

SEQ ID NO: 930053 - DNA, 555 bp, Homo sapiens
tacttcccagtcacgtgccagcaggttcctcagacctgacgggccatctgcccctgctgtggccagactggaagcagagagcgctggagtgcgggtcgccagggcccagggcactgacccacctcaaccctgtgccacctgccaggcttggctctcatctcaccccatcctgtctggcaaacacatcctcccatggccgctgcatcaatgggtggttaacaagcttctcatccctgttagatccaatcagcccttgttacttcactgagcagcagaacctgcaaggaagctgggcatgcgagcacggaggtggcagggacagacacagccagtcttcacctcctcacagcaaggacagggtgagcccagggtcagggsagggctctggaggggtcagaggaggtgaggctgtggcagaggcaggaggctcaggcagaagggcacgagggggctgagggacgcctctgaagaggggccacgcctgactctcaaagagggtgactcttgctctctgggaagtggccacgacagcacccacaggccacagtgcacgct

SEQ ID NO: 930054 - DNA, 697 bp, Homo sapiens
aaaaatgaagaaggataagcaacactggagtggactccaagtggttgcagtgttaagtaggaagccaagaacctcctcaggccaagggccaccatcataaaggtctaaagaggtaggagcacagaaagggaaaggaggaggtcccaagaagaggaaataggtgcaaagtccctgtggcaggagcatgcccagggtgtttccaaggctagcaggaggccagtgtggccagaytggagcaagtaaacagacaggaagtcatagaggtaatgggaatgaccaattatttagagcattctgatcaacttgaaggacactggcttttacttggaatgagatggacatcactggggcattttgagcagaggaagaacatggtgcaattgacatgcagcaaagctgctttggttgttgtgggaagaaaggattgagaagggacaaaggaggaggccactgcaatggtccaggcaagcaacaataatggctgggagcagtgaagggaaggagaaggagttaatttctgaatatatttggaagacagagccacaagatttgctgaggcttggaaggaattagaggggaagaatcagggatgctctaggttttttagcctgagaagctagaaggatggaattgccatcagcagtagggaaggctgtgggaggaacagattcagggcaaaggtgggaagtatggtttt

SEQ ID NO: 930055 - DNA, 697 bp, Homo sapiens
aaaaatgaagaaggataagcaacactggagtggactccaagtggttgcagtgttaagtaggaagccaagaacctcctcaggccaagggccaccatcataaaggtctaaagaggtaggagcacagaaagggaaaggaggaggtcccaagaagaggaaataggtgcaaagtccctgtggcaggagcatgcccagggtgtttccaaggctagcaggaggccagtgtggccagactggagcaagtaaacagacaggaagtcatagaggtaatgggaatgaccaattatttagagcattctgatcaacttgaaggacactggcttttacttggaatgagatggacatcactggggcattttgagcagaggaagaacatggtgcaattgacaygcagcaaagctgctttggttgttgtgggaagaaaggattgagaagggacaaaggaggaggccactgcaatggtccaggcaagcaacaataatggctgggagcagtgaagggaaggagaaggagttaatttctgaatatatttggaagacagagccacaagatttgctgaggcttggaaggaattagaggggaagaatcagggatgctctaggttttttagcctgagaagctagaaggatggaattgccatcagcagtagggaaggctgtgggaggaacagattcagggcaaaggtgggaagtatggtttt

SEQ ID NO: 930056 - DNA, 573 bp, Homo sapiens
gtgacatgatctctggatgtaggcagataggtaggtgccacttctctagggccacacacaggggccaaggtgccatctgatgccacttgggggctggctcagcttccctacagcctctggctctgtcagggtgtcaggtggtcgggctgtaacaagggatataaagaacaaaagagaccaggtgcagtggcacatgcctgtaatcccaatgcttcgggaggctgaagtgggaggactgcttcaggccaggagktggagaccaccctgggcagcacagcgagaccttatctctacatgtaccaaaaaaaaaagaacaaaagggcaggctaagaggaagggccgtggctggggtagggagaggggttcctttaggtggggtgatcgtgaagaaagggagagagcaggcctggaggtatctgggggaaggtgttgcaggcagcaagcacagcgagtgcaaagcccccgtggcggcccacgcagggcgcatgggaggaacagctgggagccagaccctgcagggcctcaggccatgagcaggacttggggttcttgctctgagtgaggaaggaagcc

SEQ ID NO: 930057 - DNA, 743 bp, Homo sapiens
attaagctaacaataataatttagtcttatttgtccaaaaagtcacacaaacaaaatcattatgttttggctgggttcatagttttataaccttctgtgtcaaaacctaacacctcaaaatatctagcagacacaaatataaacccaggaaaaatgtatgctgacaattctgaagatattcctatttttattttaccaataattttaaaccagcttgtttattaaagatttacttaagtcacatgaacttttaaattgcttggacttatttatttataagcattcttacttataagccatattggtactgtgtaaaacaacatgtaacatctagacacacacacacacacacacacacacacacacacacacacacacacacacacacacacaaagaaccaatagcttttacctcagaattctagcyatgagacagcaatacaaactctctggtctatgaacattttcagatggccagactttgtcctgataggtaatccaatgaaagctgtgaaccaaaattttgggtaaagcaatttccatggcagttttatttgtaaaggcaaaccttcccagattccagagaacactggaggccaaacagcaccacagaacatcacctggaacctactaaccagacccaattctgcttagaacagcagaataaaagcctgaatacacagaactccatctcactttcccattcaacagcaaactccaggttccaaagaacattggaacta

SEQ ID NO: 930058 - DNA, 725 bp, Homo sapiens
aatacaaactctctggtctatgaacattttcagatggccagactttgtcctgataggtaatccaatgaaagctgtgaaccaaaattttgggtaaagcaatttccatggcagttttatttgtaaaggcaaaccttcccagattccagagaacactggaggccaaacagcaccacagaacatcacctggaacctactaaccagacccaattctgcttagaacagcagaataaaagcctgaatacacagaactccatctcactttcccattcaacagcaaactccaggttccaaagaacattggaactaaacattattacaaaagagtaacagcttattaaattctaatttcccatgactatatcaacacacacagaaacaatcaccaaaacacaatgtaactgctgcctcagaaaacaagctccctggcatgtctaaactgaaacagtcagggtgcttctctttcttagtcagttgggcttgtcccaratgtagagagaaattcctttaaaatttccagtattaagaggagcagatcctgctgtctgggccaataaaggacactaacctatctggacgcagatgtcaaatttcaaaagctgcttgtcctaggcaaccaggaatgtggttgatgccagcagtgatggggccataaggacagagaaatacccaccttcagccaaaatagggtcaggaggctgcttaggaaggcttccaaaactctcagc

SEQ ID NO: 930059 - DNA, 648 bp, Homo sapiens
  misc_feature 360: n = A,T,C or G
gatgtgatccactacacatctattggaatgactaaaaaacaaatgaatgaggccacgagcaaggcagttcaagcttgtaatcccagcattttgggaagctgaggcgggtgggtcacctgagctcaggagttcaagactagcctgggcaacatggcgaaatcccgtttctgctaaaaatacaaaaaattagttggcatcgcagtgcacctctgttatcccagctactccagaggctgaggcaggagaatcacttgaaccctggaggcgaggttgcagtgagccaacatcatgccactgcacttcagcccgagcgacagagtgagactctgtctcaaaaaaacccaaaaamcaaaaaaccanaaaaaaaaaaaaaaaaaaaaaaaaaaaccgagggattgaacctgacactgtgagtgctgcccaggaggcgagcaacaaacctctcctacaatgtgacggaaagtcaaaggacagacccactctggagaactgttgggcagtgtcttataaagtcacacacacccctaccatatgactcagcaatgccccctaggtatttacccaaaatacatggaaaatgttcacacgaaatctgtgtgtgaatgtttatagcagttttattcatcattgcagaaaacaggaaatgac

SEQ ID NO: 930060 - DNA, 590 bp, Homo sapiens
tcacttggtttactagcacgagtcaagacagccacacagcgactaaatgcctcttgtaacacctgcagaggaagaagtcagctattaactctccattttgacttcaagtctgaaaggccttttctagcagtaataaaatataaataaccctttaatgttaaatatttgatacataaatgtttgatcaacatttgttaataaatagtaaacaaaggactcctaaaagtttccttttaagcatttctaataagctactttgtaaacaatattaccattatcggttttgaacccaatactttccaactcacattgtgaaataaagctccatttctacctttaatttggtataagaatatggaaaatattgtgttatctgctgaaataaattaaagaatctgcatttgtacttgctgaattcttcactgccaagagtcatataatgtrtgtaaactggcttaaaaagcacaaaggtcactccgtattacctctagtccattctctcttctgagctcttcagcattgagggctgaacagttgacagtatggaaagctagctctgtagccgcaggcaacaatggtgattcttttga

SEQ ID NO: 930061 - DNA, 593 bp, Homo sapiens
atttataaaattgaaacctgaacagttttatactgtgagactctggacctttttaaaccttcttggctttctttgacaccattctgtcagagaaaggagtggcatcacctcattactgctaggcagagagagaagtccagrttcccctcccagcttccatcagtacctgaagaggatgatgccctcatactgccaggtgggatgaaagtccaggcatcccatttggactgcactaacaacccataagatgggttggggggacttattactggccagtggggaggaaagcctcaggtttttacttggcactgtctgataccttcctggcaggggagctggggcacctcattacagtgcttgccagggtggaagcctacgctccccatcctgcctttgctggtgtgaggagtggtgggggccaatgttttttctgtggtgtttggctggagtaaagtggttattctctaaaagatttttggcttgctaggctgcatctttcctgatcctttggttagagagattatacttttgttggggtgctttatgtttttgttttgttttggtctgtgctcactgacatttccaggttacta

SEQ ID NO: 930062 - DNA, 791 bp, Homo sapiens
actcttttaaacaatcagatctcatgtgaactcattactgaagagaaggcataaaaccatttatgagggatattcccccatgaccctcccactaggttccaccttcatgtttcaatatgcgatttggaggagacaagcatccaaactatatcacggtgtctctttattttttaaaaattaattttgaattgttccaggtttttggtattatgggtgatttataaaattgaaacctgaacagttttatactgtgagactctggacctttttaaaccttcttggctttctttgacaccattctgtcagagaaaggagtggcatcacctcattactgctaggcagagagagaagtccaggttcccctcccagcttccatcagtacctgaagaggatgatgccctcatactgccaggtgggatgaaagtccaggcatcccatttggactgcactaacaacccataagatgkgttggggggacttattactggccagtggggaggaaagcctcaggtttttacttggcactgtctgataccttcctggcaggggagctggggcacctcattacagtgcttgccagggtggaagcctacgctccccatcctgcctttgctggtgtgaggagtggtgggggccaatgttttttctgtggtgtttggctggagtaaagtggttattctctaaaagatttttggcttgctaggctgcatctttcctgatcctttggttagagagattatacttttgttggggtgctttatgtttttgttttgttttggtctgtgctcact

SEQ ID NO: 930063 - DNA, 527 bp, Homo sapiens
tatagcaatgtggttcatggaaacttatcattgagatggagattttgtgcaatcaccaacagatagactgaagtttttctgtgatttaataacttagctcttacttttaaagagagcatctcattcctcacaaaacaggcctaagattatgagctgcttgatcaaagttcttaattgaaactttgtaatctagtaagtttaaagaaaaataaattcaatactgtggaatattatatacaggaggtgtgtgkgtgtgtatgagtgtgtgtgtatatttgtgtgtgtgtgtgtgtgtatgtgtagcagaatcattaaagggctgaagaaacaggtaaacagatgattctagaatgaggttttaagaattcttctcaagaatcacagcccagaactgaccaccaaggaagctcctgccagagcaactcactcctaaatcatgtaggctcggccatgatctgtgacagcaaatagatgtgttccaaatgaaagtgtcccatgcatgcatctgattagtggaacctcatcat

SEQ ID NO: 930064 - DNA, 758 bp, Homo sapiens
actgccctatgctgtcccagtggagagtgtacttacaggaaatgccatataaatgtaactctcaaccactacggtttctagtatttcaagagtcaaattctctccagtttcttttttctttctgtccttgtcaggtgccttgaaatagttgttttgggaggagccaagatagctgactacagggttcaggaagagcttctcccaccaagagaccacaccgtcaaaatcagcacattctgaacagtacttcggaaggaaggcattgaaagtggttggaaggagaatgcagatcctgggctgaagkggggaggaagttgggaaccctgcatggggttgccaagcaccaggactcattcctggccctgagaggctcccagggaagggatgagttaaataggcatagagtggcctgctctcaccagggacctcaagaatcctaggtgcaggagaccccatgatccccatagacatttgaactgacaaggagagctgtttggagagctggcaaagacaggaatccagcctgcatggaacccagaaggtttggaacaagaatgatcacagtggcacatggccagggatgcccagcccccaaggcttgccatactcctctaggtggttttggcctttcttaactgtcagatctagacagaacagggctatctaactgtagggtggagccagtctgatgagtgctcctctgtctgcccagcctctcccaaggtctctgtctggctgcatccacttgcagtacagcc

SEQ ID NO: 930065 - DNA, 632 bp, Homo sapiens
cagaagatgggtgatttctgcatttccaactgaggtaccaggttcgtctcactggggcttgttggacagtgggtgcagcccatggagtgtgagctgaagcagggcggggcatcgcctaacccaggaagtgcaagggcttggggaattcactttcttagccaaggaaagccgtgacagacggtacctggaaaatcaggacacgcccacccaaatactgtgcttttccaatggtcttagcaaacggcacaccaggagattatatcccgcacatggctcacagggtcccatgcccatggagcctcgctcattgctagcacacagtttgagatggaactgcaaggtgacagtgaggctcagggagggacatctgccattgctgaggcttgaataggtaaacaaagtggctaggaaacttgaactgggtgaagcccacygcagctcaaggaggcctgcctgcctctgtagactccacctctgggggcagggcatagctgaacaaaaggcagcagaaacttctgcagacttaaatgtccctgtctgacagctttgaagagagtagtggttctcccagcacagagtttgagatctgagaatggacagactgcctcctcaagtgggtccatgacccgcga

SEQ ID NO: 930066 - DNA, 645 bp, Homo sapiens
ggaggggctcctcacttctcagacggggcagcagggcagagacgctcctcacctcccagacggggtggcggtcaggcagagacactcctcagttcccagacggggtcgcggccgggcagaagcgctcctcacatcccagacggggcggggggtggggggcagagggggtcctcacatcccagatggggcggcggggcagargcgctccccacatctcagaggacgggcggccaggcagagacactcctcacttcccagacgggatggcggcccggcagaagcgctcctcacatcccagatgatgggcagccgggcagagatgctcctcacttcccagacgggatggcggccggccagaagctctcctcacatcccagacgggcgggggggcagaggggctcctcacatcccagacgatgggcggccaggcagagacgctcctcacttcccagacagggtggcagccgggaagaggcgctcctcacttcccagactgggcggccgggaagaggggctcctcacatcccagatgatgggcggccaggcagagacgctcctcacttcccagacggggtggcggccgggcagaggctgcaatctctgcactttgggaggccaaggcaggcggctgggaggtggagtttg

SEQ ID NO: 930067 - DNA, 538 bp, Homo sapiens
tcccatcagaaaatgggtttttcttttctaccacctggtcaggccacaaattttccatacttttatgctcttcttcctttttaaatgtaagttccaattcagaccacctctttgtgaacaacacatataaacataggctgttagaagaagccaagccaygtcttgaatgctttgcttaaaaatttctcccaccagatatcttaaattatttctctcaagttcaaagttccacagatctttacagcaggagcacaatgctgccagtatatttactaaagcatagcaagagtaacctttactccagctcccaataagttcctcagctccatctgagacctcatcagcctggccatctctgtccatatcactatcagcattttggtcaaaaccattcaacaagtctccaggaagttccaaaccttccctcatgttcctgtcttcttctgagccctccaaactgtttcagtctctgcccattactcagttccaaagctgctatcatattttcaggtacctttatagcaatgccccatttctc

SEQ ID NO: 930068 - DNA, 555 bp, Homo sapiens
agagaagtgacttgttgcacacaagggatctttataagataatcaacagatttcttgtcagaaatgttggctaccagaaggcagtgggcttataaattcaaagtgctaaaagaaaaatatctgtgaaccaaatatcctacatccagtaaaactgtccttcaaaaatgagggagaaattaagacattcccagataamcaaagctgagggaggtagttaccactagatttgccctgcaagaaatgcttaagggagtcctataaggtgaaatgaaaggacactagacagtaccttgaagttgtatgaagaaatgaagatctaaataaaggcaaatagaaggggcaattataaaagctactattattataacaacaatttataactctacttcttgttttctatatgatttaagagactaataaatttaaaaaataattattggtataagagctagtattattgtaacattggtttgtaactcatattttattttcataatttaaaagactaaagtgtttaaaagtattattgactgggcatggtggctgacacctgta

SEQ ID NO: 930069 - DNA, 559 bp, Homo sapiens
aatcagtaatgaaaaaactcccaacaaggaaaagccctaattctgatgccttccctggtgaattctaccaaacatttaaagaactaaaaccaatacttctctaactttccaagaagagaaaggaatgatttgtaactcattctatgagaccaacattacccaaagtcaaacaaagtgtcttttctggacaatacatgaaaagaaaactacaggccaatatccaytagaacattgaagaaaaatcctcaacaaattactagcaaaccaaattcagcagcatattaaaattattataggccacaactaaatgggttttattcgtggaatgcaaggatggttcaacatacaaaagccaatcaatgtttctgcttaatttggcgagacttaaaaaaaatcaatcactgtaatataccacatatagtagaatgaaaggaaaaaacaactgatcttctcaactgatgctgaaaaagcatttgacaaaattcaataccattttgtgataaaaacaataaactaggaattgaaggaaactacttcaacaaaataaaagccattgata

SEQ ID NO: 930070 - DNA, 553 bp, Homo sapiens
aaaccataagaacaaagatatcagtacctatattgtgcaagggagacaaagtttgcagttcgaatctaggcaggttaagtattaatatctactagaacaacaaaaaccccacaacaattcttagaagaacacagttaaacccagtgtctaggcatgcaaagaaacagaagtgtgactcatactcaaggagggggaaagggcagtcaatagaaactgactctgagtgagcctagttgttggatttaacagaaacttcaaagcaattattgtaaatgtgttcaatgagttaaactatgacatcaatgagtggggtggaaaatctcaaccaagaaatggaaactataaaatggaaatttgagagttgaaaaatacagtaactraaattttttaaaaatctaaatagcttcaacagtagattagaaaacaaagcagattggcaaaagaagccatgaagttcaagctagatcaatagaaatcacccagtttcgagaaacgggagaaaaagatggaataaagttgaaaagagatatgtagggcaatatcaaacaatcca

SEQ ID NO: 930071 - DNA, 723 bp, Homo sapiens
ggcccagtggattccagggaccaggctacagggagggtgagagccactgcctacagcaacacagcagcccctccacacatatcccttaggattcctgccagccacagagggccctgagcaacagctagacttgggcctctccagtgaaagccaatttaggtttcattcaaagcacagggatttgggattggatgggattgggtgaggagtggaggccaaaactgtgctcaatcatgtgttctgccctcaggactccaggatgctggggcacacgtaggaatcccagaggaagkattccctgtgtcatccgacccagggagcacccttagagcaggagcagacagtgaggacaggacaggaaggtgctgttgcaggtcccaagagtgtagagaaagacagtgggctcctttcacctcctggcacacgtatgaaggactttgtcttcaggatcacgtagcgcctatgtggggctgtgtcccaccccacactcaactttacacctgcatactcatcttgtgatctctattcacaaaaaaatgctacctcatcaaaacccagggctctggtgcttactgtggcaaaggcaggaatgatctggtcttctgcaaaatgtaatatttaaacaccagagcaagaaatgatggtgacatacacaactcgcacaaagcccatgagaacaaaactcttaggactttctcattaagatacaaaaaatcccaagtc

SEQ ID NO: 930072 - DNA, 575 bp, Homo sapiens
ctctggtgcttactgtggcaaaggcaggaatgatctggtcttctgcaaaatgtaatatttaaacaccagagcaagaaatgatggtgacatacacaactcgcacaaagcccatgagaacaaaactcttaggactttctcattaagatacaaaaaatcccaagtcagacttctacacctgtttcatatttagtcacttcactgatcccatcctaggctccaaaayaagtgtaacccaattcccaagaaccctgtctcactggtcaaccctggagtgttggtccctacctgaccagtctatttcctcctggatggatccagaggtggtgcccatgagcccatgtacagagacacaaacattagtactactgctctgtccactgtgattctccctgggctctgtgaactcaggggcctttatgaaggcactgctcacagttgtgagccttcaggtaagacagaggacctgaaataatccctttcaactgttcaccgacactggctcatagcatctcttacctccaatctgagaacctgagattccagccttgatgcaaatgcactgagttaggtgggtg

SEQ ID NO: 930073 - DNA, 575 bp, Homo sapiens
ctctggtgcttactgtggcaaaggcaggaatgatctggtcttctgcaaaatgtaatatttaaacaccagagcaagaaatgatggtgacatacacaactcgcacaaagcccatgagaacaaaactcttaggactttctcattaagatacaaaaaatcccaagtcagacttctacacctgtttcatatttagtcacttcactgatcccatcctaggctccaaaataagtgtaacccarttcccaagaaccctgtctcactggtcaaccctggagtgttggtccctacctgaccagtctatttcctcctggatggatccagaggtggtgcccatgagcccatgtacagagacacaaacattagtactactgctctgtccactgtgattctccctgggctctgtgaactcaggggcctttatgaaggcactgctcacagttgtgagccttcaggtaagacagaggacctgaaataatccctttcaactgttcaccgacactggctcatagcatctcttacctccaatctgagaacctgagattccagccttgatgcaaatgcactgagttaggtgggtg

SEQ ID NO: 930074 - DNA, 514 bp, Homo sapiens
tgagacaatggccccggtatctagaagacattcctggaaaggcacaggatttctgtgcaacattttcaattgtttttctttgacaattccaaattcttctcaagaagaaggaatttctcttaaggaaaatgcctgttgacacacagtttgtaagtgtggatgccatctgaaaccactgtttagttgataatgaactctggcatttgcccaccaagaaattctgtcagtcacctatagtgtrtatggtgaggtgtatacatcttaattcaattgaaacagagaaaccgagagaaataaaatttccttttcagaggaaagaagacgactttaccatgtgaacccctgtggcttcctcagagactgtctgctctggcacatgctcctccaggtcttccaggtcacctaggaaacagagtcgctataagcacatgagctccactgagtgaatccctcaggtggtcttggagctgtggacacggggctggcgtgtgtggaaaggtgtgttcacagcaca

SEQ ID NO: 930075 - DNA, 675 bp, Homo sapiens
cattatcttatggtcaatatgagacctctatggagaaagttggggtgatttccccctaaccccgcctgcaggctcctctcttctcagtttcccagcagaactcgctgtagcatgaggctgctccagggtctaaatgcacaggaagaagccctgccccactctccctgctcaagatgggtggtggagggtcagttctgagggctttggtagaaaaggcttgtaaaggagggaaggggctagagtgaggtgtcatgccattctagtggcaagaggaaatagaaaggcctgtgaagaggtgaggtttattagaaaataaagtatagcagggaattstgaatgaaaaaataaaatcagcagagatcctgacacagtcctgttctatgggtgtgcagtaagaatttgcctgggtgtggagaggatttcttttaggttaattaaagtgtcctgtgcgtgaaataaactgtacactttggaagcttacaagttaattttttcatgtgcctgcaacaggactgcaacggtgatggaaatctctgttgagaatgtggacactagaaaatccggggatatgtagtacggaaacccacacacacacccccagactcactgaccacagcaccacatgaattcacaaaagacatgagcaggccccttgcacgggatcccaccccacct

SEQ ID NO: 930076 - DNA, 696 bp, Homo sapiens
ctgtgcacaggtcttttctaaacttggtgctattagaaaaccagatgggaaattctggtggaggcaatggccacaaaaataaagcctagagaacacttgtagaaaggcaccaggtttttgtgcaagattatttaaaatttattttggcttgcaaattcataattctcaaaaaggtttttctcctraggacaatgcttgctgacatagtttgtaactgaagctgtcatctatgaatgccatcttcaatcagttcttagttagtaatgaattctcattttacattttcccaccaagaaattctgtaagtcatctaaaatgtacatggcagtaagattttcctatctttattcaagtgaaattgaaagaaacctaggaaaatgaaattcccctttcagacaaaaaaagaacaacttacatgggcaacagtgaggagactctgattggatgcttcagggagatgttctgctataaactcctctagatgatctaggagaaatagggtaagtgtcactgcatggattccgctgagggaatccctcgggttgtattgggtggtgtggacatgaggctggcatgtgtgaagaaggttggctaccccagacggagccgcaggccctttctccttggtggtgcaggcaggcaaatgagacaacgaggaaagccatgggaactagagcgttggtcctctggctaacg

SEQ ID NO: 930077 - DNA, 592 bp, Homo sapiens
ctcctggatccttcagtttcagaaactgcatgagtatcttaatctgttcatgcttctgtgacagaatacctaagactgggtcatttataaagaacagaaattcatttcctcactgtttctggaggctgggaagtccaagatcaaggtgccagcacgggtacgtggtgagggccttcttgctgcatcctctgggagagaggaatactgtgtcctcacatggttgaagaggagaagagagagctaagcaaatgctgcaagaagcctcctttagaacggcctcaatcccattaaygagagaggaaacttcatggcctaatcatctcgtaaacaccccaccccttcatactgtcacattggcaacacctgaattttggaggggatgcattcaaaccacagcaatcagttaatatatatttgttgttgtaaggtgctgaagtttagggtaatttgttacacagcaatagataaggaatacaacctacacattgttatatctaaaggatgccgtgacttctgggcagcatttgacactgttgacctctccctctctgaaacactcttccttttaattccaccacactacattcttcta

SEQ ID NO: 930078 - DNA, 576 bp, Homo sapiens
tccagctgatctgtgcaggagacaggaaatacaaccatcaggaccccaaggctgcaccatgggacagaccctgacatggttccagggcacagccttgctctgcgaccatcatacaccttgaggacagacttcagcctgtgccgcaaatgtgtattcgtgagcacaccctttgggaaccagaaaatgtgttttccaaagtaatttacttygtttgctttgttttgttttgtttttagacggagtctggctctgtcgcccaggctggagtgcggtgaagcgatctcggctcactgcaagctccatctcccaggttcacgccattctcctgcctcagcctcccgagtagctgggactacaggtgcccgacacctcgcctggctaatttgttgtatattttttagtagagacggggtttaccatgttagccaggatggtctcgatctcctgaccttgtgatctacccgcctcggcctcccaaagtgctgggattacaggcgtgagccactgcacccggccttgtttttgttttttgagacacagtcctgctctgttgcccaggctgcaatgcagtggtgt

SEQ ID NO: 930079 - DNA, 565 bp, Homo sapiens
agggaaagggtaccatatcaagggagcaccctgtgggacaaaattaattagagtgcagcctttgagtcctagaactttctgcttgtgggaagtttctttcagcagaggcacagatgcagtgctgggctaagtggtagaaagactgtcattctaccccagcagttgggcagccccagtgctcgtgaagggacctggagaaggggacttctaccctttgcctatcactgcagacgtggctgggactcctccacaggagcttggctkgggtgcacctatggatggcctttctggagcactttggggtaggttcacaatccctctctacatgaatgtcagcatttctgcagatccacagaagtgcctcgtctgatctgaatatccagaacattgcgacatgagtgtgacagggaggcagattgctttcgtgctggtctggaagaggagctgaggtggctccctccctttctcctgcaaagacctcagtgcctttcaaggagagctcccccagttgcttctgtcaaggctgggacttctgtccaccactggggtattgcatatatccatc

SEQ ID NO: 930080 - DNA, 561 bp, Homo sapiens
cctgaggcaggagaatcacttgaacccgggagtggaggttgtggtgagccaagatagcaccattgcactccagcctgggcaataagagcaaaactccatctcaaaaaaataaataaataaaaataaataattgaataagtgaagtacagtatatcatattagataatgagaagkgatgagaagaagaaaatgtaatttaagacagtctttggagttcttttttaagtaatgagaaaggaagaaggaaaagcaggaggggagaggagagcctaacctaatgtttttaaaaagcaaggaccggcgggaagtgtatcatagtagggaacaggagagatgcaggcctcggcgctgggaggagtggggaataggctggggctgggtttcaggaggatttgaaaagcagacagaggagtttggatttgatttggaaaggaacacgtaggctttagagatgcccaaacaagggaggggccggttgaaagtgaagttgtaggaagatcatcctaacagcagcaggcagaatgggttggaggggatgctgagggccacaaagaggaggga

SEQ ID NO: 930081 - DNA, 613 bp, Homo sapiens
aggtctgattattttgctagagtggctgtaattgtctgaagggttcgtcttgcctgctgcacagataaaaccaattcactgagacagcattattgcagtaaagaaagagtttaattactgcaaggccagccaagtggaaggataggagtttactattactcaaatcagcctccctkctaagtcaggctagggtttttatggataatttggtgggcaggagattaaggaatgggtgttgctgactggttggagatgaaatcattggagtgtggaaaacggtcttcatgtactgagtctgccataggatgggagccacagaacccgttgcattatgagtcatgagtctgaatggggtcagtggattaccagaatgcacaagtctaaaaaacatcttaaaagatcaattttaagttctgcaaaagtgatgttatctataggagcaactggggaagtcacaaatcttgtgacctctggccacatgactcctgagaagtaagggaatatagaaactgtatctacattttagctgaattcaggtctctcccatgatcctaatctcatttctggcctttgattagttttacaaaggtagctttgttccctaggcaaagag

SEQ ID NO: 930082 - DNA, 770 bp, Homo sapiens
caagtggagggtgagcaaggcaaggaggtgctttattgagtgacagtacagctctcaggagactgcaagtgggtagctcctaaccgcaggcaggtcatcccattgagtttgcagccctcagcagagaagagacctggagtggatagctcctatccacaggcaggttgttccaacatctccatgagtctggctaagtctggggtttttatgggcttcagaagggaggaagtgcatgctgattagtccatggtcggccataggtgggtccagaaaaagcaccataagttctcactccaggccatggactccaccaggaactgacagcccagcccccatgtttcaggccatccctggctggaacgtgyggtttcactggggaccagcccctttctgcccaggagcctatctgcctcctgccaccatctatgtgtcatccatggtgcccagactgtttgtgccaaggggtgccttcaggcccacaatgagccaatgagccaccctcagcacccccttggcctcccttctatgcttgttggcacccaaagtccagattgggccgaggtggcagggggctggcatgtcagcaccaccctgagtgcgcatacatccggctgggttgtgacagcaccgggcctccgccacaactttgttctgaaatcggagcaggtgctgggaacagggagaggccaggcagcaggagctggcacttccaaacctgtgggagtcaagggggcttcctgggtccccgaagcgcaaggatgcccaggtcc

SEQ ID NO: 930083 - DNA, 613 bp, Homo sapiens
aggaggctgaggtaggaggattgcttgagcctgggaggtccaggctgcagtgagcagtgattgcaccgccgtactcagattaagtgacagggtgagactccgtttcaaaagctaaaccaaaaaaagaaaaaaactcaacttcaagatttttatacttctttctctttgttttctatctcattttattttatatttgcatttacttttataattccactctaatcactttgagtttatttgcttgtgctttttccagcttcttaagttgaacacttagttcattttttctcatctcatttacttmttttccaatatcatcattgaaggctataaaattcctcctaagaagcaatttaatgccatcccacattgtgttaaatagcaattttattatcattcagttataagcatttaaaaatttttctttattaattcatctttaattcataagtgattcagaggtttgtttttaaattataaaaatttgtagattttatcatagagtccagggagtcaaattctaactcttaaatttcccctgtcacacctatccctatcatcacaaattgaatccagcatctttcccaccattgccctagccatcttctaggct

SEQ ID NO: 930084 - DNA, 551 bp, Homo sapiens
aaggagggtaatagagaagctcccccacccccaaccctaccccttccttccggaagcaaatctaagtccagccccggctccagatccctcccacactgacctaagaaaccctcagcacagacaacacccctgcattccccacacaacacccacactcagccactgcgggcgaggagggcacaaggccaggttcccaagagctcaggtgagtgacacaccggaatggcccaggacgccctcaccctgctcagcttgtggctccaacattccagaagccgaggcctctgctatccctgccctctccccatggatatcccatttcagacaaccccggccggcctgaatccccctcccttccttttttttttttccggggaggcyaggtcttgctgtcaccgaggctggagtgctgtgggatcctggccactgcagccttgaattcctgggctcaagtgattctcctgcctcagtagctaggactacagaccctcaccatcctgcctggatagttttaaaaaatatttttaaaagatttttagagatggggtctt

SEQ ID NO: 930085 - DNA, 801 bp, Homo sapiens
taatgtttcctcttacctttgactttcctcatttagaccctaatgtgcttgggatacttttctttctgtcaatcctgctttgggttcacttgggtttcttgattcttttttatttatttatttatttttttgagatggagtctcactctgtcgcccaggctggagtgcagtggcgcaatctcagctcactgcaagctccgcctcctgggttcatgccattcttgggcctcagtctcctgagtagctgggactacgggggcccgccaccacgcccagctaattttttgtattttaaatagacatggggtttcaccgtgttagccaggatggtctcgatctcctgaccttgtgatccgcccgcctcggcctcccagagtgctgggattataggcgtgagccaccgcgccyggcctcttgattctttaatctcatgtcttctactaaagtgagaaaatgtgtcctctacttttcaaaaatgtttttctcccccatttgttcctgtacacctgtgactcacatttcactattagaccctttgatggtatctctcaggtctctgagactgcattgatgtctttcagtttttttcttcttctccctaagattagatgatttctgttaatgtatcttccaagtttactggctcctgtatcatccctattctgctgctaagtgtacatgttgcattttccatttcagatattatatttttcagttatagaatttcatatagttcttttatattttatacattttaagtaatttatatttggttctcttaatttttctgatgacatttac

SEQ ID NO: 930086 - DNA, 566 bp, Homo sapiens
gatatagtttggatatttgtccctacccaaatctcatgttgaattataatccccaattctagaggtggggcctggtcagaggtgtttggatcatgggggtggatccctcatggcttagtactgtctccatgatagtgagttctcatgagatctggtgatttaaatgcatgtggcacctccttccccactttctcctactcctgccatgtgagacacctgctccctttcatcttccaccatgattgtaaacttcctgagccccaccccccacaggaagccaascaaatgccatcaccatgcttcgtataaagcctgcagaaccacgagccaaataaatctcctttcgttttaaattacccagtttcaggcatttcttagtagccatgcaagaatggcctaatacagctcctaaacagtttgccttttatgttcatctatggggtattgatgagtcctatcataaaaaggttttcctcacctgctgaatcccctgggtctaccagcgtctatttttatcgctccctcctgaagccatgccctgggctcaatatgttgaggtgctgata

SEQ ID NO: 930087 - DNA, 568 bp, Homo sapiens
cctaagaccaactgagctcccagggggaagggtggccattatcactgtggcttcctgctgcctaagatgactgagctcccagtgggaggggcagcagccaccactgcagctccagtctgctggttttcccctgtggatgctggggagattgggtggtttggacccaggaggaattccccacagcacagcacagtggctgtggcagatcatggccagactgactctttaggccagacccttacccrtccctcctcaaccagtggggcctccttgtgggaattttagctactcaggccaggggtttatagtcagaactcacatctccctgggacagagcctcgtaggggaagggcagccatggtctctgcggatcagcagacttagtctttccgcctggtgtctctgaggagtcagggcagtctggatgagtgggatttccccagcacagcacaccctctccactgaggagcagctagagtgctttgttaagcgggtctctgatcccatgtctcctgactgggtgagacccccacaacaggatatgccagacgccctatacaggggcatt

SEQ ID NO: 930088 - DNA, 599 bp, Homo sapiens
gtagactgcatcttgcttggggtacaaagaagagaagagttgtaagaggtgatgagtgcttttcattgattgtgtcctacacacctaccccaccatcccacaatttataggctgaagctccaacctacaatgtgatggatttttagaactaattggatttaggtaaagtcataagggtagagccccagtgacatcattagtgcccttataagaagagataccagagagctctgtctttctctcccctacccgctggtcccctgccccccttcccctaccgttcctctccctctccctcttgtagggacatcacagtaaatcacttgcctgttaaatacattagagtgctgaaaatcttattagagagattctttccttctaaatattttagatgttgtaatcatcttttttaaaaaartggcaaaattggccaggtgcggtggcttatgcctgtaatcccagcactttgggaagccaaagtgggtgaatcacctgaggtcaggagttggagaccaacatgctcaacatggtgaaaccccatctcttccaaaaatacaaaaaaaaattagctgggcatggtggcaggcgcctgtaatccc

SEQ ID NO: 930089 - DNA, 606 bp, Homo sapiens
cagggttccccagagaaatggaaccaatagagtgtatgtgtatgtgcatgtacacgtgtgtgtgcgtgtgtgtgtgtgtgtggagagggagtgagagagggagatttattttaagaaattggctcatacaattatggaggctactaaatgcaaaatctgcagggttggtcagcaggctggagacccagggacaggccaatgttgcagttcaagtctgaaggccatctgtgtaattcactcttgcttggggaagatcagtctttttgttctattcaggccttcaactgattggatgaggcccaccaacattttgaaggcaatctrctgtactcaaaatctactgatttaaatgctgatctcatccaaacaatctctcacggaaacatctccaacagtgttttacaacatatctaggcaccatggcccagccaagttgacacataaaattaaccactcaacccctattttctttattacccaatcctgaatcagatgacaatagcctcccgacaagcctctctgcttctactcttgtttcctctcaatgcatttataagcagtagcaagaataatcataaaacaaaaccccaattctttctcttatgc

SEQ ID NO: 930090 - DNA, 604 bp, Homo sapiens
cttggttcactgcaacttccaccccctggctcaagcaatcctcctgtcttggactcctgagtagctgggactacaggtttgcaccaccatacctggctatttttttttcttttttttgtagctgtgggggtttcaccatgtagcctaggttggtttttgttttgttttgggttttttttgagatggaytctcattctgtcgcccaggctggagtacagtggcatgatctcggctcagtgcaacctctgcctcccgggttcaagcaattctcctgcctcagcctttttagtagagatggtgttttgccatgttggtcaggctggtctcgaactcttgacctcaggtgatccagcagcctcggcctcccagagtgctgggattacaggcgtgagccactgcgccccacctaccagatccttttgaggctgataaagcactttgggacctgcctcctgcctctgtctcctccaatccccaccccataaccacatcggcctccctgtgcccagagcacagcagccatgcagcttgatcctatctcagggcctttgcacttgtgtttctatcacctgcagtgtttcctcaccctccacttacccccact

SEQ ID NO: 930091 - DNA, 544 bp, Homo sapiens
gtctcctttctcatccctgattttatttatttgaatcttctcactttttctcttagtctggctaaattttatcaattttctttgacttttcaaaaaaacaactttttgtttcattgatcttttatattgttttctatatttcatttgtttctgctctgaactttctttctttctttcactaattttgagtttgattgctyctgcgtttctagttcttcaaaatgcaccattagattgtttatttgaaatttttcttctcttttgatgttggcacttatagctgtaaacttccctcttagtactgcttttgctgtatcccgtatgttttggtatgttgtgtttccattatcatttgtttcatgaaaattttcaattttctttttaatttcttcattaacccactggttattcaggagcatattgttcaatttccattcatctgtatagtttccaaaattcctcttgttattgatttctagttttatttcattgtagtcagagaagatgtttcatataatttcaattttctggaatgttttaaggc

SEQ ID NO: 930092 - DNA, 759 bp, Homo sapiens
agctattttgaattctctgtctgaaaggtcagatatctctttttctccaggattggttcttggtgctttatttagtttacttgatgaagtcatgatttctgggattgtgttgatacttgtagatgttaatctgtgtctgggcattgaagggttaggtatttattgtagtcttttcagtctgggcttgtgtgtacccatccttcttgggagggctttctagatatttgaaagtacttgggtgttgtgatctaaactgtatctgttttagggggcactccaaacctagtaatgctgtggtcctgcagactcatacagctattgtcttgatgattttggacaagatctgggagaattgtctggattaccaggcagagactstcattctcttcccgtactttctcccaaacaaacagagtctttctctgttctgagccacctggagctgggggtggagtgacacaagcacccctatggccaccaccacagggcgagacctgaagccagcacagtactgggtctcacccaaggcctgctttaaccacttcctggctgctgtctgtgtcccctcaaggccctggggcttggtccataaatgctgtccaagggccaaatcctgaaatcagggtccccaaaagcccacttgtctgtcaccttaggtaccaagctggtctctaaggtgcatgacagagtcctctttacttttccctctgcttttctcaagcaggagtcttgccctgtaaccaccacaggcgggaatgt

SEQ ID NO: 930093 - DNA, 613 bp, Homo sapiens
tgactttttctcaacatgaagtaagagaatttggtctatgaaggacgctaaccctttatcatatgaactgcagacatttttctcagtctatcacttgttagattgctataatttgtacttgccatgtaaaaatacctaatttgatactgtaaaatatatttaacttttctttaaggttttgggttttctgttctggttaagggaagatctcccaacttccaggttacaaaagtagcatttcaaaacttctttctaatattttgttgttctatttgtagcatacttaagctttcgtgctgttacatcttttttctttytaaagtagaggcctacgtttgtttccgttcagccggaagacgcctcagtgctcaggcagcccatcgccttcctctacaatgtttaatttgcatttcgtgccttgggtcttagatcccaagtcacttcctcagagctttgaatgcccaacttaattagctccttttcctgcttgatccaaatcaaactggaagaccgagtaagtgcatacggttcctttccactcaacatttctccaaatgtgagaaaatataagttaaaaataataaatcctggccgggcgcagtggctcattcct

SEQ ID NO: 930094 - DNA, 625 bp, Homo sapiens
ttctaccagaggtacaaggagaagctggtacaattccttctgaaaatattccaatcaatagaaaaagagggaatcctccctaactcattttatgaggctggcatcatcctgataccaaagcctggcagagacacaacaaaaaaaagagaattttagaccaatatccctgatgaaaatcaatgtaaaaatcctcaataaaatactggcaaaccraatccagcagcacatcaaaaagcttatccaccatgatcaagtgggctgcatccctgggatgcaaggctggttcaacatatgcaaatcaataaatgtaatccagcatataaacagaaccaacaacaaaaaccacatgattatctcaatagatgcagaaaaggcctttgacaaaattcaacaacccttcatgctaaaaactctcaataaattaggtatggatgggatgtatctcaaaataataagagctatctatgacaaacccacagccaatatcatactgaatgggcaaaaactggaagcattccctttgaaaactggcacaagacagggatgccctctctcaccactcctattgaacatagtgttggaaattgtagccagggcaatcaggcaagaaaaataaataaagcgt

SEQ ID NO: 930095 - DNA, 625 bp, Homo sapiens
ttctaccagaggtacaaggagaagctggtacaattccttctgaaaatattccaatcaatagaaaaagagggaatcctccctaactcattttatgaggctggcatcatcctgataccaaagcctggcagagacacaacaaaaaaaagagaattttagaccaatatccctgatgaaaatcaatgtaaaaatcctcaataaaatactggcaaaccaaatccagcagcacatcaaaaagcttatccaccatgatcaagtgggctkcatccctgggatgcaaggctggttcaacatatgcaaatcaataaatgtaatccagcatataaacagaaccaacaacaaaaaccacatgattatctcaatagatgcagaaaaggcctttgacaaaattcaacaacccttcatgctaaaaactctcaataaattaggtatggatgggatgtatctcaaaataataagagctatctatgacaaacccacagccaatatcatactgaatgggcaaaaactggaagcattccctttgaaaactggcacaagacagggatgccctctctcaccactcctattgaacatagtgttggaaattgtagccagggcaatcaggcaagaaaaataaataaagcgt

SEQ ID NO: 930096 - DNA, 663 bp, Homo sapiens
tccactgcttcctcaaagctgtcagacagggacatttacgtctgcagaggttactactgtctttttgtttgtctgtgccctgcccccagaggtggaggctacagaggcaggcaggcctccttgagctgtggtgggctccacccagttagagcttccaggctgctttgtttacctaagggagcctgggcaatggcgggcgcccctcccccagcctcgctgcygccttgcagtttgatctcagactgctgtgctagcaatcagccagactccgtgggcataggaccctccgagccaggtgagggatatcatctcctggtgtgctgtttcctaagcccgtcggaaaagcacagtattctggtgggagtggcccaattttccaggtgccatctgtcatccctttccttgaccaggaaagggaactccctgatcccttgcacttcttgagtgagggaatgcctcgccctgcttcggctggcgcacggtgcgctgcacccactgtcctgcgcccactgtctggcactccctagtgagatgaaccgggtacctcagatggaaatgcagaaatcacccgtcttctgcgtcgctcacactgggagctgtagaccggagcagttcctatttggccatcttggctcctccttccattattttaagtattacaca

SEQ ID NO: 930097 - DNA, 663 bp, Homo sapiens
tccactgcttcctcaaagctgtcagacagggacatttacgtctgcagaggttactactgtctttttgtttgtctgtgccctgcccccagaggtggaggctacagaggcaggcaggcctccttgagctgtggtgggctccacccagttagagcttccaggctgctttgtttacctaagggagcctgggcaatggcgggcgcccctcccccagcctcgctgctgccttgcagtttgatctcagactgctgtgctagcaatcagccagactccgtgggcataggaccctccgagccaggtgagggatatcatctcctggtgtgctgtttcctaagcccgtcggaaaagcacagtattcyggtgggagtggcccaattttccaggtgccatctgtcatccctttccttgaccaggaaagggaactccctgatcccttgcacttcttgagtgagggaatgcctcgccctgcttcggctggcgcacggtgcgctgcacccactgtcctgcgcccactgtctggcactccctagtgagatgaaccgggtacctcagatggaaatgcagaaatcacccgtcttctgcgtcgctcacactgggagctgtagaccggagcagttcctatttggccatcttggctcctccttccattattttaagtattacaca

SEQ ID NO: 930098 - DNA, 663 bp, Homo sapiens
tccactgcttcctcaaagctgtcagacagggacatttacgtctgcagaggttactactgtctttttgtttgtctgtgccctgcccccagaggtggaggctacagaggcaggcaggcctccttgagctgtggtgggctccacccagttagagcttccaggctgctttgtttacctaagggagcctgggcaatggcgggcgcccctcccccagcctcgctgctgccttgcagtttgatctcagactgctgtgctagcaatcagccagactccgtgggcataggaccctccgagccaggtgagggatatcatctcctggtgtgctgtttcctaagcccgtcggaaaagcacagtattctggtgggagtggcccaattttccaggtgccatctgtcatccctttccttgaccaggaaagggaactccctgatcccttgcacttcytgagtgagggaatgcctcgccctgcttcggctggcgcacggtgcgctgcacccactgtcctgcgcccactgtctggcactccctagtgagatgaaccgggtacctcagatggaaatgcagaaatcacccgtcttctgcgtcgctcacactgggagctgtagaccggagcagttcctatttggccatcttggctcctccttccattattttaagtattacaca

SEQ ID NO: 930099 - DNA, 657 bp, Homo sapiens
cagggccttgctccaaaatcctataggcctcctctatgattcacctgtgggagcctgccaaaggctccaaacagcatccctatctgccagtgacacctcaagcaccattggatctgctgggtcatattgcccaagtggcagaatagcttgcacagcagcctgggcctcttgcagagccttctcctgttctagaccccactcaaaactgacagcctttccagtcgctcattaaatgagcaggagaaacacacccaaatgaggaatgtgttgcctccaaaatccaaataggcccactaggcattgagcttctttcttggttgtaggaggggccaaatacagcaacttatcytttatcttagaaggaatatctcaacaggccccataccactggacccctagaaattttactgaggtagactgtccctgaattttagtcaggtttatttcccatcttctgacacacaaatgtctcaccaataagtccagtgtgtttgctacttcttgctcactggatccaatcagcataatgtcatcaatgtaatggaccagtgtgatatcttgtggaagtgaaaagcaaccaagttctctccgaataagattatgacacaaagctggagagtcgacatacccctgaggtagaatggtaaaggtaaattg

SEQ ID NO: 930100 - DNA, 746 bp, Homo sapiens
tattcattacctgacctccatagccccctactttaactggaggaccacaatgacattttaggtcccctggaatcaatgtcagctcagagccaatgtccagcagttcctgaaatgtctgatcatttccctttccccagtgcatagttaccctggtaaaagactggaagtctccttggggaaggatgggataaagatttgctgcataaattgtcagtaatgtagtgggctccttcctcaaggggacctggcctacccttcattccaggggttctaggtctgtaaactggmtcaagtctggaaattgattgaggggccgtgattccatttttataattcaaattagtcttttgtccatttgacctagaaggtttcagcttgtataaattaagtaggaatgaagtacgcttcctattcatttcactcctaggaacaccgtgattaattagtcaatgccagagctctacatgagtcagactattctgattgccactttgcctctgctgtccattacagtagctatgcccaccttgcctttgatggttgagtgctactgccacttggcccctgccatctcaggatccaactattcccattgtattcaaattgtgtagttgagtgactgcagttcccaccattaagtctgacatacagagaagagcaattatagggctcttcaaagatgcaggtgctgccctcacaaatctatttcacaagatatttatcaacagtatatcttccggaccctc

SEQ ID NO: 930101 - DNA, 453 bp, Homo sapiens; identical to SEQ ID NO: 919765

SEQ ID NO: 930102 - DNA, 640 bp, Homo sapiens
gttttattttgtttgttacatacccgtgctctcggcatctgctttcactaactccccttgatgacacctgcccctcctccatgggtctccaccctgtccacccccgtccccgatgatgcctgtccctcctctgtgggtctccctttgcagtttggtagatcacttcaagaatcctcagtgcatgttctaaagcaaagatacagaaccctgatagtttaggaccagctttgcatccatactcatggagtggtttggataccaaagtgaagtcccaaaattttgaaaacaaacttttctccatcacaacgattagtctgttattgtaatccagtggacttatttgcatcgactgccctattttgkctatagattatttctaaaatgagcatgtctcatgctgttctatgcagcctttagtggcatggaaacaggaggctcttagaaaccagaatatttggtgactcttattgttcttcttctctgcccgtaggtatcgttcttcctcttcatcatcttcgtggtgtacaccatgctgcccttcaacatgcgagacgccatcattgccagcgtcctcacctcctcctcccacaccatcgtgcttagcgtctgcctgtctgcaacaccgggaggcaaggagcac

SEQ ID NO: 930103 - DNA, 733 bp, Homo sapiens
aagttttgtaaaaatacaaaacttagccaggcatggtggctgtgcgcctgtaatcccagctactcgggagcctgaggcaggggaatcatgtgaacgcagcaggcagaggttgtagtgaaccgagatcacaccactgcaccctagcctgggcgacacagcaagacaccatctcaaaaaaaaaaaaaaaaaagggtggggaggggaaaacagaggaagtaggagaaggctaagggatggatttgaaaaccaaagccacacttggaggaggggaaaaattggctcgtcgtacactgctgttgagccaaggggaagaattaaaccagggatcagactgactccaaggcccagacctagccccaagaggaattcctaatagcttctaagatattcttccttggcggctaagtcagatattcagggggttactgagttggtggatgccacagagcatctcagaggtgcacatcaaccctgggaccagctcactccatcgacggtgacacacacctgcrgcttccttctggtcttctccagtggcagttggtgcaacagcaaaaattaactggagaattccaggtggcaacgaccactgatctttactgagcgctgtgtgccaagcagcaacattttaagtccttgctaaggattaactcacttattcctcaagtcaccgctattcactaggtactacgttatcccacatagggaaactgaggcacggagagatgacgta

SEQ ID NO: 930104 - DNA, 606 bp, Homo sapiens
ggataaatgagaaactaaaagaggcaattgcatttgggcagagtaactttttattgtttaccttgatatatacgtttttttttttttttttgagatagagtctcgccctgtcaacaggctggagtgcagtggcgtgatcgtggctcactgcatcctccgcttcccagtttcaagcgattctcctgcctcagccttctgagtagctgagattacaggtgtgtgcgccaccaagctcagctaatttttggtatctttagtagagattgggtttcaccacgttggctgggctggtctcgaacccctgacctcgtgatctgcccaccttggcctcccaaagtgctgagattacaggcttgagccaccgcgcccggcctatatatgtattatataaacatatgcacacgcatgcatacrtacacacatatatattttttaaaaattgagtcatggccaggtgcagtgtgggtcacacctgtaatcccagcactttggcaggtgaaggtgggaggattgcctgagctcaggagtttgagaccagcctgggcaacatggagaaaccccttctctacaaaaatcacaaaaattggctgggcgtggtggcataca

SEQ ID NO: 930105 - DNA, 650 bp, Homo sapiens
atgcaggttccaaagccccgccccaaagatactgagaaaagaggtctggaaggggctgcattttactgtttccaagacaatgcttaggtcaggttaaaagcttcccagcttcttttattcttagtgtttgtctcagagcagatgatttactggctgggggtctgagctaaggattcaaaacaatacaaaatgaggttgcgatgaaagggaactaagacatcatctaacctactgggtttcaaacttttgtgaccttaacccacattaagaaataccttttacaatacaactcaatatgcttgtgggtttggttccagacaactgcaataaagcgagtcacacaactttcttggtttcctagtgcatataaaaattatgtttacactatacrttacatggtacatttatcctatactgtagtttattaaatgtgtggtagtatttgtctttaaaaatgaacacaccttaatttaaaaatactttattgctaaaaaaaaaaaaaagaaaagaaaaagtgctaacatcatctgagccttcagagagtcgtaatctttttgctggtggagggtcttgccgcgatgtggatggctgctgactgctcagggtggtggctgcttgaaggctggggtggctgcggcaatttcttaaaa

SEQ ID NO: 930106 - DNA, 578 bp, Homo sapiens
tatccacagcagaacttctttcgaaattagagtcaagcttctcaacccctgctgctgctttatcaactaagtttgtggcacattggaaatcctttgttgtcacttcaaccaagttcacagcatcttcaccaagtgtagattccatctcaaaaaaccactttctttgctcattcatgagaagcaacgcttcatccctgaggagtttaatcacgagactgcagtaattcagtcccatcttcaggctccacttgtagctctagttctcttgccgtttccaccatatttgtagttacttcttccactgaagtgctgaacccttcgaagtcatccacgagactggaatcamcttcttcagaactcctgtttatgctattttgacctcctcccatgaatcacaaatgttcctcatgacatctagaatggtgacctttccagaaggtttccagtgtactgtgtccagatctaccagaggaatcactatctatggcagctacagccttacaaaatgtattttgtaaatgataagacttggaagtcaaaattagtttttgatccatgggctgcagtacggatgttgt

SEQ ID NO: 930107 - DNA, 620 bp, Homo sapiens
atgagaactcactcactatcacaagaacagcaaggagaaaatctggccaatgatcaaatcgtcttccacaggtccctccctcagcgttggggattacaattcaacatgagatttgggcggggacacagagccaaaccataaatgatatgagtgctcccatggccccttccaaatctcatgaccttctcayattttaaaacaaattatgctttcccaaaagtcccccaaaggcttaactcgttcaaacattaactcaaaattccacttccaaagtctcatctgagacaaggcaagtcctttctgcctatgaacctgtaaaataaaaaacaagttagttacttccaagatatgatgggggtacaggcattgggtaaatgcactcattccaaaatggagaaattggcctaaacaaggggctagtggctccatgcaagtctgaaacccagcagggcaatcattaaattttaaagctccaaaataatctcctttgactccatgtctcacatccaggccacaatgatgtaaagggtgggctcctaaggtcttgggcagctctggccctgtcactctgtaggttacagccctcatggctactttcacgggctggcattgggtgccta

SEQ ID NO: 930108 - DNA, 620 bp, Homo sapiens
atgagaactcactcactatcacaagaacagcaaggagaaaatctggccaatgatcaaatcgtcttccacaggtccctccctcagcgttggggattacaattcaacatgagatttgggcggggacacagagccaaaccataaatgatatgagtgctcccatggccccttccaaatctcatgaccttctcacattttaaaacaaattatgctttcccaaaagtcccccaaaggcttaactcgttcaaacattaactcaaaattccacktccaaagtctcatctgagacaaggcaagtcctttctgcctatgaacctgtaaaataaaaaacaagttagttacttccaagatatgatgggggtacaggcattgggtaaatgcactcattccaaaatggagaaattggcctaaacaaggggctagtggctccatgcaagtctgaaacccagcagggcaatcattaaattttaaagctccaaaataatctcctttgactccatgtctcacatccaggccacaatgatgtaaagggtgggctcctaaggtcttgggcagctctggccctgtcactctgtaggttacagccctcatggctactttcacgggctggcattgggtgccta

SEQ ID NO: 930109 - DNA, 688 bp, Homo sapiens
ccagctgtcccaggaactaatagagggagaactcactctccccctcctcagtaagggcattaatatgttcatgaggagtctgcccccatgacacaaacacttcccattaggtgataccaccaacattgggatcaaattgaaacatggagtgtggtgggacaaaacattcaagctatgcattcctctccctttcccccccacacaaactcatgtcatttttacattgcaaaatacaatcactccttttcartagtcctcaaaagtcccacaatttgttctagcagcaactcaaaagtctaaagtcccaaatctcatctgagacacaaggcaattctttccagctataagtctgtaaaaacaagttatttacttccaagatacaatggtataatagacattaggtaagcattctcattccaaaatggagaaatagtccaaaagaaaggtgtaacatgcccccacacaagtctgaaacccagcagggcagacattaaatcttatagctccagaataatctcccttgactccatgtctcacatcatgagcacattagtgtgaagggtgaattttcaaggtcttgggcagccttatccccatggctttgctgggcacagcccatgtggctgctctcacaggttggatttgaattcctgtggctttctccaggctgcagttgcatgctactggt

SEQ ID NO: 930110 - DNA, 617 bp, Homo sapiens
attctttcctgggcaaaggcaagaaccctcatgtgctattgagaggtgacagcgtgctggcagccctggagctcactattggcacctcctctgcctgggctcccaatgtggcagcacttgaggagcccttcagcccgctgctgtactgtggaagtcccttcctgggctggctraggctggagccggctccctcagcttgtggggaggtgtagagggagaggcgctggcgggaaccggggctgggcagggcgcttgcgggccagcgcgagtgccggctgggcgtgggctccgtgggccccacattcggagcggccagccgaccccgccggccctgggcagtgaggggcttagcaccagggccagcagttgctgtgctcgatttctcgccaggccttagctgcctctccgcagggcagggctggggacttgcagaccaccatgcctgagcctccccctcacccaccgtgggctcctgcgcggcctgagcctccccagtgagcaccgccccctactccacagcacccagtcccatagaccacccaagggctgaggagtgccagcgctgggcgcaggactggcaggtagctccacctgtggccccagggcgggatccactt

SEQ ID NO: 930111 - DNA, 583 bp, Homo sapiens
aacttctcaaagtcacacaggttgcaggaggcagaacccggatttgaactcactttgggttcagcaactcacagctctcacctatgacataatattacttctgtggtcaaaacacttagacctggatttcacaggaatcttgtgcttgtctggctgctagggaggttttcatcatcttccttatctcacagttcaaaacccagggcctccatgctcttgctctggtggccgttcactggcaggaggcttctgggaaggttctccttttctgtcatttttcttattcgtggttttttgtctcattggtgtttatctgcaraactttgtttccttctgctcaattcataatcagagtgcttttcctcctggctgaactcataagtgtttatgcaaaaagaggttgggcacagagccaggcgactgacgacacccggctcgtctggcaagtggatatcaaattgttgtatcttgttctgccattcgtggctcctgcggtggggctgggccatctgccagctctccaaagagctggtgggaaaccgctgcaatcagagcgaacccacggcccgggtgagcccgcctc

SEQ ID NO: 930112 - DNA, 583 bp, Homo sapiens
aacttctcaaagtcacacaggttgcaggaggcagaacccggatttgaactcactttgggttcagcaactcacagctctcacctatgacataatattacttctgtggtcaaaacacttagacctggatttcacaggaatcttgtgcttgtctggctgctagggaggttttcatcatcttccttatctcacagttcaaaacccagggcctccatgctcttgctctggtggccgttcactggcaggaggcttctgggaaggttctccttttctgtcatttttcttattcgtggttttttgtctcattggtgtttatctgcaaaactttgtttccttctgctcaattcataatcagagtgcttttcctcctggctgaaytcataagtgtttatgcaaaaagaggttgggcacagagccaggcgactgacgacacccggctcgtctggcaagtggatatcaaattgttgtatcttgttctgccattcgtggctcctgcggtggggctgggccatctgccagctctccaaagagctggtgggaaaccgctgcaatcagagcgaacccacggcccgggtgagcccgcctc

SEQ ID NO: 930113 - DNA, 583 bp, Homo sapiens
aacttctcaaagtcacacaggttgcaggaggcagaacccggatttgaactcactttgggttcagcaactcacagctctcacctatgacataatattacttctgtggtcaaaacacttagacctggatttcacaggaatcttgtgcttgtctggctgctagggaggttttcatcatcttccttatctcacagttcaaaacccagggcctccatgctcttgctctggtggccgttcactggcaggaggcttctgggaaggttctccttttctgtcatttttcttattcgtggttttttgtctcattggtgtttatctgcaaaactttgtttccttctgctcaattcataatcagagtgcttttcctcctggctgaactcataagtgtttatgcaaaaagaggttgggcacagagccaggygactgacgacacccggctcgtctggcaagtggatatcaaattgttgtatcttgttctgccattcgtggctcctgcggtggggctgggccatctgccagctctccaaagagctggtgggaaaccgctgcaatcagagcgaacccacggcccgggtgagcccgcctc

SEQ ID NO: 930114 - DNA, 583 bp, Homo sapiens
aacttctcaaagtcacacaggttgcaggaggcagaacccggatttgaactcactttgggttcagcaactcacagctctcacctatgacataatattacttctgtggtcaaaacacttagacctggatttcacaggaatcttgtgcttgtctggctgctagggaggttttcatcatcttccttatctcacagttcaaaacccagggcctccatgctcttgctctggtggccgttcactggcaggaggcttctgggaaggttctccttttctgtcatttttcttattcgtggttttttgtctcattggtgtttatctgcaaaactttgtttccttctgctcaattcataatcagagtgcttttcctcctggctgaactcataagtgtttatgcaaaaagaggttgggcacagagccaggcgactgacgacacccrgctcgtctggcaagtggatatcaaattgttgtatcttgttctgccattcgtggctcctgcggtggggctgggccatctgccagctctccaaagagctggtgggaaaccgctgcaatcagagcgaacccacggcccgggtgagcccgcctc

SEQ ID NO: 930115 - DNA, 586 bp, Homo sapiens
  misc_feature 580: n = A,T,C or G
aggattccaagagtcctgggggtaccacgagcttggtggtcctaagcaggaaacaaagccggcagagtccaatccccctggcacaacagcccttctgggagagactccctaagacagagagctgacttcactgcccagattctccctggggcacatggtatctctgcraagccaagccggtggtacccaccacgtgcctgcggaggtgcacagtgcagacatctcagacctcacctgggaggcaggatgatatgaccctcattagctttccctgctgctgatgaaggaaagtcttcctggagagttctttgagagggccgatgctgtattcctcctttcactcggggaatactctttgagcatctactttggtccaggcagtggaaatggtggcaaacgatagaactcatgtgtcttgggaatggtgccatcttcccagggcttgtcccatgacatggggctcaggtcccctccactctgtgatcccatagatctttctgtgagaatagcttccttttctctgtagttcaacccacggtgaaccgatttaaaattcccttttgggaggatgctttcactncttcat

SEQ ID NO: 930116 - DNA, 757 bp, Homo sapiens
acgcatcaggaccaaggcacgactccccacttggagaaatcaacggggaaagagacggaggcaaaggagaaccatctcactgggagaggcgacgctgtttgacacatcgtccccgtacctcccaaagccactgccctcccacacctgggcaacagtggccccaaccccaggcccagccctcctgcaggaaggaagaggactgaatggagggcgtggcaggctgaaaggacgtggcctcctcaaaccccttggtaaacggcccctggggccacctggcagggaggggctggcacaccaggaagtagcctcctcctgggagttcagccagagcccaggtcccgtcccccagtggcctccagagccaccttttcagaaaaagtacatcccgcccaccctsttccccccgcctcctccctgagcctcctgctggcctctcacctagaagcagggggtagtcctcggcctccagccagggggtgcagacctggatgtgctggaagtgcttctggtggatgaggcggctataatactccctcagaggccctttgccttcacagagaagagcagacactgccatggacccatctctgtccctgccacgtggccccaggcccaagacactcccccctaggagggatccctttcccagaagctccacccctcagcagctccagtcaggccccatccgggcccttccagaagcaacccaggagccctgagacctgcaggggtgtgtgcaccctgacccctgacgcat

SEQ ID NO: 930117 - DNA, 553 bp, Homo sapiens
ggcgcggtggcatgcctgtaatcccagctacttgggaggctgaggcagaattgcttgaacctgggaggtggaggatgcagtgagccaagattgcgccactgcactccagcctgacactgcactccagtaacagagcgagactccgtctcaaacaaacaaacaacaacaaaaaagaagtgtccagtcatcccatcttcctgcttcctgtggggttggtaaaaggatgccactctctggcctccctatgtcctcgggcccrtgtcagcaggtacatgtgttctacttttccagaagcccctgggatgaaaggtgggtgaagacactttaggagcatttgcattcaaacctgggtatatttgtcaggcaactgcagatgcctacagagatgacaaagctatgaaatgaggcctcttccacgtggagaaaaggaggtttggcttgaattagatctataaagtcccaaagtggatgcagagggatggaagctttgacaattagaaggattcgaggtctcccttgaagtttaaaagcgttcaaggcaaagaaacatctc

SEQ ID NO: 930118 - DNA, 553 bp, Homo sapiens
tagcacctctgggcttgctttttcctctgcctagaatgttcttcctccagatacccacgtgacttcccccatcctttagtctttgctcaattgtcaccttcccagggaggtttttcttctctaccccacatcctctcccagcttarcattcttcatcccccttcttttattttttcctattgcacttgccaccttcttttttaaatttttttatttcattaaaaaatttttttttagtttttttttttttgagacggagtttcgctcttgttgcccaggctgtgtgcaatggtgcaatctcggctcactgcaacttctgttttccgggttcaagcgattctcctgcctcagcctcccgagttgttgggattacaggtgcccgctaccacacccagctcatgttttgtatttttagtagagacagggtttcaccatgttggccaggctggtctcaaactcctgacctcaaatgatccgcctgccttggcctctgaaagtgctgggattacagacgtgagccatggcgcccagcctgcacttgccaccttctaac

SEQ ID NO: 930119 - DNA, 595 bp, Homo sapiens
aaaataatttttctgtcgaagaggcatattttgcggtgatatattctggttttttctttttcttttttcattgagatggagtctcgctgtcacccaggttggagtgcaatggcgcgatctcggcccactgcaacctctgcctcccggttctcaagcggtttctcctgcctcagcctcccgagtagctgagattacaggcgcccaaaactgcacccggctaatttttgtatttttagtagagatggggtttcgccacgttgaccaggatagtttcgaactcctgacctcaggtgatctgcctgcctcggcctcctacaagtgctgggattacagatgtgagccaccacaccyggccttattctggttttctttaggtgtcttcattgaacaagtaggtattgtctggcatacccttctgggttatctcgtcttatggggtcttacttttgtctttaagctatctagagctctagtggagcattgtatatataccatcattaatgagttaaatggtatctttgacatatgttcattttatatttgtgtgagagtcataattttattttaaaaaaaagatatgctttttttttttttt

SEQ ID NO: 930120 - DNA, 573 bp, Homo sapiens
tggccttccaaagtgccgggatttcaggaatgagccaccatgcccggccttttttttttttttttttttttttcagaggcagggtcttactctgtggctcaggctggaatgcagtggcaccattttggctcactgcaacctctgcctcytgggttcaagtgattctcctgccttagcctctcaagtagttgggattacaggcacccactaccacacctggctaatttttgtggcgcaatcttggctcactacagcctccaccttctgggatctcaagtgatcctcccatctcagcttcccaagtagctgggactataggcgtgcaccaccatacccagctaattttttttaactgttttgtagagacagggtctgttttgttctgcaggctgttctcaaactcctagacccaagcaatcctcctccctcagccttccaaagtgctgggatcacaagtgtgagcgaccacatccagccttaagcaaggacattttaaaaaaaaagtaacacaaccactaccattttgtacccaacaagacacacaagactaccacaaatgaaggaatacaaatc

SEQ ID NO: 930121 - DNA, 573 bp, Homo sapiens
tggccttccaaagtgccgggatttcaggaatgagccaccatgcccggccttttttttttttttttttttttttcagaggcagggtcttactctgtggctcaggctggaatgcagtggcaccattttggctcactgcaacctctgcctcttgggttcaagtgattctcctgccttagcctctcaagtagttgggattacaggcacccactaccacacctggctaatttttgtggcgcartcttggctcactacagcctccaccttctgggatctcaagtgatcctcccatctcagcttcccaagtagctgggactataggcgtgcaccaccatacccagctaattttttttaactgttttgtagagacagggtctgttttgttctgcaggctgttctcaaactcctagacccaagcaatcctcctccctcagccttccaaagtgctgggatcacaagtgtgagcgaccacatccagccttaagcaaggacattttaaaaaaaaagtaacacaaccactaccattttgtacccaacaagacacacaagactaccacaaatgaaggaatacaaatc

SEQ ID NO: 930122 - DNA, 573 bp, Homo sapiens
tggccttccaaagtgccgggatttcaggaatgagccaccatgcccggccttttttttttttttttttttttttcagaggcagggtcttactctgtggctcaggctggaatgcagtggcaccattttggctcactgcaacctctgcctcttgggttcaagtgattctcctgccttagcctctcaagtagttgggattacaggcacccactaccacacctggctaatttttgtggcgcaatcttggctcactacagcctccamcttctgggatctcaagtgatcctcccatctcagcttcccaagtagctgggactataggcgtgcaccaccatacccagctaattttttttaactgttttgtagagacagggtctgttttgttctgcaggctgttctcaaactcctagacccaagcaatcctcctccctcagccttccaaagtgctgggatcacaagtgtgagcgaccacatccagccttaagcaaggacattttaaaaaaaaagtaacacaaccactaccattttgtacccaacaagacacacaagactaccacaaatgaaggaatacaaatc

SEQ ID NO: 930123 - DNA, 573 bp, Homo sapiens
tggccttccaaagtgccgggatttcaggaatgagccaccatgcccggccttttttttttttttttttttttttcagaggcagggtcttactctgtggctcaggctggaatgcagtggcaccattttggctcactgcaacctctgcctcttgggttcaagtgattctcctgccttagcctctcaagtagttgggattacaggcacccactaccacacctggctaatttttgtggcgcaatcttggctcactacagcctccaccttctgggatctcaagtgatcctcccatctcagcttcccaagtagctgggactataggcgtgcaccaccatacccagctaattttttttaactgttttgtagagacagggtctgttttgttctgcaggctgttctcaaactcctagacccaarcaatcctcctccctcagccttccaaagtgctgggatcacaagtgtgagcgaccacatccagccttaagcaaggacattttaaaaaaaaagtaacacaaccactaccattttgtacccaacaagacacacaagactaccacaaatgaaggaatacaaatc

SEQ ID NO: 930124 - DNA, 600 bp, Homo sapiens
agaggtcccatacatccttcatccagttttccctcattgttaacatcttgccttgctagctgtgttacatttaggaaaaatgaagttaacattgacacagtgctattagctgaactgtagacttcattcagatttcaccaggtttttcatgatgtcctttttctgttccaatgtaraatccagggtatcacattatgtttatctgccatatctccttagtatcttatggtctgtaacagttgttatcagtctttttgttttgttgtttatgaccttgagagttttgagaagtactggttaggtattttgtagaatgtccctcagtttgggcttgcccgatgttttctcatgattagacaggatcacgggtttgggagaaaaatgacagagatgctaagtactctatggattgcatcatgtcagggagtacatgatgtaaacatgactttttactaatggtttcaactttgatcacttagttgtgaaagctgattacacaagttgggtcattcttgtcatacacaactaaatcagagttgaggggctgtgggaaaaagcacttgaggcacatagcattgctccaagaattgaattatctga

SEQ ID NO: 930125 - DNA, 600 bp, Homo sapiens
agaggtcccatacatccttcatccagttttccctcattgttaacatcttgccttgctagctgtgttacatttaggaaaaatgaagttaacattgacacagtgctattagctgaactgtagacttcattcagatttcaccaggtttttcatgatgtcctttttctgttccaatgtaaaatccagggtatcacattatgtttatctgccatatctccttagtatcttatggtctgtaacagttgttatcagtctttttgttttgttgtttatgaccttgagagttttgagaagtactggttaggtattttgtagaatgtccctcagtwtgggcttgcccgatgttttctcatgattagacaggatcacgggtttgggagaaaaatgacagagatgctaagtactctatggattgcatcatgtcagggagtacatgatgtaaacatgactttttactaatggtttcaactttgatcacttagttgtgaaagctgattacacaagttgggtcattcttgtcatacacaactaaatcagagttgaggggctgtgggaaaaagcacttgaggcacatagcattgctccaagaattgaattatctga

SEQ ID NO: 930126 - DNA, 755 bp, Homo sapiens
ctggatccaagagtgaaccaaaggcaaaagggacagttttttgtttttgttgttttggctgggttaatagctttataacttttttttttagacagtgagtctccctctgtcacccaggctggagtgcagtggtactatcttggcttgctgcaacttccacctccctggttcaagtgatcctcctccctcagcctcccaagtagctgggattacaggcacatgccaccatacccggctaatttttgtatttttagtagaaacggggcttcaccatgttgaccaggctggtctccaactcctgacctcaggtgatccgcccacctcggcctcccaaagtgctggcattacaaatgtgagccaccacgcccagcctgatagccttgacacctcaaaatatctagcaaagacaaacataaaaccmagataaaaatgtatgttgccaattctgaagacatttctatttgtatttaccaataattttaaagctagctagtttcgtaaagatttacttaagtcacgtgaacctgaaaattgcttggacttattaagttatgagcactctcttacttataagccaatgtggtaggcacaacatataacagtaagtctacatacaaataaacacatttagacatgtatacacgcacacaaatgaagatccaaatggcttttaccttggaactctagccatgagatagcaatacaagctcgccggttttacatggttacactctgtttgccccagtaggtaatcc

SEQ ID NO: 930127 - DNA, 814 bp, Homo sapiens
gacaccctgggcagcatttctgaccccttcccttgctgtgtttcattttcccattacacttaacatcttccaatatactgtataatttacttattttattttgtaattatcatactgtacaattgaattttttccccttaaggtatacagttctatgaatctggacacatacataaattcttgtaactgtcaccacaatcaggatacaggaccattccatggtttcagaaaactctgttgtgctatccctttataatcatatcccttctcacccctaacccttagaaaccactgaatttatttttatttatttatttatttatttatttagtcaaggcagggtctcgctctgttgcccaggctggagtgcagtggcgcaatctcagctcactgcaacctctgcctcctgggttcaagcctcctgcctcagcctcctgagtagctgggcttacaggcgtgcaccactatgcctggctaatttttgtwtttttagcagaggtggggtttcaccatgttggccaggctggtcttgaactcctaacctcaagtgatctgctcactttagcctctcaaagtgctgggattacaggcatgagccacgacgcctggctagaaaccactgaatttttcatcatatatttttttcttttcaataatggggtcatacaacttttgagactggtataatgcctttcagattcatccaagttactgagttataaatagtttgttcctttttatttctgaatagtgttctattctatagctgtatcacagtttatccattcacttccattgaaggaaatttgggttg

SEQ ID NO: 930128 - DNA, 730 bp, Homo sapiens
aatgtctttcaaatttgtgtagttccctactctatgactgttaattttctcgatgtcattgaaagtttcctttgtttgtttatttattcattcgctctttcattcaacaagtgtttatcaagtacctactatgtgccaggcactgttttggactctggggacatatcagtggacaaaatcttaagaaagtgtgcattctagaggggagaaatgattataaacagaccaactaaaaacaaaatccaatctrccaactaatgataagtgatatgagaaaaataagccgagttcgtggaaaagagaaagctgggtgggagggctgctgctttgtattgggtggtcagtgaatactgctctgatactattcattgagcaggacctgaaggaagtgaggggtgcattatgcagatatctgggaaaagatccatttaggcagaggaaacaggaatttaaaaggtcctgagtgtgcttgatgtgttcagggaacggctggaccactgtggctggagcagaatgtgcaatgtgttcgaggatggaggaaatgacatcaaataaaacagagctgggaccagacctgggccttggtgtccactttaagggctttgacatttattccaagtgagatgggaagctatggaagaacttttagcagtgaagtgacacgatcagatttaagttttaaaaggatcattttaacttttacattgagccacagactgtagggttaagt

SEQ ID NO: 930129 - DNA, 730 bp, Homo sapiens
aatgtctttcaaatttgtgtagttccctactctatgactgttaattttctcgatgtcattgaaagtttcctttgtttgtttatttattcattcgctctttcattcaacaagtgtttatcaagtacctactatgtgccaggcactgttttggactctggggacatatcagtggacaaaatcttaagaaagtgtgcattctagaggggagaaatgattataaacagaccaactaaaaacaaaatccaatctgccaastaatgataagtgatatgagaaaaataagccgagttcgtggaaaagagaaagctgggtgggagggctgctgctttgtattgggtggtcagtgaatactgctctgatactattcattgagcaggacctgaaggaagtgaggggtgcattatgcagatatctgggaaaagatccatttaggcagaggaaacaggaatttaaaaggtcctgagtgtgcttgatgtgttcagggaacggctggaccactgtggctggagcagaatgtgcaatgtgttcgaggatggaggaaatgacatcaaataaaacagagctgggaccagacctgggccttggtgtccactttaagggctttgacatttattccaagtgagatgggaagctatggaagaacttttagcagtgaagtgacacgatcagatttaagttttaaaaggatcattttaacttttacattgagccacagactgtagggttaagt

SEQ ID NO: 930130 - DNA, 540 bp, Homo sapiens
agcctggctgctaaggctgtatgacccagcagagatattggtggtaaaaaataaaaataagttctgttccaagatggccgaataggaacagctctggtctgcagtgcagctcccagcatgatcgacgcagaagatgggtgatttctgcatttccaactgaggtacctggttcctctcattgggactggttggacagtgggtgcagcccatggagggcgagccaaagcagggcggggcattgcctcacccaggaaacacaaggggtcaggggatttccctttcctcgtcaagggaagccatgacagactacctggaaaaacagggcacttccgcccaaatactgtgcttttcccacagtcttagcaaccagcagaccaggagattctctcccgtgcctggctcrgtgggtaccacacctgcggagccttgctcactactagtgcagcagtctgagatcaacctgtgaggaagcagcctgacagggggaggggcatccgccattgctgaggcttgagtaggtaaacaaagcagccgggaagc

SEQ ID NO: 930131 - DNA, 367 bp, Homo sapiens
atagactccacctctgtgggcagggcatagctgaacaaaaggcagcagaaacttctgcagacttaraagtccctgtctaacagctctgaagagagcagtggttctcccagcatggcgtttgagctctgagaacggacagactgcctcctcaagtgggtccctgacccccatgtagcctaactgggagacacctcccagaaggggctgatagacacctcatacaggcggatgcccctctgggataaagctttcagaggacgcatcaggcagcaatacttgctgttctgcaatgtttgctattctgcagcttccgctggtgatacctaggcaaacacggtctggagtggagtgccagcaaactccaaca

SEQ ID NO: 930132 - DNA, 594 bp, Homo sapiens
taacatctggcctttgggcaggctcaaaaaatttaaagttaataatgctagattcaggagcatctgtggggttacatattgtctatttccccccgtctccttctgcaactgctgttttagggagagattcattctttccactatggcttgtccttgagaattgtatgggataccggtaatgtgtttaatattccacacagagaaaaatgtagctagagcttggctagtatagcctggggcattatctgttttaatagaagctggaatgcccaccaccacaaaacactgcaaamggtgatgtttaactaacacaggcagaagactctcctgattggcatgtagcccagacaaagtaagaaaaggtgtccacacatacatgtatataagctagtctcccaaatgagggaacatgtgtgacatccatttgccaaatagagttaggttccaatcctcgaggattaacccctcctgtaaaagatgaggaatgtaccatttggcaagttgggcattgctggataatagctttagcttctttccaggtaatgctgtatctgcatttgagactagaggcattaacatgggttaaattgtgaa

SEQ ID NO: 930133 - DNA, 729 bp, Homo sapiens
gctggggtttgcccacaccacttactaggctcatgaaagtgtggcacaggtgaatatcacctgtcattggtgacagaagaaaaaaggctaaggccaggcgcagtgcctcaagcctgtaatcccagcactttgggaggtcgtggtgggctgatcacctcgatcagtagttcgagaccagcctggccaacatagtgaaatcctgtctctactaaaaatacaaaaattagcttggcatggtggtgtgagcctgtaatcccagctacttgggaggctgaggcaggaaaactgcttgaaccccagagatggagttgtagtgagccaagatcatgccactgcactccaacctgggcaacagagcaagcctacatctaagaaagaaagagagagagagaaaggaaggaaggaaggaaggaaggaaggaaggaaggaaggaaggaaggaagggagagagaaaggaatggaaaggaaaggaaaagaaaaaaagaaaagaaaaaatgctggagggaaggccagggtaggagagatgctaggctgtggggctragcactgggcatgctggacctgttaggtcactgaacatctaactgccaaggcacttgcccttgtcaggtcagtcgaggtaaggaaattaggcagcactctccagaagtcccactgtactgggagaatggaggagggtctacaacttgccattctagggtaggttttagagcaagctgggctctcttg

SEQ ID NO: 930134 - DNA, 673 bp, Homo sapiens
agtcaagggtctctgcaaagtatctctctcctatatcccaaagccttctctacactctctaaatcatggcttcttatacgccatgcaaaattcttaccacgaattttggatctgcactataaaaagtgtttcccttgttgctgttgaacgtggaaagatgtggatactcaatattcctattgggggaacgtccttagtaaggatggagaacatgtaatgctgagggttcatatgtgttcttcattagctctgttcaaaacaggattaagaaaatgcttatttaaactggatggcatttattactctgaaagttctgaaaaaaaaaattattgcgagatacccgctttctagggtgctaaagaaagactactttaaattgttattaaaaattacagaacatagaagatatctgcatcttgaactctgcataaaactgatttttctgtgtggttaaattsagactatactttttggggggcaatatctcagtaatgatgctgtgttcttcggtgtgcgtcagcacatcacaaaaatttgtccttgtgcagttgattttaaaatttacttcaagagctctcggaaatattcatttcactgtagagttaattatttttctcctcattattaagtatctttttgtagccaaagaagagctgtgcataaatcatcacat

SEQ ID NO: 930135 - DNA, 579 bp, Homo sapiens
ctttcttaggttttctttgcatatgtctatctttggaaaatgaagactcttatctttgtttacaggccagaaaaatggggtaaaacacaggctcttccacttactggatgtttgacaaaatgttctttttgggcgaaatacattggcattactagtgagcttgttagaaattcagaatctcagactttatttcacatcttctgaaaaaaaaaaatctgcataagatctccagtgtattgtacacattaaaacttgagaggtgctgtctaactcaacatgtcatttttgcctaaaaaatatgcactactcattctttgtgatgcaaatataacactaaaaaatatacatgtttgtgttcatgcctttcgtttttatactttattgttcataaaattatcatatatacagyggtattgtggatcttataccattctcttctctcagagttagagaatacattagagaatatttctgtgttgaaaattgttggatgatttcagttattcctgtaagtcagaaccaattttctttactctctcatttaaccttaattcaaatgataaattctgcccgtggaca

SEQ ID NO: 930136 - DNA, 622 bp, Homo sapiens
aaatacctcactaacataccccactctgaaatcagatgcaagaagtcagcttgaaataaagaccctgcagaaagcctcagcctggtgaaaacatccaaaaaagaagtatattgactgctctcggtctacactgaagttaaaagaacatccacacacagagatgaggaagaaaaatgcaagaactccagtaactcaaatggccacagtgtcatctgttctccaaatgactgcactarttcttcaagaagagttcttaaccaggactaactggctgtaatgacaaaaatagaatttggaatatttctatagataggagcaaagatcataaagattcaggaaaatgggaaaaccaatccaagtaaaataagagtcacaataaagtcatacaggagctgaaggacaaaatagctagtataaaaaagaagctagtgggtctgacagagccgaataacacaatacaagaatttcacatgcaatcacaagtattaacaacagagtaaaccaagcttaaggaagaatctcagaacttgaagactggttctctgaaataagaaagtcagacaaaaataaagaaagaataaaaatgaataaacaaaacctccaagaagtatggaattatgta

SEQ ID NO: 930137 - DNA, 534 bp, Homo sapiens
tgcatccttaattccatttgctcttacaccaatcccttaaacaagcaagcaaacctacagaataaggattaagtcactgtattagttcattctcatgctactaataacaacatacccaagactaggtaatttataaaggaaatagatttaattgactgactgttcagcatggctggggaggcctcaggaaacttacaatcatggcataaggagaagcaaacatgtcctacttcacatggaagcatccagaagtgccaagaaaaaggggcaaaagcccattataaaatcatcagatcttgtgagaaatcactcactatcattggaacatcagcaagggggtaagtggccccatgattcaattaccttcctycaggtccctcccatgacatgtggggattatgggaactacaacacaagataagatttgggtggggacacagccaatccatatcattccctcccaaatctcaagtcctcacatttcaaaacacaaccattccctcccaacagtccacaaaattcttacctcattcc

SEQ ID NO: 930138 - DNA, 604 bp, Homo sapiens
gggacaccaggcaccaagtcctgaggctacacacagcaggggccgccggatccaacccaggaaaccatttttatctcccggacctctgagcctatggtggaagaggctgccaggaaggtctctgacatgcactggggacattttccccattgtcttggcaataaatattaactcgttagttatgtaaatttccgctggcttgaatwtctcctcataaaatggggttttcttttctctcacattgtcaggctgcaaattttccaaacttttatgctctgcttcccttttaaaaataaattccaattctaaagcatatctttttgtgaatacataaaaccgaatgtttttaacagcacccaagtcacatattgaatgctttgctgcttagaaatttcttccaccagatgccctaaatcatctctctcaagttcaaagttccacagatctctggggcaggggcaaaatgctgccagtctctttgctaaagtataacaagagtcacctttgctgtagttcccaacaagttcctcatctccatctgagaccacctcagcctgcactttattgtccatatcactagtattagaattttggtggaaaccat

SEQ ID NO: 930139 - DNA, 712 bp, Homo sapiens
aaccctgctgcagtcaaggtcaggcaggtcccaggaatcggagagcaagcaccgccaggtgggggtggggggggttgccttacaagccccagcccctgcagagggcgaccaccttgggcaacagagctgatgctgatggtggagagaggcagaaaggagggaggctgcctttctcagctcctccctgctcggccttactggatggctgtggccctttgggaaggaatcaccatccttggtccttgtctctctcctaacatcatggccrtgaaagatcacagcccccctggggcccagccggtcccagagtagacctggtgaggctgggcccatctagcgtggctcctggtggcccctgctgtcccccacacacttgtcccagggataggaggatggagagcccaccccagtccccacaccagggactcacctggaatcctcccagatggcaggtgtggtcaccactgcatctggcatctgcctgctggggaagactcattgccatgtcgtcatggggacgttccactccagccaaattgcataatcaggccattcctccttcagggtccccaaaagccaataatggtccccaaaaaagggcactggactggaggcaggagagacccattgagacccaatattgtcaccactagtcatgctggaaaatcgggagggggctcgatgcctccgctactccaacagtggcaacaac

SEQ ID NO: 930140 - DNA, 594 bp, Homo sapiens
aaccatctgattttcgacaaggtcaatgaaaacaagcaatagggaaaggatttgccatttgataaatgtttcaggttaactggcttgccataagcagaaaaatgaaaccaaattcttatctttcactaatacaaatatttactcaagatggattaaatatttaaatgtaagatctcaaactataaaagcactagagtaaaacctaggaaatactcatgtcaacactggccttggcaaataatttttggctaagtccccaagcaattgcaacaaaaacaaaaattgacaagtgatacctaattaaactaaacagcttctgcmcagcaacagaataagcagacaacctatggaatgggagaaaatattcattaactatgtatctgtattagtctgtttttacactgcttataaagcattacttgagactgagtaatttatttaaaaaaaaaaaaagatgaggtttaattgactcccagttccccatggctggataggactcaggaaacttacagttatggcaaaaggtcaaggggaagaaggcacttcttacctggtggtaggagacagagagcaagaaaacaaggaagtgccaca

SEQ ID NO: 930141 - DNA, 668 bp, Homo sapiens
tgctgatacaaaaacagacacatagactaatggaacagaatagaaagctaaaatataaagctgctcacttacaaccatctgattttcgacaaggtcaatgaaaacaagcaatagggaaaggatttgccatttgataaatgtttcaggttaactggcttgccataagcagaaaaatgaaaccaaattcttatctttcactaatacaaatatttactcaagatggattaaatatttaaatgtaagatctcaaactataaaagcactagagtaaaacctaggaaatactcatgtcaacactggccttggcaaataatttttggctaagtccccaagcaattgcaacaaaaacaaaaattgacaagtgatacctaattaaactaaacagcttctgcacagcaacagaataagcagacaacctatggaatgggagaamatattcattaactatgtatctgtattagtctgtttttacactgcttataaagcattacttgagactgagtaatttatttaaaaaaaaaaaaagatgaggtttaattgactcccagttccccatggctggataggactcaggaaacttacagttatggcaaaaggtcaaggggaagaaggcacttcttacctggtggtaggagacagagagcaagaaaacaaggaagtgccacact

SEQ ID NO: 930142 - DNA, 594 bp, Homo sapiens
aaccatctgattttcgacaaggtcaatgaaaacaagcaatagggaaaggatttgccatttgataaatgtttcaggttaactggcttgccataagcagaaaaatgaaaccaaattcttatctttcactaatacaaatatttactcaagatggattaaatatttaaatgtaagatctcaaactataaaagcactagagtaaaacctaggaaatactcatgtcaacactggccttggcaaataatttttggctaagtccccaagcaattgcaacaaaaacaaaaattgacaagtgatacctaattaaactaaacagcttctgcacagcaacagaataagcagacaacctatggaatgggagaaaatattcatkaactatgtatctgtattagtctgtttttacactgcttataaagcattacttgagactgagtaatttatttaaaaaaaaaaaaagatgaggtttaattgactcccagttccccatggctggataggactcaggaaacttacagttatggcaaaaggtcaaggggaagaaggcacttcttacctggtggtaggagacagagagcaagaaaacaaggaagtgccaca

SEQ ID NO: 930143 - DNA, 569 bp, Homo sapiens
attcacccactgtcatgagaacatcatgggggaaactgcccccataatccaatcaccttccaccaggtccctcctgggacatgtggggattacattttgagatgagatttgcgagtgtcacagagcaaaaccatatcagcatccaacaaaggtctaatattcataatctacttaaatcaacagattaaaarcaaataactccattaaaaaatggacaaaggacatggacaggcactcctcaatagaagacatataaatggtcaacaagcatgaaaaaaacgctcatcatcgctaatcatcagagaaatgcaaatcaaaaccacaatgaggtaccatcttacaccagtcagaatgactattattaaagagtcaaaaaacaacagatggtaaagggaatcctcatttgtagtttgtaggaatgtaaattagttcagccactgtaaaaggcagtctggagatttctcaaagaacttaaaacaaggctaccattgaacccagtcatcctatttcttggtatgtactcaaaggaacatagatcattctaccaaaagacacatgcatatagatgt

SEQ ID NO: 930144 - DNA, 563 bp, Homo sapiens
catgaaagtggtgggtggggtgggagtggctggtgctgactttgtccaaaggccagaggtgcggtggggcccctgacaccatgtggctaagggcttctccattcaccaggactgttctcacagagtctttccagasaggctgcaaagggcctcttatctccaaaaacgtctattttataggcacctggatgtctactgtgtcctgatacagaggagaggacatgcaatgggagataacgtggctacctttggccatgtcgggtggataagagatggccaacaggtcactgcagggcctgctcccccttacttaccccatcaggggacaggatctcgtgtgtgtgtgtgtgtgtgtgtgtgtgtgtgtgtgtgtgtgtgtgtgtgtgtgtcaaggaggggtatccctctggtgcagtccttgatggtttcctcaccttgatgttggtcccatggccatcggtgttggcctcaccatcaccactttcagtctctgaacagcaacaggctccactgagcaggtgcccagtgacacctggtgcgttggagggtggggctgagccctg

SEQ ID NO: 930145 - DNA, 633 bp, Homo sapiens
tgcagtccttgatggtttcctcaccttgatgttggtcccatggccatcggtgttggcctcaccatcaccactttcagtctctgaacagcaacaggctccactgagcaggtgcccagtgacacctggtgcgttggagggtggggctgagccctggtgagccaggacctgctgaaagatcagggggaagagaatagacccccctccaccagccctggggacccacaaaggaacattcaggccgccccagtttgagccatgagttgtgtccacggcagcctcgcttcctttgctgggccttggcagcgataacgcctgaatctgtgcaggtctcaggtgagccttctccagctcagcctctgtcgcctcacaggacgcctcggttcccrggcattgattcagcacctgctgtgtgaagggaaaccagagaggccagtccttgctcctgaggactcaagggtctggatgtgggggggaaacccacaccccacaatgctcccagacgatggacgcagcgcaaggtctaggctcactccaggaatgtggggcacagggcccagagcccatttggatgaggaggcgccgtgccctccgtgggctggagggacagggggcctttggtggccggtgaaagcg

SEQ ID NO: 930146 - DNA, 606 bp, Homo sapiens
cacagtgtagcgtgtgtgagcacgactctcggctgggatgcctgggttccaaggctgcttccgccaagttctggtcgtgtaaacctggggaagcatctaacctttttctgcttctgctttctcatctgtggataagacgactaacgtccttttcatagggttgtgatgaggatgcttagtagctagtaaatagtgagtaggrtttaagcatttgttaaataaattaattccttattagttgctgagtatgccattgcatgcatataccactctttctttctttctttttttttttttttagacagcgtcttgctttgtcgccaggctggagtgcagtggcacgatctcggctcaatgcaagctccgcctcccgggttcacgccattctcctgcctcagcctccggagtagctgggactacaggcgcccgccaccctgcctggctaatttttttgtattttttagtagacacggggtttcaccgtgttagccaggatggtctcgatctcttgacctcgtgatccgcccacctcggcttcccaaagtgctgggattacaggcgtgagccaccgcacccgggccctctttctttaactgactccttact

SEQ ID NO: 930147 - DNA, 606 bp, Homo sapiens
cacagtgtagcgtgtgtgagcacgactctcggctgggatgcctgggttccaaggctgcttccgccaagttctggtcgtgtaaacctggggaagcatctaacctttttctgcttctgctttctcatctgtggataagacgactaacgtccttttcatagggttgtgatgaggatgcttagtagctagtaaatagtgagtagggtttaagcatttgttaaataaattaattccttattagttgctgagtatgccattgcatgcatataccactctttctttctttctttttttttttttttagacagcgtcttgctttgtcgccaggctgsagtgcagtggcacgatctcggctcaatgcaagctccgcctcccgggttcacgccattctcctgcctcagcctccggagtagctgggactacaggcgcccgccaccctgcctggctaatttttttgtattttttagtagacacggggtttcaccgtgttagccaggatggtctcgatctcttgacctcgtgatccgcccacctcggcttcccaaagtgctgggattacaggcgtgagccaccgcacccgggccctctttctttaactgactccttact

SEQ ID NO: 930148 - DNA, 608 bp, Homo sapiens
ttcagggatttctagagttactgttctttcttccatttccctttttgtttgaagctccggttcttctttcacttcagtcttttcttcaatatcacattcttcacttattttttcatccttgtcttcactactgtcrgaggaactgcttaatgagttttcatcattttcatttttttcttcgatggagaggccttttaaaaaaagacagagtcagcaccaagcaacctggagcggctgcttctttctctcttgctcctcaggtgagctacagcatttcttgccaatttatgctgtaatctacgaatttctttctttctttctttcttttttttgtgacaagagtttcggtattgttgcccaggatggagtgcggtggcgcggtctcagcacactgcaacctccgcctcccgggttcaagtgattctcctgcctcagcctccagagtagctgggattataggcgcccaccaccatgtcctgctaattgttttgtatttttagcagagacggggtttcaccatgttggccaggcgggtctcaaactcctgacctcaagtgatccgcccacctcggcctcctaaagtgctgggattacaggagtgagccacc

SEQ ID NO: 930149 - DNA, 809 bp, Homo sapiens
gatgtcacagccctgggtcagggagcccctaggtctgggatcctggaaaggccacatgactcttctttccttgccacctgcaacatggagagcagggaagagggggcatgtttcagccgtttgcgttacagctcttccaaccttgccattctgcaagtcccaggatcttgttctatgtccaggaagaatgaggtgacacagacaactggagggtgagcaaggtgaaaaggtgctttatgagtgacagtacagttctcaggggacctgaagtgggtagctcctttccacagacaggtcgtcccaaggagttcagcgctcggcagagaggagacctggagtgggtagcttctacccagaggcaagacttcctgacatctgtacagccctcagcagagaggagacacagagtgggcagctcttatctgcaggcaggttgtcccattgagtctgcagccttcagtggagaggasacctggagtgagtagctcctatccacaggaaggtcatcccaacatctctgtgagtctgtctgagtctggggtttttctggggtttagaagagaggaagtacctgctgattcatccatggacagccatggcagggccaggataaagcataagttctcattctaggccacgagactctacctggaactgacaacccagccctcatgcttcggcccatccctggctggaaggtggggcatcaccaggaactaacccttttccacccaggagcctgtctgccccctgccaccatctacatataatctatggcatccaggctgttcgtgctgaggggctcctgc

SEQ ID NO: 930150 - DNA, 582 bp, Homo sapiens
tctctaaagaaaatgggtttttcttttctattgcatcatcaggttgcaaattttccaaacctttatgttctgcttctcttttaaaaataagttgcaatttcaacccatctcattgtgaatatatagaactgaatgcttttaagagcacccaggttaattcttgaacactttgctgcttagaaatttcttccaccagataccctaaatcatctccctcaagtccaaaattacaacaatctctagggcakgggcaaaatgttgccagtctctttgctaaagcttagcaggagttacccttgctctagctcccaagaagcttttcatctccaactgagacaacctcagcctgaacttcattcttcatattactatcagcattttggtcaaaaacattaaacaagtgtctaggaaattccaaactttcccaagtcttcctgtcttcttctgaactctccaaactgttccaacctcttcctggtacccagttccaaagttgcttccacattttcaagtatctttatagtggtgccccactctacagataccaatttactgtattcacaagttttcacactactataa

SEQ ID NO: 930151 - DNA, 598 bp, Homo sapiens
aaagtggaacgggctgacttgcggagtcttccggccttcatctttctcctttgctgaatgcttcctgcccttgaacatcagaccccagattctttggcctttggactcatggacttaagtggtttgcctagggctatttgtccttcagccacagactgaaggctgcactgtcagtttccctacttttgagattttggggctgggactgatccactactgacttcctttctcctcaacttgcagacggcctattgtgggactttaccttgtgaccacgtgagtcagttccctttaataaactctctttcatatatacatatatcctattagttctgttccgctagagaaccctgactaaatcaccyagcttttatatgtaatcacaaaatcaccatcatttctcctaatttagctcttgcttttggctactggctgagaataccctcagattttccattaacaacctagctctctaaatgttcagccaggctgggcgcggtggttcacgcctataatcccagcactttgggaggtgggtgcgggtggatcacttgaggtcaggaggtcaagaccagcctggccaacatggtgaaacccc

SEQ ID NO: 930152 - DNA, 596 bp, Homo sapiens
ccattgtgggcccaaatagaaccaaaatgaaaagaatgagcaaattttctctctcttcttaagctgagacgtccatcttcttcttctgcccttagatatcaatgctcctagttctctggccttcagactcagaccaggaattgcaccatcacctcccaacacccaccccacaggctttaggacttggactgaattatgccamcatctttcatggttctccagcttgcagatggcagatcatgcagatcatgggacttctcagtctccataatcatgtgatccaatttctataaaatatacacacatacatatatcacatatatcttctcagttctgtttctttggagaatccagactagagaaagaagggaatatttacttgtactaaaatgtgagacagccagtaaaagaaaagaccaatatttattttgaacatagatgcaaaaatctacaatgaattattttcaaattaaatatatcaacatataaaaagaatactacatcaaacataacctagtgatatttattccagaaatacaaagttgggtcaacattcaaaattcaatctatagctcatcatattaacaaaataaaga

SEQ ID NO: 930153 - DNA, 726 bp, Homo sapiens
aagaaggaacgcacctttgctggcagagtccaatggggcttttccaactgtactgcgtgaagtacatgctcagtccttataggacacggtgcaggtaagggaccttcaggcacaagctgagcagctaggggctcaaattcacagcttggggcaaaacctggaggtgaaggacctccaggtacaagctgggcacttagaggcctagataaacagcctggaacaggagttagcaacacctgtcagcacaacctcctggctggacacttccgttcagtctgatgctgaggaggaagcggctcctccacygtgggctcgtcccgtgatcccgtcagaaggtcgaatatgggcagccaatgggactcaggggaagagcccagggacccctcacagtggtggaacacacctcttatagtgcaactcccaatgagttgcaagagttaggtaaacagtgccggcagtgtctgggggagcccctccctgcccagttactccatatctgggatgaaggagctgacatttcctgctctgcctccgagacggagaagctggcttctatcacaactcacccctcccttcatcagtggctgcagccgtgccagtggttagcacaggggcaaggtgaccacactttaattgagtggctgatggtggccatacagactgtctggaatgatgctggagaaatatcagaaacagagtaaatggcaatcatatactgatttggta

SEQ ID NO: 930154 - DNA, 793 bp, Homo sapiens
caaaaccaatcagccttcccaacagttccccagagtcttaactcatttcagcattaactcaaaagtccagttcaaaatatcatctgagacaaagcaagtcctttttgcctatgagcctgtaaaatcaaaagcaagttagttacttcctagatataatggtggtacaggcactgggtaaatacaactgttccaaatgggagaaactggctaaaacaaaggggctacagactccatgcaagtctgaaatccagtaagccagtcaaatctttaggctccaaaatgatctcctttgactccaggtttcacatccaggtcacactgatgcaagaggtgggctccatgtccttgagcatctccactcctgtggctttgcaggttatagccctcccacccccaacaccaccatcgctggctgctttcccgggcttatgttgactgtctgtggcttttcctggcatgaggttcaggcgttggtggatctaccattctggggtctggaagatggtggccctcttctctcagctccactaggtggtgccattgtagggactttgtgtgggggcttccaacccacattacccttccacactgccctagcagaggttttccatgaggtyactgcccctgtagcaaacttctgcctgggcatccaggcatttccatacattctttgaaatctagacagaggttcccatacctcaattcttgacttttgtgtacccacaggcacagcaccacatggaaactgccaaggcctgggcttccaccctctgaagtaacagcctgagtcata

SEQ ID NO: 930155 - DNA, 642 bp, Homo sapiens
ctgtatttcttccatctgaatgtctacctctcaaaccacattagggaaattttcttgaattgttacctcaaatatgtttgcaagtttgcttactttttctccttctctctcatggatgtcagtaattcataggtttggtcactttacctaatctcatattttttgaatactttgttcattaatttttttctttattcttgtctgtctttcttagttcaaaagaccagtcttcagactctggaattctttcttctgttcggttcagtctattgataaagttttcaattgtattttgaaattctttaagggagtttttatattccaaaagctctgattaatttttttaggatgtttctctcttccttcgttttctggatcaatttagaaatttcttagtgttgattttcaaacttgtcttggatgtctttgagcttccttgcaatccatgctttgaattcattatytgttttcattttgattagggatcattgctggagaactagtgtaattttttgttggtgtcactacattcagatttgtaatggtgtcagaattcttgcactggttccttctcatctaaagatgctgtcacttctaattttggtcattatttttgttcaggtaggattttttctttatttt

SEQ ID NO: 930156 - DNA, 621 bp, Homo sapiens
caatgctgtggttccagttcacaggcacagcaagctagaggacaatgaaagtcaatgttggagatgaaatctgaatacagtctgctagggagctctctcttgctaagggagactaatctttttatttttctattaagatcttcaacagattgcatgaagtttacaacatatgatgagcaatctgctttactcagcattcaccaaattaaatgttaatctcatccagaggcatcctgtaaattgacacaaaaaattaactatcctggccaggcrcggtggctcatgcctgtaatcccagcactttgggaggccgaggcaggtggatcatgaggtcaggagttcgagaccagcctgaccaacaaggtgaaaccccgtttctactaaaaatacaaaaattagctgggcgggtggtggatgcctgtaatcccagctactcaggaggctgaggcaggagaattgctagaacctgggaggcagtggttgcagtgagcagagattgtgccactgcactctagcctgggtgacagagcaagacgctgtctcaaaaaaaaaaattaactcttctagatatcgggggaacctgcccccaatatttcaacgtaggttctttctattttccat

SEQ ID NO: 930157 - DNA, 586 bp, Homo sapiens
ccaagatggtgcatgcttgtggtcccagctactcaggaggctgaggtgagaggatcacttgagcccaggaagtcaaggctgctgtgagcagtgtttgcaccactgcattccagcctggatgacagagggagaccttgtttcaaaaaaaaaaaggaaatatcattcacaataaatgtgaaataaaaacctttcagacatgcaaaagctgaaagaactcatcaccagtagaccagtgctataagaaatgttaaaaggttttcagagagaacaacaataatgctagatgaaaatggtaaaatgtgagtaaatataaaagactggttctctwattttttaagtcacttttaatctccaaataaccaaaactatcttaagaaagaacaactaagctggtgatctttcacttcctgatttcaaaacatattacaaagctacagtagtcaaaacagtacagtactggcataaagaagacatatagaacaatggaccaaaaaagaaaagcttgatggcattgaatttggcaatgatttcttggatatgacaccaaaaacacaggcaataaaagtaagaataaacaaatggacta

SEQ ID NO: 930158 - DNA, 586 bp, Homo sapiens
ccaagatggtgcatgcttgtggtcccagctactcaggaggctgaggtgagaggatcacttgagcccaggaagtcaaggctgctgtgagcagtgtttgcaccactgcattccagcctggatgacagagggagaccttgtttcaaaaaaaaaaaggaaatatcattcacaataaatgtgaaataaaaacctttcagacatgcaaaagctgaaagaactcatcaccagtagaccagtgctataagaaatgttaaaaggttttcagagagaacaacaataatgctagatgaaaatggtaaaatgtgagtaaatataaaagactggttctctaattttttaagtcacttttaatctccaaataaccaaaactatcttaagaaagaacaactaagctggtgatctttcacttcctgatttcaaaacatattacaaagctacagtartcaaaacagtacagtactggcataaagaagacatatagaacaatggaccaaaaaagaaaagcttgatggcattgaatttggcaatgatttcttggatatgacaccaaaaacacaggcaataaaagtaagaataaacaaatggacta

SEQ ID NO: 930159 - DNA, 512 bp, Homo sapiens
aggtgtcttgggggagactggagctgggacagcagagagcagcagaggccagtcctggagggccctgaatgtcaggctgaggagctgggggtgccagtgggtggtggggggagagtagttaagggtgaggagtggcagcacagtggcacatgcctggagtcccagctaatggggaggctgaggcaggaggatcctgcgagcctaacagttgaaatcccatctggcaatgtaacaagaccccgtctctaataaaaataagctggccgggcgtaatagctrgtgtctgtaatcccagcactttgggaggccaaggcaggcggatcacttgaggccaggagttcgagaccagcctggccaacatggtgatacccgtctctactaaaaacacaaaaattagccaggcatggtggcacacgcctgtaatcccaggtacttggaaggctgaggcaggagaatcatctgaacccaggagacaggttgcagtgagccgagatcatgccactgcactccag

SEQ ID NO: 930160 - DNA, 626 bp, Homo sapiens
taacatacagaaatcagggaagttaaggggagaaattccacatactaattggagagactttactagtcacctggggaacagcgacaatggtatatacctcagaaagagattggaagattgcactgtaatagactgaaccattcaagagaaaacgttcgtagatactgacatcatttgcatgccatccctcaaagtgatgatctatctatagtgaatacttaaagttcattcaggagttaaaatgaataaaacagaaatacawgaaataagatggataaaattttataagcattatgttgagataaaaaatgtttcaggatatattcaatttacaaacattttttctcatacaaaacagtaatatatattcgagaaatatgcatatgtgtatgaatgtataaaaacataaatgggaatgtatcacaccatcttaataagaggctatcactaagaggctatctccaagaggaaagaatggaatgtgtaagtcttatctgtatctttatcatttgattaaaaaagaaaactaaagcaaacctgggaaaaattatattttttattttaagaattttttaaaaaatatattaaaaataattttaaaaataaagatatttcttctgcttaag

SEQ ID NO: 930161 - DNA, 680 bp, Homo sapiens
catggagttctactatgtaacagaccctattttaggcacttgaaatttgtcacagaatgaaaagagaaagaatccttgccctgggggagtttacattctatttgggtgaagacaaacaataaataataaatataataaatatacacatttatatagtaactgtgagtaggatgcctgggaaggaaggagaagttgcaatatttaatcagttggtcgaaatagctttgttaagaagataatatttgaggtaagacttgaagaaagcaaaagaattaacacaacaacaacaatttgaagragaagcatttcaggaggaggaaacagaaaattatccaaagagaggacatggctggtatgtggttggtgaggctgcaagggcttgagacctgaggggaggagaaggaaaatacatggtcagggaggtaagagacagtgcagagatctattttaaggtccaagaattttactctgagtgaaataaggggatatttgagggttttggaaagaggagtaatatgaactggtttgtatttttaaagaatcattttgaatgtatattgataatgggctgcagaggagagcaaaggtacaaacatggaggttgtaccttaggatgttgttgtggtaacccaagtgagcagtcatcatggttgaggtcgatgaatgtggtgagaatgtgg

SEQ ID NO: 930162 - DNA, 462 bp, Homo sapiens
tgttccccttcctgtgtccatgtgttctcattgttcaattcccacctataagtgagaacatgaggtgtttggttttttgtccttgccatagtttgctgagaatgatggtttccagcttcatccatgtccctacaaaggacatgaactcatcrttttttatggcctcatagtattccatggtgtatatgtgccacattatcttaatccggtctatcattgttggacatttgggtttgttccaagtctttgctattgtgaatagtgccgagaacagtgctgctccaagtgtgtgcaaactggactccaggtcaacagtctctgattaaataagtagtagccaatgaaaataattattcataaagttttacagtaagttcatattgcctcaatgtccaagctcatgattcatatcagtaaatgtggttacatgcctattttgtatatgagtatattcatttgatg

SEQ ID NO: 930163 - DNA, 597 bp, Homo sapiens
tgttacctataagcgccatctactggcttgtaggttgaactgcacagcccaatataaaccctgccaacagaagagcacagggctgtagaagcaaagccaaaacaccctacccagtattctctacagtcacaccccttagggagatgggaaagggaaaaggacattttgaaaataatattacagagaaaaaaagaagagaaaatcctagatgcatgagaataattacaaaaatttgaagtgccagcatctccagatgagaaagattctggcaccatgaaaaatctgaatgtagtgacaccaccaaaggatcacactrgctctccagcaatggtccctagccaaaatggaaactcaaaagtgacagataaagaatttaaagcattgattgcaaagaagctcaacaaaatccaaaacaaagttgaaaatcaacacaaataaacttctaaagcaatccaaaaaatggaggaatagataaacatctttaaaagaaatcaatcagagcatttggaattgagaaatttgaaattgaaaggaattgaaatactttcaagagaaaatttcaaaatacaattgaaagcttcaccaattgactcgacc

SEQ ID NO: 930164 - DNA, 554 bp, Homo sapiens
caaaaagcaaataaccccattaaaaagtgggcaaaggagatgaaaagacacttctcaaaggaatgcatacaagtagccaacaaacatgaaaacaaaaatgctcaacatcactaatcatcagagaaatgcaaatcaaaaccacaataaaatactaactcataccagtcagaatggctattgttagaaagtcaaaaaatagcagaagttgatgaggctgaggaataaagggaatgcttatacactgtatgaatgtaaactacttctgccactgtgggaaacagttgggagagttctcaaagaactaaaaatagagctaccattcaacccagcaatcccattaytgggtatataccaaaaggaaaataaattgctcgaccaaaaagaaacctgcgctcatatgtttatcacagcactattcacaacactgaaaacatggaatcaacccaggtgcctatcaatggtaaatttgataaataaaatgtgatacatatataccatgggatactatgcagccataaaaaaaagaataaaatcatgtcctttgcagaaacatg

SEQ ID NO: 930165 - DNA, 554 bp, Homo sapiens
caaaaagcaaataaccccattaaaaagtgggcaaaggagatgaaaagacacttctcaaaggaatgcatacaagtagccaacaaacatgaaaacaaaaatgctcaacatcactaatcatcagagaaatgcaaatcaaaaccacaataaaatactaactcataccagtcagaatggctattgttagaaagtcaaaaaatagcagaagttgatgaggctgaggaataaagggaatgcttatacactgtatgaatgtaaactacttctgccactgtgggaaacagttgggagagttctcaaagaactaaaaatagagctaccattcaacccagcaatcccattattgggtatataccaaaaggaaaataaattgctcgaccaaaaagaaacctgcgctcatatgtttatcayagcactattcacaacactgaaaacatggaatcaacccaggtgcctatcaatggtaaatttgataaataaaatgtgatacatatataccatgggatactatgcagccataaaaaaaagaataaaatcatgtcctttgcagaaacatg

SEQ ID NO: 930166 - DNA, 599 bp, Homo sapiens
ttgcgcctgcccaaattaagggtgggtctgcctttcccagctcactgactcaaatgttaatctcctttggcaacaccctcacagacacacccaggatcaatactttgcatccttcaatccaatcgagttgacattcagtattaaccatcacacatggggattatgggaactataatccaatatgagatttgggtggggacacagccaaaccatatcagaggtatcaattattattattactattttctgagatggagtctcactttgctgcccaagctggagtgcagtggcacgatcttggcaaactccgcctcccaggttaaagtgattctcctgcctcagcctcctgagtagctgggactacaggcatgygccaacatgcccagctaattttcttttttgtatttttagtagagacagggtttcactatgttggtcaggctgatcttgaactcctgacctcaaatgatccacccaccttggcctcccaaagtgcaaggattacaggtgtgagccaccacacccggccatcatcatcactgttgactgaagtcacattttcctgattattagtgagaaggaacttttgtttcccttta

SEQ ID NO: 930167 - DNA, 650 bp, Homo sapiens
ctgtgacatggcaccctgcaccccagtcactccagcttcagccatggctaaaaggggccaaggtacagcttgggctattgcttcagaggttgcaatccccaagcgttggcagcttccatgtgctgttgggccttcaggtgcacagaagacaagaactgaggcttgggagcttctacgtagatttcagaggatgtatggaaatgcctggattaacatttattataatatttcattatatggcagaagtctgatgcaggggtggagccctcatggagaacctctactagagcaatgaagagggaaaatgtagggtttaagccccaacacagagtccccacttgggtactgcctagtggtgctatgagaagagggccaccatccactaaaccccagaatggtagaccactgacagcctgcaccatgtgcctggaaaagccacagacactcaatgccagcccataaaagcagccaggagtggagctgtaccctgcaaagccacaggggtagakctgtccaagactgtgggagcccacctcttgcatcagggtgacctgaaagtgagacaagaagtcaaaggagatcattctgcagcttgaagatttgactgccacactagatttcagacttacaggaggcctggagcccttttg

SEQ ID NO: 930168 - DNA, 665 bp, Homo sapiens
ggagtgcagtggtgcaatcgtggctcactgcagccttgacctcctgggctcaagtgatcctcccatctcagcctcctgagtagctgggactacaggtgcaccaccatgcctggctaatttttatttayttatttattttttgtagaaatgggggtcttactacgttgcctaggctggtcttgaactcctgggctcaaacaatcctcctgccttagcctcccagagtgctgggattataggcatgagccactgcatctggtgcaactttttttttttttctcattttgtcatccaggctggaggtcagtggcacagttgtggctcactacagcctggacctcctgggctcaagcattccttccatctcagcttcccaagtagctgggactacaggcgtgcaccaccatacccagctaatttttttagtttttgtagacatggggtttcactatgttgcccaggttggtctcaaactcctgggttcaagtgatcctctccccttgacctcccaaaatgttgggattacaggggtgagccactgcactcagcctaagctaatgtcatcatttattcctacattcaacttttattgacctaccagtttaatggtcaattgaatttttgtgctgttatactactgccaggggaggccagtagcaactggt

SEQ ID NO: 930169 - DNA, 584 bp, Homo sapiens
ttccctcagaacgatggacctgaatggccgggtgcggtggctcatgcctgtaatcccagcactttgggaggccgaggcaggtggatcacaaggtcaggagatcaagaccatcctggctaacacagtgaaactccatctctactaaaaatacaaaaaattagcccggtgtgatggcaggctcctgtagtcccacctgctcgggaggctgagccaggagaatggcgtgaacccaggaggcggagcttgcagtgagccaagatagcgccactgcactccaacctgggtggcagaacaagactccatctcaaaaaaaaawaaataaataaataaataagaacaatggacctgaatatgccaacacagcctctttctgtatgtccgcactggaggcaactggagcctcgggagcagccatggaccatttctatgacaaaggcccctctctctgcccagctagagctcattcagcacaggggaggccaccagtctttcagagtagtcatgactaactcgggaataatgctcttggcgatagtccgtagagaatctgtcagaacaataacgtgaaagccagttcccatttc

SEQ ID NO: 930170 - DNA, 545 bp, Homo sapiens
ggagcccctttccatcaatgaggggaggagttggtggattgaaactcccacctcctcacccctcagtggagaattatgcggtgtgtttttttgttgttgttttttgtttttgggacggagtctctttctgtcgccaggctggagtacagtggtgcaatctcggatcactgcaacctccacctcctgggttcatgccattctcctgcctcagcctcccgagtagctgggactacaggcgtgygccaccacacccagctatttttgtatttttagtagagacggggtttcaccatgttagccaggatggtcttgatctcttgacctcgtgatctgcccgccttggcctcccaaagtgctgggattacaggcgtaagccaccacgcctggccatgaagtgtgttttatatgctctcagggggtccccagtgggttgaatgccggctgcccacggctgtaacctgatggctccatactctttattggcttccctccttttctttgtctcattttcccactccccaccagttcttccagggatcacccca

SEQ ID NO: 930171 - DNA, 505 bp, Homo sapiens
cttcagcctcacctatggctaaaaggggccaaggcacagctcaagcccttgcttcagagtatgcaagccccaagccttggtagcttccacatggtgttgagcctgtgggtgcacagaagtcaagaattgaagtttgggaacctcttcttgatttcaaaggatatgtggaaaagcttggatgtccaggcagatgtctgctgcaggggccctcatggagaacctctgctagggaagtgtggaagggaaagtggggttggarccctggcacagagtccccactgggacactgcctagtggagctgtgagaagagggccactgtcctccagaccccagaatggtagatccaccaacagcttgcaccatgtgcttggaaaagctgcactcaatgccagcccatgaaagcagtcatgagggggcctggatcctgcaaagccacaggggcagagctgctcaaggccatgggagtctccttcttgcatcagcatgacttggttgtgagacatg

SEQ ID NO: 930172 - DNA, 505 bp, Homo sapiens
cttcagcctcacctatggctaaaaggggccaaggcacagctcaagcccttgcttcagagtatgcaagccccaagccttggtagcttccacatggtgttgagcctgtgggtgcacagaagtcaagaattgaagtttgggaacctcttcttgatttcaaaggatatgtggaaaagcttggatgtccaggcagatgtctgctgcaggggccctcatggagaacctctgctagggaagtgtggaagggaaagtggggttggagccctggcacagagtccccamtgggacactgcctagtggagctgtgagaagagggccactgtcctccagaccccagaatggtagatccaccaacagcttgcaccatgtgcttggaaaagctgcactcaatgccagcccatgaaagcagtcatgagggggcctggatcctgcaaagccacaggggcagagctgctcaaggccatgggagtctccttcttgcatcagcatgacttggttgtgagacatg

SEQ ID NO: 930173 - DNA, 505 bp, Homo sapiens
cttcagcctcacctatggctaaaaggggccaaggcacagctcaagcccttgcttcagagtatgcaagccccaagccttggtagcttccacatggtgttgagcctgtgggtgcacagaagtcaagaattgaagtttgggaacctcttcttgatttcaaaggatatgtggaaaagcttggatgtccaggcagatgtctgctgcaggggccctcatggagaacctctgctagggaagtgtggaagggaaagtggggttggagccctggcacagagtccccactgggacactgcctagtggagctgtgagaagagggccactgtcctccagaccccagaatggtagatccaccaacagcttgcaccatgygcttggaaaagctgcactcaatgccagcccatgaaagcagtcatgagggggcctggatcctgcaaagccacaggggcagagctgctcaaggccatgggagtctccttcttgcatcagcatgacttggttgtgagacatg

SEQ ID NO: 930174 - DNA, 750 bp, Homo sapiens
ctcctttctttataaattactcagtctcaggtattcctttacagcaatacaaaatggaataacacatgctttcacaaataattcacacggtgaaaaaaataccctaatagaaaactggactaaaaactaccaacaggcacttcacaaaagaaaagtacaaataaatgtataagccttttgcctcagcttctgctcaagcctttgtataggaatgcatggatggaatacagtcttctggttttgttttgattaatatgtgaagacaagatattcacaagcttaaacattcaaatgcggcagccaagatggccgaataggaacagatccggtctacagctcccagcatgagtgacgcagaagacgggtgatttctgcatttccatctgaggtaccgggttcatctcactagggagtgccagacagtgggtgcaggacagtgggtgcagcacaccgtgcgcgagcckaagcagggcgaggcattgcctcacttgggaagtgcaagggggcagggagttccctttcctagtcaaagaaaggggtgacagatggcacctggaaaatcaggtcactcccaccctaatactgcgcttttccgacaggcttaaaaaacggtgcaccaggagattatatcctgtgcatggctcggagggtcctacgcccacggagtctcactgattgctagcacagcagtctgagatcaaactgcaaggtggcagcgaggcttgggggaggggcgcccgccattgccca

SEQ ID NO: 930175 - DNA, 611 bp, Homo sapiens
tgctaaaacaattattgatctacaaagaaccatttcgatggtttattttcttcccttaaaaatttgatgctttctgtatcaaaatacacttagcaattattaaacaattacactaagcagttattaaaagcttatccaccacaatcaagtcagttgcatccctgggttgcaaggctggctccacataggaaaatcaataaatgtaatccatcacataaacaaaaccaatgacaagaaacaaatgattatctcaatagatgcagaaaatgtctttgataaaattcaacatcccttcactttaaaaactctcagtaaactagatattaatggaacatatctcaaaataataagagctatttatgacaasctagagccaatatcatgctgaatgggcagaatctggaagcattccctttgaaaaccagcacaagacaatgatgtcctctctcaccactcctattcaacattgtattagaagttctggccagggcagtcaggcaagagaaagaaataaagcatattcaaataggaagagaggatgtcaaagtgtccttgtctgcaaatgacatgattctatatttagaaaaccccatcatctcagcccaaaaact

SEQ ID NO: 930176 - DNA, 573 bp, Homo sapiens
ttggaaaaggggtgtggcacaagcactcccttagctgccctttctggtctctctctaggtcatgtgccagcctaatccattgtctcaaagccaagcccaccattaggagtttcttaggcatttcagtccttatatcttagactgcctttcaagcttacctaggatcctagatcacattggctcatgttggcaaggcctgccaaggaattcaagttctgactgctggaatgggcaattcccctccacctgggtctagtctaggagctccttccattttcaggtactacttagcttagcacagctttgctctcmattataacaggccagcactgagttcaacgtaaagtctcacaattgctgcactctccctcttccaatcacatagatttctctgtgccccatggtcactactgggtgatgaggggaaagtggcacaagtccttccttagctgccatagctggtgtctcagtaggtcatgtgccctccaagttcactggctctgagcccagctcaggacaaggacttgccaaggaattgcagtacttgtgacctggactgctcttcaagttcac

SEQ ID NO: 930177 - DNA, 608 bp, Homo sapiens
agcagtgttttgaaatcttatgtgagggaccaaaattgagacacatgaagccgtgttctggaatcttatgtgaaggacagatattcagaaccccgtagcagtggtctggaatcctttgtgagggagaaacactcagaacccagatgcagtgttctggaatcctatatgagggacagtcattcagaccacagctagtgtgttctggaatcctgagtgtgggagaaacattcagaccctcgtaacactgttcagaatcttatgtgagggaaaagctttcagaccacagcagcagtgttctggaatcctctgtgagggacaaacattcagaccacagcagcagagttctggaatcctaagacagggacaaatattcagaccacagcaggagagttctgaaatcctatgtgacagacaaacattyatacccaagtagcagtgttggaatcgttcgtgagggacaaacactaagaaaccaacagcagtgttctataatcataagtgagggacaaacattcagacgacagcaggagtgttctggaatcctacgtgatggaaaatagttcagaacctcgtagcagtgttctcgaatcctatgtaatggacaaact

SEQ ID NO: 930178 - DNA, 598 bp, Homo sapiens
actcagaacccagcagcagtgttctggaatcctacttgagggtgaaacattcaaaccagagcaggaaattcctgtaatcctaagtgaggtacaataaatcagaccatcgtggcagtgttctggaatccaatgtgagggagaagcatgcagaacccagcagcagtcttctggaatcctatgtgagggacaaatattcagaccacatcagcagtgttctggaacactatgtgagggacaaacamgtagacccacgtgcagtgttctggaatcataagtgagggagaaacactcagaatccagcagcagtgttctggtgttgtatctgagggagaaacattcagatcagagcaggaatgttctggaatcctatgtgaggtacaaacgatcagacaccggtagcagtcttctggaatcctatatgagggataaacactcagatcccagcagcagtgttctggaatcctattcgagggagaaacattcagaccagagcaggagtgttgtggacgcctatgtgagtgacaaacactcagagaaaaggagcagtgttctggaatcctatgtgagtgacaaacactcagagaaaaggagcagtgtt

SEQ ID NO: 930179 - DNA, 598 bp, Homo sapiens
actcagaacccagcagcagtgttctggaatcctacttgagggtgaaacattcaaaccagagcaggaaattcctgtaatcctaagtgaggtacaataaatcagaccatcgtggcagtgttctggaatccaatgtgagggagaagcatgcagaacccagcagcagtcttctggaatcctatgtgagggacaaatattcagaccacatcagcagtgttctggaacactatgtgagggacaaacaagtagacccacgtgcagtgttctggaatcataagtgagggagaaacactcagaatccagcagcagtgttctggtgttgtatctgagggagaaacattcagatcagagcaggaatgttctggaatcctatgtgaggtacaaacgatcagacacyggtagcagtcttctggaatcctatatgagggataaacactcagatcccagcagcagtgttctggaatcctattcgagggagaaacattcagaccagagcaggagtgttgtggacgcctatgtgagtgacaaacactcagagaaaaggagcagtgttctggaatcctatgtgagtgacaaacactcagagaaaaggagcagtgtt

SEQ ID NO: 930180 - DNA, 862 bp, Homo sapiens
gtctgggacaaactttcagagccttgtagcattcgtgtggaatcctatgtcaggaaaatatgttgagaacacagcagcagcgttctggagtcctttgtgtgggacaaacattcagactctagtagctgtgttctggaatcccatgtgatcgagaaacatttagacccacgtagcagtgttatggaatcatacctgagggacaaacactcagaactcaacagcagtattctggaatcctaagtgagttgcaaacattcagactacagcaggagtgttctggaatcctatgtgagggagaaacattcagaacacagcagcagtgttctggaatcctacgtgagggacaatcattcagaccacagcagtagtgttctgcaatcctacctgtgggacaaacattcacaccctcgtagcattgttctggtatccaatgtgaggaaaatacattcagaacacagcaggagttttctggagtcctctgtrtgggacaaacattcagaccctaatagctgtgttctgcaatcctatgtgatcgacaagcatttggacccacgtagcagtgttctggaattataactgagggacaaacactcagagcctaacagcagtgttctggaatcccatgtgagggagaaacattcagaacccaggagcaatattccagaatcctatgtgagggacaatcattcagaccaccgatgggatgttctggaatcctacgtgtgggacagacattcagaccctcgtagcattgttctggtatcctatgtgaggaaaatgcatttggaacacagcaggagtgttctggagtcctatgtgtgagacaaacattcagaacctcatagcagtgttctggaaacct

SEQ ID NO: 930181 - DNA, 730 bp, Homo sapiens
atatcggacaaacattcaaaccctcatagcattgttctggaatcctaagtgaggaaaatattttcagaaaacagcagatgttttctggagtcctgtgggtgggacaacattcagaccctcgtagcagtgttctggaatcctatgtgagagaaaaacatttagacccacgtagcagtgttctggactagtatgtaagtgagaaatacacagaacccaacarcagtgttctcgaatagtaagtgagggacaaacattcagacaacaggtggagtgttctggaatccgatgggatggggaataattaagacacccgtagcagtgttctggaatcctatgtgaggggcaaacattcagaccttcatagcagtgttctggaatcctgtgtgacggacaaacatttagaatcaagtagcagtgttctgtaatcaaaggtgagggacaaacactcagaacccaacagcagtgttctagaatcctcagtgagcgacaaacattcagaccacagcaggagagttctggaaccctatgtgagggacaaacattcagacactcatagcagtgttctggaatcctatgagagggacaaacatttagacccacgtaccagtgtgctggaatagtacgtgagggacaaacactcagaacacaacagcagtgttctggaatcctaagtgagggacattcagatgatggcaggagtgttctggaatcctatgtgagggagaataat

SEQ ID NO: 930182 - DNA, 730 bp, Homo sapiens
atatcggacaaacattcaaaccctcatagcattgttctggaatcctaagtgaggaaaatattttcagaaaacagcagatgttttctggagtcctgtgggtgggacaacattcagaccctcgtagcagtgttctggaatcctatgtgagagaaaaacatttagacccacgtagcagtgttctggactagtatgtaagtgagaaatacacagaacccaacaacagtgttctcgaatmgtaagtgagggacaaacattcagacaacaggtggagtgttctggaatccgatgggatggggaataattaagacacccgtagcagtgttctggaatcctatgtgaggggcaaacattcagaccttcatagcagtgttctggaatcctgtgtgacggacaaacatttagaatcaagtagcagtgttctgtaatcaaaggtgagggacaaacactcagaacccaacagcagtgttctagaatcctcagtgagcgacaaacattcagaccacagcaggagagttctggaaccctatgtgagggacaaacattcagacactcatagcagtgttctggaatcctatgagagggacaaacatttagacccacgtaccagtgtgctggaatagtacgtgagggacaaacactcagaacacaacagcagtgttctggaatcctaagtgagggacattcagatgatggcaggagtgttctggaatcctatgtgagggagaataat

SEQ ID NO: 930183 - DNA, 797 bp, Homo sapiens
gctaattgagggaaaaacacacagatcacagaaggaatattctggaatccattgtgagggagaataatacagaccctcgtagcagtgttctggaatcctatgtgagggagaaatgctcaacccagaagcagtgttctgcaatcctatgtgagggacaatcattcagactacagccggggtgttctggagtcctacgtgtgggacaaacatgcagacccgcgtagcatttttctggaatcctctttgaggaaaatacattcagaacacaacaggagtgttgtggagtcctatgtgcgggacaaacattcagtccctcgtagcagtgttctggaatgccatgtgagggagaaacactcataacccagtagtagtattgtggaatcctatatgagggacaatcattcataccacagttgaggcattctggaatcctatgtgtggggcaaacattcagacccggacccttgtagcactgttctgcaatcctatgtgaggaacaaacttttagacccagggagcagtgttctggaaccgcamgtgagagacaaacacttggaaccctacagcagtgtcctggaatcctaattgagggacaaacatacagaccacgaaggaatcttctggaatcctatgtgagggagaataattcagaccctcgtagcagtgttctgcaatcctatgtgagggaaaaactttcagaccacagtagcagtgttctggaataccatgtgagggagaaacactcacaacccagcagcagtgttctggaatcctatgtgagggacaatcattcagac

SEQ ID NO: 930184 - DNA, 737 bp, Homo sapiens
cctacgtgtaggacaaacattcagagcctcgaagcattgttgtggaatcctatgtgaggaaaatacattcaggactcagcaggagtgttctggagtcctatgtgccggacaaaaattcagaccctcgtagcagtgttctggaatcctatgtgatggaaaaatatttagacccacatagcagtgttctggaatcctatgtgattgataaacactcagaaaccagtaacagtgctctggaatcctacttgagggacaaacactgagaccacagcagaaaagttttggaatcctatgtgagggagaaacattcagactacagcaagattcttctggaatcccatgtaaggcaaaaacacccagaccaaagcagggatgttctggaattctatgtgagggtcaaccattcagacaactgcagcagcgttctggaatccaatatgagggacaaacattcagtccagagcaggatttttctggagtcctgtgtgaggaacaaaccttcagacacagcagcagtrttctagaatcctatgtcagggaaaaacactcagaacacagcagcagtgttctagaatcctaactgagggacaaagattcaaaccagagcaggagtgttctggcatcctttgtgaggtgcaatcattcagatccatgtagcagtgttgtggtatcctatgtgagggagaaacacacaaaaaccagcagcaatgttctggaatcctatgtgagggacaatc

SEQ ID NO: 930185 - DNA, 662 bp, Homo sapiens
tgttaagcttatttttaatttttataatgctgttttaaatgtaattctttttttttttttttgagatggagtcttgctctgtctcccaggctggagtgcagtggcactatctcagctcactgcaacctgcgccttctttattcaagcgattctccaacctcagcctctcaattacctgggatcacaggtgtgcgccagcacrcccagctaattttttggtatttttagtagagacagggtatctccatgttgaccaggcaagtcttgaacttgtgacctcaggtgatctgcccgcctcggcctcccaaactgctgggattgcaggcatgaaccactgcacccagccaaatgtcattcttttcaaaaatttcttttcttttgttttatctttcttttctttctctctctttctttcctttctttcttttctttgagatggcgtctcactcagtttcctaagctggagcgcagtggcacaatctcagctgactgcaacctccaccttccaagttcaagcaattctcctgcctcagcctcccaagtagctgggactacaggtgtctgccactatgcccagctaatttctgtatttttaatagagacagagttttactatttatattagagatggggattggcccagctggtcacgaactcctgac

SEQ ID NO: 930186 - DNA, 662 bp, Homo sapiens
tgttaagcttatttttaatttttataatgctgttttaaatgtaattctttttttttttttttgagatggagtcttgctctgtctcccaggctggagtgcagtggcactatctcagctcactgcaacctgcgccttctttattcaagcgattctccaacctcagcctctcaattacctgggatcacaggtgtgcgccagcacgcccagctaattttttggtatttttagtagagacagggtatctccatgttgaccaggcaagtcttgaacttgtgacctcaggtgatctgcccgcctcggcctcccaaactgctgggattgcaggcatgaaccactgcacccagccaaawgtcattcttttcaaaaatttcttttcttttgttttatctttcttttctttctctctctttctttcctttctttcttttctttgagatggcgtctcactcagtttcctaagctggagcgcagtggcacaatctcagctgactgcaacctccaccttccaagttcaagcaattctcctgcctcagcctcccaagtagctgggactacaggtgtctgccactatgcccagctaatttctgtatttttaatagagacagagttttactatttatattagagatggggattggcccagctggtcacgaactcctgac

SEQ ID NO: 930187 - DNA, 582 bp, Homo sapiens
gaacctcctgctggcccacgtggttgccacagcccatgctggcacgacgctccagcaggtcggcgtccctgcgggccacactaccggtgacatggctagcatgaccctccttcctggcagtgacactgttgatgtgaaccccagtttcaaatctgtcatttatmaatgggaccattttcccttttcgctctcccttccattcacagggcttttcattctctctgtttctgcctccgtttcagatatttactcacctttttctctctcactatgtctgccgtggtctccatgagactgcgccacataacattcccccattaaaggtcatgaattcagtggcttttagtatacctgtggttgtgcacattcaattttaattcgcaatccattgtaaaacgtcttatcacccccgaccagagaaaaacgctgtagacattagtcactcctccttctgtctcaaaccctctccctgaccctcagccctaggtagcaactacctagtgcgatcaatcccatatgcatagatttccatattgtggacatttcctataaacggaattgcacaataggtgagctgctatg

SEQ ID NO: 930188 - DNA, 579 bp, Homo sapiens
cctcctgctggcccacgtggttgccacagcccatgctggcacgacgctccagcaggtcggcgtccctgcgggccacactaccggtgacatggctagcatgaccctccttcctggcagtgacactgttgatgtgaaccccagtttcaaatctgtcatttataaatgggaccattttcccttttcgctctcccttccattcacagggcttttcattctctctgtttctgcctccgtttcagatatttactcacctttttctctctcactatgtctgccgtggtctccatgagactrcgccacataacattcccccattaaaggtcatgaattcagtggcttttagtatacctgtggttgtgcacattcaattttaattcgcaatccattgtaaaacgtcttatcacccccgaccagagaaaaacgctgtagacattagtcactcctccttctgtctcaaaccctctccctgaccctcagccctaggtagcaactacctagtgcgatcaatcccatatgcatagatttccatattgtggacatttcctataaacggaattgcacaataggtgagctgctatg

SEQ ID NO: 930189 - DNA, 595 bp, Homo sapiens
ggaacctcctgctggcccacgtggttgccacagcccatgctggcacgacgctccagcaggtcggcgtccctgcgggccacactaccggtgacatggctagcatgaccctccttcctggcagtgacactgttgatgtgaaccccagtttcaaatctgtcatttataaatgggaccattttcccttttcgctctcccttccattcacagggcttttcattctctctgtttctgcctccgtttcagatatttactcacctttttctctctcactatgtctgccgtggtctccatgagactgcgccacrtaacattcccccattaaaggtcatgaattcagtggcttttagtatacctgtggttgtgcacattcaattttaattcgcaatccattgtaaaacgtcttatcacccccgaccagagaaaaacgctgtagacattagtcactcctccttctgtctcaaaccctctccctgaccctcagccctaggtagcaactacctagtgcgatcaatcccatatgcatagatttccatattgtggacatttcctataaacggaattgcacaataggtgagctgctatgactgacataaca

SEQ ID NO: 930190 - DNA, 595 bp, Homo sapiens
ggaacctcctgctggcccacgtggttgccacagcccatgctggcacgacgctccagcaggtcggcgtccctgcgggccacactaccggtgacatggctagcatgaccctccttcctggcagtgacactgttgatgtgaaccccagtttcaaatctgtcatttataaatgggaccattttcccttttcgctctcccttccattcacagggcttttcattctctctgtttctgcctccgtttcagatatttactcacctttttctctctcactatgtctgccgtggtctccatgagactgcgccacataasattcccccattaaaggtcatgaattcagtggcttttagtatacctgtggttgtgcacattcaattttaattcgcaatccattgtaaaacgtcttatcacccccgaccagagaaaaacgctgtagacattagtcactcctccttctgtctcaaaccctctccctgaccctcagccctaggtagcaactacctagtgcgatcaatcccatatgcatagatttccatattgtggacatttcctataaacggaattgcacaataggtgagctgctatgactgacataaca

SEQ ID NO: 930191 - DNA, 629 bp, Homo sapiens
aacctcctgctggcccacgtggttgccacagcccatgctggcacgacgctccagcaggtcggcgtccctgcgggccacactaccggtgacatggctagcatgaccctccttcctggcagtgacactgttgatgtgaaccccagtttcaaatctgtcatttataaatgggaccattttcccttttcgctctcccttccattcacagggcttttcattctctctgtttctgcctccgtttcagatatttactcacctttttctctctcactatgtctgccgtggtctccatgagactgcgccacataacattcccccattaaaggtcatgaattsagtggcttttagtatacctgtggttgtgcacattcaattttaattcgcaatccattgtaaaacgtcttatcacccccgaccagagaaaaacgctgtagacattagtcactcctccttctgtctcaaaccctctccctgaccctcagccctaggtagcaactacctagtgcgatcaatcccatatgcatagatttccatattgtggacatttcctataaacggaattgcacaataggtgagctgctatgactgacataacacgtagcacaatattttcaagattcatccacattgta

SEQ ID NO: 930192 - DNA, 602 bp, Homo sapiens
ggcacgacgctccagcaggtcggcgtccctgcgggccacactaccggtgacatggctagcatgaccctccttcctggcagtgacactgttgatgtgaaccccagtttcaaatctgtcatttataaatgggaccattttcccttttcgctctcccttccattcacagggcttttcattctctctgtttctgcctccgtttcagatatttactcacctttttctctctcactatgtctgccgtggtctccatgagactgcgccacataacattcccccattaaaggtcatgaattcagtggcttttagtatacctgtggttgtgcacattcaattttaattcgcaatccattgtaaaacgtcttatcacccccgaccagagaaaracgctgtagacattagtcactcctccttctgtctcaaaccctctccctgaccctcagccctaggtagcaactacctagtgcgatcaatcccatatgcatagatttccatattgtggacatttcctataaacggaattgcacaataggtgagctgctatgactgacataacacgtagcacaatattttcaagattcatccacattgtaggcttacccaca

SEQ ID NO: 930193 - DNA, 617 bp, Homo sapiens
ggctttcaacagttttgatatggctgcttgcagatccctttgactttatttttcttgtagtccaccgagcttcttagatgtgtagatcaatgtttttaattaaatattgaaggttttcagccattatttcttcaagtaatttttccaccacttaatctccactcctaggactcctgttatatgtttattggtatacttgcgggtgagcacaggtttctgagatctcttcatttcctataattttgtttgctttataaactggattattttaattaatctctcttcaaatttacggattgattcttctaccagctcaaatctgctatcaaaatctctaatattctctatttmtctttttatacttttcaaataaaaactttccattcagatttttaataatctatatctttttattaatattttatatttgggcagacatacttctcatattttcctttacttgtttagactaagcttaattgttttatactattgttttctttccttctttgaaaatatttagaatattaaaattattatctaaataaaatcattgtccagcaaatcaatccactgggcttctttggaaactatttctattgattgtttttgttact

SEQ ID NO: 930194 - DNA, 747 bp, Homo sapiens
aggtacagggaaaagtggacagttagcaaggcaaagaggagctttattgagtgacagaacagctcagaggagacctgcattgggtagctcctctccacaggcagggcgtcccgatgagtgttcagttctcaacagagaggagaccctggagtggggagctcctctctgcaggcaggttgtcctgtcatctccttgagtctgtctgagtctggggtttttatggacttcagagaggaagaagtgcctactgattggtccgtgggtggccatgggtgggcctggaaaaagtaccgtaagttcccactctggtctgtggggccggcagcctggccgtcaggcttcaggccttccccagctcgaaggtagagcttcactagggacccactcctttccacccaggagcctgtctgcctcctgctgtcacccaggctattcatgctgagggacacctaaaggcccatgcagagccgcccttagcccccactcaggctccctcccatgcttaccagtgcccaaagtccagaggcagccaaggcagcagggggctggagcgtcagtgctgccccaattgtgcacacacccarccaggttgcaacagctcctgggctcgacctcaactttgctccaagatcagagtaggtgcagggagcagggagaggccaggtagtgggagcaggcacttccaagcctgcaggtgggagggggcctttccccaggcccccaagaggggacgcccaggtccgtagc

SEQ ID NO: 930195 - DNA, 614 bp, Homo sapiens
cacatctgatcctctccatgcagccagggtcaggagaagcagaacaggtatttcaaggttcttatctcccaggacagtgaaaatgaacatataatgaacagagcctgttgcagagggggagccaaacaactgctgaccaaagcaagagagcaagcaagcaagagaagaagaaagaaagaaagaagaaaggaagaaagaaagaaagaaagaaagaaagaaagaaagaaagaaagaaagaaagaaagaaaagaaagaaagaaaagaaaaagaaagaaagaaaggaagaaagaaagaagaaagaaagggaaagagaaagagagagagagagaaggagggaggragggagggaggaaaagagagctgccaatcttatatggacctgtaccaagatggagtgatggcctggacttcagagtaggagtctagcacagtggttaaatggcctggattctggggtcaggacaacccgagttggaagattggatctggctcctcttggaagaacttgagggaagctccttcctcaaccttgaaagcctcgattgctccattggtataagaagacgatgatcacagtaccttcctccaaggtttatttcaaggactaaagtgat

SEQ ID NO: 930196 - DNA, 566 bp, Homo sapiens
gaggtccttggtcaattcttccattgcaccatgcttccccccacccccgaccgtgcctttgcacatgccatccctcctgcctgaaatgctcccgaccttctttacctggttagctcttactcttccttcaaatttccttctttacctggttagctcttactcttctttcaaatgtcttatcacttctaggaagccgtccttcttagtattcatgattaagccaaatctccccatgatttgctgtttacaggcatttattttgcctttatagcacttacccsacttgtaattttacctttggtttctagtgatttgaccgttgtgtcgattgctctggaatgtaaactccctgagggcaggcgttgtgcttgttttgatcacctagtccttgcacttcacctgaaacatagtaggtgttcagcagagacttcttggatagataaaagcatggatggatggatggatgggtggatggatggatggatagatgaatggatggatgggagcaagatttcacttcaggccaggcatggtggcccatgcctataatcccagcactttgagag

SEQ ID NO: 930197 - DNA, 566 bp, Homo sapiens
gaggtccttggtcaattcttccattgcaccatgcttccccccacccccgaccgtgcctttgcacatgccatccctcctgcctgaaatgctcccgaccttctttacctggttagctcttactcttccttcaaatttccttctttacctggttagctcttactcttctttcaaatgtcttatcacttctaggaagccgtccttcttagtattcatgattaagccaaatctccccatgatttgctgtttacaggcatttattttgcctttatagcacttacccgacttgtaattttacctttggtttctagtgatttgaccgttgtgtcgattgctctggaatgtaaactccctgagggcaggcgttgtgcttgttttgatcacctagtccttgcacttcacctgaaacatagtaggtgttcagcagagasttcttggatagataaaagcatggatggatggatggatgggtggatggatggatggatagatgaatggatggatgggagcaagatttcacttcaggccaggcatggtggcccatgcctataatcccagcactttgagag

SEQ ID NO: 930198 - DNA, 798 bp, Homo sapiens
gtggaactgtgagtccattaaacctatttttcttccctgtctcaggtgtgtctttatcagcagcataaaagtggactaacacagtaaattggtaccaggagtggggtgctgctgaaaagatacccgaaaatgtggaagcaactttggaactgggtaacaggcagaggttggaagagtttggagggctcagaagaaggcgggaaaatgtgggaaagtttggaacttcctagagacttgttgaatggctttaccccaaatgctggtaatgatatggacaataaagtccaggctgaggtgatctcagatggaaatgaggaagctgttgggaactgaagcaaaggtgactcttgctatgttttagcaaagagattggcagcattttgcccctgccctggagatttgtgggactttgatcttgagagagatgatttggggtatctggcaaagaaatttctaagcagcaaagcattcaagaggtgacttgggtgctgttaaaggcattctgttttataaaggaagcagagcatacaagttcagaaaatgtgcagcctgaccatgcaatagaaaagaaaatcccattttctgaggagaaattcaagctggctgcagaaatttgcataagtaacaagaagccraatgttaatcccccagacaatagggaaactgtctccagggcatgtcagaggtcttcacgacagccccttccatcacaggccctgaggcctaggaggaaaaaatggttttgtgggccaggtccagggtctccatgctgtgtgcagcctagggacttggtgccct

SEQ ID NO: 930199 - DNA, 376 bp, Homo sapiens
atcccgtttccaacgaattcctcacagaggtccaaatatgcacttgcagattctgcagaaagtgtgtttctaaactgctacatcgcaaggaatgctcagctctgtgagttcaactcaatcatcccaaagaattttctgagaaagcttctgtcttctttttataggaagttatttcctttactacggtastcctcaaagagtgcaattatccccttgcagtttctacaaaaagagtgtttcaaacctgaactatcaaagaaaggttccacactgtgagttgaatgcagacatcacgaagaaggttctgagaatgcttctgtttagttctgtgcagtttatcccgtttccaacgaaatcctcagagaggaccaaatat

SEQ ID NO: 930200 - DNA, 376 bp, Homo sapiens
atcccgtttccaacgaattcctcacagaggtccaaatatgcacttgcagattctgcagaaagtgtgtttctaaactgctacatcgcaaggaatgctcagctctgtgagttcaactcaatcatcccaaagaattttctgagaaagcttctgtcttctttttataggaagttatttcctttactacggtackcctcaaagagtgcaattatccccttgcagtttctacaaaaagagtgtttcaaacctgaactatcaaagaaaggttccacactgtgagttgaatgcagacatcacgaagaaggttctgagaatgcttctgtttagttctgtgcagtttatcccgtttccaacgaaatcctcagagaggaccaaatat

SEQ ID NO: 930201 - DNA, 600 bp, Homo sapiens
aactatcatcagagtgaacaggcaacctatggaatgggagaaaatttttgcaatctatccatcagaaaaaggtctaataaatatccagaatttacaaggatcttatatatttacgagaaaaaaaaaacaaccccatcaaaaagtgggcacaagatatgaacagacacttctcaaaagaagacatttgcgcagccaacaaacatgaaaaaaagctcggcatcactgattatcagataaatgcaaattaaaaccacagtgagataccacctcacaccagtcagaatggcaattattaaaaagtcaggaaacaacagattctggtgaggttgtggagaaataggaatgcttttacactgttggtgggaatgtaaattagttcaaccattgtggaagacagtgtggcgattcctcaaggatctagaaccagaaataccatttgacycagcaatcccattactgggtatatacccaaaggaatattaatcattctaccataaagacacatgcatgccacacgtatgcttattgcagcactgtttacaatagcaaagacatggaaccaacccaaatgcccatcaatgatagactggataaagaaaa

SEQ ID NO: 930202 - DNA, 626 bp, Homo sapiens
atagatacacaagggaatactattcggcctttaaaaataaagaaattatgtcatttgtaacaagatggatgaatctggacagcattatgttataagccagacacaaaatgacaaatactgcatgatctcaactatatgtggaatctrtaaaagttaaactcatagaagttcagagtagaatagtagttaccaggcactgggagttgggggtgcagttttggggaaatgtttggtcaaaggatacaaaatttcagttggataggaagaataagttcaatagatctattgtacaacatgatatctataataattattagtaaattataagtgaggtaatacatatgttaattagctcgatcaaaaaatgaagacactggtcaaatcgatcgaatcattccacaacgtattcatattttaaaacatgttgtagggccgggcgtagtggctcacgcctgtaatcccagcactttgggaggccaaggcaggcggatcacgaggtcaggagatcgagaccatcctggctaacatggtgaaaccccgtctctactaaaaaaaacacagaaaattagctgggcgtggtggcgggctcctatagtcccagctcctcaggaggctgaggcaggaga

SEQ ID NO: 930203 - DNA, 626 bp, Homo sapiens
atagatacacaagggaatactattcggcctttaaaaataaagaaattatgtcatttgtaacaagatggatgaatctggacagcattatgttataagccagacacaaaatgacaaatactgcatgatctcaactatatgtggaatctataaaagttaaactcatagaagttsagagtagaatagtagttaccaggcactgggagttgggggtgcagttttggggaaatgtttggtcaaaggatacaaaatttcagttggataggaagaataagttcaatagatctattgtacaacatgatatctataataattattagtaaattataagtgaggtaatacatatgttaattagctcgatcaaaaaatgaagacactggtcaaatcgatcgaatcattccacaacgtattcatattttaaaacatgttgtagggccgggcgtagtggctcacgcctgtaatcccagcactttgggaggccaaggcaggcggatcacgaggtcaggagatcgagaccatcctggctaacatggtgaaaccccgtctctactaaaaaaaacacagaaaattagctgggcgtggtggcgggctcctatagtcccagctcctcaggaggctgaggcaggaga

SEQ ID NO: 930204 - DNA, 594 bp, Homo sapiens
aaaatgaagacactggtcaaatcgatcgaatcattccacaacgtattcatattttaaaacatgttgtagggccgggcgtagtggctcacgcctgtaatcccagcactttgggaggccaaggcaggcggatcacgaggtcaggagatcgagaccatcctggctaacatggtgaaaccccgtctctactaaaaaaaacacagaaaattagctgggcgtggtggcgggctcctatagtcccagctcctcaggaggctgaggcaggagattggcgtgaacccgggaggcggaggttgcagttgagatcgcgccactgcactccagcctgggtgacagagcgagactccatctcaaaaaaaaaaamacacacaaacaaacaaacaaacaaaaaacatgttttaggtgactagtatataaaatttgacaattaaaaaaacaactaaaagcatcctcctgtgtccacttacttacagatacattcacatacctctcctaatttcaactgctcaaggcagttgaaacctaaaagcaagcttattgaagaatctgctaagagaaggctaacattttgaataaagtacagtaagtacagagttt

SEQ ID NO: 930205 - DNA, 678 bp, Homo sapiens
gcgggtgagatcaatgtgtgtgtgcaggaggatatggaaggaggtagtggaggggattctgaaaagcttctttttttttttttttttgaaacagagtctctctctgtggcccaggctggagtgcagtggtgcgatctcggctcactgcaagctctgcctcccgggctcacaacattctcctgcctcagcctcccaagtagctgggactacaggtgcccgccaccacgcctggctaattttctgtattttttagtagagacgggtttcgctgtgttagccaggatggtctcgatctcctgacctcgtgatctgcccgcctcagcctcccaaagtgctgggattacaggcgtgagccaccgtgcccagccctgaaaagcaatctgccctgcaagttttacctcataaatgccctgggttcttttctaagataaccaaagcataaccagtgaaatatggggcraatcatgattagttaatgctgtgaatataggttcacaaactctgggctaggtagagtatgtgacaaaacaacttgttagcagggtgatttctaagccacaatctctgagctttgaggccttcctctaagaaataaacaggcataatatttggtaccatcctctcaggaagatcaatgagatcatgcaggtgaaacctctttgaatatctggaaactat

SEQ ID NO: 930206 - DNA, 629 bp, Homo sapiens
agggctacagtgaaagactcctgtttgagaaaagcagggggaaaataaaggagactctctgtcttgcacctcaggtattagctcagctacagagggtagagcaacaagcagacttctgaggtcactgagtccaggcctaggctcttggtcagcatttctggacctgccctgagccaaaaggtgagtcccagagctggcagcattggtcacaagctgactgaagagcccttaggctttaagtatcagtgatggcctggcagaacccccmcataagccagtggtgatggcagccacagggagaggatcttctgcccgtggaaaggggagggaagagtgggaagcaacttgtcttgtgggtcacgtgccaccttaaccacagtagaacaaaacaccaggtaaatatctaaggttttgacttcaatccctggtgttctcagacagcatctatgaaccaatctggggcctaggggaactcaccaccctggagggaagggcacaaacctggctggctttgccacctgctgactgcagagtcctagggcctggagtaaacttaggtggtagccaggtagtggttacaccgggccttgggcaagatcgagtgctatcctggcttcaggtctgaaccg

SEQ ID NO: 930207 - DNA, 551 bp, Homo sapiens; identical to SEQ ID NO: 928034

SEQ ID NO: 930208 - DNA, 632 bp, Homo sapiens
aactatggataagggtctatgttcagcggtgcatgtattgtcttgataaacatcttaaacaacagaaaacagagttcgagagcagagaaccggtctgaccacaaatttaccagggcggagtttttccccaccctagtaagcctgagggtactgcagaagaccaggcgcatctcccgcataagacagacattcccggagcagccgtttatagaccttcccccaggaatgtattcctttcccagggtattaatattaatatttcttgctaggaaaagaatttagtgatatctctcctactttcacacccatttataggctctctgcaggaagaaaaatatggctctttttgcccgaccccrcaggcagtcagactttacttacggttgtcttcccttgttccctaaaaattactgttattctgttctttttcaaggtgcactgatttcatattgttcaaacacacatgttttacagtcaatttgtacagttaacacaattatcacagtggttctgaggtgatgtaaatcctcagcttatgaagataataggattaagaaattaaagacaggcataagaaattataaaagtattatttgggaactgataaatgtccatgaaatcttcacagttta

SEQ ID NO: 930209 - DNA, 632 bp, Homo sapiens
aactatggataagggtctatgttcagcggtgcatgtattgtcttgataaacatcttaaacaacagaaaacagagttcgagagcagagaaccggtctgaccacaaatttaccagggcggagtttttccccaccctagtaagcctgagggtactgcagaagaccaggcgcatctcccgcataagacagacattcccggagcagccgtttatagaccttcccccaggaatgtattcctttcccagggtattaatattaatatttcttgctaggaaaagaatttagtgatatctctcctactttcacacccatttataggctctctgcaggaagaaaaatatggctctttttgcccgaccccgcaggcagtcagactttacttayggttgtcttcccttgttccctaaaaattactgttattctgttctttttcaaggtgcactgatttcatattgttcaaacacacatgttttacagtcaatttgtacagttaacacaattatcacagtggttctgaggtgatgtaaatcctcagcttatgaagataataggattaagaaattaaagacaggcataagaaattataaaagtattatttgggaactgataaatgtccatgaaatcttcacagttta

SEQ ID NO: 930210 - DNA, 670 bp, Homo sapiens
gtccaacaaagatcacaaggcaaagggcaaaagcagaactatggataagggtctatgttcagcggtgcatgtattgtcttgataaacatcttaaacaacagaaaacagagttcgagagcagagaaccggtctgaccacaaatttaccagggcggagtttttccccaccctagtaagcctgagggtactgcagaagaccaggcgcatctcccgcataagacagacattcccggagcagccgtttatagaccttcccccaggaatgtattcctttcccagggtattaatattaatatttcttgctaggaaaagaatttagtgatatctctcctactttcacacccatttataggctctctgcaggaagaaaaatatggctctttttgcccgaccccgcaggcagtcagactttacttacggttgtcttcccttgttccctaaaaattactgttattctgttctttttcaaggtgcactgatttcatattgttcaaasacacatgttttacagtcaatttgtacagttaacacaattatcacagtggttctgaggtgatgtaaatcctcagcttatgaagataataggattaagaaattaaagacaggcataagaaattataaaagtattatttgggaactgataaatgtccatgaaatcttcacagtttatg

SEQ ID NO: 930211 - DNA, 636 bp, Homo sapiens
caactgtttgcattcttttgagtttctgattagcctttcactgaatgcacaatttacagtaatagtcacttatgccttagtctggcttagtgaaataatagggcaaatgaagcaatcagatatgcatttatctcacaagagcagaaggatgactttgagttctgcctgccctttgtctacaaggaatttccctgtgggcaaattttgagggagatttgcagcttttttatctttgtagctatcttatttaggaatagaataggaggcaggttttccctamgcccttcccagcttgactcttccctttggcttagtgattttggggccctgagatttattttcctttcacaatgtgatgaatcatgcttattgatttgcatatgctgagccaactttgcaacttcacagctttttgatgtgcttctagattcagtctgctgtattttgttgaggattttggcatctatgctcatcaaggatgttggcctgaagttttcttttcttcttgtgtctttgctttgttttagtatcaggataatgctagccttatagagtgagttagagagaagaccctcctcaattttttggaatggtttcaataggaatgatatccgctcttctttatacatctggtag

SEQ ID NO: 930212 - DNA, 657 bp, Homo sapiens
ggagtttgctggaggtccaccccagaccctgtttgtctaggtatcagcagcagaggctgcagaacaacgaatattgctgaacagcaaatgttgctgcctgaatgttcctctggaagcttcgtctcagaggggtacccggccgtgtgagctgtcagtctgccccyactggggggtgccttccagttaggctactcaggggtcagggatccacttgaggaggcagtctgaccattctcagatctcaaactccgtgctgggagaaccactactctcttcaaagctgtcagacagggacatttaagtttgcagaagtttctgctcccttttgttcagctatgccctgcctccagaggtggagtctacagaggcaggtaggccttcttgagctgcagtgggctccacccagtttgagcttcctggccgctttgtttacctactcaagcctcatcaatggcaggccattgattcccccagcctcactgctgccttgcagtttgatctcagactgctgtgctagcaatgagcgaggctccatgggcatgggaccctctgagccaggtgcgggatataatctcctggtgtgccgtttgctaagactgttggaaaagtgcagtattagggtgggcatgacccgattttccaggtgccgtctgtcac

SEQ ID NO: 930213 - DNA, 606 bp, Homo sapiens
ccaccccagaccctgtttgtctaggtatcagcagcagaggctgcagaacaacgaatattgctgaacagcaaatgttgctgcctgaatgttcctctggaagcttcgtctcagaggggtacccggccgtgtgagctgtcagtctgcccctactggggggtgccttccagttaggctactcaggggtcagggatccacttgaggaggcagtctgaccrttctcagatctcaaactccgtgctgggagaaccactactctcttcaaagctgtcagacagggacatttaagtttgcagaagtttctgctcccttttgttcagctatgccctgcctccagaggtggagtctacagaggcaggtaggccttcttgagctgcagtgggctccacccagtttgagcttcctggccgctttgtttacctactcaagcctcatcaatggcaggccattgattcccccagcctcactgctgccttgcagtttgatctcagactgctgtgctagcaatgagcgaggctccatgggcatgggaccctctgagccaggtgcgggatataatctcctggtgtgccgtttgctaagactgttggaaaagtgcagtattagggt

SEQ ID NO: 930214 - DNA, 599 bp, Homo sapiens
ccccagggccctctgactggctctcacatgtgctccaaaaggtggacttgagaggccggcactcacactcagggttttctggagaagcagagcggcgggcagagtgagggccacagctgatcctgttgggtggaaagaccctgtccctttccttcccactcttcctgactaaaatactcgagcagggcataggagagggaggaggaggggtatctcagagcccgcactcccsctcacccatcttacttcaaacagccggggtcctgactcaagcgttctttggagtgggaggagatggaatttaaatggagtttgaaattgaagttttagttggttttttaataaccaaaaatgaatagaaagtgatgcaattttggccaggggcagtggctcatgtctgtaatcccagcattttgggaggccaaggcaagagtgttgcttgagttcaggagtccaagaccaggctggacaacatggcgaaatcccgtctctacaaaaaatacaaaaattagccagaagtggtggtgcacacctgtgttcccagctacttgggaggctgaggtgggagaatcacttgaatccctgaggttgacagtgca

SEQ ID NO: 930215 - DNA, 646 bp, Homo sapiens
gtcagaacatgtggtgtttggttttctgttactgtattggtttgctgaggataatggcttccagctccatccatttccctgcaaaggacttgatctcattgctttttatggctgcatagtatcccatggtgtattctaactggtgtgagatggtatctyattgtggttttgatttgcatttttctaatcactagtaatattgagcattttttcatatgcttgttggccatgtgtatgtcttctttcgaaaagtgtctgttcaggttctttgcccactttttgatcaggttgtttggtttttgcttgctaatttgtttaagtccttatagattctggatattagacctttgtcaaatacatagtttgcaaatattttctctcattctgaaggttaactgcttagtctattgataatttcttttgctctgcagaagctctttagcttaactagtttcatttgtcaatttttgtttttgttacaattgcctttggtgtcttcattgtgaaatctttgccaggtcctatgtccaggatggtatttcccaggttatcttccagggtttttatatttttaggtttcatatttaagtctttaatctatgttcagtttatttttgtatatgatgtaagaaaggggttcagtttg

SEQ ID NO: 930216 - DNA, 618 bp, Homo sapiens
agaggcccactcactgccttctccaccacccccatccaatctatcaccacaagattgaggattttactttctcaattgctctcaaatctgtccatttctctccacagcactagtgcaagttgccatcaccttttacctacaataatggccatagcctcctcactgaactactctgaacccttccaatctccctcccacgatgcagccagagtgaactcttcaaaacacaaatctgttgtgccaccccttgcatgaaatcttaggtagcttcccatagctcttaaagaccaaacttcataacatayccttcacggtttcacatggaatggtctctcccagcttctccagctttatcctgtcccacattccctctgctctctttgctttgcctagaagaacactcttaaagtttctcagactcactgtacttcttcctgccacaatgcttttatatgtactttttcttctaccaagaattccctctctcccttcttcacttagttaaagtagatcttagccttcttattacaaatcaaattcacagcttcagtattggaagccttttgtaaccccccgatgcatactgaggtcctcaaagcaccccaaacttcttctcca

SEQ ID NO: 930217 - DNA, 586 bp, Homo sapiens
tgtttgttgttttgttcgtttctttctaatttagaaaaaaaaaaagtagtagtcagggagtctagtcaaatacatcggagttggggggaattattagatacccaaatcttagtgatgcatttgactatttttcgggatgaaaagcatatatgggtagacattggcttggaggggaaatggtgacacaggagagatgaargagcagcactttgaagttgatttttgaagaaaaaccattagttttcatcattgtataaggacatcactctatgaatcatagcaataggcaatttgcaatttaaaaaataaataaaaaggcatccttgtggctaaatggcagtttagattacagttcctaaggcccactgaaaatcataagctactgtctttcctgagcacataaatgaatttttcttccattttgacagctctatccctccaggtcatccagctattttatcccttaatattggctactcttcctcctctctcagacgtctcactttttgcacccagcccccaaacacactaaaagattaaactcaagcagccttccctattgggaaaccttttttttttttttttt

SEQ ID NO: 930218 - DNA, 551 bp, Homo sapiens
ctgtactgtgcagagccacaggggcagagctgccaaagaccatggaaacttaccccttgcatcagcatgccttggatgtgagacatggagtcaaaaggggattttgaagctttaagatttaatgactgtccagctaggtttcagacttgcatgggacctgtggctcctttgttttggccaatttctcccatttggaatgggaacatttaccaaatgcctgtaccctcattgtatcttggaagcaactaacttgtttttgattttacgggctcataggtggaagaaatttgccttgtctcagatgagactttggacttggacttttgagttaatgctgaaatgagttaagactktgggggactgttgggaaggtgtgactgtttttgaaatgtgaaaaggacatgagatttgggagggtccaggagcagaataatatggcttatctctgtgtacccacccaaatctcatctcgaattacaatcccacatgttgagggagggacctgttgggaggtaattgaatcatggggccgtctcatgagatctgattgt

SEQ ID NO: 930219 - DNA, 563 bp, Homo sapiens
ttttccagttttttagtatatcattgtttattatagtaagatcttttgtatttctgtggtttcaattgtgatttttttcttttttctttgtttttgttcatttgtgtcttttcttccccccgccttggttattttagctagcagttttatttatctcctaacaaaccaactttttgttcattatttcactttttgttcattatttctttgtgtgtgtggttttkttgttgttgttgttgttttttttttttttttagtatctaatttgtttagttttgctctggtcttcattatttcttttcttctccaattttgggtttggtttgctcttgctttcctagtttcttgggtgacattgtttatttaaaatctttctgcttttttgatgtaagcatttaatgctgtaaaattctcacttagcactgtttttatgtaatccatagcttcaatagtcatttgttttaagaaatttttttatttccttcttttattttttttcatgacctaacggtcattcatgagcatgttgttctatttccatgtatttgtacggtttccaaaat

SEQ ID NO: 930220 - DNA, 432 bp, Homo sapiens
gccaccacgcccagctattttttttttttttgtatttttagtacagaaggggtttcaccatgttggccaggctagtctcaaactcctgacctctcacctgccttggcctcccaaagtgttgggattacaggcatgagccaccacaccyggccaaaataaaacttttttaaaaaggagagaaaattcaagtattaaaaagccacttcagacaatctgtttgtaaagtgctatagataataggattttcgacatgggcttgagtaatcttgagggttttgcctggtgcctcaaatcctcgcatactggggtagtgtcttttattcctgtagaaataacgtaaaagctctaatattccctgtctttataggccatgaattaagtgttccctacactttcctgggaagcatttgaaattgcttcaaaatttacaga

SEQ ID NO: 930221 - DNA, 769 bp, Homo sapiens
tctctctttcttctatcatccttctgcagagaaggattttgtaattgttgttgctttgttttaaagtgggaaagaaaaatattgacgaacttaaaactcgacatagacagagacattgggcagcaccagacctaatcttttttttttttttttttttttttgagatggagtctcactctattcaagcaattttcctgtctcagcctcctgagcagctgggattacaggcacgctccaccacatccagctaattttttttttttttttttttgkatttttagtagagatggggtttcaccatgttggccaggctggtctcaaactcctgacctcgggtgatctgcccacctcggcctcctaaagtgctgggattataggcgagagccactgcacctggcccaaacctaatttttgagggaactcagcatcatcatagaaggctgaaaccacaagatctattttttgtgccttcctaagagtgttgtgtgcatgcagcaatccagcgaaatggtgagttgcacagatacacctgggggatgccagcttaagatcagggccagggtggcacagcagcaccctgggagctggtggaggagggcacggctcactgacgccatccgacccagccccagcagctcgcaggccacactgctcctttccgcctcggtggccttgccagaatgctgggcctctctgatgcactggtactatctaagcaatcggcaactaacagtagtgaaagcgtagttcattttaggtttaagaatta

SEQ ID NO: 930222 - DNA, 769 bp, Homo sapiens
tctctctttcttctatcatccttctgcagagaaggattttgtaattgttgttgctttgttttaaagtgggaaagaaaaatattgacgaacttaaaactcgacatagacagagacattgggcagcaccagacctaatcttttttttttttttttttttttttgagatggagtctcactctattcaagcaattttcctgtctcagcctcctgagcagctgggattacaggcacgctccaccacatccagctaattttttttttttttttttttggatttttagtagagatggggtttcaccatgttggccaggctggtctcaaactcctgacctcgggtgatctgcccacctcggcctcctaaagtgctgggattataggcgagagccactgcacctggcccaracctaatttttgagggaactcagcatcatcatagaaggctgaaaccacaagatctattttttgtgccttcctaagagtgttgtgtgcatgcagcaatccagcgaaatggtgagttgcacagatacacctgggggatgccagcttaagatcagggccagggtggcacagcagcaccctgggagctggtggaggagggcacggctcactgacgccatccgacccagccccagcagctcgcaggccacactgctcctttccgcctcggtggccttgccagaatgctgggcctctctgatgcactggtactatctaagcaatcggcaactaacagtagtgaaagcgtagttcattttaggtttaagaatta

SEQ ID NO: 930223 - DNA, 769 bp, Homo sapiens
tctctctttcttctatcatccttctgcagagaaggattttgtaattgttgttgctttgttttaaagtgggaaagaaaaatattgacgaacttaaaactcgacatagacagagacattgggcagcaccagacctaatcttttttttttttttttttttttttgagatggagtctcactctattcaagcaattttcctgtctcagcctcctgagcagctgggattacaggcacgctccaccacatccagctaattttttttttttttttttttggatttttagtagagatggggtttcaccatgttggccaggctggtctcaaactcctgacctcgggtgatctgcccacctcggcctcctaaagtgctgggattataggcgagagccactgcacctggcccaaacctaatytttgagggaactcagcatcatcatagaaggctgaaaccacaagatctattttttgtgccttcctaagagtgttgtgtgcatgcagcaatccagcgaaatggtgagttgcacagatacacctgggggatgccagcttaagatcagggccagggtggcacagcagcaccctgggagctggtggaggagggcacggctcactgacgccatccgacccagccccagcagctcgcaggccacactgctcctttccgcctcggtggccttgccagaatgctgggcctctctgatgcactggtactatctaagcaatcggcaactaacagtagtgaaagcgtagttcattttaggtttaagaatta

SEQ ID NO: 930224 - DNA, 769 bp, Homo sapiens
tctctctttcttctatcatccttctgcagagaaggattttgtaattgttgttgctttgttttaaagtgggaaagaaaaatattgacgaacttaaaactcgacatagacagagacattgggcagcaccagacctaatcttttttttttttttttttttttttgagatggagtctcactctattcaagcaattttcctgtctcagcctcctgagcagctgggattacaggcacgctccaccacatccagctaattttttttttttttttttttggatttttagtagagatggggtttcaccatgttggccaggctggtctcaaactcctgacctcgggtgatctgcccacctcggcctcctaaagtgctgggattataggcgagagccactgcacctggcccaaacctaatttttgagggaactcagcatcatcatagaaggctgaaaccacaagatctattttttgtgccttcctaagagtgttgtgtgcatgcagcaatccagygaaatggtgagttgcacagatacacctgggggatgccagcttaagatcagggccagggtggcacagcagcaccctgggagctggtggaggagggcacggctcactgacgccatccgacccagccccagcagctcgcaggccacactgctcctttccgcctcggtggccttgccagaatgctgggcctctctgatgcactggtactatctaagcaatcggcaactaacagtagtgaaagcgtagttcattttaggtttaagaatta

SEQ ID NO: 930225 - DNA, 591 bp, Homo sapiens
ccaggctggagtgcagtggtgcgatctcagctcactgcaaccctccacctcccgggttcaagtgattctcctgcctcagcctcccaagtagctgggattacaggtgcctgccaccaagcctggctaattttttgtacttttagtagagacggggtttcgccatgttgggcaggctggtctttaactcctgacctcaggtgatccgctcgcctcagcctcccaaagtgctgggattacaggcgtgagccaccatgcccagccttatgcaaggtttaataactttagatgttcacagtatctgcccctgctctgcgctaccacccctcttcaatgtctaaggacagatctgtaaacacatgtgacacacaaatagagtggtctaaaagcagtcctcagaattctgtaatccaaaaaggagagaaatccttctaaggtgtgaagcaackgacagaaacaaaatgaccaaagtcagtttcaccacatttaagcccaattctgaaaaatgcaggcaggcttctcctttttaactactaggtggagagggcacctccatgtggaacattcgaagggcagaaacagctcaccaggtca

SEQ ID NO: 930226 - DNA, 530 bp, Homo sapiens
agctctgaggtcacccataaccttcatgttgaaggtcacatgcacaactttcttttaaatttttttttttttttttttttgagacagggtctcgttttgttgccygggctggtctcaaactcctgggctgaagcacgaagcactcctcccttcccagcctcccatagtgctgggatcacaggcatgagccaccttgccgggccacatgcacagttttcaaacttcacctcctgtaacttcccagtagcctctggtgctttggccacgtcctccctccttgaagcactctttcccattggcttccatgacatcatgtgactctcctagtcttaatcctacctctacgctccttctctgggttctctggagactccttctcctccacacacctactaaacgatggagttccttgagatttggtagcaggttctttccttctctaactttgccctttttccttaggcaatttcagccatgttcatttcttcagttaccagtggcctcagccctggagctggcagatggggacc

SEQ ID NO: 930227 - DNA, 570 bp, Homo sapiens
agatcagagcaatgaacaattgtaaaataaatttaaatatctttataataatatcaaaaaatataaaatactcaggagatatagatatatatatattttttttttttgagatggagtttcactcttgttgcccaggctggagtgcaatggcatgatctcggctcaccrcaacctccgcctcccaggttcaaatgatttctcctgcctcagcctccctagtagctgggattataggcatgtgccaccatgcccggctaattttgtatttttagtagagacggggtttctccatgttggtcaggctggtcttgaactcccgacctcagttgatccgcccacctcggcctcccaaagtgctgggattacaggcgtgaaccaccgtgcccggccactcaggatatatttaatgaaagatgtacaaggcctgaaaacaagaaaacattgccaagataaattaaaaatctagatcaataagatgtaccctatttatggattggaagattcaatatcatcaagatgttcattctcctgaaaatgtaccataaattcaatgcaattaaaatcacaatc

SEQ ID NO: 930228 - DNA, 570 bp, Homo sapiens
agatcagagcaatgaacaattgtaaaataaatttaaatatctttataataatatcaaaaaatataaaatactcaggagatatagatatatatatattttttttttttgagatggagtttcactcttgttgcccaggctggagtgcaatggcatgatctcggctcaccgcaacctccgcctcccaggttcaaatgatttctcctgcctcagcctccctagtagctgggattataggcatgtgccaccatgcccggctaattttgtatttttagtagagacggggtttctccatgttggtcaggctggtcttgaactcccgacctcagttgatccgcccrcctcggcctcccaaagtgctgggattacaggcgtgaaccaccgtgcccggccactcaggatatatttaatgaaagatgtacaaggcctgaaaacaagaaaacattgccaagataaattaaaaatctagatcaataagatgtaccctatttatggattggaagattcaatatcatcaagatgttcattctcctgaaaatgtaccataaattcaatgcaattaaaatcacaatc

SEQ ID NO: 930229 - DNA, 574 bp, Homo sapiens
tccacctgtccaactttaaaacacagaatcaacagggatgttacactaaaggggaccctagaaaccatataaacggtggaaaattgaggcctggactgacccataacaaatgagacatcacataatggcaaatgaaccatgaccagaaaacaaatctctttagtamacagtttagcgcttctgcttatacaggttgaacagccctaacccaaaaatccaaatcccaaactttttgagcgaagacatgaggctccaacgagcatatcagactttcggattaggaatggtcaaccagtaagttctgcaaatattcaaaatctgaaaagaatccaaagaagtctcaaatccaaaatgcttctggtcccaagcatttcggataagaaacctgtagtttaatcatcagtcaaaatttaagaatagagttgattttgggccgggcacggtggctcatgcctgtaatcccagcactttgggaggccaaggtgggtggagatcaggagatcaagaccatctggccgaggtcagcagatcaagaccatcctggctaacacggtgaaaccccgtctctactaaa

SEQ ID NO: 930230 - DNA, 574 bp, Homo sapiens
tccacctgtccaactttaaaacacagaatcaacagggatgttacactaaaggggaccctagaaaccatataaacggtggaaaattgaggcctggactgacccataacaaatgagacatcacataatggcaaatgaaccatgaccagaaaacaaatctctttagtacacagtttagcgcttctgcttatacaggttgaacagccctaacccaaaaatccaaatcccaaactttttgagcgaagacatgaggctccaaygagcatatcagactttcggattaggaatggtcaaccagtaagttctgcaaatattcaaaatctgaaaagaatccaaagaagtctcaaatccaaaatgcttctggtcccaagcatttcggataagaaacctgtagtttaatcatcagtcaaaatttaagaatagagttgattttgggccgggcacggtggctcatgcctgtaatcccagcactttgggaggccaaggtgggtggagatcaggagatcaagaccatctggccgaggtcagcagatcaagaccatcctggctaacacggtgaaaccccgtctctactaaa

SEQ ID NO: 930231 - DNA, 610 bp, Homo sapiens
agcctcctgagtagccggcactacaggtgtgtgtcatcatgcccagataatttttgtatttttttgtagggacagagtttcaccatgttgcccaggctggtctcaaactcctgggctcatgtgatccacccatctcggcctcccaaagtgctgggattacaggtgtgagccactttgcccagcctcattccttctatatttattggctggcattctgtaaaggagatttcttccctccaactttaattttttttttttgagaagaggttttactctgtcacccaggctggagtgcaatagcatgakcatggctcactgcagcctcgacctcccagactcaaggggatactcccacctcagtctcccaagtagctgggaccacagatgcgtgacaccatgtccagctcatttttaatgttttccagtagagatgggggtcttgccatgttgcccaggctggtctcgaactcctaggcttaagggatcctcctgcctcagcttcccaaagtgttgggattacaggtgtatcaggtgatttttagaaaccaaaatcaaggtgtcgtcattgctactgagatgtaattgcttctaggccctttcaatgaacagt

SEQ ID NO: 930232 - DNA, 677 bp, Homo sapiens
acagagggagcatttagaacctctagccaaagagaaattgtccgtctccttgtttggaacttgagtttcagcaagcctcaccgccgtaggctaaggtgctctggcattccaattaaacttgcaaggcaggctgggcgcagtggctggcagggcgcagtagcttgtgcctgtaattccagcactttgggaggccaaggcgggtggatcacttgaggtcaggagtttgagaccagcatgccaacacggtgaaaccccatttctactaaaaacacacacaaaaaaattagctagacaaggtggcctgtgcctgtaatcccagctactagggaggctgaracagcagaattgcttgaacctgggaggcagaggttgcagtgagccaagattgtgccactgcagtccagtgactccatctcaaaaaagaaaaaaagaaagaaaggcagtctaggccacaagaactgcaactcctagacaagtcctagtgctgtgtggggctcagagccagtggatgtggggaacaagtaacctagtgagacaccagttgggagtgaccaaaggcgtacttttgtgccacccctctcccaactcctggcagtacagctcatagctccaaaagagattccttgcatctgcttgagaaaaggagaaggaagagtaaatggatttttgtcttgcaa

SEQ ID NO: 930233 - DNA, 677 bp, Homo sapiens
acagagggagcatttagaacctctagccaaagagaaattgtccgtctccttgtttggaacttgagtttcagcaagcctcaccgccgtaggctaaggtgctctggcattccaattaaacttgcaaggcaggctgggcgcagtggctggcagggcgcagtagcttgtgcctgtaattccagcactttgggaggccaaggcgggtggatcacttgaggtcaggagtttgagaccagcatgccaacacggtgaaaccccatttctactaaaaacacacacaaaaaaattagctagacaaggtggcctgtgcctgtaatcccagctactagggaggctgagacagcakaattgcttgaacctgggaggcagaggttgcagtgagccaagattgtgccactgcagtccagtgactccatctcaaaaaagaaaaaaagaaagaaaggcagtctaggccacaagaactgcaactcctagacaagtcctagtgctgtgtggggctcagagccagtggatgtggggaacaagtaacctagtgagacaccagttgggagtgaccaaaggcgtacttttgtgccacccctctcccaactcctggcagtacagctcatagctccaaaagagattccttgcatctgcttgagaaaaggagaaggaagagtaaatggatttttgtcttgcaa

SEQ ID NO: 930234 - DNA, 589 bp, Homo sapiens
actgctgaggccagagggtctccagggcacggtgaagctagggcttgaggcatgcttctgtggggagagccctggaatgctagattgcaggagtccagctctcatggctaagcctcctgagctcaggcatgtggagcatgatcttcttccaggtagcaggtggacaaatggcctttcaacttttgccaggattggctggcataggatggagmtgatgagaacaactgtgggctatgaggagatgggagggtggggcaggagccaaggtgggggctactccctggacagaaattcaactccacctccatctgtcatggaccacccctggccacacaaaggccaaggaaatgggattaacacgtgctcagcacctatatggtgccaagcccatgcctgacacttcaccttcagaggcccattttcctcatgctggctctattatcttcagatcccagataaggaaactgaggcttagggggggtcaaggcccagagtcttgcagagaggtggtagattgaagccctgcagtcttcctcctgtaccatgctgcatctccatgacttaaaggttgcatgctaaggcttagcat

SEQ ID NO: 930235 - DNA, 589 bp, Homo sapiens
actgctgaggccagagggtctccagggcacggtgaagctagggcttgaggcatgcttctgtggggagagccctggaatgctagattgcaggagtccagctctcatggctaagcctcctgagctcaggcatgtggagcatgatcttcttccaggtagcaggtggacaaatggcctttcaacttttgccaggattggctggcataggatggagctgatgagaacaactgtgggctatgaggagatgggagggtggggcaggagcmaaggtgggggctactccctggacagaaattcaactccacctccatctgtcatggaccacccctggccacacaaaggccaaggaaatgggattaacacgtgctcagcacctatatggtgccaagcccatgcctgacacttcaccttcagaggcccattttcctcatgctggctctattatcttcagatcccagataaggaaactgaggcttagggggggtcaaggcccagagtcttgcagagaggtggtagattgaagccctgcagtcttcctcctgtaccatgctgcatctccatgacttaaaggttgcatgctaaggcttagcat

SEQ ID NO: 930236 - DNA, 589 bp, Homo sapiens
actgctgaggccagagggtctccagggcacggtgaagctagggcttgaggcatgcttctgtggggagagccctggaatgctagattgcaggagtccagctctcatggctaagcctcctgagctcaggcatgtggagcatgatcttcttccaggtagcaggtggacaaatggcctttcaacttttgccaggattggctggcataggatggagctgatgagaacaactgtgggctatgaggagatgggagggtggggcaggagccaaggtgggggctactcmctggacagaaattcaactccacctccatctgtcatggaccacccctggccacacaaaggccaaggaaatgggattaacacgtgctcagcacctatatggtgccaagcccatgcctgacacttcaccttcagaggcccattttcctcatgctggctctattatcttcagatcccagataaggaaactgaggcttagggggggtcaaggcccagagtcttgcagagaggtggtagattgaagccctgcagtcttcctcctgtaccatgctgcatctccatgacttaaaggttgcatgctaaggcttagcat

SEQ ID NO: 930237 - DNA, 691 bp, Homo sapiens
ggaatattgccctcccccagggctgtcctgccggtgtggggctgtgcctcaacagccatcttgggaaacactggcttagttcttcacggcccggggtgtactaggggcattccccagagcaaagaacaaggggcagctaagccatgatccctactctgtgccagaatgttcataccatccatggggtcctctgtctgtccatcaaggcctttgcctcctgcccctcagcctgtctcttgcctcagcccagaaagcctcttccttcatgcattgagccaggtctcacycaccttcaaggcctttcttccaggaagatttatgggacttgccaacctcctcctgccacactctcgccctgtcagtgccagtatactggtctactctagctgcatagctgtctcggggagaccaagcagaaggaaacagagagcaagcattctctctgtgtggccccaagaacagccggctcttctgtcttctctgcacatttgtgaaactgagctggggtggtaggatgagggctggaccgggagtcaggacacctagctcctggacctggcttggttgaaggcctgagcaagccactttcctctctgaccttcagtttccccatcagtagaatggtgaggttgggcctggggggcctcgaagggccttctagctctgacatcactgaacatagacgcctacc

SEQ ID NO: 930238 - DNA, 710 bp, Homo sapiens
tgcagctaagggatctcttttctcagcccttgtttgtttcccagtgtgggcattttcttgcctgctctatctacctttctcttacatatctagatgctcttgtgatctgacggattgaggacaaatcagctaaccaccctaagttagtgggtcttttagcctataagacataacaggttctattttattttattttttaccattactatttggctagttggtaaggcttttttttttggtcaacttttattttaagttccagggtacatgtgtgggatgtccaagttggtgacataggtaaatacaaggctactttttttttttttttgagatggagtcttgctctgttgcccaggctggagtgcagtggcgcgatctcagctcactgcaagctctgcctcctgggttcacaccattctcctgccttagcctcccgagtagctgggactacaggtgcccgccaccacactcagctaattttttgtatttttagtagagacagggtttcaccatgttagccaggatggtctcgatctcctgacctcgtgatccaccygcctcggcctcccaaagtgctgggattacaggcgtgagccaccacgcctggccaaggctatgttttatatggaactgaagacattgagttcaactgatatcgaaacagttgtttagcttggtctctttactgaaacatacaatcaggtgtgaga

SEQ ID NO: 930239 - DNA, 545 bp, Homo sapiens
aaattttattcttaaaacctttgtttaataaggtatatagaggaactataattacacaggtgaggaattggagactcagaaaggttaaataatttgcccgaggtcatgaagctggtaggtggtagaactgggttgcaagtaaccaggtgtgctttgtccctggattgcattctgttttcacttgacaataacgcctctcggaaagagcaaataacctccacatgcagggtctttgtcttatctctcagaggtatttgtctccccactgcctcacatacactcagctctcaagatatttgaccccaagagaattggccagatagagatgtgagracgtgtgagttgaagcccaatgttattactctctggcacataaagggccacaatgtctgagtaacactggaatcagaagacatgaataaacagaggtcaaggtggtggtttaatcccaacgacatgtaaacaaactcacttttaaaagttagtactattaactcgtggagtaaagctcttattcgacagcaagttaaatttactttgttttt

SEQ ID NO: 930240 - DNA, 660 bp, Homo sapiens
caggctggtctcaaactcctgacctcagacctcaggtgatccacctgcctcgggcccccaaaatactgggattacaggtgtgagccaccgcacccagcccaggccaatatctttgatgaacttgatgcaaaaatcctcaacaaaatacttgcaaacaaaatacagcagcacatcaaaaaactaatccaccaccatcaggtaggctttaccctttggatgcaaggttggttcaacatatgcaaaycaataaacataatccatcacataaacaggactaaagacaaaaaccaaatgattatctcaatagatgcagaaaaggctttcaataaacttcaacatccttcgtgttaaaaactctcaataaactagatattgaaggaacatatctcaaaataataagaaccttctatgacaaacccacagccaacatcataccattcaggcaaaagcaggaaacattttccttgaaaactggcacaagacaaggatgtcctctctcaccatctctattcaacatagtattggaagtcttggccacagcaatcaggtaagagaaacaaataaaggtcatccaaataggaagacaggaagccaaactatccctgtttgcagacggcatgattctatatctagagaaccccacagtcttggtccaaaagc

SEQ ID NO: 930241 - DNA, 710 bp, Homo sapiens
tcgtgcagaaccatctgtgaaccaggccctagtcttcccttcctctgtcaactgatcatagggaactcaccatgaggccatctgtgcaagctgggggagagaaggcagggtggcaggagtggaaattaagggcatttgagtcacttcctcatgtaactttcttgtgccttcaggacctgctcgagcccratcacatatgtacaacttccacttgatgatggaatgctgctgtgtatgacccactttatggctaatgggtcaaaaagaacccagttcatgataggcagttcaggtcacatggtgacttgacccacagtcaaacattcagtttccaccaaagcccagtaacatgccaagagctgtctctcagaagtagagtagttatctgcagaagatggtagggactttccaaaatcctagaggcctctgctgtgattcacttatgggggccagccaaaggctccaaacagcatccctatctgtaacagatatcttaagcctcattggatctgctggatcatatggcccaagtggcagagcagcttgcacagcagcctggacctgttgcagagccttctcctgttctggacaccactcaaaactggcagcctttcaggtcacttaataaatgggctggagtaacacacccaagtgaggaatgtgttgcctccgaaatccaaataggcccactaggtgttgtgcctctttct

SEQ ID NO: 930242 - DNA, 642 bp, Homo sapiens
ggagtcaccacttcgttaagcttacaataacccagtgtcattctccaagatctgtctgtcttctgcacaggccagatgggagagttgaatggggatatggtgggaatcaccacctatgcatccttcaagtccttcatggtggcactaatctctgcaatccctgcagggatgtgatactgtttttgatttagtatttttctaggtagaggcagctctaatggcttccatttggcctttcccaccatagtagccctcaccctaccagtcagagagtcaatgtgggcrttctgccagcttctaagtatgtctatgccaattatgcattctggcactgaggaaatgaccacagatgattctggggaccaactggacacactgtaagtcaacgtgagctaaaactccgttaattacctgacctccataagccactacttcaactggagtaccacagtgatgtttttttttccctggaatcaatgtcagctcagagccagtgtccagtagttcccaaaatgtctgatcattttcctttccccaattcacagttaccctctacattgctgaaggtacaaagctgaaggtctctttagggaaggatgggagaaatattcacagcctagattgttggtactgaagtggggt

SEQ ID NO: 930243 - DNA, 642 bp, Homo sapiens
ggagtcaccacttcgttaagcttacaataacccagtgtcattctccaagatctgtctgtcttctgcacaggccagatgggagagttgaatggggatatggtgggaatcaccacctatgcatccttcaagtccttcatggtggcactaatctctgcaatccctgcagggatgtgatactgtttttgatttagtatttttctaggtagaggcagctctaatggcttccatttggcctttcccaccatagtagccctcaccctaccagtcagagagtcaatgtgggcgttctgccagcttctaagtatgtctatgccaattatgcattctggcactgaggaaatgaccacagatgattctggggaccaactggacacactgtaagtcaacgtgagctaaaactccgttaattacctgacctccataagccactacttcaactggartaccacagtgatgtttttttttccctggaatcaatgtcagctcagagccagtgtccagtagttcccaaaatgtctgatcattttcctttccccaattcacagttaccctctacattgctgaaggtacaaagctgaaggtctctttagggaaggatgggagaaatattcacagcctagattgttggtactgaagtggggt

SEQ ID NO: 930244 - DNA, 591 bp, Homo sapiens
atttctgctggttattcagcacccaagggttcttgagtcagcaggtgctttagtccattctcacaccattatagagaactacctgaggctgggtaatttatgaagaaaagatgtttaattgactcacagttccacaggctgaacaagaaatatggctgggaggcctcaggaaacttataatcatggcagaaggcttagggaaagaagcacgtcttaccatggcagagtaggagagagaaagtgagggagaagtgctacatacctttaaacaaccagatctcacaagaactcactatcacaagaacagcaaggaagaaatatgcccccatgatccaatcacctcccactaggtccctcccccaacattgggaattacaatcctacatgtgatttgggtgagacatagagccatatcattcatcacagrtaatgaattctgccaggaatggtccttcccttcaaggaagcagttcccttttagcccagggtgtgtctgggaatgttgttcaagacctagggcctcatgactctgtttgctgccccatcctaccatgtctgagctggttcctaagatgcaagactttgttactt

SEQ ID NO: 930245 - DNA, 742 bp, Homo sapiens
ggttgttagttgaactcattttgggttccatttgtaagaccatctgtagcttgatggccttgatgctagaggaaacaaatttgacaaggaggttaaaaatacagggcccaaaggggtaatagcaagatggctgtcacaggacctagaaaggggagaagccatgtcacccaactccagaggttggtataagagtttgaaaggtgttgtctgatttcagaagccttttcctgtaaatgccgggtggcatcttgtactatccctgactggttagtgtaaaaacaacattcttcccctaagaaggtacagaatcctcctttctcagcagtgaggacgtctaggcctcagcagttttggagagtcactgctgccaaagagtctatttgggattgtagaggaaggatagattttgttatttcttgcaamctgtctgagaaatcctttgagaatgtgtggtagtaggataatacatgttacactgttaacttttagcaaactttacttttgttggaaaccttgtaagtttgggatttcaattattcgttgctattaataagacctcattcagtccatattaacttagaattcatatagatggcttcttcctgattctgtaagtactttaaggtttggctgagtgcaaagagctcgcacatttgagcagaccaattattaggttattttcctaactctgcttctacaagagtttccttaccatttactgaatactcactgcgttttttcc

SEQ ID NO: 930246 - DNA, 734 bp, Homo sapiens
atgttacactgttaacttttagcaaactttacttttgttggaaaccttgtaagtttgggatttcaattattcgttgctattaataagacctcattcagtccatattaacttagaattcatatagatggcttcttcctgattctgtaagtactttaaggtttggctgagtgcaaagagctcgcacatttgagcagaccaattattaggytattttcctaactctgcttctacaagagtttccttaccatttactgaatactcactgcgttttttccccttaatctccttggaggaaacatctgtcctcctgtcctgaagggagttcctccttggtctggtcagacctttgtatggtaattaattaagatttagatcccctgttaggacacctgctggattaaggtttttaataggaaggctatgggttgtcagtggcctcagtgctttcaggctatgcccttgtttacactgacaacaaggtggtattggagtgttatggggtcatggagaagaccttcaattatcaattataggttttaattaccctggcttttaaaggaatagggtacactgtttttttctttactacttccatctctctttctttttctttgacttcttctttgtctctctctttctgactccctctttgtctcttcctctctctctttgactttgtctctctctttgactccttctttctctctttctgtctctttctctttcctttctgt

SEQ ID NO: 930247 - DNA, 546 bp, Homo sapiens
accagcttggccaacacagtgaaaccctgtctctactaaaaatacaaaaaaaaaaaaaaaaaaaaaaaattagctgggcatggtagtgtgcacctgtaatcccagctactcaggaggctgaggcaagagaatcacttgaacctgggaggtgcaggtggcagtgagtcgagattgtgctactgcactccagcctgggtgacagagctagactctgtctccaaaaaaaaaaaaaaaaaagcgttgtaagagaaatatgtgttatgggagattgggagatattgttgtacctattttcattatcattattttggcaaatacgtctgccacaaacttgaacagattcttcwctaaagaagatatatagaggaataagcacacacacacacacacacacacacacacaaaggtgtttggcattattcttaagcagggaaatgcatcatttcacaagcataccatttcatagccatttcacatagttaaaattaaaaagactgataacaccacactaaatgctagcaaggatgtggagcaaatgaaattcta

SEQ ID NO: 930248 - DNA, 597 bp, Homo sapiens
gtggctcatgcctgtaatcccagcactttgggaggccgaggcgggcagatcacctgaggttgggagtttgcgaccagcctgaccaacatgaagaaaccccgtctctactaaaaaatacaaaattagcctggcgtggtggcatatgcctgtaatcccagctactgggaggctgaggcaggagaatcacttgaacccgggaggcggaggttgccatgagcagagactgcgccattacactccagcctgggcaacaagagtgaaactccgtttyaaaaaaaaaaaaaaaaaacttataactctcccttctgttccactaatcactttgtctgtttttcatgcttgcatgattaatacagacttacagaaagtattgaaatcaggtagtgaagttcttccaatttggtccttagttttaaaaattgttttgcttattcaagatcctttgcttttccatactaacttaaaatcaactgttaaatttttacaaaacagcctattagaatattgattggtgttaagttaaatctatagatcaagcatggaactcttaccttaataatagttttccaatctccaaccatagttcctctctccatt

SEQ ID NO: 930249 - DNA, 777 bp, Homo sapiens
cctgaaggaaaatcatcaacttccaatggaggcaccaacttctctggacagtagcagaggccttctggacatctgaccagcagcacagcatgctggagcactcagcgaggtgtaggaaggtgacttggctggggtggaccacaatcaatttggaaagccacagccctcagacatttacgataaagcaggagtgatttgagaacctctttcctagctactcatcttcccaaggcagctctatcaccacagtcacacccagccagggagataaaaggctgacgcttgctatctgctcctacacaaatgagctacatgggcatccttcatatgggctgttcttctcctggtccagtatagaaaacaaagttagtgactggggagagggccgaccatcctgtaggggcaaatgcattccccttaccgtttgtggcctagtgctccgtccagctttcttacaaagtaagcatagttgggattgggtttttgtgctatgcagcttcatctactttggcaaataacaccttgaggcttatttgcaaggatctttcccaagtcacaaaggatagcagcacagtgcagtggttagaaatgcaygttttttattattccttttacacaagttcaactcccagttctgttgcttcttacttgggaccatagaaaaagcatctaagctttctacacatcggtatctttgtttacatatggtgataataataaaacctgcttcatagaggagatgctctgtggaattgcccagtatagggcttagcataa

SEQ ID NO: 930250 - DNA, 703 bp, Homo sapiens
tttttcctttctaggttttagtttttcaattgaataaggagagtaagttgaatccatggtttgtaaaccatgttttgtggaatcctgggttttcttggagatatttccaggacggtgggtatttccaggggtgatgaaatgcagtcttttccccatatgactcaattttttacttaatgtgtatatttggagttctagtaatgtcttawtacttgatgtttcattaatttttgtttaaaccactaaattctgatgacccctaagggccaatcatgcttctactttctctagcatgataagttgaccaacatacgtatgttttttcaaatgtaggataaaatgaagaactgacaaaatactcaattttagaggaaatcaaattaagtcagttgtatcataaaatagcacagaagtaagctcaaatagaagctctgccttcaactgcctttgggtaaatcatttgaatttttgagctttaagttactcattgtaagatgtagaagaaagtgctcaccttgcagattacgattgaagttagtgctgtacagtgtcaagcatagaggcagcaaatttgcacaactgctggttttcactcccacacccactgcccaccaattaatgccagattttcttcccaccctagatgtggctctggaatccttcccacactgggcagtaggcaaccactactataagaggaaat

SEQ ID NO: 930251 - DNA, 609 bp, Homo sapiens
gggagaaccactactgtcttcaaagctgtcagaacgggacatttaagtctgcagaggtcattgctgtcttttgtttgtctgtgccctgcccccagaggtggagcctacagaggcaggcaggcctccttgagctgtggtgggttccttccagttcgagcttccyggctgctttgtttacctactcaagcctgagcaatggcaggcgcccctcccccagcctcgctgccaccttgcagtttgatctcagatggctgtgctagcaatgagcgaggctctgtgggcgtaggaccctctgagccaggtgcaggatataatctcctggtgtgccatttgtgaagcccgttggaaaagcgcagtattagggtgggagtgacccgattttccaggtgccgtctgtcacccctttgtttgactaggaaagggaattccctgagcccttgcacttcccaggtgacgcggtgtctcgccctgcttcagctcacgcacggtacactgcacccactgtccggcactcccctgtgagatgaacctcgtacctcagttggaaatgcagaaatcacccatcttatgcgttgctcaagctgggagctgtagactggagctgttcct

SEQ ID NO: 930252 - DNA, 562 bp, Homo sapiens
tgctggcacccatccatctccccagcatccatttctcttcatgggagcaccccagatttcacagctttgtgagttgaaaccctgttcttgctgagtctccactcccagggtaggtccgacaataagagaaatatttcactcagtggatcgttaactcaaggatgggcatatcacytaactcagggtagacagcaccaaggaaagtcaatttgggggacttctgacttcttccttcctactgaacatgaaggtctatatgtgattttcactattggaaaaagcctactgcaaactataaatctaaccaatagtatatttagccaaaatgtcatttctttttgcctaaaactggtatgtatggttattgaatacaagaagctctgatgggttgctgccaacagaacagaaatttttcttttcttttttttttttttttttgagacagagtcttgctatgttgtccaggctggagtgcagtggtgtgatcttggctcactataatctctgcctcccacactcaagccatactcccccctcagcctactgagtagctgggactaca

SEQ ID NO: 930253 - DNA, 704 bp, Homo sapiens
ctgaaaaaaaaaaaaaagaaaaaagccaggtgcagtggctcatgcctgtaatcccaacacttcaggaggctgaggtgggcagatcccttaagtctaggagtttgagaccagtctgggcaacatggcgaaactctgtttctgtaaaaattagtcaggcatagtggtacatgcctgtagtcccagctacttgagaggctgaggtgggagggttgattgagcccggaaggtcgaggctgcattgagccrtgatcgagccactgccctccagccaaggaaacagagtgagaccctgtctcaataaataaataaataaataaataaataaataaataaataaataaataagaattttagaaaaagaaagtggtaattacactaaagactagaactaggttttgttaacattttataagctatgctttaacattctatttaaagttcattttagcctttgtgggcacacaaaatccatccagttgaagttttcacgtgaaacagagattcccaagtgaggattctgaaagctagtctgaggccaggtttatactcaacccatgagtctcttctatagatctcaatttgtcactgaaaatggtgttggaggtttttggggagacataaatccaggctggctctgtaactacccaaatatgttactaataaatacagaaagatcatcaggacatagaacactggctgctctt

SEQ ID NO: 930254 - DNA, 607 bp, Homo sapiens
cccctagaagaacacggggacccaggaatgacatgcactgaatgtgacttgaggaaaagagaaggcaaggcaatggtctggacaatcttgggatgtgcccatcctgtctgctcagggaagggcagagatgggaggacctcaaaggccttgaggagcagcccttgcaggccacagctctaggagctctcagcaacaggattctgcaggacagagcagtcagcaccctcctctcaccgccacactgccttccctgtctcacttgctcctggagaacaactcctcaccgaggatctatgtgggggtgaaactgcagccttaacccaaaccctgcaaacaagcatgagaagtctttccatttactactaattgccattctgaataccagccctctgccctatgggcagttactgaacagcctgcccctttctttgcccttgtggtaggactgggttgtcttgttttctccccgtrtccactaaccccagccagaatcttgattctcagattgtgcccacttgccttactttccacatgggcctctaggccacaggaagtctggctcctcacctttgtacacaggagggcgaacagataattgccccgttgc

SEQ ID NO: 930255 - DNA, 621 bp, Homo sapiens
aaacaacttcagcaaagtttcaagaaataaaatcaatgtacaaaactcactagaattcccatacaccaacaacagtcaagccgagagccaaatcaggaaggcaatcccactcacagttgccacaaaaagaataaaatacctaggaatacagataaccagggagattaaaggtctmtacagtgacaactacaaaacactgtacaaacaaacagagataatgcaaacaaatggaaaaacattccatgatcatgaatagtaagaataaatattattaaaatggccatactgcccccggagcaatttacagattcaatactatcctatcaaactaccagtgacattcttcacataactagaaaattctatttcaaaatttatatggaaccaaaaaagagccaaaatagccaaggcaaacctaagcaaaaagaaaaaagcaacctaacaaaaagaacaatttgctaccaaatttcaaactatactacggggctacagtcaccaaaatagcatgatattgtacaaaacctgacatatataccaatgaaagagaatagatagtaaacagacaacctacagaataggagaacatttttgcaaactatatctgacaaagatctaatatct

SEQ ID NO: 930256 - DNA, 621 bp, Homo sapiens
aaacaacttcagcaaagtttcaagaaataaaatcaatgtacaaaactcactagaattcccatacaccaacaacagtcaagccgagagccaaatcaggaaggcaatcccactcacagttgccacaaaaagaataaaatacctaggaatacagataaccagggagattaaaggtctctacagtgacaactacaaaacactgtacaaacaaacagagataatgcaaacaaatggaaaaacattccatgatcatgaatagtaagaataaatattattaaaatggccatactgcccccggagcaatttacagattcaatactatcctatcaaactaccagtgacattcttcacataactagaaaattctatttcaaaatttatatggaaccaaaaaagagccaaaatagccaaggcaaacckaagcaaaaagaaaaaagcaacctaacaaaaagaacaatttgctaccaaatttcaaactatactacggggctacagtcaccaaaatagcatgatattgtacaaaacctgacatatataccaatgaaagagaatagatagtaaacagacaacctacagaataggagaacatttttgcaaactatatctgacaaagatctaatatct

SEQ ID NO: 930257 - DNA, 644 bp, Homo sapiens
aaatgattgtgaaatagagatgctgcagatacaagatacagccatgcaaaaagattaaaactaacatttgtattgcataagattacgcaaaagctttgttaacctgatatttttaatgcacattaaataattagaatctttttctgtcmgttagctcctatttaattattttaacagactacagagtctcattgatctgtaaggctacatcaccattttatttaaaaaataaagatattgaggcaaaattaattttagttttgtgaaatgtatatgctgggggaattataattaaaaataaaataaaacttgtgattgcatgtccattatatcacattttatctcgattttgagagaaagataaaagtaatgggaatatcactattaataataataataccaagaatagttattaatattattattgttggccagatgtggtggctcacgcctataatcccagcactttgggaggccaaggtgggcggatcacctgaggtcaggagttcaagaccagcctagccaacatggtgaaaccccctctctactaaaaatacaaaaattagctcggtgtggtggtgggcgcctgtaatggcagctactcaggaggctgaggcaggagaatcgcttgaacccgggaggtg

SEQ ID NO: 930258 - DNA, 644 bp, Homo sapiens
aaatgattgtgaaatagagatgctgcagatacaagatacagccatgcaaaaagattaaaactaacatttgtattgcataagattacgcaaaagctttgttaacctgatatttttaatgcacattaaataattagaatctttttctgtccgttagctcctatttaattattttaacagactacagagtctcattgatctgtaaggctacatcaccattttatttaaaaaataaagatattgaggcaaaattaattttagttttgtgaaatgtatatgctgggggaattataattaaaaataaaataaaacttgtgattgcatgtccattatatcacattttatctcgattttgagagaaagataaaagtaatgggaatatcactattaataataataataccaagaatagttattaatattattattgttggccagatgtggtggctcaygcctataatcccagcactttgggaggccaaggtgggcggatcacctgaggtcaggagttcaagaccagcctagccaacatggtgaaaccccctctctactaaaaatacaaaaattagctcggtgtggtggtgggcgcctgtaatggcagctactcaggaggctgaggcaggagaatcgcttgaacccgggaggtg

SEQ ID NO: 930259 - DNA, 574 bp, Homo sapiens
cagggcttagcagaggaagacattatattgctaggacattgctaggttttactttaagtttactttaaattctaagatacaaagaaggctttaacttaaaaatggaagataaatatttcacaaatatgttcttatatctcataatttgaaagattaatctctgaagaaactatggagaatactgatcatcatcatcgtaagaaatattcctggcaattcttaaaacacagttgtattcccccagtttaagtagtattatgctggaaagaggagctggactttcaacgtaaatatttgtattttactgtgtaaaataggatatattggttggtctctctgagcatcaacttcttcatctattcaaaagtccaaaatcaaatccattttacaaatattgtgagtgagcaaraaataataatgcagatttaagtgcctagctcaaggatggacctctagcagatattaacaaccgatggattatatttaaatcaatagagatatattattacattttcttcaaaatcccagataactttcttgacaattgtcataaccttgtaaaaggcttaagatg

SEQ ID NO: 930260 - DNA, 628 bp, Homo sapiens
aatccttttaacatgctgctgaattcacgttgctagtactcttttgaggattttcacatcaacattcacaagaatattagtctgtagttttcttttcttataatgtctttacctggcattgatatcaggggaatgttggcctcatataaagaaatagaacgtgttcccttcttttcaactttctggaaaagtttgagaataatcattattagttctcttttaagtgtgtggtggaattcaccagcaaagaaatcaagtccaggcttttcttttgttgggaaatttcaattactgattacattactgatggttaytttttagagatgagtcttgctctgtcacccagtctagagtgcagtggttactacaataacagcttactgcagcatcaaactcctgggctccagagattcttttgcatcagccttttgagtagctggaactacaggtgctgccacacccagctattttttattttttaatattttagacatggggttctccctatattgctcagtctggtctcaaactcctggcctcaaactgtcctgccaccctagtctcctgagtatccgtgattacaggcacttgccatcactcccctgattcaatctttttctgagttata

SEQ ID NO: 930261 - DNA, 695 bp, Homo sapiens
gaggatgtggagaaataggaacacttttacactgctggtggtactttaaactagttcaaccattgtggaagtcagcgtggcgattcctcagggatctagaactagaaataccatttgacccagccatccctctactgggtatatacccaaaggattataaatcatgctgctataaagacgcatgtacacgtatgtttattgcggcactattcacaatagcaaagacttggaaccaacccaaatgtccaacaatgatagactggattaagataatgtggcacatatacaccatggaatactatgcagccataaaacaggatgagttcatgtcctttgtagggacatggataaagctggaaaccatcattctgagcaaactatygcaaggacagaaaaccaaacaccacatgttctcactcataggtgggaattgaacaatgagaacacttggacaccagaaggtgaacatcacacactggggcctgtcatggggtggggggaggggggagggatagcattaggagatatacctaatgtaagtgacgagttaatgggtgcagcacaccaacatggcacatgtatacatatgtaacaaacctgcacattgtgcacacatagcctagaacttaaaatataattataaaaaaaaagataaatgcttgagatattttgcagaccctgtacttcatggatca

SEQ ID NO: 930262 - DNA, 695 bp, Homo sapiens
gaggatgtggagaaataggaacacttttacactgctggtggtactttaaactagttcaaccattgtggaagtcagcgtggcgattcctcagggatctagaactagaaataccatttgacccagccatccctctactgggtatatacccaaaggattataaatcatgctgctataaagacgcatgtacacgtatgtttattgcggcactattcacaatagcaaagacttggaaccaacccaaatgtccaacaatgatagactggattaagataatgtggcacatatacaccatggaatactatgcagccataaaacaggatgagttcatgtcctttgtagggacatggataaagctggaaaccatcattctgagcaaactattgcaaggacagaaaaccaaacaccacatgttctcactcataggtgggaattgaacaatgagaacacttgracaccagaaggtgaacatcacacactggggcctgtcatggggtggggggaggggggagggatagcattaggagatatacctaatgtaagtgacgagttaatgggtgcagcacaccaacatggcacatgtatacatatgtaacaaacctgcacattgtgcacacatagcctagaacttaaaatataattataaaaaaaaagataaatgcttgagatattttgcagaccctgtacttcatggatca

SEQ ID NO: 930263 - DNA, 541 bp, Homo sapiens
atgtctttttcagcagtgtgaaaatgaactaatatagtaaattggtaccagtagagtggggtgttactgaaaagatatacaaaaatgtggaagtgactttggaactgggttacaggcagaggttggaacagtttggagggctcagaagacaacaagatgtgggaaggtttggaatctcctagaggcttgttgartggttttgacagaaatgctgataattatatgaacaataaggttcaggctgaggtggtctcagatggagatgaggaacttgttgggaactgcagcaaaggtgactcttgttgtgttttagcaaagagactggtggcattttgcccctgccttagagacttgtgaaactttgaacttgggagagatgatttagggtatctggcggaagaaatttctagcagcaaagcattcaaaagatgacttgggtgctgttaaaaacattccattttaaaagggaaatagagcttaaaagttcaggaaatttgcagcctgatgatgtagtaaagaaaaacccatgttttgaggagaa

SEQ ID NO: 930264 - DNA, 579 bp, Homo sapiens
ttgtgtattcttcatgaagttcttgtgctgtgtttttaagctccagccggtcatttatgttcttctgtaaactggttattctagttagcaattcgtctaaccttttttcgaggttcttagcttccttgcattgggttagaacaygcttctttagctaggaggagtttgttattacccaccttctgaagcctacttctgtcaatttgtcaaactcattctccatgcagttttgttccgttgctgatgaggagttgtgatcctttggaggagaagaggtgttctggtttttggaattttcagcctttttgtgctggtttctccacatctttgtggatttatctaccattggtctttgatgttggtgaccttcggatggggtctttgagtcgacatgctatccctttctgtttgttagttttccttctaacagtcaggcccctctgctgcaggtctgctagagtttgctggaggtcctctccagaccctgtttgcctgggtatcaccagtggaggctgcagaacagcaaagattgctgcctgttctttcctctggaagctttgtcccagaggggcacctgcc

SEQ ID NO: 930265 - DNA, 657 bp, Homo sapiens
gcacactggattgggtggcagatgttcccagagcccggctctttggaaggagcagaacatctcttccaccagaaagcttcccaactccaaggcaatgggtagagagccatttcctggaaacaataatcttagcctggtrgcgtggggagccactgtgctctgtcagcccacaccctccttgtgtgttccctccctgaatgccagccggccctgtgcttcggaggccagcacttcctgccagagcatctagaatccagcctatttggcctgtgtcttccagtttggctgactggctcggctctgtcctcagcactgctgttctctccaactgagttcttcagcatgctggacagcctgtctttctttccaaccttccacctgctgctctggcctgctgtctccccagcctgtcctctgtggagctgcccctcctgtggctgtggccctaggagagctcagtcaagttacttacctgcactggtctcagtttccttcccaaaaaacaaaacaaaaacaaaaaaacaaaatttaaggagagtcagactagattttttttgagacggagtctcgctctgtcgcccaggctggagtgcagtggcgctatattggttcactgcaagctccacctcccaggttcacacctttctcctgcctcag

SEQ ID NO: 930266 - DNA, 657 bp, Homo sapiens
gcacactggattgggtggcagatgttcccagagcccggctctttggaaggagcagaacatctcttccaccagaaagcttcccaactccaaggcaatgggtagagagccatttcctggaaacaataatcttagcctggtggcgtggggagccactgtgctctgtcagcccacaccctccttgtgtgttccctccctgaatgccagccggccctgtgcttcrgaggccagcacttcctgccagagcatctagaatccagcctatttggcctgtgtcttccagtttggctgactggctcggctctgtcctcagcactgctgttctctccaactgagttcttcagcatgctggacagcctgtctttctttccaaccttccacctgctgctctggcctgctgtctccccagcctgtcctctgtggagctgcccctcctgtggctgtggccctaggagagctcagtcaagttacttacctgcactggtctcagtttccttcccaaaaaacaaaacaaaaacaaaaaaacaaaatttaaggagagtcagactagattttttttgagacggagtctcgctctgtcgcccaggctggagtgcagtggcgctatattggttcactgcaagctccacctcccaggttcacacctttctcctgcctcag

SEQ ID NO: 930267 - DNA, 556 bp, Homo sapiens
tgtggtcccagctactcgggaggctgaggcagaagaatcgcttgaacctgggaggcaaaggttgcagtaagccgagatcatgccactgcactctagcctggcaacagagggaaactccatcttaaaaacaacaacaacaacaaaaagacaaagctttatatgtggaaaaaataataccttaatgattagcaatacacatataagagagaattgttcagratttaaaactgtaagcaaaaagatagttttttaaatttatatattgatagagaatgctatttactctgtttttgctaaaatctttgaagaacatcactggagttattgtctcctgagagaatgtttaccaccatcaactacctcaacctgtaattcttaaagaacaataataaattcaggaggcccagtcttccctgaccctgttggtactcaaggagacaatggcttcagaattcctccatgggttttgcatttcaggctcaagctaccttcttgatgaaaaattctggacgtgttctgaaaatcacagtcatccctaacttcagtggaaaagatt

SEQ ID NO: 930268 - DNA, 497 bp, Homo sapiens
gctccctttatcacttcctggggagaacctgcctaagaatgaagccacgtagagataaatagaacccaatgatagaggcagatttcttcttaaataacgtttattgaagtgtaacttatattcactaaaatgtacccatgttaagtacacagtttgatcaattttgacacatacatacagtcaagaccaccatgacaatcaagagatagaargttttcattacctgagaaggttgtttcacatacctgtttgcagtcaattacccccaccccagccccaagcagccaccgtctaccttttcagaatctcatataaatagaatcatacaatatacactttttagtgcttggcttctttcagtatacattctttttttttttttttttttttgtttttgagacagagcttcactctagtcacccaggccagagtgcagtggcgtggtctcggctcactacaacctccgcctcctgggttcaagtgattctactgtctaa

SEQ ID NO: 930269 - DNA, 497 bp, Homo sapiens
gctccctttatcacttcctggggagaacctgcctaagaatgaagccacgtagagataaatagaacccaatgatagaggcagatttcttcttaaataacgtttattgaagtgtaacttatattcactaaaatgtacccatgttaagtacacagtttgatcaattttgacacatacatacagtcaagaccaccatgacaatcaagagatagaaggttttcattacctgagaaggttgtttcacatacctgtttgcagtcaattamccccaccccagccccaagcagccaccgtctaccttttcagaatctcatataaatagaatcatacaatatacactttttagtgcttggcttctttcagtatacattctttttttttttttttttttttgtttttgagacagagcttcactctagtcacccaggccagagtgcagtggcgtggtctcggctcactacaacctccgcctcctgggttcaagtgattctactgtctaa

SEQ ID NO: 930270 - DNA, 664 bp, Homo sapiens
ctggaagctggactacaatgtcacgtcctcagggtctaaatcactcaatacaaacagattgcaggtttacttcaagcagatcagtttgatttagtcacattcctataattccaggcttctcatcaccttgcctaataaaaagagtgaaaaaaattcaattttttcatttttatttcatacatatccatatatatgaaataaaattttatacatatccatatatgcaataaaagttcacatatatcatacatatccatatatgtccatatatakgaaataaaaaattacccaaatgtaaaattatccatatataaaaattacttccactggtttccctattactttttctgcttcataaacccccacagcagaacaagctgggacagcctaaggacctctagagcattcataaaaaaatcaggacgaattcatttcacaattccgagggcaccaatcacaccatattctgtagtgcagtcccatgtcaactccttccagttgaaagcaaaacaaatgacgcttgttaaagagcaagctgaatcccttatgcttcttctaggtgaagatatcaccttcatagccaaagtcaaggctgaagatcttctgagaaaacccactatcaaatggttcaaaggaaaatggatggacctggccagcaaagccg

SEQ ID NO: 930271 - DNA, 827 bp, Homo sapiens
aatccaatcaagttgacacctaatattaaccatcacggaggtaaagtgccattttcaccacatcatatcagagggtatgctgatagcatcaacataacatcactgttgataatgactttgatcctggctrtgatagtatttgccagttttctccattgtaaagttactagattttgccctttccatagtgtattctttggaaggaagtcactgtgtgcagcacaaaccaaggtagtggagagttatgtgcccccttcttgagggcagagtatctatgtaaattatttggaattcttctgcatttattaatagagagtttatttatatcagtatgaattcatggatatttattttacactttgggtcataatccagtaaaaatctctttatttcttttttcaaattatacatcttggccattagaaactttcagttggcttctctgtcttttcgacatacccctattagtataggttttggttttttttaatcactgtttttttcttacctctggcattacaaattcctggttcctttttatcagagaaggtattagaaatcaagatttgggtgtcgggtgttctgcattgaattttcataagctccagctagcatcctcatgaaaatagttgcaggtccaagtgcagaaagcataaaagaaagcagagctgtcttaatagaaatcaggcaaggagcctaaaataaatgtcataagcctatctactcttttccattgttgtttggttggtgttagtggtggagctttgtggacagaagcttgtgtcctttttaccccaaatcaagagttccatgccaaagaccagagg

SEQ ID NO: 930272 - DNA, 621 bp, Homo sapiens
atatactttagagtaaaggtgtgttcaagtgagattaagtcagcagataatctagacagtgacaaataaaacaaaacattttctccagctatgctgacaatggattggagggaataatctaaaatgtgcatgatgaatttgtggtctaatgaatgacaatggaggtgtggtgggaagagctcagactttacagcgagacaaatctgattctgaactctagccccaatgattgtcagctttcagcaacttgcttagattatctgagactcataatctttgcctgtaaaatgaggattatgtcatctctgagatactgttgtgatgatctttaaacagttatgtgaaagttttaatataatatctgatatttgacatgcaagaagttgcaactatcattctggaagcatttataagatacactaaagagcagtttagacatttctggatgtcwtttaaaataatttctttcttctaatatggctaagatataatttcacttgaaaaaagatgatatcctcctagaaactcttcaaaatcttgattcaatgattccaaaaagaatattatttattcatttgagaaaaccatttgccacactgctacatactttcagatgtgaaa

SEQ ID NO: 930273 - DNA, 599 bp, Homo sapiens
caattcactcctctgctacctctactggagcaggtgctagtatccatggctgagagacatgaagacagatcacatcacaggactctttgcagacactccccagtaccagccgagagcctggtagctctactggctggtgaaactcagcagagaaataacaatcactgcagtttggctctcaggaagcccyattcctaggggaaggggagagcaccacatgaagggagcaacccatggaacaaaataatctgaacagtagcctttaagccccaaatcttccctctcacataggtctacccaagtgagaaggaaccagaaaaacaattctggtaatacgacgaaactaggttctttaacatccctgaaagaccacatagctcaccagcaatggatccaaaccaagaagtaatctctgaattgccagaaaaagaattcagaaggttgattattaaactgctgaaaggtgaatatcaacttaaattaaaaaatgttacaggatatggatggaaaaatctccagagaaatagatagcataaataaaaatcaaacacaacttctggaaatgaaggacacacttagagaaatgcaatatacactgg

SEQ ID NO: 930274 - DNA, 708 bp, Homo sapiens
acacagcacttttgcccccaggtccgttgcacttgccatctgtttgctctggttgctgcctctgccttttgcaggtatctgtacaattccagtttctcggtggtcccttgatatgtccattctccactgcccacagactacgatgctcctgaattcccttagaccatctagttccacagagttcccacagccaagcatttctaagatttgtataaatttaaggggtatgagtgcaattttgttacatggctaggttgtacagtggagaagtctgggcttttagtgtgtcygtcactggaataatgtacattgtacccacgaaataatttcttatcacccacccttctttcaccctcccacccttctgaggatccagtgcttgtcattctatactctatgtccatgtgtacacattatttagctcccacttaaaagtgagaatatgtggtatttgactttctgtttatgagttgtttcatttaaagtgttggcctccagttccatccatgttactgaaaaagacatggtttcatttttttaatggctgaatagtattccattgtgtacatataccacattttccttattcaatcatccattgatggacatttaggttgatttcatatctttgctattgtgaatagtgctgtgataaacatatgagtgcaggtatctttttgatataataatttgttttcctttgggtag

SEQ ID NO: 930275 - DNA, 559 bp, Homo sapiens
cactaacagtatatcagcattccctgttctccctatccatgacaacatctgttgtcttttgactttttagtaatagccattctgactggtataagatgatacctcattgtggttttaatttgcatttctctgatgatttgtgattttcaacattttttcatatgtgtgctagccatttgtatgtcttcttttgataaatgtctgttcacatcccttacccactttttaatggagttgttgtttttgttgttgttgctgagttatctgagttccttgtaaattctggatgttagtccccgttggttgcatactttgcaaatactttctcctattctgtaggttgtctgttcactcttttgattatttcttttactgtacagaggctttttagtttaattaagtcccatttrttatttttgtttttgttgcttgtgcttttgaggttttagtcatgaattatttcctagaacatccagaagaaatttccctacattttcctttagtatttttatagtttcaggttttacattcaagtctttcatccatcttgagttgattt

SEQ ID NO: 930276 - DNA, 596 bp, Homo sapiens
gcttttggggtgagattatggggttttctagatatagaattatgtcatctgtgaacagagatagtttgacttcctcccttcctatttggatgccctttgtttctttctcttgcctgattgccctgactaggacttctaatactatgttgaacagaagtggtgagagggcatccttgtcttgtgccagctttcaaggggaatgtttccagcttttgcccattcaatataatgtcggctataggtttgcgatagayaacttatattttgaggtatgctcctttactaccaagttattgagagtatttaacatagggggatgttgaattttatcaaaagctttttctgcatctattgagataatcatgtagtttttgtctttagttctgtttatgattaatcacatttattgatttgcatatgttgaatcaaccttccatcccagggatgaagcctacttgatcatggtggattagctttttgttgtgctgctagattcagtttgcaagtattttgttgaggattttgcactgatgttcatcaaggatattggcgtgaagtctctgccaggttttgtatcaagatgatgctggccttat

SEQ ID NO: 930277 - DNA, 755 bp, Homo sapiens
gctgaggcacaagaatcgcttgaacccaggaggcagaggttgtagcgagctgagatcatgccactgcactctccagcctaggcgaaagagcaagattctgtctcaaagaataaacaaacaaccaaccaattgcacaaacagatatatttttaggcagctatttgtgtgggaaaaggtcttcagtttgtgattgacaataggtttggtgtgagctaatagtctgaagtagctgctaactcaatcttaggttttcyttcatgaagcacagggacagtttataaagtaacaggttcctttaatggtcacctatatctgaagtattattctgttagaaacgacaggttgggccaaagaggatggcaagatgcctgtaaatcatatcttacaggctgggcgcggtggctcatgcctgtaatcccagcactttgggaggccgaggcgggtggatcacgagatcaggagatcgagaccatcctggctaacacggtgaaaccccatctctactaaaaaatacaaaaaaattagccgggcgtggtggtgggcgcctgtagtcccagctactcgggagtctgaggcaggagaatggcatgaacctgggaggcagagcttgcagtgaaccgagatcgcgccactgtactccagcctgggcgacagagccagactccgtctcaaaaaaaaaaaagaatcatattttacaggtatgaaggacatggagccaaaatgtggtatgaagtcagaacagtcagccagtgaag

SEQ ID NO: 930278 - DNA, 601 bp, Homo sapiens
cccagggagagagggagaccctgtcttaaaaaaaataaaaatggttcccacactagagggagatggctgactagacacagccagcaagaacatatgccatggaaggactaagaaggactattcagtattattaaaaaaaaacgctggtgcagtctgagcacatattcagagggaagatgctgagaatagagggagaatagagggagaacagagatgctgggctgaaggaagaggaagctgggaactctgcctggggctaccccacaccaggattccttcgtggtccccartgactactggcaaggggtgaatttcacagtcaaggaatgacttattcttgctatggacctctggaatcatggcagcaatagatcccatgacacccatggacacttgagcttgcagggaggtgtaggactccagcctctgcagtgcccagagtgtttggtacaggaatgtgttcagtggagtatgaccagggatgcctatcccccaaggttcgccatgtgccctttggagactttagccttagaggaactgttaggcctgaacagagcaaagtggcctcggctgtaagatggggcagtctgacttgagagcc

SEQ ID NO: 930279 - DNA, 684 bp, Homo sapiens
cccaccatgccccctatcctttacccataaaaatctgagaccctagcgggcacagacacaggcagctgaatgttgagaggagcagaagaacacactgacagacaccagcagacactggcaggtcagtgacggcagaacaacgctaacactgaggggaattcagctggggccagtcgggggaaagtccggctgctggtcgtcctgactccaggggaagacaatctttccattccawcccccttctagctccccatccaacttgctgagagctacttctaccactcaataaaatcttgcactcattctccaagcccatatgtgatccgattttttccagtacactagggcaagaacccaggatacagaaaaccctctgtccttgcgataaggcagagggtctaattgaggtgattaacactagccgcctgcacatggcaaagctgaaagagtgcaccataacacatgccaactcgggcttcaggagctgtaaatacccctacacactgccttggggttggagcccaaaaacgttccccatgacctctgcaactatctgtctgcatgtcccccctaggggtttgagcagtggggcactgaagaagagagccacatccctgttgaacaccctgcaagtggaaaagggggaacttctctcatttcagaaggaacatacttcaacacaat

SEQ ID NO: 930280 - DNA, 578 bp, Homo sapiens
ccaagatacagaatcaacacaagtgtccttcagtggattaatggataaagaaaatgtggtacatgcatgcaagggaatactattaatacagcctttaaaaggagggaaatcctgccattttcaacaacatagatgaatctggaagacattatgctaagtgaaataagccaggcacagaaagacagataccacatgatttcacctacatgtggaatctaaaaatgttcaactcacaaaagtagcatagactgatggttaccagaggtcagaggagctgaaaaaagagggaatagggaattgttgatcaaagggcagagtttcagacagaaagaacaggttttgaaatctaytgcacagaacagtcgctatactcagtaataacgtactaaatcaaatgtctgaccctaagaaatcataggtaatcaaattgatgaatgctaattcggttgatttaattattccacattctatgcatgtatcaaaacactgcatttcaccccataaatgtgtatttgttaattaacaacaataataaaaaattaaaaattgaacctaggacttccaggtagctgaagaaa

SEQ ID NO: 930281 - DNA, 578 bp, Homo sapiens
ccaagatacagaatcaacacaagtgtccttcagtggattaatggataaagaaaatgtggtacatgcatgcaagggaatactattaatacagcctttaaaaggagggaaatcctgccattttcaacaacatagatgaatctggaagacattatgctaagtgaaataagccaggcacagaaagacagataccacatgatttcacctacatgtggaatctaaaaatgttcaactcacaaaagtagcatagactgatggttaccagaggtcagaggagctgaaaaaagagggaatagggaattgttgatcaaagggcagagtttcagacagaaagaacaggttttgaaatctattgcacagaacagtcgctatactcartaataacgtactaaatcaaatgtctgaccctaagaaatcataggtaatcaaattgatgaatgctaattcggttgatttaattattccacattctatgcatgtatcaaaacactgcatttcaccccataaatgtgtatttgttaattaacaacaataataaaaaattaaaaattgaacctaggacttccaggtagctgaagaaa

SEQ ID NO: 930282 - DNA, 474 bp, Homo sapiens
accagctgttctgaggggcccagcagaaagctgattcatggaagaatgcagtttccacatcctgattattattattattattattattattattttgagacagtgtctcactctgttgcccaggctggagtgcaacggcgcaatctcggctcactgcaacctcctgctcctgggttcaagtgattctcctgcctcagcctcctgagtaactggatctataggcatgcgccaccatgcccagctaacttttgtatttttagtagagayggggtttcaccatgtagtccaggcaggtcttgaactcctgacctcaggtgatctgcctgcctcagcctcccaaagtgctgggactataggcgtaagccactgcactgggtcaacacattctgattatttcgttcactttactccaaccaatcaatgaccccagttttctagcccttcaccctccatgatccccttaaaaacctttgc

SEQ ID NO: 930283 - DNA, 554 bp, Homo sapiens
agtagctgtggcaatcacaaattattgtccttgtgagttgtgattttattgttactctgattttatagtattttaaaattttgcccatgggtaagtttttaattagggatacagagaaggaaagatgaggaaattcacatctaccttgcatgtaagcaagagtaatgccatcaatatgtctattagaagaaacataataattgtcataactaaaccacaggcagrcagtgaagtgtaagtgcagttccctattagcacattaaaattgatcagttctgtgtgttgttctgtggacaataaaataagatcatttttgctaatatggttacagtatactgttgcatcttagctatgttatctccataacggaagtctggaaaacaataactctttaaaaaattaagttcaggccaggcgtggtggctcgcacctgtaatctcagcactttgggaggccaaggcaggcggattgcctgaagtcaggagttcaagaccagcctggccaacatagtgaaaccccatctctactaaaaatacaaaaattagccaggcttg

SEQ ID NO: 930284 - DNA, 605 bp, Homo sapiens
aagacatctgactaaagctggcaaggaggtaattacatatgaaattctaaggccagaggcaaagtttggcctgtcaacataaatttgtgagtcattcacatatggtagttgaaatcatggtcctaggaaattgctcatgaaaggaatatagtgcccaaagcaggtctactcttattccttaagaaattctgatatttaatagccaggtagagaaagatgagacagaaaagaaaacagaaatgagcagcttgagagcaggaggaaagcaaggggagtgtggttcccagaagctggggtgagagtgtttcaaataggatggaatagtgccaagtgctgccgagacatctgaaaagaggaggcctgggaaacacccattggatttagcaacatgggggtcttggtgagctaattttaaatttcctcaayggaatgatggaggcagaagccagattggagatggttgaggaattagtgggaagtgagaaaatggtagacattatatggaccactttttttccttttttttttctgagactggagtgcaatggtgcgatcttggctcaccacaacctccatctcccaggttcaagcaattctcctgcctc

SEQ ID NO: 930285 - DNA, 605 bp, Homo sapiens
aagacatctgactaaagctggcaaggaggtaattacatatgaaattctaaggccagaggcaaagtttggcctgtcaacataaatttgtgagtcattcacatatggtagttgaaatcatggtcctaggaaattgctcatgaaaggaatatagtgcccaaagcaggtctactcttattccttaagaaattctgatatttaatagccaggtagagaaagatgagacagaaaagaaaacagaaatgagcagcttgagagcaggaggaaagcaaggggagtgtggttcccagaagctggggtgagagtgtttcaaataggatggaatagtgccaagtgctgccgagacatctgaaaagaggaggcctgggaaacacccattggatttagcaacatgggggtcttggtgagctaattttaaatttcctcaatggaatgatggrggcagaagccagattggagatggttgaggaattagtgggaagtgagaaaatggtagacattatatggaccactttttttccttttttttttctgagactggagtgcaatggtgcgatcttggctcaccacaacctccatctcccaggttcaagcaattctcctgcctc

SEQ ID NO: 930286 - DNA, 576 bp, Homo sapiens
tgtcttctgttcggaaggccagccccaggtgaggagagtgctgaatagaaaaaagctccatttcaaaatctgccatttaccagcctcgacctcagtttcctcacatgtgaaataaggggttacacaatctctgaggctttatgattctctagatgcaattcctcaccatgtctgcatgtcccaaagcctgtgtatccttcaagatccttctcctctcaaagcattctctgcctctctccctgccaccccaactagaagtaatgtctccccactctggattaccgtcacagtttctgtatttctttcagggcatatagggcattttacttatctccctcattatatgaactgccacaaactcttggagggaagagttcatgtcttgcgctttttctcctttagattctcctkgtatgtagtaggtgaccatgatgtagtcattgaatgactgaatgactgcaaaatcttccccactgatgaaaaagctgcaggagcttctcatttcctcctggctgctgtcctgacacagggctggaatagcttgtctcttctgagaactagaataaggggtgggcc

SEQ ID NO: 930287 - DNA, 576 bp, Homo sapiens
tgtcttctgttcggaaggccagccccaggtgaggagagtgctgaatagaaaaaagctccatttcaaaatctgccatttaccagcctcgacctcagtttcctcacatgtgaaataaggggttacacaatctctgaggctttatgattctctagatgcaattcctcaccatgtctgcatgtcccaaagcctgtgtatccttcaagatccttctcctctcaaagcattctctgcctctctccctgccaccccaactagaagtaatgtctccccactctggattaccgtcacagtttctgtatttctttcagggcatatagggcattttacttatctccctcattatatgaactgccacaaactcttggagggaagagttcatgtcttgcgctttttctcctttagattctccttgtatgtagkaggtgaccatgatgtagtcattgaatgactgaatgactgcaaaatcttccccactgatgaaaaagctgcaggagcttctcatttcctcctggctgctgtcctgacacagggctggaatagcttgtctcttctgagaactagaataaggggtgggcc

SEQ ID NO: 930288 - DNA, 576 bp, Homo sapiens
tgtcttctgttcggaaggccagccccaggtgaggagagtgctgaatagaaaaaagctccatttcaaaatctgccatttaccagcctcgacctcagtttcctcacatgtgaaataaggggttacacaatctctgaggctttatgattctctagatgcaattcctcaccatgtctgcatgtcccaaagcctgtgtatccttcaagatccttctcctctcaaagcattctctgcctctctccctgccaccccaactagaagtaatgtctccccactctggattaccgtcacagtttctgtatttctttcagggcatatagggcattttacttatctccctcattatatgaactgccacaaactcttggagggaagagttcatgtcttgcgctttttctcctttagattctccttgtatgtagtaggtgaccatgakgtagtcattgaatgactgaatgactgcaaaatcttccccactgatgaaaaagctgcaggagcttctcatttcctcctggctgctgtcctgacacagggctggaatagcttgtctcttctgagaactagaataaggggtgggcc

SEQ ID NO: 930289 - DNA, 608 bp, Homo sapiens
tgtatcccgtttgtcaattttttgctttcattgcaattggttttagcatctttgtcatgaaatcattgcctgttcctatgttcagaatggtattgcctagtttgtcttacagggttttcacagttttgggtctttcataagtttttaattcatcttgaattaagttttgtatatggtataaggaagaggtccagtttcaagcttctgcatatggctagccagttatcccagcacatttattaaataggggaatcatttccccattgcttgtttttgtcaggtttgttaaaggtgagatagctgtagttgtatgggcttgtttcttggttttctattatgtaacattggtctatgtgtctgtttttgtaccactamcatgctgttttggttactgtagccctgtagtatagtttaaagtaaggtagtgtgatgcctccagctgtgttctttttgcttaagattgtcttggttatttgagctcttttttggttccatatgaattttaaaatgtttttttctagttctgtaaagaatgtcaatggtaggttgataggaatatcattcagtctgtaaatttctttgggcagtatgacaactttaataatatt

SEQ ID NO: 930290 - DNA, 637 bp, Homo sapiens
tatgtttttgactcagacaaaaaatcaagtctataaatccctcagacttaatacaaaatttaattcaaaataaattgtaggtctaggtataaagcataaaactataaaaagtttttgaagaaaatttccaaaaggagaaaaatctcagtaatttgagtttaatgatttctcagaaatgactctaaatgtacagtccataaaagaaaaatttgactttattaaaattgaaaactgctttgtgagagatatttaaaagaaagaaaagacaaggttcggactaaaatgccgtatccaacagaagaccagaacatataaaaaaactcaaaactcaaccgtaaggaaacaaacaactcaatttttaaaatgagtaagacttgaaaacacatatcaccggccgggcacggtggctcacgcctgtaatccctgcactttgggaggctgaggtggatgtatcacctgaggtcaggagttcaagaccagcctggccaacagggygaaaccctgtctccactaaaaatacaaaaattagccgggcgtggtggcagtcgcctgtaatcctagccactcaggaggctgaggcaggagaatttcttgaacctgggaggcagaggttgcagtgagctgagattgtgctact

SEQ ID NO: 930291 - DNA, 692 bp, Homo sapiens
atgttgctgcagatgacatggttttattctttttcatggctgcatagtattccatggtgtgtatataccacattttctttacccagtctaccactgttgggcaccttgggttaattccaggtctttgttattgtgaatagtgctgcgatgaacatggaagtgcaggtgtctttttggtagaatgatttttcttttgtatatgtatccaggaattaatggaattgctgggtcaaatggaacttctgttttgagttctttgggaaatcyccaaactgctttccacagtggctggactaatttacattcccacccacagtgtataagcgttccctgttctgctcactcttgccagcatgtattgttttttgatattttaacaaaggccattctgactggtgtgagatggtatctcactatggttttgatttgcatttctctaatgattagtgatgttgagctttcttttatatgcttgttgaccgcatggatgtcttcctttgagaagcatctgttcatctcctttgagcaatttttacggggttatttatttttttcttgttgaattgtttgagttccttatagattctggatattagacctttgtcagatgcatagatgcaaatattttctcccattctgtaggttgtctgtttactctgttgatagtttcttttgctgtgcagaagctcttt

SEQ ID NO: 930292 - DNA, 635 bp, Homo sapiens
aacacggtaagacccgtgaataccacgagcatgagcccactgccacgcttctttggctgcaaagtgagttccttcgtcaaagcaatgctgtgtggacagcacggcattagatgaggagttctgagcccacagatggtagtgacgacagaagcactgtgtgcagggaagacaaatccatatccatggcaggcgcctatcccagtgagaacaaaccagcgcccctcccatgatgggaaccgtccagtgtcacccacccgcccccaggcaccgggctcaacacgctggggaatggagcctcagcgcccctyccatgatgggagctgtccagtgtcacccacctgcccccaggcactgggctgatcactcaggaatggagcttatcaggctgagtgttggtctctgctgctggcacactgggcatacagtgctggtggtactcagcttggccttggtcagtggaagtccatgttgctgagcccacgcacaacctccatccctgccaccacagccacttcgctcaggagctcactgggtgatgagaggggtggctgggaaaaggctcactggtgtccatagagtagctcatgctgtccacctgattactgaagtcctctgctgaggtcaccctttggtga

SEQ ID NO: 930293 - DNA, 543 bp, Homo sapiens
tgcctccacctcccaagtagctggtattacaggcactcgccaccacacctggctaattttgtatttttagtagagacagggtttcgccatgttggccaggctggtcttgaactcctgacctcaggtgacctgcccacctcagcctcccaaagtgctgggattatagattcacactgccaagtgtttaatttctacaaaggcccagaagcagggcaagagctgtttctctgaaggagagtgggttatctgtgaatgatgacaggaccttcctccaaaatcctaaaggcctgagcygtgattcacctacaggggcctggcaaagactccacacagggtctctgtctgccactgacaccccaggcaccagtggatctgccgggtcatgtggcccacgtggcagagcggcatgcacagagcctggacctactgcagagacttctcttgctctgggccatgcttaaaactaactagcagcttttcaaatcactcagtaaatggacagagttggacacctcaaagagaaagaacgtgtcaaccccacat

SEQ ID NO: 930294 - DNA, 609 bp, Homo sapiens
gaagtttaagctgtctagcttcagtttgcagggctttatgaaagcacagcttagttgtcagtgactctgaattaggaaaaatgggaaaaaaggtaaaaaaatgaaaacattattttaaagtcttctagccaagaaaaattagaatttgatccaaactgtagaaaataataaaaattgaaaagcattaggcaagactagaatctaacaacaggtgtactacagtttttggaacctaatttttctctctcccgtttcccatttttactaaagagaaaccatagtaggactaatttgctttattatatttggcctaattatttgtatacagtgcagcaagaataattaatttktacataacttttttttcttttgaaatgcagtctcacactgtcacccaggctggagtgcagtggtgtgatcttggctcaccacagcctccatttcctgggttcaagtgattctcctgcctcagcttcctaagtagctgggattacacctggctaatttttttttgtatttttagtaaagacagggtttcaccatgttggccaggctggtgttaaactcctgacctcaagtgatccacccacctcaccctcccaaagtgct

SEQ ID NO: 930295 - DNA, 609 bp, Homo sapiens
gaagtttaagctgtctagcttcagtttgcagggctttatgaaagcacagcttagttgtcagtgactctgaattaggaaaaatgggaaaaaaggtaaaaaaatgaaaacattattttaaagtcttctagccaagaaaaattagaatttgatccaaactgtagaaaataataaaaattgaaaagcattaggcaagactagaatctaacaacaggtgtactacagtttttggaacctaatttttctctctcccgtttcccatttttactaaagagaaaccatagtaggactaatttgctttattatatttggcctaattatttgtatacagtgcagcaagaataattaatttgtacataacttttttttcttttgaratgcagtctcacactgtcacccaggctggagtgcagtggtgtgatcttggctcaccacagcctccatttcctgggttcaagtgattctcctgcctcagcttcctaagtagctgggattacacctggctaatttttttttgtatttttagtaaagacagggtttcaccatgttggccaggctggtgttaaactcctgacctcaagtgatccacccacctcaccctcccaaagtgct

SEQ ID NO: 930296 - DNA, 633 bp, Homo sapiens
agattaatggacaaaagtgggtcctgcaggtaccttgtttgttcactcaatgctcctagggcttgctagaagctctactttggatcccacttctgataccgtctgataacagaaaaacttcagccaaaataaatttaaaggagtttaattgagcaatgagmgattcatggatcaggcagcccccagaatcacagcagatttagagactccagcacagcaacatggtggaagatttatagacaaaaatgggaaatgacatacagaaatcagaagtgaggtacagaatggctggattggttacaggttggcatttgccttatttgaacacagtttgaatactcagcactgtatgaattgttgaagtatggctactgggactggctaagactcagctattgttacaggcacatactcctaagttaggttttcaatattgtctacctattaaactaggttgcagttcgtccacatggcctcatatatagaagtacagagtcccttctcaggccatatttagttcgctttaacaggagaaacttagtttacagttcagctttgaaacaaacacaataacagttttttcccaaaacaaaccttacaattgtttgaaatgcttgttccccggtgctgtaa

SEQ ID NO: 930297 - DNA, 619 bp, Homo sapiens
tggaaggggacaacgtagaactcgggccaggacttcagagggtgcaagccccaagctttggcagcttccatgtggtgttgagcctgcaggtgcatggaagtcaagaattggggtttgggaacctccacctagatttcagaagacgtatggaaatgtctggatgcccaggcagatgtttgctgcagaggccctcatagagaacctctgcttgggtagtgcagaagggaaatgtggggtcagagcccccacacagagtacctactggggtaccatccagtgtagctgtgagaagggggccaccagaccccagaatggtagatccattgcacctgaaaaagcgacagacwctcaacaccagcctgtggaagcagtggggagggaggctgtaccctgcaaagccacaggggtggagctgcccaagcatgggaactcacctcttgcatcagcatgacctgcatgtgagacatggagtcaaaggagatcattttggagctttaagatttgactgccccactggatttcagactttcatggggcctgagcccctttgtttggctaatttctccccatttggaatggctgtatttacccaatgccagtacccacattgtatctagga

SEQ ID NO: 930298 - DNA, 612 bp, Homo sapiens
tctgcatctatggagataatcatacagttttggggtttggttctatttatgtggtgaatcatgtttattgatttgcatatgcttaaacattcttgcatccctggaataaaacccacttgatcatgatttattatctttttgatgtgctgtcggattcagcatttgttgaggatttttgcacctatgttcattagggatattggcctgtggttttcttttctggttgtgtccttgcctgactttggtatctggtgtcctcacctgactttgatactggtgtcctcacctgactttgatactggttttgtagaatgagttagaaaggaattactcctcctcaattttctgaaatagtttcagtattctttcctaaataccagcttttctttatatgtctggcaaaattcagctacaaatctatctggtcctggccttttttrttgttagaaggtaataaggtttggctgtgtccctacccaaatctcacctcgtagttcccctaactcccatgtgtcatgggagggttcagtggcaggtaattgaatcatgggggcagttaccctcatactgttctcttgatagtaagttctcacgagatctgatggttttaca

SEQ ID NO: 930299 - DNA, 598 bp, Homo sapiens
ccccaatctcttccagctgacttgcagggtttctgctgagaagtttggtgttagtttgatgggatttcccttataggtaatcccttctctcttgctactcttagaatttcttctttttccttcacactgactttgaacagtctgatgactatatgcttagatgaggttcttcttgcaatttatctttcaggagttctctgagcttgtttctggatgtctaaatctcttcccagactagggaagttttccctawttacttcctgaaatagcttttctacactttttactttttcttctgtagaatatctataacctgtaagtttggatgctttatacaatcccatatttctccaagactttttcactttttttttcttttgagatggagtttcactctgtcacccagtctggagtacagtggcaccatcttggctcgcacaacctccacctcctggaatcaagcgattctcctgcctcagcctccaaagcagctgcaattacagtcacacgccacaatgccctgctaattttttttttgtatttttagtagagatggggttttcaccatgttggccaggctggtctcgaactcctgacc

SEQ ID NO: 930300 - DNA, 599 bp, Homo sapiens
tgtgctttgttaaacagatgcttgaaggcagcatgctccttaagagtcatcaccactccctaatctcaagtacccagggacacaaacactgcggaaggcggcagggccctctgccgaggaaaaccagagacctttgttcacatgtttatctgctgaccttccctccactattgtcctatgaccctgccaaatccccctttccgagaaacacccaagaatgatcaataaatactaaaaaawttaaaaaaaaaaaagaagatgacgtggttttaaagttgcactgtgtcaaatatacagacgctcttgtaaggcaggtgtggtggtatcacgattatccccattttacagacgaagaaatgggggttcagaggtaagacaatcagtttaaatctagatcaccttgattgattccagggccttacaacttacccatacgctgcactgatttcccactggagccgagcagtagggaagcacaggggcacacagcttgacgactgtatattctcaattgggaggtcaagcaggagccaagaccttatgaaattgatgggtaattgctcacgcttggagcagccactgaggctcctcctgccatg

SEQ ID NO: 930301 - DNA, 527 bp, Homo sapiens
tgcatccttaattccatttgctcttacaccaatcccttaaacaagcaagcaaacctacagaataaggattaagtcactgtattagttcattctcatgctactaataacaacatacccaagactaggtaatttataaaggaaatagatttaattgactgactgttcagcatggctggggaggcctcaggaaacttacaatcatggcataaggagaagcaaacatgtcctacttcacatggaagcatccagaagtgccaagaaaaaggggcaaaagcccattataaaatcatcagatcttgtgagaaatcactcactatcattggaacatcagcaagggggtaagtggccccatgattcaattaccttcctycaggtccctcccatgacatgtggggattatgggaactacaacacaagataagatttgggtggggacacagccaatccatatcattccctcccaaatctcaagtcctcacatttcaaaacacaaccattccctcccaacagtccacaaaattcttacc

SEQ ID NO: 930302 - DNA, 567 bp, Homo sapiens
gaagcctgtttgaaagtggtcatatgacattctggaagaggcaacactatagagacaataaaaaaatcagtggttgatcagtggttgggttttgttggtaggggtggtgggagagagcaggatgtgtaggtggagcacaggagatggctgaaatataccaatgattcattcttgatctgcatcttctttgacaaattaacagtatttgacacaatacaccgttccatagtttcttaatctgtttccagaacaaaacaattatttggttttccttttacatctctggttggctgcttcttagtcatcttttctcatttattttcatcatcttgaatttttaaagctgaaattctctaaggtycaatacttatcctttatatttatatctacactcaacttcttcagggtctcatttattttcatgatttccaatataatctacagattacttccaaatttacatcttcaggctggtgcttttccccagaccttctagagtccataccacttactaatcaacaacttcacttggaagcataatagccatcctaattttagtatgtctaa

SEQ ID NO: 930303 - DNA, 601 bp, Homo sapiens
gctcttagtagtgtctactgactctttgaattttgatggtatcaattgtaatgtctcccttttgatttatcgttttgtttatttggatcttctcttatttttagcccattagtctgatgaaataattgtgggttttgtttctctccaagaaggcaaatttttgttttgttgactttttgtatttttttgtttcagttccacttatttctgttctcatctttattatttcttttcttctactaattttgggtctgctttgctctcgtttttctgattctttcagatacatcattaggttgtttattttacattttcctacttttttgatgtaggtgctgattgctatacacgttcctcttagcatggcttttgccatatctcataagttttggtatgttatatttccatttttgttttcatttatttcaagaartgtttaaattgatttgaaaagtgttattggcttctagttttattccaatgtggtcagaaaggatacttaatatgatttcaattttcttgaaatttttaagccttttattgtggctcaacgtttggtctatccctgagaatgattcctgtgctgaggagagtaatgtgt

SEQ ID NO: 930304 - DNA, 627 bp, Homo sapiens
atctaatcctacatgcccatgctgcaatatggaaagaaagggagttcctaacctctggggaacccccattgagtatcacaaggaaaccatggagttattgcatgcaatgcaaaaacccaaggaggtggcagtcttacactgctgaagccatcaaaaggagagcgagaggggagaacagcagcataagtggctggcagaggcagggaaagatcagcagaaaggaaagagagaaagagacagaaagtcagagaaagagagagagaggaagaaacagagacaaagagaaggagacrgaggaagagacagagagacagaaagtcagaaggaaagagaggaagagaaaaaaggggagtcagagagaaagtcagagagaaagagagagacagacaaacaaggagtcaaagaaagagagaaagagaagcagtaaagaaaaaagtgtatcctattcctttaaaagtcagggtaaatttctgtctacctcgccaaggcatattcttcttacatggaatctcaaccgatatctgtctctcagacagtttacaagaaataatgagatctatccttactctacaatcccaaatagattctttggcagcagcaactatccaaaaccgcctaggcctagac

SEQ ID NO: 930305 - DNA, 627 bp, Homo sapiens
atctaatcctacatgcccatgctgcaatatggaaagaaagggagttcctaacctctggggaacccccattgagtatcacaaggaaaccatggagttattgcatgcaatgcaaaaacccaaggaggtggcagtcttacactgctgaagccatcaaaaggagagcgagaggggagaacagcagcataagtggctggcagaggcagggaaagatcagcagaaaggaaagagagaaagagacagaaagtcagagaaagagagagagaggaagaaacagagacaaagagaaggagacagaggaagagacagagagacagaaagtcagaaggaaagagaggaagagaaaaaaggggagtcagagagaaagtcagagagaaagagagagacagacaaacaaggagtcaaagaaagagagaaagagaagcagtaaagaaaaaagtgtaycctattcctttaaaagtcagggtaaatttctgtctacctcgccaaggcatattcttcttacatggaatctcaaccgatatctgtctctcagacagtttacaagaaataatgagatctatccttactctacaatcccaaatagattctttggcagcagcaactatccaaaaccgcctaggcctagac

SEQ ID NO: 930306 - DNA, 636 bp, Homo sapiens
ctgacattagataaagtcaccaagaacwtacatttaggaaagaacaacatcttcaataaatgatgctggtaaaactggatatccacatgcagatgagtgaacctagactcttatctctcaccatatacaaaaatcaactcaagatggattaaagtcttaaatgtaagcccccaatctattctagataaaaacatagggaaacacttcaggatattgttctatgcaaatactttatggctaagaattcaaaaacataggcaacaaaaccaaaaatagacaaatgtgactctattaaaccaagcttctgcacagcacaggaaacaaccaacacagcagagacaagctgttgaatgggagaaaatatttccaagctatttattcaacaaaggaagcatacccagaatatacacagaactcaaacaactcaacagtaaaaaagcaaaattttttaatcattaaaaatttgtcaaaggacacaaaatagacgttcctcaaaagaagacatgcaaatggctcacaggtatatgaaaaatgctcaacatccccaatcatcagaaaaatgcaaattaaaaccacaatgagatattatcttaccttagatggagtgattatcatcaaaaggacaaaaaaaaaaaa

SEQ ID NO: 930307 - DNA, 606 bp, Homo sapiens
tcattatttccacattgaaagaccattcatttttgtatgttgatattgtaccttgcaactttactaaatttatttattagttataagagtttactaaatttatatgttagatataagagttttttggtggagtcttttgttttttctagatataagatcatatcaacaacaaagagggacaatttgacttcttttgcaatttggatgccttttatttttcttgcctgatttctctggctaggacttccagtactaggttgaacaggagcggtgaatcaggcatccttgtcttgttccaattcttagggaaacagctttaagcttttccctgttcagttaaatgctgactgtgggcttaacatatatagcctttattatgttgaggtatattcyttatatgcctagttgttgagacattttggatttgtacatgctgaactatctttgcatccctgggataaaccctactacattgtggtgtattagtcttctgatgtgctattggatttggttcactactattttgttgagaattttttgcatttatgttcattagggatattagcccataggtttcttttttttttccttgcatccttgtctgat

SEQ ID NO: 930308 - DNA, 606 bp, Homo sapiens
cagctgctcaatacaagtatttctatgaattctgggagctgtcttagcaagttaatcaaactcaaggaggggtagtgggaaccccatttcatagctgttcagtcagaagtgtgggtggcttgggacttcccactggcatctgaagtggggcagtcttgtgggactgagctcttcatctatgaaatctgactctaactccacrtagaaagtatcagaattgaattgaagtgtggacagccagttgctgtctgctagagaattgcttggtgtatggcccccacacatctggtcacagagtgttctgtgctgtgagagtataataggagaaaaacagtgagtgtgttgttctctagaattggtgtcagaagtgggacttggccaggcaccatggctcatgtctgtaatcccagcactttgggaggtcaaggtgggaggactgtttgagcccaggagttcaagaccagcctgggcaacatagtgagaccctgtggaggcatgtgcctgtaatcccagctacttgcaaagctgcggtgggaggatcgcttgagcccagggggtggaggctacactgacctatgttcacatcactgcattccagcctaggca

SEQ ID NO: 930309 - DNA, 606 bp, Homo sapiens
cagctgctcaatacaagtatttctatgaattctgggagctgtcttagcaagttaatcaaactcaaggaggggtagtgggaaccccatttcatagctgttcagtcagaagtgtgggtggcttgggacttcccactggcatctgaagtggggcagtcttgtgggactgagctcttcatctatgaaatctgactctaactccacatagaaagtatcagaattgaattgaagtgtggacagccagttgctgtctgctagagaattgcttggtgtatggcccccacacatctggtcacagagtgttctgtgctgtgagagtataataggagaaaaacagtgagtgtgttgttctctagaattggtgtcagaagtgggacttggccaggcaccatggctcatgtctgtaatcccrgcactttgggaggtcaaggtgggaggactgtttgagcccaggagttcaagaccagcctgggcaacatagtgagaccctgtggaggcatgtgcctgtaatcccagctacttgcaaagctgcggtgggaggatcgcttgagcccagggggtggaggctacactgacctatgttcacatcactgcattccagcctaggca

SEQ ID NO: 930310 - DNA, 621 bp, Homo sapiens
gcagggtaaagaggggccaggggaatgtgtatgtgtggtcacatgtatgtgggcacatgtgtgttaagtttgatgcataggttgggggaagcgggtacggtttgaaagaggataccaaaagcaaacttaatcttaatcctccccctcccaaaaacatggctcaggaatcaatcaggcaagaactagaaaattggtctgggggtcatgaaatctaatctttagtccaccagcaataagackttcaaaaagtcaattgctcctgactcttgtcttctcttttcataaaattttcaacatccacacaggaatattgggaataaaattaaataacagctacgaaaaggatgcgagaatacttttattattattattattattattattataaagttttagggtacataagttagggtaataaactttagggtaaagttttagggtacatgtgcacaacgtgcaggtttgttacatacgtatacatgtgccatgttggtgtgctgcacccattaactcatcatttagcattaggtatatctccaatgctatccctcccccttccccccactccacaccagtccccggtatgtgatgttccccttcctgtgtccatgtcttctcatt

SEQ ID NO: 930311 - DNA, 662 bp, Homo sapiens
ttacatttaaggttaatattgttatgtgtgaatttgatcctgtcattatgatgttagctgattattttgctcattagttgatgcaacttcttcctagccttgatggtctttacaacttggcatgtttttgcagtggctggtactggttgttcctttccatgtttagtgcttccttcaggagctcttttagggcaggcctggtggtgacaaaatctctcagcatttgcttgtctgtaaaggattttatttctccttcacttatgaagcttagtttggctggatatgaaattcttggttgaaaattcttttctttaagaatgttgaatatcagcccccactctcttctggcttgtagaatttctgctgagagatcagctgttagtctgatgggyttccctttgtgggtaacccgaccattctctctggctgcccttaacatcttttccttcatttcaacgttggtgaatctgacaattatgtgtcttggagttgctcttctcgaggagtatctttgcggtgttctctgtatttcctgaatttgaatgttggcctgtcttgctagattggggaagttctcctggataatatcctgcagagtgttttccaacttggttccattctccccatcactttcaggtataccagtcagatgtagatttggt

SEQ ID NO: 930312 - DNA, 650 bp, Homo sapiens
ttggaacagctgcatttacccagtacctgtacccccactgtgtctaggaagtaactagcttgcttttgattttacaggctcataggtggaagggacttgccttgtctcagatgagactttggactgtagacttttgggttaatgctgaaatgagttaagacttcrgggctgggtgcggtggctcacgcctgtaatcccagcactttgggaggctgaggcaggtggatcacgaggtcaggagatcgagaccatcctggctaacacagtgaaaccccgtctctactaaaaaaatacaaaaaattagctgggcgtggtggcgggcgcctgtagtcccagctacttgggaggctgaggcaggagaatggcgtgaacctgggaggcagagcttgcagtgagccaagatcgtgccactgcactctagtctgggcaacagagcaagactccgtctcaaaaaaaaaaaaaaaaagacttcgggggactgttgggaaggcatgattggttttgaaatgtgaggacatgagacttggagcggccaggagcagaatgatatggtttggctgtgtctcatccaaatctcaacttgaattgtatctcccagaattcccatgtgtgggagggggtgctaattgaattgtgggagccattctttc

SEQ ID NO: 930313 - DNA, 699 bp, Homo sapiens
ctgcaaagattctttctccaaataagttcacctttacagtttctggtgggcatagcgttttccccccatttatttatttatttatttttaactgtttttttttttttttttttctgagacggagtctcgctctgtctccaggctggagtgcagtggcgagatttcggctcactgcaacttccacctgccaggttcaagcaatttccctgcctcagcctctcaagtagctgggactacaggcatgtgccaccacacccagctaacttttttgtattttttagtagagacagggtttcaccatgttggccaggatggtctcgatctcctgaccgtgtgatccaccctctgcctcccaaagtgctgggattayaggcgtgagccaccgcgcctggcctaacttttattttaggttcaggggtgcatgtgcaggtttgttatataggtaaattgcatgttgcagggttttggtgtacatattattttgttatccagataataagcatagtaccgcataggtagtttttcgatcctcatcctcctcccaccctctatcctcatgtctgttgtttccttctttgagtccttatatactcagtgtttacctcccacttataagtgagaacatgcagtatttggttttctgttcctctgttagacatagctttttgggggtggctattgaatccactgttgttgagc

SEQ ID NO: 930314 - DNA, 673 bp, Homo sapiens
ttgctagaggtccactccagatgctgtttgcctggtatcagcagcggtggctgcagaacagcggtggctgtaaaacagcagtggctgtagaacagcggatcttggtcaactgcaaatgctgctgcctgattgttcctctggaagttttgtctcagaggagtacccagccatgtgaggtgtcagtctgcccctactgtggggtgcctcccagttagactgctcaggggtcaaggacctgctagaggaggcagtctgcccattctcagatctccagctrcatgctgggagaaccactactctcttcaaagctgtcagacagggacatttaagtctgcagaggttactgctgtctttttgtttgtctgtgccctgcccccagaggtggagcctacagaggcaggcaggcctccttgagctgtggtgggctccacccagtttgagcttcctggctgctttgtttgcctaatcaagcctgggcaatggcaggcgcccctccctcagcctcgctgccgccttgcagtttgatctcagactgctgtgctagcaatcagcgagactctgtgggcgtgggaccctccgagccaggtgcgggatataatctcctggtgtgccattttttaagcccattggaaaagcacagtattagggtgggagtgacccaattttccaggtg

SEQ ID NO: 930315 - DNA, 599 bp, Homo sapiens
cattggaaaagcacagtattagggtgggagtgacccaattttccaggtgccgtctgtcacccctttctttgactaggaaagggaactccctgaccccttgcacttcccgagtgaggcaatgcttcaccctgctttggctcgtgcacggtgcgctgcacccactgtcctgcacccactgtctggcactccttagtgacatgaacccggtaccttagatggaaatgcagaaatcacccatcttctgcgtctttcatgctgggagctgtaggcgggagctgttcctattaagccatcttggctccacccaartttctttttttttaactgtataattattttatttttaatgtccagaatgtgtaatataagggccagatcttcctcctggactcaattttataaatccttgattggttggtgaggtcattagggatactttttcttgtctaatttggtttctgggaaagtttttttcaagtcctcaatggtcatctgatcaaatggaattaagttcttcatcttctccttctgtttctcatattctacaatcccggcctttgagagagacacccactcagcacaagatttcacatcttctt

SEQ ID NO: 930316 - DNA, 645 bp, Homo sapiens
tgaataggcttttaggcccactctatttttcctcttcttcagaaactttaatgttacaaagctgtatcttttaatattgtcacaagtttttgaggccgttatatttatttttcattctattttctctcttttgtccaarttggataaattctattgatcaatcaagtttagttattttatcctctattgatctatcaagtttagttattttatcagcggataaactagccattggctctctatggtaatgagtccatcgagtgagttttataatgctattactgtattcttttaggtctgtgttttccattttttaaaataacttctatttatttgctgaaattttatattttttgcttcaagataatatgtaattcattgtttaagcattgttaccatcactgattaaaacttcttgccctaaaatttcaacatctaattgattttggtgctggtgccagtgattgtctttttctcatcaagatgtaatattcttggttcttgggctaactggatgattttcaattgtatacttgatattttgtattttatattaggagacttcgggtcttctaaaatctcttattctagaagacagcccctctgtttaggtttagctagatcctggcatacttttgtgggttg

SEQ ID NO: 930317 - DNA, 671 bp, Homo sapiens
tttgaataggcttttaggcccactctatttttcctcttcttcagaaactttaatgttacaaagctgtatcttttaatattgtcacaagtttttgaggccgttatatttatttttcattctattttctctcttttgtccaaattggataaattctattgatcaatcaagtttagttattttatcctctattgatctatcaagtttagttattttatcagcggataaactagccattggctctctatggtaatgagtccatcgagtgagttttataatgctattactgtattmttttaggtctgtgttttccattttttaaaataacttctatttatttgctgaaattttatattttttgcttcaagataatatgtaattcattgtttaagcattgttaccatcactgattaaaacttcttgccctaaaatttcaacatctaattgattttggtgctggtgccagtgattgtctttttctcatcaagatgtaatattcttggttcttgggctaactggatgattttcaattgtatacttgatattttgtattttatattaggagacttcgggtcttctaaaatctcttattctagaagacagcccctctgtttaggtttagctagatcctggcatacttttgtgggttgctatttctctgacagtttaacttt

SEQ ID NO: 930318 - DNA, 611 bp, Homo sapiens
actgggatgcagggcaccaagtcactagtctgcacacagtatggggacctttggcccagcccataaaaaaatcagttttaactcctaggcctctgagcctgtgataggaggggctgccatgaagacctctgacattccctggagacattttccccattgtcttcgggattaacattcggctcctcattactttttgcagccagcttgaatttctcctcagaaaatggggttttcttttctatggcattgtcaggctgcgaattttctgaacttttacactctgcttcccttttaaaactgaatggctttaacacacccaaagcacctttgaatgctttactgcttagaaatttctttcaccacgtaccctaaagcatctctcttaagttcaaaatttcacaaatctctagggcagatgcagaatgacaccagtctctttgttaacagataacaagagtcatttktgctccagttcccaagaagttcccatcgaggccacctcagcttggactttgttgtctatattgctatcaacattttgggccaagtcattcaacaagtctctaggaagttccacactttcccacattttcctgtcttcttctgagctc

SEQ ID NO: 930319 - DNA, 574 bp, Homo sapiens
ttgaggcaggagaatggcgtgaacccaggaggcggaacttgcagtgagccgagatcacaccactgcactccagcctgggcaacaaagcaagactgtctcaaaaaaaaaaaaaagaaataactaaagtatctgggaatattaaaccatgacttcaaagctgtccctcttgcagcctcagtgaggtgcgaaaggtctctgatttcaggcacccctcactctggcttaattctttcactctcacatatggttgtctgataaatccagctaaaagcaaaacctgtgatgaggtctcaacttgctcctctgcctcccaaccctcmctttaagcttgtgaccaaattgctgaattcacctcctttctcatagatctgcctgaaaaaaaaaagaaaagaaatcagaagacaggtcccccccccaccccacccccagttatctcaaatgtcacggctaggaagtttaggctgcatggaccatcaagaccctacaataaattgaagtaacaaacatattaccttctcccgaatcctctctgaacagatcaccgtttctctaccctccccaagggaaactctga

SEQ ID NO: 930320 - DNA, 731 bp, Homo sapiens
ttctggggaagtctgttcaggccccaccatactgtccatgaacagagccgacaggtccactttccctgtaattccccacccatgacttctctgtaacctacagtctcttttttttctcatctatcatctcttttctgcccataaagaccttatcctaccaaacaactggatctggcccatgtctgttttcaagagacaatcaacccccagcccccacaaaggtgttttttttttttttttttttaatgggatcgcaaaaggcctgggagcctgggggcaggtccccagatcaaatgctgtaaattcagtcaatcaatagaataaatgcggtaaacacaacaaaatgcwggctgtgtttgggacgtacttgtgtgctgtgtatctgaaattcaaattgaactgggtgtcctggatttcatctgccggatctggccacgctccctgagggcctgagctcttgcgccggctcagcggttgccgagcggccctccttctccaggtcccgccctctgagccgcccaggctgagcccggcaggtgctaacactccctgccctgggaccaccatctgggcgactgggcagccacggctggttctggccggcggtcacctcttggccctcgtgctcagccccagcccagcctctaaccagacactcactggcttacagcttgcgccacacgctaactccatagtcctacagcaccctccgtcctgacacgctgggagac

SEQ ID NO: 930321 - DNA, 751 bp, Homo sapiens
gcaggactcccaggctgttttaaaatccaccttaggctgggcgcggtggctcacgcctgtaatcccagcacttcgggaggccgaggcgggcagatcacagggtcagaagatcgagaccatcctggctaacacggtgaaaccccgtctctactaaaaatacaaaaaattagccaggcgtggtggcgggcgcctgtagtcccagctactcgggaggctgaggcaggagaatggcgtgaacccgggaggcggagcttgcagtgagcggagatagcrccattgcactccagcctgggcagcagagcaagactccatctcaaaaaataaaaaataaaaaaaaaatccaccttaagcctaaaggagggccccggctaagggcctcggtagagcctgtggttttctgccggtgtgcaggcttcagcccccatccagggcagcctcgccggcaggccagacccccaggcccctctccccaggcccttgactcagcggctgtgaggagagtctctgcccctcaggccctgggcagtcatcacggggattgttgcctctactggaaagacaggtgagcctcagcctctgcgctgggatacaatgaagaaggtcccatgtttacctccagtctgatatctcagcattcacccatgtgcaccaggaggaagtgaggtcccttccccagcaagaccctgggaggcctgtagcctctgcattcccctggtggggggagagagacggaacacaaggacatccctgt

SEQ ID NO: 930322 - DNA, 751 bp, Homo sapiens
gcaggactcccaggctgttttaaaatccaccttaggctgggcgcggtggctcacgcctgtaatcccagcacttcgggaggccgaggcgggcagatcacagggtcagaagatcgagaccatcctggctaacacggtgaaaccccgtctctactaaaaatacaaaaaattagccaggcgtggtggcgggcgcctgtagtcccagctactcgggaggctgaggcaggagaatggcgtgaacccgggaggcggagcttgcagtgagcggagatagcaccattgcactccagcctgggcagcagagcaagactccatctcaaaaaataaaaaataaaaaaaaaatccaccttaagcctaaaggagggccccggctaagggcctcggtagagcctgtggttttctgccggtgtgcaggcttcagcccccatccagggcagcctcgccggcaggccagacccccaggcccctctccccaggcccttgactcagcggctgtgaggagagtctctgcccctcaggccctgrgcagtcatcacggggattgttgcctctactggaaagacaggtgagcctcagcctctgcgctgggatacaatgaagaaggtcccatgtttacctccagtctgatatctcagcattcacccatgtgcaccaggaggaagtgaggtcccttccccagcaagaccctgggaggcctgtagcctctgcattcccctggtggggggagagagacggaacacaaggacatccctgt

SEQ ID NO: 930323 - DNA, 552 bp, Homo sapiens
tctcatctacctgtgacctggaagcaccctccctacttgagttgttctgcctttctggactgaaccaatgtacattttacatatattgattgatgtctcatgtctccataaaatgtatataaccaagctgtgtcccgaccaccttgggcacatgtcatcaggacctcctgaggctgtgtcatgggtgagtgttctcaatcttggcaaaataaactttctaaattaactgagayctatctcagttactcagggttcacatagtcatacgtatttacaaagagatggtctgaaattagaacttatgtttaaaaggaaagcagagcataacagtttggaaaatttgcagcctgacggctgcagaaatttgcataactaaagagaagctgaatgttaatagccaagacaatagggaaaatgtctccaggatatttcagagatctctgctgagctcctcccatcacaagccctgaggcttggggaaaaaattaccttcatggtccagtcccagagcccagtcgctctgtgaagcctcaggatatgataccctgtatc

SEQ ID NO: 930324 - DNA, 552 bp, Homo sapiens
tctcatctacctgtgacctggaagcaccctccctacttgagttgttctgcctttctggactgaaccaatgtacattttacatatattgattgatgtctcatgtctccataaaatgtatataaccaagctgtgtcccgaccaccttgggcacatgtcatcaggacctcctgaggctgtgtcatgggtgagtgttctcaatcttggcaaaataaactttctaaattaactgagacctatctcagttactcagggttcacatagtcatacgtatttacaaagagatggtctgaaattagaacttatgtttaaaaggaaagcagagcataacagtttggaaaatttrcagcctgacggctgcagaaatttgcataactaaagagaagctgaatgttaatagccaagacaatagggaaaatgtctccaggatatttcagagatctctgctgagctcctcccatcacaagccctgaggcttggggaaaaaattaccttcatggtccagtcccagagcccagtcgctctgtgaagcctcaggatatgataccctgtatc

SEQ ID NO: 930325 - DNA, 594 bp, Homo sapiens
ctatctttgatttgctttagtggtacttttcagcccttctgaattgacaagaacagtttcaaaaactcaagacttggatattaagtcacatataatagcagaaaaagactgaagcagttttgagtttcagaatactaaatgtgaatctttctaaaatggatcagaaaaaaaaatgtgactttcagaccccctgacttcatcctacctacaattgaagagcaacgtcacagtcttgacatctgacctgtttccttggtgcttccacactcagacaggtgtctaggagaggcatcagtaactagatttctatctctacagacatatttcmcaaaggctctatctcctaactctgactttcaatttagcttgttttataggccttaaagggctgcttctgaaatgatcgttttatctttttctctgttaatttaaatcctggaaaaaaattcagtctgactagctttacaaagcctgctgagctgttgtgaagaatagggttctgctgacttaaaaaaaatctgagctcataatcttctttagaaatacataggaacatcaagctgatctaccatggaatcatggagtttaatgatt

SEQ ID NO: 930326 - DNA, 721 bp, Homo sapiens
  misc_feature 154: n = A,T,C or G
tgcatgcagacatgagggctaggctaaaccagtaaggtcaagttgtttggacagaaaggctacagggtgcagtccgggctcttgtgtaagaattctgaccgcactaaccatgcctaggaagaaagggagttgttttgtagaaggtgttgggatntgagagatcagtcggacacgatcagcagggagagcacstgtgtttttatgagaattatgccgagataggtaacagatgaggaagaaatttgggcttgactgaagtaataggagctgtctgtgaagccttgtggcaggacagcctaggtaatttgctgagcctaatgggcgtcagggacagtccaagtgaaagcgaagaaaggctgggatgaagggtgcaaaggaatagtaaagaaagcatgtgtgagatccagaacagaataatgggttgtggagggagatattgaggataggagagtatatgggtttggcaccacggggtggataggcaaaacaatttggttgataaggcatagatcctgaactaacttgtaaggcttgtctggttttaggacaggtaaaatgggggaattgtaaggagagtttataggctttaaaagccttgctgtagcaggcgagtgataataggctttaatctttttaaagcgcactgcaggatgggatattggcgttgagtgcggtaagggtgattaggttttaatgagatggtaaggggtgcatgattggt

SEQ ID NO: 930327 - DNA, 805 bp, Homo sapiens
  misc_feature 155: n = A,T,C or G
ctgcatgcagacatgagggctaggctaaaccagtaaggtcaagttgtttggacagaaaggctacagggtgcagtccgggctcttgtgtaagaattctgaccgcactaaccatgcctaggaagaaagggagttgttttgtagaaggtgttgggatntgagagatcagtcggacacgatcagcagggagagcacctgtgtttttatgagaattatgccgagataggtaacagatgaggaagaaatttgggcttgactgaagtaataggagctgtctgtgaagccttgtggcaggacagcctaggtaatttgctgagcctaatgggygtcagggacagtccaagtgaaagcgaagaaaggctgggatgaagggtgcaaaggaatagtaaagaaagcatgtgtgagatccagaacagaataatgggttgtggagggagatattgaggataggagagtatatgggtttggcaccacggggtggataggcaaaacaatttggttgataaggcatagatcctgaactaacttgtaaggcttgtctggttttaggacaggtaaaatgggggaattgtaaggagagtttataggctttaaaagccttgctgtagcaggcgagtgataataggctttaatctttttaaagcgcactgcaggatgggatattggcgttgagtgcggtaagggtgattaggttttaatgagatggtaaggggtgcatgattggtcgccaaggagggagtagaggtatcttatacttgtggggtaaggtggggagatacaaggggaggatgtgaaggaggctttgaac

SEQ ID NO: 930328 - DNA, 721 bp, Homo sapiens
  misc_feature 154: n = A,T,C or G
tgcatgcagacatgagggctaggctaaaccagtaaggtcaagttgtttggacagaaaggctacagggtgcagtccgggctcttgtgtaagaattctgaccgcactaaccatgcctaggaagaaagggagttgttttgtagaaggtgttgggatntgagagatcagtcggacacgatcagcagggagagcacctgtgtttttatgagaattatgccgagataggtaacagatgaggaagaaatttgggcttgactgaagtaataggagctgtctgtgaagccttgtggcaggacagcctaggtaatttgctgagcctaatgggcgtcagggacagtccaagtgaaagcgaagaaaggctgggatgaagggtgcaaaggaatagtaaagaaagcatgtktgagatccagaacagaataatgggttgtggagggagatattgaggataggagagtatatgggtttggcaccacggggtggataggcaaaacaatttggttgataaggcatagatcctgaactaacttgtaaggcttgtctggttttaggacaggtaaaatgggggaattgtaaggagagtttataggctttaaaagccttgctgtagcaggcgagtgataataggctttaatctttttaaagcgcactgcaggatgggatattggcgttgagtgcggtaagggtgattaggttttaatgagatggtaaggggtgcatgattggt

SEQ ID NO: 930329 - DNA, 700 bp, Homo sapiens
acggggtggataggcaaaacaatttggttgataaggcatagatcctgaactaacttgtaaggcttgtctggttttaggacaggtaaaatgggggaattgtaaggagagtttataggctttaaaagccttgctgtagcaggcgagtgataataggctttaatctttttaaagcgcaytgcaggatgggatattggcgttgagtgcggtaagggtgattaggttttaatgagatggtaaggggtgcatgattggtcgccaaggagggagtagaggtatcttatacttgtggggtaaggtggggagatacaaggggaggatgtgaaggaggctttgaactagggggaaaggtggcaatgaggtgtggctctagcccagaaatagtcagggaagcagataatttagttaaaatatcttggcctaataagggagctgggcaggtggggataactaaaaggattgcttaaaagagtatcgtctaagttggcaccagagatggggagttttaagaggtttagaagcctggctgtcaatacccacaacagttatggaggcaagggaaacaggcccttgaaaagaaggtaatatggagtgggtagcctccgtattgattaagaaggggacagacttaccttccaccgtgagagttacccagagcacctgtgatggtcctataggcttccgaggtgatcgggcagtgtca

SEQ ID NO: 930330 - DNA, 727 bp, Homo sapiens
gatattgaggataggagagtatatgggtttggcaccacggggtggataggcaaaacaatttggttgataaggcatagatcctgaactaacttgtaaggcttgtctggttttaggacaggtaaaatgggggaattgtaaggagagtttataggctttaaaagccttgctgtagcaggcgagtgataataggctttaatctttttaaagcgcactgcaggatgggatattggcgttgagtgcggtaagggtgattaggttttaatgagatggtaaggggtgcatgattggtcgccaaggagggagtagaggtatcttatacttgtggggtaaggtggggagatacaaggggaggatgtgaaggaggctttgaactagggggaaaggtggcaatgaggtgtggctstagcccagaaatagtcagggaagcagataatttagttaaaatatcttggcctaataagggagctgggcaggtggggataactaaaaggattgcttaaaagagtatcgtctaagttggcaccagagatggggagttttaagaggtttagaagcctggctgtcaatacccacaacagttatggaggcaagggaaacaggcccttgaaaagaaggtaatatggagtgggtagcctccgtattgattaagaaggggacagacttaccttccaccgtgagagttacccagagcacctgtgatggtcctataggcttccgaggtgatcgg

SEQ ID NO: 930331 - DNA, 700 bp, Homo sapiens
acggggtggataggcaaaacaatttggttgataaggcatagatcctgaactaacttgtaaggcttgtctggttttaggacaggtaaaatgggggaattgtaaggagagtttataggctttaaaagccttgctgtagcaggcgagtgataataggctttaatctttttaaagcgcactgcaggatgggatattggcgttgagtgcggtaagggtgattaggttttaatgagatggtaaggggtgcatgattggtcgccaaggagggagtagaggtatcttatacttgtggggtaaggtggggagatacaaggggaggatgtgaaggaggctttgaactagggggaaaggtggcaatgaggtgtggctctagcccagaaatagtcagggaagcagataatttagttaaaatatcttggcctaataagggagctgggcaggtggggataactaaaaggattgcttaaaagagtatygtctaagttggcaccagagatggggagttttaagaggtttagaagcctggctgtcaatacccacaacagttatggaggcaagggaaacaggcccttgaaaagaaggtaatatggagtgggtagcctccgtattgattaagaaggggacagacttaccttccaccgtgagagttacccagagcacctgtgatggtcctataggcttccgaggtgatcgggcagtgtca

SEQ ID NO: 930332 - DNA, 654 bp, Homo sapiens
acaggaaacagggtcccagagcagacaaccggtctgactagaatttcgccaggctggaatttcccaatcctaacaagcctgggggcgctgcaggagaccagggtgtatttcatcctttatctacaactgtataagacagacactcccagagcggccattttagagacctctccctgggaatgcattcgttttcccagggttattccttgctgagaaaagaattcagcgatatttctcctattcactttctggaagaagagaaatatgactctgttctgcctggcctgcaggcagtcagactttatggttatctcccttgttccctgaaaatcactgttatcctgttcttttcaaggtgcccagatttcatattgttcaaacacacatgcttttcaatttgtgcagataacacaatcatcacagggtcctgaggtgacatacatcttcagcttacaaagatgatgggattaagagattaaagacaggcataggaaattatwagagtattgattggggaagtgataaatgtccatgaaatcttcacaatttatgtccagagattgcagtaaagacagatgtaggaaattataaaagtattaatttggggaactaacaaatgtccatgaaatcttcacaatttatgttattctgccg

SEQ ID NO: 930333 - DNA, 821 bp, Homo sapiens
gtcagaataaggactagaatccaggtttctgactttttgttggggttctttctaatacagtgtgccagtcagcttttctttaggataattagacatgatcattcagtttcgagcttcggtgtacatttaagcaggggccctctgtccaccaggactggtgtcttgacgatcctatagggtcaagaggatggaatgaagcattttaggactgctgaggccgtcccttttctagtccccagtctgaccctgtagaccattgctcaaattaaactgatgcttcacacttctcactaagagcttgtgtcatttgggggtgggggttctggggaagatcccaaaaggaccagttcttagaaaaattgcctgctmtcattagaggagcaccacgccggcactcagtggtgtgtctgctgcaggaggaagtgtgggagaggatgtcagctctgggaaggcttgtctcataattaaggatgagtctgttgcctcttaatggggatccttttttttcccaccctcatgctttcacggagactgtggagcagcttggcaggctcaaattgttttgaggacaaaaggttattgtcaccaggaccttcataatgcagttggcctcttccctggctcccccacctccccttccccctctcctcagatagtttgcacagtggctagatttacaaagccattctcttcgcagtgcccccagtgctgagttcattcctgatggagtcttcccttgctctccctatcacccccttggctctcacctcctgcgcatggtgtcattggtcccggtgccagaatccccaagctggggccca

SEQ ID NO: 930334 - DNA, 821 bp, Homo sapiens
gtcagaataaggactagaatccaggtttctgactttttgttggggttctttctaatacagtgtgccagtcagcttttctttaggataattagacatgatcattcagtttcgagcttcggtgtacatttaagcaggggccctctgtccaccaggactggtgtcttgacgatcctatagggtcaagaggatggaatgaagcattttaggactgctgaggccgtcccttttctagtccccagtctgaccctgtagaccattgctcaaattaaactgatgcttcacacttctcactaagagcttgtgtcatttgggggtgggggttctggggaagatcccaaaaggaccagttcttagaaaaattgcctgctctcattagaggagcamcacgccggcactcagtggtgtgtctgctgcaggaggaagtgtgggagaggatgtcagctctgggaaggcttgtctcataattaaggatgagtctgttgcctcttaatggggatccttttttttcccaccctcatgctttcacggagactgtggagcagcttggcaggctcaaattgttttgaggacaaaaggttattgtcaccaggaccttcataatgcagttggcctcttccctggctcccccacctccccttccccctctcctcagatagtttgcacagtggctagatttacaaagccattctcttcgcagtgcccccagtgctgagttcattcctgatggagtcttcccttgctctccctatcacccccttggctctcacctcctgcgcatggtgtcattggtcccggtgccagaatccccaagctggggccca

SEQ ID NO: 930335 - DNA, 821 bp, Homo sapiens
gtcagaataaggactagaatccaggtttctgactttttgttggggttctttctaatacagtgtgccagtcagcttttctttaggataattagacatgatcattcagtttcgagcttcggtgtacatttaagcaggggccctctgtccaccaggactggtgtcttgacgatcctatagggtcaagaggatggaatgaagcattttaggactgctgaggccgtcccttttctagtccccagtctgaccctgtagaccattgctcaaattaaactgatgcttcacacttctcactaagagcttgtgtcatttgggggtgggggttctggggaagatcccaaaaggaccagttcttagaaaaattgcctgctctcattagaggagcaccacgccggcactcmgtggtgtgtctgctgcaggaggaagtgtgggagaggatgtcagctctgggaaggcttgtctcataattaaggatgagtctgttgcctcttaatggggatccttttttttcccaccctcatgctttcacggagactgtggagcagcttggcaggctcaaattgttttgaggacaaaaggttattgtcaccaggaccttcataatgcagttggcctcttccctggctcccccacctccccttccccctctcctcagatagtttgcacagtggctagatttacaaagccattctcttcgcagtgcccccagtgctgagttcattcctgatggagtcttcccttgctctccctatcacccccttggctctcacctcctgcgcatggtgtcattggtcccggtgccagaatccccaagctggggccca

SEQ ID NO: 930336 - DNA, 493 bp, Homo sapiens
  misc_feature 459: n = A,T,C or G
agaggctgttgagaatctgtgcagctctggggttgggggatgccaggccttggtggcctgggtttgtgagtaagatcttctgatccatgggttgcacagttccgtggaaaaagcacgttttccccgtgaaggactaagtggactaagttggctggacttcctgagtcaacagggacttccctaaggggactttcccctaagccaaaataagtcatagctgcamgctaagggactgaaacttcaaccaatcatatagggagtttaagctctagctgcagcctgacgtttttaaccaatcaggcccgccaacccacaagcagatagaaaataagctaattctataggacagaaaaaggaaaaggggaggggtcatgaggggatataagcataagacacccaagccagaaacgctacccttcccggttcccttccaccaagtggaagctttactttcgcttntgctttacttctgctttcgctttagtaaatcttg

SEQ ID NO: 930337 - DNA, 493 bp, Homo sapiens
  misc_feature 459: n = A,T,C or G
agaggctgttgagaatctgtgcagctctggggttgggggatgccaggccttggtggcctgggtttgtgagtaagatcttctgatccatgggttgcacagttccgtggaaaaagcacgttttccccgtgaaggactaagtggactaagttggctggacttcctgagtcaacagggacttccctaaggggactttcccctaagccaaaataagtcatagctgcaagctaagggactgaaacttcaaccaatcatatagggagtttaagctctagctgcagcctgacgtttttaaccaatcaggcccgccmacccacaagcagatagaaaataagctaattctataggacagaaaaaggaaaaggggaggggtcatgaggggatataagcataagacacccaagccagaaacgctacccttcccggttcccttccaccaagtggaagctttactttcgcttntgctttacttctgctttcgctttagtaaatcttg

SEQ ID NO: 930338 - DNA, 504 bp, Homo sapiens
gtgctaagcccctcactgcccagagccgggggcgcggcggccaccgatcggagtgcagggcccgcccagcccacgctcacccggacatgcgagccatgcgggcagccccggttccgcctgcatctctccctccacacctccccgcaagcagagggagccggctccrgcctcagccagcccagagaggggctcccacagtggcgggctgaagggctcctcaagcacctccagagtgggtgggcacggaggccgaggaggtgccgaaagcgagcgagggctgcaaggggtgccagcaggccatcacctctcaatgctatggctaaaccaagaccagacccaattcctaatcttgggttctttgcactggttgaggatggcaaaataaatgatattcaggccagtactctttatctccaacccatggcaggcattactaatcaatcactgccctccttcgcactgtgcctagaggcaactttttagaagccctttcaacacagtgtt

SEQ ID NO: 930339 - DNA, 504 bp, Homo sapiens
gtgctaagcccctcactgcccagagccgggggcgcggcggccaccgatcggagtgcagggcccgcccagcccacgctcacccggacatgcgagccatgcgggcagccccggttccgcctgcatctctccctccacacctccccgcaagcagagggagccggctccggcctcagccagcccagagaggggctcccacagtggcgggctgaagggctyctcaagcacctccagagtgggtgggcacggaggccgaggaggtgccgaaagcgagcgagggctgcaaggggtgccagcaggccatcacctctcaatgctatggctaaaccaagaccagacccaattcctaatcttgggttctttgcactggttgaggatggcaaaataaatgatattcaggccagtactctttatctccaacccatggcaggcattactaatcaatcactgccctccttcgcactgtgcctagaggcaactttttagaagccctttcaacacagtgtt

SEQ ID NO: 930340 - DNA, 582 bp, Homo sapiens
agagtggaagccccaagtcttggcagcttccatgtggtgttgagcctgtgggtgcacagaagtcaagaattgaggttggggaacctctgcctagatttcagaagatgtatagaaacacctggatgcccaggcaaaagtttgatgcaggggtggggccctcatggagaacctctgctagggcaatgcagaagggaaatgtggggttggagcctccacacacagtccctactggggcactgcctagtggagctgtgagaagagggccaccatcctccagaacccagaatggtagatccactgacagcttgcactgtgcacctagaaaacctgcagacactcaatgccagccagtgaaagtaaccaggagggaggctgtrtcctgcaaagccacagaggtagggctgcccaagaccatgggaacccacctcttgcatcaccatgacctggatgtgagacctggagtcaaaggagattattttagagctttaaaatttgactgccatgctatattttggatgtgcatgggccctgtaattcctttgttttggccaatttctcccatttggaagggctgtatttacc

SEQ ID NO: 930341 - DNA, 520 bp, Homo sapiens
ctcaacagaccaaaccaaacaaaactggagtcactcatgctaaaagtaacataatgaaactgagactttaaggaaacacatagatcttagaccagaacagaccaggttttgtttctctcctgtaaacagggcattctagcataaggggaagttccctctactcagtgtttgttcctacctttacaaaactcattgttctactgattcccagtgggtttcactaccaaataagtayatctactatggtgatagtgacatcaatgactaaagttttggtaaatctctctcaaaaatggagaaaatgaccaaaaggggggaattggtaaagcaaactagaaggcctgagaaggactccatacttctttatttgagtcattgtggacaaactgcaacctaacttcataggtagacaaaattgaaaatctaactttggagtatgtgcctgtaacaatagctgagtcttctccaatcccagtggccgttcttccaccattcttacactgctaagtgttcaaactct

SEQ ID NO: 930342 - DNA, 597 bp, Homo sapiens
tgccgcaacctgcttctgctttgggtgccggcgtctggatgaggggaatgtggtggtggccaaaaatcttggagatgccagcaaccctgaagccccaaagtgggtgttacagcatgctgcagttttggctcagggagccccaaagtctargcccccagaagggttgtagctcttctttccttcctgctgctcacagcacggtgaatggggagcaaggcagtatttcagcctatttgtgctatagctctttcagtcctgctgccccactctggcttgcggcactggggctggcctggccctgccactgcttcccgttgcatggggctgctggacaccagcggagggtggagagttacagtgttacagtagctcctttgtcactgctgtttggcaggtctcgagtttttgtcctgcatccaagaagaatgaggttacgcagacaaccagaggatgagaagggaggagaagagttttactgagccatggaacaagctctcagtggagagctgactcaaggcgggtggtcccccaccagaaggcaggtagtttgccagtgtggctcagaatgggagagtgcatgctgattgggttgtgagt

SEQ ID NO: 930343 - DNA, 810 bp, Homo sapiens
caactgtgaacaatatttacataggagtcataatagaaactttcaatgttgaactaccaattgtgctataactatattggaatgatgagggaagagtgagtgagtgtgtgtgtgtgtgtgtttgtgtgtgtgtattttagagagagagaggtgggcagtggtggggaggggtgttgggaatattgtaggtagtctaaatccttactctccatagtgagaagtcagtagacaatagtcaaaactataaaccccagaactagtagtgttaagttgaaccatctaaaattgttgatattaaccccctttygcctacgaaaatggtagcttctgatgattcctgttatttagaaacacggatgtcaataatagaagcgctatcttgaagagtcaaactgggtatctgtgggtaacaagttggaagtggagtggaaagtttttgccataagctttgaagaactatttggcattttaaacaatatattaatttaataaaattaaagttaataaaaaatgagtaagtgtcttacttccaaattacctaagtgaaaagacccaatgttactaggagaaatgattactagcagtaattgatctaattgtgaccactttttctcctttaagatttgtaccttttaaaaaatgactattaggagagcttaatctggaagacaaaaatagtctgttctaatagcctgtttagaactttaattgaaaatgtggttgcgtcttcctccaattaagctaattgaagtggaattctgattgggccctgtgagagaggagttccccagccgaggctcatagaataac

SEQ ID NO: 930344 - DNA, 701 bp, Homo sapiens
tctgggtcaggtggggacttggagaacttttgtgtctagctaaaggattgtaaacacaccaatcagcactctgtgtctagctagaggtttgtaaatgcaccaatcagcactctgtgtctagctaaaggtttataaacgcaccmatcagcgctctgtgtctagttaatctggtggggacttggacaacttttgtgtctagctaaaagattgtaaatgcaccaatcggcactctgtgtctagctaaaggtttgtaaatgtaccaatcagcactctgtgtctagctagaggtttgtaaacgcaccaatcagcactctgtgtctagctaaaggtatgtaaacacaccaatcagctctctgtaaaacggaccaatcaactctctataaaatggaccaatgagctcacagtaaaatggaccaatcagcaggatgtgggtggagccagataagggaataaaagtaggccaaccaagccaggagcggcaacccactccacttacctccccttccacactgtgaaagctatgttcattcgctcttcgcaataaatcttgctgctggtcactctttaggtccacgctgcctttatgagctgtaacactcactgcgaagatctgaagcttcactcctgaagccagcaagaccataaactcaccagaaggaacaaacaactccggacgtgctgtctttaagagctgtaacact

SEQ ID NO: 930345 - DNA, 594 bp, Homo sapiens
cactttggaaaataagttggcatcatttagtaaatacaaaaagtagctgaactctctgacccagaaatttcacccctaggtatattccctagaggaattcttgcactgtttactaggaggcatggaaaagaatgtttataccagcactgtttgtaattggagaaaaaaaaaaactgaaaacagaccaaatgttgattaacaatggaataaattgtggtgtattcacaatgaatacatcaatgaagaaataaaaaagctacagatggctgggtgtggtggcccatgcctgtaatcccagcactttgggaggccaaggcgaacagatcacctgaggtcaggagttcaagaccagcctgaccaacatggtgaaacyccctctctactaaaaatacaaaaattagccaggaatgctggtgggcacctgtaatcccagctacttgggaggctgaggcagggagaattgcttgaactcgggaggcagaggttgcagtgagctgagattgtgctgctgcactctagcctgggcaacagagcgagactccatctcaaaaaaaaagctacacagatgagatttagaaaggaaatgttaagtta

SEQ ID NO: 930346 - DNA, 673 bp, Homo sapiens
cagaaaagcgaatattgctgggacagcacatgttgctgtctgatcattcctctggaggtttgtctcaaaggggtacctggccgtgtgaggcgtcagtctgccccttctgggagctgcttcccagttaggctactcgggggtcagggacccacttgagggggcagtctgtccattctgagatctcaaactccgtgctggcagaaccactactctcttcaaagctgtcaggcagggacattkaagtctgcagaggtttctgctgcctttttttgggctatgcccagcccccagaggtggagtctacacaggcaggccggcctccttgagctgtggtgggctccacccagttcgagcttcctgactgctttgtttacctactcaagcctcagcaatggtgggcaccccacccccagcctcgctgccgccttgccgttcgatctcagactgctgtgctagcaatgagcgaggctccgtgagcgggaagcttccgagccaggcacaggatataatcttctggtgtgccatttgctaagaccgttggtaaagcgcagtattagggtgggagtgacccaattttccaggtgccatctgtcacagctttgcctggcttgaaagggaattccctgatcccttgcatttcccgggtaaggcgatgactcaccctgctctggct

SEQ ID NO: 930347 - DNA, 582 bp, Homo sapiens
gcataaatttgagcatctataaaaagcacattttaaaacataaagtgctatgtaaataatccattttgaatgttgtaaataaataagtcatctatgactttcattatttattggggaattaaatatacatggaatactgactatattccaggtactctgttaaggattgagcatacaaaagtcaaaaagacagacatcataccttttacatggaatgcacataataacaattttgacataattttcatattactagtcttataaaaactaaatacatactacaattaagagttggaagaagcctctagaatttggcaatagttgagggagttggtttctgtaatttcaagatgctgaaatcaaatgtattcagtagtaccatcccatactcatctcttcattataaacagrgaaacacactctcttctgagagcagaaggaaaaaagttgttttttgacattttctgcattcctttccatggctgtagattcgaacacttttaaatttctttttcacaaggctaggcaattttcagtactagtctttgaggataatctaaatgtgcatgagtcttggcctag

SEQ ID NO: 930348 - DNA, 641 bp, Homo sapiens
ggattacagttgcctgccactgcactggctaatttctgtatttttagtagagacgggttttcaccatgttggccagtctggtcttgaactcctgacctcgtgatccacccaccttggcctcccgaagtgctgggattacaggcgtgagccaccatgcccagcctattaatttcttaaggctgccataacaaattgccaccaacttgagcctcacagttatggaggctcaaggtctgatatcaaggtgtcaacagggccrtgctccctctaagaatccttccttggggcttccaaggttctagaggctctaggaatgttttggtgcaccttggcttatgggtacattgctgtcatctctgcctccttcattacttggccttcttctgtgtctgattgcacatggccttcctataaggacaccattcattggatttagggaccactctaatccagtatgccgtttggcatttgaactaattgcatctgcaaagatcccatttccaaatagggtcacattctgaggttgcaggtgggacatgaattttgggggagacactgttcaacccagtatagattatatagaagaatatctgaagacagagagaaatgtttacagtatattactgagtaaagaaggtggt

SEQ ID NO: 930349 - DNA, 641 bp, Homo sapiens
ggattacagttgcctgccactgcactggctaatttctgtatttttagtagagacgggttttcaccatgttggccagtctggtcttgaactcctgacctcgtgatccacccaccttggcctcccgaagtgctgggattacaggcgtgagccaccatgcccagcctattaatttcttaaggctgccataacaaattgccaccaacttgagcctcacagttatggaggctcaaggtctgatatcaaggtgtcaacagggccgtgctccctctaagaatccttccttggggcttccaaggttctagaggctctaggaatgttttgrtgcaccttggcttatgggtacattgctgtcatctctgcctccttcattacttggccttcttctgtgtctgattgcacatggccttcctataaggacaccattcattggatttagggaccactctaatccagtatgccgtttggcatttgaactaattgcatctgcaaagatcccatttccaaatagggtcacattctgaggttgcaggtgggacatgaattttgggggagacactgttcaacccagtatagattatatagaagaatatctgaagacagagagaaatgtttacagtatattactgagtaaagaaggtggt

SEQ ID NO: 930350 - DNA, 743 bp, Homo sapiens
ctcctgcctcagcctcccgagtagctgggactacaggtgcccaccaccacgcctcactaaatttttgtatattttttagtagagacggggtttcactgtgttacccaggatggtctggatctcctgaccttgtgatccgcccaccttggcctcccaaagtgctgggattacaggcttgagccaccacgmccagccgcctccagagatttttgaacttcaggctttggcacctgttttggcccttggccctttcttagttactgtggaagcagaggcaggtaaccaactgcaatgagtaggtgagccgttcctatgaacttcactcccattccacctgggtttgccaagtacagaaatgaacagacttgcacttgcatcttctggtgttggagggcaccaatatcaaaaggtgacctcttgctggaggacaacaatatctgctatttaaggacccaaatatataactcttgtacaatgtaaaatgaaacaaagcttgtaaacagttatatagatttcttcatgggattcttctttgagatgtgatctttctccaaagattttgaggatgagagtttgtttaaaatgttctgaagctctgatactagtggccttttcattttttatttttttgagacagagtctcgctgtcgcctaggctggacagagcacaatggcacgatcttggttggctcaatgcaacctccgcctcccggcttcaagcaattcttctgcctccagctctg

SEQ ID NO: 930351 - DNA, 723 bp, Homo sapiens
acactgcccctgaagactccatggcagggcccttccttgcctcttccagcttttggtgccctgggcttccttggtttggggctgcatcgctccagcctatttctccatcttcccatggccttatcctcactgtgtttctgtgttcaaatctccatcaactttctcttacaaggacacaagtccttgggtttcgggtctactctaaatccaggatgatctcatctcaagatctctaatgcasttaaacctgcaaataacctagttcaagtacagtcacatttataggttctgggaactaggagttgaaaatgtgtttttgggtatttattttgacttagcacactgcaatacacttgctatgttgtgaggaaaatgacacttaacctctgtgcccttcttcctaaaaacacatcatcaaagcctaatcatgagaaaaacaccagacaggccccagttgaagaacgctgtataaaacgcctaaccaatgcccctcaaaactgccaaggtcattaaagacagggaacgtcttgagctttcaaactcaaaaggagcttaaggagacatgagtaaatgtaatggggtatcttgaatggcacgctggaacagaaataggatgttaggtaatataatgtaccaatactgctccattgcttttagcaaatgtactatgcttatataaactgttaataataggcaaactgggtgtggggtatataggaactc

SEQ ID NO: 930352 - DNA, 723 bp, Homo sapiens
acactgcccctgaagactccatggcagggcccttccttgcctcttccagcttttggtgccctgggcttccttggtttggggctgcatcgctccagcctatttctccatcttcccatggccttatcctcactgtgtttctgtgttcaaatctccatcaactttctcttacaaggacacaagtccttgggtttcgggtctactctaaatccaggatgatctcatctcaagatctctaatgcagttaaacctgcaaataacctagttcaagtacagtcacatttataggttctgggaactaggagttgaaaatgtgyttttgggtatttattttgacttagcacactgcaatacacttgctatgttgtgaggaaaatgacacttaacctctgtgcccttcttcctaaaaacacatcatcaaagcctaatcatgagaaaaacaccagacaggccccagttgaagaacgctgtataaaacgcctaaccaatgcccctcaaaactgccaaggtcattaaagacagggaacgtcttgagctttcaaactcaaaaggagcttaaggagacatgagtaaatgtaatggggtatcttgaatggcacgctggaacagaaataggatgttaggtaatataatgtaccaatactgctccattgcttttagcaaatgtactatgcttatataaactgttaataataggcaaactgggtgtggggtatataggaactc

SEQ ID NO: 930353 - DNA, 557 bp, Homo sapiens
tctggtcctgggcttttttgttggtaggctattaattactgtctcaatttcagaacttgtcataggtctattcagagatttgacttcttcctggtttagtcttgggaggatgtatgtgtccaggaatgtatccatttcttctagattttctagtttatttgcatagaggtgtttatagtattttctgatgttagtttgcatttctgtggggtcagtggtgmtatcccctttatcattttttattttgtctatttgatactgctctgccctttcttctttattagtctgggtagctatctatttgttaatcttttcaaaaaaccagctcctggattcactgatttttttgaaggttttctcgtgtctctgtcttctttagttctgctttttttggtttcatatggaatcaaaaaaaagcccgtatagccaagacaatcctaagcaaaaagcaaaaactggagacatcacactacctgacttcaaactatactacaaggctatggtaaccttctttagttctgttgatcttagtttggtttagtttagttctgttgatc

SEQ ID NO: 930354 - DNA, 557 bp, Homo sapiens
tctggtcctgggcttttttgttggtaggctattaattactgtctcaatttcagaacttgtcataggtctattcagagatttgacttcttcctggtttagtcttgggaggatgtatgtgtccaggaatgtatccatttcttctagattttctagtttatttgcatagaggtgtttatagtattttctgatgttagtttgcatttctgtggggtcagtggtgatatcccctttatcattttttattttgtctatttgatwctgctctgccctttcttctttattagtctgggtagctatctatttgttaatcttttcaaaaaaccagctcctggattcactgatttttttgaaggttttctcgtgtctctgtcttctttagttctgctttttttggtttcatatggaatcaaaaaaaagcccgtatagccaagacaatcctaagcaaaaagcaaaaactggagacatcacactacctgacttcaaactatactacaaggctatggtaaccttctttagttctgttgatcttagtttggtttagtttagttctgttgatc

SEQ ID NO: 930355 - DNA, 605 bp, Homo sapiens
agctctcctgtatgaggtgtttgtcaactccttctgggaggtgtctccccatcaggaggcatgggggttggggacccatttgaggagacagtttgtcccttagcagagctccagtgctttgctgggagatccgctgctctcttcagagacaacaggcaggaaggtttaagtctgctgaagctgtgtccacagccgccccttcccccagatgttctgtcccagggagatgggaattttatctataagcccctgactggggctgctgcctttctttcagcagaaaggctgccctgcccagtgaggaggaatctagagagagagcctggttacagcggttttgccaagttgtgatgggttccrcccagtttgaacttcctggtggctttgtttacatggtgaggggaaaaacccttgctcaagcctcagtaatggtggacgcccttcccctatcatgcttgagcatcccaggttgacttcagactgctgtgctggcagtgagaatttaaagccagtggatcgtagcttgttggtctccatgggggtgggatccactgagctaaaccacttggctccctggcttcagccctcttcccaggggagtgaat

SEQ ID NO: 930356 - DNA, 585 bp, Homo sapiens
agcctggcctctaacagcccatgagactctcggctcactctctgtctctgcttacaagctagaagagatactgtctgagacgacagagatgcacaatggaaggaatcgtgatctctaagccactgcttgaaagagattggtcagggcatctgttcaacttgcctgggttctacatgagaagcacgtcttgcttttgttcagcacattcagcgagtgattgccattaccctgacgcatgctgaagttgacaagtcttggaccaaggtgccacctgcacttgcatattcatactgcccaataacactcactgggttgcgggaaataaggcagagattaaagtctaggaggttgcagagttcgccctgcatggactgaaacattggagctacmtcaggctgaggatgctctgggttggctttccatgcttgtttgtttgttcatggttcagtttgtgtaattcagccaccactggcccaaaaatccaaagaaaaattcccttttcccacatgttactgacctggttagaaaagccatattaggggtaattttgaagagccactgttttgaaatacggtttctcttcca

SEQ ID NO: 930357 - DNA, 548 bp, Homo sapiens
ctttaagttgaagccaatgctcatttaccattccaaaaatgctaaggcccttaagaattatgctaaatctactctgcctgggctctataaatggaatagcaaagcctgtatgacagcacatctgttaacagcatggtttactgaatattttaagcctgctgatgagaactactgctcagaaaagagattgctttcaaaatattactactcgttracaatgcacctagtcactcaagaactctaacagagatgtacaagaaaattaatattgttttcatgcctgctcacataacgtccatctataaaccattaatcaaggagcaatttcgaatttcaagtcttactttttaagaaacacatttcgtaaggctataactgccatggatggtgattcctctgatggatctgggcaaagtagattgaaaaccttcgtgaaaggattcactattctggatgccattaaaagcattcctgattcatgggaggaggtcaaaatatcaacattagcaggagtttgaaagaagttgattacaaccttcatggatgac

SEQ ID NO: 930358 - DNA, 826 bp, Homo sapiens
aaatagtagcctgggcaacatggtgaaaacttgtctgtacaaaaaatacaaaaattaactgggagtggtggtacacacctgtaatcccagctacttgggaggctgaggtgggaggatcgtttgagcccaggagattggggctacagtgagctagtgagaccctgtctcataaaagaagagagaaagaaagagagagagagggagagacagacagacagaaagaaagaaagaaagagagaaagagagagagggaaggagggagggagagagagaaggagagagaaagagagagagagaaagagagagataaagaaggaaagaaagagagagaggagggagggagcaaacgaagaaaggactaaatagtaasaaaatcaacaacgttattttttaaaatgggcaaaagatctaaacagacacctcactaacaataatatagagatggtaaatatgcatatgaaaatatgcccaacatcttgctattagtgaattagaaattaaaataatgatagatgccacaacccacctattaaaatggccaaaatcaaaaacatgacagcatcaaaggctgatgaggatgtgaagcaataggaactctcatttactgctggtgagagtgcaaaatggtacagccacgtcagaagagagtttggcagtttcttataaaactaaacatactcttggcatatgatccagcaatcccactctttggaatttactccaaagaactaaacatttacacacacatacacacacacacacacacacacatacacacacacacacacacaatctgcacttgaatgtctataacagctttattcat

SEQ ID NO: 930359 - DNA, 826 bp, Homo sapiens
aaatagtagcctgggcaacatggtgaaaacttgtctgtacaaaaaatacaaaaattaactgggagtggtggtacacacctgtaatcccagctacttgggaggctgaggtgggaggatcgtttgagcccaggagattggggctacagtgagctagtgagaccctgtctcataaaagaagagagaaagaaagagagagagagggagagacagacagacagaaagaaagaaagaaagagagaaagagagagagggaaggagggagggagagagagaaggagagagaaagagagagagagaaagagagagataaagaaggaaagaaagagagagaggagggagggagcaaacgaagaaaggactaaatagtaagaaaatcaacaacgttattttttaaaatgggcaaaagatctaaacagacacctcactaacaataatatagagatggtaaatatgcatatgaaaatatgcccaacatcttgctattagtgaattagaaattaaaataatgatagatgccacaacccacctattaaaatggccaaaatcaaaaacatgacagcatcaaaggctgatgaggatgtgaagcaataggaactctcatttactgctggtgagagtgcaaaatggtacagccacgtcagaagagagtttggcagtttcttataaaactaaacatactcttgscatatgatccagcaatcccactctttggaatttactccaaagaactaaacatttacacacacatacacacacacacacacacacacatacacacacacacacacacaatctgcacttgaatgtctataacagctttattcat

SEQ ID NO: 930360 - DNA, 597 bp, Homo sapiens
cagggctgaggggtgggggatgggtagctactgtgagctaagctgagattgaccaaatatactgtactttactgtccaagccttctgaaatttttaagtcttcaatagactccagagtttcaaaatagttatatcagtgtgatggttaatattaggtgtcagcttaattggattgaaggatgcctcggtgggctggtaaagtagtgtttctggtgtgtctgtgagggtgttgccaggggagattaacatttgagtcagtggattgggagagacagacccaccctcaaggtgggtgggcaccatccagtcggctgccagcatggctagaacaaaagcaggtrgaaaaaggtgtgataagatggcttgctgaaccttctggctttcacctttctcccatgctggatgcttcttgcccttgaacgtcagactccagttctttggcatctggactcttggactacaccactggtttgacaggggcttttgggccttcggccacagactgaaggctgcactgttgtccttccctacttttgagacttttggtgtcagactgagccactgatggcttctttcttcatcatcttgcagatggcc

SEQ ID NO: 930361 - DNA, 705 bp, Homo sapiens
cctgctatagactggcaggcttataaacaatagaaattacttctcacagctctggaggctggaagtccaaggccaggatggcagcatggttgagttctggtgagggtgcccttctgggttacagacggctgacttctcactataacctcacaggacagtgggagtgaggggcttccattggtatacatatataggcactgatgccactcgcaagggctctgcttctgtgacctaatcaccccccaaaggctctacctcctaacaccatcaccttgggatttcaatatatagattttggggggacacaaactcaaactagcttaaytctgtgtagctttcttctctcctgtatctgacccacaaattcaagcctccctggtctccccaaactttgggttctctctctcttcaactcagcaaggtactgcttgaggttccctccctgtcccccatgtagtgtgctgttgagaccacaaggcttggctcatcttgtttccttccactcagggaccatagtcctgtgcagccctttgtgcaaacccttttactgcatccattttctccagttctctgcatgttcaaggtgagaggggaaatctggctcctgttactccatcttggcctttgacacgtgcagtgaatacattgtgcctggctgcgagtgcaggcctaaggaggacacgtggaatggacagaggaaggagg

SEQ ID NO: 930362 - DNA, 679 bp, Homo sapiens
agggaatacttgcatcacccctccctcagtcccaggaagtacttcctgcagctctggcagagagtctttctgcttgaggaaaggaacgggaagagtgaagaggacattgtctgcaacttggatgctagctcagccacagtaaaacaaagcatcaagcagagtcctgaagccctcattccaggctctagatcccaggtgatatttttagacctgccctgggccagaagggaacccattgccctaaagggrgaggcacaggcttggcaggattcaccacctgctgactaaacagcccttgggccttgaataggtatcagtgttagccagacagtagtcaccatggggatggggcagtggtatccatcgggatagtcaccttctgcttgaataaaaaatagggaaaagtaaagaggtctttgtcttgcaacttgggtaccagctcaaccacagtaaaataaagcaccaagcagtcataaagcaccaagcagagtcctaaagctcctgattccaggtcttagcttatggacaccatttctagacccaccctgggtgagcagagaacttcctgccctgaaggcaaagaccccaggcctgtcaggattcactacctgattactaaaaggctcttatgccttaaataaacatcagcagccaggcaataattgccacaaactttggg

SEQ ID NO: 930363 - DNA, 679 bp, Homo sapiens
agggaatacttgcatcacccctccctcagtcccaggaagtacttcctgcagctctggcagagagtctttctgcttgaggaaaggaacgggaagagtgaagaggacattgtctgcaacttggatgctagctcagccacagtaaaacaaagcatcaagcagagtcctgaagccctcattccaggctctagatcccaggtgatatttttagacctgccctgggccagaagggaacccattgccctaaagggagaggcacaggcttggcaggattcaccacctgctgactaaacagcccttgggccttgaataggtatcagtgttagccagacagtagtcaccatggggatggggcagtggtatccatcgggatagtcaccttctgcttgaataaaaartagggaaaagtaaagaggtctttgtcttgcaacttgggtaccagctcaaccacagtaaaataaagcaccaagcagtcataaagcaccaagcagagtcctaaagctcctgattccaggtcttagcttatggacaccatttctagacccaccctgggtgagcagagaacttcctgccctgaaggcaaagaccccaggcctgtcaggattcactacctgattactaaaaggctcttatgccttaaataaacatcagcagccaggcaataattgccacaaactttggg

SEQ ID NO: 930364 - DNA, 813 bp, Homo sapiens
gctcaactgtgaacaatatttacataggagtcataatagaaactttcaatgttgaactaccaattgtgctataactatattggaatgatgagggaagagtgagtgagtgtgtgtgtgtgtgtgtttgtgtgtgtgtattttagagagagagaggtgggcagtggtggggaggggtgttgggaatattgtaggtagtctaaatccttactctccatagtgagaagtcagtagacaatagtcaaaactataaaccccagaactagtagtgttaagttgaaccatctaaaattgttgatattaaccccctttygcctacgaaaatggtagcttctgatgattcctgttatttagaaacacggatgtcaataatagaagcgctatcttgaagagtcaaactgggtatctgtgggtaacaagttggaagtggagtggaaagtttttgccataagctttgaagaactatttggcattttaaacaatatattaatttaataaaattaaagttaataaaaaatgagtaagtgtcttacttccaaattacctaagtgaaaagacccaatgttactaggagaaatgattactagcagtaattgatctaattgtgaccactttttctcctttaagatttgtaccttttaaaaaatgactattaggagagcttaatctggaagacaaaaatagtctgttctaatagcctgtttagaactttaattgaaaatgtggttgcgtcttcctccaattaagctaattgaagtggaattctgattgggccctgtgagagaggagttccccagccgaggctcatagaataac

SEQ ID NO: 930365 - DNA, 594 bp, Homo sapiens
aacaacagaagccagtgtcaaaaagcaaagcaatcacagaaaaaaatatcagcaacaacccatctgtcagagttatccaccagggaattttaaataactatcattaacatgttaagctctatgaaaaatgcaaacaaaacgcattaacaacagagacggaatctgtaagaacgtgtcaaatggaaatgttgtacataaaaaacactgtgtgctttcaatgggttcattagtagacttgacacaaccaagaaaggaatcagtaaacttgaagaaaggttgacagaaattacctaactgaaatacaaagagtaagaagagtaggagaaaaraaaagtaaaaagcaacaaataatgttagtacagcttctttggaatacagtttgtctgttatacacttatgacccagcaatcccattcctagatatttaccttaaagtaatggaaacttatgtttacacaaagttgtgaatatctgtagtacttttatccataatgccaaaatctggaaacaacacagtgtccttcaactggtgaatggaatactattcaataaaaaagaaattaaatactgataaatgcaatgacacagatgaat

SEQ ID NO: 930366 - DNA, 707 bp, Homo sapiens
ccacccaagcaaatcacaatcctcccacttggccttgcgggtatgaggagggaaagctcacccccacacctcacctggacccttcctgctagatctttatgggctctcctgggaggagctattctccaggatggaartaccacttttttccctgggatttcctagatatttcaacaaaaacacagggtcccagcacctggcctgaatttgtgtgtgtgaaatttggccctctctcacctggttcggtttcttaacacaattgctgctgtctaccttcttttccaacccagcaacttttggatatctttcccatagctcttccctccctagaggctatgtcaaatgacctcttggagtctaagcatcaacaggatctgggacatcaagtcctttatgttgtcctagtgatggtgtcaccctcaggcacaataagtgatcacttttatccacatcctagagatgaggaatcatggggcctagagaggacaggcaactgcccaaggcccatgcagcacagcaggtacaggtgatccaggtacccgcccagatccccctccaggactgagattcgcatcctactgcctcatctcccctcccctggggcagcccacaccccagcgctggttagggcaacaagcaaaggcacaggttctcttgtcccaattcatggcagctccaaggggccatctctgctccagggctccctc

SEQ ID NO: 930367 - DNA, 604 bp, Homo sapiens
ggggtgctgctggcaccagatggtagggagatgccaggggtgctgctccacaccctatgggacactgcacagtacacctggcctgtgtcccccacagcgagagctggccctgggcaggcgtggtccctgcggtgtgtgttggttgggatcctccacagtgacagacggtgcgctctgcccacgtttccacacagctcttttgcttgtggagctcacccctttgcagagagctcatttccctgcggtctttggcctgcagaagtaaaatgaggggtggtgaattacacccctgctggttacacatggaaaactcaggagtgagaattttgtggagagcaagagaggtgagactggggtgctggctgccagccaggcggtccctcagcccctggagaagcggggtggggcctgcacaccgagtccttccagtgagtccagtgatgytctctttctcctcttcctcccagtcacctttctctccagtgccactactgcgctttcgatgcagaataattcagcatttggcgacttgaagtcggacgagttggagctgctctactcagcctacggagatgagacaggcgtgcagtgtgcgccgaggcag

SEQ ID NO: 930368 - DNA, 629 bp, Homo sapiens
ccttgtgctatccccaaactgccactcttaactcttgaagtaaataaataatctttgctggcaggactatgctgaatctccttaggcactctctaatcagatatcctgagtcgtcccaattcttagaccttttatacctgtttttctccttctcttattccatttagtttctcaattcatccaaaactgtatccaggccatcaccaatcattctatatgacaaatgtttcttctaacatccccacaatatctccccttaccacaagatctcccttcagcttaatctctcccattctaggttcccacgctgcccctacccctgcttgaagcagccctgagaaacatcgcccattctctctccataccaccccccaaaaattttcgccgccccaagacttcaacactattttgttttatttttcttattaatataagaaggcaggaatktcaggcctctgagcccaagccaagccatcgcatcccctgtgacttgcacatatacatccagatggcctgaagtaattgaagatccacaaaagaagtaaaaatagccttaactgatgacattccaccgttgtgatttgttcctgccccaccctaactgatcaatgtactttgtaatctccccc

SEQ ID NO: 930369 - DNA, 624 bp, Homo sapiens
ccgggcacagtggcttacgcctgtaatctcagcactttgggaggccgaggcaggcagatcatgaggtcaggagatcgagaccatcctggctaacacggtgaaaccccgtctctactaaaaatacaaaaaattagccaggcgtggtggcggtcacctgtagtcccagctactcaggaggctgaggcaggagaatggcgtaaatccagggggcagagcttgcagtgagccgaggtcgccccactgcactccagcgtgggcgtcagagcaagactctgtctcaaaaaaaaaaaaaaaagaaagaaaaggtgatatttgaattagatcattctgccttcattaatcaactgaaatatttctgtagaaaaaattttgtctgcaaccatgcrgaagaccagcgatacagcttgcatggagggatgtttgattttctctttatttaccaacttttaaaaatagttggctccttagcatcctccaatcgtgatcagttagcattttcttcttcttagaatccttgtgaactcaaggatttaagcattttcatgtgtttcacctggccagtgcttatccctattgaggctcaacgatttttgtctttggtcagtgagagcctctgggttcaga

SEQ ID NO: 930370 - DNA, 598 bp, Homo sapiens
ctaagggagatgcctcagccagagccgtgtgtcattctgggctccatgtccaaagaggaacattgtcaaattagcaggactccagaaattgagtgcctgggatcatgaaggactctatatgagtggttaattataaaacttataagaggctgaataatccttaagaagggagtgttcaatagaggctgagtcaccagaagtcagaaaggtttttgttcatgaatagagtgccaaatttaaaatgaggcctttgcctgcaaatccaaatstaagattcttctttggtaaattcacatatataattttgcatgattatatataggattaaacaatgaaaatccatggggtcttgagacttttccctctctttagcctctaagaacacatggctacatatacattgatgaagatatggcaaaatgtcttccttgccttccaaaatagccttttgaagttgacagcatttgcgtttcccctgggttgtaaccaagcacgcacttccttccatggtttccttgcagggcccccttactatctgaggccaggtaatgcacaggaaagggccctcaggtgtcagagaagaccaactgctggttca

SEQ ID NO: 930371 - DNA, 611 bp, Homo sapiens
gactggtgcgagataattgaatcataggggtggatactcccatactgttcttttagtagtatgggagattggatctcacgagaaccaatggtttgataagggaaaacccatttcacttgattctcattctctctcttgtctgctgygtgcctttcaccttctgccatgattacgaggcctccccagccatgtggaactgtgagtcgaattaaacctctttctttcgtagattacccagactcaggtatgtctttatcagcagtgtgaaaacagactaatatacctggcttctgatgaggtctcaggaagcttttaatcatggcggaaggcaaagagggagcaagaacatcccactgtgaaaacaggagcaagagagagagaggaggggcagggaggtgccacacacctttaaacaaccagatctcatgagaactcactcactatcacgaagatagcccaagacatgagggatccacccccatgattcaaacacctccagcactagcatgagatctgtgtgaggacaaatatccacactatatcataattgtttcaggaatctaaaatgaaatgcccagaatagttcctggcacatagcaacctccacgtaa

SEQ ID NO: 930372 - DNA, 643 bp, Homo sapiens
ttcttaactctcttcaacacagattctgattgtctttatttctacagcaggaaaggctgcagacacacctttcaagacctggatgtactagcagctgacttctgctctacctgcagctttaaaaatgggctgtgctgtccacagtgtatccatggctggccttggcagggctctccaatcacctgaagcctagccccatggagaactaacagagctcaatggggggcttcatgttcctaggaraattagggaggggaccaggagtcacgggatttcccacgtgccagactgcaatcctgttgggtacctacctgcctgcccctgcagggatggatgctcttgcacctgcgctccgggagcagaaatgatggggagcttctgaccctgctgcatccttggtaagttgcaaggtggcgcaaagatttgggatgttgaacaaaagtggttttctaaacctttttcaggtgtctgctgggacctctgtgcttgtctggaactcctgaggcactttctagacaagctggggtgtggtgggcaagatcccaagatccaggtccctctcccatctcccacggagcactggctgtttatccccaaatgtgcaggtgtctgtaccagtctctctctctctccatctttcttc

SEQ ID NO: 930373 - DNA, 566 bp, Homo sapiens
accaccttgagtgtctctggggctacttctttttattcactcggcctcacctgtcccaccagcccttggcatggctgttctacctgaaatttttgctatgtgttcattcatactcactagcattgacctttcttgaatgtatttttccatttgaggctcatcacctttctttttcaaaggcatggtggcatcatctttggtcacaatgacttctactttttcgaggctgaacatcttcaagatttagagtgagcccctcctcttcaaacacctgcaaaaacatttaaaaataagctagtttcagggtatggtttttctttagtctaccaaatttattcataatacattatgcaggtgttttgaatggaatccagaaacctctttagataccrtatttctctgaaatgtgagaatggaagatcattgctattccaggacaagtcttgtgcatagagctttttattgctttaatttgcattatttcatttactcctcagaactctgtcagttagtaacagcttgatcatgcagatgagttaacggaacccagaggaaactcgcccaaa

SEQ ID NO: 930374 - DNA, 762 bp, Homo sapiens
caaattatttataaaattgggacctgtttacctgaccaaattttatttgcctgataagtatgaaagacaaggggaagtggagaaagattctgtaggaaaggggggtggtggtgaattatatggctcagtgtgaaaccttgcagtccctgagccaccagagagctcacccagcagcggagacaccaaagaaaaatgttgaagtggccacttgtcagcctgcaggaagccatccaccaggccaagggtctgaggcccccagtacacttacttgagcagaacacctcattggggtcaggagatagagascatccttgctaatatggtgaaaccctgtctctactaaaaatacaaaatattagccaggcgtggtggcgcacacctgtagtcccagctacttggaaggctgaggcaggagaatcgcttgaacccaggagatggaggttgcagcgagccaagattgcaccactgcactccagcctgggtgatggagcgagacaatctcaaaaaacaaaaaacacctcattgggactagcagaaggttaactctagtattgacaggcagcttttatctttctcaccagggagggttaggacattctcattgccaatggcccttttgcttatggtaggcacactgattctgacccaggggccagcaagtcaagagctcttgtctgggcatgtcagatgccaatcttaaaacacactctcaggatgggtaaggctgaggggcaaggcactgacagcaactgttagcaattg

SEQ ID NO: 930375 - DNA, 752 bp, Homo sapiens
gtattccatggtgtatatataccacactaaaaaaaaatccaaaccaccattaatgggtacctaggctgattccatgtctttgctactgtgaatagtgctacaatgaacatacaagttcatgtgcccatttggtagaaagatttatttttcttggggtacatacccagtaatggatttgttgggtcaagtggtagttgtgctttaasttctttgaaatcttgaaactgctgtccacagaagctgaactaatttacatttccaccaatagtgtaaagtgttccttttttttcctgctgcctcaccagcatctgctgttttttgtatttttaataatagccattctgactggtgtgagatggtatctcattgtggctatttgatttacattcctttgatgattaatgatgttgagtattttttcatatgtttgttggtcatttgtggttttttttgagaagtgtctgttcatgtcttttgcccatttttaatggttttttttttgcttgttcaattatttgagttccttatagattctggatattagacttttgtggggcatagtttacaaatattttctcccattttgtaggttgtctgtgtactctgtgaatagtttcttttgctgtgcaggaagtctttagtttaaataggtcccatctgtcaattcttgtttttcttgcttttttttttgagtgcttagtcataaagtatttcccaaggctgatgttcagaatgatgtttcttaggttttc

SEQ ID NO: 930376 - DNA, 583 bp, Homo sapiens
ctgggctgggttttttgttgttgttgttgctggtaggtttttttaataactgattcaattttggaactcgatattggtttgtttagggttttaatttattcctgatttgatcttgagagtttgcatgtttccaggaagttatccattttttctagattttatagtttgtgtgcatagaggtgttcgtaatagtctctgaggatcttttgttatttctgtgggatcagttgtaacttcacctttgtcattctgattgtgcttattttgatcttctctctttttctttgttaatctagctagtggtttatagatctttctttgtgtggatttttgggtgtcaatttcactcagttcttctctgattttagttattcctttgtgtctgctagctttggtgttagtttgttcttkttttctagtttgtctaggtgtaatgtgagattgttaatatgagatctttctttctgaagtaggtgtttagcaccataaactttcctcttaggtctgcctctgttttctgtctgagattttggtatattgtgtttctgttttcatttatttcaaacaattttttgatttctac

SEQ ID NO: 930377 - DNA, 746 bp, Homo sapiens
atgtgtggtgttatttctgaggcctctgttctgttccattggtctatatatctgttttggtaccagtaccatgctgttttggttactgtagccttgtagtatagtttgaagtcaggtagagtgatgcctccagctttgttctttgcccatcttttattttttatttatatttatttatttactttttgagacagaatcttgctctgttgcccaggctagmgtgcagtggcagtgcagagctgcagtgcagctcactgcaacctctgcctcctgggttcaaacaactttcctgcttcattctccctagtagcaatggccacctcgctcagctaattttttttttttttttttttaagagtcagggtttgatcatgttggtcaggctcatcttgaatttctgatctcaagtgacctgcccaccttggcctcccaaagtgctgggattacagacctgagccattgtgcccagcctctttggccatctttttgaaaagtctctaaacatatttataatagctgctttaaaactcatgtctgctaattccaacatttatatcatctccaggtcactttctactcacgatatttttcttgagtataggtcacctctccagcccccgcatgtccagtatgttttgattttatactggatgttgtggatattatgttataaagattgtattcagagtatttatttgaagtcttaatttttgttctagcaggtaattaaattactgactgacgtc

SEQ ID NO: 930378 - DNA, 457 bp, Homo sapiens
gaaaaccaagaacaaacaaacctcagagctagcagaagacaataaataacaaacctcagagcagaactgaaggagacagagacataaaaagcccttcaaaaaatcaacaaatataggagctggtttttttcaataaattgataaaataaatagaccattaagtgaggctwaaaaagaaaagagagacaattcaaataaacacaataagaaataataagggggataccaccactgaccccacagaaataaaaacaaccatcagataatactataaacacctctatacaagtaaactggaaaatctagaagaaatagatacattcctggacacatacaccctcccaagatggaaccaggaagaacttgaatccctgaatagactaacaacaagttgtgaatttgaggcagtaatacatagcctaccaaccaaaaaaagcccacgtgcagttggatttac

SEQ ID NO: 930379 - DNA, 538 bp, Homo sapiens
gcagtgttatgagggagatttactgcactaaatgctcacatcaaaaagctagaaagagctcaaattgacaccctaacatcataactaaaagaactagaaaaccaagaacaaacaaacctcagagctagcagaagacaataaataacaaacctcagagcagaactgaaggagacagagacataaaaagcccttcaaaaaatcaacaaatataggagctggtttttttcaataaattgataaaataaatagaccattaagtgaggcttaaaaagaaaagagagacaattcaaataaacacaataagaaataataaggggrataccaccactgaccccacagaaataaaaacaaccatcagataatactataaacacctctatacaagtaaactggaaaatctagaagaaatagatacattcctggacacatacaccctcccaagatggaaccaggaagaacttgaatccctgaatagactaacaacaagttgtgaatttgaggcagtaatacatagcctaccaaccaaaaaaagcccacg

SEQ ID NO: 930380 - DNA, 538 bp, Homo sapiens
gcagtgttatgagggagatttactgcactaaatgctcacatcaaaaagctagaaagagctcaaattgacaccctaacatcataactaaaagaactagaaaaccaagaacaaacaaacctcagagctagcagaagacaataaataacaaacctcagagcagaactgaaggagacagagacataaaaagcccttcaaaaaatcaacaaatataggagctggtttttttcaataaattgataaaataaatagaccattaagtgaggcttaaaaagaaaagagagacaattcaaataaacacaataagaaataataagggggataccaccacygaccccacagaaataaaaacaaccatcagataatactataaacacctctatacaagtaaactggaaaatctagaagaaatagatacattcctggacacatacaccctcccaagatggaaccaggaagaacttgaatccctgaatagactaacaacaagttgtgaatttgaggcagtaatacatagcctaccaaccaaaaaaagcccacg

SEQ ID NO: 930381 - DNA, 602 bp, Homo sapiens
cttgaggaaaggcgacccagtagtaataaaatacccagaattcagatattggtttctaatgccattctccaataaaataagctagggtcccttggagaaatgtctgattctagggctgggtcagggaatgtatacgatgagcgtagagctaaagacaygcacacaaacaaaacaaaacaaacaaatgattaaaaaaattaaaaccctccacaatgatggagaaaggtcaaagaaatacagaagccaacagggagagttcccaatacccaaagctggaaggatttgagcaacaaaatgaataatgtagtgttggattacaacccagagaataaaataagtatctgtgaattcatactgatataaataaatgattaaataaataaataattaaataggagagaagaaccaaatcgcaaatctcccatgcagaagaattacaaattatttatacgaatatttccctctcaagaaggtagagcataattccctaccttttaaatatggctgcatattgtgacattctttcaaagattgcagtatggaaagagggaaaaacagctacttcacagtggagaaacctgacaaacactacgtcagccagg

SEQ ID NO: 930382 - DNA, 829 bp, Homo sapiens
catctcattaaaacctaatcacccttaccccgctcaatgccaatatcccatcccacagcatgctttaaaaagattaaagcctgttatcactcgcctgctacagcatggccttttaaagcctataaactctacttacaattcccccatttcacctgtcctcgaaccagacaagccttacaggttagttcaggatctgagccttatcaaccaaattgttttgcctatccaccctgtggtgccaaacccacatactctcctatcctcaatatctccctctactacccattattctgttctggatctcaaacacgctttctttactattcctttgcacccttcatcccagcctctcttcgctttcacttggagtgaccctgacactcattaggctcagcaaattacctgggctgtactgccgcaaggcttcacagacaggtcccattacttcagtcaagcccaaatttcatccccatctgttacctatctsggcataattctcataaaaacacacgtgctctccctgctgatcgtatctgactaatctcccaaacctcaatcccttacaaaacaacaactcctttccttcctaggcatgcttagtgcggtcagaattcttacacaaggaccaggaccgcaccctgtagcctttttatccaaacaacttgaccttactgttttagcctagccctcaagtctgcgtatggcggctaccactgccctaatacttttagaggcccttaaaatcacaaactatgctcaactcattctctacagttctcataacttccaaaatctattttcttcctcacacctgacacatatactgtct

SEQ ID NO: 930383 - DNA, 625 bp, Homo sapiens
actgtggcatgtgtacacgtattggtttgaacatctgttttcaattttcagggtatatacctatgaataaaattgctggtttacataataattctatttttaactttttgaagaaccaccaaactgttttccacagmaacaggaccatttttacattcctaccagccatgtacaaaggtttaggttgatgtttttaatagctttcctgagctataattcacataccatacattcatccatagaaggtgtgcaatttcatggcttttggtatgtttacagaattatgcaatcatcaccatcatcaatcttagatcattcatagcaccctagaaagaaaaccatggctttcacagtcggcccccacactcccctcctcagtcctaggcaaacacaaatctaatttctgtctatagatttttctattctggacatcatctcatgtaaatcatacagtgtggggtccttcatcactgacttctttcacttaagagaatgtgtcagcattcattcatgcagcagataaatccatactttccttttcatggctgcataatatttcatcgtggggattgaccgtgttttgtttacccattcatcctctctctgatggacacttggattattt

SEQ ID NO: 930384 - DNA, 816 bp, Homo sapiens
gagttcaaatcctgacccagtcactccatctatccatgaccttgggtaagttacttgacttctctgtgttttagtttcctgatctgttaaaaggggtgacaacagtaccaacttccttagtgatggaggtgggtaaggctaggatgagactccatgggtgttaagtgtttcacatagtgctggcacagggtaagtgatcaataaatattaacccttggcagggcacggtggctcacgcctgtaattccagcacttggggaggctgaggcgggcagatcacctgagatcaagagttcgagaccagcctgcccaacatggcgaagcccatctctactaaaaatacaaaaagttagccaggcatgctggcrggtgcctataatcccagctactcaggaggccaaggcaggaggctgaggctgtaatcccagctcctcctgggaggcggaggttgcagtgagccacgtcactacactccagcctgggcaacaagagtgaaacttcatctcgaataaataaataaataaatatcaacccttattacttgccaacccaatcaccagccaggcactcttatatcttcagctcaccctggttcactccaccaaatgatctgccattctcagaacactctctgcccctattcatctctgtgtgctgctacctctgtcttgaacatctcttctcctccaacaccacctggtgaacttggctcatgtatgtggtgcatcccaaaagtctcctcctccaggaagcattccttgatgcctccctcgaagtctccacagcactgagcagcaatagccacagttgtagcca

SEQ ID NO: 930385 - DNA, 601 bp, Homo sapiens
acacgctcatcgcagtagacacaacatgtgcttacatatatgtgcatgcaggcatacccacacagcagcaactgagctgaaacttgtcacagaatcctgaatattttacctcatgtggaaaataatgttgaaatggcagagaaatagacaagatcaagaaggcaagtatcttactggtaaggctaccaaaaagcctcacactctagatcaaactaaatctgcaaggcagggatccctcttgtctaaatcacaaggagctagagaacactgagattgcactgcttggtattccacaaataaatctccaatgtctgactcatccaccaaatgtctcatccaatggtgtcataggtggcatatctccatccctgtaaccttgaactggcagctttgccactttaacctccagtgttgacccagctctaccctcacccaggttctgaactggttaccacttctrgccccaggcaaacagcactgatagaaacccagctcaacagattcctcccttcactgtgagctgctacagaccctgatgtgactttggtgaccccagtcttgatgacccctggccctgatcccagctactctggtgctgggt

SEQ ID NO: 930386 - DNA, 551 bp, Homo sapiens
gacaagtgggatccccaccacttcctggctgtggacccaggcctcccactccaaagagcaggcagaagccccgccctcctaggcaaggctgcaggaacccaagttgcagatagcagcctcctccctgctctggagggcagggagcaggcaggacccctgccctccagggtgcagctgcagctgcccaaactgtggcttaagactcaggcatccctgcacccttggggatccaggaaggcctccctgtcatcaggctkgtaagtatctcttcccactgcctggcttctccctgctgtcggtgcctgctcatcttggagcaaagtccagaggagtcctgagccccagtgacatgaatggcagcaggaggcagacagatttctggtcaggagggagaggtccctggtgaagccccaccttcaggctgggggccaggctgccagtcccactgacaggagtgggaacttgtgccttttctggccacccatcaccaccctgtgactgaccagcaggcacttcctcccctctgaggcccataaaagccctgggctcag

SEQ ID NO: 930387 - DNA, 551 bp, Homo sapiens
gacaagtgggatccccaccacttcctggctgtggacccaggcctcccactccaaagagcaggcagaagccccgccctcctaggcaaggctgcaggaacccaagttgcagatagcagcctcctccctgctctggagggcagggagcaggcaggacccctgccctccagggtgcagctgcagctgcccaaactgtggcttaagactcaggcatccctgcacccttggggatccaggaaggcctccctgtcatcaggctggtaagtatctcttcccactgcctggcttctccctgctgtcrgtgcctgctcatcttggagcaaagtccagaggagtcctgagccccagtgacatgaatggcagcaggaggcagacagatttctggtcaggagggagaggtccctggtgaagccccaccttcaggctgggggccaggctgccagtcccactgacaggagtgggaacttgtgccttttctggccacccatcaccaccctgtgactgaccagcaggcacttcctcccctctgaggcccataaaagccctgggctcag

SEQ ID NO: 930388 - DNA, 619 bp, Homo sapiens
acatatacacaccctccctgatagtctttcaccattaatttcaagtgaaattgcagtctcttggtcttcctcctgccacctaggtacctcctcaatcttctttgctggtttacgctcttctccccaatctcttagctttcctgtgatccggggagcaatcttctcttcacctctcctcccttctcrtcttacactaacagtcttggtgatctcatccattcttgtggcttcaaactccatctatatgctgttcactcccaaatgcatatgtttggcccagacctctatcccctgaacttcagctacatactcagcatctccattggatgtctaatcaatagcttaaatttaatatgcctaaaagctgaactcttgatgccttctctgcacctgcccccaccaaaacctgctgcttctctaccctaccccatctgagttgtatagaaaatacatcctttcccttcctctcttcctcttgtgtaccgcatcaggaagtgcttgtgcctctgccttcaaattataacctagaatgtaaccacttcttgccactcccactgctgtctactatcccgtgccccctcccatctgaactacctgaattactgaggtagcctcccac

SEQ ID NO: 930389 - DNA, 597 bp, Homo sapiens
tttagggtctcttacaaggaagcaaccaaggtatctgccagggctgggtcttatctggagactcaactgggaaaggatacactgctcatttgcatggctgttggcagattttagttcctagtgagctattggactgagggcctcatcttcttgctagctgtcacacaaaagcttccctgagttccttgccatgggggtctctccatatgatgataccttacttcattaaagccaraaaggaagagagccattagagaaactggtagcaaaacaaaagctgcaatctcatttgcttcattctgttggttagatgcaattcactaggctggtccacactcatgagtaggggatttcacaaggatgtgaatatcaggagtgtgaatcattaaggactctctgaaagtctgcccaccacaagtacaaaagaatgcagggctgtctttaatctaccacagaagcttgctgctaaagactaaaaggagactgacaaatattaatatattcaacagtatttactgagtgccagctatgtgccatccagacatcagagcaggcccaagaaatacagggatgaataagacatcataactgccccca

SEQ ID NO: 930390 - DNA, 708 bp, Homo sapiens
caattgatgcctgaaaatatttacttcttatgttcttctttctctcctccaccagcatgtaaattccaaagggctgggactgtcgtcttgttcaacattgcttaatcgcccatggcagagtgggcatgggtattgtaaaagacagtggagttcaagcagcaaccagcatagtctgacttgcagccatctgtgtcattggctagttaatcatgaagtgaaatagataggaagcctactcaattcttacttgatctgtataagtagaaaacttatatgactagtgaatgaaaatctaacttgagtcatgtcccctccatcattcccagactggagctgctttacagacccagaaccaacwgaatgaaggggaggctgggcctccttgaagaaggatctttgtacccagctaaatatttatactgttagtctttctcccagcttccccaaagggactgaaggccttttaccaggatgagtgtgcatgggagaaaggaaataatcagacttctcagggcttgtggacactggctctaaactgacactaattccaggagacacaaaatgtcactgtggtcaaccagtcagagcaggggcttatggaaggcaggtaatcaatggtgttttagctcaggtctgtttcacagtgggcccagtgagtcaggcactgaatccatcccgtgcctgattccacagttctggactgcataa

SEQ ID NO: 930391 - DNA, 741 bp, Homo sapiens
ttggcagcacttacaattgatgcctgaaaatatttacttcttatgttcttctttctctcctccaccagcatgtaaattccaaagggctgggactgtcgtcttgttcaacattgcttaatcgcccatggcagagtgggcatgggtattgtaaaagacagtggagttcaagcagcaaccagcatagtctgacttgcagccatctgtgtcattggctagttaatcatgaagtgaaatagataggaagcctactcaattcttacttgatctgtataagtagaaaacttatatgactagtgaatgaaaatctaacttgagtcatgtcccctccatcattcccagactggagctgctttacagacccagaaccaactgaatgaaggggaggctgggcctccttgaagaaggatctttgtacccagctaaatatttatactgttagtctttctcccagcttccccaaagggactgaaggccttttaccaggatgagtgtgcatgggagaaagraaataatcagacttctcagggcttgtggacactggctctaaactgacactaattccaggagacacaaaatgtcactgtggtcaaccagtcagagcaggggcttatggaaggcaggtaatcaatggtgttttagctcaggtctgtttcacagtgggcccagtgagtcaggcactgaatccatcccgtgcctgattccacagttctggactgcataattggaacagacctactcagc

SEQ ID NO: 930392 - DNA, 616 bp, Homo sapiens
aagacaaaatctgcttttattttttattttattttactaccttttaataatagcctttttgactggtatcatggtatttaattgtggttttgattcacatttctctaatgatcagtgatattgaacattttttcatatrcttgttggccacgagtatgtcttcttttgagaagtgtttgttgatatctttgcccattttttaatgagttgtttgtttttttgcttgttgatttgtctgtattccttatagattctggatattacatatttgttggattcgtagtttgcaaattttttttccatgctgtagatctgtttatagtttattttgctgtgcagaagctctttagattaattaggtctcattcatcaatttttatttttgttgcaattgcttggagtctttgtcataaagtctttgtcttggcctatgtacagatggtatctcctaggtttccatgattggtttttaaattcttaggttttatgtttaactctttaacccattttgatttgatttttctatatggcaaagggaaaaaatccagtttcaatcttctgcatatggcaagccagtcattgaagcaccagttattgaatatggattcctttctcc

SEQ ID NO: 930393 - DNA, 616 bp, Homo sapiens
aagacaaaatctgcttttattttttattttattttactaccttttaataatagcctttttgactggtatcatggtatttaattgtggttttgattcacatttctctaatgatcagtgatattgaacattttttcatatacttgttggccacgagtatgtcttcttttgagaagtgtttgttgatrtctttgcccattttttaatgagttgtttgtttttttgcttgttgatttgtctgtattccttatagattctggatattacatatttgttggattcgtagtttgcaaattttttttccatgctgtagatctgtttatagtttattttgctgtgcagaagctctttagattaattaggtctcattcatcaatttttatttttgttgcaattgcttggagtctttgtcataaagtctttgtcttggcctatgtacagatggtatctcctaggtttccatgattggtttttaaattcttaggttttatgtttaactctttaacccattttgatttgatttttctatatggcaaagggaaaaaatccagtttcaatcttctgcatatggcaagccagtcattgaagcaccagttattgaatatggattcctttctcc

SEQ ID NO: 930394 - DNA, 616 bp, Homo sapiens
aagacaaaatctgcttttattttttattttattttactaccttttaataatagcctttttgactggtatcatggtatttaattgtggttttgattcacatttctctaatgatcagtgatattgaacattttttcatatacttgttggccacgagtatgtcttcttttgagaagtgtttgttgatatctttgcccattttttaatgagttgtttgtttttttgcttgttgatttgtctgtattccttatagattctggatattacatatttgttggattcgtagtttgcaaattttttttccatgctgtagatctgtttatagtttattttgctgtgcagaagctctttagattaattaggtctcattcatcaatttttatttttgttgcaattgcttggagtctttgtcataaagtctttgtcttggcctatgtacagatggtatctcctaggtttccatgawtggtttttaaattcttaggttttatgtttaactctttaacccattttgatttgatttttctatatggcaaagggaaaaaatccagtttcaatcttctgcatatggcaagccagtcattgaagcaccagttattgaatatggattcctttctcc

SEQ ID NO: 930395 - DNA, 627 bp, Homo sapiens
tggcagaggaacataaattgtgaagatttcatggacatttatcagttcccaaataatatttttataatttcttatgcctgtctttactttaatctcttaatcctgttatcttcgtaagctgaggatgtgcatcacctcgggaccactgtgataattgtgttaactgtacaaattgattgtaaaacgtgtgtttgagcaatatgaaatcagtgcaccttgaaaaagaacagaataacagygattttttagggaacaagagaagacaaccataaggtctgactgcctgtggggttgggcaaaaagagccatatttttcttcttgcagagagcctataaatggatgtgcaattagggaagatatcgctaaattcttttcctagcaagggcatattaatattaataccttgggaaaggaatggattccttgggggaggtctataaatggccgctctgggaatgtctgtcttatgtgggtgagataagactgagatacaccctggtctcctgaagtatccttaggcttactagggtggggaaaatctccaccctggtaaatttgtggtaggaccggttctctgctctccaaccctgttttctgttgtttaagatgtttatcaagacagtatg

SEQ ID NO: 930396 - DNA, 858 bp, Homo sapiens
ggtgactcatgcctgtaatttcagcactttgggaggccaaggtgggtggatcgcttgaggccaggagttcaagacgagcctggccaacatggtgaaatgccggctctactgaaaatacaaaaattagtcgggtatggtggcgcatacctgtagtccagcgactcaggaggctgaggcaggaaaatcacttaaactcaggaggtggaggttgcagtgagccaagattgtgccactgcactccagcctggacgacagagagagagaaaaaaaaaaaaagggcccacgttggccaggatgagtcagcaataatcatttgtttgggccacgtagagctgtttcatgatccccaagagagayttcattaaaaacagcttgccttgtataaacataaataaataactcttccttcatagttgattctctttgacacagaaatatgaaaacccctatttatagtgtcttttgcacagacacacatgagcatttagctaaatggatctttagatggggcacccatcatcaatctcagagtagtaaaattctaggtgaagtaaattaatttttcctccatctgggtaagacttatttaggtaaataatgagtaaaataattctttagttgaagatacttcatctactaaaagagctagtgctggtaggtacagactacttaagtaaccaggttttccacataaacagatttaaaattcacctgggaattggttttactcagaggtaatctgacacccttcctaaggaaccaccctaattctggctgttttaccccaatctgtgtattgctctcatatggcaattgagtgttgcttgtcaccacttatctccttaattcaaccacaac

SEQ ID NO: 930397 - DNA, 601 bp, Homo sapiens
tttacttcccgggcttaagcaatcctcctacctcagcctcccaagtagctgggaccacaggcatacaccacctggctaagttttgtattttttgtagagactgggtttcaccatgtttcccaggctggtctcaaacaccagagctccagtaatctccctgccttggcctcccgaagtgctaggattacaggcatgagccactgcacctggccaggtagggcactttttaatttaatttaatttttaaattttttttttgagacagaatctcactctgttacccagggtagagtgcactggtgggatctgggctcactgcaacctctgccacccgggttcaagcgatttccctgcytcagccccctgagtagctgggattacaggtgcccaccaccacacttggctaatttttgtattattagtagagatggagtttcaccatgttggccaggctggtcttgaactcctgacctcaggtgatccgcccacctcccagagtgctgggattacaggcatgagccactgcgcctggcccggggtagggcactttagtttttattttgggtccatgcagcagtgtagtctccatataatttcttca

SEQ ID NO: 930398 - DNA, 616 bp, Homo sapiens
aacccatgtgcaggcttcctaagctccctccctcctgtaagggtcaaagtttactatccctctgcagcaaaaatatagtaacgcatgtgtttgatgtttctgcccaggaaggaccattggagataagtgcccaaggtctttactgggagctggtcatgtaggtattctctgcctaacatgtggtgatcatattgtttgtatacagtctcggcatagtaattatcagttaggaaatagtagggacgttcctgaaacccatgttctcagatgccagccaggggccagtcttgcaagcagggctttctatggatggtagttttggtcctgatgctcttttctatctagactacttcagataaaatagaatatttattgacttcttttaagttactgtgctaggtactatgggtatattagagcattagmgatatatatttcctgccaacacagtgtttacttgctggaggacaaaaaaagaacagggtagtaagtaagcaggaaaaaattcagatcctgctaagtgttattacagaaaaatttgatgagagaatgggttagtctgctcagtctgccataacaaaataccatattctggggagcttaaacaacagaaatt

SEQ ID NO: 930399 - DNA, 747 bp, Homo sapiens
aaaacccctacaattaggtatattatattccaatttcagaaaatcaaatacaaagaaaaaagaagtcaaaggaaaaaaaccttacctataaaggaacaaggctgggaattacagtagtcctctcctctgtagtttttcaccacttcagttacctttgttcaatatttaaaagtattaaatagaaaattccagaaataattcatgtttaaactgtacaccattctgagtagtgtgacgtctcgcaccatcctgctccaccccaccccgaatgtgaattgtcctggcatatctatgctgcgaatgctacccacctgttagtcacttaggagctgtcagatcacctgatgcagtatcgtagtgcttgtgttcaactgamccttattttacttaatcatggccccaaagcacaagaatagtgatgctgacaattcagatatgccaaaaagaagctacaaagtgcttccttaatgggaaaatgtgaaatttcttctccactcaataaggaaaaactctctcatatgctgaggttgctaagattacagcagaatgagtcttctattcatatgaagaagaaaaaaagcaactcagctagtttcgctgttgcacctcaaactgctaaagttgcaaccacaagtgcataagtgcttagttaaggtgtaaaagggccaggcaaggtggctcatgcctgtcatcccagaattttgggaggccaagacaaggggattgcctaagtgcttgaggccagaa

SEQ ID NO: 930400 - DNA, 599 bp, Homo sapiens
ctatagaaagtggttgcaccatatgccacttgaatttctatcctgaaaatgatttttccttccctatcacatggtcaagttgtgacttttccaaagttctatactctgcttccctgaaaattttgctgcttagatatttcttctgctagatacgttaggtcatcactgtttaagttcaaacttccacagagtcctggggcatgggcacaattcagccaagttctttgctaaagtgtaacaaatgtgacctttgccctaattcccaataactttctcatttccatctgagacctcatcagcctggtcttcactggcagtattttcattagtattttggtcacaaccatttaacaagtctcatgaagttctgtactttttctcattccctgttgtcttctctgagacctccaaactctgcctgttccccactaccaaagatacttccacgtcttcmgatatttttatagaaattccctactccttggtaccaattttctatattagcttgcttgtattgctataaaaaaatacctgaggctgggtaatttataaagaaaagaggtttatttggctcatgcttctccaggctgtaaaagcat

SEQ ID NO: 930401 - DNA, 563 bp, Homo sapiens
tttgtgataattgttaatatagaatatattttttcattattttactttaaatttcgttgtgtctttgcatctaaagtgattctttcatacacagcatataaatgaataatgttttctttttcatacattctgccactctcttaacaatcttataaaaattacctctttttgaattgtatgtgtattatatatatttacagttatcattttatgcatgtgtcttttaaatcatataggaaaactatgaagagttacaaacaaaaatacaatgaggttggcttttttacttacctacatagytacctacaccaatgttcttaatttcctcatacagcttcaaaccactgtctagggctcttttatttcaactggatgaatttcctttagcatttcttgtaagataagtctattagtaacaagttcccttagctatttttttttaatacttgaaggacaattttgctgtatgtagaattctgggttgacagttttgtgacccaaaccctggactatttacagtactttatatcaacccactgcctctgtcctccattgtttccaat

SEQ ID NO: 930402 - DNA, 456 bp, Homo sapiens
aaatattttgtatcttacttttctcatgttgtttttaagttttttctgtgtttagcttttaatgatttgactatattttgcctgaaatttgccgaacatttttaatgtgcagttttatgcccttcattaaatttgggaaattgtcagccattatttcttaaaatagtctttccaacttattttctcatagtcttccttctgggactcccataatgaatacattggccttctrtgtaatgttccacaggtctcttatgatcagttcattttttaaaaaaatcgtttttctttctgtttctcacactgcataaatactattgtctatctttaagttcactgattatttctcctgattgctcattctactgttgaaacactcttgcgaagtttgtgtttcacttattatacatctctaaagagaagtatattatacttttcttgtctgcactagaaatt

SEQ ID NO: 930403 - DNA, 578 bp, Homo sapiens
gaaaactgccataacataccacctagtcgacactaagaatgaggaatagttttctcctcgttggttcatgtgttgttgtttttgataatccaaagcgatcatgtcagttggccctttaatatttccaatgtgaaagattatttaaatgcttttaaatctgcagcacattgataagatggtttccgtgagctatgataagattgaaattccagttgcaattcataactaatgaattgaaattttatttattttaatttttttaagttcccagattggggctagtttaagacttagttatttctgcctataaatttactctgttgaatatttagcataaatttaatgtagacatttttatttatataccttgggagctttattacctaatatctttttgtggtagctgttctaagagtaagaattggttcrtctaaaataaggacatattctttctacacctgctacctgacctgatatttgaaatcttaactccaattttattattgtggaatttacagttagtattaaggatattcttctacacatgaaaaaatcacttaaatatgagaaaatggcat

SEQ ID NO: 930404 - DNA, 713 bp, Homo sapiens
tggaacattctccgcaacagaccataagtcaggccacaaaataagcctcaataaattttttatttgatatgattttggttttctaatcacaatgaagaaaaactagaaatcaataacaagaactttggacacagtacaaatacatgcaaactaaacaacatattcctgaataaccaacgggtagcaaagaaattaagaagaaaatgtaaacatttcttgaaacaaatgaaaataaaaacacaatataccaaagcctatgaaatacagcaaaagcagtactaagaggaaagcctatagcaataaatgcctacattggaaaagtagaaagaattcaaataaacaatctaaaaatgcatctaaaagaactagaaaagcaagaaccaaatccaaaatcagtagatagaattaataaagatcagagaagaaataaacaaaattgagactaaaaaattacagaaggtcactgaaacaaaaagttggttttttgaaaagataaacaaaactgacaattcattagctagamtaagaaaaaaagagaaaacacaaataaaatcagaaatgaaaaaaaggcatttacaactgataccacagaaataaaaaagatcattaacgactactacaacaactctacgccaacaaactggaggaaaactggacatagacatatgacctactaccaagattcaactcagaagaaatagaaaatctgaaca

SEQ ID NO: 930405 - DNA, 621 bp, Homo sapiens
agcagcccttggattccagagggtgacatttatttaccctgttgacatcaagaggaatctccagaggacttgggccctgggataagggctcacaaatggcaaaggaagaatatcttctcctcccaaaggagtgggtgctaactcaaaaaatccagatgggggtcttcaaagggtcccagagtgaggccctattcagtcagacaaactgcttcaaaagccacaggagaacttagccctgatgtgtaacaggaaccaaaagcatatggtaagtcataaggagctggcagagctgggcttctgatgagtgtctgtcccagcaatattccagcagacaggtgaagggttggaggtcatctgagctggtagggtaaaaacagcacaaatctcaggggatatctgcaagggagaccatgtctttgctgccatgcaaatgcagcaaaagccatgagtgcatgcataacagggagtgttttcagggcagagaaggaagtcaygcagcatgccaagtgaaagcagaaaaggcagacttgccccttaggtggacagtctggtgggtgtgcaaggccattttggaatacatacagagaaaccaagagaataggcaaggcaggtttttgggaa

SEQ ID NO: 930406 - DNA, 593 bp, Homo sapiens
atcacgaggtcaggagatcgagaccatcttggctaacgcggtgaaaccccgtctctactaaaaatacaaaaaattagctgggcgcggtggcgggctcctgtagtcccagctacttgggaggctgaggcaggagaatggcgtgaacccgggaggcggaggttgcagtgagccgagattgcaycactgcactccagcctgggcaatagagcgagactccgtctcaaaaaaaacaaaagaaaaaaaaaaggaaggagaagggttggtcacggtggctcacacctgtaatcccagcactttgggatgccaaggcgggtggatcactcatcaggagttcaagaccagcctgtccaatatggtgagaccccgtctctactaaaaatacacaaaaaattagctgggcatggtggtgagcacctgtaatcccaattcctcgtgaggctgaggcaggagaattgctggaacctgggagatggaggttgcagtgagctgagattgcaccactgcactccagcctgggcaacagagcaagactctatctaaaaaaaaacgaaggagaagaacacacatcaaagcctttccctcacccttgctta

SEQ ID NO: 930407 - DNA, 538 bp, Homo sapiens
tccaagccgggagggttggcacacacctgtaatcccagctacttgggaggctgagacaggagaatcgcttgaatacaggaggtggaggttgcagtgagctgagattgcaccactgcactccagcctgggtggcagagagagactctgtctcaaaaataaacaaacaaacaaacaaataaataaaagtaaacgccgggtgcagtatctcacgcctgtaatcccagcactttgagaggccaaggtgggcagatcacttgaggtcaagaatttgagaccagcctgaccaacatggtgaaacccygtctctactaaaaacacaaaaattagctgggcatagtggtggtgcctgtaatcctagctactccagagctgagaatcgcttaagcccaggagacagaggtggcagtgaaccaagattgtgccactgcactccagcctgggcaacagagcgagactctgtctcaaaaaacaagcagccaggcgtggtggctcacgcctatagccccagcactttgggaggctgaggcgggcggatcac

SEQ ID NO: 930408 - DNA, 562 bp, Homo sapiens
tctctatctcagttgaatgcctacaatagtcaatacataatattaattcaccaaatgttttaaaaactattttaaatgtttacaaaactttgcgaaatgaataaagctactttttcttttttaaaacacatattttaccttagtgaaagtatgtaaaacaccccaaagggagcagcagctattagatcacactgagatagttatgtccaaaagtagtatgacttttttcccccttttttggcacaactgagttggaatgactattaaattatgataaaataaggtaacattttataaaattcccaatttcatacmaagcagcatttcctaaacttccacaatctcaattgcatattaaatttcaatgtcagtaccaggttaattttctaaaaacactctttagaaaagaggtttattgaatgtcttttatgtgttcagcattatgctaagcaattttcatacattatctaatttaattctcacactataagataaataccattaaagtcctaattttacagcagagaaaaggaggtttggagagattaagagatttatccaa

SEQ ID NO: 930409 - DNA, 684 bp, Homo sapiens
tcaaaaggggagtagttatctgcagaagatggcagggccttgctccaaaatcctagaggcctctgctgtgattcacctatgggggactggcaaaggctccaagcagcatccctatctgccactgacacctcaagcaccattggatctgctgggtcatatggcccaagtggcagagcagcttgcacagcagcctgaacctgttgcagagccttctcctgttctggactccactcaaaactggcagcctttcgggtcattcaataaatgggccagaataacacacccagataaggaatgtcttgtctccaaaatccagatgggytcactgtttgcctctttcttagttgtaggaggagctaaatgcatcttatccttcaccttagaaggaatatctcaacaggccacaccactggactcctagaaattttactgaggtagaaggtccctgaattttagtcagatttatttcccatcccctggcatacaaatgtctaaccaataagtccagtgtgtttgctacttcttgctcacataatggatcaaatcaacgtaatgtcatcaatgtaacggaccaatgtgatatcttgcaaaagtgaaaagcaatcaaggtctcttcaaataagattatgacacaaagccagagagttgatatgcccctgaggtaggacagtaaaggcatattgc

SEQ ID NO: 930410 - DNA, 546 bp, Homo sapiens
acttaagtaagagttttttcaaactctgcttcagctatttagaaactctacaattattgagtgaaagtccagcctcctaaccactgagaactttgaacatcgatgtaaagaaaaaaaaacactgtttgtctcagagtccccaccctacttgcctcacagagtcattttgaggctccaaaaattgcacgcacaaaaatgctttacaaacacaattgtgctacgcaaattgcattttcccaaacctgctgagcacatcatttgaaagaatatcatgacatttcagctcccttattcagacaaagtgagtaagccactaatttgctcgaaaatctctgtgcatgaaactcctcacattacagaatctgcctttacaaagacatttccttctgcaayagaagccaggaaacttccgagcaaattggatggtccacatccaggcgacctgcaaaccaagacataaagaaacatgggcgagtctgagtccccctcacagcctggacatgtcttatggggagtgctactgtagcttaagtgataaatcatcaa

SEQ ID NO: 930411 - DNA, 745 bp, Homo sapiens
tgtcccagggagatgagagttttatctataagccttgactgaggctgctgcctttttttcagagatgccctgcacagagaggaggaatctagagaggcagtctggctacagcagctttgtggtgctgcagtgggctctgcccagtctgaacttctttgcggctttgttaacactgtgagggaaaaaccgcctactcaagcctcagtaatggtggacccccctccccccaccaagctggagcattcccggtcgacttcagactgctgtgctgccagtgagaatttcaagccagtggatcttagcttgctgggttctgtggggatgggatccactgagcaagaccacytggctacctggcttcagccccctttccaggggagtgaatggttctgcctcagtggcatcccaggtgccactagggtacgaaaaaaaaaataaactggctgggcgtggtggctcacgcctgtaatcccagcaatttgggaggctgaggtgggcagattacctgaggtcgggagttcgagaccagcctgaccaacatggagaaaccccatctctactaaaaatacaaaattagccaggcatggtggcacatgcctgtaatcccagcttctcaggaggctgaggcaggagaatcgcttgaacctgggaggcggaggttgcagtgagctgagatcacacggttgcactccagcctgggcaaaaagagcgaaactccatcacagaaacaaaaaacaaaaaaaac

SEQ ID NO: 930412 - DNA, 581 bp, Homo sapiens
cacacttcagcatggctgagaaggcctcaggaagcttacaattgtggcagaaggggaagcaacacattcttcttcatgtggtgtcaggaaggagaagtgctgagtgaagagggggaaaagccccttataaaaccatcagatcttatgagaactcacttactattatgagaacagcatgaggtagccacccccatgattcattacctccacctggtccctcccacgacacatggggattatggggactacarttcaggatgagatttgggtggggacacagccaaaccatatcacttatctttcaaataaatattttttccatgctgtttcttgaatggagaaaacttcccacatcactggctcctgctcttatcttcactaccacttcactacttccctcactcctaccacccatgttcacaagatcatagtgaaatgtaatacatcaatgtgtgcaaaatagttggactcatactgatgtcttggtgaacattctgtgactttcccttcatgcccacagatttaactgcatccaacactgataggaagtttcccatgattaagtttactcaccaacactt

SEQ ID NO: 930413 - DNA, 631 bp, Homo sapiens
gaggatcacttgagcccaggagtttgagtccagcctgggcagcaaagcaagaccctatctaaaaaaaaattctaaacaaaataccatatacatatcatatataatgatgtgacatggtagtttcttggtgcagtgggaaaggctggagttagcaaaccctagtttgaatcctttcttcttttttcaagattcttatacgtcccctaaaaaacaagtcataatattgagtgaagtagggttggcagttaggaaatgagtggccacaggtatgtgtctgaagattttaaaaaagaggtggttttctcattgtctcaaaatcaacatgtctgtcatgtttctctccattaaaaccttcattatacaacttttaatgactttcttgccctaaactctcacatccagtaagatgctaaatcctatttattcaawctctgctttgtgtcttacccttctcccttccttctattcctatgacaactctcaaattttaggccctcattactttgtgtcaactcctgattatatttgtaattccagccaaccaaataaaattaaatctaaaagttacataatagaaacacattttttcattgagaaataaatttctacttttcttttgagacagagtctt

SEQ ID NO: 930414 - DNA, 572 bp, Homo sapiens
aggaggagacaaccacagggatgtgaactggtgtacctttcagagtacaggaatgtaagttccctgagagtgagggattaaaaagaaattttctctttaattgtggtaaaaaacatataacataaaatttatttatttatttatttatttattgagatggagtctgtcacccaggctggagtgcagtgrcatgatcttggctcactgcaacctccaccctcctgggttcaagtgattctcctgcctcagcctctggattagctgggactacaggtgtgtaccaccacgcccagctagtttttgtattttttgtagagacggggtttccccatgttggccaggctggtctcaaactcctgacctcgggtgatccaccctcctcggcctcccagagtgctgggattgcaggcatgagccacgatgcccagcctataacataaaatataaacttaccatcttaaccacttttaagtacagtgttcactggcgttaaatatattcacattgttgtgcaaccaatctccagaacttttttatcttgtaaaactgaaactctgtacccattaaataac

SEQ ID NO: 930415 - DNA, 572 bp, Homo sapiens
aggaggagacaaccacagggatgtgaactggtgtacctttcagagtacaggaatgtaagttccctgagagtgagggattaaaaagaaattttctctttaattgtggtaaaaaacatataacataaaatttatttatttatttatttatttattgagatggagtctgtcacccaggctggagtgcagtggcatgatcttggctcactgcaacctccaccctcctgggttcaagtgattctcctgcctcagcctctggattagctgggactacaggtgtgtaccaccacgcccagctagtttttgtattttttgtagagamggggtttccccatgttggccaggctggtctcaaactcctgacctcgggtgatccaccctcctcggcctcccagagtgctgggattgcaggcatgagccacgatgcccagcctataacataaaatataaacttaccatcttaaccacttttaagtacagtgttcactggcgttaaatatattcacattgttgtgcaaccaatctccagaacttttttatcttgtaaaactgaaactctgtacccattaaataac

SEQ ID NO: 930416 - DNA, 727 bp, Homo sapiens
gctacttgtgtatgctttatgaagttctcatgctgtgtttttcagctccatcaggtcatttatgttcctctctaaactggttgttctagttagtaattcctctaaccttttatcaaggttcttagcttctttgccttggattagaacatgcycctttagctcagcatagttttttttattacccatgttctgaagcctacttctgtcagtttgtccatctgattctccatccagttctgtgctcttgaaggagagacgttgcagtcatttggaggaaaagaggcactctggccttttgggttttcagcattttttgttgattctttctcatcttcatgagtttgtctagttttggtctttgaggctgctgactcttgcatggggttttttttttggcagcttttttgttgttgatgctgttgttgttgctttctgcttgtttgcttttctttcaatagtcaggtcccgcttctgtagggctgctgcagtttgctgggggttcacttcaggccctattcatctgatttactcctgtgcctggagatattactcaaggagactggagaacagtaaaggtgggtgcctgctccttcttctgggaactctgaccttgaggggcaccaatctgataccagtaagatcactccagtgtagggtgtctgacaacccctgttggagggtctcacctagttgggtggcacagggaacaggacccatttaatgaagt

SEQ ID NO: 930417 - DNA, 727 bp, Homo sapiens
gctacttgtgtatgctttatgaagttctcatgctgtgtttttcagctccatcaggtcatttatgttcctctctaaactggttgttctagttagtaattcctctaaccttttatcaaggttcttagcttctttgccttggattagaacatgctcctttagctcagcatagttttttttattacccatkttctgaagcctacttctgtcagtttgtccatctgattctccatccagttctgtgctcttgaaggagagacgttgcagtcatttggaggaaaagaggcactctggccttttgggttttcagcattttttgttgattctttctcatcttcatgagtttgtctagttttggtctttgaggctgctgactcttgcatggggttttttttttggcagcttttttgttgttgatgctgttgttgttgctttctgcttgtttgcttttctttcaatagtcaggtcccgcttctgtagggctgctgcagtttgctgggggttcacttcaggccctattcatctgatttactcctgtgcctggagatattactcaaggagactggagaacagtaaaggtgggtgcctgctccttcttctgggaactctgaccttgaggggcaccaatctgataccagtaagatcactccagtgtagggtgtctgacaacccctgttggagggtctcacctagttgggtggcacagggaacaggacccatttaatgaagt

SEQ ID NO: 930418 - DNA, 552 bp, Homo sapiens
gacacactccaatcatagtgcccacctgaaatccagagatgatctcttatttcacataggtatatggactgagagactgaaaatacaaatagacagagggtgaatatacaaataagcagacatacattttttaaaaagtgacccacaatctatgcaaccagcccaggaaaccaacccatcatctgcaggagccagcccaggaagccagcctgatgtctatgacacagacttttaggaagtcagaygctatctctagtaaccatccaggaagcaaaacaaaaaccgttgtaacatttgctccaaaagggccaggacttaattaaaaactgacagtttttctaatttctgtccctatttctgaggaccaagcagagaaagccaagttgcactctaccaaatcccatgggacacctcacttccagtgagccccctccagcttcccgcaccagcagcctccaatcagcacactctccgagccttccctttcccccactatgaagcttccccactcctctgcctgcctctgagtttctgccaaaagacaagtgatgg

SEQ ID NO: 930419 - DNA, 588 bp, Homo sapiens
ctgactttttagtgattgccattctaactggtgtgagatggtatctcattgtggttttgatttgcatttctctgatggccagcaatgatgaacattttttcatgtgtcttttggctgtataaatgtcttcttttgagaagtgtccattcatatccttcacactacctaacttcaaactatactataaggctacagtaaccaaaacaacatggtactggtaccaaaacagagatatagaccaatgaaacagaacagagccctcagaaataataycacacatttacaactatctgacaaacctgacaaaaacaagaaatggggaaaggattccctatttaataaatggtgctgggaaaactggctagccatatgtagaaagcagaaactggatcccttccttacaccttatacaaaaattaattaaagatggattaaagacttaaatgttagaccaaaaaccataaaaaatcctagaaaagaacctaggcaataccattcaggacataggcatggacagcgacttcatgtctaaaacaccaaaagcagtggcaacaaaagccaaaattgacaaatgggatctaattaaac

SEQ ID NO: 930420 - DNA, 485 bp, Homo sapiens
cttgtgtcaccacttccccagctccaggcagctcagcacagagagagactctgtttgtttgggagaaaggtaaggaaagagaacaagagtctctgcatggtaatctagataattcttccagatcttatattcagtaccaccaaggcagtacctctaagagtctgtggttacctctaagagtaaccacagtgttactgggctyggggggcccctaaggcagatatggctgtagtgaccaaaagcttagatcacaacactcaagtcccatctgatatgcacaaagccttcctaagaaggacaggtacaaacaagcccagacagtgaagattataataaatactaactcttcaatgcccagataccaatgaacatccacaggcatcacgaccctgcaggaaaacatgccctcaccaaatgagctacataaggaaccagagacccatcctgaagaagcagagatatttgactttttggacacagaattc

SEQ ID NO: 930421 - DNA, 592 bp, Homo sapiens
actccagcctggttgacagagcaagactccatctcaaaaaataaaaataattttaaaaaaagaagacaactgaaagctgtggtttccaaactgtgcagtgaggtagagcctggggcaccacagcaaattcatgtaggtgctgtggatatttcaaatcttcaaggcaaacctagtaaaatttgttgctctggtcaccayggaagctattattttgaagtagttcataatttcagtgttcatggcgaaactaggattttggtgtttgctgtaacagaaagcaggggttaggcaaaactctttgtagaacaagaaatgaagcactttgcaatcgattccaaggtttgaaaagctgtgcagtgctgaacaggtccacacatcccattagtgagtaactgtgggaatgaaaaattaatgcgtacaacttttttcaaacagctacaaagttgttaggatataaataaatatgaagtcatttggacctaactacataaacaatcaaacttaggtgtttcttttatttatttttatttatttatttattttgagacggagtctcgctctgtcgcccaggctggagtgcagtggcgcgatc

SEQ ID NO: 930422 - DNA, 495 bp, Homo sapiens
ataatgtcttctggtagagtcatactgctcctgccgaagagacacctcttagctgcctctcatctccctaatagcaacagacttctgtacaatgtaaaaccagctggttttctgtagttttgagcctaattttgctttgcctctttacaagggggagatctgcctttgcaaacatgaaggatagaggggctttatctgctttgggaattaaatggattaaaggtgctgtgaggctgatcttgcagttctcsccatacctgtctgtccctggccatgtcctgtggggaagcaatgatgttcggagggttctcacttcaacaaggtagtggaatttctctcctcttcttctagtttttctagtttgttggtggccaagtgactgtttctgcagaatctcaagcctttggtctccactggccaaaagccaggcatggactatggtcttaaagagcaagcatgcagaatttagggtgttttgttgcctgagtggctccc

SEQ ID NO: 930423 - DNA, 495 bp, Homo sapiens
ataatgtcttctggtagagtcatactgctcctgccgaagagacacctcttagctgcctctcatctccctaatagcaacagacttctgtacaatgtaaaaccagctggttttctgtagttttgagcctaattttgctttgcctctttacaagggggagatctgcctttgcaaacatgaaggatagaggggctttatctgctttgggaattaaatggattaaaggtgctgtgaggctgatcttgcagttctcgccatacctgtctgtccctggccatgtcctgtggggaagcaatgatgttcrgagggttctcacttcaacaaggtagtggaatttctctcctcttcttctagtttttctagtttgttggtggccaagtgactgtttctgcagaatctcaagcctttggtctccactggccaaaagccaggcatggactatggtcttaaagagcaagcatgcagaatttagggtgttttgttgcctgagtggctccc

SEQ ID NO: 930424 - DNA, 572 bp, Homo sapiens
gtcatttgtgtttaatgcattgagtgtgtgctcaatcttcatcccaagacagagggattcagataactggcaaatgatatgaaggaaaacctttctggagtagtccatctggaggccacgtcaggactagcctcacaggtagagtacaggcattctgactttgggagcattaaaaagagcatcaaaccaaattatctgattcagccctatataatagcctacataagccccaaagatctctattttaaattagaaataaagttaatgtttcacttgaacattctgcaggaaagtggtatgagatcaaggtattattaactattaacaactggctgggcacagtggctcacgcctgtaatcccagcaytctgggaggctgaagcaggtgaatcacctgaggtcaggagttcaaaaccagcctggccaacatggcgaaaccctggctgtactaaaaaatataaaaattagctggtcatggtagtgtgcacctgtaatcccagctactcgggaggctgaggcaggataatcatttgaacccaggaggtggaggttgcggtgaatcaaggttgtgc

SEQ ID NO: 930425 - DNA, 622 bp, Homo sapiens
ttgctattgttattactgttattattaccactgtttgaacctttgtggaatgcttcaccaggtaccgtgctaacaatcccatttaatcctcgcaaccaccataggagacagttactatgattccctctattgtggagatgaaaaaacatggagtatttgaggttaagtgcttgcctaagttcacttaggcagagctgggatataaacacccaggtctatccaattctctaagcccgtttttcttgctggggatgggggcacagataggaaggggaaaattaatcttttgttcactttttgaaaggatgatacattygcatagtccaaaactcagaaggtacagaagggaagtatctcccggccatcttgttgctctctcctgaattttttatgaacccttgcagacatgttttatgtatattatcacagtatgcacacacacacacacacacacacacacacacacacacgcacacacgtttcctctttctacagaaatggtaacatactaaaggtactcttctgtaccttcacagtacaagtacccaataccccacctaggactaggacttgcccaagaccacagacaggtaagggcggggcaggcacttggcctccaagc

SEQ ID NO: 930426 - DNA, 622 bp, Homo sapiens
ttgctattgttattactgttattattaccactgtttgaacctttgtggaatgcttcaccaggtaccgtgctaacaatcccatttaatcctcgcaaccaccataggagacagttactatgattccctctattgtggagatgaaaaaacatggagtatttgaggttaagtgcttgcctaagttcacttaggcagagctgggatataaacacccaggtctatccaattctctaagcccgtttttcttgctggggatgggggcacagataggaaggggaaaattaatcttttgttcactttttgaaaggatgatacatttrcatagtccaaaactcagaaggtacagaagggaagtatctcccggccatcttgttgctctctcctgaattttttatgaacccttgcagacatgttttatgtatattatcacagtatgcacacacacacacacacacacacacacacacacacacgcacacacgtttcctctttctacagaaatggtaacatactaaaggtactcttctgtaccttcacagtacaagtacccaataccccacctaggactaggacttgcccaagaccacagacaggtaagggcggggcaggcacttggcctccaagc

SEQ ID NO: 930427 - DNA, 622 bp, Homo sapiens
ttgctattgttattactgttattattaccactgtttgaacctttgtggaatgcttcaccaggtaccgtgctaacaatcccatttaatcctcgcaaccaccataggagacagttactatgattccctctattgtggagatgaaaaaacatggagtatttgaggttaagtgcttgcctaagttcacttaggcagagctgggatataaacacccaggtctatccaattctctaagcccgtttttcttgctggggatgggggcacagataggaaggggaaaattaatcttttgttcactttttgaaaggatgatacatttgcatagtccaaaactcagaaggtacagaagggaagtatctcccrgccatcttgttgctctctcctgaattttttatgaacccttgcagacatgttttatgtatattatcacagtatgcacacacacacacacacacacacacacacacacacacgcacacacgtttcctctttctacagaaatggtaacatactaaaggtactcttctgtaccttcacagtacaagtacccaataccccacctaggactaggacttgcccaagaccacagacaggtaagggcggggcaggcacttggcctccaagc

SEQ ID NO: 930428 - DNA, 480 bp, Homo sapiens
ggagagtcaaataaggtgatggagggtggccccctcaactctattccccagaccaggaagcggtaggcaggggccaggaatggattttaaaggcaaagttctcagacataatgggaacacgaaccggtaaactctcctcaagctcccaaggacagaggatttgggtctttgttggcttttgcccacagccacagaactcaaagtctgaatctggaatctcttgagaggacagcaatataaacctctagagatggagtttcagaaaggcccctccttctggcagcttgtgatttagaraagtgggttcattcaataaacatttactgagcatgtatgggccaggtacggttctttacagcagatataggatggaaaaggacagacaggagcccttagccctgaggtttccgttctagggggcctttaaatctcagactcgagagctaacagagacctttgatactcactacctcctctgga

SEQ ID NO: 930429 - DNA, 469 bp, Homo sapiens
aaagctaggcccccagtgccataatatacctggagccatttcctccctgggattcagttgcctcagcagggttcttcccaggtgtcggtaaaactccctctgccctggattcccaaacatatttttccctctttgggccgcagctttctcaggagctgtgcccattgatccctttggaagcagacactgaaatgaagttaggagtgtaagaggtttattgatggggagggaggacacrtgtaaagataaagagaaaggaaggaggattgggcaggaaagcgtcagtctgctaggaagagctaagaaagtctccaccaacacagtaaggagcaccagagcaaagaccactcactgcattgggcacaatggccaagccctagtatcccagccttgtggtatcatccttggctggagcttcctagaaaaagtgtaggcttggccccaatgctgcagtgaatcctggaggcac

SEQ ID NO: 930430 - DNA, 586 bp, Homo sapiens
tatatatatcttgtcaccataaaaaaaaaaattgtagccaagcatggtggcatgtgtgtctgtagtcccagctactccacagcctgaggcaggaagatcccttgagcccaggaggtcaaggctgcagtgagccaagatcgcaccactgcactccagcctgggtgactgagcgagaccccatctcaaaaataaataaattaactaattaaatcattcaagggctggggacggtggctcacacctgtaatcccaacactttgggaggcggaggcgggtggatcacaaggtcaggagttcaagaccagcctggctaatatggtgaaaactgtctctactaaaaatacaaaaaactggcacgcacctgtaatcccagctacttgggaggctgaggcaggagaatcgcttgaaccckagaggtggaggttgcagtgagccaagatcacatcactgcactccagcctgggtgacagagcaagactccgtctaaaaaaaaaaaaaaaaaaaaaggaaaggtcatttcccaatccaaaaaagtaggaagtatgtaccctttttgaaggggatctgctcctccacacctgtgggt

SEQ ID NO: 930431 - DNA, 609 bp, Homo sapiens
gcaatgcctcgccctgcttcggctcacgcaaggtgcgcgcacccactgacctgcgcctactgtctggcactccctagtgagatgaacccggtacctcggatggaaatgcagaaatcacccatcttctgcgtcgctcaggctcggagctgtagaccggagctgttcctattcggccatcttggctcctccctgcttaattctttttaaaggtcatatcatatcttatagtagagctatatcataattgttaactaatctcctgttaatgtggatattttgtttgaatgcaattgtttttacagacattgctgcaataaatgttattkcacgtatgtactggcatttgaatagagtaagtttcaaatagtggaattactagaccataagatttgtgcatttttaaatttggtagacactgaaaaaaaaacagtttgtttctgttacattttaatgagaaagtttcaatatttttaatttgtatttttattataaataatatggaacatcttttcagtgacttgttggagatattctgtttcttcttacctactcctgtactgtgcttaaaatatcctgcttctttagtctcagtaaatgacacttttgttg

SEQ ID NO: 930432 - DNA, 609 bp, Homo sapiens
gcaatgcctcgccctgcttcggctcacgcaaggtgcgcgcacccactgacctgcgcctactgtctggcactccctagtgagatgaacccggtacctcggatggaaatgcagaaatcacccatcttctgcgtcgctcaggctcggagctgtagaccggagctgttcctattcggccatcttggctcctccctgcttaattctttttaaaggtcatatcatatcttatagtagagctatatcataattgttaactaatctcctgttaatgtggatattttgtttgaatgcaattgtttttacagacattgctgcaataaatgttattgcacgtatgtactggcatttgaatagagtawgtttcaaatagtggaattactagaccataagatttgtgcatttttaaatttggtagacactgaaaaaaaaacagtttgtttctgttacattttaatgagaaagtttcaatatttttaatttgtatttttattataaataatatggaacatcttttcagtgacttgttggagatattctgtttcttcttacctactcctgtactgtgcttaaaatatcctgcttctttagtctcagtaaatgacacttttgttg

SEQ ID NO: 930433 - DNA, 609 bp, Homo sapiens
gcaatgcctcgccctgcttcggctcacgcaaggtgcgcgcacccactgacctgcgcctactgtctggcactccctagtgagatgaacccggtacctcggatggaaatgcagaaatcacccatcttctgcgtcgctcaggctcggagctgtagaccggagctgttcctattcggccatcttggctcctccctgcttaattctttttaaaggtcatatcatatcttatagtagagctatatcataattgttaactaatctcctgttaatgtggatattttgtttgaatgcaattgtttttacagacattgctgcaataaatgttattgcacgtatgtactggcatttgaatagagtaagtttcaaatagtggaattactakaccataagatttgtgcatttttaaatttggtagacactgaaaaaaaaacagtttgtttctgttacattttaatgagaaagtttcaatatttttaatttgtatttttattataaataatatggaacatcttttcagtgacttgttggagatattctgtttcttcttacctactcctgtactgtgcttaaaatatcctgcttctttagtctcagtaaatgacacttttgttg

SEQ ID NO: 930434 - DNA, 561 bp, Homo sapiens
agctgggaactctgaagaacagcagctttggctggagtcagaagaagtggtataatcagccgcaaagggttctcattctctttggcccctgtttttgatggtttaacggctttttcaatggagaagaaatggagaacaaacttctgttcagtgatactatttactacagtcacagccttaaagatatatgattttttttgtggcctgggtccttgagacatatgccagctcacaagaaaatagaaattattttgccctccatatctttttgtgctttgcytcttattaattattattattattattattattattattgctaacagaaatttaatacaaatttattatggccacctgctagatactctcttctgcttttaagaactttataaacatgttatgttactggatgggttttattctttctttctctttctaatcttttttctcttttagtcagtctaaattcaatgaaaattggatttacctctctctgggttacgtatttggatttcctgtatctcagaacttgctctttccttttatttccaactacttttt

SEQ ID NO: 930435 - DNA, 561 bp, Homo sapiens
agctgggaactctgaagaacagcagctttggctggagtcagaagaagtggtataatcagccgcaaagggttctcattctctttggcccctgtttttgatggtttaacggctttttcaatggagaagaaatggagaacaaacttctgttcagtgatactatttactacagtcacagccttaaagatatatgattttttttgtggcctgggtccttgagacatatgccagctcacaagaaaatagaaattattttgccctccatatctttttgtgctttgcttcttattaattattattattattattattattattwttgctaacagaaatttaatacaaatttattatggccacctgctagatactctcttctgcttttaagaactttataaacatgttatgttactggatgggttttattctttctttctctttctaatcttttttctcttttagtcagtctaaattcaatgaaaattggatttacctctctctgggttacgtatttggatttcctgtatctcagaacttgctctttccttttatttccaactacttttt

SEQ ID NO: 930436 - DNA, 620 bp, Homo sapiens
ttgacttaatagttttttttaaaaaaatcacaagactgttgttataatgtgatatctgagaaaatatttatatataaaatagcatattgtgttaggtaattcaaaaactatcttacaaaactatatactcactcatttacacaattttctcaggtttgcaaattgaccattgctaacatttcttgtctcaacatatggccagtaagactctatcacagtaaaagttttaacrtaatttccatctctaacactttaacatttaagaataagctaaatcacatcattatattcttttaacaacaacaacaaaaagtgatatagtcagccttgctggattaaattaaaaatgcaccactgtgctaggtgctagggaatgagatggcgtcgatgcaaacatgccttcaaaagagcttcagtctagtgagggagacatgttgacagagtgcaaggcagcaaacaatctgggggacaattcttggtcatggcagagcagtgaagctaccaaggacagtggtcttcaccagaaagtttgtagcgcagttgcactttttttttttcttcaatttaattacaatgacagttgatgtcagtggattccatctgggcctggggctgagtac

SEQ ID NO: 930437 - DNA, 560 bp, Homo sapiens
tacaatttttttcccattctgtagtttgtctgttcactctgttgattgtttatttttctgtccagaaactttagtttaagtcccatttgtctatttttgtttttgttgcatttgcctttgaggactaggtcataattttttgcctgggcaaatgtcctgaagatttttttccaggctttcttatagtatttttatagtttcgggtcttatgtttaggtctttaatctatcttgagttaatttttgtagctggtcagaggtaggtgtccagtttcaatcttctacatatggctatccagttttcccagcaccatttattgaatagggagtcatttacccagtaaatrttttagttgactttgttaaaaatcagttggttataggtgtgtggttttatttctaggttctctatgctgttctattcatcaatgtgtacatttttatactagtaccatgttgttttggttactatagctttgtagcataatttgaagtcataatatgatgccaacaactctgttctttttgtttgaaattgctttggctttttttccttgtgag

SEQ ID NO: 930438 - DNA, 588 bp, Homo sapiens
tgctatcatgtctggctaatttctgtattttagtagagtcggggtttcaccttgttggccaggctggttttgaactcatgacctcaggtgatcctcccaccttggtctctcaaagtgctgggactacaggcgtgagctactacgcctggcctctttctctttttyttttaaacctcagaatccctaactctactatagacacttttccagagaaagtaacaaagggaataaaaagatctgccttctggaaagcaatatcaagtggaagaaatttctgcaaatcagactgagaagctatatcctggtggtgggaagaaaagtggtttgatgattttacaaaagggagacaaattaaactaggctatcaaatgacacagaaaaagagaatataaccttacatattagactgtattaataaggaaacaatctctgaaagacctaactcttctatttgtgttagtctcagatcttaaatagtgttgggcactgcatttatttaggcctatgtttcatatctctggctatacaataagtcacttgggaagcttttaaaaattaccatgctcagtcccttctcatatgaattaa

SEQ ID NO: 930439 - DNA, 721 bp, Homo sapiens
ttgtcctgccatagaaataaattaaatacaaagcctgcatctacaccccatgttacttttcttcagtatgtatatcttcccctgttctctttctaaacatgtcacttcagagtgctggaaggtaaactagagatctacaaatagagttacaggacttaaagaaagacagasagagagagagagagatggagagagagagagagagagagagagagagcaagagcgagctattagcaacagaagggggaacattatttgctggagaatcttttctagcaaagtgtaaagtacacagttgtcaaaccagccacctatgaacccatacctcaggctttcagaggtaatgtcatgcctgaggccaatggaaaaacctaaaaccagaaccaaaaactcatggaagagcctaagatagtcaactcagtgagagagtgtagctgaaaaagacacatcaggctgaattttaaaaggactagaaagtcaaagaggcagagaatggctgtgagattattgctgactcccagcactggctgacacagactaactggccagttacagggtgttgctgcaaggatataggctgaataaaaatcacttttccattttaaactttgtactttgatgtatcattctctgcatctgctagaacctaaagctgcataatatgaaaatattcttaaagccctcaacacttttaatttctgacaattaaccacagaaaata

SEQ ID NO: 930440 - DNA, 758 bp, Homo sapiens
gatacattcttgttcacttttcatcatctagaattttattgaaatctttcctgttctgaagaagaaatgtctattcaaattttttgcccatattttcactcagtggtcttttttattattgagttgagagtgtcctttataagacggccgaataggaacagctccggtctacagctcccagcgtgagcgacgcagaagacaggtgatttctgcatttccatttgaggtactgggttcatctcactagggaatgccagacagagggtgcaggtcagtgggtgcacgcaccatgcgttagccgaagcagggtgaggcattgcctcactagggaagcgcaagggatcagggacttccctttcctagtcaaagaaaggggtgacagacggcacctggaaaatcaggtcactcccacccaaatactgcrcttttccgatgggcttaaaaaacggcgcaccaggagattataccctgcacctggctcagagggtcctacacccaccgagtctcgctgattgctagcacagcagtctgagatcaaactgcaaggcggcagccaggctgggggaggggcgcccgttattgcccaggcttgattaagtaaacaaagcagccaggaagctcgaactgggtggagcccaccacagctcaaggaggcctgcctgcctctgtaggctccacctctgggggcagggcacagacaaacaaaaagacagcaggaacctctgcagacttaaatgtccctgtctgacagctttgaa

SEQ ID NO: 930441 - DNA, 758 bp, Homo sapiens
gatacattcttgttcacttttcatcatctagaattttattgaaatctttcctgttctgaagaagaaatgtctattcaaattttttgcccatattttcactcagtggtcttttttattattgagttgagagtgtcctttataagacggccgaataggaacagctccggtctacagctcccagcgtgagcgacgcagaagacaggtgatttctgcatttccatttgaggtactgggttcatctcactagggaatgccagacagagggtgcaggtcagtgggtgcacgcaccatgcgttagccgaagcagggtgaggcattgcctcactagggaagcgcaagggatcagggacttccctttcctagtcaaagaaaggggtgacagacggcacctggaaaatcaggtcactcccacccaaatactgcgcttttccgatgggcttaaaaaacggcgcaccaggagattataccctgcacctggctcrgagggtcctacacccaccgagtctcgctgattgctagcacagcagtctgagatcaaactgcaaggcggcagccaggctgggggaggggcgcccgttattgcccaggcttgattaagtaaacaaagcagccaggaagctcgaactgggtggagcccaccacagctcaaggaggcctgcctgcctctgtaggctccacctctgggggcagggcacagacaaacaaaaagacagcaggaacctctgcagacttaaatgtccctgtctgacagctttgaa

SEQ ID NO: 930442 - DNA, 758 bp, Homo sapiens
gatacattcttgttcacttttcatcatctagaattttattgaaatctttcctgttctgaagaagaaatgtctattcaaattttttgcccatattttcactcagtggtcttttttattattgagttgagagtgtcctttataagacggccgaataggaacagctccggtctacagctcccagcgtgagcgacgcagaagacaggtgatttctgcatttccatttgaggtactgggttcatctcactagggaatgccagacagagggtgcaggtcagtgggtgcacgcaccatgcgttagccgaagcagggtgaggcattgcctcactagggaagcgcaagggatcagggacttccctttcctagtcaaagaaaggggtgacagacggcacctggaaaatcaggtcactcccacccaaatactgcgcttttccgatgggcttaaaaaacggcgcaccaggagattataccctgcacctggctcagagggtcctacacccacmgagtctcgctgattgctagcacagcagtctgagatcaaactgcaaggcggcagccaggctgggggaggggcgcccgttattgcccaggcttgattaagtaaacaaagcagccaggaagctcgaactgggtggagcccaccacagctcaaggaggcctgcctgcctctgtaggctccacctctgggggcagggcacagacaaacaaaaagacagcaggaacctctgcagacttaaatgtccctgtctgacagctttgaa

SEQ ID NO: 930443 - DNA, 611 bp, Homo sapiens
gggaactggatttttcatttacatatgaaagcttactatgtttaagaattagctagctctgggaggaaaagtctctccccagtcagtgaggcctcaggagcatcaagaatacagaaaattagaaaatgtaattaacacataatacatgtgttttgttgagttataagttgcataaagtaaaataaaggagtcttatgtgtacagcataataaattatttatatttgtatacacccacggaatcacctcccagatcaatgttcaatcacggccgtaactttagaagctctcactggctccttttccagttaatacctgcccctcccagcaaggtcaacattattgtgactagatttgcctgatcttaaacttcataatggaattacacattgtgaatgtactcatttctctttggtgtatatctaggaataaaattgctaaatcatagagttggtgaatctstaattttggtggatactgctgaacatttttcaaagtagttaaaacattgaactatctcaccaacaatgtacaagaatttccattattctacattcttgccaacatttctaattgacagtcttaattacgctggtagtggggtacttgtgt

SEQ ID NO: 930444 - DNA, 618 bp, Homo sapiens
gtgaattctcatcaccattctcgttgtcagctctgttctgccatttctcaaagcaattgcttgcctcagggcagggggaaagctctgccatgtgggctgcttttatatcttcaatccattctaaatcctgtcagaagagatacattgtcctgtctggtagaggtggctctgggtgatatgctctgcttagattagtcaggaaggagccctttcccttgtgtgtctgcatatttgtggtagtggttattccggtacagtttctacaagcacagtaattcataagattttccacagtatacataatgtctttcattaaagaattactgtctttcatcttctaatccttaaatttaggctttcttttatatagtatgtgaaattcgaatacctggatggcaagagatctaaaaggtagtattctgactagagtgtggaatgtagttrtaagaatgcctaatgctactgatgtttgcaaaactacgcaagtaggatgtctgaaggacgctggtctatcagcaggtagtggatcccaacccctgggctgggattcacaaggctaaaccctgtcatcaggactgtaaaactgaggcactgcttaaattgtaaagattttggttc

SEQ ID NO: 930445 - DNA, 627 bp, Homo sapiens
tacagtttctacaagcacagtaattcataagattttccacagtatacataatgtctttcattaaagaattactgtctttcatcttctaatccttaaatttaggctttcttttatatagtatgtgaaattcgaatacctggatggcaagagatctaaaaggtagtattctgactagagtgtggaatgtagttataagaatgcctaatgctactgatgtttgcaaaactacgcaagtaggatgtctgaaggacgctggtctatcagcaggtagtggatcccaacccctgggctgggattcacaaggctaaaccctgtcatcaggactgtaaaactgaggcactgcttaaattgtaaagattttggytcagagatctaagtcaagaagctgtgttagcgcaagactaatgagcaagcaataaacaagccttagtgctgactgagagcacaactcattcccgactcagataagaattggttgaaggataggccaagccgagtctatagctggaggttaggtggctaaaatttcagaacaagttggggatgtagccactttctggagatagattaagcacaggtaattctccatctagtgcctttgagagccattttctttctttgttaccc

SEQ ID NO: 930446 - DNA, 769 bp, Homo sapiens
aaatgggaaggaaagatttgttttaatgaaaaacaaatctcattctcacaatcaactacatatttaaggcacgtagcagttaaggagagatgtttaaattttatgtaaatataactatagaatctatttaggagactattaagatttgagtaaatgaggaagtccgtactgaatatctgttcagtaagagcaaatggattctttctaacaaaacaattcctttatagaagatgctctctataatgcatatagaagatatatatgtagaacatacacagaagatactataaatttactttttgacatagcagaaagaagagagtgcatcctgggcttaccttgcagcaagtcatggctatgtgactcaagtctagagcaaaaatatatgtataactttgggggaagttcccttaaaaagaaaagaatatatctttaaccatttaccttttcytttctgactagctagaatacagacaggttgttggtgagccatcatggactatataacccagggtaaaccctagaccttgaaagttactgtttttaatatatattaccattattttgaaaatgggactacaatacttagcttaaattgctgttagtggcttcaatacatagtacatttaaaatgtccaaaaaaaggcaggatacatagaggctacataataaatattttcttttttgttaaaggcttggctgaagtgctttcacagcttttaaatactatttctatgtcagtcctgttctccagcttctcttactattg

SEQ ID NO: 930447 - DNA, 609 bp, Homo sapiens
tgtgaatctagctggtcctagactttttttgttgttgttagcaatctttttattgccatttcaatctcactgcttcttattggtctattcagtgattctatttcttcctgttttaatctatgagagttgtatatttccaggaatttatccatctcctctaggttttctagtttgtgtgtgtaaaggtkttcacagtagccttgagtgttcttttgtatttctgtggaattggttgtaatatctcccatttcatttctaattgagattatttggatcttctctcttcttttcttgatttatcttgctaatggtctatgaattttgcttagctttttaaggaaccaactttttgtttcatttatcttttgtatttttttttgctattgttgttgtttcaatttcattcagttctgctctgatttttgttatttcttttcttctgctgaatttgggtttggttctttcctgtttctctgattccttgagatgtgaccttagattgtctgtttgtgctctttcagactttttgatataggcatttaatgctatgaactttcctcttagtactgctttcactgcattccagaagttttgataggttgtgtcact

SEQ ID NO: 930448 - DNA, 609 bp, Homo sapiens
tgtgaatctagctggtcctagactttttttgttgttgttagcaatctttttattgccatttcaatctcactgcttcttattggtctattcagtgattctatttcttcctgttttaatctatgagagttgtatatttccaggaatttatccatctcctctaggttttctagtttgtgtgtgtaaaggttttcacagtagccttgagtgttcttttgtatttctgtggaattggttgtaatatctcccatttcatttctaattgagattatttggatcttctctcttcttttcttgatttatcttgctaatggtctatsaattttgcttagctttttaaggaaccaactttttgtttcatttatcttttgtatttttttttgctattgttgttgtttcaatttcattcagttctgctctgatttttgttatttcttttcttctgctgaatttgggtttggttctttcctgtttctctgattccttgagatgtgaccttagattgtctgtttgtgctctttcagactttttgatataggcatttaatgctatgaactttcctcttagtactgctttcactgcattccagaagttttgataggttgtgtcact

SEQ ID NO: 930449 - DNA, 605 bp, Homo sapiens
ttgggaggctgaggcaaatggatcatttgagttcgagttggagaccagcctgggcaacatgacgaaaccccatctctacaaagtatacaaaaaattagctggtgtagtgatgcgtgcctgtagtcccagctccttgggagggtgaggtgggaagagcgattgaagatctggaggttgaggatgcagtgaaccatgatcatgccactccacttcagcctgcacaacagagcaagaccctgtgtcaaaaaacaaacaaacaaaaaaactggtaacactttgtagattattttwtgtaaaatcaattatgacagattttcagttccaatttttagattctatggtaaaatgtctattttttttattttttattttatctatttattttttttgaagcagactttcactcttgctgcccaggctggagtgcaatggcgtgatcttggctgactgcaacttccgcctcccgggttcaagcaatcctcctgtcttagcctcctgagtagctgggattataggtgtgcacaccacgcccagataattttttgtctttttagtagagatggggtttcaccatgttggtcaagctggtctcgaactcctgacct

SEQ ID NO: 930450 - DNA, 824 bp, Homo sapiens
attctcttgcgagcatcaccttctggctggaagccagccaacacagaccattacagcatccacaggtacaataacactgcacccaggaaggagaaaacttgtgcatgagctatcactatagcctgcaccaccctggctaaccagaaggtcctaagtctgtccacaggacaagttcattactattacaaccagaatttgagaaagccaacaaactaagactacttataaccaagaaatctcagagtgtatgtcacgcccccatcagaatgggtgctggctggtacccactgctgagagggttgaggacaggttacatcactggattccttgcagacattacccagcaccagcctgaattacggcagactcactgggtggctagaccaagaggaacaacagtagtcacagtagtctggctctcagggactcctacccctagggaagagggagtgycccacattaagggaacagccagtagtacaaaagaatccagatggcaagccttgagtcccagatcttaccactggtgagaagtttcagcagtggcacagttgcagcgctgggctcagctaggatagtctgcaacaataccccaacaggcaggcagccctggtgctcatgaagggccttggaaaagggaacttcttttacccctcatccatgactgtgaaataactgggggcttctctcactggagcttggtgtgggtgcacctatagataacctttctggatcactgcaggttgactacatccccagaggtggagcaccctccaggttcaggcttgcacgagaggcacagtcacaattcctctctggttgga

SEQ ID NO: 930451 - DNA, 603 bp, Homo sapiens
ccagtccctgtgggactcctggtgggtccacatggtttgtaactttgggaatttactaaatggattcctttctgtgtgatgtgaactctaccaagtgactgtttttgtggtaccattatacagtttctgtcccagacaactaagtcatcctatggggtgagtgaattctcttccttctctagctatgcaatattgtccaataattgaggcttttagggcccagaaattatcaaggtgattcttttcagccaggaatttatcaggaactgggtctgtaggtactaattcttkacttcccatggccattgatctcccattatagttcctccacatacataacatgaagtgacattgagagactgggctacatgcttggctaattgcaaaaacaaatttcttgtttttcctggaatttctggtactggcacatttagttcatcatagaaagtttgaaacactggctcagcagagtgtttgtaaacttctcctcgaaccaagatatttactcgaggatccagtccagccctatcaattcctaaggtcacatgctccccttttttccagcgaggatcaaggggattggttattactagctttaagggg

SEQ ID NO: 930452 - DNA, 603 bp, Homo sapiens
ccagtccctgtgggactcctggtgggtccacatggtttgtaactttgggaatttactaaatggattcctttctgtgtgatgtgaactctaccaagtgactgtttttgtggtaccattatacagtttctgtcccagacaactaagtcatcctatggggtgagtgaattctcttccttctctagctatgcaatattgtccaataattgaggcttttagggcccagaaattatcaaggtgattcttttcagccaggaatttatcaggaactgggtctgtaggtactaattctttacttcccatggccattgatctcccattatagttcctccacatacataacatgaagtgacattgagagactgggctacatgctyggctaattgcaaaaacaaatttcttgtttttcctggaatttctggtactggcacatttagttcatcatagaaagtttgaaacactggctcagcagagtgtttgtaaacttctcctcgaaccaagatatttactcgaggatccagtccagccctatcaattcctaaggtcacatgctccccttttttccagcgaggatcaaggggattggttattactagctttaagggg

SEQ ID NO: 930453 - DNA, 587 bp, Homo sapiens
ggcacctgccaccatgcccggttaattttttgtattttttttaagatggagtctcattgtgtcgcctaggctggagtgcagtggcacggtcttggctcactgcaagctcgcctcccgggttcatgccattctcctgcctcagcctcccgagtagctgggactacaggcgcccaccaccatgcctggctaattttttgtatttttagtagagatggggtttcaccgtgtcagccaggatggtctcaatctcctgacctcgtgatccgccygccttggcctcccaaagtgctgggattacaggtgtgagccactgtgcccggccagttttttgtatttttagtagagacagggtttcaccatgttggccaggcttgtcttgaacccctgacctcaggtgatctgcctgccttgtcctcccaaagtgctaggattacaggcgtgagaaaccgtgcctggccattgagcaacaagataatacatcttgatgctatatattgagatggcgacaacaaggggaaaacaaggctttggcaggaaaattaagagttctgtgatgtctgtattaactttgagatgtttcttagaag

SEQ ID NO: 930454 - DNA, 637 bp, Homo sapiens
tggtggctatggggcaagatgccttccacttgagaaaagtgaaagtaaaagcaaaggggactttgtcttgcaccttaggtaccagctcagccacagggtctagagcaccaagtgacctcttggggtcctttattccaggacttggctcttggatggcttttctagacctgccctgggccactggggagtgcactgccctgaagggtgagtcgcaagctgggcagcattcaccacaagctgactggagaggccttgggccttaaatggtagtctggcggtactcctcgtgggcctgtggcaatggtggccatgggaggctcctctgcctttggaaaggggcaggaagagtggaagtgtcatgcgcgtccatgtgaagagwccaccaaacaggctttgtgtaagcaacaaggctgtttatttcacctgggtgcaggcgggctgagtccgaaaagatagtcagtgaagggagataggggtggggccgttttataagatttgggtaggtagtggaaaattacaatcaaagggggttgttctctggctggcaggggtgggggtcacaaggtgctcaatgggggagcttttgagccaggatgagccaggagaaggaatttcacaaggtaatgtcatcatttaa

SEQ ID NO: 930455 - DNA, 755 bp, Homo sapiens
ctctctttctctccttgggcttttcttatttcctgagacacaaaaatcataaaattaggccaattaataattctacaattgcctctaaatgttcaagtgaaagaaagagttgcacgtttatttaaatcaaaagctagaaaagattaagcttagtgaggaaggcatgttgaaagccaagataaaccaacagttagacttcttgcaccaaacagatagccaaatggtgaatgcaaaggaaaagttcttgaagaaattgaaagtgctactccagtgaacacacaaatgacaaaaaagtaaaacagctttattgctgatgtacagaaagtttgagtagcctagagagaacatcaaaccagctcccrcattcccttaagctatagcctaatccagaccaagaccctaactctcttcaactccattaagcctaagagagattgacaggctgcagaagaatagttggaagctagcacaggttggttcatgaggtttaaggaaagaagccgtcaccataacataaaagtgcaaggtgacgcagcaagtgctgatgtagaggctgcagaaagttatccaacttatccagaagatctagctaaggtcattaatgaaggtggctacatgaaacaacagattttcaatataaatggaacagccttctattggaaggagatgccatctggactttcatagctagagaggagaagtagatgcctggcttcaaacgacaggctgactctcttgttaggggtgaatgcagc

SEQ ID NO: 930456 - DNA, 742 bp, Homo sapiens
  misc_feature 1, 2, 3, 4, 5, 6, 7, 8, 9, 10, 11, 12, 13, 14, 15, 16, 17,18, 19, 20, 21, 22, 23, 24, 25, 26, 27, 28, 29, 30, 31,32, 33: n = A,T,C or G
nnnnnnnnnnnnnnnnnnnnnnnnnnnnnnnnnctagactggcctagctcccagtctacatctttcttccgtggtggatgcttcctgccctcgaacatctgactccaagttcttcaattttgggactggaactggctatccttgctcctcagcttgcagatagcctattgcgggaccttgtgatcatgtgagttaatacttagtaaactaccctttgtatatmtataataaagtgtatgtatatagatagatagacagatatagaaatatatatatatatatacatatatatagatagctcctattagttctgtccctctagagaaccctaatacaataattaaactgacttaagaaggttgcctaaccttgactttaaccttggaaatacaaggacttttcatcttcctctttccactctgacttatattgcatctcatttctcatacaacagtctagggcctctcctctttttctggtcccctatgcttaccaaaacccacatcttcaaaacaaacatgcaaagcaggaagtacctctcagaagggaattccgtctgctctacagacgtgccagtcggccacatcacagaagcagcaggcaactctctagggaagacaccatagtgtctggtggactccaggaagctacagcacaagaaggcacaggattccctcagccccagcctggattctaagaaaaaaaataatgttgtaaatcacaaccctcacatcattcctta

SEQ ID NO: 930457 - DNA, 578 bp, Homo sapiens
ggaaggttgcttgagcccaggagttcaggaccatcttgggcaatatagatagacctcatctctaccaagatttttttttttaattagctgagcatgtggcacacacctgtaatcacagcttctcagaaggctgaggtgggaggattgtttgagcccgggaggtygagactgcagtgaaccagatcatgctactgtactccagcctgggcaacagaggaagagcctatctcaacaaccaacaaaaataatttattttaacaggttggaaggaccaaaagaaaaagaaacacagtcctggctctcaaaaagcttagatcatatgagttctctgctgaaaatttctacaaatggatttctgctacatttataataaaacccaaactcctcatcagggccaagtccccttgagttctgacttcttcttttttttttttttttttttgacatggagttttgctctcttgcccaggctgcagtgcagtggtgcaatcttggctcattgcaacctccacctcccaggttcaagcgattctcctgcctcaacctcctgagtagctgggattacaggcacgcatcac

SEQ ID NO: 930458 - DNA, 578 bp, Homo sapiens
ggaaggttgcttgagcccaggagttcaggaccatcttgggcaatatagatagacctcatctctaccaagatttttttttttaattagctgagcatgtggcacacacctgtaatcacagcttctcagaaggctgaggtgggaggattgtttgagcccgggaggttgagactgcagtgaaccagatcatgctactgtactccagcctgggcaacagaggaagagcctatctcaacaaccaacaaaaataatttattttaacaggttggaaggaccaaaagaaaaagaaacacagtcctggctctcaaaaagcttagatcatatgagttctctgctgaaaatttctacaaatggatttctgctacatttataataaaacccaaactcctcatcagggccaagtccccttgagttctgacttcttcttytttttttttttttttttgacatggagttttgctctcttgcccaggctgcagtgcagtggtgcaatcttggctcattgcaacctccacctcccaggttcaagcgattctcctgcctcaacctcctgagtagctgggattacaggcacgcatcac

SEQ ID NO: 930459 - DNA, 779 bp, Homo sapiens
aggaggctgaggcaagagaatctcttgaatccgggaggcagaggttgcagtgagctgagatcaagccgttgtactccagcctgggcaacaagagcgaggctctggctcaaaaaaaaaaaaagtatatgaggtaattcatatgttaaatagcttgatttagccattacacaatgtatataaataccaaaacattgtgtttacactataaatatgtataatttttgcttgttaatcgaaaataatcaaaaattttaagcattttttaaaataaaataatgtatagtattgcacgcaaagtctaaatatgtctcttgcctgaatgcacagtcacattagtaaaggatctcaggtgtccttgcagatgactgaaaagtcctattaccaagttcagatgttataacatggtccttcttcagagagacccaacttgttattttattaagcagctctgaggatggtaatgcaagtcattctttttgagatgtgtttttccagttattcagaccaagaaagattttaacggactgaccttctattttggtcttaggaattgcatgatctctaatttactttcaaaawtgtctgagggccaattcactctgatttttagtgtagctttgctactatgatgggactattcctttctaggcattttgtagacgagttgtctctatcatcaaccccagaattctatgagctctaatgaaatgaggaaacctatttcaatagtgggctctctcattattataaccatcaactaaacttagcaggcaaaagcc

SEQ ID NO: 930460 - DNA, 607 bp, Homo sapiens
aagaggaatgattggttattaatttagcactgtccttatgtcatcagtcatttcttctatcgggacattttcttcactagaaaagaaaaaaaacgttaaaattaaggacagcaagcagcggctgtttaccattgattgaggtttggagacaggtgtttaggattttatttactctgctgctccctaatgactgcgctcctgtttcttctttttctgaaaaaactttttttttttttttatttttctgagacagcatctcattctgtcacccagtgctggagtgcagtggtgtgatcacagctcactacagccttgacctcctaagctcaagcgatcttcccacctcagcctcctgagtagctgggacaagaggcatgcaccaccacacccacctaatttatttttattttaattttttttgtagagatggaggtcgcactgtgttgctcaggctggtctcaaactctggkctcaagctatcctcctgctgcgacctcccaaagtgctgggattacaggctagagccaccgcactgggcctaaaaaacaaaaaacaaaaacaaaaatcttaacgtatctgtcctctatctagactcatctagactgcc

SEQ ID NO: 930461 - DNA, 632 bp, Homo sapiens
atctcccaacacttttgcatataccttactctttttctccacccattatgcaaacaagctagataggaaatcacatttgacaggtgagaaaatggaggcactgatatttcaagtatctgacccaatggcaaacacaaggtaaaacacctggtactacaatttaggctttctagagatcagtgctccaatgagaagctttgtagttaaaatgttatttttaatgcagaatgagtacttcgtgctcataagaattcaaataagaaaggaatagttggccgggcgtggtggctcacacctctaatcccagcactttgggaggccgaggtgggtggatcacgaggtcaggagatcgagaccatyctggctaatatggtgaaaccccgtctctactaaaaatacaaaaaattagccgggcgtggtggcagatgcctgtagtcccagctactcagaaggctgaggcaggagaatggtgtgatcccaggagatagagcttgcagtgagtcaagatcgcgccactgcactccagcctgggcgacagagcgagactccgtctcaaaaataattagaataaaataaaataaaataaagaaaggaatagtttacctgtagtcgtgaagctatacttctcttca

SEQ ID NO: 930462 - DNA, 586 bp, Homo sapiens
cattgatgcaaaaatcctcaataaaatactggcaaaccaaatccaacagcacatcaaaaagcttatccaacatgaccaagtgggattcatccctgggatgcaaggctggttcaacatacgcaaatcaataaatgtaatccagcatataaacagaaccaaagacaaaaactacatgatcatctcaatagatgcagaaaaggcctttgacaaaattcaacaacccttcatgctaaaaactctcaataaattaggtattgatgggatgtatctcaaaataataagagctatctatgacaaacctgcagccaataygatactgaatgggcaaaaactggaagcattccctttgaaaacgggcacaagacagggatgccctctctcactgctcctattcaacataatgttggaagttctggccagggcaatcaggcaggagaagaaaataaagggtattcaattaggaaaagaggaagtcaaattgtccctgtttgcagatcacatgattgtatatctagaaaaccccatcatctcagcccaaaatttcctcaagttgataagcaacttcagcaaagtctcagaatacaaa

SEQ ID NO: 930463 - DNA, 635 bp, Homo sapiens
tgtctggcactccctagtgagatgaacccggtacctcagatggaaatgcagaaatcaccagtcttctgcgtcgctcatgctaggagctgtagcccggagctgttcctattcggccatcttggctgctctccgatgatgtctttatttcaacttgacttttgagagataattgcacagggtacataattgtaagttggaggtgtttttctctcaacactttgaatatttcagtccactctcttctggagtgcatggtttctgaagagaagtctgatgtaatcttttgctcctctatacataaggtttgttttttttctggcttcttacaggatgttttcttcatctttgattttctacagtctgaaaataacaaamctatgcataatttttctggcaattttccttcttggtgttttctgagcttcctgggtctgtagtttagtgtctgacattcattcaagaaaaattttcagtgctttttagttcaaatatttattttgttcctttctttctccctttcaagtatttccattatacacacgtagttatcacaaagttcttggctatcctttttttttttcctctagtcttacttttctttgcttttaattttggaggtttgtattgggatatac

SEQ ID NO: 930464 - DNA, 543 bp, Homo sapiens
cagccttgacctcccaaagtgctgggattacaggcatgagccaccgcgcctggcctcaggccctattctaataaaacttccaggtagatgcttgttctccttctctgtgagtccaaacaaggtctctagttattgattctcatrttattgcagcttctacaaatttcaccctcaagtcagctttttggcttttctgactcaagtcacaagataaccatccttttgtttcatttttgtaaattctcataaccccaactggatggtagatgaatatgaggaagaggggaaatcaaaagaatgagagcaatgagcctattactcttgagatgaacagagggagagattcaacaccaaatgcgtccctcttctgaatcccatctctcgaatcagacagcacttctgtgtacttcccaatatccatacaaataccaggaaacttattttacttgcctctggccttggtttgcaggtttggggaaacacaggagtcaaacagaatttttttgggtgaacccacagatttcactctgaggaacagctccc

SEQ ID NO: 930465 - DNA, 626 bp, Homo sapiens
ggctaatttttgtatttttagtacagacagtgtttcaccatcttgaccaggctggtcttgaacttctgacctcaggtgatccactcgcctccgcctcccaaagtgcttggattacaggcatgagccaccgcgcccggcccgtctctaagttattttctaagctaaaagtcatgctactgcaaccaacggatatccycccttttttggagatacttggtaatgtagaaactatttcagagagtcaaaattctacagatagagtttagaatgcacaaaatctagacatggcattgaggcatctagatattgcctttacctatttcctgtaggaacttgctccagattagtatcttaaagacaaattggcatttatttttcttacacacattgcattgtgccatgtaagaaaattacagattaaatcagcattttcctcctgcttgatgtgaataaaatcaatgctgaaatgggagtcctagttaatctatgtgatagaagttactaggaccagtgtttggtggcttaggtccttaaagaaattggaaagctctttgcaatacagtgtgttaacaacagccttttctttttattcccttccctttgcaactgttcccagcccttcttta

SEQ ID NO: 930466 - DNA, 626 bp, Homo sapiens
ggctaatttttgtatttttagtacagacagtgtttcaccatcttgaccaggctggtcttgaacttctgacctcaggtgatccactcgcctccgcctcccaaagtgcttggattacaggcatgagccaccgcgcccggcccgtctctaagttattttctaagctaaaagtcatgctactgcaaccaacggatatccccccttttttggagatacttggtaatgtagaaackatttcagagagtcaaaattctacagatagagtttagaatgcacaaaatctagacatggcattgaggcatctagatattgcctttacctatttcctgtaggaacttgctccagattagtatcttaaagacaaattggcatttatttttcttacacacattgcattgtgccatgtaagaaaattacagattaaatcagcattttcctcctgcttgatgtgaataaaatcaatgctgaaatgggagtcctagttaatctatgtgatagaagttactaggaccagtgtttggtggcttaggtccttaaagaaattggaaagctctttgcaatacagtgtgttaacaacagccttttctttttattcccttccctttgcaactgttcccagcccttcttta

SEQ ID NO: 930467 - DNA, 708 bp, Homo sapiens
ccaggccatcgtgatgagcaaacactaagcccctgcctgctggagctcacaggctagtgagaaaaggaggtgatccatgcataaggttgagggtgtatgggctataaagaaagataaagtggagtcaggggtagcatgatgagaacatgctgctttcaagggacttgcacgctaatgacaaggaaatggacaatgaaccacgagcagataaattgtgtrtgtgtgtgtgtgtgtgtgtgtgtaaatagggtgctaaggcagagaacgatgggaatgtcacttagaaatgacatttaggcaaggactgaagattgagaaggagccagatgtgcaaatagtcaaacaagaggtgttccaggcaacagcaagtccctgaggtgggtgagagttctgcaggtccacgaaagtgcagaggagcccaagtggtgggagacaaagaggaagggcctgagccaatggcttagagttgggatggagtaggtccacctgctgcaccacacagcattgtgctgctctcacctgatctttgtgattgtagtagtgccctgttgctgctgcaacaaatcaccacaaacctagtggcttaaaacagcaagaatgtattctctcccagtttagatgtcagaagtcccctgtgagtattaaggagctaatatcaaagtgctggctgggctggttccttctgggggcatgggggagaatctcttc

SEQ ID NO: 930468 - DNA, 785 bp, Homo sapiens
catgtcatttaaagttttcaaacatggtttcttcaaaagagtcctaaacacctttatcttgcctgattatggtacaagcatctcttactctagaagaattattgtatatgatcagccttttgcacaagtctcggctccaactgctatcctattgcatctggagcagaatttgtcttagccagtagagaaatgataatgtactgggacattttgctgtactcagagcacttctctgtggtttgaagacttctcatcatcatgttttcatgtcatgaggatggtatcactgatgagcaagtgtaagtggactgacatttatcttgtgagygtgggagagagagggctgcttctctctaaatgtgtggttctccttggtaagacaaatgtaaacaaatcatatattcataaagtttagaaaagaaagtcagaatatactggaaattgggataataataaggctgtttatatttatctcctgagaaactctaagcatttctttttttttttcttctttttgacagagtctcgctctgtcgccaggctgcagtgcagtggcgtgatcttggctcactgcaacctccacctcccaagttcaggtgattctcctgcctcagcctcctgagtagctgggacttcaggcacaggccaccacacccagctaattttttgtatgcttagtagaaacagggtttcaccatgttggccaggatggtctcaatctcttgacctcatgatcctcctacctcagcctcccaaagtgctgagattacaggcatgagccaccg

SEQ ID NO: 930469 - DNA, 755 bp, Homo sapiens
aaagcaactccaaaaaatgatggagataatgtgatacatgagagaggataacagaaagttaacctttacagggcaagatgtcaaactggttctttaaaacaatctactcaggggtggagccaagatggctgaataggaacagctccagtctacagctcccagcatgaacaacgcagaagacgggtgatttctgcatttccaactgaggtaccaggttcatcacatyggggagtgccagacagtgggtgcaggacagtgggtgcagtgcaccgtgcgtgagctgaagcagggtgaggcattgcctcacccgggaagcacaaggggtcagggaattccctttcatagtcaaagaaatgggtgacagatggcacctggaaaattgggtcactcccaccctaataccgcgcttttcgaacgggcttaacaaatggcacaccaggagattatatcccgccccttgattggagggtcctacgcccacgaagcctcactcattgctagcacagcagtctgagatcaaactgcaaggcggcagtgaggctgggggaggggcgcccgccattgccaaggcttgagtaggaaaacagcagccgggaagctcatgagtggagcccaccacaactcaaggaggcctgcctgcctctgtaggctccatctctgggggcagggcacagacaaacaaaaggcagcagtaacctctgcagacttaaatgtccctgtctgacagctttgaagagagtagtggttctcccagc

SEQ ID NO: 930470 - DNA, 755 bp, Homo sapiens
aaagcaactccaaaaaatgatggagataatgtgatacatgagagaggataacagaaagttaacctttacagggcaagatgtcaaactggttctttaaaacaatctactcaggggtggagccaagatggctgaataggaacagctccagtctacagctcccagcatgaacaacgcagaagacgggtgatttctgcatttccaactgaggtaccaggttcatcacatcggggagtgccagacagtgggtgcaggacagtgggtgcagtgcaccgtgcgtgagctgaagcagggtgaggcattgcctcacccgggaagcacaaggggtcagggaattccctttcatagtcaaagaaatgggtgacagatggcacctggaaaattgggtcactcccaccctaatacygcgcttttcgaacgggcttaacaaatggcacaccaggagattatatcccgccccttgattggagggtcctacgcccacgaagcctcactcattgctagcacagcagtctgagatcaaactgcaaggcggcagtgaggctgggggaggggcgcccgccattgccaaggcttgagtaggaaaacagcagccgggaagctcatgagtggagcccaccacaactcaaggaggcctgcctgcctctgtaggctccatctctgggggcagggcacagacaaacaaaaggcagcagtaacctctgcagacttaaatgtccctgtctgacagctttgaagagagtagtggttctcccagc

SEQ ID NO: 930471 - DNA, 755 bp, Homo sapiens
aaagcaactccaaaaaatgatggagataatgtgatacatgagagaggataacagaaagttaacctttacagggcaagatgtcaaactggttctttaaaacaatctactcaggggtggagccaagatggctgaataggaacagctccagtctacagctcccagcatgaacaacgcagaagacgggtgatttctgcatttccaactgaggtaccaggttcatcacatcggggagtgccagacagtgggtgcaggacagtgggtgcagtgcaccgtgcgtgagctgaagcagggtgaggcattgcctcacccgggaagcacaaggggtcagggaattccctttcatagtcaaagaaatgggtgacagatggcacctggaaaattgggtcactcccaccctaataccgcrcttttcgaacgggcttaacaaatggcacaccaggagattatatcccgccccttgattggagggtcctacgcccacgaagcctcactcattgctagcacagcagtctgagatcaaactgcaaggcggcagtgaggctgggggaggggcgcccgccattgccaaggcttgagtaggaaaacagcagccgggaagctcatgagtggagcccaccacaactcaaggaggcctgcctgcctctgtaggctccatctctgggggcagggcacagacaaacaaaaggcagcagtaacctctgcagacttaaatgtccctgtctgacagctttgaagagagtagtggttctcccagc

SEQ ID NO: 930472 - DNA, 755 bp, Homo sapiens
aaagcaactccaaaaaatgatggagataatgtgatacatgagagaggataacagaaagttaacctttacagggcaagatgtcaaactggttctttaaaacaatctactcaggggtggagccaagatggctgaataggaacagctccagtctacagctcccagcatgaacaacgcagaagacgggtgatttctgcatttccaactgaggtaccaggttcatcacatcggggagtgccagacagtgggtgcaggacagtgggtgcagtgcaccgtgcgtgagctgaagcagggtgaggcattgcctcacccgggaagcacaaggggtcagggaattccctttcatagtcaaagaaatgggtgacagatggcacctggaaaattgggtcactcccaccctaataccgcgcttttcgaacgggcttaacaaatggcacaccaggagattatatcccgccccttgatyggagggtcctacgcccacgaagcctcactcattgctagcacagcagtctgagatcaaactgcaaggcggcagtgaggctgggggaggggcgcccgccattgccaaggcttgagtaggaaaacagcagccgggaagctcatgagtggagcccaccacaactcaaggaggcctgcctgcctctgtaggctccatctctgggggcagggcacagacaaacaaaaggcagcagtaacctctgcagacttaaatgtccctgtctgacagctttgaagagagtagtggttctcccagc

SEQ ID NO: 930473 - DNA, 579 bp, Homo sapiens
gtgcccacccagatagaaggagggtctgcctctcccaatccactgacttaaatgttaatctcctttggcaacaccctcacagacatgcccaggaacaatactttgcatccttcaatccaatcaggttgacactcaacatcaactatcacagcatatatgtatatatgtttgtttaaaaacacagcaagatatcggaataagctttgtamactaggactatttgcaaagttattgtgtgaatataaagagctaatatatatcttaaaattttctgtagaggtagttgtatacacaggctgtaaaagtcagcatttttcctcatattattccagaacacataaaaaagcaacaaggaaaatggagaaaaaaagaaccaaatatatccttagtgaaactagaaaaagttagaatccaaagatttcaaaacgtatgtagagatgaccaaatctagttggaatcaggcacaagccacatgggagtaaatgaagtatggaggtagtgaggccaatggctgataatctcagaaaacaccaacaaaatgtactccctgaaaatttgggagttcacttccatgttcaa

SEQ ID NO: 930474 - DNA, 579 bp, Homo sapiens
gtgcccacccagatagaaggagggtctgcctctcccaatccactgacttaaatgttaatctcctttggcaacaccctcacagacatgcccaggaacaatactttgcatccttcaatccaatcaggttgacactcaacatcaactatcacagcatatatgtatatatgtttgtttaaaaacacagcaagatatcggaataagctttgtacactaggactatttgcaaagttattgtgtgaatataaagagctaatatatatcttaaaattttctgtagaggtagttgtatacacaggctgtaaaagtcagcatttttcctcatattattccagaacacataaaaaagcaacaaggaaaatggagaaaaaaagaaccaaatatatccttagtgaaactagaaaaagttagaatccaaagatttcaaaacgtatgtagagatgacyaaatctagttggaatcaggcacaagccacatgggagtaaatgaagtatggaggtagtgaggccaatggctgataatctcagaaaacaccaacaaaatgtactccctgaaaatttgggagttcacttccatgttcaa

SEQ ID NO: 930475 - DNA, 633 bp, Homo sapiens
tttttgaaaaatgtctgttcatgtcctttgcccagtttttaatggggttgtttctttttctcttcttgaattctttgaggtccttgtagattcttgattttagtcctttgtcagagacatattttgcaattctgtttttttttttttcaagcatggcgagaaagattttattcaggaccagagcaatagttacagggaccactgaaatgttgtctgacagtggggaagagagattccatgctggtcatttttaacagttttcttttattattattgttattattattattattattattatactttaagttctagggtacatgtgcacaacgtgcagatttgttacatatgtatacatgtgccatgttgtcgtgctgcacccattaacttgtcatttacattaggtatatctcctaatggtatccctcycccctccccctacccaacgacagctcctggtgtgtgatgttcccctttctgtgtccaagtgttctcattgttcagtacccacctatgagtgagaacatgccgtgtttggttttctgtccttgcgatagtttgctgagaatgatggtttccagcttcatctatgtccctacaaaggccatgaactcatccttttttatggctgca

SEQ ID NO: 930476 - DNA, 787 bp, Homo sapiens
ccatgcagtcatccgatttaagaaaaaaagtgccaaacagtgcagaaggaaaaggatagtcttttcaataaatggtgctggatcaagcagacacatccatgtagtaaaaagtgaatcatagccgggtggggtggctcatgcctgtaatccccacactctgggaggcttaagtgggaagattacttgagcccaacagtttgagaccaacctgggaaacatgttgaatccccatctctacaaaaartatgaaaattaagccaggcatggtggcacactcctatagtcgcagctactcaggaggctgaggtgggaggatcgcttgagccaggaggtggaggttgcagtgagctgagatcctgccacggcactctagcctgggcaatagagtgaggccctgtctgaaaaaaaaaaaaagaaatgcaaaaactaaaataaaattgctataaggttaacacagaaaaatgtgttcatactcctaggttaggcattgatttcttaaacaggacacaaaaagcagtaaccataaaggaaaagattgataaagtataatttcattaaaattaagaatctcaggctgggtgcagtggctcatgcctgtaatcccaacactttgggaggccgaggcagatgtctcacccgagcctaggaattccagaccagcctatgcaatgtggcaaaaccccatctctactaaaaatacagaaaagagctgagtgtggtggtgctcacctgtaggtcccagctacttgggggctgaggcaggaggatcacctgagccttgggaggt

SEQ ID NO: 930477 - DNA, 787 bp, Homo sapiens
ccatgcagtcatccgatttaagaaaaaaagtgccaaacagtgcagaaggaaaaggatagtcttttcaataaatggtgctggatcaagcagacacatccatgtagtaaaaagtgaatcatagccgggtggggtggctcatgcctgtaatccccacactctgggaggcttaagtgggaagattacttgagcccaacagtttgagaccaacctgggaaacatgttgaatccccatctctacaaaaagtatgaaaattaagccaggcatggtggcacactcctatagtcgcagctactcaggaggctgaggtgggaggatcgcttgagccaggaggtggaggttgcagtgagctgagatcctgccacggcactctagcctgggcaatagagtgaggccctgtctgaaaaaaaaaaaaagaaatgcaaaaactaaaataaaattgctataaggttaacacagaaaaatgtgttcatactcctaggttaggcattgatttcttaaacaggacacaaaaagcagtaaccataaaggaaaagattgataaagtataatttcattaaaattaagaatctcaggctgggtgcagtggctcatgcctgtaatcccaacactttgggaggccgaggcagatgtctcaccygagcctaggaattccagaccagcctatgcaatgtggcaaaaccccatctctactaaaaatacagaaaagagctgagtgtggtggtgctcacctgtaggtcccagctacttgggggctgaggcaggaggatcacctgagccttgggaggt

SEQ ID NO: 930478 - DNA, 666 bp, Homo sapiens
actcggagctaagaatcacatttcaaaactgcagggaaaaaagcgagcgaaagagattgtttcttgagaaaagaggaagagactcattcatctcacaaatactcaggactctgaaagcgtgaatcagctccccagacacagaaacatggcatgcgtctacacagattagattgtacgctctgcaagtataggaatgtccccccatggcccaagmatctcagcttttctccagcaaaacgggacacgcttaaacttcctttggttaaaaagtgctcttcaagaatgtgtttctgaaactaataaaatgacttgaaactctacaatgcattccttacaaggtgagagagaacttcattcaccagagtccacttgctcgctgctcaaagcgaaggcacaggcaggaatgacttccttccccctaccccccaccccgtatgttttgttgcctgagggggtcccaggaagggcaccctgtgaggctgaggccgcaggggagtgtggagcctggctgccatcacaccatcttcagcaaacagcccaggcccctctcctggtcctcacaccccaggagggctggccgtccccagttcccagcagggcccagacctcaccagactcctccctgactctcccagacccacaagggcccccaaaaccaccgtcctg

SEQ ID NO: 930479 - DNA, 587 bp, Homo sapiens
tcattccggaagaatttgggtcactagtaagtagtcctgcctgaactgggttgttgtaattttccattgaccttaatcacagagcatggtgatattaagacgtatcctaagggatctcctgtattttattcacactcttccttacctccattgtgaaggtcccatttccctatggaaggcagaattaagcaacatagccaacacwgtaactcccttctttggctgttgattcaggggcataagaagcccaaagtggccggatggcagtcttaacttctagttcagtggaatcatcgttgtgtctcctggtggaagcattcctccctctggaactaagacctttagtccagcagagcatgggcagaaacaaaaaattttctagtggatgactaggggtaatagtgagtagtaccactcccatttccaccccttgattcctggaccccaaaatactagttataggagaaacagcaccatatattggacactgattcagagcatatatagccttctggaaagtcttgccccaaccctgcaaagtattgtcacctagctggccttgtaactgagtcttaaaaatgccattt

SEQ ID NO: 930480 - DNA, 597 bp, Homo sapiens
gggtctttaccctttaaagctacagggtggtgctgcccaaggctgtgggaacccacctcctacatcagtgtgacctggatgtgagacacggagtcaaattgagatcattttggaattttaagttttaatgactgccctacttgattttggattttcatggagcctgtagcccctttgttttggccaatatctcctatttggaatgggagtatttacccaatgcctgtacccccattgtatctaggaggtaactaactgctttcaattttacaggttcatagatggaaggacttgccttgtctcagataagactttggacttrgacttttgggttaacgctggaatgagctagaactttgggggactgtcggaaaggcatgattgtgttttgaaatgtgaggacatgagatttgggaggagccagtggcagaatgatatggtttggctatggccccacccaaaatctcatcttgaattataattcccataacccccacatgccaagggcaggaccaggtggacataattggatcatggagatggctgccccatgctgttcccatgatagtaagtgaggctcacgagatctcatggttt

SEQ ID NO: 930481 - DNA, 633 bp, Homo sapiens
ttagccatcatctgccctttcaaatatctggtctacatgaaaagagaaagaggaaaggccaaaacgaaaacaaaaggaaacaaaaacaaaacgcaaccctctcaaaaacaaaagaaaaaaaaacccaaaatcttttttactacacagagcataaggtcaaaaacttacagtaccagtgtccccttcaagccatggaagaaaaacatccacataaagccttagcaagaatttccactctgaggctttgtaacatgctgaagacagggccctgggggtgctgctgccattttggaggccaccaactggggtggagamtcagtgaacagcacgtctcatgcacttggaagatcaccagccaaatatgcactggtggcctggtggagcatggctgggtgactgcctactcccaacactgaaccactcctatcctggatgacctacttcttaggtctgtctcacatttcacaaaagagctggaagtctgcatttctcattcatcacaaaacaggacaaagcacacacactctagtatctttggtcatcaaaggccatttccaacagaccctcaaacccacgtttgctttgcaagaagtgaaaagggacaaatgaagatttgaagggcagcctgcagcc

SEQ ID NO: 930482 - DNA, 546 bp, Homo sapiens
atggcttgcttcaaaattgccagtggtgtacttgatgtggaggggaagtcttcagaccagagctgttgcttcagctttcttcccctgcaccaagccatcatgtaggataaccattggtaaagcacattactttattaagggtcctctgataaagcttttcaatgtgaaaagtttccttataggatgttttaaagcaaggactttgtattgaaacaaatccaatttttagtaaagtttcagccttttaaaattgagctttcttgggccaggtgtggtggctcatgcctgtaatcccagcattttgggaggccgaggcaagtggatcacttgrggtcaggagtttgagaccagcctggccaacatgctgaaaccccgtctctaccaaaaatacaaaaaaaaaaaaaaaaaatagcccgcatggtggcatgtgcctgtaatcccagctactcaggaggctgaggcacgagaatcacttgaacctgggaggtggagattgcagtgggccgagatcacaccaccacactccagattgggtaacagagcaag

SEQ ID NO: 930483 - DNA, 605 bp, Homo sapiens
tttcccatgctgttttcatgatagtgactaagtatcatgagaagtgatggttttaaaagtggagtttccctgcacaagctcttttctcttgtctgccaccatgtgagacatgcctttcatcttctaccatgattgcgaggcctccccagacacatggacctktgagtccaacaaacgtctttctttaataaattgcccagtatcaggtatgtctttatcagcagtgtgaaaatggactaatacaggcagggacacagccagaccatatcaaagccttaacctatcattaattttattaaatgtaaatagtctaaatacacacattaaaatagattagcagagtgggttttaaatataacctagccaaatgctgtctccaaaaacctcacttcaaattagttcaactcttgtggaaagcagtgtggcaattcctcaaagaacttaaaacagacctaccattcaacacaacaatcccactactgggtatatacccaaatgaatataaatcattctaccataaagaaacatggacatgaatgttcattgaggtactattcccaataacaaagatatggtatcaacctaaatgcccatcaattgtatac

SEQ ID NO: 930484 - DNA, 605 bp, Homo sapiens
tttcccatgctgttttcatgatagtgactaagtatcatgagaagtgatggttttaaaagtggagtttccctgcacaagctcttttctcttgtctgccaccatgtgagacatgcctttcatcttctaccatgattgcgaggcctccccagacacatggacctgtgagtccaacaaacgtctttctttaataaattgcccagtatcaggtatgtctttatcagcagtgtgaaaatggactaatacaggcagggacacagccagaccatatcaaagccttaacctatcattaattttattaaatgtaaatagtctaaatacacrcattaaaatagattagcagagtgggttttaaatataacctagccaaatgctgtctccaaaaacctcacttcaaattagttcaactcttgtggaaagcagtgtggcaattcctcaaagaacttaaaacagacctaccattcaacacaacaatcccactactgggtatatacccaaatgaatataaatcattctaccataaagaaacatggacatgaatgttcattgaggtactattcccaataacaaagatatggtatcaacctaaatgcccatcaattgtatac

SEQ ID NO: 930485 - DNA, 668 bp, Homo sapiens
atagcctttcctataagcttttttctatttttatttattttatttttttactttttaaatttctttgttaaaaactcagacatagacacacacattagcgcttaagcctacacagggtcaggatcatcaatatcactgtcttccacttctacatcttgtcccactggaagttcttccrgggtaataatagcgtgaagctatcctttcttatgataacaatgccttcttctggaaaagctcctgaagaacttgtctgaggctgttttacagttacattttttttttaaataagtagaagtacactctaaaataacgataagaaatgtctcaggatccttggggtgttgcctttccaggcagaagcctctgtggccagtggcacctttgcctgagttttgcttgagcccgccgggctcgttctgctcactcggcctggcaggcagtgctgagcttgcactatcagcccggattccatgcctgccgagggagagtcaggcacggagcagcgagagggtagtgatgagcaaatgtggggtctggccactgtgcacagccaggctgctgcggtgaggcgggcagctccaggcaccagcacaggcgcctgctccgtgcaagcctgcggctggaacagatgcactgcaagtggcttccactgtgggcaccgatgt

SEQ ID NO: 930486 - DNA, 668 bp, Homo sapiens
atagcctttcctataagcttttttctatttttatttattttatttttttactttttaaatttctttgttaaaaactcagacatagacacacacattagcgcttaagcctacacagggtcaggatcatcaatatcactgtcttccacttctacatcttgtcccactggaagttcttccggggtaataatagcgtgaagctatcctttcttatgataacaatgccttcttctggaaaagctcctgaagaacttgtctgaggctgttttacagttacattttttttttaaataagtagaagtacactctaaaataacgataagaaatgtctcaggatccttggggtgttgcctttccaggcagaagcctctgtggccagtggcacctttgcctgagttttgcttgagcccgccgggctcgttctgctcactcggcctggcaggcagtgctgagcttgcactatcagcccggattccatgcctgccgagggagagtcaggcrcggagcagcgagagggtagtgatgagcaaatgtggggtctggccactgtgcacagccaggctgctgcggtgaggcgggcagctccaggcaccagcacaggcgcctgctccgtgcaagcctgcggctggaacagatgcactgcaagtggcttccactgtgggcaccgatgt

SEQ ID NO: 930487 - DNA, 752 bp, Homo sapiens
ttgcactatcagcccggattccatgcctgccgagggagagtcaggcacggagcagcgagagggtagtgatgagcaaatgtggggtctggccactgtgcacagccaggctgctgcggtgaggcgggcagctccaggcaccagcacaggcgcctgctccgtgcaagcctgcggctggaacagatgcactgcaagtggcttccactgtgggcaccgatgtctggatgaggggaatgcggtgatgcctggaagcttggagatgtcagaaaccrcagagccccaaagagggtatcacagctctggctcggggagcacctaggtctgggctcccagaagggccacagctcttctctccttctcatcacccgcaatgtggtgagcagggagttgagtttcagctctgtttgtgttacagctctttcagtccctccattcaatgggttttgagttattgtcctgcatccgggaagaaggaggtatgtggacaactgtagggtaagcaaggtggagaggagctttattgagtgacagaatagcttttgggagacctgaagttggtacctcctttctgtaggtcattccaacgagtgtctggctctcagcagagaggagacctgcagtggatagctcctacctgcaggcaggtcatcctgacaagtgtccagttctcagcagagaggagacccacagtgtgtagctcctttctgcaggcagatcatcctgacaaatcgaggagacctgaagtaggtagctcc

SEQ ID NO: 930488 - DNA, 752 bp, Homo sapiens
ttgcactatcagcccggattccatgcctgccgagggagagtcaggcacggagcagcgagagggtagtgatgagcaaatgtggggtctggccactgtgcacagccaggctgctgcggtgaggcgggcagctccaggcaccagcacaggcgcctgctccgtgcaagcctgcggctggaacagatgcactgcaagtggcttccactgtgggcaccgatgtctggatgaggggaatgcggtgatgcctggaagcttggagatgtcagaaaccgcagagccccaaagagggtatcacagctctggctcggggagcacctaggtctgggctcccagaagggccacagctcttctctccttctcatcacccgcaatgtggtgagcagggagttgagtttcagctctgtttgtgttacagctctttcagtccctccattcaatgggttttgagttmttgtcctgcatccgggaagaaggaggtatgtggacaactgtagggtaagcaaggtggagaggagctttattgagtgacagaatagcttttgggagacctgaagttggtacctcctttctgtaggtcattccaacgagtgtctggctctcagcagagaggagacctgcagtggatagctcctacctgcaggcaggtcatcctgacaagtgtccagttctcagcagagaggagacccacagtgtgtagctcctttctgcaggcagatcatcctgacaaatcgaggagacctgaagtaggtagctcc

SEQ ID NO: 930489 - DNA, 624 bp, Homo sapiens
gaatggaaaatagctggaagcattccccttgaaaactagcacaagacaaggatgccctctctcaccactccaggtcaacatagtattggaagttctggccagggcaatcaggcaagagaaagaaataaatagtgtccaaataggaagagagaacatcaaattatctttgttcacagacgacatgaacctaagtcttgaatcycatcatcttagcccaaaaacttcttaagctgataaacaacttccgcaaagtctcaggatacaaaatcaatgtgcaaaaatcactagcattcctatatatcaacaacaggcaagccaagagccaaatcatgcatgaactcccattcgcaattgctacaaaaagaaaaaaatacctaggagtaacagctaacaagggaagaaaaggacctcttcatgaagaactacaaaccactgctcaaagaaatcagagaggacacaaacaaatggaaaaacatttcatgctcattgataggaagaatcaatatcatgaaaatggccatactgctcaaagtaatttatagattcagtgctattcccactaaactacctctggcattcttcacagaattacacaaaactattttaaaattcatatggaaccaa

SEQ ID NO: 930490 - DNA, 592 bp, Homo sapiens
gtgggggaaagcaggcagtaacaggcctctctcagctcctacacagccagtaaggccagtctcacttctgccatgctcccctaatagctaacagagctaaatttatatccaggcctccagtgcacagggctgagatcttgtcccaggctataagcctccctgttgagaaagcaagcagggttttgaggccttgctcctctctgcctgccatggcttctgtgttcatatttgcacttcctgtttgtgccctgacccctggcttctgccctagaaaattcatgctaggtcaaaattattataaagtttagctggaagtcttcttctccctgtggaccttctttaattccattggctgccctccccaaggactcctgtgagaygaagtcagaaatggcttcctggggaacaggagtgcctacagggttcttcctcctgcttcttctacttttatatttcacttggctctctaaatttgtttcagctctaggtaagtttaattctttctcctgtgatctggattttcaggttcccctgtgaggatgcgtgttcgaaggtgaactgtccccttctcacactttcggcagtcacagtt

SEQ ID NO: 930491 - DNA, 749 bp, Homo sapiens
atcccagcactttgggaggtcgaggcgggcgaatcacgaggtcaggagctcgagaccagcctggccaatatggtgacaccccgtctctactaaaaatacaaaaattagccgggtgtggtggtgcatgcctgtaatcccagctactcgggaggctgaggcagaagaatcgcttgaacccgggaggcagaggttgtagtgagccgagatcgcgccactgcactccaccctgggcgacagagcgagacttcgtctcaaaaagaaaagaaaaagaaaggaggagacccagggtatgagcggaggaggccggcgctgccgggaccacgcgcgtgcggtaaacggtcccagaggcccgggccccggcggctgcgccgagtccccgcccctccckgctccgtaggggtaggagggggccggcggagtttccctccccgcccagcggccctgggcgggcttttcggctgcttctcataagcaggtggtttcgtttctccggcacaggtaggtttctctggcaccgattcggggcctgcccggacttcgccgcacgctgcagaacctcgcccagcgcccaccatgccccggcagctcagcgcggcggccgcgctcttcgcgtccctggccggtgagtggccctcagcgcttcccgcggtggccctgacgtgtcggtcccctttcatctaaacgcactctggagtcccgggcgccacaggacgggctgcgggtagggaggtgtggcgcgtccaagggct

SEQ ID NO: 930492 - DNA, 742 bp, Homo sapiens
atccacctaacagatacttttcctttactctaaagatagacatcatggctagacatagtagcttatacctcaagcctcattccttgtcaacccaacaccttgagaggtcaagtagggaagatctcttgaggtcaggagttcaagactagcctgggcaccatagtgagatcccatctctataaaaaaattttttttaaattagctggctgtggtgccacgtgcttgtagtcccagctacttgggaggctcaggcaggaggatcacttgagcccagcaggttgakgctgcagtgagccaagatcttgccactgcacaccagcctgggcgacagagggagaccccaactcaaaaaaaaagctagacatcagcttagtcctagtcaatgtttcactaattttgactcagtcaaaatggaaagaattctgagtacagcttccagactctgtcctgtgtgtccttaagatgaactcagagtgaatgtgagcaccctgcttacggaaggcctcattttttgattagccctagaaagcgcagattcttgtggaacagcagtggccctgcccatcagggacgggttcacaggtgttctgcctgtgcatccggaagggctcagacttgttttcatgctttgctgttgccccatgaaattcttgatttttgaacacatggcccggcactttcattttttactaagccccaaaaattcattatgtagccagtcctgcttcccatcaatggttat

SEQ ID NO: 930493 - DNA, 637 bp, Homo sapiens
aacaaaaaattgacctcccccaagcgagagggaattctgccatggcctttggacgtgaactgcaatatcggcttttcctgggtctccagcctgatggtccaccttgcagatttcaaacttgccagcttaattacactagccagtttcttaacataaatctctttctatgtgaatttgtaccctattagttttgtttctctgtagaaccctcactaatagagatgtatatagcttaaaacaatggttgtaaaagaattgtactggggcygggcgcggtggctcacgcctgtaatcccagcactttgggaggccgaggcgggcggatcacgaggtcaggagatcgagaacatcctggctaacacagtgaaaccccatctctactaaaaatacaaaaaattagccgagtgttgtggcaggagcctctagtcctagctacccgggaggctgaggcgggagaatggcgtgaacccgggaggcggagtttgcagtgagctgagatcccgccactgcactccagcctgggcgacagagcgacactctgtctcaaaaaaaaaaaaaaaaaaaaagtacttcagtgcagtggttaagaatgtgggctctgaaatcagatgcctgtgttaagatccctgctcttctg

SEQ ID NO: 930494 - DNA, 637 bp, Homo sapiens
aacaaaaaattgacctcccccaagcgagagggaattctgccatggcctttggacgtgaactgcaatatcggcttttcctgggtctccagcctgatggtccaccttgcagatttcaaacttgccagcttaattacactagccagtttcttaacataaatctctttctatgtgaatttgtaccctattagttttgtttctctgtagaaccctcactaatagagatgtatatagcttaaaacaatggttgtaaaagaattgtactggggctgggygcggtggctcacgcctgtaatcccagcactttgggaggccgaggcgggcggatcacgaggtcaggagatcgagaacatcctggctaacacagtgaaaccccatctctactaaaaatacaaaaaattagccgagtgttgtggcaggagcctctagtcctagctacccgggaggctgaggcgggagaatggcgtgaacccgggaggcggagtttgcagtgagctgagatcccgccactgcactccagcctgggcgacagagcgacactctgtctcaaaaaaaaaaaaaaaaaaaaagtacttcagtgcagtggttaagaatgtgggctctgaaatcagatgcctgtgttaagatccctgctcttctg

SEQ ID NO: 930495 - DNA, 657 bp, Homo sapiens
ctgaggcagtgttaagaggaaactttatagcactaaatgcccacattaaaaagttagaaagatctcaaattaacaacaacctaacatcacaactaaaagaactagagaagcaagagcaaaccaaccccaaatctagcagaacacaagaaataaccaaaatcagagctgaactgaagaagatcaagacatgaaaaaacattcaaacgatcaacaaatccaggagttggtattttgcaaaaaataatggaatagataggtcactagttagactaataagaaaagagagaggatccaaataaacaatcagaaatgacaaaacctggcagacacacacacacacacacacacacacacacacacacacacacaaagaaaaacactcaggacaatatcgtygattaacatcaatgcaaaaatcctcaacaaaatactcccaaactgaatctagcagcacatcgaaaagataatccaccatgatcaagtaaacttcatccccaggatgcaaggttgtttcaatatacagaaatcaataaatgtgattcatcacataaatagaactaaagacaaaaaccacatgattatctcaatagatgcagaaaaggctttcaataaaattcaacacccgttcatgttaaaaactctcaataaactagatat

SEQ ID NO: 930496 - DNA, 657 bp, Homo sapiens
ctgaggcagtgttaagaggaaactttatagcactaaatgcccacattaaaaagttagaaagatctcaaattaacaacaacctaacatcacaactaaaagaactagagaagcaagagcaaaccaaccccaaatctagcagaacacaagaaataaccaaaatcagagctgaactgaagaagatcaagacatgaaaaaacattcaaacgatcaacaaatccaggagttggtattttgcaaaaaataatggaatagataggtcactagttagactaataagaaaagagagaggatccaaataaacaatcagaaatgacaaaacctggcagacacacacacacacacacacacacacacacacacacacacacaaagaaaaacactcaggacaatatcgttgattaacatcartgcaaaaatcctcaacaaaatactcccaaactgaatctagcagcacatcgaaaagataatccaccatgatcaagtaaacttcatccccaggatgcaaggttgtttcaatatacagaaatcaataaatgtgattcatcacataaatagaactaaagacaaaaaccacatgattatctcaatagatgcagaaaaggctttcaataaaattcaacacccgttcatgttaaaaactctcaataaactagatat

SEQ ID NO: 930497 - DNA, 605 bp, Homo sapiens
aaacaacttcagtaaagtttcaggatacgaaatcaatgtacaaaaatcactagcattcctatacaccaataatgggtaagcaaagagccaatcaggaatgcaatcccattcacaattgccacaaaaagaataaaatacctaggaacgcagataactagggaggtgaaagagctctactaygagaactacaagacactactcaaagaaatcagagatgacacaaacaaacagaaaaaacttttcatgctcatggatcagaagaatcaacatcattaaaatggccatattgaacacttatacactgttggtgggagtgtaaatcagtttgaccattgtggaaagcaaagtagaaattccttaaagagctaaaaacaaatctactatttgacccaggaatcccattactgggtatatacccaaaggagtataatcattctaccttcaaggcatatgcagtgaatgttcactgcagcactatttacaatagcaaagacatgaaatcaacctaaatgctgagggatagcagactgcataaagaaaatgtgatacatatacaccatggaatactatgcagccataaaaaagagagagattgtgtcttttgt

SEQ ID NO: 930498 - DNA, 601 bp, Homo sapiens
catctggtcctggactttatttttggcagcttttaaattgccatttcaatctcactgcttgttattaatctgttcagagtttcaatttcttcttagtttaatctaggagggttgtatatttccaggaatttatccatctcctctaggttttctaaaggtgttcatagtagccttgaatgatcttttgtatttctgcggtatcggttgtaaatrtttcccatttcatttctaattgtgcttatttggatcttcttcttttcttggttaatcttgctaatagcctacacattttattttcttttcaaagaaccagctttttgtttcatttatctttgtatttggtttgtttcaattttatttagttctgctctgatcttggttatttccttttttctgctgggtttgggtttgttcttgcttctctagctccttgagatgtgatcttagattatctatttgtcacacctttctatctttctattgcagtttcctttacctagaatgctttttcctttctatgtcttgcaaatacctttttgtctttcaagacccagctcaggtgacgcctcctccagggagtcctcttggcctgccaggctga

SEQ ID NO: 930499 - DNA, 606 bp, Homo sapiens
tgtgttcatatatgtatgcttatatgtatataatgtatacatgtacatgcatgtatatatacatacatatatgtatacataacatatatacctataaaacatgtacgtatatacatgtaacgttaatatatgtactttttaaagtaaaaatgtttatgtgtgtatgtatagtacatatatacatataaaacaagtacatatatgcatataacatatatatgtacatgatttttcaaggaaaaagcatattatgggctgcttctgacttgcctggggaacatgactggttgtgtttgttttatcgggctggttatattggtgtctaaatataggaccctcaawcatgtttgaacagtcatatgacgtacggttagatatcaagtctgtggcctacctctgaactgatgtatttatgtatttagtgacacaataaaagcagatttttcttttccaaagaactctgcactttaacccttggaatgttaaacattttggtccagatttaatttttactactgaataaaactttctacttttttattctaaagacacaaggtatctttagaaagagacaagaggctgggcgcggtggctcacacttgtaat

SEQ ID NO: 930500 - DNA, 606 bp, Homo sapiens
tgtgttcatatatgtatgcttatatgtatataatgtatacatgtacatgcatgtatatatacatacatatatgtatacataacatatatacctataaaacatgtacgtatatacatgtaacgttaatatatgtactttttaaagtaaaaatgtttatgtgtgtatgtatagtacatatatacatataaaacaagtacatatatgcatataacatatatatgtacatgatttttcaaggaaaaagcatattatgggctgcttctgacttgcctggggaacatgactggttgtgtttgttttatcgggctggttatattggtgtctaaatataggaccctcaaacatgkttgaacagtcatatgacgtacggttagatatcaagtctgtggcctacctctgaactgatgtatttatgtatttagtgacacaataaaagcagatttttcttttccaaagaactctgcactttaacccttggaatgttaaacattttggtccagatttaatttttactactgaataaaactttctacttttttattctaaagacacaaggtatctttagaaagagacaagaggctgggcgcggtggctcacacttgtaat

SEQ ID NO: 930501 - DNA, 731 bp, Homo sapiens
acctcgaacaaatcaagctctttatcagaacctgctggactttgatctgcccagtccctatcactctgatatgatttggctgtgtgttgccacccaaatctcaccttgaattgtaataatcctcatgtgtcaagggtggggccaggtagagataattgaatcatgagggtggtttctcctatactgttttcatggtagtgaaaaagtctcacaacatctgatggttttataaatgggagttcccctggacaagctctctctcctgccaccatgtaagacatggctttgcttctcctttgccttctgacatgatcgtgaggcttccccagccatgtggaactgtgaatgcattaaacttctttgcttcataaattatccagtctcggatatgtctttattagcagtgtgaaaacagactaatacagtaaattggtaccgggagtggggtgctgctgtaaagatacccgmaaatgtaaaagcgactttgcaactgggtaacaggcagaggctggaacagtttggagagctcagaagaggacaagaaaataagggaaagtttggaacttcctagagacttgttcaatggctttgaccaaaatgctgatagtgatatggacaaagaagtctgggttgaggtgatctcagatggagatgaagaacttgttggcaactggaataaaggtggctcttgctatgttttagcaaagagaatggtggcattttgcccctgc

SEQ ID NO: 930502 - DNA, 731 bp, Homo sapiens
acctcgaacaaatcaagctctttatcagaacctgctggactttgatctgcccagtccctatcactctgatatgatttggctgtgtgttgccacccaaatctcaccttgaattgtaataatcctcatgtgtcaagggtggggccaggtagagataattgaatcatgagggtggtttctcctatactgttttcatggtagtgaaaaagtctcacaacatctgatggttttataaatgggagttcccctggacaagctctctctcctgccaccatgtaagacatggctttgcttctcctttgccttctgacatgatcgtgaggcttccccagccatgtggaactgtgaatgcattaaacttctttgcttcataaattatccagtctcggatatgtctttattagcagtgtgaaaacagactaatacagtaaattggtaccgggagtggggtgctgctgtaaagatacccgaaaatgtaaaagcgactttgcaactgggtaacaggcagaggctggaacagtttggagagctcagaagaggacaagaaaatawgggaaagtttggaacttcctagagacttgttcaatggctttgaccaaaatgctgatagtgatatggacaaagaagtctgggttgaggtgatctcagatggagatgaagaacttgttggcaactggaataaaggtggctcttgctatgttttagcaaagagaatggtggcattttgcccctgc

SEQ ID NO: 930503 - DNA, 794 bp, Homo sapiens
ttagcattggaataaatgaatggagtaaaaaagatcaccctttccagtgtgggtcaacatcatccaatccattgagggcctgaataggacaaaaaggtggggaggggcaaattggatctgtcttcttaaactgagacgtctgtctcatgttgtcctaaaactgtggagctcctggttgacttggactgaattacactggctttcctggttctgcagcttgcagacagcagatggtgggatctctcagcctctgacacagtttgaatgtgtgtctctgcccaaatctcatgtggaaatgtaatccccaatgctggaggtggagtctggtgggaygtgattggatcatggggggctgatttctcataaatggtttagcaccatctttttggtgctatccttgcaatagtgagtgagttctcacaagatctgattatttagaagcatgtggcacctctccccaactcttgctcctgcttttgccatgtgatgtgcctgctcccccttcaccttccgctatgattttaagtttcctgaggcctcctcaaaagccaagcagatgttagcaccgtgcttcctgtacagcctgcagaactgtgagccaattaaacctcttttcttataaataacccaatctcaggtatgtctttatagcaatttgagaatggcctccagaatcatgtgagccaattcccatattaaatctcatcttatgtatctattatatcccattgtttttgtttctctggagaatgctgactaataacacagactcttcagatagagtctatttcact

SEQ ID NO: 930504 - DNA, 607 bp, Homo sapiens
cactggctttcctggttctgcagcttgcagacagcagatggtgggatctctcagcctctgacacagtttgaatgtgtgtctctgcccaaatctcatgtggaaatgtaatccccaatgctggaggtggagtctggtgggacgtgattggatcatggggggctgatttctcataaatggtttagcaccatctttttggtgctatccttgcaatagtgagtgagttctcacaagatctgattatttagaagcatgtggcacctctccccaactcttgctcctgcttttgccatgtgatgtgcctgctcccccttcaccttccgctatgattttaagtttcctgaggcctcctcaaaagccaagcagatgttagcaccgtgcttcctgtacagcctgcagaactgtgagccaattaaacctcttttcttataaataacccaatctcagktatgtctttatagcaatttgagaatggcctccagaatcatgtgagccaattcccatattaaatctcatcttatgtatctattatatcccattgtttttgtttctctggagaatgctgactaataacacagactcttcagatagagtctatttcactttacaa

SEQ ID NO: 930505 - DNA, 639 bp, Homo sapiens
catttgggttgtttccattgtttggctgttatgaaaatgctgctataatgttgattgtttcctttgcttcagtttctaaatttgaaatgattccatttttaaaatttttgcttttgccgtctatgcatttggggtcatatctgaaaaaccattgtccagattaacatcaagctttctcccatattatcttctagtggttttacagtttcaggtcttacatttatgtgttttgagttgatttttgtatatggtgtgagatgagggtccatttattcttttgcatgtggatatccactttttccaatacctttattgaagaaactgtcctttccccattggatgctcttggcacctttgtcaaaggwcaattgaccataaatgcatgggcttatttctgggctctctattctgttctattggtctatgtgtccgtgtttatgccaccaccatactgttttgaagactgtagcttgtaattttttaaaataaatcaggtattgctatacctccagctttgttctttttgtgcagctatttgggggtgttttgtgcttccatgggaattttagattttatttttctatttctgtgaaaaatgccactgggaccttgatagggattgcactgaatttgtctagg

SEQ ID NO: 930506 - DNA, 507 bp, Homo sapiens
taaaaaaaaaaaaaaaagttttaagacctgcaggtaaggagcgtccatctggaaaggtgatgggtttgtcgagtaaccgggatatgtttactaccggtgcgtagaggcggaggcattccttgatgcacatcgtggtgtaaggcatctggctcaggtgttccctgggtagaagcacaggaggaaaggaaaaggaggagtagtcacttaggcattgcactgaaagcccagcttttctccatttttgtaactgaraatgattttgttctttacccaaaggaggacttcagatgtatcaagtatgtcttaggaaaagctaaatgttaacacttaccacttttcacatgtaactgtaagtgattctcccccccccgcagatatagggctcttatcctgagacatacttattccagggctcctgtgaccagtatcacacatctgtgaaaatttggtagagacatggactgtatttatatccagagtgcctcttctatgaatgaataagtattt

SEQ ID NO: 930507 - DNA, 698 bp, Homo sapiens
cagactgcttctttaagcaggaccctgatccattccttctcactgagtgagatctccctgtgggggcttccatcactccagccagggttctatggatagggctctggtctctcccaggatggagctcctgaggggaggcgtggccatcatctccatggtttggccaactcagacattccagcctgccagctatagagaatacaaatggtccagatgaggaaggacccctgctgcaatgcagcacacctgctgtactaaaaagaagccagactgcttctttaagctggtccytgatcctgctcttctgactgagtgagacctcccaacaggggtttccaggtgcattcaggccagcaacaactcagtaccccgctgggacagagcttccagaggaaggagctggcctccatctttgctgtttcacagccttcacatgtgatacctccaggtatcccaccgaagcaacaaaggtctgcagtgcactgccagcaaactgcagcagccctacagtagagtggcctgagagttaaaagaaaaacaaaaaacaggaaacaacaacaacatcaacaaaaaagagtgggggcagttccaagatggctgaataggatcagctccagtctacagctcccagcgtgagcaatgcagaagatggataatttctgcatttccaactgaggtactgggttcatctcactggg

SEQ ID NO: 930508 - DNA, 640 bp, Homo sapiens
aaccagtctgaccaaaaattattaggcaggaatttcctcgtcctaatgagcctgggagcactacgggagaccggggcttatttcgtcccacagctatgaccgtaaaagacagccacccccaaagcagccattttagagacctcccctcagggacgcattctctttctcagggttgttccttgctgagaaaaagaattcagcaatatttctcccatttacttttgaaagaagagaaatatggctctgttccacctggctcaccggcagtcaagagtttaaggttatctcccttgttccctgaacattgctgttatcctgttcttttatcaakgtgcccagatttcatattgttcaaacacacatgctctacaatttgtgcagttaacgcaaccatcacagggtcctgaggtgacatacatcctcctcagctaacaaagatgacaggattaagagattaaagtaaggacaggcataggaaaccacaagggtattgattggggaagtgataagtgtccatgaaatcttcacaatttatgttcagagattgcagtaaagaaaggtgtaagaaattataaaagtattaatttggggaactaataaatgttcatgaaatcttcacaatttatattcttctgccacg

SEQ ID NO: 930509 - DNA, 640 bp, Homo sapiens
aaccagtctgaccaaaaattattaggcaggaatttcctcgtcctaatgagcctgggagcactacgggagaccggggcttatttcgtcccacagctatgaccgtaaaagacagccacccccaaagcagccattttagagacctcccctcagggacgcattctctttctcagggttgttccttgctgagaaaaagaattcagcaatatttctcccatttacttttgaaagaagagaaatatggctctgttccacctggctcaccggcagtcaagagtttaaggttatctcccttgttccctgaacattgctgttatcctgttcttttatcaaggtgcccagatttcatattgttcaaacacacatgctctacaatttgtgcagttaacgcaaccatcacagggtcctgaggtgacatacatcctcctcagctwacaaagatgacaggattaagagattaaagtaaggacaggcataggaaaccacaagggtattgattggggaagtgataagtgtccatgaaatcttcacaatttatgttcagagattgcagtaaagaaaggtgtaagaaattataaaagtattaatttggggaactaataaatgttcatgaaatcttcacaatttatattcttctgccacg

SEQ ID NO: 930510 - DNA, 562 bp, Homo sapiens
gcctccaccaataactgctccctaagccaccaagaaaatcagagaccgtggatgctgttcacagctgaaggaatgatacagagactacattactgcatggacacagaatcaaagccaaagtgtcctacataaccaacaccgtagatacatctttaggaaaaagtgttctgctattaaagcaaatttaaaaactggaagaagcaactgttacaccagatgtgcagatgtcaacataagcataaagaaaacataaaaaagcaagggaacatggcacctccaacgaacataataatactccagcaaaagatcctaatgaaaaagaaattcaaaacattccagaaaaagaatccaaattattattattattgtaytattattattattgggacttgttctgtgacccaggctggagtgcagttggtatgtaatagcatgctgttgccttgaactcctgggctcaatcaatccttccacctcagcctcctgagtagctaggactataagcacaccacacctacccaattaaaaaaaagaaaaatgtagagacagagtcttggtatgt

SEQ ID NO: 930511 - DNA, 508 bp, Homo sapiens
cttgagaatagcaaccccaagacaaataattctcagattctccaaggttgaaacaaaggaaaaaatgttaagggcagccagagagaaagttcagattacctacaaagggtagcccatcagattaacagtgggtctctctgcacaaaccctacaagccagaaaagagtggtgcccaatagtcaacaatcttaaagaaaagattttgcaaaccagaatttcatatccagccaaactaagtttcataagtggaggagaaataaaatcctttacagacaagcaaacgctgaaggattttgtgaccaccaggcttgmcttacaagaactcctgaagggagtactaaatatagaaaggaaaaactgataccagccactgcaaaaacatactaaaatataaagaccaacgaaactaagaagaaactgcatcaactaatgtgcaaaatgaccagctagcatcataatgacaggatcaaattcacacataccaatattaacattaaatgtaaatggg

SEQ ID NO: 930512 - DNA, 643 bp, Homo sapiens
tttaattaattaactttttttttttttgacggaatctcactctgtggccaggctggagtgcagtggcatgatctcagctcactgcaacctctggctcccgggttcaagcgattcttttgcctcagcctcctgagtagctgggactacaggtttgtgccaacatgcccagctaatttttgtatttttagtagagatggtgtttcatcatgttggccaggaaggtctygatctcctgacctcgtgatctacccaccttggcctcccaaagtgctggaattacaggcatgagccactgcacccagccctggggtcccttttgtaagggcaccaatcccattcgtgaggactccaccttcttatgtctaatagttacctcccagtggcctcattttctaatggcgtcacactaggagcaatgatttcaacatgtgaattttgggggaacataaacatgtagtttgttgtcatgatgtaaaattaacaatacttcaatactttgttatatgtcttatgttacatgaccaggaaataagagagacaataaaaaatattttatacaaacatgcacatatttataccaaaataagaaggaaatgctcatgtcaattacagttatctttttctgtaactagtcacatggtca

SEQ ID NO: 930513 - DNA, 508 bp, Homo sapiens
cttgagaatagcaaccccaagacaaataattctcagattctccaaggttgaaacaaaggaaaaaatgttaagggcagccagagagaaagttcagattacctacaaagggtagcccatcagattaacagtgggtctctctgcacaaaccctacaagccagaaaagagtggtgcccaatagtcaacaatcttaaagaaaagattttgcaaaccagaatttcayatccagccaaactaagtttcataagtggaggagaaataaaatcctttacagacaagcaaacgctgaaggattttgtgaccaccaggcttgacttacaagaactcctgaagggagtactaaatatagaaaggaaaaactgataccagccactgcaaaaacatactaaaatataaagaccaacgaaactaagaagaaactgcatcaactaatgtgcaaaatgaccagctagcatcataatgacaggatcaaattcacacataccaatattaacattaaatgtaaatggg

SEQ ID NO: 930514 - DNA, 712 bp, Homo sapiens
gctgctgtaataaatcaccataaatccagcagcctaaacacacacacacacacacacacacacacacacacacacacaaaatttatgattgtatagttctttttttttatttatttttattttttgagatggagtctctctctgtcgtccaggctggagtgcactggtgcaacctctgttcactgcaacctctgcctcctgggttcaagcgattctcctgcctcagcctcccaagtagctgggactataggcatgtgccaccaggcctggctaatttttgtatttttagtagagatggggtwtcaccatgttggccaggctggtctcgaactcctgacctcaggtgatctgcccgccttggcctcccaaaatgttgggattacaggcgtgagccgccgctcccggccttactatcctatagttctaaaggtcagaagtccttagattatggtacaagcagggctgcgtttcatctggaggctctagcggagaatccgtctgcgtgtttctcccagcttccagaggcgccacattccttggttcctgccctcgcatcatcttctctgactgaccctcctgcccactcttacaaggagccttgggatgacatggtccctgtatgagtcgcattagttttgcattgctataaagaaatacctgagactgggtaatttataaagaaaacaggcttaattggctcccagttccacag

SEQ ID NO: 930515 - DNA, 712 bp, Homo sapiens
gctgctgtaataaatcaccataaatccagcagcctaaacacacacacacacacacacacacacacacacacacacacaaaatttatgattgtatagttctttttttttatttatttttattttttgagatggagtctctctctgtcgtccaggctggagtgcactggtgcaacctctgttcactgcaacctctgcctcctgggttcaagcgattctcctgcctcagcctcccaagtagctgggactataggcatgtgccaccaggcctggctaatttttgtatttttagtagagatggggtatcaccrtgttggccaggctggtctcgaactcctgacctcaggtgatctgcccgccttggcctcccaaaatgttgggattacaggcgtgagccgccgctcccggccttactatcctatagttctaaaggtcagaagtccttagattatggtacaagcagggctgcgtttcatctggaggctctagcggagaatccgtctgcgtgtttctcccagcttccagaggcgccacattccttggttcctgccctcgcatcatcttctctgactgaccctcctgcccactcttacaaggagccttgggatgacatggtccctgtatgagtcgcattagttttgcattgctataaagaaatacctgagactgggtaatttataaagaaaacaggcttaattggctcccagttccacag

SEQ ID NO: 930516 - DNA, 712 bp, Homo sapiens
gctgctgtaataaatcaccataaatccagcagcctaaacacacacacacacacacacacacacacacacacacacacaaaatttatgattgtatagttctttttttttatttatttttattttttgagatggagtctctctctgtcgtccaggctggagtgcactggtgcaacctctgttcactgcaacctctgcctcctgggttcaagcgattctcctgcctcagcctcccaagtagctgggactataggcatgtgccaccaggcctggctaatttttgtatttttagtagagatggggtatcaccatgttggccaggctggtctcgaactcctgacctcaggtgatctgcccgccttggcctcccaaaatgttgggattacaggcgtgagccgccgctcccggccttactatcctatagttctaaaggtcagaagtccttagattatggtacaagcagggctgcgtttcatctggaggctctagcggagaatccgtctgcgtgtttctcccagcttccagaggygccacattccttggttcctgccctcgcatcatcttctctgactgaccctcctgcccactcttacaaggagccttgggatgacatggtccctgtatgagtcgcattagttttgcattgctataaagaaatacctgagactgggtaatttataaagaaaacaggcttaattggctcccagttccacag

SEQ ID NO: 930517 - DNA, 560 bp, Homo sapiens
aaaaatccccgcaactgcccagggactctcccacctctctgacctcccacctacttctgacctgagctttgccccgcttccatccctgtacctgctctgcgcatttgtggaaggatcttggcttccccagcctgaatttaaatgccctctgaggactctggctcctccccagttttctggttcttcctgcccaaccctaccctcgaaatcagcctaaccatactaataataagcagctaccatttattgaccacccatgccaggcaattcctcacattatctcctgtaaactccagcagccttctgaggctmgtatcaatagtcccatttaagatgaagaaacaaatgtcactcagagaaattaattaattagcccaaggacacaaaggagatagtgataaagactctgggattcccccaagtcagcatattctttatttttatttttattttttgaaacgaagtcttgctctgtcacttaggctggagtgcagtggcacgatctcagctcactgcaacctccgcctcctgggttcaagtgattctcctgcctcagcctc

SEQ ID NO: 930518 - DNA, 487 bp, Homo sapiens
ctggtcctttcagaattttgggtaagctttcggtacatttgaatttttaaaaataaattctaatctgtagatatttttatttgaaacatgtctcatatttttctgtttagaaactgcttctctcactccaagattatactagcttttctttcttttttaaatgaaagaggaacagcaaaaaggtgtgtcccatttccagacctggyctctggagctccccacaccttccacaaccttctctcattactgtagtacaagggcaacacctattatcctgaccaacttggaagctactggtgaagatggcagtgccccccaaaacttgatgccttccatgattctgactctggcccccaagcaaccactccagactgtaacattcctgctgtaccccaaccagtgcagcaggcatgtgacttgggtctgtttgcaaagcagtgagagcctgccctatttaagccatagattagctgtgtggctttggaca

SEQ ID NO: 930519 - DNA, 638 bp, Homo sapiens
ctgtatacaagtcccttatcagatgtacattgtgcaaatattttctcccattctgtaagttgcctttccatattcttgatagtgttctttgagaaaaaactataaatatttgtaattttgatgaagttcaatttatctgttcttttgttgattgtacttttgttattgtacctacaaaattattgcctaactcaagattacaaagatttactgctatgtkttcttctaagtgttgttatgctattgtctcttaggtttaggaggctcatgatcaatcttgtcttaatttttgtgtacagtgtgaagtaaggatagaactttattcattcacttgtggatactaagttgcccgaccattatttgttaaaaaaacaaaaaaacaaaaaaacccaaaaaaacctgttctttccccacaaaattatcttgctgctcttgtaaagaatcaaccagacataaatgcaagggtttatgccaataccatactatcttaattattggggatttatcataaattttaaagtcagaaaatgtgagtcctcctttgtttttcgagattatcctggctattctcaatcccttgaatttccatatgaattttagggtcagcttgtcaatttctgaaaaaaaaccagctggaa

SEQ ID NO: 930520 - DNA, 607 bp, Homo sapiens
gggggctaagaggatttgggtcacagctgcccaggcaatcagacaggccagggactcagaactttcctttttgacagccagttggaaatcccatggcctctgtgtgtattgctgtctctgggatgtaatcttatattgtctaggcctctgttttgccaactgtaagaccacgaagtggacaaggaccactgtgctagggacctttcaacccaaacatcctgcagcccagcctggctcattagcagttcctcctgggccctgggtggtggcaactctgctggctctggtcactccctgggccgcagtggtcctgcytgcattccatccctcttcaaaccagcatccccagacctctttctgtgatgaacctcgtctccctgacagggccaccattccatgcaaactgtcactccatgccacgtggctgtgcattgaaactggcagtgcattcaggagtgtgtttgcaaacctgcgatttccagccagtgagagtgtttggagtcggtgggcacccatgtctgttctgtgagaagctgcccattttctgagagatccatgaatatctaccaagaagccttgtgtaatggccatagaatatatacctgtg

SEQ ID NO: 930521 - DNA, 812 bp, Homo sapiens
cactgaaacctagtggaagctggttctgagacttttggaagaaactggaaagtggaagcaactgcttgctgaagtgaagagctgttgctgggagataattgcaaaaccagtatggaaaactgaatgaatcaagtcctttctttgcacctcttgttttctaggctccctctagcactccctgttggcaaaaacctaatagggagcaarttgacaaaagagaaatgtgcttggtggagatccagcaatagcatcacagagtatggagggattgggaatgaaaagaggttaggcctggtgtggtggctcacacctgtgatcccagcactttgggaggccgaggcgggcagatcacctgaggtcaggagttcaagatcagcctggccaacatggtgaaaccccgtctttactaaaaatacaaaaaaattaggtgggcatcgtggtgtgcacctgtaatcccagttacttgtgggggctgaggcaggagaatcgcttgaacctgggaggtgggggttgcagtgagctgagatcatgccactgcactccagcctgggaaacaagaatgaaactccttctcaaaaaaaaaaaaagattataggttaataactgtcacacccattaattccgaccaagacaagacttgagtgacagaaaaattagcctctaatgttgtagagctacatcggctgttatagtgcagggttttcaggatgaagttttgctcctcagaagcttttcactgtgcttgatattgaaccagtgcacttctctctcattcaatagcagttctgatatctaacccacaatttcatatg

SEQ ID NO: 930522 - DNA, 812 bp, Homo sapiens
cactgaaacctagtggaagctggttctgagacttttggaagaaactggaaagtggaagcaactgcttgctgaagtgaagagctgttgctgggagataattgcaaaaccagtatggaaaactgaatgaatcaagtcctttctttgcacctcttgttttctaggctccctctagcactccctgttggcaaaaacctaatagggagcaagttgacaaaagagaaatgtgcttggtggagatccagcaatagcatcacagagtatggagggaytgggaatgaaaagaggttaggcctggtgtggtggctcacacctgtgatcccagcactttgggaggccgaggcgggcagatcacctgaggtcaggagttcaagatcagcctggccaacatggtgaaaccccgtctttactaaaaatacaaaaaaattaggtgggcatcgtggtgtgcacctgtaatcccagttacttgtgggggctgaggcaggagaatcgcttgaacctgggaggtgggggttgcagtgagctgagatcatgccactgcactccagcctgggaaacaagaatgaaactccttctcaaaaaaaaaaaaagattataggttaataactgtcacacccattaattccgaccaagacaagacttgagtgacagaaaaattagcctctaatgttgtagagctacatcggctgttatagtgcagggttttcaggatgaagttttgctcctcagaagcttttcactgtgcttgatattgaaccagtgcacttctctctcattcaatagcagttctgatatctaacccacaatttcatatg

SEQ ID NO: 930523 - DNA, 787 bp, Homo sapiens
taccaggaactgtttattgaaaggcgtataaatctttgctgtagatagtgtggcattggtccagtaccccagagacctgcttgcaatttttccaatgggccttgcaataaactccaccacggcatcttctaatgcaccggatacctccaacatcatgcagtctgctagactggactatgtggcagggctgcacagagctctttcctgacctgggccccacttcaagctgtcagtcttttgtgttgaccggtaggtgggcccaagcagtattcctagatgtagaacccaaagaggcccacctttcttctttaggttaggcaataaaagatacatcaattagttttttacttcggaggtaatatcccagaacatgcctgacttcttgactcttaaaaaattatcaaagtgaccgatttctgaatctttgtagtgtttatctcccacctctagattgcaaatgtcttaccttgtaagacctctggagctctggagtactagccagctcttgctggtcatgtctgatcagcatgatgccattggtgtaatgaatcagtgtactgttctatgggacgtccaagtgccttagattttttagastatattatgatagagactgagagagttaacagcctagaggcaaaactggaaatgaatactattgtcttatctatggtaatgaaagctgtttctgatgctcttttctgagtggaatagaaatgagcttgccaaaccaatgatggtatatcttgtacctgaggccttattaatctattttagcaataatact

SEQ ID NO: 930524 - DNA, 646 bp, Homo sapiens
  misc_feature 115: n = A,T,C or G
taatttcagagcaaagtggaagccaagcccagatgatactgtcataacccagccgaatttgtgtgcactcagggtggcattgacatgccagccccaccactgcctcacccctctntgggctttgggtgccaactttgggtcccctcctttgggagggaggctgggaggtggttaggggcagcttggcacaggcctgcaggtgccctttgacacaaacagcctgggcaccataccayggacagcaggtcggtagcaggaggcagacaggttcctgggcagaaaggggtggggtcttgttgaaacccccacttcgatccaggaatggcctgaagcctggggaccgggctgccagttcagggtggagttggcagcccggagtgagaacttatggtgctttttccaggcccacccatggccattcatggaccaatcagcatgcacttcctcccttctgtgcccattaaaaaccctggactcaggcagactcacacttgttgggacgacctgcctgtggaaaacagctacccactccgggtctcctgagagctgttttgtcacttggtgaagctcccctctgtcttgctcaccctccagttgtctgcatacctcattcctcctggaggcaggacaaaaactcgggacacgc

SEQ ID NO: 930525 - DNA, 727 bp, Homo sapiens
ggggaggactagggagaaagcaggtattggagaagcaggggattgtttatttgctaaaagtgtggccctttcactcagcaggtctgctactgcctactgaggaacggcctctcgacatccttatgtcgaaccctgcatgtttgggcccatctttaaaatccaccctaggccaggtgcggtggctcatgcctgtaatcccagcacaatgggaggccgaggcaggcggaccacctgaggtcaggagttcgagaccagcctggccaaaatggtgaaactctgtctctactaaaaatacaaaaattagccaggcatggtggcrtgtgcctgtagtcccagcttcttaggaggctaggcacgacagttgcttgaacccaggaggcagaggtttcagggagccgagactgtgctacggtaatccagcctgggcaacacagtgagactgtctcaaaaaaataaagaagtaaaaaataaaatccatcctgtatcagtcaggaaagagctcattctagcaggatcaatgcagagaattcaccagaggaactagttccaaaggtatggcaagagctaaaccttccaagaggggcccatggggcaacccagagacagacaagagcaggaaactccaaacccttcggcgggcaggacagagggtgtgggtgagggttccagtgctgtgggctgggccagcctggtaggaatgagaatccatatgctgggagctggggcc

SEQ ID NO: 930526 - DNA, 654 bp, Homo sapiens
tctggtggggacttggagaacctttatgtctagctaagggattgtaaatacaccaatcggcactctgtatctagctcaaggtttgtaaacacaccaatcagcaccctgtgtctagctcagggtttgtgagtgtaccaatggacactctctatctagctaatctagtagggacttggagaacttttgtgtctatctcagggattgtaaacacaccaatcagcaccctgtcaaaatggactaatcagctctctgtaaaacaaaccaatcggctctctgtaaaatgraccaaccagcaggatgtgggtggggccagataagagaataaaagcaagctgcccaagccagcagtggcaacccactggggtccctttccacactgtggaagctttgttcttttgctctttgcaataaatcttgctgctgctgactctttgggtccacactgcctttgtgagctgtaacactcaccttgaaggtctgcagcttcactcctgaagccagtgagaccagcaacccaccagaaggaagaaactctgaacacatccgagcatcagaaggaaaaaactccggacgcaccgcctttaagaactgtgacgctcaccccgagggtccgtggcttcattcttgaagtcagtgagaccaacaacccaccag

SEQ ID NO: 930527 - DNA, 654 bp, Homo sapiens
tctggtggggacttggagaacctttatgtctagctaagggattgtaaatacaccaatcggcactctgtatctagctcaaggtttgtaaacacaccaatcagcaccctgtgtctagctcagggtttgtgagtgtaccaatggacactctctatctagctaatctagtagggacttggagaacttttgtgtctatctcagggattgtaaacacaccaatcagcaccctgtcaaaatggactaatcagctctctgtaaaacaaaccaatcggctctctgtaaaatggaccaaccagcaggatgtgggtggggccagataagagaataaaagcaagctgcccaagccagcagtggcaacccactgggrtccctttccacactgtggaagctttgttcttttgctctttgcaataaatcttgctgctgctgactctttgggtccacactgcctttgtgagctgtaacactcaccttgaaggtctgcagcttcactcctgaagccagtgagaccagcaacccaccagaaggaagaaactctgaacacatccgagcatcagaaggaaaaaactccggacgcaccgcctttaagaactgtgacgctcaccccgagggtccgtggcttcattcttgaagtcagtgagaccaacaacccaccag

SEQ ID NO: 930528 - DNA, 654 bp, Homo sapiens
tctggtggggacttggagaacctttatgtctagctaagggattgtaaatacaccaatcggcactctgtatctagctcaaggtttgtaaacacaccaatcagcaccctgtgtctagctcagggtttgtgagtgtaccaatggacactctctatctagctaatctagtagggacttggagaacttttgtgtctatctcagggattgtaaacacaccaatcagcaccctgtcaaaatggactaatcagctctctgtaaaacaaaccaatcggctctctgtaaaatggaccaaccagcaggatgtgggtggggccagataagagaataaaagcaagctgcccaagccagcagtggcaacccactggggtccctttccacactgtggaagctttgttcttttgctctttgcaataaatsttgctgctgctgactctttgggtccacactgcctttgtgagctgtaacactcaccttgaaggtctgcagcttcactcctgaagccagtgagaccagcaacccaccagaaggaagaaactctgaacacatccgagcatcagaaggaaaaaactccggacgcaccgcctttaagaactgtgacgctcaccccgagggtccgtggcttcattcttgaagtcagtgagaccaacaacccaccag

SEQ ID NO: 930529 - DNA, 587 bp, Homo sapiens
ccatgtgctgagtaccatggtgtttattcattaatccaaatttgttttctcaattccatgagttaagtattaaactaattttatagacgaaacttctcaagatgcagcagcttgccccaaaagcttcatagctttcatagtttcctgcacagccaagagcaaaaccaaatctggatgataccaaactactctctccaaccatcaaacatcatgccttggctttactcaacattctttgcctttgtagtacattcctatctgccaagtactatccacatacagttgcatgcaccaagtatgtattcttagtgaacacctttgacagcttggtggagcactccactctctgaaagagcccctycttagctgatgagttttctctgggctattctttgcagcctccctccagctcttccttccgtcagatctccatttcctacactttgctccgtattgccttttatctttcccgtcttcccctcttctcaggaagaaccacaatgattgtgcttgagaactttagaatcagactggctctgagtaactgacaaaaaaacatgagatggtaactacctcatagagggtgg

SEQ ID NO: 930530 - DNA, 584 bp, Homo sapiens
catctggcaggtgcccctctgggacaaagcttccagaggaaagaacaggcagcaatctttgctgttctgcagcctccactggtgatacccaggcaaacagggtctggagaggacctccagcaaactctagcagacctgcagcagaggggcctgactgttagaaggaaaactaacaaacagaaagggatagcatgtcgactcaaagaccccatccgaaggtcaccaacatcaaagaccaatggtagataaatccacaaagatgtggagaaaccagcacaaaaaggctgaaaattccaaaaaccagaacacctcttctcctccaaaggatcacaactcctcatcagcaacggaacaaaactgcatggagaatgagtttgacaaattgacagaagtaggcttcagaaggtgggtaataacaaactcctcctagctaaagaagcrtgttctaacccaatgcaaggaagctaagaacctcgaaaaaaggttagacgaattgctaactagaataaccagtttacagaagaacataaatgaccggctggagcttaaaaacacagcacaagaacttcatgaagaatacacaa

SEQ ID NO: 930531 - DNA, 572 bp, Homo sapiens
agggattgagttcttgatttgattcttagcttagtcgttgttggtgtatagcagtgctactgatttgtatacgctgattttgtaatctgaaagtttgctgctagtagccttttggatgagtctttggggttttctagatatacaaccatatcactggcgaacartgagagcttaactccctcttttccagtttgaatgctctttgtttctttctcttgtcctgttgctctggctaggacttccagtactacgttgaatagaaatggtgaaagaggtcatccttgtcttgttctagttctcaggggtaatgctttcaacctttcccccattcagtacgacgttggctgtgggtttgtcatatgtggcttttattactttgaggtgagtccctcctgtacttattttgttgagggattttatcataaagggatgctggattttatcaaatgcttttttctgtatctatttaaatggtcatatggtttttgtttttaattctgcttatgtggtatatcacatttattgacttacatatgttaaacaacccctgaatctctgggatgaaaccctgc

SEQ ID NO: 930532 - DNA, 636 bp, Homo sapiens
aacaatcactacagcattctcagatgatctgagcacctgtatgactcatcacagcgacaggtggaaaacaattctgaagtctgagttacacatgcaattctcccagacctgtacaaaaccaaagcaaacccatgcacttgcaaccaagagctgctcatttttcttgtcgtttttgatcagactccaaaagtgttttctggtgggtctacaagtccctaatacactgctgaaaacacccccccacacacacacagtaggtttatcactgcacttacataccactttccatccatgggtcccaagggatctgtccaaaatcttgttttcataagtctccagtgagatgtataaatattgttacctccatcttatacacagacaaacttaaacctggaggcagttaagtgkcttgtcaacagttataacccaagacaagatctgtgcaagctgccctctggtctcccttcctctgctggtcggccctctgagcgttctcgttggctccagtttaaatcatgtccgtagaccattgtttccctggcaatggaggtggtattctatttcctgccctgaatctggcccggggccctgactgcaccgcatttagccacaagtgcatcagccgtgcgtgagtgg

SEQ ID NO: 930533 - DNA, 764 bp, Homo sapiens
aacagaaaggaaagagaaagagacagaaagagagaaagaaggagtcaaagagagagacaaagtcaaagagagagaggaagagacaaagagggagtcagaaagagagagacaaagaagaagtcaaagaaaaagaaagagagatggaagtagtaaagaaaaaaacagtgtaccctattcctttaaaagccagggtaattaaaacctataattgataattgaaggtcttctccatgaccccataacactccaataccaccttgttgtcagtgtaaacaagggcatagcctgaaagcactgaggccactgacaacccatagccttcctattaaaaaccttaatccagcaggtgtcctaacaggggatctaaatcttaattaattaccatacaaaggtctgaccagaccaaggaggaactcccttcaggacaggaggacagatgtttcctccaaggagattaaggggaaaaaacgcagtgagtattcagtaaatggtaaggaaactcttgtagaagcagagttaggaaaatarcctaataattggtctgctcaaatgtgcgagctctttgcactcagccaaaccttaaagtacttacagaatcaggaagaagccatctatatgaattctaagttaatatggactgaatgaggtcttattaatagcaacgaataattgaaatcccaaacttacaaggtttccaacaaaagtaaagtttgctaaaagttaacagtgtaacatgtattatcctactaccacacattctcaaa

SEQ ID NO: 930534 - DNA, 722 bp, Homo sapiens
attcagtaaatggtaaggaaactcttgtagaagcagagttaggaaaataacctaataattggtctgctcaaatgtgcgagctctttgcactcagccaaaccttaaagtacttacagaatcaggaagaagccatctatatgaattctaagttaatatggactgaatgaggtcttattaatagcaacgaataattgaaatcccaaacttacaaggtttccaacaaaagtaaagtttgctaaaagttaacagtgtaacatgtattatcctactaccacacattctcaaaggatttctcagacagkttgcaagaaataacaaaatctatccttcctctacaatcccaaatagactctttggcagcagtgactctccaaaactgctgaggcctagacgtcctcactgctgagaaaggaggattctgtaccttcttaggggaagaatgttgtttttacactaaccagtcagggatagtacaagatgccacccggcatttacaggaaaaggcttctgaaatcagacaacacctttcaaactcttataccaacctctggagttgggtgacatggcttctcccctttctaggtcctgtgacagccatcttgctattacccctttgggccctgtatttttaacctccttgtcaaatttgtttcctctagcatcaaggccatcaagctacagatggtcttacaaatggaacccaaaatgagttcaactaacaa

SEQ ID NO: 930535 - DNA, 688 bp, Homo sapiens
ttcaaaatgtaaatccaatctgtcatgcacctgcacacaactcttccttggcctcccattgcatttggaaagaaagctcaacctctcaccatgggcctcaggggcatgtgtgaccagtccctgtcttttatgcagcctcacgccctcacccgtcctctcacttagcagacgtggactttcctatgactctgtactcaattcatcaaagataaaatctagtcatgtgtgtatgcatgactcgttaccacttactttattttcttaaaaaattttgacttagaaactttttttaaaattattaaawttttttcaaagatggtgccttactctgtcaccgaggctggagtgcagtggcatgataatggctcactgcagccttgaactcccacctcatcctcctgagtagctgggactacaggtgcatgctacgaccaccagctaattttttaaatttttaatctttttgcagagatagggtctcactatgttgcccaggctggtctcaaacttctggcctcaagtgatcctcctgcttccacttcccaaagcactgggattacaggtgtgagacaccaagcccagctctgttacaactgactgtggtatcttgaacaagtcagtttcctcacctctaaaatgggtacaataatggcacgccctcacaaggttgttgcagcctgtgtcccct

SEQ ID NO: 930536 - DNA, 582 bp, Homo sapiens
cagaaatacaaaaaggagctggtaccattccttctgaaactattccaaacaactgaataggagggactccttcctaaccccttttatgaagtcggcatcattctgatgccaaaacttggaagagacataacaaaaaacaataaaacttcaggacaatattcctgataaacatcaatgcgaaaatccttaataaaatactggcaaaccaaatccagcagcatatcaaaaaatttatccaccacgatgatattggcttcatcccttggakgcaaggctggttcaacatacgcaaatcaataaatgtaacccatcacataaacagaaccaatgacaaaaaccacatgattagctcaatagatacagaacggcctttgataaaattcgacatcccttcatcatggtaaaactctcaataaagtaggtactggtggaacatatctcaaaataatagctatttatgacaaacctacagccaatatcatattgaatgggcaaaagctgaaagcattccctctgaaaactggtacaagacaaggatgccctctctcactactcttattcaacatagtattggaagttctg

SEQ ID NO: 930537 - DNA, 584 bp, Homo sapiens
cagaaatacaaaaaggagctggtaccattccttctgaaactattccaaacaactgaataggagggactccttcctaaccccttttatgaagtcggcatcattctgatgccaaaacttggaagagacataacaaaaaacaataaaacttcaggacaatattcctgataaacatcaatgcgaaaatccttaataaaatactggcaaaccaaatccagcagcatatcaaaaaatttatccaccacgatgatattggcttcatcccttggaggcaaggctggttcaacataygcaaatcaataaatgtaacccatcacataaacagaaccaatgacaaaaaccacatgattagctcaatagatacagaacggcctttgataaaattcgacatcccttcatcatggtaaaactctcaataaagtaggtactggtggaacatatctcaaaataatagctatttatgacaaacctacagccaatatcatattgaatgggcaaaagctgaaagcattccctctgaaaactggtacaagacaaggatgccctctctcactactcttattcaacatagtattggaagttctggc

SEQ ID NO: 930538 - DNA, 789 bp, Homo sapiens
atgacaaaattaaagcggaaacttacaagccagagacctcagcccatttcaccaggagctcaaccacccacccctatcagggctggtgcctgtgcttgtcactggggtatttatgagtgagcttggtagttggtggcccaactctacccagcttggtcctccccaccctctccactccctgctgaccaaggaacttaaggcaaggggcactccacagagaagcccatcacctgaaataccagagaacacctctcaataagcaaagactaagcacacactcaactgctgttgcagccaattcttacatgtaagtgccacctactggcctggaggttgaactgctcatcacaacacraaaactactgacagaagtgtaccaggctaaaaaagtaaagtcaaaaaaaccctaaacaacagacactacagtcatactttcaatggttagaaaaaaaatcctatccaaataaaagtaaattcaaaaataagaagtaacagtttctccaggtgaaaaggacccaaaactctggcaccatgaaaaatacagtatcgtaacacccttcaagaatcacactacctatctagcaatggatcctaaccaacatgaaacttctgaaatgatagattaaaaaattcaaaatatagattgtaaggaagctcaatgagatctaagagaaaattgaaaaccagcacaaataaatcagaaaagcagtgttggatgtgaatgcagataggtatcggaaaaacaaacaaaccaaacaaatggagcttctggaaatgaaaaatttactg

SEQ ID NO: 930539 - DNA, 569 bp, Homo sapiens
ttaaaccaagacatattgcactgaacaactgaacttcagggacacaataattatttagatataaagacaggcttctgtttcctgctgggaaggataaggggggttagggaaagatgatccaggatcgcaaagagacaggaggctgcagaaatagacagtatgagaacacatgtttatctgaggcagacacaactcaatccagtaagaacaatttagctagaatagttaacagttgatgkaggtaaatgtgggttgctaagagagtgggggaatccatggagctgaaaatgcaaggggaatttgcaccctcttgccaacttttgttacatgggcccaacttgttgagagtactgaagagttgcttttcatggtgtagtttagggatgataaaagtcttcactgggacccttccaaatttcactatatggaataagagatttaatttgtagaagggcaatataatctgccactcttagtgcactggtaaaacccattactgctatggaaggggagagaaaaaaaaaatctttagttctgaggaagaagcagaaatgactgccggccccaga

SEQ ID NO: 930540 - DNA, 533 bp, Homo sapiens
  misc_feature 1, 2, 3, 4, 5, 6, 7, 8, 9, 10, 11, 12, 13, 14, 15: n = A,T,C or G
nnnnnnnnnnnnnnncccccaagccagggttattttgaagcaaatcccagacattatataatttcatgtatgaatatttccttatgtatatctaaaaaattaggaattctcatttgaaaaacataaacttaaggggtatagcccatctaaaataataactcctaatatcatcaaatatctagccaatgttaaaattttgctagtaacctcataacatttttttaagtttgtccagaaataaggtccatactggtcatggagcagtgtgactcttcagtctctgtctgcagttgctgccaccgtacctgtctctgttgtttcttttttatgtatttattgaagaagccacattgtactgtagagcgtccaccccacagtctggattctktttttgtatcctggtggtaacataaaggtgttgttctgtcccctctttagctgtaaattgggagttagatctagatgcatgattagatgcttttttttgtttttggcaagagttctttgtagcaggtgacgtttgcgccacctcc

SEQ ID NO: 930541 - DNA, 677 bp, Homo sapiens
cacgcggcaccctgaccctggcacttgctcttgttccagaggcagagggagagcactgagagaggacgccacccaccccggagcccagagaatcggggcacctccatgcagggcccagccacatggagcctcccgcaggctgatggcccaacagagggaggacagggtccccccaggaaggaaggctggcttggctggagaagagaatgctaattaaagatcccccattctcagctccctgcagagacaggaccctatgggcagagggaaaaggcctgctgaggcaaggccgggtcacttctgtccacatcccatcggccacacccgcaagccgcaggtggacacccctcccatagcgacactgccagtcagatggcgttgggcaggaggggcagcagatgatcagggacagtcctgcagcgcaccacargggacctgctgcacccagctcttacctggtcagctcaatgcaccttcatggaggagaccaaggcacagagaggcttcagaagcaggaaacagcccagccctgcgccctgagcagggcgagtggttagagagggtgggatggagccaggagaggatgggcctgcaggccccagagaggatccttgcctgcgtcctaccctctgaaaggtttacgcaaaagaggcgacaggatcaggtctgtgtttcct

SEQ ID NO: 930542 - DNA, 562 bp, Homo sapiens
cccgtttaatataatccagacaaacttccaggttactggtccaccaagacacatatgtgctgcaaattggggattctaattatttaaaacattttgatttgaatacattaaaatggatttaatgaatacattaaatggattcaaatccatttaaacagtcaaggaaattggggtgcacttggtctctcaagtcacccacttggccctcttcaaagtgtactttccttcctttcttttccttattttccttactgctttaaagctttttaataaactttcactcctggactgaaaaaagaaaaaaggaaagaaattgaaatattgcagttgctcatagaaaagtacagagcagggagacagaccaagatggctgaatagaacccactggagattgtaccccaacagaaygccaaattaaacaactctccacccaagaaagcacgttgagcagaacaaaaaaaccaggtgagggatcatattacctgattttaacataatatcaaggaaagaggcaatgaagagtgtgggaaagacagtctctttgccaacattgcttctctcc

SEQ ID NO: 930543 - DNA, 615 bp, Homo sapiens
gcatggtgaaacctaatttcaaagggggcagggaactataatttttgttttgtttgtttttttttgagacaaagtttcactctgtcacccaggtggagtacagtggtgccatcttggctcactgcaaactctccctcctgggttcaagcgattctcgtgccttagcctcctgagtagatgggacgacaaatgtgtgccaccacgtctggctaatttttgtatttttagtagagacagggtttcactatgttggccaggctggtctcgaactcctggcctcaggtgatccatcccygtcagcctcccaaaatgttagaattacaggcttgagccaccacaccctgccaactataatctcttatagtgtgtggagttgtgtgcagtgaaaactcagggttctgttctgttcctaaagaggaagagaataggtgtaaggattggcgtatagtctcaggcactttacacaatttccgtgtaattaaaattttttcataaatgtggtttgcaatatcacagagtctcattgttgcctaattcacttaattattcactcatttcagggcttttaaggtcatttaataatttactcaacaagactcactgagcatatattac

SEQ ID NO: 930544 - DNA, 615 bp, Homo sapiens
gcatggtgaaacctaatttcaaagggggcagggaactataatttttgttttgtttgtttttttttgagacaaagtttcactctgtcacccaggtggagtacagtggtgccatcttggctcactgcaaactctccctcctgggttcaagcgattctcgtgccttagcctcctgagtagatgggacgacaaatgtgtgccaccacgtctggctaatttttgtatttttagtagagacagggtttcactatgttggccaggctggtctcgaactcctggcctcaggtgatccatccctrtcagcctcccaaaatgttagaattacaggcttgagccaccacaccctgccaactataatctcttatagtgtgtggagttgtgtgcagtgaaaactcagggttctgttctgttcctaaagaggaagagaataggtgtaaggattggcgtatagtctcaggcactttacacaatttccgtgtaattaaaattttttcataaatgtggtttgcaatatcacagagtctcattgttgcctaattcacttaattattcactcatttcagggcttttaaggtcatttaataatttactcaacaagactcactgagcatatattac

SEQ ID NO: 930545 - DNA, 612 bp, Homo sapiens
aggtgattaggccatgagggctccactatataaaggagctgatgtcattatcatgggagtggtttagttattgagggcatggtctcctgataagaggataagtttggtccagtttctccccatcttgtgtgccacttctgctttttgttttccaccacgggataaccctcaccagatgccggtgccatattcttggacgtcccagcttccagaaccatgaaccaaatttattgtttataagttaccctgactgtggtattctgttatagcagcagaaaatggactaagacagttgtcacttaggaatcagaattaaatcctctaaagtgataaaactagcttttcaaatgatcttcatatccaactcccaccaagttacaaatactcaccttttatatagcaaaagataacactggctgacatggtattctacttccacatgaagatgtgaatgkcagggcaagagctagacagcctggagagacacagtccagaggaccagcttagagcccagtcatagtttgggatcctatgtaacaggccatgaatcccagcaggggaaaaattctctcaggcttggtgttttcagggctcatctactgtcaccatgac

SEQ ID NO: 930546 - DNA, 748 bp, Homo sapiens
tattttggtcatgtagtgactcaactagctttacagctttaattaccacatctaaaatcactcactcccaaattccaactctgaatgaactttctacttggatgtccacccagcactccaaaaccaatatgtcccaaaaacggaattatatttcttcttctgtgacttaaccctcaatttaacttccctgtctgagcatgttcctgagctataacaaaaggaaacaactttcactcctgtcttttccttgtcctcatgcccaagcagacctgaatttcctcacatctttcatttcgttcccatttcctgtgtcaccatcttcgttcaggtctttattgactcttgagcatattttctaagcaacttttgaactggtttccctgcctctccctgctccaagtcatcctccacctactgctaaattaatcttctgagagtaacaccatgatcttttaacttctgccaccctacttttcaacccttcattggttttattgtagtagagacttctagtactcacctattctgacttcattctccagccctcttgtagctgcatagaaccatgcaatgagtttcggattgggctgtsagtgaaaggaacaatatcacttctagacaaaggcatttagaagcaagcatgcattctccaggctctcttgcattctccaggctctcttttccctgctgtggtgaccctggaaaccaaatgttgagatggcagagccaaagacggaagcacctggat

SEQ ID NO: 930547 - DNA, 733 bp, Homo sapiens
taaggagataagcagttttatttcaaggaagcattctcttttacgtgcatttaatctatgcttaagaaaaatcatattgaagagtataagaaagaaataaaaaatataaaatattactaaggaggaaaaaacttctgatcttttaaaatttggaactcacaaggctctctcagaaggtttataagagcataaataaaattaacattacagtacatacaaataatgaagagagtttttctatcttatcgtggagatgactcttaagaaattaaacattttgcttttttgcatgaaagcttaaaatkttctgttttgaatacaggttttaaaaccactaaataattagactgcaaggaagaaaaatccatttaagcaatgattctatttgaatgagctagcaatctttactcatatgctgagtaaaggaaatgaataatggagttaatcttgcaatacaattaattttgatttaacgtacctagacaaatgttgcaaatttaaaggcgaataaagggaacttgaatgtcctattcacctttggtaagtgaagaattattttctgctcttttcaacaattaactgaaatattctcagtgaaaatatctgacatgaaaataaatggtgcccatgatccaggaccagtgataaactacacattttggtttcctgagaaaatgtccatatgtgattacatgaaaagtctccatataatctaagacactaataatgatca

SEQ ID NO: 930548 - DNA, 733 bp, Homo sapiens
taaggagataagcagttttatttcaaggaagcattctcttttacgtgcatttaatctatgcttaagaaaaatcatattgaagagtataagaaagaaataaaaaatataaaatattactaaggaggaaaaaacttctgatcttttaaaatttggaactcacaaggctctctcagaaggtttataagagcataaataaaattaacattacagtacatacaaataatgaagagagtttttctatcttatcgtggagatgactcttaagaaattaaacattttgcttttttgcatgaaagcttaaaattktctgttttgaatacaggttttaaaaccactaaataattagactgcaaggaagaaaaatccatttaagcaatgattctatttgaatgagctagcaatctttactcatatgctgagtaaaggaaatgaataatggagttaatcttgcaatacaattaattttgatttaacgtacctagacaaatgttgcaaatttaaaggcgaataaagggaacttgaatgtcctattcacctttggtaagtgaagaattattttctgctcttttcaacaattaactgaaatattctcagtgaaaatatctgacatgaaaataaatggtgcccatgatccaggaccagtgataaactacacattttggtttcctgagaaaatgtccatatgtgattacatgaaaagtctccatataatctaagacactaataatgatca

SEQ ID NO: 930549 - DNA, 733 bp, Homo sapiens
taaggagataagcagttttatttcaaggaagcattctcttttacgtgcatttaatctatgcttaagaaaaatcatattgaagagtataagaaagaaataaaaaatataaaatattactaaggaggaaaaaacttctgatcttttaaaatttggaactcacaaggctctctcagaaggtttataagagcataaataaaattaacattacagtacatacaaataatgaagagagtttttctatcttatcgtggagatgactcttaagaaattaaacattttgcttttttgcatgaaagcttaaaattttctgttttgaatacaggttttaaaaccactaaataattagactgcaaggaagaaaaatccatttaagcaatgatkctatttgaatgagctagcaatctttactcatatgctgagtaaaggaaatgaataatggagttaatcttgcaatacaattaattttgatttaacgtacctagacaaatgttgcaaatttaaaggcgaataaagggaacttgaatgtcctattcacctttggtaagtgaagaattattttctgctcttttcaacaattaactgaaatattctcagtgaaaatatctgacatgaaaataaatggtgcccatgatccaggaccagtgataaactacacattttggtttcctgagaaaatgtccatatgtgattacatgaaaagtctccatataatctaagacactaataatgatca

SEQ ID NO: 930550 - DNA, 733 bp, Homo sapiens
taaggagataagcagttttatttcaaggaagcattctcttttacgtgcatttaatctatgcttaagaaaaatcatattgaagagtataagaaagaaataaaaaatataaaatattactaaggaggaaaaaacttctgatcttttaaaatttggaactcacaaggctctctcagaaggtttataagagcataaataaaattaacattacagtacatacaaataatgaagagagtttttctatcttatcgtggagatgactcttaagaaattaaacattttgcttttttgcatgaaagcttaaaattttctgttttgaatacaggttttaaaaccactaaataattagactgcaaggaagaaaaatccatttaagcaatgattctatttgaatgagctagcaatctttactcatatgctgagtaaaggaaatgaataatggagttaatcttgcaatacaattaattttgatttaacgtacctagacaaatgttgcaaatttaaaggcgaataaagkgaacttgaatgtcctattcacctttggtaagtgaagaattattttctgctcttttcaacaattaactgaaatattctcagtgaaaatatctgacatgaaaataaatggtgcccatgatccaggaccagtgataaactacacattttggtttcctgagaaaatgtccatatgtgattacatgaaaagtctccatataatctaagacactaataatgatca

SEQ ID NO: 930551 - DNA, 787 bp, Homo sapiens
acagagcgggacccctgaccacagagagggaccaggggaccttttcacatctccctgcattcctgccacccaaggggaaggaggacacagatgagagggaaggagccaattgcccttggaggaatgcagatgaccccaaggcgacattgtggctgtattatccggcaccgttcacagcactttacatgtattatttcatttgattctcatagcagttttctgtggtgtaggatatgctgactcattttgtttattttatagctaaggagtcttatgctcaaggaatttgagtgactttcccagggtcaccagcrggatggttaactttatgagttaacgttgacagggccacagtacccagatatttgtgcaaacattcttctgcatgtttcagtgggagtatttttgggtaagattaacatttaagtcagttgactttgagtaaagcgcattgccctccataatgcaggcaggctcatccaaccagtcagaggccttaacagaacagaaactggcctctcgcaagcaagggggaatcgtgccagcagatggcctttggatttgaactgcaacatcagctctttcctgagtctcctgctggctggcctgtctgcagattttgaacttatacctccatgatcgcataagccaatttcttaaaataaatctctttccctccttccttccctccctccttcatacgcacacatcctgttggttctgtttctctggagaatcttgactaccacactcaactagtaagtgatggaagagccaggattaaaaa

SEQ ID NO: 930552 - DNA, 612 bp, Homo sapiens
tccttgctgttctcatgatattgagtgagttctcacaagatctgatagtttaaaagtgtttggcacttccctctttgctctctttctactggtctgccatggtaagacatgccttgcttctactcaccttccacatgattgtaagtttccctaagtcctccccagccatgcagaactatgagtcaattaagcctcttttcttaaaaaaataaattacccagtcttaagtagttctttatagcagcatgataatggaataagacagagaggaaacaaaataatgagtacataaccactctgagtagatcatctaagagagaatacaggagttcaacagaaaagtgatgggaagcaccaaaagcaaggaaggagagggaagcaggacaacccatttggctgggataggctgttaggagaggttccctaatgctggaaaataaaaagtgagagacccctcaggggtccagatwcccacaacagattcctacagtcctagccatgggagagcccctcaatctttctggcccctgagactaacataaggaactgcatggagactgtgggaaggcactgctccagagagggagtccattctgtgtcccacaccttctt

SEQ ID NO: 930553 - DNA, 593 bp, Homo sapiens
atacacagtgtcctccaggttcatccatgttgtagcatgtggcaagattttcttcttttttagagacagggtctcactcggttgcccaggctggagtgcagttgtgtgatcacagttcactgtaacctcgaacttctgagctccaacaagactactgccccagccccagccaccctgcctcagaagtcaggactacaagtgtgcaccaccacacccaactaatttttttatrtataattttttgtggagacagagtttcactatgttaccccagcaggtctcaaactccaggactcaagcgatctacctcaacttcccaaagtgctgggactacaggcgtgagccacctttcttcttttaaagactgaatgttatttgaatgttattccattgtatgtatataccaccttttctttatccattcatgcatcagtaggcgtttgcgttatttccatttcttggctattgtgagtaatgctgcaatgaacatgggtatacacacaccttttcaagatcctgctttcaattcttttggatatatagccagaagtggaattgctgggtcatacggtaattttgacggaccaccatac

SEQ ID NO: 930554 - DNA, 547 bp, Homo sapiens
aacagaggttaaaagggtgctttctaaaagtttacctagatataactgaactttggggggtttaaagtagatcatacttatttcactcatttttaaaccctgaaaattctttctatgcgatattcttggggagaggttggtattgtgttttagtcagcattgggactattcgatatttgtttcatcatgttttaatttrtgaatttgataaaatggcatcttcaagttgatttcatttcggatacaccatgggatttttcaagaaagtatttctagcttcaactatagtaacccctatttaaaattacatatatttgaatgtttagattcttgaaatattggccattatctttttaacagtaatttaatatttcaaactaatttgaaatattatcgatgacctgtggcatctttgaacttacactctaagagtgggatgattactcaaatgagttcccccatagtaatttacaaaggtacatgatttgtggagatacctaaatcacttttggcatggtgcttctaagtacgggggactttaatgcta

SEQ ID NO: 930555 - DNA, 547 bp, Homo sapiens
aacagaggttaaaagggtgctttctaaaagtttacctagatataactgaactttggggggtttaaagtagatcatacttatttcactcatttttaaaccctgaaaattctttctatgcgatattcttggggagaggttggtattgtgttttagtcagcattgggactattcgatatttgtttcatcatgttttaatttgtgaatttgataaaatggcatcttcaagttgatttcatttyggatacaccatgggatttttcaagaaagtatttctagcttcaactatagtaacccctatttaaaattacatatatttgaatgtttagattcttgaaatattggccattatctttttaacagtaatttaatatttcaaactaatttgaaatattatcgatgacctgtggcatctttgaacttacactctaagagtgggatgattactcaaatgagttcccccatagtaatttacaaaggtacatgatttgtggagatacctaaatcacttttggcatggtgcttctaagtacgggggactttaatgcta

SEQ ID NO: 930556 - DNA, 598 bp, Homo sapiens
actgaggaaattatgacagtgaaagaggtcagacctaactgactccatcttgcttctaacctttaagctgtccttgttcattcttgggcatcagccaaactaaccttgggaaggaatttagtttatagtttgactctaaaagaaaattgataatagtcctttcccaaaaagactcccttcttgcctggggaccagtctgcctttgtagggctaacaaattagctacaagattagaaattaaggtttaggggtcatgcagcctctggctgtcagaatctgaacctcccgagattgctcctgggataacatcactattgtaaagcctaagatcagtgcttcagatattttgcagaccctgcactygatggatcagttgacaccacccaggcctgtaatttggctcaatcttttctgcaatcccacccaggaacagaagacaccaagaaaacctaaatacggccacctacgattccatttccagcacgaccaatcagcactccccacttactgagcccctacccaccaaattgtctttaaaaacgcggatcccggaaggctcagggagactgacttgagtaacaataaaactccagtctcc

SEQ ID NO: 930557 - DNA, 649 bp, Homo sapiens
acaccttgtcagattatgggaatattcttctattcctgctttgctgagagtctttctcataaacacacattaaagtttatctaatttcttctttcttttttttctttcttttcttcctctctctctttctttctctttcttttctttcttttctttctttcttgtttttttgagacagggtctcactcccttgcccaggctggagtatagtggcattaacatggctaactgtagccatgacctcctaggctcaagcaatcctccttcctcagcctctcaggtagctgggactrtaggcatgcaccaccatgcctggctaattttttaaaaaaaattttggtatagacagcatcttgccatgttgcccagggtggtctcaaacacctgggtcaaatgatactcccgccttagcctctcaaagtgctgggattccagatgtgaggcactgtgcctggcctgtggaaagatttttgaccactcattccatttctttggtgtttttaggcagagcagccataatatttattgtacaattcttgggtcagttttggtaaattatattttatagcaatttttttcatctaaatttaaacatttgttggtgtaaagttgctgacaatgtcattgtcttattaatgttttgaaagtc

SEQ ID NO: 930558 - DNA, 582 bp, Homo sapiens
gaacaggagtgcttcactactgctccccatgtgccctccactgacattgtgggagagtgacctctttgctgctgagtgatggtgaatgtcctgattctcctctaggccttctctgataccactctagtggaaaggagtagaggtgcttcattacaaggttttctttgacatcatggcagggaagaaggaaggtgtcactggcaggagttctggcttcctactcagtcttctctgacttyacttctgcaagggtgttgaggtgtcttgttacttcctggtaaacatctagagtccccactcagtctttcctagcaagagtggagttggggtctctgtttttactgtgatgtttggctagagtagaacagttattgtcttaaagtattctgtcttggtaggctggctgtcccttttgtgatatcttggttagaaaatggggcttttgtttagaattttttaattttttgggggctgtgtctattgattattgatgtttccatgctgctggtttcttcagctacaagtccaggctaaatgagacaaagagaaaacccagggaactcactgccttttgagacccaa

SEQ ID NO: 930559 - DNA, 582 bp, Homo sapiens
gaacaggagtgcttcactactgctccccatgtgccctccactgacattgtgggagagtgacctctttgctgctgagtgatggtgaatgtcctgattctcctctaggccttctctgataccactctagtggaaaggagtagaggtgcttcattacaaggttttctttgacatcatggcagggaagaaggaaggtgtcactggcaggagttctggcttcctactcagtcttctctgactttacttctgcaagggtgttgaggtgtcttgttacttcctggtaaacatctagagtccccactcagtctttcctagcaagagtggagttggggtctctgtwtttactgtgatgtttggctagagtagaacagttattgtcttaaagtattctgtcttggtaggctggctgtcccttttgtgatatcttggttagaaaatggggcttttgtttagaattttttaattttttgggggctgtgtctattgattattgatgtttccatgctgctggtttcttcagctacaagtccaggctaaatgagacaaagagaaaacccagggaactcactgccttttgagacccaa

SEQ ID NO: 930560 - DNA, 711 bp, Homo sapiens
catagtcaaacattcagtttccaccaaagcccagaaatgggccaagagctgtttctcaggagcaaagtacttatcttctgaagatggcaaggctttgctccaaaatcctagaggcctctgctgtggttcacctgtgggggcctaccaaaggctcaaaatagcatccctatctgccactaacacctcaagcaccattggatctgttgggtcatatggcccaagtggcagagcagcttgcacagcagttctggaccccactcaaaactggtagccttttgagtcactagataaatgggctggagtgacacacccaaatgaggaatgtgttgcctccaaaatccaaataggcccactaggcgttgtgcctctttcttggttgtaggaggggtcaaacgcagcaactcrtccttcacgttagaaggaatatctcgacaggtcccacaccactggacccctggaaattttactgaggtagaaggtccctgaattttagttggattcatttcccatcctctggcatgcaaatgtctcaccaataagtccagtgtgtttgctatttcttgctcactggatccaatcaacataatgtcatcaatgtaatggaccagtgtgataccttgtggaagcaaaaagtgatcaaggtctcttcaagtaagattatgacacaaagccagagacttgatatacccctggggtagaacagtaaagatc

SEQ ID NO: 930561 - DNA, 711 bp, Homo sapiens
catagtcaaacattcagtttccaccaaagcccagaaatgggccaagagctgtttctcaggagcaaagtacttatcttctgaagatggcaaggctttgctccaaaatcctagaggcctctgctgtggttcacctgtgggggcctaccaaaggctcaaaatagcatccctatctgccactaacacctcaagcaccattggatctgttgggtcatatggcccaagtggcagagcagcttgcacagcagttctggaccccactcaaaactggtagccttttgagtcactagataaatgggctggagtgacacacccaaatgaggaatgtgttgcctccaaaatccaaataggcccactaggcgttgtgcctctttcttggttgtaggaggggtcaaacgcagcaactcgtccttcacgttagaaggaatatctcgacaggycccacaccactggacccctggaaattttactgaggtagaaggtccctgaattttagttggattcatttcccatcctctggcatgcaaatgtctcaccaataagtccagtgtgtttgctatttcttgctcactggatccaatcaacataatgtcatcaatgtaatggaccagtgtgataccttgtggaagcaaaaagtgatcaaggtctcttcaagtaagattatgacacaaagccagagacttgatatacccctggggtagaacagtaaagatc

SEQ ID NO: 930562 - DNA, 791 bp, Homo sapiens
ggagaaagaaggccccaactcagtctctttctgtattacttttatgctatgtttctctttacaaatggaatgcttttaacagcagcaaagtcacctcttgtgtcctcgctacttaggaatttcttttgccagataccctaaatcatctctctcaagttcaaagttccataaatctctagggaagggacaaaatgccaccagtctattgctaaaatataacaagagtcacctttgctccagttcccaacaagttcctcatctccaggctgagaccatctcagcctgacccttattgttcatatcactatcarcaattttgtcaaagccattcaacaaatctctaggaggtcccaatctgtcccacattttcctgtcttcttctgaacactccaatccaaattgttccaacctctgcctgttacccagttccaaagtcacttccacattttcgggtatgttttcagcaacgcctcactctcctgatatcaatttattgtattagtcagttttcacactgctgataaagacatacctgaggctgggaaaaagaggtttaattgaacttacagttccacatgcccagggaggcctcagaatcatggtggaaggtgaaaggcacttcttaaacggtggtggcaagagaaaatgaggaagatgcaaaagcagaaacccctgataaaaccatcagatctcatgagtcttattcactaccatgagaacagcatggtggaaaccactcccatgattcaaattacctcccattgggtccctcccacaacacatgggcattc

SEQ ID NO: 930563 - DNA, 791 bp, Homo sapiens
ggagaaagaaggccccaactcagtctctttctgtattacttttatgctatgtttctctttacaaatggaatgcttttaacagcagcaaagtcacctcttgtgtcctcgctacttaggaatttcttttgccagataccctaaatcatctctctcaagttcaaagttccataaatctctagggaagggacaaaatgccaccagtctattgctaaaatataacaagagtcacctttgctccagttcccaacaagttcctcatctccaggctgagaccatctcagcctgacccttattgttcatatcactatcaacaattttgtcaaagccattcaacaaatctctaggaggtcccaatctgtcccacattttcctgtcttcttctgaacactccaatccaaattgttccaacctctgcctgttacccagttccaaagtcacttccacattttygggtatgttttcagcaacgcctcactctcctgatatcaatttattgtattagtcagttttcacactgctgataaagacatacctgaggctgggaaaaagaggtttaattgaacttacagttccacatgcccagggaggcctcagaatcatggtggaaggtgaaaggcacttcttaaacggtggtggcaagagaaaatgaggaagatgcaaaagcagaaacccctgataaaaccatcagatctcatgagtcttattcactaccatgagaacagcatggtggaaaccactcccatgattcaaattacctcccattgggtccctcccacaacacatgggcattc

SEQ ID NO: 930564 - DNA, 791 bp, Homo sapiens
ggagaaagaaggccccaactcagtctctttctgtattacttttatgctatgtttctctttacaaatggaatgcttttaacagcagcaaagtcacctcttgtgtcctcgctacttaggaatttcttttgccagataccctaaatcatctctctcaagttcaaagttccataaatctctagggaagggacaaaatgccaccagtctattgctaaaatataacaagagtcacctttgctccagttcccaacaagttcctcatctccaggctgagaccatctcagcctgacccttattgttcatatcactatcaacaattttgtcaaagccattcaacaaatctctaggaggtcccaatctgtcccacattttcctgtcttcttctgaacactccaatccaaattgttccaacctctgcctgttacccagttccaaagtcacttccacattttcgggtatgttttcagcaacgccycactctcctgatatcaatttattgtattagtcagttttcacactgctgataaagacatacctgaggctgggaaaaagaggtttaattgaacttacagttccacatgcccagggaggcctcagaatcatggtggaaggtgaaaggcacttcttaaacggtggtggcaagagaaaatgaggaagatgcaaaagcagaaacccctgataaaaccatcagatctcatgagtcttattcactaccatgagaacagcatggtggaaaccactcccatgattcaaattacctcccattgggtccctcccacaacacatgggcattc

SEQ ID NO: 930565 - DNA, 557 bp, Homo sapiens
  misc_feature 500: n = A,T,C or G
cagatagcgtttaggctctttttcatcaaatataaaaatccagcccagttcatggctcgttcggcagcaaccctgagacactttacagccctagaccctaaaaggtcaaaaggccgtcttattctcaatacacattttattacccaatctgctcccgacattaaataaaactccaaaaactggaatctggccctcaaaccccacaacaggacttaattaacctcaccttcaaggtgtgcaataacagaaaaaagttgcaattccttgcctccactgtgagacaaaccccagccacatttccagcacacaagaacttccaaacgcctgaactgyagcagccaggcgttcctccagcagccagcaagttcctccccaaggagcttgttacacatgccggaaatttggccactgggccaaggaatgcccgcagcctgggattcctcataagccacgtcccatctgtgtgggaccccactgaaaatcggactgttcaactcacntggcagccactcccagagcccctggaactttggcccaaggctctctgactgactcct

SEQ ID NO: 930566 - DNA, 598 bp, Homo sapiens
agctgatctctgggcagaaactctacaagccagacgagagtgggggccaatattcaacattcttaaagaaagaattttcaacccagaatttcatatccagccaaactaagcttcataagtgaaggagaaaaaacgccaattctttaaaaaatattcaaaacaaattggagaggggggatttctccctaactcattctatgaggccagtattactgataccaaaaccagatgaagctacaacagaaaaagaaaattacagaccattaatcttgataatatacatgtaaaaattcttaagacaatactmgcaaaacaaaaccaatagcacatcataaagatagtgcaccatgatcaagtggggtttatgccaggaatgcaaagatgcttcaacatatgcaattcactaaatgtggtacactgagaacacatggacatgtgggaaagaacatactggggcctgtcaggcgtgattcaggggagggacagcaacaggaagaatacatattggatgctgggcttaatacctgggtagtgggatgatctgtgaagcaaccaccatggcacacgtttgcgtttgtaacaaacctgcacatcctgc

SEQ ID NO: 930567 - DNA, 442 bp, Homo sapiens
gctgcaagcagccatctgatactccacaggaaaggatacctctttgtagagccttctggcctaggaacctggtgactattcccgtgtgttcttttcctcacatgattactagtcacatatatacagacatatttaagaggccaaggtatttcagtgtcttgctcaatctgacagccatgggctggaatcctagctctggcagcattggctatktgactttggggaggttaacattttaacatttctgagcctcagtatcctcatgtgtactgtgaagataatcttaaaaacatacccagcaggctttcttggaggattaattggaatcatagaagcaaaatagcagagggtcacatagtaggagctcaaaggataatcactgtttcttattattgctatttgaaaagcatatgaaaagaagggctgaggttcttttgaaaag

SEQ ID NO: 930568 - DNA, 602 bp, Homo sapiens
gatcagagtctgtgattagatctgtttctccaggaaaagtcaaagttgggaataattttaaatgagcacatagaaatatgtattatgtgtagaagcggatgaaaaaccagcgtagggccaggcgcagtggctcacgcctgtaatccctgcactttgagaggctgaggcaggtggatcacgaggtcaagagatcgagaccgttctggccaacatggtgaaaccccgtgtttaataaaaatacaaaaattagctgggtgtggtggcgtgtgcctgtagtcccagctactcgggaggctgaggcaggagaatcacttgaacctgggaggcggaggtggcagtgagccgagatcgcaccactgcactccagcctgttgacaaagygagactctgtctcaaaaaaaaaaaaacaaaaacaaaacaaaccagcatgggagaaatatgtattaaatgtagaagcagattaaaaaccagcgtggggccagatgcagtcactgacacctgtaaatccagcactttgggaggccgaggcaggagaatcatttgagcctaggagtttgagaccggcctggacaacacagcaagaccccgcctctacaaaaact

SEQ ID NO: 930569 - DNA, 602 bp, Homo sapiens
gatcagagtctgtgattagatctgtttctccaggaaaagtcaaagttgggaataattttaaatgagcacatagaaatatgtattatgtgtagaagcggatgaaaaaccagcgtagggccaggcgcagtggctcacgcctgtaatccctgcactttgagaggctgaggcaggtggatcacgaggtcaagagatcgagaccgttctggccaacatggtgaaaccccgtgtttaataaaaatacaaaaattagctgggtgtggtggcgtgtgcctgtagtcccagctactcgggaggctgaggcaggagaatcacttgaacctgggaggcggaggtggcagtgagccgagatcgcaccactgcactccagcctgttgacaaagcgagactctgtctcaaaaaaaaaaaaacaaaaacaaaacaaaccagcatgggagaaatatgtattamatgtagaagcagattaaaaaccagcgtggggccagatgcagtcactgacacctgtaaatccagcactttgggaggccgaggcaggagaatcatttgagcctaggagtttgagaccggcctggacaacacagcaagaccccgcctctacaaaaact

SEQ ID NO: 930570 - DNA, 772 bp, Homo sapiens; identical to SEQ ID NO: 920316

SEQ ID NO: 930571 - DNA, 772 bp, Homo sapiens; identical to SEQ ID NO: 920317

SEQ ID NO: 930572 - DNA, 772 bp, Homo sapiens; identical to SEQ ID NO: 920318

SEQ ID NO: 930573 - DNA, 764 bp, Homo sapiens
ttccttggtgggtgagaaacaagaataggagagaattgagaaggcacacacagagctaaacacatgcagtaaacaatctttaattcactgagatttaaatggaaagtaaaatcacagtataggggtagttgtgccacctaaatcaagtactaagagttccttttttaaattgtggtaaaatacacataatataaaatttaccatcttagccattttacagtatccagttcagtggcattaagtacattcacattgctgtgtagccatcaatatcatccaactgyagttgttttcattttgggaaattgaaactctatactccttaaacagtaactctctatcctttccttccatcagtccctggcaactaacattgtactttctgtctttatgaatttgacttctctaggtatctcatgtaagtagaattatacagtattcattttttgatgcctgacttatttcacttagtgtaatgtcctcggtgtttattcatgttgtggcatgggtcacaatttcctttctttctgaagttgaataatactccattctatgtatgtaccacattttagtttacccattcttcattgagcacaaatttcttcccttttgctattgtaaataacactgctatgaacatggtatacaaatatgtttttgagattctgctgtcaattatttgaatatatacccagaagtggaactgacaaatcatagagtaattctatttcattttgttttgtgaaatcggtatgctgttttcc

SEQ ID NO: 930574 - DNA, 528 bp, Homo sapiens
aaatttatagcactaaatgcccacaagagaaagcaggaaagatctaaaattgacaccctaacatcacaattaaaagatctagagaagcaagagcaaacacattcaaaagctagcagaaagcaagaaataactaagagcagagcagaactcaaggaaatagagacacaaaaaacccttcaaaaaatcagtgaatccaggagctggtattttaaaaagatcaacaaaattgatagacygctagcaagactaataaagaagaaaagagagaagactcaaatagatgcaataaaaaatgataaaggggatatcaccactgatcccacagaaatacaaattaccttcagagaatactataaacacctctacgcaaataaactagaaaatctagaagaaatggataaattccttgacacgtacactctcccaagactaaaccaggaagaagttgttattggtctctgaatagaccaataacaggttctgaaattgaggcaataattaatagcctaccaaccaaaaaaagtccag

SEQ ID NO: 930575 - DNA, 584 bp, Homo sapiens
ggctcaaacacatctttattaatcaaaataggaacgattatgatcaacatttttttgccaataatttttttttttttttttgagatagagtctcactctgtcgcccaggctggagtacagtggtgcgatcttggctcactgcaacctctgcctcccaggtttaagcaattcttctgcctcagcttcctgagtagctgggattacaggcgcgtgccaccatgcccagctaagttttgtatttttagtagagacggggtttcaccatgttggtcaggctggtctcaaactcctgactttgtgatccgcctgcctcagcctcccaaagtattgggattacaggtgtgagccaccatgccyggctgaaaaaatgtttgtttattcctgtagcataaaacttcatgctttgggattcaacaaactcttggaaagcatttcctgcatcctgctggtgtggaagcgttttccctgcaaaaagttgttgagatgcttgaataagtggtgtcagttggtgagaggtcagatgagtatggtagatgaagcaaaactttggagtccaatttgttcaacttttgaagtgttggttg

SEQ ID NO: 930576 - DNA, 588 bp, Homo sapiens
tcacaccattctcctgcctcagcctccggagtaactgggactacaggtgccgccaccacgcccggataattttttgtatttttagtggagacggagtttcaccgtgttagccaggatgttctcgatctcctgacctcgtgatccacccgcctcggcctcccaaagtgctgggccttattttaacagacaccaatgtgatcagaaaaagtataacatgtgctgaaaactgtttattgtgtggacattgtgtgggaaccaataaaagacaaagagctatagaataaatcatttttatttaattttatttacttttaaagttagactcgtattcattctggtctctctgagttgtttgctcccacctgtttggtctcacttttctctctgtatctcaggagccagaactayaagcttcagaagtcagttcagatggttatctgcaatttctctttgtagtgctattcgaggtcaaatccattacagcatatgttcagactgactttgcacacttaactccactgggctttcagtgacatacttggcgcttcacctgagaacctgttatccatagatacatgagatgttaaa

SEQ ID NO: 930577 - DNA, 751 bp, Homo sapiens
ttgagcaatattacagctctcaggctacctggagtgggtagctcctatctgcaggcagtcatcctgatgacatctctccacccctcagcagagcggagacctggagtgggtagcttctacctgtagtcaggtcatcccaacatctgtgcagccctcagtggagaggagacccagagtgggtagctcctatccatgggcaggtcatcttgtcatctttccaaatctggctaagtccagggtttttatgggcttcagaagggaggaagtgcatgctgactggtccatgagcagccatgggtgggcctggaaaaagcaccataagttttcatgcctggctatggaacaggcagcccaggctccaggcttcagaccatccctrgcttgaacatggggtttcactgggggcttgctcctttccacccaggagcctgtctgcctcctgccaccatcaattacatcatccatggtgctcaggctgtactgaggggcatctgcaggcctgcacctagctgccctcagtcccccctcggcctctctcccattcttgtcagtgcccaaagtccagaggatgccaaggcggcagggggctgtcatatcatcactgcttcaagcacacacacaacactcgggctcggcttcaactttgctcctaaatgagagtgggtgctgggagtggggagagatcaggcagcaagagtaggcacttctgaacctgcaggggcagggagggttcccatgaccctgagagcat

SEQ ID NO: 930578 - DNA, 546 bp, Homo sapiens
ccctcactcaattttcagtggattaagtggccctttctcactaccaactactctctgataataaagatttcttgtattgccttaaagacatattaaatgataccatgctttttcactccttcatgcctttacacattctattcctytgcctccactgtcctttcctttgatctgttcaatgaaatgttagtaagcctttaatgtttgatctcaactgtcacctactccatgaaaaccttccctgactggaaacaacagatgctggagaggttgtggaaaaataggaacgcttttacactgttggtgggagtgtaaattagttcaaccattgtggaagaaaatgtggcgatgcctcaaggatctagaaccagaaataccatttgacacagcaatcccattactgggcatatacccaaaggattataaatcattctacaataaagacacatgcacatgtatgtttattgtggcactattcacaatagcaaagacttggaaccaacccaaacgtccatcaatgatacactggattaagaaaatgtggca

SEQ ID NO: 930579 - DNA, 492 bp, Homo sapiens
aagatatagactagctgaatggatttaaaaatgactcactatatgctgcctacaagaagtttatttcacctgtgaaaacacatatagactaggccaggcatggtggctcatgcctgtaatcccagcactttgggaggccaaggtgggaagatcacaaggtcaggagattgagaccatccgggctaacatggtgaaaccctgtctctactaaaaatacaaaaacaaaattagccgggtgtggtggtgggcacctgtagttccacctactaggaaggctgaggtgggagaatggcgtgaacctrggaggcggagcttgcagtgagccaagatcgtgcctctgcactctagcccgggtgacagagcaagactctgtctcaaaaaaaacaaaaaacaaaacaaacaaaaaaccaaaacaaaacaaaacatatagactaaaagtaaaggaatgtaaaaagataatcctgcaaatggaaaccaaaagcaagcagaaac

SEQ ID NO: 930580 - DNA, 799 bp, Homo sapiens
gttttgtgtatctgcacatgtataggttggtagagccaccaccatagtcaagacacagaactgttcatcaccacaaaggatctctctgatgctgcccctttacagtcacagccctcttccctttcccacacccctgacaaccccttatctcttttccatctctatatttttgtcattttgagactatcttataaatctttttaatatctaattttttgagattggcttttttcactcagcacaatattcttaggatccatccaacttgtttcattgtatcagtaattcattccctttttactgctggctaccattctatggtatggatgtaccacagtttgtttaaccttcacccattggaggatgcctgggtcgtttccagtttctggttattacaaataaggcagctatgaacatttgtataaaggtttttgtgtgaacataaatgttcaggattttgattgatgggycatatattagcctggtgcaaaaataattgcggttttgccattacttttaatgcaaaaccgcaattacttttgcaacctagtagtacttaattgtttaacttttaaagaaattgccagacagatttccagagtgattgtaccattttacatgcctaccaaaaacctttacaagatccagtttctgcattcttgacagcatttgttttattagtattttttattttggtgattttaataggtgtgtagcatcataactagttttccacaaaaactagtgatgttgagcacctttcatgtgtttattttgccatctgtgtacagtggcagcc

SEQ ID NO: 930581 - DNA, 608 bp, Homo sapiens
tgatatggttttgctgtatccccacccaaatctcatcttgaattgtagctcccataattcccacatgttgtgggagggacccagtaggagataattgaatcacgatggtggttttccccatactgttcttatggtaatgaataagtctcatgatctgatggctttatraggggaaaccgcttttgcctggctctctcattctctcttctctgctgctgtgtaagacatgcccttcaccttccatgatgactgtgaggcctccccagccacgtggaactgtgagtccattaaacctctttttcttataaattacccagttttaagtatatctttatcagcagcctgaaaacagactaatacagtaaattggtatcagtagagtgggacactgctgaaaagacaccccaaaatttgaaagtgactttggaactgggtaacaggcaaaggttggaacaatttagagagctcagaagacgggaaaacatgggaaactttggaacttcctagggacttgttgaatggctttgaccaaaatgctgataatgatatgaacaatgaaatccaggctgaggcggtttcagatggagatgagaaacttgttgggaaat

SEQ ID NO: 930582 - DNA, 742 bp, Homo sapiens
tgtaatcccagcactttgggaggcagaggcaggcggatcacctgaggtcgagagcccgagaccagcctgaccaacatggagaaaccccatctctactaaaaatacaaaattagccgggtgtggtggtgcgtacctgtaatcccagctactcaggaggccgaggcagaagaatcacttgaatccaggaggcggagatcgcagtgagctgagatcgtgccactgcactctagcctgggaaacaagagcaaaactccatctcaaaaaaaaaaaaccaaaaaacagatcatgaggagccctgtttaccatagtaagaaattagaactgtattataattttattagcatgatttaagcagaggagtgacatgatgcaatttaatctttaataaamtcatcctggctgctctgtggagaagagattgcagaaagccaagagttcagggagacaagttggaagtccagataaggaatgattatgaattgaaccacagtagtagatggtgaggtcagatccaagatctattttctttttaaaaattatttatttatttgtttattttatattttcaatatagagccaccaggattggctaattaattcaattcaaagtgtgaggaaaagagagaagttcaaggatgacttcaagttgtcttacctgagcaactgaaacagtggagatgccatttatgagtctgtaaagacttgggacaaatatttgtatggagaggagacaaaaaaagct

SEQ ID NO: 930583 - DNA, 736 bp, Homo sapiens
tcagtctttcattccctaacctccctttgaatgttagttacctattcccacataacaaagtgccccaaaacttaatggcataaaacaagcatggacattgttaattcacccagttctgtggggcaggaaagcgggtctctcatgaggctacagtcaagatgtcagccgaggtgacagtgaagatatcaaccaaggctgcagccggttgaaggcctcactggatttggagaatattattgattaaattgcrtcttccccaaaaaagatacgttgtagtcctaacccccaatagctcagaatgtggccttatttggaaatagggtctttgcagatgcaatgaagatataagttaaaatgagatcacactagagtaactgggcccttaatccaatatgacatgtccttatcagaagaggagaagacacacacacagggagaagatgaccatgtgacaacaggggcagagatcacagggatgcctctactagacaaggcacaccagaaattgcttgccaacaaacaccagaaattagaagaggcaagaaacaactccccacacacaacccacccctgcaggtttcagaagaagcatggctctgccaacaccttgattttggatttccagcttccacaactatgagacaataagtttctgttgtttgaagccacccagttcagggtactttgatatggcagacctaggaaacaaatacagaggatcacttgcaaaatggcc

SEQ ID NO: 930584 - DNA, 704 bp, Homo sapiens
catggttcttccagaacattctgcaagctcatggaccagttcatttgagaagaaatagaggagttaggggagagagaagcttcttaatgaaaataaccttggtagctagtctcaagattagcccccagtgctccccacctgctggtatccgttgtacaacacttcccacatttttctggggtcgttttgtgtaaccaataaaatatggcagatgcgatggcatgttacttctgaaattgggttataaaaggtactgcagaccgggcacggtggcttacgcctgtaatcccagcactttgggaggccaagcctggcggatcacaaggttaggagttcaagaccagtctggccaatatggtgaaaccctgkctctattgaaaatacaaaaattagccggcatggtggcacacgcctgtagtcccagctagtcgggaggctgaggcagaagaatcgcttgaacccgggaggcggaggttacaatgagctgagatagcaccactgcactccagtctgggcaacagagcgacactccgtctccaaaaaaaaaagatactgcagcttctatcttggttgctcacttgctatcttgggtccctccctctggggaaagccagttgccatctcccaaggatccctatggacagacccatttggcaaggaacagccaccagctagctgcatgagcgagccatgttggaagtggg

SEQ ID NO: 930585 - DNA, 586 bp, Homo sapiens
taagtaacaaggagcccaatgctaatccccaagacaatggggaaaatgtctccaaggcatgtcagaggtcttaaccttcatggcagcctctcccatcacaggcccagaggcctaggaagaatatatggtttcatgggctgggcccagkgtccctctgctggggctctcatggagaacctctgatagtgcaatgcaggagggaaatgtagggtcagagacttcatgcagaattcctaccagggcaccacctagtggagttgtgagaaaagggttaccatctccaagacccaagaatggtagacccattgacagctagcaccatgtgcctggaaaagccacaaccctcaacaccacccaggaggaaggctgcaccccacaaagccacaggggaagagctaccccaaaccatgggaacccactccttacatcagcatgacctggatgtgacatggagtcaaaggagattattttggtgatttaagactttacaaccccactggattttggacttgcatgcctgtagcctctttgttttggccaatttctcccatttggaatggctgtatttacccaatgcctgtgcttc

SEQ ID NO: 930586 - DNA, 777 bp, Homo sapiens
accccagatcccagggaggagaatgtcagcacaaacccccatgatggtatctggctgataaaagtgagtgaagtcccagcacattagagaggtagagagccaccctctgtaacttacctttccactaggaatctgaccaacccaagctgagagagagcactttgtttcttctaaactctgtatttaacrtggagtgaggtttggagacactgtgagggaaacacaatgggaaaagctgtaaacgttttcccagacacagggctgagggcaggacatcatttttaatcaaggcacttacaaagtcagccattcaagctgagaaccaaataaagaacacaatcacatttacaatagccactccccaaaataaaatagctaagaatacagctaacctaatgagaaggatctcaaggaaaactacaaaacagtgttaaaaggaattatatatgacaaaatcaatggaaaaactttaaatgtttatgaattgaaagaattaatattctttaaatgaccatactgcccaaagcaatctacagacttaatgctatttctatcaaactaccaatgtcattattcacaaaactagaaaaatctattctaaaattcatatggaaccaaaaagacctaaatagccaaagctagcctaagtaaaaataataaagccagaagcatcccagtatctgacttcaaattataacgaggctgcagtaattaaaacaacagggtactgttacaaacagcagacacaaagattaatgtaaaagaatacagaaccca

SEQ ID NO: 930587 - DNA, 654 bp, Homo sapiens
tttacaaaaataaaaattatatcaagtgtcttctcagacagcaatggaataaaactataaaacaataataaaagaaactttaaaaactacacaaatacacagaaattaaataacatgctcctgaacaactgatataatttagatgtttgtccatatctcacgttgaaatgtgatctccaatgttggacatggggcttaaagggagatgtttgagtcatggaagcagatccctcttgaatgacttggtaatctccttgtggtaatgaatgagttctcattctgtcagttcatgtgagggctgrttgtttaaaagatcatttttgatttttaataaatgtatgtatgtgcaaacatcatcacaaatgactttcagaacattttcatcattcacaaaagttttctcatatgaatttactgtcacttatgacttctacttccaacccaggcaaccacccataagctttctcatttgacattttaaggaatgccacattaataaattagacaatgtgcactgtttgcaactgatttatttcacttagcataataattgtggtgttaatctatgttgcagcatgtaccagtagtttatttcttttgtgctgaaaaatagtccatttcagcaatattcgtttatccattcacctgttgaaa

SEQ ID NO: 930588 - DNA, 654 bp, Homo sapiens
tttacaaaaataaaaattatatcaagtgtcttctcagacagcaatggaataaaactataaaacaataataaaagaaactttaaaaactacacaaatacacagaaattaaataacatgctcctgaacaactgatataatttagatgtttgtccatatctcacgttgaaatgtgatctccaatgttggacatggggcttaaagggagatgtttgagtcatggaagcagatccctcttgaatgacttggtaatctccttgtggtaatgaatgagttctcattctgtcagttcatgtgagggctgattgtttaaaagatcatttttkatttttaataaatgtatgtatgtgcaaacatcatcacaaatgactttcagaacattttcatcattcacaaaagttttctcatatgaatttactgtcacttatgacttctacttccaacccaggcaaccacccataagctttctcatttgacattttaaggaatgccacattaataaattagacaatgtgcactgtttgcaactgatttatttcacttagcataataattgtggtgttaatctatgttgcagcatgtaccagtagtttatttcttttgtgctgaaaaatagtccatttcagcaatattcgtttatccattcacctgttgaaa

SEQ ID NO: 930589 - DNA, 618 bp, Homo sapiens
ggccgggcacggtggctcacacctgtaatccgaacactttgggaggccgaggtgggtggatcatgaggtcaggagttcgagaccatcctggccaagatggtgaaaccccatctctactaaaaataaaaaaattagccaggcgtggtagtgggtacctgtaatcgcagctacttgagaggttgaggcagagaattgcttgaacctgggaggtggaggttgtagtgagccaagatcgcaccattgcactccagcctgggtgacagagcgagactctgtctcaaaaaaaaaaaaaaaattcctttgatcaacatctcttcaacaccttgcccttctaactatcctggacatatttttaaaaccccaccctctctcagtgccamattgtgacttgtgacctctgagttagcccgacaggccaccccctctcactgccaaactgtgacttgtgacctctgagttagcccgacaggccaccccctctcactgccaaactgtgacttgtgacctctgagttaacccgacaggccaccccctctcactgccaaactgtgacttgtgacctctgagttagcccgacaggcctaagctctgctctcttcggaccccagttctcaacat

SEQ ID NO: 930590 - DNA, 778 bp, Homo sapiens
ttaacaaatatgcaagcaacgttgcaaggaatatctgttaaaaataagaaaaagtgagtggcaggaaaataaaagagccaggagtggcacatgttatgaagatgtaccttgtgagacgtggacgtaagttggactccaggctttgctgcagccgctataccatttcagttgtcctgccaaagcccctgatttctgatgctaagaacaagaaggcagtgcttcaagggtcctcattaagaagccactgaaggatgtggtagagcgcctgtagtcccagctactcaggaggctgaggcgggaggatcgcttgagcccaggagttggagtgatcagtgagctatagttgcaccactgcactacagcctgagctacagagcaagacctgcctctcggaaggccgggcgtggtggctcacgcctgtaatcccaccactttgggaggccgaagcgggtggatcacctgaggtcagaagatcgagaccagcctggccaacatggcgaaaccccatctctacgaaaaatacaaaaaattagccgggtatggttgtgggcacctgtaatcccaaytactcaggaggctgaggcaggagaatcacttgaaccctgggggcggagattgcagtgagccaagatcatgccactgcattccagactggcaacagagtgagattccatctcaaaacatatataataataggaaaccactgcagtctaatgagccagatcctcacggtacctgcaatatgggtggagtattatccagggagcacagaagctgg

SEQ ID NO: 930591 - DNA, 527 bp, Homo sapiens
gctggtcgtgtcccaggcttgctgtgtgacctcatgtgagtcacttgccttattttttcttaacaagcatttattgagcacttactatctacatcaggcactgttctaggtacttgaaatgtatcagtgaacaaaatagagatccttgccctcatggaacttacattctagacagggagagaccatcggtaataagcactataaataagaattttatatactatgataygaaatgataagtgctcttaaaaaatacaaagtagaccgagtgcagtgactcacatctgtaatcccagcactttgggaggccaaggcaggtggatcacgaggtcaggagttcaagaccatcctggccaacatggggaaaccccatcactactaaaaatacaaaaattagccgggcgtggtggcgggcgcctgtagtcccagctactcaggaggctgaggcaggagaatagcttgaacccgggaggcagaggttgcagtgaggcgagatcgcaccactgcactccagcctggcgacagag

SEQ ID NO: 930592 - DNA, 448 bp, Homo sapiens
aatctttctaaaatggatcagaaaaaaaaatgtgactttcagaccccctgacttcatcctacctacaattgaagagcaacgtcacagtcttgacatctgacctgtttccttggtgcttccacactcagacaggtgtctaggagaggcatcagtaactagatttctatctctacagacatatttcmcaaaggctctatctcctaactctgactttcaatttagcttgttttataggccttaaagggctgcttctgaaatgatcgttttatctttttctctgttaatttaaatcctggaaaaaaattcagtctgactagctttacaaagcctgctgagctgttgtgaagaatagggttctgctgacttaaaaaaaatctgagctcataatcttctttagaaatacataggaacatcaagctgatctaccatggaatcatggagtttaatg

SEQ ID NO: 930593 - DNA, 723 bp, Homo sapiens
actctttctctttatttctcagccggccaacacttatggaaaatagaatctatgttgaaatattggggacaggttcccccaatacatccctagatattttactttatttttttgttgatattgtaaatggaattgtgtacttgatttggctctcagcttgaacattattggtgtacagaaatgctactgatttttgtgcattgattttgtatcctaaaactttactgaagtgattaatcagttccaggaaccttttggcagagtctttaatgttttctaggcatagaatgatactgtcagcaaagagatataatttaacttcttattttcctatttggatgcctttgatttctttctcttgyctgactgctctggctaggacttccagcactatattgaataggagtggtgagagtggacatcatgtcttgttccagttttcaaggggaatgcttccaacttttacctattcagtatgatgttgcctatagatttgtcatataaggtcttattattttgagatatgttcctttgatgcctagtttcctgtgggtttttatcatgaggggatgttaaattttattgaaagcttttcctgtgtttattgagatggtcatatggtttttgttaattctatttatagagagaatcacatttattgattttcatatgttgaaccaaccttgcctcctaggaaagaagcttacttgatcatagtaaatt

SEQ ID NO: 930594 - DNA, 638 bp, Homo sapiens
cagcacacactcccccattctgactccataaaaaccccagaatcagccacacatggggactaccagccttcaggtaggagctacccacttcaggtaccctctcatgtcgagagctgttctaccattcaatgaaactcttctccaccttgctcactcttcagttgtccatataacctcattcttcttggatgcgggacaagaacccggaacccaccaaatagtgggtgcaaaaggagstgtaacactgtagccctccctccctcttccagtgctgggcaggttctccatgtgatgggaagtggtagcgggtggggggtgggtgggggcggcagcccagaagctgcaggctggagtgaagcagtggaatagaaggagctgtaacacaaatgagctgaaacacattcctggctggcccttgagctggggtggtgacacatttccattcatcagactatgagacaagcgctgcaacccttctggaggcccagactttgagacttcccaagccagagatgtggcatgctgtaatacccccttggggctctgaggttactggcatctccaagtttttgggcaccacccggttccccttgtccagacactgacacgcaaggcagaagccgattgaggcatgccag

SEQ ID NO: 930595 - DNA, 595 bp, Homo sapiens
acacatggggactaccagccttcaggtaggagctacccacttcaggtaccctctcatgtcgagagctgttctaccattcaatgaaactcttctccaccttgctcactcttcagttgtccatataacctcattcttcttggatgcgggacaagaacccggaacccaccaaatagtgggtgcaaaaggaggtgtaacactgtagccctccctccmtcttccagtgctgggcaggttctccatgtgatgggaagtggtagcgggtggggggtgggtgggggcggcagcccagaagctgcaggctggagtgaagcagtggaatagaaggagctgtaacacaaatgagctgaaacacattcctggctggcccttgagctggggtggtgacacatttccattcatcagactatgagacaagcgctgcaacccttctggaggcccagactttgagacttcccaagccagagatgtggcatgctgtaatacccccttggggctctgaggttactggcatctccaagtttttgggcaccacccggttccccttgtccagacactgacacgcaaggcagaagccgattgaggcatgccaggtcca

SEQ ID NO: 930596 - DNA, 638 bp, Homo sapiens
cagcacacactcccccattctgactccataaaaaccccagaatcagccacacatggggactaccagccttcaggtaggagctacccacttcaggtaccctctcatgtcgagagctgttctaccattcaatgaaactcttctccaccttgctcactcttcagttgtccatataacctcattcttcttggatgcgggacaagaacccggaacccaccaaatagtgggtgcaaaaggaggtgtaacactgtagccctccctccctcttccagtgctgggcaggttctccatgtgatgggaagtggtagcgggtggggggtgggtgggggcggcagcccmgaagctgcaggctggagtgaagcagtggaatagaaggagctgtaacacaaatgagctgaaacacattcctggctggcccttgagctggggtggtgacacatttccattcatcagactatgagacaagcgctgcaacccttctggaggcccagactttgagacttcccaagccagagatgtggcatgctgtaatacccccttggggctctgaggttactggcatctccaagtttttgggcaccacccggttccccttgtccagacactgacacgcaaggcagaagccgattgaggcatgccag

SEQ ID NO: 930597 - DNA, 663 bp, Homo sapiens
gaatggtgctttttccaggcttgcccatggaccaatcagcacacactcccccattctgactccataaaaaccccagaatcagccacacatggggactaccagccttcaggtaggagctacccacttcaggtaccctctcatgtcgagagctgttctaccattcaatgaaactcttctccaccttgctcactcttcagttgtccatataacctcattcttcttggatgcgggacaagaacccggaacccaccaaatagtgggtgcaaaaggaggtgtaacactgtagccctccctccctcttccagtgctgggcaggttctccatgtgatgggaagtggtagcgggtggggggtgggtgggggcggcagcccagaagctgcaggctggagtgaagcagtggaatagaaggagctgtaacacaaatgagctgaaacacattcctggctggcccttgagctggggtggtgacayatttccattcatcagactatgagacaagcgctgcaacccttctggaggcccagactttgagacttcccaagccagagatgtggcatgctgtaatacccccttggggctctgaggttactggcatctccaagtttttgggcaccacccggttccccttgtccagacactgacacgcaaggcagaagccgattg

SEQ ID NO: 930598 - DNA, 617 bp, Homo sapiens
gaaactactgagaacaaaaatacaacataccagaatctctgggacacagctaaagcagtgttaagaggaaagtttatactgctaagtgcccacatcaaaaagttataaagatctcaaattaaccaacctaacattacacatagaggaactagaaaaacaagagcaaaccaaccccaaggctaccagaagacaagaaataactaaaatctgagctgaaccgaatgaaactgagacatgaaaaaccatataaaagatgaacaaatcgaggggttggtcctttgaaagaataaatgacatatatagaccattagctagactaataaagaagaaaggaatgaatatccaaataaatacgatcagaaatgacaaaggggacattaccatcaaccccatagaaatattttttaaaaaaccctcagagactattacaaacacctgtatgcatacaaactagaaaacctagttgaartggataaattcctggaaacacagcctcccaagattgaacaaggaagaaactgaagccctaaacaaaccaataatgagttctgaaattgaatcaggaataaaaagcctaccaaccagaagcagcccaggaccagatggatttacagctg

SEQ ID NO: 930599 - DNA, 781 bp, Homo sapiens
tcatatgtatatatttcattttgaccttgggattctctgcatctcctgaatttaactgttggccattctaatgaggttggaaaatttttccatggacaatatcctatatgttttccaacttgcttgatttctctctctgtctctcagacatgcccatgaattgtagatttggtctctacataattctatatttcttgaaggttttgtttattcttctttattgttttttctttatttttctctgagtgagttatttcatagaaccagtttccaagctcttagattctttcctcagattggtaaattatgctgttaatacttgccattgcattatgaaatttttttagaatgtttttcakctctatcagatttgtttggttctttcttataacgagccatttcacctataagatcctgtattattttattgtaatctttagattccttggattttttttcattttatcctttatgcctgtgaccttcatttctatctatattctgaattctatttttatcatttcagccatctcagtgtggttagaaacccttgctgcaaaatagtgcaggtgtttggagggaaaaagacattctggctttttgagttggcagagtttttgtgctggttctttctcattttggggggtttttattccagcaatctttgaagttgttaatctttggaatttttttcttttatagtattcaatgtccttgggtgtttgattgtggtgtaaggtgggtttagtcaacttaatttgtttctggagaattttagcgg

SEQ ID NO: 930600 - DNA, 604 bp, Homo sapiens
aataggacatgtactttaaaataatcattcaagcaaagtacacacatgatggaaggctttaaaaaagaattggacggcagcagacttggttcttaagcttccaaatgtcagactacaccccttcaccccggctgagaatgacggagatgaacctaaatccttttagcgagggttgcacgaccttgatcaacgcctgaatgccaaataagggattttcatctccctggactacaatttcttgttgaggattgcacggcacaataaaactgttgctccacacacaggcgacatttaaacagtatacagtgagttctgtagacgagtttacgaggaaattgttaaaactccccggaactgcttagacggggaatgttctggtttgccctgccgagtttaggctggaaaacgtgttcagtttctcctgaagagggaaggggtgaaagagacgratgcccgacgcgccgggaggcggtcccctctggcagaggtgccgggtgaggagcccgaagccccgcgggtgagaaaccctgctctgaaagcggagccgcggataagggcgggctgagggggagggcatgcggaccacgaaagtactgccacgggg

SEQ ID NO: 930601 - DNA, 701 bp, Homo sapiens
ttctcgaagactttgctcatttttaaaattctttaatctttatttttgtctgactgggttagtttgtaaaactggtcttcaagctgtgaaatcttttcttttgtttttttggcttgagcttgtctatcgataacattttcaattgtattttgatattccttaagtgagtttattttaattccataaactataaaktttttaatgatggttatctctttcttcatttcttggattgctttagaagtttctttgtgtcaattttcaaccttgtcttggatcttgttgagcttccttgcagtccgttctttgaattctttatctgtcatttctgagtttcactttggttagtgatcattgttagaaaactaatgtgaaccattggtagtgtcactacattcagatttttcatggtactataattcttgtgctggtttattttcatctgaataaactggcacttctaatttttataattattttcatgtgggtgggatttttttctttcttttctacatatatatattttattttcctttcctttctgccttcctaggaattgtgactatagaggatgttgagtagggtcttttgactttgcctttatagccttaggcacctctgttggcaggttttatattatgctgtgcaattcaacccacaaggcagtagatggaagttatgggaaagagctggctgtggcc

SEQ ID NO: 930602 - DNA, 701 bp, Homo sapiens
ttctcgaagactttgctcatttttaaaattctttaatctttatttttgtctgactgggttagtttgtaaaactggtcttcaagctgtgaaatcttttcttttgtttttttggcttgagcttgtctatcgataacattttcaattgtattttgatattccttaagtgagtttattttaattccataaactataaattttttaatgatggttatctctttcttcatttcttggattgctttagaagtttctttgtgtcaattttcaaccttgtcttggatcttgttgagcttccttgcagtccgttctttgaattctttatctgtcatttctgagtttcactttggttagtgatcattgttagaaaactaatgtgaaccattggtagtgtcactacattcagatttttcatggtactataattcttgtgctggtttattttcatctgaataaactggcacttctaatttttataattattttcatgtgggtggratttttttctttcttttctacatatatatattttattttcctttcctttctgccttcctaggaattgtgactatagaggatgttgagtagggtcttttgactttgcctttatagccttaggcacctctgttggcaggttttatattatgctgtgcaattcaacccacaaggcagtagatggaagttatgggaaagagctggctgtggcc

SEQ ID NO: 930603 - DNA, 633 bp, Homo sapiens
acatgcgaaggtgtccaactctctagagatatacctaagtgtggggcagccaggacctcgcttcaccgcagtctctgtacaggaagagtgggcaggcccaggctgctgatttaggtgagcaaatgcttcaaatgcctgaaaatctgcctgggctggagcagagaggggcctcatatactcagatctctgcacagtaagggtggagcaactcaggctgctgttctatgtgagcaggtgctttgaatgcctggagatctgatctgccttggtgcagaacagaggtggtccccctgtaccatgatttatgcccaggaagggtggggtgggtcagtctgctggcaggtgagtgagtgctctgagtgcctggagatctgcctggatggatcaggcaatgggttgcytggggatctgcctggggccccacctgcaccaagatctctgcacagaaagggtcacgctgctcaggatgtcagtctatgcctctgggtgctctgaatgcctggagattaatgcctggagttctgcctggggccggagcagagggtgcactactgtaccatgatctcaggagagcacccgtagactcattccaggtcaccaagctgtccctgactgcaagccttgtcacccagg

SEQ ID NO: 930604 - DNA, 562 bp, Homo sapiens
acatgaactcatcattttttatggctgcatagtattccatggtgtatatgtgtggggtggggggaggggagagggatagcattgggagatatacctaatgctagatgacaagttagtgggtgcagcgcaccagcatggcacatgtatacatatgtaactaacctgcacattgtgcacaggtaccctaaaacttaaagtataataataatagaaataaaaaaagtgaaaaaaaaacaattgctatttcttcaaaattttatgtatttctrtattttccaaattttctataataaaacattaaatacttttgtcattaaaagtcacttaaacaacctaaactgaagcacaaagtgatgtagatgcttctacaaataggtgaacaaatatttatcaaagtctaaaaaattgttccaggtactaggatatagcagtggcaaaacaaagtccataggtaaagaattgtttaaatttgcactaagaatgaaagaagagaactccaaacatacaatgaagcatccatctttacattctgatttactcacacctttgtactagtatgtga

SEQ ID NO: 930605 - DNA, 562 bp, Homo sapiens
acatgaactcatcattttttatggctgcatagtattccatggtgtatatgtgtggggtggggggaggggagagggatagcattgggagatatacctaatgctagatgacaagttagtgggtgcagcgcaccagcatggcacatgtatacatatgtaactaacctgcacattgtgcacaggtaccctaaaacttaaagtataataataatagaaataaaaaaagtgaaaaaaaaacaattgctatttcttcaaaattttatgtatttctatattttccaaattttctataataaaacattaaatacttttgtcattaaaagtcacttaaacaacctaaactgaagcacaaagtgatgtagatgcttctacaaataggtgaacaaatatttatcaaagtctaaaaaattgttccaggtactaggayatagcagtggcaaaacaaagtccataggtaaagaattgtttaaatttgcactaagaatgaaagaagagaactccaaacatacaatgaagcatccatctttacattctgatttactcacacctttgtactagtatgtga

SEQ ID NO: 930606 - DNA, 634 bp, Homo sapiens
atgttaagttaaataagccagatatggaaacacaaatactgtgtagtctcacttatatgggaaatctataaaagttgatataaaagcatagagttgtatggcagttgccagggatgagggttggaggcaattaagtagatgttggtcaaaacatacaaactttttgtctttcagtttgaaagacaaataagttctggggatctaatgtacagcatggtgactgtcgttaatactgtattgattacgtgaaattagctaggagaagagttattatgtgtcctcaccacacactcacacttacatacacaaacagtgactatgaatggtgatggatatattgattaatttgattgtagtagtcattacacaatgcatatgtatcccaaatcatcatattacatctttaatataaaccattttaatttgtcaattayactttgacaaagctggggaaaaaagaaagaaaagctgaaaagaatcttaaaatattaaaggaaaattcattgagatgttttcatacttttgtgacaatttacatccccttattagtctttagagagaaatcttgctcaatttaaattattaaatattctcataaacaatatttttcatgtattattcagaaaagaaatga

SEQ ID NO: 930607 - DNA, 542 bp, Homo sapiens
gtaaattggtgccaggtagtggggtgctgctgaaatgatacctgaaaatgtgactctggaactgggtaacaggcagaggttggaacagcttggagggctcagaagaagaaaggaagacgtgagaaagcttggaacttcctagagacttgttgaatagctttgactaaaatgmtgatagtgatatggacaataaaatccgggctgaggtgaactcagatggagatgaggaacttgttggaaactggagcaaaggtgacttgctatgttttagccaagagactggtggatttttgcccctgcataaagatttgtggaactttggacttgagagagatagtttaaaggcatctggctgaagaaatttttaagcagcaaagcattcaagaggtgatttgggtatagttaaaggcattcagttttatgtattcacatatatatggtttggaattggaacttctttttaaaagggaagcagagaataaactttcagaaaattttctgcctgacaatgcaatagaaaagaaaaatcaattttctgagga

SEQ ID NO: 930608 - DNA, 597 bp, Homo sapiens
tttataaattacccagtttcaattatgtctttattagcagcatgaaaagagattaatacagtaaattggtgccaggtagtggggtgctgctgaaatgatacctgaaaatgtgactctggaactgggtaacaggcagaggttggaacagcttggagggctcagaagaagaaaggaagacgtgagaaagcttggaacttcctagagacttgttgaatagctttgactaaaatgctgatagtgatatggacaataaaatccgggctgaggtgaactcagatggagatgaggaacttgttggaaactgragcaaaggtgacttgctatgttttagccaagagactggtggatttttgcccctgcataaagatttgtggaactttggacttgagagagatagtttaaaggcatctggctgaagaaatttttaagcagcaaagcattcaagaggtgatttgggtatagttaaaggcattcagttttatgtattcacatatatatggtttggaattggaacttctttttaaaagggaagcagagaataaactttcagaaaattttctgcctgacaatgcaatagaaaagaaaaatcaattttct

SEQ ID NO: 930609 - DNA, 542 bp, Homo sapiens
gtaaattggtgccaggtagtggggtgctgctgaaatgatacctgaaaatgtgactctggaactgggtaacaggcagaggttggaacagcttggagggctcagaagaagaaaggaagacgtgagaaagcttggaacttcctagagacttgttgaatagctttgactaaaatgctgatagtgatatggacaataaaatccgggctgaggtgaactcagatggagatgaggaacttgttggaaactggagcaaaggtgacttgctatgttttagccaagagactggtggatttttgcccctgcataaagatttgtggaactttggacttgagagagatagtttaaaggcatctggctgaagaaatttytaagcagcaaagcattcaagaggtgatttgggtatagttaaaggcattcagttttatgtattcacatatatatggtttggaattggaacttctttttaaaagggaagcagagaataaactttcagaaaattttctgcctgacaatgcaatagaaaagaaaaatcaattttctgagga

SEQ ID NO: 930610 - DNA, 390 bp, Homo sapiens
gcagccaggagaggggctgtaccttgcaaagtcataggggtggagctgaccaaggtcgtgggagtctacctcttacatcagcctaatctggatgtgagccatggagtcaaaggagatcattttggaactttaaggtttattgactgccccattggatttgtcttgaatggagcctctagccccttttgyttcaaccatttttttcccatttggaatgggtgtctatacccaatgcctgtactcccactgtatctagtaagtaataactgactttcaattttacatgctcacaggcagaagggacttgccttatttcagatgagactttggacttggacttttgggttaatgctggattaagttaagactttgggggactgttggaagcac

SEQ ID NO: 930611 - DNA, 586 bp, Homo sapiens
ttctcagtgaattttatcatcaatacaacagctaaattaatataatatatcaaagagcatcttgaataaaattgagacccacttctgccaaatgaatatttcctgagcagaattaattactctatactttttaaattaatcaagcaaatgttttagaaacatcaaaaaactgtgtatacatagtatttattcttttaacaatgatattccctactgaataatattttgatgaatagaatttctcttttataaaaaggatagggagacattggatatgataagaatgctgtgaagtttaatatttcacaatttaacaaggaagtacgttttactgtatttttgtacctacacatgctattcatcaacmagctctttacaacatggtcattttttttgcccaaactggaacagttagaacaaatatttgttgaagttagttacagagaatagaaccaagtttaagcagaacaagatttatcacaggatgttaaatggcttgctgaatctttgggattgctcaagaaacagatgctaggttgaactttcaaggaccagtacaaaagctacactcctgaagtgagctgcc

SEQ ID NO: 930612 - DNA, 586 bp, Homo sapiens
ttctcagtgaattttatcatcaatacaacagctaaattaatataatatatcaaagagcatcttgaataaaattgagacccacttctgccaaatgaatatttcctgagcagaattaattactctatactttttaaattaatcaagcaaatgttttagaaacatcaaaaaactgtgtatacatagtatttattcttttaacaatgatattccctactgaataatattttgatgaatagaatttctcttttataaaaaggatagggagacattggatatgataagaatgctgtgaagtttaatatttcacaatttaacaaggaagtacgttttactgtatttttgtacctacacatgctattcatcaaccagctctttacaacatggtcattttttttgcccaaactggaacagttagaacaaatwtttgttgaagttagttacagagaatagaaccaagtttaagcagaacaagatttatcacaggatgttaaatggcttgctgaatctttgggattgctcaagaaacagatgctaggttgaactttcaaggaccagtacaaaagctacactcctgaagtgagctgcc

SEQ ID NO: 930613 - DNA, 475 bp, Homo sapiens
tttgtgtatgttgaaccagccttgcatcccagtgatgaagccaacttgatcatggtggataagttttttaatgtgctgctggattcggtttaccagtattttattgaggattttcacatagaagttcatcagggatattggcctaaagttttcattttttgttgtgtctcttcctgattttggcatcaggatgatgctggctccacaaaataatgtgttacgggggagtccctccttttcaattgtttggaatagtttcagaagaaatggtaccagctcttctttgtatctctggyagaatttgtctgtgaatctgtctggtcacaggctttttttggttggtaggctattaattaccacctcaatttcagaacttgttattggtctattcagggatttgacttcttcctggcagggtgtatgtgtccacccatttcttctagattttctggtttatttgcatagatgtgtttat

SEQ ID NO: 930614 - DNA, 602 bp, Homo sapiens
tgtaatcccagcactgcgggaggccgaggtgggtggatcacttgaggtcaggagttcaagaccagcccgaccaacatggtgaaacccccatctctactaaaattacaaaaattagccagcatggtggtgtgcgcttgtaatcccaggtactcgggaggctgaagcacaagaattgcttgaacccaggaggcagggactgcagtgggctgagatcatgccactgcactccagcctggctggaagaacgagacyctgtctcaaaaaaaaaaaaaaaactggccaggtatggtggctcatgcttgtaatcctagcactttgggaggccaaggtgggtggattgcctgagctcaggggttcgagaccagcctgggcaacaaggtgaaaccccgtctctactaaaatacaaaaaattggccaggcgtagtggcttacgcctgtaatcccagcactttgggaggccgaggcgggtatatcacgaggtcaggagatagaggccatcctggcgaacatggtgaaaccccgtctgtactaaaaatacaaaaattagctgggcgtggtggcgggtgcctgtagtcccagctacttgggaggctgagggagag

SEQ ID NO: 930615 - DNA, 602 bp, Homo sapiens
tgtaatcccagcactgcgggaggccgaggtgggtggatcacttgaggtcaggagttcaagaccagcccgaccaacatggtgaaacccccatctctactaaaattacaaaaattagccagcatggtggtgtgcgcttgtaatcccaggtactcgggaggctgaagcacaagaattgcttgaacccaggaggcagggactgcagtgggctgagatcatgccactgcactccagcctggctggaagaacgagactctgtctcaaaaaaaaaaaaaaaactggccaggtatggtgsctcatgcttgtaatcctagcactttgggaggccaaggtgggtggattgcctgagctcaggggttcgagaccagcctgggcaacaaggtgaaaccccgtctctactaaaatacaaaaaattggccaggcgtagtggcttacgcctgtaatcccagcactttgggaggccgaggcgggtatatcacgaggtcaggagatagaggccatcctggcgaacatggtgaaaccccgtctgtactaaaaatacaaaaattagctgggcgtggtggcgggtgcctgtagtcccagctacttgggaggctgagggagag

SEQ ID NO: 930616 - DNA, 603 bp, Homo sapiens
attcttgattttatatcattctcagaaataactgtggctggggacggcctttcaggaagctgatatgacatattactattaatataactaagtttataaccccagacagagaaagtttgaagacatagttttgcaaggaaaagaggaagagatgaatgttgattggaggaatctatgctttaaaatatgagaagtaaatgtatagattgcggcaagacattaagagtagtgtctctcaagtattagaaagatgataacgaaagatggaaagaatagggttgggtttgtgtgataaacaccaagcttttcattacgtctgaatcaaagattgtgtttatctgacagtggcaagattccaaggaaagttaagactgggaatgaaaataggagtatgccttggatttcaggctaagcagtcttaaatcaattcagttatcagtaaggaatcatttaagarttttaaggatgctagtggtataaatttttttgtatattcatgctgtttccaagttatggatttgataaacctgatacttacttttatttcctgatccagatagtttggtatgcaaatggtgtttgctttcacatcattcttggtac

SEQ ID NO: 930617 - DNA, 611 bp, Homo sapiens
tcccctttgtcttggcaaattcctgctcattttttagggtttagttttatcttcaatcctccagaatatctcctctgatctcaatgtgtctgctgtctctttgtaacctggtataagtctcttttcgtgtatcatgttatcatttaattttctgtttatgtgtttgttctttcacaggtctattcatctamctccagccgctggcagagaagctaacaagaatagagatccaccagtgtttcttttcttttctttccttttttttttttgaggttctcgatactcgatttttaaaaaataatttttctctttctttttctttttcctttttttaatttcaatagatttgtgggaaacaggtggtgtttggttacatgaataagttctttagtggtgagttctgagatcttggagcacccatcacttgagcggtgtacactgtaccacccttctcccaccctttcccctgagtccccaaagttcactgtaccattgttatgcttttgcgtcctcatttgcgttcccacttatgagtgagaacatacagtgtttggttttccattcctgagttacttcacttagaataatggtctctaattccatccagtttg

SEQ ID NO: 930618 - DNA, 611 bp, Homo sapiens
tcccctttgtcttggcaaattcctgctcattttttagggtttagttttatcttcaatcctccagaatatctcctctgatctcaatgtgtctgctgtctctttgtaacctggtataagtctcttttcgtgtatcatgttatcatttaattttctgtttatgtgtttgttctttcacaggtctattcatctacctccagccgctggcagagaagctaacaagaatagagatccaccagtgtttcttttcttttctttccttttttttttttgaggttctcsatactcgatttttaaaaaataatttttctctttctttttctttttcctttttttaatttcaatagatttgtgggaaacaggtggtgtttggttacatgaataagttctttagtggtgagttctgagatcttggagcacccatcacttgagcggtgtacactgtaccacccttctcccaccctttcccctgagtccccaaagttcactgtaccattgttatgcttttgcgtcctcatttgcgttcccacttatgagtgagaacatacagtgtttggttttccattcctgagttacttcacttagaataatggtctctaattccatccagtttg

SEQ ID NO: 930619 - DNA, 631 bp, Homo sapiens
tctcttcctatttgaataccctttatttctttctcttgcctgattgcccttgccagaacttgcaatatagtgtggaataggagtggtgagagatggcatccttgtcttgtaccagttttcaaagggaatgcttccagcttttgcccattcaatatgatattggctgtgacttgtcataaatggctcttattattttgagatatgttccatcagtacctagtttactgagagtttttaacatgaaggaatgtcgacttttatcaaaggccttttctacatctattgagataatcatgtagtttttctctttggttctatttgtgtgatggattatgtttattgatttgcatatgttgaaccagccttgcatcccaggggtaaagctgacttgatcgtggtggataagctttttgatgtgctgctggattcagtttgccagygttttattgagtattttcacatcaatgttcatcagggatattgacctgaagttttcattttttgttgtctcttcccagtttttgtatcaggatgaagctggcttcataaaatgagttagggaggagtccctccttttcaattgtttggaataatttcagaaggaatggtaccagcacctttatgtatttct

SEQ ID NO: 930620 - DNA, 666 bp, Homo sapiens
gcataagacttgacatttgactgaagaataaatatgcatttatgcacatgaaaagatgctcaacatctttttaccattaggaaagtgcaaattaaaatcacaatgagataccactatatacccactagaatggctgtaatcaaaaagtattggtgaaaatgtgtagaagctggaaggaaccctcatacattgctgatagacatgtaaaatggtatagctactagctttgcaaaagcattttggcagtttcctacaaagttaaacatactcttagcctataacctagcaattttattcctgagtatctacctaagagaaatgaaaacatgttcacccatagatttgtrcacagttcatatctgtattattcataatagccaaaaaaatgaaaactatttaaacgtccattaacattttgtaaatgaatacacaactgtgttgtatccatgtgagaatactactgagcataaaaaggaataaactactgataatgcagccatgtagatgaacttcaaaaataccatgctcaatgaaagaagccagacccaaaagaccacatattatgttgttttatttatatgaaatttgtagaaatagcagaactagagaggcagaaagcagatttgtggttggctggggagttggagtgggagcagagattgactg

SEQ ID NO: 930621 - DNA, 645 bp, Homo sapiens
agagcataagacttgacatttgactgaagaataaatatgcatttatgcacatgaaaagatgctcaacatctttttaccattaggaaagtgcaaattaaaatcacaatgagataccactatatacccactagaatggctgtaatcaaaaagtattggtgaaaatgtgtagaagctggaaggaaccctcatacattgctgatagacatgtaaaatggtatagctactagctttgcaaaagcattttggcagtttcctacaaagttaaacatactcttagcctataacctagcaattttattcctgagtatctacctaagagaaatgaaaacatgttcacccatagatttgtacacagttcatatctgtattattcatamtagccaaaaaaatgaaaactatttaaacgtccattaacattttgtaaatgaatacacaactgtgttgtatccatgtgagaatactactgagcataaaaaggaataaactactgataatgcagccatgtagatgaacttcaaaaataccatgctcaatgaaagaagccagacccaaaagaccacatattatgttgttttatttatatgaaatttgtagaaatagcagaactagagaggcagaaagcagatttgtggttggctggggagt

SEQ ID NO: 930622 - DNA, 626 bp, Homo sapiens
gagtttatgctaatgaggtgactcttggatgatggaggctgattgccagagaaaccaaccacataattagtgggttgggattttcagtcccatccctcaacctccaagtaggggagagggggctggagtttaagtgcaatcaccaatggccaatggtttaatcaatcacacctacctaatgaagctccataaaaacccctaacaatggaatttggagagcttccaggttagcaaacacaaggaggtactaggagggtggtgcacctggagagggcatgaaagctctgcactcttcccctataccttaccctatgcgtctctcccatttagyttgccccacatatcctttataataaaaccagtaatagtaaatagagtgttttcctgagttctgtgagccattctagaaaattatcaaacctcaagagggaattgtgggaaccctcaacttatagccacttagtcagaagttacaggtcacaacctgggacttgcaactggtgactgaagtcaggggcagtctttggatactcagcccttaacctgtgggagcctgtgctagctccaggtagtgtcagaaatgacttaaattggccagatataatggctcacacctgtaatcccag

SEQ ID NO: 930623 - DNA, 733 bp, Homo sapiens
tgtccttaaggacctttttcctgctcactcctgatgacagacattggcatgagacctagagaggtcagtgttcggttgcctgcccccagagctcacatcctgccacaatgagtagacgaaaaggcatgactcaccaaccacccttcacatccctatcatctagttccccagtcaaggatagaaatgcaatgtgtttcttcttcctcccttcctgaaatcttgagttctcataaattcttaaattcttaagaagttagaaaactcttctttcctacccatcccaatgagctcatcctgtggcacttccaatcacttgttcttttcttccttcctcccacccttccctgcaacccctccccagccacgccccagttccagaactcctgacctgcagcagagaagtcactgcatyggcccctcagaagcctctcagatctgacctcggggctctacttcttgtgctttctgagccatgtgaccgtacctgagcaatgaggagaacctgaattttcatgtaaatacttaatgaattttccagcctgatagtgtgtctccttggactctatcctgtccttacctgtggttgtttagaaccggggcaccttgatcccttggaaatctgatgggaaggagatcaattatcaggtactgtcaactcccaggaagatagtatcttcccctcttgctgatgcctgaagttccactctgagagtcccctcatattttgcttaat

SEQ ID NO: 930624 - DNA, 543 bp, Homo sapiens
gggtcaaaggatcctcctgcctcagcctcccgagtagctgggactacagacacatgccaccatgcctggcttctttttggctttttgaaaacattttgccactagcttactgttactttcttcaccattacttccatcatgattcttggatgatttcagtatccttagagaagatccttcagatacactgacctgtcattttctggacctcctctttatcactgatcttaccttttacccagtctcagccatttgctttcctgatcataagcctaagtcttgtcactaccaataacatctcactttcaaacatcctgctctgactgccttcgcctgttttaccagcttacttcctttagtattccagtttcaatagttgttcagtccttctgagrttttgccatgtttccagtgtctctcattctcttcagttcatcacgtccctcttacccagtttaaataccatggacagtcattgtcactatttccttcctttcacctttcatattcatgtctgtctcttttctggtaggtttctcttgg

SEQ ID NO: 930625 - DNA, 644 bp, Homo sapiens
ttctatcagacattcaaagaagaattggtaccaatactattgacgctactccaaaagatagagaaagagggaatcctccctaaatcattctatgaagccagtataaccctaataccaaaaccaggaaaggacatgacaaagaatgaagactgcagaccaatatccttgatgaacatagatgtaaaaattctcaaaaaaaatgctacctcaccgaaccccacagcatatcaaaaaaataagccaccatcttcaagtgggtttcataacagggaggcggagttggtttaaaataagcaagkcaataaatgtgattcaccacataaacagaattaaaaacaaaaatcacataatcatcttgacagatgcagaaaaagcatttgacagaatcagcacctctttatgattaaaaacctcagtaaaatcagcatagaagggacataacttaaggtaaaaaaagccatttatgacaaacgcacagccaacattatactgaatgaagagtagttgaacgcattctccctgagaagtgaaacaagacaaggatgcccattttcaccaattctattcaacatagtagtggaattcttagccagagccatcagacaagagaaagaaagggtgtccttatccataaagaggaagtc

SEQ ID NO: 930626 - DNA, 610 bp, Homo sapiens
tctacagctcccagcctgagcgacacagaggatgggtgatttctgcatttccatctgaggtactgggttcatctcactagggagtgccagacagtgggtgcaggacagtgggtgcagcgcaccattcatgagccaaagcaggctgaggcattgcctcacttgggaagcacaaggggtcagggatttgcctttcctagccaaagaaaggggtgacagacagcacctggaatatcgggtcactcccaccctaatactgcacttttccaacaggcttgaaaaacgggacaccaggagattatatcctgcacatggctcagagggtcctacgcccatggagtgtcactgattgctagcacagcagtctgagatcaaactgcaaggccgcagtgaggctgggggaggggtgcctgccattgcccaggcttgattagggaaacaaagcagccaggaagctcgaactgggtggagmccaccacagctcaaagaggcctgcctgcctctgtaggctccacctgtgggggcagggcacagacaaacaaaaagacagcagtaacctctgcaggcttaaatgtccatctgacagctttgaagagagtagtggttctccctg

SEQ ID NO: 930627 - DNA, 782 bp, Homo sapiens
ttcctttttattgctgactagcatgctattatttggatattcaataatttgtttctttagtaaatgcattcgtggcattggtatttcttttacattactgataaagctattatgaccattcatgtacatgtctttgtatagccatatgctttcattcctttggacaaatacctaggaaggggtggctacatgacatataagtgtttatataacattttaaaagactgttttccaaagtagttgtactgttttacctttctatcagcagagatgagasttctagttcctccaaatcctcaccaacatttgttatggtcagtcttttttattttagccattttaataggtgtgtaatggtatctgattatggttttaatttgcaaccacttaataacattgaacatcttatgtgcttatttgccatctatatatcttttttgctatttccaatatttttgcccattttaaaaaatggagttgcttgtttaatgttgaattttgagaatctatattttctggatacaagaccatttttagatacatactttgaaaatattttttcccagtgtgtgtcttctaattttaatgaagctcggtgtatcaatttttagtagaattcactttctttaataggtatggagctattcagaatagtttttctttttcttttctttttttttttttttttgagatggactctcgctctgttgcccaggctgaagtgcagtggtgtgatctcatctcactgcaacctccgcttcctgggttcaagtgattttcct

SEQ ID NO: 930628 - DNA, 739 bp, Homo sapiens
ccaccacacctggctcattgttgtatttttagtagagacagtatttcaccatgttggccagggtggtctcgaactcctgatctcaggagatctgcccgcctcagcatcccaaagtgctgggattacaggcatgagccaccactcctggcctcaattgctatgcattctaatgaaaacttggtattaacagtctaattttagtcctactgttggatgtgtcttattakgcttttattccacatctctgtaattattaaggaagttgaacaacttttcatatgtttattggccatattaaaattctttcttaaagtgcccatttaatctcttgcccatttccctttgaggtttagtctttcttttatggactagtatatgcttttcatatattttggatatgtgccctttggcagatatgttagcaaataccttcacccatctgtagcttgcctttggaatttctcagagatacctactgataaagagaaggtcttaattttgttgtagaccaatttagtctagtcctttttaagcattactggattttatttgctaatattttgttaagagtttggttttccacttatgtttctgagtgaaattggcctgtaattctcttgtataatgcctttttttttttaagaaggcactgcagtggctggtatatagcattcttgtgaatatatctaactgggatacaagttgaggtagaaatatttcaaatgtccttaaaaaaata

SEQ ID NO: 930629 - DNA, 691 bp, Homo sapiens
cagaactaaatgacattcaaacaaacaaaaaacaataccaaagataaatgaaacgaaaacctggtccattgacaagagaaagaaaatggatagaccattagtgagattaaccatgaaaagaagagagaagatccaaataagctcagttagaaacaaaatgggagatattacaaccaatacgacagaaacacaaaagaccattcaaggccattatgaacacctttatgtgcacaaactagaaaactgagaggagatagataaattgctgaaaacatacagccctcctagattaaaccaggaagaaatagaaactttgggctgggcgcagtggctcacgtctgtaatcccaggactttgggaggcygaggtgggcagatcacgaggtcaggagatcgaaaccatcctggctaacatggtaaaaccccatctctactaaaaatacaaaaaattagccaggaacagtggcaggtgcctgtagtcccagctactcggaaggctgaggcaggagaatggcgtgaaccagggaggcagagcttgcagtgagccgagatagtgacactgcactctggcctgggcgaaagagtgagactcctcctcaaaaaaaaaaaagaaatagaaactttgaacagaccaataacaagcagcaagataaaaataatgataatataaaaattgccagcaacaagaaagt

SEQ ID NO: 930630 - DNA, 625 bp, Homo sapiens
ctttgaaactaatgagaacaaagagacaatgtaccagaatctctgcaaggcaggctaaaggattgttaagagggaaacttacagcactaaatgcccacatcaaaaagctagaaagatctcaagttaacaacctaacatcacaactaaaagaactatagaaccaaaaacaaacaaaccccaaagctagcagaagatgagaaataayaaagatcagggctgaactgaaggagacagagacacaaaaaaccattcaaaaaatcaacaaatccagaagttggctttttgaaaaaatgagaaaaatagagagactgctagctagactagtaaagaagaaaagagagaagaatcaaataaacacaataaaaaatgataaaggggatatcatcactgaccccaaagcaatacaaacaaccatcagagaatactataaatatctctatgtacataaactagaaaatatagaagaaatggataaattcctggacacttacacactcccaagactgagccaggaagaagttgaatttttgaacagaccaataacaagttctgaaattgaggcagtactaaatagcctaccaaccaaaaacaaaacaaaacaaaacaaaacaaaagccaggaccag

SEQ ID NO: 930631 - DNA, 499 bp, Homo sapiens
agattttatgtaatttatgtagctttgattatttgtattttagctttctttaaataactcaccaagaactgttgaaaacaccctctctttctcatagagaaaatatatttcttagtttgtggaaggacttgctagctctctaacatattgtaggtgacattttgtgtgacagcaaaaatatgtgaaaattgtattatgtaaatgatattttataaattaactgcaawtaaaaatgatagtctctcagatgttattttacttttataggataacatcagtgactatcatattagcaactaaaaatgcagccaggcatggttaatcccagcactttgggaggccagggtgggcagattgcttgaggccaggagttcgagatcagcctgggcaacatggtaaaatcccatctctactaaaaatgcaaaaattagctgggcatggtggcatatgcctgtaatcccagctattcaggaggctgaggcacaagaatcgcttgaac

SEQ ID NO: 930632 - DNA, 482 bp, Homo sapiens
ttagtctggctagtggtctatgtattttttaatcttttttaaaaaacaattcttggattatttgatattttgaagggtttttcatgtctgtctccttcagttctgctctgatcttagtcagccttcttgtcttctgctagcttttgaatgtgttttctcttgcttctctagttcttttaattgtgatgttaggatgtcaattatagatctttcccgctttctcctgtgggcatttagtgctataaatttccctscaaacactgcttccgcagtttcccagagattctggtacgttgtgcctttgttcccattagtttcaaataacttatttatttctgccttaatttcgttatttacccagtagtcattcaggagcaggttgttcagtttccatgtagttgtgcagctctgagtgagtttcttaatcctaagttctaatttgattgcactgtggtctgaaagactgtttgttatgatttccg

SEQ ID NO: 930633 - DNA, 558 bp, Homo sapiens
aaatgaatttgtgaattttaagagaaaatctaaattcaatacctctactcctgggtggttttgatctacatggcatttatttgttggtttgcttttcagttccctcccctgctcttttctgtgtcactgaggggactggctcttgcaaactatatttcccaggcttctctgtcaattgttcccaggtagsttcagccaccaaaaggcactagcactaaagagaagaagccaaggtatttctgcccctttctcttcttgggaggaaggggatgcatctctagcagtggctgcgtctcttctgtacttccagctcccatcatacagcccctcctccccatggccccaaatcccacctacctagctggcagaggttcccactcctaccaagtggctaatgtttctgggctccgggtaggctcatcctttctttatccttccatccctatgggcgtagcagcgcctgcagttgctaatctttgggttttctcactttcttcttttcttccctttttcaacttttctgtgtattgtttcctgtatcaaattccctctgttggc

SEQ ID NO: 930634 - DNA, 596 bp, Homo sapiens
tcctctgatggaaaatctatctcaggagccatgtacaaaaccatgatttattctaaagcctagttccgaaaggaggtatgtttgttttcccccttaattatttgagagcatttctgaaagatactctttcctatgtcttattttcctggtattttgtagtatttgaaataagattatattcagaacattaacagcaatcaaaaagctaagtctgggccaggcacagtggctcacagctgtaatcccaacacaatgggaagcgaggcaggaggatcatttaatccatgtcaaaaaaaaaaaaaaaaaaaccaaaacctaagtatgcccaatattggaaagacgccaactgttcctaaattgatctatcgatgtgatgtaattcctgtcaaaatcctaactggttttttttttttttttcatgaaaatagacagttgattacaagattygtatgaaaatgcaaagggccaaaaatggcccataccatcctaaggaaaaacaaggtgggaagacctttttcagcagacatcaagacttaatggccagacacagtggctcacacctgtacttccagcactttaggaggccgaggcaggct

SEQ ID NO: 930635 - DNA, 753 bp, Homo sapiens
tctaaaggccaaccccgaagccaggaagaatctgaggaaggtgaggaagatgccacctctgaggtggacaaacgacgcacgaggcccagacaccaccacgggaggagcaggcccgacaggtcctctcaaggagggagtcttccctctgaggaaaagggacacccccaggaggaatctgaggagtcaaacgtcagcatggccagtttaggggaaaagagggaccaccattcaacccactacagggcttcagaggaagaacctgaatatggagaagaaataaagggttatccaggcgtccagggccctgaggacctggagtgggagcgctataggggcagaggaagtgaggaatacagggctccaagacctcagagtgaggagagttgggatgaggaggacaagagaaactaccccagcttagagcttgataagatggcacatggatatggtgaagaaagtgaggaagagaggggccttgagcygggaaagggacgccatcacagaggcaggggaggggagccacgtgcctatttcatgtctgacaccagagaagagaaaaggttcttgggtgaaggacaccaccgtgtccaagaaaaccagatggacaaggcaaggaggcatccacaaggtgcgtggaaagagctggacagaaattatctcaactacggtgaggaaggagccccagggaagtggcagcagcagggagacctgcaggacactaaagaaaacagggaggaagctaggtttcaagat

SEQ ID NO: 930636 - DNA, 642 bp, Homo sapiens
attttgtccagttttatagccatttatagcagaagggcaaatttggtatagttaactctgccattgccagaggctgttcacttagatttgtcttgtaacatttttctgtagtaagtaaaggcagggatcctgtacccattttataggttaaataatgcagagttgccaagaaataagagggttggaatcacatactgggttggttggtaggtaggtcatatgatccaggaactcttggtccttgcaaggagataggaggaaatgctcaaatttgtctccccaaatgggggcctgggttgaggtttataagcatatggtaatgaggcgtgaatgaggtgactggattgatcttggaatgaggtgattgattggatcttacaataaggygatgatgttgggggtcatgatctaactggaatccaccatggggtgactccagggctcaatctgattggatcctggatcctgccatgcagtgtccacttctgttttgttttgttttgttgagatggagtcttgctccattgtccaggctggagtgcagtggcatgatctcagctcactgcaacctctgcctcctgggttcaagcaattcttgggcctcagcctcccaagtagctgggactacaggtgtgcgccatc

SEQ ID NO: 930637 - DNA, 618 bp, Homo sapiens
cacagaacattgtcagtaaacagaacaaggataacagtaatatccaattaaggatatgctatatcagcatagaaaccaataaattttgtcttagggttgcatttaggacagtgaacaaaattcacttggacacttaaaatgcaggcaagaatacacagaatgagtgacctcattgtgaatagtcagcattatgagagctatcaaaatctatgggaatctatacattatcaaacaaaacttaaatgtctcccatgaaatgtttccacataagcaaaactatcaaaattatcaaatggaaattataaaacatctactgagttagaaaatgtttcaagtttccacagaagatgtaaaagtgggatacaagtttaccacatcatatatgattacatccaattaaaacactgtatccactcaaattcctagtcaaaggagttatatgccttgtcaatgtactrataccctaaagagtaaaatttaatggatgacttggctggatcaggaagaatttcaaaactactaaatttgaaaaaagaattataaagacatttgtaaagaacttagttttattaggtcaatggcagaaatacaatgtgaaaaataaaaatttaacataaa

SEQ ID NO: 930638 - DNA, 618 bp, Homo sapiens
ctttctctttaaatctgttttgtactttcctggttatgttatgacattcacagatcagtaaatcccaatctggaggaataggtgtcagaaatgagacagttaagtcaagatgggattgagcttaatgtcacagttcctagtctgggcaaaccccaaggcacaaaccttttactttttctctctttcagtaacatgagaaaacaaccccaatcttacaaaattaaatgtttccccaggctaaggtstgcagcaaaagttattggcaggcaagctgcctcagtacagcttaaactgcttcttaagatggaggattctgaggcaacctcttgttccattacctctcccagcagccctccaacccccgcccacacctttaccacacacatacacattataggacctcaggctacttctaaatgttatttacattttaggattagtcttagaattgtctaggataatatctggtcttctgagaatcatcaaataaaacaacttatctttagcttgtagacttgatacagatcctccttatgctactctgtctcttcttatcctattctgcctttagaatccagacagtatgctcaaagtcaaatgattaagaaaagctattga

SEQ ID NO: 930639 - DNA, 591 bp, Homo sapiens
caacggttccttccctctcccacctgccccaaaacaccttcttcccttggtgtccaggccaccacccacccaggcgtttctacagcctgcttgatcctgcaaaaggccgactcttctctttctaccctgctccctcagggtctcaggcagcctcaaagctttgaatgcgatattttatgwtgattactctaacgtttacatctctagcctggatctctctcttgaattctagactagaatttccggttgcctagtgagggtctgcatgaggaagtctcataggcacctcagacttcacatgtacaaaaccaagctcctgccccttcccctggatgcctgcttttcccaaagccttccccatcttcctgtcactcaggacaaatgccttggtgacaccttccactcctcccctctcctcaccccctacatcacgccccacatcaatgctgtggcccccactcctatccagaatctgacaacttatctctgccctcatggctactccctttcccagcccccgtcgcctccagcctggattgattgttgccatggcctcctgcaggctgcccctgtgccctgcatctatgcaca

SEQ ID NO: 930640 - DNA, 702 bp, Homo sapiens
ggcaccaagtccctaagctgcacacagcacagggacccagggcctggcccacaaaaccattttttcctcctgggcatctgggcttgtgatgggaggagctgctgtgaagacctctgacatgtcccagagacattttccccattgtcttggggattaacaygcggctccttgttacttatgcaaatttttgcagccagcttgaatttctccttagaaaatgggattttcttttctatcacattgtcaggctgcaaattttctgaacttttatgtttagtttaccttttaaaactgaatgcctttaacagcacataagttacctctttactgctttgctgcttagaaatttcttcctgcagataccctaaatcatctctctcaagttgaaagttccacaaatctctagggcaggggcaaaatgccaccagtctctctgataaaacataacaagagtcatcattgctccagttcccaacaagttcctcacctccatctgagactatctcagcctggatttaattgtccatatcattatcagccttttggttaaagctattcaacaagtctctaagaagttccaaactttcctgcattttcctgtcatcttctgaaccctccaaactgttccaacctctgcctgttacccagctccaaagtggcttctacattttcaggtatcttttcagtggtgccccactctac

SEQ ID NO: 930641 - DNA, 613 bp, Homo sapiens
aaacactcaagctcacagtggaaaatagaagtttttcaatattcaaattttcctgtgaaagctcaaatgttatccttggttgtgtataacatcaataatttgtttttttggagtgatagggtcactttgttcattttccagaaaatgtctgccaaactcccaattctgaataacaattttcagttattcctttgagtaaaaatgatgwtcagatcacaactcaattgcacagtgtttttggaataaccactgttttttaatgcccagcctaagtgctttatttgtatttccccttttgtcatacagcatatttttaagttcaataattgagtcaaaatttaataaaatttataatcttaatagcctcattaaagacattcttgaataaaattttcttttttaaaaaaagctgtaagtgcctggctgtgaagactacaataatgatgtatgtatttctgcgccactgtcttgattggtgctgtttaatctaccatggattgcataaaatcagtaccatgtcagcatacagaaaaagccaaataatgtcatagtatattttgaaaatatatttgacttcctggaacccttgaagggatcctaagaaccctcaggg

SEQ ID NO: 930642 - DNA, 813 bp, Homo sapiens
caagggtgtgaaaatgacagaagggaggctcagagaaggcactgagagaaggctagactggtggaacccagcaagtgaggtgcagccaggggcaatacaaggcctggggccttgcagggccttgaagagccttgtaggggcttgtggaccacattaaaatttgagtttttattctgactgaaataggtaggaagacacagaaggaatttaaggacaggaaatacataatgagaattgtatttttaaaagactattctgttctatttgtggaatggtgaacagattggaagggggtaggagaagatgccagcagacaaatttagaggccactacaggggcccagagaaggggcaatggcagtytgagggtggggaggcagcagtggagaaggagagaagtgggagggagaactggtgagttctttaagagggtggattgacagtcttttgtattatgggggctgcaggagagggaggtgctgagaagactccttggattctgagttgtacatccagatggagactggtgccattcactgacatagaaggcactcgaaggatggacttattttctgtacttgtccacacttttatgtatgtgtgactctcaaattctaaggataattttaatttgaggatgtttaagaatagtaatgtgtaagaggtggtttgatggctctgggaaatgagaaaacggcaacctggtattttctgtcacttatggatctgcactgttactaaaaaacatgacttagcgggtggagctggacacacatcacccccaagtggaccacagggaatgaggttcttaggc

SEQ ID NO: 930643 - DNA, 813 bp, Homo sapiens
caagggtgtgaaaatgacagaagggaggctcagagaaggcactgagagaaggctagactggtggaacccagcaagtgaggtgcagccaggggcaatacaaggcctggggccttgcagggccttgaagagccttgtaggggcttgtggaccacattaaaatttgagtttttattctgactgaaataggtaggaagacacagaaggaatttaaggacaggaaatacataatgagaattgtatttttaaaagactattctgttctatttgtggaatggtgaacagattggaagggggtaggagaagatgccagcagacaaatttagaggccactacaggggcccagagaaggggcaatggcagtttgagggtggggaggcagcagtggagaaggagagaagtgggagggagaactggtgagttctttaagagggtggattgacagtcttttgtattatgggggctgcaggagagggaggtgctgagaagactccttggattctgagttgtacatccagatggagactggtgccattcactgacatagaaggcactcgaaggatggacttattttctgtacttgtccacacttttrtgtatgtgtgactctcaaattctaaggataattttaatttgaggatgtttaagaatagtaatgtgtaagaggtggtttgatggctctgggaaatgagaaaacggcaacctggtattttctgtcacttatggatctgcactgttactaaaaaacatgacttagcgggtggagctggacacacatcacccccaagtggaccacagggaatgaggttcttaggc

SEQ ID NO: 930644 - DNA, 617 bp, Homo sapiens
ctacaggccaatatcactaatgaatattgatgcaaaaatcctccacaaaatattagcaaattgaattcatcaacacgttaaatttggggtgcagtgtcccagcttcactcaacccttccccttttcctgtgtgtgtctactttggctgtgctcccaggtggcagcggtggyggcaatgttggtgtgtgggcctcccaggacaaggggaaagtgagtatgcccttctctcctcctgccaggcatctgtagcctggcaccagctctggccatgtcttcaagcgagggacctggagatgttcttttccaatttctggattgggaaatggaggcaaattctgggtactagagtcagaactaagatgaggcttgatcaggggcatctggggtcctgagaggcagagacctgaaaccctctagagcatgtggggatctgggtgtgtgttctggccagttgcttctccctgtgcctcaatgttccaggtacccttggaagggctgagatcctggagcctggctgcatgtcctggccaccgtgatgcctttgtgttctccatggcaggccagcaaggccgaggagaatggctccgacagcttcatgcactccatggacccacagc

SEQ ID NO: 930645 - DNA, 644 bp, Homo sapiens
tagaggcaaaaaatttcaggtgtgatgaaaaaactgaggaagagagttgtcatctcaagccttctcaaggggaggaaaagctgaaagcaacaagacacaacaaatgttgaacctctgagatacgaatctaagaagtttttaaaagaaattggttatataattaaaaatcaaaacctcttgtaatttccctaaaagcaaagcaataccttaagtaacccctgttttaatgtaaggggctaacctttasaaagactattataatggtttcctttttaattataaccaacttaattacttacaacgttccttttataaattctgtttcttataccttataaccacttacacagcccatttataacattttttactttcttacttgtcttacattacagttctttttaaaaataaccagttattttactttaagacaaaaatttaccacacaagatctttagataaaattattatttttaaacaatcttacttaccaaaaatatattcacattcataacttttctcacatctcttttacttcctattttctttttaccttttttaacttttgaataacttctaaattatacaaaattattttttctcaagaacacaacttttagaattatataagaattatatattaa

SEQ ID NO: 930646 - DNA, 621 bp, Homo sapiens
gctagggggagtgcttgtgccacccctcccacaaccccagcctgcacagctcatggcttcaaaagaggtcccttccttccacgtgaggagagaggagagagaagagtaaagaggactttgtcttgcatattggataccagctcagccacagtagaataggacaatggtcaaagtaatgaggccccctttctaggctcctggattatatttctagcacaccttgggccagaagggaacctgctkccttgaagggaaagacccagtcctggcagtacccattgtctgctaactaaagagcctttgatccttgaataaccaacagtgatgcccaggaaatacactgtgggccgtaggtgaaactgagattttctgacttcaggtgagactcagcacattcttagctgtggtggctatggggagagactccttctgcttgaggaaagtggaggaaaaagaaaagcagactttggcttgctccatatgtaccagctcagccacaggggaatagagcaccaagcaggctcttggggtccccagttcaaggtcttgactcctggatggcatttttgggtctaccctgagtcagaggggagcgcattgccccgaagggtgagtcccagg

SEQ ID NO: 930647 - DNA, 584 bp, Homo sapiens
acacaacaaaaaatgaaaaccaggccaatatccttgatgaatattgatgcagaagtccgcaacaaaacacttacaaaaccaaattgaacagcacatcaaaaagctattccaccacgatcaagtaggctccatccctgggatacaaggttggttcaacatatgcaaatcaataaatgtgattyatcacataaacagaactaaagacaaaaactacatgattttctcaatagatgtggaagaggctttcaataaaattaagcactccttcattttaaaaatcttcaataaactagatactgaaggaacatacctccaaataataagagccatctatgacaaacccacagccaacattatactgaatgggcaaatgctggaagcctttcccttgaaaactggcataagacaaggatgccctctttcaccactcttattcaacatagtattggaaatcctagccagcacaatcaggcaagagaaagaaataaagtgcatccaaataggaagagaggaagtcaaactctctctttttgcagatgacatgattctatatctagaaaaccccatagtctcggtcaaaagct

SEQ ID NO: 930648 - DNA, 584 bp, Homo sapiens
acacaacaaaaaatgaaaaccaggccaatatccttgatgaatattgatgcagaagtccgcaacaaaacacttacaaaaccaaattgaacagcacatcaaaaagctattccaccacgatcaagtaggctccatccctgggatacaaggttggttcaacatatgcaaatcaataaatgtgattcatcacataaacagaactaaagacaaaaactacatgattttctcaatagatgtggaagaggctttcaataaaattaagcactccttcattttaaaaatcttcaataaactagatactgaaggaacatacctccaaatartaagagccatctatgacaaacccacagccaacattatactgaatgggcaaatgctggaagcctttcccttgaaaactggcataagacaaggatgccctctttcaccactcttattcaacatagtattggaaatcctagccagcacaatcaggcaagagaaagaaataaagtgcatccaaataggaagagaggaagtcaaactctctctttttgcagatgacatgattctatatctagaaaaccccatagtctcggtcaaaagct

SEQ ID NO: 930649 - DNA, 587 bp, Homo sapiens
aattggagagtagatagcttcaagggaccattcctgtagagaaacatcaaaatacgctgggagaccgaggcgggcagatcacgaggtcaagagatggagaccatcctggctaacacagtgaaacgccatctctactacaaatmcaaaaaaattagctgggcctggtggtgggcgcctgtagtcccagctactctggaggctgaggcaggagaatggcatgaacccaggaggtggagcttgcagtgagctgagatcgtgccactgcactccagcctgggcaacagagcgagactctgtctcaaaaaaagaaaaaaaaatgcaagcaaaaactgtcctaattttgttagaactctggaaagtagtcaaagatttacagcaacaaaactaaggctgaagcaagaaaaaggtgacttaaaaatggtagaaaagctttgagatatttttacgtgcccttgctctacccctcctgggttcagcagaaactattagagtggataagaataataagactcaagtatacattgtctacaagaaacctactccaaatataaaggcagaggtgcattaaaagtaaataaattggagta

SEQ ID NO: 930650 - DNA, 718 bp, Homo sapiens
ttagaggtccttataatcacaaactattctcaactcactctctacagctctcataatttccaaaatctattttcttcctcacacctgatgcatatactttctgctccccggctccttcagttgtactcactctttgttgagtctcccacaattaccattgttcatggcccggacttcaatccagcctcccacattattcctgataccacacctgaccttcatgactgaatctctctgatccacctgatgttcaccccatttcccctcatttccttcttccctgtttctcaccctgatcgcacttggtttattgatggcagttccaccaggcctaatcaccacacaccagcaaaggcaggctatcctatattacaagccactagtccgcctcttagaacctctcatttcctttccatcgtggaaatctatcctcaaggaaataacatctcagtgttccatctgctattctactacttctyggattattcaggccccttcccttccctaaacatcaagctcagagatttgcccccacccaggactagcaaattagctttacttaacatgccccaagtcaggaaactaaaatacctcttggtctatgtagacactttcacttgataggaagatacctttcccacagggtctaagaaggccaccacggtcatttcttcccttctgtcagacacaattactcggtttggccttcccacctcta

SEQ ID NO: 930651 - DNA, 700 bp, Homo sapiens
ttccatctgctattctactacttctcggattattcaggccccttcccttccctaaacatcaagctcagagatttgcccccacccaggactagcaaattagctttacttaacatgccccaagtcaggaaactaaaatacctcttggtctatgtagacactttcacttgataggaagatacctttcccacagggtctaagaaggccaccacggtcatttcttcccttctgtcagacacaattactcggtttggccttcccacctctacgcagtccgatagtagactggcctttatyagtcaaatcagccaagcagtttttcaggctcttggtattcagtgaaacttttatatcccttacagtcctcagtcttcaggaaaagtagaacggactaatggtcttttaaaaacacacttcactaagctcagccaccaacttaaaaaggactggacaatacttttacctctttcttttctcagaattcaggcctgtcctcggaatgctacaaggtacagcccatttgagctcctgtgtggacgctcctttttatttagccccagtctcattccagacaccagaccaacttagattttgcccccaaaatcttgtcatccctactatcttctgtctagtcatactcctattcaccattctcaactacttatacatgctctgctcttgtttacactgctggtttacattg

SEQ ID NO: 930652 - DNA, 692 bp, Homo sapiens
tcggattattcaggccccttcccttccctaaacatcaagctcagagatttgcccccacccaggactagcaaattagctttacttaacatgccccaagtcaggaaactaaaatacctcttggtctatgtagacactttcacttgataggaagatacctttcccacagggtctaagaaggccaccacggtcatttcttcccttctgtcagacacaattactcggtttggccttcccacctctacgcagtccgatagtagactggcctttattagtcaaatcagccaagcagtttttcaggctcttggtattcagtgaaacttttatatcccttacagtcctcagtcttcaggaaaagtagaacggactaatggtcttttaaaaacacacttcacyaagctcagccaccaacttaaaaaggactggacaatacttttacctctttcttttctcagaattcaggcctgtcctcggaatgctacaaggtacagcccatttgagctcctgtgtggacgctcctttttatttagccccagtctcattccagacaccagaccaacttagattttgcccccaaaatcttgtcatccctactatcttctgtctagtcatactcctattcaccattctcaactacttatacatgctctgctcttgtttacactgctggtttacattgtttctccaagccatca

SEQ ID NO: 930653 - DNA, 692 bp, Homo sapiens
tcggattattcaggccccttcccttccctaaacatcaagctcagagatttgcccccacccaggactagcaaattagctttacttaacatgccccaagtcaggaaactaaaatacctcttggtctatgtagacactttcacttgataggaagatacctttcccacagggtctaagaaggccaccacggtcatttcttcccttctgtcagacacaattactcggtttggccttcccacctctacgcagtccgatagtagactggcctttattagtcaaatcagccaagcagtttttcaggctcttggtattcagtgaaacttttatatcccttacagtcctcagtcttcaggaaaagtagaacggactaatggtcttttaaaaacacacttcactaagctcagccaccaacttaaaaaggactggacaatacttttacctctttcttttctcagaattcaggcctgtcctcggaatgctacaaggtacagcccatttgagctcctgtrtggacgctcctttttatttagccccagtctcattccagacaccagaccaacttagattttgcccccaaaatcttgtcatccctactatcttctgtctagtcatactcctattcaccattctcaactacttatacatgctctgctcttgtttacactgctggtttacattgtttctccaagccatca

SEQ ID NO: 930654 - DNA, 544 bp, Homo sapiens
gtattcacaggaaattggttccgggacctccttgggataccaaaatcctgggatgcttgagacctgtaggcgctgtggaacccttgaatatggagggtggactgtactgatcagctcctaaatgtcaaacacttggcactttatatccgttttaattctcaaaatagttctccaggtcgggtatcattattttaattttaaagacgaggaaccaagtttaagagagtaaatactttaggtaaatactttagtaaatacttcaggtaatgccaccagctagtaattgctagaactaggattcaagcagcataaatagctactcacatgggtttatgacatgacgagcactgtgctaagcaacttacctggattggctcattaaatcttcctcataacycttcaaaagaggtcctaatattttactcacttaaaagatgagaaaacaggccaggcgcggtggcttatgtaagcatgtaatcccagcactttgggagactgaggcgggtggatggcttgcggataggcattcaagaccagactggtg

SEQ ID NO: 930655 - DNA, 867 bp, Homo sapiens
taaaacgtgatgaatgattgattgattgaataaattagtaagttaataaatcaggaaacgaatgaagcaggttttccttgactagaatagtgcagggtgatttctctttctaaattcctatagcatccactgtctgatctatttgtttagctcataatatttactgccttgtggtattaattaacaatccgtccatgttagtctcctcttcccagtgggataacaggtacctgggggtcagagtttgagtcacgttttgggacaccccccgctctgccccagtatcagcagggcagcattctgcgctctccaaggytcattgatggattgagcatcagaccaactgaatctccactgccaagtgtcagaagcaggccctcatgtgagcattagccataaatcacaggttaaacctttcctagtcgtttaatgcctggctcatatttcaaggtaacctggatcctgaaaagccttgatcagtgcataaagggaaaacatctggctttgccatccgctagggtctgttaggaactcacgatgcatttgtggttgatggtgaaagtgtggtttccttggtagacttgaatgctgagatcaaacatccacacgctaaccattaagctaaactcaagagagttatttccctattctctccaagatacagcacaaactctggggtccctgaccaaaactctgcttcatcttttgccatctgggccccaggcagctaagcttccatagtcttacacctctggttctcgttctatttctcttctcttattagagcatcctttccttccctccatatttggccaaattctattcattcttaagaaccaagctgtgatatccccacctctagaaagt

SEQ ID NO: 930656 - DNA, 757 bp, Homo sapiens
actttgttcagtatttgagatatactacctcatttaattgccagcaccaacataattttttttttatctcttgtgataggcaatatctaagatgatcctggataatctgtgcctgctaatatccaagtcctgatgtcatcccctccatttggacacaagctgggcatatttacctgcttctaaggaatagaatatgacagaagtgaygagatgccattttcaatattagattataaaaagactgcggcttctatttgggtgctttttctcactcacccttggcagccttctggagaggctcatgaggaagcttgtgaaagaaactaaaatatttcacctcaaaatgtacttctttgacatattttgagagggctgttccaaaagaagtagccctgcaaagctgtcttttgtgggggacttgcatctgtagagaaaacctgcattgctacaacaaggctttctgtaaggctctcccttgtatggatcgaggactgagagtccaaacatttaaaagtctgaaaaaaacatttgtcatttattctctctaagggctgatacctgtatggcttcacctacattttaagaccaccttggtaaacagaacctccttttctctcccctcaattacctgtcttgccatcataacctgatttactaccatacctgttttgttgttgttgttgttttgtttttttgagatgggatctcattttgccacccaagctggagtgcagcggcgtgattatgcctcactgca

SEQ ID NO: 930657 - DNA, 616 bp, Homo sapiens
attcacgtggtgttaagtgctccttctgtaagcactagctagcaagagtatttttgtttagcaaggccatcacaaaattagacaagcaaaccatagcaatgtatttgagcaatgtagtctataaataacacagtggaaggaagcataggagcacattatccatattacaatcttgtgccttaaaaaaaaaaataggttagctctgtaatagaaggcagctccagagaaatagacaaaatgtctttggtgattgttaaaggatgtaagcagcctcctggtaataagatctgctgagtgtaccctgtggattctgtgcgcccctaagcaactcctacaggctgagtagtgaacgcttgtaaagttggcgttgtttacctagcaggaatggaacaaaaaattktcgtggaaggatgctgatgtgtctgtaaccatgtcggctgtttatctgaaagtgaagttattgaagaagaaaggtttcacattagcccagaaagcagcattcgaatcagatacggtccatacactgccactgttttttagatttatttatttttttctttctttttcagaagtgcctggcagaaacttaaacaacattgttattcatttggctttg

SEQ ID NO: 930658 - DNA, 640 bp, Homo sapiens
agaaccgctcgactggggagaagggcaagaaggaaaagagcagagacaggataaaaaggaaggggacaaaaaatgggatgggataacaaagaaaggaggaaggaagcccagcatggtggctcacgcctgtaatcccagcatttctggagaccaaggcagaaggatagcttgagcccaggagttcaagaccagcctggacaacttagaccccatctctccaaaatgaaacttagcygggcatagtggtgtgcacctgtagtcccagctactcaggaggctgaggcaggaggattgcctgagcctggagaagtcaaggctgcagtgagccatgttcacgccattgcactccagcctggacaacagagagaccccgtctccaaaaaaaaaagaaaggaggaaggggaagacatctttatgggacacagctatcctcaacccaagaacccaggaggtgtgaggcatgtcctacgccccagtggctgaggacacttcaagaagtgggcaggcacatggccaaggccctggtctggggcctccgaagtccaggacgcccactctctgaattggcgccctggactctgaacttcacatcatctgcagatatgtgcagccactgtatgccagagagctgtcccaaagc

SEQ ID NO: 930659 - DNA, 644 bp, Homo sapiens
gtgtgcagtttacgtcatgtggcccaactcaaggcttcagtaaacgggtctgtccttcccaaggtttatctgtggtcatgatatcccacaaataaaatataaatggtattaaggtgctttgaaatgtaccccatctggctatagtcctgggagctaaatgaaaaaaaaatgttgaagagagtagaaattcagcatttttgttatgctcaatggattttctttaagacacttgccctaatggtgttaatggattctaatgtacccttatctttataaggtcctttcacttaaaaaaaaagtacaaccattaaggaaattaaacatgagtaggtgagcaggggctggggcaaagaacagggcagctttgcatttctgtttttttgcattgccttgtataggttttcataagtattttgttcaaaaagcarctctaatgcaagtatcaaactctaaatagaacaaataccttgatttgcaatttttcatatgaaaacaggtttgtacattttttctctgtgattttcttatgctctcagattctatttaatatgcctggaattaataaattaatattgtgtataattatatgtaaatatttcattatatattaatgttttaaatatatttattacatgtaattagac

SEQ ID NO: 930660 - DNA, 586 bp, Homo sapiens
gctgaactctaccagaggtagaaataagagctggtaccatttctactgaaactattctaaaaatttaaaaagaagggactcctcactaactcattctatgaggccagcatcatcctgataccaaaacctggcaaagatattatacaacaaaaacagaaaacttcaggccaataacttaaatgaacgtcagtgcaaaaatcctcaacaaaatactggcaaatttaagctagaagcacatcaaaaagcctatccaccacaatcaagcaggcttcatccccggcatgcaaggttggtttggcatatgcaaatcaatktgattcatcacataaacagatctaatgacaaaaaccacatgattatctcaatagatgtagaaaagaccttcgataaaattcaacatcccttcatgttaaaaactcttaataagctaggtattgaaggaacatacctcaaaataataagagccatatatgacaaacccccaaccaatatactcaatgggcaaaagctggaagcattccccttgaaaactggtgcaagacaagtttgccttttctaaccactcctgttgaacataatgttgcaa

SEQ ID NO: 930661 - DNA, 579 bp, Homo sapiens
tgggaggagttttcttatcctcctcgcagggcgtgcaacagggatgtggcttgcttctttggtgcctggctgctcaaacccctagggggagcatacagatgggcaggtcatgggcagtttttgggctctgaccccacagcagcgtctaaggttgagtgtttatagctcccgaagtcccagtgggtgtgtgtcacagtgtgctcttttagctttgctgttttgctgtctgtaggcagcttgtgttaatccgcccaattagagcctctgctttatcacaaggacagagggctttctgtatcctgaattattgccctggtgtaccagaaaaattgaatcacatgtgggcttggaggatggctgcaaagttttattgattggaagtagctctcagtgaggtgaatggggaggccagrgggggatggaatgggatggtggtgtttccctggagtttgggctgcccagcggcaggcatctcctctgatcactactgaccaaattccacatggtcccaccattgatggcctgtcagcatctgctggtgtctgtcagtgtgctcttctgatcctctgttcctctcga

SEQ ID NO: 930662 - DNA, 727 bp, Homo sapiens
cctccggtcctgggttttcctttattgggaaagtttttattactgattcaatctcactactcattttggtctttttagggtttctgtatttttagggttcaatcttggaaggttctatgtgttcaggaatttattcatttcctctaggatttctagtttgtcagtgtagagatgttcatagtagtttctgattatcaattgtatttctgtggtttcagttgtaatgtctccttttttaaatttctgattgaattgtctctcttcttggtcaatctagctagtgttctatcacttttgtttacatttacagaaaacaaacttttcatttggttgattcttttttttggtctcaatttcatttaattctgctctgatcattgaattttttccttctgctagttgcagttttggttccctcttaytcttctgggtccttgaggtgcaatgttaggttgttaatttgtgatctttctgtcctttggatgtataaatttattgctcaaaacttccctcttagtcttttcctatatcccagaggttttggtgtattgtgtctctttttattcatttccaaaagtttttaaatttacatcttaattttgtccttgacccaaagattattcaggagaagattgttgagttttcatgtgtttgtatatttttgagagttcttcttagaattgatttctagttgtattccactgtggtctgagaagtgacttgatat

SEQ ID NO: 930663 - DNA, 624 bp, Homo sapiens
atagaatctacccatttttattttagtgtctaagcttatttaatcttcaagcatttgaaaatcgagggcaataaggacatgtatctcctaacattttccacgtacacaaaaagttggcaatgaggcatacagtgccctgtatgttttaagcccaaatcacatcttcctttttaaacgtgaaaatatcttttattggttcagttttcaatgctactttctctatatataggtattcttctgacagaagtaaataaaatatttattattatatattaaataatatattaataattaataaataatactttaaaaatatatactttaatatatatttaaatatatattaagatatatttaaatatataccttaatatatatttaaatatatatttagatatatttaaatatatttaaatatactttaatatatatttaaatatttttatatatttaaatattataaaatatttaaataatacttttttaawaaactttttaaaatatatatatatttaaatatactttaaatatatatttaaaatatatttaaaaatattaaaaatattaaaaatataaaaaaataaaatatataaaaaaatttaaaagaatactttttatttactt

SEQ ID NO: 930664 - DNA, 604 bp, Homo sapiens
cttaaggatgcatttgtttgctgggtaactaaaaaggcaaaaagagagcattaaaatattgtgaaggctgcaactataggaaatggctatgacccgtagagctgaggaaacaacaacaaaaaaaagaggttggaaattttaaaaattagtagcttggagcagaggtctgaaattggagctgcaacttagacttctcaggggacaacatcattcagcttgtgctggttctctgagctcagagaggatgagcccatggggttgtgacccagatccctgaggatggaacactgactaatgctgatatctctgagagakgcacaataaggctgagtctgcaagaattaaaaagaatgtgagctagattcctgagctgccataggaatgaacttatttgccactgctgggtggagaagcaaggctggggcaatgctgataaagagcgtgttaggagcagggagcagacatgaatcctgctggaaggcaacaaggagcagaaaagaaggagaatgtcctttcttctcttccagccttgagtcttcctctagaacccccaatagtcatggcctaatagggagccagatggaaaggcagaaaagtagttttc

SEQ ID NO: 930665 - DNA, 765 bp, Homo sapiens
agactaaaaagactcatgaaaagcaagtgtctgactttaggtttctagttaaacatgtaaacagctcataagtcatctctcctgtccttgaacaaactggcaaatcacacttcttctaagatccatggaaagttgagatcacaagacaaactatcaattcaaaaataggaaagacaagaaaataaggataaaatttaccagaagcaaaaactatagctctcttctggcaggaacacacaaagcttaattgacttattgctaaacaataggtatggactaattgatagagaaaatctcatggggggtcatccttaggggaacctccacacttttttgtgagtattacttctaaaagtcccacattttcatgagttttacctytaaaagccctcaccagcttctcaggatgatgactgcacaaaaatcccctcttgtttttggcaggaggaggggaaaatttaccatttgaaatacatccagagcattatattctcaattagcaaaggcttgtgtcatagaaaaaaatactactagagccaacaaccatgagctagagcctaactgacacagaaaaatggaaatgcctaactccaggacctttggacattcctattacacttaagcagggaaggggaggaagagatgtgagaagcaccttgaagaggtacagcccactaaaaaaccaatgcctgattacaggaatatggagtggctttcctccccacactgcactaccccattaacaaggcttctggataataacag

SEQ ID NO: 930666 - DNA, 765 bp, Homo sapiens
agactaaaaagactcatgaaaagcaagtgtctgactttaggtttctagttaaacatgtaaacagctcataagtcatctctcctgtccttgaacaaactggcaaatcacacttcttctaagatccatggaaagttgagatcacaagacaaactatcaattcaaaaataggaaagacaagaaaataaggataaaatttaccagaagcaaaaactatagctctcttctggcaggaacacacaaagcttaattgacttattgctaaacaataggtatggactaattgatagagaaaatctcatggggggtcatccttaggggaacctccacacttttttgtgagtattacttctaaaagtcccacattttcatgagttttacctctaaaagccctcaccagcttctcaggatgatgactgcacaaaaatcccctcttgtttttggcaggaggaggggaaaatttaccatttgaaatacatccagagcattatattctcaattagcaaaggcttgtgtcatagaaaaaaatactactagagccaacaaccatgagctagagcctwactgacacagaaaaatggaaatgcctaactccaggacctttggacattcctattacacttaagcagggaaggggaggaagagatgtgagaagcaccttgaagaggtacagcccactaaaaaaccaatgcctgattacaggaatatggagtggctttcctccccacactgcactaccccattaacaaggcttctggataataacag

SEQ ID NO: 930667 - DNA, 594 bp, Homo sapiens
acataaattgtgaagatttaatggacatttactagttccccaaattaatacttttatattttcttatgcctgtctttactgcaatctctgaacataaattgtgaagatttgatggacacttatcacttccccaattaatactcttgtgatttcctatgcctgtctttactttaacctcttaatcccgtcatcttcataagctcaggatgaatgtcgcctcaggacgctgtgatgattgcgttaactgcacaaattgtttaaacaatatgaaatctgggcaccttgaaaaaagaacaggataacagcaatgttcagggaacaagggagataaccttaaagtctggctgcctgtgggccaggcrgaacagggccatatttctcttctttcaaaagcaaatagtagaaatatcgctgatattctactcagtaaggaactgagttttctcagtaaggaacatccctgagaaagagaatgcatgcctatgggtaggcctctaaaatggccgctctggggacgtctgtcttttacggtagttgataagggatgaaataagccctggtctcctgtagctctcccaggcttattaggacgaa

SEQ ID NO: 930668 - DNA, 609 bp, Homo sapiens
aatcgtgctgctataaagacacatgcccacgtatgtttattggggcactattcacaatagcaaagacttggaaccaacccaaatgtccatcaatgatagactggattaagaaaatgtggcacatatacaccatggaatactatgcagccataaaaaaggatgagtttatgtcctttgtagggacatggatgaagctggaaaccatcattctgagcaaactatcgcaaggacagaaaaccaaacaccgcatgttctcactcataggtgggaattgaacaatgagaacacctggacacagggtggggaacatcacataccagggcctgtcgtggggtggggggagtggggagggatagcattaggagatatacctaatgtgaatgacaagttagtgggtgcagcacaccaagatggcacatgtatacatatgtaacaaatctgcacgttgtgcacatgtacyctagaacttaaagtataatttaaaaaaagaaatcatatttcaaacaggctttgcactatgcatgttcacctgcagatcctggggttgcagtgggggcctggggaattttgatgaatttcctctctgctgttttggagaatttggaaaac

SEQ ID NO: 930669 - DNA, 595 bp, Homo sapiens
ctgcagattctatacttgcgttggcctctaactctccaatccagagcctcctgcctctggcgtcagtcttttccctcatccactcactggggagattggactagaggagtcctgagaggacacttccaacaagagacatttattctctgattttacctgaaaatggtagtagtttacatttatacagtacagtttatgaagcactttcatacgcaggcatctcttgttacctacatctaagctgttcccgaaagagkgttacagaacacaacagtattgtacaatattcgataagcatatcttcactgcacttgttataaaaatgagtggtgaaataatgtttggagacataatgaaagcgattaacatttggcaaaatataataaagcctttttgtaattggtgagaaagtcatgaagacttaagttgcctcagggcatctggtggcaagaggagggagatgggtggctgggcatggtggcccatacctataatcccagcacttgggaggccttgggaggccaaggcgcatggatcgcttgagcccaggagttggagaccagcttgggcaacatggtgaaacctcctctctact

SEQ ID NO: 930670 - DNA, 584 bp, Homo sapiens
tctccaaaacagcagagaggaaattcatcaaaattccccaggcccccactgcaaccccaggatctgcaggtgaacatgcatagtgcaaagcctgtttgaaatatgatttctttttttaaattatactttaagttctagrgtacatgtgcacaacgtgcagatttgttacatatgtatacatgtgccatcttggtgtgctgcacccactaacttgtcattcacattaggtatatctcctaatgctatccctccccactccccccaccccacgacaggccctggtatgtgatgttccccaccctgtgtccaggtgttctcattgttcaattcccacctatgagtgagaacatgcggtgtttggttttctgtccttgcgatagtttgctcagaatgatggtttccagcttcatccatgtccctacaaaggacataaactcatccttttttatggctgcatagtattccatggtgtatatgtgccacattttcttaatccagtctatcattgatggacatttgggttggttccaagtctttgctattgtgaatagtgccccaataaacatacgtgggcatgtgtcttt

SEQ ID NO: 930671 - DNA, 597 bp, Homo sapiens
ttcaactctgaagtcttcaacaaggccggccagacacagtggctcacatctgtaatcccagcactttgggaggccaaggcgggcggatcacctgaggtcaggagttcaacaccgccgggccaacatagtgaaaccctgtcactactaaaaatacaaaaattagccrggcgtggtggcaggtgcctgtaatcctagctacttgggaggctgaagtgggagaatcccttgagcctgggaggtggagcttgcagtgagccgaggtcgtgccactgcactccagcctgggtgacagagccagaccctgtctcaaaaaaaaaaaaaaaagcaagcatatgagtacacaaaaccttgtacatgaatattcatagcagcattattcataatagccaaaaagtggaaacaattcaaatgcccatcaattgattaatggataagtgagatgtgataccttcatacaatggaatattactcagccatgctacagactgagttatgtccctcagaattcatatgatgaagccttaactcccaccatctaactgtattggagataggacctttaaggaggtgattaaggttaagggtatatacctgatc

SEQ ID NO: 930672 - DNA, 630 bp, Homo sapiens
cttcttaccaggaagctccaggttggcaagcccgtgtttgttgagatttggcagggatggcagagtcagcccagcttggaggctggctccctgggatgccagaagatagggatcaggacagagatcagcactgggaacccagaggacgggccyttctgggaatgtcgtgagcagagatcgggagctggtcagttcctgggttcctggttgggccatctctctgctggcccaaactccctctggaactcaaaaatagcaagaattcctgaaacggatacaaacttttatacattcatgttttcttttttctttcttttttttttcttgagatggagtttcactcttgttgcccaggctggagtgcaatggcatgatctcagctcaccacaacctccgcctccaggttcaagcaattctcctgcccctgcctcctgggtagctgggattatagccgtgtgccaccacacctggctaattttgtatttttagtagagacggggtttctccatgttggtcaggctggtctcaaactcctgacctcaggtgatccacccgcctcggcctcccaaagtgttgggattacaggcatgagccaccgcacccagccccctttttcgttttgttttgttt

SEQ ID NO: 930673 - DNA, 630 bp, Homo sapiens
cttcttaccaggaagctccaggttggcaagcccgtgtttgttgagatttggcagggatggcagagtcagcccagcttggaggctggctccctgggatgccagaagatagggatcaggacagagatcagcactgggaacccagaggacgggcctttcwgggaatgtcgtgagcagagatcgggagctggtcagttcctgggttcctggttgggccatctctctgctggcccaaactccctctggaactcaaaaatagcaagaattcctgaaacggatacaaacttttatacattcatgttttcttttttctttcttttttttttcttgagatggagtttcactcttgttgcccaggctggagtgcaatggcatgatctcagctcaccacaacctccgcctccaggttcaagcaattctcctgcccctgcctcctgggtagctgggattatagccgtgtgccaccacacctggctaattttgtatttttagtagagacggggtttctccatgttggtcaggctggtctcaaactcctgacctcaggtgatccacccgcctcggcctcccaaagtgttgggattacaggcatgagccaccgcacccagccccctttttcgttttgttttgttt

SEQ ID NO: 930674 - DNA, 570 bp, Homo sapiens
ccctgttatggttttaaggataaccacaaattccttgacactctttccatcaaggagtggggtctaattcctctcctcttgaatctgggctggccttagagtcttgcttataactgtctcacgcacgtccatgtgaagagagtccaccaaacaggttttgtgtgagcaacaaggctgtttatttattttggactcaaggcgggctgagtccgaaaaaggagtcagcaagggtggtgggattatcattagctcttataggttyggggatagacggtggagttaggagcaatgtttggcaggcagggagtggatctcacaaagtaccttctcaagggtggggagaattacaaagaaccttcttaagggtgggggagattacaaagtacattgatcagttagggtggggaagaaacaaatcacaatggtggaatgtcatcagttaaggctattttcacttcttttgtggatcttcagttgctccaggccatctggatgtataggtgcaggtcacaagggatatgatggcttagcttgagctcagaggcctgacaacaactaatagaatatagt

SEQ ID NO: 930675 - DNA, 570 bp, Homo sapiens
ccctgttatggttttaaggataaccacaaattccttgacactctttccatcaaggagtggggtctaattcctctcctcttgaatctgggctggccttagagtcttgcttataactgtctcacgcacgtccatgtgaagagagtccaccaaacaggttttgtgtgagcaacaaggctgtttatttattttggactcaaggcgggctgagtccgaaaaaggagtcagcaagggtggtgggattatcattagctcttataggtttggggatagrcggtggagttaggagcaatgtttggcaggcagggagtggatctcacaaagtaccttctcaagggtggggagaattacaaagaaccttcttaagggtgggggagattacaaagtacattgatcagttagggtggggaagaaacaaatcacaatggtggaatgtcatcagttaaggctattttcacttcttttgtggatcttcagttgctccaggccatctggatgtataggtgcaggtcacaagggatatgatggcttagcttgagctcagaggcctgacaacaactaatagaatatagt

SEQ ID NO: 930676 - DNA, 609 bp, Homo sapiens
tttaaagttatacgttctatgtttttgttggttactcttacctttttttttttttttttttttttttttgagacagggtctgctctgtttcccaggctggagtgcagtggtgcgatcacagctcactgcagccttgacctcccggactcaagtgatcctcccatctcagcctcccaaggcaagtcggctcccagttcctgcttgatatggctagccacctggagcactgccctgctcccagattctttgttcctgttgttgttgcccagctcaatattgaggttggggaaaggaggggagaagaagaaataaagagaggattaaccccacctggttgctgttggtttagaacaccaactaattaccccattcatatcccctrggccctctatttctcctggaacatatcaccctcatatgtggaacagttttgatattgctcctaattgcaatagtcatctcccggtggttttgaactgaggtttccatcttccatcctatactgtcttctttctctcagggatttcttgtagcttctggtctatccactgcaaactttttttttttttttttgagacagggcctcactctgtcacccaggctggagta

SEQ ID NO: 930677 - DNA, 577 bp, Homo sapiens
gctccgggagtgctgggtcctgaggagttctgttgcctttcctgctgctcaccggttgctaagaggaaacaccgtgatttcctgatgctcttgccttgtcatcatgcctgaaacagcttattcccaattctgtaattccttttacataatccttctccaaaaattactttcttactaatatagaccatacagttttttttccatttagtaagtcactctgcaaaataacccttaagtaaatagacataatatccatttcacataccatttttgttaaagtatataataaagttgaaatctctgtgtggtagcaraataactctagtatgaatgctgtaaatgtacaggtaaatgtgaaattaggtcatattaactggccaagtgttggattgattactttgaggtagcagtatacgtatattaagttttataaactagatgaaattgcattctgtttgagactgaaatttaaaaatattgagaataactaagcgacttgaagtgacctcttattccctgggtatacatacagtgtgaccctctcgtgaagtgtggctctgcctggggatcagcacag

SEQ ID NO: 930678 - DNA, 665 bp, Homo sapiens
atcttcatcttaaaatacatgcaaaagaaaaggaaacctattgatctctgcttagggacaaagacttcctgaaggtagaagcagattccaattcaaccccgacccgcaaggcctggccacccccatggccccaaactcacgcctttcggaatcagatacccgccaataaccaggtcttcctgggtgacccggccgttccctggcagcactggaaacagcctggaaaagagccarcggggacgggaatggcgtggtgactttcacagtattttattgaacgttcagaaccctggatatattcccatttccattaaaaattcttaaaaagtaacacatggtacattttcaactgaaacattttgcaaggacctttgctgcttctttgttggcttgctttaccagcgagtattctgaggaatgtggaaaagactcccaaagcaaaacatttgcaaaacacaaagccaagcctttcacatgccattgtgttcccaggagggaaattccaagtttctaatattttatgtgaccacgggaccactttatcaaggaatagttcataggacttaaggccccatgaaatgcatttggagaaaagatacttcggcgatcggattatctcagaaaaccctgaataaaactttaattgacaaataccaataaacccc

SEQ ID NO: 930679 - DNA, 665 bp, Homo sapiens
atcttcatcttaaaatacatgcaaaagaaaaggaaacctattgatctctgcttagggacaaagacttcctgaaggtagaagcagattccaattcaaccccgacccgcaaggcctggccacccccatggccccaaactcacgcctttcggaatcagatacccgccaataaccaggtcttcctgggtgacccggccgttccctggcagcactggaaacagcctggaaaagagccagcggggacgggaatggcgtggtgactttcacagtattttattgaacgttcagaaccctggatatattcccatttccattaaaaattcttaaaaagtaacacatggtacattttcaactgaaacattttgcaaggacctttgctgcttctttgttggcttgctttaccagcgagtattctgaggaatgtggaaaagactcccaaagcaaaacatttgcaaaacacaaagccaagcctttcacatgccattgtgttcccaggagggaaattccaagtttctaatattttaygtgaccacgggaccactttatcaaggaatagttcataggacttaaggccccatgaaatgcatttggagaaaagatacttcggcgatcggattatctcagaaaaccctgaataaaactttaattgacaaataccaataaacccc

SEQ ID NO: 930680 - DNA, 586 bp, Homo sapiens
ctcacctaggaagctgtttctagcatgtacctgggtgtcaaacttattttttttctttgagattgtggttattttctccaacttgatagttacaattacatacacagaatacaattatgttaccattgtgttgtattctagagttagtttgttttaacttctagctttttagatggagtayttttaatgtttactcaggaaacagtctcttaggcttggggacctagacttggctgagacctagtgccttaggtttttgaagcagtgagggacagagtatttctctgtattgtagtaaataggatatattattgacagatgcaagtagagaaagggacttggcaccttaaacttgcctcataagattcaagtctcactgatagggtatatatatccctgtgcaagtgagagcctgtgcacttacagaatagaatctcatttgctgcacaatagggttctaggggaaaatgtcaatctggtcatcacagctcatagtttactgtcatttcaaataggctttattgatctcatggcaatacttagtttcaaggtgtgggtggattatcaactcagggaagtggcttgt

SEQ ID NO: 930681 - DNA, 795 bp, Homo sapiens
gtaaccaccacccagatcaagatagagaattaaatgagattttaaaagctgacagaagcttataaactgtaaagcgctgaagaaatgttggttttgagtattaccaggaggtggagcctctttcccattaaattcccctcctataacttctaggtttctagaaatcattagcaccagttgcaacaccctagcaaatcattgctggtgccaggaccttgataccccagccatgcagagtggagacacagacccatccattgctgttaatctccacattatcagcatgacttctctgagtcatgttagcccctgcatcctccccttcaggcagcaggatgtcctcacaaaacagggccattgacaacacaggtgtgcaatttcaattcagtacaatttgattcaaaaagatgtgccctttatgctggcgctggacagagaaggggagaagaaactttcttggctgggccctccaagggggcttgaaatctgtgaggctgtggccagtttatacatacctgtgaagtgaagcccacagaggcaagagctgtgactgtcacccttctcacccatgggactctctaccagagggtttccagaccctctctccagkgctgtctactcctctgggctgtagccagcttctccactttacctgctagatttctctcctggctactctatggccctcagaacttagtgatttcctaagaaacccatctttttacctcttccacctggcttcctcctcctggcttccctctttctccgttctggcatcactaactcccaatcatc

SEQ ID NO: 930682 - DNA, 605 bp, Homo sapiens
tgctggggtccccttctgtgctgtgaagctttgctctttagctctttgcaataaatcttgctgttgctcactctttgggtctatgcctcctttatgagctgtaacattcaccgtgaaggtctgcagcttcactcctgaagtcagcaagacsacgaacccatcgggaggaatgaacaactccagacgcaccgcctttatgaactgtaacactcaccacgaaggtctgcagcttcactcctgaagccaatgagaccaagaacccacaagaaggaagaaactccggacacatccaaatatcagaaggaacaaactctggacacaccatctttaagaactataacactcactgcaagggtccgcagcttcattcttgaagtcagcgagaccaagaacccaccaattccagacacactagaactagtaaaactgaggttaacaccataggttaaaagttaacatacaaaataagtttctttatgctaacaatatacaactggaaagcaacttaaaaatacaataccatttataatagcttacataaaatgaaatacttgagtataattctaaaaatatgtacaagatttgtacactgaaaactaaaatgc

SEQ ID NO: 930683 - DNA, 605 bp, Homo sapiens
tgctggggtccccttctgtgctgtgaagctttgctctttagctctttgcaataaatcttgctgttgctcactctttgggtctatgcctcctttatgagctgtaacattcaccgtgaaggtctgcagcttcactcctgaagtcagcaagaccacgaacccatcgggaggaatgaacaactccagacgcaccgcctttatgaactgtaacactcaccacgaaggtctgcagcttcactcctgaagccaatgagaccaagaacccacaagaaggaagaaactccggacacrtccaaatatcagaaggaacaaactctggacacaccatctttaagaactataacactcactgcaagggtccgcagcttcattcttgaagtcagcgagaccaagaacccaccaattccagacacactagaactagtaaaactgaggttaacaccataggttaaaagttaacatacaaaataagtttctttatgctaacaatatacaactggaaagcaacttaaaaatacaataccatttataatagcttacataaaatgaaatacttgagtataattctaaaaatatgtacaagatttgtacactgaaaactaaaatgc

SEQ ID NO: 930684 - DNA, 386 bp, Homo sapiens
cctgagaactaagaagcagaatccctgaggataggagaagattgatgtcctagcttaaagaatcatgcagagtttgagtttatgccttatttctggccttttcaggccctccccagattgaatgacatccactcatatcaaagagggcatctcctttactcagtacatcarctcacatgttaatctattctggaaacacacagagacaggaagaaacaatgttcaaccagacatctggtttcccatggccgagtcaaattggcagataagattaaccattataagtccacccttagtcaatttggcacctatatctatctctttataccctgcctaatcttcaaatgaagccagtaacaagatcacagttcttcctaacaatcaaa

SEQ ID NO: 930685 - DNA, 470 bp, Homo sapiens
gaggaaacagagtattaggatattctcaggccagattcaatttatgcctcacaagagggccaagtcacaaggatttccaaggaaccacactagacttcagtttaaggttgtctcctggctcggggtaggtgatcctcttgagccgtattgcctatggttgtgtcttagaagcagaagtagtaacctggccttcttaagctccrtgacctaaactccattctgttcatctctacttcatcccttccgggtaccctggggacctagtacctttctataccatccctgtggccagtgttatctgtgattcatttccatccttggggcccaggctgatggggtactctttttttttctttttttttgagactgagtcttgctctgttgcccaggctggagtgcagtggcacgatctcggctcactacaacctccacctcctgggtccaggcgattttcctgcctcggcctccca

SEQ ID NO: 930686 - DNA, 617 bp, Homo sapiens
aatactgttttaaaaaattttttattcagatattttttgtttgtgattctgtgtatgtctattttcatttcatagctggagttttaatatcaggtagaagacaggggcctggatgtcagcagagacatccgggtacttatcttttacttcttatcccaccatgcccttcccaactcaaagctgagcagtttgatggcagtccccacagcttgcagaacttggtgcccaggcggttttgctggaggaaatacctcctaacccatagcagatagtgatcttagccgcagcagagaagtggttgcgctgggttgggcagtgggtggagaaggatggcatagaacggatgcattctgttctcaaaatgatacttgttttgatggtgacaatttrccagtgaaacacactgatttcatattctctggggtactctccacctcagtgggagggagaggattgttggggaatctctaggggacacttcttattagtatacctgctttttttttcattttttaaatttttttgagacaggatctcagctctgttgctcaggctggagagaagtggcacaattatggctcactgcagcctcaacctccctggctcaagccattcat

SEQ ID NO: 930687 - DNA, 617 bp, Homo sapiens
aatactgttttaaaaaattttttattcagatattttttgtttgtgattctgtgtatgtctattttcatttcatagctggagttttaatatcaggtagaagacaggggcctggatgtcagcagagacatccgggtacttatcttttacttcttatcccaccatgcccttcccaactcaaagctgagcagtttgatggcagtccccacagcttgcagaacttggtgcccaggcggttttgctggaggaaatacctcctaacccatagcagatagtgatcttagccgcagcagagaagtggttgcgctgggttgggcagtgggtggagaaggatggcatagaacggatgcattctgttctcaaaatgatacttgttttgatggtgacaatttaccagtgaaacrcactgatttcatattctctggggtactctccacctcagtgggagggagaggattgttggggaatctctaggggacacttcttattagtatacctgctttttttttcattttttaaatttttttgagacaggatctcagctctgttgctcaggctggagagaagtggcacaattatggctcactgcagcctcaacctccctggctcaagccattcat

SEQ ID NO: 930688 - DNA, 787 bp, Homo sapiens
ctctgtcacccaggctggagtgcagtggcgcaacctctgccttcccggttcaagcaatcctcctgcctccgcctcccaagtagctgggattacagatgcccaccaccacgcccagctaatttttttgtatttttagtacaaaaataccatgttggccaggctggtctcgaaactcctgacctcaggtgatccgcctgcctcagcctcccaaagtgctgggattataggcatgggccacygccccggtgttttttgaatacataaaatgatacacatagaattaccacaggaaccaattatatacaatatgttgttacaatatttttaagttgcctgaataatttttgacatagttatacattttcttttattttgtgtcctttattaatgcattcaataacgagatcttgaagtgggcctaataacttctgtatttaatttttttttttagagacaaggtctcactctgttgcccaggctagagtgcaatggcacgatcatagcttactgtaacttcaaactcctgggctcaagcaatcctcctgccttagcctcccaaagtgctggaactataggcatgtgccaccatgcctggctaatttttatttatttatttatttttttgtagagagagggggtctgcatgttgcccaggctggtctcaaactcctgggctcaattgatcctctcaccttggcatcccaaaatgctgggattacaggtgtgagccatcacacccagcaatttctgtatttttaaaatattgataattataagcaatattttg

SEQ ID NO: 930689 - DNA, 787 bp, Homo sapiens
ctctgtcacccaggctggagtgcagtggcgcaacctctgccttcccggttcaagcaatcctcctgcctccgcctcccaagtagctgggattacagatgcccaccaccacgcccagctaatttttttgtatttttagtacaaaaataccatgttggccaggctggtctcgaaactcctgacctcaggtgatccgcctgcctcagcctcccaaagtgctgggattataggcatgggccaccgccccrgtgttttttgaatacataaaatgatacacatagaattaccacaggaaccaattatatacaatatgttgttacaatatttttaagttgcctgaataatttttgacatagttatacattttcttttattttgtgtcctttattaatgcattcaataacgagatcttgaagtgggcctaataacttctgtatttaatttttttttttagagacaaggtctcactctgttgcccaggctagagtgcaatggcacgatcatagcttactgtaacttcaaactcctgggctcaagcaatcctcctgccttagcctcccaaagtgctggaactataggcatgtgccaccatgcctggctaatttttatttatttatttatttttttgtagagagagggggtctgcatgttgcccaggctggtctcaaactcctgggctcaattgatcctctcaccttggcatcccaaaatgctgggattacaggtgtgagccatcacacccagcaatttctgtatttttaaaatattgataattataagcaatattttg

SEQ ID NO: 930690 - DNA, 643 bp, Homo sapiens
tggcagcaggcaaagaaagagagcttgtgcaggggaactcatctttttaaaatcatcagatgtcatgagacttagtcactatcgtgaaaacagcacgggaaaaacccgcccccttgattcaattacctcccactgggtccttcccataacacatgggaattcaagataagagttgagtggggacacagagccaaaccatatcattctgcccctggyccctcccaaatctcatgtccttacatttgaaaactaattatgccttccctacagtctaccaaaagtcttaactcatttcaatattaactcaaaaatccacaatccagagtctcatctgagacaaggccagccccttctgcctatgagcctgtagaatcaaaagcatgttagttactacctagatacaatggggtagaggtattgggtaaatacagccattccaaatgagagaaagtggccaaaacaaatttggccaattttggccaaccgatgcagggttgaaatccagtgggacagtcaaatctttaaaactccaaaatgatctgttttgactccatttctcacatccaggtcacagtaatgtaagaggtgggttccatgatcttgggcagctctgcccctgtggctttgcagggtacagcctccc

SEQ ID NO: 930691 - DNA, 563 bp, Homo sapiens
ccatcagatctcatgagacccattcactatcataagaacagcacaggaaagacccaccccataattcaatcatctcccactgggtacctcccacaagacgtggggattatgggagctgcaagatgagattttgggtgggaacacagagccaaaccatatcattctgcccctggcccctcccaaatctcatgtcttcacatttcaaaaccaatcatgcctccccaactgtcccataaactcattaactcaaaagtccacagtccaaagtctcatccaagacaatgcaagttctttctgcctaggagcctataaaatcaaaagcaagttagttacttcctagatacaatggaggtacagccattgggtaaatacagccattccaaatgggagaaattggccaaaacaaargggctacaggccccatgcaagtcccaaatccagcagggcagtcaaatcttaaagctccaaaatgatctcctttgactccatggctcacattcaggtcacactgatgcaaaacgtaggttcccatagttttgggcagctccacctttgtggcttta

SEQ ID NO: 930692 - DNA, 609 bp, Homo sapiens
  misc_feature 214, 215, 217, 224, 225: n = A,T,C or G
ttctatgtaagctactatcaagagaatgaaggacaaactacagatagggagataatatttgtaaaccctatgtctaaaaaaggacttctatctagtatatatagagaattctcaaaactccagaaagaaaacaagaaaaaaaatttttttaatcatgggaaagaatcagtcacttcaccaaaaaaaatataagaatgacaaataagcacaacannanaacatgnnctcagcactaaggaaacaatgtagccattacgtaactaattaaaaccacagtgtgataaaacttyatagctatcagaacagctcaaaacaaaactgactactgcatgctgacaaggatgtagagcacctggaactctcataaatacctcctgagaacccaatgtggtacagctgctctggaaaaacaacttagcaactttatatggagtcaaacatatttatcatgtgacccagtaatttcactactatatatttatcatgaaaaatgaaaagttctattcataagaaacctccacataagtgtttatagcagctctattcagaatcatccccaaacaagaacaacccaaaggtacttcaacaggtgaataggtaaacaaactg

SEQ ID NO: 930693 - DNA, 601 bp, Homo sapiens
taatctgaacatcttaaacgtttttgcttggatacacaatgatttttattttttcgatgtctgtaatttttatttttatgtttttcaagtaatacattagtttttgagcagttttaagctaacagaaaaattgagaggaaagtacagagaacgcccgtctaccctttcacagactccctccttattttctgttttgttaacatcttgcagtgttacagttgttataattgaacaaatattgataaattattttcacactaaagacygtagctcacattagacttcactcttgatgggtttgtccataccaaaagcatacatcaaccactgcagcatcatataaaagagtgtctctgtcctaataaccctctgtgctctgtgtattcatccctctctcccctctaactcccggaaaaattgattatgacaaccactgatctttttgctgtgtccatagttttgcctttttcagaatgtcatgtagttggaatcattcagtatgtagccttttcagattgacttctttcatttagcattatgcatttaagttttctccatgtctttcctgctgtggagactaaagtaacttcatcttgaatgc

SEQ ID NO: 930694 - DNA, 550 bp, Homo sapiens
taatagtacaaaattattcataataaactggatagctgtattaatgcctggaaaaagagactctaaacataatatcacagattataaaggaaatttcataataataggttaattatttatcaagaagatataataatcctaaatgtttataacatttgtaacagagtttctaaatatataaagttaaaaaaaatgaccgaattgaaaatacaacagacaaatttacaattttaggtggggatattaaacactcctcmgtaattcattgtctataggtaataatgatatagaagacttaacatagtcagttaacttgctttaattgacatttatagaacatgcaacaactgcagaacaaatattattttcaagtgcacatggtacattcaccaagagagataataattagtaatcaggtgagtttcaatacaaaagtttgatcttgcatacaacatgttctcttataataatgaaattcatttcataaagatatttggaaaatctctagtattgggatgttaacatacttccaaataaaatataaaataaa

SEQ ID NO: 930695 - DNA, 695 bp, Homo sapiens
ttagtggtgccacttccacttccgtcttttgattcctcgacccgtgaatcctggctatgggagaaatggtaccatatattgaatgttgattcagtgcatacacaggcttttggagaactttgcccatccacatacctcttccccaaatttctttgtcaccaatttttttttctttttctttttcttttttcctttttttttttaattttgagacggagtctcactctgtcaccaggctggagtgcagtggtgcgatctcggctcactgcaatctctgcctcccrggttcaagcaattccccgattcctctgcctcagcctcctgagtagctgggactacaggcatacactaccacgcctagctaattttttgtattttagtagagacagggtttcaccatgttggccacgatgctctcgatctcctgaactcatgacctgcccgccttggcctcccaaagttctgggattacaagcgtgaccccccgcgcccggcctgtcaccaatttttaaatcatgcttcttctaagtccctgctcacccagccaaaccattggctacagcccatatgtcagtatataatcacacatctggccatttctccttctaagcaaagtgtacaaccaggtgccctgcttgaagttctgcccattggaaagatttcccttcaatgctgtccttcagggatgtcctaga

SEQ ID NO: 930696 - DNA, 579 bp, Homo sapiens
ccaatccagtaacaatgagcactcccagtgctcagattatggtccctaaatatcatttccaacctaaaagggtcaattctgggtctgcaacaggaaatataaaaaaaagagtctgtaacattttgtcttaacagaaagcaaaaaatctattaaagattactggggttgctatgggttgaattgtgttcccccaaaatatgtgttcaaaatctaaccccttatacatgtgaatgtgaccttatttgaaaatagagtctttaaagatgtaatcaggttaaaatgaggtgatattggactagggtgggtccaaatccagtgactggtatcttaataagaagagggaagtatggacacasacacagagagggagagaatgccatgtgataatggagacagagactggagtgatatccgcaaggcaaggaacatcaaggattgtggcaatggccagatgctaggagagaggcatggaacagattctctcccagagtctcccaaaataaccaatcttaccaatgtcttgatttcaaacttccagcctccagagctgtgaggcaatacattctgcagtaagccacc

SEQ ID NO: 930697 - DNA, 600 bp, Homo sapiens
ttctgggtagacccaaactaacataaagaatttggtcgaaatgtgtatattattaaggtaatgctagctgctgtaaaaataacttctcagttcaacaacatgtacatcattcagacagaaaattagtaagaaatgcaggacttgaattgcatttttggccaaatggacccaatagacatgtacagaattttccatccaacagcagcagaatgtaaagtttttctagagtayacatagaacattctccaggatagaccatatgttagaccacaaaatttaagattgaaattatgtctagtatcatttcagatataacttcaaaccacagtggtataaactagacatcagtgacaggaggaatcttgaaaaattcacaaatatctggaacataaacaacatgccccagaacaaccaatgggtcaaagaagaaattaaaagataaatttaaaaaatgccttgagacaaatgacaacggaaacacaatataccagaactgatgggatataggagaagcagttctgagaggaaagtttatagcaatatatgcctacattagaaaagaagaaagatctcaaatgaatagtgtgacattacacctca

SEQ ID NO: 930698 - DNA, 574 bp, Homo sapiens
tggggtgagcaggggaaacttcatggacaaggtggcctatctgcctttcgtgtaaaggatttataaagatgaaaggaaagggcaaatgtaacaatcattaaaaaggcagggaaaagaaggtggtctgaatgactatttcatccagggatgactaagtataggagagggaagagtccaacttcaggctaggatgaaagtacagagtttggtagaaatcccctggaaaataaaaattcttctagaaactaaaaactagctataagtttgggcaatatttattttctgcacaygggagtctggaaggttgtcatgtgtgtctcatctctcctcctttctctgcctaccctatcacccctgcatcaaatcacttaccaagcaccaccaattctccatccatatcctctcttctatctcttctttttgtcactctaattccactgtgtgcttaatgactgaaagactcctgcatggtgccatgtttcctctctccctcttcaatctacacctgaatcctttgaaaggcaggctagggacctggctgcttagcaggacacagaggtcaaggaggtgagtg

SEQ ID NO: 930699 - DNA, 431 bp, Homo sapiens
taagactctaattttgcaaaatatgattaaaacctgacatatacgtaaaagctagaggacaaacaatgtgatgaaatataccaaatactaataatagtggttctctgaatctctgaattatagatgaatttaattttctttcttatactttcagatatccctaaaatgtctcatttwgaatgtcctttataatccaaaaaagttatcgtaaggcaatttaagagttgtctttatagctgtgtgaaaatattttatatttaaagaaacgtgcttgttttatttggaatattaaaatataaagatggagaactttcagataatagtagataactggcattcacagatgaggacctaccctacaggtccccggcaaccagacccacggtgtctgggttcatgggactgaaaatcagtcaccaggtggaaaagct

SEQ ID NO: 930700 - DNA, 431 bp, Homo sapiens
taagactctaattttgcaaaatatgattaaaacctgacatatacgtaaaagctagaggacaaacaatgtgatgaaatataccaaatactaataatagtggttctctgaatctctgaattatagatgaatttaattttctttcttatactttcagatatccctaaaatgtctcattttgaatgtcctttataatccaaaaaagttatcgtaaggcaakttaagagttgtctttatagctgtgtgaaaatattttatatttaaagaaacgtgcttgttttatttggaatattaaaatataaagatggagaactttcagataatagtagataactggcattcacagatgaggacctaccctacaggtccccggcaaccagacccacggtgtctgggttcatgggactgaaaatcagtcaccaggtggaaaagct

SEQ ID NO: 930701 - DNA, 566 bp, Homo sapiens
tggcagttcctcaaaaggccaaatgcagagttaccatatgatgcagcaattccactcctaggtatatacccaagagaaaatatgtctacacaaaaacttttacgcgaatgtcaatggcagcattattcataagagccataatatccatcaactgataaatggataaataaaatatggtacacacatacacttgaaaatcatttggcaataaaaaaattaaaaatgaaatattgagtggacgaaccatggaaacactatactaagtgaaagaagccagtcacaaagggccactttttatatgattgcatttatgtgaaatatccagaatagacaaatctatagagaccagtatgatctatagagtagattggtggttgcctagggcttggatacgtggagaagtggaggtgatagctaaggggtatagtgyttctttttagtgtaatgaaaatgttctaaattgatttggtgatggttgcaccactctgtgaatatgcctagtcattgaattacacattttaaatgggtgaaatttttttatggtttgtgaattataactcaataga

SEQ ID NO: 930702 - DNA, 635 bp, Homo sapiens
gtatggtcttttatttttattattttgtattattatattgttattatttatttattcatttattgaatattttcaatccatggttgtttgaatctatggatgtggaacccatggatatgaagggctgattgtattatccccttgggggttaggatttcaccataggaattttgrggggcacacaaacatccagaccatagcaaaagagataagaaacctaggttagtgaccagggagggctgctaggatgagccttgatgaaagatctttcatcaggaggatcctgggcatgtggctgggaagggtcctgggcatgtggctgggaagacccttcaaaggggagggcacagtgggtgcaaagttggaagtgaaagaataccatgagcgaagaaagcatcaaattggcagtgttgctggatgtgttagtttcctgtggctaccaaaacaaattaccacaaactgggtggcttaaaacaacagaaatatatttctcccagttcaggaaggcagaagtcagaaatcaaggttggcagggttgttccttccagaggctgtcagggagaaatcatccctttcctctctcctagcttctggtagttgctggcaaaccttggcgtcccttggtttgcagatgc

SEQ ID NO: 930703 - DNA, 635 bp, Homo sapiens
gtatggtcttttatttttattattttgtattattatattgttattatttatttattcatttattgaatattttcaatccatggttgtttgaatctatggatgtggaacccatggatatgaagggctgattgtattatccccttgggggttaggatttcaccataggaattttgaggggsacacaaacatccagaccatagcaaaagagataagaaacctaggttagtgaccagggagggctgctaggatgagccttgatgaaagatctttcatcaggaggatcctgggcatgtggctgggaagggtcctgggcatgtggctgggaagacccttcaaaggggagggcacagtgggtgcaaagttggaagtgaaagaataccatgagcgaagaaagcatcaaattggcagtgttgctggatgtgttagtttcctgtggctaccaaaacaaattaccacaaactgggtggcttaaaacaacagaaatatatttctcccagttcaggaaggcagaagtcagaaatcaaggttggcagggttgttccttccagaggctgtcagggagaaatcatccctttcctctctcctagcttctggtagttgctggcaaaccttggcgtcccttggtttgcagatgc

SEQ ID NO: 930704 - DNA, 563 bp, Homo sapiens
acccaaagaggcagctgcaaagggctccagaagtgtctccaagatgacccccccaccaccaccaccaccgcccacaccaggagcagcagtgctctctgtgggacacccagaagcacagacattcaacttaaaataggatctcatagaataaagcagtccgtcaggtggtaacaagtcccaaggtattaaaaattatagaagagaaayttaatgcctctgaacagcacacttacaaatggttaagatggtcatttttatgttacgtgtgttttaacacgattttaaatttttaattgacacacttatgaaagagaaacttaaaatggagaacgttctattccagagggagacctagccaacttgcatcaccaattagcctgtttttggtaaatgtacccactttttgcattctgagagagaactctgtcctctggaaagactttctcttagatgagccttttaattcatgcagatgtgggccggagtatttgagtatttcccgttatatgggggaagcactaaaaggtgaactgccctaaatgcagatttctcagtgtgaggtt

SEQ ID NO: 930705 - DNA, 563 bp, Homo sapiens
acccaaagaggcagctgcaaagggctccagaagtgtctccaagatgacccccccaccaccaccaccaccgcccacaccaggagcagcagtgctctctgtgggacacccagaagcacagacattcaacttaaaataggatctcatagaataaagcagtccgtcaggtggtaacaagtcccaaggtattaaaaattatagaagagaaacttaatgcctctgaacagcacacttacaaatggttaagatggtcatttttatgttacgtgtgttttaacacgattttaaatttttaattgacacacttatgaaagagaaacttaaaatggagaacgttctattccagagggagacctagccaacttgcatcaccaattagcctgtttttggtaaatgtacccaytttttgcattctgagagagaactctgtcctctggaaagactttctcttagatgagccttttaattcatgcagatgtgggccggagtatttgagtatttcccgttatatgggggaagcactaaaaggtgaactgccctaaatgcagatttctcagtgtgaggtt

SEQ ID NO: 930706 - DNA, 563 bp, Homo sapiens
acccaaagaggcagctgcaaagggctccagaagtgtctccaagatgacccccccaccaccaccaccaccgcccacaccaggagcagcagtgctctctgtgggacacccagaagcacagacattcaacttaaaataggatctcatagaataaagcagtccgtcaggtggtaacaagtcccaaggtattaaaaattatagaagagaaacttaatgcctctgaacagcacacttacaaatggttaagatggtcatttttatgttacgtgtgttttaacacgattttaaatttttaattgacacacttatgaaagagaaacttaaaatggagaacgttctattccagagggagacctagccaacttgcatcaccaattagcctgtttttggtaaatgtacccactttttgcattctgagagagractctgtcctctggaaagactttctcttagatgagccttttaattcatgcagatgtgggccggagtatttgagtatttcccgttatatgggggaagcactaaaaggtgaactgccctaaatgcagatttctcagtgtgaggtt

SEQ ID NO: 930707 - DNA, 587 bp, Homo sapiens
agaattaggctctctgctcaagcagccctgggccttgcgtgtgctctctgtggcccggtttccccacgaggggcagagatgaaagggcccagttatgcttaccccatgctccttccaactcaccaatgagagaagcagggagcaggggtgagacggctcttggcactatctccacaagcaggaagcatcaggcccgagggataagtcgacaagtcgtgcccctcagagagccaagcctatgtccgctatccaggcttatggatgaatayggcctgcaaagatcagaactccctccaggccagaaggagcacataatctcttccagtcacagcaaaggttcccatcagcattccctggccagtgcttcctttgcccaataaggggctggacaaaagggaggatggcctgtgtgatggttaatactgagtgtcaacttgattggattaaaggatacaaagtattggcctggtgcagtggctcacacctgtaatcccagcactttgggaggctgaggtgggtggatcatctgaattcaggagttcgagaccagcctggccaacatggtgaaaccccgtgtctactaaaaa

SEQ ID NO: 930708 - DNA, 557 bp, Homo sapiens
aatcgcattaggaagtgttagcagctcaaagcactcgaattattctttgttttaatctcccaccatgataaaaacaatgtgatttttattaggacacagaacaaatattactgctgatatatgttccaccatttacattttttctctgtaaagttgtggctgtgtcaggggctggagaggaaacttttcctcaattattccagctcacgctcgtactcattattattgtattagtggcaaaaaaaaaaaaaaaaaaccctagatttctaatagaattttggaatgacatagccagtcactatgtcattcctaagacatagtgaatttttcatttgttcattttttatttctttttagtagagatgggtttcaccatgttggccargctggtcttgaattcctgatctcaagtaatccacccacctcggcctcccaaagtgctgcgattacaggtgtgagccactgtgcccggccaacatagtaaaccttttaaaatatttttgggttgccagtgtaaaaactagtatcctcaaagtagaatctgtaaaattggtttg

SEQ ID NO: 930709 - DNA, 627 bp, Homo sapiens
gtggttgcattgtgaagttctcatattgtgtttttcagctccatcaggtcatttatgcttctccctaaactggctattctgattattggctcctgtaatgttttaccatgattcttagcttctttgcattgggctacaacatgctcctttagctcagtgaagtttattattacctacctcgttaagcctacttgtcaatcatccatttcagcggcctcagcccagttcakttcccttgctggagaggtgttgcggtcatttggagaagaggcagtctggctttttgagttttcagcatttttgcattctttctcatctttgtgggcttatctacctttgatcttcgaggttgctgaacttcaaatggggttttgtggggtcttttttgttaatgttgttgtttgtttgttttaacagtcaagtcactcttctgtagggctgctgcagtttgctgggcgttcactccagaccatagttgccttgttcctcccatacctggaggtatcaccagtgaaggctgcaaaacagcaaagatggtagaccattccttcctctgggagcaccatcccgggggggcaccgacctgatgccagccagaacattcctgtaggaggtgtgtggagaccc

SEQ ID NO: 930710 - DNA, 620 bp, Homo sapiens
ataattccaaaatctgcgtcacatctgagtctggttctgacgcttgctttgtatctacaggctgtttttccttgcctgttagcatgctttgttgagacagggtcttacttactctgttgcccaagctggaatgcaatgatgtgatcacagcttactgcagtcttgacctcctgggctcaagtgatcctcccacctcagcctcctaagtagctgggactacagccatgcaccaccatgccaggctaatcttcttattttttgtatagatggggttttaccatgttgcccaggatgctcttgaacttctagcctcaagtcatctgtccaccttggcttcccaaagtgctagaattataggcatgagccatgygcccagcctcatctgtgtaattttctgttgaaagctagacatgatgtatcagataacaggaaatgaggcaaaaaggacttcagcttgaggcttatctgtctaagattgggttgtatataatgtttgctataaatgtggttgtcagaggtttcaaagtcctctagtgtcttttttttttttttttttcatctctcctgttgtctttggactttcctgagaccccctctccttggccagccagtgtctgtct

SEQ ID NO: 930711 - DNA, 776 bp, Homo sapiens
atctgcagggggtcttttcaccatggatgctgcaaccccctggtctgagcccccatcctctcttgcttggataactgcaacagcttcctgcagagcctcctgtttctccccttgatcctctatagtctgtgctcaacacaatggctatacaataatttaaaatatatgtgccattttatgcttctccttagttcaacccctgtgtgacttcccatctgcctcagagtgaaagccaaagtcttaacaatggcccacagtgccctccacaatctgccctgcccttctgtccctcacctccctggctcagctcatcgcactcatcccctagactgctctactctgctgcactgacctccttgccattcctcaatcctgccagccctgctccctctgcctggaaggctctttctacagttatttccatgcctccctccctcataccttttggatctttgctcgaatgtcgtaagccatcctctcatggagaccttttcacaccctttaaaattgctaccaccwccctagcgccctctccccaaccccattcctcttccattctcattaccgtatgacttaactctctatttgcttgttttattgtccttcctccactgggatgtaagctccatgaaggcagggattttagtctgtttcgttcacctaatagaatcttgtcggctcatagtagggtcaataaatattagtttaataaacaaatgactgatgaggactttttccagcaatttatttacctatctgccaaaggaccagcaaaa

SEQ ID NO: 930712 - DNA, 776 bp, Homo sapiens
atctgcagggggtcttttcaccatggatgctgcaaccccctggtctgagcccccatcctctcttgcttggataactgcaacagcttcctgcagagcctcctgtttctccccttgatcctctatagtctgtgctcaacacaatggctatacaataatttaaaatatatgtgccattttatgcttctccttagttcaacccctgtgtgacttcccatctgcctcagagtgaaagccaaagtcttaacaatggcccacagtgccctccacaatctgccctgcccttctgtccctcacctccctggctcagctcatcgcactcatcccctagactgctctactctgctgcactgacctccttgccattcctcaatcctgccagccctgctccctctgcctggaaggctctttctacagttatttccatgcctccctccctcataccttttggatctttgctcgaatgtcgtaagccatcctctcatggagaccttttcacaccctttaaaattgctaccacctmcctagcgccctctccccaaccccattcctcttccattctcattaccgtatgacttaactctctatttgcttgttttattgtccttcctccactgggatgtaagctccatgaaggcagggattttagtctgtttcgttcacctaatagaatcttgtcggctcatagtagggtcaataaatattagtttaataaacaaatgactgatgaggactttttccagcaatttatttacctatctgccaaaggaccagcaaaa

SEQ ID NO: 930713 - DNA, 593 bp, Homo sapiens
tttctttatatttttttctctctcctacttactgattccttttaatctcatttgtttccttcctaaatccatattttgaagtaatttttaggtaacatcgaaattgtacaaaattattcttttctcaataaagaacacatttttataccttctgataatatgttctcatcaaaaacacatcttacttttttggtcctttttatataaagagttgtatatattaatttgaattttaaatcttastaatcttaaattttagtgagaacctaagaagtaagaaatctagaattatctgtcacatatcaattttgtatagataagaagcattttataatttctagaaacatgctttcttataacacaattttttaccttaagtggaaacgacccagacgtttgatgattatctattattgaatttaacatacttttgagatttcaaataacacaaaaaattcatttatagaagtttatcccatttacatttacttatttgattttaacaatttacctagtttacttatgagaactaagatattagacaaaggtagtcatcatttcaagttattatcctgttaaccatttttatagcc

SEQ ID NO: 930714 - DNA, 607 bp, Homo sapiens
gtgccatggtggtttgctgcacctatcaacccatcacctaggttttaagccctgcatgcattagctatttgtcctgatgctctcccttccctttcccccaccctccacaggccctagtgtgtgttgttcctctccctgtgtccatgtgttcacattgttcaactcccacttatgagtgagaacatgcagtgtttggttctctgttcctgtgttagtttgctgaggatggtggcttccagcttgtgatggcgaattttatatgtcaagttgacttggcaatagagtgcttagatatttagctaaatattattctggatgtttctctgagagtgtttttggatgagattaacatttaatgtggtagactgagtaaaacagattgtcgtccctaacgtgggtgggcctgagccaatcaactgaaggcctgaatagaacgaaaaggctsacccctccctccaataagacagaattttttccttactgactgcctttgaaccgggacattggcttttttcttgccttcagacactaacttaaatactggctcttcctgggtctcaaaccttctagcctttagtctggaactaaaccattggctctcctacat

SEQ ID NO: 930715 - DNA, 620 bp, Homo sapiens
aaaccaaagagcttctgctcagcaaaagaaactatcatcagagtgaacaggcaacctatggaatgggagaaaatttttgcaatctatccatcagaaaaaggtctaataaatatccagaatttacaaggatcttatatatttacgagaaaaaaaaaacaaccccatcaaaaagtgggcacaagatatgaacagacacttctcaaaagaagacatttgcgcagccaacaaacatgaaaaaaagctcgrcatcactgattatcagataaatgcaaattaaaaccacagtgagataccacctcacaccagtcagaatggcaattattaaaaagtcaggaaacaacagattctggtgaggttgtggagaaataggaatgcttttacactgttggtgggaatgtaaattagttcaaccattgtggaagacagtgtggcgattcctcaaggatctagaaccagaaataccatttgacccagcaatcccattactgggtatatacccaaaggaatattaatcattctaccataaagacacatgcatgccacacgtatgcttattgcagcactgtttacaatagcaaagacatggaaccaacccaaatgcccatcaatgatagactgga

SEQ ID NO: 930716 - DNA, 620 bp, Homo sapiens
aaaccaaagagcttctgctcagcaaaagaaactatcatcagagtgaacaggcaacctatggaatgggagaaaatttttgcaatctatccatcagaaaaaggtctaataaatatccagaatttacaaggatcttatatatttacgagaaaaaaaaaacaaccccatcaaaaagtgggcacaagatatgaacagacacttctcaaaagaagacatttgcgcagccaacaaacatgaaaaaaagctcggcatcactgattatcagataaatgcaaattaaaaccacagtgagataccacctcacaccagtcagaatggcrattattaaaaagtcaggaaacaacagattctggtgaggttgtggagaaataggaatgcttttacactgttggtgggaatgtaaattagttcaaccattgtggaagacagtgtggcgattcctcaaggatctagaaccagaaataccatttgacccagcaatcccattactgggtatatacccaaaggaatattaatcattctaccataaagacacatgcatgccacacgtatgcttattgcagcactgtttacaatagcaaagacatggaaccaacccaaatgcccatcaatgatagactgga

SEQ ID NO: 930717 - DNA, 620 bp, Homo sapiens
aaaccaaagagcttctgctcagcaaaagaaactatcatcagagtgaacaggcaacctatggaatgggagaaaatttttgcaatctatccatcagaaaaaggtctaataaatatccagaatttacaaggatcttatatatttacgagaaaaaaaaaacaaccccatcaaaaagtgggcacaagatatgaacagacacttctcaaaagaagacatttgcgcagccaacaaacatgaaaaaaagctcggcatcactgattatcagataaatgcaaattaaaaccacagtgagataccacctcacaccagtcagaatggcaattattaaaaagtcaggaaacaayagattctggtgaggttgtggagaaataggaatgcttttacactgttggtgggaatgtaaattagttcaaccattgtggaagacagtgtggcgattcctcaaggatctagaaccagaaataccatttgacccagcaatcccattactgggtatatacccaaaggaatattaatcattctaccataaagacacatgcatgccacacgtatgcttattgcagcactgtttacaatagcaaagacatggaaccaacccaaatgcccatcaatgatagactgga

SEQ ID NO: 930718 - DNA, 612 bp, Homo sapiens
gtgtttggttttctgttcctgtgttagtttgttgaggatgatggtttccagcttcatccatgagctgcaaaggatatgaactcattcttttttaccacggcatggtattccatggtgtatatgtgccacattttctttatccagatgggcatttgggttggttccaagtctttgctattgtaaagagtgctgaaataaacatacatgtgcatgtgtcctttatagtagaatgatttataatcctttgagtatatacccagtaatgggattgctgcgtcagatggtatttctggttctagatccttgaggaattgccacactgtcttccacaatggttgaattaatttacattcccatcaacagtgtaaaagtgttcctatttctccacatccttgccagcatctgttgtttccggcctttttaatgatcaccwttctaactggcaggagatagtatctcattgtggttttgatttgcatttctctaatgatcagtggtgatgagctggagtgttttggttaaccttctttttctttcagcatcttgaatatgtcattacacagcctctggcttccctggtttctgatgaagtgtcagctcttaatctttttg

SEQ ID NO: 930719 - DNA, 663 bp, Homo sapiens
taatgaaaagggttgggatgagttttttaaggaatggaaagaggagtggggaaaggatttaggatctatggggtcagctacatttatctagaacagaataatgggttgtggagggaggtattgaggataggagagtatatgggtttggcatcacggtgtggataggcaagacaatttggttgataaggtgcagatcctgaactaacctgtaagacttttccgggttttggacaggtaaaatggaggaattgcaaggagagtttataggctttagaaggccatgctgyagcaggccagtgataacaggctttaatccttttaaagtgtgctgtgggatgggatactggtgttgagcggggtaagggtgattaggttttaatggaatggtaaggggtgcatgatcggtcaccaaggagggagtagaggtgtcctatacttgtggattaaggtagggagacacaaggggatgatgcgaaggaggatttaaactggggaaaagggcagcaatgaggtgtggctatagcccaggaatagtcagggaagcagacaatttagttaaaatgcctcacctaataagggaactgggcaggtggggataactaaaaaggagtgcataaaagaatgttgtccaagttggcaccagagttggggagctttaagagg

SEQ ID NO: 930720 - DNA, 597 bp, Homo sapiens
ccatgttgttgaatacggcaggatttccttctttgttaaggctgaataaaattatattccattgtaagataaagaatacgtggcacatatacataatggaatactgtttagatgtaagaaagaacaaaattcgactgggcgcggtggctcacgcctgtaatcccagcactttgggaggccgaggcaggcggatcacgagatcaagagatcaagaccatcctggccaacatggtgaaaccctgtctctactaaaaatgcaaaaattagctgggcctgttagtgtgygactgtagtcccagctactcaggaggctgaggcaggagaatcgcttgaacccgggaggtggaggttgcagtgagccaagatcctgccactgcacttcagcctggcgacagagcaagacaccgtttaaaaaaaaaaaaagaacaaaattctatcatttgtggcaacatggatgagcttggaggacgttatgtgaatgaaataagtcaggcccagaaagagaaatactgcatgttctcaagttgatctcaagacatagagaatagaacagtggttattagagggggggcagtgtattgggggttaggggatagc

SEQ ID NO: 930721 - DNA, 664 bp, Homo sapiens
aacctgtgactgtcttattttagttagcataatgtcctcaagatgcatccatgttgttgaatacggcaggatttccttctttgttaaggctgaataaaattatattccattgtaagataaagaatacgtggcacatatacataatggaatactgtttagatgtaagaaagaacaaaattcgactgggcgcggtggctcacgcctgtaatcccagcactttgggaggccgaggcaggcggatcacgagatcaagagatcaagaccatcctggccaacatggtgaaaccctgtctctactaaaaatgcaaaaattagctgggcctgttagtgtgtgmctgtagtcccagctactcaggaggctgaggcaggagaatcgcttgaacccgggaggtggaggttgcagtgagccaagatcctgccactgcacttcagcctggcgacagagcaagacaccgtttaaaaaaaaaaaaagaacaaaattctatcatttgtggcaacatggatgagcttggaggacgttatgtgaatgaaataagtcaggcccagaaagagaaatactgcatgttctcaagttgatctcaagacatagagaatagaacagtggttattagagggggggcagtgtattgggggttaggggatagccagagatttgttaacagat

SEQ ID NO: 930722 - DNA, 600 bp, Homo sapiens
tatgagctattgtggagtaagatattataatatttttgttctggacctattacgtttgggacaatagaataatatatataactggaagcatgaagtgagaacatacttgagatgtcaactaagtttttaaaagctaaaatcatagtggggtctcagcctgagaacttgaaggcggccctatttgaatggggcatgtttgagtataacttgaggtccagtagggactgctgctcaattaaggaggtttagtgtatgaatttaagtaccagtaataagccaggtatcattcttgagaagtccatgctmtcctagaattcagaatctggtaggtactgagatactcttgggaaataactattctaagggagaagaatgttgaacaccggttctgggctgaaagaagcaagctctcagcttcattcctcctctactttccaccctcctctaccctccatcctcctcaccccaagactaaccttggcataccactcatctcagttaatactagaactgtaggaatgtgaagggaataggtaagttctgtgaagtaagttgcaccagtctgcatctggaaagaaatgtagcaggaaaaagcaccag

SEQ ID NO: 930723 - DNA, 584 bp, Homo sapiens
ctatttctccatccagttttgttcccttgctggcgaggagttgtgatcctttggagaagaagcattctggtttttggaatgttcagccttttcatgccagtttttcctaatcttcatggatttatctatctttggtctttgctgttagtgactttcgaatggagtttgcatggtcatcctttttgttcatgttgatgctattggtttctgtttgttagttttccttctaacaatcaggccccttttctgcaggtctgctggagtttgttgtgggtccactccagaccctgttttcctgggtatcaccagtggaggctgcaaaacagcaaaggttcctgcctgctccttcctctgaaagcttcatcccagaggggcacctgccagatgccagtgggagctctcatgtatgaagtgtctgttgacccatgttgggaggcrtttccctgtcaggagccacagggaccagggacccacttgaggaggcagtctgtcccttagcagagctcaagcactgtgctgggagatctactgctctcttcagagccagcaggctggaacgtttaagtctgctgaagctgcgccca

SEQ ID NO: 930724 - DNA, 732 bp, Homo sapiens
gaggctagaagacagtgagatggcatagtcaaagcgctgaagggaaaaaagtgtcaaccaagaattctatatccagcaaaactggtcttcaaaaatgttggaggaattaagacatttctagataaacaaaaactgagagaatttgtcactaagcagatccaacctaaaagaaataccaaggaggtccttcaggctaaattgaaaatacactagatagtaacttgaatccacatgaagaaataaaaccaccagtaaacgtaactaygtaggtaaacataaaagacagtataaacgtattttttcttatttgattaaaaaaattcataaagcattaacgataaatctatgtcaatgggaaaaatgtataaagatataatttgtgttaatagcagcataaaggagagagaggtacagagccaaataggagcaaagttttgtgtactatcggaattaaattggtattaatttgaactagattgttataaactaagttgctaatggtaatcttcagggaaaccactagaaaaacaactcaaaaatatataataaaagaaatgacaagaaaattaaaatggtgcaccagagtatttttctatgaaaacctcactctcgaggaaccagcaaaaaatggggagcctgaactccctgaggaggggaggtatgcatatcctctttgttcctcagccctacgctttactcataccttaacataaaatatccagcattccttag

SEQ ID NO: 930725 - DNA, 385 bp, Homo sapiens
ctatccttgagaataatccatgtgctgaggaaaaaaatttgtattctgcagccattggataaaatattttgtaaatatgtgttatatccatttggtctgtagtgcagattaagtctgatgtttctttgttgatttttctgtctgaaagatctgtctaatggtgaaagtggggtgttgcagtctccatctattaytgcactgtggtctgtctctttctttagctctaataatgtttgatttatatatctgggtgctccagtgttgggtgcatatatatttataatcgttaactcctctgactgaattgacccctttataattacgtaatggccttctttgtctcttcttgtagtttttgtcatgaagtacattttggctgatataa

SEQ ID NO: 930726 - DNA, 385 bp, Homo sapiens
ctatccttgagaataatccatgtgctgaggaaaaaaatttgtattctgcagccattggataaaatattttgtaaatatgtgttatatccatttggtctgtagtgcagattaagtctgatgtttctttgttgatttttctgtctgaaagatctgtctaatggtgaaagtggggtgttgcagtctccatctattattgcaytgtggtctgtctctttctttagctctaataatgtttgatttatatatctgggtgctccagtgttgggtgcatatatatttataatcgttaactcctctgactgaattgacccctttataattacgtaatggccttctttgtctcttcttgtagtttttgtcatgaagtacattttggctgatataa

SEQ ID NO: 930727 - DNA, 584 bp, Homo sapiens
ggttagaatataaagcaggtagaaaaatgcgaaaagagagtggcttagcctcccagcttacatctttctcctgtgctggatgcttcctgcccttgaacatcagactacaagttttttatataagtttatgtatataatatatacatatatatttcattagttctgtcyctctagagaaccctaacataacatacaaaggatatgaatattcagtacatcaaagagatatctgcacctccacattcattgcagcttattcacaatagcaacaataaggaatcaatctaagtgtccatcaatgaatggagaaaatgtgatatatattgatatatatatatgactattcttcagctttaaacgagaaggaaattctgtcattcgtgacatcatagatgaacctaggaagacattatgttaagtgaaataagccatgcacagtaagacaaatactgcaggatttcacttacatgtagaatctaaaaaagtcaaactcacagaaatcaggagaaaaaatgtggcttaccagaggctgggatggaagatatgtagggggaaatgttggtcaaaggatacaaaattttagt

SEQ ID NO: 930728 - DNA, 599 bp, Homo sapiens
taaaggtcattcttgctatgcaaagagactggcagcatttttgcccctgccctagagatttgagaaactttgaacttgagggagatgatttagggtatctggtggaagaaatttctaaccagtgaagcatacaagaggtgacttgggtgtgttaaaagcattcatttttaaaagggaaacagagcataaaagtttggamaatttgtagcctgatgatgcaatagaaaagaaaaattcattttcggaggagaaattgaagccagctgcagaaatttacataagtaacaaggagccaaatgtaaatcactaagacaatggggaaaatgtcttcagggtatgtcagagatctttaaggcagcttgtcccattacaggcccagaggcctaggaggaaaaaatggttttgtgggctgggcccagggccccctgctgtgtgcagcctagggacttagcgccctgtatcccagctgtggtagccatggctaaaaggtgccaaggtacagctcagactgttgcttcagagggtgctagcctcaagccttggcagcttccacgtggctttgagcctgcgagttcacagatgtcaagaattgaggattg

SEQ ID NO: 930729 - DNA, 608 bp, Homo sapiens
agccatggctaaaaggtgccaaggtacagctcagactgttgcttcagagggtgctagcctcaagccttggcagcttccacgtggctttgagcctgcgagttcacagatgtcaagaattgaggattgggaacctctacctagatttcagatgatgtatggaaatgcctggatgtctaagcaaaagttagctgcaggggcagggccctcatggagaacctctgctagggcagtgtggaaaggaaatgtggggttgaagcccccacacagagtccttactgggacattgcctagtggagctatgaggagaaggccactatcctccagacccyagaatggaagatccgacaacatcttgcaccttgcaactggaaaagccacagacactcaatgccagcccatgaatgcaaaccagagggaggcggtacctggcaaagccacagatgcagagctgcccaagatcatgggaacccacctcttccatctgtgtgacctggatgtgagacatggagtcaaaagaaatcattttggaactttaagatttgactgctccactggatttcggactggcgtggggcctgtggcccctttgttttgtccaatttctccca

SEQ ID NO: 930730 - DNA, 666 bp, Homo sapiens
aaaaggcagaggaaaagtgaatatgctgccaccttagctggaacatttgtcttctgctctcagaggacaccagtgcttcttttttgcaagactttagactagaattgagactcagaacattgacttcgttttttccyttttttttgagatagggtcttgctttgttttccaggctggagtgcagtggcatgatcatagctcactgcagccttgacctctctccagggctcaaatggtcctcccatcctcccacctcagcctcccaagtagctgacactacaggcagcaccatgcagcaccatgctttgctaattcttttattgtttgtatagatggggtctccctatgttgcccaagctggtcttgaattcctgggctcaagccatcctcctgcctcagattcccaaatcgctgatattggaggcaagaactgctgtgcccagtcaggccttcttttttggagtggaacttcaccacagagtttcctgggcctctagctcacagacagccaaatcatgggacttagtctttttaattgcacgagccagtcccttataataaatttctttctgtatgtcaatatatattgtactgtttctgtttctgtctttttgagaattcttataaatatatccaatgcttaaatctgataagagtcagaggtat

SEQ ID NO: 930731 - DNA, 666 bp, Homo sapiens
aaaaggcagaggaaaagtgaatatgctgccaccttagctggaacatttgtcttctgctctcagaggacaccagtgcttcttttttgcaagactttagactagaattgagactcagaacattgacttcgttttttcctttttttttgagatagggtcttgctttgttttccaggctggagtgcagtggcatgatcatagctcactgcagccttgacctctctccagggctcaaatggtcctcccatcctcccacctcagcctcccaagtagctgacactacaggcagcaccatgcagcaccatgctttgctaattcttttattgtttgtatagatggggtctccctrtgttgcccaagctggtcttgaattcctgggctcaagccatcctcctgcctcagattcccaaatcgctgatattggaggcaagaactgctgtgcccagtcaggccttcttttttggagtggaacttcaccacagagtttcctgggcctctagctcacagacagccaaatcatgggacttagtctttttaattgcacgagccagtcccttataataaatttctttctgtatgtcaatatatattgtactgtttctgtttctgtctttttgagaattcttataaatatatccaatgcttaaatctgataagagtcagaggtat

SEQ ID NO: 930732 - DNA, 724 bp, Homo sapiens
gggttggaatcaacttcttccaaactgttaatggtgacattctgacctcctcccatgaatcctgaatggtcttaacagcatctaaaatggtgagtcctttccagaagcttttcctttttttttytcctaaatccatcagaggaatcactatctatggcagctagggccttaagacacgtatttttaaaataataagacttcaaggttgaaagtattccttgatccatgggctgcagaatggatgttgtgctagcaggcacaaaaacaacataaatctccttgtacatctccctcagaactcttgcttgaccagatgcattgtcaatgagcagtaatattttgaaagaaaacttttctgagcaggtctcgagagttataatattcagtaaaccatgctgtaaacagatgtgctgtcatccaggctttttgttccacttttagaaaacaagcaggatagacttagcataatccttaagggccctaggattttcagaatggtaaattctttaggttggcttcaacttaaaggcacctgctgcattggcacccaaaatgaggggatagcctctctttcgaagcctcgaagctgggcattgacttctctctagctattaaattactagatggcatcgtcttccaatagacagctacttcatctgcatcaagaatctgttgtttagtataatcaccttcatcaattatcttagttagatattcttgataa

SEQ ID NO: 930733 - DNA, 724 bp, Homo sapiens
gggttggaatcaacttcttccaaactgttaatggtgacattctgacctcctcccatgaatcctgaatggtcttaacagcatctaaaatggtgagtcctttccagaagcttttcctttttttttctcctaaatccatcagaggaatcactatctatggcagctagggccttaagacacgtatttttaaaataataagacttcaaggttgaaagtattccttgatccatgggctgcagaatggatgttgtgctagcaggcacaaaaacaacataaatctccttgtacatctccctcagaactcttgcttgaccagatgcattgtcaatgagmagtaatattttgaaagaaaacttttctgagcaggtctcgagagttataatattcagtaaaccatgctgtaaacagatgtgctgtcatccaggctttttgttccacttttagaaaacaagcaggatagacttagcataatccttaagggccctaggattttcagaatggtaaattctttaggttggcttcaacttaaaggcacctgctgcattggcacccaaaatgaggggatagcctctctttcgaagcctcgaagctgggcattgacttctctctagctattaaattactagatggcatcgtcttccaatagacagctacttcatctgcatcaagaatctgttgtttagtataatcaccttcatcaattatcttagttagatattcttgataa

SEQ ID NO: 930734 - DNA, 641 bp, Homo sapiens
gtggctcttaccaaaaaaaatgaaaatcacaagttaattctgcaccttcaactgaggtattcaggttctctcatcatgactaggcagttgttgtgacccacggagagcaagaaaaagcagggtggggcaacagcccacctaggagctacacggggtaaggggagctcccttccyccgccagccaagagaggcggtaagtgattgtgctatgccccctgggaaaccatgcttttgccatggacctttgcaactcagaaaataggagattccccttgtgagcccacgtcaccagggcctttggccccaaccacagagctgtacagactccccagactctgttcggcagtcgctctggcaggcactgagacgcaggagttcttttgcatactttgtcctcaggaattccagtgaggcaggagattgttcacttctttaggaagagggctgaagccagggagccaagtggcatcattcagcgggccccaatcccacgaaaccttaccaactaagacccgctggcttggaaagcttgccagacagtggcagcaggctggagaattccgaaaacgactgagttcccagggagagggacagccaccactgtctctgaggctccagtcggctgttttcccctgtcggtg

SEQ ID NO: 930735 - DNA, 641 bp, Homo sapiens
gtggctcttaccaaaaaaaatgaaaatcacaagttaattctgcaccttcaactgaggtattcaggttctctcatcatgactaggcagttgttgtgacccacggagagcaagaaaaagcagggtggggcaacagcccacctaggagctacacggggtaaggggagctcccttcctccgccagscaagagaggcggtaagtgattgtgctatgccccctgggaaaccatgcttttgccatggacctttgcaactcagaaaataggagattccccttgtgagcccacgtcaccagggcctttggccccaaccacagagctgtacagactccccagactctgttcggcagtcgctctggcaggcactgagacgcaggagttcttttgcatactttgtcctcaggaattccagtgaggcaggagattgttcacttctttaggaagagggctgaagccagggagccaagtggcatcattcagcgggccccaatcccacgaaaccttaccaactaagacccgctggcttggaaagcttgccagacagtggcagcaggctggagaattccgaaaacgactgagttcccagggagagggacagccaccactgtctctgaggctccagtcggctgttttcccctgtcggtg

SEQ ID NO: 930736 - DNA, 571 bp, Homo sapiens
agacatatattcttattgttttatgtaagaactgaaaacaatatttttagaagaattttgatgagagatttgattgaatcgtatttttattttgggaaaattgtcaagaaaatatgaaaatgagggttatttcttacgcagagcaatctgtgtaaagctatctgaacaaccattytgtatatatgggtatcttatcttttgcatttggataactagatttttttttctgataatttttcacgtatttttaaagatttctccatttctgcattctttcagcttactttgatatattctcttttaaatcatttttctagcatttcatagttatttttaattgaacatatgaccagttttgtatttgtgagtgttggtttaagaccagcaaatcactacttttagcatgcccaatgattccaagccagcttcctcttgtactggcattagtttcaagtctcctcaatctttaaccaatttcatccttaaaaaaaaaaaagacaagatttaacacaatatttaaataatagcacaacaccagtaatagtgcaaactgtggtgaccttgccaaact

SEQ ID NO: 930737 - DNA, 622 bp, Homo sapiens
ctcagctctacttcaaatctaggttttcttcccagttgccagctctgctaacctatgatgactttagctccataccagatgtgacgtgaaagcgactgcaaagctcccacaattgttcaaggtctaaaactgaaaataaatccattattccatattaccatagtggttctgcttttctaagtgatagggattccattaaatcttttctattcagaatatgtacttggttacaaatattctttagtgcakgcctttcttttttaaaatttatgatattgtcaaaagaaatagtactaatgtactgagcctaagtatgttattttattctcccttgttttggggatagggacttggaatatgctcttttacacaattcctctcaaaactggtaagccgaggaattgggagtctgctccataaccagagaatacagaaaaactaacaattaatttgaacttcggcataataatgagttaaagactacttgagtgaattagctgcttcttcgaaatttgttttaatgtgacacttggaaagttatgtcactcatgatgaaatctaaacattaaaattttgaaaacaggctgggcatggtggctcacatttgtaatctcagcacttt

SEQ ID NO: 930738 - DNA, 583 bp, Homo sapiens
gatgacactttgataaccactaccttaatgcttcatttttgcctctttaaaactttacgcttttttaaattcaatttctggttatgatttttgatatcaaattttctcagataaaataactgacaaaattctgcctgattcacaccaatttagtgattgcctcagaagagcactaggaagrgcggggttttttatgtcatactttctcaaaatgaaagcattgcctggccggctgtggtggctcactcctgtaatcccagcactttgggaggctgaggtgggcagatcacgaggtgagaagatcgagatcattctggctaacacggtgaaaccctgtttctactgaaaatacaaaataattagccgggcgtggtggcgggcacctgtattcccagctactcgggaggctgaggcaggaggagaatggcatgaacccgggaggcgtagcttgcagtgagctgagatcacgcctctgcactccagcctgggacactgaacaagactctgactcaaaaaaaaaaaaaaaaaaaaaaaaaaaagctttgcctttggctctcatctaaacatgttatatgacagggtt

SEQ ID NO: 930739 - DNA, 583 bp, Homo sapiens
gatgacactttgataaccactaccttaatgcttcatttttgcctctttaaaactttacgcttttttaaattcaatttctggttatgatttttgatatcaaattttctcagataaaataactgacaaaattctgcctgattcacaccaatttagtgattgcctcagaagagcactaggaagggyggggttttttatgtcatactttctcaaaatgaaagcattgcctggccggctgtggtggctcactcctgtaatcccagcactttgggaggctgaggtgggcagatcacgaggtgagaagatcgagatcattctggctaacacggtgaaaccctgtttctactgaaaatacaaaataattagccgggcgtggtggcgggcacctgtattcccagctactcgggaggctgaggcaggaggagaatggcatgaacccgggaggcgtagcttgcagtgagctgagatcacgcctctgcactccagcctgggacactgaacaagactctgactcaaaaaaaaaaaaaaaaaaaaaaaaaaaagctttgcctttggctctcatctaaacatgttatatgacagggtt

SEQ ID NO: 930740 - DNA, 628 bp, Homo sapiens
tctgggaacaggtaaggtagtgttaagagggaaatttaaggcactaactgctcacttcaaaaagttagaaagctcacaggtaaacaagctaccatcacaactaaaagaactagagaaccaaaggcaaacacatgccaaagctagcagaagaaaaaaaataaccaaaatcagagctgaactgaaggagactgagacatgaaaaaccgttcaaaagatcaatgartccaggagcaggtatttttgaaaaattaaaacaagtagatagactgctagctagactaataaagaagaaaagatagaagattcacataagcataatcagaaataacaagggggatatttccactgtctccacagaaatacaaacaatcatcagagactattatgaacacctctttgcacataaactagaaaatctagaacaaattgataaattcctggatatatacaccctcccaaacttgaacaaggaagaagttgaattcctgaacagaccaataataagctctgaaactgaggcagtaataaatagccaatgaaccaaataaataaataaataaataaaagaaaagagaaagtaaatcctaagtccagatggattcatcgctgaattttaccagatgctcaa

SEQ ID NO: 930741 - DNA, 628 bp, Homo sapiens
tctgggaacaggtaaggtagtgttaagagggaaatttaaggcactaactgctcacttcaaaaagttagaaagctcacaggtaaacaagctaccatcacaactaaaagaactagagaaccaaaggcaaacacatgccaaagctagcagaagaaaaaaaataaccaaaatcagagctgaactgaaggagactgagacatgaaaaaccgttcaaaagatcaatgaatmcaggagcaggtatttttgaaaaattaaaacaagtagatagactgctagctagactaataaagaagaaaagatagaagattcacataagcataatcagaaataacaagggggatatttccactgtctccacagaaatacaaacaatcatcagagactattatgaacacctctttgcacataaactagaaaatctagaacaaattgataaattcctggatatatacaccctcccaaacttgaacaaggaagaagttgaattcctgaacagaccaataataagctctgaaactgaggcagtaataaatagccaatgaaccaaataaataaataaataaataaaagaaaagagaaagtaaatcctaagtccagatggattcatcgctgaattttaccagatgctcaa

SEQ ID NO: 930742 - DNA, 779 bp, Homo sapiens
acccctcccccagcctcgctgccaccttgcagttccatctcagtctgctgtgcctgtgggagtgggaccttctgagccaggcacaggatataatctcctggtgtgccgtttgctaagaccattggaaaagcacagtatttgggtgggagtgacctgattttccaggagccgtctgtcacagcttcccttggctaggaaagggaattccctgaccccttgcacttcctgggggggaaggcaattcctaaccctgctttggctcatgctcgatgggctgcaccctctgtcctgcacccactgtctgataagccccagtgagatgaacctagtacctcagttggaaatgcagaaatcacccatcttctgcgttgctcatgacgggagctgtagactggagccgttcytattcggccatcttggaaccgtccccccaagaaattctctttcctaagattagtgggatattttagactctgggtttcctcctttgctctacttgccaaaccgttatgccaagccactaaaggccctcaccatgagccttcaaaccctgcacagcctattacccaacctttctgtctactccagaaggctctcacctcaatccctgtccgcactcttccagacctcaccaaacctttttccctctacgctgatggatggcgtggagttgcactgagtgttctaacccaatctaagggacccaccctccaggttattgcctacctctctaaacagcttaaagccacagttctcagatggcctgtgtgcctctgagc

SEQ ID NO: 930743 - DNA, 655 bp, Homo sapiens
gcctgtaatcccagcactttgggaggttgaggtgggacgatcgcttgaggccaggagttcaagaccagcttgggcaacacagtgacaacccgtctacaaaaaataaaaaaattacccgtgagtgtgggcgggtgcctgtagtctcagctacccgggaggctgaggagggakgattgcctgagcctgggaggtggaggttgcaataagctatgatcctcccactgcagtccagcctgggcaacagagcaagaccctgtctcaaaaaaacaaacaaaatataaattaaaaaaaaaaaaaaaaaaagaaggggaaatgtggacagagggagggaaacagagggaagaatgtcatttggtgagggaggcagagactggagtgatgggtccacaagccagggaatgccaaggacgccagtgactaccagcagctaggtaagagcatggaacaaattcttttttggagcctccagaaggaagcaactctgccgctattttgatctcggacttccagcctgcagaactgtgagaaaatcaatgtctgttgtttaagccaccccatctgtgatagtttcatcagcctgaacagcctaatgcaacaggaagaggtacagtcgattggtagagactgacgtccggtcgtatgactcaggtgctct

SEQ ID NO: 930744 - DNA, 610 bp, Homo sapiens
caaaaacaggcacatagatcaatggaacagaatagagagcccagacataaggccacacatctatgaccatctgatcatcgacaaagctgacaaaaacaagcaatggggaaaagactccgtattcaataaatagtgctgggataactggctagccatatgcagaaaattgaagctggacctcttccttatagcatacacacagatcaactcaagatggattaaagacaaatgtaamacctcaaattataaaatccctggaagacaaccaaggtaataccgtgttggatataggaaggggcaaagatttcatgacaaagacaccaaaagcaattgaaataaaagcaaaaaaaatgacaaatagtatctaattaaatatagtagcttctgcatagcaaaggaaactatcaacagagtaagcagacagtctacagaatgggggaaaatttttgcaaactatgcatctgacaaaaggctaataaccagcttctataaagaacttaaacaaatttacaaaagaaaaataaacaactccattaaaatgtgggcaaaagacatgaacagacacttctcaaaagaagacatacatgcagctagcaagcatatgataaaa

SEQ ID NO: 930745 - DNA, 583 bp, Homo sapiens
agtgtgcttttatttattggaggaaatagtcttataaagaagcagtttgattttccaggggtacattcatgtagagaaatagatttaatgtatggttatttcttattattgtttctattttaaaaacaaactgtttattctgatttcctcagaaggagacragatatttttcaatcaccttaaaatcatggatttaaatgtacactatagatttaaatccatgatcatacttgtccttattgaagtgaatattgtctgtttttgtccagggagtctactatttgattggcacagaactacattgtcgttggtaactttcttattgcttgctgttttcagaagcaaaagaaactattttttttttcattttctgacccatacataaaggcaaatatttctccaagaagcctccattacataagtggaaaatagtatcgctagattacaatctggtctgggtgttaaggatgcatattgattccagacttggtcatttaggtctatttggtacacaaggcagaataaagggattattgcttgataggtaggtaggtaggtaggtaggtaggtagatagatagata

SEQ ID NO: 930746 - DNA, 595 bp, Homo sapiens
gtatataaatatcctggaactaccctgctttctggtgagcagaaatcttttggcagcaaataaatatctgttggccagcactgaacttctgagtgtgtggctgcctcctgatttcttgccctatagcccgtttccagttgctgcataatcatcaagcacaacacaagattaaaacaaatacttccttaggttgatatttttccatttttacacccagcaggtaaacaaacattcatcaattttctcacagtggactcacttccaatttcaaggaactgattatagagatttctttgaatctactagaaagggggagatgtaggtctgggttacatagttgttacaactttgctgaaaaccctctgagaattctgcaaagaaaactgtacatgaacccctctaggtcattcagccactggtggtatgtacacacrttgctgttctatagaactccagcagggccctcgcccctgagtcttgatttcagaacttaaaggattacccatgcgttcggctgattgctcaatgcttgtattcattcctctcgaaataacgctacaacttaaaacgtaagggtaatagaaatgaagttact

SEQ ID NO: 930747 - DNA, 553 bp, Homo sapiens
ggccaaggcaggaagactgcttgaggtcaggagttcaggagactcccgtctctataaaagataaaaaaaaaatcagagcgggagtggtggctcacgcctgtactcccagcactttgggaggccgaggcaggtggatcatctgaggtcaggagtttgagaccagcctagccaacatggtgaaatgccatctctactaaaaatacaaaaatcagccaggtatggtggcacgcacctgtaatcccagctactcaggaggctgaggcaggagaattgcttgaacctggyaggcggaggttgcagtgagccgagacggtgccactgcattccagcctgggtgacagagcaagagtccgtctcaaaaaaaaaaaaaaaattagccaggtgtagtggtgtcttcttgtagtgggaggctgagatgggaggattgcctgagtccaggaggttgaagatgcagtgaactatgactgcatcactgtaccccagcttgagtaacaaagagagatcctgtctcaaaaaaaaaaaaaaagaaagaaagaaaagaaaaagaaaggaa

SEQ ID NO: 930748 - DNA, 834 bp, Homo sapiens
gaggacagagcgagactccatctcaaaataataataataataataaagaaagaaaatttactaagtctctataagaatagtaagagtctgtgacatttatgcagaattccaccacctacttacaacaaactccatctcagtgtgatggaagctctgctgtaggtgggagtgggcaagaacaaagagcttctactctcccaagctccagtctagggctacagtttcttcctggagaagcaagctgctagaatttcttattcctcactccccagctccatgttgcagaagctctattatgggcagaccaagaatattgggcccagtggttttcactttaactcacttttatagtcttgtttccatgccagaagagaagacaaaaaaagatcagggctaccacctcctcccaatgccccacacataaaacagggatatcactccaacagaagcaggcctttcttccttccctcagctctagagcagtgaaacagaggtttttcccagggggacaggcaggctgtgagaatagagaactccataggtctccctaagggcactgattttatttggaacaaagtgtggtaaagttgaagtccaaggctgctatcaaaawcaatggagattttggtagtaagcaattatgaggaggctggtagcttcatgatagcaataagctaaaccacagaacagaaagaattagggaaagagatagctaacaaaagcctttcctgggattgaaacaagcctcaaagactgtctttgcaaaggggttcaaatttaattggattaggctgtggagcaatttatggcccagagcattgctgaaaacaataa

SEQ ID NO: 930749 - DNA, 565 bp, Homo sapiens
ccagatggatgttaggtatgaggcttatttctgggctctctattctgttttattggtccatgtgtctgtttttgtaccagtactgtgctattttggttactgtagccctgtggtataggttgaagttgggtagcatgatgcctccagctttcaacagtcaagctgagagccaaatcaggaatgcaatcccattcacaattgctataaaaagaataaaatacctaggaatacccctaaccaagtgtattagtccattttcacattgctataaagagctacctkgactgggtagtttataatgaaaagaggtttaattgactcacagtttttcaggctatagaggaggcaagactgggtgaggccttgggaaacttacagtcacgacagaaggcaaagggggaagcacacacgtattcatgtgacaggagagagagagagagaagggggggatgccacacatttttaaaccatgagatctcatgagaactcactcactatcacaagaacagcaagggggaaatccgcccccatgatccagtcacctctgaccaagtccttcctccaa

SEQ ID NO: 930750 - DNA, 576 bp, Homo sapiens
accactgatgggtttagagtaggtatttccaaggtcttgtatttagtgggtaagatatttttaaaattgtcgtggatacataataggtgtatgtatttatgaggtacatgagattttgatgcaggtatataatgcataataatcacatcarggtaaatagggtatccatcacctcaaacatttatcctttctttgtgttataaacaatccagttatactcttttagttgttttaaattatacaataaattattattgactgtactcaccctgttgagctatgaaatagtagatcttattcactgtatctaactatatttttgtacccattagccatccccacgaccccagccacccctgccctcccctactacccttcccagtttctggtaaccatcattctactctctatctccatgtgttcaattgttatcattttttttttagctccccaaaataagtgagaatatatgaagtttgtctttctgttcctggcttatttcacttagcataatgatctccagttctatgcatgttgttgtaaatgacaggatctcattctttttaatggctgaat

SEQ ID NO: 930751 - DNA, 642 bp, Homo sapiens
tgaatgggagtccattcatgatttggctctctgcttgcctgttgtttgtgtaaaggaatgcttgtacctctgtgttgcaggaagtcagggaccctgaatggagagaccggctgaagccatggcagaagaacataaattatgaagatttcatggacatttattagttccccaaattaatacttttataatttcttaggcctgtctttactgcaatctctgaacataaattgtgaagatttcatggacacttatcacttccccaatcaatactcttgtgatttcctatgcctgtctttactctaatctcttaatcctgtcatcttcataagctgaggaggatgtatctcgcctcaggaccctgtgatgattgcgttaactgcacaaattgtttgtagagcatgtgtgtttgaacaatatgaaatctgggcaccttgaaaaaagaacagggtaacagcaatgttcagggaacaagagagataaccttaaactctgactgccggtgwgccaggcagaacagagccatatttctcttctttcaaaagcaaatgggagaaatatcgctgaattatttttctcagcaaggaacatccctgagaaagagaatgcatccctgaaggtaggcctctgaaatggccgcttcag

SEQ ID NO: 930752 - DNA, 584 bp, Homo sapiens
tcactggactgggggagtctagggaaactcacagtgttaaagtaacaggtaaacagacataacttggaattttagcctgtcaaatgtggatggcacctgggaagttgatacttccctccgacatcataatccctcccataacactcctgacaatcagttcacakaaaaaaaagatcctagcatcacagggcagctcattctcctagtgaacagcactgacttattagagcattctttcttatatagaacagagatatgtctggctgacacttttaccaattaatattaaatctgtccattagccttacaaaatcacccttcaatgtgacaaaatcttgggtatttggaaagggcaatcatgttccttcttaagtgcctattctacagggtaacattccctaggtttcttggatttgagatgtctcagtatcagatcactttcctagggacatgaaccactttgggacaaagccctacttaacaggtgggggccagaagtgagtatcccattccaggtgctgacagacaacagccaagtccagggagacaatctcttccttccttctagttcctctacttttaat

SEQ ID NO: 930753 - DNA, 657 bp, Homo sapiens
accttcatgctctcatcccaaatccccaactgagccaatgtcctgaaaacctgaatcctctctgcagaatacttctggttttgcatgttaaaatgaagaatgaaaaaatatgcactaagataacatttttaatgcattaagcattcaagagtgcaggtttagtggaaaggttaaatttaaggcaaaaatataacttgtcagtttccactgaaaaagcatttgaattctagtacatactgggctctgcgacctcttttttctttttccacacagcagtctcccaagacatgttctttcacccacttactttctttctattattcttagaccatgatccatagaaaacaaggtttacattaatttttagggaacaaaatagactgcctccaaagtatttgtgtttcaaataaacatcaaaagcaaaatttatagtccttcctgggcttctggctgtcaaaragctgcatatgtattacagttatgtcccttacttcatatagagtgtcagacaaatgccatcacaaaacataactgggcaggcacaacgatgtctcaaacaaatcactgcctatacaaagaagtcaagggcatcccagtttgcaagcccacattgacagatttcaagacctgagagagagctctgtcaatcctctccca

SEQ ID NO: 930754 - DNA, 604 bp, Homo sapiens
gtacagggcaaagatgcccactctagccgcttctattcagcatagtactgagagtcctagccagaacaaattagagatgaaaaagaaataaaattcatccaaataaagaaggaagtaaaattatctgtttgcagatgatatgatcatatgtgcagaaaaccttaaagactcaacaatacatcaaaatattagaacaaatgaattcattgaagttttaggatacaaaaatmaacatacaaaaatcagtgatatttctatatactaacaacgagccatctgaaaacaaaattaagaaaacaatcccatttacaacagcaacaaaacgaatgaaatatttagaagttaaagacgtgtatactgaaaactaaaacattgatgcacgaaactgaagatgacacagataaatgaaaaaacatcatgtgttcatagattagaagaattaatctgggagtgatggcttgtgcctgtaatcccagctattcaggaggctaaagcagcaagatgcttgaggccaggagttctgggtaagcttgggcaacatagcaagatcccatctcaataacactaaattaaaaaattagctggtcattgtggcgtttgcctt

SEQ ID NO: 930755 - DNA, 643 bp, Homo sapiens
gccgatgcaatagaataaagcaggcagaagttgggaagagcagacttgctgagtcttctggctttcgtctttctcccacgctggatgctttccgctctcaaacatcagactccgtgttcttcagcttttggactcttgggccacaagcaggtgggtgttgggagcactaaagtgtcttataaagttaagatagtattattctcaatctgataacttgcatcaaaaacttgacatctgctataagtacaatggagtattttgtgtccaattctatgacttttaaaaaattaatttgaggcatttgtgtaattttataattcagattaattctgtcttatcttttttgarccctattttcaaataaggaatatttgagaaaccaattgtttattcaaaatgagtattttatgaaataagggtaaagcatcatgtttttagtgaagagaaacctgtcactgagataacaattggtttgaatcttccttacttcatttttacatgaaatctccatgcttatgctagagccacaagcttgctaaatttctttgtgcacaattttacagttattaccttcattttaagagagccatattagaaattcaactgcattatttactttaccagggagcctttctcaggaaca

SEQ ID NO: 930756 - DNA, 584 bp, Homo sapiens
caccacttggttaagcttgtgataatccactgtcttctggattcttcaggatccatctgtctttggcacaggccaaatacataagccgaatggggatgtggtaggaatctccacccctgtgtcttcaagtccttgatagyagcactaatctctgcaatcccttcagggatgggatattgtttttgatttattatgtttctaggtagagacagctctaatggctttcatttggccatttccaccataatagccctcccttcacaggttagggaagcaatgtggggattctcccagcctctaagtatgtctattcccttggacccaccatgagtcagacccgagctaaaactccactgatcagctcacctctatgagcctcgcctctgactagagggccacagtaacatttcgggcctcctggaatcaatgtcagcacagagccggtgtctagcagtccatgaaacctctgattacttccttttcctaaagcacagttaccctgggtcacagatccctttggcgaagcctgggagaaagagtaatagtataaattttcagtagtgtccccctccctgagggaaccc

SEQ ID NO: 930757 - DNA, 590 bp, Homo sapiens
cacagactcacagcacttactgtgtgccagaacaagtcctgacccgtgtaaccctcacaacagccttctgaggtagcttctattatgatgcccattctactttgcaaaccaaaagtaaaatgcaaaggtcgcccttcagccatctaaatggactccctcctctcaaccaggacactccaaatttaacctgaaagactggttcagattgtggagggcagtgggaggtcggatgtgccttattataccctccttccttttggaattcaggaaaagccgcaaagcctttcacatcaacacagaccttaattctgttaagaaacatttacaatctattctctctraggcctgctacctggaggcttcatctgcatgataaaatttggtctctacaaccccttatcacaacccagacattcctttctattgataatagttctttcaaccaattgccaatcagaagattttaaaatctacctacccacaacccaaacacctcccatgaggccccacctttcaacactgcagcattggagattaaatttcagcatgaactttgatggggacaaactagccatatgcaaaccatagca

SEQ ID NO: 930758 - DNA, 609 bp, Homo sapiens
aattcattgggagttttttttattgttagtgcgttttgtgtcctatctaagagaattctgccttctctaaactcatgaaaatttctggatttttgtgtctagagtgttagggctctcacttttatacttaggtctatctatcatccattttcaattaattttttatatggagtgagacagagattgagattcatctttgtttaccatatccagttgttccagcacyacttcttaagatgaacttcctttccccactgaattgccttcgtatctttatcaaaaataatttggccatacatacatggttctttttctgaaatttccattttgttacactaacctgttccttatgccaataccacactgttttgattactatagctttatcattagttttgagatcaggtaatgtaaatcctccaattttgttctttttcagtcttgttttgtctaatgtagatcttttgtatttctgtaaaattttgtaactactatttccttcttaacatagcctgtaatcgcagcactttgggagaccaaggcgggcagatcatgaggtcaggagatcgagaccatcctggctaacacagtgaaaccttgtctctacta

SEQ ID NO: 930759 - DNA, 617 bp, Homo sapiens
  misc_feature 373: n = A,T,C or G
ggtgagcagcagcttcccaataaaatctccggagttgggtgagtgggctcaagaatgtgcactaagagacaaaatcgtggagtttaactggtataggaccttcttctaggagcactcaactggtaagggaaaaatgcctcaagtgagcatgcgcacaactccagtaaacacattgttgacactgtgcatgagacccctctcaagtactagcaggccactgcgcacgaagaatggcaatgtataaaaccccaagtcaaaggtcaaactgtgtgcttgaatttctcaagttgccagcttggccctyttccaagtgcactttacttccttttgtttctgttctaaaactttttttttttttttttttttttttttngagaaggagtctcactctgttgccaggctggagtgcagtggcgcgatctcggctcactgcaagctccacctcccgggttcacgccattctcctgcctcagcctccccagtagctgggactactggcacgggccaccccacgcccagctaatttttgtatttttagtagagacaggctttaaccatattggccaagatggcctcggtctcttgatctagtgatccacccgcctcagtatttgagt

SEQ ID NO: 930760 - DNA, 446 bp, Homo sapiens
tttcttaaaaaagttattaaaagaaaaataatttttgtttaattcaaaggttgtttataaaacaaggtaaaaggaagtagtaaataaggcagttgtaaagaaagttataaagaggtaattttggtaagttaaaaggaaaataattttytatgagaacaaattttgtacagtaaattattggcctgaaataaaatgactgtttatttaagaaagaggaataattaggctaaaagaggaagtttaagcatctcacaaatttttataagtcttaataaggtttgtaaaaagaaaatgtatggaaaagttttacgtgattaagttggctaaaattaaaaggaaattattaataatagtctttttagagattgggtttgatattaaaaataccctgatacccaaaataattgtttaaaaaaccaaaatttccttaaagtattcatttgttc

SEQ ID NO: 930761 - DNA, 446 bp, Homo sapiens
tttcttaaaaaagttattaaaagaaaaataatttttgtttaattcaaaggttgtttataaaacaaggtaaaaggaagtagtaaataaggcagttgtaaagaaagttataaagaggtaattttggtaagttaaaaggaaaataattttttatgagaacaaattttgtacagtaaattattggcctgaaataaaatgactgtttatttaagaaagaggaataattaggctaaaagaggaagtytaagcatctcacaaatttttataagtcttaataaggtttgtaaaaagaaaatgtatggaaaagttttacgtgattaagttggctaaaattaaaaggaaattattaataatagtctttttagagattgggtttgatattaaaaataccctgatacccaaaataattgtttaaaaaaccaaaatttccttaaagtattcatttgttc

SEQ ID NO: 930762 - DNA, 794 bp, Homo sapiens
acttgaggtcaggggtttgagaccagcctagcctacatggtgaaacactgtctctactaaaaatacaaaaattagccaggtgtggtggtgggcacctgtaattccagctacttgggaggctgacgcatgagaattgcttgaatccaggaggcagaggttgcagtgagctgagatcatgccacttcactccaacgtgggcaacagagaggaactccatctcaaaaaacaaaacaaaacaaaacaaaaacaaaaaaacaaaaacaaaaaagatttcaccagaaataacaaatcagtaatcttgtttcaaaattcgtttttttctcagaagtctttgttgtaatgacacttgaaactacatacaattcatgactctcttrtaggtgtttataaagttgggaaaagtaacacagtaagagacttcaccatctgcaagtgaaaaaaatccttttatttataatctcaactattctgccaaaaccagtgctttctgtctagaataaattgatttttgcttatgcataaattaaatgtcaacacatctttcacaaatctacttatggccagccaaaaaccaagctgttgagctagaaaacaaatttaatacagataactagatattctatttgttcaacaaatagatacaaaagaaaggagcttcagtgatcccaagttgtcagtgttaattagttgatatttgaagaaaattcctgcctcttcctcctaaaccactgtggatcaggaaacctgttatatattatatttctgtccaactatgtcttataacgcattagttc

SEQ ID NO: 930763 - DNA, 609 bp, Homo sapiens
tctttagaaatttctcatcttacatgactaaaatcctatccctatgaacagcaattcccaatttccccagcccacagcctccaagaaccatcattccactttctgcttctgtgagtttttagatacctcatgtataggtggaatcatayggtatttgtccttctctgattggcttgttttattttttatttttatttatttttttgagacggagtctcgttctgtcaccaggctggagtgcaatggcgtgatctcggctcactgcaacatccacctcccagtttcaagtgattctcttgcctcagcctcctgagtagctgggactacaggcatgtgccaccacgcccagctaattttttttgtatttttagtagagacggggtttcaccacattggccagaatggtctcgatctcttgacctcatgatctgcctgcctcggcctcccaaagtgctgggattacaggtgtgagtcacagcacctggccttctttatttttatttttgagacagagttgcgctcttgttgctcaggctggaacacaatggcacggtctcggcttactgcaacctccacctcctgggttcaagtgatcctcctgcctcagcc

SEQ ID NO: 930764 - DNA, 722 bp, Homo sapiens
catggactgcatctggggctccatttgaagaacaatttgtagatttacagcttcaattctggaagagacaaacttaacaaggaggttaaagatacagggattgaaatgtatggcctgcagtgtaggggattatttctttggcacactttacaggccctgactatctgcttgataatttttwaaatgcctggtccagtaaataataatttggccatctgatggatgctatcaatgcctaagtttaaggtttggtgaagggttttaagtaattttcatcggttagctgcaggcaaaagtatttttcctttgttggctagccatcctgagggtgggttccctattctatttctcctgttgagtactggggcttggcttcctggaggggattaccccatagtaggggtctttctataagcatttttaatggagggtcctgccttgtggctcttttggcttcaatattctcttggctattcccttttattttcttttcctttcctttctgatgaccccggcagtgtaagactgccacctctttagatttctgcacagccaataataatctcctgacggcttcctgatgtttgattggtgttctctcggaagttaggaattccctttctctccatattgctgcatgggcatggaggactaggtaagcatacttacagtctgtatctctatttacccttttttctttttctaattttagtgcccaagtg

SEQ ID NO: 930765 - DNA, 602 bp, Homo sapiens
atcatcccaacagtcttcatccccccactgtaccctacccagcaccagagtcctaaacaaccattaatctatatacttgcctatactggatatttcacatagatggcaggtaggaggtgggactcaacttggaagcggggcttgaacaccggaccawattgagtactagctcaaacagggactgggtagaagcagctttccataagacacacccaccagtgtgccatgtcaatttaccattgccatagcaacacctggaatttactgcctctttccatggcaataaccgggaagttacctcgcttttcctagaaatttctgtatgatctgccccttaatttgcatgtaattaaaagtgagtgtaaatatgactgcagacctgcctatgagctgcttctaatgggcacgtttgcctatgaggtagccctgctctgcaaagagcagtagctttgctgttgcagcccaccactgcttcaatacaagttacataacacctcgcccttgaatcctctactgagtgaagccaagagactgcgtggactaagacccaatttgggggctcgctggtcctacatcagatggagacatatagtgtgtggcct

SEQ ID NO: 930766 - DNA, 602 bp, Homo sapiens
atcatcccaacagtcttcatccccccactgtaccctacccagcaccagagtcctaaacaaccattaatctatatacttgcctatactggatatttcacatagatggcaggtaggaggtgggactcaacttggaagcggggcttgaacaccggaccaaattgagtactagctcaaacagggactgggtagaagcagctttccataagacacacccaccagtgtgccatgtcaatttaccattgccatrgcaacacctggaatttactgcctctttccatggcaataaccgggaagttacctcgcttttcctagaaatttctgtatgatctgccccttaatttgcatgtaattaaaagtgagtgtaaatatgactgcagacctgcctatgagctgcttctaatgggcacgtttgcctatgaggtagccctgctctgcaaagagcagtagctttgctgttgcagcccaccactgcttcaatacaagttacataacacctcgcccttgaatcctctactgagtgaagccaagagactgcgtggactaagacccaatttgggggctcgctggtcctacatcagatggagacatatagtgtgtggcct

SEQ ID NO: 930767 - DNA, 605 bp, Homo sapiens
tcaggaaacttacggccatggcagaagaagaagcaaatacatccttcttcacaaggtagcagcagagagaagaatgagagttcagtgaagggggaagccccttataaaaccatcagatctcatgagaacttactgtcatgagaacagcatgggggaaaccaycccatgattcaattacctcccactgtgtccctcccacaacacatggagattatgagaactacacctcaagatgagatttgggtggggacatagccaaaccatatgtattagtccattttcatactgctataaagaaatacccaagactgggtgatttataaagaaaaagaggtttaatggactcaccattccacatggctgggcaggcctcacaatcatggcaaaagacaaaggaggagcacaggcacatcttacatggtggcaggcaagatggcacgtgcaggggaactgccctttataaaaccatcagaccttgtgaaactattcactatcatgagaacagcacgggaaaaacccacgcccatgattcaattacctccgaccaggtcgctcccacgacatgtggggattatgggagctacaattcaagataagatttgggt

SEQ ID NO: 930768 - DNA, 706 bp, Homo sapiens
atgtgcaccaggcagacccggcccttctgctctggatcccttctctctgtctctggctgaagacgagagcatcctggggtcgggactcttaatcctcctaacctaagggaggatgtgcgcctgacacagggccaaggccccccgacaccctgatgcgcggccccgggcccatctggaatgttcagaaatgctgccatcttgtggcgcctgcaggccggagcaaggcaccttccggctgatcttgaagttgattcctagaagatgttgctccaaataagcacacacagactgtgtgcatttgcattgccacatgctaagccgcctataccacccactcactgctaccccaggtgtgttatctgctttgggccagcctgaggtaaaactgtcaacactgaaaatcattacctttggcacctcccagctctccggaagttatcyggtctgtagacaacaagtccctgagggaagtgggtggggcacagggcaggtaagttttgacagaaaaggaaactgggcacaaagtctaaggtgctacaacaacaacaacaacaacaacaacaacaacaaaaagatgggccctacaggagcctgctgagcacagagttactgagttgagctgttggaatcacagtggtaaggggccctccccgctggtgcaacaagacacaacagagtgtagttattgtgcacttggaccctcggg

SEQ ID NO: 930769 - DNA, 601 bp, Homo sapiens
atctatattgctgcaaaggacatgatttcattcttttttatggttgtgtagtatttcgtggtgtgtatgtaccagattttctttatctagtccaccattgatcagcacctgggtcaattacatgtctttgctattgtgaataatactgcratgaacattcaagttcaagtgtctttttgatagaacaatgtattatcctttggatataaacccagtaataggatgctaggttaaatagtagttctgagttctttgagaaatctccgaactgctttccacagcggctaaactaatttacattcccacgcacagtgtgtaagtgttcccttttcttcgaagccttgccagtagctgttattttttgacttttaaataatagccattctgatgggtatgagacagtatatgccattgtggttttgatttgcctttcactgatgatcagtgatgctgaggattttttcaaatgtctgttgcccacttgtgtgtcttcttttgaggagagtctgtttatgtcctttgcccactttttaatgggattattttttgcttgttgaattgtttatttatagattctggatgttagacctttgttggatgc

SEQ ID NO: 930770 - DNA, 632 bp, Homo sapiens
ccctgtctgaagtcagttcccctccctgaggctctgtttctagcacacaacgcagcctcacacctgtgcactcagtgatgggcactgcggggagggcgcaggtgctcagtggaggccgccatggactgtcctctgtccacttggggtggccctgtgatctggggctggtgaggtccttccagtgcctgtctcctcttgggtctgcatctggggctcctctttgcctgggacttggccctgcatgggcgagagatggaggatgaggccagagctcttcaccactttcagccttaggcccctttcgcagtctggaaaacctrtgacctgttctcaaaaatacttcctcaatgcataaaagaaaaatacatggggctacaaagggaattaataacattggccaggcacggtggttcacgcctgtaatcccaacactttgggaggctgaggcaggctgatcacctgaggtcgggagttcaagaccaccctgaccaacatggcgaaaccctgtctctactaaaaatacaaaattagctgggtgtggtggcacatgcctgtaatcccagctacttgggaggctgaggcaagagaattgcttgaacccaggaggcagaggttgtggtgagccgagatca

SEQ ID NO: 930771 - DNA, 638 bp, Homo sapiens
cctgcttttctctgtgggtccctcaacttccaggtccaggcaactagtgacccttcctagccagctcactcagggatgtttgcagcctcctctcccctgtccttgtgtctaggccagaggtcctgttttcttcacttggaaggtgatgtcgctgattgatttaagagcttgtttgtgctctcagctctgggagtgtaggcagtggtctcccttgataattgtgtcccagagcttcaaaggtgagggccagcagggcccttggggatcttggggaccaaccaccacagkggacagaggagatgcagtgcagagggggagctgtcgtcccaggtcacacactgtgttgggggacacatgtgggtccaggaccctttctgaagggtgctcattcattcttttggcaagcactcctcaatggctggattccccagcttacaggcagggctgtgccatagtgagcaccgactccacaggcaaaggcaaccataactgccctgcaggccaagggcagaggagcctgtttggggaagtggggaggtggctcggagagggtggcctggaaagactagcttgggttggggcagggcaagtgcaaaggccctgaggcaggtgagaatgagcattttgagcatggaggc

SEQ ID NO: 930772 - DNA, 619 bp, Homo sapiens
gttccccacccccgtatcacccgggtctcagtctttcctctctgtgacacaatagcctcctccctagggctccttccttccactcttgcccccacaaatccattcttcatatattgttcaaactatgcaactcccctgcttaacccctctccccatggcttcctgacgccttccacgtaaagcagaaaactgtttacccaggccccagaggccccmccgctgacctccccagccccaccttgctctcctctccccttgctccgtctgtcttttctgtcctttgaacacatcaagcacatccccgtctggccaacattgcacctgctgtcccctcctcctggtgtgtcaccatgtggccaccccttctcagcaggacaacccagatgtcgctgtcctcggccatccagcccccagccctctgtgcactccccacaccagccctgtccggtagttccttcagtgatggaaatgctccccgttcgctgtcaaacacagcagccaccccgtgcggctaacaagcccctgaaatgtggctattgcgatggaagaactgaactcttaattttcttctttttattttttttgaaaaacaaaatttctttctgtaaactgtttgagt

SEQ ID NO: 930773 - DNA, 619 bp, Homo sapiens
gttccccacccccgtatcacccgggtctcagtctttcctctctgtgacacaatagcctcctccctagggctccttccttccactcttgcccccacaaatccattcttcatatattgttcaaactatgcaactcccctgcttaacccctctccccatggcttcctgacgccttccacgtaaagcagaaaactgtttacccaggccccagaggccccaccgctgacctccccagccccaccttgctctcctctccccttgctccgtctgtcttttctgtcctttgaacacatcaagcacatccccgtctggccaacattgmacctgctgtcccctcctcctggtgtgtcaccatgtggccaccccttctcagcaggacaacccagatgtcgctgtcctcggccatccagcccccagccctctgtgcactccccacaccagccctgtccggtagttccttcagtgatggaaatgctccccgttcgctgtcaaacacagcagccaccccgtgcggctaacaagcccctgaaatgtggctattgcgatggaagaactgaactcttaattttcttctttttattttttttgaaaaacaaaatttctttctgtaaactgtttgagt

SEQ ID NO: 930774 - DNA, 619 bp, Homo sapiens
gttccccacccccgtatcacccgggtctcagtctttcctctctgtgacacaatagcctcctccctagggctccttccttccactcttgcccccacaaatccattcttcatatattgttcaaactatgcaactcccctgcttaacccctctccccatggcttcctgacgccttccacgtaaagcagaaaactgtttacccaggccccagaggccccaccgctgacctccccagccccaccttgctctcctctccccttgctccgtctgtcttttctgtcctttgaacacatcaagcacatccccgtctggccaacattgcacctgctgtcccctcctcctggtgtgtcaccatgtggccaccccttctcagcaggacarcccagatgtcgctgtcctcggccatccagcccccagccctctgtgcactccccacaccagccctgtccggtagttccttcagtgatggaaatgctccccgttcgctgtcaaacacagcagccaccccgtgcggctaacaagcccctgaaatgtggctattgcgatggaagaactgaactcttaattttcttctttttattttttttgaaaaacaaaatttctttctgtaaactgtttgagt

SEQ ID NO: 930775 - DNA, 596 bp, Homo sapiens
cacccagataattttgcatttttttgtagagatagggtctccctgtgttggcccagactggtatcaaactcttgggctcaagtgatccacccacctcagcctccgaaagtgctggggtttcaggcatgagccaccatgcccagcctgatttcactatcttttgagagcatgttaacaaccatattattgtatccttataaataatctctgaggtatataggggcatatattaacctgattaaaaagagaaggaactggccaggtgcggtggctcatgcctgtaatctcagcactttgggaactgaggcgggcagatcacctgaggtcaggagtttgagaccatcctggccaacatggcaaaaccccgtctctactaaaaacacaamaattagtcgggtgtggtggcgtgtgcctgtaatcccagctacttgagaggctgaggcaggagaatcacttgaacccaggaggcagaggttgccgtgaatggagatcccaccactgcactccagcctgggcgacagagtgagactccgtctcaaaagagacagagagagagagagaaaaggaaggaagaagggaaggagagaaggagggaa

SEQ ID NO: 930776 - DNA, 630 bp, Homo sapiens
gctcttcttgaggagtatctttgtggcattgtctttatttcctgaatttgaatgttgtcctgccttgctaggctggggcagttctcctggataatatcctgcagagtgttttccaccagttgattgaatcagctactgaagcttgtgcattctttgcgtagttctcgttccatggttttcagctccatcaggtcatttaaggacttctctacactggttattctagttagccattcatctaatcttttttcaaggtttttagcttctttgagatgggtttgaacttctgcctttagctcagagaagtttgatcatctgaagccttcttctctcaagtygtcaaagtcattctccatccagctttgttccattgctggcgaggagctgccttcctttggagggggagaggtgttctgatttttagaatttcagctttttttggtgtagatgtcctttctgtttgtcagtcttccttttaacagtcaggaccctcagctgcaggtctgttggattttgctagatgtccactccagaccctgtttacctgggtatcagcagtggaggctgcataacagcgaatattgctgaacagcaaatgttgctgcctgatcgttcctctggaggggcacc

SEQ ID NO: 930777 - DNA, 592 bp, Homo sapiens
agccagaatataaaagtaggcagaaaaatgtgaaaaggttagacttgcttaacctcccagcctacatctttctcctgtgctggatgtttcctgccctcaaacattggactccaagtacttcagctttgggactcggactgcctttgttgctccttagcttgcagatgacctattgtgggaccttgtgatcatgtgtgttaayactacctaataaactcccctttatgtatacatatctatcctattatttctgtctctctagagaaccctaactaatgcagcccagctctgtgcacttgctagagaactgttgtggtcatttggaagataagaggcactctagctttgtaagttttcagcatttttgcactgattctttctcatttttgtgggcttatctaccttcgatctttgaagttgctgactttctaatggggtttttgtggggggttatttgttgatgttttctgtttgttttccttttagcagtcaggccattgttctacagagctgctgtggtttgctggggttctgctccagaccctggttatcttggtttttcccatacctggaggtattaccaatgaaggct

SEQ ID NO: 930778 - DNA, 492 bp, Homo sapiens
ggcctttaaatatacctataacttgaatatccatttttaattaacctaaatactctttaagaaaatttctttaagtcccttgttaaatgactttagccatgccaagcagttaagattttcagctttgaattttacaaaaagtaacctcacaagtgaaatgcacaagccaaaattaggtcatgactaaaccacgagtgtgcaaggtattttcaaaggggcaataggcagcttgagaaasactgcaaaattgtgactgagatagtgaaagggatacgacccaatcaactccattttgtttccagcccctaagctgtccttgcccttccctgggcataggcaaaaccaactttgggagaagactgatctacagtttattgtctaaaacaaatatgataatagctcttcttaagaatattttcctcttgcctgggaaccagaccaagaatctagccacaagtttagaaaaagaaaccatggcctaggaatcacaca

SEQ ID NO: 930779 - DNA, 706 bp, Homo sapiens
atgagaacgggaaactcggctgtgccaagaggcagagaagagaaggcatgaggtccaacttagctggagttggtctccctccagcctccggcttctccacacccctggcatctccagcttgtgctgtcctccgctccagcacacactgagcaaacgcggccaggcccaccggagtatgcagtgagtggaggagagggtacggagtcggggaacccgaagcctcactcctgaccgttccttcctccctcagtgcttctcagtcagcttccttcattsacacttaccttgaaagctgtcattgatgactgtgcaattcgtgttgttggtacatattctccagacatctgcaaaaaactcatctcctacccaccaggcctgtaacacaaaatggaaatagagagaaaggccgtccgttcatgatgcaaacactgactgctaattaggcacgaggcatggtgggcttccaggattctcaaactgcaacacatgtgagaattgcctgaggagcttattctaatgcagactgactcaggaggtctggggtggggactgggattctgcatttctttcttttctatttatttatttttttgagacagggtcttgctctgtcatccaggctggagggcagtggcacagtcttggctcactgcagcctccatctcttgggctcgagcaatcctcccacctcagcctcctgagtatc

SEQ ID NO: 930780 - DNA, 706 bp, Homo sapiens
atgagaacgggaaactcggctgtgccaagaggcagagaagagaaggcatgaggtccaacttagctggagttggtctccctccagcctccggcttctccacacccctggcatctccagcttgtgctgtcctccgctccagcacacactgagcaaacgcggccaggcccaccggagtatgcagtgagtggaggagagggtacggagtcggggaacccgaagcctcactcctgaccgttccttcctccctcagtgcttctcagtcagcttccttcattcacacttaccttgaaagctgtcattgatgactgtgcaattcgtgttgttggtacatattctccagacatctgcaaaaaactcatctcctacccaccaggcctgtaacacaaaatggaaatagagagaaaggccrtccgttcatgatgcaaacactgactgctaattaggcacgaggcatggtgggcttccaggattctcaaactgcaacacatgtgagaattgcctgaggagcttattctaatgcagactgactcaggaggtctggggtggggactgggattctgcatttctttcttttctatttatttatttttttgagacagggtcttgctctgtcatccaggctggagggcagtggcacagtcttggctcactgcagcctccatctcttgggctcgagcaatcctcccacctcagcctcctgagtatc

SEQ ID NO: 930781 - DNA, 555 bp, Homo sapiens
tttttttatttgcttcaagtatgttcataattgttcactaaagcattacaatgatggctgctttagaatctttgaaagataactaatatcactattaccttgaagttgatatctattcattttcttttgtcattcaagctgaagttttcctggttgttactatgatgaaggatttttagttaaaacctgggygtttttggtattatgttatgagactctggaccttatttaaattttgttttaactggccttttctgaaatgacttgggcaaggagaagggggcactgccttcttactgccagatgcaggtaatagtctaggttccctccttggccttctttgacaaacagtaggaggagctcttcattactgctgggcaggagtggtatttctggctctccgcaaggcctccattgataccttcctggctgggaggggcaggagtgccttgttactactctccacacggactccactgactctgcatggaaaaatagaggggtagccgtactacccaggaccactgggtaatgacaaaagttctgactcccact

SEQ ID NO: 930782 - DNA, 710 bp, Homo sapiens
taccataacaaatctgctattgagcccctgttgtgaaatttttcatttcagctattatgtttttcaactccaaaatgtatatttttataatttctatatctttattgatattctctatttggtgagacattgttctcatactttgctttagttatctagacatggtgtcctatagttctttgaacatattttaaatagatggtttcaagtatttgtctattaagtccaacatctgggctccctcagagacaacttctattcattgcttttytccccatatatgagttatatgttcttgtatcttttcatggctcatatttttttagtcggaaactggagatttaaaataataaatgtggcaactgtgaaaatcagatcctccctcccccagggttggttactgttgttactcttagtttgtttagtaactttttcagtaaagtctatattcttatttatgcatggccaataaagtttctgctcagttagtttaatggtcagcttatgattgaacagagattcccttaaatgcctggaaccaataagtctcccagcttttgctgaggggctgtgtgtgtgtggcaggacatgcctttgacactcaggcaggcagttgccaattctgctttatctttcctgggacccaaaggttagtcagaggtaagagcttagggccttctcaggtctttcctgagcagtaacagcctgga

SEQ ID NO: 930783 - DNA, 421 bp, Homo sapiens
ctgctttgtccataaagtgagtgccttggtcagaggcaatgctgtgtggaataccatgatggtggataaggcattccatgagcccacagatggtagttttgccagaagcactgcatacaggataggcaaacccatattyggagtaagtatctatcccagtgaggacaaacctctgcccttttcatgatggaagaagttcagtataatcaacctgccaccaggtagctgtctgatcaccccaaggaatggtgccatatcgagggctcagtgttgatctatgctgctggcaaactgggcactcagaagtggctgtagccaggtcagccttggtgagtggaagtccactttactgagcttatgagtaacctccatccctaccaccatggctactttgttcatgggcccatcgggcaatgacagg

SEQ ID NO: 930784 - DNA, 709 bp, Homo sapiens
tttgggtggtgcctgcatattgtgcagaataatctgtgaatcagaccctagtcttctcttcctctgtcagttggtcatagggaactccccatgaggccattggtgcagactgggggagagaaggcagggtggcaggagtggagaccatgagcatttgagccacttcctcatataacctacttgtgccttcaggacccgcttgagcccaatcacatatataccacttccatttgatgatgaaatgctgctatgcatgacccactttatggctagatgggtcagaaagcacccagttcatgataggcagttcaggtcgcatggtgacttgatgacccatagtcaaatgttcagtttccaccaaagcccagtaacaggccaakagctgtctctcaaaaggagagtagttatctgcagaagatggcagggtcttgctccaaaatcctagaggtctctgctgtgattcacctataggggactgccaaaggctccaaacagcatctctgtctgccactgacaccttaagcaccattggatctgctgggtcatatggcccaagtggcagagcagcttgcacagcagcctggacctgttgcagagccttctgttctggaccccactcaaaactggccacctttcaggtcactcgataaatgggccagagtaacacacccaaatgaggaatgtgttgcctccaaaatccaaataggcc

SEQ ID NO: 930785 - DNA, 522 bp, Homo sapiens
aattagttaaatgatggtgaagttatacttgagcggggtggaccctaatccaatatgactgttgtccttataagaaggcgactatgagccgggtgtggtggctcatgcctgtaatcccagcactttgggagggcgagacaggcagatcacaaggtcaggagtttgaaaccagccygaccaaaatggtgaaaccacatctctactaaaaatacaaaaattagcagggtgtggtagcgcgggcctgtaatcccagctactcaggaggctgaggcaggagaatcgcttgaacccgggaggcagaggttgcagtgagctgagatggcacctttgcactccagcttgggcaacagagtgagactccatcttaaaaaaaaaaaaaaggaggtgactatgtgaagacaaaaacacacacaaagaactccatgtgaagacagagatttggagtattgcatctacaggagtaggaatgccaaagattgccggcacaccaccagaatctaggagaagacaagggagaattcc

SEQ ID NO: 930786 - DNA, 711 bp, Homo sapiens
cgtcttatcctttatgcgtgcaggtcatgaaattgctatgactttcttgtccctatatcttttctctctctacccagaattcctatccttattttattggccttctgaacaatttttcaaaacctcaccaagaatcacctcgtcattgatgccttttctgattcttattgcaagcctcttgtgytgccactgcgccttgcacagatttcttgatttctgcacatctacacacatttagacccatcatgaggtcctgatctttctgaaggcaagaattatgcctttacatgtttcaatacccatctcagtatgtggcatatggcaagtgagcaataaatgtttgtggaatcaagaaattaagtaaaccttgtctctagggaaattgttttacatcaaactaaaacctgggcttggaaagcttccgtactttcatacttaagtccttatggatgaaccataaccgaacttagtaggtaggcagggtggaaatctaactgaggagtatacttctgtaacaaaagctgagtctcagccaatcccagtagccatactccagccattcacaggctgttgtttaaaccatgtttaagtaaggcaaaatgccaagctgtaaccagcctagctatttccgtacatcacttccgttttatgtaaatcactttccttttttggtccataaactcactctgaccgccaggcatccctggagcc

SEQ ID NO: 930787 - DNA, 804 bp, Homo sapiens
actcctttcgtcttatcctttatgcgtgcaggtcatgaaattgctatgactttcttgtccctatatcttttctctctctacccagaattcctatccttattttattggccttctgaacaatttttcaaaacctcaccaagaatcacctcgtcattgatgccttttctgattcttattgcaagcctcttgtgttgccactgcgccttgcacagatttcttgatttctgcamatctacacacatttagacccatcatgaggtcctgatctttctgaaggcaagaattatgcctttacatgtttcaatacccatctcagtatgtggcatatggcaagtgagcaataaatgtttgtggaatcaagaaattaagtaaaccttgtctctagggaaattgttttacatcaaactaaaacctgggcttggaaagcttccgtactttcatacttaagtccttatggatgaaccataaccgaacttagtaggtaggcagggtggaaatctaactgaggagtatacttctgtaacaaaagctgagtctcagccaatcccagtagccatactccagccattcacaggctgttgtttaaaccatgtttaagtaaggcaaaatgccaagctgtaaccagcctagctatttccgtacatcacttccgttttatgtaaatcactttccttttttggtccataaactcactctgaccgccaggcatccctggagcctctctgaatctgctgtgattctgggggctgcccaattcatgaatctttttttttcttgttcaattaaactctgttggccagcaca

SEQ ID NO: 930788 - DNA, 792 bp, Homo sapiens
tactactatgtactaggcattttgctagatgctcaggatacagtagcaaatcaaatagacaaaatcattatcttcacagagcttctagaccaagaatgtgagtattaagtaaacagtatatatgctaaagagtgcatgaaaaaaaagtaagtactatgaaaaagtatggtgggaagggtatagaaagtgtgtgtgtggggggcgcagacgcagtggctcaggcctataatcccagcactttgggaggcagaggcaggtgaatcacaaggtcaagagttcaagaccagcctggccaacatggtgaaaccccgtctctactaaatatacaaaaattagccaggcatggtggcataggcctgtaatcccagctactcgggaggctgaggcaggagaattgcttgaacctgggaggcagaggttgcagtgagccaagatggtgccacttcactccagcctggacaacagagcaaaactctgtctcaamaaaaaaaaataaagtgtgtgtgtgtgtgtgtgtgtgtgtgtgtgtgtgtgtgtgtgtgtgtgttggggaggtgagaagagggcaaggttgcaattgtaaaccaagaagtcagggaaggccaccccttgatcttgggcaggagtttgtgactccttcaaccaataaagaatggtgggaatgacattatatgacttaccaggctaaattataaaaatgccatgcacctcctccaggttctgttggatcacacactgttggagcccaaccaccatgctgtgaggaagcccaagcagccacctggagttctg

SEQ ID NO: 930789 - DNA, 724 bp, Homo sapiens
ggggatgggagagtgcagtgactagaggactttacattgaactcagtgctgctctgccacaatggagagcaaagttgtgctgggctcactcagcattcacacacagagggggcatttgaaccagacctagccagtggggaatcgcccatctagctgttggaactcgagttcctcagcaagcctcgccagtgcaggccaaagtgctctggggtcctaggtaaacctgaacagcagactaggacacaaggactgcaattcctaggcaactcctagtgctaggctgggcttagagccagtaaactagggtggcacatgacctagggagacacaagctggtttggctatgggagggcttgcgccatccctcccccaaccccaggcagtgcagctcatagcaatgaaagtgactccttccttctgcttaaggagaggagaatgaagagtaaagaggactttgtcttgcatcttggatagcagctcagccacaacaggatagggcaccaggcagagtcatgagscccctattccaggccctagctcccaaatgacatttccagccacaccctgggccaaaagagaacccctgccttaaagggaaggactcaacacttgcaggattcatcacctgccgactaaagagtccttggaccctgaataacaaccagcaatatccagggagtatgccatgggcccgagctctgagacatgctggtttcaggggaga

SEQ ID NO: 930790 - DNA, 697 bp, Homo sapiens
tagttgcttatctccatctaacaaagccagcctgcactgtgcatgagatagtgatctatatggaagattccagacttgcctttatggagacagcaagactgttctgatgaccacctccgtatttatttttcctccaggatgaaatttactctaacttcccagttgtctgccctgtcatccactaatagaaaagatcttgtgttaatcctaccttttccgtccaggaaggaaaaaaagagctcatcccagcctgttgtgcagcaccacctgcccgtttgtccatagccaagcaatgatggatctgtgctagggggatgaatgggaattgtgtttattttatgagctgcagaaagttggctagggaacccagcaggaggcttaactggaaaaaaatgaktttatcttatgctgtgtatctgctgtctagaaaaatatatggcattatcctggcttgaaattgggaaagaaaataaaggaggacggacttttttttttttccaaatactggatttgagggattaacttcaggtaggtctttctctgtttttggggatgacctgctcaaaccaagggccctctgctcaaactgggtggtggcaggaagggagtgtgagccacgcagggacaggggcctggcagagggtccccaggccagtgctcagtgacctggagagagtcccacactatttgcaacctt

SEQ ID NO: 930791 - DNA, 602 bp, Homo sapiens
aattagagggtgtataataacatacctggctttgtgggttgccttttgactctgttgatagaatatttaatgcacaaaatttttaaattttcttaaagttacatttgtctgctttttttcttttcttgcctttttwaaattttcttgcctttgcctttggtgtcatatccaagaaagcattgccaatttcaaggttgtaaagcttttgttctatgttttcttctaagagttttatagctttagctcttgcatgtaggtctttgatccattttgaattactttttgtatatgtgttagggaaggagtcagcttcattcttttgcatgtggatgtccagtttccccagcaccatttgttgaaatgattatatcttccctattaaatgatattgaaacctttgtcaaaaatcattttaccatatatgtcaaggtttttttattctattttattccgttggtctatgtatctgtatttatgccattatcacattgttttgattattgaggcttggtagtaagttgtgaaatcaggacatatgagtcctttagttttgttcttccctttcaggattgttttggctcttcaggatctcttaaggttcc

SEQ ID NO: 930792 - DNA, 598 bp, Homo sapiens
taacatacctggctttgtgggttgccttttgactctgttgatagaatatttaatgcacaaaatttttaaattttcttaaagttacatttgtctgctttttttcttttcttgcctttttaaaattttcttgcctttgcctttggtgtcatatccaagaaagcattgccaatttcaaggttgtaaagcttttgttctatgttttcttctaagagttttatagctttagctcttgcatgtaggtctttgatccattttgaattactttttgtatatgtgttagggaaggagtcagcttcattcttttgcatgtggatgtccagtttccccagcaccatttgttgaaatgattatatcttccctattaaatgatattgaaacctttgtcaaaaatcattttaccatatatgtcaaggtttttttattctattttattccrttggtctatgtatctgtatttatgccattatcacattgttttgattattgaggcttggtagtaagttgtgaaatcaggacatatgagtcctttagttttgttcttccctttcaggattgttttggctcttcaggatctcttaaggttccatgtgaattctag

SEQ ID NO: 930793 - DNA, 479 bp, Homo sapiens; identical to SEQ ID NO: 921698

SEQ ID NO: 930794 - DNA, 498 bp, Homo sapiens
gccctgcactaaactctgctcagatccagcctattaaattttaaaagcaagacttgaaaggattaaactgtttctaagtaacttaactttgtcccagaacacaggaatacaaaaatatccagttcccaacaaggtaagattcacaatgtctggcatctaacagaaaaaaaaaaaaaaagaagaagaaaagaaaaaaatgaccagacatgcaaagaggcaggaaaatataactataatgaggagaaaaatcaatcaataaaagctgacccagaactgacacagatattagaattagcayacaatgacgttaaaacatttattgtaactgtgtttcgtatgtttgaaaagttaattagagacatgaaagatataaaataaacttctagaccccatactcaatggtgaaaagttgaaagcttttcctctaagatctggaacaagacaaggatgcccactctcacttcttctattcaacgtagtactggaagttctagctag

SEQ ID NO: 930795 - DNA, 601 bp, Homo sapiens
ttattatctgtcacatccagtctgtgtcacctgccccccttctttcttctggagcttcctggaaacacagagctttacatctatggtttttctttccctccaaggccaaggcaggtctggaaccccatgtttctcaaagccaaggcctttggagctcagcagtcatgctttctttgcaatgacataaaataaaagcaaatagagtgctacgtgtcagtctcatgctagctccaaacatctctactttttaggaataatctttcgcttagcattgtttttttttttaaaaaaggtatcttagagtcaatccaagaacctggctccttctccctgtttcttttttaaaatgttcagcttcccctcccccacataggaaaagcagccaggatcctgcagatctacaggtaggacgatagtggcagagctagagttagaactragctctactgcttcctaggtccactttccattttccttttctcctacttagttctttctatagccccgcccccatcttgccaccccgctaacctacagtcatgcccagaaaattgccaagactgtgttcctggggagataccagtccttggatcctgcactc

SEQ ID NO: 930796 - DNA, 693 bp, Homo sapiens
ctacaagtgttgatatgtcatattctcattatcatttagttcaaaattaccatgatttaattaccatgaggttgcttttttgatacatgagttacttagaaattgaattaggctaggcatggtggctcccacctataatcctagcactttggaaggccaaggcaggaggattgcttgagtttgaggccagtctaggcaatatagtgagacctcatctccacaaaaaagtacaaaaaaactagccaggcatggtgacacatgcctatagttccagctactcaagaggctgaggtgggaggattgcttgagcctgggaggcagaggttgcagtgagtggagatcacaccagtgcacttcatcctggatgacatagcgagaccctgtctcaaaaaaagaaaaaaagaaattgaactatattgcttgatttccaaatgtttttgaggattttctaattttcttttggctattgatatgttgcttaattcaactctggacaaaaacagtctataacttcaattctttaargttttttgagattgactttatggcccaggaaatggtcacttttggtaaatattctatgtgcacttgaaaaaatttatagtattttatgattgctgagtacagagctccatacgtctcaatgagacaagtttcttaattatgttgctcagatcttctatacccctattg

SEQ ID NO: 930797 - DNA, 693 bp, Homo sapiens
ctacaagtgttgatatgtcatattctcattatcatttagttcaaaattaccatgatttaattaccatgaggttgcttttttgatacatgagttacttagaaattgaattaggctaggcatggtggctcccacctataatcctagcactttggaaggccaaggcaggaggattgcttgagtttgaggccagtctaggcaatatagtgagacctcatctccacaaaaaagtacaaaaaaactagccaggcatggtgacacatgcctatagttccagctactcaagaggctgaggtgggaggattgcttgagcctgggaggcagaggttgcagtgagtggagatcacaccagtgcacttcatcctggatgacatagcgagaccctgtctcaaaaaaagaaaaaaagaaattgaactatattgcttgatttccaaatgtttttgaggattttctaattttcttttggctattgatatgttgcttaattcaactctggacaaaaacagtctataacttcaattctttaaasttttttgagattgactttatggcccaggaaatggtcacttttggtaaatattctatgtgcacttgaaaaaatttatagtattttatgattgctgagtacagagctccatacgtctcaatgagacaagtttcttaattatgttgctcagatcttctatacccctattg

SEQ ID NO: 930798 - DNA, 609 bp, Homo sapiens
ctttctcttagcaccatgttttagggtctatctacgttgtagcatgggtcagtacttcaaccctgttctttttttttttttttttttttttgagatggagtatccctctgttgctcaggctgaagtgcagtggcacgacctcagctccctgtaacctctgccccctgggttcaagtcattctcctgcctcagcctcccatgtagctgggattacaggcacgtaccaccacacctggctaagttttgtatttttagtagcgacggggttttgccatgttggccaggctggttttgaactcctgacctcaggtgatctgcccacctcggcctctcaaagtgstgggattacaggcgtgagccaccacgcctggccacttcatccctttttatggctgagtaacattccattgtgtggatataccacacggttttgtttattcatcagttgatgaacctttggattgtctcacattttgaccattgtgaatcatgctgctataaatattcatgtacaagtttttatttgaacacttgtctctaattctttggggtatatacccaggagtggaatcgttggctcatatggtaactctgtgtttaacttattga

SEQ ID NO: 930799 - DNA, 560 bp, Homo sapiens
actgagtgaccttggccaattcccttaattccctccctctgcctcagtttcttcatgtataagaggaaaatgactattttatgtattccatggagttgctgtaaaaatccaatgggctaacagaccgtatgcttagtatggtgcttagtatgctaatgagtccttataaatgttcccacgattatgaactgctagagtgtgtttcctgtaggtaaacctccaagccatcaaacctatgtccatgtctcctgccaccatctgtcctggatgattattgttcagatgcatattccaaacttactgagtacctagtatgtgcrgggttctttcacttatatcatttgcctttaaacagctctgcactgtagttattattacccattttctgcatcaggaaactgagttccccccaaaatgaactgacttttcaaaagtcacacaggtattaagtgccaaagccaggatttgattccaggccttctggcttgacagtggcactcaaattcatcaagtgtttcttgaggatcttgcagatattttctcatattgcaattctagtc

SEQ ID NO: 930800 - DNA, 753 bp, Homo sapiens
tgatacaaagaaatacaaagtatcatgagactattatgaacaactatatgtaacaaattggataatatagaagaaattgatacattctttgatgcatacaacctaccaggagtgagttatgaagaaaatagaaactcgcaagagaccagtaacaagtaaggatgttgaattagtaataaaatgcctcaaatcaaagaacagccaaaaacctcatcacttcactgctgaattctatcagtcatttaaataactaatactaattctcctcaaactctttcaaaaaaaataaagagraagaaatacttacaaaattattttatgaggccagctaagcctgatgcaaaaccaaatatatcacaaaaaaagaaaactgcaggctgagaccccttgatgggtatagaagcaaaaatcctcagcaaacttctgccaaactgaatttaacaggacagaaaaaagatcattaacatgaccaaatggtactaaatccagggctgcaggaatggttcaacatactgtcacaggatcctttgggtgtcgcttcactagacagaaacctctgtggttggtggggcctctgcctgagttttgatcatgcctgctgggcttgttccacccactcagcccagcaggctgcatctggttcacactactgacctggatcccacacctgccaagggcaagccaggcgcacagcagcaaaccatgtgtgagtgactgaacatggggtccggccactgtgcacagtcatgcatg

SEQ ID NO: 930801 - DNA, 518 bp, Homo sapiens
cccaggctggagtgcagtggcatgatctcggctcactgcaacctgtctcctgggttcagatgattctcctgcctcagccttccaagtacctgggattacaggcgtgtgccaccatgcctggctaatttttgtgtttttagtagagacgggtatcaccatgttggccaggctggtctcgaactcctggcctcaagtgatccgcctgccttggcctcccaaagtgctgggattacagacacyagctattacgcccggccagcttatttttattagagacggggtcttgttacattgccagatgggatttcaactgttaggctcgcaggatcctcctgcctcagcctccccattagctgggactccaggcatgtgccactgtgctgccactcctcacccttaactactctccccccaccacccactggcacccccagctcctcagcctgacattcagggccctccaggactggcctctgctgctctctgctgtcccagctccagtctcccccaagacacct

SEQ ID NO: 930802 - DNA, 821 bp, Homo sapiens
tgatgtagtcccatgtgtaaacttttgcttttgtgcctatggttttaggttcatattcaaaaaattattgcccgggccaatatcatagagctggttcccctatattttcttttagtagttttacagtttcagatcttatatttaagtctttattccattttgagttgattttgtatatggtgtgagaggagggcctaatttcattatttgaaatgtggacataccgttttcccaacaccatttattgaagatgtggtctattgtgttcttggcacctttgttgaaaattaaccataaatgtgtggatttatctctaggctctttgttctgttccactgattacatgtttttatgccagcactatgctgttatgttttttttaaagttttattttgtttctattggcacataataattatcggcacatatttacagggtacagtgtgatgtttttacatatgtatagattgtataccaatcaaatttgggtaattagcatatccatcacctcaaacacttgtcatttctttgtggtaagaacattcaaaatcccctcttctagctattttgaaatatacacacattactgttaactctagtcaccccactctgcaatagaasagcagaacttatacctcctatctaactgtaactttgtgtctgttgaccaatctccatccattcttctttttcccttatccttcccagcctctggtaactactcttctactttctacttttaagagatcaactttgtttagattccacatatgagtgcgatcatgcggtatttgtccttctgtgcttggcttattttaact

SEQ ID NO: 930803 - DNA, 797 bp, Homo sapiens
aggaaggtttacccgattcatttatggatgcttcccccatagcaggtacccaacaaatgcttgtttgtggcagttttacataggtccacaaattctttgacatttcttctataaagtggtagagtctgtgttccttcccctgaaactgggaaggcttgcatgactgcttcaatcaacagaatataaggctgggcacggtggctcatgcctgtaatctcagcactttgggaggccaaggcgggaggatcacctgaggtcaggatttcgagaccagcctgaccaatatggtgaaatcccgtctctactaaaaatacaaaaattagcggggtgtggtggtgggtgcctgtaatcccagctactcagaaggctgaggcaggagaaccgctkgaacccaggaggcggaggttgcagtgagctgagatcacgccattgcactctagcctgggtgacagagagagactccatctcaaaaaaaaaaaaaaaaggatatagtaaaagttatatgacttttgatactggattacagaaggtgatgcaacctccaccttgctcactgaaacatttatttttgaggattttagctgttatgtaagcagtccaaacaccatgagaccaccatggtgtgaggaagtctaaactagcccacagagagagaccacacagagaaatcctgaaactagtggagagagagagagagagagaaatccaaccagccccaactgcttcatgcttcataccctgctttccgaggctaatcaccatctgactataactgcatgtgatactcagccagaaat

SEQ ID NO: 930804 - DNA, 672 bp, Homo sapiens
gccagagcagggtgagtcatcgccttacccgggaaatgcaagggatcagggaattccctttcaagccaggcaaagctgtgacagatggcacctggaaaattgggtcactcccaccctaatactgcgctttaccaacggtcttagcaaatggcacaccagaagattatatcctgtgcctggctcggaagcttcccgctcacggagcctcgctcattgctagcacagcagtctgagatcgaacggcaaggcggcagcgaggctgggggtggggtgcccaccattgctgaggcttgagtaggtaaacaaagcagtcaggaagctcgaactgggtggagcccaccacagctcaaggaggccggcctgcctgtgtagactccacctctgggggctgggcatagcccaaaaaaaggcagcagaaacctctgcagacttmaatgtccctgcctgacagctttgaagagagtagtggttctgccagcacggagtttgagatctcagaatggacagactgccccctcaagtgggtccctgacccccgagtagcctaactgggaagcagctcccagaaggggcagactgacgcctcacacggccaggtacccctttgagacaaaacctccagaggaatgatcagacagcaacatgtgctgtccagcaatattcgcttttctg

SEQ ID NO: 930805 - DNA, 593 bp, Homo sapiens
caaagtgctgggattataggaatgagccacggtgcccagcccacttgtttttataataaagttttattggcacacagccatgcccatttatttacatattgtctatgactgctttcaccctacaatggcaaggttgagtagttgtgacagagactgtgacccacagtactgaaaatcttagttacgtggccctttacacagaatgttgccacctccataacttattagtcagaaaaggttggcggcaggaaagtcaaaacatcaaaacaccatgttcctggccgggcgcggtggctcatgcctgtaatcccagcactttgggaggccaaggcgggaggatcacctgaggttgggagtttgagaccagcctgaccaacatggagaaaccccgtcyctactaaaaatacaaaatttatctgggtgtggtagcgggtgcctgtaatcccagctactcgggaggctgaggcaggagaatttcttgaaccctggaggcggaggttgcagtgatccgagatcatgccattgcactctagcctgggcagcaagagtgaaactccatctcaaaaaaaaaaaaaaaaaccaaaaaaacacca

SEQ ID NO: 930806 - DNA, 608 bp, Homo sapiens
agtctcaataatatttttaggattataaaaatatccagcacctaacagcatgaaatccacagtgcttggcatcccattactagacataaaaagaaagagaaaaatgtaatgaataataaggggggaaaatcaatcaaaaccagaactgatactgatgtcagccacagaagacaaagatattcaaactgttaatataactatttcatatggtcaaaagctaygtagagatgaagaaaatatataacaaacacaagaagtcaaactcttagagatgaaaactataatgtgtgatgtgaaaactatgctgggtagaataaatggtagattatacattgtagagaacaaaaaatagcaaaattaaaggcatggcaatagaaactatccaaaattttacataaaggaaaaagagaacaaataaatagtatatctatgaactgtgagacaacttaaagtagcctagtatatctttaaaggaagaccccaaataataggagaaagaaaaaagacaaaaaaactatttcaagaatagctgaaaatgttccaaattttataactataaactcacagatataaaaatattaatgaaccccaaacatcataaacataaa

SEQ ID NO: 930807 - DNA, 646 bp, Homo sapiens
taggaaaaagctctgaaagttagccttgggccccgagcaaaatttagaggcattattaaacctggcaaccatggtgttctatagtagggaccaagaggaacaagccaaaaaggaaaagcaggataagagaaaggccacagccttagtaatggccctcagccaaacaaaccttggtggttcagagaggagaaaaattggagcaggccaatcacccagcagggcctgttatcagtgtggtttacaatgtcactttaaaaaagattgtccagagggcggagccaagatggctgaacaggaacagctccattctacaactsccagcataagcgacagaaaagatgggtgatttctgcattcccaactgaggaactgggttcatctcactggggagtgccggaaagtgggtgcaggacagtgggtgcagtgcaccgtgtgtgagctgaagcagggcaaggcatcacctcccctgggaagcacaaggtgtcagggaatttgctttcctagtcaaagaaaggggtgacagatggcaactggaaaatcgggtcactcccaccctaatactgcacttttccaatgggcttatcaaatggcacaccaggagattatatcccacacatgactcggaggttcctacgcccatggatcc

SEQ ID NO: 930808 - DNA, 601 bp, Homo sapiens
caccactgcactccagcctgggtgacagagcaagactctgattcaaaacaaaaacaaaaacaaatacaaacaaaaaaccctgtatttatgttcattttattttggcttgactgttgcaaatgatgaaagctcaagtacgggccaggcacagtggctcaygcctgtaatcccagcactttgggaggctgaggcaggtggatcacttgaggtcaggagttcaagaccagcctggccaacatggcgaaacccagtctactaaaaatacaaaaattagccgggcatggtggcacacgcctgtaatcccagctactcaggaggctgaggcaggagaatcacttgacccaggaggcggacgttgcactgagccgagatcatgtcaccgcactccagcctggatgacagagcgagactgtctcaacaacaaaaaaagctcaagcaagaaacgagaatgaaggtatggaagcaatgattcaagatgacaatatatattattaaaatacttcttgacatgcactttctataaaattggggcgaattaaagacttctccattagatcaaaaggctattccaaatacaggtgatcctctactatcccaatta

SEQ ID NO: 930809 - DNA, 741 bp, Homo sapiens
gctccagagttcctgcatttttttttttttttttttggagacttagtcttgctctgtcgcccaggctggagtacaatggtgtgacctggcctcactgcaacctctgcctcctaggttcaagcgattctcatgactcagcctcccaagcatctgggattacagatgccccaccaccatgcctggctaatttttattttttcttttcctttcttttttttttttttgagacagagtctcactctgtcaactgggctggagtgyagttgcgcaaattccgcctcctgggttcaagcgattctcttgcctcagcctcctgagtaactgggattacaggcactcaccactaccccaaactaatttttttgtatttttagtagagatggggtttcaccatgttggccaggctagtctcggactcctgacctcgtgattcacccacctcggcctcccaaagtgttgggattacaagcatgagctaccacacccagcctttttttttttgtatttttagtagagacagggtttcaccatgttggccaggctggtctcgaactcctgacctcaagctatccatctgcctcaggctcccaaagtgccgggattacaggcatgagccaccacgcccagccagttcctgcttttaaccgccatgctactctgctacaagaaaatatagcacttaaaatggtgagattatctcccctaggcataatttttaaatttaatattaaattgatttcc

SEQ ID NO: 930810 - DNA, 741 bp, Homo sapiens
gctccagagttcctgcatttttttttttttttttttggagacttagtcttgctctgtcgcccaggctggagtacaatggtgtgacctggcctcactgcaacctctgcctcctaggttcaagcgattctcatgactcagcctcccaagcatctgggattacagatgccccaccaccatgcctggctaatttttattttttcttttcctttcttttttttttttttgagacagagtctcactctgtcaactgggctggagtgcagttgcgcaaattccgcctcctgggttcaagcgattctcttgcctcagcctcctgagtarctgggattacaggcactcaccactaccccaaactaatttttttgtatttttagtagagatggggtttcaccatgttggccaggctagtctcggactcctgacctcgtgattcacccacctcggcctcccaaagtgttgggattacaagcatgagctaccacacccagcctttttttttttgtatttttagtagagacagggtttcaccatgttggccaggctggtctcgaactcctgacctcaagctatccatctgcctcaggctcccaaagtgccgggattacaggcatgagccaccacgcccagccagttcctgcttttaaccgccatgctactctgctacaagaaaatatagcacttaaaatggtgagattatctcccctaggcataatttttaaatttaatattaaattgatttcc

SEQ ID NO: 930811 - DNA, 741 bp, Homo sapiens
gctccagagttcctgcatttttttttttttttttttggagacttagtcttgctctgtcgcccaggctggagtacaatggtgtgacctggcctcactgcaacctctgcctcctaggttcaagcgattctcatgactcagcctcccaagcatctgggattacagatgccccaccaccatgcctggctaatttttattttttcttttcctttcttttttttttttttgagacagagtctcactctgtcaactgggctggagtgcagttgcgcaaattccgcctcctgggttcaagcgattctcttgcctcagcctcctgagtaactgggattacaggcactcaccactaccccaaactaatttttttgtatttttagtagagatggggtttcaccatgttggccagsctagtctcggactcctgacctcgtgattcacccacctcggcctcccaaagtgttgggattacaagcatgagctaccacacccagcctttttttttttgtatttttagtagagacagggtttcaccatgttggccaggctggtctcgaactcctgacctcaagctatccatctgcctcaggctcccaaagtgccgggattacaggcatgagccaccacgcccagccagttcctgcttttaaccgccatgctactctgctacaagaaaatatagcacttaaaatggtgagattatctcccctaggcataatttttaaatttaatattaaattgatttcc

SEQ ID NO: 930812 - DNA, 583 bp, Homo sapiens
cagaggtacaaagaggagctggtaccattccttctgaaactattccaaacgatagaaaaagagggaatcctccctaactcattttttatgaggccaaaatcatcctaataacaaaacctggcagagacacacacaaaaaaagaaaatttcaggccaatatccctgatgaagatcaatgcgaaaatacycaataaaatactggcaaaccaaatccagtagcacattaaaaagcttatccaccacaatcaagtcagcttcatccctgggatgcaaagctggttcaacatatgcaaatcaataaacgtaatccatcacataaacagaaccaacgacaaaaaccacatgattatctcaaaagatgcagaaaaagcctttgacaaaattcaacagcccttcatgctaaaaacacacaataaactaggtattgatgaaacatgtctcaaaataataagagctgtatatggcagacccacagccaatatactgaatggacaaaagctggaagcattccctttgaaaaccagcacaggacaaggatgccctctctcaccactcctattcaacatagtattggaagttctgg

SEQ ID NO: 930813 - DNA, 620 bp, Homo sapiens
aaatacaaaaaccagtcaagcgtggcggcgcgtgcctgtgatcccaggcactcggcaggctgaggcaggagaatcacgggagcccgaggcagggaggttgcggcgagccgagatcaaggcagtacagtccaacctcggcaacagagggaaaccgtggaaagagagagaagagagaatagagggacaattttttattttttattgtagaaatctttcacctccttggtttaatttattcctatgtattttatttttcatagctgttgtaaataggatttgttttttcatttatttttcagatagttcattattggtgtacagaaactactgatttttrtgtgtgttgattttgtatcctgcaattttactaaatttgtttattagttttacagtttttttggtggagcctttagagttttttatatatacgatcatgtcatccacaaacaggaacaatttgacgtcctcttttttaattggatatcctttatttctttctcttgcctgattgctctggctaggacatccagtactgggttgaataagagtggtgaaggtgggcatccttgtcttgttcccatattttagaggaaaagcattgagttttttcttattcaatg

SEQ ID NO: 930814 - DNA, 729 bp, Homo sapiens
  misc_feature 671, 672: n = A,T,C or G
cacccttaaccaatggctggtgaaatagatttgtgagagcaacacctgcatctttgaagagacctgtaattgctcttctctgtatgtcacatcgaacagtgggaaccacagtcactccactacaatatttaaattcagtgggaataactggatcctgaactgtcagaggccaagtggcggcactcaaccatcaagggcaaagtgtgtgtggctaccgtaatggacagcagaggcaaagcagcaatcagaatagtctgacttgtgtagagctctgtcaytggctaattaatcaaaatgttcctagaagtcaaattcatagaaagcctttcggaatcaatacttaatttatataagcagaaaacttctcaatcaaatggacaaaaaactaatttgaattatagaagcagagacccatggcccctcaagaaatttccagacttgagccagtttacagacccagaacaccttgaatgaaagacaggcagtgtcctcctaaggaaggactcactacactaccaacaatttatgcagtgaatcttactcccatccttccgcaaggagacctctggccttttaccagggtaactgtgcactggggaacgggaaatgatcagacatttctgggactagtgcacactggctctgagctgacatggatttcaagggacccnnaaagcatcatgtaatcctccacttaaagtagggctttacagaggtaagataattaat

SEQ ID NO: 930815 - DNA, 615 bp, Homo sapiens
gctctagggacctggggaactttgaactcgagagagatgatttagggtatctgtcagaagaaagttctaagcaacaaattactcaagatgtgacctgggtgctcctaacagcatatagtcatatgtgttcacaaagagatgatctaaaattggaacttatatttaaaagggaagcagaacataaaagattggaaaatttgcagtctgaccatgcagtagaaaagaaaaaaacatttcatagggagaaattcaagccagcygcagaaatttgcataagcaacaatggggaaaacgtctccaaggcatttcaaagatctacatggcaggccctcctatcacaggcctggaggcccatgagggaccttcctgggcccagggtccctgtgctctgtgcagcccttgggacatgatgcgctgtatcccagccactccagctacagacatgactataggggccaaggtacagcttgggctattgcttcagaaggtagcttccttctgccaagaagacttggcagcttccacgtggtgttcagccttcaggtgcacagaaaacaagagttgagctttgagaacctccgcatgtatttcagaggatgtatggaaacacctgga

SEQ ID NO: 930816 - DNA, 605 bp, Homo sapiens
ctccaggccagctctctgctatctctggcctaagtttttgctgggatactgtcagatcttgtcatgaatgtctcagctacttcaaatcacatgtgcttaaagtatggttggctcagcctggcattctcaccctgggccaaatggtgcctctgatattcatatatatctgtggataattccttaaatatatagggaacttcatcatgttgcaaatagttggctgcttctgcttttatttaaattccaactatgcgtgttacacccatcctctgtcttaactgctacagagaaataaaccctaccctcaaggagaaataaccatgctgaacacaggaatgtgttgtgtttcctcagttcttaacctggatctttcagygacttcctcaatattgttgttttttatttaaaaaaatatttagggacaaagagtaagagccaattcagaatgctcatgattaaatatttgtccatttaggtttctgtggtagccttcatcagtttgaatatagtctctaggccacaaaaaaatatagatacctcaattccatcttatgcttagtaattacagtagaacaatctagaaactgagcaagttatgttttcta

SEQ ID NO: 930817 - DNA, 640 bp, Homo sapiens
acaccaagcattctacacgtttttgaagataaagcatgtctcctatcaataaacaaagattagactagtcttaaacatctcaacagcaaggactagatattggaagacagtgtagaaattccttcaagattttgaaggaaaatagtttccaacctagaattctgtgcacagtcataatataaaatacatgaaagaaaagttaatacacttagaaacgtgaaacattaatgttataaatacattttcaatgccacaaaagaaatagcactcaaacattaattttctcagcaaggcaattttacttctatagaagggtatgactcgcggatggagcaatggtgagagcacacctgaagaagggaggagaagagattttttttcctgatgcagrtagcccctactgctgtgtcattctcctgctggctagggttggaccgcacagtctaagctaattctgattggctattttaaagagagagggggtaggagttggagtcatggagtgagtagtttggtgggaagggtggttacagaacaggtgattcaggatgattcaggtcagagcaagagaccagggtcgactccggacggaggaggtgaccaggggaacagatgtgaactactgatttgaactcgtgga

SEQ ID NO: 930818 - DNA, 464 bp, Homo sapiens
gaatagcctacactatattgaagaataagaacagagttgggaggccaggtgcggtggctcatgcctattatcccagcactttgggaggctgaggcaggcagatcatgaggttaggagatcgagaccatcctgactaacatggtgaaaccccatctgtactaaaaatacaaaaatttagccaggtatggtgatgcatacctgtagtcccagctactcaggaggctaaggcaggagaatcgcttgaacctgggagtcaraggctgcagtgagccaagatcacaccactctaccctggcctgggtgaccgagtgagactctgtctcaaaaaagagaaaaaaaaaaaagaacagagttggaagactgacactgcctgacttgaagctacagtaaccaagacattgtggtattggcaaaagaacagacaaatagatcaatagaatagaacagagatcccagaaatagac

SEQ ID NO: 930819 - DNA, 596 bp, Homo sapiens
cctgcctcagcctcccaaagtgctgggattacaggcatgagtcactgcacccggcccaaatttttaatcaataagcacacaggatgtgtggtgacatcccagagggcctgcagcagggatgggctttgttcagaaccaggcagtgggcaaggcagccacagacacacctgtcccctccacgccaccactgtccccaccccatcacactagagtcacaccagctctgggagcagaaggtcacacatgccaatccagctccctcatggcrctcacacttgccccggccttgagcacaaaccactcctgtctggggtcaggcaggcactgaacagaaaactctggccacagaatccagttacagagtggatggagcagggagttcttcctgcccatgcaatgggaatcatcatcgctcatcagagatgggatccttcccagggctgagtgtgacctcaacaatcaggtggccctggaagggcccaagggcaccacagtagccctgcgaggagctcctgctaaaacacttcaccggacagggccttggaggccccgcccccacagggatggagggggctacacagggaggtaggaacggg

SEQ ID NO: 930820 - DNA, 596 bp, Homo sapiens
cctgcctcagcctcccaaagtgctgggattacaggcatgagtcactgcacccggcccaaatttttaatcaataagcacacaggatgtgtggtgacatcccagagggcctgcagcagggatgggctttgttcagaaccaggcagtgggcaaggcagccacagacacacctgtcccctccacgccaccactgtccccaccccatcacactagagtcacaccagctctgggagcagaaggtcacacatgccaatccagctccctcatggcgctcacacttgccccggccttgagcacaaaccactcctgyctggggtcaggcaggcactgaacagaaaactctggccacagaatccagttacagagtggatggagcagggagttcttcctgcccatgcaatgggaatcatcatcgctcatcagagatgggatccttcccagggctgagtgtgacctcaacaatcaggtggccctggaagggcccaagggcaccacagtagccctgcgaggagctcctgctaaaacacttcaccggacagggccttggaggccccgcccccacagggatggagggggctacacagggaggtaggaacggg

SEQ ID NO: 930821 - DNA, 713 bp, Homo sapiens
acctgatgccacagcactgagagaccctccttcagacatcctcacccacgctttttccaagcctgtgaccttcagagcaagtcccaggctctgggggactcccagtcctttggcttcttataaaacaaagtttcagatcccgggaggcccaggaaactcaaaacactacaggcctgagcctgagcctgagccgtggggaagctgctagcctctaactgaggcccagtctgaaaccaacaggcagattctctgcatctcggcaataaaagcaacagcttcagcagtgcagaccgagcctcggtccctcagaggccaggctcatcacagcactatctcctttctcacttcccggctgtgctataaactaggacctctgatcccattttacagatgaggaaactgacgctcacaagtcaagtactaaggttaaagtcccaagtaggaggtcctgggatgcaaacttatgacctggcaractccagaaccccagaacccaattctttttttttcttttctttctttcttttttttttttagaggcagggtctcactctgttgcccaagctgtagtgcagtggtgcaaacacagctcactcactgcagtcttgaactcctgggctcaagcagtcctcctacaccacaggtgtgtgccactcgtgcacagataatttttttattttttttgtagagatggggtctcgctatgctgccca

SEQ ID NO: 930822 - DNA, 540 bp, Homo sapiens
gtgcccttatacaaaggctggaatgtgacaaaagcccacctagagttgtgcccaggtctttcctggtccttgaagtatgacaagataacaaaggacccatttaggatgaaataagtttattgggaggtccaaagaaactccccaggcctccacaaacaagtttattaggggtctgaagagactccccaaacctccatcatttagcaggagacaagataagggtaatcaccccagcacctggacccatttagattaagtaaatttactgaggctccagaggaaggtcttcaggactcagatattagttatagattaaaagaagttaatctttattttatttyattcattcattcattcattcattcattcattcattcattttgagatggagtctcactctgtcgcccaggctggagtccagtggcacgatcttggctcactgcaaactttgcctcctgggttcaagcaattcccctgcctcagcctcccgagtagctggaattataggcgtgcaccaccacacccgctaatttttgtatt

SEQ ID NO: 930823 - DNA, 426 bp, Homo sapiens
tctgaggcaggtatggctgaagctttatgaaaagagatggggcctgtgccaggccttagatgtaggagaaggaggacgtgtcaggaagcagaaacagtatcatcaaaggtgctgctgtgaggcatgtgggcagtgtttggaraagagccagggactttctgtgtcaggtttacagcatctgtgggaggccgcattggtaaataagcccagagaagtaggctggggctacttacattaaaagtatgcatggctttaaaggccagctgagtggtataagtagaaactgtaaatagtatcacatttattgaggacagcttttgctgccaatagagtttttaaattttttgtgaggtgggtaattaatggatgaagaattattgacctaaatgtatccaatctttgagtgttttagtatgctagattatt

SEQ ID NO: 930824 - DNA, 526 bp, Homo sapiens
gcacaccaataatgattaatctgaaaaggaaattaagaaaacaataccatgaacaacagtattaaaaagaataaaatgctctggaatcaatttaaccaggatgacaaactatttgtacaataaaaactttcaaaatgctgctgtaagaaatcaaaggtacaaataaatggaacagtatcttctgttcataggtgaaaagactttttaaaaaayttcaacttttattttagattcaggggttacaggcacagatttgttatgtaggaatattgtataatgctcaggtttggagcacataggtagtgagcacagcaaccaatatgtagtatattaacttgtcctcccctctgcacactttagtagtccaccgtgtttactgttcccatatttatgtccatatatgctcaatgtttagctcttataagtaagaacatgcagtatttggctttctgtttctgcattaatttgcttgaaattatggcctctggttccacctatgttcataccaaggacatgatttcattat

SEQ ID NO: 930825 - DNA, 570 bp, Homo sapiens
gagagccctcacctgaaactgaactgaccacaactttgcttttggactttccagcctctagaattgtaagaaaaataaattcctgtttaaactgcatggtctgtggtattttattatgacatctctagtagactaagacacctagtgagacccacattgaacttctgacctccaaaaccataagataatatatttgtgttgcttaagcactaaatttgtaataatttgttacagcagcaatgggaagctaatacattctccatcattaaatcattagatttccggtratgtcttagcaatgatatagattgttgccatgacatagtatttctttctttctttctttctttttttattttatttatttatttatttttttttttgagatggagttttgctctttgttgcccagggtggagtgcaatggcacgatctcagctcactgcaacctccgcctcccgggttcaagtgattctcctgcctcagcctccgaaggagctgggattacaggcatgtgccaccatgcctggctaattttgtatttttagtagagacaggttttcgccatgt

SEQ ID NO: 930826 - DNA, 656 bp, Homo sapiens
cttgaatttctcctcagaaaatggggttttctttcctactgcatcatcaagctgcaaattttctgaacttttatgctctgtttcccttttaaaactgaatccttttaacagcatccaagtaacctcttgaaggctttgctgcttagaaatttcttcyatcagataccctaaatcatttccctcaagtttgaagtcccacaaatctctagggcaggagcaaaatgccaccagtctctgctaaagcatagcaagagtcatgtttactccagttcctaacaagttcctcatctccatctgagactacctcagtctggatttcatagtcgatagttatcagcattttggtcaaagccattcaacaaggctctaggaagttccaaactttcctaaattttcccgtcttcttctgagccctccaaattgttacagcttctgtctgttatccagttccaaagttgcttccacatttccgagtatcttaacagcagcactccactctactggtaccaatttagtgtcttagtccattttcatgctgtgtactggagactgagtaatttataaagaaaagaagtttaattgactcacagttccacatggctcgggaggcctcacaatcatggtggaagatgaaggaagagcagagggacaaaatt

SEQ ID NO: 930827 - DNA, 543 bp, Homo sapiens
cagcatccaagtaacctcttgaaggctttgctgcttagaaatttcttccatcagataccctaaatcatttccctcaagtttgaagtcccacaaatctctagggcaggagcaaaatgccaccagtctctgctaaagcatagcaagagtcatgtttactccagttcctaacaagttcctcatctccatctgagactacctcagtctggatttcatagtcgatagttatcagcattttggtcaaagccattcaacaaggctctaggaagttccaaactttcctaaattttccygtcttcttctgagccctccaaattgttacagcttctgtctgttatccagttccaaagttgcttccacatttccgagtatcttaacagcagcactccactctactggtaccaatttagtgtcttagtccattttcatgctgtgtactggagactgagtaatttataaagaaaagaagtttaattgactcacagttccacatggctcgggaggcctcacaatcatggtggaagatgaaggaagagcagagggaca

SEQ ID NO: 930828 - DNA, 756 bp, Homo sapiens
caacgagtgtagaggagacctgaagtctgtggctcctttcagcaggcaggttgtcctaagagtgtctgagtctggctgagtccaggatttttcttggctcagaagggaggaagtgcatgctgattggtccatgggcaaccatggcttagcctggaaaaagcaccataagttctcgctcctggttgtggactccacccagtactggcagcctggccccaaggcttctggccatccctgcttgaaggtgggatttcacaagggacccatctcttcctgcctaggaacctgcctgcctcctgccatcatcaacatgtcatctatggtgcccaggctgtttgcattgaggggcacctgcaggctcatgctgagccgccctcagcccactggcctccctcccatgcttgtcagtaatcaaagtctggaggggaccaaggcagcagggagctggcatgccagcatcactctgagcttgcgcacacgtggccaggtcatgrcagtgtctgggctcaaccacaactttgctctgcactggagcaggctctgaaagccaagagaggccagggagcaggagcaggcacttcaagcctgcagagacagggggcttcccaggcccccaatggcacagggatgcccgagtccagacccactgctgggcatctgtagctgtgcccaggatcatggggctcccaccccatcaactcagtaaaggataaggatcctgcctgttcctggcccccaccagctctgtgtaatgca

SEQ ID NO: 930829 - DNA, 444 bp, Homo sapiens
tgaaaacattatgctaaataaaataagcgagatgataaaaggacaaataatatatgattccactcatataaggtatctagaataggcaaattcataaagaaagaaagtagaatacaggttaccaggggctgggggaggggaggatggagagttattgtttatgggtgcagaggttcagtttgggatgataaaaaaagttctggaaatrgatagtggttatggttgtacaacaatatgaatctgcttaatgttactgaattgtacacttaatgtttaaaatgttaaattttattttatgtatgtttatcacaataaaaattgcaaaaataatgtaaaactctcattatcaattttatcttaagaatatgttgaaatgattatattttagatgttaggtttaaaatatattattgttttttttttttcttttttcaaaatgtgttg

SEQ ID NO: 930830 - DNA, 485 bp, Homo sapiens
ttgaaaccttcgttggaaacgaaaataacttcacataaaaactagacaaacattctgagaaacttcttagtgatgtgtgctcaacgcactgaattgaaccttcctttagatagatcagtgttgaaacactctttttctatagtatgcaggtgcatatttggggcactttgaggcctatggttgaaactaaaatatcttcacataaaatctagaaagaagcattctcagaaactactttgtcatgtgggcattcaattcaaacagttgaactttccttttgatagatcagtttttaaacactctttttgtaggatatgcaggtggatatttggggcactttgaggyctacggttgaaacgaaaatatcttcacataaaatctagacacaagcattctcagaaactagtttgttatgtgggcattcaactcaaagggttgaaccttccttttgatagatcggttttgaaacactctttttggagaat

SEQ ID NO: 930831 - DNA, 655 bp, Homo sapiens
gggcctggaggtcccaccatgataacaccacattgcctcacagaggtctctgcttttctgtccttggtagacctcagggtaggtggtgccaaggatgataaagaacataagcaactgggagaggaaaacaggcaaaggaaggaagggtgaatgaggaagaagagatgaggctacaggggtgggagaacgtggtgataaagccagaggggatggtgtggtggcaactgacagaaggggagaaggttgtccatgctcatcagtcccctccttcctgaacaacaggaggggtgcacggagggcgagccctctgtcagtgaatgcagcagttcaaagaaacaaaaatagacaaaaataataaatgttctcctaggacaccaggtttttagacaggccactgtgagacctctgaatgcccgatgcycaatagtgctgagtgggtaagtgacaagaagcctgcacccccccagccctgtgcacctcctgagaccgaggagcctgtgtcaccattacctagggctagaagaaagggcttccaaatggctcaggaagatgagtgggcatttcacgccacctctgggaccagatgaccacacctcccctgaggaatcccttagccaaaataattgaacataataatgttgcttaaatataaact

SEQ ID NO: 930832 - DNA, 655 bp, Homo sapiens
gggcctggaggtcccaccatgataacaccacattgcctcacagaggtctctgcttttctgtccttggtagacctcagggtaggtggtgccaaggatgataaagaacataagcaactgggagaggaaaacaggcaaaggaaggaagggtgaatgaggaagaagagatgaggctacaggggtgggagaacgtggtgataaagccagaggggatggtgtggtggcaactgacagaaggggagaaggttgtccatgctcatcagtcccctccttcctgaacaacaggaggggtgcacggagggcgagccctctgtcagtgaatgcagcagttcaaagaaacaaaaatagacaaaaataataaatgttctcctaggacaccaggtttttagacaggccactgtgagacctctgaatgcccgatgcccaatmgtgctgagtgggtaagtgacaagaagcctgcacccccccagccctgtgcacctcctgagaccgaggagcctgtgtcaccattacctagggctagaagaaagggcttccaaatggctcaggaagatgagtgggcatttcacgccacctctgggaccagatgaccacacctcccctgaggaatcccttagccaaaataattgaacataataatgttgcttaaatataaact

SEQ ID NO: 930833 - DNA, 632 bp, Homo sapiens
tagccaggccctgctccatctctgcattccgctgttgtaggcagaatctaagaggggaatggctgcctcaggatcctcagcgccagagctgacaggctgaaagtagactcctttggtttgaacaaaagttcaaaacctttagtgtcagtgggcattccctgtaagaccctgactgcatcactgatgacaactaccractgaggtcccaaaggctttggctgagttttcttctctcagcaagtatcccaggatatctgtatactttgaagaggccggagggggagagggaggaaatgacactcagtacttttaaattaggatcatgtatgagagaatggagaaattggactttaacatgttaaatttagataaaagtaacattgctatatcctcaatacagttgaataaaatgtatactgaatttaacaaaaaagggagatttctcaagaaatatcttggatgaaaatctgaaatatttgtatgactgtgtgattatgcctgggcctgaaagtgtaactgaggttgttctttgcaggacagagttggtgcaaatggaaaagccccagccagtgaacccagaactcacttcctggcacatcactggagtgttagataagctcaacaaattcaga

SEQ ID NO: 930834 - DNA, 633 bp, Homo sapiens
ataataaaattatggcagtaattaagaagttctttgaacctaataagaacaaagatatatcagaatctctgggacacagctaaggtagtgttaagaatgaaatttatagcactaaatgcccacatcagtaagttagaaaaatctcaagttaaacctaacatcacaactaaaagaaatagagagccaagagcaaacaaatctcaaagctaccagaagacaagaaatgaccaaaatcagagctgaactgaaggagatcgagatacgaaaaactattcaaaagawcaacaaacccagaagctgtttttttaaaaaaaaatactaaaatatatagactaccagctagacaataaagaagaaaagagagatgatccaaacaaatgcaatccaaaatgacaaaggggatactgccactgaccccagagaaataaaaacaaacatcagataatattatgaacatctctctgcacatgacctagaaaatctaggagaaatggataaaatcctggacacacataacctcccaagtctgagccaggaagaaatataatccctaaacagaccaataaccagctctgaaatggactcagaaaggaatagcctaccaaccaaaaagtgcccaagaccggacaaatt

SEQ ID NO: 930835 - DNA, 633 bp, Homo sapiens
ataataaaattatggcagtaattaagaagttctttgaacctaataagaacaaagatatatcagaatctctgggacacagctaaggtagtgttaagaatgaaatttatagcactaaatgcccacatcagtaagttagaaaaatctcaagttaaacctaacatcacaactaaaagaaatagagagccaagagcaaacaaatctcaaagctaccagaagacaagaaatgaccaaaatcagagctgaactgaaggagatcgagatacgaaaaactattcaaaagatcaacaaacccagaagctgtttttttwaaaaaaaatactaaaatatatagactaccagctagacaataaagaagaaaagagagatgatccaaacaaatgcaatccaaaatgacaaaggggatactgccactgaccccagagaaataaaaacaaacatcagataatattatgaacatctctctgcacatgacctagaaaatctaggagaaatggataaaatcctggacacacataacctcccaagtctgagccaggaagaaatataatccctaaacagaccaataaccagctctgaaatggactcagaaaggaatagcctaccaaccaaaaagtgcccaagaccggacaaatt

SEQ ID NO: 930836 - DNA, 596 bp, Homo sapiens
tgctcaattaaactcttttaaatttaatttggctgaagtttttcttttatcaaccataatagatgcaggaaaagtatctgacaaattttattacccatttatgttaaaaactctcagcaaactaaaagaagaaggaaatttcctcaatttaaacaaattttatatatattttttggtttttggtttttggggtgtgtgtgtgtgtgtgtttatacaagtaacacaatagttaatggtgaaacactgaaagcttcccctcaaaaatcaacacctattcataatataaaaattctcagcaaaccaaaaattgaaggcaacttagrtattctgaaaaaaaaaatctagaaaaaaacaacgactgacatcatatttgggggtggaacactgagtgatcatgagcaaggcaagaataactgttctcaccagctctttttgacattatcctgatagttgcagccagagcaaaaggcaaggaaaagaaaggaaagacatacaaattggaaagggaaaaataaatctctttatgaatagatgccatggctgtttatggtgaaaattttaagtctaacaaaaacctactagaactaataagtgag

SEQ ID NO: 930837 - DNA, 596 bp, Homo sapiens
tgctcaattaaactcttttaaatttaatttggctgaagtttttcttttatcaaccataatagatgcaggaaaagtatctgacaaattttattacccatttatgttaaaaactctcagcaaactaaaagaagaaggaaatttcctcaatttaaacaaattttatatatattttttggtttttggtttttggggtgtgtgtgtgtgtgtgtttatacaagtaacacaatagttaatggtgaaacactgaaagcttcccctcaaaaatcaacacctattcataatataaaaattctcagcaaaccaaaaattgaaggcaacttaggtattctgaaaaaaaaaatctagaaaaaaacaacgactracatcatatttgggggtggaacactgagtgatcatgagcaaggcaagaataactgttctcaccagctctttttgacattatcctgatagttgcagccagagcaaaaggcaaggaaaagaaaggaaagacatacaaattggaaagggaaaaataaatctctttatgaatagatgccatggctgtttatggtgaaaattttaagtctaacaaaaacctactagaactaataagtgag

SEQ ID NO: 930838 - DNA, 603 bp, Homo sapiens
ttctaaatcgttttatgaagccagtatcaccctaatgccaaaactgggaaagaacataacacacacaaaaaatctatagaccaatattcctgatgaacacagatgcaaaaatcctcaacaaaacactgactaactgaatccaacagcacatcaaaacaataatacattatgatcaaatgggtttcataccagagattcagggatgatttaacatatgcaagtcaataaatgtgatacatcacataaacagatttaaaaacaaaaattgtatgatcatctcaatagacacaggaaaagcatttgataaaattcagcattcctttagtattaaggccctcagcaaaaytggcatataagggacacaccttaaggtaataaaagccatttatgaaaaacgcacagccaacattatactaaactgggaaaagtttaaaccattccccctgagaactgaaacaagacaaggatgcttgctttcaacacttctattcaatgtagtactagaagtcctagccagagtaaccagacaacattaataataaagggcattcaaatcagtaaagaggaagtcaaactgtcattgttcaccaatgatatgattgt

SEQ ID NO: 930839 - DNA, 779 bp, Homo sapiens
aaggagataatttaagacatataaagaaagcttttccaagtgtcagggtaaagctgattccctatgtccaaactttgtctgcaacttttcaggaaaaacaaacaaacaaacaaaaaatttaagaggtacaataaacacagttatttttttaagcaccaagggggcctgggttctctactcaactctgaccctaattattgtgtgtcatttagaaatttgtcttttcaaggccctagtttcttcaaacgtaaaatgaagctttgcagagagctcatgttcaaaggtcctgaggcacaagaaacagtgatatatttgaggaaaagaaggaggtctgtgagactagaatggagtgagtgaggaaaaacagccagagatgcaatcagggggaatggggaacttggtttttaccctgagtgtgacaggaaagcattgcagggtttggtgcccagggattaaatgaactgacatgtaatttggccaatagacattaatgtcagtaagacataaatatgttctgccaatgccaagcaggagcaaaaacatcaytttttcatctttcctcagttcagtgcctccaaaactctaagaactgagacatcactttggatgatgacataggacttgtgtacttattacatgtagtatcaactgtccattaatacttttaaaacccatgctttccaacaaagttacttctttaaagcttccagaggtcatctttaatttatgaatgaaagatatgttctaaaaataagctatgtactagtataattatctat

SEQ ID NO: 930840 - DNA, 575 bp, Homo sapiens
aacagtgattacttgataggtacgaagtttcctttggcggtgatggcagggttctggaactagatagcagtgatggtggcataacactgtggatgtagtcaatgcgcctgaattgttcacttaaaaatggtaaaaacgggccgggcgcggcggctcacgcctgtaatcccagcactttgggaggccgaggcaggcggatcatgaggtcaggagttcgagaccagtctggccaacatggtgaaaccccgtctctactaaaaatacaaaaattagttggctctggtggygcatgcctgtattgctagctactcaggaggctgaggcagaagaatcgcttgaacccgggaggcgaaggttgcagtgagctgagattgcgccactgcactccagcctgggcgacagaatgagactccgtttcaaaaagaaaaaaaaaaaaaaaaaagatgaaaacaggctgggtgcagtggctcacaccttttaatctcaactctttgcgaggccaaggtgggaggattgcttgagcctaggagttgaagaccagagtgggcaacacagatccagtctctaccaaaaaa

SEQ ID NO: 930841 - DNA, 575 bp, Homo sapiens
aacagtgattacttgataggtacgaagtttcctttggcggtgatggcagggttctggaactagatagcagtgatggtggcataacactgtggatgtagtcaatgcgcctgaattgttcacttaaaaatggtaaaaacgggccgggcgcggcggctcacgcctgtaatcccagcactttgggaggccgaggcaggcggatcatgaggtcaggagttcgagaccagtctggccaacatggtgaaaccccgtctctactaaaaatacaaaaattagttggctctggtggcgcatgcctgtattgctagctactcaggaggctgaggcagaagaatcgcttgaacccrggaggcgaaggttgcagtgagctgagattgcgccactgcactccagcctgggcgacagaatgagactccgtttcaaaaagaaaaaaaaaaaaaaaaaagatgaaaacaggctgggtgcagtggctcacaccttttaatctcaactctttgcgaggccaaggtgggaggattgcttgagcctaggagttgaagaccagagtgggcaacacagatccagtctctaccaaaaaa

SEQ ID NO: 930842 - DNA, 662 bp, Homo sapiens
attagattaaagagcttctgtacagcaagagaaactataaacagtgaacagataacctacagaatgggaaaaaaaattgcaaactatacatttaacaaaagtctagtatccagaatctacaagaaacttaattcaacaaagaaaatcatgtaatcccattaaaacatggtcaaaagatatgaacagacacttctcaaaagaagacatacaagtagccaacaaacatgaaaaaatgctcatcatcactaatcatcagagaaatgcaaatsaaaactacaataatgtatcatctcacactagtcagaatgcctactataaaaaagtcacaagatgttggtaaggctgcagagaaaagggtacgctcatacactgttggtgggtatgtaaattaatactgctactgtggagagcagtttggagatactgcaaagaactaaggattgtactacccttcaactcagcaatgccattactgattttataccccaaataaataattctaccaaaaggatacatgcacctgtatgttaaatatggaatcaacccaggtgcccatcaatggcaggttagacaaagaaaatatggtacatatataccatggaatactatattgccataaaagagagtgaaatcatgtcatttgcagtaacatatatacagct

SEQ ID NO: 930843 - DNA, 662 bp, Homo sapiens
attagattaaagagcttctgtacagcaagagaaactataaacagtgaacagataacctacagaatgggaaaaaaaattgcaaactatacatttaacaaaagtctagtatccagaatctacaagaaacttaattcaacaaagaaaatcatgtaatcccattaaaacatggtcaaaagatatgaacagacacttctcaaaagaagacatacaagtagccaacaaacatgaaaaaatgctcatcatcactaatcatcagagaaatgcaaatgaaaactacaataatgtatcatctcacactagtcagaatgcctactataaaaaagtcacaagatgttggtaaggctgcagagaaaagggtacgctcatacactgttggtgggtatgtaaattaatactgctactgtggagagcagtttggagatactgcaaagaactaaggattgtactacccttcaactcagcaatsccattactgattttataccccaaataaataattctaccaaaaggatacatgcacctgtatgttaaatatggaatcaacccaggtgcccatcaatggcaggttagacaaagaaaatatggtacatatataccatggaatactatattgccataaaagagagtgaaatcatgtcatttgcagtaacatatatacagct

SEQ ID NO: 930844 - DNA, 617 bp, Homo sapiens
ggagatgtaatgtacgctattggatttatgaatacagaggtttgcaaaaaattttcatctagcgatttaaatgtgggagttggcatatggttgatatataaccatatgagactaagattaccaggggatgaaatttaaatataaaagaaagataaggactaagcactggattactccaaccttatgaggttatatacaagaagaattagcaagggaaactgagaaaaacaacaagagagtcacttaaaatcttagaagtgtgtgatatactagaagttgaatacaaaaaaaaaagtataccaaggagaaggaagttcacaattttgtgaaataatgctgtcagctcaaggaaaatagtaagaaaaatgaccattggagttagccaaatgaggtttacatttgctctatrgccaaccaccctaaaacttcagggcttaaaatatacatttattattatttgccctggttctatatattggtttggctctgtggggtgattagcacttggggagaatcagaaatttgcaattagatataaatttggtctgttgtcatctgaagccctgctggtctaaacatccaagatagatcattcacatggctatcagttgatgtga

SEQ ID NO: 930845 - DNA, 471 bp, Homo sapiens
ctcctaagttcatcagcattgaagtagaaaacagaagtggcagaaatgcaagttaaaaatgcaacgagatctcacccattagaatgagatctcctaacggagatccaccccatcaggatggatatattaaaaaattgcggccgggcgyggtggctcacgcctgtaatcccagcactttgggaggccgaggtgggtggatcacaaggtcaggagatcaagaccatcctggctaacacggtgaaaccccgtctctactaaaaatacaaaaaattagccaggcgtggcggcgtgcgcctatagtcccagctactcgggaggctgaggcaggagaatggcgtgaacccgggaggcggagcttgcagtgagctgagatcgcgccactgcactccagcctgggtgacagaccaagactctgtttcaaaaaaaaaaaaaaaaattgcaaaaggacaataacaaatgttggcaaggatg

SEQ ID NO: 930846 - DNA, 651 bp, Homo sapiens
gagacatcagaggggtagggcttggggaggacaggaaagggacgtcccagctccatgggagggctgctgcctggtagcttcagaggatgcctccgcccgaatgtggtcccgatgttgacagatacttccttttccaagagaaactgtgaaactggatttttattggaaatctttttatttgacatagtaaaatctaactgaacgacaatgaggtaccacatcacacgcactaggatagctataataaaatagaatggaaaatacgaaattttgatgaggaagtggagcagttggaacccttgtacattgctggtaggaaagtaaggtgacccactcactgtggaaaagtttggaggttcctcargaagttaaacatagccttatcatataacccagcaattccactcctaggtatatgcccaaaagaattgaaagcaggtactctacatgaagacaagtacatctacatgcatgttcctagcagcgcagttcatgatcaccaggaggtggaaacaacccaaatgtctgtcatcatgtatgctgcaatgtaactgaatcttgaaaaggttatgccaagtgaatgaagccagacactaaaagtcatacattgtatgattccatttatatgaaatgtccagaataggcaaatcc

SEQ ID NO: 930847 - DNA, 614 bp, Homo sapiens
gcttgattttttttttttaaggcttttttttaagctttattgcagtggctctagagaagcttcttatctaaagctggcttaggcctacaagaaaggtgtagcctcacagtggtctctaatgaatgccttggatgttcaacaaattattcccattctggcttgctaagatttgaatgtcccccagtcccatgagagctcttggaattattcagcttatacctctccaatagcagttccttgacagtcttgtatcattttacccaatatctgagcaacttagtatttagccagtgactcaagtggtcccctgtgcagatttctggcactatgtgtccatataacaccatcttgcctgggactttgcgtcacaaatttcagccttttcaacctccatatattataatctctctcttcaactcagagaggccactgtgctctgcatgggatcctcctccctgtgctgcartctaaaaagctcttccaggcagaaagccagggtgatcactgggctcacttgatttgcatcccttctttcaggcctcatagttctacactacctgtggcccaatctctgaaaaacaattgttttatatctttggtctggctttccagtt

SEQ ID NO: 930848 - DNA, 576 bp, Homo sapiens; identical to SEQ ID NO: 929431

SEQ ID NO: 930849 - DNA, 721 bp, Homo sapiens
tttagttaagtccctcgcaatgtttttatttctagccttctatacaatttctttcacacctgaatccttacgttatttagatacttcagaaaatctagccctcgagtgctaagatctcataagcatgctatactcagccattcttctatggacaattttcatttgtaagagcagccaaatcaaagttgcatgaacatgagtttyctgtggcaggaagtttaagacatttttaatattttccaataagtttttttaaaaagtatttttggagataattttcatcattttaaggcatcactaacacactcttgatttttctgggaatgatttttttagtttgtagattatccttgccctttatttctcctccctattttgtctgcctctgggctatttttacagctcattagtgtttccataagaagatgggaaatggaaataaaagaagatgacgctcaaattcaggcactacctatgcaacataaaatggaccttcagggatgaaagaaaatccatctggttggctgtggagatgttaatgactgaattatactcacagtttgatttcagactgttatccacacacagtgcttgtcagctacttaaactcaattttcttcttgaaatggctgattggtactcattactatggtgatatccatcaatcacccagaccatcatgcatgctgagttattatcttgatctttgggtgttggaaaa

SEQ ID NO: 930850 - DNA, 689 bp, Homo sapiens
gctgctatggaaaacagtatggtagtgcactatgctaatgtgttgtccacactaagtttcgcatcaatatggtgacctcctaggagcagggcaccaccaggtttccctagcaggagtgaaccatcccagactgaaaatggagcaggtcaaaattcctgtgctgatcagtagtgggattgcgcctgtgaatagcaactgcactccagcctgagcaacatagtgagaacttgtctcttaaaataacaaaaacaaaacaaaaaaattaaaaatagaattaccrtatgatccagcaattccacttctgggtatatacccaaaagaattgaaagtaggatctcgaagagatatttgcacatccatgttcatagcagcgttattcaaatcgccaaaaggtgaaaggatcctagtgtccatccacagatgaatgaataaaatgtagcatatacatacaatggaattttattcagcctgaggaaggaaaatgtgacacatgctacaatatggatgactcttgaagacattatgctaagtggaataagccagtcacaaaatgagaagtactgtatgatttcactcataggaggtacttcgagtagtcaaattcatagagacagaaagtagaatggtggttgtcaggggctaggggagggaggactagggagtaattgtttaatgggtacaatgtttca

SEQ ID NO: 930851 - DNA, 630 bp, Homo sapiens
aaaccccattttctaaggagaaattcaagccgacttcagaaatttgcataagtaatgaggagccaaatgttaatccccaagacaatggggaatatgtctccaggacatgtcagaggccttcacagcagccccccatcgcaagcccagaggcccaggagaaaatggtttcatgggttgggcccagagtccctgtgctgtgtgcagcctagggacttggtggcctgtgtcccagccactccagccatggctgaaaggggccaatgtacaactcaggctgtggcttcagagggtgcaagccccaagccttggcagcttccacatggtgttgagcctgtgagtacacagaagtcaagaattggagtttgggaacttccgcctaaatttcggaggatgtatggaaatgcctggatgcccaggcagaagtttgctgcagaggctgggctctcatggagaacctctgctagggcagtgtggaagggaaatgtaaggacagagstcccacacagagtccctattggggaaccgcctagtggagctgtgagaagaggtctactgtcctccagaccccggaatggtagatccagcttgcactgttcacctggaaaagccacagacactgatcgccagccc

SEQ ID NO: 930852 - DNA, 624 bp, Homo sapiens
agattccatttcaggctgtgttgaattagcattttctcaatttcttcaacaaatattctcatccatgtttgtttcatacacatagaggttaatttctgtcacttcaaacttggcagttacccttcaataagcaacagccaagccgtattggtacatctgtcaactcattaagagccaagaaaaaccacttgaaatcatttgccttgttgtttaattggctattgatattgttactcatgtctttgactttttgagcagttattctcattgagagactaacaatgggctgggtgtggtggctcacatctgtaatcccagcattcaggaggctgagatgggcggatcacctgaggtcaggagttcaagaccagcctggccaacatggtgaaaccccgtctctactaaaaatacaaaattagccrggtgtggtggcacatgcctgtaatcccagctactcgggaggctgagtcaggagaattgcttgaacttgggaggtggaggttgcactgagccgagatcacaccactgcacgccagcctgggtaacagagctacagtcagcctcaaaaaaaaaaaaaaaaaaaaaggctaatgatgtttattttctctggacacatttcttcag

SEQ ID NO: 930853 - DNA, 522 bp, Homo sapiens
tgcagagcggagctgccttctccagggcctcctcgctgtgagaactaaagactccacaaatgacctgcctacagagaggagctatccactgtgggtctcctccaagctgttgtaacactcaataacgctcatgttagtgttgttcacccttcacttgtctgtgtacctcattcttcccagatgcaggaaaagatcttgagcaaaggcacagcaaccacagaggtttccagccagaaaaygaaacccccaaagatcctgtaacacaattaacgtttctcaaagggcagactgacatgccttcagtttgatagttctagatagggaaaacattcctcagtcagatacaatatctattttcatatgacatttaggtaagagtcacaactacatttcataaaacttatttaaacatctcaaatttcatagtcctatcaatctgtacatgtttatgttcccatcccaggaacttttcttctctacccacagaccattttaccttttctagtaaaaagggatttgggt

SEQ ID NO: 930854 - DNA, 742 bp, Homo sapiens
aaaatttctccaatctggggcaaatacagaagacttgtgtgggcccctttaatgctgggggaacagcaggggttccctttggtccacccaatttttttttttttgaaacggagtctcactctgttgcccaggctggagtgcagtggtgcgatctcagcttactgcaagctctgcctcgcgattcacgccattctcctgcctcagcctcccaagtagctgggactacaggcrcctgccaccatgcctggctaattttttgtatttttagtagagatggggtttcaccgtgttagccagaatggtctcgctctcctgacctcgtgatccgcccgcctcggcctcccaaagtgctgggattacaggcgtgagtcaccgcacccagcctggtccacccaatttttgatggtgttgtaaagacctttgtttaaccccatcagttttcattttattttacttcatttcttaaaagccatctaaagattcccaccacccttctggggtgagtcctttaactcccttttgcctttgccattttgcttttttggtaattgccctaatgtttaattaagcatcagtaagactcatgggggacagaaaatttgatgagacttctcaaacagtaatatcacgcaaggtgcccatgtaaaatgggcccttttaccctcaatatttaccatgacctggataatagacatattcagggggagaatatcccagtcatcataaatccagtcccacatgg

SEQ ID NO: 930855 - DNA, 752 bp, Homo sapiens
aaaatttctccaatctggggcaaatacagaagacttgtgtgggcccctttaatgctgggggaacagcaggggttccctttggtccacccaatttttttttttttgaaacggagtctcactctgttgcccaggctggagtgcagtggtgcgatctcagcttactgcaagctctgcctcgcgattcacgccattctcctgcctcagcctcccaagtagctgggactacaggcgcctgccaccatgcctggctaattttttgtatttttagtagagatggggtttcaccgtgttagccagaatggtctcgctctcctgacctcgtgatccgcccgcctcggcctcccaaagtgctgggattacaggcgtgagtcaccgcrcccagcctggtccacccaatttttgatggtgttgtaaagacctttgtttaaccccatcagttttcattttattttacttcatttcttaaaagccatctaaagattcccaccacccttctggggtgagtcctttaactcccttttgcctttgccattttgcttttttggtaattgccctaatgtttaattaagcatcagtaagactcatgggggacagaaaatttgatgagacttctcaaacagtaatatcacgcaaggtgcccatgtaaaatgggcccttttaccctcaatatttaccatgacctggataatagacatattcagggggagaatatcccagtcatcataaatccagtcccacatggtttacatata

SEQ ID NO: 930856 - DNA, 752 bp, Homo sapiens
aaaatttctccaatctggggcaaatacagaagacttgtgtgggcccctttaatgctgggggaacagcaggggttccctttggtccacccaatttttttttttttgaaacggagtctcactctgttgcccaggctggagtgcagtggtgcgatctcagcttactgcaagctctgcctcgcgattcacgccattctcctgcctcagcctcccaagtagctgggactacaggcgcctgccaccatgcctggctaattttttgtatttttagtagagatggggtttcaccgtgttagccagaatggtctcgctctcctgacctcgtgatccgcccgcctcggcctcccaaagtgctgggattacaggcgtgagtcaccgcacccrgcctggtccacccaatttttgatggtgttgtaaagacctttgtttaaccccatcagttttcattttattttacttcatttcttaaaagccatctaaagattcccaccacccttctggggtgagtcctttaactcccttttgcctttgccattttgcttttttggtaattgccctaatgtttaattaagcatcagtaagactcatgggggacagaaaatttgatgagacttctcaaacagtaatatcacgcaaggtgcccatgtaaaatgggcccttttaccctcaatatttaccatgacctggataatagacatattcagggggagaatatcccagtcatcataaatccagtcccacatggtttacatata

SEQ ID NO: 930857 - DNA, 752 bp, Homo sapiens
aaaatttctccaatctggggcaaatacagaagacttgtgtgggcccctttaatgctgggggaacagcaggggttccctttggtccacccaatttttttttttttgaaacggagtctcactctgttgcccaggctggagtgcagtggtgcgatctcagcttactgcaagctctgcctcgcgattcacgccattctcctgcctcagcctcccaagtagctgggactacaggcgcctgccaccatgcctggctaattttttgtatttttagtagagatggggtttcaccgtgttagccagaatggtctcgctctcctgacctcgtgatccgcccgcctcggcctcccaaagtgctgggattacaggcgtgagtcaccgcacccagcctggtccacccaatttttgatrgtgttgtaaagacctttgtttaaccccatcagttttcattttattttacttcatttcttaaaagccatctaaagattcccaccacccttctggggtgagtcctttaactcccttttgcctttgccattttgcttttttggtaattgccctaatgtttaattaagcatcagtaagactcatgggggacagaaaatttgatgagacttctcaaacagtaatatcacgcaaggtgcccatgtaaaatgggcccttttaccctcaatatttaccatgacctggataatagacatattcagggggagaatatcccagtcatcataaatccagtcccacatggtttacatata

SEQ ID NO: 930858 - DNA, 586 bp, Homo sapiens
cagtcttattcaaaagtggacttgtattggttgtaaatgtatttaaaccactttaaaaagttaaaaaaaaaaaacaacctttaactgatatgctaagaaaggagagaaaatagaatcataagatgttctattaaaaccacagaaggcaaaaaaagaatgaaagacaaaaacaggaacaaataacaagggcaacaaataaaaaatagtaacaaatatggyagatactaatccaatatatcaataattactttgaacatcaatgatctaaatgtaccaatcacaagacagagattgtcagagaggatcaaaaaacaagatccatctacttattgtcttcaggaaacccaaatgaagaaaaatataccatgctcacactaatcaaaagaaagcaaaagtcattatattaatttctgacgcagcacacttcaaagtaaagagagtcaacatgaataaagaagggcattacacaatgataaagatgccaattttatgtctttaatgaaagacataacaatccttaatatgtgtgagggtcaaattatttaagtcaaaaactaatagaagtgcaagaagaaatagatgaatc

SEQ ID NO: 930859 - DNA, 775 bp, Homo sapiens
ctactaccaagacgcggagaccggtagtggccctgaatggccggacacgctgatatttattgcatacaagacaagggggcagggtaagaagggtgagtcgtccaagtgattaataaggtcaagcaagtcacgtgatcatgggacagggggccattcccttttaggtagccgaaccagagagggaaggcagcaaacgtcagcactttcccctatgcacttataagaaagatcaaagactttaagactttcactatttcttctaccgctatctactacaaayttcaaagaggaaccaggagtacaaaaggaacatgaaagtggacgaggagcgtgaacactgaagcacagcaccacagggaggggtttaggcctctggatgactgcaggcagggctggataatatccagcctcccacaagaagctggtggagcagagcgttccctgactcctccaaggaaagggagactccctttcacgttctgctaagtaatgggtgccttcccaggcactggcattgccacttgaccaaggacccctcaagcggcccttaagcaggcgtgataagagggctcacctcttgccttctaggtcacttctcacaatgtcccttcagtacctgaccctatacccgccagttattcctggtaatatgagtaatacaacaaagagtaatagtaaaagctaatgattaataatgtttatactaatgattgataatgcccatgctcatctctatatctaatttgtattataactattcttattctattttctt

SEQ ID NO: 930860 - DNA, 683 bp, Homo sapiens
acgctgatgataaacactgggcaacttaaaaaatgaaaaggtttactggactcacagttccacgcggctggggaggcctcgcaatcatggaggaaggcaaggaggagcatgtcacgtcttacttggatggcagcaggcaaagagagagctygtgcagagaaactcccgcttttaaaaccatcagttctcatgagacccattcactatcatgagaacagcgtgggaaagaccagctcacatgattcagtcatctcccaccaagtccctcctaaaacatgtggaaattatgggaactacaaaataagatttgagggggacacagtgccaaatcatatcagctagaaagccccagcatcaccagggtgagttaccagaatcaacccttgaccaacacagaggttaggagctctggcccttctgcaattgaaaattaacatataacttttgacttacccaaaacttcaaaattaataacctacttttgactggaagtcttactgataacataaaccattaattaacacatattttgtttgctataggtattatatattgtatcttacaatgaaacaagctagagaaaacaaatattaagaaaattgtaagcaagaaaaatatatttataatattatactctatttatcagataagtttaagttattcgtttgcaagatgaatcatct

SEQ ID NO: 930861 - DNA, 666 bp, Homo sapiens
gtgagggaggacctgatgaagctggagacactgagcttgtaaactccgatgaactttttttgccagaaggaacaacttccccatccctaatagtggcaacatcccctccccaacccatgctgtcatcagacttttcacctttgtctaaggagaaaaatcctgcactgcctgaggctatagtgatggcctcctcgaggcagttgccaggcaagataatattgattctcctcaggagccaatacccctgtttgcttctagacttataactaaagtcctggcrggcccctgaaggtgaatttgatagtgtgatccatgaggaggtgcactacactcaaaaagaactgcttgagttctctaatttttataaacagcaatctggagaacaggcatgggaatggatattaagggtatcagataatggtggaaggaacctagagttggatcaggctgaatttgttgatttgggcccactaagtaggaactctgcatttaatgttgcagcttggggagttaaaaaagtttctaatagtttatttgcttggttagctgaaatatggatttaaagatggcccactgtgaatgagctggaaatgcctgatctcccttagtttaatgtagaggaagggatccaaaagtttagggagattggatggtggagtggattag

SEQ ID NO: 930862 - DNA, 666 bp, Homo sapiens
gtgagggaggacctgatgaagctggagacactgagcttgtaaactccgatgaactttttttgccagaaggaacaacttccccatccctaatagtggcaacatcccctccccaacccatgctgtcatcagacttttcacctttgtctaaggagaaaaatcctgcactgcctgaggctatagtgatggcctcctcgaggcagttgccaggcaagataatattgattctcctcaggagccaatacccctgtttgcttctagacttataactaaagtcctggcaggcccctgaaggtgaatttgatagtgtgatccatgaggaggtgcactacactcaaaaagaactgcttgagttctctaatttttataaacrgcaatctggagaacaggcatgggaatggatattaagggtatcagataatggtggaaggaacctagagttggatcaggctgaatttgttgatttgggcccactaagtaggaactctgcatttaatgttgcagcttggggagttaaaaaagtttctaatagtttatttgcttggttagctgaaatatggatttaaagatggcccactgtgaatgagctggaaatgcctgatctcccttagtttaatgtagaggaagggatccaaaagtttagggagattggatggtggagtggattag

SEQ ID NO: 930863 - DNA, 585 bp, Homo sapiens
accttcattgtcctacctcaggggtatagcaactttccagcttctgtcataatcttattaggagagaagttaatcactttttgcttccacaaaatatcacactggtccattaaattgatgacatgctgataatgaatctgactaaaattcagggacyttctacctcagtaaaatgtatagaggtccagtagtatgaggcctgttgagatattccatctaagataaagtacaaaatgctgcatttggttcctcctgcaatcaagaaagagacacaagccctagtgggtctattgagattttggaggaaacacattcttcatttgtgtgtgttactctggctcatttatctagtgacctgaaaggctgtcagttttgagtgggatccagaacaggagaaggctctgcaacaggtccaggctactgtgcaagctgctctgccacttgggtcatataacccaacagatccaatggtgtttgaggtgtcagtggcagatgggaatgctatttggagcctttggcaggacccaacaggtaaatcacagtagaggcctctaggatttttgagaaagtccctgccatattctg

SEQ ID NO: 930864 - DNA, 585 bp, Homo sapiens
accttcattgtcctacctcaggggtatagcaactttccagcttctgtcataatcttattaggagagaagttaatcactttttgcttccacaaaatatcacactggtccattaaattgatgacatgctgataatgaatctgactaaaattcagggaccttctacctcagtaaaatktatagaggtccagtagtatgaggcctgttgagatattccatctaagataaagtacaaaatgctgcatttggttcctcctgcaatcaagaaagagacacaagccctagtgggtctattgagattttggaggaaacacattcttcatttgtgtgtgttactctggctcatttatctagtgacctgaaaggctgtcagttttgagtgggatccagaacaggagaaggctctgcaacaggtccaggctactgtgcaagctgctctgccacttgggtcatataacccaacagatccaatggtgtttgaggtgtcagtggcagatgggaatgctatttggagcctttggcaggacccaacaggtaaatcacagtagaggcctctaggatttttgagaaagtccctgccatattctg

SEQ ID NO: 930865 - DNA, 585 bp, Homo sapiens
accttcattgtcctacctcaggggtatagcaactttccagcttctgtcataatcttattaggagagaagttaatcactttttgcttccacaaaatatcacactggtccattaaattgatgacatgctgataatgaatctgactaaaattcagggaccttctacctcagtaaaatgtatagaggtccagtagtatgaggcctgttgagatattccatctaagataaagtacaaaatgctgcatttggttcctcctgcaatcaagaaagagacacaagscctagtgggtctattgagattttggaggaaacacattcttcatttgtgtgtgttactctggctcatttatctagtgacctgaaaggctgtcagttttgagtgggatccagaacaggagaaggctctgcaacaggtccaggctactgtgcaagctgctctgccacttgggtcatataacccaacagatccaatggtgtttgaggtgtcagtggcagatgggaatgctatttggagcctttggcaggacccaacaggtaaatcacagtagaggcctctaggatttttgagaaagtccctgccatattctg

SEQ ID NO: 930866 - DNA, 588 bp, Homo sapiens
aggaactcaaacaaatcagcaaggaaacaacaaacaattccataaaaaaagtgggctaaggacatgaagagacagttctcaaaagaagatatacaaatggccaacaaacatatggacaaatgctcaacatcactaattacctccttactcctgcaaagatggccataatttaaaaatcaagaaataatagatgtttgtatggacatggtgaaaagggaacacttttacactgctggtgagaatgtaaactagtacaaccactgtggaaaacagtatggagcttcctcaaagatctaaaggcagaactaccatttaatccagcaatcctactactgggtatctacacagaggaagtcattgtatgagaaagacacttgtggctgggcrcggtggctcacacctgtaattccagcactttgggaggccgaggcaggtggatcacctgaggtagggagttggagaccaaactgaccaacatggagaaaccccgtcactactaaaaatacaaaaaaaaatagccaggcgtggtggcacatgcctgtaatcccagctactcacgaggctgagtcaggagaatcacttgaacct

SEQ ID NO: 930867 - DNA, 592 bp, Homo sapiens
acatctgcagtgacatcctttactgaagtcttgaactcctcaaagtcacccatgagagttggaatcatcgtcttccaaactcctgttattgctgatgttttgatctcccatgaatcacagatgttcttaatggcatctggaatggtgaatcctttttagaaggtttgcagtttactttgcccagatccattagaggaatcgctatctatggcagtgaatagccmtacaaaatatatttgaaatatattttgaaataataagaggctgaaataataagacttgaaagttgatccacaggctgcagaatggatgttgtgttagcaggcatgaaaacaacagtaatctccctgtacctgtccttcagagctcttgggtgactaggtgctttgttagtgagcagtaatattttgaaatgagtcttttctgagcagtaggtctcaacagtgggtttaaaatattcagtaaaccatgctgttaagagatgtgctgtcatcccagttttgttccatttatagagcatgggcacagtagatttagaataattcttaagcgccctaggacttttacagtggtcagtcttggcttcaaaaac

SEQ ID NO: 930868 - DNA, 592 bp, Homo sapiens
acatctgcagtgacatcctttactgaagtcttgaactcctcaaagtcacccatgagagttggaatcatcgtcttccaaactcctgttattgctgatgttttgatctcccatgaatcacagatgttcttaatggcatctggaatggtgaatcctttttagaaggtttgcagtttactttgcccagatccattagaggaatcgctatctatggcagtgaatagccctacaaaatatatttgaaatatattttgaaataataagaggctgaaataataagacttgaaagttgatccacaggctgcagaatggatgttgtgttagcaggcatgaaaacaacagtaatctccctgtacctgtccttcagagctcttgggtgactaggtgctttgttagtgagcagkaatattttgaaatgagtcttttctgagcagtaggtctcaacagtgggtttaaaatattcagtaaaccatgctgttaagagatgtgctgtcatcccagttttgttccatttatagagcatgggcacagtagatttagaataattcttaagcgccctaggacttttacagtggtcagtcttggcttcaaaaac

SEQ ID NO: 930869 - DNA, 494 bp, Homo sapiens
cttggtgaaaaaaataaatgtctaattattacaacatcttaacttgctaaattaaaaacaaattaaaacatatttttctatcttctcttttatatatactttcctcctgggaaaggcagacagttggaggtattttacttcatcttcctgatttttttttttttttttggktttaaaaaaaggggagtttaataggcaagaggaagggagaagagagaaggaagaagctccctcgtacagagacagagggagggggcctccaaagctggaagaggacgtccccaagtgcagcagactccagccaggtatatatgcagaggctggaggaggccatgtctgatttgcatagggctcaggggattggtttgaccaggcatgtcattcacgtggcctgcggaaaaagctggccttcccaccctagccttttaatatgcaaatgcagggcaccatgatgttctacacacgtggggatatgtgggggcagccatgtcgcg

SEQ ID NO: 930870 - DNA, 663 bp, Homo sapiens
tgtgaagtacacagtctttacaggtattttaaaaatagacctttgtcatagggttgctaggttagtacaaaactggctaataccctacagggcaatgaaaccataacttttggaaatatcttttctactgaaatgaaacctgtcaagttaacatgttacttcctaaaacttgagctgtcaatcaaatccaattagcaaaacgtaaaaatgcattattataggaaattaaataatccttgtttgaaattgataaagtgttccaatatgacattgaaaggacatactactcatctttttttgccttttttcctagttttaaataatcttccttaacatggttcacataaatccttttataattctttaatttctttttcatcccattgtgtattagatttctattgctatcttaatgaattaatcataaactcaggggcttaaagtaacacaaatttgttattaaatttggactaaatttgtggactaagaatgcccccaaactattttawttataggtccatagatggaaagtctgggttgggtttcaccaaactaaaataaacatgacagtaagctgtgttcctttctggaggctctaggggacaatctcattcagtttgttggcagaaatgaatttactgtgggtgcaagaagaaggtcctc

SEQ ID NO: 930871 - DNA, 632 bp, Homo sapiens
gacattcccagcttcttagagcctgtcacactgcttggctcatggtccccacttgcatcttcaaagctagaaatgaaggatgaagtacttctcatagtgagtctttttaacccacccttctgcctttcccttcctctcttgaggactcaagtcactagactggcccctctgcccccagataatccaggatgatcccccccatctctagatctataccgttaatcacactgcaaactctcctttgccatgtttaaggtaacrtagtcacaggtttggtgggttaggggtagacgttgttgtgtgtgtgtgtgtgtgggcaggcttttattgaaagccctatagtttccccattgagttgttttagaacatttgtgaaaagtaaattttccataaaggcaggaatttgtttctggactcaattattttccattgatgtgcatgcgtctaagcttgtgccagcaccacgttgtcttgattactgtggctttaacaaaatttttgaaatcaagtagttctttgtttttaacagtattttgtttttaacaggttgtcggaatatgcagataagttttagcatcagcttatgaatttttgcaaaaaaaagcctgctgggcttttgaattgtgttgaat

SEQ ID NO: 930872 - DNA, 608 bp, Homo sapiens
aatactacattgtgaaggagaataatatttgatgacatgcttcaatagcttaaaagtgtatatatatttttaatttattccaaaaaatgggatacacgtgcaggtttgttacataggtatatgtgttccatggtggtttgctgcacctattgatctgtcctctaagtgccttcccctcaccccctaccccagcaacaggccctggtgtgtgctattcccctctctgtgtccatgtgttctcaatgttcagctcccatttatgagtgagaacatgtggtgtttggttttctgttcctgtgttagcttgctgaagatgatggcttccaatttcatccatgtccctgcaaaggacaagatctccttcctttttatggctgcataatattccatgatgtatatgtaccacattgtctttatccagcctatcattgatggggaattgggttggttccatktctttgctattgtaaatagtgctgtaataaacgtatgtgtgcatgtgtctttatagtagactgatttatattcctttgggtatttactcagtaattggattgcttggtcaaatagtatttctggttctagatccttaaggaatcgccacactg

SEQ ID NO: 930873 - DNA, 741 bp, Homo sapiens
ctagcaagggcagagggccacagtgttacagcctttctaggtacctgttttcagtgggtcctgagctcatatcatgtgcccaagaagaatgaggtcatgctgacaattggagggtgatgacggtggataattttactaagtgacaaaacagctttcagcagagagggaatggggaggtggtctctcacctgaagtcacatcatcccccccattgttgctgagtctggagtttttataggcatgggatgggggaggggcaggccatacatagtactggataaggcracatttgattggttaaaagcattattcagaaagaaccaatcaggaaaggttgggcaaacagcaatagacgttctcactgtgggtcatgggtttcgtccagaacaagcactccagggtgtttttggcttgaaagtggggtttcaccagggaccgcatcatctgcctagtcatttgactgcctccagtcactatcaatattctttacttattataggtcagaagccctatacagggactgtgcagacaagctataaggccagttttcccaaggagctcttattggctaagtcaagcttgattccttaaaggagagcatgccatttaagtcaaagccttggtaaaacaatcagtttctccaattgtgtcctgttgcaaaagaaaacattcttattgcacttatgcaaataattacattgccataagttaagaacactcacaaatattttccaaattctg

SEQ ID NO: 930874 - DNA, 566 bp, Homo sapiens
actacaggcgtcagccaccatgcctggctaatttttgttatttttcatagatatgggagtttcaccatgtagctcaggttggtctcgaactcctggactccagtgatgccaccacacaggcaaattttttaattttttgtagagatgggggtctcactatgttgcccaagctcgtcttgaactmctggtctcaagcaatcttttcacattgccatcccaaagtgctgggattacaggcatgagccaccgcgcctggcctctattgtaattttttttttgagacagagtcttgctctgtcacccaggctggagtgcagtggcacgatcccagctcacttcagcctccgcctccccggttcaagcgattctcctgcctcagcctcttgagtagctgggattacaaatgtctaccaccacacccagctaatttttttatttttagtagaacggggtttcaccatgttggtcaggctggtctcgaactcctaacctcatgatccgcccgcctcggcctcccaaagtgctgggattacaggcatgagccactgcgcccagcctattgtaat

SEQ ID NO: 930875 - DNA, 645 bp, Homo sapiens
tctggcacaaaagtagagtctgtcgctggtgacaggttaacagacaagctgaaaaacatgtgagaatatagatttggtatgaccaaaacagccttaatgttctccacagcttgaacaaacattaggcaggcttcttcctgactctaggctcctgacctcccttttcttagagcatttgctttagaaaacataattttagattatttccctgcctctctgagatgtaaatttttttaaaaaaaccttttgccagaattcattcctcctaactgcacatttgtactcattgaccaactgtagttaacaatattgtatagtatatttcaaaatagctagaaaattttgaattttgtcaccacaaagaaataawcattaatgtttgaggtgatggatatgtcaattaccctgatttagttattacacaacgtatgcatgtatcaaaacattatatggtgtcccataaatatgtacaattatgtgtcaattaaaaacaaaatacacaatgctcatcatcactggccatcagagaaatgcaaatcaaaaccaccatgagatatcatctcacaccagttagaatggcaatcattaaaaagtcaggaaacaacaggtgctggagaggatgcggagaaataggaacacttttac

SEQ ID NO: 930876 - DNA, 645 bp, Homo sapiens
tctggcacaaaagtagagtctgtcgctggtgacaggttaacagacaagctgaaaaacatgtgagaatatagatttggtatgaccaaaacagccttaatgttctccacagcttgaacaaacattaggcaggcttcttcctgactctaggctcctgacctcccttttcttagagcatttgctttagaaaacataattttagattatttccctgcctctctgagatgtaaatttttttaaaaaaaccttttgccagaattcattcctcctaactgcacatttgtactcattgaccaactgtagttaacaatattgtatagtatatttcaaaatagctagaaaattttgaattttgtcaccacaaagaaataatcattaatgtttsaggtgatggatatgtcaattaccctgatttagttattacacaacgtatgcatgtatcaaaacattatatggtgtcccataaatatgtacaattatgtgtcaattaaaaacaaaatacacaatgctcatcatcactggccatcagagaaatgcaaatcaaaaccaccatgagatatcatctcacaccagttagaatggcaatcattaaaaagtcaggaaacaacaggtgctggagaggatgcggagaaataggaacacttttac

SEQ ID NO: 930877 - DNA, 645 bp, Homo sapiens
tctggcacaaaagtagagtctgtcgctggtgacaggttaacagacaagctgaaaaacatgtgagaatatagatttggtatgaccaaaacagccttaatgttctccacagcttgaacaaacattaggcaggcttcttcctgactctaggctcctgacctcccttttcttagagcatttgctttagaaaacataattttagattatttccctgcctctctgagatgtaaatttttttaaaaaaaccttttgccagaattcattcctcctaactgcacatttgtactcattgaccaactgtagttaacaatattgtatagtatatttcaaaatagctagaaaattttgaattttgtcaccacaaagaaataatcattaatgtttgaggtgatggatatgtcaattaccctgatttagttattacacaaygtatgcatgtatcaaaacattatatggtgtcccataaatatgtacaattatgtgtcaattaaaaacaaaatacacaatgctcatcatcactggccatcagagaaatgcaaatcaaaaccaccatgagatatcatctcacaccagttagaatggcaatcattaaaaagtcaggaaacaacaggtgctggagaggatgcggagaaataggaacacttttac

SEQ ID NO: 930878 - DNA, 645 bp, Homo sapiens
tctggcacaaaagtagagtctgtcgctggtgacaggttaacagacaagctgaaaaacatgtgagaatatagatttggtatgaccaaaacagccttaatgttctccacagcttgaacaaacattaggcaggcttcttcctgactctaggctcctgacctcccttttcttagagcatttgctttagaaaacataattttagattatttccctgcctctctgagatgtaaatttttttaaaaaaaccttttgccagaattcattcctcctaactgcacatttgtactcattgaccaactgtagttaacaatattgtatagtatatttcaaaatagctagaaaattttgaattttgtcaccacaaagaaataatcattaatgtttgaggtgatggatatgtcaattaccctgatttagttattacacaacgtatgcatgtatcaaaacattatatggtgtccyataaatatgtacaattatgtgtcaattaaaaacaaaatacacaatgctcatcatcactggccatcagagaaatgcaaatcaaaaccaccatgagatatcatctcacaccagttagaatggcaatcattaaaaagtcaggaaacaacaggtgctggagaggatgcggagaaataggaacacttttac

SEQ ID NO: 930879 - DNA, 606 bp, Homo sapiens
gctaaaccccagttgggcatccctggtccccacttctgcccttcattgcccagggctgtgggtgttgtggtcacagatggactgacttataggcccttcctctctcttctcatggttgccaaccaggctactgcaggtccccacagcccctacgcccccaggctgcagctgctccgtctgactgccccacacatgttttctggataccttcaagctgcatcttctgccccttccctgtgaaaagctgtgtgagttgaggaactgaaatcattttgtttatatgttataaacacccaggtttctcactgaacccacaaaaacctcagatactaagggaaaaaaagtatctaaccctctgagaacatctatgtattctgcgtttaacttttaaattcagggcccagcacagtggctcacacctgtaatcccagcactttgggaggccaacatggtgaaaaccccayttatctacaaaaaatacaaaaaatagccgggtgtggtggtgcacacctataatcccagctacttgggaggtggaggcagaatcacttgaaaccaggaggtggaggttaaagtgagccatgatcacgccactgcactccaggc

SEQ ID NO: 930880 - DNA, 631 bp, Homo sapiens
cttccactcctcagtaagacagtaaaagcttttccaaaatctgaccctagccttgcttttcagcttcatccccgctacttcccttcttgtgctccagatacttggacttccccagcaatcgcctccctgtgcttttgttctggtggtttttttccccactgacctcactcctcttctcctccctttcccagcctcctgaactcattctcatcctcaaaggccaatgcaaatattaattctctgcaggtttctctggacagaatcaatcatcctctctatggtgttcccatagcattttgtctaactgctagagaaacatttagcatggtatcagatgcctcctgatagactgggatttcactgaggacatggaatgtgtcatatttatcttggataccaatggyatagctgaattccaggcatataggaggggcttagtaaatattggttgaattggattaagtcagaaatacatccaggtcactgactcttatccaatgtcttttttttttttttttttttttagacagagtcttgctctgttgcctaggctggagagcagtggtgcaatctcggttcactgcagcctccgcctcccaggttcaagctattgccctgcctcagcctcctg

SEQ ID NO: 930881 - DNA, 486 bp, Homo sapiens
atcctgactttgaaggctagaccaacaccaccctcccaaggtcactaccactccagttagggaacacatgcaacaagaatacccatagaaaactttcactctttattgattcggctctaaatctccatctaagtcttatgttgctgatccgagcttaactatggacaaaactcaaaggcctctacttggtacaaggtcagtgctggaagctgtgtcccctatattctggggtattkgttttgttttgttttttggcctaaggcaaacagaaggcagctatgtgcatctgccactggtagctttcctcctacttcattaccttacagcttcatgggaaaggggagaaagtgtagaaaccaaatagttccaaggtaagaggattgtgatcacatcttattctatttggaatcactttcatccaaaaaaagagccacaacaacaaagagtgacccatttttaaaaatgatggctccattttgtgacctt

SEQ ID NO: 930882 - DNA, 543 bp, Homo sapiens
gagctatatgtggctgctgatgaagcctccatcgcccccattctggctgaggcccaggcccactttggacgtaggcttggcctgggttcctaccctgactggggcagcaactactatcaggtgaagctgactctagactcagaggaagaaggacccctggaggaatgcttggcctacctgactgcccgtttgccccagggatcgctggtcccctacatgcccaacgctgtggagcaggccagtgaggctgtatacaaactcgctgaatcaggtagggaccttatggaggaggggcattatgcccaaagccattggtggcaccccagatctcagtaatgcaggggctgttgggtgcttcctgcaaatccctgagagggcagaagatagcttctgktaattcattattcttccaataaatgttgattgagtacctattttcatcagcactgtgctaggtgttggggatatggctcaataggataatgtatgccctgctcttatggaccagtgttttaacaaaaaaagatggacattaaacaggtg

SEQ ID NO: 930883 - DNA, 738 bp, Homo sapiens
caaatccctgagagggcagaagatagcttctgttaattcattattcttccaataaatgttgattgagtacctattttcatcagcactgtgctaggtgttggggatatggctcaataggataatgtatgccctgctcttatggaccagtgttttaacaaaaaaagatggacattaaacaggtgatcctgcatggggtgatgaaaggagtgatctcccacagcagggagatcagccttgatctggggtcagagaaggccaaatgacataaactgagtgataaggaggatttgrtcagttcagtaggtgggcaagagccaacagtatgaatgagggcctgcaaggaagcagcatggggttagggaatggaaggaagcccacaccccacaccccctgctacagaggaatgacactgaggctactgtgaggtgtggctgggtggcagatggcagggcaggtcaggggcagactgcagggcctagcgggcagcatgaaggagtttggactttatcctcagaacactgggaagatattgaagggtttaagcaagggcagcatgccttcactcccctttgatagccatatgtgtccatctgatgccctcttccctgcctgcttggcagggtcttctttggggaaaaaggtggcaggtgccctacagaccattgagacctccctggctcagtacagcctcacccagctctgtgtgggcttcaacgggggcaaagactgcactgccct

SEQ ID NO: 930884 - DNA, 501 bp, Homo sapiens
gtgagctgatatcgccccactgcactttagcctgcgagccagagcaagactctgtctcgggaaaaaaaaaaaaagtttagggcagaaatgaaagtaagtaaagtacatttggaacagggccaagtgggggacttgagcgatcaatyaagtgcgcagtttgatttttcacttggggtcttatacattggcatgcttctgggggcttgtgtccctttttccctgattcttcccctggcgggggctgttcacacgtgcagtggcctgttagcccttgggaggggagcatgcgcagtgtgtttactgaaatttttcgcatgctcacgtgaggcgttaccagttgcgcattcccggaggaaggtcatgtaccagttaaacgccaccattttgcctcttagtgcacatgcttgagcccacttgcccaactcctgagatcatatcgggaagctgatcaccaatttcaggtttttctatctgttgggagactgccgttccctggtgcca

SEQ ID NO: 930885 - DNA, 612 bp, Homo sapiens
gtgaaaagaacagacttctgagtggagtacctgggtcaggagatatggatcgattctgtgattgggctcctgaaaaacaataaacttgccatgcttttgtatacctggatgcggtctccaaatgctctctctaggcatttattctgctccagggtcttcagaagaacaggttagtagctggtcaaagggaagggaggaagaggggaattgtgctggtgtgaaacggtttgatggctgaactccccttagggttgtaggcaaaagcagatccctggataatgggggtaccaagcatagctctgaaaataaaatgttattggctccagtctgaaactgtcaatttccactgaaacggaataaattattcagaaaagagaagcaccaaatattatgcagtctgcctttggggaaagaaaaaaacacccmcttcttataaaaacacttttttgggatgaaggatttgatttcaactgatgagtcatcactgtgtgtgtgttttttaccacttagccaaaaagtgagatttttaaaaagcatttcttgaagcaaattcttccattgcttggggttctctcatctaagagagaaggcatcctaagcacttatatccac

SEQ ID NO: 930886 - DNA, 611 bp, Homo sapiens
ctttcaccgtgattcccagtaaaatggaaatcccacgtacccaggaactctgtcttgttccccattttaagtcagatagtagcctggtacctggcacatagcaggcacttcataaacaactgctgaatgctgattgtctstcttcaaaaaaaattctcaggaggccgggcgcagtggctcacacctgtaatcccaacactttgggggccgaagcaggcggatcacttgaggtcaggagttcaagaccagcctggcctacatggtgaaacctcgtctctgctacaaatacaaaaactagccgggcatgatggtacacgcctgtaattccagctattcaggaagctgaggcaggagaatcgcctgaaccagggaggcagaggttgcagtgagccaagatctgcatgacagaatgagactccacctccaaaaaacaaaaattctcaggaaaccatcaacagagtgaagagacaacttaccaaatggaagaaactgtttgcaaaataggtctgataaggggttaatatccaaaatatacaaggaactcaaacaactcaatagcaggaaaatataacctgattaaaaaatggacacaggatgcaaatagacatttc

SEQ ID NO: 930887 - DNA, 535 bp, Homo sapiens
tgcccaggctggagtgcaatggtgtgacctcggctcaccttcacctccacctcccaggttcaagtgattctcctgccttagcctcccaagtagctgggattacaggtccccgccaccacgcccagctaatgtttttgtatttttagaagagatggggtttcaccatgttagccaggctggtatcaaactcctgacctcaggtgatctgcccgcttcagccccacaaagtcctgggattacaagtgtgagccaccacacccagccaattaactttcatctatcttttgttactatatgttttccttcccacaatttgctgccccgagagactcaaggtccttttcctttgtcttgtcacttctctaaaaayttatagttcctttgctaagatgccatataaaaacaagttcaaaacaaacctttgagttactcttctctgggtactccatattgcgtattctgtacatatgttaatcaacttctatttgttttttcaattgttaatcttttttgttgttatgttaatctgtctttt

SEQ ID NO: 930888 - DNA, 550 bp, Homo sapiens
acatattccctgggaaatacaatgaaataatgtatgcctgtactttccagttcccccatcattaatatattgcattaatgtggtacatttcttgcaatacaattcataaatgaatactaatacactattattaattaaagtccacagtttacattaaggttcactctgtgctataaagttctatgagttttaacagaagtataatctcttgtctccaccattacagtatcatacagaatagtttcatggccctaaaaaataccctgagcttcacctattcatctcttctttcctctatccccaaatccctggcaaccactgatctaaatatttatggtccacatagtcttgccttttccagaatgtcatatacagccgacccttgaacaacagttgggtttgaactgcrtgggtccacttatatatatgttttcttcctctctgccatccctgaaacagcaagaccaatccttccttttgctcctcagcctactcaacatgaagatgacaaggatgaagacctttatgataatccactttacttaatgaa

SEQ ID NO: 930889 - DNA, 568 bp, Homo sapiens
gtgaccctcccagcccagtgtactttcgagagaccatagttcctctactctcataaaatctcctgttcccttgaggcttggctatatggctgtaccatctcttacgacttctcattgcagatatataacaaattcatagtcactatcctttgtccacggaaaacatcaytggcatcttgctcaaagtcttctttctctaagctctgctgtctacttaattttaatttcaacagcaacccgtctaatacctagaccactcagtttttttgcctcatctttggcgataatcctctcttactaaaacctatttttgtggctcaagtattttcaacacatttgttccatggcttccttgagtctcttggcccaccaaccaaatgccttttttagaaactcccttgtttttatttccttccctatctagcttagattatagagattttcgtttcttccactctacagaagtggaataggaatatactatgttctcttgtcttactgtcttttcatagcaccttcccagaaaaggcccaaccctgtgaaaaactgagttttttttctatatttg

SEQ ID NO: 930890 - DNA, 612 bp, Homo sapiens
  misc_feature 598, 599, 600, 601, 602, 603, 604, 605, 606, 607, 608, 609,610, 611, 612: n = A,T,C or G
gctctccactgggagggcattaacctattcatgagacacctgctcccatgacccaaacacttcccatctcccaatactgccacactggggatcaaatttcaacaggagttttagtggggacaaaccacatccaaaccatagcagcctccttcttcatatgactgtctcccctgtttctttgggtctcagatctctctcattggattaaatccagcattatctcattttgagatcctcaacttaattatatctgcaaagacccgtatatccaaataaggtcacattcacagaaaaaggagtggggtagctagagcttatgcatatctttttttttttttttgaggcaragtcttgctctgtcacccaggctatagtgcagtggtgcaatcttgtctcactgcaaactctgcctcccaggttcaagcgattctcctgcctcagcctcctgagtagctgggattatgggcacctgccatcacgcctggctaatttttgtacttttagtagagatgggatttcaccatgttggccagcctagtctcaaactcctgacctccagtgatctgcctgccttggcctcccacagtgctgggattannnnnnnnnnnnnnn

SEQ ID NO: 930891 - DNA, 594 bp, Homo sapiens
ggcacccgccaccataccaggataattttttgtatttttagtagagacagggtttcatcgtgttggccaggctggtctcgaactcctgacttcaggtgatccacgcacctaggcctcccaaagtgctgggattacaggcataagccactgtacccggcctgatttttttctaaaagttttattagaaaaaatgttcttttgacatagatttacactctacctggaattattttttatatggtgtgaagtaaggtggatgcagatggtttccttatttttaattaaaaaaaaaaattcaaaatcattattagaaaaacytccctgctctgtagtaccacattagttgaactttcagtgttcatataagcgtgattcttcttctcagatccctcattcaacctgtgagtctaatttggccatcttgtaccatcttttgttaattacaggtttataataattcttggtaacagctagagcaagtcctcccatctcattcttactcaagcttctccaggatattgttggcattttgaaattggattatcaatttcattttaaaaacttctaatatttattacttcattgatttgattt

SEQ ID NO: 930892 - DNA, 583 bp, Homo sapiens
ccaaaacctcatctgtacatcaccatcatcaaagaccaaaggtagataaaaccacaaagatggggaaaaaacagagcagaaaagctgaaaattctgaaaatcagagtgcctctcctcctccaaaggaacgcagctcatcaccgacaatggagcaaagctggatggagaatgactttgatgatttgagagaagaaggcttcagaygatcaaactactcagagctaaaggaggaagttcgaacccaaggcaaagaagttaaaaaccttggaaaaagattagatgaaaggctaactagaataatcaacacagacaagtccttaaaggacctgatggagctgaaaaccacggcatgagaactacgtgacgaatgcacaagcctcagtagtcgattcaatcaattggaagaaagggtatcagcgatggaagatcaaatgaatgaaatgaagcgagaagataattttagagaaaaaagaataaaaagaaaggaacaaagcctccaagaaatatgggactacgtgaaaagaccaaatctatgtctgactggtctacctgaaagtgacagggagaatggaaccaagttgga

SEQ ID NO: 930893 - DNA, 825 bp, Homo sapiens
cttctgggggggaactgtccttgttagctttaccttaagggttccaaggggtgtatggttccgagtgtggagggacccttcagagttgtaagactatgaacccaaagtttaaggttttaaagttttgctgtcatgtggatggcaagggcagtcctctgatgttctcagaagatccagtcatcakattctagattgtgaaggggttggctgtcctctgtgaaccataaaaggctttctttagctggtgaaaatacacttcagcataataatctactgttttaacatcaaccctcttgcatggaagagcttttttacaatcagaaaacatgcactgaaaatgacaactgaatgaaatccctttataaaatgtttaaatggcccatcaggtaaccaaatgcacctgaagttttgattgttttcctaggaatataggttcgacaaaccaaacattgattataaactattttagcaatttagagatcaccacagcaatatatttaatttggatcattttctctttccatgatgagttatggaatgcagaacttttaataacaaaagttttaaggacttaagacggaaaggtggccatcctggttcttcataagtccgtgcttaattaacattagacttacatcctcttgactaccagctgtttcttcaaattaggtgcatggcactggtaactgatgagttataggtaatttggcttagaccatggagtgtatttaaattatatatctaaacaatttcaatattggtgatttagcatgcaaatctggcaaaatatttccttgatattcaatttttgttttacttgggtta

SEQ ID NO: 930894 - DNA, 699 bp, Homo sapiens
  misc_feature 495: n = A,T,C or G
ctccagaaaagaaagatctggagggtcgttttcttcaaaatagtaatgagggtgtgcagaaggatagggatgaacctctccctccttttctgctttagctttaggtgacaaataaacctggtctgtaacctctactgttactttgttatactctccttcctcctcatcatcagtgtgaaaaagttccaaggtagaacgaaccacagcccacacttgtcctattgctaccctgatgcttccgagctccccttcttactcaccacggggattgctttaagagtactcgggtgtcctccagctagttccacattctccaatcgttgctccagcgatcctttgacctgtatttgagcccccatkaatgggcaccacttgctgagaccaggtcggttggagagaccctaacccagcagcactagaggaattaaagacacacacagaaatatagaggtgtgaagtgggaaaatgggggggggggtgtcttacagccttcanagcagggccctgaacagagatttacccacgtatttattaacagcaagccagtcattagcattgtttctatagatattagattaactaaaagtatcccttattcttaaggcacagatcactcatgctattgtttgtggcttaagaatgcctttaagtggatttccaccctggacgggccaggtattccttgttctcattccagta

SEQ ID NO: 930895 - DNA, 699 bp, Homo sapiens
  misc_feature 495: n = A,T,C or G
ctccagaaaagaaagatctggagggtcgttttcttcaaaatagtaatgagggtgtgcagaaggatagggatgaacctctccctccttttctgctttagctttaggtgacaaataaacctggtctgtaacctctactgttactttgttatactctccttcctcctcatcatcagtgtgaaaaagttccaaggtagaacgaaccacagcccacacttgtcctattgctaccctgatgcttccgagctccccttcttactcaccacggggattgctttaagagtactcgggtgtcctccagctagttccacattctccaatcgttgctccagcgatcctttgacctgtatttgagcccccattaatgggcaccacttgctgagaccaggtcggttggagagaccctaacccagcagcactagaggaattaaagacacacacagaaatatagaggtgtgaagtgggaaawtgggggggggggtgtcttacagccttcanagcagggccctgaacagagatttacccacgtatttattaacagcaagccagtcattagcattgtttctatagatattagattaactaaaagtatcccttattcttaaggcacagatcactcatgctattgtttgtggcttaagaatgcctttaagtggatttccaccctggacgggccaggtattccttgttctcattccagta

SEQ ID NO: 930896 - DNA, 699 bp, Homo sapiens
  misc_feature 495: n = A,T,C or G
ctccagaaaagaaagatctggagggtcgttttcttcaaaatagtaatgagggtgtgcagaaggatagggatgaacctctccctccttttctgctttagctttaggtgacaaataaacctggtctgtaacctctactgttactttgttatactctccttcctcctcatcatcagtgtgaaaaagttccaaggtagaacgaaccacagcccacacttgtcctattgctaccctgatgcttccgagctccccttcttactcaccacggggattgctttaagagtactcgggtgtcctccagctagttccacattctccaatcgttgctccagcgatcctttgacctgtatttgagcccccattaatgggcaccacttgctgagaccaggtcggttggagagaccctaacccagcagcactagaggaattaaagacacacacagaaatatagaggtgtgaagtgggaaaaygggggggggggtgtcttacagccttcanagcagggccctgaacagagatttacccacgtatttattaacagcaagccagtcattagcattgtttctatagatattagattaactaaaagtatcccttattcttaaggcacagatcactcatgctattgtttgtggcttaagaatgcctttaagtggatttccaccctggacgggccaggtattccttgttctcattccagta

SEQ ID NO: 930897 - DNA, 629 bp, Homo sapiens
tacaatggggatataggcattgcataaatacagctcttctaaatggaagaaattggccaaaacaaaggggctacaggccccttgcaagtataagatccaatagggcagtcatcaaaccttaaagctccaaaatgatctccttggactctatgtctcacatccaggtcaccatagtcttggatagctccagctctgtggctttgcagggtacaacctccctcctggctgygttcttgggctggcattgagtgcctgtgtcttttccaggtgcatgatgcaagctgtcaatggatctaccatactggggtctggagaaccgtagcactcttctcacagctcccccaggaagcaccccagtggggactctgtgtatggcctcaaaccacacattttccttctgcactgccctagcagaggttctcaatgaggacccttcccctgcagcaaactcctgcctggacacccaggcacttccatacatcctctgaaatctaggcagaggttccaaacctcaattcttgacttctgtacacctacaaactcaacaccatgtggaagctgccaaggcttggggcttgcaccctctgaagtaatggcctgaactatatgttgggcccttttaaccatga

SEQ ID NO: 930898 - DNA, 629 bp, Homo sapiens
tacaatggggatataggcattgcataaatacagctcttctaaatggaagaaattggccaaaacaaaggggctacaggccccttgcaagtataagatccaatagggcagtcatcaaaccttaaagctccaaaatgatctccttggactctatgtctcacatccaggtcaccatagtcttggatagctccagctctgtggctttgcagggtacaacctccctcctggctgcgttcttgggctggcattgagtgcctgtgtcttttccaggtgcatgatgcaagctgtcaatggatctaccatactggggtctggagaaccgtagcactcttctcacagctcccccaggaagcaccccagtggggactctgtgtatggcctcaaaccacacattttccttctgcactgccctagcagaggttctcaatgaggacccttcccctgcagcaaactcctgcctggacacccaggcacttccatacatcctctgaaatcyaggcagaggttccaaacctcaattcttgacttctgtacacctacaaactcaacaccatgtggaagctgccaaggcttggggcttgcaccctctgaagtaatggcctgaactatatgttgggcccttttaaccatga

SEQ ID NO: 930899 - DNA, 639 bp, Homo sapiens
cctgttggaatttgctcatccatttcatcgtgggccagtgtgaaatggtgagggaattgaacagcgtcacgagaatccgtggatgagtacctattctttcccatctggagtatattcttttatttatttatttatttatttatttatttatttatttatttatttattgagtctcactctgtcccccaggctggagtgcagtggcacgatctccgcttacggcaacctctgcctcctgggttcaagcaatcctcgtgcctctgccgcccgagtagctgtggttacaggctcgcgccaacacacctagctgatttttttttttttttttttttttttgaaacggagtctcactctgtcccccaggctggagtgyagtggcgcgatctccgctcactgcaagctctgccccccgggttcacgccattctcctgcctcaacctcctgagtagctgggactacaggcgcccgccaccacgcccggctaattttttgtaattttaataaaaacggggtttcaccgtgttagccaggatgggctcgatctcctgacctcgtgatccgccctcctcggcctcctaaagtgctgggattacaggcgtgaaccaccaccccctgcctggagtatattctatacagcat

SEQ ID NO: 930900 - DNA, 645 bp, Homo sapiens
gggccttccagtgattgccttggcataatggacatgagcaagggggcggcttgtttctcgttggacaatcttttttaagatgtccttgcagaccacactgataacaagccctactgggtgattggcctgctccattttctatcctctccaaaccaccaaggtttgtttgtctgagggctatgactaaggctgtggcctttctcttttctcgcttttcctttttggcctgttcctcttggtaggctcatctaacaatagcataacatctctccaagtgaggttgaaggtttgccctagaccctgtagaacatctatatacctattaggatcatctgaaaacttccccaggtctaccttgatctgctttaaattagacagagagaagaggacatgtacacagattggaccaaattctcctccccccacagcttgagggggacataactgatggcccggtgggwtttttggtcccttggagatttctttgctcatttctttcatatcagagtgcccttttttcagtcctcccgtgattggctactttagaatcctgctgattggtgtgttttacagagcgctgattggtacgttttacaatcctattccaagacaggaaagttccccaggtccccacttgacccagga

SEQ ID NO: 930901 - DNA, 644 bp, Homo sapiens
gggtcgagtggggacatggggaactttcctgtcttacaagaggacatacaaaacacacaaatcagcactctgtaaaacacaccaatcagcactctgtaaaatacaccaatcagtgttctctaaaatgcaccaatcagcaggattctaaaagtaggcaatcgcagggaggattgaaaaaagggcactctgatatgacagaaacagaacataagaggggacagtaagggaataaaagctggccaccccagccagcagygacaacctgcttgggtccccttccatgctgtggaagctttgtccttttgctcttcacaataaaccttgctaccactcactcattgggtccgtgccatctttaagagctgtaacactcaccatgaaggtctgcagcttcattcttgaagtcagcgagaccacaaacccactggcaggaaccaactctggacacaaaatcaagaatgcaatcccatatacaaaatccgtaaaaaagcaaaatacctagaaatacacctaaccaaggaggtgaaagatctctgcaaggagaactctaaaacactgctaaaagacatcacagattacagaaacaaatggaaaaattttccacgttcatcaattggaaaaactaatatcttgaaaattgccac

SEQ ID NO: 930902 - DNA, 627 bp, Homo sapiens
aagagtgcaaggtagattaatgcaaacaaaatggcagttaacatcccatagtgccaaatccacccttagacaagacagactttactgagagggacctctaacccactaaatcttaggaagattctaacctttgtaagttgggcctcgaaaccatatttggtcaagcatccttgtcttttattaagagggacttttaacccactctgtcttaggagagactctaactcccctaagttgggcctctaactcaatcccatcctttacctgggtatcctaccacttacccaaagttggccaattggtgctgcagtctatttcctttgggtcagggtctcttcagtatcacccctttgtggttccccaggatggtgttaccagaaagsggtcctgattcagacctcaagagagggttcttgaatctcacacaagaaagaattcagggcaagtccatatagtaaagtgaaagcaagtttattaggaaagtaaagaaataaagaatggctactccataggcagagcagccctttttagatttttttattttaaatttttgtaggtaaataattggtatatatatttatgaggtacatgagatattttgatataggcatgcaatgcataataatc

SEQ ID NO: 930903 - DNA, 582 bp, Homo sapiens
acctgcacatgtacccctgaacctgaaataaaagttttaaaaaataaagaaaacaatatatcagcaaaatcaaaagttgaactaaaagattgaaaacattaaaaaacagaaattttagagatgaagaatacaacgactgaactgtaaaatagaaacatttccatagaaagcttgaagagtaaactcaatcaagtagaaaaaagaatcaatgaatgtgacgagagtttcatttkaaattatctagtcagaggagtgaaaaagtgaaaagaatgaagaaagcctatgggacttataggctgccatcaaatgaaccagtgtacatattatggaatacaaaaaggtgaagataaagaggaaagaaacagaaagcttatttaaagaaataatagctgaaagtttaccaaatctggggagagatatggacatctagatttatgatttacccaaaacacaccaaatacgttgaatctaaagaggtctacactgagacacattacatttaaattttcaaaagtcaaaaacaaacagaattttgaaggcagtaggataaattaacttattatacacaagggaactttcaaa

SEQ ID NO: 930904 - DNA, 582 bp, Homo sapiens
acctgcacatgtacccctgaacctgaaataaaagttttaaaaaataaagaaaacaatatatcagcaaaatcaaaagttgaactaaaagattgaaaacattaaaaaacagaaattttagagatgaagaatacaacgactgaactgtaaaatagaaacatttccatagaaagcttgaagagtaaactcaatcaagtagaaaaaagaatcaatgaatgtgacgagagtttcatttgaaattatctagtcagaggagtgaaaaagtgaaaagaatgaagaaagcctatgggacttatasgctgccatcaaatgaaccagtgtacatattatggaatacaaaaaggtgaagataaagaggaaagaaacagaaagcttatttaaagaaataatagctgaaagtttaccaaatctggggagagatatggacatctagatttatgatttacccaaaacacaccaaatacgttgaatctaaagaggtctacactgagacacattacatttaaattttcaaaagtcaaaaacaaacagaattttgaaggcagtaggataaattaacttattatacacaagggaactttcaaa

SEQ ID NO: 930905 - DNA, 604 bp, Homo sapiens
gcacataatttatctatataacaaacctgcacatgtacccctgaacctgaaataaaagttttaaaaaataaagaaaacaatatatcagcaaaatcaaaagttgaactaaaagattgaaaacattaaaaaacagaaattttagagatgaagaatacaacgactgaactgtaaaatagaaacatttccatagaaagcttgaagagtaaactcaatcaagtagaaaaaagaatcaatgaatgtgacgagagtttcatttgaaattatctagtcagaggagtgaaaaagtgaaaagaatgaagaaagcctatgggacttataggctrccatcaaatgaaccagtgtacatattatggaatacaaaaaggtgaagataaagaggaaagaaacagaaagcttatttaaagaaataatagctgaaagtttaccaaatctggggagagatatggacatctagatttatgatttacccaaaacacaccaaatacgttgaatctaaagaggtctacactgagacacattacatttaaattttcaaaagtcaaaaacaaacagaattttgaaggcagtaggataaattaacttattatacacaagggaactttca

SEQ ID NO: 930906 - DNA, 582 bp, Homo sapiens
acctgcacatgtacccctgaacctgaaataaaagttttaaaaaataaagaaaacaatatatcagcaaaatcaaaagttgaactaaaagattgaaaacattaaaaaacagaaattttagagatgaagaatacaacgactgaactgtaaaatagaaacatttccatagaaagcttgaagagtaaactcaatcaagtagaaaaaagaatcaatgaatgtgacgagagtttcatttgaaattatctagtcagaggagtgaaaaagtgaaaagaatgaagaaagcctatgggacttataggctgccatcaaatgaaccagtgtacatattmtggaatacaaaaaggtgaagataaagaggaaagaaacagaaagcttatttaaagaaataatagctgaaagtttaccaaatctggggagagatatggacatctagatttatgatttacccaaaacacaccaaatacgttgaatctaaagaggtctacactgagacacattacatttaaattttcaaaagtcaaaaacaaacagaattttgaaggcagtaggataaattaacttattatacacaagggaactttcaaa

SEQ ID NO: 930907 - DNA, 562 bp, Homo sapiens
cctgggacacagctaaagcagtgttaagagggaaatttaaagcactaaatgcccacattagaaagctagaaagatctcaaatcaacaccttaaaatcacaattaaaagagctagagaggcaagagcaagctaatccaaaagctagcagaagacaagaaataactaagatcagagcagaactgaaagagatagagacatgaaaaaccctccaaaaaatcaacaaacccaggagatggtttttttgaaaaaaataaaycaatagatagaccactagatagaccaataaggaagaagagagagaagactctctcaataaaaaatgataaaggggatatcaccactgaccccacagaaatacgaactacaatcatagaatactataaacactctgcaaataaactagaaaatctagaagaaatggataagcttctggatgcatacactgtaccaatactaaagtaggaagaagttgaatccctgaatagcccaataacaagttctggaattgaggcaggaattaatagcctaccagccaaaaaaagcccaggaccagaaggattca

SEQ ID NO: 930908 - DNA, 617 bp, Homo sapiens
gaaaaaatacaaagttaccacatttgtcatctctgtaactggtcacaagaacataactaatacatactactttattcttctactattcatttcatacttcccctgccctcagccagaatgtcagttggtcaggattctttgcctgttggagtaatgcaaatcttttttcttgaaaggtctgagttagcaatcatgctattatttgttgttgtttcaatagttttccaataaccttcactattgagcatggaaktaataagaaatacactagaggatttgctgggtttcaaatttagtcctgcttatcctcattacgcagcaacaaatcaatttccctttggtaattgggagaaatcactccattgagtagaataacctttttttctgcctgttagttcaatggcataaagagaccacgctaaccaggtagcagtttcatcttccaattcaatggaaccaatattgtgtcccatagttgaagcatgttcaccctggagactaagagttccaaatcggcagagtccaaagctgctagaacagaaagcaagaattgcaagtgtattattgagtataataatgagaaaactctctctcattttcatcctttgattcccaga

SEQ ID NO: 930909 - DNA, 617 bp, Homo sapiens
gaaaaaatacaaagttaccacatttgtcatctctgtaactggtcacaagaacataactaatacatactactttattcttctactattcatttcatacttcccctgccctcagccagaatgtcagttggtcaggattctttgcctgttggagtaatgcaaatcttttttcttgaaaggtctgagttagcaatcatgctattatttgttgttgtttcaatagttttccaataaccttcactattgagcatggaattaataagaaatacactagaggatttgctgggtttcaaatttagtcctgcttatcctcattacgcagcaacaaatcaatttccctttggtaattgggagaaatcactccattgagtagmataacctttttttctgcctgttagttcaatggcataaagagaccacgctaaccaggtagcagtttcatcttccaattcaatggaaccaatattgtgtcccatagttgaagcatgttcaccctggagactaagagttccaaatcggcagagtccaaagctgctagaacagaaagcaagaattgcaagtgtattattgagtataataatgagaaaactctctctcattttcatcctttgattcccaga

SEQ ID NO: 930910 - DNA, 533 bp, Homo sapiens
aagaaatttaccaaaaaacatagatattttaaaaatagctaagcttggcatgatagctcatgcctgtaatcccaacactttgggaggctgagacagaagactcgcttgaggccaggagtgggagatcaacctaggcaacataatgagattctggctcttcaaaaatgttaacaagtatccaggcatgatggtgtgcctctagtcccagcttcttgggaggctgaggcagttctatcccttgagcctaggagactgaggctgtagtgagctatcattgcattactgcactccagatactgaactcaacggaatgagaccctgtctcttaaaaaaaattagaacattgagaaataaagaatttattgaaggaattacaaatayagttgaaagcttcaacaataaactacaccaagcagaagaaagaatctaagaacttgaacaaggtctttggaattaattcaactggacatacagaaaaaaaaaaagaattttaaaaaataagcaaagtcttctagaaccatgggactacttta

SEQ ID NO: 930911 - DNA, 779 bp, Homo sapiens
aattttattggggttcccttatatatgatgaatcattgttttgcttgctgctttcaaattttctatttggattttgttgagtttcttttatgtgtagattaatgtttttcaggcaatttgagaaatattcagccattatttcttcaaatatttttctgctcccttttctttctctcttctccttctgctcttcccactatgtgtgtgctagtgctcctttaatgagtcctccatttctctgagattctattcatttgcctttattctatttttctctattctttaractgcatagctgtcaatactaatatgtacgtacaattttgtttcttttcatatctcatacatttttgttaaaacttggacatcttaggtaatgtagcaactgtagacactgatttgcttccttctctttggggctggtttcaattcttgttttcttgtttatttgttttattaattcattagactaatgtagtaaagtctagatcccccacaatgtgaagcctttggtgttgctactcagaaggtgcagtcttggggttttgcacaagctaagacagtggttttcatgggtctttcttctactgttttattgcttgctctatgtctttttttaaggtgtctgactcatgtggtattatgcccagtactcattctccactaattacaggctgattatttcattgtttttgataatgtcctggaatataaattgcttggtagtttgatccaattaaattctggcagaggtagtttttgaggccagtctttgagct

SEQ ID NO: 930912 - DNA, 567 bp, Homo sapiens
cagataaaagagtatccaaacagttacaaattaacacccatggggatggttcccagatatgtgctcacagaaactttacaaaatgcatgtgtgaggccgggcgcggtggctcacgcctgtaatcccagcactttgggaggccgaggcrggtggattacgaggtcaggagatcgagaccatcctggctaacacggtgaaaccccgtctctaataaaaacacaaaaaattagctgggcgtggtggcgggcgcctgtagtcccagctactcaggaggctgaggcaggagaatggcgtgaacccgggaggcggagcttgcagtgagccgagatcatgccactgcactccagcctgggctaaagagcgagactccgtctcaaaaaaagaaaaaacaaaatgcatgtgtgtgtgcttgtgtgtatatgggtattttatatatatatatatatatatatatatataaaatcaccagtcatgtcgtcttgtactctagctgcaatgcaaaagagacagattttaatgagttgagagtgttattttaaacattttttcatactttgtttttacctt

SEQ ID NO: 930913 - DNA, 618 bp, Homo sapiens
atgacaccctcactgattagaacctcatgaccaggccccactaacaaggcccccactgccgggcacacaatgacaaggactccactgaccaggaccttactgacaaggactcactgacaaggcctcacggactatgtccttactgacaagtcctcactgactaggtcattattgacaaggcctcactgatcaggttccactaatcatgamctcattccctgatcccaaagatgaggccccactgaccaggcctccagggaacaggttgccactgatcaggcccctaataacgaggccttatgtcaccagatgcccctgactgggaccctagtgagtagaccccactgaaccggcaccaaatgctgagatccccgctgaccaggtcaccctgtagaccggtgctacaaaagtcaccactgaccaagtcctctctgaccaggacaatacagattaggtcccactgacaaggctgccctgaccagggccccactgacaagggcctcactgatgaggacacgcccaccagggtctgctgactaagtctcatgtgcccagtcctccactgaatagcaccccttgacctggtcaccagtgccccagcccatgctgaccaggcca

SEQ ID NO: 930914 - DNA, 563 bp, Homo sapiens; identical to SEQ ID NO: 928366

SEQ ID NO: 930915 - DNA, 741 bp, Homo sapiens
tagattggactagtgttgagtgcctgtagcttttccacacggagggtgcaagctgttggtgggtctatgtatctggggtctggagggtggtagcatgggggctccaagtccatattttccttctgcactgccctagtagaggtttcccaagaactcttcgtctgcaggaggctactgcgtggaaacagtaggaggtgggtgtgggaggcagatccttcaccaatggttaggcaacgtcttcttgatgctgtcctcatgatagtgtgttctcatgagatctggttatataacggggtggyaactctttcctctcgcagtcttgcttctactcctgccatttgaaatatctcattgccccttggccttctggtatgattgggaggcttcctgatctgatcctcccagaagcagaagccactacgcttcctttacagcctgctgtatagtgagccaattaaacctcttttctttatgatcatacagaaaatcagtgctatgaagtggagccatgaaatgccttcaaggccctttcccctttgtcttggcaaccagcactcagcttcttttcatgcaaatatctgaagccttcgtgaattttcccccgaaaatggacttttctgttttaccacattgccaggctctgataaagatagctgacaatgtagaaccaggttcagaagtgagtaaaagacagaggtcagaagaattgggaaagcttagaagacagcaagatgaggaaaa

SEQ ID NO: 930916 - DNA, 618 bp, Homo sapiens
tacaagccagaaaagatattcaacttcttaaagaaaagaaatttcacgtagtatggcagagacagatataccatataataacatggtgttattataaatggttaaaagaaaaagaaatttcaacccagaatttcatgtccagcaaaattaagcatcataagtgaaggagaaacaagatccttttcagacaagcaaatgctgagagaattcattatcaccagatctaccttacaagagctcctgaattaagcactaaatatggaaagaaaagaccatcaccagccactacaaaaatgcaccgaagtacacagactattaatgctaaaaaccaaccacatacacaagtctgcaaaataactagctgacagcatgacgacaggatctaatccacacataccattactaaccttaaatggaaatkggctaaatgctccgattgaaagacacaggggggcaagctggataaagaaccaagacccatttgagtatgccatctccaagaaacccatctcacattcagtatcatacataggctcaaaatgaaggaatggtgaaaaatctttcaagccaatggaaaacagaagaaatcaggtgttacactcccagtttcgacaaaac

SEQ ID NO: 930917 - DNA, 625 bp, Homo sapiens
tgtaagagggttagaggttttgcaaaatagtctaggagagtaagatgttgaatttactactggtatgtaataggattgtgaggacccatcttgggctgtgagtcgaacttagaatgaaactaataagcataactgtacctctttcctctagctatgttcagtgcttggtaggaagtcggatttaaccacagttggctacaaggaacagaggaggagcaagagaatttaggatgtwtacaagggagtgactcatttaagctacaagagcacaaaatgggtgatggatagtgatgggtagagatgggtagcgggcttagttgtttggaggtcccattgaggttaaaagctattaagagtataggtgtcagaaagaatgagttggaaagataaaatgtagtggttaggatatgaaaagcttggaattgagatttgggagaagtttagataatgacaagactgggggaatgagtggttgagatgttattaaaggtaactagaggtagggaggtgagaacttagagcccaggatttcaaatggatcatctatttgattattaaaattatccccaaaaaatgacaggaataatgctggggacacggagactgtaaatgattgcaataagga

SEQ ID NO: 930918 - DNA, 617 bp, Homo sapiens
agccgagatcatgccactgcactccagccggggcaccattgagcactgagtgaacgagactccgtctgcaatcccggcaccttgggaggccgaggctggcggatcactcgcggttaggagctgaagaccggccaggccaacacagcgaaaccccgtctccaccaaaaaaaatacgaaaaccagtcaggcgtggcagcgcgtgcctgcaatcgcaggcactcggcaggctgaggcaggagaatcaggcagggaggttgcagtgagccgagatggcagcagtacagtccagcttcggctgggcatgagrgggagaccgtggaaacagagggagagggagaccgtggggaaacgggagacggagagggagagggagagctggatttcaaagcttcccaaattctctttcaattatgatctgggcccttgatttttcttattgctggtgaggcctggttacaaaggatttgtccgagaacatcaagctgagacttcttattgagttcgtttccttttaaaatacatatatgcagttgttctttccatagtcaaatggttaattttattttctctaaattggtaacaaagaaataattgtgaaaatatatccatagaccaat

SEQ ID NO: 930919 - DNA, 500 bp, Homo sapiens
cactcgcggttaggagctgaagaccggccaggccaacacagcgaaaccccgtctccaccaaaaaaaatacgaaaaccagtcaggcgtggcagcgcgtgcctgcaatcgcaggcactcggcaggctgaggcaggagaatcaggcagggaggttgcagtgagccgagatggcagcagtacagtccagcttcggctgggcatgagagggagaccrtggaaacagagggagagggagaccgtggggaaacgggagacggagagggagagggagagctggatttcaaagcttcccaaattctctttcaattatgatctgggcccttgatttttcttattgctggtgaggcctggttacaaaggatttgtccgagaacatcaagctgagacttcttattgagttcgtttccttttaaaatacatatatgcagttgttctttccatagtcaaatggttaattttattttctctaaattggtaacaaagaaataattgtgaaaatata

SEQ ID NO: 930920 - DNA, 617 bp, Homo sapiens
agccgagatcatgccactgcactccagccggggcaccattgagcactgagtgaacgagactccgtctgcaatcccggcaccttgggaggccgaggctggcggatcactcgcggttaggagctgaagaccggccaggccaacacagcgaaaccccgtctccaccaaaaaaaatacgaaaaccagtcaggcgtggcagcgcgtgcctgcaatcgcaggcactcggcaggctgaggcaggagaatcaggcagggaggttgcagtgagccgagatggcagcagtacagtccagcttcggctgggcatgagagggagaccgtggaaacagagggagagggagacsgtggggaaacgggagacggagagggagagggagagctggatttcaaagcttcccaaattctctttcaattatgatctgggcccttgatttttcttattgctggtgaggcctggttacaaaggatttgtccgagaacatcaagctgagacttcttattgagttcgtttccttttaaaatacatatatgcagttgttctttccatagtcaaatggttaattttattttctctaaattggtaacaaagaaataattgtgaaaatatatccatagaccaat

SEQ ID NO: 930921 - DNA, 617 bp, Homo sapiens
agccgagatcatgccactgcactccagccggggcaccattgagcactgagtgaacgagactccgtctgcaatcccggcaccttgggaggccgaggctggcggatcactcgcggttaggagctgaagaccggccaggccaacacagcgaaaccccgtctccaccaaaaaaaatacgaaaaccagtcaggcgtggcagcgcgtgcctgcaatcgcaggcactcggcaggctgaggcaggagaatcaggcagggaggttgcagtgagccgagatggcagcagtacagtccagcttcggctgggcatgagagggagaccgtggaaacagagggagagggagaccgtggggaracgggagacggagagggagagggagagctggatttcaaagcttcccaaattctctttcaattatgatctgggcccttgatttttcttattgctggtgaggcctggttacaaaggatttgtccgagaacatcaagctgagacttcttattgagttcgtttccttttaaaatacatatatgcagttgttctttccatagtcaaatggttaattttattttctctaaattggtaacaaagaaataattgtgaaaatatatccatagaccaat

SEQ ID NO: 930922 - DNA, 617 bp, Homo sapiens
agccgagatcatgccactgcactccagccggggcaccattgagcactgagtgaacgagactccgtctgcaatcccggcaccttgggaggccgaggctggcggatcactcgcggttaggagctgaagaccggccaggccaacacagcgaaaccccgtctccaccaaaaaaaatacgaaaaccagtcaggcgtggcagcgcgtgcctgcaatcgcaggcactcggcaggctgaggcaggagaatcaggcagggaggttgcagtgagccgagatggcagcagtacagtccagcttcggctgggcatgagagggagaccgtggaaacagagggagagggagaccgtggggaaacgggagasggagagggagagggagagctggatttcaaagcttcccaaattctctttcaattatgatctgggcccttgatttttcttattgctggtgaggcctggttacaaaggatttgtccgagaacatcaagctgagacttcttattgagttcgtttccttttaaaatacatatatgcagttgttctttccatagtcaaatggttaattttattttctctaaattggtaacaaagaaataattgtgaaaatatatccatagaccaat

SEQ ID NO: 930923 - DNA, 546 bp, Homo sapiens
gaatagtttgagaccatcctggccaacataatgaaaccccgtctctactaaaaatacaaaaattagctgggcttggcagtgggtacctgtaatcccagctactcaggaggctgaggcaggagaattgcttgaactcgggaggtggaggttgcagggggccgagatcatgccattgcactccagcctgggcgacagagcaagacgctgtctcaaaaaaaaaaaaaaaaaaaaggggggggtgctaaggacatgaatagacaattgtcaaaagaaaatacagaaatggccaacaaacatatgaagaaagactccacatcactaattatcagagaaatgcaaattaaaactataatataataccctcttactcctgcaagaatggccataatcaaaaaatcaaaamatactacatgttggtgtggatgtggtgaaagggaccactttacactgctggtgggaatggaaactagtacaaccactatggagaacagcggggagattccttaaaggactaaaagtagatctaccatttgatccagcaaaacc

SEQ ID NO: 930924 - DNA, 659 bp, Homo sapiens
gctaagacgaaaagatgaggataggaaattcaaaattggacttcgaaacacagagatcactggtacctctgggaaaaaaggatcaaaggaatggtggaggtgaaagcttaattggaagggggtaaatcaagaactggaggcaagactgaagacagaaatataaacaagattttagtgtactgtgttctcaaatggagcgttgaagaggggtactcactacagggagagatgtaattaatagaatattttttrttttaatcatggaggagtggcaagaaaatgaaggcttcatctgtgctttttttttttttttttttttttgagacagagtctcactcttgtcacccaggctggagtgcggtggcatgatctcagctcactacaacctccatctcggctcactgcaacctccacctcctgggttcaagtgattctcctgcctcagcctccggagtaactgggaatacaggtacgtgtcaccacacccagctaatttttgtatttttagtagacatggggtttcaccgtgctggccaggctggtctggaactcctggccataagtgatccacccgccttggcctcccaaagtgctgggattacaggcgtgagccatcgcacccagccagtgtgtctgtgtgtgttttaatggacaatacc

SEQ ID NO: 930925 - DNA, 591 bp, Homo sapiens
caatggctcctatctcttcttttataatgttcctccaaactaggaaaagtgaatttccccaaaccttaaaatgcttggcttagagttgagctgggggaagggaacccagaggcctgacatgctggcaaaaaggtaaaaggttttgtttgtttgtttttttaactagccaagttttggcttctctctacccacgcaaactggaaaaagggataataaggatcattgtttatattctctgtaaaattgtaataaaaaaagatttgtgaggttggtcttaagctgtagccagtctgttgtgcttcatgtgtctttctgtatggttctgtcaaaagaaggagtaccttacgttaggatgcaggcccaggaccccataagcytgctgatcaagccaacccaacaaaacggccagtaacaaacatggctataggcctccatcttgtttcatgtgcttggcaacatgacctgtaaccacatggcaatactttgttttagtctgtaccattttacaatggttgccatctccttatgctaagtcagttcctgaataggggccacaaaatcagataagctagtttgttgatctggatggtg

SEQ ID NO: 930926 - DNA, 758 bp, Homo sapiens
tctatagaggcagtaggcattggtgagctgtggtgggctctgcccagtttgtgcttcccggcctctttgtttacactgtgagctactttagcctgagcaatggtgaacgcctctccccctgccaagctctcgtgtcccaggttgatctcagactgctgtgctagcaatgagcaaggctctgtgggtgtgggacccactgagccaggcatgggagggtatctcctggtctgctggttgctaagactgtgggaaaagtgcagtatttggtcaggagtgtactgtttctccaggtacagtctgtcctggcttcccttggctaggaaacggaaatcccccaaccccttgtgcttccctggtgaggcaatgccccaccctgcttctgcttgccctccttgggctgcacccactgtccaaccaatcccaatgacacaaaccaggtacctcagttggaaatgcagaaatcacttctgtgatcttctatgttgatcttgctgggagctgcagactggagctgttcctattgggccatcttggaagtgaccctcccatgaccatttttaaagttttatttttttccatgagatgtaackctggattctctgctgtgttttttcagttccctttcatcatatttctcatatcttttatcagtattctacataatttcaagaaaatatgggcactaattatttgaactctcatgatgtattgtttgatggattgaaaaggagagatagccagaaagttttgaatctcag

SEQ ID NO: 930927 - DNA, 758 bp, Homo sapiens
tctatagaggcagtaggcattggtgagctgtggtgggctctgcccagtttgtgcttcccggcctctttgtttacactgtgagctactttagcctgagcaatggtgaacgcctctccccctgccaagctctcgtgtcccaggttgatctcagactgctgtgctagcaatgagcaaggctctgtgggtgtgggacccactgagccaggcatgggagggtatctcctggtctgctggttgctaagactgtgggaaaagtgcagtatttggtcaggagtgtactgtttctccaggtacagtctgtcctggcttcccttggctaggaaacggaaatcccccaaccccttgtgcttccctggtgaggcaatgccccaccctgcttctgcttgccctccttgggctgcacccactgtccaaccaatcccaatgacacaaaccaggtacctcagttggaaatgcagaaatcacttctgtgatcttctatgttgatcttgctgggagctgcagactggagctgttcctattgggccatcttggaagtgaccctcccatgaccatttttaaagttttatttttttccatgagatgtaactctggattctctgctgtgttttktcagttccctttcatcatatttctcatatcttttatcagtattctacataatttcaagaaaatatgggcactaattatttgaactctcatgatgtattgtttgatggattgaaaaggagagatagccagaaagttttgaatctcag

SEQ ID NO: 930928 - DNA, 682 bp, Homo sapiens
gggtagcttccatccacaggcaggctatcccaacgtctgtgcagccctcagtggagagaagacctggaatgggcagctcctatccacaggcaagttgtcctgtcatttgctcgagtctggctgagtgtggggttttaatggtcctcagaggggattaagtgcatgctgattggtccatgggcagccatgggcgggcagaaaaagcaccataaattctcattccagtctgcagaactgacagtccggcccccaggattcagaccatccctggcttgaaggtggtgcttcactggggacctgtccctttccacccaggagcctgtctgcctcctgccaccatctatatgtcattcatggcacttaggctatttgtaccgaggggcacctacctgcaggcccatgccaagctgctcttagctcycccttggcctccctcccatgctctttggcacccaaagtctagagggggctgaggtggcagggggctggcgtgtcagcatcaccccaagcgtgtgcacacccagccaggtcatgacagcgcctgtgctctgccacaactttgctccaaaatcggagtggctgccaggggcagggagacgccaggcagcaggagtaggtgcttccaagactgtgggtggagggggcttcctgggcccggagagcacagggacgcccgggtccg

SEQ ID NO: 930929 - DNA, 682 bp, Homo sapiens
gggtagcttccatccacaggcaggctatcccaacgtctgtgcagccctcagtggagagaagacctggaatgggcagctcctatccacaggcaagttgtcctgtcatttgctcgagtctggctgagtgtggggttttaatggtcctcagaggggattaagtgcatgctgattggtccatgggcagccatgggcgggcagaaaaagcaccataaattctcattccagtctgcagaactgacagtccggcccccaggattcagaccatccctggcttgaaggtggtgcttcactggggacctgtccctttccacccaggagcctgtctgcctcctgccaccatctatatgtcattcatggcacttaggctatttgtaccgaggggcacctacctgcaggcccatgccaagctgctcttagctctcccttggcctccctcccatgctctttggcacccaaagtctagagggggctgaggtggcagggggctggcgtgtcagcatcaccccaagcgtgtgcacacccagccaggtcatgacagcgcctgygctctgccacaactttgctccaaaatcggagtggctgccaggggcagggagacgccaggcagcaggagtaggtgcttccaagactgtgggtggagggggcttcctgggcccggagagcacagggacgcccgggtccg

SEQ ID NO: 930930 - DNA, 539 bp, Homo sapiens
ataaatacatagatatctttgatttgttcataatcgaaatggaggtggaaaaataggagaaactttaattgataaatctttttttcagatactctaattgacccagctatgaactctaagcttatatatcaacattctagttatataactaatatcagtaatatcaagcataataatggctttcatttattaagtgcttactgtgtgtcagatactgtaaaagatacataataacattactgccaacatttggtatatagctaccattatgyttattttaccgataaggaaacttagtcagtataaagagcagtaaattccctggagtcggatctagaactagaaataccatttgacccagccatcccattaccgggtatatacccaaaggattataaaacatgctgctataaagacacatgcacacgtatgtttattgcggcactattcacaatagcaaagacttggaaccaacccaaatgtccaacaatgatagactggattaagaaaatgtggcacatatacaccatggaatacta

SEQ ID NO: 930931 - DNA, 652 bp, Homo sapiens
cactcagccaaaccttaaagtacttacagaatcaggaagaagccatctatatgaattctaagttaatatggactgaatgaggtcttattaatagcaaygaataattgaaatcccaaacttacaaggtttccaacaaaagtaaagtttgctaaaagttaacagtgtaacatgtattatcctactaccacacattctcaaaggatttctcagacagtttgcaagaaataacaaaatctatccttcctctacaatcccaaatagactctttggcagcagtgactctccaaaactgctgaggcctagacgtcctcactgctgagaaaggaggattctgtaccttcttaggggaagaatgttgtttttacactaaccagtcagggatagtacaagatgccacccggcatttacaggaaaaggcttctgaaatcagacaacacctttcaaactcttataccaacctctggagttgggtgacatggcttctcccctttctaggtcctgtgacagccatcttgctattacccctttgggccctgtatttttaacctccttgtcaaatttgtttcctctagcatcaaggccatcaagctacagatggtcttacaaatggaacccaaaatgagttcaactaacaacctataccaaggacccc

SEQ ID NO: 930932 - DNA, 719 bp, Homo sapiens
cagtaaatggtaaggaaactcttgtagaagcagagttaggaaaatagcctaataattggtctgctcaaatgtgcgagctctttgcactcagccaaaccttaaagtacttacagaatcaggaagaagccatctatatgaattctaagttaatatggactgaatgaggtcttattaatagcaatgaataattgaaatcccaaacttacaaggtttccaacaaaagtaaagtttgctaaaagttaacagtgtaacatgtattatcctactaccacacattctcaaaggatttctcagacagkttgcaagaaataacaaaatctatccttcctctacaatcccaaatagactctttggcagcagtgactctccaaaactgctgaggcctagacgtcctcactgctgagaaaggaggattctgtaccttcttaggggaagaatgttgtttttacactaaccagtcagggatagtacaagatgccacccggcatttacaggaaaaggcttctgaaatcagacaacacctttcaaactcttataccaacctctggagttgggtgacatggcttctcccctttctaggtcctgtgacagccatcttgctattacccctttgggccctgtatttttaacctccttgtcaaatttgtttcctctagcatcaaggccatcaagctacagatggtcttacaaatggaacccaaaatgagttcaactaacaa

SEQ ID NO: 930933 - DNA, 592 bp, Homo sapiens
aagctggaaaccatcattctaagcaaactatcacaaggacagaaaaccaaacatcgcatgttctcactcataggtgggatttggacaacgagaacacatggacacagggcagggaacatcacatactgggacctgttgggaggtggggagctgggggagggatagcattaggagaaatacctaatgtaaaygacgagttaacgagtgaagcaaaccaacacggcacatgtatacctatgtaacaaacctgcacattgtgcacatgtaccctagaacttaaagtataacaataataagataaaacagactttaaattaaaagtattaaaattaaaatggtaaagggatcaatttagcaaggagaggcaataacaatcctgaatacatatgcatctaacattagagcacccaaatttacaaaataattattactagacctaaatatgtagataaacagaaatgcagtaatagttgggcattcaacacctcactcatagcagcagacaaatcatcaagacagaaaattaacaaaaaatgttggacttaaatctgacagtagaccaaataggcttaacagacatttacagaacatt

SEQ ID NO: 930934 - DNA, 669 bp, Homo sapiens
cctgtaatcctggcactttgggaggctgaggcgggcggaccacgaggtcaggagatcgagaccatcctggccaacacggtgaaaccccgtctctactaaaaatacaaaaaattagcctggcgtggtggtgggtgcctgcagtcccagctactggggaggctgaggcaggagmatagcttgaacctgggaggcagagattgcagtgagctgagattgtgccactggactccagcctgggtgaaagagtgatacttagtcttaatataaaataaaataaaataaaattaaaataaaataaaataaaataaaatgtatagggaagctatttaaaaaagaaatggtcataaaaacaaaaatgacagtggcaacttactcctaacatccctgaggtccccttttggatcccaaatatgcacactcacactagaaaaattcatgtatttatttgccacgaggaatgaaggacacctgacttttgcatttcaaaattttctccaagctcctcttcacaggattgagaaaggtggaagacaaatgaaatctcaaatctccatgacctccacagacccccttgattgtgtcttcaacttgactgcacctgcaggatgtattttgatgattctagcataaccatgcttaatttattgttacctcttttcctggtttaaa

SEQ ID NO: 930935 - DNA, 669 bp, Homo sapiens
cctgtaatcctggcactttgggaggctgaggcgggcggaccacgaggtcaggagatcgagaccatcctggccaacacggtgaaaccccgtctctactaaaaatacaaaaaattagcctggcgtggtggtgggtgcctgcagtcccagctactggggaggctgaggcaggagaatagcttgaacctgggaggcagagattgcagtgagctgagattgtgccactgsactccagcctgggtgaaagagtgatacttagtcttaatataaaataaaataaaataaaattaaaataaaataaaataaaataaaatgtatagggaagctatttaaaaaagaaatggtcataaaaacaaaaatgacagtggcaacttactcctaacatccctgaggtccccttttggatcccaaatatgcacactcacactagaaaaattcatgtatttatttgccacgaggaatgaaggacacctgacttttgcatttcaaaattttctccaagctcctcttcacaggattgagaaaggtggaagacaaatgaaatctcaaatctccatgacctccacagacccccttgattgtgtcttcaacttgactgcacctgcaggatgtattttgatgattctagcataaccatgcttaatttattgttacctcttttcctggtttaaa

SEQ ID NO: 930936 - DNA, 669 bp, Homo sapiens
cctgtaatcctggcactttgggaggctgaggcgggcggaccacgaggtcaggagatcgagaccatcctggccaacacggtgaaaccccgtctctactaaaaatacaaaaaattagcctggcgtggtggtgggtgcctgcagtcccagctactggggaggctgaggcaggagaatagcttgaacctgggaggcagagattgcagtgagctgagattgtgccactggactccagcctgggtgaaagagtgatacttagtcttaatataaaataaaataaaatwaaattaaaataaaataaaataaaataaaatgtatagggaagctatttaaaaaagaaatggtcataaaaacaaaaatgacagtggcaacttactcctaacatccctgaggtccccttttggatcccaaatatgcacactcacactagaaaaattcatgtatttatttgccacgaggaatgaaggacacctgacttttgcatttcaaaattttctccaagctcctcttcacaggattgagaaaggtggaagacaaatgaaatctcaaatctccatgacctccacagacccccttgattgtgtcttcaacttgactgcacctgcaggatgtattttgatgattctagcataaccatgcttaatttattgttacctcttttcctggtttaaa

SEQ ID NO: 930937 - DNA, 612 bp, Homo sapiens
actgggctgcattcttaggaggttaggcattctaagtcacaggatgagataggaggtcggtttcactggcgtccgtgtgaagagaccaccaaacaggctttgtgtgagcaataaagctgtttatttcacccgggtgcaggcgggctgagtccaaaaagagagtcagcaaagggagataggggtggggccattttatagratttgggtaggtaaaggaaaattacagtcaaaggggggttgttctctggcggacaggagtgggggtcacaaggcgctcagtagggaagcttttgagccaggatgagccaggagaaggaatttcacaagttaatgtcatcagttaaggcaggaacaggccattttcatttcttttgtggtggaatgtcatcagttaaggcaggaactggccatctggatgtgtacgtgcaggtcacaggggatatgatggcttagcttgggctcagaggcctgacattcctgtcttcttatattaataagaaaaataaaatgaaatagtggtaaagtgttgggacggcgaaaattttgaggggatggtatggagagataatgggcgatgtttgtcagggctgctttgagccggattaggggcgg

SEQ ID NO: 930938 - DNA, 576 bp, Homo sapiens
acccagctacttgggaggctgaggcacgagaatctcttgaacctgggaagcggaggctacagtgagctgagattgtgcactgcactccggcctgggcaacagagcaagatttcatctcaaaaaaaataaaacaaaacaaaaacaaaaacaaaacagggccaggcgcagtggctcacacctgtaatcccagcactttgggaggccgaggcaggcagatcacgaggtcaagagatcaagatcatcctggccaacatggtgaaaccccatctctactaaaaatacaaaaattagctgggcatggyggcatgcgcctgtagtcctgctactcgggaggctgaggcagaagaattgcctgaacccgggaggtggaggttgcagtgagccgagatcacaccgctgcactacagcctggcaacagaatgagactccttcttaaaaaataaaaataaaaacaacagcaacaacaacaaaaactaaggcacaaacacacattagcctaggcctacacagggtcaggattatcaatatcactgtcttctctttccacaccttgtcccactcaaggtcttcaggggc

SEQ ID NO: 930939 - DNA, 576 bp, Homo sapiens
acccagctacttgggaggctgaggcacgagaatctcttgaacctgggaagcggaggctacagtgagctgagattgtgcactgcactccggcctgggcaacagagcaagatttcatctcaaaaaaaataaaacaaaacaaaaacaaaaacaaaacagggccaggcgcagtggctcacacctgtaatcccagcactttgggaggccgaggcaggcagatcacgaggtcaagagatcaagatcatcctggccaacatggtgaaaccccatctctactaaaaatacaaaaattagctgggcatggtggcatgcgcctgtagtcctgctactcgggaggctgaggcagaagaattgcctgaacccgggaggtggaggttgcagtgagccgagatcacaccrctgcactacagcctggcaacagaatgagactccttcttaaaaaataaaaataaaaacaacagcaacaacaacaaaaactaaggcacaaacacacattagcctaggcctacacagggtcaggattatcaatatcactgtcttctctttccacaccttgtcccactcaaggtcttcaggggc

SEQ ID NO: 930940 - DNA, 786 bp, Homo sapiens
catacctttttagtctcccttaatctggaacagttcctctgcctctttttgtctatcatggggttgacgccgaagaacagttcaggtcagtccttgaaggtccctccatctgtgtttgtctgatgtttcctccagggaccggaatgctacagaagcaatgctgtgttctcagtgtatcacatcaagaaacacttggcacccatttgtcctattcctggtgttgttaactttgttcagctcattaagggaggacctgctgggtttctctactgttaagttaccactttttctctttgcaattaataaaccatatgagtggaagtgctatgagacaatgaaaacatactttaccttcctaaattttcactcagtgatgattcttccttgaataaactattatgatcatgtttgcaaatggagttttctattattccctctgtatttattcattggcattctacygtaagaaagtcttcttccttcttccctccctccgtccctccctccctctctccctccctccctctcttcttctttcttttcttccttcccttttctttctttctatagctataggttcccattttattcaatagactataatctaccattatcattattaatttggatgctcacatcatcctagatttggccagtggaagccccttgaagttgattgatgtgtcctttgacatgtccctgtcattttttaaatgcttccttgctttctggcaccacacagcactctgggctcaccttgtacttccctaccccagccttagcatc

SEQ ID NO: 930941 - DNA, 760 bp, Homo sapiens
acctttttagtctcccttaatctggaacagttcctctgcctctttttgtctatcatggggttgacgccgaagaacagttcaggtcagtccttgaaggtccctccatctgtgtttgtctgatgtttcctccagggaccggaatgctacagaagcaatgctgtgttctcagtgtatcacatcaagaaacacttggcacccatttgtcctattcctggtgttgttaactttgttcagctcattaagggaggacctgctgggtttctctactgttaagttaccactttttctctttgcaattaataaaccatatgagtggaagtgctatgagacaatgaaaacatactttaccttcctaaattttcactcagtgatgattcttccttgaataaactattatgatcatgtttgcaaatggagttttctattattccctctgtatttattcattggcattctactgtaagaaagtcttcttccttcttccctscctccgtccctccctccctctctccctccctccctctcttcttctttcttttcttccttcccttttctttctttctatagctataggttcccattttattcaatagactataatctaccattatcattattaatttggatgctcacatcatcctagatttggccagtggaagccccttgaagttgattgatgtgtcctttgacatgtccctgtcattttttaaatgcttccttgctttctggcaccacacagcactctgggctcaccttgtac

SEQ ID NO: 930942 - DNA, 760 bp, Homo sapiens
acctttttagtctcccttaatctggaacagttcctctgcctctttttgtctatcatggggttgacgccgaagaacagttcaggtcagtccttgaaggtccctccatctgtgtttgtctgatgtttcctccagggaccggaatgctacagaagcaatgctgtgttctcagtgtatcacatcaagaaacacttggcacccatttgtcctattcctggtgttgttaactttgttcagctcattaagggaggacctgctgggtttctctactgttaagttaccactttttctctttgcaattaataaaccatatgagtggaagtgctatgagacaatgaaaacatactttaccttcctaaattttcactcagtgatgattcttccttgaataaactattatgatcatgtttgcaaatggagttttctattattccctctgtatttattcattggcattctactgtaagaaagtcttcttccttcttccctccctccgtccctccctccctctctccctccctccctctcttcttctttcttttcttccttcccttttctttctttctatagctataggttcccattttattcaatagactataatctaccattatcattattwatttggatgctcacatcatcctagatttggccagtggaagccccttgaagttgattgatgtgtcctttgacatgtccctgtcattttttaaatgcttccttgctttctggcaccacacagcactctgggctcaccttgtac

SEQ ID NO: 930943 - DNA, 735 bp, Homo sapiens
ccagcgccagaccctagcccccggccggggaaaattcttcccgggaagaccgaagggtgcttggtgtagccctggagtcctagccctagccacgcttggggaacaagaggtggggtagggatgaggacgcgagggcttccggagggggaaagagcatttgaagtgtaaaggggayggccttggattgcccacagacctgagtcccaatccggactttattcctggctctgcaactttaagggccctacattactttacccggccttggtttccttctccacaacgtggaataatgattcctcctcctagaacagtgtcagaactcagggaagccttctaggatgaggtgtccagtagacagtgtctcctaggaacaggctcccgcttcccccagcccctccctcaacaccatgaggctggggcttcacctgacctcttgggagactgtccttttccccaccaccgcccccagtccttcagtgatttttcctttggggaataatttggaatgaacccagaagacaagaggaggaagagagccccccaccccccccacccccagagagttggaagcctcttctttgcagggcacttttacagtctttctctttttcaaccttgagaggggtggatacatagctcagtgttgaacagaaaaggaactgacggggcccaaaacccagactgaaaaaaaaaaatgatggaaaacaataaagagggaaaacagtgttcctg

SEQ ID NO: 930944 - DNA, 633 bp, Homo sapiens
ggaggctgaggcactagaatcgcatgaacctgggagactgaggttgcagtgagctgagattgtgccattgtactccagcctgtgtcacagagccagaccctgtctcaaaaaaaaaaaaaaaaaaagtaaatgaaaaaaattgatggtgccttaaattttgtaaaataaggattattttttctattttaaaacgaatatagagaacaacagaaaggaggagaaatcacttatattcatatacacaaaaacaataatttaaaaatcttagacatttttcctgtatgtcttggttttcatttccccccatgtgtgggtatagcataaaccatcctcctaactctcttccctgtggaattaagattagacactctaaaaactgaatgagatgtttcctggttgttgatcttatctattttsttatatccaaaagattcttcatgtttggattcctgtaacatctctctgtgcaatgtgaatcaaataattggaaatataaatattttaaattatgtgtgccaatgaatttgggttttgataattgagaaagaactctagtacctgagtaaaatgtactatttagaggaaattttagaagcaagataaatggatcagccactaaagataggaatcatt

SEQ ID NO: 930945 - DNA, 609 bp, Homo sapiens
tattcttcttggatttttggattccaaatattttttccttttaagttctaggcatgataatgattttattgttttgaggttcatttaactctctctatatctttataaacggctcctttattaaactcttttcatttgttcagttgagtgcctccaccccttctgagaccttgattgataacaatgcatagtactaagagttgcgccacaaaacaggtcattaagtaggtttgtgggataggtttgctcacatatctgcagtcctccttgctgagaggaaaaaggacacagatagtgtgagacatccagtgccataataattgttcaaattatcatgcacaatcataggattaaaaatgcggatggatggaaagtcaagcatctcgagatcatgtggccatggcacttakttgctgaggagatcatagtcaatataaggattgtgggataagctggttgcttctgttgaccctaaaatgaatgttgactttgtcagtctaactcaaactaggatgcaaagtctgaaaacctctatgaggaagataaaactgaggatcaggcccacagtcggatttcaggggttgcagaattgcagcccaagttaaatgc

SEQ ID NO: 930946 - DNA, 571 bp, Homo sapiens
aaactaacaatattaaatgtcttatttgtcaaaaaactcgtacaaagccctttttgatttttgtatggtttacagttttctaaccttttgtgccaaaccctgacacctcaaaatatttagcaaggaccaacgtgaaactcagacaaaaatatatgctgaaaatttttaatacattttagtttttatctgattaataattttaaagccagcttttttatgacagatttatttatgtcacatgaacttgaaaattgtttggacttctttatttattaagtacttgtttactttatttctaggctaatttggtacacaatgtaatataataattgtatatatacataaacamatcgaaatatgtaatgcattcacatacataaacaaagctctaatagctttaatctcagaaatttcacatggaatggtctattaacatattcacatggctaaactgtgtcccaatgtgtaatccagtgaaggctgtgaaccaaaattttgggtaaagcagtttctgtggtagttcgattttgaaagtccaaatcttctcacactccaaggaacactggggcca

SEQ ID NO: 930947 - DNA, 603 bp, Homo sapiens
ctggaaaagccacagcccatgaaagcagcttggatgggggctgtaccctgcaaagccacaggggtggagctggcaaaagctgtgggagcctgcctcttccatcagtatgacctggatgtgagacacggaatcaaaggagatcattttggaactttaaggtataatgactatgcttttggatttcagayttgcatggggcctgtaacccctttgttttggccaatttctcccatttggaatgggtatatttacccaatgcctgtactcccattgtatctaggaagtaactaacttgtttttgactttgcaggctcacaggcggaagggacttgccttgtctcagataagactttggacttggacttttgggttaatgctagaacaagttaagactttgggggactgttggaagggcatgattgtgttttgaaatgtgaagacaagagatttgagaggggcagaattatatggtttggctgtgtccccacccaaatctcaccttgatgtaatccccataatccccatgagtcaagggcaggacaaggtagaggtaattggatcatgggggtggtttccccaatgctgttctcatgataatgactg

SEQ ID NO: 930948 - DNA, 586 bp, Homo sapiens
gttggtgtcccataagttgcataagctttcttttttccatttcttttcctttttactcctataactggataattccaaatgacctgacttctattttattgatttttttttgcttcattagtctgatgttaaaggtctctattcaattttttagttcattttactcctagctctagattttawgattcccatatttttgttgaatttctagttttgttcatgtattattttccagatttcattttgtaatctccttccaacttctattttaggttgaaggtggacatttacatgtttgttacatgggtaaattgaatgtcatgggggatttgtgtacagataatatcatcaaggtaatctgcataatacatggtaggtagtttttcaatccttatcctcttttcaaactctatcctcaaataggtctcagtgtgtatttttcttttctttgtgtccatgtgtactcattgtttaacttcttatatgtgagaacatgcagtatttggttctctgttcctgcattactttgcttggaataataacctctagctccatccatgtttctggaaaagacatgatttcattc

SEQ ID NO: 930949 - DNA, 598 bp, Homo sapiens
tttttttgtggcttgatagttcatttgtcactgaataatattccattgtaaactgtaatatcacagtttatccattcatctattgagggatatcttggttgcctctggtttttcacaattatgaataaagctgctgtaaacattcaagcgcagatttctgtgtgcacctaagttttcatttcatttgagtaaacacctagaagtatgatcactagattgtacagtaagactgtgtttagccttgctaagacactaccaagttgatttcccaagtggctgtgccattttgcattcttaacatyaatgaatgacagtttctgttgttccacctctttgccagcattcagtattgccagtgttttggatttagtaattctaataggtttgtactgtaaaacaacatcttgttttaatttgtgatttcctaatgagatgtaatgtccagcatctcttcatatgcatcttttgccatctgtatatcttctttgataaggtatctgttcagatcacttacacatgtgtaaactggattgcttgttttcttgttgttgagtttgaagatttctttgtatataatggctacaatttatcagatatg

SEQ ID NO: 930950 - DNA, 598 bp, Homo sapiens
tttttttgtggcttgatagttcatttgtcactgaataatattccattgtaaactgtaatatcacagtttatccattcatctattgagggatatcttggttgcctctggtttttcacaattatgaataaagctgctgtaaacattcaagcgcagatttctgtgtgcacctaagttttcatttcatttgagtaaacacctagaagtatgatcactagattgtacagtaagactgtgtttagccttgctaagacactaccaagttgatttcccaagtggctgtgccattttgcattcttaacatcaatgaatgacagtttctgttgttccacctcttygccagcattcagtattgccagtgttttggatttagtaattctaataggtttgtactgtaaaacaacatcttgttttaatttgtgatttcctaatgagatgtaatgtccagcatctcttcatatgcatcttttgccatctgtatatcttctttgataaggtatctgttcagatcacttacacatgtgtaaactggattgcttgttttcttgttgttgagtttgaagatttctttgtatataatggctacaatttatcagatatg

SEQ ID NO: 930951 - DNA, 598 bp, Homo sapiens
tttttttgtggcttgatagttcatttgtcactgaataatattccattgtaaactgtaatatcacagtttatccattcatctattgagggatatcttggttgcctctggtttttcacaattatgaataaagctgctgtaaacattcaagcgcagatttctgtgtgcacctaagttttcatttcatttgagtaaacacctagaagtatgatcactagattgtacagtaagactgtgtttagccttgctaagacactaccaagttgatttcccaagtggctgtgccattttgcattcttaacatcaatgaatgacagtttctgttgttccacctctttgccagcattcagtattgycagtgttttggatttagtaattctaataggtttgtactgtaaaacaacatcttgttttaatttgtgatttcctaatgagatgtaatgtccagcatctcttcatatgcatcttttgccatctgtatatcttctttgataaggtatctgttcagatcacttacacatgtgtaaactggattgcttgttttcttgttgttgagtttgaagatttctttgtatataatggctacaatttatcagatatg

SEQ ID NO: 930952 - DNA, 579 bp, Homo sapiens
gattttttttcttgtagcctgtggcttgtctttctattcttttaactgtgtctttcataaaacagaagttttaaattttaaagaagcccaacttatcaatttttgttttcctgaatcatccttttggtactgtatctaaaaactcatcatcaaacccaaggtcacctagattttctgctatgttatcttctagaagtttyatcgttttacattttacatttaactcttgatccattttgcatcactttttgcgaaaagtataatatctgccactagattcactttttgtcgcatgtgggtatgcagttattccagcaccatttgttgaaaacactctcatttctgcattgaattgccttttatcttggtcaaaaatcagttcactgtatttgtgtgtatctattctgggctttctattcttttccattgatctatgtgttaattctttcaccagtaccacactgtcttgattactatagctttatattgtcttaagttgggtagtgtcagtcctctgttatttttcttccatattgtgtttattattctgagtcttttgcctttccatataaactttag

SEQ ID NO: 930953 - DNA, 579 bp, Homo sapiens
gattttttttcttgtagcctgtggcttgtctttctattcttttaactgtgtctttcataaaacagaagttttaaattttaaagaagcccaacttatcaatttttgttttcctgaatcatccttttggtactgtatctaaaaactcatcatcaaacccaaggtcacctagattttctgctatgttatcttctagaagtttcatcgttttacattttacatttaactcttgatccattttgcatcactttttgcgaaaagtataatatctgccactagattcactttttgtcgcatgtgggtatgcagttattmcagcaccatttgttgaaaacactctcatttctgcattgaattgccttttatcttggtcaaaaatcagttcactgtatttgtgtgtatctattctgggctttctattcttttccattgatctatgtgttaattctttcaccagtaccacactgtcttgattactatagctttatattgtcttaagttgggtagtgtcagtcctctgttatttttcttccatattgtgtttattattctgagtcttttgcctttccatataaactttag

SEQ ID NO: 930954 - DNA, 614 bp, Homo sapiens
catcagcggtaccccggcagtactccctatggacttgtggtggtgagggccatggagaaagactcctctgcctgtggaaagggaagggaagagtgagaaggactgtgtcttgtggtttgagtgccagctcaggtgtagtagaataagtaagtatatttttaaggtttctgactatagatactggttctcagatggcatatatggacccacccagggcccagggggaactcactactcttaagggaacaacacaagcatggctggcttcaccacctgctgattatgcagccatagggccttgaacaaacataggcggtagccaagtagtgattacagtggaccttgcacaagcctcagtcagtgstggcttcaggtctgacccaccatggctccagtgatggtggccacatgcatgcttgtgtcacccctccaccagttccaggcagctcagcacacagagaatgactcaattgtttgggaaaaagtaagggaagagaacaagaatctctgcttggtaatctggagaattcttctgaatcttatccaaggccaccaaggtggtaccttgtctgcaagaaccacagcattactgagctttgggtactccctaatga

SEQ ID NO: 930955 - DNA, 590 bp, Homo sapiens
tttcccaccctaattaaataaaatatatgtgcaagggacagagtaacacaatgtttgccataaatgaaccaagcacatgacgtctatgcaatttaatagattgttcagttccatttaggtcacattagactttcatttaaaatgcatcacgttttatttattatttacaattataccactaaatgctgctaaatgtaccaagtctagatggtgcctgtagcatgcaagggtctgggcccaaaaaccagggtcacatagacctggaaagtgaggcttaatatccactggcttacagagtgaatgttacttttccaacactatccactctctgaaactgtgttaggatgagagagttaactccattttgtgaaaccatgtttcaggttaaagtcacctttaacagtttgctgccccagcaggggaataaatwaatataagtaaataagaaagaggcatcttgcagcttaaaaaaaaaaaaaaattacacattcctcgtgtatgtttttcttcatttctaatgagttgtatgtgtatttggaatgggtgaaaaatgaatcaggaagcaatggttcttgctataaaggaagaaa

SEQ ID NO: 930956 - DNA, 625 bp, Homo sapiens
atgtttttgatgtgatacatttaaaaattgtgtatcgatttttaaatagggttattgaggtatcatctatacacagtaaaaagcaccctttttagtgtgcaatcctaagagtgttgacaaatgcatataggttgtgtaactaccatcacaaacaaaatgaagaactgttccatcactctctaaaattctcttgtgcctttttgtagtaaatctcttcttccccatcccagcccrtcataaccactgatctgttttctgttcctattgttttgccttaaaaagaagctcatataaatggaaccatggagtgtgtaaccttttgagactggcttctttcactcagtacacgttttcaagatccatcatgttattgcatggattagtaatacattctttttattgctgagtagtattccactgcatagatatgctacaatttgttcatctacttaccatgtaaagatgtttgggttgtttccagttttggggaattctaaataaagcagctataaactctcatgtatatgttttgtattaccataacttttcatttctcttgaaaaaatacctatcaggtgggattgctgggctatatgttaactttataagaaatcaaaagatggtt

SEQ ID NO: 930957 - DNA, 640 bp, Homo sapiens
aactttcagtcgcaagataagtaaattcaggggactttagttaacgatactgtattgtatacttaaaatttgcttgaatgttctcaccaaaaacagaataaaacaaaaagggaagcaatgaccttgggtaataaatatgttaactcatttgattgtggtgaatcatttcacagtatacatgtgtatccaatcattacattgtatacactgaacccttataattttcataagtatatcacaataaagctggaaatttcaaataaatacagtgcaaaaaatattttggaasggtgaaaaatatgtttgctatcttaaggataatgatgatttcacagatgtatacgtatgtcaaaacatcaatttgtatactttattttgtgcagtttattgtttgtcagttatatctcaacaaagctttaaaaaataactatatattcggtgtttggcattcaaaacacatctcatggacagtctcatgtacctggaaatagcacaaagttgatttgttgcataactgccccattttttttatcatggggggaggaaatgagatgacacttcacatatgtccctgagtaaaaaactgaggctggagctccagacttctctctgcctgaatgcaaagaaagagttttgataa

SEQ ID NO: 930958 - DNA, 668 bp, Homo sapiens
ccctgcaactggttgcagaaataaactcttctttcccagtctgtctgcacatcattattggaccactagaatgagcagcctgttctgtcctggcacaaatcaatggcaaagcatttagaatattccataaacttagctgataaagcagtggcaggtttggagaagattgactccarttttgaaagttttgctgtgggcaaaatgctgtcaaacagcatggcatgctgtagaaaagtctttcctgaaaggaagagtctattgtggcaaacttcaccattgtcttattttaagaaattgccatagccagccaaaccttcagcaacctccatgctgaccaatccacagccatcaacactgaggcatgaacttctaccagcaaaagaattagaactcaatggaggctcagatgactcttaccatttttgagcaataaagtattttataaatcaaattatgtataatttttagacaatgttattgtacttagtaaactatagtatagtgtaaacataatttttatgtgcagtaggaaatcaagacatttatgtgactcactttatttcaatatttgctttattatggtggtctggatataaacctgcagtatctctaaggtatgcctgtattgggtgcctgtcatagatcagcctatgtgtgagttactggat

SEQ ID NO: 930959 - DNA, 668 bp, Homo sapiens
ccctgcaactggttgcagaaataaactcttctttcccagtctgtctgcacatcattattggaccactagaatgagcagcctgttctgtcctggcacaaatcaatggcaaagcatttagaatattccataaacttagctgataaagcagtggcaggtttggagaagattgactccaattttgaaagtyttgctgtgggcaaaatgctgtcaaacagcatggcatgctgtagaaaagtctttcctgaaaggaagagtctattgtggcaaacttcaccattgtcttattttaagaaattgccatagccagccaaaccttcagcaacctccatgctgaccaatccacagccatcaacactgaggcatgaacttctaccagcaaaagaattagaactcaatggaggctcagatgactcttaccatttttgagcaataaagtattttataaatcaaattatgtataatttttagacaatgttattgtacttagtaaactatagtatagtgtaaacataatttttatgtgcagtaggaaatcaagacatttatgtgactcactttatttcaatatttgctttattatggtggtctggatataaacctgcagtatctctaaggtatgcctgtattgggtgcctgtcatagatcagcctatgtgtgagttactggat

SEQ ID NO: 930960 - DNA, 668 bp, Homo sapiens
ccctgcaactggttgcagaaataaactcttctttcccagtctgtctgcacatcattattggaccactagaatgagcagcctgttctgtcctggcacaaatcaatggcaaagcatttagaatattccataaacttagctgataaagcagtggcaggtttggagaagattgactccaattttgaaagttttgctgtgggcaaaatgctgtcaaacagcatggcatgctgtagaaaagtctttcctgaaaggaagagtctattgtggcaaacttcaccattgtcttattttaagaaattgccatagccagccaaaccttcagcaacctccatgctgaccartccacagccatcaacactgaggcatgaacttctaccagcaaaagaattagaactcaatggaggctcagatgactcttaccatttttgagcaataaagtattttataaatcaaattatgtataatttttagacaatgttattgtacttagtaaactatagtatagtgtaaacataatttttatgtgcagtaggaaatcaagacatttatgtgactcactttatttcaatatttgctttattatggtggtctggatataaacctgcagtatctctaaggtatgcctgtattgggtgcctgtcatagatcagcctatgtgtgagttactggat

SEQ ID NO: 930961 - DNA, 668 bp, Homo sapiens
ccctgcaactggttgcagaaataaactcttctttcccagtctgtctgcacatcattattggaccactagaatgagcagcctgttctgtcctggcacaaatcaatggcaaagcatttagaatattccataaacttagctgataaagcagtggcaggtttggagaagattgactccaattttgaaagttttgctgtgggcaaaatgctgtcaaacagcatggcatgctgtagaaaagtctttcctgaaaggaagagtctattgtggcaaacttcaccattgtcttattttaagaaattgccatagccagccaaaccttcagcaacctccatgctgaccaatccacagccatcaacactgaggcatgaacttctaccagcaaaagaattagaactcaatggaggctcagatgacwcttaccatttttgagcaataaagtattttataaatcaaattatgtataatttttagacaatgttattgtacttagtaaactatagtatagtgtaaacataatttttatgtgcagtaggaaatcaagacatttatgtgactcactttatttcaatatttgctttattatggtggtctggatataaacctgcagtatctctaaggtatgcctgtattgggtgcctgtcatagatcagcctatgtgtgagttactggat

SEQ ID NO: 930962 - DNA, 655 bp, Homo sapiens
taaataaacaagcaaaagtagccaaaaatttttttgaaaaagactaatgagcatatgaccagaaaacttaccagaagatgtgggtagaacagcactggtctttaagaaatcacctactgagtgctgggaaactctttttctttttaaatttttttttttatactttaagttttagggtacatgtgcaaaatgtgcaagttagttacatatgtatacatgtgccatgctggtgygctgcacctactaactcgtcatctatcattaggtatatctcccaatgctatcgctccccgccccccaccccagaacagtccccagagtgtgatgttccccttcctgtgtccatgtgttctcattgttcaattcccacctatgagtgagaatatgcggtgtttggttttttgttcttgcgatagtttactgagaatgatggtttccaatttcatccatgtccctacaaaggacatgaactcatccttttttatggctgcatagtattccatggtgtatatgtgccacattttctgaatccagtctgtcattgttggacatttgggttggttccaagtctttgctattgtgaataatgctgcaataaacatacgtgtgcatgtgtccttatagcagcatgatttatagtcctttgggtatatag

SEQ ID NO: 930963 - DNA, 596 bp, Homo sapiens
acccatctcatgtgcaaagacacacatagactcaaaataaagtgttggaggaaaattaccaagcaaatggaaagcagaaaaaagcaagggctgcaattctagtctctggcaaaacagactttaaactaacaaagatcaaaaaagacaaagaagggcattaaaaaattgtgaagggttcaatttaactggaagcrctaactatcctaaatatatatgcatttagtacaggagcacccagattcataaaacaagttcttagagatgttaaaagagacttagacccccacacaatagtagtgggagatgttaccacccactgtcaatattagaaagatcatggagacagaaaattaacaaagatattcaggattgaactcagctctggatcaagtggacctgataggtaactacagaactctttacccaaaaacaacagaatatacattcttcttggtgccacatgacacttactctaaaattgatcacataactcaaggtaaatcactcctcagcaaatgcaaaagaaacagtctctcggagcacagtgcaatcaaatttgaactcaagattaagaaactcactcaaatccacacaac

SEQ ID NO: 930964 - DNA, 793 bp, Homo sapiens
ataattcttttgagttccgtttgaaaaggactatttgtgagcctaacggactgcagtgatatttaagatgttgagcaacagaaacccaaaaatacaatatttcaaaacagaagtgattttcaagattctcaattgtccagaggcagcttatcactcagagatgtagtattgtgtagtgtgctctattgctctttccacaacctagttatgcttggaactacatttcccagaatcttttttcttatgtggtctgggatagagttgccaaaagtgaagttggatgagtttgggacgtggaagtgaagtggcagtcataatgatctgaagttccatgttggtaggggacgttgaggtacagacactgagatgcaagtgggcttcgatttatccttgatcttccctgctatagggaagcagcttccctttcctactgcaagtcatgatgagctgtggtgagcyccagcctgttatcactgtgaactcacaaggcgctggtcacagaaagcagacagcctccgtgaacttcatcagcttcctctgtggttccaggtcaacagagagatgggtttagtagcttccaggtttccctgaaagcttggactcagtcacccactccagggctggatagtgacctgttaagggctgcacatggcccccaaaattcatgtgttaaagtctttttttttttctgagacggagtctcgctctgtcgcccaggctggagtgcagtggcgcgctctcggctcactgcaagctccgcctcccggattcacgccattctcctgcctcagcc

SEQ ID NO: 930965 - DNA, 793 bp, Homo sapiens
ataattcttttgagttccgtttgaaaaggactatttgtgagcctaacggactgcagtgatatttaagatgttgagcaacagaaacccaaaaatacaatatttcaaaacagaagtgattttcaagattctcaattgtccagaggcagcttatcactcagagatgtagtattgtgtagtgtgctctattgctctttccacaacctagttatgcttggaactacatttcccagaatcttttttcttatgtggtctgggatagagttgccaaaagtgaagttggatgagtttgggacgtggaagtgaagtggcagtcataatgatctgaagttccatgttggtaggggacgttgaggtacagacactgagatgcaagtgggcttcgatttatccttgatcttccctgctatagggaagcagcttccctttcctactgcaagtcatgatgagctgtggtgagctccagcctgttatcactgtgaactcacaaggcgctggtcacagaaagcagacagcctccgtgaacttcatcagcttcctctgtggttccaggtcaacagagagatgggtttagtagcttccaggtttccctgaaagcttggactcagtcacccactccagggctggatagtgacctgttaagggctgcayatggcccccaaaattcatgtgttaaagtctttttttttttctgagacggagtctcgctctgtcgcccaggctggagtgcagtggcgcgctctcggctcactgcaagctccgcctcccggattcacgccattctcctgcctcagcc

SEQ ID NO: 930966 - DNA, 717 bp, Homo sapiens
cagtggtatgagtaatgtcaaaatattccttctaagatggaggataagttgttatatctggaccctcctacaaccaaaaaaaataggcacaatgactattgggactctttaaattttgtaggcaacatattccttatttcagtgtgttactctagccattacctagtgaccctcaaaacctctagtttttagtgaggcccagaaccaaaaaaaaawaaaaaaaaaaaggcttttacaacaggtccaggctgctatgcaggcccctgtgctgcttgggccatatgatctaatagatccagtggtgcttgaggtgtcagtggctgatagagatgccgtatggagacaccggcaggcttctgtaggtggattacagcacaggtgcataggattttggagcaaagcccagccatcagccacaaaagccatttccttttaagaaatggctaatggtccactagtggagcttagtagagactgaatacaaccatgagccatcaagttacccagaaacctgagctgcccattatgaactgggcgttataaagtttgggatggacagaagcactctatcatcaaatggaagtggtatatataagatggggcctcagcaggccctgaaagccagattaagttatagaaaaaagtgatccaaaggcccatagtctcctttcctgctacactgccttctctctcccagccctccctatggggagtttc

SEQ ID NO: 930967 - DNA, 752 bp, Homo sapiens
ggaccttctactttggttaaatttctaagggtccagtggtatgagtaatgtcaaaatattccttctaagatggaggataagttgttatatctggaccctcctacaaccaaaaaaaataggcacaatgactattgggactctttaaattttgtaggcaacatattccttatttcagtgtgttactctagccattacctagtgaccctcaaaacctctagtttttagtgaggcccagaaccaaaaaaaaataaaaaaaaaaaggcttttacaacaggtccaggctgctatgcaggcccctgtgctgcttgggccatatgatctaatagatccartggtgcttgaggtgtcagtggctgatagagatgccgtatggagacaccggcaggcttctgtaggtggattacagcacaggtgcataggattttggagcaaagcccagccatcagccacaaaagccatttccttttaagaaatggctaatggtccactagtggagcttagtagagactgaatacaaccatgagccatcaagttacccagaaacctgagctgcccattatgaactgggcgttataaagtttgggatggacagaagcactctatcatcaaatggaagtggtatatataagatggggcctcagcaggccctgaaagccagattaagttatagaaaaaagtgatccaaaggcccatagtctcctttcctgctacactgccttctctctcccagccctccctatggggagtttcct

SEQ ID NO: 930968 - DNA, 752 bp, Homo sapiens
ggaccttctactttggttaaatttctaagggtccagtggtatgagtaatgtcaaaatattccttctaagatggaggataagttgttatatctggaccctcctacaaccaaaaaaaataggcacaatgactattgggactctttaaattttgtaggcaacatattccttatttcagtgtgttactctagccattacctagtgaccctcaaaacctctagtttttagtgaggcccagaaccaaaaaaaaataaaaaaaaaaaggcttttacaacaggtccaggctgctatgcaggcccctgtgctgcttgggccatatgatctaatagatccagtggtgcttgaggtgtcagtggctgatagagatgccrtatggagacaccggcaggcttctgtaggtggattacagcacaggtgcataggattttggagcaaagcccagccatcagccacaaaagccatttccttttaagaaatggctaatggtccactagtggagcttagtagagactgaatacaaccatgagccatcaagttacccagaaacctgagctgcccattatgaactgggcgttataaagtttgggatggacagaagcactctatcatcaaatggaagtggtatatataagatggggcctcagcaggccctgaaagccagattaagttatagaaaaaagtgatccaaaggcccatagtctcctttcctgctacactgccttctctctcccagccctccctatggggagtttcct

SEQ ID NO: 930969 - DNA, 752 bp, Homo sapiens
ggaccttctactttggttaaatttctaagggtccagtggtatgagtaatgtcaaaatattccttctaagatggaggataagttgttatatctggaccctcctacaaccaaaaaaaataggcacaatgactattgggactctttaaattttgtaggcaacatattccttatttcagtgtgttactctagccattacctagtgaccctcaaaacctctagtttttagtgaggcccagaaccaaaaaaaaataaaaaaaaaaaggcttttacaacaggtccaggctgctatgcaggcccctgtgctgcttgggccatatgatctaatagatccagtggtgcttgaggtgtcagtggctgatagagatgccgtatggagacaccggcaggcttctgtaggtggattacagcacaggtgcataggmttttggagcaaagcccagccatcagccacaaaagccatttccttttaagaaatggctaatggtccactagtggagcttagtagagactgaatacaaccatgagccatcaagttacccagaaacctgagctgcccattatgaactgggcgttataaagtttgggatggacagaagcactctatcatcaaatggaagtggtatatataagatggggcctcagcaggccctgaaagccagattaagttatagaaaaaagtgatccaaaggcccatagtctcctttcctgctacactgccttctctctcccagccctccctatggggagtttcct

SEQ ID NO: 930970 - DNA, 480 bp, Homo sapiens
gatgataaaaagaaatgaaatataattaccatcttcaaagtggttcacctgtaatgggtgagagttaactacgtaattctaatacagtgtcgtaggtgctgtaatggagggctgcagaggatactgtgggctcatggaggaggtacktaaaccagactgagagtagcaaaggtctcccctaatggcttgatagtatttatggggtgtgaactctgtgctagacccttggaatataaaattggaagagtttctgcccttacgtagtttatagcctaataggacagtcagacaaataaatagagaattgaaatacattatgggaaattaaaaaaaaatacattatgatttaatgtataagcctaaggtattttgagtgtaggtagaagaggcacctaatttactatatcaggaaagggttcttgaaaaaagcagtttttattttagagacctaagctgagtcttaaaggcagagaagagaaa

SEQ ID NO: 930971 - DNA, 420 bp, Homo sapiens
tagccgattcaatcaagtggaagaaagggtatcagtgattgaagtcaaataaatgaaataaagtgagaagacaaggttagagaaacaagagtaaaaagaaatgaacaaagcctccaagaaatatgggactatgtgaaaagaccaaatctatatttgattggtgtaccggaaagtgatgaggagaatggaaccaagttggaaaacactcttcaggatattatccaggagaayttccccaacctagcaaggcaggccaacattcaacttcaggaaatacagagaacaacacaaagatactctttgagaagagcgattccaagacacataattgtcagattcaccaaggttgaagtgtaggaaaaagtgttaagggcagccagagagaaaggtcaggttagccacaaagggaagcccatcaga

SEQ ID NO: 930972 - DNA, 576 bp, Homo sapiens
attttctccttccatccccctgacctgtagccaagccatttgaccaagagtcagtacattcttactttgagtctcttctctttccatgcaaagtgaatgacaaggtgcgtagtgcaaagttctgcctactgatttttttttaatttttttattttttgagacagagtcttgcactgtcaccaggctggagtacagtggcgtgatctcagctcactataagctctgcctcctgggatcaygccattctcctgtctcagcctcccaagtagctgggactacaggcgcccgccaccatgcccagctaattttttttgtatttttttagtagagatgtgttttcaccatgttagccagaatggtctcgatctcctgacctcatgatccaccaccttggcctcccaaagtgctgagattacaggtgtgagccactgtgcctggccaagaatttatttttgagttgaatttttaaatattaaaaaattttaaatatacaaacaaaaattgtatatatttgtagtgtacaacctgatgttttgaaatatggatacactgtgaaatggctaactcaagctaatt

SEQ ID NO: 930973 - DNA, 576 bp, Homo sapiens
attttctccttccatccccctgacctgtagccaagccatttgaccaagagtcagtacattcttactttgagtctcttctctttccatgcaaagtgaatgacaaggtgcgtagtgcaaagttctgcctactgatttttttttaatttttttattttttgagacagagtcttgcactgtcaccaggctggagtacagtggcgtgatctcagctcactataagctctgcctcctgggatcacgccattctcctgyctcagcctcccaagtagctgggactacaggcgcccgccaccatgcccagctaattttttttgtatttttttagtagagatgtgttttcaccatgttagccagaatggtctcgatctcctgacctcatgatccaccaccttggcctcccaaagtgctgagattacaggtgtgagccactgtgcctggccaagaatttatttttgagttgaatttttaaatattaaaaaattttaaatatacaaacaaaaattgtatatatttgtagtgtacaacctgatgttttgaaatatggatacactgtgaaatggctaactcaagctaatt

SEQ ID NO: 930974 - DNA, 576 bp, Homo sapiens
attttctccttccatccccctgacctgtagccaagccatttgaccaagagtcagtacattcttactttgagtctcttctctttccatgcaaagtgaatgacaaggtgcgtagtgcaaagttctgcctactgatttttttttaatttttttattttttgagacagagtcttgcactgtcaccaggctggagtacagtggcgtgatctcagctcactataagctctgcctcctgggatcacgccattctcctgtctcagcctcccaagtagctgggactacaggygcccgccaccatgcccagctaattttttttgtatttttttagtagagatgtgttttcaccatgttagccagaatggtctcgatctcctgacctcatgatccaccaccttggcctcccaaagtgctgagattacaggtgtgagccactgtgcctggccaagaatttatttttgagttgaatttttaaatattaaaaaattttaaatatacaaacaaaaattgtatatatttgtagtgtacaacctgatgttttgaaatatggatacactgtgaaatggctaactcaagctaatt

SEQ ID NO: 930975 - DNA, 576 bp, Homo sapiens
attttctccttccatccccctgacctgtagccaagccatttgaccaagagtcagtacattcttactttgagtctcttctctttccatgcaaagtgaatgacaaggtgcgtagtgcaaagttctgcctactgatttttttttaatttttttattttttgagacagagtcttgcactgtcaccaggctggagtacagtggcgtgatctcagctcactataagctctgcctcctgggatcacgccattctcctgtctcagcctcccaagtagctgggactacaggcgcccgccaccatgcccagctaattttttttgtatttttttagtagagatgkgttttcaccatgttagccagaatggtctcgatctcctgacctcatgatccaccaccttggcctcccaaagtgctgagattacaggtgtgagccactgtgcctggccaagaatttatttttgagttgaatttttaaatattaaaaaattttaaatatacaaacaaaaattgtatatatttgtagtgtacaacctgatgttttgaaatatggatacactgtgaaatggctaactcaagctaatt

SEQ ID NO: 930976 - DNA, 598 bp, Homo sapiens
atggaactgctcattacagaagaccagacatctatcagaacacctgcccaatgccgtagctaattccaaaactaaagattaatccagcaaagccaaaacgtacttccaactcttggcagttccaaatgaggtcagcatttaataatggcagccccaacccctagcaggagcagagcagtaacacagatgaaaagtgcaggtgacggccttcactaaggacacatttactcacctgaatkaacaagcagtgggaccctttatacccagtcacttgggctcaagaaatagctggattctccccatggaggctgccctcctccccctcccccacttccccgatttaaggttgaagatggttggaatgcaccgcacctatgaagaccagtggacatggctggggttagagccagaacaagccctcaaaagaacacaggccatactggagacttgggacagccaagtggaaccagaacaggacataaagtgagcttgtacatccaacagccatgagtaacatcgaaaaggttgtagcctagccaacacggcgaaaccccatctctacaaaaaatacaaaaagtagttgggcttggtagcatgc

SEQ ID NO: 930977 - DNA, 598 bp, Homo sapiens
atggaactgctcattacagaagaccagacatctatcagaacacctgcccaatgccgtagctaattccaaaactaaagattaatccagcaaagccaaaacgtacttccaactcttggcagttccaaatgaggtcagcatttaataatggcagccccaacccctagcaggagcagagcagtaacacagatgaaaagtgcaggtgacggccttcactaaggacacatttactcacctgaatgaacaagcagtgggaccctttatacccagtcacttgggctcaagaaatagctggattctccccatggaggctgccctcctccccctcccccacttccccgatttaaggttgaagatggttggaatgcaccgcacctatgaagaccagtrgacatggctggggttagagccagaacaagccctcaaaagaacacaggccatactggagacttgggacagccaagtggaaccagaacaggacataaagtgagcttgtacatccaacagccatgagtaacatcgaaaaggttgtagcctagccaacacggcgaaaccccatctctacaaaaaatacaaaaagtagttgggcttggtagcatgc

SEQ ID NO: 930978 - DNA, 612 bp, Homo sapiens
gtttctcagatagcttccttttgtttttatcctgggatattcactttttcatgattgacctcaatgacttttcaaaagtccattcacagaatggacagaaacagtgtttccaaactcctgaatcaaaagaaagttttcactccrtgagatcaatgcacacatcagaaagcagtttcacaaaaagcttctttctggcttttacctgaagatattttctttttcacaataggacaaaatgtactcccaaatatccctttgcagattctagaaaaatagagttttcagactgctgaatgagaggatggtttatctctgtgagatgaagcacacatcacaaagccgtttgtcagatagtttctttcttgtttttgtcctgggatactcgcctttttgccattggcctcaatcagctccccagcgtcccttcacggaatggactgaaagagtgtttccaaactggtgaatcaaggaaaagtttaactctgtgagattaatgcacacaacacaaagcagaatgcttctttctagtttttatctgaagatattttctttttcaccataggcctcattgccctcccaaatatccctttgcagattctaaaaacacagtgt

SEQ ID NO: 930979 - DNA, 379 bp, Homo sapiens
gtactcccaaatatccctttgcagattytagaaaaatagagttttcagactgctgaatgagaggatggtttatctctgtgagatgaagcacacatcacaaagccgtttgtcagatagtttctttcttgtttttgtcctgggatactcgcctttttgccattggcctcaatcagctccccagcgtcccttcacggaatggactgaaagagtgtttccaaactggtgaatcaaggaaaagtttaactctgtgagattaatgcacacaacacaaagcagaatgcttctttctagtttttatctgaagatattttctttttcaccataggcctcattgccctcccaaatatccctttgcagattctaaaaacacagtgtttcc

SEQ ID NO: 930980 - DNA, 603 bp, Homo sapiens
gcttccttttgtttttatcctgggatattcactttttcatgattgacctcaatgacttttcaaaagtccattcacagaatggacagaaacagtgtttccaaactcctgaatcaaaagaaagttttcactccatgagatcaatgcacacatcagaaagcagtttcacaaaaagcttctttctggcttttacctgaagatattttctttttcacaataggacaaaatgtactcccaaatatccctttgcagattctagaaaaatagagttttcagactgctgaatgagaggatggtttatctctgtgagatgaagcacacatcacaaagccgtttgtcagatagtttctttcttgtttttgtcctgggatactcgcctttttgccattggcctcaatcagctccccagcgtcccttcacggaatggactgaaaragtgtttccaaactggtgaatcaaggaaaagtttaactctgtgagattaatgcacacaacacaaagcagaatgcttctttctagtttttatctgaagatattttctttttcaccataggcctcattgccctcccaaatatccctttgcagattctaaaaacacagtgtttc

SEQ ID NO: 930981 - DNA, 650 bp, Homo sapiens
gatgaatgcacacatcacaaagcagtttctcagagagcttccttctagttttaatcctggaatatttgctttttctcaattggcctcaatgagctcccaaatgtccatttgcagaatagacaaaaacagtgtttgcaaactgctgaatcaaaagaaaggcttaactctatgagataaatgccaacctaaaaaaccagtttctcagaaagcttttctctagtttttgtctgaagatatttttttttcaccagagcyttcgatgcagtacaacatatccctttgtagattctacaaaaatagtgtttccaaactgctgaatgtataggaaagttaattctgtgagataaatgcacgcgtcacaaagtggtttcttctatagcttccttctagtttttatcctggaaaattcacctttttgccattggcctcaataagctcccaaatgtccattcacagaatggacaaaaacaatgtttcctaattgctgaatgaaaaaacaattttatctttgtgcgatgaatgcacacaccagaaagcggtttccagatagcttcattccagattttatcctgggttatttactttttcaacactggcctcaatgagctccaaaatgtccgtttgcagaatggacagaaacagtgtttcca

SEQ ID NO: 930982 - DNA, 595 bp, Homo sapiens
agattctcagacagcttccttcgagattttatcctgggatatttgctttttcacaattggcctcaatgagctcccaaatgtccatttatccaacggagaaatacagtttccaaactgccgaatcaaaagaaaggtttaaatttgtgagatgaatgcgcacctcccaaagcagtttttcagaaagcttctttctagttttcatctgaagatattttctttttcaccataggcctcaatacgctcccaaatatcccttcacagattctacagaaacagtgtttccaaactgctgaatgaaaagaatggcttcactctgtgagactaatgcagacatcacaaagcagtttctgagatagcttccttgtagttttgatccaagcatattcattwtttccattggcctcaatgagctcccaaatatacattcacagaaatggacaaaaacagtgtttacaaatttttgtatgtaaagagaggtgtaactgtgtgagaggaatttatacataacaaagcagtttctcagaaagcttctttctggtttttatctgaagatatttcttttttcaccatagtcctcaatgcactcctaaaagtc

SEQ ID NO: 930983 - DNA, 489 bp, Homo sapiens
catagtgataaaaggaacatggcaatcctaaatttgtatgcaccaaaaaacagagcttccatatacatgaagaaaacaacaaatagaaatgaaagagaaataaatccacttttatagttgggagcttcaacatcctgcttttttttttttttttttttttttttgagacggagtctcgttctgtcscccaagcgggagtgctgtggcgcgatctccgctcactggaagctccgccttccgggttcacgccattttcctgcctcaacctcccgagtagctgggactacaggcgcccgccaccgggcccgggtaattttttgtatttttagtaaaaacggggtttcaccgggggctcgatctcctgacctcgtgatccacccgcctcggcctcccaaagtgctgggattacaggcgtgagccaccgcgcccgggctcaacatcctactttcattaattgatagaaatatagtacttgaccaaaatcagcaa

SEQ ID NO: 930984 - DNA, 719 bp, Homo sapiens
ggtagaaagaggagcaggtaccatttcctctgaaattattctaaacaattgaaaagaaaggactcctccctaactcattttatgatgccagcatcatcctgataccaaaacctggcagagatacaacaacaataaaagaaaacttcaggccaatattsctaatgaacatcaatgtaaaaatcttcaataaaatacaggcaaatggaatccagcagcacatcaaaaagctcatccaccatgatcaagttagttttatccccggatgcaaggctggttcaacatatgaaaatcaataaatgtaatttatcgtaaacagaactaaaaacaaaaacctcgatcatcttgatggacacagaaaaggccttcgataaaattcaacatcccttcatattaaaaactctcaataaattaggttttgaaggaacatacctcaaaataataagagccatataggacaaacccacagtcaatatcatactgaattggcaaaagctagaaacattccctttgaaaatcagcacaagacaagattgccctctctcaccactcctattcaacatagtattcgaagttctggccagggcaatcaggcaagagaaagaaatagaagttactcaaataggaagagaggaagtcaaattgtctgtttacagatgacataatcctctatctagaaaaccccattgtctcagtccaaaagcttcttaagttgataagca

SEQ ID NO: 930985 - DNA, 719 bp, Homo sapiens
ggtagaaagaggagcaggtaccatttcctctgaaattattctaaacaattgaaaagaaaggactcctccctaactcattttatgatgccagcatcatcctgataccaaaacctggcagagatacaacaacaataaaagaaaacttcaggccaatattcctaatgaacatcaatgtaaaaatcttcaataaaatacaggcaaatggaatccagcagcacatcaaaaagctcatccaccatgatcaagttagttttatccccggatgcaaggctggttcaacataygaaaatcaataaatgtaatttatcgtaaacagaactaaaaacaaaaacctcgatcatcttgatggacacagaaaaggccttcgataaaattcaacatcccttcatattaaaaactctcaataaattaggttttgaaggaacatacctcaaaataataagagccatataggacaaacccacagtcaatatcatactgaattggcaaaagctagaaacattccctttgaaaatcagcacaagacaagattgccctctctcaccactcctattcaacatagtattcgaagttctggccagggcaatcaggcaagagaaagaaatagaagttactcaaataggaagagaggaagtcaaattgtctgtttacagatgacataatcctctatctagaaaaccccattgtctcagtccaaaagcttcttaagttgataagca

SEQ ID NO: 930986 - DNA, 646 bp, Homo sapiens
agcaggtaccatttcctctgaaattattctaaacaattgaaaagaaaggactcctccctaactcattttatgatgccagcatcatcctgataccaaaacctggcagagatacaacaacaataaaagaaaacttcaggccaatattcctaatgaacatcaatgtaaaaatcttcaataaaatacaggcaaatggaatccagcagcacatcaaaaagctcatccaccatgatcaagttagttttatccccggatgcaaggctggttcaacatatgaaaatcaataaatgtaatttatcgtaaacagaactaaaaacaaaaacctcgatcatcttgatggacacagaaaaggccttcgataaaattcaacatcccttcmtattaaaaactctcaataaattaggttttgaaggaacatacctcaaaataataagagccatataggacaaacccacagtcaatatcatactgaattggcaaaagctagaaacattccctttgaaaatcagcacaagacaagattgccctctctcaccactcctattcaacatagtattcgaagttctggccagggcaatcaggcaagagaaagaaatagaagttactcaaataggaagagaggaagtcaaattgtctgtttacagatgac

SEQ ID NO: 930987 - DNA, 595 bp, Homo sapiens
tatggaactgtaagtccattaaacctctttcttttgtaaattgcagagtctcaggtatgtctttagcagcagcatgagaacagacgagtacagtaaactagtaccaggagtgggtgctgatgaaaagataccccaaaatttggaagcaactttgaaactggataacaggcagaggttggaatggtttgcaaggtccaaaagaagatagaaaaatgtgggcaagtttggaacttcatagagacttgttgaatggctttgccaaaaatgctgatagtgatatggacaattaaatccagcctgaggtggtctcagatggagataaaaaactttttgggaactgtagcaaaggtgactcttgttatggtttagcaaagaggctagtggcattttgccrctgccctagagatttatggaactttgaacttgagagagatgatttagggtatctggtggaagaaagttctaagcagcaaagcattaaagaggtgacttggttgctgttaaagacattcagttttaaaagggaacagagcataaaagtttagaaaatttgcagcctgccaatgtgatagaaaagaaaatccaattttctgag

SEQ ID NO: 930988 - DNA, 566 bp, Homo sapiens
agaaggagggaatacttccaaactcattctatgaggtcaatattaccctgataccaacaccagacaaagacacatcaaaaaaaaaaaaaaagaaaaaagaaaaaagaaaagaaaagaaaagaaaactgcaggccaatatctctaatgaatattgatgcaaaaaacctcaacaaaatactaagaaactgaattaaaaaayacattaaaaaggtgattcatcatgactgttatttattactgtgatgcaaggatggttcaacatatgcaaatcaatcaatgggatacagcatatcaatagaataaaggacaaaaaccataggattgttttcaaatagccactgctttcaagtttatttagaaccccagagcatattagcccatggtggcgaggctgaccactggtgtgggtggttcctctctggctagggctggtctaaatgccccctagtgcatgggtgtcacctgagtttagcccagttttgctttccagtgtgacagagcagcactgagttcaatgcagggtcccacagttgctgtggtctctctccccaagcacacagattctc

SEQ ID NO: 930989 - DNA, 810 bp, Homo sapiens
cttttcttctcactctatactttctatcctggcaagtttcatcatatctgtggcttcagttattacctaatatgcaaaagcctcaacaaattatagctccaaatccacatatgtaactcgaacctttataaatctacrtggacgtttcaaagacactcaactaagtaggtttaaaaccaaattcataacatttcccatgagccttgtctactacctactaaatccttagtgttcacaatctcagtaggtggcaccaccttcccaccaagtatgtaagtctgagaaataggcattgttctttacaccctattcttcccctttatttaatctaacaattgtccactttgtgtttcttgaatctgttcatttgtcttaatctccattgacacctctataatttaagatgtataccatctcttatgcgaactactgcaatgcaggaataggtcacccctatatactctaacccttctctgatccatttcttgccatgtagccagagtattacttgcttttcttttttcaaaagaaaatctgaacatcttaccccttgtataaaactctccagtgccttctgtgaagcattcactgtctttaaagtcaaaagacacgtttgcaacaacacggatgttcctgaagcctggtatgctaagtgaaataagccaggtgcagaaacacaaatactgcatgatttcactcctatgtggaacttaagaaagttgaccccactgaattagaagcagaatggtggtaaccagaggctggggtagttccacagcggggggcaattgtagagatactgatcaaagc

SEQ ID NO: 930990 - DNA, 578 bp, Homo sapiens
aacgaaaatagacaaacatactttattaagcatattgcataacctatgctactttcagcttatttatattcatttaatccctcattcaacttaatataatatcctcttttccttcctggctttctacctgcctgttctcattcattaacttgttttagccaatgagtcatgagtagctactctgttcaggcattgttctcagttctagtgatacagtagcatacaattttaacaaaatatcgmcctcatgaagctacattttagaggaaggaactcagtgaacaagtcaacagaaaaatataaaatattttagaatacaaataattggtatgaaggaaaaccagtcaaatgaggggtaagacatattcaaggtagagaacaatctacaattacactgagccctgaacaaagagagaaaataagctatacataaatttggggaagaacatttcaggaagagggaagtgtacaggctctaatgaaatcaaaaagctagtgtattcccaaaagagcaaaaaatcattatgcttgaaattgaattgaatgagcaatgagaagaatagtaaaaatgagatcaa

SEQ ID NO: 930991 - DNA, 606 bp, Homo sapiens
attctgcttttgataaagatatttctttttttgtatgtggcctctgaatgaaggccaaccaagattctcagctcaaaagctgtaatctttcaatgttggaggggaaaaaaggccattttccccctgcaaagtaatcaagcatgcttccctgtcacaccaccttcttagggagactcaatttggactatatcatgatttctgccttaaggactgactttagagtctgcccctggatgagagctgagacatcacttcatcattctctaaaagatgaagaaatgaacaaagtttcagcagtcaacaaggacactgagcaaggaagtggctcaaaattcccatttctttaaggcaagtctcctgtaagggaatagcttagatgtggctctccccatccagctcagtatttcacctacctattccmcaatgaagatgaaaagtgtgaagcaggagggtagcaaatagtcctcacttttgttaaccccctcagggaggttttggtttcaaagtctgaccactgggtgtcaggcttcgggggaaagaaaatagagatggtttatcaaccccacttaattatgccagagaatgcaggtgagatttgctaaagga

SEQ ID NO: 930992 - DNA, 606 bp, Homo sapiens
gaatgcagtggtgaacgggacatagtctctgcccttaaggagcctcagtctggtgagggaaagaaaatacaattatagttaaatgaaagaggtgcatacagatggctgtggaagcacagaaaaggggcatctaatccagccttggggaaggggaaatagggctgtcagggaagatatggaggcagtgatacctggcagggtctagggtaaaagcaggagttgacaagtttaaaataaagttgcagrccaggcacagtggctcgctcctgtaatcccagcactttgggaggcaagaggtggacgggtcgcttgaggccaggagttcaagaccagcctggccaacatggcgaaaacccatcactactaaaaatacaaaaattagccaggcatggtggtgcacacctgtaatccctgctactcgggaggctgaggcagaatggcttgaactcgggagagggaggttgcagtgagccgagattgcaccacagcactccaccctgggcaacagagcaagtgagtctctgtctcaaattaaataaataaataaaatttaaaagtaaataaaataaaataaaatagggttgccaaatttttcaaataaagata

SEQ ID NO: 930993 - DNA, 585 bp, Homo sapiens
aacacacttagaataaaaaccaaacatctagccccagctcataaacattgcatgatctcaccctgacgaccttttcaacctcctcgcctggcgccctggctaccctggcctgtcatgggttcctcacacactttgagcttctttttattgagacaaggtctcactctgtcacccaggatggagtgcagtggcaccatctcggctcacwtcaacctccacctccccagttcaaatgattctcatgcctcagcctcctgagtggctggaattacaggcgtgcgccaccacattcagctactgttgtattttcagtaaagatggggtttcaccgtgttgcccaggctggtcttgaactcctgagctcaagtgctctgctcacattggcctctcaaagtgctgggattataggcgtgagccaccgcttccacctcaagctgctttttgacggactctgcactagctgcttcctttttgcagaatcccccttcgtcccctgccccctgtcaatattctcatgatggccccatgtccttcagatcgctgcaaatgccacctcctcaaagaagttttccctgaccagccatc

SEQ ID NO: 930994 - DNA, 571 bp, Homo sapiens
ccatgttgaatagaagtggtgagagtgggcatccttttcttgttccagttctcagagagaatgctttcaacttttccccgttcagtattattatgttggctatgggtttgtcatagatagcttttattatattgcagtatgtcacttgtatgccaattttgctaagggttttaattacaacgagatgctagattttgtcaaatgctttttctgcatctattgagatgatcacwtgattttttgtttttaattctgtttatgtggtgtatcacatttattgacttgcatatgttaaaccttccctgcattcctggtataaaacccacttgatcatggtgaattatctttttgatatgctattggattcagttagctagtattttgttaaggattttagcatctatcttcatcagggaaattggtctgtagttctctttatttgttgtgtcctttcctggttctggtattaggatgatactggcttcatcaaatgatttagggggaattccctctttctctgtcttgtggaatagtgtcaataggattggtaccaattcttctttgaatgtgt

SEQ ID NO: 930995 - DNA, 575 bp, Homo sapiens
cacctatcaatccctctccactcaaggcagatggttcttagaccaaaaaaaaatctccttccagcctcacaggcccattctattctgtcgtcatttcataacctcttccatgtaggttacaagctgttagcccacctcttaaaacctctcgtttcctttccatcatgaaaatttatccccaacccgccactcttgactgcctcttggagtgcacagacaatctttgctgacaggacacactccaatactttcaccctgatgaagtcctattctttacttttatactcactcttattctygttcctgttcttatgccaccctctacctctccccagctatctccaccacactatcaatctcactcactctctcctacccgtttctaatccttctttaacaaacaattgctggctttgcatttctctttcctcaaaactcgccaaggccctgacttactcactgctaaaaaaaaagggggactctgtatatttttaaatgaagagtgttgtttttacctaaatcagtctggcctggtaaacagtatcaaaaaactcaaggatagagcccaaaaactt

SEQ ID NO: 930996 - DNA, 783 bp, Homo sapiens
ggaaaatttaaaaatctcaatgcatgcctatatcaaagtatctcatgtaccccataaatatatatacttatgatgtacccacaaaaattgaaaataaaaaaaatctcaggaaccccaaactccttacatcaaaaggaaaattaagcctggtgactgagtggcacaacacaaacacatcatcctttttccaaatgaatagcttttacttcataatcttgtgtcaaagcattatccattarccacaacccctgcataaaggcaaaaagcctcacgctatccctgatgactgtcttcacaaattgttctttgctggccttaagctttcaggaggtatatcctgccataaaaaaaagggcatgtcaattataactttaggtctgcaatataagtctagctcctataactaaagtctgttaaaattcagactgataatgtcaattacaagataatcttcccaagtacagaacaaagacaagctgagattgatcaatcctccacctaccctgagaaatctgcataactgattttcctttactccctctttttttggtaaaacattcaccttatcttatgtaaaatgtagatttacaaggcactaactaaagtctcacaaggatgtaaccattcacctcacaccacctacatgccttccccatttcaaggaaatgtataaatgctaaacctcctgaaaacctctttggagaacacaagaattggcaatctggcactggtggtttcatttcttggtgtaaattacatagcacgcttataaaactacagctg

SEQ ID NO: 930997 - DNA, 783 bp, Homo sapiens
ggaaaatttaaaaatctcaatgcatgcctatatcaaagtatctcatgtaccccataaatatatatacttatgatgtacccacaaaaattgaaaataaaaaaaatctcaggaaccccaaactccttacatcaaaaggaaaattaagcctggtgactgagtggcacaacacaaacacatcatcctttttccaaatgaatagcttttacttcataatcttgtgtcaaagcattatccattaaccacaacccctgcakaaaggcaaaaagcctcacgctatccctgatgactgtcttcacaaattgttctttgctggccttaagctttcaggaggtatatcctgccataaaaaaaagggcatgtcaattataactttaggtctgcaatataagtctagctcctataactaaagtctgttaaaattcagactgataatgtcaattacaagataatcttcccaagtacagaacaaagacaagctgagattgatcaatcctccacctaccctgagaaatctgcataactgattttcctttactccctctttttttggtaaaacattcaccttatcttatgtaaaatgtagatttacaaggcactaactaaagtctcacaaggatgtaaccattcacctcacaccacctacatgccttccccatttcaaggaaatgtataaatgctaaacctcctgaaaacctctttggagaacacaagaattggcaatctggcactggtggtttcatttcttggtgtaaattacatagcacgcttataaaactacagctg

SEQ ID NO: 930998 - DNA, 638 bp, Homo sapiens
cgggcggagacgctcctcacttcccagacggggtggctgccgggcggaggggctcctcacttctcagacggggcggctgccgggcggaggggctcctcacttctcagacggggcggctgccgggcggaggggctcctcacttctcagackgggcggttgccgggcagagggtctcctcccttctcagatggggcggctgggcagagacgctcctcacctcccagacggggtcgcggctgggaagaggcgctcctcacatcccagacggggcggcagggcagaggcgctccccacatctcagacgatgggcggccgggcagagacgctcctcacttcctagatgggatggcggccgggaagaggcgctcctcacttcctagatgggatggcggccgggcagagacgctcctcactttccagactgggcagccaggcagaggggctcctcacatcccagacgatgggtggccaggcagagacgctcctcacttcctagacggggtggcagccgggcagaggctgcactctgggcactttgggaggccaaggcaggcggctgggaggtggaggttgtagcgagccgagatcacgccactgcactccagcctgggcaccattgagcactgagtgaaccagac

SEQ ID NO: 930999 - DNA, 553 bp, Homo sapiens
ggcttcaactttgcttggatttttaaatattttccttgcatatgtaaatagaatgtggtgagttttagttcaaaattctctgttgagaataataaatgcatgaaataccttaaagctctgtgaagacttgtaacatggcagcaatcaaatggcttataaaaggatactttgaatgtggataaattgaattcagtcaatatttcagtggaatttttggcyaattgcttgaattgaattgaattatactactcaattgaataatattttctcctcctccttctccccttccttcttccttctcttcctcctcctcctcttcttcttcttcttccccttctcctcctcttcctcctcctcccccttcttctacttccttctcttcctcctcctcctcttcttcttcttcctcttctcctcctcttcctcctcctccctcttcctcttcttcttcttcttctcctcctccttcttcttctccccttactcctccgcctcctctgtcctcttcttcttcctcttcctttttcttctttctcttctccccccctcctgc

SEQ ID NO: 931000 - DNA, 650 bp, Homo sapiens
tggaacatgcctgtactcccagctacttgggaggctgaggtgggaggaccacctgagcccaagaggtcaaggctagagtgagcagtgagttcaccactacactccagcctgagcaagcttaagaccctgtctcaaaaaaaaaaaaatacgctatttaagcatgaggtctcagaaaaatagagattcctgcaaggtatttgataatgtccctcaaattcactagggcaaaaaataagtagctcttatcttgagaatatcatttayagatttagagacaacaccgaggtgcaataaattttctcctagtaatattacgatctgcaaacttgtcaacatttctgtaatatccccttttaggaaaaaacatcctacatggggaggacagataattctctgtccttgaaccaaaggtccttctctggaaaggttgccttttttgacttaaagtccaatcctcagaaagaacacacatgaaatctacctgcttagtgagacaggtccccagaattgagcctgatacacatggggactgggatgtgatagacaggatgtctcactggggcagggaaagaatcacacatctgggttatgctggagagattatgtcaccaatttttaatatgatagaactaacattgatatcagagatc

SEQ ID NO: 931001 - DNA, 702 bp, Homo sapiens
gaatatatgatttcattctcgactgccctgtaaggtttctgctaatataactgctattagtctgataggataacttatgtatgactttacactttgctattgctgtttttagagttctctgtttgtcttttgacaatttgactgtaatgtacaagttttctaagttgaatccacaagagagtctttgagtttcttgtatctggatgtctgtatctctcccaacctacttgggaatctttgagtttcttgcatctggatgtccatatttctcccaagatttgggaatttttcagctattgttttattaaacaggtttttttttttgctttttaataacctttccttttgtaattctcataatgtgaatatttgttcacttaatggtattccatatgtcctgaaggctttcttttcattctcttttttcttttgtctgactgggttatttcaaaagacctgtttttatgttcrgaagttcttttttctgcttgatctagtttattgtcaaagctctcaattgtatttttaaatttcattcactgaatttttcagctacactctttctgtttggttctttttttttaaatgatgtctacgtctgctgaatttctagttcaggctataaagtgtttttctgattttgttgcattgcctgcattctcttgtatcttgctgagtttccttaagtttattattttgaat

SEQ ID NO: 931002 - DNA, 683 bp, Homo sapiens
caaaaatctatagaaaagtaaaattaaaaaaaaatccttaacggaaaaaaagaaagataattttgcagtagagaaacctgacaaacactacctgagccaggcgactaagattaacatcaacaataagtcatatggatagtatgtaccttagatatgatgtcatgagaatagcactttacatctgagatttgcctccccaaaacacaatatcccgatctaatcatgaaaaaaatagagacaaatcccaactgagggacattctacaaaatatctgaccaccactgctcaaactgtcaaggtcatcaaaaacaaggaaagcctgagaaaccatcacagcccagagatgcctaaggagacatggtgactaaacgtaatatggtatcctggatggaattttggagcmataaaaggagattaagtaaaactaaggaaagcaaaataatgactttaatgataatgtattagcattctttcattaattataacaaatgcaccatactaaagtaagacttgaaaaataggggcaactgagtgtgaatatatggaactctgcactatcatctcaatttttctataaatctaaaagtgttctgaataaaatatttgcttcaaaaaatgcaatgtagcatctttatctatgcaaattttggtgaactaatccaacacccctggaaattacaatt

SEQ ID NO: 931003 - DNA, 782 bp, Homo sapiens
gaggtgcttgctaaaggcaaagggaatatagaatgggaagtggaggaaggtgattataaatacctgctatggctgcatggcctgttatggaactgaggactgtagttgccatgaaaatttcacctgtgtgtgtgtgtgtgtgtatgtgtgtgcgtgtgtgtgtgtgtgtgtrtatatatacacatatatatatgtgttccctctctcacctccctattatgtaacataagatgtattaacttcctatcattgtatttaagtttcaagatagcaagaagagtaaacacctctcaagaactttacctcctcttctgggaaagtgtgaatgcattgttggttgtacaaaggacagttatatcacattagttggaatggccttgttattgtgtttatttttagattaagcatggtttaaggagaggcatatgggtgccaagttgtcaaggggtggacccatggtggttaattttgtgtgtcaactttactgggccatgagtttcccagatcatctgactttcctcaagatagctttacatggttgagctctctactgctcgtttgaacaaagagaagcagaactcacttggctctgaatgtccttctggaagttggtctgcttactcagatctctcgtgtaagcaggagttactatgctcaaagcaatataaattataaaatggttttcacatatgtcacctaattgaaaccatgaaaggacagtgcatggagtgacaattgtctcagtttcatccctgcaggactgaggtctagagatgagaaat

SEQ ID NO: 931004 - DNA, 579 bp, Homo sapiens
tggggacgcagaaagagtggcagcggccaggctgcccagcttcgtgaaggctctcggtgcgccgcggcccgcaggcacctggcacgcgccctccctgccgccaggatgcccaagaggaaggtcatctccaccgaaggggccgccaaggaagagcccaagaggacatcggcgagtttgtcagctaaacctcctgcaaaagtggaagcrcagccaaaaaaggcagcagcgaaggataaatcttcagacaaaaaaacgcaaacaaaagggaaaaggggagcaaagggaaaacaggcagaagtggctaaccaagaaactaaagaagatttacctgcagaaaatggtgaaacgaaaactgaggagagtccagcctccctgatgaagcaggagagaaagaagccaagtctgattaataccctacactacgtcttctcagtggtccctgtcccccttcttgtacaatccagaggaatatttttatcaactattttgtaaatgcaagcttttgagtagctctagaaacatttttaagaaggagagaatcccacctcatcccattttttaagtgtaaatgcttttttt

SEQ ID NO: 931005 - DNA, 549 bp, Homo sapiens
cttactatcagaagaacagcatggcggtaaccgccccccataattcaataacctcccactgctgtggggattatgggaactacaagatgagatttttgcgtgaggacacagccaaaccatatcattccacccctgccccctcccaaatctcatgtcctcacatttcaaaacataatcatgcctttccaacagtccccctaagtcttagttcattgcaggatgaacccaaaagtccaggtccaaagtctaatctgagacaaggcaagtccctttcacctatragcctgtaaaatcaaaagcaagttagttacttcctagatacaaaggtggtacaggaattgcctaaatacactcattccaaataggagaaattggccaaaataaaggggctccaggccccatgcaagtccaaaatccaatagggtagtcatttaaccttaaagttccaaaatgctctcctttgactccatgtctcacatccacattacactgatgcaagaggtgggttcccatgaccttggacagcttcgcccctgtggctttgcagtg

SEQ ID NO: 931006 - DNA, 700 bp, Homo sapiens
aatattactctagatgctatgctgagactagactgtagggggttaacgatggaggcagagacacgtaaggaggctgttgcagtaatctaggtgagaggtgctggtggcttagaccaggactgtagctgtggagattccggatgtattttgaaggcaaagctaacaggatattttgacagatttgctgtggatgtgaagaaaagagagggcatcaaggataatgtcatggtttttggcctgagcacctggaaggatatgtatgtatacacatatggaagacactggagaagtaaatttggggagaagatgaggagttcagttttkgtcatgttcaatttgacatttattagatatccaagggaaatgtcaaattggtaattgtatatatgttttctggagttcagagaagaggttaagattggaaaattttaatttaagggtttcaacatataaattaattttcaaccatgagggagatcaaaggaatgagtttagatagagaagaagaccaaggacttagcctgtgctcaataataattggttaggataagagaacgaaccagcaaagagactgagaaggcacaggcacagagtgcaggagaacagttgatgtcctggaaatcaaatgaagaacatgttttaagagaaagggagctgggcatgatggctcatgcctgtaatcccaacactgtgggaggct

SEQ ID NO: 931007 - DNA, 502 bp, Homo sapiens
ttcctaccaatgggctccatgtaggtgtgtctgttagtctgtttttgttgctgtaacaaaataccttagactgggtcatttataaagaatagaaatttatttctcacagctttgtaggctagaaagtgcaagatcagagccctggtaggtttggtatctagtgaaggcttctccccgcttccaagatggtgccttgttgctgggtcctcacatggcagaagggcaaaaaggaggcctagctagttctcttgagcccttttatagaggcactaatcctattcatgagggccctgccctcatgaactaatcacctcctaaaagccccacctcttaatactgtgagaggaaaataaaaacttgggatyccaattcgctctgccacaaggaaaagttaagccgaaagctgagtcatgcaagaagctccctttccttttgctcctgagcagatacctaccgataaaagttaagtatttccacaggtagctactttatattcccctta

SEQ ID NO: 931008 - DNA, 604 bp, Homo sapiens
caatccaattcatttcagacactatctgaaaacagtgtgagattccacaggctgagggctcagtcccagaagactgcccctacttcagacagcagtcacacaagtcagggcctccagaacttctcaacggcgggcttcaagctgcagttcccaagacctcctctttaggcttcattaatttgctagaatggctcacaaaacacctacttaggtttactggtttatttaaaggatattaccaagcatacagatgaagtgrtgcacagggtgagggatagagagggggcgcagagctctatgccctccccaggcataccaccctccagaaacttccacctgttagactatccagaagttctcttgggcgttttgtagagatttcattagagagatgattgaagcatggccaacctcacagtaattgactggacagagagtgtgatctaatactaagactgagtgcagacacccagcaaggcccatccagattctccctggcctctgtgtgtggtattccttcctactgggtaaggggcaggaccccctctgaaacaatcagacgagataggtcagagaatttctttacaaccagctctaagacaga

SEQ ID NO: 931009 - DNA, 596 bp, Homo sapiens
ttgcaccacagcactccagcctggcaacagagcgagactacatctcacacacacaaaaaaataaataaataaaaagaaccagtgtactgtcttcaatcttttgctatccctaaagtggcaaacatgaagggcttgcattaaaatgatggcatcctcaactgaagggagcctggatccttgagttactggaaagagaagagccctagcaacctgcatcacactttatgagcaagaaatcagttattattgtgttcagccactaagatgttaagggtttatttgttgttgcagcctagcctgcaaacaacctcaaaacctgtytaaaatagggtttgagaagcccaaaagtgtgctgaataggatcttctagtcagctaaattgtatgcatatgtgcatgcctgtgtgcacatgtagttcttaactatcaatatgctctagcaagtggtaatctatttgatgatagggccacaagtgctaacatgcaaaagttagctttcctttccactcccatctctcctcaaaaaaaaaaaaaaaaaaaaaagagagagagagaagtggtagatggcttagatctatttattcattggtttaaaag

SEQ ID NO: 931010 - DNA, 543 bp, Homo sapiens
cctctgctgggtacccagctcccggccggccccgagctcagaaggcgaagggagacccaaggccaggctggggcccacgaagccgggctcctctaaggggtgcacccagctcccaaggcccccgggcggacttcgagcagtccccgcgcgggggccccagggtttctcgctgggcccatcatgccctctgggctaggtggccaggactgtgctctcttgcctagggaccgggtgagctygaactgtccccatggggcggctgcggctcctgcaggctgtgccgtcctgggctccttttccgacattgccacctgccccatttcctttccaaagcagaggtgtaggcgcctgcccactatcagtccctctttgttgcaagaggctctgaagggccctcccgcctccagaccattcattcccgtctgactctgcagccagacagatctttccagaacattaatctgattctgtcatgccctggcctgacctccttcaaagtctgccaattgccaagagggtcattacaaaactcagcatgaaata

SEQ ID NO: 931011 - DNA, 637 bp, Homo sapiens
taataggagaaaacacgtataaatgtattaacattcatagaagagaatcacagagaaattgtcctaccaggcaatgaggtacagatggttatgttccctattcttaggggaaacagaaatagggaagcgtgaatgactttaggtgggggtaataaatgatttttattggaattcaatgagcttgaagaacatacaattgcctgggacaaagtcttttggrcccacagagcagacaatggtttgtggcaaaagtctgtccaggtttgttgacagactgcagtcttcctgtgatatgagttcagttaatgaaaactcaggtgtggaaccaaacggtaattgtattctgctttggtaggtccagatttcaggcagataaaaatctttagagaacattataatcctgtgctttgggagagacagagcactgaaaaacaggaggtaggggatcacagagaacttgaggcttcttcttcagtttagcatgtcaaaacaccatgttttggggtatccgtttctgtgccccaacacttgaatacctactgtttccctcaggatatgcagtaatcttggctgcataacaatagaacctcagtggattaaaatgtaggtaggatcactcatttaagctacatgtcca

SEQ ID NO: 931012 - DNA, 742 bp, Homo sapiens
gcacccgactcttgacctcactggatttcccagctaccttactgtaattctacacttgaaaactacaaaaattcattttgaatgtgctcaagatttttttcccactccagattgattcctaacgttctccaacttctttctggcactgagcatgctgtcatttactgtatcaaccaagttcctttctgtttggcttcagttcgggtttatgcaatgggagaygtattcgtttgctatcctgccataagagagtacaacagattgggtggcttaaataataaaagtttattttcttacaattttggaggctagaaatctgagatcaagttgttggcagggttgatgtttttctgaggcctgtctccttgccttgtcatgggatatcttctgtcttacatggtcttcctctgtgtgtgcctgtgtcctaatctcccctacttataagggcaccagccatattggattagggcccaccctaatggcctcatttccagttacttctttaaagactctatctccaaatacaagtactgagggttaggacctcagcatatgaattttgggggacacaagttagcacatcacaggaggtacatgtaaaagatcagagagacatgttgggtaattttccccttggctatgtattgtcttcccttagctgactttctctaactaagagcattcctcttgctgggtggccactctcctacagctactttttccaactaatggattctggtaa

SEQ ID NO: 931013 - DNA, 630 bp, Homo sapiens
tgcttttccaagtttcatatgagtagaatcatacaacatgtagtttttttgtgtgtctttcttctttttttttgagataaaatctcattctgtcatccaggatagagtgcagtggcacgatcatggctcattgcagcctcgacctccctgggctcaggtgatcctcctatcttagcctcctgagtagctgggactacaggtgtgtgccaccatgcccaggtacctttttttgcatttttttgtagagatggagtttcaccatgttgctcaggstgatttcgaattcctgggctcaaggtatctgcctgcctcagcctcccaaagtgctggaattacaggcgtgagccaccatgcctggcccatatctttccttttcactcagtatactgtgtttgaggttcatccaggctgtaatgtgtgtcagtagttcttttcttttaattgctcagtagtatttcattgtattgatatgccacaatttgttcattcatcagttgatggacatttgagttgttttaagtttttggatgttacagattaagctgctgtgaacatatgtgtacaagtctttgtatttattgtgggtgagtacccaggaatggaatggctggtggcatatgtttgattttt

SEQ ID NO: 931014 - DNA, 542 bp, Homo sapiens; identical to SEQ ID NO: 920014

SEQ ID NO: 931015 - DNA, 631 bp, Homo sapiens
ggttttttcctccaaatcattctctatcaccaactccaagacatacacacattcttttcttacttgaatcagcatttttctttttttttttttaatgctatccctcccccagccccccaccccccaacaggccccagtgatcaatgttccctgccctgtgtccaaatgatctcattgttcaattcccacctatgagtgagaacatgcggtgttttgttttctgcccttgtgatagtttgctgagaatgatggtttccagcttcatccatgtccctgcaaaggacatgaactcatccttttttatagctgcatagtattccatggtatatatgtgccacattttcttaatccagtctatcattgatggacatttgggttggttccaartctttgctattgagagcatttttctaattctatataccaaagcttcttagccacaaaaacaggaacatgtcaactcatcttgcatggcagcaattttcctgactttgggcctaaactggataatgcaaatcatatatacagacttaactgtgtagcacccagtctaaaaatatttatagttatacaaaagagagaagtaaataaaaaccaaagtcatggtcacatctaaccagaacaaaactaa

SEQ ID NO: 931016 - DNA, 463 bp, Homo sapiens
gcctttttcttctcatgggaacactggccatactgaattagggtcccaccttaagggcctcattgaatttaattacatcctaagaggccccatctccaaatatagtcacattaggggttagagcttcaacatatgaattttggtgggaggcagggttcacacttcagtccataacacatctcaytattgtaaatccacaaaggtggagtactttgaacaaaacacatagaattaggggagccccagacgaattaatctctaagaataaaagtaggaagagttggcatattatatatacatcccatatctactcctacatggggacaatacctgtgagcaagaatatttgttgtattgtttgtagaaaaaaaatgtttgaaacaacgtaatgacccaacaaaggaagacttagttaagtttggcacacgtgtgaaaagaaataaattatagtaacaaatgagaa

SEQ ID NO: 931017 - DNA, 508 bp, Homo sapiens
agaatatacacaaaagaaagtgagaaagaaatttaagtgtcataaacaaaaactcaagataaaagtagacagcaatgcagaatgtaaagatcaaaatggttataaggaatataggaaacacctagcaaaatggcagatataaggccatatttatcagtaattactttaaatgtattacactcttcaatcaaaagacagagattagaagaatagcttaaaaaaaatacttagttggttgtggtggcayacacctgtaatcccagctacttgggaggctggaggctggagaatcatttgaacccaggaagtggagattgcagtgagctgagataatgacactgcactccagcctgggtgacagagtgagaatccatctcaaaaaaaaaaaaaaaaaaaagaaaagaaaaaagaaagaaaaaaaaatatggcaccaaaaagcacaagcaacaaagaaaaaataagtaactttgactacattaaaattaaaaaaaaaaacttaaaagaaaca

SEQ ID NO: 931018 - DNA, 588 bp, Homo sapiens
agcactaggggataccctaagcccagggaaactataactcttgcaagctcctggatatgcagccttggtgaacttgggagcaataaaaaattccctgggttaccagtgaaggtctcttactctctttgctcttttcctccttccagaaagagtctctgtgtttggctgcctgaagatcgggtaggggtgacatgaataatcctatggccaccacagctagcactgcactgtgtctcacctcatgcctatgaccttccggaccagcataacagtggggcttgcctaagacctgtggcmactactgcctggctgcctctgacatttattcaaggcccaaggtcacttaagtcagtctgtagtgaatcctacatggattgaccatcacatcacagaagtggattctttcatggcccaggttgggtataaaagcatcatccaagagaataggcctgaaactgggggcttccagaatctgtctggtgttttgttttcctgtgggtgagctggtacacaaagtacaagacaaaggcctctgtactcttccttctcctttccccaagcagaaagaatctgtcctgggtctggatt

SEQ ID NO: 931019 - DNA, 612 bp, Homo sapiens
aaatccctagagtctaaaatatctaacatctaaaattccaaaaatcgtaatcctgaaagatcaaaatcctgaaattggaaatcttagaaagctgaattctagggaaggaattaatgcgttttgggttgtatttaggacagytgagtcatgttagttgcatcatgttatgcagaactattaccttctcattgtctttatttgcatttggtggaaaattcaggtgagtggattggccacattataatgcagtgatgaaaacttcagtttaaaaatgcatcattggctgggcacagcggttcatgcctgtaatcccaacactttgggaggccaaggcgggaggattgcttgagcccaggagttcgagtcctgggcaacatggcgagacctcaactctacaaaaaataaaggaaattagccaggtgtggtggcatatgcctgtagtcctacactcaggaggatgaggtgggaggatcacttgagactgggaagttgaggttgcactgaactgtgatcacatcactgcactccagcgtgtgtgacagagtgagaccctgtctcaaaaaaaatgaaaaataaaaataaaaatgcatcctttgtctgcattggcagccc

SEQ ID NO: 931020 - DNA, 620 bp, Homo sapiens
gtgatccactaatatcctgcatcagaattatctatgatgcttgttaaaaaaaaaaccccagattcccgtattccatttgacactgattaaatcagaatcactgggatttcctaaggggagtcttctaagtgccaatttgagaaccacttgccaggctattgaaattgcttaatagagatgaaacacaagccacctggattgcartggatgaaatatggccagggctgctattaaaggatgatttcaaagatgagagaggacttgttgggcaagaatattgactactctctgtggctgctgtgtctgacattaccacatttagaaatctgagagtccttaggatatacctttgaactttttttttttttgagacagagtctggctctgtcacccaggctagagtgtagtggcgtaatatccactcactgcaaactctgcctccggggttcaaacgattcttatgccttagcctcccaagtagctgagattacaggtgcatgccactgcacccgggtaatttttgtatttttagtggagatggggttttgccatgttggccaggctggtgtcaaactcctgggatcaagtgatatgcctgcctcagcctcccaaagtgctgg

SEQ ID NO: 931021 - DNA, 845 bp, Homo sapiens
aactaaaattataaaattatgagtttagagaagaacataaataacctgatagagctaaaaaatacaccacaagaacttcatgaagcatacataagtatcaatagctgaattaagcatgagaaaggatatcagagattgaagatcaacttaacgaaataaagtgtgaagacagaattagagaaaaaagaatgaaaaggaacaaacaaaggctccaagaaatgtgggactttctgaaaagaccaaacctacacttgattggtgtacctgaaagggacagggagaatggagccaagttggaaagcactctgcaggatattatccaggagaacttccccaacctagcaagagaggccaacattgaaattcaggaaatacagagaacacaacaaagatactcctcaagaacagcaatcacaagacaaataatcatcagattaaccaaggttgaaacgaaggaaaaaatgttaaggacagccagagagaaaggtcgagttacccacaaaaggaagcccatcagactaacggtggatctctccartctctctgcagaaaccctaaaagccagaagagagtgggggccaatattcaacattcttaaagaaaagaattttcaacccagaatttcacatccaaccaaactaagcttcataagtgaaggagaaataaaatcctttacagacaagcaaatgctgagggattttgtcaccaccaggcctgccttacaagagctcaagaaggaagcactaaatatagaaaggaaaaacaggtaacagccactacaaaaacgtaccaaaatgtaaagaccatcaaaactatgaggaaattgcattgactaatgcacaaaa

SEQ ID NO: 931022 - DNA, 556 bp, Homo sapiens
taccagaggtacaaagaggagctggtaccattccttctgcaactatttcaaacaatagaaaaagagggactccttcctaactcattttatgaggccagcgtcatcctgataccaaaacctagcagagacataacgaaaaaagaaaatttcaggccaatatccctgatgaacatcgatgtgaaaatcctcaataaaatactggcaaaccaaatccagcagcacatcaaaaagcttatccaccacaatcaagttggctttatatctgggatgcaagkctggttcaacatatgcaaatcaatacacataatacatcacatatacagtatcaatgacaaaaagcacatgattatctcaatagatgcagaaaagtactttgataatattcaacaccccttcatgctaaaaactctccataaactaggtattgatggaatatatctcaaaataataagagctatttatgacaaacccacagccaatatcatactgaatgggcaaaagctggcagcattccctttgaaaactggcacaagacaaggatgtcctctctcaccac

SEQ ID NO: 931023 - DNA, 615 bp, Homo sapiens
ctcttgtatggcaggtctggtggtgacaaaatctctcagcatttgcttgtctgtataggattttatttctccttcatttgtgaagcatagtttggctggatatgaaattctgggttgaaatttcttttctttaagaatgttgaacattggcccccactctcttctgccttgtagcatttctgccaagagatccgctgttagtgtcttgggcttccctttgtggttaaccgtcctttctctctggctgccyttaacatttccttcatttcaaccttggtgaatctgacaattatgtgtcttggggttactcttcttgaggaggtaacatctttgtggtgttctctgtatttcctgaatttgaatgttggcatgccttctaggttaaggaagttctggataatatcctgaagagtgttttccaacttggttccattctccctgtcactttcaggtacaccaatcaaacatagatttggtcttttcacatagtcccatattttctggaggctttggatgtttctttttactcttttttctctaaacttctcctctccctttatttcattaatttgatcttcaatcactgataccctttcttcccattgattgaactgg

SEQ ID NO: 931024 - DNA, 721 bp, Homo sapiens
tattaacaaaatagatagaccactagccagactaataaagaataaaagagagaagaatcaaatagacaaaataaaaagtgataaagaggatatcaccactgatctcacagaaatacgaactaccatcagagagtactataaacacctctatgcaaataaactagaaaatctagaagaaatggataaattcctggacacatacaccctcccaagactaaaccaggaagaaggttacctgaataggcaaggaacaagttctaaaattcaggcagtaataaatagcctaccagccaaaaaaagcccaggaccagacggattcacagccaaattccaccagaggtacaaagagaagctggtaccattccttctgaaactctttcaaacaatagaaaaagaaggactcctccctaactcrttttatgaggccagcatcatcctgataccaaaacctggtggagacacaacaaaaaaaagagaatttcaggccaatattcctgatgaatatcgatgcaaaaatcctcaataaaatactggcaaaccaaatgcagcagcccatcaaaaagcttatccatgatcaagttggcttcatccctgggatgcaaggctgattcaacatacgcaaatcaataaacgtaatccatcacataaacagaaccaatgacaaaaaccacctgattatccccagagaagcagaaaaggccttcaataaaattcaatgccc

SEQ ID NO: 931025 - DNA, 596 bp, Homo sapiens
agcaagagctcacttattaccaaggagatagcccaagccattcgtgagggatcgacccccgtgatccaaacacttcccaccaggccccacctctaacattggggattacgtttcaaaatgagatttcagtaaggaaagatatccaaataatatcattccaccttgttccctcccaaatctcatgtctttctcacactgcaaaacgcaatcataygttcttaatagtcccctaaagtcttaactcattccaacattaactgagatctcccaactcctaagttctatctgagactcaagccaagtttctttcacctataagcctgtaaaatcaaacacaggttattaacttccaagatacaatggtgttataggcattgggtaaacattcctgttccaaaagggagaaattggctaaaagaaaggggctacaggcctcacacaaaactgaaacacagcagtcactaaacattaaagctccaaaataatcttctttaactctatgtcccacgtccagggcaactgataagagaagtgggttccaaagacctttggcaactccacccctgtggctttgcagggttcagcacccaaggcta

SEQ ID NO: 931026 - DNA, 460 bp, Homo sapiens
caggagatcgagaacagcctggccaacattgtgaaaccccatctctactaaaaatacaaaaattagccaggtatggtggcatgtgctagcgtgtgcctgtaatcccagctacccaggagactgaggaaagagaagccctggaaccctggaggcggaggctacagtgagccgagattgtgccactgcactccagcctgrgtgacagaggaaaaccccatctcaaaaaacaaaacaaaacaaaactgcacaacaaaataatagtggtatcaaaaataataatagtatcaacaacaacaacaacaatagcaaaataacgaatatctgtatagagctttaacatcagattgagaggagaaggatggcagggaaaaatgaaggaagtaaaggggaagaaaagaaagaaagagatggagagagggaaattatttttttaagtcttaattttatacgagataacaat

SEQ ID NO: 931027 - DNA, 747 bp, Homo sapiens
agggggaaaacttagcattccttggagacctgaagggatgcagtgagcgtaaggattttcaagagcttatcaatcagtcagcccttgttcatccccgagcagatgtgtggtggtattgtggtggacttttagtggacactctgccaaataactggggtgacacttgtgctytagtccaattggctgtccctttcaccctggcatttcatcaaccagaggaaggaaaaatgaagcatcgtaaagctagagaagccccttatgggtctttccactctcacgtctatttagacacaattagagtcccatggggaataccagatcaatttaaagcccaaaatcaaatagctgcaggatttgagtcaatatttcagtgggtgacaattaataaaaatgtagattgaataaaccaaatctactacaaccaacagcgatttattaactacactagagatgctgttaaagaaatagctgtaaaattaggtgctactagccagagggcgtgcgaaaataggatagccttagacatgatatcagcagaaagaggaggagtttgcatcacggttaaaactcaatgttggcaccttcatcccaaacaacaccgcccctaatggaagtataacaaaagcattgcaaggtctgactgctctatccaatgagttagccagcaactcaggggtaaatgacccctttacaggatggctagaaaagtagtttggtaaatggaaaggaataatagcctcaattctt

SEQ ID NO: 931028 - DNA, 589 bp, Homo sapiens
cagggaaagaacagtagagaggaaagagagaaagagaggggaaagagaaagagagagcagaaagaaagagagagacagaaagagaggcggagagagaggaagagacagaaagacaaagagggagtcaaagagagagataggcagagagagagaggaagagacagagagacaaagagggggtcaaagaaagagaaagagacagaaagtcaaagagagaaagagagaagtagtaaagagaaaacagtgtaacctattcctttaaaagccagggtaaatttaaaacctgtaattgataattgaaggtcttctccatgagcttataacaccccaatactaccttgttgtcartataaacaagggcatagccggaaagcactgaggccttcctatcaaaaatcattaacccagtaacttgtggatggcccaaatgcatttaatctgtagctgcaactgctttgctagcagaagaaagtagaaaaatagcttttagaggaaacctcattgtgagcacaactccccagttcagaaccatcctaagtcaaaaaaaaaaaaaaaaaaaaaagcaaaaatgtagcttactaactcaaaa

SEQ ID NO: 931029 - DNA, 605 bp, Homo sapiens
aacccacttgatcatggtggagtatcctttttttttttttttttttttgagacagagtctcgctctgttgcccaggctggagtgcagtggcacaatctcggctcactgcaagctctgccttccatgttcacgccattctcctgtgtcagcctcctaagtagctgggactacaggcacctgccaccaygcccagctaatttttttgtatttttagtagagacagtgtttcaccatgttagccaggatggtctggatctcctgacctcgtgatctgcccgccttggcctcccaaagtgctgggattacagacatgagccaccgcacccggccatggattatctttttgatatgctgttgtattccgttagctactattttgttgaggatttttgcatctatgttcatgagggatattgggctgtagttttctttttttatgtcctttcctggttttggtcttaggatgatactggcttcatagaatgatttaaggaggattccctccttctctatcttttggaataatgtcaataggattgttaccagttctttgaatgtctgatagaattcagctgtgaatccatctagtcctggattcttttttt

SEQ ID NO: 931030 - DNA, 617 bp, Homo sapiens
actccccattcctctctcctgctagcccctagcagccactattctactttttgtctctatgaatttgactaccctaggtaccctatataagtggaatcatacatttgtcctttgtgactggcttattttactcagcataatgtcgtcaaggtatatccatgcttgcagcgtgtgtattactttcccttttaaggctaaataacattccattgtaggtataaactgctattcattcatcatacacagatttttgggttactttcatcttttggctattgtgaatgctgctgctataaacatgggtgtatagtatttcttcaaatctgtgctttcrcttccttttggtatatatttagatgtggaattgctggatcatatagtagtttcatgtttcattttttgaggaatcaccaagccacttcctacagcacctgcaccattttactttcccacctgccatgcacaaggattctcatttctccccatctttgctaatgcttaatttctatttttttaaataataatgttgtagtaaatataaagtggtatttcactgtggatttgatttgcattttcctaatgattggtgatgctgagcttcttttcatgtgcttgtg

SEQ ID NO: 931031 - DNA, 590 bp, Homo sapiens
aggatatcgagaccatcctggctaacacagtgaaaccccgtctctactaaaaatacaaaaaaaattagccgggcggggtggcgggagcccgtagtcccagctacctgggaagctgaggcaggagaatggcatgaacccaggaagcggagcttgcaatgagctgagatcgygccgctgcactccagcctgggcgacaaagtgagactctgtctcaaaaataataataataataataataaagaggtgaataagttgaataaatgatgcagagttaatgcaaaccttatacagtggctccatgagaaatttccctaaaactagtttctcctctctctttttctttttctccctgtgtcattctttttctcttcctctctctctcttctccctctttctctcactttttcattctttttctgtctctcccatttctttttctctttctctttctctctccctccctctttctctctctgtcattctttctctcttcctctctcttccccctcagtgtctctctctctctctctctttctctctatctctccgtcttccttcttcccaatccacttcccaacccctcccctcac

SEQ ID NO: 931032 - DNA, 592 bp, Homo sapiens
cccatctctctggttgctgcttctcagtatcttttgagggctcatcctctttgctgtggtttaaatgtctgtccctgcagaactcatgttgaaacttaagcccctggccatgtgtggtggctcatgcctgtaatcccagtacttcaggaggttggggcagatggattgtttgaggccaggaattcgagactaacttggccaacatggcacatgtaaagtccgggtctacaaaaaaatacaaaaattagccggatgtgatgatgtgcacctgtagtcccagctacttgggaggctgaggcaggagaattgcttgaagccaggaggtagaggttgcagtgagcygagattgtgccactgcactccagcctgggcgacagagtgagactccgtctcaaaaaaaaaaaaaaaaaaaaatttaaaaataaaaataaaataagaaatttaatccctagtgtaatagtataaagaggtggggcttttaagaggtgattgggtcatgaagactttgccttcatgaatgaacgaacccattcatggattaatagataagtgagttaatagattagtgggttatcatgagaatgggtctgtt

SEQ ID NO: 931033 - DNA, 592 bp, Homo sapiens
cccatctctctggttgctgcttctcagtatcttttgagggctcatcctctttgctgtggtttaaatgtctgtccctgcagaactcatgttgaaacttaagcccctggccatgtgtggtggctcatgcctgtaatcccagtacttcaggaggttggggcagatggattgtttgaggccaggaattcgagactaacttggccaacatggcacatgtaaagtccgggtctacaaaaaaatacaaaaattagccggatgtgatgatgtgcacctgtagtcccagctacttgggaggctgaggcaggagaattgcttgaagccaggaggtagaggttgcagtgagctgagattgygccactgcactccagcctgggcgacagagtgagactccgtctcaaaaaaaaaaaaaaaaaaaaatttaaaaataaaaataaaataagaaatttaatccctagtgtaatagtataaagaggtggggcttttaagaggtgattgggtcatgaagactttgccttcatgaatgaacgaacccattcatggattaatagataagtgagttaatagattagtgggttatcatgagaatgggtctgtt

SEQ ID NO: 931034 - DNA, 571 bp, Homo sapiens
ctactttctgcctctatgaatttgactactctaggtatttcacataagtggaatcatacagtatttgtctttttgtttctagcctagttcacttagcaaaatgccctcaagttttatccatgttgtagcatgtgtcacatttccttcctttttaaggctgaataatacattgttgtctttcaatgcttattaattccattgtgtgcgcatgtgtgtgtgcaaatgtgtgtgtgcttctgtgtgtatttacatatatttatatatacataccacatttttgtttatccgttcaatcattgatgaacacttggattgcttccaccctttggctattgtgaataatactgcaatgaacaaagatatacaaatatatcttcaagaccctgctttcaatttttggggggtggtatatgtccagtgtggaattgttggattatacagtggttctatttttaactttttttctttttttattatactttaagtcctggaatacatgtgcagaatgtacaggtttgttacataggtatacacrtgacatggtggtttgctgcacccgtcaacccatcat

SEQ ID NO: 931035 - DNA, 612 bp, Homo sapiens
cttattctaaaatcgaccacataattggaagtaaaacactcctcagtaaatgcaaaagaacagaaatcataacaaacagtctctcagaccacagtgcaatcaaattagaactcaggattaagaaactcactcaaaattgcacaactacatggaaactgaacaacctgctcctgaatgactactgggtaaataatgaaattaaggcacaaataaataagttatttgaaaccaatgagaacaaaggcacaatgtaccagaatccctgggacacagctaaagcagtgtgtagagggaaatgtatagcactaaatgcccatcggagaaagcaggaaagatctaaaatcarcaccttaacatcacaactagaagaactagagaagcaagagcaaacaaattcaaaagctagcagaagacaagaaataactaagatcagagcagaactgaaggagatagagacaagaaaaccccttcaaataaatcaatgaatgcaggaggtggttttttgtaaagattaacaaaatagaccgctagcaagactaataaagaaagaatcaaatagacacaataaaaaactataaagggaatatcaccactgatcccagagaaatacaa

SEQ ID NO: 931036 - DNA, 612 bp, Homo sapiens
cttattctaaaatcgaccacataattggaagtaaaacactcctcagtaaatgcaaaagaacagaaatcataacaaacagtctctcagaccacagtgcaatcaaattagaactcaggattaagaaactcactcaaaattgcacaactacatggaaactgaacaacctgctcctgaatgactactgggtaaataatgaaattaaggcacaaataaataagttatttgaaaccaatgagaacaaaggcacaatgtaccagaatccctgggacacagctaaagcagtgtgtagagggaaatgtatagcactaaatgcccatcggagaaagcaggaaagatctaaaatcaacrccttaacatcacaactagaagaactagagaagcaagagcaaacaaattcaaaagctagcagaagacaagaaataactaagatcagagcagaactgaaggagatagagacaagaaaaccccttcaaataaatcaatgaatgcaggaggtggttttttgtaaagattaacaaaatagaccgctagcaagactaataaagaaagaatcaaatagacacaataaaaaactataaagggaatatcaccactgatcccagagaaatacaa

SEQ ID NO: 931037 - DNA, 650 bp, Homo sapiens
gttgccatattatgttctttaaaatgtccaatttttaacaaaaaattacaagacatgcaaacaaactataggccatacatggtggtgtgggggtggcagggtaggaacatggaaacagtcaataaaaactgtccctaaggaagccctgacattgaacctactagacaaagactttaaattagctattttraatatattcaaaaaactaaaaaaaaagtgtgagaacaaatggcttgccaaatagagaatatcgagagagattaaaattatttttaaaaaagaaccaaatataaattctggagttgaaaagtacaataatagcagattagagcttgcaggaaaatcagcaaacttgaagacaggtcataagattatctagtctgagagacagaaaggaaaaacaatgaggaagagtgaacagagcctcagagacctgagggacaccatcaagtgtagcagttgacagacaccactggtctccctctctatcctttccctccctccctgatacttctgtcaccctgcaaaaaaaacaaaaaacaaaaaacaaaaaaaacaaaaacaaaaaaaaacactcctgacctaattgcttttaatcaagtttgctcattttcaacacaaccctgaggataagattctatttcagagat

SEQ ID NO: 931038 - DNA, 650 bp, Homo sapiens
gttgccatattatgttctttaaaatgtccaatttttaacaaaaaattacaagacatgcaaacaaactataggccatacatggtggtgtgggggtggcagggtaggaacatggaaacagtcaataaaaactgtccctaaggaagccctgacattgaacctactagacaaagactttaaattagctattttgaatatattcaaaaaactaaaaaaaaagtgtgaraacaaatggcttgccaaatagagaatatcgagagagattaaaattatttttaaaaaagaaccaaatataaattctggagttgaaaagtacaataatagcagattagagcttgcaggaaaatcagcaaacttgaagacaggtcataagattatctagtctgagagacagaaaggaaaaacaatgaggaagagtgaacagagcctcagagacctgagggacaccatcaagtgtagcagttgacagacaccactggtctccctctctatcctttccctccctccctgatacttctgtcaccctgcaaaaaaaacaaaaaacaaaaaacaaaaaaaacaaaaacaaaaaaaaacactcctgacctaattgcttttaatcaagtttgctcattttcaacacaaccctgaggataagattctatttcagagat

SEQ ID NO: 931039 - DNA, 720 bp, Homo sapiens
gcctgtgccgttccttagatttccattcataaggtgtgtgtgtgtgtgtgtgtgtgtgtgtgtgtgtgtgtgtataaaaaaatatatggagtcttgctttgtctcactgcaacctccacctccctgttaaagagattcacgtgcctcagcctcccgagtagctgggattagaggtgcacaccaacacacctggctactttttgtatttttagtagagacagggttttgccatgttggccaggctggtctcaaactcctggcctcaagtgatcctcccgtctcagtttcccaaagtgctgagattacaggtgtgagccaccacacccagcctcatgagataaatattaagaaacaaaggcctaagaaggtgacttgtccaaagtcacctgcctcagtggccctggactccccgaaccttctacagctagtactagaatccagtgttagttctacgccatcaagctacttggtatccaaaatgtcatggaagtagtcacagctctccttcacacagtcatgkgcacctctccctgccttccagtaaccctccaggcttcttctactgctggggaaaatgttcacacattcaaaagtccttagcaaacacagtatagtaggtgcctctaaaaaccacattatctgtctgaggtccaaactcttctccacttacaaagctctgtggtgcccggtgggaggcgtagccctttctgccctttctgc

SEQ ID NO: 931040 - DNA, 444 bp, Homo sapiens
atcttattggagttcccttgtatgtctcaagtcatttttctcttgctgctttcgagattttctctttgttggctttcagcgtttttactgtgatatgtctacttgtggatttctttgtgagtttcttccttgggatttgttgagattcctaggcggtatagattaatggctttgaataaatrtggaaaattttcaggcattatttctttgaatatattttctgcttctttctctttctccccctttctggtactttcattatgtatatgttgtttccttaatggtatttcacatttctctaagtctctattcatatttcttcattcacttttctctctgtctttcagattgcataatctctatcaatctatcttgaaattcactaattctttcttctgccacttcaaatctactgttgtgccactctaacgaattttttatttt

SEQ ID NO: 931041 - DNA, 588 bp, Homo sapiens
acaagtaaatgtccatgttatgaggctcccttggcaaggagcttagcacagcctctaggggctgagggtaatgacagtcagaaagaagctatggccctcagtcccagagtttcaagaaaatgaattctgccatcaacctgagtgagcttggaagtggattcttcaccagttgagtctccagataagagtgcagcccagccgccatcttgagtgcagctttgtgaagccctaaccaggggacccaaccaagatgcacctgtatctgaccacagaaatcgtgaggtaatatatatgtgtktggctttaagccattaagtgtgtggtcatttattgtgcagaaatagatagctaatatagtaactttttaatttatttttttcccacttaaaaaaatggaggcaacaacatacagtaaagtgcacaggtgtgtccaatttggttaatttttatctatgtatacactcatgcagccataactcagatcaagatatgaagatctgcactgccccaggaggctacctcacactcccctcccctgctgctcccaagggccaacaactgtgctgacttctactaccattagtgtat

SEQ ID NO: 931042 - DNA, 722 bp, Homo sapiens
cacgtaccaggctctgggtgtcgctcccgcgtggctctgaccgtggctgtaaccccagagtgacccccgggaggaccccagcccgccccagccccacccaaggccgcagccccctgaccccaggccccggtccctgcggagggaggctggagacccrgcgaggacgccgcctcccgtgacagttctcagaggtgcctgggaactggctccggccccgtccgctgccctcatttcctctgccggcttcctctgcgggggggcggggaggccaaggccgccggtcccgcgggcgcttgttcctctgtgaaaggcagggcaaggcccaggggggcccagacgccaaagccctcctgtcactgtggcctgcggaggggacgggagtctccccaccacggacacgggctcctgggcccctggatctgtgccaccagggacaggaccgcaggccgaggccccacggcaggtgctttgcatcaggctcccacccaggagtggtcgagtgggcctcccgtcagccttgccctggcgtgcacagaggggtcaggtggccctcgagaaaagcctaccccggaagaaccccgtgagctggagacaggaggccggtgacagcagaacagcgtggtcccaggctcaccgccgacaccacatccgaggagacaccgaggtgctccgtggaccctctgcctcccccgtggaccgaggaggaggcagaggatgccacg

SEQ ID NO: 931043 - DNA, 718 bp, Homo sapiens
tggcaccagcaggccagagtgaggaggaaccttgggaggaacatcccactgagggaagcgtggcagacgcccccacataccatgtgattccatttttatgaaatgtccagaatgggccggtccatggggactgaacacagagtggtgggggctcaggagaagggaacgggcaggtgctgtctgaggggcctggggtttcctctggggatggtgagaatgttctggacccagatgggggcgcaatgttgtgaatacaaatgctactgaattgttcacttcaagccgattcattttatgttatgtgaattttttcaataaaaaaggaaatatgtggccgggcacggtggctcacgcctgtaatcccagcactttgggaggctgaggtgggcggatcacgaggtcaggagatcgagaccatcctggctaacacagtgaaaccccgtctctactaaaamtacaaaaaaattagccgggtgtggtggtgggcgcctgtagtcccagctacttgggaggctgaggcaggagaatggcgttaacccaggaggcggagcttgcagtgagccgagatggcgtcactgcactccagcctaggtaacagagtgagactccatctcaaaaaaaaggaaatatgtggagtgggaaatcatgcttttaataaaacgagacccaaagaaaccagcgtctggaagcatctgcagtgtgagcagctcaggctggg

SEQ ID NO: 931044 - DNA, 588 bp, Homo sapiens
tagaaagtagactcaaagagacaaatataatagttattggccttaaagaggaggtagagaaagatagaggtagaaagtttattcaaagaaataaaatggagaattttccaagcctagagaaagatatcaacatccaagttcaagaaggtttaacccaaagcagatttaatccaaacaagactaactcaaggcatttcataatcaaactcccaaaggtcaaggataaagaaaggatcctaaaagtggcaagagaaaagaaacaaatagtatacaatggagctctgatatgtctggcagcagacttcagtggaaaccttacaggccaggagagagtggcatgacatattgaaagwgctgaaggaaaaaaaagttaatcctagaatagtatatctagtgaaaatatccttcaaacatgaaggacaaataaagactttcccagacaaacaaaagttgagggatatcatcaataccagacttgtcctacaagaaatgctaaagggagtacttcagtcagaaagaaaaaaacatgaataagcaaaaaataatcacctgaaggtacaaaactaaccagtaatagtaagtagacag

SEQ ID NO: 931045 - DNA, 801 bp, Homo sapiens
tatgacctgcataaggcgagctgtgatttgggagttgggagggagattgattggtgataagggcaaatagtagagttttttgttgtttatctggtaaaactgctttggagtctggtgggaacattttcaaaacttatcctacttcttgctgtgctaattggaatccatggttttgaagtctgtggaggctttattctaaaccaagttgtgaaataggaaagaataggycatcatttagcattttaacagaaaagtggctaaatgatgaaatattgttgaaagaaaaataatgaaaatgtactttaggcattggtagatgaacagcactctcttacaagtcgtgttttacgtatgcagacactgagagtaacataaagtgtgtttgagcatgcagatccacactgcctggtttgaatccaggcactgccacttggtagccacgtgaccttgatgttgggaatattgcctgacctttctatgcttctgtttccccatctgtaatgtgaggataacactggtaaccattttataggtttactgtgaagattcaatgcttagcttagtgttggctcatacatgctccatagttgtggtggtggctgttgttagtattgatagtgctgtaataaactagtgtgaatcagatatcatcgattctggagccatctcaccctaaactgttctctttcgtactctagctctgtctgctttccattctgatcctgatttgttattctgcttggtttccagcctgcatggcatgccctgagtggtctcatacagttagagatttggggtgca

SEQ ID NO: 931046 - DNA, 720 bp, Homo sapiens
atattgcaggaatttatccatctcctctaggttttctggtttgtgcacataaaggtgttcatagcagccttgaatgatcttttgtatttctgtggtataggctgtaatatcttccatttcttttctaattgaacttatttggatcttctctcttcttggttaatgtcattaamggtctatcaattttgtttatcttttcaaagaaccagctttttgtttcatttatcttttgtattttttttgtttcaatttcatgtagttgtgctctgatttttgttatttcttttcttccactgtgtttgggtttagtttgttcttgtttctatagttccttaaggtgaccttagattgcctatttgtgctctttcagactttttgatgtaggtgtttaatgctatgaactttcctcttagcaccacttttgctgtaatcccagacgatttcataggttgtgttactattatcattcagtgcaaaaaaggtttaatttctatcttcatttgattgttgactcaatgatcattcaggagcagattatttaatttccatgtatttgcatggttttgagggttcctttcggagtttctaattttatttcactgtggtctgagaaagcacttgatataattttgattttcttaaatttattgagacttgttttgtggccaatcatatggtctactttgaagaatgttccatgtgctgatgaatataatgtgt

SEQ ID NO: 931047 - DNA, 563 bp, Homo sapiens
tttcctaaattgtcctgaaggactcaaatggcacattatggatgttcagcttttatttgactgctgtagtatcgaatggtaggaagagtgaagtgaagtaggattttggagttactcttcttgctgaaaattcaacttgaaaaaccctgaactgcagctgaatagattacccaataaattgttttatgccctaatcatcatgccactatgttgtatttcttaggttcttattcaggctcaggtcttagaacctcgttatcacagttctctgcacacagcaaagaacatcctagattatcagatctaaaaccacagggagcaatgcccagaaccagccagggcttacatcagckagggtcagagtgtttttgaccctctgaggctcaccgtacctgaatatgattccatttgcacccctcctcctgtttcctctgtggggagggcgctgtggagaccataaagcctccagggtgtttctctctccctcttcctagagagcagcatctccgtggaggtggccagcaatgccagcgtcatccttgagggcgaggacctgcgcttct

SEQ ID NO: 931048 - DNA, 657 bp, Homo sapiens
gatctgggccatcctttacccactcagactttcttcctgcccacctgctgctgtgaatcctgtatgtcatatacatatatatataaaatatattatataattattatatttatgtaatttacataatataatatataaatgtattatatatagtattatatataaaattatactttaagttctagggtacatgtgcacaacgtacaggtttgttacatatgtatacatgtgccatgttggtgtgctgcacccattaacttgtcatttacattaggtrtatctcttaatgctatccctcccccctcccctcaccccacgacaggccccagtgtgtgatattccccttcctgtgtccaagtgttctcattgttcaattccaacctatgagtgagaacatgcatgtcttatatgctctcaggcagagaggaaactgctgagcagggcaggggacagagccctgtggctctccactttagacccctcccggctgactgccatggaatgcagccacttagcagggccaaatcccctgatgttcctgttggctgtctagccttcagggacaggtcatggggccttggttcctgccctgtcatcttcccagtcaccctgatcttcagggggaggaatagcctgagaaaggacttggtcatagca

SEQ ID NO: 931049 - DNA, 657 bp, Homo sapiens
gatctgggccatcctttacccactcagactttcttcctgcccacctgctgctgtgaatcctgtatgtcatatacatatatatataaaatatattatataattattatatttatgtaatttacataatataatatataaatgtattatatatagtattatatataaaattatactttaagttctagggtacatgtgcacaacgtacaggtttgttacatatgtatacatgtgccatgttggtgtgctgcacccattaacttgtcatttacattaggtgtatctcttaatgctatccctcccccctcccctcaccccacgacaggccccagtgtgtgatrttccccttcctgtgtccaagtgttctcattgttcaattccaacctatgagtgagaacatgcatgtcttatatgctctcaggcagagaggaaactgctgagcagggcaggggacagagccctgtggctctccactttagacccctcccggctgactgccatggaatgcagccacttagcagggccaaatcccctgatgttcctgttggctgtctagccttcagggacaggtcatggggccttggttcctgccctgtcatcttcccagtcaccctgatcttcagggggaggaatagcctgagaaaggacttggtcatagca

SEQ ID NO: 931050 - DNA, 679 bp, Homo sapiens
ctcagacttcttggtgggctggtcagaaacatgcagtaacttggggcagttaccaggtggccaagtctgcactgctgggctctgtgagcttgggccagctcaggccctctctgggccctgcctttctgggctgttcaggtggttccttgggcctggggtgctaatgtttctggatgggcagcagaaccagtctgcactcagggccccaggccatgttcccggaacacacctttagcattgacagcagcgtgtggtgaggccccttagtctgggttctggtctagtgccaggggcaccactactccaccgcctccagagccatctctgggacactggctgtgcgttcagatgttctgaacagggacagggagagccagagggacccagcctggggctcactggaggggcttgtgggcagacagtgccctttagagggaactgagtctgaagggaaggaaaccctttccccagctcatagcayctgccatccagggccctgccagggctgcgtgaactttagtcatgtggtgacaggccgagtcaccgtgccaagtcactgtgcgcctccttgctgctgtgacgtcagcttccccatcctcccagccaggctggatctctgtgagaggcctgcctgtcctgcaccctgtgcggatgcctcccactgtccaccagggctgct

SEQ ID NO: 931051 - DNA, 790 bp, Homo sapiens
aaactcactgatacgtcagacaatatgcagcagtgtaacatacatgtaattaatatctcaaaaaggatgggtaaaggaattacaggtgaataaagaatggtacactcattcctgagggcaccgaggagggaggatagctttagatttctaagggagggtattatccattcatgaaggtccaaccccatgaccaaacacctyccagtaagccccacctgcaacattggggatcaaattttaacatgagattggaaggggcaatcattcaaaccatagcaagagttaaatttccttttttaaaaaatcactgttatgattccatttcaccatagataaaagctagtatttcagcctaccattgagtgtgcttatagctcaccaaaagggcactctgtctcgggaatacagatttgcctagaggtatcctagtgcagtcaaagagcaatgagggatagaaaaggttagtgatggagacaccagcgctgcattttgcaacaaacaatgtaaaaattttacggattggttcagctaacttactacagtttacattcctctcaggtgggagaattgttgcgttttttcttaagatagaaaagcaattcagataatctgaaatctccacaagaaggataagaagcacaggagaaactattctaggcaggaggtcaatcctttcaactgtctgtgctccatagaaacaattgtctgcactgggagtcatatgaggtacagacaacagccagacctctaatcctctcattagtgatttcagaagaaattaccagtcaac

SEQ ID NO: 931052 - DNA, 790 bp, Homo sapiens
aaactcactgatacgtcagacaatatgcagcagtgtaacatacatgtaattaatatctcaaaaaggatgggtaaaggaattacaggtgaataaagaatggtacactcattcctgagggcaccgaggagggaggatagctttagatttctaagggagggtattatccattcatgaaggtccaaccccatgaccaaacacctcccagtaagccccacctgcaacattggggatcaaattttaacatgagattggaaggggcaatcattcaaaccatagcaagagttaaatttccttttttaaaaaatcactgwtatgattccatttcaccatagataaaagctagtatttcagcctaccattgagtgtgcttatagctcaccaaaagggcactctgtctcgggaatacagatttgcctagaggtatcctagtgcagtcaaagagcaatgagggatagaaaaggttagtgatggagacaccagcgctgcattttgcaacaaacaatgtaaaaattttacggattggttcagctaacttactacagtttacattcctctcaggtgggagaattgttgcgttttttcttaagatagaaaagcaattcagataatctgaaatctccacaagaaggataagaagcacaggagaaactattctaggcaggaggtcaatcctttcaactgtctgtgctccatagaaacaattgtctgcactgggagtcatatgaggtacagacaacagccagacctctaatcctctcattagtgatttcagaagaaattaccagtcaac

SEQ ID NO: 931053 - DNA, 560 bp, Homo sapiens
agtaacaaaagcacatcttggcatgaacaaattcccgtatattcaaattagggacagtgctttaccacagagtgttttaattaatatttataaatcacagagtgcctttgaaagggccagtaagctgtttatattattatcatgtcacacaaataacaaaccctttggagattgctgcstactttgcattttgtaagtgagcatgttgcgtgtgtttctctccctcgtaggtgtggtgtcagcacagcggcaggtcaccgttcaggaaggacccttgtaccgcatggagggctcccacatcactatctggtgcaatgtgagtggctcccagggacctcctgagcagaatttccagtggtccatttacctgccttcgtcgccagagcgagaggtgcagatcgtcagcaccatggacccttccttcccctatgccatctacacccagcgcgtccgcggagggaagatcttcatagaaagagtccaggggaacccaaccctattgcacatcacagatcttcaggcccgggatgccggagaatatgaatgccacacacccagca

SEQ ID NO: 931054 - DNA, 786 bp, Homo sapiens
tatatacacttctttaatgactacacaaaatttcaacggtattgtatgaaaattttaaacaacttaattgatggcattttaattgttttaaatttttttgctattaaaaataatgtatatttgtgtatatatttctttgatcacacatatgaatatttctttaaagaagactactagaagtgaaattcttgggtcaaatggtattttttaatttaattttgatagatcccatcttatttgttctccagaaagactgcctgtttctattccccccagcaaggtgtgagggtacaagtcccctgcacccttgctaacacggatattggtagtctttattttaaatccttccaataaggcgaaaaatctgatactgctgtcaaatattcatttctttgtgtactcacaatgttgaaacttttttcatatgcttgttgcatgtttgtacttattcaatgtttatgccctttgctcattttctatttaggttatagatgcgtttcttaaatgatgaattaaaaatgaagccttgttgttcacctcttaatgtcgtttctccagcttgcatccttaatttrattagctaagagttgaaacatttgctatttatataaaatatgagcagccaaaaatccttttggaatgaggcagggttataaataaaatgcacttttaaaaatatgtgaaacatggttgtgtgtaacttgcctcagttcttccctttgattccactggagatgtttggcactaaaatctgtggatttccctgagactttgacaactggtcat

SEQ ID NO: 931055 - DNA, 561 bp, Homo sapiens
gtcatgctacgttgcccaggctggtcttgaacccctagcctcaaactcccacaggggcctcctagagggctgggattacagatgtgagccactgcacctggccctctgtcatctttgtctggttaacagtaaatcattaacccaaagcctagtatcaatattgctaccttaggggccttcttggtctcagccaaggtcacctcttctaggccaccctaacatcctgaacctcctcttttatcactcccatcacatttgtgtgatttgcttcttggcatgttctgtgcaagactgtaagtgcctttggcaaagaccttgtctgtcttgttcattataaaaatagccaatgactgatgtatggtaagggagtaagaaatatttgcmgagttaaatttgagatagagataataacatctatgtggcagggatgttttgaggagttaaggtgatgtttttccaggcacttagtgtggtgtctgacacttaataggtgctcaaatcatgacctaaatagaaatctgaatgcaaatggtttaaacttattaaattctgttgaatgag

SEQ ID NO: 931056 - DNA, 604 bp, Homo sapiens
taagtttggactccatgtagtaacttacttcaaagaaagcagtatagagtgggaggagagaaaaagtaactgtacagtaaagaaatctggaaacctttgccttagccaggtgatcaggtttgctatcagtgagaagtcatgttgacagcatatacctttgatatgacatattgagaatggctcttcgcttctgtagtcttcatcccccaaacccataaataaacctatccatgagaaaaactctagacaaacccaaatcaagggacattccacaaaatacctgaccagtactcaaaactgtcaaggtcatcaaatgcaaagaaagtctgagaaaatgtcacagcccaagragtctgagacctgatagcaaaatgtaatgtagtgtccttaatgggatactggaacagagaaaggatgctgggaaaaaatctaatgaggtccaaataaattaagaactttagttaataatgaagtatcaatgtttgttcatatgttttgacaaatgtgccatggtaacatgagatgttaacaagaagggttgctgggtgtgggatagacaggaacattctgtactatctttgctacttttctgtaaatctaaaat

SEQ ID NO: 931057 - DNA, 604 bp, Homo sapiens
taagtttggactccatgtagtaacttacttcaaagaaagcagtatagagtgggaggagagaaaaagtaactgtacagtaaagaaatctggaaacctttgccttagccaggtgatcaggtttgctatcagtgagaagtcatgttgacagcatatacctttgatatgacatattgagaatggctcttcgcttctgtagtcttcatcccccaaacccataaataaacctatccatgagaaaaactctagacaaacccaaatcaagggacattccacaaaatacctgaccagtactcaaaactgtcaaggtcatcaaatgcaaagaaagtctgagaaaatgtcacagcccaaggagtctgagacctgatagyaaaatgtaatgtagtgtccttaatgggatactggaacagagaaaggatgctgggaaaaaatctaatgaggtccaaataaattaagaactttagttaataatgaagtatcaatgtttgttcatatgttttgacaaatgtgccatggtaacatgagatgttaacaagaagggttgctgggtgtgggatagacaggaacattctgtactatctttgctacttttctgtaaatctaaaat

SEQ ID NO: 931058 - DNA, 647 bp, Homo sapiens
ggtagagatgaggttttaccatgttggccaggctggtcttgaactcctgacctcatgattcgcctgccttggcctcccaaagtgctgggattacaggcctcagccaccgtacccggcctatttttaattttttttttcagtagagacagggtcttgccatgttgccccggctggtcttgaactcctgagctcaarcaatccacctgcctcagcctcccaaagtgcttggattacagatgtgagccaccatgcccggctgtttaagaagttttaacacacgtatacacctatgtaaccgttgcccagttcaagatatagaacattttcatcaccccccaaaatcccttcacagtcttttccagtcaatacttcccatttcctgtcctgacagtatcactattctgacttctatcaccagagcttttccattcttgaacctcatataaatataatcatacatatgtactctcttgtgtctggttttaatattttaatgttgctgcatatatcaaaaggttattcctatgtaattttgttttttgcttttttttcatgaggcattttatttgtaaatatgtataacatctctagaaaaagaatcccaggattttccttcctgtgtgttttcgtcttgcttctttatggtc

SEQ ID NO: 931059 - DNA, 609 bp, Homo sapiens
aagaaatatccttccttcccatcttaggtttatggctgaggcccctataacaaaagacagagtaacaagaacaatgtatacaaattaatctaagtttttaggtgacgcagaagccttcataaggaaatgaaggtccaaagaaacaggtaactctggcccggcgtggcggctcatgcctgtgatcccagcactttgggaggccraggcgggcagatcacttgaggccaggagttcgagaccagtctagtcaacatggtgaaaccccatctctaccaaaaatacaaaaattagccaggtatggtggcgcatgcctgtaatcccagctactcaggagaccgaggtgggagaattgcttgaaccaggaaggtggaggctgcagtgagccgagactgcaccactgcactccagcctgggcgacacagcgagaactgtctcaaaaaaaaaaaaagaaaaaaagaaaagaaacaggtaagtctgcatatttccctatgtcaggtttgatgaagaagtggatgatcgtgaagaagtgtgactggagaaaggggatatgatctaatagtgataaactgaagagaacttggcaggccctgtttgttcttctctgtgtcc

SEQ ID NO: 931060 - DNA, 833 bp, Homo sapiens
agtgatagcttgtttccccatctgccttgactcagagctcacgcaccagcagggcccccttccctctggagagccagactctcctggggtcctcccacctcactgactgcttgctcgcagactcctttgcagattcctcctccccacgtgacttctaaatagctgagtgtgagggcaggcatggtggctcacacctgtaatcccagcattttgggaggccgaggcaggcggatcacttgaagtcaggagttcgagagcagcctgaccaacatggtgataccccatctctactaaaaatacaaaaattagctgggcatggtggcgcgttcctgtaatcccagctacttgggtggctgaggcacgagaatcgstagaacccgggaggtggagattgcagtgagccgagattgtgccactgcactccagcctgggtgacagagcaagactgtctcaaaaaaaaaaaaaaagccgagtgtgaatgtctctgtcaacccatcttcttggatgatgtctgttctagttacagtggctgtgtaacaaactaccccgaaccttagtagcttaaagcaacaactggtttctttcatcttgtgattctatgggtcaggaattctggcagggctgggctgggtggtttgtctgctctatgtggcattgatggaggctgcttagtggaacttagtggtggatgggctgaactgggggctccatgatgccttcactggcacctcggtggggagggctggaaggttgggtttagctgggactgtcatttggagcacccacgtgtggcctcttcaatatgacagtcttgggatagttagattttctac

SEQ ID NO: 931061 - DNA, 832 bp, Homo sapiens
agccacaggtgagcggggggagagagagaggccttgagtggaagacgtgaacctctgtctctggcaggtgaagcacagtggccagtaagtgtcattgccctcaatcccagcccaccctggaagaagtgggcagaggaagcaatgcagtgagtcataccacatgggtcttcgttcatgccggcagcaccaagcacagcataggagaggccctcctgacagagttcaccccaggagatcctcagggccaggacaggacagccactcctcctgagacctcccaggttaagcagcctgcccagggcccagagtttgcctgttttcttcccaccttccttccttccttccttccttccttccttccttccttccttccttcaagtacactgcccctcctccaaaagagagattcaggatgctgsagggagaatgaaatcattgagtcaggagcccccttcctctcagcctgcagagcccataagcaattcccatctgagtccagggggcaagcaatcctgcactcagagagcgaggctaatgctccgtattccattaacctggtgcatggctggcaggaggctggcagggtgtccgggggtgaggtagaggaaaaaaacctcctgattttcttcctggcttcaaaatgaaggaaagtctacaattctccaccaggagccagaagcccttttctttcctgtgataatggtgagggtttgttttctttcatttagacgctcccaaacttaatttaaagtttctctcttttaaatatgtcctggctgcagagtgaacagcaaggagctgccaaaggaaagtggagagggagagatgattg

SEQ ID NO: 931062 - DNA, 677 bp, Homo sapiens
ctcggagtctgtttctgaggaagctaatctaagtcaggcatcaccgctgcatgcatgtgagataaatgtagggaactggagagagagcctggggaccgtgcacacagtgagatgagaaaggaagggaaggagaaaggaggagagggaggcagggagaggaccaagatgaggaacaagggcacatgagcttcagaccaaaggactgccctgagatacggagggaaaaccaaaagatcctactatcaggaagtcagaagagcagaatattcaaggagggagtggcagtagcaccaaactccgcagagaggtccaatcacattaaaaaactaaaaaaaaaaaaaaaaaaatctgtatcagtcagggttctctagaggaacagaactaacaggatagatgtatatataaatcggagtttattaaagagtattgactcacatgatcacaaggtracatcccacaataggccacctgcaagctgaagagtaagaaagccggtccaagtcccaaaacctcaaaagtagggaagccgagagtgcagccttcggtctgtggtcgaaggtacaagagccccaaggctgaagaacttggagtccgatgttcgagggcaggaagtatccagcacgggagaaagatggaggccagaagactcagtcagtctagtctttccacattcttct

SEQ ID NO: 931063 - DNA, 590 bp, Homo sapiens
  misc_feature 573, 574, 575, 576, 577, 578, 579, 580, 581, 582, 583, 584,585, 586, 587, 588, 589, 590: n = A,T,C or G
catttttcttgggtcatttctgtggggacaggaggcctctttggagtccatggcctctgcccactgctacaggctccctggtaaggacagtctagctcctagttcacctccccccatcccggcagcacacgcctgaggcttgcttgtggggggctacaggctgggggtggaggtagtgagaggggtgagctccactgcactctggtgtcacaccagcttggactcaaatgccagctccttttgtgaccacaagcaagtgacatcacctctctgagcttcactttccatatctgtaaaacgggtgttgtaagagtacgtgctacttagggttatcgtgaacattcaacaagacaaggtgtgtgmagcgtttaacacagagcatgcccctaaggctccataggtggccggagtcactctttccctttaaggctccttaattctctgtaaggcccagttttctcatctagaaactggggagaaaaatctctatagtgctgagttgctatggcacttaaaggggtaaaaactcaaatgctgacagggtccaggcaggtattgaagtaactaaagaannnnnnnnnnnnnnnnnn

SEQ ID NO: 931064 - DNA, 579 bp, Homo sapiens
ttggggtttgagttttgcctgaaggactcactggtgaggctgaaccaagtgtgtttctttggccatcacaaggacccaggcaggatgtcatactcagcagtacagcaagaactggtccaatgcttcagatctgtgattctcaatgggcagagggcaataagtaatgtctgaagactttttaaaaaaaaattaattagagagagggtcttggctcamtgcagcctccaactcctgggttcaagtgatccttctgcctcagcctcccaagtagctaggactacagaggtgtcccaccatgccaggcttgaagactttaaaattttatatattttatttcaattttttttgagttgtggtctcactctgtcacccaagctggagtgcagtggcgtgatcaaggctcactgcaacctccacctccccagattcaagcaatcctcctgcctcagcctcctgagcagttgggattacaggcgtgagccaccacacctggctaatttttgcatttttggtagagacggggttttgccatgttgatcaggctagtctcgaatttctgagctccagcaatccacccat

SEQ ID NO: 931065 - DNA, 587 bp, Homo sapiens
ggccaggatatagcccgactcccccaggagtgtcaagcgattatcaggtgatgatcaggcagttgttttgttttgttttgtttgagacggagcctccatatgtcgcccaggctggagtgcagtggtgcgatctcagctcacggcaacctccgcctcctgagttcaagcgattctcccgcctcagactcccgagtaactgggattacaggcgcccccacactaaactcggcttttttttttttttttttttttttttgagacggagttttgcttttgttgcccaggctggagtgcaattgtgcgatcttggctcacagcaacctctgtctccagggttcaagcaattctcctgcctcagcctcccgagtagctgggattataggcgtgtgccgccacacccggctaattttgtatttttttttttttattagagacagggtttctscacgttggtcaggctggtctcgaactcctgacctctcaggtgatccacctgcctctgcctcccaatgtgttgggattacgggcgtgagccaccgagcccggcccatcaggcagttgttaaactatcgctctaaaataataat

SEQ ID NO: 931066 - DNA, 635 bp, Homo sapiens
ccagggaaaggcaggctccgaacagatagaaaacacctgaagctggtgatcagcttcctggtaagatcccaggagttgggcgagtgggctcaagcatgagcactaacaggcaaagtggtggcgtttacctggtttatgaccttcctctaggaacactcaattggtaagggaagaacgcaccaattaggcatgcacaacttcactaaacacactgcgcatgcggtcccgcccaagtgctggcaggccactgagcatgcagacagcccatcccaacgggagaatcaggggagaagggatgcaaccccctggaagcatgccaatgtataaaaccccaagtcaaaggtcraacagcgcacttggccctcttccaagtgtactttccttccttttgttcctactctaaaacttcttaataaatttacactcctgctgtaaaacttgccttggtttctcactgtgccttatgccccttggatgaagtctgtcctctgaggaggaaagaattgacttgctgcagacctgtgcagattggctgctgctaacaatataaaaattttagtttctaataggaaatttaaaacacaagtcaacatagataattgtctttataactcctatgtatccatcacccagct

SEQ ID NO: 931067 - DNA, 635 bp, Homo sapiens
ccagggaaaggcaggctccgaacagatagaaaacacctgaagctggtgatcagcttcctggtaagatcccaggagttgggcgagtgggctcaagcatgagcactaacaggcaaagtggtggcgtttacctggtttatgaccttcctctaggaacactcaattggtaagggaagaacgcaccaattaggcatgcacaacttcactaaacacactgcgcatgcggtcccgcccaagtgctggcaggccactgagcatgcagacagcccatcccaacgggagaatcaggggagaagggatgcaaccccctggaagcatgccaatgtataaaaccccaagtcaaaggtcaaacagcgcacttggccctcttccaagtgtactttccttccttttgttcytactctaaaacttcttaataaatttacactcctgctgtaaaacttgccttggtttctcactgtgccttatgccccttggatgaagtctgtcctctgaggaggaaagaattgacttgctgcagacctgtgcagattggctgctgctaacaatataaaaattttagtttctaataggaaatttaaaacacaagtcaacatagataattgtctttataactcctatgtatccatcacccagct

SEQ ID NO: 931068 - DNA, 573 bp, Homo sapiens
gcagtggcacaatctcagcttcctgcagcctcaacctcttggctcaagcgattctcctatctcagcctcttgagtagctgggaccacaggcatgtgccaccacacctggctcgtttttgtattttttgttgagatagggtttcactatgttgcccaggctagacttgaactcctgactcaaamaatcctcccacgtcccaatgtgctgggattataagcatgagccatcacacctggccgtatcaattctcaaaattctgagtcctacccttgctaatattgcctctcacacacattctctgctactgctttcctgactcaatgcatgctgggccttctctgctatgtgtcttaacctctttattactttcattttttatttttatttttggcactgtagggtacattttgagtaatttattcaaaagtatcctccatcccactaatttggtctttaattgtatctaatctggtgtttgcgtttcgatttttaattgtagtcattatctttttatatgttagttgtgttagttgaagtttggatttagttctattgttttttctttctgtgca

SEQ ID NO: 931069 - DNA, 607 bp, Homo sapiens
tctgcaccattttgtaagtcccccgccatttcacagaccgtgcttaaagtgaaatattccacagggattcaggccatgagaaatagcctgcctcttatcatattctgctgggagaaagtacaaggaacaccacgttccaccacaacaagggtcagaaatgcctcatcctgggaacatgttatcaatattttcccagacagcaggccatgtctccccaaacccctcctgtccaagcctacagatggccccagcctgtaagcaggggcgggcactgacattaagctggtctcctgcctctttaggtcttatgctggacataaagcctgcacttaaaacctaacacagacaaaacaggctttaaagcaacaatagtttaaaggaaaaagagggacattatataatgataaaaggactaatccaacaggaaaataycacaatcctaaatacatatccatctgacactggagctcacaaatttatgaaacaattactactagacctaagaaatgagatacacagcaacacaataatagtgggggacttcagtattccattgaaagcactagacaggtcatcaagacagaaagtcaacaaagaaacaatggac

SEQ ID NO: 931070 - DNA, 623 bp, Homo sapiens
gaaacagcttccccattcccagtagtggcaacatcccctccctgacccaggctgccatcagcctttccacctttgtctaaggaaacgaaccctgcactgcctaaggcagcagtgatggcctcccctgaggcagttgccrggcaagataaagttgattctcctcaggagccaccctcaacacccgagtttgcttctagacctataactagactaaagtcccagcaggcccctatagggtgaggttgagagtgtgacccatgaggaggtgtgctatactcaaaaagaactgcttgagttttctagtttatgtaaacagaaatctggagaacaggcatgggaatggatattaggggtgggataatggtggaaggaaagtagagttgaatcaggctgaatttattgatttgggcccactaagtagggactctgcatttaatgttgcatctcgaagagttaaaaagggttctaatggttcatttgcttggttagctgaaagatgcattaaaagagggcccactgtgaatgagctggaaatgcctgatctcccttggattaatgtagaggaagggatccaaaggcttagggaaattgggatggtggagtggattagtcaatttagacct

SEQ ID NO: 931071 - DNA, 616 bp, Homo sapiens
tagaagatatacacttgaccaatgtcttgtgaaatagatttgtgagggcaacacctgcatctttgaaggaccctgtcattgctcttctctgtatgtcagatctaacagtgggaactacagtcactcaactacaaaatttaaatacaatgggaataattggattctgagggggcaggggccaagtggagcactcaaccatcaaaggtgggcgtcatgaccataatagacagcagaggcaaagcagcaatcagaatagtctgaattgtatagggctgtggcattggctaattaatcatagttcctagaagtgaaattgatacgaagcctaytgcattcctacttaatttataggagtggaaaacttctaggttgaatggacaaaagactaatttgaggctgggcgtggtggctcaagcctctaatcctagcactttgggaggctgaggccggtggatcgcctgaggtcaggggttcaagaccagcttggacaacatggtgaaaccccgtctctactaaaaatacaaaaaattagctgggtgtggggatgggcacctgtaatcctagctacttgggaggctgaggcaggagaatcgcttgaacctagaaggtggaggtt

SEQ ID NO: 931072 - DNA, 616 bp, Homo sapiens
tagaagatatacacttgaccaatgtcttgtgaaatagatttgtgagggcaacacctgcatctttgaaggaccctgtcattgctcttctctgtatgtcagatctaacagtgggaactacagtcactcaactacaaaatttaaatacaatgggaataattggattctgagggggcaggggccaagtggagcactcaaccatcaaaggtgggcgtcatgaccataatagacagcagaggcaaagcagcaatcagaatagtctgaattgtatagggctgtggcattggctaattaatcatagttcctagaagtgaaattgatacgaagcctactgcattcctacttaatttataggagyggaaaacttctaggttgaatggacaaaagactaatttgaggctgggcgtggtggctcaagcctctaatcctagcactttgggaggctgaggccggtggatcgcctgaggtcaggggttcaagaccagcttggacaacatggtgaaaccccgtctctactaaaaatacaaaaaattagctgggtgtggggatgggcacctgtaatcctagctacttgggaggctgaggcaggagaatcgcttgaacctagaaggtggaggtt

SEQ ID NO: 931073 - DNA, 616 bp, Homo sapiens
tagaagatatacacttgaccaatgtcttgtgaaatagatttgtgagggcaacacctgcatctttgaaggaccctgtcattgctcttctctgtatgtcagatctaacagtgggaactacagtcactcaactacaaaatttaaatacaatgggaataattggattctgagggggcaggggccaagtggagcactcaaccatcaaaggtgggcgtcatgaccataatagacagcagaggcaaagcagcaatcagaatagtctgaattgtatagggctgtggcattggctaattaatcatagttcctagaagtgaaattgatacgaagcctactgcattcctacttaatttataggagtggaaaacttctaggttgaatggacaaaagactaatttgagrctgggcgtggtggctcaagcctctaatcctagcactttgggaggctgaggccggtggatcgcctgaggtcaggggttcaagaccagcttggacaacatggtgaaaccccgtctctactaaaaatacaaaaaattagctgggtgtggggatgggcacctgtaatcctagctacttgggaggctgaggcaggagaatcgcttgaacctagaaggtggaggtt

SEQ ID NO: 931074 - DNA, 823 bp, Homo sapiens
atcactgccaggttattcactgtctatgccccaaagcccattaggtaggcagtgcgctatgctgagcacagtgcgacttctcagcaaatccttgttgacaaactgacataggctgtgctaaggtcccctcctactaccctcccaggacctgttctttgtacctctaggcaccgcgcagtttcccagtgcgcctcgagtcctcgcagggccgggcagtggccaccccggattggctagccttgccccctcgtgatcatggaagtgggcggggagcgtggtgagcggatgctgctggagtgcttgaaccccgaggcctggagcggcagtcagcacccccacgccgagtccctggcagtcccggccttccgggggcggccctggggcctcgggcaactgcatccacggccctggagcccatcatgtcccatggttcacgtttttccgcctggaaactgcatgcctgtctttctgctttgccaaagtttccttcgcacgmggagggccctgaattacagaagtcgcttttctccagtcagttcaagccagcctggcgcgagtccctcattctcctttgtcaacgaggcaaagactcagttgttcacccaactgtgtcttgctggggggcagccctttccctgcccttccctctctctcagaagccccaagtgggcctttccccgaccctactctgagcgcgtggaaaatctgcttcgggcgcagatctcgagtagttggcctcccctcatttccgtctttcgcttctgcccgcgtggggccactttggtataggtgggaattaagccggggagggaggagtaggtcg

SEQ ID NO: 931075 - DNA, 607 bp, Homo sapiens
gttcacggctgtaatctcagcactctgggaggctgaggcgggtggatcacaagatcaggagatggagaccatcctggccaacatggtgaaactccatctctaccagaaatacaaaaattagcttggcgtggtcgcctgtgcctgtaatccagctactcgggaggctgaggcaggagaatcccttgaacctgggaagcagaggttgcagtgagccaagwtcgtgtcactgcactccagcctggtgacagagcgagactccgaaaaaaaaaaaaaattcaccggccttctttgtattcccagtcacttgtgtgttctgttacactgtgtgatgcatttctatcattcaaggataatttcagagcttcatttaatttttgtcctctacccccaagtccaaatggggaccccaaaacataatgaccatccattattataccaaggaattcaggaaatgctgagaataatgtccctcagggttgctttctagaattagcatttaactgtgagcctgaatttcttccttttgccacaaggaaaaaacaatccactggagaaattgtgttactgatgaaactgaaacaagagcataaagtcaaatgtcttccac

SEQ ID NO: 931076 - DNA, 607 bp, Homo sapiens
gttcacggctgtaatctcagcactctgggaggctgaggcgggtggatcacaagatcaggagatggagaccatcctggccaacatggtgaaactccatctctaccagaaatacaaaaattagcttggcgtggtcgcctgtgcctgtaatccagctactcgggaggctgaggcaggagaatcccttgaacctgggaagcagaggttgcagtgagccaagttcgtgtcactgcactccagcctggygacagagcgagactccgaaaaaaaaaaaaaattcaccggccttctttgtattcccagtcacttgtgtgttctgttacactgtgtgatgcatttctatcattcaaggataatttcagagcttcatttaatttttgtcctctacccccaagtccaaatggggaccccaaaacataatgaccatccattattataccaaggaattcaggaaatgctgagaataatgtccctcagggttgctttctagaattagcatttaactgtgagcctgaatttcttccttttgccacaaggaaaaaacaatccactggagaaattgtgttactgatgaaactgaaacaagagcataaagtcaaatgtcttccac

SEQ ID NO: 931077 - DNA, 571 bp, Homo sapiens
cgtcatccacgtgactccagggcctactgtgggcttcaccgttggtgaaagagaaggcagtcatcagtgaggacagcccaggctttggggccaggcagcccagggtctgacccgctcttggcactcgctagctttgggcaggttacttacgctgtagtgcctcagtctcctcatgtttaaatggatgttggyaattgaatatatctcagagaattgttgtaaagactggtagaaataatgtatataaattgcttcacacggtgcatggtagccataaatgctcagtaatcctggctttatcagatgcttataaaatgaatggaattagtatgacctgtattcttaggatctcctgttaaatgattgtcctgtaagctagtagtccccaagggaaaaagaaaagattgctcaccactggtttagaaaattcagagggagtaattccatgaagtacagttaagggaatctgggaatactttgatattgtattaaataaaatggcccatgccattttatttttattttattttactttttattttttgagacggagtttccctcttgtcaccca

SEQ ID NO: 931078 - DNA, 635 bp, Homo sapiens
gcaggtgaccctctgggacaaagcttccagaggaaggaacagacagcaatctttgctcttctgcagcctccactggtgctactcaggcaaacagggtctggagtggacctccagcaaactccagcagacctgcagcagaggggcctgactgttagaaggaaaagtaacaaacaaaaacgaatagcatcaaattcaaccaaaaaaaatccacacaaaaatcccatctgaaggtcactagcatcaaagaccaaaggtagataaatccacaaagatgaggaaaaaccagcgcataaaggctgaaaattccaaaaaccggaatgtctcttcccctccaaaggatcacaactctcaccagcaagggaacaaaactggacagagaatgagtttgatgaaytgacagaagtaggcttcagaaggtgggtaataacaaactcctccaagctaaaggagcatgttctaacccaatgtaaggaaactaagaaccgtgaaaaaaggttagaggaagtgctaactggaataaccagtttagagaacaacataaatgacctgacggaggtgaaaagcacagcacgagaacttcatgaagcatacacaagtatcaatatttgaatcaatcaagcagaagaaaggatatc

SEQ ID NO: 931079 - DNA, 611 bp, Homo sapiens
ccctatttaataaatggtgttgggaaaactgtctagccatatgcagaaaactgaaactggaccgcttctttacaccttatacaaaaattaactcaagatggattaaagacttaaacttaaggcctaaaaccataaaaaccctagaagaaaacctaggcaataccattcagaacatcgacatggacaaggacttcatgtctaaaacaccaaaagcaatggtgacaaaagctgaaattgacaaatgggatctaattaaactaaagagcttctgcacagcaaaagaaactatcatcagtgtgaacaggcaacctacagaatgggagaaaatttttgcaatctatccatctgacaaaggactaacatccagaawctgcaaggaatttaaacaaatttacaagaaaaaaaacaactccatcaaaaagtaggcaaaggatatgaatagacacttcttgaaagaagacatttatgtagccaacaaacttatgaacaaaagctcgacatcactggccattagagaaatgcaaatcaaaaccacaacgagatgccatctcacgccaagcaaatgtcacatgctcaatggactttgaccatgagtgtgtcccttagccttc

SEQ ID NO: 931080 - DNA, 632 bp, Homo sapiens
agaagatatacccttgaccaacaccttgcaaaacagatttgtgagggcagcatctgcatctttgaagagccctacaattgctcttccctgtatgtcagatctaacagtgggaaccacagtcactcaacgacaaaatttaaataaaatgggaataactggatcctgaggtggcaggaaccaagtggtggcactcaaacatcaaaggcaaggcaggcgtagctactgtaatggacagcagaggcaaaacagcaatcacaatagtctgacttgtatagagctctggcattggctaattaatcacagtgttcctagaagtaaaactgataggaagcctactgcactcctgcttaatttatataagtagaaaacttctaggttgaattgacaaaagactcatttgaattataaaaacagagaatcacmgcccttcagtcaacttccagacttgagccagtttacagacccagaaccccttgaatgaaggggaggccaggtccctttgaggaaggaccctactaccctactgacaatgtatgctgttaatctttctcctatccttccccgaggagacattcagccttttaccagggtaactgtgcactggggaaaggaaaataatcaggcacttcagg

SEQ ID NO: 931081 - DNA, 632 bp, Homo sapiens
agaagatatacccttgaccaacaccttgcaaaacagatttgtgagggcagcatctgcatctttgaagagccctacaattgctcttccctgtatgtcagatctaacagtgggaaccacagtcactcaacgacaaaatttaaataaaatgggaataactggatcctgaggtggcaggaaccaagtggtggcactcaaacatcaaaggcaaggcaggcgtagctactgtaatggacagcagaggcaaaacagcaatcacaatagtctgacttgtatagagctctggcattggctaattaatcacagtgttcctagaagtaaaactgataggaagcctactgcactcctgcttaatttatataagtagaaaacttctaggttgaattgacaaaagactcatttgaattataaaaacagagaatcacagcccttcagtcaacttccagacttgmgccagtttacagacccagaaccccttgaatgaaggggaggccaggtccctttgaggaaggaccctactaccctactgacaatgtatgctgttaatctttctcctatccttccccgaggagacattcagccttttaccagggtaactgtgcactggggaaaggaaaataatcaggcacttcagg

SEQ ID NO: 931082 - DNA, 673 bp, Homo sapiens
ttatggctagctggctatctcagcactatttattgaataaggggtcctttccacgttgcttgtttttgtaagctttgtcaaagatcaggtggttgtaggtatgcagccttatttctgggtactctgttctgttccactggtctatgtgtctgtttgataccattaccrtggtgttttggttactgtagcactgtagtacagtttgaagtcagataccatgacgtctccagcattgttcctttggattaggattgcctcggctatttgggctcttttttggttccttatgaatcttaaaatagttttttctacttctgtgaagaatgtcattggtagtttgataacaatagtattgaatctgtacattgctttgggcagtacggccattttaatgatagtgagtcttcctatctatgagcatggaatgtttttccatttgtgcatgtcatttctgatttctttgagcagtgttttgttactctcattgtagagatcttttgcctccctggttagctgtattcctaggtattttattctttttgaggtaattgcaaatgggattgcgtttctgatttggctcttggcttggttcttggctgttattggtgtataggaatgctagtgatttttggacattgattttgtatcctaagagtttgctgaagttgtttac

SEQ ID NO: 931083 - DNA, 610 bp, Homo sapiens
ttgtatttttaatagagacgaggtttcaccatgttggccaggctagtctcaaactcctgacctcaggtgatccacccacctcagcctcccaaagtgccaggattacaggcatgagccaccactcccggccagcatattttaattaactaatttttccagtattcagaaaatactatgacagttcaaacttccaataccttgcctgatagctcacagagccacgattaaatccaagtctgtttcactgcaaaaggtgtttcactcccctttccatggtatcattttaactctaataacagataagcatatgacagcatttcattcatctgagccattggtgacaactcgtgcaactgctctgttgctctcaggtgtgactaaacacagagaggatcagtctgaatatattcacatgtgckcagcttgatacagttttacaaaatatctctgatacattatcttatcctccaaacaaactttgaagtaaataaaattgtgtacaccagtatgcatatgagaaaattgaggctccataaatttaggtaagtggaggctcaaacccagatctttctaattcttttcattaactttactgaaaaagccattctta

SEQ ID NO: 931084 - DNA, 601 bp, Homo sapiens
ctcagtctctgtgggagggtaggagcctaactttagccagggcctggctccaagttgcaaagctgcctcctgtcataaagatgtatgtttttcttttatataaaatcaagtttctaatatagatggtcttcctaattacacagtgaatttaggatgaactatgtataataaatggtgccgtcagcattcttgcttgaggactagttattatttatcttgagaacatgaatgtaatcatttgttactgcctagctacataaaatggtgagatttctttctgtctttgcaatctcttagtggattgcctgcaatatcatatctctgtttaatatttattcaataataaaactgttttcattttctgctgcatttgtggagaagttttctgggttgggagaataatttgtttttgtttttacttatatttctctaacaatatttggtcaaaaaatggttctctcaraaagaaggaattgttcttgtgtattagcaggcattaggcaatttgctgccactggaaaatttggattttattgagagagaaggaaggaggggttgttacacagttaggagctaagatcttgtgcaaaagatggtggag

SEQ ID NO: 931085 - DNA, 704 bp, Homo sapiens
atagaacttacctagtaaagcgtcacagaaaaaaaaccaacatgcctctggtcaaagcacctgttattctgtctcccctgagggttatacaaactgattggtggaccccagaacccaggcgcactggaaatgaagcagcatctctggggattgcagagccacactctcttagaaattagcttctaggggcaaagtgtagtgttcacacctgtaatcccaggatttagggagccaaggcaggtggatcacttgaggtcaggagcgcgagaccatmttggccaacatggtgaaaccgcgtctctactaaaaatacaaaaattggccaggcatgatggtgcatgcctgtagtccgagctactcaggaggctgaggcacgagaatcacttttaaccccagaggcaaaggtttcagtaagccgagattgggccactgcactccagcttgggtggcggaattagcttctaggacccctgcctgacttggtgtgccagaggttgtatggacaactgatggccctgactctacaattaaattagttcaactaagtattcttagttgagacatgaaagcagtacttggcacaatttaatccatgggatagggttaggatgtaacagcatttaaaatacacatcatgcattcagtgtatgttaggtataattaatggaggcagaatttttcattgctgtggtatgtttacagtg

SEQ ID NO: 931086 - DNA, 711 bp, Homo sapiens
agccttgcagagggccagcacctgtgacagcacctggagctgcccaccccattgcagcaaccagcatgtctgactatgcagtggccagaccccatgctcactcacacacccctggccattccatgtctgattcacccttggcaggcatgggacccaggccagtaggtcaagtgcagcctgccarggtgagttggtgaaacagcctagccacagaggtttctagccagaaaaacaacaccctgaagatcctgtaactgcatattatctgagcacttgggacaaagatcctgtctctaaaaacaaaatttttttttaattagccagtcatggtggtacatgcctttagatccagctactcaggaggctgaggtgggaggattgcttgagccaaggagttcaaggctacagtgagctaggataacaccactgcactccagcctgggtgacagagtgagaccctgtatctttacaattaattaaataaaaataaatgagaaagaaaaaagaacaaaagaccaccatctcttatgaacattgatgcaaaaatcttcaacaaaatactagcgaaccaaatcttgcagcacattaaaagcattttacacaatcatcaagtgggatttattcctggaatgcaaggatggttcaacgtattagaatccaccactctaataaacaacattaacagaatgaaggggagggaaccacatgatc

SEQ ID NO: 931087 - DNA, 561 bp, Homo sapiens
actctctatgtccatgagttcaattgatttgatttttagatcccacaaataagtgagaacagacaatgtttgtctttctgtgcctgacttatttcacttaacataatgatctccagttccatccatgttgttgcaaatgactggatcctattctttttcatggctgagtagtactccattgtgtatacataccacgttttctttatccattcatctgtcgatggtcacttaggttgcttccaaatcttagctattgttaacagtgttgcaacaaatataggagtgcagacatctcttctatataccgatttcctttcttttgggtatatacccagcagtggggttgctggaycatatggaagctcaatttttagttttttgaggaaactccaaactgctctccatagtggctgtactaatttacattcccacttacagtgtacaaggttcccttttttccacattcttgtcagcatttcttattgcctgtcttttatagtaagccattttaactgggatgagatgatatctcactgtagttttgatttgcatttctctgat

SEQ ID NO: 931088 - DNA, 636 bp, Homo sapiens
aaccaagcagggctgatgacctccagcagtcccctgaattgggtctcagcctcctgccctttgagtgagatgacccttggtgggggtccaccaatcttttctttcttttcttttttttcttttttttagacggggtctccctctgtcacccaggctggagtgcatgaktacagctcactatagcctcaacttccctgggctcaggtaatcgtcccatctcagcctcccaagtagctgggactacaggtgcctgccaccacacctggctacattttttgtattttttgtagagacgaggtttcgccatgttgcccaggctggtctcgaactcctgagctcaagtgatctgcccacctcggccttccaaagtgctgggattacaggcgtgaaccaccgagcctggccacacccatttttctagatgcagcagctttcaaacccgtaaagtggtaacaatacaaaatgcatttgacacctctgtgctttaggtatgtacagacatgtgcacaaacagccacagcaaagcagcacctgctacacagagcaccatggtgtatgccacgggtcctgattggtttttacaggctttcccagaattctgaaggctgtgccactgttccagcatgttctaagagt

SEQ ID NO: 931089 - DNA, 639 bp, Homo sapiens
atgtgtctgagcctggaggtgagtggcacgggggctggcaaggctagggtggaggcaagcaggttccgctgtctgccgccttcacacctttctccttccacatgcatagatgagcccaccagccccagcactgacctccaagccaggcatgtccctgcttttgctgtggtctccagtgccatgaactcagccgctgtcctgggcaccagcccatcttccccgaccttcaccttcaccctcggacggcattactcgcgggactgcagtgagcgctccccacacccccagccccaccctttccctcgctgcccagtcccaggggtctctgttgggyctgctgcttgatgcctggcctcttcctctggtttccgcttctcctggggcaccttgggagagtcactccggcccctgcctagaagggagggctctgggaagcccctgacctgctgccccgctgaccctgaggcccgatgcgggcggctttgcaggcagcatcaaagctggccgccgctcctcctacctgctggccatcaccacggagcgctccaagtcctgcgatgatggactcaacaccttccgcgacgagggccaggttctgcggtgaggccctgtctggacatggggtggggtggccacagc

SEQ ID NO: 931090 - DNA, 631 bp, Homo sapiens
atgtgtctgagcctggaggtgagtggcacgggggctggcaaggctagggtggaggcaagcaggttccgctgtctgccgccttcacacctttctccttccacatgcatagatgagcccaccagccccagcactgacctccaagccaggcatgtccctgcttttgctgtggtctccagtgccatgaactcagccgctgtcctgggcaccagcccatcttccccgaccttcaccttcaccctcggacggcattactcgcgggactgcagtgagcgctccccacacccccagccccaccctttccctcgctgcccagtcccaggggtctctgttgggtctgctgcttgatgcctggcctcttcctctggtttccgcttctcctggggcaccttgggagagtcactcckgcccctgcctagaagggagggctctgggaagcccctgacctgctgccccgctgaccctgaggcccgatgcgggcggctttgcaggcagcatcaaagctggccgccgctcctcctacctgctggccatcaccacggagcgctccaagtcctgcgatgatggactcaacaccttccgcgacgagggccaggttctgcggtgaggccctgtctggacatggggtggggtg

SEQ ID NO: 931091 - DNA, 639 bp, Homo sapiens
atgtgtctgagcctggaggtgagtggcacgggggctggcaaggctagggtggaggcaagcaggttccgctgtctgccgccttcacacctttctccttccacatgcatagatgagcccaccagccccagcactgacctccaagccaggcatgtccctgcttttgctgtggtctccagtgccatgaactcagccgctgtcctgggcaccagcccatcttccccgaccttcaccttcaccctcggacggcattactcgcgggactgcagtgagcgctccccacacccccagccccaccctttccctcgctgcccagtcccaggggtctctgttgggtctgctgcttgatgcctggcctcttcctctggtttccgcttctcctggggcaccttgggagagtcactccggcccctgccyagaagggagggctctgggaagcccctgacctgctgccccgctgaccctgaggcccgatgcgggcggctttgcaggcagcatcaaagctggccgccgctcctcctacctgctggccatcaccacggagcgctccaagtcctgcgatgatggactcaacaccttccgcgacgagggccaggttctgcggtgaggccctgtctggacatggggtggggtggccacagc

SEQ ID NO: 931092 - DNA, 565 bp, Homo sapiens
tgctggagaatggatgcaggagcaagagtagagactgggaaggtctgtgcattctccaagcaagaggcgttgatggcatggaaagatgtctttcctctggcaggaaagacagagacaggggatgttttggaggcagaacagttgtgacttcctgatggatgggatgtcaagggcgaggaaaagggaggagtcaagggcagctcccaggtttctggacaactggatggattgactgagctggaaaagatgggggtagagagtggagaagaggtttgatggtaagaaatcacatggcctggcaagtattgtgcagagtgcccatgggacctgcaaatgaagacactgagcagggtgggggtgccgggctgtggctgggggagatgctgggctcgggaatggccatcagcagrtggacctggtttaaaggcacggcacaggtgacatccttgagggaggtgtgcagggagaggagaggaggggagagtcaggacaaagttctggagctcccctccctttaggcggggtctgttacctccgctctgctgacattttgagccagataatc

SEQ ID NO: 931093 - DNA, 658 bp, Homo sapiens
catttttagtagagacagggtttctccatgttgatcaggctgctcttcaactcccgacctcaggtgatccacctgcctcggcctcccaaagtgctgggattacaggtgtgagccctgcgccccactctatttttcaacttttattggtgtatagtatttgtatatatttatggggcacatgtgatattttcttacatgcagagaatgtgcaatggttaagttcaggctatttaggatatccatcacctggggcatttatcatttctgtgtttttggagcatttcaagtcctctcatctagctattttgaaatatataatactttgatggtaattatagtcactctgtgctgctattggacattagaacatatttttttctstattactctatgtttatactctgcctttgcccattcttaccccaaaatacacccttcccagcctctgttgactattattttacactgtatctccatgggattaacattttttagctaccacatctgagtgagaacatggaatatttttcttgctgtgcctggattatttcatttaatataatgacctccagtttcactcatgttgctgcaattgacaagattttattatttattatggtcaaatagtattccactatgtgtatagaccatattttct

SEQ ID NO: 931094 - DNA, 634 bp, Homo sapiens
atggaataaaaataaaggatatcaaaaggatgacataacatttaaagttagtaagggtgtatagatatcctaacatggttaggttatgtttgaaggaagagtaagaaagagggtacttatgaggtaagctatgaaagagtgtatagatattctaacatggttaggttatgtttgaaggaagagtaagaaagagggtacttatgaggtaagctatgaaataaattattagttgatttgaatcaagttgagactatgaaaggattgcaacttggatttgtttttaacgtgtgtgtgtgtgtgtttgtgtttatgtgtgtgtgttttgtcattacatggtctagccatgctcactggatgaatggaagaggtaggatggtgttggtactcagaaacaataccccaaaatcaaggcctcagaaatagcttcagaagcaaaaggttttctctgatctctgccctcctgtctttcaaggccattctyccccaatgttaattatagaaactagaatccccctttcccaaggtaggtcatagaaaccagaatctgttttcctcaaagccagccataaaacctaaaaatattactataacttttccccgcctttctttgtcaaaactggccataaagaaatta

SEQ ID NO: 931095 - DNA, 508 bp, Homo sapiens
tctacctatgtctttgaattccttctacattagaccaaaggaaatcaggcacctctgacttgctcattttcagccatcttttaatccatgttttagccaaccaaaaaaacaaactgttagcaccttttctaactccttgagctacaaaattaaatacagaatatctgcttaatgggtccgtatcaacaaatttggtgagattcaactttatgttcctttcaccattgtatcaaaccattaatatccattttcacacatattctctggctttctgcttgtacaaattaaaaaactaaagttgttatcttggagtgtagtacacctcttcatgagtaagacgttgtccctcacctgtagaggactgcygggacttaagtctagttataggcctagaagcaaagaggggtgatgaaggtgggtcgtgaggagaatcagctttgtcttaattggtaactgcctcagggaaagtcattaacatctcttaggcgatgcggagttaattgcctca

SEQ ID NO: 931096 - DNA, 597 bp, Homo sapiens
ttgaacctttcttttgacagagcacttttgaaactctttttgtagaatctgcaagtggacatttgtatcgctttgaaggatgtggtagaaaaggaaatatgttcacatagaaactagacagaagcattctcagaaacttctktgaaatgagtgcattcaattcacagtgttaaacctttcttttgattaagaagtttggaaacaatctttctgtagaaactgcaaatggatacttggagcgctttttggcctacagctgaaaaggaaatatcttcacataaaaacgagacagaagcattctgagaaacttttttgtgatgtgtgcattaatctcacagagttgaacctttcttttgattaagaaattttgaaacactctatttttggaaactgcaagtggatatttggggtgctttgaggcctaaggtggaaacggaaatatcttcacataaaaactagacagaagcattctcagaaacttctttgtgatgtgtacattcaactctcggagttgaacttttcttttgtttgagcagtttggaaacactctttttgtagtaaatgcaaatggatacttggagcccttagaggccttat

SEQ ID NO: 931097 - DNA, 597 bp, Homo sapiens
ttgaacctttcttttgacagagcacttttgaaactctttttgtagaatctgcaagtggacatttgtatcgctttgaaggatgtggtagaaaaggaaatatgttcacatagaaactagacagaagcattctcagaaacttctttgaaatgagtgcattcaattcacagtgttaaacctttcttttgattaagaagtttggaaacaatctttctgtagaaactgcaaatggatacttggagcgctttttggcctayagctgaaaaggaaatatcttcacataaaaacgagacagaagcattctgagaaacttttttgtgatgtgtgcattaatctcacagagttgaacctttcttttgattaagaaattttgaaacactctatttttggaaactgcaagtggatatttggggtgctttgaggcctaaggtggaaacggaaatatcttcacataaaaactagacagaagcattctcagaaacttctttgtgatgtgtacattcaactctcggagttgaacttttcttttgtttgagcagtttggaaacactctttttgtagtaaatgcaaatggatacttggagcccttagaggccttat

SEQ ID NO: 931098 - DNA, 597 bp, Homo sapiens
ttgaacctttcttttgacagagcacttttgaaactctttttgtagaatctgcaagtggacatttgtatcgctttgaaggatgtggtagaaaaggaaatatgttcacatagaaactagacagaagcattctcagaaacttctttgaaatgagtgcattcaattcacagtgttaaacctttcttttgattaagaagtttggaaacaatctttctgtagaaactgcaaatggatacttggagcgctttttggcctacagctgaaaaggaaatatcttcacataaaaacgagacagaagcattctgagaaacttttttgtgatgtgtgcattaatctcacagagttgaacctttcttttgattaagaaattttgaaacactctatttttggaaactgcaagtggatatttggggtgctttgaggyctaaggtggaaacggaaatatcttcacataaaaactagacagaagcattctcagaaacttctttgtgatgtgtacattcaactctcggagttgaacttttcttttgtttgagcagtttggaaacactctttttgtagtaaatgcaaatggatacttggagcccttagaggccttat

SEQ ID NO: 931099 - DNA, 481 bp, Homo sapiens
ttattatgtgaagctatttccttattcaccataggcctcaaactgctctgaaatatccctttgcagattctagaaaaagactgtttccaaactgctcaatcaaaagaaatgttcaactccgtgagatgaatacacacatcccaaagaagtttctcaaaacacttctgtctagtttttatgtgaagatatttactttttcaccataggcctcaaagtgctcccaaatatccctttgcagatgaatgcatgcatcacaaacaattttctcagaaggcttcygtctagtttttatgtgaagatattcactttttcaccatagacctcaaagtgcagattctagaaaaagactgtttccaaactgttcaatcaaaaggaaatttcaactctgtgagatgaatgcatgcatcacaaagaagtttctcagaaagcttctgtctagtttttatgtgaagatatttcctttttcaacataggcctcaaa

SEQ ID NO: 931100 - DNA, 604 bp, Homo sapiens
gacggacctatgcccacggagtctcactgattgctagcacagtagtctgagatcaaactacaaggcgtcagcgagggtgggtgaggggcactcaccacttcccaggcttgcttaggcaaacaaagcagccaggaagctcgaaattggtgaagccaattcaagtgaagcagctcaattggtgaagcagctcaaggaggcctgcctgcctctgtaggctccacctctaggggcagaacacagacaaacaaaaagacagcagtaacctctgcagacttaaatgtccctgtctgacagctttgaagagagcagtggttctcccagcacacagctggaaatcttataatgggcagactgcctcctcaaaagggtccctgacmcctgacacccgagcagcctaactgtgaggcaccccccagtaggggcagactgacacctcacacggccgggtacttctctgagacaaaacttccagaggaatgatcagacagcagcattcactgttcacgaaaatccggtattctgtagccactgctgctgatacccaggcaaagagggtctggagtggacctgtagcaaactccaacagacctgcagctgagggtcc

SEQ ID NO: 931101 - DNA, 822 bp, Homo sapiens
aactttctcagaatgcttctgtgtagtttttatgtgaagatatttccttttccaacatatgcctcaaagcgctccaaatatccatttgcagatactacaaaaagagtgcttccaaacttctcaatcaaaagaaaggttcaactctgtgaggtgaatgcactcatcacaaagaggtttctgagaatgtttctgtctagttttttgtgaagatatttcgttttcagctacaggcctcaaagcgctccaaatatacttttgcagatattgcaagaagaatgtttgcaaagggctcaatcaaaagcaaggttcaactctgtgagttcaatgcacacatcacaaaaaattttctgagaatgtttctgtctagtttttatgtgaaggtatctccttttccaccataggcctcaaagagctccaaatatccacttgcagattctacagaaagagtgtttcaaaacagctcaagcaaaagaaaggttcaacmctgtgagatgaatgcacacatcaacaagtagtttctcagaatgcttctgtctagtttttatgtaaaaatatttccttttcagcataggactcaaagtgctccaaatatccacttgcagattctataaaaagagtgtctctaaactgctgaatcaaaagaaagtttcaactctgtgaggtgaatgcacacatcacaaggaagtttctgagaatgctactatctagtttttatgtaaaatatttcctttaccagcatatgcctcaaaacgctccaaatatacatttgcagatactacaaaaagagtgtttccaaactgctcagtcaaaacaaaggttcaa

SEQ ID NO: 931102 - DNA, 822 bp, Homo sapiens
aactttctcagaatgcttctgtgtagtttttatgtgaagatatttccttttccaacatatgcctcaaagcgctccaaatatccatttgcagatactacaaaaagagtgcttccaaacttctcaatcaaaagaaaggttcaactctgtgaggtgaatgcactcatcacaaagaggtttctgagaatgtttctgtctagttttttgtgaagatatttcgttttcagctacaggcctcaaagcgctccaaatatacttttgcagatattgcaagaagaatgtttgcaaagggctcaatcaaaagcaaggttcaactctgtgagttcaatgcacacatcacaaaaaattttctgagaatgtttctgtctagtttttatgtgaaggtatctccttttccaccataggcctcaaagagctccaaatatccacttgcagattctacagaaagagtgtttcaaaacagctcaagcaaaagaaaggttcaacactgtgagatgaatgcacacatcaacaagtagtttctcagaatgcttctgtctagtttttatgtaaaaatatttccttttcagcataggactcaaagtgctccaaatatccacttgcagattctayaaaaagagtgtctctaaactgctgaatcaaaagaaagtttcaactctgtgaggtgaatgcacacatcacaaggaagtttctgagaatgctactatctagtttttatgtaaaatatttcctttaccagcatatgcctcaaaacgctccaaatatacatttgcagatactacaaaaagagtgtttccaaactgctcagtcaaaacaaaggttcaa

SEQ ID NO: 931103 - DNA, 822 bp, Homo sapiens
aactttctcagaatgcttctgtgtagtttttatgtgaagatatttccttttccaacatatgcctcaaagcgctccaaatatccatttgcagatactacaaaaagagtgcttccaaacttctcaatcaaaagaaaggttcaactctgtgaggtgaatgcactcatcacaaagaggtttctgagaatgtttctgtctagttttttgtgaagatatttcgttttcagctacaggcctcaaagcgctccaaatatacttttgcagatattgcaagaagaatgtttgcaaagggctcaatcaaaagcaaggttcaactctgtgagttcaatgcacacatcacaaaaaattttctgagaatgtttctgtctagtttttatgtgaaggtatctccttttccaccataggcctcaaagagctccaaatatccacttgcagattctacagaaagagtgtttcaaaacagctcaagcaaaagaaaggttcaacactgtgagatgaatgcacacatcaacaagtagtttctcagaatgcttctgtctagtttttatgtaaaaatatttccttttcagcataggactcaaagtgctccaaatatccacttgcagattctataaaaagagtgtctctaaactgctgaatcaaaagaaagtttcaactctgtgaggtgaatgcacacatcacaargaagtttctgagaatgctactatctagtttttatgtaaaatatttcctttaccagcatatgcctcaaaacgctccaaatatacatttgcagatactacaaaaagagtgtttccaaactgctcagtcaaaacaaaggttcaa

SEQ ID NO: 931104 - DNA, 565 bp, Homo sapiens
acagggcaccaagtccccagataagagcggggggccctgggcccagcccacaaaaccattttttccttctaggttcccaggcttgtgataggaggggctgccatgaagttttccaacatgctctggagacattttggctcctcgttatttatgcaaatttctgcagctctattgaatttctcctcagaaaattggtttttcttttctacagcatcatcaggctgcaatttttcctaacttttatgctgagctttccttttaaacataagctccaatccaaattatayctttgtgaatacataaaactgaatgcttttaagagcatccaagtcacatgctttgctgcttagaagtttctttcgctagatactctaaatcatctctctcaagttcaaagttccaaagatctctagagcaagggcaaaatgctgccagtctctttgctaaagcataacaagagtcacctttgctccagttcccaacaagttcctcatctccatctgagaccacctcagcctggacctcattgtccatatcactatcagcattttggccaaagccattc

SEQ ID NO: 931105 - DNA, 586 bp, Homo sapiens
atttaaaaatagttttgtttaaaaacggcaaaacaaccctgagttaataatttagggcttgtaatggctggtgagtgtggcctgacttcactgatacaaaaagaagaaaagaaagggattgttgttccctttgctcacaaaacatttcgaagaaatgaaactgtggtggcagcaaaactgaaatacaagaggaaaatgtaaatgcatatagacggaaaataaagcattaacacgccaagaattatagtctcatcagacttcaaatctaactcaaagtctagggagcagtgatcctgaaaacctttttacacagctctactacaagcctcttatcagtgaaattaagggtcggcaaaactgtctctccttctgcatgagaatttgacctcckgttaactagctaagtcggctctctgcaaatgaggacagcttgtgtcaacaagcctaggcaacaatgcttctgatctaaaaagatgcttgatgggtaaactgcatctggactgggaaagccatgtttcggattccctgagtacgctgactcctggaaccaggcatgtctctttcagggatcctggggactttgcca

SEQ ID NO: 931106 - DNA, 586 bp, Homo sapiens
atttaaaaatagttttgtttaaaaacggcaaaacaaccctgagttaataatttagggcttgtaatggctggtgagtgtggcctgacttcactgatacaaaaagaagaaaagaaagggattgttgttccctttgctcacaaaacatttcgaagaaatgaaactgtggtggcagcaaaactgaaatacaagaggaaaatgtaaatgcatatagacggaaaataaagcattaacacgccaagaattatagtctcatcagacttcaaatctaactcaaagtctagggagcagtgatcctgaaaacctttttacacagctctactacaagcctcttatcagtgaaattaagggtcggcaaaactgtctctccttctgcatgagaatttgacctcctgttaactakctaagtcggctctctgcaaatgaggacagcttgtgtcaacaagcctaggcaacaatgcttctgatctaaaaagatgcttgatgggtaaactgcatctggactgggaaagccatgtttcggattccctgagtacgctgactcctggaaccaggcatgtctctttcagggatcctggggactttgcca

SEQ ID NO: 931107 - DNA, 553 bp, Homo sapiens
  misc_feature 277, 279, 280, 289: n = A,T,C or G
ttccagaaatgtgtaccatgcagactaatctgttatcagtatgcacttttggcaaacaaattggctaaaattgtactggctttttttttttttttttaaagcagaaggtcaaattgtccaatgccaaatattttttttattttttaaagttaacctcactgtttggttgatagactatgttacaggaggaagaccatctacaagacaatataccaatttacctagaggctaaaactccttattggtcatttgtgttttcttcatgggttttttgtantnntcagtctancagcaacaaggatcttagtgttcattayccaaactatctatattgtactataatctatgaatttgtttgctttcttggtaaatattagagtctttcgctgactaaagataatttgaactttttgccaacatttcatcggttgttggatcagtgcaatttgtatcaactgagtattggttttgtatttgttagctgatgaagtcagtaagaagagtcattgcagctccttgcagtaaattcattcactcattatttttcacatca

SEQ ID NO: 931108 - DNA, 575 bp, Homo sapiens
tgggtgatttctgcatttccatctgaggtactgggttcatctcactagggagtgccagacagtgggtgcaggacagtgggtgcagtgcaccatgcacgagccaaagcagggtgaggcactgcctcactcgggaagcgcaaggggtcagggggttccytttcctagtcaaagaaaggggtgacagacgtcacgtggaaaatcaggtcactcccaccctaatactgcacttttccaatgggcttaaaaaacagcacaccaggagattatatcccgcatatggctcagagggtcctatgcccacagagtctcactgattgctagcacggcagtctgagatcaaactgcaaggccacagggaggctgggggaggggcgcctgtcattgcccaggcttgattaggtaaacaaagcagcggggaagctcgaactgggtggagcccaccacagctcaaggaggcctgcctgcctctgtaggctccacctctgggggcagggcatagacaaacaaaaagacagcagtaacctctgcagacttaaatgtccctgtctgacagctttgaagagagtaatggttct

SEQ ID NO: 931109 - DNA, 575 bp, Homo sapiens
tgggtgatttctgcatttccatctgaggtactgggttcatctcactagggagtgccagacagtgggtgcaggacagtgggtgcagtgcaccatgcacgagccaaagcagggtgaggcactgcctcactcgggaagcgcaaggggtcagggggttccctttcctagtcaaagaaaggggtgacagacgtcacgtggaaaatcaggtcactcccaccctaatactgcacttttccaatgggcttaaaaaacagcacaccaggagattatatcccgcatatggctcagagggtcctatgcccacagagtctcactgattgctagcacggcagtctgagatcaaactgcaaggccrcagggaggctgggggaggggcgcctgtcattgcccaggcttgattaggtaaacaaagcagcggggaagctcgaactgggtggagcccaccacagctcaaggaggcctgcctgcctctgtaggctccacctctgggggcagggcatagacaaacaaaaagacagcagtaacctctgcagacttaaatgtccctgtctgacagctttgaagagagtaatggttct

SEQ ID NO: 931110 - DNA, 575 bp, Homo sapiens
tgggtgatttctgcatttccatctgaggtactgggttcatctcactagggagtgccagacagtgggtgcaggacagtgggtgcagtgcaccatgcacgagccaaagcagggtgaggcactgcctcactcgggaagcgcaaggggtcagggggttccctttcctagtcaaagaaaggggtgacagacgtcacgtggaaaatcaggtcactcccaccctaatactgcacttttccaatgggcttaaaaaacagcacaccaggagattatatcccgcatatggctcagagggtcctatgcccacagagtctcactgattgctagcacggcagtctgagatcaaactgcaaggccacagsgaggctgggggaggggcgcctgtcattgcccaggcttgattaggtaaacaaagcagcggggaagctcgaactgggtggagcccaccacagctcaaggaggcctgcctgcctctgtaggctccacctctgggggcagggcatagacaaacaaaaagacagcagtaacctctgcagacttaaatgtccctgtctgacagctttgaagagagtaatggttct

SEQ ID NO: 931111 - DNA, 602 bp, Homo sapiens
ggtaattctccttagtacttcctgttcactcggtagcgagaaccacaggcatacaggctcaaaccaccgcacgagtcattcaacactgcaaaccatacatgatagtcaacttcatcaatatataaatattctagattaaatattccacaaacaaacaaagtaaaattaacatcaagagaaaagagataggaaaaaaggttaacaaaccagtccagggagggtgacaaagaggaaaacagccttctggtctgggccmgggggtccatcagtcttgcaatgaagagtctttgatgtgtcagagccttcggcagcagatgccagcattgatcgcaagtgacagcaagacagtgtcagtgaagagctgcttcaagttgccgaaactctgctcttttatggtcacagaatcttctagtggggactgatagtggaagagtgtgctgcttttacgtgtccttatctggctgggtacagtctttatcttgtattggcttattaagcaaaacatcttgtccttgttggcaaagtgccctatgaaatgtacaatggaatctgtttctaagatggagttacttatgtcaagggtgcccaggaacaaccagacc

SEQ ID NO: 931112 - DNA, 616 bp, Homo sapiens
gaaagataaaatggaaaaagatggagggagggattcaaaaaatgtgaggggcttgaccaccattgctggctttaaaaatggaagaaatggccaggcgcagtggctcacgcctgtaatcccagcactttgggaggccgaggcgggtggatcacaaggtcaggggtttgagaccagcctgaccaacatggtgaaacccggtctctactaaaaatgcaaaaattagctgggcatggtgacaggtgcctgtaatcccagctactcaggaggctgaggcaggagaattgcttgaacccagaaggcggaggttgcagtgagccgagatcgcaccactgcactccagcctgggcaacagagcaaggcttggtctcaaaaaaaaaaaaaaaaatggtggaaatgtgtcatgaaccaagggatatggggacctctagmaaccgggattggtcctcacatgacaaccatcaaggaagtggggatctcagttctacaaactctagcaactgaattctgtcaacaacttgaatgagcaaagaagttgtttctccttagagtctccagaaagaaacatagccctggtgagaccatcttgaatttttgacctatagagctttaaaataat

SEQ ID NO: 931113 - DNA, 614 bp, Homo sapiens
tgacttcactgctaaattctaccaaatttttaaagaactaaaatcagttctcacaattttgcaaaaaagtaaaaaggagtacaaactttcttactcattttataagggaagcattaccctgataccaaaaccagacaaggacacaacaataaaagaaatctacagaccamtattttgaatgaacatagacgcaaatatcctcaacaaaaaactaacaaatgaaatccaacagcatatcagaaggattatacattgcaattacgtgggattatttttctaggaatgcaaggatagtttaacatatgcaagtcaataaatgtgatacatcacagcaacaattgaatgatcacctcaatagtggcagaaaaagcatttgataaaattcaacattacctcatgaaaaaaaaaaaaacactcttaacaaattaagtatagaagtgtacctcaacacagtaaaggccacatatgacaaaaccacagctaatatactgaatggagaaaactgaaagcttttcccttgaaaaactgggataggacaatgatgcccactttcaccactcttatttaacatagcactggaagtcctagccagaataattaggcaagagaaagga

SEQ ID NO: 931114 - DNA, 569 bp, Homo sapiens
caacctctgcctcctgggttcagtgattctcctgcatcagcctcctgagtagctgggattatcagcacacaccatcacgcctggttgatttttgtatttttagtacagacggggttttgccatgttggccaggctggtctcaaactcctgasctcgtgatctgccccccctccgcctcccaaagtgctgggattacaggcatgagccaccacacctggcctaaacccctaatttcgttcagtcaaagagacggatttgagactgatctctcatctcagctgcaatacatgaataaagccttctttcctggcaatactcgtttcagtgattggctttctgtgtggcgagcagcaggacctagaccaaacccctaggtcatttcagtcacagcataaacactgactatgttcaggctatggactctataattttcatttgagcttttagattattacaaattaggaattgtacttgtgtgtatgtgtgatttctgggtagctagaaagggtgagaagggttggcattttgaaagtacattagaaataaacctatggctttctagatttcca

SEQ ID NO: 931115 - DNA, 569 bp, Homo sapiens
caacctctgcctcctgggttcagtgattctcctgcatcagcctcctgagtagctgggattatcagcacacaccatcacgcctggttgatttttgtatttttagtacagacggggttttgccatgttggccaggctggtctcaaactcctgagctcgtgatctgccccccctccgcctcccaaagtgctgggattacaggcatgagccaccacacctggcctaaacccctaatttcgttcagtcamagagacggatttgagactgatctctcatctcagctgcaatacatgaataaagccttctttcctggcaatactcgtttcagtgattggctttctgtgtggcgagcagcaggacctagaccaaacccctaggtcatttcagtcacagcataaacactgactatgttcaggctatggactctataattttcatttgagcttttagattattacaaattaggaattgtacttgtgtgtatgtgtgatttctgggtagctagaaagggtgagaagggttggcattttgaaagtacattagaaataaacctatggctttctagatttcca

SEQ ID NO: 931116 - DNA, 563 bp, Homo sapiens
tgctaatgttgacaaatgcagagacatgtgacctcattcacagtaggacacaaaacagttctctcaactccaccatttcctggtgctgccccttagcagtcaaacttttcatcagcccataacccctgccaaccactgatctgtttctctctctctctctctggagtttttccctttctggaatgttatatgcatggtattttacaatgaataatcttttgatagtgacttctttaactaaacataatgcattcacccatgtagtgtacaccaacaataaaatgctgagtatgattccattgcatggatgaatcattttgtttttaatccattctctacygctgcaggaggctggagctgtttccagttttagaattgtatgaataacactgttataaacgttcatgagaaagtttccgtgtgaacctctgctttcatttctgtgtgataaatacttactagtagtattgcttggtcataatataagggtatatttaacctcatgagagactatgaaaatacttttcagagtagctatatcattttgcagtcccaccagcaat

SEQ ID NO: 931117 - DNA, 563 bp, Homo sapiens
tgctaatgttgacaaatgcagagacatgtgacctcattcacagtaggacacaaaacagttctctcaactccaccatttcctggtgctgccccttagcagtcaaacttttcatcagcccataacccctgccaaccactgatctgtttctctctctctctctctggagtttttccctttctggaatgttatatgcatggtattttacaatgaataatcttttgatagtgacttctttaactaaacataatgcattcacccatgtagtgtacaccaacaataaaatgctgagtatgattccattgcatggatgaatcattttgtttttaatccattctctactgctgcaggaggctggagctgtttccagttttagaattgtatgaataacacwgttataaacgttcatgagaaagtttccgtgtgaacctctgctttcatttctgtgtgataaatacttactagtagtattgcttggtcataatataagggtatatttaacctcatgagagactatgaaaatacttttcagagtagctatatcattttgcagtcccaccagcaat

SEQ ID NO: 931118 - DNA, 576 bp, Homo sapiens
attgtcttaattgtttttctctgtttaccaagataataaaagctcattgttttgaacccaatgatacggaatgctatcaagaaagaaaggaaggctgagcgcagtggctcatgcctataatcccagccctttgggaggccagggtgggaggatcacttgagcccaggagttcaagaccaggctgggcaacatagtgagacctcatttctataaaagtatttataaatttttatatagtagaatttaaaaactagccgggyatggtggtgcatgcttgtactcccagctaaggctgtactctggagactaaggcaggaggatggcttgagcccaggagttcaaggctgcagtgagccatgattgcatcactgcactccaacctcagcaacagggcgagactctgtctcaaaaagaaagaaaaaagggagcaaaagcctgggcccagtggctcgcgcctctaatcccagcactttgggaggccaaggcgggcggaacacttgaggtcaggagttcaagaccagtctggccagcatggtgaaaccccgtctctactaaaaatacaaaaattagtcaagt

SEQ ID NO: 931119 - DNA, 698 bp, Homo sapiens; identical to SEQ ID NO: 918858

SEQ ID NO: 931120 - DNA, 593 bp, Homo sapiens
atggggttttaccatgttgaccaggctagtctcaaactcctggcctcaagagatctgcccacctcagcctcccaaagtgctgggattataggtgtgagccaccacacctggcttccactcccttttgtgatgctcagagaggctaggtaattttcccaaggacacacaagcaatgaaacaggctggcatcccagcccaggtctgttatgttgcagagtttgaacatctaacccccctgctgtgcccctctcccccagcctgcatccacktacattctgtaaagtacgtgacctactgcctggcacacactagtgtccataacgtgtttgtaggcaggaagcgtgttattgttcataggagtttgagttttgaagtaagactccttgcatgggaatctactgctggctgtttgtgtgaccttgggcacatttgctcgcctctctaacccttggtttcctcttatgcaaaatgggagtgatgacagcaatggtccttcccgggatttctgggaggcttaaagggattaatgagtgtgaagtgttcagcatagcgcttgggacggtgccatgtgtcagtggtgctctttcagtaat

SEQ ID NO: 931121 - DNA, 593 bp, Homo sapiens
atggggttttaccatgttgaccaggctagtctcaaactcctggcctcaagagatctgcccacctcagcctcccaaagtgctgggattataggtgtgagccaccacacctggcttccactcccttttgtgatgctcagagaggctaggtaattttcccaaggacacacaagcaatgaaacaggctggcatcccagcccaggtctgttatgttgcagagtttgaacatctaacccccctgctgtgcccctctcccccagcctgcatccacgtacattctgtaaagtacgtgacctactgcctggcacacactagtgtccataacgtgtttgtaggcagsaagcgtgttattgttcataggagtttgagttttgaagtaagactccttgcatgggaatctactgctggctgtttgtgtgaccttgggcacatttgctcgcctctctaacccttggtttcctcttatgcaaaatgggagtgatgacagcaatggtccttcccgggatttctgggaggcttaaagggattaatgagtgtgaagtgttcagcatagcgcttgggacggtgccatgtgtcagtggtgctctttcagtaat

SEQ ID NO: 931122 - DNA, 593 bp, Homo sapiens
accacctggtcctcaatctgacagacttcagttccctgccagccgcaaaccattaaaacaaggcagtatcgtcctcacatagtaaccaggggcaccctgtgctgttgatattcaaagcctgcctctctcttgctgcccctgcttgttcatctgttcccaagtgcaccccggtgtggccctgtgtggtgtgcagtgtcctcccgcaggaccatgagtagatgtgggtaataaaatgctgcccatctatctgcccagtgttgcgatgtgttcaaccatctcattctgtttagggcagtggatgccttcctcactaatgaggtgaatacgaggtcatcatagcactataaaaccacagtaatcaagccagtttgctattggtgaaggaaaaaaagagtacagaaatagrcccacatgtatgtgcacggccacttgattttccatagagatacaaatgcaattttgtgaagaaagaatacacttttcaacaatagtgtttttttatattaaaaaaagaacttaaattcttaatttgctccatatacaaaaattaattaactcaaaacaaatcataaacctaaatgcaaagattgaaa

SEQ ID NO: 931123 - DNA, 603 bp, Homo sapiens
aagttggagtgcctgttaaatgggtattctctgtctctgttttgactgaggcccaaagatagtaactgtcaatgctactcatattgcagaacaatctgtgaatccatcaaagcagaccttgccaaggaggcggctgggaataatttggggaccctcggaagaccacttgcctccattcttttagaaatattggacacgaaattagaaaggttttytgtgggaaagatattggtatgctgctgttccactacttggcctccaggacttttctgagggacaaagatgcctgctagggattcactttatatctgtgtcaggagatgatgggtctgtgttagtctgttttatgctgctgtaacagagtaccacagactgggtaatttatgatgaacagaagtttatgtggttcatggttctggaggctggaagtccaagagcatgatgccgacatctgacaagggccttcatgctgcattatgtcatgacagaaagtggaacggcaaaagaggtcaagagcaagagcaagaggaggctgaacttgcttttataacaagcctactctcttaataatgaacccacttccacgataatggtgttagtcca

SEQ ID NO: 931124 - DNA, 647 bp, Homo sapiens
ttacctgagtgtttcactggcaacaaggggctcattccacacctgcacaccaaagccagcatttttatgcaccaccagggagcttgaggtcacagcccaaactggctacatgcccccggttcctgagcacactgtccagacacctggggatggcccagcccagtccctttctggtggtacctgaacactcctcctgaagttgggggttgggcccactcaatttactgctagcaacatagatgacacccaccccccaacacacaacctgtgggtctgggaactggcacatccaacccattgcaaccactgccaacaccagtacaaaccacttgggtcccaaataaattgttcctccactgctattgtcatttcccacaccaaacccactgcccaggaacccgagaacatgcctatccacctgccccaccactgccatttctrgcacccaagaaagccatctggaggcccaaaagtcagtctgcctgggcctgctaacatctgcactaacgtatgtcactctgagggcccaacgacagacatactctgcctagtactgctacctctggggctcaaaaattgacctaattggcatcccagaccacagcaaaacttcaccacagcctgaactaacatctgcaacccaagcc

SEQ ID NO: 931125 - DNA, 647 bp, Homo sapiens
ttacctgagtgtttcactggcaacaaggggctcattccacacctgcacaccaaagccagcatttttatgcaccaccagggagcttgaggtcacagcccaaactggctacatgcccccggttcctgagcacactgtccagacacctggggatggcccagcccagtccctttctggtggtacctgaacactcctcctgaagttgggggttgggcccactcaatttactgctagcaacatagatgacacccaccccccaacacacaacctgtgggtctgggaactggcacatccaacccattgcaaccactgccaacaccagtacaaaccacttgggtcccaaataaattgttcctccactgctattgtcatttcccacaccaaacccactgcccaggaacccgagaacatgcctatccacctgccccaccactgccatttctagcacccaagaaagccatctggaggcccaaaagtcagtctgcctgggcctgctaacatctgcactaaygtatgtcactctgagggcccaacgacagacatactctgcctagtactgctacctctggggctcaaaaattgacctaattggcatcccagaccacagcaaaacttcaccacagcctgaactaacatctgcaacccaagcc

SEQ ID NO: 931126 - DNA, 626 bp, Homo sapiens
aagcagacagaaaaatgtgcaaaggcgagactggcctagcctcccagcctacatctttctcccgtgctggatgcttcctgccctcgaacatcacactccaagttcttcaagctttgggactcagactggcttccttgcttctcagcctgcagatggcctgttgtgggaccttgtgatcgtgtgagttaatactccttaataaactcccctttatgtaatatatatatatwttttttctattagttctgtccctctagagaaccctgactaatgtagttgccaactttttgcctgctgccatccatgtaagatgtgacttgctcctctttgccctccgccatgattgtgagccctccacagccacatggaactgtgagtacaattaaacctctttcttttttaaattgaccagtcttgggtatgtctttatcagcagcatgaaaacggactaatacacaccccctccccaatacaccccgggtttccatccctgactccaggcccagagtcctggacatctgtcaggacagtcctcacctgttcaaggatcccattcccatcccagccatcacccattctccaaaattcagagtcccttacagccttcaagatgcggttcaaatgct

SEQ ID NO: 931127 - DNA, 603 bp, Homo sapiens
gtattaaaccagaacatgatgtgcatgacaggcaatctgataagcagttgcaaagaccaaaaaaaaaaaattcacctttttatacaggcaagcagatataattcattacatacatgctttttaagataaacagtaaccagccctcaaataagaggacttgacagcaccatttgtcacacataaatcatcctaaatttgcctggtgattgagatgtccctctgtattagcgaatttactttattctcatctctttattacacaaggcagttttgcatgttaggctcctacctccctatagaaactgggagatagtggtgttatcacccttgrtgtttgcatttaaaagagatggctcccaagtacttgagaaggacaagcttgggtcctaaaactgacaaagcacctatttagttttagaaaaggcttatatacattttaaagagataagaaagtatttacaacgttaagtttgctaagatagatgctctaaaaaaaaaaaaggaggaaaatgtcttccatattttcaacagagataattaggcctcttatttttaatttatatttgttcttacacatgctttttccatagtatcactccctga

SEQ ID NO: 931128 - DNA, 590 bp, Homo sapiens
caatggaaattttaaacaagtggaatcaagatcctgaagcatttctttgaagaattgaaacaagtgatgcaatatagttttaacagtatgatcttgaagccaaagcacaaccaaagcaatggctaccaggaggtggaagtggtccarccaaaacaaaagcagaccagtcaacagcaaagatcacggcaacagtgttttagatgctgaacgtattttacctgttgtctttctgaagggcctaagaatgataacatctgctcattatgaaagtgttttgaaaaagctaacaagagctttaacagaaaaacaacccaggaaaacctcatcagtttttctttaccatgacaacactctagttcattcctctcattaaacaagggcaattttgtgagagtgttagtaggaaatcattaggccctcacctgaaggttctgatttggctccttctaacttctttttgtttcctaatcttaaaatgtctttaaagggcacccattttttttctgcaaataacaatgtaaaaatgattgccttgacatggttgaattccttggatgctcagttcattagagatgaactaaatgactgta

SEQ ID NO: 931129 - DNA, 597 bp, Homo sapiens
gaactttcaatggaaattttaaacaagtggaatcaagatcctgaagcatttctttgaagaattgaaacaagtgatgcaatatagttttaacagtatgatcttgaagccaaagcacaaccaaagcaatggctaccaggaggtggaagtggtccagccaaaacaaaagcagaccagtcaacagcaaagatcacggsaacagtgttttagatgctgaacgtattttacctgttgtctttctgaagggcctaagaatgataacatctgctcattatgaaagtgttttgaaaaagctaacaagagctttaacagaaaaacaacccaggaaaacctcatcagtttttctttaccatgacaacactctagttcattcctctcattaaacaagggcaattttgtgagagtgttagtaggaaatcattaggccctcacctgaaggttctgatttggctccttctaacttctttttgtttcctaatcttaaaatgtctttaaagggcacccattttttttctgcaaataacaatgtaaaaatgattgccttgacatggttgaattccttggatgctcagttcattagagatgaactaaatgactgta

SEQ ID NO: 931130 - DNA, 695 bp, Homo sapiens
ctctgtggatgtgtctgttctggacattgtatatgagtggaatcatgcactctgtggctttcgtgtctggcttccttcactcagcgtgacgttttccaggctcatctgtggggtggcaagcggcagagctgcaattcctttccgtggctgagtgatcctctgttggatggataaggccgtacttcgggcatttgggttgtttctgctttagggctattatgaataatactgctatgaacattcgtgtrtgagttttcgtgtggatggatcatttctcttgggtatatacctaagagtgagattgctggctcatagggtaacgctatgtttaactttctcaggaattgctaaaccgttttccaaagcgtctgccactttcatgacttaactttggtgccactttggtgcctgagtttactgtgaggagtaaaggatattcctggccggtcacggtggctcacacctgtaatcccagcactttgggaggccaaggcgggcagatcacttgaggtcaggagttcgagaccagtttggccaacatggtgaaaccccatctgtactaaaaatacaaaaattagccaggtgtgatggggggcaggggggaggcggctataatcccagctactcgggaggctgaggcatgagaatcacttgaacccaggaggcagaggttgcagtgagctgacattgcacca

SEQ ID NO: 931131 - DNA, 574 bp, Homo sapiens
tgtatatttagtagagacagggtttcaccatgtggaccgggctggtcttgaactcctgacctcaaatgatatgtctgctttggtctcccaaagtgctgggattacaggcatgagccactgcgcccagactgttattttatttctttttatggctaggtagtattccatgccacattttctttatctattcattggttgatgggcatttagattggttccacawttttacaattgcaaactgtgctgctataatgtgcatttgtcttcttcatataatgacatcttttcctctagatagatacctagtagtgggattgctggatcaaatggaggtactacttttagttctttaaggcatctccaaactgttttccacagtggttatactagtttacattcccaccattaatgtaaaagtgttcccttttcaccacatccatgtcaatatctattatattttgatttttgaagtatggccattcttgcaagaataaggtgatatctcgtgtttttaatttgcatttcccagataattagtgatgctgagtattttttcatgtatttgtgggccatt

SEQ ID NO: 931132 - DNA, 566 bp, Homo sapiens
aggagctacccctctccaggacctcctccagggctgagcactcgatgggatgacctgtctacaaagaggagctacccactgcaggtcttctctgagctgttctaacactcaataagctactctttgttttgcttaccctccacttgtctgcctacctcattcttcctgaacataggaaaakaacttgggcaaaggcaccactagccatagaggtttccagccagaaaaatgacactccaaagatcctgtaacaaaatcacaacaacgaaaacttttttcagtgtgatatagaaataatctccaaggatattatcaataatataaaataaccttacaaattacagctattttttatatttcaaataatttctattgttgaaagaagatactaataaatgtactttaagataagtaattagataaatatattaaaacttgacagcaaagttcatatacttacttaaaaacagtacatggccaatgcattatatgactataggtagtaagtaattataaatattaagtaagtaaattaaacctgatagcaaagttcatgtgtttactta

SEQ ID NO: 931133 - DNA, 624 bp, Homo sapiens
gataacatctcacaccagtcagaatggctattactaaaaagtcaaaaaacaacagattctggtgaggctgcaaagaaaagggaatgcttatacaccgtttgcaggaatgtaaattagttcagccactgtggaaagcagtttggagattttccaaataacttaaaacagatctaccatttgatccagcaatcccattactgggtatatatccaaaagaaaatcattctactaaaagacacatgcacttgtatkttcatcacggcactgtttgttttaaattttttattttaatttttctgggtacgtggtaggtgtgtatatttatgggatatatgagatgttttgatacagacttgaaatgtgtaataatcacatcatgtaaaatggggtatccatctccctaagtatttatcatttgtgtcacaaattatccaagtatacactttaaggaatttaaaaatatacaattaaattattattgactatagtcaccctgttgtgctatcaaatactaggtcttattcattgtttcaatttttttgtaccccttaaccatccccacctccccgacaccctcccactacatttctcagcctctgacaaccatcctctactccctatctc

SEQ ID NO: 931134 - DNA, 462 bp, Homo sapiens
acctccgtggctgtaataaggacgaaattagatacagtgtgtaggttgcctagctggtgtctgacacaaaaaggtcctcagtaaacagtatgaatggattcaaagccatttaacctctaaacttccctccactctatgcagaaaggccttctctccagcccatgaaaccctaattgccttcttttctccccacacttgctattgtgggctccctactggaaggctctcctttcactcagcctaaccaaatcccccacaaaagcctgactcaggtccccactcagcagcctcaggcctggcatcacatggcctctcgatggtggamccagcattgcgggttgctctctcggcaggcatgtctggccatccacacctgggggcagagaacactccatcttcccctgtgccctccacaacacccaagacaaagctgggcacatgcagcatgctcgataggggctg

SEQ ID NO: 931135 - DNA, 612 bp, Homo sapiens
atgggggaattgtaaggagagtttataggctttaaaaggccatgctgtagcaggcgagtgataacaggctttaatctttttaaagcgtgctgcaggattggatattggcgttgagtggggtaagggtgattaggttttaatgagatggtaaggggtgcatgatcggtcgccaaggagggagtagaggtatcttatacttgtgggttaaggtggggggatacaagaggaggacgcaaaggaggctttggattgggaagaagggcggcaatgagatgtggctgtagtccaggaatagtcagggaagcagataatttagttaaagtgtctcggcctaataagggaactgggcaggtggggataactaaaaaggagtgcttaaaagagtattgtctaagttggcaccagagttggggagttttaagaggtttagaagcctggccgtcaatacscacatcagttatggaggcaagggaaacaggcccttgaaaagaaggtaatgtggagtgggcagcctccgtattgattaagaaggggacggacttaccctccactgtgagagttacttgaagctctgcgtccgtgatggtctagggggcttccgaggaaatcagg

SEQ ID NO: 931136 - DNA, 586 bp, Homo sapiens
cagcagacttaaacgttccagcctgccaactctgaagagaacagtggatctcccagcacagcactagacctctgctaagggacagactgcctcctcaagtgggtccctggtgcccatgtctcctgactggaagacacctaccagcagggatcaatagacaccycatacaggagagctctggctggcatctggcaggtgcccctctggaacaaagcttccaaaggaaggaccaggcagcaatctttgctgttttgcagcctctgctggtgatacccaggcaaagagggtctggagtggacccccagcaaactccagcagacctgcagcagagggtcctgactgttagatggaaaactaacaaacagaaaggaatagcatcaacaaaggacatccacagacaaaccccatccaaaagtcaccaacatcaaagaccaaaggtagataaatccatgaagataaggaaaatccagcacaaaaaggctgaaaattccaaaaacaagaaagcctcttctcctccaaaggatcagaactcctctacagcaagggaacaaaattggatggagaatgagtttgatgaattgacaga

SEQ ID NO: 931137 - DNA, 607 bp, Homo sapiens
atttaccagataaatagaactaaaaacaaaaaccacatgatcatctcaatagatgcagggaaggcatttgataaaattcaacatcccttcatgttaaaaattaaacatccctttgtgttaaaaattcaacatcccttcatgttaaaaatcctcaacaaactaggcattcaaggaacatactcagccaacgtcatactgaatgggcaaaagctggaagcatttcccttgaaaacgacactgagaaaagaataccctctctcattactcctgtagcactggaagccctagccagaagaataaggcaagagraaaaaataaaaggcgtccaaaatgaaagagaggaggtcaaactatccctgtttgcagatgatatgattctatacctaaaaaaccccagagtctctgcccaaaagctccttcatctgataaaaaatcttcagcacattttcaggatatgaaatcaatgtacaaaaatcagtagcattcctatacaacaacaacatcgaatctcagagccaaacctacaatgcagtcccattcacaatagccacaaaaataataaatacagttaaccatggaagtgaaggacctctacaatgagaattac

SEQ ID NO: 931138 - DNA, 584 bp, Homo sapiens
tcataatagcaaagacatggaatcaacctaaatgcccatcaataatagactggataaagaaaatgtggtacatatgcaacacagaataatatgcagccataaaaaggaacaagatcacatcctttgcagggacatggatagagctggaggccatcatttttagcaagctaacaaaggaacagaaaaccgaacaccacatgttcttacttatcagtgggagctaaatgaagagaacacatggacacaaagacgggamctatagacacaggggcctacgagagggtggcggttaaaagtagggagagtagcagaaaaaaaaacattgggtaccaggcttagtatctgggtgacgaaataatctatacatcaaatcccagtgacatgaatttccctatataacaaacctgcaaatgtacccttgaacctataataaaagttaaaaaaaaaaaagcaaatcctatatgccaatgtgatagtagaagaggtagggcctttgagaggtgattagctaatgaggacagagttctcacgaatgggattagtgcccttataaaagacatgttaggaagcaggtcctcaccaga

SEQ ID NO: 931139 - DNA, 858 bp, Homo sapiens
ctaccagattaacaaagaagagctggtaccattcctactgaagctattccaaaaaattgaaaaggagggactcctccctaactcattgtatgaggccagcatcatcctgataccaaaaccttgcagagatacaacaacaacaacaacaacaaatttcagacaaatattcttgatgaacattgatgtaaaaatccccaacaacatactggcaaaccgaatccagcagcacatcaagaagcttatccaccatgttcaagtcagcttaatccctgggatgcaagactggtttgacatatgcaaatcaataaatgtgattcatcaygtaaacagaactaaggacaaaaaccacatgattatctcaatgaatgcagaaaaggcttttgataaaattcaacatcccttcatattaaaaactgtcaataaactaggtattgaaggaacatatctcaaaataacatgatccatatatgtcaaacccacagccaatatcatactgaacaggcaaaagctgagagtattccccttgaaaacaggcacaagacaaagacgccctctctcaccactcctattcaacatagtattggaagttctggccaggaatgtcaggcaagagaaagaaataaagggtattcaaacaggaagagagaaagtcaaactatctttgtttgcagatgacatgaccctatatctagaaaaccccacagtctcaagatacaaaatcaatgagcaaaaatcgttagccttcctataaaccaacaacaggcaagctgagaactaaatcatgaatgaattaccattcacaattaccacaaaatgaataaactacctaggaatatagctgaaaagggagctaaagga

SEQ ID NO: 931140 - DNA, 745 bp, Homo sapiens
caagacaaagacgccctctctcaccactcctattcaacatagtattggaagttctggccaggaatgtcaggcaagagaaagaaataaagggtattcaaacaggaagagagaaagtcaaactatctttgtttgcagatgacatgaccctatatctagaaaaccccacagtctcaagatacaaaatcaatgagcaaaaatcgttagccttcctataaaccaacaacaggcaagctgagaactaaatcatgaatgaattaccattcacaattaccacaaaatgaataaactacctaggaatatagctgaaaagggagctaaaggatctctacaaggcggtctacaaaccaatcctcaaagaaataagagatgacacagacaaatggaaaaacattccatactcatggagaggaagaataaatattattaaaatggtcattcagcccaaagcaatttatagattcaatgctacttccattaagccaccactgacattcttcaaagaactagaaaaaaatactattttaaaattcataygtaaccacagaagagcccaaataaccgaagcactgctaagcaaaaagaataaatctgggccaggcgcagtgactcatacctgtaatcccagcaatttgggaggccaaggcaggcagatcacctgagatcaggagttcgagaccagcctggccaacatggtgaatcccaaactttactaaaaatacaaaaattagctgggcatggtggtggg

SEQ ID NO: 931141 - DNA, 745 bp, Homo sapiens
caagacaaagacgccctctctcaccactcctattcaacatagtattggaagttctggccaggaatgtcaggcaagagaaagaaataaagggtattcaaacaggaagagagaaagtcaaactatctttgtttgcagatgacatgaccctatatctagaaaaccccacagtctcaagatacaaaatcaatgagcaaaaatcgttagccttcctataaaccaacaacaggcaagctgagaactaaatcatgaatgaattaccattcacaattaccacaaaatgaataaactacctaggaatatagctgaaaagggagctaaaggatctctacaaggcggtctacaaaccaatcctcaaagaaataagagatgacacagacaaatggaaaaacattccatactcatggagaggaagaataaatattattaaaatggtcattcagcccaaagcaatttatagattcaatgctacttccattaagccaccactgacattcttcaaagaactagaaaaaaatactattttaaaattcatatgtaaccacagaagagcccaaataaccraagcactgctaagcaaaaagaataaatctgggccaggcgcagtgactcatacctgtaatcccagcaatttgggaggccaaggcaggcagatcacctgagatcaggagttcgagaccagcctggccaacatggtgaatcccaaactttactaaaaatacaaaaattagctgggcatggtggtggg

SEQ ID NO: 931142 - DNA, 548 bp, Homo sapiens
gagggagactctgtctaaaaaaacaaaaacaaaaagtttaatctgagattttttatctgacaaacgcaacctttaaaagagcctaaatggtcaatcactacttttaactgcacttgtgtacataaccagtacaagtttaatgagattaaacttatttagcaaacaaatcaatctgactttgattatctttgacagaaatgagagtgaatatagagagaaaagttatgtttcgggagaaaactgcagtgcacccaatattagattctagctgtttttttttttttyctgaggttttattatctgcctgcaatctgcaatagatcctcaatttttctagtttactacaatatttagctacaacactccaaattaatatttcatttttttccctgctattctggcttggaatcactaaaattataaacttttcatttcttgaagtccttcaaactgaaactggatgacttgacataagcttcagaaaaattaccacaacagcttgtgtgtggcccatctttatgacattcaaactgcaaactaatccaatg

SEQ ID NO: 931143 - DNA, 667 bp, Homo sapiens
atttcaaggatttgattatatatataaaatattaaatcacttatacatataacatcgtgtgtgtgtgtgtgtgtgtctccttttactgagttacctcctgatttttatgactttaggatgagaaccagggctatttttctaataacacagatacctttcctgagaaaaatcatcctagccatccacaatggcaaagatcacatatgtgtatgcatgttcatgtggtcacatatgtgtgcatgcatgtatacatgtctgcatgaccacatrtgtgtatgcatgtgtattagggttctctagagggacagaactgatagaatagatgtacatataaaagggggtttattaaagagaatcaactcacatgattacaagataaattcccatgataggccatttgcacgttgaggagcaaggaagccagtggtgcatcagtccgagtcccaaaacctcgaaagttgggaagtaaacaatgcagtcttcagtctgtggccaaaggcccgagagcccctgaaaaatcactggtgtaagtccaagagtctaaaagctgaagaacttggagtctgatgttcgagaccaggatgcttccagcacaggagaaagatgaaagccagaagactcagcaagtctgttcttccatcttcttctgcctgctttattctagctg

SEQ ID NO: 931144 - DNA, 446 bp, Homo sapiens
gtcacatatgtgtgcatgcatgtatacatgtctgcatgaccacatatgtgtatgcatgtgtattagggttctctagagggacagaactgatagaatagatgtacatataaaagggggtttattaaagagaatcaactcacatgattacaagataaattcccatgataggccatytgcacgttgaggagcaaggaagccagtggtgcatcagtccgagtcccaaaacctcgaaagttgggaagtaaacaatgcagtcttcagtctgtggccaaaggcccgagagcccctgaaaaatcactggtgtaagtccaagagtctaaaagctgaagaacttggagtctgatgttcgagaccaggatgcttccagcacaggagaaagatgaaagccagaagactcagcaagtctgttcttccatcttcttctgcctgctttattctagctgtgc

SEQ ID NO: 931145 - DNA, 667 bp, Homo sapiens
atttcaaggatttgattatatatataaaatattaaatcacttatacatataacatcgtgtgtgtgtgtgtgtgtgtctccttttactgagttacctcctgatttttatgactttaggatgagaaccagggctatttttctaataacacagatacctttcctgagaaaaatcatcctagccatccacaatggcaaagatcacatatgtgtatgcatgttcatgtggtcacatatgtgtgcatgcatgtatacatgtctgcatgaccacatatgtgtatgcatgtgtattagggttctctagagggacagaactgatagaatagatgtacatataaaagggggtttattaaagagaatcaactcacatgattacaagataaattcccatgataggccatttgcacgttgaggagcaaggaagccagtggtgcatcagtcygagtcccaaaacctcgaaagttgggaagtaaacaatgcagtcttcagtctgtggccaaaggcccgagagcccctgaaaaatcactggtgtaagtccaagagtctaaaagctgaagaacttggagtctgatgttcgagaccaggatgcttccagcacaggagaaagatgaaagccagaagactcagcaagtctgttcttccatcttcttctgcctgctttattctagctg

SEQ ID NO: 931146 - DNA, 683 bp, Homo sapiens
cctcagcccctgggtctgacatcgtccatttgtcattctcactggacttccctccttgcactggctcccactcccccaggacctggtggacggccacgtgagaaggatacaaacaggccatgcccctttctttctccccctctcaatgcctgcagtggtgggttccctggggtagtgacctgagatttactcrttatggggtctctagcccagagcagggcatggtacctaatagtcaccccatgaatgctcagtgaaagaaggcgtccaccacaaggtcctggggaaccaagaattccactgtggcccataaattctaagtcccacaggattctggaatgggagatgggaacggccttcaaaagtggcctctcttttaacccattatactggcaactgagccatgtttccccatcctggacacatctagagggcactgcctaaaaccacacacatctccccacccaggacagtgcagggccttagcctgggggatgcaggtggacagggagggggtgagccatgaaagctgaagaggagaaagcaggtgaaaggggacggcagggtggaaacaagagatggaaatgggggcagagaatggggggtaagaggggaagagcaaggagtgggatgcagatctagctactaaggaaaagtcctggagagaacactgtcctctcctg

SEQ ID NO: 931147 - DNA, 603 bp, Homo sapiens
tgttctttaatattgtcttgtcaattctgtgtcttttgcctttccatatcaattttatagtttattgatattgaaaaaaataacttgttaggattttgaatggaattgcattgaatctacagaagctacagatcacgttgggaagaactgatatcttgacaatattkattcttctttttgataaacacgaaatatctctccatttatttagttttcctttggctttattcaatacagttttgtggttttctgcctatagatcctgtacacattttattagatttataaccaagtatttcatttttttgggttctcatgtaagtaatattgtgtttctaatttcaaattgtccattttcattgctgctgtacaggaaagcaattgacttctgcatacaatcttgtatcctgcagccttactgtaattccttaatagctccaggaggttttctgtcagctctttcagattttctacaaagatgatcatgatgatgtcatctgtaaacaatgaggttttatttcttccttcccaatatgaatatattttatttcctttacttttttattgcattagcatgaactttagtatgatgaagaagagcaa

SEQ ID NO: 931148 - DNA, 751 bp, Homo sapiens
acccgaaacaataaattcctgctggagaaaactgtgtccagatgtgtgcgtgaatgccgaagatacacaacagagcaaatcaaggaaatcatgaaagagatttggatatggcataaaatgtagtgggagaagagtttcaagatatggatcttagaaaaattcaagagttaatagacaccacgctagaggaactaataggagatgacttgatggagatgagtgcttctgaaccagtgccagacaatgaggatgaagacatagaagaagcagtgccagaaagcaaattgacgttagaccatctggcagaagggttccgcttattcaagattgcttttgacttctttcacgacatgaactcttctayaatatggacactaaaacgaaagctaatggtggaagaagaactggtactgcacagaaaccttttgagaaatgtcagacagaaattacaaatttctttctttctttctttctttctttctttcttttctttctttctttctttctttctttcttttctttctttcttttctttctttccttcctgccttccttccttccttctttctctttctttccttctgtctttctttctcttttcttttcttttctttttttgagatagagtctcgctgtgtcacccaggctggagtgcagtggtgtgatctcagctcactgcaacctccgcctcctgggttcaagtgattctccttcctcagcctcccgagtacaggtgcccgccacccacacc

SEQ ID NO: 931149 - DNA, 680 bp, Homo sapiens
gcacaggtctggatgccttttctgtgccccacaaacagtagtaattgctcagggcaggggaggatccactgttctctgcacagtgttagcacaagtgtagggcactggtgggggcaagggttgtctggctctgtgcccaccaaggctccatctgcaatgatggttagcacaggggtggaggggagacagactgcattcccacactcaggagggggaggaaagcaaaaaccatccatgcagacatacagcagaaaagtkatatgtggagttgccatgggcccttgggaagctacaatatgaagaaggggcgagcaaaatggtgtgtggccataggggttgccccactggagctctctgctgctcaagcatggtggtgcaccagtgcagaagctatgatctcaggacacccaagactgccctgccaccaggagtgaccagggtagggctctgggagagcccagcagtccaaggggtgctcaggttggaccagctccatccgatgggcaagaccaccctacagaggtcagaaccaaaatctcctatgggagcaagttgagcctagggaaatggctatccctggctgtgctccactacagatgctcctgcaccaaaccctctaccactacagatgctcccgcaccaaaccctctaggctccatatcatcttgcttactgccact

SEQ ID NO: 931150 - DNA, 558 bp, Homo sapiens
gatctctcagaagaaactctacaagccagaagagagtggggaccaacattcaacattcttaaagaaaagaattttcaaaccaggatttcatatccagccaaactatgattcataagtgaaggagaagtaaaatcctttacagacaagcaaatgctgagagatttttgtcaccaccaggcctgccctgaaagagctcctaaaggaagcactacacaagtaaaggaacaaccggtaccagccactgcaaaaacatgccaaattgtaaagaccatcaaggctaggaagaaactgcattaactaacgagcaaaataactagctaacatcataatgayaggatcaaattcacatataacaatattaaccttaaatgtaagtaagctaaatgctccaattaaaagacacagaatggcaaattggataaagagtcaagacccaccagtgtgctgtattcaggaaacccatctcacatgcagagacacacataggctcaaaataaagggatggaggaagatctaccaagcaaatggaaaacaaaaaaaggcagaggttgcaatcct

SEQ ID NO: 931151 - DNA, 609 bp, Homo sapiens
acattgtcagcagcctaggcatttgctcatgttatgtttgtggaaggactaacataggagaccaatggccttgggaagcaaaaaagttaatgcctcaagataactttactctgagtgactctttccccaaacagatgcccacaagttcaagcgtctggctcttaaaaacttctattattagaagatactktgttgctcgctgaggaaaggcttttacagacccagtaggagaaataacctgcttaggatggcaatattacaatgaaacattaaggaaaactttgtggcagggcacagatgactacagagcaccttatccaaatctgttctcccgtttctcttctctaaaccacacttggtatcaacttgaatctccaaatacttggcaagcaacccccagtctttattggatctgtgggctatgggcatatcaacagttgccagttaaatgggcaggggcctgtgtgcttagaacaattagaccatctttattcctactcccactgcaatagagaaaaactttaggggatcctgtgtatgatgaacttagaagaagaaacaaaagagatgcagacataaagagagatataaaaataggatattaaaaag

SEQ ID NO: 931152 - DNA, 609 bp, Homo sapiens
acattgtcagcagcctaggcatttgctcatgttatgtttgtggaaggactaacataggagaccaatggccttgggaagcaaaaaagttaatgcctcaagataactttactctgagtgactctttccccaaacagatgcccacaagttcaagcgtctggctcttaaaaacttctattattagaagatactttgttgctcgctgaggaaaggcttttacagacccagtaggagaaataacctgcttaggayggcaatattacaatgaaacattaaggaaaactttgtggcagggcacagatgactacagagcaccttatccaaatctgttctcccgtttctcttctctaaaccacacttggtatcaacttgaatctccaaatacttggcaagcaacccccagtctttattggatctgtgggctatgggcatatcaacagttgccagttaaatgggcaggggcctgtgtgcttagaacaattagaccatctttattcctactcccactgcaatagagaaaaactttaggggatcctgtgtatgatgaacttagaagaagaaacaaaagagatgcagacataaagagagatataaaaataggatattaaaaag

SEQ ID NO: 931153 - DNA, 764 bp, Homo sapiens
aaaatatttcctgtacctcgtgtcctatattttacaacacaatactggaagtggactattgatatggtttgggctgtgtccccacccaaatctcatcctgaattgtaactcccacaattcccatgtgttgtaggaggaatctggtgggaggtgattgaattaagggggtgggtctttccagtgcctttctggtgatagttaatcagtctcacaagatcttatgattttaaaaatgggagtttccttgcacaagctctctctttgcctacttccttccatgtaagacatgacttgctcctccttgctttctgccaagattatgaggyctcaccagccatgtgtaagtccactaaacctctttcttttggaaatttcccagtctcaggtatgtccttatcagcagcatgaaaatggactaatacagtaaattggtaccagtggagtgaggcattgctgaaaagatactaaaaaatgtggaagtgactttggaactgggtaacaggcagaggttggaacaatttggagggcttggaagaagacaggaaaatgtaggaaagtgtggaacttcccagagacttgttaaatggctttgacaaaaatgttgatagtgatatggacaataatgtccaggctgaggtggtctcagatggaaatgagaaactttctgggaactagagcaaaggtgacttcttatgttttagaaagacactggcagcattttgcccctgccttagtgatttgtggaactttcaacatgagagaga

SEQ ID NO: 931154 - DNA, 580 bp, Homo sapiens
ttaggacttccagtatgatgttgaataggagtggtgaaagtgggtattcttgtcttgttccagttcttagggagaatgcttccaacttttacccattcagtatattagctgtgggtttgtcatagacgactcttaccattttgagataagttcctttgatgactatttttttgagggtttttatcatgaagcaatgttgaattttatcagtgctttttttatgtctactgagatgatcatatcgttttcatttttaattctgtttatgtggtgaatcacatttattgatttgcatatattaaaccatccttgcatcctagaaataaagtgcccttggcatgatgaattatttttttgatgtgttattggattcagtttgctastattttgttgaagatttctgtgtctatgttcatcaggaatattggcctgtagttttccttttttgttgtgtccttgccagattttggtatcaggatgatgctgctttcaaagaatgagttagagaggaatgcccccctcctctcttagaatagtttcattaggattggtagtagttgttctttgtatgtctggtaga

SEQ ID NO: 931155 - DNA, 600 bp, Homo sapiens
tgtcaattcgtcaaactcattctccatccagttttgttcccttgctggtgaggagttgtgatcctttggaggagaagaggcattctggtttttggaattttcagtctttttgcgctggtttttccttatcttcatggagttatctacctttggtctttgatgttggtgaccttctaatggggttttggtgtggatgtcctttttgttgatgttgatgctattcctttctgtttgttagttttccttctaacagtcaggcctctctgctgcaggtctgttggrgtctgctggaggtccactccagaccctgtttgcctgggtatcaccagtggaggctgcagaacagcaaagattgctgcctgttccttcctctagaattttcatcccagagggacacatgcctgatgccagccagagctctcctgtatgaagtgtctgttgaaccctgctgggaggtgtctccccatcaggaggcatggggaccagggactcacttgaggaggcagtctgtcccttagcagagcttgagtgctgtgctgagagatccacttctctcttccaagccagcaggcaggaacgtttaagtctgctgaagctgca

SEQ ID NO: 931156 - DNA, 632 bp, Homo sapiens
aaatttttttgtagagacagggtctcactatgttgcccaggctggtctcgaactcctggccttaagtgatcctcccacccctgccttccgaagcactgggattacaggcgtgagccaccgcgcccagtagatgttaattaagtttatacaggtagttagtggcagagctggaattcactccaggtgtgtcaaagtcccaaactcctgctctagcctgttatactccacctctctctgatagagaagaggtaagtaggatttacagataagcayacgagaagcaggggaagatgctaaggcaaagaaggggcctgaacaccaccatcaaagcatcttaggcacctcagtagccctggaagcctaggcggtaactggtaacaataattcattttcacaaagaaaaagttatgtttacttaacatcaaaagatacggaagtatgcaattgttttagaaaggctaaaatgtaacatggtcacacagaatgctttaaaagaaaaatacagttatttggaagattcacttttatggaaaacaactcattaactgatggtgttagataaatgaggtattattgcaatacacttttactgaagtgcgtggtgagttttttgaagattgggttttgtgtta

SEQ ID NO: 931157 - DNA, 622 bp, Homo sapiens
tgattaagagtaaccagacaaaaaatgcatacctgacccttcacacttaatggtgaaagagtaaatgccttccaccagagattgggactaagggaaagatgcctggttttaccattcctattcagcatcatactgggaagtcctcaccagtgcaataaggtaagaaaaagaagagacatccagatttaaaaggaagaataaaagagttcttgttcattgacaatgtaatggtctacatagagaatcccaaggaattcattttttggaaagtcctagaaataataaatgaatatagcaacatcaatgcatataaggtcaacatacaaaaataaattgtgtttcaacttaggcatgaacagttgtaaactggtattaaaaataaaaataccatttcaaaaagcttccaagaaatgaaatgcttagggaaaaatctaacaaaacgtgtaggatctatatgctgaaaactacaaaacrttgatgaaagatcccccagaagacctaagtaaattgagagacatactgtatagacaagctgattctaaaggtttgcttttgcaaaggacttagagtagccaaaacaattttgggggaaacaaagggtaaacttgaaaaaaaaatcata

SEQ ID NO: 931158 - DNA, 549 bp, Homo sapiens
ttaaaatataataatgcattgttagatttttgtgtacttgtcataattctgggtgttctttcctgcatacttattaagaaatctgggaagtataaataatattgacttattgatgccatctgatcattaactgattggaatgaatgataaataggakttttattagcatgtgatattgaatttgttttgaaatttagtctcttctaatgatatgctaagttcaaatccttaataacctggttgttggcattattaggccaggcatagtggctcatgcctgtaatcctagcactttgggaggcctaggtgggaagaccactcgaggtcaggagtttgagactagcctggctgacatggcgaaactccatatctaccaaaaatacacaaattagccaggtgtggtggtgggcacctgtaattccagctactcaggaggctgaggcaggagaattgaatgaacccggaaggcggagggtgcagtgagccaagatgacatcgctgcactctagcctgggcaacagagtaagactctgtctcaaaaaacaaaac

SEQ ID NO: 931159 - DNA, 717 bp, Homo sapiens
accagataggctattcaggctatttcattgcctgggcaaattaaacatctcctggtacctggtatgcagccattaacttggtaaatgccttgttctccatccctgtccataaggaccaccagaagcaatttatcttccgctagcaagaccagcaatgtacgtttaccatcctcccttgggggtatatcaactctccagctttgagtcacaatcttaatcaaagagatcttgatcactttttccttcctcaagatatcacactggtccattacattgatgacattatgcttattggctccaatgagcaagaaatagcaaacatactggacttattggtgagacatttgcatgccaggggatggaaaatcacctaaaattcggggaacttttacctcagtaaaatttctaggkatccagtggtatggagtctgtccagatattccttctaaggtgaaggataagttgctgcatttggcccctcctacaaccaagaaagaggcacaatgcctagagatcctatttggatttttgaggcaacacattcctcatttgggtgtgttactctggcccatttatcgagtgacccaaaaggccaccagttttgagtgggatccagaacaggagaaggttctgcaataggtccaggttgctatgcaagctgctctgccacttgggccatatgacccagaagatccgatggtgcttgaggtgtaagtg

SEQ ID NO: 931160 - DNA, 717 bp, Homo sapiens
accagataggctattcaggctatttcattgcctgggcaaattaaacatctcctggtacctggtatgcagccattaacttggtaaatgccttgttctccatccctgtccataaggaccaccagaagcaatttatcttccgctagcaagaccagcaatgtacgtttaccatcctcccttgggggtatatcaactctccagctttgagtcacaatcttaatcaaagagatcttgatcactttttccttcctcaagatatcacactggtccattacattgatgacattatgcttattggctccaatgagcaagaaatagcaaacatactggacttattggtgagacatttgcatgccaggggatggaaaatcacctaaaattcggggaacttttacctcagtaaaatttctagggatccagtggtatggagtctgyccagatattccttctaaggtgaaggataagttgctgcatttggcccctcctacaaccaagaaagaggcacaatgcctagagatcctatttggatttttgaggcaacacattcctcatttgggtgtgttactctggcccatttatcgagtgacccaaaaggccaccagttttgagtgggatccagaacaggagaaggttctgcaataggtccaggttgctatgcaagctgctctgccacttgggccatatgacccagaagatccgatggtgcttgaggtgtaagtg

SEQ ID NO: 931161 - DNA, 794 bp, Homo sapiens
cagttttgagtgggatccagaacaggagaaggttctgcaataggtccaggttgctatgcaagctgctctgccacttgggccatatgacccagaagatccgatggtgcttgaggtgtaagtggcagatagggatattgtttggaggctttggtggtccccataggtgaatcacagtggaggcctccaggattttggagcaaggccctgtaatcttctgtagataactactctctttttgagagacagctcttggcctgttattgggctttggtggaaactgaatgtttgactatgggtcattatgtcaccatgtgacgtgaatatcctatcaagagctgggtgctttctgaccyatctagccataaagtgagtcatgcacaacagcattccatcatcaaatgtaagtggtatatatgagataggaattgagaaggtcgtgaaggcacaagtaagttacgtgaggaagtggctcaaatccccatggtctccactcctgccatcctgccttctctcccccagcctgcaccaatggcctcatggagagtttgctatgatcagttgacagaggaagagaagactacagcctggttcccagatggttgtgcatgatatgcaggcaccacccgaaattggacatctgcagcactatagcccatttctaggacatccctgaaggacagtgggaagaaatcttcccagtggtcaggacatcaaggcactcactttacagctaaagaagtgtggcagtggtctcatgctcatggaattcactggtcttaccatgttcttcatca

SEQ ID NO: 931162 - DNA, 563 bp, Homo sapiens
tttaaaagtgcattatttggaagataaatatttatttttcttcatgtgtgaacttcgaaaatttgagacaggtctcagttaattaagaaagtttattttgccaaggttgaggatgtgcgcccatgacagagtctcaggaagccctgacaatatgtgcccaaggtggtcatggcacagcttagttttatacattttagggagacatgagacatcaatcaatatatgtaagaagtacgttggttcagtytggaaaggcaggaaaacctgaagcaaaggcagaactggaggcaatcagggaggcttcctgttcacagataggtgagagaggaggggctgcattcttctaagtttctgattggcctttccaaaggaggcaatcagttatacatctatctcagtgagcagaggggtgactttgaatagaattggaggcaggttagccctaagcatttcccagcttgacttttctatttagcttagtgatttgggggccacaagatttattttccttcacacatgttaacaaataaagttatgtgtccacataattatgatcaaaaaaa

SEQ ID NO: 931163 - DNA, 563 bp, Homo sapiens
tttaaaagtgcattatttggaagataaatatttatttttcttcatgtgtgaacttcgaaaatttgagacaggtctcagttaattaagaaagtttattttgccaaggttgaggatgtgcgcccatgacagagtctcaggaagccctgacaatatgtgcccaaggtggtcatggcacagcttagttttatacattttagggagacatgagacatcaatcaatatatgtaagaagtacgttggttcagtctggaaaggcaggaaaacctgaagcaaaggcagaactggaggcaatcagggaggcttcctgttcacagataggtgagagaggaggggctgcattyttctaagtttctgattggcctttccaaaggaggcaatcagttatacatctatctcagtgagcagaggggtgactttgaatagaattggaggcaggttagccctaagcatttcccagcttgacttttctatttagcttagtgatttgggggccacaagatttattttccttcacacatgttaacaaataaagttatgtgtccacataattatgatcaaaaaaa

SEQ ID NO: 931164 - DNA, 761 bp, Homo sapiens
tggtgaggtggtttttaaaaaataaattcttattatcattgttattttttagtggtaaaatattataactttaaaatttaccatttttaagtgtacagttgagtggcattaagtacattcacattgctgtggagctattaccaccctccagctctggaactttttacatcttgcaaagctgaaactctgcacctattaaacactaaatttccattctcccataccctcagcccctggcaaccaccattctactttctgtctctatgtattgattattctaggtacgtcatataagtgaatcacagaatttgtccttttgtgactggctaatttcttttctttctttctttcttcttttttttttttttttttttttgagatggagtttcactcttgttacccaggctggagtgcaatggcatgatstcggctcactgtgacctccacctcccaggttcaagcgattctcctgcctcagcctccctaatagctgggattacaggtgcctgccaccacacccagctaattttttttgtattttttttagtaaagacggggtttcactgtgttggccaggctggtctcaaacttctgacctcaggtgatccacccgtctcaacctcccaaagtgctgggattacagacatgagccactgcgcccagcttgtgactggctaatttcatttagcctaatgtcttcaaggttcatccatgttgtagcatgtgtcagaatttccttcctttttaagattgaatagtat

SEQ ID NO: 931165 - DNA, 599 bp, Homo sapiens
aacacttctattaaataagaacaacaaaaaattttccattaaacgcactgaaaaaataagagcaaactaaatctgaaacaataaggtagaaggaaattataaaaattagagcagatattaatgaaatcgagaatagaaaactgcatataaaaagtataaaaacaaaagtttgttattttcaaagrtcaacataattaacaaatctttatctagattgggcaagaaaaaagaaataatattgaaatttttaaggcagggatggacattgggatcaagcttatagaaatgcaatacatgataaggaaataatataaactactgtatgccaacaaattatcatagatgaaatgagcaagttactagaaagacacaaactacataaactgacacagaaagaaataaacaatctgaataggctataataaaagaagggttaaaataagtagcttaataggctatatcaaaagaagagatgaaataaatgactttaaaacttcccaggaagagaagcccaagtacagatgactttgctggtgaactctaccaaacatttaaagaagaattaaaaacatttctgaaatgaaatcatcaagattttg

SEQ ID NO: 931166 - DNA, 556 bp, Homo sapiens
tcaaaacaaaacccaatgatttgttgtgtacaagaaacacacatctgggcacagtggctcacatctgtaatcccagcactttggaaggcccaggtgggtggatcacgaggtcaggagatcgagaccatcctggctaacatggtgaaaccccgtttctactaaaaatacaaacaaaatagctgggcatggtggcaggcgcytgtaataccagctactctggaggctgaggcagaagaatggcgtgaacccaggaggcggagcttgcagtgagtggagatcacatcactgtactccagcctgggctacagaatgaaaatctgcctccaaaaaaaaaaaaagagaagcacacatcacacatcacctgtaatatacgtatagactgaaaataaagacatgaaaaaagatattccatgccaatggaaaccaaaaagagcaagggttgctacacttatattagacaaaattgatttcaaggcaaaaactctaataaaagaaaaataaggtcattatctaataataaaagggtcaatttagcaagaggattgtattagtctgc

SEQ ID NO: 931167 - DNA, 606 bp, Homo sapiens
tacagaatgggaaaaatgattgcaaactatgcatctgacaacagtctgatattctgaatctataaggaacttaaacaaattaacaagcaaaaagcaaagactccattggaaaatggggaaaggacatgaatagacacttttcaaaagaagatatacacgcagccagcaaacatattttacaaatgttcaatatcactaatcattcaagaaatgtaaatcaaaaccacaacgtgataccatttcacaccagtcacaatggatattatttaaaaaaaattaaaaaaaaacaggtactggcaaggtagcaaagaaaacaaaacacttatacactgatggtaggaatgtaaaatagtttagccactgtggaaaccagtctggagatttctcaaatgacttaaaatggaactatgtcmtgtctctacccaggaatttcattatttgtgtatacccgaaggaaaataaatcacttttaccaaaaagacacatacaagcatatgttcattgcagcactactcacaatagaaaatacatgaaatcaacctaaatgcccatcaacagtgagttagataaagcaaatatgctacatacacaccatgaaatatatat

SEQ ID NO: 931168 - DNA, 597 bp, Homo sapiens
gagaggagctaccctccctgctgagagcttcagagacctgcagagatgtcaggactaccagctacagagaagagcaacccactccagggcctcctctctgctagaagctgggaagacattggaatgatcagcagcmgagaggagccacccctctccagggcttcctctctgctgagagctgcaaacatctggacaacctgcctacagagaggagccaccctctccaggcctcctctctgctgaaagctgcagacgtcaggatgacctacctacagagaagagctaactacagtgggtctcctcctagcactcctaacactcaataaatctcctcttcattttgctcaccctccacttgtctgcatacctcattcttcctggatgcaggacaagaacttgggcagaggtgccactggccacagaggtttgtggccagaaaagtgacacccaaagattccgtgataatatcactttttttttttttttttaaagacagagtctcactctgtcatccaggaggctggagtgcaatggcagaatctcggctcactgcaacctctgcgtcctaggttcaagtgattctcctgcctcagcttc

SEQ ID NO: 931169 - DNA, 597 bp, Homo sapiens
gagaggagctaccctccctgctgagagcttcagagacctgcagagatgtcaggactaccagctacagagaagagcaacccactccagggcctcctctctgctagaagctgggaagacattggaatgatcagcagcagagaggagccacccctctccagggcttcctctctgctgagagctgcaaacatctggacaacctgcctacagrgaggagccaccctctccaggcctcctctctgctgaaagctgcagacgtcaggatgacctacctacagagaagagctaactacagtgggtctcctcctagcactcctaacactcaataaatctcctcttcattttgctcaccctccacttgtctgcatacctcattcttcctggatgcaggacaagaacttgggcagaggtgccactggccacagaggtttgtggccagaaaagtgacacccaaagattccgtgataatatcactttttttttttttttttaaagacagagtctcactctgtcatccaggaggctggagtgcaatggcagaatctcggctcactgcaacctctgcgtcctaggttcaagtgattctcctgcctcagcttc

SEQ ID NO: 931170 - DNA, 597 bp, Homo sapiens
gagaggagctaccctccctgctgagagcttcagagacctgcagagatgtcaggactaccagctacagagaagagcaacccactccagggcctcctctctgctagaagctgggaagacattggaatgatcagcagcagagaggagccacccctctccagggcttcctctctgctgagagctgcaaacatctggacaacctgcctacagagaggagccaccctctccaggcctcctctctgctgaaagctgcagacgtcaggatgacctrcctacagagaagagctaactacagtgggtctcctcctagcactcctaacactcaataaatctcctcttcattttgctcaccctccacttgtctgcatacctcattcttcctggatgcaggacaagaacttgggcagaggtgccactggccacagaggtttgtggccagaaaagtgacacccaaagattccgtgataatatcactttttttttttttttttaaagacagagtctcactctgtcatccaggaggctggagtgcaatggcagaatctcggctcactgcaacctctgcgtcctaggttcaagtgattctcctgcctcagcttc

SEQ ID NO: 931171 - DNA, 597 bp, Homo sapiens
gagaggagctaccctccctgctgagagcttcagagacctgcagagatgtcaggactaccagctacagagaagagcaacccactccagggcctcctctctgctagaagctgggaagacattggaatgatcagcagcagagaggagccacccctctccagggcttcctctctgctgagagctgcaaacatctggacaacctgcctacagagaggagccaccctctccaggcctcctctctgctgaaagctgcagacgtcaggatgacctacctacagagaagagctaactacagtgggtctcctcctagcactcctaacactcaataaatctcctcttcattttgctcaccctmcacttgtctgcatacctcattcttcctggatgcaggacaagaacttgggcagaggtgccactggccacagaggtttgtggccagaaaagtgacacccaaagattccgtgataatatcactttttttttttttttttaaagacagagtctcactctgtcatccaggaggctggagtgcaatggcagaatctcggctcactgcaacctctgcgtcctaggttcaagtgattctcctgcctcagcttc

SEQ ID NO: 931172 - DNA, 600 bp, Homo sapiens
agtgtacagaggttccaatttctccatgtcctcatcaatggttgtcttttttataatagccatcataataggtatgagatggtatctcattgtggttttgatttgcattcccctgataattagtgatgttgagcatcttttcatgtacctgttggtcatttatatctcttctctggagaaatgcctgttaaggtcttttgcccatttttaattatttgtttgggtttttttaatttagttattagsttgtatatattgtgattgttaatctcttaacatatatatgatttgaaaatattgcctctgactgcataagttacctttcaatgttgttggttatttcccttgctgtgaagaagctctttagtttgatatagtaccacttgtctattatgctttttttgcttatgcttttggtgtcatatccaaggtatcatagccaagaccaatgatgtcatgaagcttttctcctatgttttcttctacatgttttacagtttcaggtcttaggttagtctttaatccattttgagttgattttcatatataatataaattaagggtctgatgttattctttttcatgtagctatccagttct

SEQ ID NO: 931173 - DNA, 598 bp, Homo sapiens
acattaaaaattttttttacaaccactttgggtattgtttaaaaaaattatttattacataaattttcaaaaggataggtaaccaaaaaaaattacaaaaaatcactcataatcccgggatttagatatacatctcratactttgaagaccttcctctgctgttttcatgtagatatcatacatattgtttaaaagcatacttttaaaattttaacatatcatatatgtttttctgtcattaaatatttgtattagtcggggttctccagagagacagagctcttgaattgtagctcccataattctgacatgtcatgggagggacccagtgggaggtaattgaatcatgggggcggacctttcctgtgctcttctcctgatagtgaataagtctcatgagatctgatgattttctaaaggggagttcccctacacaagctctctttgcctgacaccatgtaagatgtatagatatagacagatgtagtaagatgtatagatatagacagatgatatgaatacacacacacacacaagaagagattagggaaattggctcatatgattatggaggctgggaagtctcatgacaggcca

SEQ ID NO: 931174 - DNA, 602 bp, Homo sapiens
taaatttcatgtgaaaccgaaaaagaggctgtagagtcaagacaatcctaagcaaaaagaacaaagctggaggcatcatgctacctgatttcaaactatactacatgctacagtaaccaaaacagcatggtattcataccaaaacagatatatagaccaatggaacagaacagaggcctcagaaataacactacacatctacaaccatctgatctttgacaaawctgacaaaaacaagcaatggagaaaggactccctatttaataaattgtgttgggaaaactggctagccatatgcagaaaactgaaactggacccattccttacaccttatataaaaattaactcaagacggattaaagacttaaacgtaaggcctaaaaccataaaaaccctaaaagaaaactaggcaaagctattcaggacatagacatggacaaagactttatgattaaaacaccagaagcaatggcaacaaaagccaaaattgacaaatggcattaatttaaccaaaggacttctacacagcaaagaaactgccatcagagtgaagaggcaacctacagaatgggagaaaatttctgcaatctgtccatctgaca

SEQ ID NO: 931175 - DNA, 610 bp, Homo sapiens
attgctgttactgttttttgttttgttttgttttgttttgttttagtgatggtaactcctatctataccttttcccttcaaacaagagacttttatattccttttttttttcctcgctgctgactgacaaaggctgtgggcaaaacagaactcacatctcacattcctcctcaccyctccctgacaaagatgcacactctgtatgtttgatacattatttccttcatagaaaagaattgtgcctcaagaaacaaaatataatacaaaaggctcagctttgcctggtgcatgagtagtaaaactttaagcaaatgaggccagatagaaaaaataatagcaactctatacacattgggataaaatggaaaacaaaaaaagcacaaaaaaaagtataacatctaggtactttagatttaattaaatgagtcaaatgacaatataaaatgtgaataatcttaagatttttattatgaggttcccctttgacaatctgatgacaatcttatgaaaattatgaatgttcttcctggaaatcactcacatacacatacaagcaaacacacacacacacacacacacacacacacacacacaccagttttgcagacca

SEQ ID NO: 931176 - DNA, 477 bp, Homo sapiens
attagtattagctaaataacagactttattcagattttatcacttttcccaacaatatcctttgaatgttccaggattcaatttagaataccacattgcatttgctttccatttctcctcctgtttatgggagtgcatcagtctttttatttgtttcatgaygttgataatttgaagaacactgttccccttgtagaatgtccctcaatttctcaatattagactggtgtatagttttgggggcagaaaatccaagaggtgaagaatcctcttactgcatcatatgaaggatacatcatatcaatatgacttagtgctggtgatgctaacattgattacttgttcattgtatgttttctaggtttttccactatgatgtgactatgcttttccttcccctagtctattctttggatacaagtcaatacaagcccatactcaaaaaaagtttttgttttatggtttgggttggaatcc

SEQ ID NO: 931177 - DNA, 583 bp, Homo sapiens
acgagtggaatgcaatggaatgaaatggaatggaatggaatggaatggaatggaacggaattgaatggaataaaatcaacccgagtggaaaggaaaggaatggaatggaatggaatggaatggaatcaacccgagtggaatggaatggaatggaatgcaatggaatggaatggtatggaataaaccatagtggaatggtatggaatggaatggaatggaatggaacggaatggaatcaacacgaatggaatggaacggaatggagtggaatggtatggaatggaatggaatggaaaggaatcaacccgaagtgtatggaatagaatggaatggaatggaatggaatcaacccgagtggaatgccatggaatgtaatggaatggaatggaayggaacggagcggaatggaacggaattgaaaggaatggaatcaacccgagtggaaaggaatgtaatggaatggaatggaagggaatgaaatagaataacatgcaatcaactttggtggaatggtatggaatggaaaggaatggaatggaatggaacggaatgaaatggaataaaaggtcatggaatggaacgg

SEQ ID NO: 931178 - DNA, 581 bp, Homo sapiens
gagtggaatgcaatggaatgaaatggaatggaatggaatggaatggaacggaacggaattgaatggaataaaatcaacccgagtggaaaggaaaggaatggaatggaatggaatggaatggaatcaacccgagtggaatggaatggaatggaatgcaatggaatggaatggtatggaataaaccatagtggaatggtatggaatggaatggaatggaatggaatggaacggaatggaatcaacacgaatggaatggaacggaatggagtggaatggtatggaatggaatggaatggaaaggaatcaacccgaagtgtatggaatagaatggaatggaatggaatggaatcaacccgagtggaatgccatggaatgtaatggaatggaatggaayggaacggagcggaatggaacggaattgaaaggaatggaatcaacccgagtggaaaggaatgtaatggaatggaatggaagggaatgaaatagaataacatgcaatcaactttggtggaatggtatggaatggaaaggaatggaatggaatggaacggaatgaaatggaataaaaggtcatggaatgg

SEQ ID NO: 931179 - DNA, 585 bp, Homo sapiens
acacgagtggaatgcaatggaatgaaatggaatggaatggaatggaatggaacggaacggaattgaatggaataaaatcaacccgagtggaaaggaaaggaatggaatggaatggaatggaatggaatggaatcaacccgagtggaatggaatggaatggaatgcaatggaatggaatggtatggaataaaccatagtggaatggtatggaatggaatggaatggaatggaatggaacggaatggaatcaacacgaatggaatggaacggaatggagtggaatggtatggaatggaatggaatggaaaggaatcaacccgaagtgtatggaatagaatggaatggaatggaatggaatcaacccgagtggaatgccatggaatgtaatggaatggaatggaayggaacggagcggaatggaacggaattgaaaggaatggaatcaacccgagtggaaaggaatgtaatggaatggaatggaagggaatgaaatagaataacatgcaatcaactttggtggaatggtatggaatggaaaggaatggaatggaatggaacggaatgaaatggaataaaaggtcatgg

SEQ ID NO: 931180 - DNA, 675 bp, Homo sapiens
tgttgctctggcgacccttcgacctggatttgagcccccacgaatggacaccacttgccgagaccagctcagtcggggagaccctaacccagcagcgctagaggaattaaagacacacacacagaactacagaggtgtgaagtaggaaatcaggggtctcacagccttcagagctgagaaccccgaacagagatttacccacgtatttattaatggcaaaccagtcattagcattgtctctatagatrttaaattaactaaaagtatcccttatgggaaaagggatgggctgaattaaaggaataggttggactagttaactgcagcaggagcatgtccttaaggcacagatcactcatgctattgtttgtggcttaagaacgcctttaagcagttttccgtcctgggcgggccaggtgttccttgccctcattcccataaacccacaaccttccagcttgggcgttagggccattatgaacatgttacagtgctgcagagattttgtttatggtcaattttagggacagtttatggccagattttggggggcctgctcccaacactttctaatttttttgtacccattgaccatctccattccccacgccctacccactccccccaccacattatgcttcccagcctctggtaagcatccttctactctctacg

SEQ ID NO: 931181 - DNA, 675 bp, Homo sapiens
tgttgctctggcgacccttcgacctggatttgagcccccacgaatggacaccacttgccgagaccagctcagtcggggagaccctaacccagcagcgctagaggaattaaagacacacacacagaactacagaggtgtgaagtaggaaatcaggggtctcacagccttcagagctgagaaccccgaacagagatttacccacgtatttattaatggcaaaccagtcattagcattgtctctatagatattaaattaactaaaagtatcccttatgggaaaagggatgggctgaattaaaggaataggttggactagttaactgcagcaggagcatgtccttaaggcacagatcactcatgctattgtttgtggcttaagaacgcctttaagcagttttccgtcctgggcgggccaggtgttccttgccctcattcccataaacccacaaccttccagcttgggckttagggccattatgaacatgttacagtgctgcagagattttgtttatggtcaattttagggacagtttatggccagattttggggggcctgctcccaacactttctaatttttttgtacccattgaccatctccattccccacgccctacccactccccccaccacattatgcttcccagcctctggtaagcatccttctactctctacg

SEQ ID NO: 931182 - DNA, 624 bp, Homo sapiens
gtaattacatcatcagttaagaatagccttctgtaatcccagcactttgggaggccaaggcgggcagatcacctgaggttaggagttcaagaccagcctgaccaacgtggagaaaccccatctctactaaaaatacaaaattagccgggcatggtggttcatgcctgtaattccagctactcgggaggccgaggcaggagaatcgcttgaacccggaaggcagagrttgcagtgagccaagatcaaggcattgtactccagcctgggcaacaagagcgaaaattccatgtccaaaaaaacaaggccgggcacagtggctcaggcctgtaatcccagcactttgggaggccgaggcgggcagatcacaaggtcaggagatcgagaccatcctggctaacacggtgaaaccccgtctctactaaaaatacaaaatattagctgggcgtgctggcgggcgcctgtagtcccagctactcgggaggctgaggcaggagaatggcgtgaacccgggaggcggagcttgcagtgagccaagatcgtgccactgcactccagcctaggcgatagagagagactccgtctcaaaaaaaaaaaaaaaaacacacacacacacacataaaaaca

SEQ ID NO: 931183 - DNA, 627 bp, Homo sapiens
tgctaggctcagcggggaaagccttcagctctatcgcaacagtcagacagctttggtgcatgggaaggatcttggagaagaggcagtctttccccccttgttcaccaccatatgcacagttgggacttctcccacaggagctcgacatggatgcaactatagacggccattctggaacacatcaaggcgactgcatccccacaagaggagcaccctccaggatcaggcttgcacaagaaacagtcacaattcctctctatttggaacaccaacacctacagatgaaaagaggtgcctgtctgatctgaatagccagagcgctgggacaggagcatatctaagaagtggaaaacgtccctgctgaccttgcaggggagctaaggtggctccaacccttctccctgataagacctcactgtgactcaccgagggctcctccagccacctctgtcaagcctgggtcttcatttacccacttgcttyacccacaaccgattcctactcagggacacctcttctactggcctgaaacctgaaccatcaaaccagtaaataaaatactgggggaaaataaataaataaaaagtgcatgagatgggagaaggagataagctttaagaaacctct

SEQ ID NO: 931184 - DNA, 621 bp, Homo sapiens
acacaaaggccgaggcgcggacctgctgttcctttcatgccaatcagtcctggggttgtaatgactacaattttctgatttgaagtcaaaaccaaatggcccagaagagtgattcagactccacgtggccctcttcctgagaagaagaagcacaaatggatttttctttcttaagcccaattgtgtgctgctcatcgacccctcatcatttctgagctctattttcttccctcctgcttgaggcacaattaacggaggcccaraaagttttttgcttcctgtgtcttggctttgtgggtatagcttggccttggtgctgagaaaatgccgaggagcccaaagccctggagttgccttgggagagtcgctcacccttctgggcctcaggatggagggtccaggggctacagagctgtcagcctatgccctgagctgggactctgtggaaatgtgggtagcccagtctgcccagggtgactgactcagactctccaggggtcattgactctttgggtcaaacatctgctcttcaccatgtgaattttaaagtgtaaaccagctgggcacagtggctcacacctgtaatcccagcacttcggaaggccaaggcgagtggatcac

SEQ ID NO: 931185 - DNA, 621 bp, Homo sapiens
acacaaaggccgaggcgcggacctgctgttcctttcatgccaatcagtcctggggttgtaatgactacaattttctgatttgaagtcaaaaccaaatggcccagaagagtgattcagactccacgtggccctcttcctgagaagaagaagcacaaatggatttttctttcttaagcccaattgtgtgctgctcatcgacccctcatcatttctgagctctattttcttccctcctgcttgaggcacaattaacggaggcccagaaagttttttgcttcctgtgtcttggctttgtgggtatagcttggccttggtgctgaraaaatgccgaggagcccaaagccctggagttgccttgggagagtcgctcacccttctgggcctcaggatggagggtccaggggctacagagctgtcagcctatgccctgagctgggactctgtggaaatgtgggtagcccagtctgcccagggtgactgactcagactctccaggggtcattgactctttgggtcaaacatctgctcttcaccatgtgaattttaaagtgtaaaccagctgggcacagtggctcacacctgtaatcccagcacttcggaaggccaaggcgagtggatcac

SEQ ID NO: 931186 - DNA, 738 bp, Homo sapiens
catcagtgccttaaaatatccatcagacaagcacatcttatatttgtgtgaaatctgaccccgctatgagagaagagggtggtggaggcagtgagtggctggtgtagcattaaagcctctggagacaggtgtgcactgcagatggtgtatagctgttcacagtatttgaggcctctttcttcgtgaagggagatgatccttccctgtgctattatgctggggtgtggccatgtgttttgctgtggccgatgacacgtgagtggaaatgtcacttccagcagcagctttgagcatcagcttgtgcttgttcatgcactstgcattagtccattttcacactgctataaagaaatacccaagactgggtaatttgtgaaggaaagaggtttaattggctcacagttccacatggctggggaagcctcaggaaacttgcaatcatggcggaaggcaaaggagaagcaagtagcttcttcactgggcagcaggagagagaagagcaagcggggtaatgccagatgcttcggatctcatgagaactctctttctatcacaagaatagcatgggagaaactgccctcatgatccaatcacctccctccctcgacgtggggattacaggtccctccttcaacacgtgaagattacaatttgagatgagatttgggtggggatacaaagccaaaccatatcacactccttctgtctgcctttgtcattctactgttccaggggatg

SEQ ID NO: 931187 - DNA, 731 bp, Homo sapiens
ccatcagtgccttaaaatatccatcagacaagcacatcttatatttgtgtgaaatctgaccccgctatgagagaagagggtggtggaggcagtgagtggctggtgtagcattaaagcctctggagacaggtgtgcactgcagatggtgtatagctgttcacagtatttgaggcctctttcttcgtgaagggagatgatccttccctgtgctattatgctggggtgtggccatgtgttttgctgtggccgatgacacgtgagtggaaatgtcacttccagcagcagctttgagcatcagcttgtgcttgttcatgcactctgcattagtccattttcacactgctataaagaaatacccaagactgggtaatttgtgaaggaaagaggtttaattgrctcacagttccacatggctggggaagcctcaggaaacttgcaatcatggcggaaggcaaaggagaagcaagtagcttcttcactgggcagcaggagagagaagagcaagcggggtaatgccagatgcttcggatctcatgagaactctctttctatcacaagaatagcatgggagaaactgccctcatgatccaatcacctccctccctcgacgtggggattacaggtccctccttcaacacgtgaagattacaatttgagatgagatttgggtggggatacaaagccaaaccatatcacactccttctgtctgcctttgtcattctactgttcc

SEQ ID NO: 931188 - DNA, 731 bp, Homo sapiens
ccatcagtgccttaaaatatccatcagacaagcacatcttatatttgtgtgaaatctgaccccgctatgagagaagagggtggtggaggcagtgagtggctggtgtagcattaaagcctctggagacaggtgtgcactgcagatggtgtatagctgttcacagtatttgaggcctctttcttcgtgaagggagatgatccttccctgtgctattatgctggggtgtggccatgtgttttgctgtggccgatgacacgtgagtggaaatgtcacttccagcagcagctttgagcatcagcttgtgcttgttcatgcactctgcattagtccattttcacactgctataaagaaatacccaagactgggtaatttgtgaaggaaagaggtttaattggctcacagttccacatggctggggaagcctcaggaaacttgcaatcatggcggaaggcaaaggagaagcaagtagcttcttcactgggcagcaggagagagaagagcaagcggggtaatgccagatgcttcrgatctcatgagaactctctttctatcacaagaatagcatgggagaaactgccctcatgatccaatcacctccctccctcgacgtggggattacaggtccctccttcaacacgtgaagattacaatttgagatgagatttgggtggggatacaaagccaaaccatatcacactccttctgtctgcctttgtcattctactgttcc

SEQ ID NO: 931189 - DNA, 723 bp, Homo sapiens
gggtgagccaaagcagggtggggtgtcgcctcacccgggaagtgcaagggatctggggatttccctttcctagccaagggaagccatgacagactgtacttggaaaaacaggacaatttcacccaaatactacacttttcccaaggtcttagcaaccagcagacaaggagattctctcccgttcctggctcagtgggtcccacacccacggagccttgctcactgctagcacagcagtctgagattgaactgtgaggcggcagcctggctgggggmgggacatctgccattgctgaggtttgagtaggtgaacgaagcagccaggaagcttgaacagggtggagcccaccgcagttcagcaaggcctactgcctctatagactccacctctgtgggtagggcatagctgaacaaaaggcagtagacttctgcagacttaaacctccctgacagctctgaaaagagcagtggttctcccagcacggtgtttgatctctgagaacagacagactgcctcctcaagtggatccccgacccctgtgtagcataactgggagacacctcccagtaggggccgacagacacctcatataggcgggtgaccctctgggatgaagcttccagaggaaggatcaggcagcaatatttactgttctgcaacatttgctgttcttcagcctccattggtgatacccaggcaaacagggtctggagcagacctcc

SEQ ID NO: 931190 - DNA, 723 bp, Homo sapiens
gggtgagccaaagcagggtggggtgtcgcctcacccgggaagtgcaagggatctggggatttccctttcctagccaagggaagccatgacagactgtacttggaaaaacaggacaatttcacccaaatactacacttttcccaaggtcttagcaaccagcagacaaggagattctctcccgttcctggctcagtgggtcccacacccacggagccttgctcactgctagcacagcagtctgagattgaactgtgaggcggcagcctggctgggggagggacatctgccattgctgaggtttgagtaggtgaacgaagcagccaggaagcttgaacagggtggagcccaccgcagttcagcaaggcctactgcctctatagactccacctctgtgggtagggcatagctgaacaaaaggcagtagacttctgcagacttaaacctccctgacagctctgaaaagagcagtggttctcccagcacggtgtttgatctctgagaacagacagactgcctcctcaagtggatycccgacccctgtgtagcataactgggagacacctcccagtaggggccgacagacacctcatataggcgggtgaccctctgggatgaagcttccagaggaaggatcaggcagcaatatttactgttctgcaacatttgctgttcttcagcctccattggtgatacccaggcaaacagggtctggagcagacctcc

SEQ ID NO: 931191 - DNA, 571 bp, Homo sapiens
tctctcagcacctcttagaccatgagctttctttcatttttttgaacatgccaagctcctgctatggcacatctgcatatgctaccccatgctttgaagcctctctcctccccttttcagaagggtgtgtctttgttctttggatttcaaataccacttctcttgaacactatctaatgtggattctcccattatctcgatttcctctttgtttactttgttgcattgaacaaaagttgtaatgttgatttacttcttttttttctatttcccatatttgaatctgagctcttggagatctgagcacctagtggagatttggcatataaaaagaaatcaataaaaaccatggaatgattggatgaataaaaacaaaaaattgtctgggcraagtggctcatgcctggaatcccagcactttgggaggtcgaggcaggtggatcacctgaggccaggagttcaagaacagcctggccaagatggtgaaaccccgtctctactaaaaatataaaaattagctgggtgtggtggtgggcacctgtaatcccagctactcaggaggctgaggcag

SEQ ID NO: 931192 - DNA, 571 bp, Homo sapiens
tctctcagcacctcttagaccatgagctttctttcatttttttgaacatgccaagctcctgctatggcacatctgcatatgctaccccatgctttgaagcctctctcctccccttttcagaagggtgtgtctttgttctttggatttcaaataccacttctcttgaacactatctaatgtggattctcccattatctcgatttcctctttgtttactttgttgcattgaacaaaagttgtaatgttgatttacttcttttttttctatttcccatatttgaatctgagctcttggagatctgagcacctagtggagatttggcatataaaaagaaatcaataaaaaccatggaatgattggatgaataaaaacaaaaaattgtctgggcgaagtggctcatgcctgkaatcccagcactttgggaggtcgaggcaggtggatcacctgaggccaggagttcaagaacagcctggccaagatggtgaaaccccgtctctactaaaaatataaaaattagctgggtgtggtggtgggcacctgtaatcccagctactcaggaggctgaggcag

SEQ ID NO: 931193 - DNA, 480 bp, Homo sapiens
ccacctgaagcattaatataaagtctcggcttttcaacattgctcacaaagcccatcacacccttgcctgaacctaactctcctgcatcattttttcccattctctacttcccaatgtgtatgtcagtcatgtcaggttataattcccaaaagagacattatgttgctccctaccttcacgtatgttgctcacttgacctgaaaaccttttttactcttttcagtctattaaacttctgatgatttttcatagctcaggtcctgcttcccccaggatgctttaatttaaccatagagaraatgattagacgtcccccagcatgtccttatagtgccctgttctcatgtgctccgtgaagcatgcttaccatggagtcatcattgattagctcatgtttctccatgttttttcctgagagctggacccatatcttaatcttgaataataccaaatacagatataaatgttctcatcagtag

SEQ ID NO: 931194 - DNA, 634 bp, Homo sapiens
caggagtcaaaactggaacagtccagcaacacatccaggtacattatactattgggttttagctcatcaaataaaataaatatccattaatccatactgatataaataactgattgcataagtaaatggggaagaagggaccatttttccttcragaggagttccctttaatgaaagtggaaggaaccagggaaacagcaaatcaccatttgaacaccacaggaacaactgctgcaggcaagacccaccgatggatgctcggactcgtaggagaaagtttaaggagaaacaagagttgcacagatgcaaagcatttcccccaatacctatcaattacaaaggggaaaataataactttataatggagaaagctggcaaacaccactgtaaccaataggtcaaggtcagtgttaccagtaataagccacactgacatcatgtacttcctgatatgatgcactgagaatgacacatcatcactcctggggtagtttttccaataatgcataacctcaatctaattatgagaaaatatcagacccaaattgagcaacatattgcacaatacctgaccaggactgttcacagatatcaaggtcatgaaagacaaagaaaggccgaggaactgacgact

SEQ ID NO: 931195 - DNA, 634 bp, Homo sapiens
caggagtcaaaactggaacagtccagcaacacatccaggtacattatactattgggttttagctcatcaaataaaataaatatccattaatccatactgatataaataactgattgcataagtaaatggggaagaagggaccatttttccttcgagaggagttccctttaatgaaagtggaaggaaccagggaaacagcaaatcaccatytgaacaccacaggaacaactgctgcaggcaagacccaccgatggatgctcggactcgtaggagaaagtttaaggagaaacaagagttgcacagatgcaaagcatttcccccaatacctatcaattacaaaggggaaaataataactttataatggagaaagctggcaaacaccactgtaaccaataggtcaaggtcagtgttaccagtaataagccacactgacatcatgtacttcctgatatgatgcactgagaatgacacatcatcactcctggggtagtttttccaataatgcataacctcaatctaattatgagaaaatatcagacccaaattgagcaacatattgcacaatacctgaccaggactgttcacagatatcaaggtcatgaaagacaaagaaaggccgaggaactgacgact

SEQ ID NO: 931196 - DNA, 590 bp, Homo sapiens
cacagtgtcctccaggttcatccatgttgtagcatgtggcaagattttcttcttttttagagacagggtctcactcggttgcccaggctggagtgcagttgtgtgatcacagttcactgtaacctcgaacttctgagctccaacaagactactgccccagccccagccaccctgcctcagaagtcaggactacaagtgtgcaccaccacacccaactaatttttttatrtataattttttgtggagacagagtttcactatgttaccccagcaggtctcaaactccaggactcaagcgatctacctcaacttcccaaagtgctgggactacaggcgtgagccacctttcttcttttaaagactgaatgttatttgaatgttattccattgtatgtatataccaccttttctttatccattcatgcatcagtaggcgtttgcgttatttccatttcttggctattgtgagtaatgctgcaatgaacatgggtatacacacaccttttcaagatcctgctttcaattcttttggatatatagccagaagtggaattgctgggtcatacggtaattttgacggaccaccatac

SEQ ID NO: 931197 - DNA, 585 bp, Homo sapiens
cattactatccttccaaagaattatctctatgctcttttcctagataaactctggctttgtcccatagatcccacagatctccctgtaatccttttttagccaccacctcctcctctttcttttctatgcattcttcaggttcctcactgaatacagtgcttgttttagggttgagaacaattagaatgaactctaggtgtttcatatgaggtgcttttcctgcaagacctgcacatgatatgataacgaggtttgggatgctacagactttttgctaccaggtggaatctaatgtcaacctgcaaaggctagcaaaagagaacttaagagaaatccaacttttttttttgaatttattatttttttttagatggagtcttgctctgtcgcccaggctggagtgcartggcgtgatcttggctcattggaacctccatctcctgggttcaagcgattctcctgcctcagcctcccgagtagctgggattacaggcatgcatcaccatgcccagctaatttttgtatttttagtagagacggggttttgccatgttggccaggctggtcttgaactcctgacccca

SEQ ID NO: 931198 - DNA, 748 bp, Homo sapiens
agaaggggttataacatggtgtcactcacccaaagtcactgaaactgaggtaggaggcaggacttgactccagaggtgggactcaagacaccagaccagattgaggagtacctaaaacagggccagggcagaagcagctttccaatcagacacacctagcagtgtgccatgtcartttatcattgccatggcaacacctgggagttactaccccattccttagtgatgacccaatgaaccaaaagctacgaccccttccctagaaatttctgcataaaccaccccttaacctgcatgcaattaaaagtgggtataattatgactgcaaaactgccctgagctgctactctctgcccatggggtagccctgctctgtaggaacagtcacagagttgtaacactgcctctttaataaagctgttttcttctacctctggtttgctcttgaattccctcctgggcaagtccaagaacgcttgtagaccaagcctcactttggggcttgccttccctgaatcaaaactgtaacagggcagctcatacctgagccactacgttaaaattaagaacacaatgatgtgtttcttcggaagaaatgcagtgggagtctccatgaaaacgtcatagtccagctcaaatagttacactggatgatggtacacccatccttctttccctcaccactgaagatggctaagccaggattctgcagcccaaccccgaaagactcacaccgttcctctctaga

SEQ ID NO: 931199 - DNA, 617 bp, Homo sapiens
ttttgttttgttttgttttttgagacagggtcctgctctgtcacccaggcttggagtgcagtggcatgatcatggctcactgcagcctcgacctcccaggctcaagcgatcctctcacctcagcctcccaagtagttgggactacaggtgcatgccaccatgcttagctaattttggaggtatttttgggtaaagatgggggtcttactatgctaccaggctggtctcgaactcctgggttcaagtgatccacctgccttggcttcccaaagttctgggattacaggcaggagctaccatgctcagccttgagctcctgggtgatgccaatgctgttgggccaggaccacatgttgagaagcagggtcccggggtgcactgctgcctgactgtccatcagttcctcccccrtattcagaacctctggccctacctggctttgcatccctgggcatagtcccttctgtaactggactttcattggtggctgtgcactgtccagatatagccatggtacttgccaggttcctctccctgatctcaccctgccctcctcatatctttatctcagactgggaggcaatgatagattaaggcaaatggtagcagaaaatctc

SEQ ID NO: 931200 - DNA, 597 bp, Homo sapiens
accacatccacctaattttgtattttttgtagagacgggttcttcctatgctgcttaggctggtcttgagctcctgggctcaagtgatcctcccaccttggcctcctaaagtgctcatattataggcatgagccaccacccccagcccatgattctatttttaatgtataaaaatgcaataacaggtataacaaaaaccctccttstgccctactttctcgtccctgaggtaatgctactgtgtgtttagtatacatgcttccagacttttccccatttacctacatacatatttacataaagcaaaatagatttgttgtgtggattttaaaatcttttttcttttcataaagggtaacatcttgcaacttgattctttcacttcatggtatcacttatatgatattctttcacttcataatttctttccttcctgggacttagagggtcaccccattcatttaaactcctgcataatccatagtatggatgcatcagagtttatttaataatttccccattgatgaatgttgagcttatgcttagtgggcaagtattcctatagcatagatatctagaaatggaagagttggggtg

SEQ ID NO: 931201 - DNA, 597 bp, Homo sapiens
accacatccacctaattttgtattttttgtagagacgggttcttcctatgctgcttaggctggtcttgagctcctgggctcaagtgatcctcccaccttggcctcctaaagtgctcatattataggcatgagccaccacccccagcccatgattctatttttaatgtataaaaatgcaataacaggtataacaaaaaccctccttctgccctactttctcgtccctgaggtaatgctactgtgtgtttagtatacatgcttccagacttttccccatttacctacatacatatttacataaagcaaaatagatttgttgtgtggattttaaaatcttttttcttttcataaagggtaacatcttgcaacttgattctttcacttcatggtatcacttatatgatattctttcacttcataatttctttccttcctgggacttagagggtcacccmattcatttaaactcctgcataatccatagtatggatgcatcagagtttatttaataatttccccattgatgaatgttgagcttatgcttagtgggcaagtattcctatagcatagatatctagaaatggaagagttggggtg

SEQ ID NO: 931202 - DNA, 665 bp, Homo sapiens
tcatggtatcacttatatgatattctttcacttcataatttctttccttcctgggacttagagggtcaccccattcatttaaactcctgcataatccatagtatggatgcatcagagtttatttaataatttccccattgatgaatgttgagcttatgcttagtgggcaagtattcctatagcatagatatctagaaatggaagagttggggtgaagactatgtagatataaaattttaattgtcctcaaaaatgttgtgccaactgactgtatygtcagcagaatgtgacagcattcatttccccacaccttttcactgttgggtattcaccaaatttttgttgaagttatggatgaataaaagggattccatccaaatttgaatttttctgatcactcatgaatttaattaaatatctttatatgtttattgaacatttgtgtttctcctctgagttttctgtcctttgttcattttcctgttgaattgttttatcgttgtcttcctgatttatagaaggaattagttgagacacataaatgattttggaaaaatgcttacattcaaagtaacatttttcacaacagtttctgtcacatcattagtttgacttatatagacaagacatacatgagttctaaattaaaaatcaaacacatacta

SEQ ID NO: 931203 - DNA, 665 bp, Homo sapiens
tcatggtatcacttatatgatattctttcacttcataatttctttccttcctgggacttagagggtcaccccattcatttaaactcctgcataatccatagtatggatgcatcagagtttatttaataatttccccattgatgaatgttgagcttatgcttagtgggcaagtattcctatagcatagatatctagaaatggaagagttggggtgaagactatgtagatataaaattttaattgtcctcaaaaatgttgtgccaactgactgtattgtcagcagaatgtgacagcattcatttccccacaccttttcactgttgggtattcaccaaatttttgttgaagttatggatgaataaaagggattccatccaaatttgaatttttctgatcactcatgaatttaattaaatatctttatatgtttattgaacatttgtgtttctcctctgagttttctrtcctttgttcattttcctgttgaattgttttatcgttgtcttcctgatttatagaaggaattagttgagacacataaatgattttggaaaaatgcttacattcaaagtaacatttttcacaacagtttctgtcacatcattagtttgacttatatagacaagacatacatgagttctaaattaaaaatcaaacacatacta

SEQ ID NO: 931204 - DNA, 584 bp, Homo sapiens
tcaaaaaaaaaaaaaaagaaaaaagaactagagatagtaggcttgaaggatgccttttaagttctttttgaacaatcatttgccttttcaggtacagaagtccagtgccctgtaagttcacttccttcagggcccaaattctgagctctgaaataaaacaaaaagcacctggtagttcaggtaaaggactttccagcatgttgtgtgaagttgacagcttcccattcactaaccctgagtgactaacacgtttgatattcaggagcctgctgcatttgactttggtttgggctgtgctcaccaaccataatggcgccgaacctccggctgcctccctttgcagagttttkgagctcccttcaaacatgggaggctggacttgatcacggctgcctatgttgtttgttttctttcctggaaggtgaatcctaagcttatgaaagccagtgtactctattgacaaagcctaagctcatggttttaaaaaagccagagaagctgcctgtgagggcactgaattctatccccacttcggccatgtgtgtcctatagcactttcccatgcagagtttcctggaaacaaa

SEQ ID NO: 931205 - DNA, 773 bp, Homo sapiens
aaatatgcaagcaacgttgcaaggaatatctgttaaaaataagaaaaagtgagtggcaggaaaataaaagagccaggagtggcacatgttatgaagatgtaccttgtgagacgtggacgtaagttggactccaggctttgctgcagccgctataccatttcagttgtcctgccaaagcccctgatttctgatgctaagaacaagaaggcagtgcttcaagggtcctcattaagaagccactgaaggatgtggtagagcgcctgtagtcccagctactcaggaggctgaggcgggaggatcgcttgagcccaggagttggagtgatcagtgagctatagttgcaccactgcactacagcctgagctacagagcaagacctgcctctcggaaggccgggcatggtggctcacgcctgtaatcccaccactttgggaggccgaagcgggtggatcacctgaggtcagaagatcgagaccagcctggccaacatggcgaaaccccatctctacgaaaaatacaaaaaattagctgggtatggttgtgggcacctgtaatcccaaytactcaggaggctgaggcaggagaatcacttgaaccctgggggcggagattgcagtgagccaagatcatgccactgcattccagactggcaacagagtgagattccatctcaaaacatatataataataggaaaccactgcagtctaatgagccagatcctcacggtacctgcaatatgggtggagtattatccagggagcacagaagctgg

SEQ ID NO: 931206 - DNA, 587 bp, Homo sapiens
catccctatggctctccattccccacttggacaaaagctggcaggttaggcaaatagaaatcaataattggctttatccattaacatccgagtcaaagcaactctggatacggctttatccataacagatacggctttatccattaatggatatgactttctccattaatatctgagtcaaagcaattctggaattcccagctccatagtgtggagcttggcatcatgaatccaaaccacttcctttcagaccaagatgtctgttcaggcttaatgcgggtagctaactccagatgtggaatgctgatttgtacaatctccaggctaaaagggaccttaaacttcttccaatgaccattttcaacaacattcctcattaagtgckcaaccagcttctgcttaaacatctccaacatctggagcagttgctggattctgttgagccaaaatctttctcaatttcctaattctgcccattctgaaacacatctgctcctcctgcctctaggacagttctcctcaaatcttctcttctccagaggcccatgcccagccccgaccactgtggcttagagcacgcgattact

SEQ ID NO: 931207 - DNA, 692 bp, Homo sapiens
gtttggttcggttttctttctgctctaacaggacagcactgagttaactatctcacaatgttgtgttctttccccagcacccagaaatgctctctgcactacactgccactgctgggggttggggaggggtggtgttggtgattccagactgcttttcctatctcttcagtgcctctttcagtgatatgaagctaaaactaggcactataagtacttggcctgatttttgtttttttatgaaggtgtttttttctgtgtagatagttgttaacttggtgttcttgtggggggacaatcagtgaggtttctattctgccattgtgctctgcctctgcctgttttatcttaaactagaatagcaacttctgcttcttttctgtttgctaggtggatttttctccatccctttactttgagcctrggggtatcactgtatgtgagattggtctcttgaagacagcatacagttgggtcttctttattcaacttgtcactctgtcccttttaattgaggcatttagcccatttacattcaaggttattatcgatatatgcagatttaatgcagtcattgtgtttttagctggttattatgcagacttctttatgtgattgctttataatgttgttggtttagtggccagtaaaaatctttcctttccatatttagcactctcttcgggacctctta

SEQ ID NO: 931208 - DNA, 692 bp, Homo sapiens
gtttggttcggttttctttctgctctaacaggacagcactgagttaactatctcacaatgttgtgttctttccccagcacccagaaatgctctctgcactacactgccactgctgggggttggggaggggtggtgttggtgattccagactgcttttcctatctcttcagtgcctctttcagtgatatgaagctaaaactaggcactataagtacttggcctgatttttgtttttttatgaaggtgtttttttctgtgtagatagttgttaacttggtgttcttgtggggggacaatcagtgaggtttctattctgccattgtgctctgcctctgcctgttttatcttaaactagaatagcaacttctgcttcttttctgtttgctaggtggatttttctccatccctttactttgagcctgkgggtatcactgtatgtgagattggtctcttgaagacagcatacagttgggtcttctttattcaacttgtcactctgtcccttttaattgaggcatttagcccatttacattcaaggttattatcgatatatgcagatttaatgcagtcattgtgtttttagctggttattatgcagacttctttatgtgattgctttataatgttgttggtttagtggccagtaaaaatctttcctttccatatttagcactctcttcgggacctctta

SEQ ID NO: 931209 - DNA, 574 bp, Homo sapiens
tctttttttcaaggtttttagcttccttgcgatgggttagaacatgttcctttagctcacagaagtttgttattactgacctcctagagcctacttctgtcaactcatcaaagtcattctctgtccagctttgttccattgctggcaagrggctgagatcctttggagaagaggtgctctggtttttagaattttcagattttctgctctggtttctccccatctttgtggttttatctaactttggtctttgatgttggtgacctacagaagaagttttggtgtggatgtcctttttgtggatgttgatgctattcctttctgtttcataatttttcttctaacaatcaggtccctcaactgcaggtctgttggagtttgctggtggtccactccagaccctgtttgcctgggtatcaccagcggaggctgcagaacagcaaatattgaagaacagaaaatattgttgtctgatccttactctggaagcttcgtcccacagttgcacttgcctgtatgaggtgtctgttggcccctactgggaggtgtctcccagttaggctacacagtggtc

SEQ ID NO: 931210 - DNA, 725 bp, Homo sapiens
tagttctttaaggcatctccacactgttttccatagtggttgtaccagtttacattcccatcagcaatgtagaattgttccttgttcactgcatccacaccaacatctactgttttttgattttttgattatggtcattcttgcaggagtaaggtggtatcgcattgtgcttttgatttcaatttccctgttcattagtatgttgaccattttttcatgtttgttggccatttgtatatcttcttttgagaattgtctatycatgtccttatcccactttttgatgggattgtttgtttttttcgtgttgatttgtttgagttcgttgtagattctggatattagtcctttgtcagatgtatagattgtgaagatttttctcccactctgtgagttgtctgtttactctgctgttttttttttcctgtgcaaaagctctttagtttaattaagtcccagaaatgtatctatctttgtttttattgcatttgtttttgggttcttggtcacgaaatccttgcctaagccaatgtctagaagagtttttacaatgttatcttccagaatttttatagtttcagctcttagatttaagtccttaatccatcttgagttgatttttgtataaggtgagagatgaggatccagtttcattctcctacatgtggctagccaattattgcagcaccatttgttgaaaagggtgtcctttccaaataaaatac

SEQ ID NO: 931211 - DNA, 725 bp, Homo sapiens
tagttctttaaggcatctccacactgttttccatagtggttgtaccagtttacattcccatcagcaatgtagaattgttccttgttcactgcatccacaccaacatctactgttttttgattttttgattatggtcattcttgcaggagtaaggtggtatcgcattgtgcttttgatttcaatttccctgttcattagtatgttgaccattttttcatgtttgttggccatttgtatatcttcttttgagaattgtctatccatgtccttatcccactttttgatgggattgtttgtttttttcgtgttgatttgtttgagttcgttgtagattctggatattagtcctttgtcagatgtatagattgtgaagatttttctcccactctgtgagttgtctgtttactctgctgttttttttytcctgtgcaaaagctctttagtttaattaagtcccagaaatgtatctatctttgtttttattgcatttgtttttgggttcttggtcacgaaatccttgcctaagccaatgtctagaagagtttttacaatgttatcttccagaatttttatagtttcagctcttagatttaagtccttaatccatcttgagttgatttttgtataaggtgagagatgaggatccagtttcattctcctacatgtggctagccaattattgcagcaccatttgttgaaaagggtgtcctttccaaataaaatac

SEQ ID NO: 931212 - DNA, 614 bp, Homo sapiens
tatatttcttatccatacatgaactcaactgcaaggatagcctcagatgttgataactggaagctataactggcaaaatactgaggtgactgggaaccctgccatggactaagggacctgctcctaggtctgcattgaaccttcatgttggtcacagtgaagtttctaccctacagggctactaacaaactaggaaaaaccataaatagtgggcaaatgatgtgttaaataatatgttattgaaaacaataagaaatctttgacatacatcccactttaggtttataaaaatgtctggaaggtgaattatatttgtttctttttctagagctgaatggttaaatctggctataaaagtaattgaataattacctttgcaaacactcccattgcatgaagaatagcaattcatgctggatacaagtagagaatattggtttttattgctatctctttccttakaaagagagtggatggagttataaaacattttgtgggcttgtacattgtactttcttgtgaaatccctgtatattttggtcctatatgaaaaatacattatattaaaactcataaaggaagcagatactccttctaatactctttccactttc

SEQ ID NO: 931213 - DNA, 617 bp, Homo sapiens
gtggcaatttcttaaaataacaatgaagtttgtggcatggatttactctttctttcatgatagatgcctctgtagcatgccatgctatttgatagcattttaccctcagtagaacttctttcaaaatgttgagtcaatccgtgcagactctgctgctgcttcattaactaagtatatgtaatattgtaaagcctcttytgtcatttcaacaatttacacagcatcttcagcaggagtagattccacctcaaaagaccactttctttgctcatctctaagaagcaacacctaatccattactgttctatcatgagactgcagcaatccattcacatcttcaggatccacttctaattctaggtctcctgctgttttccccacatgttcagtgacttcttccactgaagtcttgaacctctcaaagtcattcatgagggttggaatcaatgttttctaaacttttgttaatgttgatattttgaccttctcccatgaataacgaatgttcctaatggcatctagaacagtgaattctttccagaattcaatttactttacccagattcctcagaggactctatctatggcagtgaaagccctacaaaatgcatttctta

SEQ ID NO: 931214 - DNA, 617 bp, Homo sapiens
gtggcaatttcttaaaataacaatgaagtttgtggcatggatttactctttctttcatgatagatgcctctgtagcatgccatgctatttgatagcattttaccctcagtagaacttctttcaaaatgttgagtcaatccgtgcagactctgctgctgcttcattaactaagtatatgtaatattgtaaagcctcttctgtcatttcaacaatttacacagcatcttcagcaggagtagattccacctcaaaaraccactttctttgctcatctctaagaagcaacacctaatccattactgttctatcatgagactgcagcaatccattcacatcttcaggatccacttctaattctaggtctcctgctgttttccccacatgttcagtgacttcttccactgaagtcttgaacctctcaaagtcattcatgagggttggaatcaatgttttctaaacttttgttaatgttgatattttgaccttctcccatgaataacgaatgttcctaatggcatctagaacagtgaattctttccagaattcaatttactttacccagattcctcagaggactctatctatggcagtgaaagccctacaaaatgcatttctta

SEQ ID NO: 931215 - DNA, 617 bp, Homo sapiens
gtggcaatttcttaaaataacaatgaagtttgtggcatggatttactctttctttcatgatagatgcctctgtagcatgccatgctatttgatagcattttaccctcagtagaacttctttcaaaatgttgagtcaatccgtgcagactctgctgctgcttcattaactaagtatatgtaatattgtaaagcctcttctgtcatttcaacaatttacacagcatcttcagcaggagtagattccacctcaaaagaccactttctttgctcatctctaagaagcaacacctaatccattactgttctatcatgagactgcagcaatccattcacatcttcaggatccacttctaattctaggtctcctgctrttttccccacatgttcagtgacttcttccactgaagtcttgaacctctcaaagtcattcatgagggttggaatcaatgttttctaaacttttgttaatgttgatattttgaccttctcccatgaataacgaatgttcctaatggcatctagaacagtgaattctttccagaattcaatttactttacccagattcctcagaggactctatctatggcagtgaaagccctacaaaatgcatttctta

SEQ ID NO: 931216 - DNA, 560 bp, Homo sapiens
gcttcagcagacttaaatgttcctgcctgctggctctgaagagagcagcagatctcccagcacagtgctcaagctctgctaagggatagactgtctcctcaagtgggtccctgacccctgcacctcctgatggggagacacctctcagtaggggctgacagacacttcatacaggagagttctggctggcatctggcaggtgcccctctgggaygaagcttccagaggaaggaacaggcagcaatctttgctgttctgcagcatctgctggtgatactcaggcaaaccaggcctggagtggacatccagcaaactccagcagacctgcagcagaggagcctgactattagaaggaaaattaacaaacagagaggaataacatcaacatcaacaaaaaggatgtccacacagaaaccccggaaaccccacttgaaggtcatcaaaagaccatcaaagaccagaggtagataaattcacaaagatgtggaaaaaccagcacaaaaaggctgaaaattccaaaaaccagaacacctcttcacctgcaaagtgtcacaactcct

SEQ ID NO: 931217 - DNA, 749 bp, Homo sapiens
ccactgggctcattcaagggcgttagtgccaaattccttctccctggccttcctcacgttgatctgtgtacaaatggagctgcaggggaaaggtgggtttccaaaaggagtgacagtgaggaagagaccgagatagaaagaacctgttgcaaacatttcccatcttttgtcattcaaatggatactgttttaagtatcacctgttctggtcataaaagacaagaatgtgtttgtagaagcttctaggatgcctggcatacaccatgcaggaagcacccttccaagtcggctggcctgcttttgttttgcaaaatctggtttgaaaattttgcactttccatatttagcaacatttcagtgggtgtgaatttatattgctacagccatggctaaaagtaattcactctttgatctatgttgcctatrtgttactatacagacaggacttcaggtttctggagctttggtttaaaataaactctgtgtgtgtgtgtgtgtgtgtgtgtgtgtgtgtgtgtgtaagagaaacagacagactctagggcattgctagttccaattggtgggacttgcttgtgacctgtttggtccaaaagttggtcaaaactgtagatttgcaaatcagcaggattcactcccggctctcattttgatgtttcaaatgagtgcatgttgtgcatttgaattagatcggaatgagttttgggggtctcactgagacactcatacatgtcaggatttgccacttt

SEQ ID NO: 931218 - DNA, 580 bp, Homo sapiens
ggatagtagctcagagctactagaatggttatcatgaaaaaaggtggtgaatatatgtgttggtgatattatagaaaaactggaaccttcatacttggctgggagagatgtaatatattgtagccactttagaaaaaagtttggcagtttcttaaaaagtaaagttaatatttaccatatggcccagtcattacattcttaggcatataaactcaaaagaactgaaaacatgtattcaaacaaacaaatacttgtatatgaatatttatagcaacaccattcacagtagccaaaagttgacaatagataaacaaagaaacaaaatttaataaaccatacaatggaatattattcaaccataaaaaagaataaaatackgatgcatgctataatctggatgaaccttaaaaatattatgcgaagtgaacgaagacagatacaaaagataacatatttattatgtcagctgtcttgaatatctgtaatagataaatccatagggacagaaaacagattaatggttgctaggagctaggaaaagggaggatgagtagccgctgcttaatggagacagggcttc

SEQ ID NO: 931219 - DNA, 704 bp, Homo sapiens
tatgcaaaagaatgaaactgggctcttacctttccctttcgttacgtacaaaaattacctcaagtaggttaaagtttaaatgaaagccctcaaactattacaatcttagaaggaaatgtagaaaacacaattctgggcatcaaacttgggaaataatttatgattaagttctcaaaagcarttgcaacaaaaacaaaaactatcaagtagaatttaattaaactaaagagcttctgtacataaaagaagtataaacagagtaaacagacaacccacattacgggtgaaaatattcaccaactatgcatagacaaatgtctaatatccaggatctataaagaacttaaagaaatcaacaagaaaaaaaacatataatcttattaaaatgtgggcaaaatacatgaacaggcacttctcaaaagaagacatacaattggccaaaaaaacatgaaaaaatactccatatcaccaatcatcagagaaatgcaaatcaaaactacaatgagatatcatctcacaccagtcaaaatggttattattagaagtcaaaaaacaacagatgctaatgaggctgtgtagaaaagagaacacatacacacagtgaaaagcagtttgaagatttttcaaagaatctaaaacagatctaccattcaactcagaaattccattactagttatatatccaaaagaaaataaaacattct

SEQ ID NO: 931220 - DNA, 624 bp, Homo sapiens; identical to SEQ ID NO: 928538

SEQ ID NO: 931221 - DNA, 759 bp, Homo sapiens
agctgtgcttgagtccttgttacccaaaacaatgatcttggttctagaacacatatgggcactgggctccgtgaaggcccacctgcccatgcttgcttggatgcaggaagacgctcacagtaggcgcacctgggagctgctgcctctggatgccacaaggagaagttgctccaccttttgagcagagctgagccaagggccttaatctaggccctggttacaggttggctccgctgaagggatagagagagtaagggcttgaaggtgcctcttcctcaacctcttaggccaagagtgctcaatggcatgccagggcactgcagagttggccagtggccctagccactggatcctacactcctcccctccctcttctggctttcctcccatcccccttccatcattaagatgatgacgatgggccaggtgtggtggctcacgcctgtaatcctagcactttgcgaggccaaggcagggagactgcttgaactcaggagttcaacaccagcctgggcaacatggtgaaactgtttytacaaaaaatacaaaaagtagccaggcttgatggtgtgtgcctatagtcccagctacgctactcaggaggctgaggtgggaggatggcttgagcctgggaggcaaaggttgcaatgagttgagatggcaccactgcattccagcctgggtgacagagtaaaaccctgtttcaaaaaaaaaaaaaaaaaaaaaaaagaaaagaaaatgatgacaatgatgatgata

SEQ ID NO: 931222 - DNA, 603 bp, Homo sapiens
taatcccagcaccttgggaagccgaggcgggcaaatcttggggttggaagttcgagaccagcctggccaacatggtgaaactccgtctctactaaaaatacaaaaattagttgggtgtggtggcatgtgcctgtaatcccagctactcaggaggctgaggcaggataattgcttcaacctaggaggcagaggttgcagtgagccaagatcgtgccactgcactccagcctgggcaacaaagcaagactctgtcttgaaaaaaaaatttttgtttaaataaaaaaaaaaattaaagtgtattgggaggagggggtgttcagaactctaagatgtcagagtttctttctgggggatgtggggaaaagctacatttacccccaggctgcccttgaccttgacccaaartgccccctcctcactcagcccaggcagtagtctgaaatgtgcaaaaaacaaaaacaaacaaacaaaaaccaaacttcttcagagcaggcttttcagtgttcccaactgctcaaggagtaggtaggtgtaggtgccaggctgggcgtaagcaggctgctcctgaacaggtccccagacccgtttccctttccccctgtg

SEQ ID NO: 931223 - DNA, 627 bp, Homo sapiens
ctcccccagaccgcaggcagcagtaaagcagggctaccgtggccccagagcttgactggaacaaggtgcattctggcatggctgatcctacacaaacaagaaggttgaggggagttcccaggtgaggaattcccggcagccagggagcatgaaccaggtggcttccactctgcctgcaggaaggaaatttcttttctggttcctgaaacttcactcctatcaggaatggcctctctcctacctacccacctgggggactcacactgacctgcatttctaggctcttaaccttctctccctctctgactttgtcctgcttgttgtagaactgtgtttattcatcagtctctttcttttgtttttttgtttgagacagagtctcactctgtcgccaggctggacagtgcagtggcccgatctcggctcactgcaacctccacctcccaggttcaagtgatcttcgtgcctcagcttcctgaatagctgggamtacaggcgcccgccactgctccaggccaatttctgtatttttaatagagaccgggtttcaccatgttagccagtctggtctcgaactcctgacctcgagtgacctgcccatctcagtttcccaaagtgctgggatta

SEQ ID NO: 931224 - DNA, 614 bp, Homo sapiens
agaggacttgagccactggttatgtccatgaatggaaatgtttggatggcacaaggtcccagaacaccaggtctcttgagcagccccactcctcggtgggtctgtatgataatcccttatggttggaggtgatcaagccaagagtccatgcaccaggagagaagataggmactgaaactgtttcctgtgagttcagcagatggtcttggggtagcttatggagacaaagcaccacactcaggtcttagaggagatactaagttcttaggtccccagccaggttggctaagagctagtagaaaatgtggtccttgaaatagagtgccacctctgttcccacctatatggacacagcataggatgtcactggctggacccagtggacccactagagtccagcttgtcctcagagcttcctcaagccctcagtccagcagaccaagcatctgaagctggcatccttactgtcctgagacttcatccagtgcaggatggattcaaatagtcaacacacacatgccaggccctgggcagagcactggggatatgaagtgacttaaatgtccccctgttcctctctttaaggaaatatgagagatagtcacataggcaag

SEQ ID NO: 931225 - DNA, 784 bp, Homo sapiens
ccaggagatggaagttgcagtgagccgacacaacaccagtgtccagaatttgtagggggtctcactgactttaagaatgaagccatggaccctcacagcaagtgttacagttcttaaaggcagcatatccggagtttgttccttctgacgttcggatgtgttcagagtttcttccttctggtgggttcgtggtctcgctagctcaagagtgaagctgcaggcctttgcggtgttaccccccttaaggccgtgtctccgaagttattcattcttcttagtgggttcgtggtttcactggcttcaggagtgaacctgcagaccttcccagcgagtactasagctcataaaggcagtgtagacccaaaaaaggagcagcagcaagatttaaccgcaaaaaacaaaagaacaaaaggtctacctaacagaagagtaccccagtgcattgcaattgccggttcaggcagcctgcttttattctctaatcggccccacccacatcctgctgattggttcattttacagagagccgattggtccattttacagagagctgattggtctgttttggcagggtgctgattggtgcatttacaatccgtgagctagacacaaaagttctccacgtccccactagattagctagatacagagtgtagacacaaaggttctccaagtccccaccagagtagctagatacagagtgtggattggtgcattcacaaaccctgagctagacacagggtgctgattggtgtgtttacaaaccttgagctagatacagagt

SEQ ID NO: 931226 - DNA, 648 bp, Homo sapiens
aacaccagtgtccagaatttgtagggggtctcactgactttaagaatgaagccatggaccctcacagcaagtgttacagttcttaaaggcagcatatccggagtttgttccttctgacgttcggatgtgttcagagtttcttccttctggtgggttcgtggtctcgctagctcaagagtgaagctgcaggcctttgcggtgttaccccccttaaggccgtgtctccgaagttattcattcttcttagtgggttcgtggtttcactggcttcaggagtgaacctgcagaccttcccagcgagtactacagctcataaaggcagtgtagacccaaaaaaggagcagcagcaagatttaaccgcaaaaarcaaaagaacaaaaggtctacctaacagaagagtaccccagtgcattgcaattgccggttcaggcagcctgcttttattctctaatcggccccacccacatcctgctgattggttcattttacagagagccgattggtccattttacagagagctgattggtctgttttggcagggtgctgattggtgcatttacaatccgtgagctagacacaaaagttctccacgtccccactagattagctagatacagagtgtagacacaaaggttctccaagtcccc

SEQ ID NO: 931227 - DNA, 648 bp, Homo sapiens
aacaccagtgtccagaatttgtagggggtctcactgactttaagaatgaagccatggaccctcacagcaagtgttacagttcttaaaggcagcatatccggagtttgttccttctgacgttcggatgtgttcagagtttcttccttctggtgggttcgtggtctcgctagctcaagagtgaagctgcaggcctttgcggtgttaccccccttaaggccgtgtctccgaagttattcattcttcttagtgggttcgtggtttcactggcttcaggagtgaacctgcagaccttcccagcgagtactacagctcataaaggcagtgtagacccaaaaaaggagcagcagcaagatttaaccgcaaaaaacaaaagaacaaaaggtstacctaacagaagagtaccccagtgcattgcaattgccggttcaggcagcctgcttttattctctaatcggccccacccacatcctgctgattggttcattttacagagagccgattggtccattttacagagagctgattggtctgttttggcagggtgctgattggtgcatttacaatccgtgagctagacacaaaagttctccacgtccccactagattagctagatacagagtgtagacacaaaggttctccaagtcccc

SEQ ID NO: 931228 - DNA, 650 bp, Homo sapiens
gtgggcatcaccacacccagctaacttttaaatattttatttatttttattattattatttttttgagacggagtctcgctctgtcgcccaggctggagtgcagtggcgccatctccgttcactgcaacctctgtctcctgggtttaagcaattctcctgcctcagcctcctgagtagctgggattacggtcacgtgccaccacacccagctaatttttgcattttcagtagagacagggtttcgccacgttggctaggctggtctcraactcctgacctcaggtgatccgcccccctcggcctcccaaagtgctgggattacagatgtgagccaccgccccagcttacattttttgtagagacggagtatctctgtgttgcccagactggtctcaaactcctggattcaagtgatcctcctgcctcagcctcccaaagtgctagaattatagatgtgagccaccacgcctggccaagactaggatctgtcagaagtggaggaaaaggagacacagatttccccaatttactaacccccatcttccaactctccacccattcagggaaactttgggatggtcaacctcgtttaatatcttcatgcgataaagacaaaagatctacccagcacagttccccacttctcagg

SEQ ID NO: 931229 - DNA, 732 bp, Homo sapiens
tggcctcaagtgatctgcctgcctcagcctcccaaactgttggcattacaggtctgagccaccacgcccagtcctctttggtctttttaaatctcaaatagtaactcagtctttccctgagtttcataactttgatacttctgaatattacaggtcagttattttgtagaatgacctcctatttgkatttgcctgatgtttcatcatgattaaatgcagttatgtttttagcaggagtatcacatatgtgattctgtgttttttgtttgcatcctatcaggtggtacatgatttcagtttttccttgaccacttggttaaggtgtgtctatcaggtttctccactgtgaggttaatcttttttctctttatagtcagtatggattttgtgggggaagtacttctcatataaacatcttgttccttgcaccttttcctcactaattttagtattcattgatgtttcttgacctaatttatgactaggattgatggcaagtagtgattttctaatttcaccttttctttcacattcatcagttgatgttccactgtaaggtgaagctttctttactccctgattatttgtattagtatggacttacgctattttattttaatgggtcatattccactaatatcatttattttgatgtacatactgtctcaggtttgcctggtgggacctctttaagccggcttctgtgtattttgacctatcatttcagagaag

SEQ ID NO: 931230 - DNA, 575 bp, Homo sapiens
taaagaaagggctgggcgtggtggctcacgcctgtaaacccagcactttgggatgccaaagcaggcagattacctgaggtcaggagtttgagaccaacctggccaacatggtaaaaccctgtatctactaaaaatacaaaaattagccaggcatggtggttgatgcctgtaatcccagctactagggaggctgaggcaggagaatcgcttgaacctgggaggtggaggctgcagtgagccaagatcacgccactgcactccagcctgggtgacagagcaagactccgtctcaaaaaaaaaaaaaaaaaaaaaaaaaaatgcaaggaagctctgacgcaggccaraacaggatggactttggggacattatgctgagtgaaatcaaccaggcagaaaaggacaaatcccgtagattccactgattatgaggttcccagaatagccaaatccatagggacagaaggaagaatggaggttgccaggggcttgtggtgggggggcgggtggtttgggagaatgtggaattgtttctgggggacagactttccatctgggaggaggaaaaagctctggag

SEQ ID NO: 931231 - DNA, 763 bp, Homo sapiens
caacctctggcctgtgactatgtttagtggtgataatgaataaagcagtgatcttcaaggaattcatatgtcaaatgagaaaaacatgatgcccaactttacatatgcaaaaaatatactttcagagttcgtgagtaagctggaataagtggatatcaaagcagtttttaacatcaataatgaggctccagttgttcactcatgaattaatggtgaaatagctgaaatgattctgaatccaaggtgatcatgataatagtgatgatgaagaagacatggttaacgccgcagaaaaatccctataagccatgtgatgaaaaagtgtgatgggcttattggaagactagagcagcatttattcataacagaataagaaatcatgtcagtttaaaaaccaaagggagttgaatgcaaaaaaccattgttaataagacagatgactctggagaaaacatttktaaaaagtcatccagcatgatttatagtcctttgggtgtatacccagtaatgggatggctgggtcaaatggtatttctagttctagatccctgaggaatcgccacactgacttccacaatggttgaactagtttacagtcccaccaacagtgtaaaggtgttcctatttctccacatcctctccagcacctgttgtttcctgactttttaatgattgccattctaactggtgtgagatggtatctcattgtggttttgattttcatttctctgatggccagtgatgatgagcatggatgaaattg

SEQ ID NO: 931232 - DNA, 732 bp, Homo sapiens
tacccagtaatgggatggctgggtcaaatggtatttctagttctagatccctgaggaatcgccacactgacttccacaatggttgaactagtttacagtcccaccaacagtgtaaaggtgttcctatttctccacatcctctccagcacctgttgtttcctgactttttaatgattgccattctaactggtgtgagatggtatctcattgtggttttgattttcatttctctgatggccagtgatgatgagcatggatgaaattggaaatcattctcagtaaactatcgcaagaacaaaaaaccaaaygcatattctcactcataggtgggagttgaacaatgagatcacatggacacaggaaggggaacatcacactctggggactgtggtggggtggggggaggggggagggatagcattgggtgatatacctaatgctagatgacgagttagtgggtgcagcgcaccagcatggcacatgtatacatatgtaactaacctgcacaatgtgcacatgtaccctaaaacttaaagtataataataaaagaaaaaaaaagtcatccagcagaatgtctcttcatccctagaagatccacttcctagtctctaaactgcttctgatgtttcttttcacctaaaaaaaataaaatatagtgtatagtaatctttttgtcaaaacacagcatggcaggtggagactaaaagtctgctgttgtgtgttgttgctgc

SEQ ID NO: 931233 - DNA, 552 bp, Homo sapiens
caatttgaataccttttttcttgccaaatggctctggctagaacttccagtaaaacggaatagcaatgctgaaagcagggatctttttcttattcctgattttagaggggaagctgtcagtcttcaacattgagtatgatatgagctgtgcatttgtcacaagtgcttcttaccatgttgaggaagttcccttctattaytgtgtgtctttatcatgaaagaatgctttattttgtgaaatactttttgtgtgtgtttctccgaatgagataatcatgcaatttctccccttcatgcttttaatataatttattacattgattgattttcttatgttgaaacacccctacattccaaatttttgtacatcaaagaacgttctcaggaaagttaaaaggtaattttcagaatgggagaaacttgaaaatcattaatatgaaaagtatcatgtccagagtaaataaagatgtcttacaactcaacaacaacaacaaaaaaaaacccaaaaaaactaattaagaaatgggaaaaggactgcaacagatatttctc

SEQ ID NO: 931234 - DNA, 596 bp, Homo sapiens
acattccaaatttttgtacatcaaagaacgttctcaggaaagttaaaaggtaattttcagaatgggagaaacttgaaaatcattaatatgaaaagtatcatgtccagagtaaataaagatgtcttacaactcaacaacaacaacaaaaaaaaacccaaaaaaactaattaagaaatgggaaaaggactgcaacagatatttctccacagaagatacacaaatggcttcaaaataagcacatgaaaagatgctcagcgttatctcttattagagagatacacattaaaaaccacaaggagaacgctttacacccatgaatatggctacaagtttaaaaagaagtaaagaagaaaatagaaaacagcaaatgttggttaatatgtggagaaactggactcttgcgcattgctggtggaaaggtaaaatgggtaagccmctgtgaagaagagtttggtggttccttcaaaaggtaaacaaatttaccatctgacccactaattccactccaaggtataatccccggagaattgaaaacagacattcagacaaatactcgtgtatgaatattaatagcagcactattgagaatagccgaa

SEQ ID NO: 931235 - DNA, 597 bp, Homo sapiens
tgtgatctcggctcactgcaacctccgcctcccgggttcaagcaattctgctgcctcaacctcctgagtagctaggattacaggcgctgacccccatgcccggctgatttttttaatatttctagtagagacggagtttcaccaagttggtggtcaggctgctcttgaactcctgacctcaggtaatatgcccgcctyggcctcccaaagtgctgagattataggcgtgagccacagtgcccggcccatggttgttttatatagcctatgttcatcagctagaaagcttttatgcttactttctattttcttctaacagtaactttatttaaaacttttaaaaatagctttattgagataaaattcttctaccatactattcactcatttaaggtgtatgactcacattcatttaaagtgtgttttctaaggtcatgcaaccattatcacaatctaattttagaacattttaatctcccttaaagagaataatcacacccatcagctgccacaccccaccccaaccccacccttttcactcactcccccataccactgagaaatcactaatatactttctatctccataaatttgcc

SEQ ID NO: 931236 - DNA, 728 bp, Homo sapiens
gagaatctgtgagatagggtaaggaagagtgaagtgatcatgggacttagcattggaattcagcgctgcctgattgattcaatgttgccacagtggaaaacaacacaggacagaattcagcgggcacccacaaagagagcatttagaccagtcctagacagaggcaaayaatctatcccagtggtcagaatccgatttccagcaagcccttccaatgcatgctaaagtgctctggtgtcctaaataaatttgaaaggcagtctaggtcacaaaggctgcaattcctgggcacgtcttagtgctgtgcagggttcaaagccagtggacttggtgtgcttggaacctagttagacatcagccaggataagcaaaggactgcttaagtcaagcctttcccaaccctaggcagcacagctctgggggcaattctttccctctacttgaggaaagtagaggggagagtaaaaaggactttgtcttgcaacttggatacaagcttagccacagtggaatggggttccaggcagggtgctgaggctcccccattctagggcctaactcttggacatttctagacacctggggccagaaaggaacccattctcttgaaagaaaggaacaaatactgacatgattcatcacctgctgcttaaagagcccttgggcactgaataatcagcaaatggtagtgaggcagtactcatcatgggccttgggtgagactcaga

SEQ ID NO: 931237 - DNA, 632 bp, Homo sapiens
tgttcagggaacaagggagacaaccttaaactctgactgccggtgagccgggtggaacagagacatatttctcttctttcaaaagcaaatgggagaaatatcgctgaattctttttctcagctaggaacatccctgagaaagagaatgtgtccctgaggggaggcctctgaaatggccgctttgggracggctgtcttttatgatcgtagttgagggatgcaataagccccagtctcccgtagcgctcccaggcttattaggatgaggaaattcctgcctaataaattttggtcggaccagttgtctgctctcaaaccctgtctcctgataagatgttatcaatgacaatgcgtgcccgaaacttcattagcaattttaatttcaccccggtcctgtggtcctgtggtcctgtgatcttgccctgcctccatttgcctcgtgatattttattgctttgtgaagcatgtgatctctgtgacccacaccctattcatacactccttccccttttgaaaatcactaataaaaacttgctggttttacagctcaggggcattacggaacctgctgacaagtgatgtctcccctggacaccaagctttaagatttctctcttttgtactctgtccct

SEQ ID NO: 931238 - DNA, 658 bp, Homo sapiens
aaaaggtcctggatccccagacagaatttacttctctctgttcaattcctccaatagacgtgaaaccaaatgttgtgttagaattttaaaattaggcaccagggccggacgcggtggctcacacctgtaatcccagcactttgggaggccgaggcaggcagatcacctgaggtcaggagttcgagaccagcctcaccaatgtggcaaaaccccgtctctatcaaaagtacaaaaattagcccggcgtggtggcacatgcctgtaacccagctagttgggaggctcgggcagaagaatcacttgaacccggaaggcagaggttgcagtgaaccaaatggcgccactgcactccagcctgcctgagtgacagaactagactctatccmacaaaaaaaaaaaaaaaaaaaaaagaaaaaaaagaaaaagaaaaaagcaccaggacacctggattcaaattctgattctctagattcaaatacacttatcagttctgtgatcttggggaagccacttaaccttctgcatatacatatttttttctataaaaggaaagaatcattcttaggattgttgtcaaggattaaataagtaatgtgtgtgttagcttctatgggaggtctgacacctggtgggtgtctaataccggttggatgcatct

SEQ ID NO: 931239 - DNA, 489 bp, Homo sapiens
cagagcagcttgcacagcagcctggacctgttgcagagctttctcttgttctggaccccactcaaaactggcagccttttgggtcacttgataaatgggccagagtaacacacccaagtgaggactgtgttgtctccaaaatccaaataggcccactaggccttgtaccactttcttggttgtaggagtggccaaatgcagcaacttttccttcaccttagaaggacaagccctacaccactagaccccaagaaattttactgaggtagaaggtccctgaatttcccatcctctggcatgcaaatgtcccmctgataaatccagtgtatttgctacttcttgctcactggatccaattagcataatatcatcaatgtagtggaccagtgtgatatcttgtggaagcaaaaagtgatcaaggtctctccgaataagatgacacaaagccagagttgatacaccctgaggtaggagagcaagggcatgttg

SEQ ID NO: 931240 - DNA, 780 bp, Homo sapiens
tacaaattacatgaatacctacctagacaatccaattaaactctaacaaaatatgttggatttaacaatggacctaatattaggtaaatagtgacaataataaattggatatgacaatgcaaaaataatcctgtttatgagtgataatcatcttaaaatatcgaagaatgtaggtacccaggaagattcttcaaatatgtgaaggaactattcacatttctttaaaaattgtaagaacagctctgaaaatttaaggtaagtcatttccttgttgaaaaatgtgaaaataactagtcatcacaaatttaaaaataaaatcaatgcaattccaaacaaattccaatgaagtttttgttgaagtgagctggacaaaagataatgaaggtttgtatgtgtgaaagaaataattcaattgtattattgattatataaggaaaattcattatttctgaaaaattataatttactttaatcattagctttttaatcataagtgttactactatatgaacaaaaacaggtgaggttgttaytcataagtccaagaaatgacgttgaattttgttagttctcaaaaaaaaagtaacttttaggaatgaagttcatgcagtgttctaatttataaaacaaacattagttttcagtcaaccattggcatatgatatggtacccagatattctaattgtagtaattttttagtgctacataatttgtaatatagtctaagattgatgagaagtaatttagaatgacactgcttatgtaaattgttaatcatt

SEQ ID NO: 931241 - DNA, 569 bp, Homo sapiens
atcatttatcaaatgaccccaaaagttgctagttttgaatggagacaagagatggctgtgcaacagttccaagctgccgtgcaagctgctctgacacttgagccatatgatccattgcatccattggtgcttgaagtttcagtggcagataaagatgttttttgaaacccttggcaggcccccactggtgaatcatgaagaaggccctgaggattttggagcaaagctctgccatcttcttcaagtaaacactctctttcgagaaacagctcttggcgtgctactggrccttagtagagactgaacacttaagcatggaccgccaggttaccatgaaatctgagctgtccattatgaattaggtgttatctgacccaccaaggcctaaagttgggcatgcccatcagcaatccataataaagtggaagtgatatatatgtgaggggacccaaatagaccgtaaggaaacaggtaagttacatgaagaagtggtcccaaagcctaaggtcctcacttctgctactcggccttctctttctcagcccatacctatcaccacatgggaagat

SEQ ID NO: 931242 - DNA, 763 bp, Homo sapiens
agaagaacgtggattgtgaagatttcatgaacaatttattggttccccaaattaatacttttataatttcttatgcctgtctttactgcaatctctaaacataaattgtgaagatttcatggacacttatcacttycccaatcaatacccttgtgatttcctaggcctgtctttactttaatctcttaattctgccatctcgtaagccgaggaggatgtatgtcgcctcaggaccatgtgataattgcgttaactgcgcaaattgtagagcatgtgtgtttaaacaatatgaaatctgggcaccttgaaaaaagaacaggataacagcaattgttcagggaataagagagataaacctaaactctgactgccagtgagccgggcggaacagagccatatttctcttctttcaaaagcaaatgggagaaatatcactgaattctttttctcagcaaggaacatccctgggaaagagaatacatgcctgggggtaggtctatagacggtccccagggtgtggccatgttttatgatctgtagactgtaggggtgaaatagaccccagtatcccatagccctcccaggcttattagggagaagaaattcccgcctaataaattttgtcagaccagttgctctcaaaaccctgtctcctgataagatgttatcaatgacaatcgtgcccgaaacttcattagcaattttaatttcgccgccctggtcctgtggtcttgtgatctcgccctgcctccatttaccttgt

SEQ ID NO: 931243 - DNA, 594 bp, Homo sapiens
gagaaggatagagggtaattttagggtactggcaagaatattactaaaataatcgttcatggaatttaagataggtaagtaagcaagtaaaaaaaaaaacaaagctgatgggtggttaagactaatggcttgaaagaaaatagaagtattcataaacttgaagttctgataaagttaacaatacaaattagaaggaaagactcttattagaggagcctgggttgtttgaagagcagttacagaaaatgaaaagttcaaggtgtcccatcggagtgggtggcgagggtaaaatcaaggacattggagatgaagaagacaaggatctaggaggtcatttatttgattgcttgcctatatggacmctgaggtaccctggcatttatggcagggattgacggtgagtcacttgacaagtcacagctgaatgtggggagtgacttgaaagagttataaacaggaaaaggtaaggggaggagtaatggcctggaggaagtccaaaggtgcaaggaatgaatctaccaccacctgagagggctacagggcctggagtgccattgggaaaaatctcaatttaagttgattcaagctgtcctt

SEQ ID NO: 931244 - DNA, 584 bp, Homo sapiens
ggtgtcaggctttctgggaaagggtgctctaacaaccccgactcttcggaattgggagcattggtttgcttggaatcagcttccgcttttcctgtacttctgggctgagccgagggtcggcagagaggaaagccattcagctccagggtcctgacaagttgttggttgaccctgcagccatgagcggaactctcaaagttacgtcgcccaagcgagactcacccatgtgtcctatctatcctgacccttgcctcttgggtcctaatgcttgtcagacaaacttcctctggyctctcttctctgaggctagtcccacttctaaaaaccactccctgtctctggtgcttttctagtttctcctataagaatgatttctagtataaactccaggactctattcccttctttaggcacccgggctcaccaatcagaaagacataatttttctccaaagccctgttgtagggggactatctggaattttaggatccctcctcatacaagcaggcctaacaaaagctattcctgaagctaggatatggggagcctcagaaattttatccttcctattcatataagtgatg

SEQ ID NO: 931245 - DNA, 621 bp, Homo sapiens
atgatttctagtataaactccaggactctattcccttctttaggcacccgggctcaccaatcagaaagacataatttttctccaaagccctgttgtagggggactatctggaattttaggatccctcctcatacaagcaggcctaacaaaagctattcctgaagctaggatatggggagcctcagaaattttatccttcctattcatataagtgatgacaaaaggcatcactcttccaactctggagatcccgtccttcyctcagggtatggccctccacttcatttttgtggcataccatctttataagataggggaaaagtcccaatactaacaagagaatgcttaggattctaacaggtttttgagaatgcttcagtaagggccactaaatccgatttttcttggtcctctttgtgatctaggaggacaggcaagggtgcaggttctcaagaatgcgtcggtaagggccactaaatccgacattccttggtcctccttgtggtctgggaagaaaactagtgtttctgctactgcatcagtgagcacaactattcagatcagcagggtccagggactgttacgggttcttgggcagggggagaaacaaacaaaccaaaa

SEQ ID NO: 931246 - DNA, 621 bp, Homo sapiens
atgatttctagtataaactccaggactctattcccttctttaggcacccgggctcaccaatcagaaagacataatttttctccaaagccctgttgtagggggactatctggaattttaggatccctcctcatacaagcaggcctaacaaaagctattcctgaagctaggatatggggagcctcagaaattttatccttcctattcatataagtgatgacaaaaggcatcactcttccaactctggagatcccgtccttctctcagggtatggccctccacttcatttttgtggcataccatctttataagataggggaaaagtcccaatactaacaagagaatgcttaggattctaacaggtttttgagaatgcwtcagtaagggccactaaatccgatttttcttggtcctctttgtgatctaggaggacaggcaagggtgcaggttctcaagaatgcgtcggtaagggccactaaatccgacattccttggtcctccttgtggtctgggaagaaaactagtgtttctgctactgcatcagtgagcacaactattcagatcagcagggtccagggactgttacgggttcttgggcagggggagaaacaaacaaaccaaaa

SEQ ID NO: 931247 - DNA, 673 bp, Homo sapiens
taaaaaccactccctgtctctggtgcttttctagtttctcctataagaatgatttctagtataaactccaggactctattcccttctttaggcacccgggctcaccaatcagaaagacataatttttctccaaagccctgttgtagggggactatctggaattttaggatccctcctcatacaagcaggcctaacaaaagctattcctgaagctaggatatggggagcctcagaaattttatccttcctattcatataagtgatgacaaaaggcatcactcttccaactctggagatcccgtccttctctcagggtatggccctccacttcatttttgtggcataccatctttataagataggggaaaagtcccaatactaacaagagaatgcttaggattctaacaggtttttgagaatgcttcagtaagggccactaaatccgatttttcttggtcctctttgtgatctagsaggacaggcaagggtgcaggttctcaagaatgcgtcggtaagggccactaaatccgacattccttggtcctccttgtggtctgggaagaaaactagtgtttctgctactgcatcagtgagcacaactattcagatcagcagggtccagggactgttacgggttcttgggcagggggagaaacaaacaaaccaaaactgt

SEQ ID NO: 931248 - DNA, 627 bp, Homo sapiens
ccttaaatctggaatgattctcttcccttcccaacacacacgcactcttccccttgccagtgcttaccgataggggatgggtgacttctccagagcactgtccctgaaacccgccacaatctaatttatgaatcttccctctgttattctctcacatagakccctgctcctttccttgggggcacttgtccttgggcttactgcaaagttaagttttactttgtctgttaacatgtggggtttgtgtgtgattgtgtgcacgcttcagcctcataagactctagaccacaccggtatttctgcctgccattgtaccttcagatcctagaaccgtgtggccggtgctcagtaggcactcggtaaatatttgttgaagaaagaataaatgaatgtctgggattatagcctctataacttggcctccaaatatctggttagaggaaaccaaaaataatgcagaacaaaccaaactagagaggaaaacccatgggggcaaaccctatagtttccagcagtaaattcttgacctttttgtttctctttccaagattgtctgtaaaaagggaaaaataaggttttttaaaaaccctccaccaattacctctgagatgagacttaatatgccaa

SEQ ID NO: 931249 - DNA, 666 bp, Homo sapiens
aggctgaggtgggaggctcgcttgagcctggaaggcagaggttatggtgtgccaagatcataacactgcactccagcctgggcgacacagtgagaccactgtctcaaaaaaacaaaaacaaaaacaagatatggtgctgagccaattacttccttaattttgaagtaatkataaatagaaacaatatttcaagatatctgtaaaaggccgggtgcagtggctcacacatgtaaccccagcactttgggaggccgaagcgggcgaatcatctgaggtcgggagttcaagaccagtctggccaacatggcgaaaccccatctctccaaaaaaaaaaaaaaaatacaaaattagccaggcatggtggcacatgcctgtaaacccagctactccggaggctgaggcaggagaatcgcttgaacccagaaggcagaggttgcagtgagccgagattgtgccattgcactccagcctgggcaataagagtgaaactctgtctcaaaagaaaaaaaaaaagatgtctgtaagaactgtcaggcggcatgaaaacacatggtgtctactggtggtaaaattgcagttactggtcatgctactgtgggttgctggcaacattcataatgaaaggaaatgaaacattttagttagaggataacaaaaataaaaatg

SEQ ID NO: 931250 - DNA, 539 bp, Homo sapiens
tgttttacggagagctgattggtccgttttgacagggtgctgattggtgcgtttacaatccctgagctagacacaaaagttctccacctccccactagattagctagatacagagtgtcggttggtgtatttacaaacctcgagctagacagagagtgctgattggtgcattcacaatcccttakctagacataaagattctccaagtccccatcagattagctagacacagagtgctgattggtgcatttacaaaccttgagctagacacagagtgctgattggtgcatttacaaaccttgagctagatacagagtgttgactggtgcattcacaatcccttagctagacataaaggttctccaagtccctaccggattaaatagatacagagtgctgactggtgcattcacaaaccctgaactggacacagggtgctgattggtgtgtttactaaccttgagctaggtacagagtgctgattggtgtatttataatcccttagctagacataaagattctccaagtcaccaccagac

SEQ ID NO: 931251 - DNA, 727 bp, Homo sapiens
cccgatcacctcggaagcctataggaccatcacaggtgctctgggtaactctcacggtggaaggtaagtctgtccccttcttaatcaatacggaggctacccactccatattaccttcttttcaagggcctgtttcccttgcctccataactgttgtgggtattgacagccaggcttctaaacctcttaaaactccccatctctggtgccaacttagacratactcttttaagcaatccttttagttatccccacctgcccagctcccttattaggccaagatattttaactaaattatctgcttccctgactatttctgggctagagccacacctcattgccacctttccccctagttcaaagcctccttcacatcctccccttgtatctccccaccttaccccacaagtataagatacctctactccctccttggcgaccaatcatgcaccccttaccatctcattaaaacctaatcacccttaccgcactcaacgccaatatcccatcctgcaatgcgctttaaaaagattaaagcctattatcactcgcctgctacagcaaggcttttaaagcctataaactctccttacaattcccccattttacctgtcctaaaaccagacaagccttacaagttagttcaggatctatgccttatcaaccaaattgttttgcctatccaccccgtggtgccaaacccatacactctcctatcctcaatat

SEQ ID NO: 931252 - DNA, 727 bp, Homo sapiens
actgcccgatcacctcggaagcctataggaccatcacaggtgctctgggtaactctcacggtggaaggtaagtctgtccccttcttaatcaatacggaggctacccactccatattaccttcttttcaagggcctgtttcccttgcctccataactgttgtgggtattgacagccaggcttctaaacctcttaaaactccccatctctggtgccaacttagacaatactcttttaagcaatccttttagttatccccacctgcccagctcccttattaggccaagatattttaactaaattatctgcttccctgactatttctgggctasagccacacctcattgccacctttccccctagttcaaagcctccttcacatcctccccttgtatctccccaccttaccccacaagtataagatacctctactccctccttggcgaccaatcatgcaccccttaccatctcattaaaacctaatcacccttaccgcactcaacgccaatatcccatcctgcaatgcgctttaaaaagattaaagcctattatcactcgcctgctacagcaaggcttttaaagcctataaactctccttacaattcccccattttacctgtcctaaaaccagacaagccttacaagttagttcaggatctatgccttatcaaccaaattgttttgcctatccaccccgtggtgccaaacccatacactctcctatcctca

SEQ ID NO: 931253 - DNA, 727 bp, Homo sapiens
actgcccgatcacctcggaagcctataggaccatcacaggtgctctgggtaactctcacggtggaaggtaagtctgtccccttcttaatcaatacggaggctacccactccatattaccttcttttcaagggcctgtttcccttgcctccataactgttgtgggtattgacagccaggcttctaaacctcttaaaactccccatctctggtgccaacttagacaatactcttttaagcaatccttttagttatccccacctgcccagctcccttattaggccaagatattttaactaaattatctgcttccctgactatttctgggctagagccacacctcattgccacctttccccctagttcaaagcctccttcacatcctccccttgtatctccccaccttaccccacaagtataagatacctctactccctccttggcgaccaatcatgcaccccttaccatctcattaaaacctaatcacccttaccgcactcaacgccaatatcccatcctgcartgcgctttaaaaagattaaagcctattatcactcgcctgctacagcaaggcttttaaagcctataaactctccttacaattcccccattttacctgtcctaaaaccagacaagccttacaagttagttcaggatctatgccttatcaaccaaattgttttgcctatccaccccgtggtgccaaacccatacactctcctatcctca

SEQ ID NO: 931254 - DNA, 651 bp, Homo sapiens
aaggtggccagactgcttctttaagtgggtccctgatcctgttcctcctcactgggtgggacttcccaaatggggtctccagtcacatcctattggttcctttgggccagcaacaggcctatacctccctgggaaaaagctcccacaggaaggtgcaggctggcatctttgccattttgcagacttcactggtgatacttccaggttctagaaaatccaaggcaactacggactggagtgggccctaagcatttcacagcagccctacggaaaagtggccagatggttacatgggtgtctgtttccgtatttcctcatctggcaggtcctccaggcctgggcctccagacacacccaaccagagctattaagccagtagcaacccagcaattccctgtacagagcctccaggggcaaatgaaascctctctgctacaccctctgcagtggaactgcccttaccatccttggaataatgaaggagcaaaaaccctaagtaccttatccacacctccaacaagctgcagttgacccaaggagaggaggccagtccatctcccatgggtcccatacacaccccgctgctcatcaccagacagcgaacccctggcttgggcccacagcacagaccttccatcctgatctgactgc

SEQ ID NO: 931255 - DNA, 557 bp, Homo sapiens
ccacaagatgtacaaagaagagctggttccatttctacaaaaactatttgaaaaaattcagaagaatggactcctccccaactcattctatgaggccactatcatcttgatacaaaaacctggcagagacatgaccaaaaaaagaaaacttcaggccaatatccttgatgaacatcaatgcaaaaatcctcagcaaaatacttgcaaaccaaatccagcagcacatcaaaaagtgaatgcaccatgatcaagtaggcttcatccctgggaggcaaggtttgttcaacatatgcaaattaataaatgtgattcaacacataaacagaactaaagacaaaaaccacatgattatctcaacagatgcagaaaagatacattcaataaccctccaagaaaagatacattcarcaaccctccatgttaaaaactctcaataaattattgaaagaacatacctcaaaataataagagccacctatgacaaactcacatccaacattataatgaatgggcaaaagttggaagcattcccattgaaaaccagcaaaagacaggat

SEQ ID NO: 931256 - DNA, 699 bp, Homo sapiens
actgaccctgcactgctcctaaggaaacatgctttgaaaactctacaacccagcccagagctgtgttagaaccaaaaatggtttctttccagcaccataaattattatgaaagacccaggaattattcacaaccatgaacttctttagcaactctgccaaaatgtttacttcttcattatgttgatgcagataaaacttccacaaattcccagaatattagatttgcaacttgctttcctaaagtctccttcctcacctaaactaatagagtacacctgagctctgagcaaaaagggccaaatcccaccgggcttacgtccaaacttcatgtgtttgaaagttttattcagtgcaagtggttttaaagtcacttttatacagactcttagyatgaattttggacaatagggtgaaataagcctttatatttaattccctgacctactaatatgaacaagaaaacgagaaactcaagaaatgagggagggtgccaactatatattaaaatatttcagccacagacaggtaaggagtaagggcagcaccagccggcatgccatccatcagcacatcaggaagaaagatacccggggtggaaataaacaaggcttctgttggaacttcatcaaaaccccaacttggagcaaatggggttaaagatgaaagcagatctttgagcagttctttggggaacaggt

SEQ ID NO: 931257 - DNA, 699 bp, Homo sapiens
actgaccctgcactgctcctaaggaaacatgctttgaaaactctacaacccagcccagagctgtgttagaaccaaaaatggtttctttccagcaccataaattattatgaaagacccaggaattattcacaaccatgaacttctttagcaactctgccaaaatgtttacttcttcattatgttgatgcagataaaacttccacaaattcccagaatattagatttgcaacttgctttcctaaagtctccttcctcacctaaactaatagagtacacctgagctctgagcaaaaagggccaaatcccaccgggcttacgtccaaacttcatgtgtttgaaagttttattcagtgcaagtggttttaaagtcacttttatacagactcttagtatgaattttggacaatagggtgawataagcctttatatttaattccctgacctactaatatgaacaagaaaacgagaaactcaagaaatgagggagggtgccaactatatattaaaatatttcagccacagacaggtaaggagtaagggcagcaccagccggcatgccatccatcagcacatcaggaagaaagatacccggggtggaaataaacaaggcttctgttggaacttcatcaaaaccccaacttggagcaaatggggttaaagatgaaagcagatctttgagcagttctttggggaacaggt

SEQ ID NO: 931258 - DNA, 555 bp, Homo sapiens
aagtataataaaaaaataataataaataaataaataaataattttttaaaaaaaagaaacacagctacagatacttaggaaatggtatagtatagttgacttctgggaatgcaaccttttcacattttcaagagtgagccattctagaacatgtggccaaagtatggtaattctcaacccggcatgtgcagcagaatcccctgtgtggcttgtaaaaagcacatattactgggctcctcctctgatccctagcccagaaggcctatgagtcaggtcaggtcagagtcagcttgaggcatgcaggtttttagaaagttcatcaactcttcctatgcacarccatgactgagaatcactggaaagaagtgaagacaacaagctgttataagcattaaataacaacagaatattgaataaccctcctccaggatggtgatccaagatgaagtacattggctggaacttattaaattattagtctttgtcaaatgattacttgatttctattcctttgccaaagttaaccactgaaggaagatggacatggtggattga

SEQ ID NO: 931259 - DNA, 760 bp, Homo sapiens
tattagagggggattaaatgggtgttaatgagccaatacaaggttttggtcacatttccttttgggacatccatcttggagaaacataggtaaggttatctcgtcaacatgggaaaatgctgtgattccagaatattgattgcattctctttcaactgaaactgtaacaatctagatgatccataattcaattatttttgacagtgaagaaataaagaatatttaaatagaattagtacattgttatttactagagtacaaaagtaatggtaattcgataagtataagggtatcagtaagattaataaaagcaaattgtgctttagatcaagtgttcaaaaaacttgtgacattaggttgaatctcttctttttttccagaattgtacccactcccttgaattagttaccttcctccagyactccaccagaattataaaactcctttcaaacagcagttaatctaattagttaacttccccccaccccccgggagatttccttcctagagccccattcttcctgacccagtatgaactcactgctgtctaggcctgctgcctggctattgtcttgggacttcctttcattgtcaccctgggaattctttcactttgattttaatatgattttggtgaatgaatgtttaaaactttattctgttggtttgggtattaaacaaatcatttgataattaaataatataatcatgtattttgaccttaattcatatgtatttttcttctgttcagctgtgaact

SEQ ID NO: 931260 - DNA, 801 bp, Homo sapiens
accccaaaccaactatgtgacccagggcaagttgtatcatctgggcctcagtttccccacaagtgatttgctaaagtattgaggcgatagcacagagcttagggtgctgctagctcccgtgtcagtttgttcttcctgaaagactggatttttgttgcagagagaatgtgaggagaacaagagtttttggctaagaatggtcaggccaaagtgtgtgtgtgtgtgtgtgtgtgtgtgtgtgygtgcgtgcgtgcgtgcgtgtgtgtgtgtgtgttagtagaaggagggaacaccagaggcttatagggccctctccctttccccagcaggcctcaaagaaccgaaacatcattctgaatgcttaacactgattgcaaggaaatgaagtcaatgtctaaggcactcagaaaaacagtttctttaccatgatggatttttagaaaatgaactatccctgaagattcactcccttgactggggagatagacaggaggtacataggtgctcatccagtggctggatacataggggtggttgtgaggcaagctagtgggatgatcatgacaaagccccaacttggggggaccccttgtgcagaaaatggcccagcaggcctaactgctgccctttgaaaggtctgcttactgagtcttggaacttggatttcaagatggctccctacaccctcagaactgatcaacgtggctcacagtgcctaagcggtttgtataaacaatgtggtttatgctgaacactactttccttctgagactctggaactttggtatatgctaggcagaa

SEQ ID NO: 931261 - DNA, 651 bp, Homo sapiens
ctttccccactcaaatattccacctgcatcctgggatcaccctgcccctgactaccatagccagtgcctgcacacaccaccagtgaccctgaagccaggtctgcccagtccagctctgtccctcccagtgcccaagcatgccatcagagacatgggtatcacccagccccatccactgccattggcacctaggaattcctcctgggtacctgaggycaggcccacccaacctgccactaccaccacaactagcactaagcagcacacaccatctgctggcctagtgactggcctgaccagcccactgcaaccactaacaacaccaatgcataccacttgggagccagaaggttgccctgccactgccattgccattgcccaagccacacctgcttgccagggactcaagaacacactctcttaactggctcactgctaccactaatggcacctgagcaagaatcctagaagcccaagaataggcttgcctggactcactaacactgatgccagtatacaacactctggggcccaaggacagtcatgctcagcttacactaacaccactggggcttgaggactgggccacctggcatcttcatcgccagcaagatctcaccacaacctccactaaccgacatagcctaagcc

SEQ ID NO: 931262 - DNA, 651 bp, Homo sapiens
ctttccccactcaaatattccacctgcatcctgggatcaccctgcccctgactaccatagccagtgcctgcacacaccaccagtgaccctgaagccaggtctgcccagtccagctctgtccctcccagtgcccaagcatgccatcagagacatgggtatcacccagccccatccactgccattggcacctaggaattcctcctgggtacctgaggtcaggcccacccaacctgcyactaccaccacaactagcactaagcagcacacaccatctgctggcctagtgactggcctgaccagcccactgcaaccactaacaacaccaatgcataccacttgggagccagaaggttgccctgccactgccattgccattgcccaagccacacctgcttgccagggactcaagaacacactctcttaactggctcactgctaccactaatggcacctgagcaagaatcctagaagcccaagaataggcttgcctggactcactaacactgatgccagtatacaacactctggggcccaaggacagtcatgctcagcttacactaacaccactggggcttgaggactgggccacctggcatcttcatcgccagcaagatctcaccacaacctccactaaccgacatagcctaagcc

SEQ ID NO: 931263 - DNA, 473 bp, Homo sapiens
ttgtcctttctttataattgttggtttaatgtctattttgttagaaataagaatagtaactcctgcccttttttgtttttcatttacttgatagatttttctcctgtcctttagtttgagcctatggatgacattgtatctaagatgggtctcttgaaaacagcatccagttgggtcttgcttttttatccaacttgccactctatgccttttaagcagggcttttagcttgtttacaytgaaggttagtactgatatgtgctgatttgatcctgtcatcctgttataagcttgttgttatgtagacttgattgtgtggttgctttagagtgccaatggtttatgtagttaagtgtgtttttgtggtagctggtaatgatctttcatttccctgtttagcactcccttaagggtctcttatcgggggaacccaccccccaatatttcaatgtaggttctttctattttctgta

SEQ ID NO: 931264 - DNA, 623 bp, Homo sapiens
gatgaaataagccccagtctcccgtagcgctcccaggcttattaggacaaggaaattcccacctaataaattttggtcagaccatttgtctgctctcaaaccttgtctcctgataagatgttatcaatgacaatgcgtgcccgaaacttcattagcaattttaatttcgcccccgtcctgtggtcctgtgatctcgccctgcctacatttaccttgtgatatcttattaccttgtgaagcatgtgatctctgtgacccataccctattcgtacacctcctccccttttgaaaatcactaataaaaacttgctggttttgcagcttgtggggcatgacggaccctgccgatgtgatgtctcccctggacactcagctttaaaatttctctcttttgtactctgtccctttatttctcatactggcccacacttasggaaaatagaaaagaaactacatgaaatatcgggggtgaattttgcctgatatctggctgaatttcccccgatattgtccctttgagatattaattttcttccagtgctagtatcttaccagtttcacaacccaggaatatctttctcaaggacctgggagccattcctttgaaatgtaaatatcaaga

SEQ ID NO: 931265 - DNA, 684 bp, Homo sapiens
ggaaaactcactttagaatgcagccagcacacagcaaacttgaggaaagagatagagagagagagagtccttttttttcttcttttgagacagagtctcgctctgtcaccaggctggagtgcagtggtgcgatcttggctcactgcaacctccccctcccgggttcaagcaattctcctgcttcagcctcccaagtagctgggactacaggcgcacgccaccacttccagctaatttttgtatttttaatagagacraggtttcaccatgttggccaggatggtctcaatctcttgacctcgtgatccgcctgcctcagcctcccaaagtgctcggattacaggcgtaagccactgcacccggccgagacagaatcttacgacgtcatttgaactcctggattcagctggggctgaagtcagcacactgttagacttcccagttatataagcagatacattctattttccttaacaactttcatttgagtttctgtccgttgcctccaagagtctaaactcatgtaaatatcctttataaagttgttgtgatgattaaacaagataatgtttttaaatcacacattaaacttaatatctggcacatttctaaatattcaagaaatggtagggtaggtagttgttatcattagcaggactgtagtgaactcttttcccagaatga

SEQ ID NO: 931266 - DNA, 574 bp, Homo sapiens; identical to SEQ ID NO: 919447

SEQ ID NO: 931267 - DNA, 574 bp, Homo sapiens; identical to SEQ ID NO: 919448

SEQ ID NO: 931268 - DNA, 641 bp, Homo sapiens
agaaagccatgagtacgtgatattgagggagtctctaagggaagggtgagacgaattattataaagcgtatgaaagtctcgatcgtgccttccttcactagtggaagacaaataactgtcactaaagcaaaaaataagtttctggcaccttggccagtgtggtttcccttctcaggctcttctcctctggcctggtttttgcatttcctcagtctgtgagtgataaatgaccagtgtattctcttttacctttgtcagggctaatgttcgctaacaaatatacaagagaataggattccagaagtgatgctctcctaggaaatctgttagcagggattttgaattagatctgtcatatttttttaaattgaaatgtttaaaacatagctctttttaaaaattccatcaacatttcagtgggatttttattcttttacktatttattgtaattaaaaattgttctaaaccttagctgcatgttagaattatctgaggagctttaaaaaaaatattctggtgtacaggtcataccctgcataccccagaccaaaaaaattagactgtctggggaggaatctaggtattggtatttctttctttcttttttttttaattttactttaagttctgggatacatgt

SEQ ID NO: 931269 - DNA, 626 bp, Homo sapiens
cctacagtgagaggcagatgtaggggagtgagtagctaaatggcagcctggggaccaaatcctggctctgctacttactagctgcatgacctggtgcaaattacccagccagtctttctgttctcatttccttacctgtgaaataatgtgggaataacaatagtacctatgtaataggactgtttygatgattaaataaattaatatgctagaacattagaacagaataaattttcgataaataagtgggttgctgttagactgtatttatttatttatttatttatttatttatttatttatgatagtatctctctctgtctcccaggctggagtgcagtggtatgatctcagcttactgcaacctccacctccaggattcaagtgattctcttgcctcagcctcctgagtagctgagattacaggcgcgcaccaccacgcctggctaatttttagtaaagatggggtatttttagtagaggtggggttctgccatgttggccaggctagtcttaaactcacgacctcaactgatctgcctgcctcggcctcccaaggtgctgggattacaggcgtgagccgctgtgtccggcctctgttatactttttactgaccagttacaat

SEQ ID NO: 931270 - DNA, 635 bp, Homo sapiens
gattccccaccattctctccatccgtcctactttcttctcccagtgtcttttgaaaatgtctacttctacttttattgttttcactttgcatctgaacctaatgtaaaatttcactatgaaaatgtgaaactaggatctatactttcttagttatacttaagttataataagagagggtatttttcaccttttaaatcatgctgctttaaattgtataaagctcaagcttatcccttcttgattaatttttcagattgttttcaaacttttctcatatttattcatctcaacaattttartagttcagggatggaatgcgttctgttctacttgtattatcattcttaaaagcaacccaaaacttgcagagtgaatctctctttcttggacagcaaaaatcctaatgctgggtccagaatcatgacagccacagctccccaatgctgtcaatccctagcatgtctaatagccatcaaagctgtggtaggaggcccggtgcagtggctcacgactgtaatctcagtactttgggaggctgaggcaggcagatcacttgaggccaggagttcgagaccagcctggccaacatggtgaaaccctgtctctactaaaaatacaaaaattagccaggcat

SEQ ID NO: 931271 - DNA, 635 bp, Homo sapiens
gattccccaccattctctccatccgtcctactttcttctcccagtgtcttttgaaaatgtctacttctacttttattgttttcactttgcatctgaacctaatgtaaaatttcactatgaaaatgtgaaactaggatctatactttcttagttatacttaagttataataagagagggtatttttcaccttttaaatcatgctgctttaaattgtataaagctcaagcttatcccttcttgattaatttttcagattgttttcaaacttttctcatatttattcatctcaacaattttagtagttcagggatggaatgckttctgttctacttgtattatcattcttaaaagcaacccaaaacttgcagagtgaatctctctttcttggacagcaaaaatcctaatgctgggtccagaatcatgacagccacagctccccaatgctgtcaatccctagcatgtctaatagccatcaaagctgtggtaggaggcccggtgcagtggctcacgactgtaatctcagtactttgggaggctgaggcaggcagatcacttgaggccaggagttcgagaccagcctggccaacatggtgaaaccctgtctctactaaaaatacaaaaattagccaggcat

SEQ ID NO: 931272 - DNA, 635 bp, Homo sapiens
gattccccaccattctctccatccgtcctactttcttctcccagtgtcttttgaaaatgtctacttctacttttattgttttcactttgcatctgaacctaatgtaaaatttcactatgaaaatgtgaaactaggatctatactttcttagttatacttaagttataataagagagggtatttttcaccttttaaatcatgctgctttaaattgtataaagctcaagcttatcccttcttgattaatttttcagattgttttcaaacttttctcatatttattcatctcaacaattttagtagttcagggatggaatgcgttctgttctacttgtattatcattcttaaaagcaacccaaaacttgcagagtgaatctctctttcttggacagcaaaaatcctaatgctgggtccagaatcatgacagccacagctccccaatgctgtcaatccctarcatgtctaatagccatcaaagctgtggtaggaggcccggtgcagtggctcacgactgtaatctcagtactttgggaggctgaggcaggcagatcacttgaggccaggagttcgagaccagcctggccaacatggtgaaaccctgtctctactaaaaatacaaaaattagccaggcat

SEQ ID NO: 931273 - DNA, 580 bp, Homo sapiens
tgctctgtcccagggagatgggagttttatctataagcccctaactggggctgctgccttcctttcagagatgccctgcctaaagaggaggactagagaagcaggctacagaggctttgctgagctgtggtgggctccacccagttcgagcttgctggtggctttgtttatactgtgagggaaaaccacctactcaagcctcagtaatggtggacgtggcttctccctccaccaagccagagcatcccaggtccacttaagactgctgtactagcagcaagaatttcaagccagtggatcttagcttgctggactccatgggggtgggatccgctgagctagaccacttggctccctggcttcagccccctttccagaggagtgaayggttctgtctcactggcattccaggtgccactggggtacgaaaaaaatcttctgcagctagctcagtgtctgcccaaactgccccctagttttgtgcttgaaacccagggccctggtggtgtagacaccctagggaatctcctctcctgtgggttgtgaagaccatgggaaaagcatagtatctgggctggaa

SEQ ID NO: 931274 - DNA, 574 bp, Homo sapiens
tcgagtttgctggaggtccactccagacactgtttgcctgggtatcaccagcagaggctgcagaacagcaaatattgctgcctgatccttcctctggaagctttgttccagagggtctcccgcctgtatgaggtgtctgtcagcccctactgggaggtgtctctcattcaggctacacgggggtcagggacccacttgaggaggcagtctgtccattaatggatctcraacgccatactgggagaaccactgctctcttcagagctgtcaggcagggttgtttaagtctgtagaagctgtctgctgcctttttttcagatatgccctagacagtctagagaggcagtaggccttgttgagttgcagtgggctctgcccagttcgagctaccctgcggctttgtttacactgtgggcataaaactgcctattcaagcctcagcaatggcagacgcccctccccctgccatactccagcatcccagattgatctcagactgctgcactagcagtgagcaaggatctgtgggcatgggacccactgagccaggcgtgggagggaatctcctggtctg

SEQ ID NO: 931275 - DNA, 570 bp, Homo sapiens
ttgctggaggtccactccagacactgtttgcctgggtatcaccagcagaggctgcagaacagcaaatattgctgcctgatccttcctctggaagctttgttccagagggtctcccgcctgtatgaggtgtctgtcagcccctactgggaggtgtctctcattcaggctacacgggggtcagggacccacttgaggaggcagtctgtccattaatggatctcgaacgccatactgggagaaccactgctctcttcagagctgtcaggcagggttgtttaagtctgtagaagctgtctgctgcctttttttcagatatgccctagacagtctagagaggcagtaggccttgttgagttgcagtggsctctgcccagttcgagctaccctgcggctttgtttacactgtgggcataaaactgcctattcaagcctcagcaatggcagacgcccctccccctgccatactccagcatcccagattgatctcagactgctgcactagcagtgagcaaggatctgtgggcatgggacccactgagccaggcgtgggagggaatctcctggtctgct

SEQ ID NO: 931276 - DNA, 546 bp, Homo sapiens
  misc_feature 1, 2, 3, 4, 5, 6, 7, 8, 9, 10, 11, 12, 13, 14, 15, 16, 17,18, 19, 20, 21, 22, 23, 24, 25, 514: n = A,T,C or G
nnnnnnnnnnnnnnnnnnnnnnnnngctgtccaagtcatgggaacccacctcttgcatcagtgtaatgtggatgtgagacatggagtcaaaggagagcattttggaactttaaggttaaatgactaccctattggattttggacttgcatggggcctggagcccctttattttggccaatttctcctatttggaatgagtgtatttaggcaattcctgtaccacctttgtatctaggaagtaactaacttgcttttgattttacaggctyataggtgaaagggacttgccttgtctcagattagactttggacctggacttttgggttcatcctgcaatgaactaagacttagggggactgttggaaaggcatgattatgttttgaaatgtgaggacatgagatttgggagggggcaggggtggaatgatatggtttggctgtgtcctcacgcaaaaatctcatcttgtagttcccataatccccacagcagtgggaggttattgaattatggngggcggttaccgccatgctgttcttctgatag

SEQ ID NO: 931277 - DNA, 708 bp, Homo sapiens
actctcacacctgattgtatgtttcagtaaagagaccaagctaaacaactgtttcgatatcagttgaactcaatgtcttcagttccatataaaacatagccttggccaggcgtggtggctcacgcctgtaatcccagcactttgggaggccgaggcrggtggatcacgaggtcaggagatcgagaccatcctggctaacatggtgaaaccctgtctctactaaaaatacaaaaaattagctgagtgtggtggcgggcacctgtagtcccagctactcgggaggctaaggcaggagaatggtgtgaacccaggaggcagagcttgcagtgagctgagatcgcgccactgcactccagcctgggcaacagagcaagactccatctcaaaaaaaaaaaaaaagtagccttgtatttacctatgtcaccaacttggacatcccacacatgtaccctggaacttaaaataaaagttgaccaaaaaaaaaagccttaccaactagccaaatagtaatggtaaaaaataaaataaaatagaacctgttatgtcttataggctaaaagacccactaacttagggtggttagctgatttgtcctcaatccgtcagatcacaagagcatctagatatgtaacagaaaggtagatagagcaggcaagaaaatgcccacactgggaaacaaacaagggctgagaaaagagatcccttagc

SEQ ID NO: 931278 - DNA, 560 bp, Homo sapiens
ccaaaaacaaagtaaatttaacttgctgtcgaataagagctttactccacgagttaatagtactaacttttaaaagtgagtttgtttacatgtcgttgggattaaaccaccaccttgacctctgtttattcatgtcttctgattccagtgttactcagacattgtggccctttatgtgccagagagtaataacattgggcttcaactcacacgtyctcacatctctatctggccaattctcttggggtcaaatatcttgagagctgagtgtatgtgaggcagtggggagacaaatacctctgagagataagacaaagaccctgcatgtggaggttatttgctctttccgagaggcgttattgtcaagtgaaaacagaatgcaatccagggacaaagcacacctggttacttgcaacccagttctaccacctaccagcttcatgacctcgggcaaattatttaacctttctgagtctccaattcctcacctgtgtaattatagttcctctatataccttattaaacaaaggttttaagaataaaatttaataacacgtatg

SEQ ID NO: 931279 - DNA, 618 bp, Homo sapiens
acacaccactctgccactctcacccaagccttgggtgggcctctccctgctgtactctcccagcataatataaagcacttccaattttttaaaaaagtaatatgcagcattctttttctagagctttttattccaaggtcatccacctattctgttaatggcagaaaatctgtgataatattcggtggaaaattctgtcatttaaaagctcatgactaggaaagggacccacagagaggcttgccacacatcagcaagcaggttgtgttccattcaaacacttcattcacttttccactatagaggacgtgatccctaagaacgtgtgaccagctatgacacagccctaaactcaaccaggatgggccatcccccaggcatcactccaygggaccgtcagggatgagggacatcagtccctaaccagaagccaatggctggaaccaagtgtggcatcagagtcactggtcatgatgagagaggtctctcatggcagtcatggctccttgtgtgtatatctttctccttaccgggaaaggccacccacacgaaaagcatgaaaaatgctggtgactgcatacagtcctgggaatccggctacccagagccaatgccaag

SEQ ID NO: 931280 - DNA, 454 bp, Homo sapiens
ttgctgtgatgcaggggatgaagtccctaggctgcacacagcaaaggaaccctgggcccagcccacaaaaccgcttcttcctcctaggtctctgtgcctgtgatgggagaggctgaggtaaagacctttgacatgtcctggagacattttccccattatcttatgcaaatgtctgtagctggcttggatttctcctcagaaaatgggattttcttttctattgcattgtcaggctgcaaattttccaaatttttatgctctgcttsccttataaaactgaatgctttcaacagcaccgaagtcacatcgtaagtgctttcctgcttagaaatttcttctgccagataccctaaatcatgtctctcaagttcaaagttctacaaatctatagggccgggcaaaatgccaccagtgtgtttgcaagactcacctttactccggttcccaacaagtt

SEQ ID NO: 931281 - DNA, 454 bp, Homo sapiens
ttgctgtgatgcaggggatgaagtccctaggctgcacacagcaaaggaaccctgggcccagcccacaaaaccgcttcttcctcctaggtctctgtgcctgtgatgggagaggctgaggtaaagacctttgacatgtcctggagacattttccccattatcttatgcaaatgtctgtagctggcttggatttctcctcagaaaatgggattttcttttctattgcattgtcaggctgcaaattttccaaatttttatgctctgcttgccttataaaactgaatgctttcaacagcaccgaagtcacatygtaagtgctttcctgcttagaaatttcttctgccagataccctaaatcatgtctctcaagttcaaagttctacaaatctatagggccgggcaaaatgccaccagtgtgtttgcaagactcacctttactccggttcccaacaagtt

SEQ ID NO: 931282 - DNA, 618 bp, Homo sapiens
ttcatcgtccatatcactgtcagcattttgttcaaagccattcagcaagtctctaggaagttccaaacttggccacattttcctgtcttcttctgagtcctccaaactgttccaacctctgcctgttacccagttccaacgtcgcttccacatttttggatatgttttcaccagcaccccactctactgtaacaatttactgtattagttcattttcatgctgctgataaaaacatacctgcaactgggcaatttacaaaagaaagtggtttgttggacttacagttccacatggctggagaggcatcataatcatggtggaaggcaagaaagagcaagctacatcttacatagacggcagcaggcaaaaaaagasattgttcagagaaactcccatttttaacaccgtcagatctcgtgagacccattcactatcacggcaacagcatgggacagacctgccctcatgattcagtcatctcccactgggtccctcccacaacacgtggaaattatgggagctacaaaatgagatttgggtgaagacacagaaccaacccatatcagtgattatttaagattttttggagaagcctaactgttcaaggaaggtgtgtg

SEQ ID NO: 931283 - DNA, 459 bp, Homo sapiens
aaattcatgattatgatccctagttacatctctctttaagtccttatgtttgattccctgggagtttcagcacatttatatagcagcacccaagtttttataatctgttaagtattactacccaggattagctactgaagaatcaagaaccagtagttgatgaacttgaaagacaattatyctatatagtgtttcttgaggacactaatttcttgagatagaatgagaggaaaacataatatccacaaacagaaataaattttggaatattatatgctttagcttcctcttggatatttacaaaaatattagcatattgacagttacagaatgaagaaacctttttagctacatttaaactagtgctagagtttgaatatatttcctccaaattcatgtttaagtttaatcctctaagtgatgaggaagtggggcctctggaggcaattaagttatgat

SEQ ID NO: 931284 - DNA, 654 bp, Homo sapiens
tttgttcatagtgtctgcttaataggtatttgttaaaaaaaataaatgagcacatataatgagttaaaaaatgcttgggaccagaggtatttcagatttcaaattattttcagatttcagaatatttacattatacttacaaattcagtagtgctaatccagaaatccaaaatctgtaatgcttaagtgaacatttccttgagcatcacgtcagctctcaaaaagtttcagcttttagagcatttcagatttcagatatctggataaggaacactcaacatgcacttttctatattaaccttatttgctataaatttcatatatatatatattatttagttctagtagcttttgaaatgtattccttagttttttyccataatcatctcattttcaagtaaagacaattttgtttttcctattcaatcattatgccctttatttttcttttataatggttagtgcttacagtaatgtgtagaagaatagtagtgagatgaacattctttcttttttcctgattttatgtggaatttttcaatattgcacctttaaatagtaccctgcctgaagattttttgtaggttgtggaaataaataacacctaataataacagagagaatctatatttattcagacgttttataacaaga

SEQ ID NO: 931285 - DNA, 628 bp, Homo sapiens
gcggtcgcctgcagttccaactactcgggaggttgaggcaggagaattgtctgaacccgggaggcggaggttgcagtgagccgagatcgtgccactgcataccagcctgggtgacaggcaagactatatctcaaaataaataaatacatacatacatacaaacacatatatgtaatgtataaatattacctttttgtcatctatttaacaaaatatttgctcaaatatatmcttccatctgacaactatttaacattacttttctaatatttttactttattgctgctgacttgatacattttttattcattccactacatccttgttattttggaagatctatcctttatttctttattaaggggtatcttcaattttttgacctcacaattagatgcataattttcaagtactatttgaaataaaaataccttctattgtcttagcaaattagtccatttctctacttacccctcctcaataagttgacaaattcaaaaaacataaatttccccatttctttttcaccactcccctccaagaaaacttggaaccagtttgttccaaggtttgttcccaccaaaatctagattatacaaaaacattttagaatgttaatgatatatt

SEQ ID NO: 931286 - DNA, 629 bp, Homo sapiens; identical to SEQ ID NO: 924164

SEQ ID NO: 931287 - DNA, 609 bp, Homo sapiens; identical to SEQ ID NO: 924165

SEQ ID NO: 931288 - DNA, 527 bp, Homo sapiens
gtcatctatgacctcctcctgcagcatctaactctgtaggtgattgataaacataaatatctggtgaatggatgcaaaatagtgaaagtggttggctatgttaatagaattgaagaaggaaaatactaagaggtgcacatccagatgagagaatgtatgatttgacgacaaccaagaccagatagaagaaacaaattgaatatgtttgcatgtgtgtgtatgtgtgttggggggacttccttctgtgtagataaatctgaatatagaaagtttgttttaaggcctggtrtggtgacctgtaatcccagcactttggaaagccaaggagggcagattgcttgagcccaggtgtttgagaccagcctgggcaacatgttgaaactccgtctctacaaaataatacaaaaattagctgagtgtggtggcatgtggctgtagtcccagctactcgggaggctgaggtgggaggatcacttgagccgggagggagtggctgcagtgagccatgatcacgccactgcacttca

SEQ ID NO: 931289 - DNA, 763 bp, Homo sapiens
ctcagcctcccacagggggcagctcctttccgcagacaggatgtcctgatgagtgttcagctcctagcagagaggagacttggagtgggaagatcctctctgcagggaggtcatccagtcatctctgcagctctcagcagagaggaggccctggagttggtagctcctctctgccccagctcatcctgtcgtctgaccagctctggctgagctggggcttctctgggcctcagaggggaggaagtgcacactgattggcccatgggtggtcatgggcaggcctggaaaaggcaycacatatctccacactggtctgtggcactggcagcccagcccccagctttcaggccctccctggcctgaaggtggaggctcactggggacctgcccccttctacccaggaacctgtctatctcctgctgctgttcatggtgccgaggctgtaggtgccaaggggcgcctgcaggccagtgtgagctgccctcagaccctccgcggcttccctcctatgctcattggcgcccaaaatctggagggggacaaggcggcagggactggcatgtcagctctgccctgagcatgtgcacaccccatggggctgtcacagtgcccaagatcagccctgactttgctctgacatcagaacaggtgctgacagcagggagaagccaggcagtgggaacaggcatttctgagccagcgagggcagggggtccttcccgagctcccaagagtgcaggcatgcctgggtttgcagccaca

SEQ ID NO: 931290 - DNA, 613 bp, Homo sapiens
gcggtggcgtgcacctgtaatcccagctaatcgggaggccgaggcaagagaatggcgtgaacccgggaggcagagcttgcagtgagccaagatcgcgccactgcactccagcctgggtgacagagtgagactgtcaaaaaaaaaaaaaaaagcataggctggatagtgtaagcaacagatattttctcatggttttggaggctagaatttcaaaattaatattcccatggatttggtttctggtgagggctcttttcctgacttctcacrgggcctttcctcagtgtgcatgcatggaaagaacaagaaagagcaagctcttttatgtctcttcttataaggacactaattctattggatcagggcgtgctgtaaactaaattgtgtcctcccaaaattcttacgttgaagccctaactaaatttgactgcatttggagatagggcctacaaggaggtaagtaaggttcaatgagctgataaggatgtggccctgaactaataggactagtgtccttggaaaaaaagaaacaccaaagctttctctgcctgccacatgagggcacagtaaggaggtggccatctgcaaggtaagaagagaaccttcactagaa

SEQ ID NO: 931291 - DNA, 607 bp, Homo sapiens
tttctcccaaatcagagctgtctccccagataggtggcctctccctgggggaacctggggcagaacagtttccttcttctgggtcctcctatctagtccccgggtcacctgggccagccctgccttgtcccagtggggtctgacagtgtggaggagcaagaagggtgggctctcacacgraaaggtgcagtgaggcctgtggcaggtggaccccatgaccccagcttggcctctggggggttgtctgggctcctacatgtgtgtgtgtgcatgcgtgtgtacatgggtgtgtgtgtgtgtgtgcatgtgtgtgtgcgcacgtgtgtgtgtgtgaccctggctgcaactgagatctgagttgtcttgctggtaagctggggacgggccgcagttcccaggctgggatgagaagcccaaagccctctgtggagccaactctacttgcccccacccctgtcccagcactgaccctcttccctcccctctctgcagttcttcttgacattctcactagaagggtcaccatcactggaggtcctggggtcatctcctgccccaacgcaggctggccccacccccacatgccagctgctcccttctctcctga

SEQ ID NO: 931292 - DNA, 661 bp, Homo sapiens
agtagccaagctttcggatatggagtctgaactccttgcatctttgaagaatggattcagggaggagtgaagtgagaggattggagatgattcccaacaaattttgtattgcagcgtatgtcagtttggaccctccatgaagtagacaccaatataaattgtaaagcgtaactttaagctgggtgtggtagttcatgcttatagtcccagctacataggaagctkacccaggaagatcccctgagcctaggagtttgaggctgtggtaagcaatgattgtgccactgccctctaccctgggtgataggatgagaccctatctctaaaaataaaacgcaaaaaaagttcaactttatcttgttaatcataaaggagagaggtgacaggagttaagtggggagagcctcacactgtgatgtctgacttatgtgagagggaaaagggaataaagaagaatcggataagaagagcctcaaaatatagtgcagctctaagtaagtcctttctatgccactagggaaccgaagaatatagtacattagaaaagcccagcattgatcagaaatgaccaactcgaggacttctgccatgctcggtcattggccaggagcagactgaagacagtgagacattgatcgacacgggactggattctgatggt

SEQ ID NO: 931293 - DNA, 661 bp, Homo sapiens
agtagccaagctttcggatatggagtctgaactccttgcatctttgaagaatggattcagggaggagtgaagtgagaggattggagatgattcccaacaaattttgtattgcagcgtatgtcagtttggaccctccatgaagtagacaccaatataaattgtaaagcgtaactttaagctgggtgtggtagttcatgcttatagtcccagctacataggaagctgacccaggaagatcccctgagcctaggagtttgaggctgtggtaagcaatgattgtgccactgccctctaccctgggtgataggatgagaccctrtctctaaaaataaaacgcaaaaaaagttcaactttatcttgttaatcataaaggagagaggtgacaggagttaagtggggagagcctcacactgtgatgtctgacttatgtgagagggaaaagggaataaagaagaatcggataagaagagcctcaaaatatagtgcagctctaagtaagtcctttctatgccactagggaaccgaagaatatagtacattagaaaagcccagcattgatcagaaatgaccaactcgaggacttctgccatgctcggtcattggccaggagcagactgaagacagtgagacattgatcgacacgggactggattctgatggt

SEQ ID NO: 931294 - DNA, 661 bp, Homo sapiens
agtagccaagctttcggatatggagtctgaactccttgcatctttgaagaatggattcagggaggagtgaagtgagaggattggagatgattcccaacaaattttgtattgcagcgtatgtcagtttggaccctccatgaagtagacaccaatataaattgtaaagcgtaactttaagctgggtgtggtagttcatgcttatagtcccagctacataggaagctgacccaggaagatcccctgagcctaggagtttgaggctgtggtaagcaatgattgtgccactgccctctaccctgggtgataggatgagaccctatctctaaaaataaaacgcaaaaaaagttcaactttatcttgttaatcataaaggagagaggtgacaggagttaagtggggagagcctcacactgtgatgtctgacttatgtgagagggaaaagggaataaagaagaatcggataagaagagcctcaaaatatagtgcagctctaagwaagtcctttctatgccactagggaaccgaagaatatagtacattagaaaagcccagcattgatcagaaatgaccaactcgaggacttctgccatgctcggtcattggccaggagcagactgaagacagtgagacattgatcgacacgggactggattctgatggt

SEQ ID NO: 931295 - DNA, 612 bp, Homo sapiens
tcagggaagatggttccccttttgcccagggcaggtccagaagtgctgtccaagtgcctagacctggacttggggaccctgagagtttgcaaggtgctataccccactgtggtcaagctggcacctaaggtacaagacaaagtccccttcacatttctctctgcttttctcaaccagaaggagtctttcatcaaaaccaccatagctgagaatgtgctgggtcacacctgaggtcagcatatctcagagtctcacccaaggctcaaagtatactacctgggtatcactgttggttattcagggcccaaggggtctttagtcaacaggtgataaatcctgccaggactagatccttcctttcaaagcagcaggttccctcttgttcagagtatgtctagaaatgtcatctgggagctggggcctgagatcrgagcctcacgatactgcccagtgccctatcttagtgtggctgaactggtattcaaaatgcaagatgaaggcctctttggtcttccctctcctcttctgaagcagaaggaaggagtcattttcattgctgcaagctgtgcctcctgggtttgtgaaagtggtggtacaagcattcccttagcc

SEQ ID NO: 931296 - DNA, 598 bp, Homo sapiens
ggagtttgccagaggtccactccagaccctgtttgcctgggtatcagcagcagaggctgcagaacagtgaacattcgtgaacagcaaatgttgctgcctgatcgttcccctggatgttttgtctcagaggggtacctggctgtgtgaggtgtcaatctgcccctaatggggggtgcctcccagttaggctactcaggggtcagggacccacttgaggaggcagtctgtccattctcagatctcaagctgcrtgctgggagaaccagtactgtcttccgtgctgtcagacagggacatttaagtctgcagaggattctgctgccttttgtttggctatgccctgcccccagaggtggagtctacagaggcaggcaggctccctatgctatggggggctccacccagtttgagtttcctggccactttgtttacctactcaagcctcagcaatggtgggtaccccttccccagcctcactgccaccttgcagtttgatctcagactgttgtgctaggaatgagcaaggcgccttgggcgttggaccctccgagccaggtgcaggacataatctcctggtgtgccgtttgctaagactgtt

SEQ ID NO: 931297 - DNA, 559 bp, Homo sapiens
agacagggacatttaagtctgcagaggattctgctgccttttgtttggctatgccctgcccccagaggtggagtctacagaggcaggcaggctccctatgctatggggggctccacccagtttgagyttcctggccactttgtttacctactcaagcctcagcaatggtgggtaccccttccccagcctcactgccaccttgcagtttgatctcagactgttgtgctaggaatgagcaaggcgccttgggcgttggaccctccgagccaggtgcaggacataatctcctggtgtgccgtttgctaagactgttggaaaagcgcagtattagggtgggagtgactcgattttccaggtgccgtctgtcacccctttcctgggctaggaaagggaattccctgaccccttgcacttcctgggtgaggtgatgcctcgcccttcttcagctcacactcggtgcactgcacccgctgtcctgcacccactgtccgacaatccgcagtgagatgaacccggtacttcagttggaaatgcagaaatcatccgtcttctgcgtcgc

SEQ ID NO: 931298 - DNA, 559 bp, Homo sapiens
agacagggacatttaagtctgcagaggattctgctgccttttgtttggctatgccctgcccccagaggtggagtctacagaggcaggcaggctccctatgctatggggggctccacccagtttgagtttcctggccactttgtttacctactcaagcctcagcaatggtgggtaccccttccccagcctcactgccaccttgcagtttgatctcagactgttgtgctaggaatgagcaaggygccttgggcgttggaccctccgagccaggtgcaggacataatctcctggtgtgccgtttgctaagactgttggaaaagcgcagtattagggtgggagtgactcgattttccaggtgccgtctgtcacccctttcctgggctaggaaagggaattccctgaccccttgcacttcctgggtgaggtgatgcctcgcccttcttcagctcacactcggtgcactgcacccgctgtcctgcacccactgtccgacaatccgcagtgagatgaacccggtacttcagttggaaatgcagaaatcatccgtcttctgcgtcgc

SEQ ID NO: 931299 - DNA, 696 bp, Homo sapiens
gataaatgagtgagttgatagtgaatgtctagtgggtgagtgggtaaataaatggatacatggataggtgggtagatgattgaatgggcagatgggtagatatatagatgggaaggtgaatagatgaattgatggatggataattaaaatcaccagtttatcccgaagtatcagaggatctaaaattagggaaaatgggaaaaccaatgagtacatttttaaggggataatgcaaaacaacaaagagattaagttggctgcactgcaactgtgtttgtccccccagacacgagtgtgggcagtcaaggacccttgacagccccagtgaaccccgtcttttctcctccccctgcaggtgggctgtaaggcagccatggtctttttccaatattgtgtcatggctaacttcttctggctgctggtggagggcctctacctgtacaccctgcttgccgtctccttcttctctgagcggaagtacttctgggggtacatactcatcggctggggtatggtaccaggkagggcttccaggctggggacagagggggcaaggcctggagaactccctagggggagggtgccaacccagcttgcagtcctacgtcttgcttagctgcaggtcctgcctgcaaggatatcagccaagggtcaagaaagtcctcaaaatgtctgatcccaggacaagtccctcag

SEQ ID NO: 931300 - DNA, 887 bp, Homo sapiens
  misc_feature 508, 511: n = A,T,C or G
caggcacgcgccatcatgcctggctaatttttgtatttttagtagagacgggatttcaccatgttggccaggctggtctcgaacttctgaccttaggtgatccgcctgccttggcctcccaaagtgctgggattataggcatgtaatcccagccactgcacccggccttctttttgttgttattgttgttgtttttaagatatggggtcttactgtgttgccacgcccagccttctttctgtgtttttttttttttttaagagatagggtctcacgtgttgcccaggctggtctgaaactcctagactgaagcaatcctcctgcctcagcctctcaaagtgctgagtttacagaggtgagccaccgctcctggccaaatactgtattttccctctgcsattggtggaacctgcggatacggagggctaaatgattttgttttatgtggacaaaaagaccgaagaagaaaaaaaaagcgaggaggaggaggcagggaggggaaaagcangangaggaggcggcagccctcagtaaggtacctaaacagtgaaaagatttcatccacatatatgctacaaagtgaatctttttaaaagtacattttcaagagatagagaagcagacaaaatggtgagttatcatgaaacaaatagatggtctcttttttttttttagagctttatcttgcattttcaggtgcccagtatgattttgtgttttatttttattttcatttttagttctagtcattctcccccaggattctcattcctggtagttccatcacctcccacaccatcccaaatgtgatattccatcccactctgaatctggatacttgactcatttctgaactttcattttagttgcaaatctcctaaaactat

SEQ ID NO: 931301 - DNA, 561 bp, Homo sapiens
aggaaaggccttttggatgaagtgacttttgatcagagacctaagttgagcgtgagaggagtgagccttgtgactgtctgggggaagaatcttccaggcaggaaaaatgcaaaagccccaggttggtgggagtgtgccagtgtggctggagcagagtgagcaagggaggggggcaggtgggatatgaggtcagaagggtagcaggagggcaggtcttgttcagccatggtaaagggtttggcttgactcctggtgaaatggaaagtcttgggtgtgggggcggtttaagcagagaaatgataggatctgatgtatatttttaaaggatcattaagtctggtgtggtgaatagactcttgggggaagagggaacaaaggtgggcatagagagaccagttaggaggcactgagaggaggggagggayggtagagttttagaatagaggaggaggttgaaatggttgttttggagaatggaagcgagaatagagaaatgtaataggattgccatgcagcaggaagggctcagttgaggttagtgatacattatagcaagatgtt

SEQ ID NO: 931302 - DNA, 488 bp, Homo sapiens
cagggaattgctaagggggtgcttacccagactctaggaccttggagatgcccagtagcctatttatctaggaggctggatcctgtggcctctggatggccaagttgcctgtgagccatggcggctacagcaagcctagtccaagggactgataagttaactctgggccagaatttatcccttayagctcctcatgctgtagagactctactatgaagtgcttctgctaaatggatgtcaaatgcttgcatcttacaatatcagggtttactgttggatcagcctcatttgactttcactcccacaaggtgtttaaatcctgctaccctgctcccagatgcagattccactatacctatccatgactgtcaagaactgttagaaaatactgaaactggccagccagatgttcaggatgtgcccctggaaaaggcagatgccactgtgtttacagacagtagcagtttccttgagcagggagtatgaaa

SEQ ID NO: 931303 - DNA, 614 bp, Homo sapiens
ctgttgggtgctgtggctcacacctgtcatcccagcactttgggaggccgaggggttggatcacctgaggctgggagtatgagaccaacctgacgaacatggagaaaccctgtctctactgaaaatacaaaattagccaggtgtggtggtacacacctgtaatcccagctacttaggaggctgaggcaggagaattgcttgaacccgggaggcagaggttgcagtgagccaagatcacgtcgctgcactccagcctgggcaacaagagcgaaactccattaaaaaaaaaaamaaacaaacaaacttcctccccctaaactgacttcttctgtcctaaatcttcttcattacattaaatggagctaccacccatccagtggattagatcaaatagttaagagtaatccttcatctcattcttttttccccactctatgtggtctatcaacaagccccttcatttgccatcatctccactaacatgatccttgcacaggctattgtcatctttcactgaactgctgtaacagcatcacaatttaattcctttcctctatttttgtcccttgcatttagttcaacgtacagaatccaagttatgtgtgtaaaagcat

SEQ ID NO: 931304 - DNA, 636 bp, Homo sapiens
gctgttctcccctctccttcctctttttgatggcttcagcagtggaagactgccaccaccttgggtttttgcactgtgcaataactccataatttccttgtggtatttaatgggggttcccagcagttaggaaccccctttctttccatattgcagcatgggcatgtaggattagataagcatacttgctatctgtatacacatttattctttttccctttcccagttctaaggctcaggtaagtgccactagttctgctaactgggcgctggtccctggggaaaagggcttattttcaagtatggttacatcactaactatggcataacctacccttcgtatcctattctccacaaatgagcttccatcggtatataggttaaggtcaggattagctaaggggactttgaagagatcatctcagggggcataagtctggactataatttgttggcagtcaggcttgattggctccccatcrtctgggagaaaagtggcagggttgagggccacgcatatacatatttgaagcaccggtccctcaaggagtagcacctggtatctaagtaggcagttgtctgatagccataaacttcctttggcacctagtatgccattgacattatgagtagtcc

SEQ ID NO: 931305 - DNA, 576 bp, Homo sapiens
ttcctcccaccctccagtctcaagtaagcccctttttctattgttcatttccagaatggctattattaaaaagtcaaaaaataacagatgctggtgacattatggagaaaaggtaacacacatacactgctggtgggaatgtaaattagttcagccattgcacaaagcagtctggtgatttctcaaataactcagaacagaattaccattcaacccagcaatcccattattgggtatataatcaaaggattatataccttctaccataaagacacatgcacatatatgttcatggtagtagtatccacaakagcaaagacttggaatcaatctaaatgcccctcaatggtagactggatttgaaaaactgtggtacataaacacaatggaatactatgcagccaataaaaagaatgaaatcatctcctttgcagcaacatagatggagctggaggccactatgttaaacaaactaatgcatgagcagaaaaccaaatactgcatgttctcacttataagtgagagctaaactttaagttcatatgagcaaaacctcttaaatccagatttttaaaa

SEQ ID NO: 931306 - DNA, 749 bp, Homo sapiens
cttctatctttcagaatagtttgagtaggattgatactagttctttaaatgtttggtagaatgtagcagtaaagccattgggttctaggctttttactggtacagcttcaatctcgttagttgttattggttggttcaggttttggatttcttcatggttcaatcttggtagattgtatgtgtctaggaatttgttcatttcttctatactttccaatgcattggcatatagttgctcatagtagccattaatgaccctttaaatttctatggtgtcaattgtaacatcactgttttcatctctgattttgagttttctttttttttttcttagtctggctaaatgttaattctgttttcaaaaaaccaattttttgttgatcttttgcactgttttgtattgcatttatttctgctctgatctttatttcctttcttctaattttggttttggtttgctcttgcttttctggttcttcaagatgcatcatcwggttatatatttgaggcttttcttcttgatataggcacttatagctataagtttctctcttagtactgctttctctgtatcccataggttttgatatattgtgtttccattatttgttttgagaaaattttcaatttctttatttcttcattgacccactggtcatttagaaacatattaatttccttgtgcttatataatttccaaaattcctcttgttttgatttctggttttggtgtgtgctttttcaatata

SEQ ID NO: 931307 - DNA, 607 bp, Homo sapiens
catgaagctactcagggaggtccatggagaggtccacatggcaaggaactgaggcctcctgccagtagccagcaccatcttgctggccatgtgagcgtgccatcttagatgcagatcatacggccccagtcaagccttcaaatgactgcatccctacttgacattttgactgtaacctcatgasaaaccctaagccagaacaccagctaagccactccccaattcctcatcaagagaaactgagataataaatgtttattattgttttaagctactaaattttgaggtaatctgttatgtagcaatagataactaatactgatatctgtcatattggggcctcagtgtaacttggaacagaaagagttccatattataattcttaaacattacttggaatggttaggggccccagtgctattctctctggggatatttccagcaatgggccccacagccatttatagtgagttgtcccacttactctttcaccagtgagcactttccatgtgtcagatgccatattagagactggggctatagaaatgaacagtcttttgggaggccgaggcaggtggatcacctgaggtcaagaatttgagaccag

SEQ ID NO: 931308 - DNA, 726 bp, Homo sapiens
ctttcagtccttttaatgttctatcccattgcttccttacctccatggtttctaatgataaataagctgttaatcttattaagcattacttctacgtgataagctgcttctcttttgctgctttcaagattctatctttgtctttatctttgaacagtttaattataacgtgtctcagtgtggacctctttgagtttatcctacttggagtttcttagatgtatagactaatgttttccatcaaatttggaaagtttttgcccattatttctctcaagtattcttyctattagaccccactacctcctctggcactcccattatgcatatgttgtggtatacttggtgatgtcttttaaagtctgctcattattctatgtctttcttttttatgctcctctgactgagtaatctcaatgacttatcttcaagttcactgattcttctgcctgctcaaatctgctgttgagtctctctaataaatttttcctttcagttattcttttaagcactagaatttatatttggctcttttttataagtttggtctttttattgatattctctatatgtgagacatcattctcatggttttctttagttctttgtacatggtttcctttagttttttgagcatattttaaatggttgaattaaagtctcttaaaagtaagcccaatgtctgggcttcttcaggaataatttctatcaattgtcatttttctt

SEQ ID NO: 931309 - DNA, 746 bp, Homo sapiens
ttcagtccttttaatgttctatcccattgcttccttacctccatggtttctaatgataaataagctgttaatcttattaagcattacttctacgtgataagctgcttctcttttgctgctttcaagattctatctttgtctttatctttgaacagtttaattataacgtgtctcagtgtggacctctttgagtttatcctacttggagtttcttagatgtatagactaatgttttccatcaaatttggaaagtttttgcccattatttctctcaagtattcttcctattagaccccactacctcctctggcactcccattatgcatatgttgtggtatacttggtgatgtcttttaaagtctgctcattattctatgtctttcttttttatgctcctctgactgagtaatctcaatgacttatcttcaagttcactgattcttctgcctgctcaaatctgctgttgagtctctctaataawtttttcctttcagttattcttttaagcactagaatttatatttggctcttttttataagtttggtctttttattgatattctctatatgtgagacatcattctcatggttttctttagttctttgtacatggtttcctttagttttttgagcatattttaaatggttgaattaaagtctcttaaaagtaagcccaatgtctgggcttcttcaggaataatttctatcaattgtcatttttcttgtgtaggggccatacttccttg

SEQ ID NO: 931310 - DNA, 599 bp, Homo sapiens
tgtaattctgatagagattgcactgaatctgtagatcattttgaggagtattgttatcttaaaaatattaagattcagcctgggaaacatggtgaaaccccatctctacaaaaaatacaaaaattagccaggtgtggtggtcccagctacttgggaggctgaggtaggaagatcacttgcactcaggaggttgaggctgaagtgagacatgaccaagccattgcacgccaacttaggcaatagagagagaccttgtctcaaaaaaaaaaaaaaaaagtcttccarttcatgaatgtgggatgtcttttatttattttggttaaaaatttttttttaacagtagttttcagtgtacaaatcttttttttttttttttgagacagagtctcgctcttgttgcccaggctggagtgcaggggcgcaatcttggctcactgcaacctctgtctcctgggttcaagcaattctcttgcctcaacctcctgagtagctgacctcaagggatcctccctccttggcctcccaaagggccaggattacaggcgtgagccaccacgcctggcctcagtggacaaatcttatacttacttgggaaaatt

SEQ ID NO: 931311 - DNA, 635 bp, Homo sapiens
tgctctgggtccatcattaatttttattttatttattattatttttagagatgaggtcttgctatgttgcccagcctggtctcagactacaggcattcaccactgcatccagcttttccttccttcccgccttccttccttccttccttccttccttccktccttcccttcttcctttttttcttttttttttgacaaagtcttgctctcttgcccatgccggagtgcaatggtttgatctcacctcactgcaaccttcgcctcccgggttcaagcgattctcctgcctcagcctcccaagtagctgggattataggcggctgcaaccatacccagctaatttttgtattttttagtagagatgggctttcaccatgttggccaggctggtcttgaactcctgacctcaggtgattcgcctgcctcggcatcccaaagtgttgagattacaggcgtgtgccaccatgcctggccaacacccagctttttctaggcctttttttttcttttttttttttgagacagagtctcactctgtcacccaggctggactgcagtggcgcaatctcggctcactgcaacctcccgctcctgggttcaagcgattctcctgcctcagcctcccgagtagctgg

SEQ ID NO: 931312 - DNA, 635 bp, Homo sapiens
tgctctgggtccatcattaatttttattttatttattattatttttagagatgaggtcttgctatgttgcccagcctggtctcagactacaggcattcaccactgcatccagcttttccttccttcccgccttccttccttccttccttccttccttccttccttcccttcttcctttttttcttttttttttgacaaagtcttgctctcttgcccatgccggagtgcaatggtttgatctcacctcactgcaaccttcgcctcccgggttcaagcgattctcctgcctcagcctcccaagtagctgggattataggcggctgcaaccayacccagctaatttttgtattttttagtagagatgggctttcaccatgttggccaggctggtcttgaactcctgacctcaggtgattcgcctgcctcggcatcccaaagtgttgagattacaggcgtgtgccaccatgcctggccaacacccagctttttctaggcctttttttttcttttttttttttgagacagagtctcactctgtcacccaggctggactgcagtggcgcaatctcggctcactgcaacctcccgctcctgggttcaagcgattctcctgcctcagcctcccgagtagctgg

SEQ ID NO: 931313 - DNA, 580 bp, Homo sapiens
aggagggctacaccctgcaaagccacaggggtggagctgcctgaagctgtgagagcccatctcttgcatcagcatgatgtgaatgtgagacatgaagtcaaaggagataattttgaaagtttaaggtttaatgactgccctgtygaatttcagacttgcatggggcctgtagcctctttgttttgggcaatttctcccatatggaatggctgtatttacccaatgcctgtacccccattgtatctaggaagtaactaacttgcttttgattttacaggctcatagatggaagggacttgccttgtctcatatgagactttggacttggacttttgagttaatagtggaatgagctaagattttgggggactgttagaaagacctgattgtgttttgaaatgtggggacatgaggtttgggaggggccaggggtggaatgatatggtttggctgtgaccccacccaaatctcatcttgaattgtagttctcaagcctcaggccttggcagcttccacgaggtattgagcctgcaggtacacaaaagtcaagaattgaggtttgggaacctctacctagatt

SEQ ID NO: 931314 - DNA, 671 bp, Homo sapiens
accccctcccttcccgacacatcaagctcggggatttgcccccgcccaggactggcaaattgactttactcacatgccccgagtcagaaaactaaaatacctattagtctgggtagacactttcactggatgggtagaggcctttcctacagggtctaagaaggccaccgctgtcatttcttcccttctgtcagacataattccttggtttggccttcccacctctatacagtctgagagcatacaggcctttattagtcaaatcagccaagcattttttcaggctcttagtattcrgtgaaacctttatattccttacagtcctcagtcttcaggaaaggcagaaaagattaatggtcttttaaaaacacacctcaccaagctcagccaccaacttataaaggactagacaatacttttaccactttcccttctcagaattcaggcctgtcctcggaatgctacagagtacagcccatttaagctcctgtatagacgctctttttattaggctccagtctcattccagacaccagaccaacttggactgtgccccaaaaaacttgtcatccctactatcttctgtctagtcatactcctattcaccattctcaaactactcatccatgccctgctcttgtttacactgccagtttacattgtttctccaa

SEQ ID NO: 931315 - DNA, 671 bp, Homo sapiens
accccctcccttcccgacacatcaagctcggggatttgcccccgcccaggactggcaaattgactttactcacatgccccgagtcagaaaactaaaatacctattagtctgggtagacactttcactggatgggtagaggcctttcctacagggtctaagaaggccaccgctgtcatttcttcccttctgtcagacataattccttggtttggccttcccacctctatacagtctgagagcatacaggcctttattagtcaaatcagccaagcattttttcaggctcttagtattcggtgaaacctttatattccttacagtcctcagtcttcaggaaaggcagaaaagattaatggtcttttaaaaacacacctcaccaagctcagccaccaacttataaaggactagacaatacttttaccactttcccttctcagaattcaggcctgtcctyggaatgctacagagtacagcccatttaagctcctgtatagacgctctttttattaggctccagtctcattccagacaccagaccaacttggactgtgccccaaaaaacttgtcatccctactatcttctgtctagtcatactcctattcaccattctcaaactactcatccatgccctgctcttgtttacactgccagtttacattgtttctccaa

SEQ ID NO: 931316 - DNA, 671 bp, Homo sapiens
accccctcccttcccgacacatcaagctcggggatttgcccccgcccaggactggcaaattgactttactcacatgccccgagtcagaaaactaaaatacctattagtctgggtagacactttcactggatgggtagaggcctttcctacagggtctaagaaggccaccgctgtcatttcttcccttctgtcagacataattccttggtttggccttcccacctctatacagtctgagagcatacaggcctttattagtcaaatcagccaagcattttttcaggctcttagtattcggtgaaacctttatattccttacagtcctcagtcttcaggaaaggcagaaaagattaatggtcttttaaaaacacacctcaccaagctcagccaccaacttataaaggactagacaatacttttaccactttcccttctcagaattcaggcctgtcctcggaatgctacagagtacagcccatttaagctcctgtatagacrctctttttattaggctccagtctcattccagacaccagaccaacttggactgtgccccaaaaaacttgtcatccctactatcttctgtctagtcatactcctattcaccattctcaaactactcatccatgccctgctcttgtttacactgccagtttacattgtttctccaa

SEQ ID NO: 931317 - DNA, 671 bp, Homo sapiens
accccctcccttcccgacacatcaagctcggggatttgcccccgcccaggactggcaaattgactttactcacatgccccgagtcagaaaactaaaatacctattagtctgggtagacactttcactggatgggtagaggcctttcctacagggtctaagaaggccaccgctgtcatttcttcccttctgtcagacataattccttggtttggccttcccacctctatacagtctgagagcatacaggcctttattagtcaaatcagccaagcattttttcaggctcttagtattcggtgaaacctttatattccttacagtcctcagtcttcaggaaaggcagaaaagattaatggtcttttaaaaacacacctcaccaagctcagccaccaacttataaaggactagacaatacttttaccactttcccttctcagaattcaggcctgtcctcggaatgctacagagtacagcccatttaagctcctgtatagacgctctttttattaggcyccagtctcattccagacaccagaccaacttggactgtgccccaaaaaacttgtcatccctactatcttctgtctagtcatactcctattcaccattctcaaactactcatccatgccctgctcttgtttacactgccagtttacattgtttctccaa

SEQ ID NO: 931318 - DNA, 572 bp, Homo sapiens
atgagcacccccttcacacacccgactggaagccgcactgcatataacgcacacggggtcactatcccctgttccacacatccccacgcacacaccatcagtgcactactgggacattctgctgtccggggctgagagtgaaccagaactctgcccataaatctagcacaccccactgtggaaacaatggggggtaaggaggggccgcccagcaaagaacaggacacacgttcctgaggatggagtcacttctggctgagacatctstgcaggggatgccggcgacaaaggctgccctatcctcctccctgggccagatggacaccacccctgccttctgccccctagcaccaggcaaaaggaaaatagaagaggttccatccaggttaaataccccagggcctcttatccgtaggaaacatgctggcccactctctccaaacccagcatgggggtggagaaacggtggggaaaacagcatctgtctcagatttcttgggtggagtttttgttttatttacactgtttatttttctgatttcctaaaatgggcatctggtgcctggcagccc

SEQ ID NO: 931319 - DNA, 710 bp, Homo sapiens
ccggtcgggctctgtggcgagtcctgaggagcaccccatcctctgggtcccgggtgggaagataaaacagaggtcagcagagcagggcctggggcggactggatcctgttctccattttgttggctgaaactgtgggcaaatttccccaacccctctgagcctcagtttccccatctgtgcagtggggacagtaggactgaccctgcagggatgggtggggactaaaatggtgggggtgaggcactgagctcagcatacggccagagggagggctccggggcactcctgggctgggttatccaatcagaactgcgggagggctgggtgcggtgcctcacacctgtaatctcggcactttagaggccaaggccagtggatcacctgaggtccggagttcgagaccagcctggccaacatggtgaaaccccgtctctactaaaaatacaaaattagccgagcgtggtggcacatgcctgyagtctcagctactcgggaagctgagataggagaatcgcttgaacccaggaagcggaggctgcagtgagccaagactgcgccattgcactccagcctgggcgagacaggtagagactctgtctcaaaaaaaaaaaaaaaaaaaaagctctggcctgtgaatgcagcctgagaagcctggactagaagcagttcagcttccttccacatcccaggcgcccacccatgctgtggt

SEQ ID NO: 931320 - DNA, 569 bp, Homo sapiens
cagaggttaaaaggcacagcacaggtgatcgtggctgattcctgccaattaagccatgcccaagcttcctgtttgatggataaaggccacgttagtgtccatggcataaatgaggtctagggaattcaaggctactgacaataagggagatagggcatatgtgcggtaagaatggcagattttcaccccctaaaccccctgcttcatgagtgtaagtcattttaacacctatggtggtgactgccaaggtcgcctggactcrgggatggaaggacagaagagggaaagaggacgctctttcctctctctctcacataccccagatatctgctaggaagagaagggaagcttcaaactgaactttataataattttattgggcataaactctcttgagcagaatccaggtgttgaacaggaactgctgcagaaagaagcacaggagccatggcccatcgtgtgggcagacagggaggggcaggtgaggcctgaaagtgatgcttgctttctcagcagggaagcttatagcctggggcaaggtctgagttctccctgggcttcctggagat

SEQ ID NO: 931321 - DNA, 610 bp, Homo sapiens
aatcagctggggactagagacaggtgtgcagccctcggtttacagaggctgtgagaccaagagagttccaagacctccaggaaaacatctccctgctaaaaggctttcccaacctttagaaatctattcattttccccactttccatcctctttctcttgctatctctttatcgctcctcctgccttcttcctttctttccttcagtaaacgttttttgaaacgatgatgagcaaaaaacgcctgatccagtctatggcgcgtttcggtgggaagatgaacacgccttcccagcagagtaaaacgtgattacaccaaggaccggtaccctctcccttccctcggccaggtccacgtccccaggcgtcggagaaggggttggaccgcagcggggcgtcagakttgccaggcgcccggggcaaataccggcagcggtggttgtgcggtgtcctagcaacggggcggcagcaggggcacacacaccgcccaagcccggacggtggccgcgaagctagggccaccatggcggaccgcaggcggcgctccggcggggacgttggccccggtgcgcgagggcgtgaactgcaggtccaggtaaacactcagcgccc

SEQ ID NO: 931322 - DNA, 622 bp, Homo sapiens
aggatggtcagggaaagtctttctgattaggtgaagtttgggcagaggcccaaggaagaaagggcacaagtcaaatgggattatctaagggaagatttttctaggcagagggaacagcaaatgcaaaaagcctgtaatgaaggaaagacttagagtatttgagaaacagaaaggamatcagggagatcagaggcagatgtggggctagggaagtagactggaagcagagaaatgggaggccgttacagtggcccagtggagacaacaaagtgggcaaggaggggacaactgtgagaaattgattttgcagaggaggccagagccagatcatttgctctgagtgaaaaggaaaggccactgaaagtttctgaacagaggattgatctaacttgctttaacacttctctctggctgccgcaagagaagaagttgttggtgcaaagatacataggagcagagagtacagttgggaagctaaagtaaggcctagagacttcgatggcctggatgagggtgatagaggtaagagatgagtagtgactggattctgggtttagcttgaaggtgagaccttcaggatttgctgaaggatttgatataagatgtactatacatggtaaag

SEQ ID NO: 931323 - DNA, 614 bp, Homo sapiens
gacaggcatccaccaccacgcctggctaattttttaatgttttgtagagatggagtttctccgtgttgttcaggctggtctcgaactcctgggctcaagcaatccacctgcctctgcctcccaaagtggtggattacagatgtcagccgccatgcctggctggcttaagcaattatgaagtgaagatggtgaagtgctccaggtcctaatttcatcaggacggtctaaactattggagtctccaaggcctggccaccttgaggagcagggcaggctctaatcccatttgtacacagggaaatgaagaggcagtttgggatttgcagtgcttatgattaaatgtacaatatgctggtcctcaagtgattcctagaaatgcctaattctttgtgtatggtccataatttgatatcctggcctggggggaaatcaacctccatcttagccactctgcacttctttttcctcatctatawataagggattaaaacaataaacatagttcaaatggtggctgcaagaattcaatggagtaaatgccataaaccactagtacagggcttggtaaatataatctcctcttagtattagttgatatacagaatgttcctgag

SEQ ID NO: 931324 - DNA, 627 bp, Homo sapiens
ctgtaatcccagcactttgggaaactgagatgggcaggtcactcgaggtcaggagttcgagaccagactggctaacatggtgaaacccggtctctattaaaaatacagaaattggcctggagcagtggcgggcgcctgtaktcccagctattcaggaagctgaggcacgaagatcacttgaacctgggaggtggaggttgcagtgagccgagatcgggccactgcactgtccagcctggcgacagagtgagactctgtctcaaacaaaaaaacaaaagaaagagactgatgaataaacacagttctacaacaagcaggacaaagtcagagagggagagaaggttaagagcctagaaatgcaggtcagtgtgagtcccccaggtgggtaggtaggagagaggccattcctgataggagtgaagtttcaggaaccagaaaagaaatttccttcctgcaggcagagtggaagccacctggttcatgctccctggctgccgggaattcctcacctgggaactcccctcaaccttcttgtttgtgtaggatcagccatgccagaatgcaccttgttccagtcaagctctggggccacggtagccctgctttactgctgcctgcggtctgggg

SEQ ID NO: 931325 - DNA, 606 bp, Homo sapiens
tgagccactggttatgtccatgaatggaaatgtttggatggcacaaggtcccagaacaccaggtctcttgagcagccccactcctcgatgggtctgtatgataatcccttatggttggaggtgatcaagccaagagtccatgcaccaggagagaagataggmactgaaactgtttcctgtgagttcagcagatggtcttggggtagcttatggagacaaagcaccacactcaggtcttagaggagatactaagttcttaggtccccagccaggttggctaagagctagtagaaaatgtggtccttgaaatagagtgccacctctgttcccacctatatggacacagcataggatgtcactggctggacccagtggacccactagagtccagcttgtcctcagagcttcctcaagccctcagtccagcagaccaagcatctgaagctggcatccttactgtcctgagacttcatccagtgcaggatggattcaaatagtcaacacacacatgccaggccctgggcagagcactggggatatgaagtgacttaaatgtccccctgttcctctctttaaggaaatatgagagatagtcacataggcaag

SEQ ID NO: 931326 - DNA, 609 bp, Homo sapiens
cacagggggaaagggaaactggtctggggacctgttcaggagcagcctgcttacgcccagcctggcacctacacctacctactccttgagcagttgggaacactgaaaagcctgctctgaagaagtttggtttttgtttgtttgtktttgtttttgttttttgcacatttcagactactgcctgggctgagtgaggagggggcattttgggtcaaggtcaagggcagcctgggggtaaatgtagcttttccccacatcccccagaaagaaactctgacatcttagagttctgaacaccccctcctcccaatacactttaatttttttttttatttaaacaaaaatttttttttcaagacagagtcttgctttgttgcccaggctggagtgcagtggcacgatcttggctcactgcaacctctgcctcctaggttgaagcaattatcctgcctcagcctcctgagtagctgggattacaggcacatgccaccacacccaactaatttttgtatttttagtagagacggagtttcaccatgttggccaggctggtctcgaacttccaaccccaagatttgcccgcctcggcttcccaaggtgctgggatta

SEQ ID NO: 931327 - DNA, 634 bp, Homo sapiens
ccagctgtggctaaacagggccaatgtacacctcaggtcactgcttcagagggaagaagccccaagccttgtaaatttacatgtggtattgggcctgtgggtacacagaggtcaagaactgaggtttgggaacctccgcctagatttcagaggatgtayggaaatgcctggatgtccaggcagaggtgtgctgcaggggtggagttctcatggagaacctctgctaaggcagtgtggaagggaaatgtgaggtgggagcccccacatggagtcctcactggggtactgcctattggagctgtgagaagagggccaccatcctcccaaccccagaatggtagaaccaccaacagattgcaccatgcacctggaaaagccacagaacaccagcctgtgaaagcagccagaagggaagctgtaccctgcaaagccacaggggtggagcttcccaaggctgtgggaacccacctcttgcatcagcatgacctggatgtgagacatggagtcaaaggagatcatttcagagctttaagatttggctgccctgctggattttggacttgcatggggcctgcagccccttcgttttggccaatttctcccattaggaatgggcgtatttacccaaagcttg

SEQ ID NO: 931328 - DNA, 634 bp, Homo sapiens
ccagctgtggctaaacagggccaatgtacacctcaggtcactgcttcagagggaagaagccccaagccttgtaaatttacatgtggtattgggcctgtgggtacacagaggtcaagaactgaggtttgggaacctccgcctagatttcagaggatgtacggaaatgcctggatgtccaggcagaggtgtgctgcaggggtggagttctcatggagaacctctgctaaggcagtgtggaagggaaatgtgaggtgggagcccccacatggagtcctcactggggtactgcctattggagctgtgagaagagggccaccatcctcccaaccccagaatggtagaaccaccaacagmttgcaccatgcacctggaaaagccacagaacaccagcctgtgaaagcagccagaagggaagctgtaccctgcaaagccacaggggtggagcttcccaaggctgtgggaacccacctcttgcatcagcatgacctggatgtgagacatggagtcaaaggagatcatttcagagctttaagatttggctgccctgctggattttggacttgcatggggcctgcagccccttcgttttggccaatttctcccattaggaatgggcgtatttacccaaagcttg

SEQ ID NO: 931329 - DNA, 574 bp, Homo sapiens
acaataagaagcaatcatgttaagccactgtttaatgcagaccattgttacctcctgactacactactgcaatatggcccttgcttgtatttcactttctatgttgttcccatttattcatcaagtgaaaacccaagtctggccgggcgcagtggctcatgcctgtaatcccagcactttgggaggctgaggcgggcggatcacgaggtcaggagatcgagaccatcctggctaacacggtgaaaccccgtctctactaaaaatacaaaaaattagccaggcatggtggcaggcgyctggagtcccaggtactagggaggctgagacaggagaatggcatgaacccgggaggcggagcttgcagtgagcccagatagcgccactgcactccagcctgggtacagagcaaaactccgtctcaaaaaaacaaaaacaaaaacaaaaacaaaacaaaacccaagtctgatcatgttacttcttggcttaaaatctcttagtgggccaagtgggcgctgtggctcacgcctataatcccagcactttaggaggctgagggaggtggatcatctgaggt

SEQ ID NO: 931330 - DNA, 574 bp, Homo sapiens
acaataagaagcaatcatgttaagccactgtttaatgcagaccattgttacctcctgactacactactgcaatatggcccttgcttgtatttcactttctatgttgttcccatttattcatcaagtgaaaacccaagtctggccgggcgcagtggctcatgcctgtaatcccagcactttgggaggctgaggcgggcggatcacgaggtcaggagatcgagaccatcctggctaacacggtgaaaccccgtctctactaaaaatacaaaaaattagccaggcatggtggcaggcgcctggagtcccaggtactagggaggctgagacaggagaatrgcatgaacccgggaggcggagcttgcagtgagcccagatagcgccactgcactccagcctgggtacagagcaaaactccgtctcaaaaaaacaaaaacaaaaacaaaaacaaaacaaaacccaagtctgatcatgttacttcttggcttaaaatctcttagtgggccaagtgggcgctgtggctcacgcctataatcccagcactttaggaggctgagggaggtggatcatctgaggt

SEQ ID NO: 931331 - DNA, 620 bp, Homo sapiens
gtggcgcaatctcggctcactgcaagctccgcctccggggttcaagctgttctcctgcctcagcctcttgagtagctgggattacaggcgcccgccaccaagccccactaattttttttatttttagtagagatggggtttcactatgttgaccaggttgttcttgaactcctgaccttgtgatctgcccgccttggcctcccaaagtgctgggattacaggcgtgagccaccgctcccggccaagacatgttatgttttttcttactgaagatttaatkattaaatgtgtgtccctccaaacttcaaactacttcaagaggacaacgttgccttattcttctgtctgtcccttttctggtccatggttcagtgctgaataactgtttgacaaatgattgctggatggatatgaaaatgaatgaaagtatttcttcaaatctcagctatgagcatcacactacgcaccattttacaagagggctgaagcagtttatctttattgtccattccaattaagacatgttgtctgtggttaaaaacaaacaagcaacaaaactataaataaccttcagatgaattcattcagtaacctggctttatttccttgtaaaagtcaat

SEQ ID NO: 931332 - DNA, 590 bp, Homo sapiens
atgtcttttgagaagtgtctgttcatatcctttgcccattttttgatggggttgtttttttcttgtaaatttgtttaatttctttgtagattctagatattagccctttgtcagatggatagattgcagaattgcagaatttctccaattctgtaggttgcctgttcaccctgatgatagtttcttttgctgtacagaagctctttagtttaattagatcccatttgtcaattttgrcttttgttgccattgcttttgatgttttagacatgaagtctttgccaatgcctatgtcctgaatggtattgcccaggttttcttctaggatttttatggtcctaggtcttacatttaagtctttgatccatcttgagttgatttttgtataaggtgtaaggaaggggtccagtttcagttctctgcatgtggctagccagttttcccaacaccatttattaaatacggaatcttttccccattgcttgtgtgtgtcaggtttgtcaaagatcagatgattgtagctgtgtggtgttatttctgaggcctctgttctgttttattggactatatatctgttttggtaccagtac

SEQ ID NO: 931333 - DNA, 610 bp, Homo sapiens
aggggcagctgcgggtgcagcttcagcaggcttaaccgctcctgcctgccagctctaaagacagcagtggatctcccagcacagagctcaagctctgctaaggaacagaccacctcctcaagtgggtccctgacccccatgcctcctgactgaaagacacttcccagcaggcgtcgacagacacctcatacaggagagctccggctggcatctggcaggtgccctctgtgatgaagcttccagaggaaggaacaggcagcaatctttgctgtactgcagcctccactggtgatacctaggcaaagaaggtctcgagtggacctcctgcaaactccagcagacctgcagcagaagggcctgttagaaggaaaactaacaaacagaaaggagtagcatcgacatcaacaaaaaggatgttcacacaaaaaccccatccaaaggtcaycaacatctccaaaggtcaccaacatcaaagaccaaaggtagataaattgatgaagttgaggaaaaccagtgcaaaaaggctgaaaattccaaaaaccagaacacttcttctccttcaaaggattacaactcctcaccagcaagggaacaaaactggacagagaat

SEQ ID NO: 931334 - DNA, 802 bp, Homo sapiens
ggtgcctctgtattcccagtgcctctctgtttctggtacacagtagactttataaatgtttgctgaattagtggtccttgttccatccccagcctgccctaacccctgccccacccacacatgaattcaatgaactaatacctttaagcccttaaacagagttacatattcrcttgctaaataatacagaaatcagttacagccccttctagaacctgtagtcccccgcctcctgcctgagcagtcacaccacattattctgtctcctgtacttcctgggcatttccagggtcatcaaaaagcccagtgtattgccgaagggactaaggttagatctcaggaaggacttcctagagaatagccaaggggagtctggtcatcctgggagagctggccagtggagcaggcgctggggtcagtggggtaggtctgagatttggggacagtgagtagtgggagaggcgaggtctggagcaaaatggagccagggtgccacctagtggttccctcacctccccagccccagaagctcttccttctgggcctgggttcttttccctcctccacacccttccctaaagaaggcaataacttttgagtgcccaaaacaggagaggcatttttcttgcgttgcttttatttaatcacttccccagcccttccatcgccttttttgaggataagaaacccaaagttcccagagattaacttgcccaagatcacttggcctggatttgagcctgaggctcagactccaaaacccacactcaatttgctacatctcccaggggtggggccaagg

SEQ ID NO: 931335 - DNA, 546 bp, Homo sapiens
aaggagctatatgtggctgctgatgaagcctccatcgcccccattctggctgaggccaggcccactttggacgtaggcttggctgggttcctaccctgactggggcagcaactactatcaggtgaagctgactctagactcagaggaagaaggacccctggaggaatgcttggcctacctgactgcccgtttgccccagggatcgctggtcccctacatgcccaacgctgtggagcaggccagtgaggctgtatacaaactcgctgaatcaggtagggaccttatggaggaggggcattatgccaaagccattggtggcaccccagatctcagtaatgcaggggctgttgggtgcttcctgcaaatccctgagagggcagaagatagcttctgktaattcattattcttccaataaatgttgattgagtacctattttcatcagcactgtgctaggtgttggggatatggctcaataggataatgtatgccctgctcttatggaccagtgttttaacaaaaaaagatggacattaaacaggtgatc

SEQ ID NO: 931336 - DNA, 735 bp, Homo sapiens
atccctgagagggcagaagatagcttctgttaattcattattcttccaataaatgttgattgagtacctattttcatcagcactgtgctaggtgttggggatatggctcaataggataatgtatgccctgctcttatggaccagtgttttaacaaaaaaagatggacattaaacaggtgatcctgcatggggtgatgaaaggagtgatctcccacagcagggagatcagccttgatctggggtcagagaaggccaaatgacataaactgagtgataaggaggatttgrtcagttcagtaggtgggcaagagccaacagtatgaatgagggcctgcaaggaagcagcatggggttagggaatggaaggaagcccacaccccacaccccctgctacagaggaatgacactgaggctactgtgaggtgtggctgggtggcagatggcagggcaggtcaggggcagactgcagggcctagcgggcagcatgaaggagtttggactttatcctcagaacactgggaagatattgaagggtttaagcaagggcagcatgccttcactcccctttgatagccatatgtgtccatctgatgccctcttccctgcctgcttggcagggtcttctttggggaaaaaggtggcaggtgccctacagaccattgagacctccctggctcagtacagcctcacccagctctgtgtgggcttcaacgggggcaaagactgcactgccct

SEQ ID NO: 931337 - DNA, 728 bp, Homo sapiens
cagcttttcaacccggaactggtctaaatgtgttgctgggtgcttcagcctgctctctgagattgtgatgcagcaaggacctctctgctctactcacaggtagaagtccaggcatttggagcagcttggttgaaacagcagcttgaactgccccacccttctgtgcagagactgtggtgctcagagccctctctgctccacatccaggcaagtctccaggcatttgagatacccactcacctagatcacyattctgagctgcatcaccctttttgtgcatagattgtgatgcagtgaggccttctctgctccatgcctaggcaggtctccaggcattcaaagcacctgcttgcccagactggcagcttaagccactccaccatcacttttcaaagatccaggtgcaagggagccctctccactccatgtccaagcagatatccaggcacttggagcacccacttgcctgactcagaagcctgtcactccatccctcgtgtacaaagatcctggtgcaagagaggttctttttggttcatggccaggcagattgtcagacatttgggacaactgctcagccagattcacagcctgagctatccctcccttccaatacagagattgtggtgcatcagggccttctccactccatgaccatgtggatgtctaggtatttcaagcaccagggctttctccactccatgaccaggtggatctctaggtatttc

SEQ ID NO: 931338 - DNA, 586 bp, Homo sapiens
ttggagcacctactctcctgaattaggagtttcagtaggtcacccccacatccccaccatgcaaagaacttggggctgaggaagtttttcaggttcacgcctaggtgctcctctgggcacttggtgaccacccactggattctccttctgtgctagtgtttgtgtctgacatcaggagacctataggtggctctgcccaatcttgccttacccatcttgccccctaccaccccagggctgagcagrgagctcagatcactgtcactccatggatcagcccattgcctgaggaaatagagagcttctcccagtaaacaaggaccaagtatatacccagccacattgcccacagtaggctcttacctttaagcaccttctattggcctgtaggctgaaccacacagcccagtgtaaaacctgctggcagaagtgcttagggaagcaaattcaaaagaccctacccaacattctctatagttacatcccaagggatgaggtgaaagggaaatttaaaataataaaaatatagggaaagaaagaaaaataaaaaatcctaaccacataaaaatagttataaaaattagta

SEQ ID NO: 931339 - DNA, 586 bp, Homo sapiens
ttggagcacctactctcctgaattaggagtttcagtaggtcacccccacatccccaccatgcaaagaacttggggctgaggaagtttttcaggttcacgcctaggtgctcctctgggcacttggtgaccacccactggattctccttctgtgctagtgtttgtgtctgacatcaggagacctataggtggctctgcccaatcttgccttacccatcttgccccctaccaccccagggctgagcagagagctcagatcactgtcactccatggatcagcccattgcctgaggaaatrgagagcttctcccagtaaacaaggaccaagtatatacccagccacattgcccacagtaggctcttacctttaagcaccttctattggcctgtaggctgaaccacacagcccagtgtaaaacctgctggcagaagtgcttagggaagcaaattcaaaagaccctacccaacattctctatagttacatcccaagggatgaggtgaaagggaaatttaaaataataaaaatatagggaaagaaagaaaaataaaaaatcctaaccacataaaaatagttataaaaattagta

SEQ ID NO: 931340 - DNA, 611 bp, Homo sapiens
ggtcagggttaagggttcctgatagagacaccgattcctggaggtccaaagagcctcaggagctgggccagcaatatgcagcatctattatggacacagaacattcccatcacatggccgggtacagtggctcacgcctataatcccagcactttgggaggtagaggcaggtggatcacctgaggtgaagagttggagaccagcctggmcaacatggtgaaacccccatctccactaaaaatacaaaaaattagccaggcatggtggcaggtgcctgtaatcccagctactcaggagctgaggcaggagaattgcttgaacccgggaggtagaggttgcagtgaggcaagattgcaccaccgcactccagcctgggcaacaagagggaaactctgtctcaaaaaaaaaagcaaaaaacaaaaacaaaaggacatttccaccacaagtcatggggcaggggcctggcctggtcagtgaccctgtcctagcatgacagccccctgcaccaaggaagctacccagtcccgtccactgggccgggtcatgctgagtgccctggaggcatggcctcatctctcccaggctcagggtcatgagctgagcccccgttc

SEQ ID NO: 931341 - DNA, 449 bp, Homo sapiens
gcccaggggactttggacagtgctgcccattcccctgtggccctcatctgccaacgatatgggccagagtctccctgagtcatggctccctcccctgatcctggcctgctgtgtctacagtgccggagagcccctgcagcctccacctgaggtctattccgtgcccataacacctaccccacaatcatccttccargctgccccaagctgacagaaggggacatgaaggctgacccaatattgctgcctgcctgggtcacataggcctgtcctgtcatccactgctctcaaatgggctctagacagaacccaccagacacacgactgtgagatcctcaatagccctagggtggaggtgctatgaccaagtcctttctcaggctattcctccccctgaagatcagggtgactgggaagatgacagggcaggaaccaaggccccatgacct

SEQ ID NO: 931342 - DNA, 594 bp, Homo sapiens
cccaggggactttggacagtgctgcccattcccctgtggccctcatctgccaacgatatgggccagagtctccctgagtcatggctccctcccctgatcctggcctgctgtgtctacagtgccggagagcccctgcagcctccacctgaggtctattccgtgcccataacacctaccccacaatcatccttccaggctgccccaagctgacagaaggggacatgaagkctgacccaatattgctgcctgcctgggtcacataggcctgtcctgtcatccactgctctcaaatgggctctagacagaacccaccagacacacgactgtgagatcctcaatagccctagggtggaggtgctatgaccaagtcctttctcaggctattcctccccctgaagatcagggtgactgggaagatgacagggcaggaaccaaggccccatgacctgtccctgaaggctagacagccaacaggaacatcaggggatttggccctgctaagtggctgcattccatggcagtcagccgggaggggtctaaagtggagagccacagggctctgtcccctgccctgctcagcagtttcctctctgc

SEQ ID NO: 931343 - DNA, 630 bp, Homo sapiens
gaaatgaaggcagaaataaagatgttctttgaaaccaatgagaacaaatacataatgtaccagaatctatgagacacatttaaagcagtgtttaagagtgaaacttatagctctggatgcccacaagagaaagcaggaaagatctaaaattgatgccctaacatcaaaattaaaagaactagagaagcaacagcaaacaaattcaaaagctagcagaagacatcaaataactaagatcagagcagaactgaaggagacagggacacgaaaaacccttaaaaaaatcattgaaaccagaagcttgttttttgaaaaaatcaacaaaatacatagaccactagccagactaataaagaagaaaagagagaagaatcaaatagacataataaraaaggatatatgggatgtcaccactgatcccacagaaatacaaactaccatcagagaataccgtaaacacctctatgcaaataaactagaaaacctagaagaaatggttaaattcctggacacatacacgctcccaagtctaagccaagaagaagtcaaatctctgaataagccaataacaagttctgaaattgaggcagtaattaatagcataccaacaaaaaaagtccagaaccagac

SEQ ID NO: 931344 - DNA, 608 bp, Homo sapiens
catactttaccaaatttaaaaattattcaaaatatttttacatttaaaatttttctttgtaatttgttttactatagctaagtaaacacagcaaacttttccctcactcctgctctattccttaacattgaaaagtttgatgggtattcttccatctttttgtcaattcatttaaatatttgaaatttagatatttagcttgggaggttagctatctgaataattttctacttgtttttttgtcagtcaatacaaacaaatctayttaactttttatagctgctgcatatattcaattgcatcaacattttataacttattttattattccctcatgataatttgtttccaatatttcaaaattatttttcagaaaagtgctacaattaatctctacatgcctctttgtgcacttgtgtgctctcagtttttctcaggatagataccaggtatagcagtataatatctaaacacggttacaatcatacctatatctgtaggggattggttccaggatctcccacagataacaaaattcacggatgctcaagtccctatccacattctcccatatactttaagccatttctagattatttataatacct

SEQ ID NO: 931345 - DNA, 730 bp, Homo sapiens
acagtctcagttggatccagagatgccaccaaggagccagggcctggggttggaaacgttaggaatctacctggtgctctgttctactgtatctgagctggcacccaagccacaagacaaaatccttcccactcttcccttcccttccacaaatagaggaatttctccccatggccacggttacctcaggcccagattgtacactgtctgctactgctgatgttcattcaaggcacaagggctcttcagtcagcttgtgctgactgctgcctggtctgggactctactttcagagcagtgggctcccctctggccmagggcaggttcagatgctatacaagagccaaggcctggaatcaggggccccaggaggctgcttgttgctctaccccactgtggctgagctggtacctaagctacaagacaaaatccccttactcttctatctccttttctcaagcagaaggagtccctctccattgccaccacaactagaaatgtgctgggtcacacttaaagccaacacatctctgagtctcacccaaggtccacagcgagtattccctgggtgccactgctgctgattattcaggcgccaagggctcttcagtcagcaaacaattaattctttcaggactgagcccttcccttcaaggcagcaggttcccttctggcccacagtgcatctagaaatgtcttcagggtgccagggcctgaaatgggggtcttg

SEQ ID NO: 931346 - DNA, 754 bp, Homo sapiens
agagtcatgaagtcccctttccaggccctagtccctggacatttctagacacaccctgggccagaagagaactctgccttgaagggaatgacccagtcctggcagaattcatcacctgctaactgaagaacccttcagtcctgaataaccagcagtgatacccaggtactacatcgtcggccttgggtgagattctgagacttgctagctacaggtgagactcagcacattccaagatgtggtggctatgggctgagactccttctgctggagaaaagcagagggaaagtaaaggggaattagtcttgcatyttaggcagcagcttggccacagggcggtagagcaccaagcaggctcttgaggtccctgattccatgacttgattcttggatggcatttctgggccctgggccagaagggaaccctgaatggagagattcaggactggtagcattcacaacaagctgactgagagcccttggaccttaaggaaatatgggtagtagtctgacagggttcctcatgggcatgaggtggcaatggtcatggagttaggctcctctgcctttggaaaagggaggaaagagtgggaaagactgcatcttctggttcgagtgccagctcagccacagtaaaatagaaaaccaggtgaacttctaaggtttttgactctagtccttggtgcccagatggcacctttggacccacctggggcctggggaaactttctgccctgaagggaaggttataggc

SEQ ID NO: 931347 - DNA, 580 bp, Homo sapiens
caccttcctcccaccctccagtctcaagtaagcccctttttctattgttcatttccagaatggctattattaaaaagtcaaaaaataacagatgctggtgacattatggagaaaaggtaacacacatacactgctggtgggaatgtaaattagttcagccattgcacaaagcagtctggtgatttctcaaataactcagaacagaattaccattcaacccagcaatcccattattgggtatataatcaaaggattatataccttctaccataaagacacatgcacatatatgttcatggtagtagtatccacaakagcaaagacttggaatcaatctaaatgcccctcaatggtagactggatttgaaaaactgtggtacataaacacaatggaatactatgcagccaataaaaagaatgaaatcatctcctttgcagcaacatagatggagctggaggccactatgttaaacaaactaatgcatgagcagaaaaccaaatactgcatgttctcacttataagtgagagctaaactttaagttcatatgagcaaaacctcttaaatccagatttttaaaa

SEQ ID NO: 931348 - DNA, 576 bp, Homo sapiens
tatccatggctgagagacctgaagacagatcacatcacaggtctctttgcagacactacccattaccagcctggagcccagtagctctgctgggtggctagatccagaagagaaataacaatcactgcagttcagatctcaggaagccctatccctaggagaaagggtagagcaccacatcaagggagtaccccatgtaacaaaagaatctgaacagcagtccttgagtcccagaccttccttctgacacagtctaccaaatgagaaggaaccagaaaaacaagtttggtaatatgacaaaacaaggttctgaaacaccccyagaagatcacactagcttacaagcaatggatccaaaccaagacaaaatctctgaattcccagaaaaataatttggaaggtcaactattaagccaatcaagggggcaccagagaaaggtgaagtccaacttaaataaatcaaaacaattatacaaggtatgaataggaaaatctctagtgaaattgatagcataaataaaaaacaatcacaatgtctgggaatacgcaacacacttagagaattgcaaaatgcac

SEQ ID NO: 931349 - DNA, 610 bp, Homo sapiens
aacttcatcagttgtttatatggcgtaactctgtcttcaaccatagctgactggactagatatggtgttaaagtacatttggcctgaggacacctctgtattttgagtcctcatgtaaccaactgcaacctaacttagtacgtactaactgaaaacctatcttaggagttgttgttsttgttgttgttgttttaaacaaatagccaagtcttagccaatcatagcggctatgcttcagttagtcacaagtggccaactgattagaccatgttcaaatgaggcaaagcccgaaccgtaatcagtcaagctgtttctgtagttcacttccattttcatccataaacactgcctgccacattgtgaagaacagctctctgaaactcctctggttctgagggctgctcgatttgatggcagtggtggcccatctggagtggccactgccatgatgctggctgcagtcaggcccactaggcttgtcccactcattcagcctggcaggctgtgcttggttcatgctacctgagtacagtcggggctgcacactccatggaaccctgggagctgggaacaggtggaagccccacccgcttctgagttggcagggtaa

SEQ ID NO: 931350 - DNA, 566 bp, Homo sapiens
aagtgaaggtgatgtatgcaggcatggatgtgagggcaggtaacggggctttatttctcagcaaatttggaaacaagttcattaactaaaagtgagtatggggaagagatgctgcacatttcaaaaaacagaaaagttacagaatagacatccgggagagtatgaaagagaagggaataaagacacgaattacyttaaagattaaagaggatttaaaatgagatcatgtagcatggttgtgtgtttttctccattcatgtcactgctcagcttcaagacttgattagtaaaaagtccaatttagagttatggctttgtcaagttgggtgagaaaattaaagaagagtggtgtagttgaggatgtatatacgggagtcattaaaacaccttaccatggaatgtatgcttgattttgatggaagagaaaaatataaggttgttgagggaaagtgaaaatattgtgagatcaatacatgcacttcccagtggcatgagggcttatcacagtagggctgcccgagacagtgaactacaagcaagaagtcaggaagttgagctgccagagt

SEQ ID NO: 931351 - DNA, 590 bp, Homo sapiens
tagatactacacaggatgaaaattcccagggcacatagtcatcagattcaccaagttcatcacaaaagaaaaagttcttaaaggaagctagagagaagggtcaaatcatgtacaaagtcatgtacaaaaacccatgaggctagtagtagacatttcaccaaaaactttayaagccagaagagactgacacctatttttagcattagttttttgttttttgtttttctgagatggagtttagctctgtcgcccaggctagagtgcagtggtgcgatcttggctcactgcaacctctgcttctcaggttcaagtgattcttctgcctcagcctcctgagcagctgggattacaggcacgtgccaccacacctagctaatttttgtattttgagtagagacagggtttcacacattggccaggctggtcttgaactcctgacctcaggtgatcagcctgcctcatcctcctaaagttgggattacaggcatgagccactgcacccagcctatttccagcattcttaaagaaaagaaaatacaaccaagaattttatttcccaccaaactaacttcataggtgcagaagaaata

SEQ ID NO: 931352 - DNA, 590 bp, Homo sapiens
tagatactacacaggatgaaaattcccagggcacatagtcatcagattcaccaagttcatcacaaaagaaaaagttcttaaaggaagctagagagaagggtcaaatcatgtacaaagtcatgtacaaaaacccatgaggctagtagtagacatttcaccaaaaactttataagccagaagagactgacacctatttttagcattagttttttgttttttgtttttctgagatggagtttagctctgtcgcccaggctagagtgcagtggtgcgatcttggctcactgcaacctctgcttctcaggttcaagtgattcttctgcctcagcctcctgagcagctgggattacaggcacgtgccaccacacctagctaatttttgtattttgagtagagacaggktttcacacattggccaggctggtcttgaactcctgacctcaggtgatcagcctgcctcatcctcctaaagttgggattacaggcatgagccactgcacccagcctatttccagcattcttaaagaaaagaaaatacaaccaagaattttatttcccaccaaactaacttcataggtgcagaagaaata

SEQ ID NO: 931353 - DNA, 810 bp, Homo sapiens
ttcctacttaatttataggagtggaaaacttctaggttgaatggacaaaagactaatttgaggctgggcgtggtggctcaagcctctaatcctagcactttgggaggctgaggccggtggatcgcctgaggtcaggggttcaagaccagcttggacaacatggtgaaaccccgtctctactaaaaatacaaaaaattagctgggtgtggggatgggcacctgtaatcctagctacttgggaggctgaggcaggagaatcgcttgaacctagaaggtggaggttatggtgagccaagatcacgccactgcactccagcctggatgacagagtgagactttgtctcaaaaaaaaaaaaaaaaaaaaagactaatttgaattataaaarcagagaatcacagccccttaaccgatttccagacttaagccagtatacagactcaggaccccttgaatgaaggtgaagccaggtcgccatgaggaaggaccccccactataccaacaatttatgcagttaatctttctcccatccttccccaaggagacctctggccttttaccagggcaactgtgcactggggagagggaaattattagacatttcggggactactggacactggctctgagctgatgttgattccaggggacccaaaaacatcatcgtggtcctccagttaaagtagacacttatggaggtcaggtaattaatggagttttagctcacgtctgacttacagtgggtccactgggtccccagactcatcctgtggtcatttccgcagtgccagaatgcatagttggcatagat

SEQ ID NO: 931354 - DNA, 810 bp, Homo sapiens
ttcctacttaatttataggagtggaaaacttctaggttgaatggacaaaagactaatttgaggctgggcgtggtggctcaagcctctaatcctagcactttgggaggctgaggccggtggatcgcctgaggtcaggggttcaagaccagcttggacaacatggtgaaaccccgtctctactaaaaatacaaaaaattagctgggtgtggggatgggcacctgtaatcctagctacttgggaggctgaggcaggagaatcgcttgaacctagaaggtggaggttatggtgagccaagatcacgccactgcactccagcctggatgacagagtgagactttgtctcaaaaaaaaaaaaaaaaaaaaagactaatttgaattataaaagcagagaatcacagccccttaaccgatttccagacttaagccagtatacagactcaggaccccttgaatgaaggtgaagccaggtcgccatgaggaaggaccccccactataccaacaatttatgcagttaatctttctccyatccttccccaaggagacctctggccttttaccagggcaactgtgcactggggagagggaaattattagacatttcggggactactggacactggctctgagctgatgttgattccaggggacccaaaaacatcatcgtggtcctccagttaaagtagacacttatggaggtcaggtaattaatggagttttagctcacgtctgacttacagtgggtccactgggtccccagactcatcctgtggtcatttccgcagtgccagaatgcatagttggcatagat

SEQ ID NO: 931355 - DNA, 810 bp, Homo sapiens
ttcctacttaatttataggagtggaaaacttctaggttgaatggacaaaagactaatttgaggctgggcgtggtggctcaagcctctaatcctagcactttgggaggctgaggccggtggatcgcctgaggtcaggggttcaagaccagcttggacaacatggtgaaaccccgtctctactaaaaatacaaaaaattagctgggtgtggggatgggcacctgtaatcctagctacttgggaggctgaggcaggagaatcgcttgaacctagaaggtggaggttatggtgagccaagatcacgccactgcactccagcctggatgacagagtgagactttgtctcaaaaaaaaaaaaaaaaaaaaagactaatttgaattataaaagcagagaatcacagccccttaaccgatttccagacttaagccagtatacagactcaggaccccttgaatgaaggtgaagccaggtcgccatgaggaaggaccccccactataccaacaatttatgcagttaatctttctcccatccttccccaaggagacctctggccttttaccagggcaactgtgcactggggagagggaaattattagacatttcggggactactggacactggctctgagctgatgttgattccaggggacccaaaaacatcatygtggtcctccagttaaagtagacacttatggaggtcaggtaattaatggagttttagctcacgtctgacttacagtgggtccactgggtccccagactcatcctgtggtcatttccgcagtgccagaatgcatagttggcatagat

SEQ ID NO: 931356 - DNA, 715 bp, Homo sapiens
ttacccagagagaaaaatacttagctgatgcattatgacactctgggtctcaaacaattgccagacatttctagtcttttccattgagtcttggatttcttcccaaatctgtgctcatgtctgccacagccaattgaatggaactgacactgaagttgaagcctattcaccccagatctaatcaaatatatttggtccatgagaacatgagataaactgattcactcttaaaatagccaatcactgccaytgaaccaaagcaatgaataacctaatctaagtgaaggagaagtatcctgtttattttgtgtggttcctgttgataaggttttagcagagaagtgtgggttttaaaataaatgctgtgtgctgacaaagttttgaaaaacacttttaagcttcatattaaaattaatatttcatttctatccattaatatttatatgcaatgtaacataacattacatgtcaaatatttgttattttcaatagctatttgtggttaggttctcaattttataattaaatactttcaattatttctcgatatcaacttttatttggtaactttaattccagatagtagttaagataatcagtaagaagacaaaatttggttcaaaatattttctcaattttagttaatgtttttcacatatcatgagatagaaatatcttcctttttaaaatattttctttatttcaatttaagaaa

SEQ ID NO: 931357 - DNA, 695 bp, Homo sapiens
ttacctagtcttgggtatttctttattgcattctgaggacagactaatacagtgcttggtactgcagagagtggggtactgctgtaaagatacccaaaaatgtggaagtgactttggaactgtatgacgggcaagggttgaaacacagtttggagggctcagaagaagacaggaagatgtgggaaagtttaaaacttcctagagacttgttgaattgcattgatcaaaatggtgatagtgatatggacaataaagtccaggctcaggytgtctcagaaagggatgagaaacttgttggaaactggaataaaggtgactcactatactttagcaaagagactggtgccattttccccctgccctagagatctgtggaaatttgaacttgagagagatgatttaaggtatctggcagaagaaatttctaagcagcaaatcattaaagaggtggcctggttgattttgaaagtcttcaattttatgcattcacaaagagatggtttgaaattagaacatatgtttaaaaggaaagcaaaggctgggtgtggtggctcatgccagtaatcctggcattttgggaggccaaggcaggggaatcacctgaggtcagggttcaaaaccagcctggccgacatggtgaaacctgtccctattaaaaatacaaaaattaacggggcatggtggcacacatttgt

SEQ ID NO: 931358 - DNA, 493 bp, Homo sapiens
tgctagaatttaaagcagctttatttcagtctgtaggcaatagtaacagtataaatttgggggtcatgtttcttaaattaatctatgcttgacttctttagaggtattgtcagttgttgaaattttatttgaaaaacaatttatawaagcacagtctggatcatctttattatcttagccttacagagcagttctattcaaaatttactgtgcatataaaacaactgagttctgttaatttgaaaatctgatttagtagtcctagcatgaagcacaaaatctgcatttctaagaaactctaggtaagagggagccaagatggctgaataggaacagctctggtctacagctcccagcctgagcgatgcagaagacgggtgattttttgcatttccatctgaggtaccgggttcatctcactagggagtgccagacagtgggcgcaggtcagtgggtgcatgcctgcgcgagccgaagcagggcgagcactgcc

SEQ ID NO: 931359 - DNA, 647 bp, Homo sapiens
ctctaggtaagagggagccaagatggctgaataggaacagctctggtctacagctcccagcctgagcgatgcagaagacgggtgattttttgcatttccatctgaggtaccgggttcatctcactagggagtgccagacagtgggcgcaggtcagtgggtgcatgcctgcgcgagccgaagcagggcgagcactgcctcacacgggaagtgccaaggggtcagggagttcactttcctagtcaaagaaaggggtgacagacggcatctggaaaatcaggtcactcccacccgaatactgcgcttttccgatgggcttaaaaatcggcgcaccaggagattatatcccgcacatggctcggrgggtcctaagcccacggagtctcgctgattgctagcacagcagtctgagatcaaactgcaaggcaggcagcagtgaggctgggggaggggcgcccgccattgcccaggcttgcttaggtaaacaaagcagccgggaagctccaactgggtggagcccaccacagctcaaggaggcctgcctgcctctgtaggctccacatctgggggaagggcacagataaacaagacagcagtaccctctgcagacttaaatgtccctgtctgacagctttgaagagagcagtgg

SEQ ID NO: 931360 - DNA, 647 bp, Homo sapiens
ctctaggtaagagggagccaagatggctgaataggaacagctctggtctacagctcccagcctgagcgatgcagaagacgggtgattttttgcatttccatctgaggtaccgggttcatctcactagggagtgccagacagtgggcgcaggtcagtgggtgcatgcctgcgcgagccgaagcagggcgagcactgcctcacacgggaagtgccaaggggtcagggagttcactttcctagtcaaagaaaggggtgacagacggcatctggaaaatcaggtcactcccacccgaatactgcgcttttccgatgggcttaaaaatcggcgcaccaggagattatatcccgcacatggctcggagggtcctaagcccacggagtctcgctgattgctagcacagcagtctgagatcaaactgcaaggcaggcagcagtgaggctgggggaggggcscccgccattgcccaggcttgcttaggtaaacaaagcagccgggaagctccaactgggtggagcccaccacagctcaaggaggcctgcctgcctctgtaggctccacatctgggggaagggcacagataaacaagacagcagtaccctctgcagacttaaatgtccctgtctgacagctttgaagagagcagtgg

SEQ ID NO: 931361 - DNA, 623 bp, Homo sapiens
ccctcgagggagacagccagcagaatcagggaggagtcgcaggattaaagaagcttccaactgaaattagtaatagttttgacagggtacaaattttcttgagcagaatctggaggtcatacgtgaactgctgcagatacaagcacaggagccaccaatgacagtgtgggcagatggggatgggcgatgtttggaagctgtgcttgctttctcagtggggaagctcagggtctggggcaaggtctgagcagggcactgcaaaagtgacatgagccttgccaactgcctaggacctaggtgaggcctctcactaccagttatccrccacttccctggtgaactatataacatagcagaggcagccataatcccctctggaaaataaccccattaacctgagaaccacctccccttccccctcagtggccacagcaagccctgcccaagaagaatctgaggccagacccacctaaccctgcccccacctggtggcatttctttacccaccctggtagctgaacataaaagacagaaacttttggaaggcttatagccccacctattgcctgagaaaacaaaatacttaccttggccaacttagggcaagtttagatatccctgct

SEQ ID NO: 931362 - DNA, 647 bp, Homo sapiens
ggaatctagagaggcagtagcccttgctgagctgtaatgtgctccacccagttcgagcttccctgccactttgtttacactgagcatagaactgcctactgaagcctcagcaatcgtggatgcccctttccctgccaagctccagcgtcccaggtcaatctcagactgctgcactagcagcgagcaaggctccgtgggtgtgggaaccgccaagccaggtacgggagggaatctcctggtcttccggttgtgaagaacatgagaaaagtgccgtatttgggcagaastgcaccgttcccccagttacagtcactcatggcttcccttggctaggaaagggaaatcctctgatcccttgtgcttcccgggtgaggtgacaccccgccctgcttctgctcaccctccgtgggctgcacccactgtccaaccagacccaatgagatgaaccaggtacctcagttggaaatgcagaaatcacccgttttctgtgtcaatctcgctgggagccgtagactggagctgttcctattcggccatcttggagtttttgtttgtttttgtttttgtttttgacagagtctcactctgttgcccaggctggagtacagtggcacaatctcggctcaccataacctctgcctcccagg

SEQ ID NO: 931363 - DNA, 498 bp, Homo sapiens
tgggaggtagaggctgcagcgagccgagatcacaccactatacaccagcctgggcgacagagtgagactctgtctcaaaaaaaataaaaaaaaaaaaatcctcctctgctgatgtcaccttttgatgaacattcatgtggacgcaaataccttcrcatcttttgcccactcagagaagtctattcatatacttctcccaatttccttgtcaccaatttgcccatcatgctccttctaagtccctgaccatccagctaaagcattagctacagtccataaatcagtataaaatcacatgtgtctgatcatttctcctgctaagaaaagtgcacaaccaggtgcactggctgaagttctgcctatggggaagacttcccttcaccaacatccttaggggatgtcacagaaaggggctatagtgctgcagcgttgacttctgggtggcacctgcttatcatgcagaaccatcccaagtaaacaagaaaccgagtcttccct

SEQ ID NO: 931364 - DNA, 751 bp, Homo sapiens
gtatacgagagagtgaattttattgtgcataaaaggtggaaaaatgaacaggtaaaaaaatttactcaaaaaaattttgggggtgagtttggccttctatatggagataataaataagtagtgaaaaacatgaacccaattattctttctaccttctctgcccaaatcatttttttctcaagtgaccaaaaccacacactttgaggtctttttgttgttgttgatacagggtctcactcagtcatccaggctggagtgcagtggtgcaatcacacctcactgcagccttgacctcccgggttgaaagtgatcccctcaccgcagcctcctatggagctgggactacaggcgcctgccacaatgcctggctaatttttgtgttttctgtagagacagagtttcaccgtgtttcccaggctggtctcaaactcctgagctcaagtgatccacctgccttggcctcccaaagagctgagattacaggygtgacccactggcgcctggcccactttgaagtcctaaagaaatttaggttattattctatgcatgttggaggatttaagtcttattagcagcttctgttttctgtaaggaaaaagttaaaacacatctggaagagtctcatagagcagcactttctgaaacttgcctgggtaccagtatgcctgcttccagaccttgaagatattacatgtactgcttggtgatctgccctgtcccccacatgttgtgggcctggattgaatggac

SEQ ID NO: 931365 - DNA, 596 bp, Homo sapiens
tgccattttaagagcctagctcccactagactgtgtcctgtcctgccactgggctgaggtgagagtcaggagcaacaaccccactccccaagcagaggagtggccatgcattttctcatgtcccaaggacaaattcccctgcctgcaattaccacctgcagtctgctgcggggctgaagtatgagtaaagattgcaaccccctatgaaagcttccaatcttgggtgcttccagaaaaagcaaccctgctctccccagtagcaggactaggactaaacacggacactgctgccctacctgtgcatgcttatagcctggggatcaccctgcccctgactactgaagtcagcacccatatataccactgggtggcccgaaggaaggtctgcccagctcagctccatccccatgacacccaagcataccatccagggrtctggggattgcccagcctagcccaccaccagtgacatctgaggacttctcctggggtctgaagtcaggtccaatcaacctactgccaccaacatagtgggcagccacccacatgcatcacctgtggctctggggacctacctgtccaagctgtcagaacta

SEQ ID NO: 931366 - DNA, 592 bp, Homo sapiens
aaatagcaaagctgccctagccagactgtgtcagattggacaagtagcacatcaggatggccagtgtgagatggggaccagaacaccttcccgtgtgctggccaatgtggtcctgagaactttcacaacccaggatagcgggggattggagaaggagtcccaagagggacaaaaatcaaacccctagtcttgaagccgagcttattttaaaaattaatgtaaacagagagttcttaaagccaactaatgtgatgactgcaaatttatagctattctaaacatattccttcacctatagtcacactcctctcccatgcrctgcacaaggaccagccctcaggataagaaagacatgagtcaacgtggcaaacggggtcaaaattgacagaaagagggcaatcatgcatgtcagtggggaataatgatgaacctggagaaaccagtattgctccagacccccctcccaaatccttgcagaaaagaatattaataaaataaaattccaaaatctgatcccagagcaataatagaacacccatgccaaacttcacagccgtggggaggatgcatgtagctgagcaatctgtggata

SEQ ID NO: 931367 - DNA, 602 bp, Homo sapiens
acaggcagctccaggcaggcaccagcacaggcgctggctctgtgcaaggctgcagttggaccagacatacaacacgtagcttcagtagcatctggacagggggaaaacgatggcaccagaaagctcagagataccaggaaccacagagtcccaaaragggtgttacagcatgtcacagtcctggctcaggtagccccaagctctggaatcccagaagggccacagatcttctctctttctcgttgcacgcagcgtagtgactggagggcatgtttctactgtgctcgtgttacagctctttttagtcccaccattcagtaggtcccaagcacttgtcccacatccagaaagaatgaggtatgcagacaactggaggatgagcaaggcagagaggagcttcactgagcgacagaatggctctcaggagactcaaagtgggtaggtcctttctgcaggcaggttgtcccaatgtgtgcccaactcagaagggaggagacctgtagtgggcagctcctttccacaggcaggttgtcccaacaagcatccagctctcagcggaggagacccatagtgggtagctcctttctgcaagcaggtcatct

SEQ ID NO: 931368 - DNA, 648 bp, Homo sapiens
aggcagctccaggcaggcaccagcacaggcgctggctctgtgcaaggctgcagttggaccagacatacaacacgtagcttcagtagcatctggacagggggaaaacgatggcaccagaaagctcagagataccaggaaccacagagtcccaaaaagggtgttacagcatgtcacagtcctggctcaggtagccccaagctctggaatcccagaagggccacagatcttctctctttctcgttgcacgcarcgtagtgactggagggcatgtttctactgtgctcgtgttacagctctttttagtcccaccattcagtaggtcccaagcacttgtcccacatccagaaagaatgaggtatgcagacaactggaggatgagcaaggcagagaggagcttcactgagcgacagaatggctctcaggagactcaaagtgggtaggtcctttctgcaggcaggttgtcccaatgtgtgcccaactcagaagggaggagacctgtagtgggcagctcctttccacaggcaggttgtcccaacaagcatccagctctcagcggaggagacccatagtgggtagctcctttctgcaagcaggtcatctggattaatgtgtgtctggctgagcctgggatttttatgtgctcagaat

SEQ ID NO: 931369 - DNA, 883 bp, Homo sapiens
gctgcaggacaggcagctccaggcaggcaccagcacaggcgctggctctgtgcaaggctgcagttggaccagacatacaacacgtagcttcagtagcatctggacagggggaaaacgatggcaccagaaagctcagagataccaggaaccacagagtcccaaaaagggtgttacagcatgtcacagtcctggctcaggtagccccaagctctggaatcccagaagggccacagatcttctctctttctcgttgcacgcagcgtagtgactggagggcatgtttctactgtgctcgtgttacagctctttttagtcccaccattcagtaggtcccaagcacttgtcccacatccagaaagaatgaggtatgcagacaactggaggatgagcaaggcagagaggagcttcactgagcgacagaatggctctcaggagactcaaagtgggtaggtcctttctgcaggcaggttgtcccratgtgtgcccaactcagaagggaggagacctgtagtgggcagctcctttccacaggcaggttgtcccaacaagcatccagctctcagcggaggagacccatagtgggtagctcctttctgcaagcaggtcatctggattaatgtgtgtctggctgagcctgggatttttatgtgctcagaatcagggaactgcatactgattcatccatgggcagccatggtgggcctagaaaaagccccatcaaatttgccaaacagtcatcaatgaagttctcactctgggccacggacttcacctagaactggcagcccagcccccaggcttcaggccatcgctggcctgaggtaaagtttcaccagggacccacccctttctgcctaggaacctgtctgcctttaacatgcca

SEQ ID NO: 931370 - DNA, 761 bp, Homo sapiens
caggagactcaaagtgggtaggtcctttctgcaggcaggttgtcccaatgtgtgcccaactcagaagggaggagacctgtagtgggcagctcctttccacaggcaggttgtcccaacaagcatccagctctcagcggaggagacccatagtgggtagctcctttctgcaagcaggtcatctggattaatgtgtgtctggctgagcctgggatttttatgtgctcagaatcagggaactgcatactgattcatccatgggcagccatggtgggcctagaaaaagccccatcaaatttgccaaacagtcatcaatgaagttctcactctgggccacggacttcacctagaactggcagcccagcccccaggcttcaggccatcsctggcctgaggtaaagtttcaccagggacccacccctttctgcctaggaacctgtctgcctttaacatgccatccacggcacccaaactgactgtcccaagaggcgcctgcaggctggtgccaagctgccctcagcccctgcggcccccctcctacgcttgtcgatacccaaagtccagaggggacgatggtggcaaggggctggcatatcagcaccactctgagcatgcacatacctggccgggttgcaacagtgcctggacttggccacagctttgctccaccctggagcaggcgccagaagcagggagaggccagggggtgagagcaggcactttcaagcctacaggggcagggggcttcctgggccccaagctgc

SEQ ID NO: 931371 - DNA, 761 bp, Homo sapiens
caggagactcaaagtgggtaggtcctttctgcaggcaggttgtcccaatgtgtgcccaactcagaagggaggagacctgtagtgggcagctcctttccacaggcaggttgtcccaacaagcatccagctctcagcggaggagacccatagtgggtagctcctttctgcaagcaggtcatctggattaatgtgtgtctggctgagcctgggatttttatgtgctcagaatcagggaactgcatactgattcatccatgggcagccatggtgggcctagaaaaagccccatcaaatttgccaaacagtcatcaatgaagttctcactctgggccacggacttcacctagaactggcagcccagcccccaggcttcaggccatcgctggcctgaggtaaagtttcaccagggacccacccctttctgcctaggaacctgtctgcctttaacatgccatccacggcacccaaactgactgtcccaagaggcgcctgcaggctggtgccaagctgccctcagcccctgcggcccccctcctacgcttgtcgatacccaaagtccagaggggacgatggtggcaaggggctggcatrtcagcaccactctgagcatgcacatacctggccgggttgcaacagtgcctggacttggccacagctttgctccaccctggagcaggcgccagaagcagggagaggccagggggtgagagcaggcactttcaagcctacaggggcagggggcttcctgggccccaagctgc

SEQ ID NO: 931372 - DNA, 609 bp, Homo sapiens
ctacaagctagaaaccctggaatgacagtagcatggttcagcacaatacaagtctgaaagcctcagatgcagggaaactaatggtgtaattatcagtctgaggcagaaggcctgagaaccttgggggccattagggtaagtcctggattccaaagggtggagagtctggagttctgatgttcaagggcaggagaagacacatgtcccacctctaggaaatggagaggaggaaatcacctttcctcagtcttttttgttctgtctgggccaccatctgattgggtagtgcctgccgacattgagagaaaatcttcttcacttagttcatggactcatatgtcartcagtctcctctggacacaccctcaaagacacactcagaaataatgctttaccagttctccagatgtttcttaatccagtcaaattgacacctaaaattaaccatcacactgtacttcccctttgctttaatgataaagctctgctttttgtcaggatggtaatgttttcagctaaaaggatatacttatcagcctccctctctcacagctagatacagttatgttactatctgctggctgatgagatgtaagcagagggaattaa

SEQ ID NO: 931373 - DNA, 750 bp, Homo sapiens
gggcaggagctctgtttcttgcagcgaccataacaaatgaccatgcacttggtggcctcagacagcacagatgtatcctctctctggaggtcagaactctaccatcaaagtgtcagcagggccatgcaccctctgaaggctctactttcttcttctttgagatgaagtcttgctttgttgcccaggctggagagcaacggcttgatctcggctcactgcaacctccacctcctgtgttcaagagattctcctccctcagcctcctgatatctgggattacaggcgcgtgccaccatgcccagctattttttttttttttttttttttgtatttttagtagagacggggtttcaccatgttggccaggctggtctccaactcctgacctcaggtgatccacscacctcggcctcccaaagtgctgggattacaggtctgagccaccacgcctggccaaggaggctctactttcctgtgtcaacttgactgggccacagggtgctcagttatttggtcaaactttcttccaggtgtttctgtgagagtgtttgggatgagggtaacattggaattggctgactgcattgagcagactgtctctctaatgtgggtgggcctcatctgcttggctgaaggtccttacagaactaaaagtgtgtccagagttgcttccttctggtgggttggtggtctcgctgacttcaagaacagagccacagaacttcacggtgagtgttgcagctcttaaag

SEQ ID NO: 931374 - DNA, 485 bp, Homo sapiens
ctgctagcacggctagaatataagcaggcaaaaaaatgcgaaaagagagactggcctagcctcccagcctgtatctttctcccatgctggatgcttcctgccctcgaacaccggactccaagttcttcagttttggaactcggactggctctcagcctgcagacggcctattgtgggaccttatgatcacgtgagttaatacgtaataaactyccctttatatgtatatctattccattagttctgtccctctagagaaccctgactaatacagcgaccctaggaaaacaactaggccttcctctgccatgctattattacaatggtgataataacagaatgtgctgctgggggttatcaggaagattaaacagggtcatggacgggaagctcttggctgatgcctggcacacagcggttttcaataaacagtggtaattccattttaggtggaatttgctttctttcttttttttgagatggag

SEQ ID NO: 931375 - DNA, 806 bp, Homo sapiens
ggaccagaggtatctcccagggttctgctgaggagtgaagagtgcatcccagtgtggtgcctctgttctttgtctaccaggcctctattctcttctctttcagaaacagccctgggatgttcttttgggatactaatgtgccctccctcataggataagggccaggccaacaggaacttccactctctggtctcaatagtggtggttcaggaaagggcacataacccccgtaaggcccgagacccaattctgcaacttttactggaactactaggaaagaaggaactcattccattcattgggaaggaagcctggagctggaagagccaacccgtggcaaaggcctgcctgagagtgatgccaacacagaggcaagcagagctttgagttggaaagagaggtaggatcctgctgatatccttccagtacctagatccagctattcctgaactcacccaatatactcccagacatttccttttttgcttagggcactttgagtggggttttgccccttgcgagaagatccctgactactagtgctcaacatgratgagttttcttccccaagcttgctgttggttcagacaataacagcttgtttcttaggatgaaaagatgccccttcccttgccctacctgaggatgaatggacagataatgggcacttcgtctcgggctgaaatgatgactatgtctgatggttcctcaaaaacacaaaacaacacaacttccccctccccaaaaaacactctgaccaaataaccacactgccacccggctcctcctctgccctcatgaagaca

SEQ ID NO: 931376 - DNA, 503 bp, Homo sapiens
aattactctagctagaacttccagtactacgttgaatagaagaagtgagagtgggcatccttgtcttgttccagatcttagaggaaaagctttcaacttttcaccattgagtatggggtctagaagtttattttatatctttcatgtctctaattaacttttcaaacatacgaaacacagttacaataaatgttttaacgtcattgtrtgctaattctaatatctgtgtcagttctgggtcagcttttattgattgatttttctcctcattatagttatattttcctgcctctttgcatgtctggtcatttttttcttttcttcttctttttttttttttttctgttagatgccagacattgtgaatcttaccttgttgggaactggatattttgtattcctgtgttctgggacaaagttaagttacttagaaacagtttaatcctttcaagtctgcttttaaaatttaataggctggatctgagcagagtttagtgcagggc

SEQ ID NO: 931377 - DNA, 705 bp, Homo sapiens
gcatctcactgaatctatgtaccaatttgaaagtatttatcttaacaatattaatttttttgttttttttgagacagggtctcgctctgtcacccaggctggactgcagtggtgtgatcttggctcaccgtaacctctgcctcccaggctcaagcaatcctcctgtctcagcctcccaactagctgggactataggcatgctccactatgcctggctaagtttttttgtrttttttgtagagatggagttttgccatattgcccaggttggtctcaaactgctgagctcaaatgatctgcccgcatcagcttcccaaagtgctaggattacaggtgtaggccattacacccggccaacaatactaaatttctaatctataaatataagatgttttcccatttacttaagtcttctttaatttctctcaacaatgttgcatagttctcagtgtaggagtcttgaatttcttttgttagacttatttctaggtattttttgatgctattgtgaaggcaattcttttccttaatttctttattctgtatttttattattattattttttttttttgagaaggagtcttgctctgtcgcccaggctggattgcagtggcgcgatctcggctcattgcaagctctgcctcccaagttcacgccattctccctgcctcagcctcccgagtagctgggactacaggcgccca

SEQ ID NO: 931378 - DNA, 818 bp, Homo sapiens
acttatttctaggtattttttgatgctattgtgaaggcaattcttttccttaatttctttattctgtatttttattattattattttttttttttgagaaggagtcttgctctgtcgcccaggctggattgcagtggcgcgatctcggctcattgcaagctctgcctcccaagttcacgccattctccctgcctcagcctcccgagtagctgggactacaggcgcccacacgatgcccggctaattttttgtattttttgtttagtagagatggggtttcaccgtgttagccaggatggtctcaatctcctgaccttgtgatctgcccacctcggcctcccaaagtgctgggattacaggggtgagccaccgtgcctggccaattccttattttttaaagatgggtgtctcaactatgttgcccaggctggcctcaaactccttggcatcatgagtttctgggattayaggaatacaccaccatggccaggagcaattttcttatttcattttttgcttatgcattgcaagcatatagaaatacaactgattactgtatattgatcttgtacactgtaaccttactggagtcaatttattagctctaagagttttttagtgaattccgtagtgttcctatacactagatcatatcatctgcaaaaaggaagttttacttcttttccaatctgaataccttttatcttattttcttgcctaattgccctgcctagaatttctagtgcaacactgaatagaagtgatgggagcagacaaccttgtttttttcctatattgaggggtaaacattcagtatt

SEQ ID NO: 931379 - DNA, 818 bp, Homo sapiens
acttatttctaggtattttttgatgctattgtgaaggcaattcttttccttaatttctttattctgtatttttattattattattttttttttttgagaaggagtcttgctctgtcgcccaggctggattgcagtggcgcgatctcggctcattgcaagctctgcctcccaagttcacgccattctccctgcctcagcctcccgagtagctgggactacaggcgcccacacgatgcccggctaattttttgtattttttgtttagtagagatggggtttcaccgtgttagccaggatggtctcaatctcctgaccttgtgatctgcccacctcggcctcccaaagtgctgggattacaggggtgagccaccgtgcctggccaattccttattttttaaagatgggtgtctcaactatgttgcccaggctggcctcaaactccttggcatcatgagtttctgggattataggaatacaccaccatggccaggagcaattttcttatttcattttttgcttatkcattgcaagcatatagaaatacaactgattactgtatattgatcttgtacactgtaaccttactggagtcaatttattagctctaagagttttttagtgaattccgtagtgttcctatacactagatcatatcatctgcaaaaaggaagttttacttcttttccaatctgaataccttttatcttattttcttgcctaattgccctgcctagaatttctagtgcaacactgaatagaagtgatgggagcagacaaccttgtttttttcctatattgaggggtaaacattcagtatt

SEQ ID NO: 931380 - DNA, 659 bp, Homo sapiens
cttcatcagcaaatcctgctgcctctaagcacacctagaatctgctccttgctcatcgcctctccatcactctggtctaagccagcctcatccttcaccgaattgttgtactagcttcccatctgttatatcttcttctgcatttgtcatcctatagtctatycttaacacaatacacagactaatcctcttgaaatttgagtcagattatgtcacctgactgtttaaaatccttcagtagtttccaagttaattcaaagtaacaggagaagttctaatggtagcctatatcgccctacacgtgatgaggtcccatcatctctctcatctcatttcctaattctcccagtcttcatctttctactttatccagattacactctatagtattgcttaaacgcgtcaggaactttgtacttagtgtttttttgtttttgtttttgtttttgttttctgtttggcatggtcttccccaagacagcatgtcaccttcaccttctcactgaggccttttctgatagtctggctaaaatcataaccctcatccttattctcaccctgacctttctaacgccttctctggtttatttttctctttagcacttatcaacctaacatattttatatttattcatcttatatgtttccctgactacaat

SEQ ID NO: 931381 - DNA, 758 bp, Homo sapiens
tcaaaaatggtatgaagattgctcaaaaattaaaaataggactgcatatgattcagcaatctcactactgggtttccacctaaaagaactgaaatctgggtcttgaagagatattatcatctctatgttcattgctgtgctattcataatagccaagatgtgaaaacagctaaatgtttattgatggatgaatggataaagaaaatgtagtgtataagtaaagtgaaatgttactgagacttaaaaaactaggaaattctacaatatctgatagcatggatgaacctctagaaaattatactaagtgaaataaacttgtcatagaaggacatatactgcatgattccacttacatgaaatgtctaaaatagtcagatacatagaatcaaagtggaaagttggatgccaggggcagggggagggagaaatggagarttgctagtcaaacgggtacaacgtttcagttgagcaagacaaataagttccagaaatctgctgtacaacattgtacctataattaacaaactgtacagttataaatttgtcaagagagtagatcttatgttaaatgttcctaccacaattaaaaataacctcctaaagatacccaataaatggttagtactgggtttgaactttgtctttttgattctaaagtacagttgtttccactagacttctttgttctatattatttactggagagttctaatgttaaaatgcacagagatacgtcataaaagttttgaggcaatgat

SEQ ID NO: 931382 - DNA, 597 bp, Homo sapiens
atctttgtttctaattgcatttgcttttcagttcttagttacaaaattctttcctaagccaaagtctaaaagggttttcccaatgttgttttctagaattagaatttttatagtttcaggtcttagatttaagtctttgatccatcttgagttgatttttgtataacgtgacagatgagaatccagtttcattcttctacatgtgacttaccaattagtccagaaccatttgttgaataggatgtcctttccccacttcatgtttttgtttgctttgttgaagtcagttggctataagtatttgggtttatttctggattctctattctgttccattggtctatgggcctatttttatactagtaccatgctgttttggtgactattrccttatagcatagtttgaaatcaggtaatgtgatgcctcaatatttgttattttttcttagtcttgctttggctatgtgggctccttttggttccataagaattttaggattgctttttctagttttttgaagaatgatggtggtattttgatggaaattgcattgaatttgtagattgctttcggcagtatggtcattttcacaatat

SEQ ID NO: 931383 - DNA, 500 bp, Homo sapiens
tggagggttcaccattcactacaactgtcggtaagaatcctaattactgcaggaataatccaagtaaaaattcaattttcccaaagacaacttgaaaacaaaaaataatccatttacaagtctgaaatgtgatcgaatgtgttgggaacatgtcagcattcccttgctttctgtggtttctgctgtctctggctatcttgtagtttcaaagacaagctggagatttcccacagtaagaaaacaacctgacctgtatgtttctagactgctcgacaagtgagaaaagttaatagcctcacgggcagggctccgatagaatggttctgagaaatgttgcagataaagtaactcctatttgagtgcacgtcctttctaagaaattgggaggrcatgcactgaaccagacataaccctgcgttttgtcagcggcagacagcagtgggatctcgacttattatagactgaagacactggagcatctccaagacacactgaatagg

SEQ ID NO: 931384 - DNA, 631 bp, Homo sapiens
gccacatcgatgatgccaaccactgactcaaagccctagatgtcctagtacctcaagccaaagctgttccaagatgaggtccaggggccaggataggaacctatttcaggtctctccatgagtgtcgggcctcctggtcacctcggcccctacaattctattaggagcagagcaatagagaatcgagctaaatcctccctcccaatcatcagtgatgggatatggcagcaaataggtctctttgaaagatgtcaaatggggaacaaatcttttatgaactagaaacagaagaataattttaaaacatggcatatatacaaaaccaacagccaactgcattcttagcagtaaaataccatargaatttccaggaaattcaggaatgagacaaggatgcctattctacgtaattatgctctagaagttctgggcaattcaataaggttataaaaacaaaggaactacaagtatcaggagaaaataaaattttccttatttccaggtgttaatgctatccaggcaaccaaagagaaatcagctaaaaaccaaaaaagaaataagtaaattcaaccactagctgcaatctgtatgagtttgctttttcataggtaaaacagagacagtgacatca

SEQ ID NO: 931385 - DNA, 680 bp, Homo sapiens
ggtaattactgacaaataaagacttaatactggcatttgttaattgttttctggctgtttttcagatcctttgctccttcctatctttctgtcttcctttgtgatatgatgattttctgtcatggtatctttgaatcctttctggttttttttgtgtatccactataggtttttactttgtaattaccgtgaggcttacataaaacatcttggcttataatagtctattttaagttgataatagcttaacttcaataatgtataaaactctacacttttactctcctttatatttttgatgtcacaatttatatcctctcatttctgtatctacaaacgaatgattrtagctgtacttacttttaatattctttgttttttaacctttatactagagttataaataatttagaaatcatcattacagcacaagttgtgcattccgaatctaaacatctgaattccaaaatgctcaaactccaaaacttttgagcaccaatttgaccccagaagtggaaaattccacacctgacctcatgtaatgtgtcataatcaaactgcagcataatcaaactacaggtgcacaacacagtttatttagggtccccaagggcagttaaccttttaatcaaaacaagcattgtagtggagaaaaaaggcttctgttgtttgttattgct

SEQ ID NO: 931386 - DNA, 821 bp, Homo sapiens
ttatggtgatgaggacgaggtaagtcattctctaggaaataaacagaggaggaatcaggttcatggtccggggagatcctgcctgctctgagtgccgtttcccaagctggaccagaaataactgcaatagtgtagaattctctgcctgctcacaggttgtgatttttgtgctggcagtcacacagcctgaagcgccaggcatcacaaaacaaaacttacagctttttctcttggctgatatcacatcagtgatatgaaatctctcccactgccatcattagaaccagttggctggttgtcactctcaagaatggcttaaaatcatcccggttttgagaaattccatttaccaggaagacttccatgttggatgcaaaattaaaatcatgtaagatgacatatgtttgaaatacacttcagataaagatttgtcttttgagttacattttcctcaatattttatcataaaaattgtcaaacagaaaagttgaaagaattgtacagtgagcaagaacattttcctatattgctttaccatatatctgtccaactacccakctctatccacgctgtagtccatttaatttctttgatatattcaaagttgcaaacatcagtatacttcacccctaaacacatcaatatgcatatttaaactagagttcaatattgttccttttttaggttaaatttacactgaataaaatgtgcaaatcttaagtgtaccattctatgagtttccagtcaccttaggcttatatttatattttaataaaactcacattaattaattggcatgtcctaagtgtgtgtctcgccgc

SEQ ID NO: 931387 - DNA, 628 bp, Homo sapiens
cttatttttcattagttctctcatgtatttcctagtcactttcagttaatttatttttcctgaggcccaaaccctctttccttcgttaagaaggatatataggccgggcgcagtggctcaagcctgtaatcccagcactttgggaggctgaggcgggcagatcacgaggtcaggagatcgagaccatcctggctaatacggtgaaaccccgtctctactaaaratacaaaaaattagccaggcatggtggcaggcgcctgtagtcccacctactcgggaggctgaggcaggagaatggcgtgaacccaggaggcggagcttgcagcgagccgagatctcgccactgcactccagcctgggtgacagagcaagactccgtctcaaaaaaaaaaaaaaagaaggatatataagctccctagtctaaccacttctttgagtttcacttcttttctgtgaattcccaggaatgtaaaattttaaaaagttaatacgtttatatttcttttctactattagtttgtcttgtgtcagtcaaattcacaagcccccactgactaaacccaacagagtagaggaaaagttcctcctcttcaacaacatgtagttttatacacttacaacttaatct

SEQ ID NO: 931388 - DNA, 622 bp, Homo sapiens
cttatttttcattagttctctcatgtatttcctagtcactttcagttaatttatttttcctgaggcccaaaccctctttccttcgttaagaaggatatataggccgggcgcagtggctcaagcctgtaatcccagcactttgggaggctgaggcgggcagatcacgaggtcaggagatcgagaccatcctggctaatacggtgaaaccccgtctctactaaagatacaaaaaattagccaggcatggtggcaggcgcctrtagtcccacctactcgggaggctgaggcaggagaatggcgtgaacccaggaggcggagcttgcagcgagccgagatctcgccactgcactccagcctgggtgacagagcaagactccgtctcaaaaaaaaaaaaaaagaaggatatataagctccctagtctaaccacttctttgagtttcacttcttttctgtgaattcccaggaatgtaaaattttaaaaagttaatacgtttatatttcttttctactattagtttgtcttgtgtcagtcaaattcacaagcccccactgactaaacccaacagagtagaggaaaagttcctcctcttcaacaacatgtagttttatacacttacaact

SEQ ID NO: 931389 - DNA, 546 bp, Homo sapiens
agtactacaaactgggtgccttaagacagcagaaacgcattctttcgcagctctgaatgctggaagcccaagatcaaggtgtcagcaggactgattccttctgagggctctgagggagatatctgtcccatccgtgcctctcctcgcttctggtgagggctggcaattgctggcattccttgacttgtagatgcagaactccaatcgctgcctctgttgcaatgtggcatcctcccagcatcttttcgcattgtctttcctctacatatgtgggtatctgtgtctcttatctttttatatggacaccaatcatgttggatttaggacacacactaatgacctcatcttaatttgattacatctgtaaagaccctgtttcttcttcttcttytttttttttttttttttttttgagatggagtctagctctatcacccaggctggagtgcagtggtgtgatcttggctcactgcaacctctggccttcccgcggatcaagcaattctccccctcagcctcctgagtagctgagacccacagggcacg

SEQ ID NO: 931390 - DNA, 622 bp, Homo sapiens
acctcagcctccagagtagctaggaatacaggcatgtgccactgtgcctggctaatttttaagaactttttgtagagatggggttttgctatgtttcccaggttgatcttgaactcctggcctcatgtgatccgcccacctcagcctcccaaggcattcggattacaggccacggtccccagcctggaacaggtttttgagtagagaattgcaatcgttgatgaaagctgtgatttgggaagtctgacctgggagtagactgggggggtgggggcagatgacagagcagcgggggcccaggaggaggtggctgccacactcctggcctgagctccaagcatctgttggatgttcttcagggccaggtgggcagccgccatatgaattagggacaagtttcaaatcaggactcttggtagcattcccagagtgagaaaggtgcatccccagggggcctggagagcttgwgttcagcttctgctcctcagcagaccccagacaacatctgagaccatgtgtctttattggctcccatggctcaatgatgagagctaacatttgttgagttcaggatgcgctgggctgtgggtgaattttgtgggtattttctcatttagtctgt

SEQ ID NO: 931391 - DNA, 736 bp, Homo sapiens
ctggctcaggagtgaagctgcagaccttcgtggtgagtgttacagctcttaaggcggcatgtctggagttgttcgttcctcccagtgggctcgtggtctcgctgccttcaggagcgaagctgcagaccttcgcggtgagtgttacagctcataaaagcagtgtggacccaaagagtgagcagtagcaagatttattgcaaagagcragagaacaaagcttccacagtgtggaacgggacccgagcgggttaccactgctggctcgggcagcctgcttttattctgttatctggccccactcacatcctgctgattggtagagccagagtggtctgttttgacagggcgctgattggtgcgtttacaatccctgagctagacacaaaggttctccaggtgcccactagattaactagatacagagtgtccattggtgcattcacaaaccctgagctagacacagggtgctgactggtgtgtttaaaaaccttgagctagacacagggtgctgactggtgtgtttacaaaccttgagctagatacagagtgccgattggtgtatttacaatccctgagctagacataaaggttctccaaggccccaccagagtagctagatacagagtgtccattggtgcattcacagaccctgagctagacacagggtgctgattggggtatttacaatccctgaggtagacataaaggttctccgtgtccccaccagatctcagga

SEQ ID NO: 931392 - DNA, 568 bp, Homo sapiens
ctgttggaggagcactgcctcaaaatggttctgacctgacaaagtgagggaccctatcaagcgtctgatcctcaggagaagtagaaaatcaagagtttcagagtgaagttctatgtccaagccagtgaaatctgcagtgcagaagtccccgtaggcaacctctgaagaattcacacatgcttgccaaggaagcaagtctatttgaacacctgtatgcccagaaagctctaatagtgtgttacaagagaattatctcattaagacctttccttcaggttagttcttctcactcacctgccttagcttcagactccaaccctgacagatcagaaagtgaactagaaggcaaarataaaggagaagaccacaaagctcaggaaatatgaaagatgctgacaatcctacctttccgctacggacttccagcctgaagcaggcccaagctgggggaaaggagaagctttagctctgcatgcaggtgtaaagcatttcagttcttaaaatgagattctatggttaaaattaccacaaaattgttttaactatcatagaatgaccagaaaaaatg

SEQ ID NO: 931393 - DNA, 577 bp, Homo sapiens
ctgaggcctacttctgtcaactcatcaaagtcattgtctgtccagctttgttttgttgttggcaaggagctgcgatcctttggaggagaagaggtgctctgatatttagaattttcagcttttctgctctggtttctccccatctttgtggttttatctacctttggtctttgatgttggtgacctacagatggggttatggtgtagatgacctttttgttgacgtcaatgctattcctttctgtttgttagttttccttctaacagtcagatccctcagctgcaggtctttggagtttgctggagttccactccagatgctgtttgcctgggtatcaccagcagaggctgcagaacagcaaatattgcwgaaccgcaaatattgctgcctgatccttcctctggaagctttgtcccagagagtcagctgcctatatgaggtgtctgtcagcccctacagggaggtgtctcccatttaggctacctgggggtcagggacccacttgaagaggcagtctctctgttctcagaggtcaaacactgtgctgggagaaccactgttctcttcagagctgtc

SEQ ID NO: 931394 - DNA, 740 bp, Homo sapiens
gaatgtgagccaaagcagggcagggcatcacctcacctgggaagtgcaaggggtcagcaaattccctttcctagccaagggaagccgtggcagatggtacctggaaaatcagggcacgcccaccctcatactgcgattttccaatggtcttagcaaatggcacaccaggagattatatcccgcacctggctcagagggttcaatgcccatggagccttgctcactgctagcatagcagtaagaggtcaaactgcaagggggcagcaaggctaggagaggggcgtctgccattgctgaggtttgagtgggtaaacaaagtggctgagaagctcaaactgggtgtagcccaccacagctcaaggaggcctgcctgcctctrtagactccacctctgggggcagggcatagctgaacaaaaggcagcagaaacttctgcagacttaaacatccctgtctgacagctttgaagagagtagcggttctcccagcatggagtttgagataagagaatggacagactgccacctcaagtgtgtccctgacccccgagtagcctaactgggagacacctccctgtaggggccaactgacacctcatacagccaggtgcccctctgagatgaagcttccagaggatcaggcggcaacatttgctgttctgcaatatttgctgttttgctgcgtccactggtgatacccaggcaaacagggtctggagtgcacctccagcaagctccaac

SEQ ID NO: 931395 - DNA, 598 bp, Homo sapiens
tactcacaacccaatcagcatgcactctcccattctgagccacactggcaaactacctgcctcctggtgggggaccacccgccttgagtcagctctccactgagagcttgttccatggctcagtaaaactcttctcctcccttctcatcctctggttgtctgcgtaacctcattcttcttggatgcaggacaaaaactcgagacctgccaaacagcagtgacaaaggagctactgtaacactgtaactctccaccctccgctggtgtccagcagccccatgcaacgggaagcagtggcagggccaggccagccccagtgccgcaagccagagtggggcagcaggactgaaagagctatagcacaaataggctgaaatactgccttgctccccattcaccgtgctgtgagcagcaggaaggaaagaagagctacaacccttctgggggcytagactttggggctccctgagccaaaactgcagcatgctgtaacacccactttggggcttcagggttgctggcatctccaagatttttggccaccaccacattcccctcatccagacgccggcacccaaagcagaagcaggttgcggca

SEQ ID NO: 931396 - DNA, 605 bp, Homo sapiens
cagggttccccagagaaatggaaccaatagagtgtatgtgtatgtgcatgtacacgtgtgtgtgcgtgtgtgtgtgtgtgtggagagggagtgagagagggagatttattttaagaaattggctcatacaattatggaggctactaaatgcaaaatctgcagggttggtcagcaggctggagacccagggacaggccaatgttgcagttcaagtctgaaggccatctgtgtaattcactcttgcttggggaagatcagtctttttgttctattcaggccttcaactgattggatgaggcccaccaacattttgaaggcaatctrctgtactcaaaatctactgatttaaatgctgatctcatccaaacaatctctcacggaaacatctccaacagtgttttacaacatatctaggcaccatggcccagccaagttgacacataaaattaaccactcaacccctattttctttattacccaatcctgaatcagatgacaatagcctcccgacaagcctctctgcttctactcttgtttcctctcaatgcatttataagcagtagcaagaataatcataaaacaaaaccccaattctttctcttatg

SEQ ID NO: 931397 - DNA, 472 bp, Homo sapiens
taagtatgtttatgccaattatgtattctggcactagggaagtgaccataggataagtccagggacccactggacccactgtaagtcagacctgagctaaacctccatcaattacctgacctccataagcccctactttaactggaraaccacaatgactttttgtgcctcctggattgacatctgctcagagccagtgttcagtagtccccaaaatgtctgataatttccctttccctaaagcacagtgaccctggtaaaaggccagaggtctccttcgggaaggatgggagagagattcaccacgtaaattgtcggtaatgtagtggggtccttcctcaagggaacccggcttccccttcattcaaggggttctgggcacgtagactggctcaagtctggaaattgactgacaggccgtgattctctgtttttgtatttcaaattagtcttttgtccattcgacctagaa

SEQ ID NO: 931398 - DNA, 596 bp, Homo sapiens
aactatcatcagagtgaacaggcaaactacagaatagggaacattttgccatctatccatctgacaaaggtctaacatctagaatctacaaggaacttacacaaatttataagaaaaaaacaaagaaacccatcaaaaagtgggcgaaggatatgaagcagacacgttctcgaagacagaagactgtttatgcggccaacaaagcatataaacaaaggctcattaccactggtcatgagacaaatgcaaatcagaaaccacagatgagataccatctcagtgccagttagaatggtgatagattaaaatgtcgtggaaacaacagatgctggagaggacgtggagaagaaggaatgcttttacactgttggtgggagtgtaaattagttcaaccattgtggaagatagtgtggcaattcctcaaggatctagaaccagatayaccatttgacccagcaatgcccattaccggatatatacccaaagaaatataaatcattctactgtaaagacacatgcacatgtatgtttattgcagaactgtttacagtgcaaagacttggaaccaacccaaacgcccatcaacgatagactgg

SEQ ID NO: 931399 - DNA, 591 bp, Homo sapiens
gtctgtaagcccctggttcaagatacccagcctctttcagtcaaaccaatgtataagctccatgtattgacttaggactttgcctgtaacttctgctttcctgcctttagaaatccttacctataagccattggagartccgggtctgaagcacgagctgcctgattttccctgctgggcaccctgcaataaatgcctcattttcttttgctgcaatctcgatgccagtgtttggcttacctgcattgggcaggtgaacccaagttcggttcggtaaacattcctgataacttttctcctcgctatgttctccccacagatgttctccatctcagttaatggcaatttcaaccttcagttctacaaactttgaaattactcaattcttttcctttcctaccccacaactgatctgtcaacaaattcttctggctcagccttcataatacatctggaattcaaccacttctcatcacttttaccacaaaaacccctggtccaagctaccatcaagtctcacttagattattgcaggagcctcccaagtggtctccatgcttccccacttgttcccttattatcttgttacta

SEQ ID NO: 931400 - DNA, 592 bp, Homo sapiens
ctatctctctctttagatttaatatttgctttatgtatcttggtgctccagtattgggtggatatatatttacaatggttatccttttgcttaattgacctctttatcattgtatcatgaccttctttgttcctacttaaagcctttatcttgaaatttattttgtctaactatagctactcttgctcttttttggtttccattggcttggactatctttttatgtctctttatttttattctaygtgtgtcttttataggtgcagtgtgtttttcataggcaagagatcattgggtctttttgtttttaaatcaattcagccactctgtgtcttttgattggagagtttactcaatttacattcaatgttattattaataaggacctactcctgccattcattttgttatttgttttctggttgttttgtggtcttcaattctttccctccttcctgtcttccttttagtaaaggggatttttctctggtggtataatttaattttttgctttttattttttgtgtgtccattgtatgtttttttattagaggttaccatgagggttgcaaatactatcttatcacccgtt

SEQ ID NO: 931401 - DNA, 583 bp, Homo sapiens
cacagaggacatgatgttaaataaaataagagaagcacagaatgataaataccacatgttctcatgcatgagagagctaagaaaaagtagagtacaatcgtgggtattagaggcggggaagggtggcggggcagggaggatggggagatgctgattaacaattacggaattrccgttggataagaggaatgagttcaggcgttctgcagcatcacaggggggatgtggttaaccagaatttattgtacattttcaaaaagctagaagagaggatttttaatgttcacaacacaaagaaatgatccaagtttgaggtgatggatgtgctaattcccctgaattattatacatggtatacacatatggaaatactactctgcatcccataaatatgtacaattattacgtgtcaactaaaaattaaagaaaaaagtggaaacaactcaaatgtctatcaactgatgaaaggatagataaaatgtgttatatccacactattattgggtaatatgataaaggactgatgcatgctactatatggatgaaatttgaaaacattatcctaagcaaaagacagacccaa

SEQ ID NO: 931402 - DNA, 589 bp, Homo sapiens
tctttttttttttttgtatatatatttattgtactttacgttctagggtacatgtgcacaacatgcaggtttgttacatatgtatacatgtgccgtgttggtgtgctgcacccattaactggtcatttacattaggtatatctcctaatgtcaagcgattctcttgcctcagmctcctgaatagctgggattacaggcacctaccaccacacctggctaatttttgtaattttagtagagacggggtttcaccatgttggccaggctggtctagaactcctgacctcagatgatcggcctgcctcagcctcccaagttgttgagccaccgcgcccggcctattttggagatttttttcatatcaatacttaaaaagcttcttcattttgtttttacaactgcctacattttcacggcatgaacacatcatcatttaaccagttttctattgatggccacttaggttgtttctaatctttaattattacaagcaacactgcagtgaataaccttatacatgagaggtcagcaaactgtttctgtaaagggctaggtagcaaatattttaggcattgcaggccatttggtc

SEQ ID NO: 931403 - DNA, 493 bp, Homo sapiens
gagaagaccttaaatgacctgatggagctgaaaaccatggcatgagaacttcgtgatgcatgcacaagcttcaatagccaacttgatcaagtggaagaaagggtatcagtgattgaagatcaaattaatgaaataaagtgaraagagaagtttagagaaaaaagagtaaaaagaaatcaacaaagcctccaagaaatatgggactatgtgaaaagaccaaatctacgtttgattgtggacctgaaagtgatggggaaaatggaaccaagttggaaaacacacttcagggcattatccaggagaacttccccaacctagcaagcaaagccaacattcaaattcaggaaatacagtgaacaccacaaagatactcctcgagaagagcaaccccaagacacaaaattttcagattcaccaaggttgaaatgaaggaaaaagtgttaagtgcagccagagagaaaggtcaggttaccctcaaagggaagcccatcat

SEQ ID NO: 931404 - DNA, 696 bp, Homo sapiens
aggtctctgtgagtcaggctgttctggttgcagctttgactctgctgtcttttatggtaactgcgtccaccttgcctttggggattgagtgctgcaatcacttggccccggcccctgtagtgtgcctatgtcacttacccyctttatacctcagtctcctcctctgtaaaatgggcatcctaatagcacccacccccagggctgctgtgaggtatagatggattagcatattgaaagtaatagaagagagtccaaagcccatgtgtcgttatcagaattatttcatgacaggggagagctggaggagagaggaaggtgctgagcagacccatgtgctctcccaccagtgtttcctgagcacctactatgtgctgcccactgtgagagctgttagggttgaaatagggagcacagcagggtagggtccgccatcaggagcttagtggagagaccattgtgcaacatggttccagtgcttggggtggagaagctcagggagttcaggggcctaggatcctgggcagaatcatggaaaggacacagcctccccagcctctcctgcctccactgcctccctggcctcctctgcttccctggcctctcctgccttcctggcttccccttccaccccagcatccccagtctcccctgtctctcctgcttttgaggtgggccaggagctgctggtgctcagcc

SEQ ID NO: 931405 - DNA, 681 bp, Homo sapiens
ccacccaaaactcatgttgcaatccccagtgttagaggtggggcctggtgggaagagattgggtcatgggggtggatttctcatgaatgatttagcctcatccctttggtcctgtccttgcaatagtgagtgagttcttgcaagatctggttgtttacgagtgtgtagcacctccctccttactctcttgctcccacttcaccttctgccatcattgtaagtttcctgaggcctccacagaagctcagcagatgtcagtgtcatgctccctgtatagcctacaaaactgtgagccaattaaagctctttatatattacccagtctcaggtatttctttatagcatgagagaacagccaaatccagcagccatagacaatatgtagcaaatgggcatggctgtgtttcaataaaactttattgacaaacacatgcacaagcaggtcagatttggcccatgggccatagtgtcccaacctctgytctggagtattctcttcagcaacctctgcctcctgggttcaagcaattctcctgcctcagcctcccaagtagctgggattacaggcacctgccaccacacctggttaatttttgtattttttaatagaaatagggtttcaccatgttggccaggctggtctcaaactcctgacatcaggtgatccaaccacctcagcct

SEQ ID NO: 931406 - DNA, 577 bp, Homo sapiens
aaagtcccccactattgttgtgttgctgtcaatctcatttcttaggtctattagtcattgttttataaatttgtaatctccagtgttaggtgcatatgtatttagagttgtgatattttcctcttgtacaaggccttttatcattatgtaatgtccctcttggtttttttctaaatgctgttgctttaaagtttgttttgtctgatacaaaaatagctactcctgctcgctgttggtgtccatttgcrtggaatgtctttttccacctctttaccttaagtttatgtgagtccttatgtgttaggtgagtctcttgaaggcaacagaaacaaggttggtgaattgttagccattctgtaattctgtatcatttaagtggagtatttaggctatttaccttcaatgttaaagagaatggataaattgttgaaaagatacaacccttttattttaagtcaggaagaattagaaacccagaacagcccaataacaagcggtagattgaaatggtaaaaaaaaaaaaaaaaaaaaaaaattagcaccaccaccaacaacaactacaaatccaggaccagat

SEQ ID NO: 931407 - DNA, 579 bp, Homo sapiens
ttttttctaaatgctgttgctttaaagtttgttttgtctgatacaaaaatagctactcctgctcgctgttggtgtccatttgcgtggaatgtctttttccacctctttaccttaagtttatgtgagtccttatgtgttaggtgagtctcttgaaggcaacagaaacaaggttggtgaattgttagccattctgtaattctgtatcatttaagtggagtatttaggctatttaccttcaatgttaaagagaatggataaattgttgaaaagatacaacccttttatyttaagtcaggaagaattagaaacccagaacagcccaataacaagcggtagattgaaatggtaaaaaaaaaaaaaaaaaaaaaaaattagcaccaccaccaacaacaactacaaatccaggaccagatggattcacagctgaattctatcagaaatttaaaggagaattggtaccaatcttactgacactactccacaaggtagagaaagaggaaaatcctccctaaatcattctaagaagccattatcaccccaacaccaaaaacaggacaggatataaccacaacaacaaca

SEQ ID NO: 931408 - DNA, 618 bp, Homo sapiens
tgtcattcaaagaagaattggtagcaatcctgctgaaaatatttcaagagatagagaaagatggaagtctccataaatcattctatgaactcagtattaccctgataccaaaaacaggaaagaacataacaaaaatactacagaccaatatctctgataaacatggatgtaaaaatcctcaacaaaatactagawaaccaaatccagcagcatataaaaaatataatacaccattatcaagtgggtttcataccatggatgtggaattagattaacatatgcaagccagtaaatgcaatacaccacataaacagagttaaaagcaaaaattatgtgatcatctcaacagatgaagaaaaagcatttgacaaaattcagcctcgctttatgattagaacccttagcaaattagcatagaagggacacgctttaaggtaataaaagccatctatgacaaactcaccaccaacagaatactgaacggaaataagttgaaagcattccccctaagaagtggaacaagacagggatgctcaattttaccacttctattcaacatagtattagaagttttagccagaccaatcagaaaggagaaagaaataaagagcatctaaa

SEQ ID NO: 931409 - DNA, 618 bp, Homo sapiens
tgtcattcaaagaagaattggtagcaatcctgctgaaaatatttcaagagatagagaaagatggaagtctccataaatcattctatgaactcagtattaccctgataccaaaaacaggaaagaacataacaaaaatactacagaccaatatctctgataaacatggatgtaaaaatcctcaacaaaatactagataaccaaatccagcagcatataaaaaatataatacaccattatcaagtgggtttcataccatggatgtggaattrgattaacatatgcaagccagtaaatgcaatacaccacataaacagagttaaaagcaaaaattatgtgatcatctcaacagatgaagaaaaagcatttgacaaaattcagcctcgctttatgattagaacccttagcaaattagcatagaagggacacgctttaaggtaataaaagccatctatgacaaactcaccaccaacagaatactgaacggaaataagttgaaagcattccccctaagaagtggaacaagacagggatgctcaattttaccacttctattcaacatagtattagaagttttagccagaccaatcagaaaggagaaagaaataaagagcatctaaa

SEQ ID NO: 931410 - DNA, 580 bp, Homo sapiens
gcctttcttgaatctaggtagagccatgtgactaggtgctgccaatagaatatgcatggtagttattgggttctccaggctgaagcagtgaatgagtgggtgtcccctttttccttgttccctctctctctgtatctcactgtgtgtgwgggtgtgtgtgtgtgtgtgtgtatggaagctggaagaaagctgaggccaggggagaaggtggagagccataagatgttcatgagcattacctgacaagtacccgcttttgttgctgtgtgaagagtaagtgaaatttttattttgttaattcaaggagattttaggggtccatctgttatagtagctacccttaccctaaatggtaccctggtttaggccagtcatgattcatcctctgaaagtagagtgacagggcctattttccttaagttcttgatgtctccctgctcttaacctattaattgagcctctgttaccaggtatagatattataacaatagtagaaagtgtctcccacagtacgtcataacaatttttgtatgcctgttgaaaatacagagcccttaactcttccccaggattactgaat

SEQ ID NO: 931411 - DNA, 580 bp, Homo sapiens
gcctttcttgaatctaggtagagccatgtgactaggtgctgccaatagaatatgcatggtagttattgggttctccaggctgaagcagtgaatgagtgggtgtcccctttttccttgttccctctctctctgtatctcactgtgtgtgtgkgtgtgtgtgtgtgtgtgtgtatggaagctggaagaaagctgaggccaggggagaaggtggagagccataagatgttcatgagcattacctgacaagtacccgcttttgttgctgtgtgaagagtaagtgaaatttttattttgttaattcaaggagattttaggggtccatctgttatagtagctacccttaccctaaatggtaccctggtttaggccagtcatgattcatcctctgaaagtagagtgacagggcctattttccttaagttcttgatgtctccctgctcttaacctattaattgagcctctgttaccaggtatagatattataacaatagtagaaagtgtctcccacagtacgtcataacaatttttgtatgcctgttgaaaatacagagcccttaactcttccccaggattactgaat

SEQ ID NO: 931412 - DNA, 588 bp, Homo sapiens
aagagaaataaataaaggacattcaaataggaagagaggaagtcaaattgtctctgtatgcagatgatatgattgtatatttagaaaaccccatcgtctcagccccaaaactctttaagctgataagcaacttcagcaaagtctcaygatacaaaatcaacgtgcaaaaatcacaagcatttttatacaccaataatagacaagcagagagacaaatcatgagtgatctcccattcacaattgctacaaagagaataaaatacctaggaatacaacttaccagggacttgaaggacctcttcaaggagaaatacaaaccactgctcaaggaaataagagaggacacaaacaaatggaaaaacattccatcctcatggataggaagaatcaatattgtgaaaaggcaatactgtttaaagtaatttatagattcaatgctatttcctttaagctaccattgaatttcttcaccaaattagaaaaatctactttaaattttatatggaaccaaaaaagagcccatgtagccaagacaatcctaagcaagaagaacaaagctggaggcatcatgctacctgacttcaatct

SEQ ID NO: 931413 - DNA, 588 bp, Homo sapiens
aagagaaataaataaaggacattcaaataggaagagaggaagtcaaattgtctctgtatgcagatgatatgattgtatatttagaaaaccccatcgtctcagccccaaaactctttaagctgataagcaacttcagcaaagtctcatgatacaaaatcaacgtgcaaaaatcacaagcatttttatacaccaataatagacaagcagagagacaaatcatgagtgawctcccattcacaattgctacaaagagaataaaatacctaggaatacaacttaccagggacttgaaggacctcttcaaggagaaatacaaaccactgctcaaggaaataagagaggacacaaacaaatggaaaaacattccatcctcatggataggaagaatcaatattgtgaaaaggcaatactgtttaaagtaatttatagattcaatgctatttcctttaagctaccattgaatttcttcaccaaattagaaaaatctactttaaattttatatggaaccaaaaaagagcccatgtagccaagacaatcctaagcaagaagaacaaagctggaggcatcatgctacctgacttcaatct

SEQ ID NO: 931414 - DNA, 725 bp, Homo sapiens
taacgcagggtctgaagttttcaacagagcatatttggggaattacagagcatcccagttcaccagaacagagtgaggctgcttttcagacagtattgagaaacgagggctggaaaaagttggaaacagattgggcaaggcctttacccccaagttaaggagttgaggcacagtgagcaggaagaggccattttcctgcaagagggtttgaggagcagagtgaggagcagattgatctggtggtggtgtgtaggatggattggagagagcaggaaagggaggcagggagaccaattaggggattctacactgagacaggtgcaaaacgaagagggatgatggcatgagaactggataggaagggatggacaagaagacaggcactggggactggtggaggtcgggaaggaggaagagggagaagctacggaagacgcttggttttaggagccttacaattatctcgtattactctaagtctggtgtgtggagtattctgtgtggaattcaggcctcattttggktttgatggtctcatcgtgatttattttaaaactttttctaatcaaagccatgctaagacaatggttctcgacctcaactgcattttaggattgcctagggagattttaattcccaatgtccagactataattcagatgaattacatcaggatttctcggggtgaaacctggattttcagcggtgtctaaatctcaccggtg

SEQ ID NO: 931415 - DNA, 696 bp, Homo sapiens
ggagccttacaattatctcgtattactctaagtctggtgtgtggagtattctgtgtggaattcaggcctcattttgggtttgatggtctcatcgtgatttattttaaaactttttctaatcaaagccatgctaagacaatggttctcgacctcaactgcattttaggattgcctagggagattttaattcccaatgtccagactataattcagatgaattacatcaggatttctmggggtgaaacctggattttcagcggtgtctaaatctcaccggtgatccccatgtgcagccagggatgagagtgtctgtgctaggagcggatagggagaagctatggtgagacagaacagacatttgaggggtgtgaagaagaaaacctggaatccgacttagcttttggataaagtgaggtggcagtgaatgtgcagaaattgaaagttggagggagggctgttcccacgtcctttacttttgctatcacagttctgtatttctttccttaaaatcaatatataaaaagattcaatttcttgagcttccttgaccctggaatttctttgtgaattatgtatagtactgtacataaggaactattgaattacaaaccttcccacatgaatcttatggtattaaaataaataaatattcaaaaatacacagaaatcattaccacatctctattctgtttccaa

SEQ ID NO: 931416 - DNA, 696 bp, Homo sapiens
ggagccttacaattatctcgtattactctaagtctggtgtgtggagtattctgtgtggaattcaggcctcattttgggtttgatggtctcatcgtgatttattttaaaactttttctaatcaaagccatgctaagacaatggttctcgacctcaactgcattttaggattgcctagggagattttaattcccaatgtccagactataattcagatgaattacatcaggatttctcggggtgaaacctggattttcagcggtgtctaaatctcaccggtgatccccatgtgcagccagggatgagagtgtctgtgctaggagcggatagggagaagctatggtgagacagaacagacatttgaggggtgtgaagaagaaracctggaatccgacttagcttttggataaagtgaggtggcagtgaatgtgcagaaattgaaagttggagggagggctgttcccacgtcctttacttttgctatcacagttctgtatttctttccttaaaatcaatatataaaaagattcaatttcttgagcttccttgaccctggaatttctttgtgaattatgtatagtactgtacataaggaactattgaattacaaaccttcccacatgaatcttatggtattaaaataaataaatattcaaaaatacacagaaatcattaccacatctctattctgtttccaa

SEQ ID NO: 931417 - DNA, 696 bp, Homo sapiens
ggagccttacaattatctcgtattactctaagtctggtgtgtggagtattctgtgtggaattcaggcctcattttgggtttgatggtctcatcgtgatttattttaaaactttttctaatcaaagccatgctaagacaatggttctcgacctcaactgcattttaggattgcctagggagattttaattcccaatgtccagactataattcagatgaattacatcaggatttctcggggtgaaacctggattttcagcggtgtctaaatctcaccggtgatccccatgtgcagccagggatgagagtgtctgtgctaggagcggatagggagaagctatggtgagacagaacagacatttgaggggtgtgaagaagaaaacctggaatccgacttagcttttggataaagtgaggtggcagtgaatgtgcagaaattgaaagytggagggagggctgttcccacgtcctttacttttgctatcacagttctgtatttctttccttaaaatcaatatataaaaagattcaatttcttgagcttccttgaccctggaatttctttgtgaattatgtatagtactgtacataaggaactattgaattacaaaccttcccacatgaatcttatggtattaaaataaataaatattcaaaaatacacagaaatcattaccacatctctattctgtttccaa

SEQ ID NO: 931418 - DNA, 662 bp, Homo sapiens
tagggagtgaagtatatttatggggagctattcattgtcagcacattcctgtgcctgtatgcaggctccatgagctgaccatttgaataaattcaataaattacctaatgacagctatttttttgcatacttgtcaattaaatctagctaatttactttctaatttcattaatttgttatgaaattatttaattttatattaaatcaaattctgactggttttgttattctgactggtttttaaaccgtgcattcaaaattgtggcaamtagggtaaaactgccacaatttctgtttttcaaaatatttcagcatattcaacaataattagagtcacattgaagttctagtacaggaaattgcctacaaatcctgcttaccttactttttaattgagattcatgacacttcagaggaattactttgggaaaaacgcctaagtctcaatctcccaagcatcttttcatttaatgctaaacatctatcaagaacctactataagctctagacgggcaaagctgtacattatctttaaaggaatacaggccattaaatacaaagtatgataagataaaagtgaacatgcattaggagttctaagaaaacgttttaactacctgctaactcaggaaccaactgggcaaaaaaggatggttaagtaa

SEQ ID NO: 931419 - DNA, 662 bp, Homo sapiens
tagggagtgaagtatatttatggggagctattcattgtcagcacattcctgtgcctgtatgcaggctccatgagctgaccatttgaataaattcaataaattacctaatgacagctatttttttgcatacttgtcaattaaatctagctaatttactttctaatttcattaatttgttatgaaattatttaattttatattaaatcaaattctgactggttttgttattctgactggtttttaaaccgtgcattcaaaattgtggcaaatagggtamaactgccacaatttctgtttttcaaaatatttcagcatattcaacaataattagagtcacattgaagttctagtacaggaaattgcctacaaatcctgcttaccttactttttaattgagattcatgacacttcagaggaattactttgggaaaaacgcctaagtctcaatctcccaagcatcttttcatttaatgctaaacatctatcaagaacctactataagctctagacgggcaaagctgtacattatctttaaaggaatacaggccattaaatacaaagtatgataagataaaagtgaacatgcattaggagttctaagaaaacgttttaactacctgctaactcaggaaccaactgggcaaaaaaggatggttaagtaa

SEQ ID NO: 931420 - DNA, 662 bp, Homo sapiens
tagggagtgaagtatatttatggggagctattcattgtcagcacattcctgtgcctgtatgcaggctccatgagctgaccatttgaataaattcaataaattacctaatgacagctatttttttgcatacttgtcaattaaatctagctaatttactttctaatttcattaatttgttatgaaattatttaattttatattaaatcaaattctgactggttttgttattctgactggtttttaaaccgtgcattcaaaattgtggcaaatagggtaaaactgccmcaatttctgtttttcaaaatatttcagcatattcaacaataattagagtcacattgaagttctagtacaggaaattgcctacaaatcctgcttaccttactttttaattgagattcatgacacttcagaggaattactttgggaaaaacgcctaagtctcaatctcccaagcatcttttcatttaatgctaaacatctatcaagaacctactataagctctagacgggcaaagctgtacattatctttaaaggaatacaggccattaaatacaaagtatgataagataaaagtgaacatgcattaggagttctaagaaaacgttttaactacctgctaactcaggaaccaactgggcaaaaaaggatggttaagtaa

SEQ ID NO: 931421 - DNA, 653 bp, Homo sapiens
agaacttagttttcactttccttctcagactggtgtaaatggttgagggaaagcattgtcaaagcaagatctgggtagctgaaacaaaattactgtgggcaaggaaaatggatccttgtcagatagcaaaggagtcttgaagccacatatgcaagggacatggagagttctgcctgtagggaccaagaggtttcaaagtttagcccacacaatacagacacaatctcaggcaaagacaaatttattcatgtcccctttttcccaatctcagtccagactgactcaagaatcagtaaaaacaaagaacttaaacaatgataaatcagagggcacatttgcattgggggaagaagtgagtaggatctctaacaatttactgtcatctattcattcaggagaaaaatgacaagtgcctttttttgtttttgtatttggtccaggggatagagataaacctggcaccagttttgccttgatatttgtagggagtggaggaaacaaacaggaaagtgkccaattataggtctgcactgtaagtgctcaggtggggagaattcttcactgcggagtctcagagaagacaattactgggcacggcagcactttctagaggtaacatctgttcctgaggtggagactgtttattctgtgct

SEQ ID NO: 931422 - DNA, 628 bp, Homo sapiens
taccaattacattcctcacataactgagaaaaaactattgtaaaataactagaaaaaactattttaaaattcatatggaaccatcaaaagagcccaaatagctaaggcaatcctaagcaaaaatagcaaagctggaggcatcatgctatacaacttcaaactatactacaggactatagtaaccaaaacagcaaaacaggactatagtaaccaaaacagacacatagaccaatggaacagaatagagagcccagaaataaaaacacacaccaacaacaatctgatctttgacagagtgacgaaaaaagaaaacacggtaaatatatgccatagaatactatgcaaccataaaaaagaatgagatcatgtcctttgtaggaacatggatggagctggaggycattatacgtagcaaactaatgcaggaacagaaaaccaaataacacatcttctcacttataagttttagttaaataataagaacacatagacacatataggggaacaacagatatagagacctactgaagggtgaagggtggaagaagggagaggatcagaaaaaataactgattactaggcttaggacctgggtaatgtaataatctgtacaacaaacccccatgac

SEQ ID NO: 931423 - DNA, 586 bp, Homo sapiens
cagtggaggaacagtgtgacagccttttggacccaccctcttggtaccctagttcttgtttggcatccaggaaaaatcaggtcatgtgaacaaattgaagggtggtgaatgtggagaattttatcaagtgatggaagtggcccttagtggaatggggagctgaaaaggggatgaagggggaaggtggttttcccctggagttcagcagtccccggctgaactcttctccaaggtcycactgtcaagccatccctctgaagtcatgctgctacttcagatgtctgactgcttcttttctctccttctctgccactctgctgctctgccactccactggtggagcatagggtttttatgggtacaggaatagccagggcaagatgggccagggtggttttggaaaaggcaacattcaggcagaaagataggaatgcatgttctcactttgggctgtgggttcaggcttgagggtggggctttgcagggaccccatccttttctgcctagggtttacctgcctcctgtttgtatcaaagagacaacgattacagtctcaaaaaattaatcaacatcaatattgaaattt

SEQ ID NO: 931424 - DNA, 643 bp, Homo sapiens
aacagtagagctttcagtggaaattttgaacaagtgggataacaattataaagcattttttcaaagaattggaacaggtgataaaacatggctttacccagactattttgaaggcaaagcacaagcaaagaaataattaccaagaggtgaaattggtccaggtaaagcaaaaacagaccagtcaagaacaaaggtcaaggcagcagttttaagggatacgcaatgcattttgcttattgattttccagaaggccaaagaatgataacatctgtttattatgagagtgttttgagaaagtcagccgtagctttaggagaaaagcacccaggaaagcttcrccaagagcccttctccaccacgacaatgttcctgctcactcctctcttcaaacaaggtcaattttatgagaattttcatgggaaatcattatatttataccttaaagtcctgatttggctccttctgacttctttttgtttcctgatattaaaaacaatctctaaaggaaacccatttttctttagttaataatgtaatgaaccattgacatggttaaattctcaagacctgcaattcttttgagatggatggatgaaattaatggtactatcacctacaaaagtgtcttgaacttgatgaaac

SEQ ID NO: 931425 - DNA, 788 bp, Homo sapiens
acttctccctcaaccataggcaatgcagcttgcagctccaggaaagacactttccttctgcttcaagagaggagaggaaataataaagaggctcttgcttgcaacttggataccagctcagtcaaagtacaataaagcaccaggaaaagtcctgaggccccaattccaggccctagcttccagatgacatttctagacacaccctgggccagaagggaacccagtgtcttgaagggaagaaaccagttacagcaggatccatcacctgctgactaaagagtctttgggccatgaataaacatcaaagatagccagacagtacatgggccttgggtgagactcggtaccatgctggcttcagatgtgatccagcacactctgagctgtggtagccacagggagagacagattcagcttgagcaaaggagwgggaagagcaaaggggactttgtcttgtagcctgggtaccagtgaacccacagtgaagtagagcaccaagtgggctactgttgtccccagttccaggccttagctcctggaaggcattttttgacgaacccaggttgagaaggaagcccattgccatgaagagagagatataggccagaagcatttgccattagctgattatagagcacttgggacttgagtgaacattagtggtagccgggaggaggtcaccatgggccttgggtgagacccagtgccatgatggcttcaggtcttacccagcacagccccagtggtggtggccacagtgctgcttttgtcacccttctcttagctcc

SEQ ID NO: 931426 - DNA, 730 bp, Homo sapiens
tgtcaagaaacctgctgggttgagtgaattatcagtagtcaaggttaaatcatctttttctagtaaaatggcctcatattttaagattctggagtcacctttctgctttttgatttaaaattgctctaatttggtgggctgtttttacagtccatttccccccaaaagttaattttctactttcttcaattaatatttctgtagctcaatggattggatgcattgaacccatccacatgtgactgggtccaaaacttttgatagtaaggctacaggctgccagcggccaccatktttttgggtaagcacccccaaagctactccattatttacataacaaaatgtggaatggtttttctagggaagggaaggctagggcagaggtggttatgagcctttcttttagttcttcaacctgatcgccttcctcagacatccacaggagacggtcaggttgttcctgggcaagtttttggtatagaagtttactgtttagtgcatatgagtcaatccataagcagcagtacccaactaaccctaaaaatttgctgagttcttgcttagtttggggtaagggtaaggacacgaggccttcaactcattcaggccctattcttcgcttacctgcacttattaagtggcctaaatattcaactttgggctccatatactgaagatttccctttgaaactcataacccctcgaactccagatggttaagcatatgtgt

SEQ ID NO: 931427 - DNA, 730 bp, Homo sapiens
tgtcaagaaacctgctgggttgagtgaattatcagtagtcaaggttaaatcatctttttctagtaaaatggcctcatattttaagattctggagtcacctttctgctttttgatttaaaattgctctaatttggtgggctgtttttacagtccatttccccccaaaagttaattttctactttcttcaattaatatttctgtagctcaatggattggatgcattgaacccatccacatgtgactgggtccaaaacttttgatagtaaggctacaggctgccagcggccaccatttttttgggtaagcacccccaaagctactccattatttacataacaaaaygtggaatggtttttctagggaagggaaggctagggcagaggtggttatgagcctttcttttagttcttcaacctgatcgccttcctcagacatccacaggagacggtcaggttgttcctgggcaagtttttggtatagaagtttactgtttagtgcatatgagtcaatccataagcagcagtacccaactaaccctaaaaatttgctgagttcttgcttagtttggggtaagggtaaggacacgaggccttcaactcattcaggccctattcttcgcttacctgcacttattaagtggcctaaatattcaactttgggctccatatactgaagatttccctttgaaactcataacccctcgaactccagatggttaagcatatgtgt

SEQ ID NO: 931428 - DNA, 730 bp, Homo sapiens
tgtcaagaaacctgctgggttgagtgaattatcagtagtcaaggttaaatcatctttttctagtaaaatggcctcatattttaagattctggagtcacctttctgctttttgatttaaaattgctctaatttggtgggctgtttttacagtccatttccccccaaaagttaattttctactttcttcaattaatatttctgtagctcaatggattggatgcattgaacccatccacatgtgactgggtccaaaacttttgatagtaaggctacaggctgccagcggccaccatttttttgggtaagcacccccaaagctactccattatttacataacaaaatgtggaatggtttttctagsgaagggaaggctagggcagaggtggttatgagcctttcttttagttcttcaacctgatcgccttcctcagacatccacaggagacggtcaggttgttcctgggcaagtttttggtatagaagtttactgtttagtgcatatgagtcaatccataagcagcagtacccaactaaccctaaaaatttgctgagttcttgcttagtttggggtaagggtaaggacacgaggccttcaactcattcaggccctattcttcgcttacctgcacttattaagtggcctaaatattcaactttgggctccatatactgaagatttccctttgaaactcataacccctcgaactccagatggttaagcatatgtgt

SEQ ID NO: 931429 - DNA, 578 bp, Homo sapiens
tgtggagaaaaaaaaccttacatccattcttttagggtttttcaagaatacaatatattgtttaatatagttaccaagttatacaatagacctcttaaacctctttctcctatctgaaattttgaatcctttgagcaagatataccagcctcccttccctaaccatttcagcccctgataacaaacgtgagataaactttgttaggttctacatatgaataaaatcatttgatagttgtctttctgtgcctaatttatttcacttaacatagcattcttcaggtccrttcatattgtcccatattacaaaattaccttctgttttagggctgaatagtgtatatataccagattttttttatccatccattcatttattgatggacatttaggtcgattccatatcatggcagttgtgagtaatgctataataaacaaaggaatgcagatatctctttgacatactcatttcatttgctttgcacatgtattcagtagtggaatggctggatcatgtggaagatttattgttaattttttaaggaacctccattctgttgccataatggctgcaccac

SEQ ID NO: 931430 - DNA, 579 bp, Homo sapiens
gtggctcatgcctgtaatctcagcaatttagaaggccgaggtgggtggatcatttgaggtcaggagttcgagaccagcctggccaacatggtgaaacaccatctctactaaaaatacaaaaactagctgggcatggtggtaggctataatcgcagctactgtaatcccacctactcrggagactgaggcaggagaatcgcttgaactcaggaggaggaggttgcagtgagctgagatcacgccactgcactccagcctggacgacagagcaaaactccaactcaaaaaaaaaaaaaaaaaaaagaatcagagtaaattagagcattacattgaagaaattccactatgtagcttacaatgatgcttgatttcttattagataaaatttaaatttaactttatatagtatctcatgaattaaacttaaaaaataaaaaagatgactgatattacaaccttggctaaaacatagaaaatccatagttgcctgacacaaccttaaacagtcaaaactctggccctccacacatccatctccttctctccatgatcccttctagcacattccctaactctgag

SEQ ID NO: 931431 - DNA, 596 bp, Homo sapiens
attcaattacctccacctggtctctcccttgacacctgggaattttggggatcacaattcaagataagatttgggtgggcacacaaagcctaatcacaccaggtcgtcaggtgatgaatggagttttggcagaggtttggatcacagtggttatttcctcagttcctaaatataatttgagtagctgtacttggtaactgacagaacccctgtactgactctctgaaccaaggagtgaagactgtcacagtagggagagaaaagtcaacggcatgaaatgactctgctctaagtattgtacacagagagcagtactgtggctctggacaaaccacagagactgtgaccacartgaagggttaaaaatgcaagagaatggtgattcatctcagaattctatttaattttcctgctttcctttgcagtaaataatgatcttagagattctaactgcacatataattaaagtaaccagagattattccaatattagttgttgtttcagatgtggtatcttaatggagaaaatcagcataggtccttaaccttgcatttaatctggaaaatattcatcttccccctgactaatttacaag

SEQ ID NO: 931432 - DNA, 607 bp, Homo sapiens
ggttatcaagaaattattatcaagaataacaagcggccacgtgtggtggctcacgtctgtaatcccagcctgggtaatatggtgaaaccccatctttacacaaaaacaacaacaacaataacagtaacaacaaacaaaaattatcagggcacagtgattcatgcctgtaattctggcagtttggaaggctgaggcgaaaggatgacttaagcttagaagtgtgagaccagcttrgccaacatggtaaaaccctgttggtacaaaaattacaaaaattagccggatgtggtggtatgtgcctgtggtcccagcttcttgggaggctgaagtgggaggattgcttgagcccagaagttcaaggctgcagtgagccatgattgtgccactgtactccagcctaggcaacagagtgagagaccctgtctcaaaaaaaaaaaaaaaaaaaaaaaaggaaaaataagaaataaaaaacattggtcagggtgaggagaaagggaacccttgtacactctgttgggaatgtagatgggtgtagccactgtggaaaacagtatggtggttcctaaacaaatcaaaaatagaacaaccatatgatccagtaatccct

SEQ ID NO: 931433 - DNA, 658 bp, Homo sapiens
tgaaaataaatgttccagagatgggtgttagacattgaaagctttttttttttttttttcgagatagcagcctcaaccttaagtgaatctcctgtcttatcctcccaagtagctggcactataggcacaccccaccatgtctggctaattattttattttattttattttgtagagacaggggtcttgctatgttgcccaggctggtcttgaactcctggacacaaacaatccttctgcctcaacctctcaaacactgggattatagacatgagcctctgtgctaagatgaaggcttttcatcagccgtaaaaacactagttggctgggcaccgtggctcatgcctgtaatcccagcactttgggaggcagaggtgggtggaccacttgaggtcagcagttcgaaactagcccraccaatatggtgaaaccccgtctctactaaaaatacaaaaattatctgggcatggtggcaggcgtctgtagtcccagctactcgggaggctgaggcaggaaaatcgcttgaatctgggaggcagaggttgcagtgagccgagattgtgccactgcactccagcctgggcgacagagggagactctgtcacaaaaaaaaaaaaaaagaaagaaagaaaaagaaaaagaaaaccctagttacagag

SEQ ID NO: 931434 - DNA, 629 bp, Homo sapiens
ggctgtggtgaggtgttgcttgggatagggaaaccaggaaccaggtagtccagtccttggaccccactgattgtagcagcaggcagagcatacctggtttggggtccccaggcagcacatgtgtgaactggttttagcaagtccacaggggttgattcttgggccttgagagggcttgcttggtttccaccagtgtcagtggctgaccaggtaggtgagcaggtccttggttctcagagtattgtgtttggtatagatgatggcaatagcagtggtgagaaaactcttgtgctgcaagtagcacactggtgttagtgttagctgtgagggtctgagtgggccaatccccaggctcctagttagtgcttgcatgtgaatgycatctgtggagatagaagcaggttatgtgggcctatcctcaggcctccaggaagagtgcacagttaccagtagtggtggacagagtgggactattctgagttccctgggtggtttgtgtgagtactgagagcgggggccgtgccaggcccggtggcccagtagcctgtcctcaggactcccagtgggtgtactctggcactggctgtgctgagcagggtagctttatcaccaggcccccttgatagagt

SEQ ID NO: 931435 - DNA, 609 bp, Homo sapiens
ctaggaataaaccaggaaaaaagtgcaagaaatataggaataaaaccataaaactttataggacacaaagacttgaatatataaaaaaagtattatcatgtttctagacataaagatgctacattgtaaaaatgtcagttcttcctaaattaatctataacttaaatctcttgccaatcaaagtttcmatgtaaaacctaaatctcataaacgatacaaaaattaactccaaatggatgatgtatcttaatgtgaaacaaagcaataacaattttacaagaaaacaggagtgaaaatcttcatgatcaaagagttcttggacatgacaccaaaagtgcaatccaacaaagaaaaaattgataaactggaccttatcaaagttgaaaactttgttctgggaaaaacactactaagggtatggaaagacaagctagcactgtgaacgtatatttgcaaattgcatatccaacaaacaggaccagctatgtaatttatggggctaagtacaaaatgaaaatgtgggacctcctttttgaaaaattattaagaatttcaagactgcaactgtagaacattgaacaaagctctgggtccctttgagtgtggaac

SEQ ID NO: 931436 - DNA, 567 bp, Homo sapiens
agggctttctctgttgtaaaagttataatatgtattggaagtatcctcacagctatcaagaatcagctccattaatcagaattgctgctgtgaccttaatgaataatggaacttaggcatatttctaataggcaaatccccttgtaataatttcagatacaaactgctgctgctatagatatttgaggactaaaatcaaggacagtcacaaacccaccacaacattaagtctagtatagttatyttaaaaaaattcaaactttataagaagattggatgtataaacatttaagttacaaacaaagtatgcttttgaacagctggttccatttcctgccattgcctccatgtaaaatcactataataaaaatgcttctctacttatgttggggctatgttccgataaacccattgtaagttgaaaatattataaatcaaaatgcatttattatacctaatcttctgagcatcgtatcttagtctggcccaccttaaacatgctcagaacacttacattagcctacagttggggagaattatctaacacaaagcctattttatagtgaa

SEQ ID NO: 931437 - DNA, 590 bp, Homo sapiens
tggagtgtcccagggctcagttcctccctgatttcatcaagtcttatggctttaaactccatcacatgtagacagctcccaaatgtacatctccaggccatccccagcctctctcctaactccacatttgcatctccgacagcctacttgacaactctacttgaatttgtaatgggcatctcgcacttaacatgtccaaaatcactccagaataccattccccagcccaaactgcaatctttcccatcttagtaaatagaaagtccttttttgtttttccaattgctcaggccaaaagcacttggactgggccaggagcagtggttcacacctgtaatcccagcactttgggaagccgaagtgggtgaataacttgaggtcaagaccagmctggccaacatggcaaaaccctgtctctactaaaaaatacaaaaattagccaggcgtggtggcacgtgcctgtaatctcaactacttgggaggctgaggcaggagaatcgcttgaacccgggaggcaggggttgcagtgagccaagatcatgccactgcactccagcctgggtgacagagtaagactccgtcttccccca

SEQ ID NO: 931438 - DNA, 610 bp, Homo sapiens
tggaaagtgccacctcctggaaggaggccaagcagaacaaaaatagaacattaaactagcaaagctaagaacactcaaagagtccatttcacccccggccacatcccccagaacaggtgctggtatccacggctgagagacccatagatggttcacatcacaagacgctgtgcagacaacccccagtaccagcccagaaccagttagacttgctgggtggctacacccagaagagagataacaatcactgcagcttggctcacaggaagccacatccataggaaaagggagagggtactacatcaagggagcaccacatggtacaaaagaatctgaagaacagccttcagccctagaccttccctctgacagagcctaccccaatgagaaggaaccagaagaccaactctggtaatatgacaaaacaaggctctttaacrtcccctaaaaaaatcacactagctcaccagcaatggatctaaaccaagaagtaatccctgatttacctgaaaaagaattcaagagattagttattaagctaatcagggaggcaccagagaaaggtaaagcacaatgcaaagaaatccaaaaaaaagattcaagaagtgaa

SEQ ID NO: 931439 - DNA, 586 bp, Homo sapiens
ctgcgctattcccacagtcttcgcaacccgcagaccaggagattccctccagtgcctacaccaccagggcccctgtgtttccagcacaaaactgggtggccatttaggcagactccgagctagctgcaggagtttatttctcacaccccagtggcacctggaaatccagcgagacagaaccgttcactctcctggcaagagggctgaagccagggagccaagtgctctggctccgcgagtcccacccccacggagcccagcaagctaagatccgctggcttgaaagtctcgcggccagcacaacacaacagtctgagctcgacctgggacactccagcttggtggcrggaggggcatccaccattgctgaggcttgagtaggcagttttcccccacagtgtaaacaaagccaccagcaagttcaaactgggtggagcccaccgcagctcagcaaggcctctgaggccagactgcatcctctagattccctctctgaaaaaaaggcagcagcccccagtcagcgacttatagataaaacccccacctccctgggacagagcaactctgggaatgggcggttgtaggc

SEQ ID NO: 931440 - DNA, 582 bp, Homo sapiens
atatgggtgtctttgaaggatggtaccaagaaattttaaaaagggggtgggctcggtggctcatgactgtaatcccagcacttttggagggtgaggtgggcctcacctgaggtcaggagttctagccagcctggccaacgtggtgaaaccccgtttctactaaaaatacaaaaaaaaaaaaaaaaaaaaattagccaggcatagtggaacgcrcctataattccagctactctaggggctgaggcaggagaatcacttgaacccaggaggcggaggttgcagtgagccgagatcaagccactgcacgacagagtgagaatctgtctcaaaaaaaaaaaaaagaaaaagaaaaagaaaagcaattttaaaaagggcgattctgccctgtattcctcaggagattctcttaggaagggactgctagagctcactgtagatgtgcctcattttatgcaacaaatatatttttgaacatataaaatagtcaaatgttgttcagcatctaccatgcgtcagacaatgagctaggtgttttaacccttatacctaatctgtaaaatggacattattatttccattttg

SEQ ID NO: 931441 - DNA, 449 bp, Homo sapiens
  misc_feature 26: n = A,T,C or G
ccaggtgctctgtcccagggagatgnggggttttagctatatgtccctgactggggctgctgcctttttttcagagatgcccttcccagagaggagggatctagagaggcagtctggccgcagtggccttgctgagctgtgatgagctgtgcccagtttgaacttcccggtggctttgtttacactgtgagggtaaaactacctacttaggcctcagcaatggtggacgcccctccccmccaccaagctcaagggtcctaggtcgacctcagactgctatgctgcagtgagaatttcaagccagtggatcttagcttgttgggctctgtgggagtgggacccactgagtcagaccacttggctccctggcttcaaccctctttccaggggagtgaaagattctgtctcgctggtgttgcaggtgccactggggtatgaaaaaaaataaa

SEQ ID NO: 931442 - DNA, 891 bp, Homo sapiens
agtctcagctccttaggaggctgaagcaggagattcccctgaacccaggaggtggaggttgcagtaagcagagatcatgccactgcactccagcctgggtgacagagcaagactcagtctcaaaaaaattgtgcatatgtgtacaacatatttgaatatgtgttctaatacatcagaattagaaacactcagaagtgtgtgtgtatgtgagtgtgtgtgtgtgtgtgtgtgtgtgagagagagagagtatttagcgccacagaaaagaaacaatgacctgtctagagaaatgagctttcctagtgctggtattatgtattcaagttccacatcacacgacaaaggaccaggacttcttgcagaaatgactgaatgcaggtctggtcctggaacatcttgtcatatcagaaagcagcaatgttaaagacttctagcatcatgtccaaaggacycaagaactaacctaaagaggttcgcactagccaaagtcagaataatttgaagctacagtaaagataatgtttaaattcgtgagtacataataatattgaaacaataaaaaagaactagtcaccctcagaggatgacaggaaaccaattcattatcttggaaactgatgaataaaggaagaatctagcatctatccccgtttctatatgaactgtactgctgggtaaccagatagcagttggagaaggatctccttagaacagtattacaaccattaaataacaaaacaataaaaaagatagaatgtcaccattttgcatccccagtgaattattagatgtaggcactaagcatcaacaactgctaacatcaataaaagagacaacagggctttatatgcctcctattgtcttgccaaaccaagggatcaaatctgaatc

SEQ ID NO: 931443 - DNA, 548 bp, Homo sapiens
acaacaaaaaagaggtgacagtcaagaagaaatgggaacaacaacaaaatcaacatgtgaataaatctaagttaaaatgctgagaatacagaacacaagcatctaatctgaggagctaaaaaagtcataacagaactaaggtgctacaaacagtagtacacaaggtgagaaggagtaattggagtataagcattctaagaacattatatttttccagaaaaagctttaaaaatcattgatttcaaaataaagtgaaacatgcatattaagatttctaagttagcttctaaaagaatagraacatagatattaaatttcaaaggagagagaaaaaaatgggactggggcagaggtgaagggaatctcaactcatttaaaaggcaagaaacaggcagggcgccgtggctcacgcctgtaatcccagcattttgggaggccaaggcaggaggatcgcttgaggtcaagagttcaagaccagcctggccaacatggtgaaactctgtctctactaaaaatacaagtattagctgggcatcatggtgggcacc

SEQ ID NO: 931444 - DNA, 601 bp, Homo sapiens
gggtcgggtgggcacttggagaacttttgtgtctagctaagggattgtgaatgtaccaatcatcactctgtgtctagctaaaggattataaacgcaccaatcagcactctgtaaaaacataccaatcagcactctataaagtggaccaatcagcactctgtaaaatggaccaatcaggatgtgggcagggccaaataagggaataaaacctggccacccgagccagcagtgccaagcaacctgctcgggtccctttcgaggctgtggaagctttgttcttttgctcttcatgataaatgttgctgctgctcactctttgggtccacactacctttacaagctgtaacactcactgcgaaggtctgcagcttcattcctgaagtcagtgagaccatgaacccactgggaggaacaaacamccaactccagatgcacgatctttaagagctgtatcactcactgcaaaggtctgcggcttcactcctgaagtcagcaagaccaagaacccaccagaaggaagaaagtccggaggcatctgaacatctgaaggaacaaactccagacacaccatttttaagagctgtaacactcaccacaaggg

SEQ ID NO: 931445 - DNA, 721 bp, Homo sapiens
cacttggagaacttttgtgtctagctaagggattgtgaatgtaccaatcatcactctgtgtctagctaaaggattataaacgcaccaatcagcactctgtaaaaacataccaatcagcactctataaagtggaccaatcagcactctgtaaaatggaccaatcaggatgtgggcagggccaaataagggaataaaacctggccacccgagccagcagtgccaagcaacctgctcgggtccctttcgaggctgtggaagctttgttcttttgctcttcatgataaatgttgctgctgctcactctttgggtccacactacctttacaagctgtaacactcactgcgaaggtctgcagcttcattcctgaagtcagtgagaccatgaacccactgggaggaacaaacacccaactccagatgcacgatctttaagagctgtawcactcactgcaaaggtctgcggcttcactcctgaagtcagcaagaccaagaacccaccagaaggaagaaagtccggaggcatctgaacatctgaaggaacaaactccagacacaccatttttaagagctgtaacactcaccacaagggtccccggcttcattcttgaagtcagcgagaccaagaacccaccagaaggaataaattctggacacaatgggaggggctgccatgaaggtctctgacatggcctgcagacatttccccatggtcttgggatta

SEQ ID NO: 931446 - DNA, 577 bp, Homo sapiens
agagtgaaaacagagctcccatacaatgggaggggacccaaagggggttgcccactcccgtctcgaatgcctagggtttatatcccgaatattgtccctcccccacgctctcaggcaatatatgatttgactatttctttacctcctgcttttagcctaattggtattttagtgagtcctctttactacctaattggttgggtgtgaggtgagttacaagccccgtgtttaaaggtaggtgcggtccccttccccagctaggcttaggaattcttagtcagcctaggaaatccagctagtactgcctctcagtccccactctcaacaggaaaactcaagtgatgttggggaggttggccaacgaccrctcttaactgcttcctgctgaattggggcgtagtaggggtcgtgcagttgagatttcctcaggaggggtgcctttgatgtcattaacatcagagcatgggctagcaggctggtccaggggtctgcagtagatcttagtcatggactgcatctggggctccatttgaagaaccatttgtagttttacaacttcgattctggaagagacata

SEQ ID NO: 931447 - DNA, 577 bp, Homo sapiens
agagtgaaaacagagctcccatacaatgggaggggacccaaagggggttgcccactcccgtctcgaatgcctagggtttatatcccgaatattgtccctcccccacgctctcaggcaatatatgatttgactatttctttacctcctgcttttagcctaattggtattttagtgagtcctctttactacctaattggttgggtgtgaggtgagttacaagccccgtgtttaaaggtaggtgcggtccccttccccagctaggcttaggaattcttagtcagcctaggaaatccagctagtactgcctctcagtccccactctcaacaggaaaactcaagtgatgttggggaggttggccaacgaccgctcttaactgcttcctgctgaattggggcgtagtaggggtcgtgcagttgagatttcctcrggaggggtgcctttgatgtcattaacatcagagcatgggctagcaggctggtccaggggtctgcagtagatcttagtcatggactgcatctggggctccatttgaagaaccatttgtagttttacaacttcgattctggaagagacata

SEQ ID NO: 931448 - DNA, 670 bp, Homo sapiens
agattaagggtgggtctgcctttcccagcccactgactcaaatgttaatctcctttggcaacaccctcacagacacacccaggatcaatactttgtatccttcaatctaatcaagttgacactcagtattaaccatcacaaatccaccccttgtcaacttgaacccatgcacatctcttgagatcatatataatctccaaataaagaaaataataaggtcataattatgcctaacataatacaactatccttcatacaaccaatgcccaacccaaataccattacataaagttaacaatacttaaatgctgatgtgaagtcaataaatcttmtgtcacatgataaggagaaaggaaataaaacgaagatattttcttagtacaagtgtatacatgcacaaacatgtttttaacaaaagaaggaggaaactcatgacaactacagtcctcgtagctgcagttggtcacgtggttgtagctggtattcatgactaccttcttctactacccattctgtattccctttgccttcagcaagcacctcagcaggtcgtggttttttcctggtggagtgaccgaaaccgtcattcctgaagggcctgggtcatttgtagtccttcctggattgggctgttgtagtttcccattgaccttaatcacagggcatggta

SEQ ID NO: 931449 - DNA, 670 bp, Homo sapiens
agattaagggtgggtctgcctttcccagcccactgactcaaatgttaatctcctttggcaacaccctcacagacacacccaggatcaatactttgtatccttcaatctaatcaagttgacactcagtattaaccatcacaaatccaccccttgtcaacttgaacccatgcacatctcttgagatcatatataatctccaaataaagaaaataataaggtcataattatgcctaacataatacaactatccttcatacaaccaatgcccaacccaaataccattacataaagttaacaatacttaaatgctgatgtgaagtcaataaatcttatgtcacatgataaggagaaaggaaataaaacgaagatattttcttagtacaagtgtatacatgcacaaacatgtttttaacaaaagaaggaggaaactcatgacaaytacagtcctcgtagctgcagttggtcacgtggttgtagctggtattcatgactaccttcttctactacccattctgtattccctttgccttcagcaagcacctcagcaggtcgtggttttttcctggtggagtgaccgaaaccgtcattcctgaagggcctgggtcatttgtagtccttcctggattgggctgttgtagtttcccattgaccttaatcacagggcatggta

SEQ ID NO: 931450 - DNA, 753 bp, Homo sapiens
ccaacgaattcctcagagaggtccaaatatgcacttgcagattctgcagaaagtgtgtttctaaactgctacatcgcaaggaatgttcagctctgtgagttccactcaatcatcccaaagaattttctgagaaagcttctgtcttctttctataggaagttatttcctttactacggtaggcctcaaagaagtgcaattatccccttgcagtttctacaaaaagagtgtttcaaacctgaactatcaaagaaaggttccacactgtgagttgaatgcagacatcacgaagaaggttctgagaatgcttctgtttagttctgtgcggtttatcccgtttccaacgaaatcctcagagaggaccaaatatccacttgcagtttctacaagaagagtgtttcaaagctgaactatcaaagaaaggttcagcactgtgagttgaatgcaaacatcacgaagagggttctgagaatgcttctgttttagttctgtgcggtttatcccgtttccaacgaaatcctcagagaggcccacatatcyacttgccgatcctacaaatagtgtgtttagaaactgctccatccaaaggaatattcagctctgtgtgttaaactcagtcgtcaccaagagttttctgtgaatgctaaggtctagcttttatatgaagctatttcctttactaccatagtcctcaaagccttccatatctccacttgcagattctacacaaagagagtttccaaactgctctgtca

SEQ ID NO: 931451 - DNA, 660 bp, Homo sapiens
attcacagattatataatcttgtacatagtaaatcttaagaaatcaaacaactattagaactaataaaagtgtgtagcacagttccaggatccaagatcaatatatgaaaatttactttagttatgcacactagaaacaaaacaaaacataaaactraaaaaacaagtttgcaacgcatcaaaaagaatacttaaggccaggcgcggtggctcacacttataatctcagcactttgggaggccgaggcgggcggatcatgaggtcagaagatcgagaccatcctggccaacatggtgaaaccccatctctactaaaaatacaaaaattagctgggcatggtggtgcatgcctgtaatccctgctactcgggaggctgaggcaggagaatcgactgaaccaggggaactggaggttgcagtgagctgagatcacaccactgcactccagcctgggtgacagagcgagactccatctcaaaaaaaaaaaaaaaaaaaagaatacttaaaaaaataaattaaaccaaagtacaatacctgcaaacagaacatcataaaactgcttaggaaaattgaacatctaaataaatgacgacatcctgtgtttctggattggaggactcaatattcttaaaatggcaatccccctcaaattaatctata

SEQ ID NO: 931452 - DNA, 625 bp, Homo sapiens
caataacagacaaacagagagccaaatcatgagtgaactcccattcacaattgcttcaacgagaataaaatacctaggaatccaacttacaagggatgtgaaggacctcttcaaggagaactacaaaccactgttcaatgaaataaaagaggatacaaacaaatggaagaacattccatgctcatgggtagaaagaatcaatattgtgaaaatggccatactgcccaaggtaatttatagattcaatgccatccccatcaagctaccaatgactttcttcacagaattggaaaaaactacttcaaagttcatatggaaccaaaaaagagcctgcattgccaagtcaatcctaagccaaaagaacaaagctggaggcatcacgctacctgacttcaaactayactataaggctacagtaaccaaaatagcatggtactggtaccaaaacagagatacagaccaatggaacagaacagagccctcagaaataatgccgcatatctacaaccgtctgatctttgaaaaacctgacaaaaacaaaaaatggggaaacaattcccaatttaataaatggtgcttggaaaactggctagcaatatgtagaaagctgaaactggatcccttc

SEQ ID NO: 931453 - DNA, 625 bp, Homo sapiens
caataacagacaaacagagagccaaatcatgagtgaactcccattcacaattgcttcaacgagaataaaatacctaggaatccaacttacaagggatgtgaaggacctcttcaaggagaactacaaaccactgttcaatgaaataaaagaggatacaaacaaatggaagaacattccatgctcatgggtagaaagaatcaatattgtgaaaatggccatactgcccaaggtaatttatagattcaatgccatccccatcaagctaccaatgactttcttcacagaattggaaaaaactacttcaaagttcatatggaaccaaaaaagagcctgcattgccaagtcaatcctaagccaaaagaacaaagctggaggcatcacgctacctgacttcaaactatactayaaggctacagtaaccaaaatagcatggtactggtaccaaaacagagatacagaccaatggaacagaacagagccctcagaaataatgccgcatatctacaaccgtctgatctttgaaaaacctgacaaaaacaaaaaatggggaaacaattcccaatttaataaatggtgcttggaaaactggctagcaatatgtagaaagctgaaactggatcccttc

SEQ ID NO: 931454 - DNA, 575 bp, Homo sapiens
gacttagctttatttctgggttctctactctgttccactggtctatatgcctagttttatatcagtaccacgctgttttgaaaactacagccttgtagtataatttaaagtctggtaacgtgatgtctccagatttgtttcttttgcttataatttctttggctattcaggctcttttctagttccttatgaattttaggattttttttctaattttctgaaaactggtgttggtattttatgggaattgcattgaatctgtagattgctttggacagcatggtcrttttcactatattagttcttcaaatctgtgagcatgggatgtgtttccaatggtttgtgtcatctatgatctcattcagcagtattttgtagttcttcttgtagagatctttcacttcctcggttaggtatattcctaggtttttttggttttggttttgtagctgctgtaaaagggattgagttcttgatttgattctcagcttggttgttgttggtatatagcagtgctattgatttgtgtacattgattttgtaacctaagactttattgaattcatttttcaaat

SEQ ID NO: 931455 - DNA, 620 bp, Homo sapiens
cataagcacaatatactggcttgtaagtcaaactgcacagcctaatataaagcttgttgacagaagtgcacagggctatagaagcaaagccaaaagaccctacccagcattctctacagccacacacctgaggaaaggaggagggaaagaaggaaaaaaactcaatattatagggaaataaagaaaaagaaaaaatcctacccacatataaattattataaaaattagaagtgccaacatctccagataagaagagaccagcacaaggattctggcaccatgaaaaatctgagtgtagtgacatcaccaaaagatcacactcactccccagcaatggggcktaaccaaaatggaaactcagatgtgacagaaaaagacttcaaaatatagattgcaaggaagctcaatgagatccaagaaaagattgaaaataaacacaaagaaatttctaaagcaatcctggaaatgcaggaagagatgaatatcttaaaaagtaatctgagcttatggaattgaaaaactgacttaaataatttcaaaatacaatggaaagctttatcaatggactggatcaagtagaagaatttcagagcttaacgactgttctttcaaactaagtc

SEQ ID NO: 931456 - DNA, 627 bp, Homo sapiens
gggaggtggtaccctgcaaagtcacagaggcagagctgcccaaaactatggaaacctacctcttgcatcagcatgacctggatgtgagacatgaagtcaaaggagatcattttggagctttaagatttgactgccctgctggattctggacttgcatgggacctgtatcccctttattttggccaatttttcccatttggaatggctgtatttacccaatgactgtacctccattgtatctaggaagcaagtaacttgcttttgattttacaagcttataggcagaagggacttgccttgtcccagatgagactttgtactgtagacttttgagttaattctgaaatgagttaagactttgggggactgttgggaaggcatgattcattttgaaatgtgaagataggagatttgggaggggctgggatggaatgatatggtttggctctgtgtccccacacaaatctcatcttgtagctcccataattcccaagtgttgtggragggacccagtgggaaatgactgaatcatgggggtgggcttttccccatgctgttttgtgatagtgattgggtctcacaagatctgatggttttaaaaacaggagtttccctgcacaagctctt

SEQ ID NO: 931457 - DNA, 618 bp, Homo sapiens
acaagaaattgtacagacactttgaaaggaaatttggcagtttcttacaaagctaaacatactcagtataaaattcagcaacttttacttcttggaaattagcaaaatgagtagaaaacttacatccacatgaaaacttccacattaatatttacagcagctttatctgtaattgccaaaacttggaagcaacatccattccttggaatattattaagcactaaaaagaaatgagccatctagccacargaagacatggaggaagtttaaatgcatgttgttaactgaaagaagccaatcttaaaacgctacatactgtacaattccaaccatgtgatattctgaaaaggggaaaacaatgggagcagtaaaaagataagtaactgccgatgggtttgaagcaagagagggaggaatgaataggtagagtgcaggaaatgattttagggcagtgaaatgattctgtatgatattataatgatggatatatatcattatacatttttcaaaacccataaaatgtacaacacaatgagtaaactctaatcaaactagaaacttaagttaataataacgattcagtaccagtttattacttttaacaaatgcaagatgtta

SEQ ID NO: 931458 - DNA, 600 bp, Homo sapiens
caaatgcacatagtttcagggtagatatgataatttgatacatttgaataatttgtaaagatgaaaacagtgtccttgagatattcatcaccttaaatatttgcattttctttatggtagaaacattgaaatttttcttctctagctactgtgaaatgtacaatcgattattgtaaggtattgtctccctactaactaaacggtataattttacccaataatcaacttcttttcttccttctgtccgctagcctttctagactgtggacaccaccagtctacackctatcttcatgagatccacacttttagctcccacctatgtgggcaaacatatgatatctgtccttctgttcatagcttattatacttaatgacatccagttctattcttgttgtttcaaatgacaggattttattctttttatggctgaataatattccattgtgtatatattccacattttcttcatctattcatctgatgatagacacttaggtttattctgtattatgcctgttttgaatagtgcggcaataaacatgagagtgtatctacctctgtgatatgacatactgatttgctttcttttggatata

SEQ ID NO: 931459 - DNA, 750 bp, Homo sapiens
actcaaggctggctcgggagaacagtggtaaaaagaatccttccagtaagcagaacgtcaagtagtggatgtgactatcattcttcctagaatgagagaagaccaaatatacaaatatacaccaattcatgtgtggtgtctaactgtttggctgaatggttaggtacttggaaagaatgtgaatagaaaattggtaacaaggttgtctggggaagaatatgtggacagacttcttcaaatgggcactgtgcccagatcaacttcagtagacaaggatcttaataatcaggagggcaaaatgaagtattctatggatatcaaccaatgttttttcctagccatctttgtctttacaaaattgaacaaaagagtcatagcagcaaggacagaggtaatacacaggctcagcaatatgaacttccattcaccaaggctgattgggttacaactcctgttgagtgccaaattcaccaatagcaaaaacaaacactgagaccatgatatgacaccatyctctgggaggatgagatagcaacttggtggcaggttgatcacactgagtaactttcatcatggaatgggcaatgctttattcttactaagatagacacttactctgaatacggattttccttccctaaccataacgtttctgaccaaactaccatccatgtgtacacaaaatactttaattcaccatcatgtattccaaatggcattgcttctgatcagagaatgcattttacagca

SEQ ID NO: 931460 - DNA, 773 bp, Homo sapiens
gtttctatgagtttgactgttttaaatagttcatgtatgtggaatcatgcatcactcatccttctgtaactgatttatttcacttatgataatgtcctacaggttcatttttattgtcacataagcaagatatccttattttttaaggatgaataatattccactttgtgttgtacacacacacacacacgcacacacattttcttattcattcatccattgaaaatttaggttgcttgcatgtcttggctattgtgaataatgctgcaatgtagatatccctttgagatcctgctttcaattcttttggatatattcccagaagtaagkttgctggatcataagatagtcatattttaaaatttttgcagaccttctgtgctgttttccgtagtggcttaccattacacgtacaccaataatgtattagagctctaatatctccccatactgtccaatccccctttttaaaataacaaccatcctaacgggtgtgaagtgacgtctcgttgtggtttttatttgcattttaaagcccactgctagcatcatagtcgatgttgaaaaactgaaagcttttcctctgagatccagaaacaaggcaaggatgcctactttctttgcttctattctacataatagtcgaagtcctagccagagcagttatgaaaaaaaaaaacatgaataaagggcattcaaataagaaaggaagaaataaaattgtctctgtttgcagatgacataatctatacacagaaaaccccacaaaaaat

SEQ ID NO: 931461 - DNA, 826 bp, Homo sapiens
ttggtctatggatatattttcacaattatttctttgttaccaatttagagaaaataaaattaaccatttgactatggaaagaacaactgcatatatgtattttaaaaggaaacgaactcaataagaagtctcagcttgatgttctcggacaaatcctttgtaaccaggcctcaccagcaataagaaaaatcaagggcccagatcataattgaaagagaatttgggaagctttgaaatccagctctccctctccctctccstctcccgtttccccacggtctccctctccctctgtttccacggtctccctctcatgcccagccgaagctggactgtactgctgccatctcggctcactgcaacctccctgcctgattctcctgcctcagcctgccgagtgcctgcgattgcaggcacgcgctgccacgcctgactggttttcgtattttttttggtggagacggggtttcgctgtgttggcctggccggtcttcagctcctaaccgcgagtgatccgccagcctcggcctcccaaggtgccgggattgcagacggagtctcgttcactcagtgctcaatggtgccccggctggagtgcagtggcatgatctcggctcgctacaacctccacctcccagccgcctgccttggcctcccaaagtgccgagattgcatcctctgcccagccgccaccccgtctgggaagtgaggagcgtctctgcctggccgcccatcgtctgggatgtgaggagcccctctgcctggctgcccagtctgggaagtgaggagcgtctccgtccggccgccatcccatctaggaagtgag

SEQ ID NO: 931462 - DNA, 826 bp, Homo sapiens
ttggtctatggatatattttcacaattatttctttgttaccaatttagagaaaataaaattaaccatttgactatggaaagaacaactgcatatatgtattttaaaaggaaacgaactcaataagaagtctcagcttgatgttctcggacaaatcctttgtaaccaggcctcaccagcaataagaaaaatcaagggcccagatcataattgaaagagaatttgggaagctttgaaatccagctctccctctccctctccgtctcccgtytccccacggtctccctctccctctgtttccacggtctccctctcatgcccagccgaagctggactgtactgctgccatctcggctcactgcaacctccctgcctgattctcctgcctcagcctgccgagtgcctgcgattgcaggcacgcgctgccacgcctgactggttttcgtattttttttggtggagacggggtttcgctgtgttggcctggccggtcttcagctcctaaccgcgagtgatccgccagcctcggcctcccaaggtgccgggattgcagacggagtctcgttcactcagtgctcaatggtgccccggctggagtgcagtggcatgatctcggctcgctacaacctccacctcccagccgcctgccttggcctcccaaagtgccgagattgcatcctctgcccagccgccaccccgtctgggaagtgaggagcgtctctgcctggccgcccatcgtctgggatgtgaggagcccctctgcctggctgcccagtctgggaagtgaggagcgtctccgtccggccgccatcccatctaggaagtgag

SEQ ID NO: 931463 - DNA, 826 bp, Homo sapiens
ttggtctatggatatattttcacaattatttctttgttaccaatttagagaaaataaaattaaccatttgactatggaaagaacaactgcatatatgtattttaaaaggaaacgaactcaataagaagtctcagcttgatgttctcggacaaatcctttgtaaccaggcctcaccagcaataagaaaaatcaagggcccagatcataattgaaagagaatttgggaagctttgaaatccagctctccctctccctctccgtctcccgtttccccacsgtctccctctccctctgtttccacggtctccctctcatgcccagccgaagctggactgtactgctgccatctcggctcactgcaacctccctgcctgattctcctgcctcagcctgccgagtgcctgcgattgcaggcacgcgctgccacgcctgactggttttcgtattttttttggtggagacggggtttcgctgtgttggcctggccggtcttcagctcctaaccgcgagtgatccgccagcctcggcctcccaaggtgccgggattgcagacggagtctcgttcactcagtgctcaatggtgccccggctggagtgcagtggcatgatctcggctcgctacaacctccacctcccagccgcctgccttggcctcccaaagtgccgagattgcatcctctgcccagccgccaccccgtctgggaagtgaggagcgtctctgcctggccgcccatcgtctgggatgtgaggagcccctctgcctggctgcccagtctgggaagtgaggagcgtctccgtccggccgccatcccatctaggaagtgag

SEQ ID NO: 931464 - DNA, 574 bp, Homo sapiens
gggtgagcctctgagactttctggcttcaggtaccagcacagccatggagggacagagtaccaaatacactcttgggatccctgattccaggacttgattgttagatggcatttctagacctgtcctgggctacaggagaasccactgccctgaagggtgagacctaggccaggcagtattcaccataagctaacttaagaatccctgggccttaagcttaagggaacagtggtgcttgtctggcaatactccttgtggcctggggtggtggtagctatggggcgaggctcctctagctttggaaaggggaggcacaagtgaaaaagactgtgtcttgtggtttgagtgccagctcagccatagtacaatagaacattgggtagacctctaaggtttttgactctagtccctgactcccagatggcacctctagacccacctgaggcttgggggacctcactccccctgaagggaaggacacggcctggctggctttgccactggctgattgtggaaccacagagtcttgagcgaacataggcaatagccagggagtggttacggcaagcttgg

SEQ ID NO: 931465 - DNA, 606 bp, Homo sapiens
gagtgcaatcactatcaaaattcttgctggctttgtttggcagaaattgataagctgatcctaaaatcatatggaaattcaaggatccagagtagccaaaacagtcttgaaaaagaagaggaaagttagaaggctcacactttccaacttcaaaacatactactttagagttacagtaataaaaatagagtggctgtgtcagaaggataaatatatagatcaatggaatagaattaagagtctagaaataaactcatacatctgtggcttactgattttctacaagagtgccaaaactatttcatgagagaatagtgtctcatggtacttggacaactgtatacccacatgcraaagaatgaagttggccccttacatcatatacaaaaaaattaaagtggattaaagacctaaatataagagctataactgtaaaactcataaaagaaaacatagggccaggcgcacgcctgtaatcccagcactttggaatgccgaggcaggtggatcacctgaagtcgagttcaagaccagcctaacatggtgaaaccccgtatctactaaataacaaaaaattagccgggtgtagtggcgtgtgcctgtaat

SEQ ID NO: 931466 - DNA, 819 bp, Homo sapiens
  misc_feature 687: n = A,T,C or G
acccccatgacaaaaaacagattaacgagagaaaagcataacacatttatttaatctaagttttacgtgatgcgagaggcttcagaaatgaagatccagagacaaagggaaaactgtgtatttttaagcttaggtccaataaagaacagacagccatgtagaaatgtgattggaaagagggtgtgctctaatggtgatagactgaaggcagaacacagcaaggcctcttgttcagcttctctacggcctctctgtgtagcgttctttccttcctgagtaaggkgcaggacccctgtcgtatgagggtcttccagggagatgggaagaggttagagagtgacatttctaggtttcgtggcttgcactggggagaggagttctagtttctatgacctctttcaggggcaatactgggtaaggagaaaggagggaaagaaaaaggaaggcaggagaggatcagcaagacttgcttttgaggcccttcccatcccttccagtccaaataactcagagtgctagagtgccatattttgggatattgtgttctgagccccaaatttgcttgggttttttttttttgtccctcccttacttactttcttacttactcccttccttcctccctccctcaggcctggcaggctgaagaggctgcccctgccatagctgctccacagcaaggcctanagagtagccactgcaccaagagccttgggccaagctctgagcaccctggctaataccaaagctggagcctagagcagggttcccagaaggttatctggggctggctttgaccacattggctacagcatggcc

SEQ ID NO: 931467 - DNA, 600 bp, Homo sapiens
accacacctggctcattttttttattttttgtagagacgaagtcttgctatcttgcccagcctggtctcaaactcctgacctcaatccattttcctgtcttggcctcccaaggtgctgggattacaggtgggagacactatgtcccgcatattagtctgttcttgcactgctatgaagaaatacttgagactgggcaaattataaagaggtttaattggttcatgattctgtaggctgtacaggaagcataacggaagtttccaatcatggcagaaggcaaagggggagtgaggcagtttacatggccagagcaacaaggaaaagagaacgagagtgggaggtgccacacacrtttaaacaaccggatctcatgatcactcactcactatcatgaggacagcaccaacgggatggtgctaaactctttatgaagggtcaccccaatgatacaatcacctcctaccaggccccgcctccaatacggggattacgattcgacatgagattctgtggggacacagatccaaaccataacacccagctttgactttctatttctgtattgcgggcacttggtaaatatttgctggctggatgca

SEQ ID NO: 931468 - DNA, 703 bp, Homo sapiens
gctccacttctaattctagttctcttgctatttccaccacaactgcagtgaatttccccactgaaatctcaaacctctcaaagtcatccatgagcgctgcaatcaacttcttccaaattcccataactattgatatattttgaccacctcccatagatcataaatgttcttaatggcatctagaatgatgaatcctttatagaagattttccatttacttttaccagatccatcagaagaatcaactacctatggaagctaaagccttacaaaatatttcttaaatattaaataatattaaagctgtacaaagtatttcttaaataataagacttcgaagtcaaaacttcttattgatccatgggtaacagatggatattttattagcaggcataaaaacaacattaatctctgtatacatttctatcagagcaatcttrggtgcctataatctctgtatacatttctatcagagcaatcttgggtgcctagatgcattatcaatgagcagtaatactttgagaagaatcttttttctaagcagtaggtctcaatggtgggcttaacatattaagtaaaccatgctacaacagacttgatgttatccagtctttgttgttccatttatagagcacaggtgtggtagatttagcataattcttaaggaccctgattttcagaatggtaaatgagcatgggcttc

SEQ ID NO: 931469 - DNA, 651 bp, Homo sapiens
atagggaacagttggcatatgaaagatatgcctgcaggtgagtcatttactatctttaggaattggctagccctgggagagtcagtccctgcagggtcagtttattagtctgttttcacactgctataaagaacttccctgagactgggtaattataaaggaaggggtttaattgacttacwgttctgcatggcttgagaggcctcaggaaacttacaataatggtggaaggggaagcaggcaccttcttcacaaggcagcaggagagagaagaatgaaggaggaacttctaaacacttataaaaccatcagatcagccaggtgtggtggctcacacctgtaatgccagcactttgggaggccaaggcggttggatcacctgaggtcaggagtctgagaccagcctagtcaacatggtgaaaccccatctctactaaaaatacaaaaaattagccaggcgtggtggtggacgcctgtaatcccagctactcaggaggctgaggcaggagaattgcttgaacctgggaggcgggggttgcagtcagcagagattacaccattgcactccagcctgagcaacaaaagtgaaattctgtctcaaaaaaacaaaaaaacaaaaaacaaaaaacaacccatcagatctcatgagaa

SEQ ID NO: 931470 - DNA, 651 bp, Homo sapiens
atagggaacagttggcatatgaaagatatgcctgcaggtgagtcatttactatctttaggaattggctagccctgggagagtcagtccctgcagggtcagtttattagtctgttttcacactgctataaagaacttccctgagactgggtaattataaaggaaggggtttaattgacttactgttctgcatggcttgagaggcctcaggaaacttacaataatggtggaaggggaagcaggcaccttcttcacaaggcagcaggagagagaagaatgaaggaggaacttctaaacacttataaaaccatcagatcagccaggtgtggtggctcacacctgtaatgccagcactttgggaggccaaggcggttggatyacctgaggtcaggagtctgagaccagcctagtcaacatggtgaaaccccatctctactaaaaatacaaaaaattagccaggcgtggtggtggacgcctgtaatcccagctactcaggaggctgaggcaggagaattgcttgaacctgggaggcgggggttgcagtcagcagagattacaccattgcactccagcctgagcaacaaaagtgaaattctgtctcaaaaaaacaaaaaaacaaaaaacaaaaaacaacccatcagatctcatgagaa

SEQ ID NO: 931471 - DNA, 644 bp, Homo sapiens
gtgaaaccccatctctactaaaaatacaaaaaattagccaggcgtggtggtggacgcctgtaatcccagctactcaggaggctgaggcaggagaattgcttgaacctgggaggcgggggttgcagtcagcagagattacaccattgcactccagcctgagcaacaaaagtgaaattctgtctcaaaaaaacaaaaaaacaaaaaacaaaaaacaacccatcagatctcatgagaactcactcattattatgagaacagcataaaggaaaccgcccccatgatccaatcacctccctccctcgacatgtgggaattacacgtgagatgagatttgggtggggacacagagccaaaccacatcattctgtccctggcccctcccaaatctcaagtcttttcacatttcaaacttatcatgccttcccaacagtccccyaaagtcttaactcattttagcattaacccaaagtccacagtccaaagtctcatttgagacaaggcagtttccttttgcctatgagcctgtaaaatcaaaagaaagttagttacttccaagacgcaatggagtacaggcattggataaatgctttcattccaaatgggagaaattggccaaaacaaagggaatgcaggccctatgcaag

SEQ ID NO: 931472 - DNA, 575 bp, Homo sapiens
tctgatccttaatgtcaccgctaaaggactagttcttcttggcaggacgttgcggctctaacactgcaagttggaaaactgaatttattttgccatagaaaatacgtgtttaaatatagttaaattcctttattatcagttcaagtaaattttgagttaaatgggcttttgtgggctggtttatttacagagtcaatgtttttagtatggcctgtatgtgaaaacatgttctaagtgagaaacttctaacttggaaataaaccttctggaacataaaccagtttttaatttgggacatatctgcatttcttttgtaatagcttcagaacctagcagaaaactacactcagagcaggagtttagtaaatatctattgggaaaaaatttaatgtatgcaggtgattatttctgaattcaccggttaagaacagtaatagttygtgtgccggatgtgaagtgttcacattcttcaaatgataatcatgggaaatcaaagcacaaaacagtcactgaacactataataaatattctcacagcaggagagatggtggctacctcatgttattgtctcctt

SEQ ID NO: 931473 - DNA, 595 bp, Homo sapiens
gcaaacttcagatgctgcctggttccaccacgtggacttgtctcgccagccatccagatgggcagagtgacaggaggaaggcttcctgccaactcctagctgytcccatcctgagttcctatttgacatgttaaacaattactcagataaagacatagaaggcatggagagtatcaattctccccccgacctctctcatctgaaccttcttcttgtgtttggagaattgcttacataataagccctgatgggaagcagagcttacctccaaaaatagattctgaaagtgtcagacactggttgggcgcggtggctcacgcctgtaatcccaacactttgggaggccaaggggggcagatcacaacgtgaggagattgtgacgttgatgaaaccccgtctctactaaaaatacaaaaattagctgggcatggtggtgcgtgcctgtaatcccagatgctcgggaggctgaggcaggagaatcgcttgaaccagggagtcggaggttgcaatgagctgagatcgtgccactgcactccagcctggcaacagagtgacattccatctcaaaaaaaaaaaagtgccagatatttgggtc

SEQ ID NO: 931474 - DNA, 644 bp, Homo sapiens
tgattttttcctactctgtacagtccagactttcacatatgtactgaataaaaagtaaaacttccatatggcaccagaggacttgactggaaatattaataatcatttaataaaaaactaatttggaggcctctggaaaaactgcaagacagaaaatgagaaattatctcacaattctttttgccttctcacaytgccaaatgaaaattaacaaggaattttcagactcatgttatcatggttatttaataatgaaagaagatggatctgaaaacctataggattcttccaagaaacctctttactggtctatgggccatctcattagtttatttgtttgtttttaatttctcaccactgtaaagaaaaatatgtcttaatattttccaccaaaaaataggttagtaataagacagtttctgtaattcttatacctgtgtttgtaatatgtcattaaatatttatacactcatatcttctgctagttagtgagttattttagaatatatacttctaccttttatctttcgtgactggcataatgtttcaatctgttgctacataacaaaatacccccaaatttagcagcttaaaacaacaatactttcttgtttctcgtgattctgcgagttgataagcagtcc

SEQ ID NO: 931475 - DNA, 627 bp, Homo sapiens
acttctggcttttctctccacccctcatccctgcaagagaagaggggtgcattaccagaatgatggtttggaaggaatttagcatgctcagcttatgccattctgttttcctctttagcatctcccagctaaagatgacacattatgatcttctttttttttttttatcattcctgataaaggactcttcggctttattaagtactggattctggcgacataacttggctccagataaatccattagagttacgattggtgtgttttctatgtgtgcggtgatagccctaaattctttggastccttaatgcaagaggcatataagaaatgtgatattgaacaaaagcaacttaggtggtcctgagggaacaaaccctttccaatgtgtaacatcccaggctgcaacaactgaatgcttacttaaaggatggaacatataagaggaagtggttctttttcttaagtacagaaatgccttcaaattgattaatgtactgttttgtctcattttggagccttcctggaagcattttaaactctccaccagttgtatcaaaaagatgtacaaaaccagatactcagttctgtgggaacattctagtgaagatgcaagtagaggatacttc

SEQ ID NO: 931476 - DNA, 758 bp, Homo sapiens
aacgaacgtggtgatggcgtcagttcatgcctcaaagactgcagagctgggggaaagaagtgaatgtgctggaatattctggcagctcagtggaggaagggccgaggtgggtgccttccgtgagacagtgagaagcgtgttgagcctccaggctgcgaggctgcacctagagtgggagtgaggagaagagaggccatggttgaaagagttggcttctgaaggccttcccagccgagctgaggtgaccaggtggctgcaggaggacacagcagaggagggacaggacaaggctgtccgtgggagtccctgtgccagtgtccagcccaccttcctcgctgatgccatgagctgtggacatggcggaggtgactgtcctctgcccgtaccaaggactgacccctgggcaagtcttgaggtggactcaccggcctccaaagtcgtgcccaccccctgcatcacctcagccagcccagaaagcccccagagggaggggagtgttttcctgagtagctcagacccgggacaggtgcccatgttgggtttccagggctgagcagtcccaggccaccasatagtcccaagtctgatcccaacacccatactgggcctgagcttcctccacttcctcctcctcttcctcctcctcttcctccatgaggaggctcagagccaccctggctgcctgataggctgacgggagcaggggagggaggctttgagtttggtctgtcttttcttccaggggctcaaagcacttt

SEQ ID NO: 931477 - DNA, 588 bp, Homo sapiens
ggctggagtgcaatggcatgatctcagctcactgcaacctccgcctcctgggttcaagcaattctcctgcctcagcctcctgagtagctgggattacagcctcctgctaccacatctggctaattttttgtatttttagtagagacagggtttcaccatgttgaccagactggtcttgaactcgtgatctcaggtgatccacccgcctcagcctccaaaagtgctagsgttacaggcgtgagccactgcgcccagcccttaagtgttatttaattatgagaaggaagaatttagagtagaacacaggcatagttcctataatttggctgtttgagacagccttacagactagaaagtttgcagttccctccagaccaacatcctctaagaacaaactttgctgtgggtgaccaataacacctgatgagattattttcccatcttggctatttgtcctgagagccttgtttggattcagagagcacattccttctgacacattccacctgctagggactcaagactgttgggtctaaattctgaggggctgaccattaggtcaggggcccaagacactaagttgtctaa

SEQ ID NO: 931478 - DNA, 752 bp, Homo sapiens
atagcagcaatcagaaactaatacagtgtgagtatacaatggagggaaagaatgttgatggtggtagtagttagcatttattgcgtattgtatgccagatactgttctagtgctttatgtggtgtattaatctactarggctgccacaacaaaacaccatagaccagaggcttaaacaacagaaatgtatccgtgcagagtgctggaggctggaagtccaagatcaaggtgctgtcagggttggttgatcctggggccccactccttggcttgcagatggcagctttcttgctgcctcttcccatagttgtccctccgtttgtgggcaccctaatgtctcttcctctccttttataaggacacagttaggatgtattagggcccaccctaatacagtttaacatattcaccttgcttaggtcctgtctctaaatactatcacattctgaagtactgggggttaagatttcaatacatgaatttggagcaggagcgtccacaattcagcccacaacatgtggattacatcattcagtgtccacaataacccactaaaatagaatagataagaaaagtgaagcacagagtgtttgagttagttgctgaaatttatacagcaagtaagtggtcacgccaagtctgggaattgcctgttcatatcctttgcccacttttctatgaggtagttttctgttctttttggtttgcaggtgcatgagtcagcatttattgaaggaaggaatgagtgggaa

SEQ ID NO: 931479 - DNA, 835 bp, Homo sapiens
tcttggctcactgcaacctccacctcccggattcacaagcgattctcctgcctcagcctcccaagtagctgggattacaggcccctgccaccatgcctggctaatttttgtatttttagtacagacagagtttcactgtgttggccaggctggtctcaaactcctgacctcgtgatccgcccgcctcggcctcccaaagtgctggaattacaagcatgagccacgtgcctggcctatatacatttttttaaggcaaatgaatctatgatggtagaagtcagggcatggttggccttgtagggtcaggggaaggcagagacgagaggggtccaagggcctctggtgctggctgagtgctgtttctaggctgagtaatgtgtgcacaggcctgctggctctgtgcaaactcattgagctgtgcacatgatttgtgtaccttatgtatgttttagacttcaataaattcactccaaaataccaccccctacacacaaacacacagacacasacacacagacacacacacacacagacacacacacacacacacacacacacacacacacacacacacacacggggagagatctgaagtaagtaggattcctccattgatcatttcttgagaagcggggagaagacatgctctgggctatgctttaagcaagagttttccaaacaaatttgctactttccagagtgagatgtttttttcccatgacccatggggcatatgtcatgggctgcagcctgaagttgaaaagtctggttttaagctgatctctctggtggcagggtaaagaatggaaggcaacaggaagagcccagagaggag

SEQ ID NO: 931480 - DNA, 835 bp, Homo sapiens
tcttggctcactgcaacctccacctcccggattcacaagcgattctcctgcctcagcctcccaagtagctgggattacaggcccctgccaccatgcctggctaatttttgtatttttagtacagacagagtttcactgtgttggccaggctggtctcaaactcctgacctcgtgatccgcccgcctcggcctcccaaagtgctggaattacaagcatgagccacgtgcctggcctatatacatttttttaaggcaaatgaatctatgatggtagaagtcagggcatggttggccttgtagggtcaggggaaggcagagacgagaggggtccaagggcctctggtgctggctgagtgctgtttctaggctgagtaatgtgtgcacaggcctgctggctctgtgcaaactcattgagctgtgcacatgatttgtgtaccttatgtatgttttagacttcaataaattcactccaaaataccaccccctacacacaaacacacagacacagacacacagacacacacacacacasacacacacacacacacacacacacacacacacacacacacacacacggggagagatctgaagtaagtaggattcctccattgatcatttcttgagaagcggggagaagacatgctctgggctatgctttaagcaagagttttccaaacaaatttgctactttccagagtgagatgtttttttcccatgacccatggggcatatgtcatgggctgcagcctgaagttgaaaagtctggttttaagctgatctctctggtggcagggtaaagaatggaaggcaacaggaagagcccagagaggag

SEQ ID NO: 931481 - DNA, 556 bp, Homo sapiens
gtgagaccccatctctgaaaaaaaaattgttttaattacccaagcatggtggcacatatctgtggtcccagctactcaggaggctgaggtaagaggatcacttgagcataggtgttcaagaccagcctgcgcaacatagcgagaccytatctctacaaaaataaaaattaaaaaattagctgggtttggtggctcacacctgtagtctcagcagcccaggaggctgcagcagggggattgcctgagcctaggagttggaagctgcagtgactatgatcttgtcactgcactccagcctgggcaacagagcagagatcctgtcaaaaaaaaaaaaaaaaaagtcaccccttactgcagaatcagtctcaagtttgggggtcccaaagctacctgcacttctgaccaactggccacaaattcggggtttgcatgactccttcagtttcaataattcactagaatgactcaaagtgctgtacttaggattacagttttattataaaggatacgagtcaggaccagcatataaatagatgcccaggatgaggtctggagg

SEQ ID NO: 931482 - DNA, 539 bp, Homo sapiens
tccagacattgctgaaaggggccaacacagagcttggtctgtggcttcagagggtgaaagcctcaagccttagcagcttccacatggttttgagcgtgcgggttcacagacgtcaagaattgaggtttgagaacctctgcctagatttcagaagatgtatggaaatgcctggacgcccaggcagaagtttgctgcaggggtggggctctcatggagaacctctactagggcagtgcagaaggaaaatgtggggttggagcccccacacagagtccctactggggcactgcctagtggagctgtgagaagagggccaccatcctccagamcccagaatggtagatccactgacagattgcactgtgcacctggaaaagctgcagacactcaatgccagcctgtgaaagcagccaggagggaggctgtaccctgaaaagctacaggggcagagctgcccaagaccatgggagcccacctcttgcatcagcatgacctcaatgtgagacctggagtcaaaggagatcattttggagctttaa

SEQ ID NO: 931483 - DNA, 722 bp, Homo sapiens
actctctaggagaatcctgacaaacaagttagggtcgagtgtatcagtcaggtgagacacgggaggcaactcaacaaaacacaagaaataacagcagtttattacttacagatgccagagagaagagggcagcatgcctcccagggccaacaggaagtggggagccatctaggacatgcacagtcaactagtgggtggggaacagggcaaagagtacaagtgacctgtgggctgaggcttttactggggtccagggcattttccaagcaggtttccctcagggagttgtaattggtgggtttagagcaagtaggcataaatttcatggagtcatgctgtgtctgagaaatcagtattagggttctctagggggacagaactaataggatagatatatatatgaaggggaatttagtaggagaattgactcacatgatcacaaagtgatgtcccactattggccatctgcaagctgcggagcaaggaagccagtcmgagtcccaaaacctcaaaaataggaaagccaacaatgcagccttcagtctgtggctgaaggtacaagagcccctagcatatcactggtgtaagtccaagagtccaaaagctgaagaacttggagtctgatgttcgagggcaggaagcatccagcacgagagaaagatgaaggccagaagactcagcaagtcaagtccttccacgttctgcctgctttattctagctg

SEQ ID NO: 931484 - DNA, 631 bp, Homo sapiens
ctatataggcagtaggccttgatgagctgaggtgggctctgcctagtttcagcttcccggctgctttgtttacctactcaagcctcagcaatggtggacaccccttaccccaccagtctgcagactggcaggtcgatctcagactgctgygctagcagtgagcaaggctctgtgggcatggtacccgccaatccaggcatgggagagaatctcctggtctgccagttgataagaccatgggaaaagcacagtatttggccagaagtgtcctgtttttccaggtacagtttatcacagcttcttttggctaggaaagggaaatcccctgaccccttgcacttccgaggtgaggcaatgccccatcctgcttcggcttgccctctgtgggctgcacccactgtccagccagtccaaatgagatgaaccaggcacctcaggtggaaatgtagaaatcacccgtcttctgcgtcaatcataccgggagctgcagacaggagctgttcctatttggccatcttccaatcattacatcttaaagctccaaaataatctcctttgactctgtgtctcacatccaggccacactgatgcaaggggtgggttccgaaaggccttgggtgtctccacccct

SEQ ID NO: 931485 - DNA, 631 bp, Homo sapiens
ctatataggcagtaggccttgatgagctgaggtgggctctgcctagtttcagcttcccggctgctttgtttacctactcaagcctcagcaatggtggacaccccttaccccaccagtctgcagactggcaggtcgatctcagactgctgcgctagcagtgagcaaggctctgtgggcatggtacccgccaatccaggcatgggagagaatctcctggtctgccagttgataagaccatgggaaaagcacagtatttggccagaagtgtcctgtttttccaggtacagtttatcacagcttcttttggctaggaaagggaaatcccctgaccccttgcacttccgaggtgaggcaatgccccatcctgcttcggcttgccctctgtgggctgcacccactgtccagccagtccaaatgagatgarccaggcacctcaggtggaaatgtagaaatcacccgtcttctgcgtcaatcataccgggagctgcagacaggagctgttcctatttggccatcttccaatcattacatcttaaagctccaaaataatctcctttgactctgtgtctcacatccaggccacactgatgcaaggggtgggttccgaaaggccttgggtgtctccacccct

SEQ ID NO: 931486 - DNA, 626 bp, Homo sapiens
gatttttgtatttttttgtagagatgggatcttgttatattgccgaggctggtcttgaactctggggctaaagcaatcctttcaccacagcctctcaagtagctgaaactacagatgcataccaccatgcccagctaattttctcttatttctttttgttgtttaattgagggggggggtctcactgtgtttcccaggctggtcccgaacttctggcctcaagcatttctcctgctttgacctcctaaactgttgggattatggttgtgagccccggcctctgtgtccagcaatcacaagaggtctttataagtgaaagagggaggtaagagagtcagaattgaaggagatttgatgrtggaagcacaggtcacagagggagatttgaatatgctttgcttctggctttgaagatgcatttaggggccatgaggcaaagaataggggtggcttttggaactgggaaaggcaagggaacaccttctctctggaacctccagaagggatgcagtcctgctgacaccttgactttagccttaatagacctattttggacttctggcccccagacctgttaggtagtagatttgtggtgtattaagccactcaacgtaaggtagtttgta

SEQ ID NO: 931487 - DNA, 610 bp, Homo sapiens
ttgaacttgagggtgatgatttagggtatatctggtgaaatgaacttctaggcagcaaagctcaagaggtatcttgtctgtattgaacagcctgtggtgttctgtgtgaccaaataaatgacctcaagttgaaacttatatttaaatgagaagcagagctttgaagtttgatttgcagcctgcccaagaggtcaaaaagaaaagctgattttyagtgggaaaattcaagaaggcttcagaaatgtgcataaaatggagcccagtgctaatagctaagacaatgttaaaaaggccttgaaggcatttcagagacctttgcagcagagcttgctgtcaaaggccctgagttctaggaccaaagaatggtttcctgggtcagtcccatgatcgcgctgctgtgtccatcctcaggacagtgccgcctgcatccctgcagctccagctccagctccagccatggctgaaagatgcacaggtacagcttgggtcactgcttcagagggtgcaagctgcaagccttggtggcttccacatagtgttaagccagcaggtgcacaggcttgggagcctttgtctagactcaagagtatgtaaggaaaaacctcagtgt

SEQ ID NO: 931488 - DNA, 610 bp, Homo sapiens
ttgaacttgagggtgatgatttagggtatatctggtgaaatgaacttctaggcagcaaagctcaagaggtatcttgtctgtattgaacagcctgtggtgttctgtgtgaccaaataaatgacctcaagttgaaacttatatttaaatgagaagcagagctttgaagtttgatttgcagcctgcccaagaggtcaaaaagaaaagctgatttttagtgggaaaattcaagaaggcttcagaaatgtgcataaaatggagcccagtgctaatagctaagacaatgttaaaaaggccttgaaggcatttcagagacctttgcagcagagcttgctgtcaaaggccctgagttctaggaccaaagaatggtttcctgggtcagtcccatgrtcgcgctgctgtgtccatcctcaggacagtgccgcctgcatccctgcagctccagctccagctccagccatggctgaaagatgcacaggtacagcttgggtcactgcttcagagggtgcaagctgcaagccttggtggcttccacatagtgttaagccagcaggtgcacaggcttgggagcctttgtctagactcaagagtatgtaaggaaaaacctcagtgt

SEQ ID NO: 931489 - DNA, 619 bp, Homo sapiens
ccaggtgcccagctccacactcaccccaaaagccctctgggccaatctcaaaggagatagtgaggtggcctggcactgcctggacatgccatgtagcctattcctgagtgtcagagtgggaggaaggcagggacatttggcagatgagacatcttgtgctgttgggcatcccagggcccttcccacagagtcccgatctacagacacagcacagaggctacaggaagactaatgcagracccttgaggctgagccagggaccacatgaggactgtgcccagacagccagaaggccctttgctagtttcttgatacctcatggatgcggcagcggttgttctgttggggaccagtgatcacgtgctggggagggctcgcctgtgcttcctcagtggctccacctctgcttctaagaaaaatcactcattccatggctggagcagagaaaatacaacattagcttagaacatcttgttcctgaaactaaaaaagtgctgacagagtaacgaagacaaataaaaaagacaagaagtcagcttgaaatgtctaccactggcctaatcttggggaattggagcaccagaatcatgagctttcccttctcagttatttattggtt

SEQ ID NO: 931490 - DNA, 635 bp, Homo sapiens
caagttcaggttctgtgactcactggctctgtaattctgggtaagtctcttgctctccttgagtctcatatcctccttggtaaaatggagaggtagagctattgttagattttgaaggcaaggcaagggttaaagaaagacasagaaagacagttgacggcttcaacagcaacacctttattactagcaaaaccctgcagaggaggaaaccagcttactgccagcaccaactgcctctcacaggctggggtgatcatgggactgggaaggaggggtgtgggcggtagagcttgctgcccggcaggatatggcaaggatgttcctgcagtcaggctgttgggcctttgcccgggagggtgcgataaggatgtttctacagtcaggtgatcaggaaggatgcttctcacggcccgagttcccaaggaatgtttcattctgaccagggtgtgcaaaacggctgcaggtttacaaaatggtacaggttagactaacagcaacatctcccaggtagacagttctataaagtaaacttcccttgagcacctacactgtaccagacatggtgctaggacccaggccacaggaggaacaggacagatgaggcccctgccatcctggtgctcatgcctgatgaa

SEQ ID NO: 931491 - DNA, 635 bp, Homo sapiens
caagttcaggttctgtgactcactggctctgtaattctgggtaagtctcttgctctccttgagtctcatatcctccttggtaaaatggagaggtagagctattgttagattttgaaggcaaggcaagggttaaagaaagacacagaaagacagttgacggcttcaacagcaacacctttattactagcaaaaccctgcagaggaggaaaccagcttactgccagcaccaactgcctctcacaggctggggtgatcatgggactgggaaggaggggtstgggcggtagagcttgctgcccggcaggatatggcaaggatgttcctgcagtcaggctgttgggcctttgcccgggagggtgcgataaggatgtttctacagtcaggtgatcaggaaggatgcttctcacggcccgagttcccaaggaatgtttcattctgaccagggtgtgcaaaacggctgcaggtttacaaaatggtacaggttagactaacagcaacatctcccaggtagacagttctataaagtaaacttcccttgagcacctacactgtaccagacatggtgctaggacccaggccacaggaggaacaggacagatgaggcccctgccatcctggtgctcatgcctgatgaa

SEQ ID NO: 931492 - DNA, 635 bp, Homo sapiens
caagttcaggttctgtgactcactggctctgtaattctgggtaagtctcttgctctccttgagtctcatatcctccttggtaaaatggagaggtagagctattgttagattttgaaggcaaggcaagggttaaagaaagacacagaaagacagttgacggcttcaacagcaacacctttattactagcaaaaccctgcagaggaggaaaccagcttactgccagcaccaactgcctctcacaggctggggtgatcatgggactgggaaggaggggtgtgggcggtagagcttgctgcccggcaggatatggcaaggatgttcctgcagtcaggctgttgggcctttgcccgggagggtgcgataaggatgtttctacagtcaggtgatcaggaaggatgcttctcacggcccgagttcccaaggaatgtttcattctgaccagggtgtgcaaaayggctgcaggtttacaaaatggtacaggttagactaacagcaacatctcccaggtagacagttctataaagtaaacttcccttgagcacctacactgtaccagacatggtgctaggacccaggccacaggaggaacaggacagatgaggcccctgccatcctggtgctcatgcctgatgaa

SEQ ID NO: 931493 - DNA, 616 bp, Homo sapiens
catattcaatgcatgaccttactgtagagctcagtgtatttaatcataagctgttcatttggcggggaattctgtacaccaggtagcacttctgtggtaagtggttggtacaattttcatgtttctagtctattactgtagcttgraagctctttgagagcagtattaaacatcttgtaccacaggcctaaacagtgccttgcaccaaggtatatatttgtcatttttatttgaggtggattgttttcttttcttttctttccctcccttctttctttcttttttttttttttttttttttttttgagacacagtctcactctgttgcccaggctggagtgcactggtgtgatctcagctcactggaaccttcacctcccaggttcaagtgattctcctgcctcagcctcctgagtagctgggattacaggcatgtgccaacacacttggctaatttttgtatttttagtagagacagggtttcgccatgttggccaggctggtctcaaactcctgacctcaggtgatccacccacctcggctccccaaagtgttgggattacaggcgtgagccaccgtgcccagcctgaattttcttttaaggccctaaaactgc

SEQ ID NO: 931494 - DNA, 616 bp, Homo sapiens
catattcaatgcatgaccttactgtagagctcagtgtatttaatcataagctgttcatttggcggggaattctgtacaccaggtagcacttctgtggtaagtggttggtacaattttcatgtttctagtctattactgtagcttggaagctctttgagagcagtattaaacatcttgtaccacaggcctaaacagtgccttgcaccaaggtatatatttgtcatttttatttgaggtggattgttttcttttcttttctttccctcccttctttctttyttttttttttttttttttttttttttgagacacagtctcactctgttgcccaggctggagtgcactggtgtgatctcagctcactggaaccttcacctcccaggttcaagtgattctcctgcctcagcctcctgagtagctgggattacaggcatgtgccaacacacttggctaatttttgtatttttagtagagacagggtttcgccatgttggccaggctggtctcaaactcctgacctcaggtgatccacccacctcggctccccaaagtgttgggattacaggcgtgagccaccgtgcccagcctgaattttcttttaaggccctaaaactgc

SEQ ID NO: 931495 - DNA, 773 bp, Homo sapiens
tatgtacacatgggtgggttttgccttcccttttccatcagcatgcatttgtgtgtgtatccggccatgtcactactgtagaatgagtgcatcccacctcctactgtaccaatgtagcagtcagagccttggtaggcacagagcctgatattgtttggctctgtgttcccacccaaatattatcttgaattgtaatatcatgtgtggaggtgggatctggtgggaggtgactggatcatggggatggtttcccccattctgttctcctgatagtgagggagttctcaggagatctgctagtttagaagtggcagtttccyctgcactctgtctctcctgctgccatgtgagatatgccttgcttccccttcaccttcctccattattgtaagtttcttgaggcctccccagacatgtggaaaagtgagtcaattaaacatcctttctttataaattaccaagtctcaagcagtcgtttatagcagtgtgataaggcactaatacagagccagacagccccaacctgcagtgggagtgaaactaggcacagagaacagcagaccatcctctgttctgaacaaccacccctgcctgtggtgcacagagagcacacacagacctgcacacacccatgccttgaccccatgctaccaccagcaccaatgcaattgtgcactggggcctcccagctccctgagctgtgctgcacctgccacgttgtgaacacctgcatttgaggcaggcaccccagcatccactatcatgcagcacta

SEQ ID NO: 931496 - DNA, 773 bp, Homo sapiens
tatgtacacatgggtgggttttgccttcccttttccatcagcatgcatttgtgtgtgtatccggccatgtcactactgtagaatgagtgcatcccacctcctactgtaccaatgtagcagtcagagccttggtaggcacagagcctgatattgtttggctctgtgttcccacccaaatattatcttgaattgtaatatcatgtgtggaggtgggatctggtgggaggtgactggatcatggggatggtttcccccattctgttctcctgatagtgagggagttctcaggagatctgctagtttagaagtggcagtttcctctgcactctgtctctcctgctgccatgtgagatatgccttgcttccccttcaccttcctccattattgtaagtttcttgaggcctccccagacatgtggaaaagtgagtcaattaaacatcctttctttwtaaattaccaagtctcaagcagtcgtttatagcagtgtgataaggcactaatacagagccagacagccccaacctgcagtgggagtgaaactaggcacagagaacagcagaccatcctctgttctgaacaaccacccctgcctgtggtgcacagagagcacacacagacctgcacacacccatgccttgaccccatgctaccaccagcaccaatgcaattgtgcactggggcctcccagctccctgagctgtgctgcacctgccacgttgtgaacacctgcatttgaggcaggcaccccagcatccactatcatgcagcacta

SEQ ID NO: 931497 - DNA, 773 bp, Homo sapiens
tatgtacacatgggtgggttttgccttcccttttccatcagcatgcatttgtgtgtgtatccggccatgtcactactgtagaatgagtgcatcccacctcctactgtaccaatgtagcagtcagagccttggtaggcacagagcctgatattgtttggctctgtgttcccacccaaatattatcttgaattgtaatatcatgtgtggaggtgggatctggtgggaggtgactggatcatggggatggtttcccccattctgttctcctgatagtgagggagttctcaggagatctgctagtttagaagtggcagtttcctctgcactctgtctctcctgctgccatgtgagatatgccttgcttccccttcaccttcctccattattgtaagtttcttgaggcctccccagacatgtggaaaagtgagtcaattaaacatcctttctttataaattaccaagtctcaagcagtcgtttatagcagtgtgataaggcactaatacagagccagacagccccaacctgcagtgggagtgaaactaggcacagagaacagcagaccatcctctgttctraacaaccacccctgcctgtggtgcacagagagcacacacagacctgcacacacccatgccttgaccccatgctaccaccagcaccaatgcaattgtgcactggggcctcccagctccctgagctgtgctgcacctgccacgttgtgaacacctgcatttgaggcaggcaccccagcatccactatcatgcagcacta

SEQ ID NO: 931498 - DNA, 772 bp, Homo sapiens
taagattatgattcattacaagtaatcaggattaatgaagtgacatgaacacagaagaaaagtgtaagtgattatcagaaggacaaagtatccttacataacaaagtccttaagtaaggagaacatcattagaatgcaaagtagtccactgtgaaatgtttcaaagtacagaagttctccctactcctcctccaactgcttaactacaaaatgctggagtacctttgcctgagatatggatgatactgcaatgcctcaccaggaaacaaactcaggtcagtgaaccagatgtgctgtgttaattcctggagaaactatctcgtattagactacagaaatgtaagaagttaactcttttgtgttatctcattagtctcttccactcacatccattaaaaaaagttaaatttggtttctttttttttttttttttgagacggagtctcgctctgtcgcccaggctggagtgcagtggcgcgatctccgctcactgcaagctccgcctcctgggttcacaccattctcctgcctcagcctcccgagtagctgggactacaggtgcccgccacgacgcccggytaattttttgtatttttagtagagacggggtttcaccgtgttagccaggatggtctcgatctcctgacatcgtgatccacctgcctcggactcccaaagtgctgggattacaggcgtaagccaccgtgcccggccaaacttggtttcttaattttgctctctacaagccaattcccaaattacagaaacttag

SEQ ID NO: 931499 - DNA, 665 bp, Homo sapiens
ttggaaggcagtttcccgtgttgtccaggctggtctcaaactcctgagctcaagtgatcctcccgcctcagcttcccaaagtgctaggattacaagcatgagccaccgtgcctagctccagagtgatcgttctaaactacaaatcagatcaggccacctccctacttaagttcctccaagagttcctccaacrgtttgtggcctttatcaaagcgttaagggctgaggcctttcacgacctggttcctggaggaaacgccatgccgcccccagcctggaccacttgcagctcccagacagggagcccctgcttcctctcatcctcaggtagctagtaggagccactctgtctgccagggtctctctttcttcccccttctttgccaggccaatccagcctgcaggtttaagctggacgtgcttcctccagagagccctccctgcctcctccactggaatggggttcctcctctggacttcccctgcactctctttcagtctcttttcttttctttttcttttttttttttagacggagtctcactctgtcgcccaggctggagtgcagtggcgcgatctcggctcactgcaagctctgcctcccgggttcatgccattctcctgcctcagcctcccgagtagctgggactacagggacccgccac

SEQ ID NO: 931500 - DNA, 600 bp, Homo sapiens
cactctctttcagtctcttttcttttctttttcttttttttttttagacggagtctcactctgtcgcccaggctggagtgcagtggcgcgatctcggctcactgcaagctctgcctcccgggttcatgccattctcctgcctcagcctcccgagtagctgggactacagggacccgccaccaggcccggctaattttttttttttttgtatttttagtagagatggggtttcaccrtgttagccaggatgatctcgatctcctgacctcgtgatccgcctgccttggcctcccaaagtgctgggattacaggcgtgagtcaccgtgcctggcttctttcagtctcttttctacagactgtgattacacgtctgacttgtctccccagccctgcacagtgcctggcatgcagaagtgctcagtaagtgtggtgaatgaatgaaggcttgcctgaatgtgtagtgggcagttctgggagagggtccaccgggcctctggaatctcaccttccactagggggagctctcaccttgagtccagccaccaccacgctggatgctacgaattcagtttccctggacacaactcaaacctatatccc

SEQ ID NO: 931501 - DNA, 600 bp, Homo sapiens
cactctctttcagtctcttttcttttctttttcttttttttttttagacggagtctcactctgtcgcccaggctggagtgcagtggcgcgatctcggctcactgcaagctctgcctcccgggttcatgccattctcctgcctcagcctcccgagtagctgggactacagggacccgccaccaggcccggctaattttttttttttttgtatttttagtagagatggggtttcaccgtgttagccaggatgatctcgatctcctgacctcgtgatccgcctgccttggcctcccaaagtgctgggattacaggcgtgagtcaccgtgcctggcttctttcagtctcttttctacagactgtgattrcacgtctgacttgtctccccagccctgcacagtgcctggcatgcagaagtgctcagtaagtgtggtgaatgaatgaaggcttgcctgaatgtgtagtgggcagttctgggagagggtccaccgggcctctggaatctcaccttccactagggggagctctcaccttgagtccagccaccaccacgctggatgctacgaattcagtttccctggacacaactcaaacctatatccc

SEQ ID NO: 931502 - DNA, 775 bp, Homo sapiens
ttttacaaatttgttaaggaaaaagggacataggcaacatatgtaaaagaaaaaccggctggacgcggtggctcacgcctgtaatcccagcactttgggaggccaaggcgggcggatcacgaggtcaggagatcgagaccatcctggctaacacggtgaaaccctgtctctactaaaaatacaaaaaattagccgggcgtggtggcgggcgcctgtagtcccagctactcgggaggctgagacaggagaatggcgtgaacccgggaggcggagcttgcagtgagcagagatcgcgccactgcactccagcctgggcgacagagtgagactctgtcttaaaaaaagaaaaccaaaccaaacaaaaccgtagtgtcagcttgtcctcggtgccgcagctccccatgctggtcgttcctctgatagccccggggtccaagaagctcctaggttctttctccggctcagtgcttcccccaggcgtctccctcgtcggactcctsgtccctcccttaaaattgccggtgagtcgtcttccttgctggaaaagaattagggttatgatgattttgagggcaaatcagtgactttgtccccctccccagtggatatatttataattgcatctggagggacccgttgggaggccgggccgaatctagtcatgaaagaatgaagcctaggcagtcgctgctgtctagggagggatacacttccggggcaagggagacccacttcctgcgagaatgactggcgcccccagctactctgtctctgt

SEQ ID NO: 931503 - DNA, 447 bp, Homo sapiens
caaagcagtttctgagagtgcctctgtctagattttatatgaaggtattcccgtttcctacgaaatctttagagctatccaaatatccacttgcagattgtacaaaaagagtgtttccaaactgctgtatcaaaagccaggtagtactttgttagttgaggrcacacatcacaaagaggtttctgagaatgcctctgtctagattttacctgaagatattcgggtttccagtgaaatccttaaagctctcgaaatatccacttgcagattctccaaaaagagtctttcaaaactgctctgtaaatagaaaagttcaactctgttagatgaggacatacatcacaaaccagtttgtgagaatgcttctgtctagtttttatgggaagatatttcctttttcactgtaagcgtcaaagcgctccaagtgtccacatccagatactacag

SEQ ID NO: 931504 - DNA, 651 bp, Homo sapiens
ggcccatttatctagtgacctgaaaggctgccagttctgagtggggtccagaacaggggaaggctctgcaataggtccaggctgctgtgcaagctgctctgccacttggaccataagacacagcagatccagtggtgcctgaagtgtcagtggcaaatagggatgctgtttggagcctttggcargctcccataggtgaatcacagcagaggcatctaggattttggagcaaggccctgccatctagttcagataactactctccttttgagagacagctcttagcctgttactgggctttggtggaaactgaacgtttgactatgggtcatcaagtcaccatgtgacctgaactgcctgtcatgaactgggtgttttctgacttatctagccataaagtgggtcatgcacagcagcattccatcatcaagtggaagtggtatgtatgtgatcaggctcaagcaggtcctgaaggccaagtaagttacatgaggacatggctcaaatgcccagggtcttcactcctgccacctgccttctctcccccagcctgcactgatggcctcatggggagttccctatgatcagttgacagagtaacagaagactagggccaggttcacagacggttctgcataatacacaggcacc

SEQ ID NO: 931505 - DNA, 581 bp, Homo sapiens
ctgagtggggtccagaacaggggaaggctctgcaataggtccaggctgctgtgcaagctgctctgccacttggaccataagacacagcagatccagtggtgcctgaagtgtcagtggcaaatagggatgctgtttggagcctttggcaggctcccataggtgaatcacagcagaggcatctaggattttggagcaaggccctgccatctagttcagataactactctccttttgagagacagctcttagcctgttactgggctttggtggaaactgaacgtttgactatgggtcatcaagtcaccatgtgacctgaactgcctgtcatgaactgggtgttttctgacttatctagccataaagtgggtcatgcacagcagcattccatcatcaagtggaagtggtatrtatgtgatcaggctcaagcaggtcctgaaggccaagtaagttacatgaggacatggctcaaatgcccagggtcttcactcctgccacctgccttctctcccccagcctgcactgatggcctcatggggagttccctatgatcagttgacagagtaacagaagactagggccag

SEQ ID NO: 931506 - DNA, 792 bp, Homo sapiens
ataaggcgagctgtgatttgggagttgggagggagattgattggtgataagggcaaatagtagagttttttgttgtttatctggtaaaactgctttggagtctggtgggaacattttcaaaacttatcctacttcttgctgtgctaattggaatccatggttttgaagtctgtggaggctttattctaaaccaagttgtgaaataggaaagaataggycatcatttagcattttaacagaaaagtggctaaatgatgaaatattgttgaaagaaaaataatgaaaatgtactttaggcattggtagatgaacagcactctcttacaagtcgtgttttacgtatgcagacactgagagtaacataaagtgtgtttgagcatgcaggatccacactgcctggtttgaatccaggcactgccacttggtagccacgtgaccttgatgttgggaatattgcctgacctttctatgcttctgtttccccatctgtaatgtgaggataacactggtaaccattttataggtttactgtgaagattcaatgcttagcttagtgttggctcatacatgctccatagttgtggtggtggctgttgttagtattgatagtgctgtaataaactagtgtgaatcagatatcatcgattctggagccatctcaccctaaactgttctctttcgtactctagctctgtctgctttccattctgatcctgatttgttattctgcttggtttccagcctgcatggcatgccctgagtggtctcatacagttagagatttggggtgca

SEQ ID NO: 931507 - DNA, 628 bp, Homo sapiens
ggcattgggtaaatacacctattccaaatgggagaaattggtcaaaataaagaggttacagtccccatgcaagtctgaaatccaatagggcagtcgttaaaccttaaagttccaaaatgatctcctttgactacatgccttatatccaggtcacgctgatgcaagaggtgggctyccatggccttgggcagctctgcccttgtggctttgcagggcacagccccacttctggctgttttcatgggctgcagcttttccaggctcacagtgcaagctgttggtggatctaccattctggggtctggaggatggtggccttcttttcacagctccactaggcagtgccccagtgggaactctgtgtgggggctccaaccctacatttcccttccatactgccctatcagaggatctccatgagggctccatccctgtagcaaacatctgcaagggcatccaggtgtttccatacatcctctgaaatctaggtggaggttttcaaacctcagttattgacttctgtgcacccgcaggctcaacaccacaaggaggctgccaaggcttgggcttgcaccctctgaagcaatgatctgagctgtaccttgtccccttttagccatggctggag

SEQ ID NO: 931508 - DNA, 628 bp, Homo sapiens
ggcattgggtaaatacacctattccaaatgggagaaattggtcaaaataaagaggttacagtccccatgcaagtctgaaatccaatagggcagtcgttaaaccttaaagttccaaaatgatctcctttgactacatgccttatatccaggtcacgctgatgcaagaggtgggcttccatggccttgggcagctctgcccttgtggctttgcagggcacagccccacttctggctgttttcatgggctgcagsttttccaggctcacagtgcaagctgttggtggatctaccattctggggtctggaggatggtggccttcttttcacagctccactaggcagtgccccagtgggaactctgtgtgggggctccaaccctacatttcccttccatactgccctatcagaggatctccatgagggctccatccctgtagcaaacatctgcaagggcatccaggtgtttccatacatcctctgaaatctaggtggaggttttcaaacctcagttattgacttctgtgcacccgcaggctcaacaccacaaggaggctgccaaggcttgggcttgcaccctctgaagcaatgatctgagctgtaccttgtccccttttagccatggctggag

SEQ ID NO: 931509 - DNA, 654 bp, Homo sapiens
accctttgtttagcatatgatcaagaaataaccataaaaatgggcaaccggcggcccatgccgctgctctgtctatggagtagccattctttattcctttccttctttttttttttttttttttttttttttgacagtcttgctctgacscccaagctggagtgcagtgggggtgcaagctcgtctcactgcaacctctgcctcctaggttcaagcaattcttgggcctcagcctcccaggaagctgggattacaggcctacgccacaacaccctgctattttttgcatttttagtaaagtcggggtttcgccatgttcaccaggctggtctggaactcctggcctcaagtgatccgcccgcctcggtcggactctcaaggggctggattacaagcatgaaccacctcgctcggccctttcttaccaaacttgctttcactttactctatggattcgcccggaattctttcttgcatgagatccaaaaaccctctcttggggtctgaatcaggacccttttccagtaaaggttctgaagaaaacaatgttatctactggtttgtaaaccttttcttcatcaacagcaaaatcttaattttacttggagatctctaataataatagtgatagcagagaactttatggaaagaaac

SEQ ID NO: 931510 - DNA, 654 bp, Homo sapiens
accctttgtttagcatatgatcaagaaataaccataaaaatgggcaaccggcggcccatgccgctgctctgtctatggagtagccattctttattcctttccttctttttttttttttttttttttttttttgacagtcttgctctgacccccargctggagtgcagtgggggtgcaagctcgtctcactgcaacctctgcctcctaggttcaagcaattcttgggcctcagcctcccaggaagctgggattacaggcctacgccacaacaccctgctattttttgcatttttagtaaagtcggggtttcgccatgttcaccaggctggtctggaactcctggcctcaagtgatccgcccgcctcggtcggactctcaaggggctggattacaagcatgaaccacctcgctcggccctttcttaccaaacttgctttcactttactctatggattcgcccggaattctttcttgcatgagatccaaaaaccctctcttggggtctgaatcaggacccttttccagtaaaggttctgaagaaaacaatgttatctactggtttgtaaaccttttcttcatcaacagcaaaatcttaattttacttggagatctctaataataatagtgatagcagagaactttatggaaagaaac

SEQ ID NO: 931511 - DNA, 654 bp, Homo sapiens
accctttgtttagcatatgatcaagaaataaccataaaaatgggcaaccggcggcccatgccgctgctctgtctatggagtagccattctttattcctttccttctttttttttttttttttttttttttttgacagtcttgctctgacccccaagctggagtgcagtgggggtgcaagctcgtctcactgcaacctctgcctcctaggttcaagcaattcttgggcctcagcctcccaggaagctgggattacaggcctacgccacaacaccctgctattttttgcatttttagtaragtcggggtttcgccatgttcaccaggctggtctggaactcctggcctcaagtgatccgcccgcctcggtcggactctcaaggggctggattacaagcatgaaccacctcgctcggccctttcttaccaaacttgctttcactttactctatggattcgcccggaattctttcttgcatgagatccaaaaaccctctcttggggtctgaatcaggacccttttccagtaaaggttctgaagaaaacaatgttatctactggtttgtaaaccttttcttcatcaacagcaaaatcttaattttacttggagatctctaataataatagtgatagcagagaactttatggaaagaaac

SEQ ID NO: 931512 - DNA, 585 bp, Homo sapiens
aaggtatccagaaatcagcctgaatgctttgttgcttagatattacttctgccatatatcctaattcattgctcttgagttctgtattccttaaagccctcaggcattgaagcagttctactaaggtctttgccactttataacaagaatgacctttactctagtttccaaaaccttattcctcatttctgtctaagacttcatcagcatgaccttttctgttcatatttctactaacattctggtcacaatcatttaagcaatctctaagaagattcagattttttatacagctctcttctgagccctcatcaraatcacccttaatgttccattcacagcaatctggctttttttttttttagcctgctcctctaaattcttccagcttctagccattacccagttccaaagccattccacatttttagatatttgttatagaaacaaatacctcccaatatcaattttctatcttagtttgttttctgctgctgtatcagaatactacagacttgataatttacaaagcaaagaaattatctctcacagttcgtgaggctgagaagtccaagagcattatac

SEQ ID NO: 931513 - DNA, 624 bp, Homo sapiens
ccatttgagaacttgggactgaaaaggtttcccagctccatgcctagtcacacctctaagtatttagtggctgcccactggattctttctcagcactggtgcttgtgcccaccatcaggggaccagtaggcagacttcacagtctgggcctgccattctttccctgtgccccactcccagggctgagtggattgagcagatctctgtgcactccacaaattaggccactgcctgaggcaacagagagcttcttccagtaaacaaggatcaaatatatctcctgccatgctggccacaccgaggtctaacccataagcaccacctactagcttataggtcaaactgcacaggtcagtataaaactcaatgtagtataggkttatggaagcaaagccaaaagatcctacccaacatttgctatagtcacatcccctagggagatggggtaaggggaaaggaaaagaaaaaaaaaaacttttttgggaaagaaagaaaaacattccttcccatatgaaaataattacaaaaaattagaagtgctggtgtctccagatgagaagtcagtgcaagaattctggcaccatgaaaaatctgaatgtagcgataccaccaaaggataacact

SEQ ID NO: 931514 - DNA, 645 bp, Homo sapiens
tataggcatgcaccactatgcctggctaatttttttgtatttttagtagggatgagttttcaccatgttgcccagggtggtatccaacccctggactcaagcgatctgcctgcttcagcctcccaaagtgctgggattaccagcgtgaaccactgcacccagccacgggtacaaaatattctaatttatatcatcagttagtttgtttttcttaaamctcatataaataaaatcatatagtacaaacttttttgtatctggcttcttttgctcagcatagtatctgcgagtaacatccatgaatgatattatgtaagtgatttattcatttttaggttcatagtactctatgcatattctatgttatatttatccattccctattgatgaatagttgagggtttccagtttggggctattgtgaataaaattctataaatattcttatacatctctcttgataagcatgtgcaattatatagagttaaatttttgaatcataaggtaggtttagtagctactgtccaagtttccaaagtgattgaaccaatttatactcccaacacatgcttgccaacacttggtatggttagtctttctaattttagccattctagtgggtgagtagtaatatctcattgtagc

SEQ ID NO: 931515 - DNA, 544 bp, Homo sapiens
atacaaaaaaattagctgggcatggtagtgcacgcctgtagtcccagctacttgggaggctgaggcaggagaattgcttgaacccaggaggtggaggttacagtgaactgagatcgcaccactgtactccagcctggtgacagagcgagactccgtctcaaaaaaaaaaaaaaaaaaaaatcatacagagcaggggtcyccaacccccaggcagtggaccaatgccatcaggaaccaggctgcacaacaggaagtgagtggccaatgagcactactgtctgagctccacgtcctgttagatcagtggcgccattagattttcatgggagtgcaaaccctagtgtgagctgtgtatgtgagggatttaggttgtgcactccttatgagaatctaatgcctaatgatctagaatggaacagtttcatcctgaaacaatcccacccctgctggtccatggaaaaactgtcttccatgaaaccagtccctggtgccaaaaaaggttggggactgctaattcagaggaataggaagtgtcctagagcta

SEQ ID NO: 931516 - DNA, 590 bp, Homo sapiens
gctggttaatgaagtgttatttcttcaccttcctcatgcctgtaacattgacctctgagccttcaccacagtcgagagagcttaggtccatgctccatctgtctgcagggcgatcacttccaaaccaaaaaagactcatccaagaggcattatgttgtgttatggacataggaacttcagagtttggacatcggccaggcgcggtggctcacacctacaatcccagcactttgggaggccgaggtgggcagatcatgaggtcaggagatcgagaccatcctggctaacawggtgaaaccccgtctctactaaaaatacaaaaaattagccggacgtggtggcgggcgcctgcagtcccagctactcgggaggctgaggcaggagaatggcgtgaacctgggaggcggagcgtgcattgagctgagatcgcaccactgcactccagcctgggcgacagagcgagactccgtctcaaaaaaaaaaaaaaaaagaaagaaagaaagagtttggacatcaagggggtggggagataatcctctggtaagtaaaataattctgtggaaacaatctctcattcccagcatgcaggt

SEQ ID NO: 931517 - DNA, 590 bp, Homo sapiens
gctggttaatgaagtgttatttcttcaccttcctcatgcctgtaacattgacctctgagccttcaccacagtcgagagagcttaggtccatgctccatctgtctgcagggcgatcacttccaaaccaaaaaagactcatccaagaggcattatgttgtgttatggacataggaacttcagagtttggacatcggccaggcgcggtggctcacacctacaatcccagcactttgggaggccgaggtgggcagatcatgaggtcaggagatcgagaccatcctggctaacaaggtgaaaccccgtctctactaaaaatacaaaaaattagccggacgtggtggcgggcgcctgcagtcccagctactcgggaggctgaggcaggagaatggcgtgaaccygggaggcggagcgtgcattgagctgagatcgcaccactgcactccagcctgggcgacagagcgagactccgtctcaaaaaaaaaaaaaaaaagaaagaaagaaagagtttggacatcaagggggtggggagataatcctctggtaagtaaaataattctgtggaaacaatctctcattcccagcatgcaggt

SEQ ID NO: 931518 - DNA, 590 bp, Homo sapiens
gctggttaatgaagtgttatttcttcaccttcctcatgcctgtaacattgacctctgagccttcaccacagtcgagagagcttaggtccatgctccatctgtctgcagggcgatcacttccaaaccaaaaaagactcatccaagaggcattatgttgtgttatggacataggaacttcagagtttggacatcggccaggcgcggtggctcacacctacaatcccagcactttgggaggccgaggtgggcagatcatgaggtcaggagatcgagaccatcctggctaacaaggtgaaaccccgtctctactaaaaatacaaaaaattagccggacgtggtggcgggcgcctgcagtcccagctactcgggaggctgaggcaggagaatggcgtgaacctgggaggcggagcgtgcattgagctgagatcgcaccactgcactccagcctgggcsacagagcgagactccgtctcaaaaaaaaaaaaaaaaagaaagaaagaaagagtttggacatcaagggggtggggagataatcctctggtaagtaaaataattctgtggaaacaatctctcattcccagcatgcaggt

SEQ ID NO: 931519 - DNA, 604 bp, Homo sapiens
tagagatggggtctcactatgttgcccaggcttgtcttgaaatcccggcctccagcagtcctcccacctcagcctcccaaagtgctgggattatagacatgaaacactgtgcccagccaacaagtggtagtttcttaaatgttagtggcaatgtgatatctgacatcttatcaatgacctttttgtacactaaaattcattagtctattttgcactttgagtgcatcttttacccatgcttagtgtaatgttctgatcatttggaaaatataggttcaccaagttatgcaggtcttcaaaatgttgactyatttcattatacaatatcataaaatcacatttcttaatgtctctactgatctcaagcattaggaagctgtcaggctcatggtggctgatacaactttttcaaaattctaattttcacttgaaagctctatttttatcattggtgacaaatactgttattttccttgaagtgacaggctcactttgtcactttgtccatttttgagaaaatgcctgccaaatacccaagttggaataactacaatttgttggtcattctttcaagtaagaatggtgctccgtggcatgagcggct

SEQ ID NO: 931520 - DNA, 633 bp, Homo sapiens
agctgtataactacaacttggcagtgtaatttgatattaaggattgtgggtcttcactttgtatttctcaggattcctttagatattcattgcttttgtggttccctgtgatttttagcaatacgtatttatttctrttaactttttttcacaacataaaggtccataattaggggtacattttcatacatacagattgggtaatgatcaaatcagggtacttaggatctctatttgctcatccaggttttttttttttttgtggggagaacattcaaaattctcccttcttactctagaaaaatatgatattgttaactccagtcaccaggctgaggaggagaacctcagatttgttcctttaatgttaagataactttgtttccataatcaatccttccccattccccctctatctcccaaactctggtaaccaatattgtgctttttacttcattaagataaacatcttaagatttcacatgagtggtatcatgcagtgtttttctaggcctagctccttacatttaacataatgttttccaggttcatctgcgttgctctaaatgggactgtttcattattttgatggctgaagaatatttcctagtgtatgtatatgagagtttcttg

SEQ ID NO: 931521 - DNA, 633 bp, Homo sapiens
agctgtataactacaacttggcagtgtaatttgatattaaggattgtgggtcttcactttgtatttctcaggattcctttagatattcattgcttttgtggttccctgtgatttttagcaatacgtatttatttctgttaactttttttcacaacataaaggtccataattaggggtacattttcatacatacagattgggtaatgatcaaatcagggtacttaggatctctatttgctcatccaggttttttttttttttgtggggagaacattcaaaattctcccttcttactctagaaaaatatgatattgttaactccagtcaccaggctgaggaggagaacctcagatttrttcctttaatgttaagataactttgtttccataatcaatccttccccattccccctctatctcccaaactctggtaaccaatattgtgctttttacttcattaagataaacatcttaagatttcacatgagtggtatcatgcagtgtttttctaggcctagctccttacatttaacataatgttttccaggttcatctgcgttgctctaaatgggactgtttcattattttgatggctgaagaatatttcctagtgtatgtatatgagagtttcttg

SEQ ID NO: 931522 - DNA, 786 bp, Homo sapiens
ctcctcattccgggaaagtacgtgtcgtgggcaagtctaagcagaaagtgtattgaatctgccaggttgaccacctgtttcatgcagcttagggtcagaagaatctgtagctctgtcaagaagacgcagggctacagataggaaacaggagggaataatccagccagaaattatcttgcccaaccacagagggcatcatctacattctgctgggatccataccagaggaggacagaaacagaaaataggatcgggactggaaactagagctgtggttgtcttctggatggatcagaatgctctagatcaatggaacgtggcagctccaattccagkaatgtcagtgcagcctctcctgaggtgagcagtcacctgaaattccattttcactgaattaaacgtgagaaagcctgagttgagaaagccaacttctgtaatctactccccaaaagggcatatcccttaaattagctgagcctcagtttccttatttgtaaaacaagaccagcagtatcccctttacaggattactgtgaaattaaatgagatgagcatgctaagtgcaaagcatcctgaaggtgtaagccatggcaccatcagcaccacctccatcatcatcatcgttgttgtcgtcgctgttgctactcccaggtagcaccagtataaaacagccattttcccatgcggtcagtcttctcttctgtttggttagagaacattttgtgggagaactgccttccttaggtagttcagtcccaaatcctcaatgatgccttggaaaaaatc

SEQ ID NO: 931523 - DNA, 786 bp, Homo sapiens
ctcctcattccgggaaagtacgtgtcgtgggcaagtctaagcagaaagtgtattgaatctgccaggttgaccacctgtttcatgcagcttagggtcagaagaatctgtagctctgtcaagaagacgcagggctacagataggaaacaggagggaataatccagccagaaattatcttgcccaaccacagagggcatcatctacattctgctgggatccataccagaggaggacagaaacagaaaataggatcgggactggaaactagagctgtggttgtcttctggatggatcagaatgctctagatcaatggaacgtggcagctccaattccaggaatgtcagtgcagcctctcctgaggtgagcagtcacctgaaattccattttcactgaattaaacgtgagaaagcctgagttgagaaagccaacttctgtaatctactccccaaaagggcatatcccttaaattagctgagcctcagtttccttatttgtaaaacaagaccagcagtatcccctktacaggattactgtgaaattaaatgagatgagcatgctaagtgcaaagcatcctgaaggtgtaagccatggcaccatcagcaccacctccatcatcatcatcgttgttgtcgtcgctgttgctactcccaggtagcaccagtataaaacagccattttcccatgcggtcagtcttctcttctgtttggttagagaacattttgtgggagaactgccttccttaggtagttcagtcccaaatcctcaatgatgccttggaaaaaatc

SEQ ID NO: 931524 - DNA, 560 bp, Homo sapiens
accaaaaccttgcacaaaagccattgtaaccttacacaaaaaaatacttccgcaaggaaatctgcccagcaaagctaaatgttcaaccttggacaggcatcacctttgttactgactcttgtagccaaggataatcatttcaaaacaatcatattgagaggtgacagcrtgctggcagccctcgctcgctctcagcgcctccttggcctctgcgcccactctggccgcgcttgaggagcccttcggcctcccgctgcactgtgtgggagcccctctttgggctggctgaggccagagccggctccctctgcttgcggggaggtgtggagggagaggcgcagaaggagagacgcgggtgggaaccggggctgcacggggtgctggcggaccagcgcgagttccgggtgggcgtgggcttggcagccctgcagtaggagcggccggccgccaccaccagtcctgggcagtgacgagcttagcacctgggccagtagccacagagagtgcgctgggtcccccagcagtgccggcccgcccacgttgcacttgaattctcgcgg

SEQ ID NO: 931525 - DNA, 560 bp, Homo sapiens
accaaaaccttgcacaaaagccattgtaaccttacacaaaaaaatacttccgcaaggaaatctgcccagcaaagctaaatgttcaaccttggacaggcatcacctttgttactgactcttgtagccaaggataatcatttcaaaacaatcatattgagaggtgacagcgtgctggcagccctcgctcgctctcrgcgcctccttggcctctgcgcccactctggccgcgcttgaggagcccttcggcctcccgctgcactgtgtgggagcccctctttgggctggctgaggccagagccggctccctctgcttgcggggaggtgtggagggagaggcgcagaaggagagacgcgggtgggaaccggggctgcacggggtgctggcggaccagcgcgagttccgggtgggcgtgggcttggcagccctgcagtaggagcggccggccgccaccaccagtcctgggcagtgacgagcttagcacctgggccagtagccacagagagtgcgctgggtcccccagcagtgccggcccgcccacgttgcacttgaattctcgcgg

SEQ ID NO: 931526 - DNA, 560 bp, Homo sapiens
accaaaaccttgcacaaaagccattgtaaccttacacaaaaaaatacttccgcaaggaaatctgcccagcaaagctaaatgttcaaccttggacaggcatcacctttgttactgactcttgtagccaaggataatcatttcaaaacaatcatattgagaggtgacagcgtgctggcagccctcgctcgctctcagcgcctccttggcctctgcgcccactctkgccgcgcttgaggagcccttcggcctcccgctgcactgtgtgggagcccctctttgggctggctgaggccagagccggctccctctgcttgcggggaggtgtggagggagaggcgcagaaggagagacgcgggtgggaaccggggctgcacggggtgctggcggaccagcgcgagttccgggtgggcgtgggcttggcagccctgcagtaggagcggccggccgccaccaccagtcctgggcagtgacgagcttagcacctgggccagtagccacagagagtgcgctgggtcccccagcagtgccggcccgcccacgttgcacttgaattctcgcgg

SEQ ID NO: 931527 - DNA, 560 bp, Homo sapiens
accaaaaccttgcacaaaagccattgtaaccttacacaaaaaaatacttccgcaaggaaatctgcccagcaaagctaaatgttcaaccttggacaggcatcacctttgttactgactcttgtagccaaggataatcatttcaaaacaatcatattgagaggtgacagcgtgctggcagccctcgctcgctctcagcgcctccttggcctctgcgcccactctggccgcgcttgaggagcccttcggcctcccgctgcactgtgtgggagcccctctttgggctggctgaggccagagccggctccctctgcttgcggggaggtgtggagggagaggcgcrgaaggagagacgcgggtgggaaccggggctgcacggggtgctggcggaccagcgcgagttccgggtgggcgtgggcttggcagccctgcagtaggagcggccggccgccaccaccagtcctgggcagtgacgagcttagcacctgggccagtagccacagagagtgcgctgggtcccccagcagtgccggcccgcccacgttgcacttgaattctcgcgg

SEQ ID NO: 931528 - DNA, 745 bp, Homo sapiens
atattacatagaaagatttctttgagaagtgggaaaaaaagcagacaacaaatatgtagtataaaatcctgtatcatcagggtggggaaatgtacattttaactgagtgatgtcttgatggtgaatgggaaagctattgagaggagagaaggagtctgttgttttcctgggttatctcagcttgaatcctatctgatgcctgagaggagagaggagagggcacccgctcctccaggggaagcctccaggggtgggaggggccccctagaaggcctggctgcaggcttgagtcagaagccagggaagggacctagcctttgttttttattttccttttgagataagagtctcaatctgttgcccaagctggagggcagtggcacgatattggctcactgcaacctccgccttccaagttcacatgattttcctgcctcagcctcccaagtagctgggactattggtgcccgccaccacacccagctaamcttcttcttcttttttttttttttttttgtagagacagggtttcaccatgttgaccaggctgatctcgatccacctgccttggcttcccaaagtgctgggattttgggtgtaagccaccatgccccgccaggacctagtctttgaaatgccaaggcagagaattcggggaagtgtgggtggtggggcatagacagaaatgacccgtgcttttcaccgcagtggagatctgctcctctgaggagagctgaacccagaa

SEQ ID NO: 931529 - DNA, 546 bp, Homo sapiens
cccggagccacaccatgccatcttgcatttgcaattttctaagccccctagcccaggaggccaggcctattaggccttgtttgaaaaggagcatatatacatttttaacattcttattatttgcgtgaagatgaactctcaaatttagtttgtactgggtggagtggtccttagtaggcgccagtgtttaattctatttcgtgatgtttgcggccggtaggtttagcggtcaccgggsgagggaggcatgtgggaggggtgctgccctcctctctgggtgacggtatagttaggttagtatcgttaggttattatctggctcttcccactcggctgggggctcctgccaggcccagcccccgccctccctgtgcgtcccgcgccagggccccaggtccccccaggccttgggcacgggcgccaccccctcggttctccgggatcctggccggcatctcccaaagacagttcagagcccctttcatcttaaaagctttgctgctcatcacttctgggaaactcaaaatgtacatttcatttttttaa

SEQ ID NO: 931530 - DNA, 594 bp, Homo sapiens
ggtgcaggtttttgtgtgaatttaagtttccaacttgggtaaatacctaggagcctgattgctggattgcatggtgagagtgtttagttttataagaaaccgccaaaccgtcttccaaagtggctgcaccagtttgcactcccatggacaaggaatgagatttccttttgctccacctccttgccagcatttggtgctgtcagtatgtagaytttgtccatcctagtaggtgtgtggtggtttctctttgtcttgaattgcgattccctgatgataaatgacatgagcatcttttcagacgcatacttgtcatctgtgtcccttttttggtgaggtgtctgtttagatctttctccgcattttttaattaggtggtttgatttctcattgttgagttttaagagttctttgtatgttttggatactagttctttatatgtatgtgttctataaagattttctcccaatctgtggcttcacattctcttgacagtgtctttttcagagcagaagtttttaattttaatgaagcttcactatgaattatttctttgatggatgtgcctttggtattatattgaaaaagccatcact

SEQ ID NO: 931531 - DNA, 613 bp, Homo sapiens
tgtatttttattagagacagggtttcaccatgttagccaggatggtgtcgatctcctgacctcgtgatccgcccatcttggcctcccaaagtgctgggattataggtgtgatccaccgcgcccagtccagatccatttttagtaagatttttttgtgaaaggtttaaggtctgtgtctatatttttatgcatgtggatgtctagttgtgccagccccatttgttgaaaagaycattcactgaatagcctttgtttgctcctgtatcaaagataagtcagtggtatttatgtgggtctatttctgtactctctattctgtcccattaatctatgtgtctactcttttgccaaaaatacgctgtcttgattactgtagatttctggtaagtaactcttgaagtcatgtaatgccagtcctttattttgtttttctcctttaatattctgttggctattctcagtcttttgcgtctccatctaaactttagaatcagtttatcaatatccacaaaataacttgctgggatattaatcaggattgtattgaatgtgtacatcaagttaggaagaatgagtatctctataatatcgagtcttcctatccatgaacatg

SEQ ID NO: 931532 - DNA, 652 bp, Homo sapiens
tcttctcctacagggaaacaatttgctccactgggaagaggggaaaaggccacagaaaggcaagttgaccagaagacccctcacagcgtccccttatcatcacctcctctgcctctagggaagtcttgggggctggtggtgcattggctaggtgcagaggcaatggctacaggctgggaccactgtggaagcccccagactgaagccccactgcctgatctcatcatcctttgcatcactctgtgacctatgactttgaccctctctcctaactggcctggcctggtgggagcaggagccacttatttaggtctaaggactgcaagctctagggctttgcagatgcaggcagatttggggcctgagcaggggcaggaatgaacttggaacataaccctcagaagttctgaggtagtcctggccatggggtccatgcaaggactacatcccgcagckttccgctttccagtctgccgtcagtgcccacacatggttcaggaggtggaaatcatgagatgacaccgtgtctgtgcacgcggctctggttctgctcaaggcttatagtattgctcatggaaacagaggatgctggaaacgagggtctggttttgcagcagaaccacagcatctgggggcgagtgtgggggctcag

SEQ ID NO: 931533 - DNA, 846 bp, Homo sapiens
cagataggaggatcacttaattaactaggcaacacaggtattttagtatattaatcacttccctaggtaggcaagttctaaatcacccttttctcctatatgaggacacatggagctactgttttctgttcccgtgttactctttaatctctgtcagtgttgtacttttgaacttccactttgtaacactgcactacactaaacactatatgtagcaagcattctatacgtttgtagaagattttagtaaatatgtactttcaaatgctatataacacatctgcaacttgttttgcaaactgggggtctgaagtctttggacaagtctgcattccaccacctgccatatgtgctccttaacctggcttccaatctcaaagctgcattcacttattttaaatcttgaggagcaggataggtgttgacaatgtgttacttagaatgttccaagtattccctaatctctgggtcattcctgtcaaaacaggagtgtgactacacagtgaccagsatgcaagctgatgatatttttgcttctaatctgagaaaagaaattgcttttgtgcagactggtatctctagggtgactttgttctaaatgctaatatcttattctaaatatcatcaattgtcaaatatctttgaaataaaattctgcaaaaaaagtacacacttcagaatttctgaataaaaaatatcaaaccatctctttatgatttaaattgtaaataagagctttattgtttgcttttgtttttattttgatggaaataggatgttgaggcaatttcctggagattagacaatgacattattttaaactttttactatccaggaaaaaacat

SEQ ID NO: 931534 - DNA, 690 bp, Homo sapiens
gggggttttctagataataggatcatgtcatctgcaaagagggatagtttgacttcctctcttcctatttgaatgcctttatttctttctttagcccgattgctctatccagaactttcaatactatgctgaataggagtggtgacagagggcatccttgtcttgtgccagttttcaagggggatgcttccagcttttgcccattcagtatgatattggctgtgggtttgtcatatattgcttttattattrtgaggtatgttccttcaatacctagtttattgagagtttttaacatgaagggatgttgaattttattgaaaaccttttcttcatctattgagataatcatgtggcttttgtagttctgtttctgtgatgaatcacatgtattaatttgtgtatttcaaacaaactttgcatcccaggggtgaagcctacttgatcgtggtagataagctttttgatgtgctggtggatttggtttgccagtgttttgttgaggacttttgcatcaatgttcatcaaggatgttggcctgaagtttttgttgttgttgtatctctgccaggttttggtatcaggatgatgctggccttatggaatgagttagggaggtatccctcctcctcaattttttggaatcatttcagtaggaatggtaccagcttttctttgtatatctggtac

SEQ ID NO: 931535 - DNA, 571 bp, Homo sapiens
agatcatatcctgcgcctggctcagagggtcccacacccatggagccttgcttattgctagcacagcagtctgagatcaaactgcaaggtggcagcgaggctgggggaggggcgcccgccattgctgaggcttgagtaggtaaacaaagctgccaggaagctcgaactgggtggagcccaccacagctcaaggaggcctgcctgcctctgtagactccacctctgggggcagggcatagacaaacaaaaggcagcagaaacctctgcagacttaaatgtccctgtctgacagctttgaagagagtagtggttctcccagcayggagtttgagatctgagaacggacagactgcctccttaagtgggtccctgacccctgagtagcctatatgggaggcaccccccgagtaggggaagactgacacctcacacagccgggtacccctctgagacgaaacctccagagaaacgatcagacagcaacatttgctgttcagcaatattcactgttctgcagcctctgctgctgatacccaggcaaacagggtctggagtggacctccagcaaact

SEQ ID NO: 931536 - DNA, 699 bp, Homo sapiens
gggaaataaacaatcctagagttcaaatacttgcttgatttggagtattttccacatatgttaaatttgtcttcaccttgatatattagtccattctcacattgctataaagaaatacctgagactgggtcatttataaagaaaagaggtgtaattkgctcatgattccacaggctgtacagaaagcatgacgctggcatctgctcggcttctgcaaaggcctcgtgtcacttacaattgtggcaggaggtgaaggagaaacacacacatcacatgtttggaataggagcaagagggtggggggaaggtgctacacactttcatacaacaagatctcatgataactcacttgtacaccgtcatgagaacagcaccaaggagatggtgctaaaccattcaggaaggaccaacttcatgatccaatcacctcccatcaagacccacaaccaacactgaggattaccatttgacatgagatttgggtggggacacaaatccaaaccctatcacttggtgagtatcaagtagtgggaatgccactggatgggatcttggtggatgaacggttacttcctccataagttagccattctcaaaggtgctctaactgttacagaatcctcaagtacccttttaacaagctttcccaagtggtctcacgatcctaaagctttaggacccaattagcagaatttatct

SEQ ID NO: 931537 - DNA, 577 bp, Homo sapiens
aagggtttaaaggctccatgcaagtccgaaatcgaatacggcagtcattaaaccttaaagatccaaaaagatctccattgactccatgtctcacatctggttcatgctgatgcaagaggttggctcccacggccttgggcagttccatccttgtggctctctggggtacagcccttttccttgctgctttcatggcctggcattgagtgtcttcagcttttccaggcacacagcgcaaactgtcagtggatctaccattctggggtctaaaggatgatgggcctcttctcacagatcgactaggcagtgccccagtggggactctgtgtggggrttccaatcccacatttcccttctgcactgccctagcagaggttctccatgagggcaccacccctgcagcaaaattttacctagacacccaggcatttccatacatcctctaaaatctaggtggaggttcgtaaacctcaatttttggcttctgtttgcaactgcaggctcaacaccacgcggaaactgccaaggcttggggcttgcaccctctgaacccactacctgagctgtactttggccc

SEQ ID NO: 931538 - DNA, 577 bp, Homo sapiens
aagggtttaaaggctccatgcaagtccgaaatcgaatacggcagtcattaaaccttaaagatccaaaaagatctccattgactccatgtctcacatctggttcatgctgatgcaagaggttggctcccacggccttgggcagttccatccttgtggctctctggggtacagcccttttccttgctgctttcatggcctggcattgagtgtcttcagcttttccaggcacacagcgcaaactgtcagtggatctaccattctggggtctaaaggatgatgggcctcttctcacagatcgactaggcagtgccccagtggggactctgtgtgggggytccaatcccacatttcccttctgcactgccctagcagaggttctccatgagggcaccacccctgcagcaaaattttacctagacacccaggcatttccatacatcctctaaaatctaggtggaggttcgtaaacctcaatttttggcttctgtttgcaactgcaggctcaacaccacgcggaaactgccaaggcttggggcttgcaccctctgaacccactacctgagctgtactttggccc

SEQ ID NO: 931539 - DNA, 459 bp, Homo sapiens
cacttgagtgctggctgcagattactactttagtactcctgggctacacagcgcagttgtgaggtgatgtcagggtttctgttccctccccaaattggaggcagcacaggaaggggctttagcagtggttgtgccccagaaagatgcagagctgcaatcagtcagtatgattggcctgggatggtgggctgcactgtgggtcccagctaggkagtggggagcaggtgcctggtaatgggcagtggggtgggacctgtgagagacaggccttttttccttagggaaactgcagcttgctggaagggtggataaggaacttagagtcttggttctttgcccagtgggagggaagcaggggcagtaccactgcagaggcagtggccaaggggctttcagttgccccttggagctccacctccaagaaacacagtcactggtactgaaagtattcagctagag

SEQ ID NO: 931540 - DNA, 598 bp, Homo sapiens
tatagtgtgaaagatcaaatcagggtaattgggttatccatcatcttaagtgcttatctttttttatgctaggaacatttgaattactgtcttctagctgttttgaaatatacactagattagtgttaactatagtcccctgccgatctattaaacaccagctcttaytacttctatctaactgtattaatgtatccactaatcaccctcttttcatgccccctcctcttcctggcctctggaaaccactagtctactctttatcttcatgggatctgcctttttagctcccatagatgaatgagaacacgcaacatttgttaaatgttcatttatatggtttcagaggttcatatgtttccttagctaaattccaagctgtacatgtatagggtgggatttcatgaggccaggcaaagaatgactactgaagagttataagataaacaactcatggatcttaacaggtttcagagacgtttgagttctgagccattactgaacacctgggatattttgtaggttcccggaagcctactggctctagaataaaggcttaagaattattaaggcctgggcccattggtgtatgcctgta

SEQ ID NO: 931541 - DNA, 675 bp, Homo sapiens
gccttctctctatgtctcctcacattggtttccttcacagataggtatgtgtctgtgtccaaatttccccttttctttctttttctgagagggagtttcactcttattggccaggctggagtgcaatggctcgattttggctcaccacaacctccgcctctgggttcaagttcctctgctgcatgagcctcccaagtacctgggattacaggcatgcacaagcacgcccagctaagttttgtacttttagtagagatggggtttctccatgtcggccaggctggtctcaaaatcccaacctcaggtgatccacccgcctcggcctcccaaagtgctaggattatagccataagccaacatgcccggcccaaatttccccttttcataaggacattggacatcttggattaggccacattctatgaatttgrttaaatttgcaaagaccctatttccaaataaggtcatgtattgaggtactgggagttaggatttcaacatatcctttttaggggacataaatgaacccataacagcaccaaagaagaatatcagcaattatctgaaagggctattgaaatactttttccacggccaactgcatatctgtgtaaggccagattttctttgtatactggaaccaaaacaacacactaatagatggaatgcaaacgc

SEQ ID NO: 931542 - DNA, 492 bp, Homo sapiens
gacagaattcaatgagaaaaaatagacaaactatagggaaaattgattaaaacaaagctgttctttgaaaagagtattgaagttgacatatctagactgatcaagaacaaagacaaaaggtacagattatcaagaaaatgagcgggcaaagcaagatggccaaacagaagcctgcaacaattatccccccaycaaaggaacactaaattttaacaactaactacacacaaaaaagcactatcacaaaaaacaaaaatcaggtgagcaatcacagtacctgattttaacttcatattgctgaaagagacattgaagagggtaggaaagacagtcttgaattgcctatgccacttctcctccactccctggcagtggccacatggcatagagaaacaatctgtgcacttgaggcagggcaagcacagtgactaggggtcttggcattgaactcagtgctgccctgtcacagcagggagcaaaaccttgcttggt

SEQ ID NO: 931543 - DNA, 601 bp, Homo sapiens
tggtttgttcctccacatactttatcttattcattagctgcattttaaaatgaggaaaatgaaattaaccagaggtggctaaaactatttttccccagtggaagaacctccgccaagaatccagaaaacaggctgggggcagtggctcatgcctgtaatcacagcactttgggaggccgaggtgggcggatcatttgaggccaggagtttgagaccagtctggccaacatggcgaaaccctgtctctactaaaatacaaaaattagccgggggtggtagcatgcctgtgatcccagctacttgggaggctgaggcaggagaatcgcttgaacccaggagatggaggttgcagtaagccaagatggygctactgcactccagcctgggtgacagagcaagactgtcacaaaaaaaaaaaaaaaaaaaaaagaaaaaacaaacaaacccagatacaggcaaggttgcagggaaaagggaacccttacatagtgttggtaggagtgcaaattagttcaaacattgtggaaagcagtatggcaattcctcaaagagctaaaagcagaacaaccatttgacccagcaatcctattattactgggta

SEQ ID NO: 931544 - DNA, 615 bp, Homo sapiens
attctcatcaccattctcgttgtcagctctgttctgccatttctcaaagcaattgcttgcctcagggcagggggaaaggctctgccatgtgggctgcttttatatcttcaatccattctaaatcctgtcagaagagatacattgtcctgtctggtagaggtggctctgggtgatatgctctgcttagattagtcaggaaggagccctttcccttgtgtgtctgcatatttgtggtagtggttattccggtacagtttctacaagcacagtaattcataagattttccacagtatacataatgtctttcattaaagaattactgtctttcatcttctaatccttaaatttaggctttcttttatatagtatgtgaaattcgaatacctggatggcaagagatctaaaaggtagtattctgactagagtgtggaatgtagttrtaagaatgcctaatgctactgatgtttgcaaaactacgcaagtaggatgtctgaaggacgctggtctatcagcaggtagtggatcccaacccctgggctgggattcacaaggctaaaccctgtcatcaggactgtaaaactgaggcactgcttaaattgtaaagattttggctc

SEQ ID NO: 931545 - DNA, 659 bp, Homo sapiens
aatgcaaagaagtcacaaggagctgaatcagactgtaagatggattcctaacgtattcctatcaaagatcttgcaaaattgcccttgtttaatgagaagaatgatcaggagcattgttgtggtgaagaaggactccctggtgaagctttccwggaagttttactgtgaaagctttggctttctcaaaacactctaagaacaagtagttattatttttcttcagccctccagaaagtcaagaagcaaaatgcctcaagaatccccaaaacttttgccataaccttgactcctgattggtccactttggctttaaccagaccaccgtcacctcttggtaaccgttgctttgattgtgctttgtcttcaggatggtactggtagagccatgtttcatcttctgttacaattcttcaaagaaatgcttcaggatcttgatccaacttgcataaaattttcattgaaagctctgctgttgtcaggagctgatctggacacaacagttttggcacccattgggtggaaagcttgctcaactttaatttttcagtcagaattgtgtgagttgaaccaactgagatgtctgtggttctggctattttttgcactgttaatcgctagtcctctttaattagggcatgcacaagattaattttttcctc

SEQ ID NO: 931546 - DNA, 730 bp, Homo sapiens
gcccatgcagtcattttagcactattaactgaagaaaaatgagtgccctttaaagattttttgagattaggaaatgcaaagaagtcacaaggagctgaatcagactgtaagatggattcctaacgtattcctatcaaagatcttgcaaaattgcccttgtttaatgagaagaatgatcaggagcattgttgtggtgaagaaggactccctggtgaagctttcctggaagttttactgtgaaagctttggctttctcaaaacactctaagaacaagtagttattatttttcttcagccctccagaaagtcaagaagcaaaatgcctcaagaatccccaaaacttttgccataaccttgactcctgattggtccactttggctttaaccagaccaccgtcacctcttggtaaccgttgctttgattgtgctttgtcttcaggatggtactggtaragccatgtttcatcttctgttacaattcttcaaagaaatgcttcaggatcttgatccaacttgcataaaattttcattgaaagctctgctgttgtcaggagctgatctggacacaacagttttggcacccattgggtggaaagcttgctcaactttaatttttcagtcagaattgtgtgagttgaaccaactgagatgtctgtggttctggctattttttgcactgttaatcgctagtcctctttaattagggcatgcacaagattaattttttcct

SEQ ID NO: 931547 - DNA, 598 bp, Homo sapiens
aatgatattcttatgtgatcctatagctgactgtgcaaatggagaatatttcccgagcagattgaggagattgacaaatcttggatagtttggatggaaggagaatgaatggcgccactgggtcactctgtgtaaaggagatgaggaggcattctaaatgaaytctcttagggggagctcctctagcccactgtctggcatgaagggctcaccatactaggtccccacctcacccctcttcagtcactccacaggctggtggatggcactccttagggacggtcagagtctgggaagcgaaattctattgtccactccactaacacatatggacctgggtctaggagatgtggccaaagggccagaagctgggtggcccctggggtgaactggggaacaagaacaaagttaggaaggaggagacaagttccaatgactatcggggaggagcactttggggctggggttgcagagtgcctgggaaggtggcctagaaagggtgcagctctgggtgaggagcagccgctgccttctttagatgattcatacctgatcagtggttctctggcgactagcagagtacggtgcacaagactca

SEQ ID NO: 931548 - DNA, 597 bp, Homo sapiens
taatctgagtctcccttcaaataatatgctaccccatgtgcagtataagggtcttagaataatccaaatttctacttcccatttcttatagcattgttgtcatacatttcacctttatatatgtgtatacatgcaatatataataactgattttattttaaatagttatattttagagaattaaaaatgagaaaaataatatttattttacttttattccatttacaacattctttatttctctgtgtagaccaaggtttctggcctataccacaatccttcagtaagaagaattgcyttcaatattttttgttgaatggatctgttagaaatacatttcctcagtttctgtttgtatgagaaggtctttatttattcttcatttttaaatgatgtttttactggatatggaattctggattgccagttttttttctttagtactttgaagaagtcaatttattgtcttctctttgcatttattccaaaaagagtgctgatgtagttcttatccttccctctatttataatgtatctttttgtctagccaccttcaagattttctctttgtctttggtttacagcaatttgtatatg

SEQ ID NO: 931549 - DNA, 794 bp, Homo sapiens
gcagtcaggaaatgcagtagtaactattttaccataatacatttatgtatgtttaattctgtatcctttgtataggtaaggttattatccataatttataaatgaggaaactgagggttacaaagattaaggacatggggcaaggttgcacaagtagtagatgttgaagccaggttttgaaacaaggcaatctgactctacttgaaatttaaagtctgtattcttttttttttttttttgagatggagtcttgctctgtcacccaggctggagttcagtggagcgatctcagcctactgcaacctctgcctccgaggtttaagtgattctcctgcctcagcctcctgagtagctgtgattacaggtgtgtgccaacatgcctggacaatttttggatttttagtagagatggggtttcaccatgttggccagrctggtcttgaactcctgacctcaggtgatccatctgccttggcctcccaaagtgctgggattacaggtgtgagccaccttgctgggcctaaagtctgtatttttaaacatgaagctgactgtctttattctggcatgtaaagtaaactctttacatacataacaatgtagctggaaagatgggatacataaaccaaaacataactaataaagtaagattgcataattaggggctaacaaaatgtgcaaaatatattgtatgtgtgttattaggctccagaggaggaaagaacactgtgagctaaagtggtcagaaggaaatgggatttctcatagctttggaaaaatggagagatgagcaa

SEQ ID NO: 931550 - DNA, 794 bp, Homo sapiens
gcagtcaggaaatgcagtagtaactattttaccataatacatttatgtatgtttaattctgtatcctttgtataggtaaggttattatccataatttataaatgaggaaactgagggttacaaagattaaggacatggggcaaggttgcacaagtagtagatgttgaagccaggttttgaaacaaggcaatctgactctacttgaaatttaaagtctgtattcttttttttttttttttgagatggagtcttgctctgtcacccaggctggagttcagtggagcgatctcagcctactgcaacctctgcctccgaggtttaagtgattctcctgcctcagcctcctgagtagctgtgattacaggtgtgtgccaacatgcctggacaatttttggatttttagtagagatggggtttcaccatgttggccaggctggtcttgaactcctgacctcaggtgatccatctgccttggcctcccaaagtgctgggattacaggtgtgagccaccttgctgggcctaaagtctgtatttttaaacatgaagctgactgtctttattctggcatgtaaagtaaactctttacatacataacaatgtagctggaaagatgggatayataaaccaaaacataactaataaagtaagattgcataattaggggctaacaaaatgtgcaaaatatattgtatgtgtgttattaggctccagaggaggaaagaacactgtgagctaaagtggtcagaaggaaatgggatttctcatagctttggaaaaatggagagatgagcaa

SEQ ID NO: 931551 - DNA, 633 bp, Homo sapiens
gatggtcgacagcatgctggggctgagcacagtcccggggtggggtggaggagacagacgcgtatgagaatgatagcaatgccatggtgtgagggcagtgacgctcatgtgcaggtgttgaacccgcataagggttgttttacccatccccaggcggaaggtcgtttagtgatggattttttttttttttttttgagacggagtctcgctctgtcgttgggctggagtgtagtggcgggatctcggctcactgcaagctscgcctcccgggttgacgccattctcctgcctcagcctccggagtagctggtactacaggcgcctgccgccacgcccggctaattttttgtatttttagtagagacggggtttcaccgtgttagccaggatggtcttgatctcctgacctcgtgatctgcccccctcggccttccaaagtgctgggattacaggcgtgagccaccgcgccctgcctgagtgatggttttctaaggaagagtggctctgttgagaagtagcagttggacgatttggaggcacagatatgagaacatgtaaatcagtgaacacagagtgagaagtccagggtgcagggcagagccagtaagagtttcagcagcgagaagagtgaag

SEQ ID NO: 931552 - DNA, 626 bp, Homo sapiens
gaaaaggtaagaagtctatggccataccaccctgaacgtgctggatctcatctgacaaagtaatgaaaactacggcttctcccaagaaaattgcacatatctacaaagtttggagagtctacaacctcctgaaacctatgcatgaaccaccacaggccagtcattaagaatctcaatcaagattaaaaaaagaatcctggttaagaaatattatttcagcatgataatcacttgtacagaaatgatgcttagataaggatatgggtgattgtaacattgagttataacattttgcatagatctttgkttttttttctttttaaattgctcagactattctctataacaattgtgcaatctttgaagctgaagtttattccactaaaagagaattcaaccaccatatcttaaataatatgtagaatcaagtatcccaaaatcaactcagtgaacattcagattgaaaactccttgttttaagcttgatatcaataacattatgaagttcacaagataatcagaaggaagactatttaggtactggtaattcgattttttaaaaaattgaaattggcaaacattccatccaaacaatctaagctatggtctgtcttctgtacaacttt

SEQ ID NO: 931553 - DNA, 575 bp, Homo sapiens
ttctatatacaaccctatgttgtctgtgaactaaaacagctttacttttcgtttcaaaccttgatgtctttaatttctttatacaatgagcaaaagttaatgttgagcagaaatagagaagacagaaatcctcatcttattactgattacaagagaaaaacactgtctttcatcattaagtgtgatgttagatgtaggattctcaaagatgccccttatctcatggaggaaatccctctaattcctcttttcttaaaaggttttgtcaaaaatgggtgatgaattttgttaaatgttttgtctatatctattaagatgattgcgtggttttaatcttttaktctactaattgttaattgattttgagctgttaaaccactcttacattgctgggataaattccatatgccacaatgtttaatcttctttatatgttactgggtttatttggcttttttttttttttttttgagacagggtctcactctgttgtccaggctggaatgtagtggcatgtgatcacggctcactgcagtctcaacttactgggttcaaggaatcttcccacctcagcc

SEQ ID NO: 931554 - DNA, 619 bp, Homo sapiens
atggcccacaagacatttcttgttagttgtctttccattatctcaaaataatgtggcaaaagaaaataatgccttttaattcaataaagcacttcataattctacaaattgaattaatattctttaggatagtcacttatattcaacatcttaggttgatcctagagagcaagacagacatataataaagaagagaggttttgaaatcaagcatatttctctctcagctttaaattcaaatcccaatgtattagtttaatgaacttggacaagtaggacacaacttggaatggaatggaaatttaatatactgtaattatttattaatgatattaatcatattstttcttatccttctaccatcctgttattattcatcaaatattatataaaatatacaacctacactggtaaattcattaacctcttccattttcccacttgtgccaccccaatctggcctcattttctcatctctaaactactgcaataatctattttgatctccagttcctctctttctaacatatttctctagatcagtcttccgaagtggaagtttttaaattctgttacaggtagccttaaaattccccgtcactatcacagagatcagtgg

SEQ ID NO: 931555 - DNA, 617 bp, Homo sapiens
tactgtaatgtgtacatacatcacaatatcacattgtaccccataaatatatacaatttttgtcattaaaaataaattaaatatttttaaaaatgtattttaaatagcagaaatttttattttgataaagaaaaatttatgattttgtgggtcttgcttttcatattgtttctaaaaattatttgcttaacccaaagattaaatgattttatctttccagacatttacactttgggcatttacttttaggtctataatctatatttatacaatttttatatattatatatatatatgttgctaatatgatgaatcacaattttttaaactttaagttcaggatacatgtgcaggtttgttatataggtgaactactgtcactgaggtttcttgtacagattattttgtcacycaactattaagcctagtattcattagttatttttcctaattctttctctcccacccttcaccctctgggaggtaacagtgtcttttgttctcctttatgtgttctcatcatttagctcccacttataaattagaacatgtggtatttggttttctgttcctgcaaatgacatgatcttgttctttttagtggctgcgtagaattc

SEQ ID NO: 931556 - DNA, 576 bp, Homo sapiens
gtgaaagattcctttttgtggccacaattcttcttcttctttattttattttattttattttattttactctattttcctgagacagagtcttactctgttgcccaggctggagtgcagtggcctgatcttggctcactgcaacctccacctcccagattcaagtgattctcctgccacagcctctgaagtagctgagattacaggtgtaagccaccacaccagcctaattttttatrtgtttagtaaagacagtgtttccctatgttgttcaggctggtcttgaactccagacctcaaatgatccgcctgccttggccccaaagtgctgggattacaggcatgagccaccatgcccggcctgcttcatcagcctaaataatagcaatacagtcattggtaattgatttgaaataatatatatctagaattttaaagtaattcaactattttataataattttaaatgaaatgtgatactataactttaaaaatagggttaactgcattattcactttgggttcaatttttcatttattgcaaagatgttgattgaatggcatgtgccttttctat

SEQ ID NO: 931557 - DNA, 612 bp, Homo sapiens
ccaaaacaaaggggttacagggcccatgcaagtccagaattcagtggggcagtcaaattttaaagctccaaaatgatctcctttgactccaggtctcacatctaggtcacactgatgcaagaggtgggtcttggacagctctgcccctgtggctttgcagtgtacagcatctcttctggctgctttcaagggctcgtgttgcctgtctgtggcttttccaggcccatggtataagctcttggtggatctaacatgctggggtctggaggacagtagccctcttctcacagctccactaggcagtgtcccagtagggactctgtgtgggggctctgacttcacatttctcttctgcgttgmcctagcagaggttctccatgagggcccacccctgaagcaaacttttgcctgggcatccaggcatttctatacaccttctgaaatctaggcagaagttcccaaacctcaattcttgacttctgtgcacctgcaggctcaacaccatacggaagctgccaaggcttgcagcttccaccctctgaagccacagcctgagttatacgttggtccctttcagccaaggctggagtagctgggacacaggtgggacac

SEQ ID NO: 931558 - DNA, 620 bp, Homo sapiens
cctggccaacatagggaaaccccatctctactaaaaatacaaaatttagctgggcatggtggctaatcccagctactcgggaggctgaggcaggaaaatcgcttgaacccagtaaggggaggttgcagtgtgcagaaatcttgccactgcactccagcctgggtgacagagtgagactctgcttcaaaaaaaaaaaaaaaaaaggataaaaaggatttagcctatatcccaagactacatggaataacctattgcccctaggctacaaacctgaacagcatgttactctactgaataatgcaggcaattgtaacacaatggtatttgtgtatctaaacatacctaaacatagaaaaagtacactaaaagtactgtaaaaggcaaacaatggtgcacttatcatgaatggagcttgcaggacttagtaagytgtgagtgaacgagagggcctaggacattactgttcactgctgtaagctttacaaacactgcacacctaggctttattaaattcatttttaaaaatttcggtagtaaatttaccttagcttactgcagttttttactttataaactaaattttttaactttctgattcttctgtaataacacttaattta

SEQ ID NO: 931559 - DNA, 575 bp, Homo sapiens
agggattgagttcttgatttgattcttagcttagtcgttgttggtgtatagcagtgctactgatttgtatacgctgattttgtaatctgaaagtttgctgctagtagccttttggatgagtctttggggttttctagatatacaaccatatcactggcgaacartgagagcttaactccctcttttccagtttgaatgctctttgtttctttctcttgtcctgttgctctggctaggacttccagtactacgttgaatagaaatggtgaaagaggtcatccttgtcttgttctagttctcaggggtaatgctttcaacctttcccccattcagtacgacgttggctgtgggtttgtcatatgtggcttttattactttgaggtgagtccctcctgtacttattttgttgagggattttatcataaagggatgctggattttatcaaatgcttttttctgtatctatttaaatggtcatatggtttttgtttttaattctgcttatgtggtatatcacatttattgacttacatatgttaaacaacccctgaatctctgggatgaaaccctgctga

SEQ ID NO: 931560 - DNA, 687 bp, Homo sapiens
agtccctcccacctatgagcctgtaaaatcaaaagcaagttagctacttcctagataaaatggagatacaagcattgggtaaacacaccaactctaaatgggagaaattggccaaaacaaagaggctacaggccccatgcaaatccaaaatccaatagggaagccattaaaccataaagttcccaaatgttttcctttgactccctgtctcacatccaggtcacactgatgcaagaggtgggctcccacagctatgggatgctccacccctgtggctttgcagggtacagccccccttcctggctgcttccacaggctgacattgagtgtctgtggctttttcaggcacacagtgcaagttggtggatctaccattctgggggctggaggatggtggccctgttctcacagctccactaggcagtactccagtggggactctgtgtgaggtcttcaatcctacatttcccttccacactgccccagsagaggttctccatgagggcgccactcctgcaacaaacttctgcctggacatccaggcatttccatacatcctctgaaatctaggtgggggctcccaaactttatttcctgaattctgtgtgctcgcagacccaacagcacatgtaagctgccaagacttggggcttgcaacctctgaagcaatgaccagagctgcacttt

SEQ ID NO: 931561 - DNA, 609 bp, Homo sapiens
aaaaatcagtagcatttctatatgttaatagcaagccatatgaaaaataaagaaagtaatcccattaacaatagctacaaataaaataaaataccttagaatgaacctaaccaaagaagtcaaagatttctaaaattaaagctataaaatattgatgcaagaaattcaagggaaaacamcagaaatagaaagatattttgtgtttatgtattagaagattctatgttgttaaaatgtccatacaacccaaagcaatttgtagattcaatgtgatccccaccaaaataccaatgacattcttcatggaaatacaaaaaaaatcctaaaattaatgtggaaccataaaagactgagaatatccaaagttattctgagcaaaaagaagaaaaccagaggaatcacattacctgacttctgattatactacaaagttattgtaatcaaaacagcatggtactagcataaaaacagacagactaatgaaacagaataaagaacgcagaaattacttccatacatctacagtgaactcatttttgacaaaagttccaagtacataccttaggaaaagggtggtctcttcaataaatggtgctggaaaaactatat

SEQ ID NO: 931562 - DNA, 609 bp, Homo sapiens
aaaaatcagtagcatttctatatgttaatagcaagccatatgaaaaataaagaaagtaatcccattaacaatagctacaaataaaataaaataccttagaatgaacctaaccaaagaagtcaaagatttctaaaattaaagctataaaatattgatgcaagaaattcaagggaaaacaccagaaatagaaagatattttgtgtttatgtattagaagattctatgttgttaaaatgtccatacaacccaaagcaatttgtagattcaatgtgatccccaccaaaataccaatgacattcttcatggaaatacaaaaaaartcctaaaattaatgtggaaccataaaagactgagaatatccaaagttattctgagcaaaaagaagaaaaccagaggaatcacattacctgacttctgattatactacaaagttattgtaatcaaaacagcatggtactagcataaaaacagacagactaatgaaacagaataaagaacgcagaaattacttccatacatctacagtgaactcatttttgacaaaagttccaagtacataccttaggaaaagggtggtctcttcaataaatggtgctggaaaaactatat

SEQ ID NO: 931563 - DNA, 743 bp, Homo sapiens
atccctccggtcctgggttttcctttattgggaaagtttttattactgattcaatctcactactcattttggtctttttagggtttctgtatttttagggttcaatcttggagggttctatgtgttcaggaatttattcatttcctctaggatttctagtttgtcagtgtagagatgttcatagtagtttctgattatcaattgtatttctgtggtttcagttgtaatgtctccttttttaaatttctgattgaattgtctctcttcttggtcaatctagctagtgttctatcacttttgtttacatttacagaaaacaaacttttcatttggttgattcttttttttggtctcaatttcatttaattctgctctgatcattgaattttttccttctgctagttgcagttttggttccctcttaytcttctgggtccttgaggtgcaatgttaggttgttaatttgtgatctttctgtcctttggatgtataaatttattgctcaaaacttccctcttagtcttttcctatatcccagaggttttggtgtattgtgtctctttttattcatttccaaaagtttttaaatttacatcttaattttgtccttgacccaaagattattcaggagaagattgttgagttttcatgtgtttgtatatttttgagagttcttcttagaattgatttctagttgtattccactgtggtctgagaagtgacttgatatgataattaagatt

SEQ ID NO: 931564 - DNA, 711 bp, Homo sapiens
ccagctggatccttatcttatacatgaggatcctcaccttatacaaaaatcaactcaagatggataaggacttaaatctaagacctgaatctataaaaattctagaagataacattggaaaaacccttctaggcattagcttaggcaagaatttcatgaccaagaacccaaaagcaaatacaatgaaaacaaagwtaacctagttgggacttaattaaactaatttttttgccagcaaaaggaacagtcagcagagtaaacagacaacccacagagtgggagaaaatcttcacaatctatacaatttgacaaacaactaacatccagaatctacaatatactcggaaaaatcagtaacaaaaaacaaacaatgccatcaaaaagtgggctaaggatatgaataaacaattctcaaaagaagatattcaaatggacaacaaacatatgaaaaaatgatcaacatcattaataatgagagaaatgcaaatcaaaaccacaatgtgataccaccttactcctgcaagaatggtcataatcagaaaatcaaaaaacagtagatgttggcgtggatgtagtcatcaggaaacacttctacaccactggtgggaatgtaaactagtacagccactatggaaaatagtgtggagattccttaaagaaaaaaaaattataggtgtcaaaccgataatgtctcctgtgattgatcaaaca

SEQ ID NO: 931565 - DNA, 636 bp, Homo sapiens
atacatgatgagtttggggtttgatattataccacacaacactgggattatgcaattatcatacagactgaatgcttttgtgctgaaagcattctgaggcaggggtggactcaggttttttcagtcctgggttaatcactttgaggactctcttcaataaaaaaaacatgaaactgtgattttaaaagcaggaatagagccttggaagagccccacacaaacggagaaccctgaatcattctcccaggttagggaatgagactcttttccaacttcattgcctttcattgtaaggattctggcttagaaataacattgctaggaggagccaagatggccgaataagaacagctccagtctacagctcccagcatgagtgaygcagaagacgggtgatttctgcatttccatctgaggtaccgggttcatctcactagggagtgccagacagtgggcacaggacagtgggtgcagcgcaccgtgcgccagccaaagcagggcaaggcattgcctcactcgggaagtgcaaggggtcagggagttccctttcctggtcaaagaaaggggtgacagacggcacctggaaaatagggtcactcccacccgaatactgcacttttccaacgggcttaggaa

SEQ ID NO: 931566 - DNA, 609 bp, Homo sapiens
agaaatgtctatttgcatcctgtgtccattttttaatcaggttatattttcctgctattgagttgtttgagttccttgtatattttggatattaaccccttatcagacctattttgcaaacagtttcttccatttggtaagttgtctcttcactctgttgatggtttcctgagaatttttgttttttggaggtggagtctcattctgtcatgcagatcttggctcactgcaacctctgcctccctggttcaggcgattctcctgcctcagcttcctgaatagctggaattacaggcgtgtaccatcatgcccggctagtttttgtatttgtagcagagacgaggtttcaccatgtaggccaggctggtcttgaactcctgacctcaagtgatccgcctgcttcggcccccaaagtgttgggattacaggtgtgagccactgcgcccggcctcctgagaattttttttgaagasagacaatcagcattcagcagttgtttatgaagtgcctgctatgtgccaggtaccaggctactatctgacttaaaatggggaacaagacagagttcctgggtacgtgggatttccattttactgggaatcacggtga

SEQ ID NO: 931567 - DNA, 598 bp, Homo sapiens
gccaggcttggtgtcaagagcctgtaatcccagctactcgggaaactgagacaggataattgcttgaacttgggaggtggaagttgcagtgagccaagatcgcgccactgtactccagcctgggtgacagagtgacagcctgtctaaaaaaaagaaaaaagaaaaaaaaagaacatgttttgttttgtttagttttctttagagatggggatctcactatgttgcccaggctggtctatgaactcctgggcccaagcgatcttccctcatcagcctcccaaaatggtgggattacaggcctgagacactgtgcccggccaggacagttgcaagaattaaattgcawtatagatgcaaatacctaagtaaacgctcgatatgtgtcaggtgttcgaaaaatactagtttattctccatctgaattgaagggattgaatattttctaactcgtttctacttattgataaataatagttttattattggtgaattttaaaattgaagttagctaaaactgcaatcattttaacaaccaaaactttaattttctcaacactaaaactcaattccgcgccaggcctgccagacacctgcgccc

SEQ ID NO: 931568 - DNA, 759 bp, Homo sapiens
ccctcctgtgctggggccccagcaccccccttctcagggcacacgctgccccatcttgcacctgcctctgtcatgtctcattctccccccagaccatgaatgttcatgggcagagacataatagggtccttggagatgatcaggttaagatgaggtcaccgggcacggtggttcacacctgtaatcccagcactttgggaggccgaggcgggtggatcaagaggtcaggagttcaagaccagcctggccaacatggtggaaccctgtctctactaaaaatacaaaaattagccgggtgtggtggagggtgcctgtaatcccagctactcgggaggctgaggcaggagaattgcttgaacccaggaggcggaggttgcagtgagccaagatcacaccattaactccaaaggttagtggttagtgcccactccagcctgggcaacagagcaagactctgtcttggaaaaaaaaaatgaggttatgaggtgggtcctgatcggacactgctgtgtccttaygaaagggggagtctggacacagacagcctcctaggagagcaccacacgatgataaaggcagaaaccagagtgatgcctctacaagccgagcaatgtcacagatcaccagaagccaggagactggcctaggacagagcaggagacagccagccctgccgaaccctcaatctcagagccccagcctccagaactacaggacaataaccatctattgttacactgcccagtgtgcattgctttg

SEQ ID NO: 931569 - DNA, 593 bp, Homo sapiens
cttcattttgcaatatatttttgctgagtacagaattgcaggttgccagtgatttttttctcagcgcattgaaaatatcattccatggtcttctggctgactccttttggttttgcacaaaagtcaactgtcagcctgtccctcttcaatgtatratctatcttttctctcgtacttaggacatctttcctttatttttggttccctgcagtttcacttacgttttttctttttttgagatggagtctcgctctgttgcccaggctggagtgcagtggtgcaatctcggctcattgcaacctctgcctcccgggttcaagcaattctcctgcctcaccctcctgagtagctgggattacaggcttacaggcatgcaccaccatgcctggctaattttttttgtatttttagtagcgaccgagtttcaccatattggccaggctgctctggaagtcctgaccttgtgacctgcccgccttggcctccctaagtgctgggattacaggtgtgagccactgcgcctagactatgttttttcttttaacttaacttggaacgtatcgggcctctgaggattgttctttcttcaattc

SEQ ID NO: 931570 - DNA, 644 bp, Homo sapiens
gagagtccattggtggtaaattttctgtttttgtctatgtgaaaatgactgaatttaatcttcattttgcaatatatttttgctgagtacagaattgcaggttgccagtgatttttttctcagcgcattgaaaatatcattccatggtcttctggctgactccttttggttttgcacaaaagtcaactgtcagcctgtccctcttcaatgtataatctatcttttctctcgtacttaggacatctttcctttatttttggttccctgcagtttcacttaygttttttctttttttgagatggagtctcgctctgttgcccaggctggagtgcagtggtgcaatctcggctcattgcaacctctgcctcccgggttcaagcaattctcctgcctcaccctcctgagtagctgggattacaggcttacaggcatgcaccaccatgcctggctaattttttttgtatttttagtagcgaccgagtttcaccatattggccaggctgctctggaagtcctgaccttgtgacctgcccgccttggcctccctaagtgctgggattacaggtgtgagccactgcgcctagactatgttttttcttttaacttaacttggaacgtatcgggcctctgaggattgttctttc

SEQ ID NO: 931571 - DNA, 743 bp, Homo sapiens
tacttaatgagaagatggcaagccaattggcgtgctcccccgctctctttaatatggcacatcgaaaaatgtgactttagtgatctatcttttaatgattctgacttgctcactcttacttcttttaattcagcagcaaataagcctgtgatttgcccaggaatcccaacaggggattcttttgattttatgttgggggtttgggtctttttttaggggacaggaaggctttgccagggttacaccttcctcactctgccatcagaaggagcccgttccatcccagggtttgttctttgaatcacaacgaaatgggacccaggaaagtccmacaacccagctcacttcagagaggacaatctacaggcgacaagctggccttgcagtgtgaagccgaggccacaccgtcagggaaggtggggagaccagggtcccaggctgcacctgagcctgcacgacctggggaaggcctctccccttctccagcctccagttctctggctggagaagggaacgggcctggctgatcccagggtcctgaggtttgatgctgagtgtaggagagttcttctgggcaggttttctagtgtttggatgggcacctgcctcctttgggaactaggcaatgtttaagagtggaccctgcctccacctcatgtgtcttatatggccttgggcaagtccctgggttcaagtctgtaaattgggaagggcgatggtgcccacctacctggcaaagccct

SEQ ID NO: 931572 - DNA, 743 bp, Homo sapiens
tacttaatgagaagatggcaagccaattggcgtgctcccccgctctctttaatatggcacatcgaaaaatgtgactttagtgatctatcttttaatgattctgacttgctcactcttacttcttttaattcagcagcaaataagcctgtgatttgcccaggaatcccaacaggggattcttttgattttatgttgggggtttgggtctttttttaggggacaggaaggctttgccagggttacaccttcctcactctgccatcagaaggagcccgttccatcccagggtttgttctttgaatcacaacgaaatgggacccaggaaagtcccacaacccagctcacttcagagaggmcaatctacaggcgacaagctggccttgcagtgtgaagccgaggccacaccgtcagggaaggtggggagaccagggtcccaggctgcacctgagcctgcacgacctggggaaggcctctccccttctccagcctccagttctctggctggagaagggaacgggcctggctgatcccagggtcctgaggtttgatgctgagtgtaggagagttcttctgggcaggttttctagtgtttggatgggcacctgcctcctttgggaactaggcaatgtttaagagtggaccctgcctccacctcatgtgtcttatatggccttgggcaagtccctgggttcaagtctgtaaattgggaagggcgatggtgcccacctacctggcaaagccct

SEQ ID NO: 931573 - DNA, 743 bp, Homo sapiens
tacttaatgagaagatggcaagccaattggcgtgctcccccgctctctttaatatggcacatcgaaaaatgtgactttagtgatctatcttttaatgattctgacttgctcactcttacttcttttaattcagcagcaaataagcctgtgatttgcccaggaatcccaacaggggattcttttgattttatgttgggggtttgggtctttttttaggggacaggaaggctttgccagggttacaccttcctcactctgccatcagaaggagcccgttccatcccagggtttgttctttgaatcacaacgaaatgggacccaggaaagtcccacaacccagctcacttcagagaggacaatctacmggcgacaagctggccttgcagtgtgaagccgaggccacaccgtcagggaaggtggggagaccagggtcccaggctgcacctgagcctgcacgacctggggaaggcctctccccttctccagcctccagttctctggctggagaagggaacgggcctggctgatcccagggtcctgaggtttgatgctgagtgtaggagagttcttctgggcaggttttctagtgtttggatgggcacctgcctcctttgggaactaggcaatgtttaagagtggaccctgcctccacctcatgtgtcttatatggccttgggcaagtccctgggttcaagtctgtaaattgggaagggcgatggtgcccacctacctggcaaagccct

SEQ ID NO: 931574 - DNA, 743 bp, Homo sapiens
tacttaatgagaagatggcaagccaattggcgtgctcccccgctctctttaatatggcacatcgaaaaatgtgactttagtgatctatcttttaatgattctgacttgctcactcttacttcttttaattcagcagcaaataagcctgtgatttgcccaggaatcccaacaggggattcttttgattttatgttgggggtttgggtctttttttaggggacaggaaggctttgccagggttacaccttcctcactctgccatcagaaggagcccgttccatcccagggtttgttctttgaatcacaacgaaatgggacccaggaaagtcccacaacccagctcacttcagagaggacaatctacaggcgacamgctggccttgcagtgtgaagccgaggccacaccgtcagggaaggtggggagaccagggtcccaggctgcacctgagcctgcacgacctggggaaggcctctccccttctccagcctccagttctctggctggagaagggaacgggcctggctgatcccagggtcctgaggtttgatgctgagtgtaggagagttcttctgggcaggttttctagtgtttggatgggcacctgcctcctttgggaactaggcaatgtttaagagtggaccctgcctccacctcatgtgtcttatatggccttgggcaagtccctgggttcaagtctgtaaattgggaagggcgatggtgcccacctacctggcaaagccct

SEQ ID NO: 931575 - DNA, 631 bp, Homo sapiens
agaattgcaacagagaaagagtaattcacacagagctggccactgttgtattattcaaatgagtctctctgagcatttggggatcagtttttaaacataatttggcccaggtgtggtggcgtacacctataattccagcactttgggaggctgaggtgggcagattccttgaggtcaggagttctacaccagcatgaacaagatggtgaaaccccatctytacatttcaacaacatggtgaaaccccatctctataaaatacaaaaaattagctgggtatggtggagtacacctgtagtcccagctagccactgcacctggccaacccattgatttagagtgaaataaatttatactatcacagttctgaaggtcagaggtccaaaatcaaggtgacagcagaaccatgcatctctatgaaggctgtaggggagaatctattccatgcctttatctgagctcctggtgctcccagcaatgcttggcacttattggcttgtagaggcatcacttgaatctctgcctgtgttgttgcacagtgttctcctgtgtatctcgcttcctgttgtcttccctgtgtgtctctgtgtttcttctccttttcttagaaaaggagaccaattagggctca

SEQ ID NO: 931576 - DNA, 592 bp, Homo sapiens
cctcaggattggaatctaggtcatgctcttcttggggtagtcacaaccagtgacttaagctggtaaaagacctagacattgccacccaatgcaggacttttctcataggcagtctgctcaggagttccaggatgagttggcagagactgtcagatctgtatctacatgtcttcccctatccaatcctgcttcctcccctttcctttcacagttatttctcctatttaacaagacttttgcactccttgtttttcttttctttttttttttttgagacggagtcttgctctgtagcccaggctggagtgcagtggtgcartctcggctcactgcaagctccgcctcccgggttcacgccattctcctgcctcagcctcccaagtagctgggactacaggcgtatgccaccatgcctggctaatttttttgtatttttagtagaggcggggtttcaccgtgttagccaggatggtctcaatctcctgacctcctgatccgcccgcctccgcctcccaatgtgctgggattacaggcgtgagctaccgcgcccggccagccttttgcactcctaattccatctcagcatctgctt

SEQ ID NO: 931577 - DNA, 577 bp, Homo sapiens
gtgagccctctgtcatgcctgcataagggccacttgagggctccttggtcaagcagtaatgccagtgcctgggaaggcacccattacttagcagaccgtgaaagggaatctcctttccttggaggagtcagggaacactctgctccaccagcttcttgtgggaggctggatattatccaggcctgcccacagtcatctggaggcctaaagccctccctgtggtgttgtgcttcaatggtcactttccttgtccactttcatgttcctcccatacttctggttactctttgaagttcgtagtagatagcggtagaagaaatagtgaaagtcttaaagtytttgatctttcttacaagtgcatagaagaaaatgctgacgtatgctgccttccctctctgctttggctacctagaagggaagggccacctgtcccatgatcacatgacttgcttgaccttatcaatcacttggatgactcaccctccttaccttgtcccccttgtattgtttgcaataaatgtcagcgcgcccagccattctgggccactaccggtcccctcatcttggtggtagtggt

SEQ ID NO: 931578 - DNA, 752 bp, Homo sapiens
tatgcaggtttttgtgggacatcagttttcaaataatttgggtaaatttacttggtgattgctggattgtatggtaaaatgatgtttagctttgtcagaaatcaccagactgtcttccaaaatgctgaatcattttgcaaatcccactatcaaggaatgaatgtttctgttgctccatgtccatgtgagcattggatgttgtcagagtttaaaattttagctgttctgataggtgagcaatggtttatcattgttattttaatttgtaattaactaatgacgtgttgttgagtatctttttgtatgctatctgtaaatctttggtgaattacttgttcagatcttttgcccattttagttgagttgtttgctttcttatttytgaagtttaagagttctttgcatattttgtatactagccattggatagctgataggcaattgctttttttctcagtcattctcctaacagtgtctttgacagagcagaagttcttaattttaatgaagttcagcttatccagtttctcttcatggattgtgcttttgtgttatatctaaaaactcaccaaacccaaggtcacctagattttttcatatgttattctctagaagttttatagttttgcatttaggtcttcgattcattttgagttaatgtttgtgcaaggtataaggcctgtgtctagattcattttttttggtatgtggctgtccagttgtttcaccaccatttgttgaaaagactgtcc

SEQ ID NO: 931579 - DNA, 759 bp, Homo sapiens
attttttttggtatgtggctgtccagttgtttcaccaccatttgttgaaaagactgtcctttctccattgaattgtctttgctcttttgtcaaagatcagtaggctatgtttatgtgaattatttctgggttctctattctgctccattgatcggtctttttttttttttttttttttttttttttttgtccgtaccacactgtctttactactgtcatttctatgaatttgaatacatgtgtagawctatgtaaccaccaccataattaacatacacaaccattctattattctaaaacaattccctcatgcaaactctttatatgccacctctcactcacacacagcctctgacaaccactgatctgttttcatcatgatagttttttttttttttttctggggactactgtatgaatgaaatcatataatacatgactttttgagactggcttgcatcactcagcatgatgcttttgagatttatccatgttcttgcgtgtatcagtgattgtttcttgttatggctgagggatacccacgctgtatgaatgtgtcactatttgtttatttgttttctaattgagaaacatttgggttatttctagttttgatcaattagtaataaagacatataagtatccctgtatagatttttgtgtgttaacataagttttcatttctgtagagtcaatacccaggagtgagctgctaagccatatgataagcatatgattactttagaagaggctactaaa

SEQ ID NO: 931580 - DNA, 653 bp, Homo sapiens
gctttgacataaaattatgtcatctgcaaatggggatagtttgacttcctctcttcctatttagatggtctttatttctttttcttgcctgatttattttgccgggacttctaatactatgctgaataagagtggtgagagagggcatcattatcttgggccagttttcaaggggaataagtccagcttttccgcattcagtatgatattggctgtgagtttgttgtaggaggctcttactaatttaagatatgttccttcaatatctagcttcttgatagtttttaacctgaggagatattgaactttatcaaaagccttttctgtttctattgagataatcatgtggtttttgtctctagttctgtttatgtgacgaatcacatttactgatttgtgtatgttgagscaaacttgcatcctggggatgatgcctacttgatcatggtgaattaactttttgatgtcttgctggatttgatgtgcaagtattttgttgaagatttttgcatcgatgttcattaaagatattggcctaaaattttattttgtcgtgtctctgcccagtttgtgtcaggatgacattggcttcatagaataagttagggaggactccctcctcactttctggaatagtttcagtaagaatggta

SEQ ID NO: 931581 - DNA, 716 bp, Homo sapiens
gtcttttttttttttttttttttgtctctcagtggtggtatttagtcagaggagattacttatgagagaagtgaacctattccagataaatcaggtgagctaatagtcacctcctacaaaagaggaagggacaattgtctgtaatgtctgatcatccctcccctgccagyatttattgtctttattgtctcacctctgaacttgacattgagcactgagctcaaaagataatagaaattctgtctgcaggaaaaacaaaaaacaaaaaagatgggcacagaagtttacaatggccaatggctgggatctgcaagatagggcactagatagatctggattacttagggtgagcaaccaaatgtgacccaaggagagctcagttgctggcagattcaagtagacagttgccaggggctcaggggtgtccaaactcagaggaaaacaaaatattcaccaacatatggagacttgtacatctaaaataagtatacacagacacatatacacatatgtacatgttcatgcacaaacaccgaagtccatgcaaacacagtcaccatatcaggcacatgcatgtagagttttaaagcacatggcaatgcgcttgggtgacataagcaaatggagataggctcatcagaaacagaacccaggggagaaaagaggctgtttcagggcttccctgcccagtgcacagtctcaatacaacaatcagc

SEQ ID NO: 931582 - DNA, 706 bp, Homo sapiens
agccacaaatgaagagaaaagccatgcccaccccagccccagagaaaccaataagaatcctctattattttcactattcatttaggtttttatactccacctcctttcaaaaaagatttaagatgtacgacattaccgaacacctaaaatagaaccagagaaacgaaagccattcccacaaagtgaaggaacagtttccaaaacccctgcgaggcagagttaagacctgtgacgtggggagcctggaaacacccggcccacgcgtgctgcagatgtggggagcctggaaacacccggcccacgcgtgctgcagatgtggggagcctggaaacacccggcccacgcgtgctgcagatgtggggagtctggaaacacccggcccacgcgtgctgcagatgtggggagcycggaaacacctggcccatgcctgttcagtccgtcatggcgtttggtttatggtggccgatactaagagccactgaggtctgggttgtgtaagggttagctaccaccctataacctccctaccaggtaataaggagaccaagtctttgatcaaattctgattttttaactaaattttcattagaaagcaagcacaaaataaaatcaaaacaacctttaccttcagcttgagaggctaccagctctctattctttcagattctccaatcaacaccttgcaggacaagaccccaaaaaagtt

SEQ ID NO: 931583 - DNA, 516 bp, Homo sapiens
ttcgttctgcgtgtcctgtactcaacagtcatctcatgctgcagggtggctgcgtgtgctccgtacatcacacccatatttcaggtagggacggttcccggagggtgctcagcaccatgccgactactgctggctggcacgttcgcacgtggccatgtcagctccaaggaggatgctgacatcctgctggctggcacgttcgcacgtktccatgttagctgcgagggccatgccgacatcctgctggctgggcacttccacaggtagccatgttagctgagagggcgatgccaacatcttgctggctggcacgtttgcacgcggccatgttagctgcgaggacaatgcttctgcaacttttggtttcttccctttcatcctcccacccctgaccgtttttgcctgggagcaagtgcctaataaattacctgcactcaaatctttggctcagagactttccgagagaacccaagctgaggcagacaatgaaatcaacactaccagccacttagctgc

SEQ ID NO: 931584 - DNA, 516 bp, Homo sapiens
ttcgttctgcgtgtcctgtactcaacagtcatctcatgctgcagggtggctgcgtgtgctccgtacatcacacccatatttcaggtagggacggttcccggagggtgctcagcaccatgccgactactgctggctggcacgttcgcacgtggccatgtcagctccaaggaggatgctgacatcctgctggctggcacgttcgcacgtgtccatgttagctgcgagggccatgccgacatcctgctggctgggcacttccacaggtagccatgttagctgagagggcgatgccaacatcttgctggctggcacgtttgcacgcggccatgttagctgcgaggacaatgcttctgcaacttttggtttcttccctttcatcckcccacccctgaccgtttttgcctgggagcaagtgcctaataaattacctgcactcaaatctttggctcagagactttccgagagaacccaagctgaggcagacaatgaaatcaacactaccagccacttagctgc

SEQ ID NO: 931585 - DNA, 565 bp, Homo sapiens
gacagtcatttttcttgtgtgttcttttttccattaggaagatgggtttcttcaaagcattatgctattttaaggcctcaaacatttccagcatttgcacagggttgctgtgagccttgacttatttgcagagagatgttgaactgagataaggctacttaataatacaccagttcttgctaaacacaatttctttccacatttcttagtgaaagccaagagcgagcactctctcatagaagccttagaagaatgttaccttatttttctagagaaggctacttgaaccttgagttatgcagaatggcttcaatgaatggattttaacattggtcaatggctagttttcaaaggctacaatttaagataaaacccacgaaaggggattaaaagaaattgtcaagtttccaacctgaaaataatcytgcaatataaatattttcatttcttcaattagtatgcaaaatagtatggagtttcctcaaaaaaaaaaaaaaaataaactaaaaatagccaggtgtagtggctcacgcctgcaatcccatcactttgggaggccaaagca

SEQ ID NO: 931586 - DNA, 588 bp, Homo sapiens
aaggagggtcccaccctcatggcataatctaacttaaattccctctcaaaggcccttgatatggtttggatctgtgtacccaccaaatctcatgtttaattgtttaattgtaatcctcattgttggaggtggggcctggtgggaggtgactgaatcatgggggcagagttctcacaagtggtttatgtgttcttttgatagtgagtgagttctcaagagatctggttgttttaaaagtgtgtagcaccttccacctctctctctcagtcctgttcctgccacgtaagaaggctattcccactttgtcttcatccatgagtaaaagttccctgaggcctccccagaagcagatgctgccrtgcttcctctacagtcggtggaaccatgagccaattaaacctcttttctttataaattacccagcctcaggtatttctttacagcagtgcaagaacagactactacaaccccatttccaaatactatcccattgggcatcagggcttcaacatatgaatttgagggaacacaaacattcaatccataacagtagcttagaaacctgtctggcatttcagaaatcctcca

SEQ ID NO: 931587 - DNA, 643 bp, Homo sapiens
gtgatttttcttttaaattctgtttacatgatatatgacatttattgacttacgtctgttaaaccatctctgcattccttgtatgaaacctacttgatcatggtggattatctttttgatatgctgttggatttgttttttttgtttgtttttgagatggaatcttactctgttgcccaggctagagtgcagtaatgtgatcttggctcactgcaacctccacctcccaggttcaagcaattcctgtctcagcctcctgagtagctggggctgcaggcgcctgccaccaagcctggctaattgttgtattttcagtagagatggggtgttgccatgttgtccaggcttgtcttgatctcctgacctcaggtgatccaccaccttagcctctcaaggtgctgggattacaggtgtgagccaccatgcacagcctgctgttggatttggatcgctagtattttgttgaggatttctgcatctatrttcatcagggatattggtctgtaggttgttgttattatgtccttgcctggttttggtattaggatgatactggcttcacagaatgattaagggaggattccctctttctcttttgaaatagtgtcagcaggattggtaccaatactttgaatgtctgaca

SEQ ID NO: 931588 - DNA, 647 bp, Homo sapiens
aatcgagtcactcccaccctaatactgcacttttccaagggtcctagcaaacggcacaccaggaaattatatcctgcgcctggctcggagggtcccacacccatggagcctcgctcatttctagcacagcagtctgagacctaactgcaaggcggcagtgagcctgaggaagggcgcccaccattgctgaggcttcagtaggtaaacaaagcagccaggaaacccraactgggtggagcccaccgtcgctcaaggaggcctgcctgcctctgtagactccacctctgtgggcaaggcatagccgaacaaaaggcagcagcaacctctgcagatttcactgttcctgtctgacagctttgaagagagtagtggttctcctagcacagagtttgagatctgagaacggacagactgcctcctcaagtgagtccctgacccctgagtagcctaactgggaggccccccagtaggggcagactgatacctcacatggccgggtacccctctgagacaaaccttccagaggaacgatcaggcagcaacatttgctgttcagcaatattcgctgttctgcagcctccgctgctgatacccaggcaaacagggtctggtgtacctgaaagggtcttgagtggacctccagcaaa

SEQ ID NO: 931589 - DNA, 647 bp, Homo sapiens
aatcgagtcactcccaccctaatactgcacttttccaagggtcctagcaaacggcacaccaggaaattatatcctgcgcctggctcggagggtcccacacccatggagcctcgctcatttctagcacagcagtctgagacctaactgcaaggcggcagtgagcctgaggaagggcgcccaccattgctgaggcttcagtaggtaaacaaagcagccaggaaacccaaacygggtggagcccaccgtcgctcaaggaggcctgcctgcctctgtagactccacctctgtgggcaaggcatagccgaacaaaaggcagcagcaacctctgcagatttcactgttcctgtctgacagctttgaagagagtagtggttctcctagcacagagtttgagatctgagaacggacagactgcctcctcaagtgagtccctgacccctgagtagcctaactgggaggccccccagtaggggcagactgatacctcacatggccgggtacccctctgagacaaaccttccagaggaacgatcaggcagcaacatttgctgttcagcaatattcgctgttctgcagcctccgctgctgatacccaggcaaacagggtctggtgtacctgaaagggtcttgagtggacctccagcaaa

SEQ ID NO: 931590 - DNA, 602 bp, Homo sapiens
  misc_feature 70: n = A,T,C or G
aaatattttacaaaagaatttcagctattaaatgtaggaggaaaaggagaaatagaaaaatcacccttanaaaaatcacagtaataattgctgcaggccaggcacagtggctcacacctgtaatcccagcactttgggaggccgaggcaggtgaatcacgacatcaggagttcaagaccagcctggccaagatggtgaaaccccatctctactaaaaatacaaaaactagccggacgtggtggtgggtgcctgtaatcccagctacacaggaggctgaggcagggaattgcttcaacccaggaggcagaggttgcagtgagccgagatggcgccactgcgytccagcctgggggacagagcgagacaacgtctcaaaaaaaagaaaaaaaaattgcttcaggcagtatccactgatgaatgccaaatttgatggctgaaactttaaggagaaacaaggtagttacatagtgacacaatattttttctaaattatttagtaatttactgtagtgattttatgtcttgttcaaaattgtttgctattcctccctctgggaagcagagcttaattctatgccccaacaccccaccctattgtgga

SEQ ID NO: 931591 - DNA, 611 bp, Homo sapiens
aaaggaacccttccaggaggaggtgatatctgagcttggttctaaagaatatttaggattcgggacatgtttagattgggggtttggagaagatgatgtaatccaggcaagaggggacagcaaaaacaaagacagaagaattgttcctggaccacatgcagcatgggcaaaggtcagtcatgagaagtaagctttagcaatgggggccagtttaggggaccccaaatgccaaagtagggagggagtgctctataaacaatgttggagcaaaggatatgaacaggcaatacacaggagaagaaatccgaaaactatcaagctcaggtagagatgcttgaactcatgaatacccrgaacaatgaaaacgaaagcaatgctgagataccactttacaccaggcagtctggcaaaacttagaaagttggatgacccgaggactgggcctggatgtgggctcagagtccagctaccttggtattggaagtccgggacaagcattctggaggggagcctgacactccttagttcaattagatgtaaataaaactctgaacagaactgctggtttctggcttctcagcacttctgttcctgagtttttatccaaaaga

SEQ ID NO: 931592 - DNA, 592 bp, Homo sapiens
tacattgataatagtaattatatatagtgtgattacagcacatagataaataaaatgaattcagcaatgtcataaggaataagaaaagggaatttgaaatgctctaatataaggtacatgcactatacgtgaagtggtatagtgttatttgaaggtgaacttagattagttaaaaatgtatagtgcaaactctagggcaatcataaagatatttttaaaagaagtataactgatgctatagttcagatacttgaacctccaaacctcatgttgaaatttgatccccagtgttggaggtgggatctagtgggaggtatttgggtcataggggtgagtttctcatgaatatattaatgctctttattgytgggggtatgaatgaattcttattctgttagttcccataagagctggttgttttaaaaggcctggaaatcccctctcctggtttcttctctctcactctgtgatctctgtacatggtggcttccctccccttttgtcatgagtgcaagcagtctgagggcttcatcagaagcagatgctggtgccttgcttcttatacagcctgcagggccatgagccagataaa

SEQ ID NO: 931593 - DNA, 761 bp, Homo sapiens
gaccacttctttgatgccttttagccaatcaagtgatgctttttccatgtcctcccatgaaccaattagcacatacctcctcctgcccgtggaccaatcagcatgcatttcctccattctgagcccataaaaaccccagactctgccagagtcaggcactggttgggactaaccgcctgtaggtaggaactctccacttcaggtttcctcttcactgagagctgttcagtcacccaagaaagttcttctccaccttgcttaccctccagttgtccaagtaaccttgttcttcccggatgtgggacaagaacttgggatctgcttaacagcaggagtgaaaagagctataacttctctggccagctcaccaagatgctggcaggaacaaaagaggctgtaacatggtagccctcctgccctccrctggtgctgggcagccaccccatgcaatgggaagtagttgcagggccaggccagcccaggagccacagttggagtgggatggactgaaagagctgtaatacaaatgggctgaaacatctccctccagccctcccacccctgcttgccctgctgcaggtgacaaggaggaggaaagagctgtggtccttctaggatcccagacctcgaggctctccaagccagggctgtgacatgctgtggggctctgtagttccttgcatctccgagctttgaggagccacggtgttcccctcatccagatgctgcagcccacagcagaagctgtttgcagtatgtct

SEQ ID NO: 931594 - DNA, 740 bp, Homo sapiens
  misc_feature 703, 704, 705, 706, 707, 708, 709, 710, 711, 712, 713, 714,715, 716, 717, 718, 719, 720, 721, 722, 723, 724, 725, 726,727, 728, 729, 730, 731, 732, 733, 734, 735, 736, 737, 738,739, 740: n = A,T,C or G
cacttaagaaaatgaatgtagaatatcacagattatgtaaactaccaatttttaaaataaatagtacagaacaaatcgaataaatagtatagaacaaatattagattactgaggaatacaagaagtatgaagaggagcatagatcaactagaatgactaagattagtaaaagaatatcggaagaactagagattatgtttaaaggaaactgaagattatgagaagggaatttcaaaggtttcatatggtatagagaggtaagaacagttaaagaatgtgtgtgtgtgtgtgtgtgtgtctgtgtgtgtgtgtgtggagagagagagagggagagaaagaaatgaagatrgccacacatttcttgttactcttaccattaaaaaggtatgggtttgttttccttttttgtgaaattccacaagcctgtgatttgttttgagcaatataatacaacagaatatgtgatcttgggtagcctctgaccttgggctttaaaagatctgaatcttttactttcccctctgatagaaagctccctcttagaagaaataaacaatttaagatgcctgactactcttagaagaaaatgttgtgagggagcccaagctagccacatgaagaaaaggagaaagaaaatgttaaagaggaggtgtgtaagaatatcgaggtgctggacatgtgaactaagccttctggaattttnnnnnnnnnnnnnnnnnnnnnnnnnnnnnnnnnnnnnn

SEQ ID NO: 931595 - DNA, 626 bp, Homo sapiens
attttggtatgttgtttttttcattttcatttgtctcaagacattgcttttaatcttagaaatctttaatttaaagaatatggtatatcttcaagattataaacatttgtttaacttttattttaagtttaggggtacatgtgcaggtttgttgtataggtaaacttatatcatgggggtttgttgtacagattatttcatcactcaagtattaagcctagtacccattagttatttttcctgatcctctccctcctcccatcctttaccctccaataaatccgtgtttcattttcctctatgtgtacatatgttttcacgttttagctcccacttataagtgagaacatgcagtgtttggttttctgttcctgtgttagtttsctaaagataatgacctacaactacatccatgtttctgcaaaggacatgatcttgtccttttttatggcaacacagtattccatggtgtatatgtaccacattttctttatccagtttactattgatgggcatttaggttgattccatgtctttgccattgtgaatagtgctgcaataaacatacacgtgtgtgtatctttatgatagattgatttctattcctttgagtatatacccagtaa

SEQ ID NO: 931596 - DNA, 626 bp, Homo sapiens
attttggtatgttgtttttttcattttcatttgtctcaagacattgcttttaatcttagaaatctttaatttaaagaatatggtatatcttcaagattataaacatttgtttaacttttattttaagtttaggggtacatgtgcaggtttgttgtataggtaaacttatatcatgggggtttgttgtacagattatttcatcactcaagtattaagcctagtacccattagttatttttcctgatcctctccctcctcccatcctttaccctccaataaatccgtgtttcattttcctctatgtgtacatatgttttcacgttttagctcccacttataagtgagaacatgcagtgtttggttttctgttcctgtgttagtttgctaaagataatgacctacaactacatccatgtttctgcaaaggacatgatcttgtccttttttatggcaacacrgtattccatggtgtatatgtaccacattttctttatccagtttactattgatgggcatttaggttgattccatgtctttgccattgtgaatagtgctgcaataaacatacacgtgtgtgtatctttatgatagattgatttctattcctttgagtatatacccagtaa

SEQ ID NO: 931597 - DNA, 628 bp, Homo sapiens
acagaagtaagcttcagaaggtgggtaataacaaactcctccgagctaaaggaatgtgttctaacccaatgcaaggaagctaagaaccttgaaaaaaggttagaggaattgctaactagaataaccagtttatagaagaacataaatgacctgatggagctgaaaaacacagcatgagaactttgtgaagcatacagaagtatcaatagctgaatcaatcaagcagaagaaaggatatcagagactgaagatcaacttaatgaaataaagcatgaagacaaggttagagaaaaaagaatgaaaagaaatgaacaaagcctccaagaaatatgggactatgtgaaaagaccaaacctatgttacattggtgtatctgaaagtgataggcagaatggaaccaagctggaaaacactcttcacgatattatccaggagaacttccccaacctagcaagacaggccaacattcataytcaggaaatacacagaacaccacaaagatactccttaagaagagcaaccccaagacacataatcatcagattctccaaggttaaaatgaaggaaaaaatattaagggcaaccagagagaaaggtcaggttacccacaaagggaagcctatcagac

SEQ ID NO: 931598 - DNA, 750 bp, Homo sapiens
aaacttatcaggaccaccaccggttaggaagagacagttactaaccctgaataagactaattcagcctcccgatccctgtaaagatacagagaatataacagcaaaatctatgaaataggatcaggcgaagggatggcaaagctcaagtccacatttcttgaagtcmacaggaggcacatggtcctgtctcacgtcacagggaaaggggaggcattggcttctatcccaggttcttgtaggtcgctgatgttcactctgaaataaatcttcaaaaacacacattggtgccttccacattttcttagactcctctgggagcccaaacttggccagaacctctggcctggagagacatgaatgagcatctggctcttgacctgaggtcgctggtcccggaattaacggaagttgccaccagctccttacagggcacgttcatgacatttctccagaagagagctccagagcaataagcttcctcattccccaggtaatcagtccttctctaaacccgaagtcagtttagggtgatccagggctactccctgttccctgtctgttccttacaggggtgctgtgggctttgcagtgagagggacttgggttcaaatcccccaccaagcaaatccccctacctggggccgagcttcccgtatgtgggaaaatgaatccctcaggttgattgctgcaagcaatgaaattcaactagaaaaataggtagacgtgagggcaagctgtctgtcatttag

SEQ ID NO: 931599 - DNA, 795 bp, Homo sapiens
ggtgcccaccaagattaagggtaggtctgcctttcccagctcactggctcaaatgttaatctcctttggcaacaccctcacagacacacccaggatcaatactttgcatgcttcaatccaatcaagttgacactctgtattaaccatcacaagtccaacccttgtcaacttgaacccatacgaatctcctgagatcatacataatcttcaaataaagacaataataaggtcataattacacctaatgtaatacaactatcttttgtacaaccagaaatgcaccaatccccaacccaagtgctrttatgtaaagttaagaacacttaaatgctgatatgaagtcaataaattttatgtcacatgataaaggaaaaaagaaataaaatgaaggaattttcttagtacaagtgtgtacatgcacaaacatgtttttaacaaaagaagaaggaaatactgatgacaattacagtcctcatttctgcaacagatcacgtggttgtagctggtattgatgactacttcttctactaccgattctgtattccctttgccttcagcaagcatcacagcaggtagagttttttctcctagtggagtgatgcaaaccttcattcctgaagggtctgggccatttgtagtcctgcctggattgggctgttgtagtttcccgttgaccttaatgacagggcagggtaatgttaagagatgccctaatggatctcctgtattccatacatattcttccttacctccattgtggagtaatagactgattgcatcttgatagttcaggtc

SEQ ID NO: 931600 - DNA, 730 bp, Homo sapiens
agatggtgcccaccaagattaagggtaggtctgcctttcccagctcactggctcaaatgttaatctcctttggcaacaccctcacagacacacccaggatcaatactttgcatgcttcaatccaatcaagttgacactctgtattaaccatcacaagtccaacccttgtcaacttgaacccatacgaatctcctgagatcatacataatcttcaaataaagacaataataaggtcataattacacctaatgtaatacaactatcttttgtacaaccagaaatgcaccaatccccaacccaagtgctattatgtaaagttaagaacacttaaatgctgatatgaagtcaataaattttatgtcacatgataaaggaaaaaagaaataaaatgaagkaattttcttagtacaagtgtgtacatgcacaaacatgtttttaacaaaagaagaaggaaatactgatgacaattacagtcctcatttctgcaacagatcacgtggttgtagctggtattgatgactacttcttctactaccgattctgtattccctttgccttcagcaagcatcacagcaggtagagttttttctcctagtggagtgatgcaaaccttcattcctgaagggtctgggccatttgtagtcctgcctggattgggctgttgtagtttcccgttgaccttaatgacagggcagggtaatgttaagagatgccctaatggatctcctgt

SEQ ID NO: 931601 - DNA, 571 bp, Homo sapiens
atatttattatccatttgtatgtgttctttggaaatgtctactcacgtcctttgctcattttaatagggttatttggttcttcttcctgttgttgtatagtttaattccttgtaaattcttcatgttagttccttgtcacaggcaaggtgtgcgaaaattttctgtcattctgcaacttgcctgttcagtctgttgctgtgaaatacctctatagtttaattctcacttgtctatttttttcttgggtgtgttttgtggtgttagtcataaattcttcacctcgcccagtgcccagaagagttgtcctcgtattttmtttgagtacatttatagtttgaggtctcatatctaagtctttaattcattttgtgttgagtatgtatgtgttgagggtaggggtctagttttgttcttctgcatgttcatttccaatttccccagcaccatttattgaatggggtgtcctttttctggtgtatgtttttgttaagtttgtcaaagatcatttggctatagattgtgtggctcaattctgggttctgtaaaatgtaccctagagccttgattctc

SEQ ID NO: 931602 - DNA, 615 bp, Homo sapiens
caggaacacccagctcctgtgcccaaggctttagcaaactttctacttgtgcctcagttctggacaagtggtttcatcttcaatcaggattatatcacaaatctcaggagcttctcttaaccagtgactgccatgtgagttagctggytgacttctgcaaagtcctctgtgctgtagaggatcaggaatggcttcccaggtccccccggtgactgggagtgcatgcaaagcatgtcctgatcctgctccttctcatatactccccactgctcagtacgtcagctccagtcctgggtaggcttaaggccttcctccgtggcctggattgccaggtttcccagtgggagtgcatacacctgatgcagtttctgccaccctcgtgctggagactcacggttttccacctggcttatggtgtaggctgcagccaccacttccttcaaagggcctgtggtttcattcagttttcctgttaagttcctgtgttgcttcttggaagaaggctcatagcatgtctctgcactatttggtctttgcaagtggaagaagcacactaacaaaaccttcagtctaccatcttgaaaaactactaacaaggtaattttatatgagaaa

SEQ ID NO: 931603 - DNA, 615 bp, Homo sapiens
caggaacacccagctcctgtgcccaaggctttagcaaactttctacttgtgcctcagttctggacaagtggtttcatcttcaatcaggattatatcacaaatctcaggagcttctcttaaccagtgactgccatgtgagttagctggctgacttctgcaaagtcctctgtgctgtagaggatcaggaatggcttcccaggtccccccggtgactgggagtgcatgcaaagcatgtcctgatcctgctccttctcatatactccccactgctcagtacgtyagctccagtcctgggtaggcttaaggccttcctccgtggcctggattgccaggtttcccagtgggagtgcatacacctgatgcagtttctgccaccctcgtgctggagactcacggttttccacctggcttatggtgtaggctgcagccaccacttccttcaaagggcctgtggtttcattcagttttcctgttaagttcctgtgttgcttcttggaagaaggctcatagcatgtctctgcactatttggtctttgcaagtggaagaagcacactaacaaaaccttcagtctaccatcttgaaaaactactaacaaggtaattttatatgagaaa

SEQ ID NO: 931604 - DNA, 745 bp, Homo sapiens
gcaactctatttgtctgttagtcacacagaaaattcataataatacaatgccatgtttcctaatatattctgagagttctgtgagaaatgaaacctattgtatcggttaagtactgaagatggccgaataggaacagctccagtctacagctcccagcgtgagcgacgcagaagatgggtgatttctgcatttccatctgaggtaccgggttcatctcactagggagtggcagacagtgggccsaggtcagtgggtgcgcgcaccctgcgcgagccgaagcagggtgaggcattgcctcactctggaagcacaaggggtcagggagttccctttcctagtcaaagaaaggggtgacagatggcacctggaaaatcgggtcactcccaccccaatactgtgcttttccgacgggcttaaaaaatggcacaccaggagattatatcccgcacctggctcagagagtcctatgcccacggagtctcactgattgctagcacagcagtctgagatcaaactgcaaggcggcagcgaggctgggggaggggtgcccaccattgcccaggcatgcttaggtaaacaaagcagccaggaagctcgaactgggtggagcccaccacagctcaaggaggcctgcctgcctctgtaggctccacctctgggggcaggacagagacaaacaaaagacagcagtaacctctgcggacttaaatgtccctgacagctttgaagagagcagtggttctc

SEQ ID NO: 931605 - DNA, 745 bp, Homo sapiens
gcaactctatttgtctgttagtcacacagaaaattcataataatacaatgccatgtttcctaatatattctgagagttctgtgagaaatgaaacctattgtatcggttaagtactgaagatggccgaataggaacagctccagtctacagctcccagcgtgagcgacgcagaagatgggtgatttctgcatttccatctgaggtaccgggttcatctcactagggagtggcagacagtgggcccaggtcagtgggtgcgcgcaccctgcgcgagccgaagcagggtgaggcattgcctcactctggaagcacaaggggtcagggagttccctttcctagtcaaagaaaggggtgacagatggcacctggaaaatcgggtcactcccaccccaatactgtgcttttccracgggcttaaaaaatggcacaccaggagattatatcccgcacctggctcagagagtcctatgcccacggagtctcactgattgctagcacagcagtctgagatcaaactgcaaggcggcagcgaggctgggggaggggtgcccaccattgcccaggcatgcttaggtaaacaaagcagccaggaagctcgaactgggtggagcccaccacagctcaaggaggcctgcctgcctctgtaggctccacctctgggggcaggacagagacaaacaaaagacagcagtaacctctgcggacttaaatgtccctgacagctttgaagagagcagtggttctc

SEQ ID NO: 931606 - DNA, 794 bp, Homo sapiens
cctggactttttttggttggtaagatattaatcattgcctcaatttcagagcctgttgttggtctattcagagatcaacttcttcctggtttagtcttgggagggcgtatgtgtcgaggaatttaaccatttcttctagattttctagtttatttgcatagaggtgtttatagtattctctgatggtagtttgtgtttctgtgggattagtggtgatatcccctttatcattttttattgtgtctatttgattcttctctcttttcttctttattagtcttgctagtggtctatcaattttgttgatcttttcaaaaaaccagctcctggattcattgattttttgaagggttttttgtttctctatctccttcagttctgctctgatcttagttatttcttgccttctgctagcttttgaatgtgtttgctcttgcttctctagttcttttaatgatgaygttagagtgtcaattttagatctttcctgctttctcttatggacatttagtgctataaatttccctttacacactgttttaaatgtgtcccagagattctggtatgttgtgtcttttttctcattggtttcaaagaacatctttatttctgccttcattttgtaatgtacccagtagtcattcaggagcaggttgttcagtttccatgtagttgagtgattttgagtgagtttcttaatcctgatttctagtttgattgcactgtggtctgagagacagtttgttataatttctgttcttttacatttgctgaggagtgctttacttccaact

SEQ ID NO: 931607 - DNA, 829 bp, Homo sapiens
tccacctggattgaattgtttgatttaagagtggcagttcagaaagaggaagagatgcctctccctttccttccacacatcccccaccctgcagtgccacgaacatcccttcaagccaggagaggcaggaagggacaggcccaagccaggattccctggctgggctagagcagccttgccccatgtctccagcttgtctgcatgtgcccacactcagccagtttggtgcctgtttagagactgcatatgttgtcatgtcttttttcctgtgttgtgccatttgtctccttaaggccctacaggggccgccccttgttcctgcctcatgcccacacctgatgacctagcacccaaggccttgtaaaccagaccccaacctgtctgtccaaccatgtctgcgtctggccttccatttccttctggaacatcttttatttatgamggtatttgtatcttcaggcccagtgactatcaggggctcagtacttgcttatgtactgaggaggtatgcatggtgacccccatgagtgccactctcaggccccatctttgcttatgctcctctcttccctttggcaccagcatgaggccccccccaattactctgccctgtgccagcccaaacttagcacacttccagcagagcaattgattccctggctctccccacctcaccagcccactcctcctaaagggcttgctctctggagcaatggctccatccttcactcagtggctcaggtgagaaaccctgcagtcatccttggttcatttctttccctcacacccaaatccagtccaattcactctaatggttccaccttttcat

SEQ ID NO: 931608 - DNA, 748 bp, Homo sapiens
gaagagattttcttttaaaagttcctatgcaagggccgggcatggtggcttacacctgtaaccccagcattttgagaggccgaggtgggtgaagcacctgaggtcaggagttcgagaccagcctgaccaatatgttgaaatcccgcctctactaaaaataaaaaaattagccagccatggtggcatgtacctgtaatctcagctactcgcaaggctgagacaagagaattgcttgaacccgggaggcagaggttgcggtgagccaagattgcgccattgtactccagcttgggcaacaagagtaaaactctgtctcaaaaaaaaaaaaaaaaagttcctatgcaagaacttcgctatttcattaaattaatcaggtaaatgtaatggaataaatgcttgcaaacaaacttgacataatttaggatctaaggttattaattgatcttaagtatctgggcaatttccaatttaagaattataaaaaacattttwaaaaaagttcttattaaaggtaaagtatctttgtctaattcaaagcttatttaagggttatatgtgaaataaggtaaagaaatcaggaaataagagatgtaaagaaagttaaagatgtaaagtagtatttctggtaaaaaagaaaaataattttatatacgaaagaatcttgtgtggtaaatttttgtcctaagatagaaataatgaggttgttcaagaaagagggatatttaagacaaaacagtctaaacgtgct

SEQ ID NO: 931609 - DNA, 607 bp, Homo sapiens
tggaaatgtacaacatgtacttttttctgtctggtttatttcactttgcctatgtttttaaggtttattcatgtggtgcatataggaatttctacactatgttttgctgatgcattcattcatcgatgaacacttaggttgtatccacctttcgactattgcaaattatgctgctgtaataaacattagtgtacaaaatctgttgaagttattgttttcaattatttggtggtatatacctcaaagtgaaactgctgttcrtaaggtaattctgtgtttaatttttttgagaaactgccagattgttttccacaatgactgcacaattttacattctcattggcaatgcacacaggttccaatttctccacatcctcaccaatacttcttattttcatctttttaatattaatcatccaaatgggtagtatctcacagtttttatttgtatttccctgatgattagtgatgttgagcaacttttcatatacttatcggccatctgtctatcttctttggtgaaatgtcagttcaagtactttgtccatctttgaatcagctttttttgatttttttgttattgagttgtaggagtactttatttatt

SEQ ID NO: 931610 - DNA, 663 bp, Homo sapiens
aaaaatcaatgtaatacacatgttcatggaataagaataaagcatttcacaaaatctaaaatccactcatgataactactctcaacaaactaggaacaaaaggcaactccttcaaccaataaggggcatctacaaaacacctctagctgagaacgtatggaacactacgttaatggtgacaggctgagtgctttccccttaaatcccccttgtgcctacaaggcaaggaggctgagtgtttccattggtacccaacaatatactggagattctagcaaaggccggaaggcaaaaactgaacaaacaaaaagcatcargaatggaagagaagaagtaaaactttatttacagataaaatgatccttagtagaaaatactaattaagggatccacaaaaactcttagaactaataaacaagttttaaagggttgctagatacaagatcaatattagaaaatcaattgcatttctatacatcaggaaaaaacaattccaaaattaaattaagaaaataattccattcacaacagcaccaaaaaaaattatatacttggtaataaactgaacaaaagtagtacaaaacttatatgctacaaactgcaaaataccgttgagagaaattaaagaagatctaaataaacagaacgatatttcatgtttat

SEQ ID NO: 931611 - DNA, 559 bp, Homo sapiens
gcaggacaatggtgtgaacccaggaggtggagcttgcagggagccgagatcacgcccactgcactccagcctaggcgacagagcgagactccgtctcaaaaaagtaaataaataaataaatagataaataaataaataaattgcccattygtatagtgagctgttttcttgagtgttgagagttctttataccagtaagatacaaatcttacatcagatacatgtttatgaaaatattttctcccagcctctagttttttaattaacagtttctcttgaagagcaaaaatttaaaattttgatgaaatccaattggttatgttgttcttttaatgattctttttggtggtcatatctaggaaagctttgcctaatgcatggtcacaggtgttttcttacacattgtttttatagttttaagttttatatttaactctatgttcaattttgagttaatttttgtatataatatgagatatagatcaaaggggttttttgttttatttttacgtgtgaatatctagttgttccagtatcatttgttgagcagacttctttc

SEQ ID NO: 931612 - DNA, 702 bp, Homo sapiens
ttatctattgctgcttaacaacttacccccaaatgtagtgatttaaaagaataaacattcagtgtcttgtattttctgaggccccagaatctgtgcctgacttagctgggtgcctttgcctccaggtctcttacgaagctgcagtcaaggttgttggccaggactgcagtctcatctgaagatttaactgaagaaggatcttcctctattcacgtggttgttgtcaggttcaattccttgtaggctgttgaactgaaggactccatttcttgcttgatgttggctagagcasttccctcatttccttgccatttggcctttctgtaggatagttcacaacatagcaactgtcttccatcagagcaagcaagccaaagagcaagagagagtatacactttcccacaatccctggtaatcactaatgtactttccgtctctatggatacacgtttttctggatgttttatattagtggaatgagacaatatgtgaccttttgtatctggctgcattaacatagcataatgttttcaaggtttattcatgttgtagcaggtatcagaattaattcctttttatggctgaataatattccgttgaatagatacatgactttttgtttatctgttcatcagttgatagacatttgagtggtttccacattttgaaagcttttccttttacagtttgtggtttgtcag

SEQ ID NO: 931613 - DNA, 752 bp, Homo sapiens
taaagtgtctgtagtctattgtgttaagcaaatattcacctttttaattatctattgctgcttaacaacttacccccaaatgtagtgatttaaaagaataaacattcagtgtcttgtattttctgaggccccagaatctgtgcctgacttagctgggtgcctttgcctccaggtctcttacgaagctgcagtcaaggttgttggccaggactgcagtctcatctgaagatttaactgaagaaggatcttcctctattcacgtggttgttgtcaggttcaattccttgtaggctgttgaactgaaggactccatttcttgcttgatgttggctagagcacttccctcatttccttgccatttggcctttctgtaggatagttcacaacatagcaactgtcttccatcagagcaagcaagccaaagagcaagagagagtatacactttcccacaatccctggtaatcactaatgtactttccgtctctatggatacacstttttctggatgttttatattagtggaatgagacaatatgtgaccttttgtatctggctgcattaacatagcataatgttttcaaggtttattcatgttgtagcaggtatcagaattaattcctttttatggctgaataatattccgttgaatagatacatgactttttgtttatctgttcatcagttgatagacatttgagtggtttccacattttgaaagcttttccttttacagtttgtggtttgtcagttg

SEQ ID NO: 931614 - DNA, 488 bp, Homo sapiens
attttcttttttaagaggtagggtcttgctgtgttgcccaggctggtcttgaactcctggactcaagtgagtctctggcctcagcctcccaaagtgctaggattacaggcatgagccactatgcccagccccttccttgtgtttgtttcccttcactgttattatttttagtagtttaatttacttatattagttataattaatttttatcattagtaaccttccttttatagagaaaactagacagtagtgaaaagtagacaattgtgaattgtctgtcatattccaacattccrtagcaggctagcagtttatgaatacatcatttcataattcgtatatgcctcttcataatacaatttttcagtgtgataaaaaaaatgtttatttacagatccaagtatctttagtctctttgtaaaaataagaaatcaagaccgggtgcagtggctcatgcctgtgatcccagcaccctgagagtccaagac

SEQ ID NO: 931615 - DNA, 567 bp, Homo sapiens
aaaatagcagacttgaaggcatcatacaactgaactccataatatattacaaaactatagtacccaaacagtatggtattggcacaagaaaaaaagacatctagactaatggaaagaaatggacaacacagaaataaatccacatatttacaggcaactgagttttgacaaatgtgtcaaaaacatacattgggtgaaataatcaacwtacatttggggaaataatccttcttcaataaatggtgctgggaaaattgaatattcatatgcagatgaatcaaactggaaccctatctgccacaatatacaaatttcaactcaagatgggttaaagactcaaatgtaagttccaacactataaaactaaaagaaaaaaacatagaagacacacttcagctcattggtctgggcaaagattttatagctaagacctcaaaaacacaaataacaaaaacaaaaatataaaaatgggactatattaaactaaaaatcgcctgcacagtgaaggaaacactccacacaataaagagacacctgttgaatgggagaaaatatttgcaaactatt

SEQ ID NO: 931616 - DNA, 735 bp, Homo sapiens
gtgtccggaattggtgggttcttggtttcactgacttcaagaatgaagctgcggaacctcgtggtgagtgttacagttcttaaagatggtgtgtccggagtttgttccttcagatgttcagatgtgactggagtttcttccttctggtgggttcatgaccttgctgacttcaggaatgaagctgcagatcatcgtggtgagtgttacagctcataaaggtggcacagacccaaagattgagcagcagcgagatttattgcgaagagcgaaagaatataacttccacagcatggaaggggacccaagcaggttrcggctgctggctccggtggcctgcttttattcccttatctggccccacccacatcctgctgattggtccattttacagagagctgattggtccgttttacagagagctgattggtccattttgacagagtgcatttacaatcctttagctagacacagagtgctgattggtgcatttacaatcctttagctagacacaaaagttctccaagcccccaccagattagctagacacagagtgctgattggtgcgtttacagtcctttagctagacacaaaatttctccaagtccccaccagattagttagacacagagtgctgattggtgcatttacaaacctttagctagacacagagtgctgattggtgcatttacaatcctttagctagacagaaaagttctccaagtccccacctgaccc

SEQ ID NO: 931617 - DNA, 585 bp, Homo sapiens
gaggaggatagcctcgggcaagttttcaagcctgtctcgccctctgcctggaaatactctgggctgttgagaagagggcacggtggaagtaaggcccttcggtgtgtgtgggagcagggtgaggcctgtgactgccagcttaaccccacttccctgacaacctgcatgactcagcagagacagccgtaatcctcctaggtacacacctccagtgacctgggaatcttacccccatcccccacagcagccacagcaagacccacccaaggagagtctgagctcagacatgcctagccccgcccccacctgatggtccttacctatccacctggtagcagaatacaagaggcatttaatcttgggagttctagggccccacycactgctggtccctctccacgttactatagctgatgctttctggaaagtgtcacctcctggaaggaggccaaccagcacaaaaatagagcattaaaccaccaaagctaaggaccctcacagagtccattgcaccatctgccacctccactgaacaggcactggtgtccatggctgagagacccatagacagttcacatcacagga

SEQ ID NO: 931618 - DNA, 632 bp, Homo sapiens
  misc_feature 21: n = A,T,C or G
gcacccgccaccatgcccagntaatttttgtatttttatgttggccaggctggaggatctgctatttgtttaatgtcctccagtgcttccttttttttttttttttttttttgagacagagtcttgctctgtcacccaggctggagtacagtggtatgatctcagctcaccgcaacctctgactcttgggctcaagtgcctcggcctccccaggagctgggattacagacgtgcaccaccacacccagctgattattgtatttccagtagagatagggttttgccatgttggctggttccagagcctgtgttctgctccattacccttgttgcctgtgtctagkgtccctgctgctggctcagcaatgccagcctcctctaggtccacccgtccactcgggccccagaatggaagcagcagagtaggggctgtggcgagcaataagtggctgggggacaggggccgcggtcagggctggccacgggaagcagacaggcagccagcagggggcagggcagtctgcacagtgtctgatgcctcaggactgtggagcaaggctggctttggcccccttggttggatagttcttacagtgtagaggtgtctccacagcggggggccagtgggagcg

SEQ ID NO: 931619 - DNA, 635 bp, Homo sapiens
ggtggcagagatgtgatgttagataacattcaaccacacattgagactacgattccctttttagtttcttcaattcttgtgattatgataaaaataggagaaagtttcaatccaatgcactatatccttttatttccccccattgttttgagacagggtctcgctctgtcatccaggctggagtggagtggcacgatcatagctcactgtagcctcctgtgctcaagtgatcctctcacctcagcctcccgagtagctggataaacaagtgcgtgccaacatgcccagctaattttttatttttattttttgtagagatggggtctcactttgttgcccagattggtctctaactaattgactcaagtgatcctcctgccttggcctcccaaagtgctgggattataggggtgagcaaccacactggccttctatgtcttcaatacayctgtatcacttgctaatcctgcaaaccatacctatcctgtttttcttttctttcctttttttttttttgagacggagtctcgcactgtcacccgagctggagtgccatggctcgatcttggctcactgcaacctctgcttcctgtgttcaagcgattctcctgcctcagcctccctagtagctggga

SEQ ID NO: 931620 - DNA, 627 bp, Homo sapiens
cctgttcctttcaaaattctctctttgtctttgacttttgacagtttgattgtaatgtgtctcattgtaggtcttttgcaaattatccaacttggagttctttgagcctcttggatttgtatgtccatttccttctttaagtttgagaagtttttggtcattatttttttaactggctctctgcccctttatttttctcttctcgttcttgcactttcataatgcaawcattggactgcttcatggcatcctgtaagtctcttaggctgtcttcactcttcactccttttcccttttgctcctctgactccataatttcaaatgactagtcttccatttcactgattctttcttctgcttgatgttattgaaactgcctttgcaaaaattataactgaagaaattataacagcaaaagacatcagacttaatcaactccatcttgcttctagcatttaaactgtccttgttcattcctggcagtaggatgaactaattttgggatggtattcagttcatggttttgctctcaaacaaagttgatagtagccatttcccgaaaagatccccttcttgcctggaaccagtctgcctttgcaggataaacaaattagccataacattaga

SEQ ID NO: 931621 - DNA, 550 bp, Homo sapiens
catagagaccgaagaatgaaaaggatttttcctgtttggttcatggaaggaaaactttgttttagaaaatgaataatttcatgagaacatttaagactacagctaagaacatgtcaaactagcaagaaaaaaatctttgatgaggaactcagttatcaatttccatacaaaggcttatccagcacaggcatgcaggtagtttacacatggagaagtcaaaagcagcttttcaktgtctggaagccaaggcgagttctaatcatttaatcacttctgctccatatctttgtcctcattatcaaaagactcagaaaaagcctagcagtgagagaaacaagaagctgggtcacacctctaggacttattcccagaccccagtttcgccccacagggttaagatggcatcacacagccaggtgcggtggctcacatctgtaatcccagcattttgggaggctgaggagagcggatcacctgaggtcagcctagcaaaaatggtgaaaccccatctctactaaaaatacaaaaaaattagctgggcatggtggtg

SEQ ID NO: 931622 - DNA, 774 bp, Homo sapiens
cactgtgtctaggaagtaactaacttacttttgattttacaggctcataggtggaagggacttgccttgtctcagatgagactttggactgtggacttctgagttaatgatgaaatgacttaagattttgggggactgttgggaacacatgactagttttgaaatgtgagggcatgagatttgggaggtaccaggggtggaatgatacagtttggctctgtcctcacccaaatttcatcttgaattcccatgtgttgttggaggaacctggtgggaggtaattgaatcatgagggcaagtcttccccatgctattctcatgaaagtgagtaagtctcatgagatctcatagtttttaaaaaaaggctgycccccacacaagctatctctcattttttgcctgccaccattcatgtaagacgcgacttgcttctctttgccttctgccatgattgtaagacttccccagccacatggaactataagttcaattaagcctctttcttttgtaaattgctcagtttcacatatgtctttatcagcagcatgaaaattgactaatacaccctgagagctggttattaaaagagcttggcacctcctcctgtctctcttgcttcctctcttgctatgtgatctctgtacccactaggttccctttgccttcgaccatgaacaaaagcagcctgaggttctcatcagaagccaagaagtttctggtgctgtgcttcttgtacagcctgcctaccatgaggtgaatagatttattttcttt

SEQ ID NO: 931623 - DNA, 774 bp, Homo sapiens
cactgtgtctaggaagtaactaacttacttttgattttacaggctcataggtggaagggacttgccttgtctcagatgagactttggactgtggacttctgagttaatgatgaaatgacttaagattttgggggactgttgggaacacatgactagttttgaaatgtgagggcatgagatttgggaggtaccaggggtggaatgatacagtttggctctgtcctcacccaaatttcatcttgaattcccatgtgttgttggaggaacctggtgggaggtaattgaatcatgagggcaagtcttccccatgctattctcatgaaagtgagtaagtctcatgagatctcatagtttttaaaaaaaggctgccccccacacaagctatctctcattttttgcctgccaccattcatgtaagacgcgacttgcttctctttgccttctgccatgattgtaagacttccccagccacatggaactataagttcaattaagcctctttcttttgtaaattgctcagtttcacatatgtctttatcagcagcatgaaaattgactaatacaccctgagagctggttattaaaagagcttggcacctcctccygtctctcttgcttcctctcttgctatgtgatctctgtacccactaggttccctttgccttcgaccatgaacaaaagcagcctgaggttctcatcagaagccaagaagtttctggtgctgtgcttcttgtacagcctgcctaccatgaggtgaatagatttattttcttt

SEQ ID NO: 931624 - DNA, 633 bp, Homo sapiens
caggggtggagacacccaaggcctttcggaacccaccccttgcatcagtgtggcctggatgtgagacacagagtcaaaggagattattttggagctttaagatgtaatgattggaagatggccaaataggaacagctcctgtctgcagctcccggtatgattgacgcagaagacgggtgatttctacatttccacctgaggtgcctggytcatctcatttggactggctggacagtgggtgcagcccacagagggcaagccgaagcaggatggggcattgcctcacctcggaagtgcaaggggtcaggggatttccctttcctagccaaaagaagctgtgataaactgtacctggaaaaacaggacacttctggccaaatactgtgcttttcccatggtcttatcaactggcagaccaggagattctctcccatgcctggattggcgggtaccatgcccacagagccttgctcactgctagcgcagcagtctgagatcgacctgccagtctgcagactggtggggtaaggggtgtccaccattgctgaggcttgagtaggtaaacaaagcagccgggaagctgaaactaggcagagcccacctcagctcatcaaggcctactgcctatataga

SEQ ID NO: 931625 - DNA, 633 bp, Homo sapiens
caggggtggagacacccaaggcctttcggaacccaccccttgcatcagtgtggcctggatgtgagacacagagtcaaaggagattattttggagctttaagatgtaatgattggaagatggccaaataggaacagctcctgtctgcagctcccggtatgattgacgcagaagacgggtgatttctacatttccacctgaggtgcctggttcatctcatttggactggctggacagtgggtgcagcccacagagggcaagccgaagcaggatggggcattgcctcacctcggaagtgcaaggggtcaggggatttccctttcctagccaaaagaagctgtgataaactgtacctggaaaaacaggacacttctggccaaatactgtgcttttcccatggtcttatcaactggcagaccaggagattctctcccatgcctggattggcgggtaccatgcccacagagccttgctcactgctagcrcagcagtctgagatcgacctgccagtctgcagactggtggggtaaggggtgtccaccattgctgaggcttgagtaggtaaacaaagcagccgggaagctgaaactaggcagagcccacctcagctcatcaaggcctactgcctatataga

SEQ ID NO: 931626 - DNA, 752 bp, Homo sapiens
ataaagcaggcagaacgtggaaggacttgacttgctgagtcttctggccttcatctttctctcgtgctggatgcttcctgccctcgaacatcagactccaagttcttcagcttttggactcttggacttacaccagtgatatgctaggggctcttgtaccttcagccacagactgaaggctgcattgttggctttcctatttttgaggttttgggactckgactggcttccttgctccgcagcttgcagatggccaatagtgggacatcactttgtgatcatgtgagtcaattctcctactaaattccccttcatatatatatctatcctattagttctgtccccctagagaaccctaatactgatttctcagacacagcatgactccatgaaatttatgcctacttgctctaaacccaccaattacaactccctgagggaaacctgcttggaaaatgccctggaccccagtaaaagcctcagcccacaggtcacttgtactctttgccctgttccccacccactagttgactgtgcatgtcctagatggctccccacttcctgttggccctgggaggcatgctgccctcttctctctggcatctgtaagtaataaactgctgttatttcttgtgttttgttgagttgcctcccgtgtctcacctgactgatacactcgaccctaacttgtttgtcaggattctcctagagagtggctatctgctattttggtaggaacaaactggacacag

SEQ ID NO: 931627 - DNA, 492 bp, Homo sapiens
gatgtccagcacctgctgcccggcaggtgtggggctcgggctcccagccacctgcaggacgacagcagtggtcagcgggcggcagctcaaacctgctcaggacctggatgagaagccacctcctcagcagacaggacagagcccggtgccatctgacagaatgtyctagaatgctggatatatgggacatctgcaccgtccgtgatggcagcccctcgcgacgtgtgccactgaacacttgacagcagactggtgcagctaaggaacagagttttcaatttcatttttttttttcttagatggagtctcgctctgtcacccaggctggagtgcactggcgcaatctcagctcactgcaacctccacctcccgcgttcaggcgattgtcctggctcagcctcctgagtagctgggattacaggtgcctgccacgatgcccagctgattttttgtatttttagtagagacggggtttcactgtgttggccaggc

SEQ ID NO: 931628 - DNA, 658 bp, Homo sapiens
cccaaatgacaacagtgttgaggctgggaaaccctgctctaatgcttcctttctattagattactacctctttcctccatgctgcatgcaactctcttgtctctttaaagctaaaacaaagcaaaaaaaaaaaaaaaacaaaccactgattcagcatttccaggttcgagatacacctatcatgtagtaaaagctgaatgcattttgtttcaccattcttcctttactgcccagttttgaagagaatggtttattactatggcagtggtagttagattgcctggaatgaaattccaattttattatccagtgtgtgatcttgagcaaattgttttaacctctctgcctctattttccactgtgtgaaaccaagaaaacaatagagatttaaaaaatatggagtgttttgtttttaagagatgtggtcttgctgtgttgctctrgctattcacaggtgtgatcatagtgcactacagccttgaactcctggcctcaaatgatcctttctcttcagccttctaaaaagctgggactataggtgcatgccatgtttaaagtgcctggctttaaacatggaaatacttaacaaggattcaatgagctaatatgcaagaagcacttagaacagtctctgactcaaagtaagggcaataattgt

SEQ ID NO: 931629 - DNA, 474 bp, Homo sapiens
tcatgtagtaaaagctgaatgcattttgtttcaccattcttcctttactgcccagttttgaagagaatggtttattactatggcagtggtagttagattgcctggaatgaaattccaattttattatccagtgtgtgatcttgagcaaattgttttaacctctctgcctctattttccactgtgtgaaaccaagaaaacaatagagatttaaaaaatatggagtgttttgtttttaagagatgtggtcttgctgtgttgctctggctattcacaggtgtgatcataktgcactacagccttgaactcctggcctcaaatgatcctttctcttcagccttctaaaaagctgggactataggtgcatgccatgtttaaagtgcctggctttaaacatggaaatacttaacaaggattcaatgagctaatatgcaagaagcacttagaacagtctctgactcaaagtaagggcaata

SEQ ID NO: 931630 - DNA, 474 bp, Homo sapiens
tcatgtagtaaaagctgaatgcattttgtttcaccattcttcctttactgcccagttttgaagagaatggtttattactatggcagtggtagttagattgcctggaatgaaattccaattttattatccagtgtgtgatcttgagcaaattgttttaacctctctgcctctattttccactgtgtgaaaccaagaaaacaatagagatttaaaaaatatggagtgttttgtttttaagagatgtggtcttgctgtgttgctctggctattcacaggtgtgatcatagtgcmctacagccttgaactcctggcctcaaatgatcctttctcttcagccttctaaaaagctgggactataggtgcatgccatgtttaaagtgcctggctttaaacatggaaatacttaacaaggattcaatgagctaatatgcaagaagcacttagaacagtctctgactcaaagtaagggcaata

SEQ ID NO: 931631 - DNA, 607 bp, Homo sapiens
agggctgatgacctccagtagtcccctgaattgggtctcagcctcctgccctttgagtgagatgacccttggtgggggtccacccatcttttctttcttttcttttttttagacggggtctccctctgtcacccaggctggagtgcatgaktacagctcactatagcctcaacttccctgggctcaggtaattgtcccatctcagcctcccaagtagctgggactacaggtgcctgccaccacacctggctacatttttttgtattttttgtagagatgaggtttcgccatgttgcccaggctggtctcgaactcctgagctcaagtgatctgcccacctcggccttccaaagtgctgggattacaggcgtgaaccaccgagcccggccacacccatcttttctagatgcagcagctttcaaacccgtaaagtggtaacaatacaaaatgcatttgacacctctgtgctttaggtatgtacacacatatgcacaaacagccacagcaaagcagcacctgctacacagagcaccatggtgtatgccatgggtcctgattgggttttacaggctttcccggaattctgaaggctgtgccactgttccag

SEQ ID NO: 931632 - DNA, 473 bp, Homo sapiens
cttctgtcagacataattcctcagtttagccttcccacctctatacagtctgatagcagaccagcctttattagtcaaatcagccaagcagtttttcaggctcttagtattcagtgaaacctttatatcccttacggtcctctgtcttcaagaaaagtagaacggactaaaggtcttttaaaaacasacctcaccaagctcagccaccaacttaaaaagactggacaatacttttaccactttcccttcttagaagtcagacctgtcctcggcatgctacaaggtacagcccatttgagctcctttttattaggccccagtctcattccagacaccggaccaacttagactgtgcccccaaaaaacttgtcatccctactattttctgtctagtcatactcctgttctccattctcaactactcatacatgccctgctcttgtttacactgccgttttacactgtttctccaa

SEQ ID NO: 931633 - DNA, 599 bp, Homo sapiens; identical to SEQ ID NO: 920180

SEQ ID NO: 931634 - DNA, 823 bp, Homo sapiens
ctctttataggatgactaagccatcagcctaccactccccggaggaggtcttcaatctgatatgcataaaacctcacctcaattcagcgtggctgattctgagttaaacggtgatttttttgtttctttttctgagatggagtcttgctctgtcgcccaggctgcagtgcaatggcatgatctcggctcactgcaacctcygtctcctgggttcaagccgttctcctgcctcagcctcctgagtagctgagattacaggcgcctgccacaccaggctaatttttgtacttttggtagagacagggtttccccatgttgcccaggctggtctcgaactcctgacctcaggtgatccacccaccttggcctcccaaagtgctgggattacaggcatgagccactgcgcctggccaaggggtgatttatttatttatttattatttttattttattttattttagagacagggtctcactctgtcacccaagctggagtgcagtggtgtgatctctgctcactgcagcctcgaactcctggctcaagcaatcctcctgcctcagcctcccaagtagctaggactacaggagcaaaccaccatacccggctgcagtgaggtggaacttccccaaaaaagagcaggcgagtctaacttccccaaaaaagcagctctgaaagtctgtgtaacaggagacgatgacaagatcagcgaccagcctgagcttcagcaagcacagatctacacattcatcgctgtgacaacgaccctgcagacccaacacggaccaccctcccacaatgcagagatagtggccactgctccat

SEQ ID NO: 931635 - DNA, 609 bp, Homo sapiens
gaggctgaggtgggaggatcacttgagcccaggagttgaagaccagcttgggcaagatggcaaaaccgcatctctacaaaaaatttacaaaattagccccgtgtgatagtgcatgtctgtagtcccagctactcagcaarctgaagctggaggattgcttgagcccaggaatttaaggcattagtgagctataattgcaccactgcactccagcctggggtgacaaagcaagacctcctctctaaaaaaaaaaaaaaaaagaaagaaaaaaggaaagaaaagaaagtgaatgcactctgtctgctgatgagtgtgagtgcctaaaacaatacagaaggagtgataagaagaccccttcccttgacttcagctaattatgagttcttttcagacacatatggctccaaaactacctgggagcacatttcttagcacagttccatgcatgggaacagtggttaacattccatgatccttccccatctccttcaagagggtcacgtgctccgtaagcatgacagaggcttcgtaaggaactggctatcagacacgttgtgtgaaagctgggctgtaaatagaatgaatctgaggagagcctgggctgtgggc

SEQ ID NO: 931636 - DNA, 605 bp, Homo sapiens
gagcagggcttgggacctgcagcccgccatgcctgagcctcctcccggcctgccgccgtgggttcctgcgtggccccaccttccctgacgagcggcgctccctactccacggtgcccagtcccatccaccgcccaagggctgaggagtgcgggcgcgctgtgcgggactggtaggcagctccacctgtggcccacgtgcggtatccacccagtgaagccagccaggctcctgagtctagtgargaacttggagaacctttatgtctcgctaagggattgtaaatacaccaatcagcactctgtatctagctaaaggtttgtaaacataccaatcagcaccctgtgtctagctcagggtttgtgaatgcaccaatggacactctgtatgtaactactctggtggagaggtttagaactttcgtgtctagctcacggactgtaaacgcaccaatcagctccctgtcaaaacagaccaatcagctctctgtaaaaaagaccaatcggctctctgtaaaatggaccaatcagcaggattggggggggggggggcggtgccagagaagagaataaaagcaggctgccggaatcaacagcggtaagcggtc

SEQ ID NO: 931637 - DNA, 558 bp, Homo sapiens
attttttcatgtgtcttttggccacataaatgttttcttttgagaagtgtctgttcaagatatggattcttaagagcaatgtctggttttgacttttcgactgtagttttttatccccctttctcaggaagctttgagtcttagaatgttgcctataaagagaatttgggatcattaaaattgatttactgaatggttttcatgatcataaccagatatatggtgcccaaggacagaagaagaaattagcccttgttcataccaaagccacttacacgcataaatctaaaggaaaaaacgatcattttggataaaaaatgatgcacaaaaagttatagaatataaatgcaaagtagcccgggtttatgttatgcttggggaaaraaaaggaaaacccaagtttaagattgtaaatggatggagcatgtggcttggaaaatgtcctctcttctcctgttactgacacctactgtgtgcctggtaccgaaccaagcacttacacacagaatcaacttttacccatacaaatccctgcttgatgggaattaccatttccat

SEQ ID NO: 931638 - DNA, 639 bp, Homo sapiens
gggcatcctaaatctgccattcgggtctcagtgatcctgttctggatttagctctagcactaactggggactaacgctaacctctagcactaacccctccttgggactcaatttattcacctataaacaaggcagcttgatagatcagtattttccacacatgtctagttgtcaaaatcatctgcggtctttcttgaaagtatggaattctggactccacgtcaggtctgctaaaatagaatctccaggggaagggtctgcagatctatttttaacaagcgattcagaaaactcttaggaccaggaaagataggaaagcatcctaggcccagatgatcttarcaattctcccagctcctactatcactcagtcaggctcttgatcggcctccctacagacccatcatgaacactacagtccctctccctatgccccaggatttgaccctcctgagcaattccccaccctgcatggatttgatagctccttccttcctgtaaggcacttaggctcttaagggaggtaaagctatttaaataatgaatggaatttacagtagcattcggaattcacttaagcaatagaaacatgattgcagtaaagtcccttaaaaatcttttcatcgggttagaaagaag

SEQ ID NO: 931639 - DNA, 621 bp, Homo sapiens
tgagatttgaaggaaacatgcacaaatctgtaaaacatagaccttcgctttatttttgtaagtatcacctgccaccatgttttgtaatttgaggtcttgatttcaccattgtcggtgaagaaaattttcaataaatatgtattacccgtctgaagcttaaagatactgtgtaacggactctttccacttgtcccatttctctttgatgacggtctggaatgggttctgaatcaacctgctaattttgtgttcactgagacgtaattcacataacattctccactttatagtgtagagcgcagtggtttttggtgtattcacaaggctgtgcaggttccggaacatttccatcaccctagagcaaaaccccactcccaccagcagtcacccrcgttcatcacctgcccctaggctgctggcggccgggctgctctgtggatcggcctgttctggacatgtcctttcaatgggatcgcacagtacgagtgggtccttggcgtccaactcttttcactcagtgtcgtcttttcagggttcattgaccagcgctgtagcaggtatcaagactcattcctgcttgtggctgagcagtgtcctgtggtgtggctagaccagttgtgt

SEQ ID NO: 931640 - DNA, 621 bp, Homo sapiens
tgagatttgaaggaaacatgcacaaatctgtaaaacatagaccttcgctttatttttgtaagtatcacctgccaccatgttttgtaatttgaggtcttgatttcaccattgtcggtgaagaaaattttcaataaatatgtattacccgtctgaagcttaaagatactgtgtaacggactctttccacttgtcccatttctctttgatgacggtctggaatgggttctgaatcaacctgctaattttgtgttcactgagacgtaattcacataacattctccactttatagtgtagagcgcagtggtttttggtgtattcacaaggctgtgcaggttccggaacatttccatcaccctagagcaaaaccccactcccaccagcagtcacccgcgttcatcacctgcccctaggctgctggcggccgggctgctctgtggatyggcctgttctggacatgtcctttcaatgggatcgcacagtacgagtgggtccttggcgtccaactcttttcactcagtgtcgtcttttcagggttcattgaccagcgctgtagcaggtatcaagactcattcctgcttgtggctgagcagtgtcctgtggtgtggctagaccagttgtgt

SEQ ID NO: 931641 - DNA, 551 bp, Homo sapiens
ccgaagggcgccgggtgccattaagaattctacacatttgggctgggcgtcacacctgtaattccagcactttgggaggccaaggcaggcagatcacgaggtcagcagttcaaaaccagcctgaccaacacggtgaaaccctgtctctactaaaagtacaaaaattagcgaggcgtgggggcggacacctgtaatcccagctattcgggaggctgaggcaggagaattgcttgaacccgggaggcagagtttgcagtgagccaagattgcgscactgcactccagcctgggcaacagagcgagactccgtctcaaaaaacaacaacaacaacaaaacaacaacaacaaaactctacatctgaccccttgaccccaaagcagccctgccccacatgccccctgtacagatgaggatggtgaggcagaggtggacagcttggccagcacctcattgtcaagggcggagctgggattcagatcccactactgtccccgtgcatcaaccgcacatgtcacccactgcgcagcccctcacacggtcactgtgttag

SEQ ID NO: 931642 - DNA, 615 bp, Homo sapiens
agctgtagtatgctgggcactgaccccagcaacccagaggtgttggtaaaaggtttctaagagcatatttgtgcttaagcaatagatgctgacttgattagaagagagcacgtcttttatgaaaaatgcctgaatcttggccgggcgcggtggctcacgcctgtaatcccagcactttgggaggccgaggcgggcggatcacgaggtcaggagatcgagaccatcccggctaaaacggtgaaaccccgtctctactaaaaatacaaaaaattagccgggcgtagtggcgggcgcctgtagtcccagctacttgggaggctgaggaaggagaatggcgtgaacccgggaggcggagcttgcagtgagccgagatcccgccactgcactccagcctgggtgacagagcgagactccgcctcaaaaaaraaaaaaaaaaagaaaaatgcctgaatcttggcaactccaagatggtcagctccatcttatctttcaaaaaatatcctcatggtatacagtatagagagccattttacagagaaaagggagaaatgggcttgttaaatgtagaatgtgcctcagaaggatattttctagtgagaaatttggcttctcaaa

SEQ ID NO: 931643 - DNA, 615 bp, Homo sapiens
agctgtagtatgctgggcactgaccccagcaacccagaggtgttggtaaaaggtttctaagagcatatttgtgcttaagcaatagatgctgacttgattagaagagagcacgtcttttatgaaaaatgcctgaatcttggccgggcgcggtggctcacgcctgtaatcccagcactttgggaggccgaggcgggcggatcacgaggtcaggagatcgagaccatcccggctaaaacggtgaaaccccgtctctactaaaaatacaaaaaattagccgggcgtagtggcgggcgcctgtagtcccagctacttgggaggctgaggaaggagaatggcgtgaacccgggaggcggagcttgcagtgagccgagatcccgccactgcactccagcctgggtgacagagcgagactccgcctcaaaaaaaaaaraaaaaaagaaaaatgcctgaatcttggcaactccaagatggtcagctccatcttatctttcaaaaaatatcctcatggtatacagtatagagagccattttacagagaaaagggagaaatgggcttgttaaatgtagaatgtgcctcagaaggatattttctagtgagaaatttggcttctcaaa

SEQ ID NO: 931644 - DNA, 590 bp, Homo sapiens
ctgtaaagatggacaatttgacgtccacttttccaatttgaatgcttactatttctttttcttgactgattgctttggctacaacttccagtagtgaaagcgggtatccttgtcttcttggcattcttagaggaaaggcttttggcttttccctattcagtatgatgttaactataggttcgtcacacatggcctttaatatgttgatgtatattccttctgtgcctagcttattaggagtttttaatcataaagtgatgttgaagtttatcaaatgctttttctatatctgctgagatgatcatatggtttttgactttcattctgttgatgtgatatatcccacttattgatttgtgtatttgaaccaccctgaacccctggaataaatttcacttgatcatggtgtattatctttttgaygtgctgttagattccgtttgctagtattttgctgaggatttttgtgtctgtagtcatcagggatattggcctgtagttttattgtgtccttgtctggttttggtagcagggtaatgctagcctcatgaaatgaattaatgagaatttcctcctcttcaatttcttgg

SEQ ID NO: 931645 - DNA, 564 bp, Homo sapiens; identical to SEQ ID NO: 920197

SEQ ID NO: 931646 - DNA, 564 bp, Homo sapiens; identical to SEQ ID NO: 920198

SEQ ID NO: 931647 - DNA, 570 bp, Homo sapiens
ttctggaggaattgttctcattttatcacttaatgttgaaatattcctattagttaataataattttcattgtattaaagaatcatattctataccttctccttctgatctacatattgagacctatttgataatatctgtgactgtgacttatctaatttataaatgagattaatataaacaaatgttatctgttttgctcaccagaatccaattctggctaatcacagaaacttcagccgggcgcggtggctcacacctgtaatmccagcactttgggaggccgaggcgggtggatcacgaggtcaggagctcgagaccattctggctaacacggtgaaaccccgtctctactaaaaatacgaaaaaattagccggtgttggtggcgggtgcctgtagtcccagctactcgggaggctgaggcaggagaatggcgtgaacccaggaggtggagcttgcagtgagcccagatcgcgccactgcactcaagcctgggtgacagagcaagactccgtctcaaaaaaaaaaaaaaaaacaaagaaagaaagaaacttcacagcttttctctc

SEQ ID NO: 931648 - DNA, 726 bp, Homo sapiens
ttgcatggacgttaaactaagaatgatttttgcattttgatttttattttatgaaaaaaaaaattgagggctgggcgcggtggctcaagcctgtaatcccagcattttgggaggccaaggtgggtggatcacctgaggtcaggagttcaagaccgccctggccaacatggggaaaccctgtctctactaaaaatacaaaaattagccgccatggttgtgggcacctgtaatcccagctacttgggaggctgaggcaggagaatcgcttgaacccgggaggtggaggttgcagtgagccgagatggcgctactgcactccagcctgggcaacaagagtgaaactttgtctcaaaaataataaaattaaaataaaataaaaaagagtggtctctggaacaatagctcagtatcacctggacatytgttagaaatccagacctactgaaccagaatctgtattttagcaagacccccaggtgatctgtgtgtacattaaagtgtgagatgtttttgtagcaacacgcatggaactagaggtcattatcttaagtgaaataagccagatacagaaagacaaatattgcatgttctcactcccaagtgggtgctaaaaaatgcatacacatggctccacagagagtggaataataaataatggagattcagaagagtgaacgtgaattttggcagttcatccaccgctgtgaatcataagaaatagtttaa

SEQ ID NO: 931649 - DNA, 729 bp, Homo sapiens
aaggtggccagccactgaacagctcattacggagcagcacctatttggcatctctctctctctctctctttttttcttttttggagttggagtctcactctgtgacctggaaatgggtacatggtttcttttttcrtttttttgagacagagtctccctctgttgcccaggctggagtgcagtggtacaatcttggcttactgcaaactccacctctcagcttcaagtgattctcctgcctcagcctcctgggtagctgggattacaggtgcgcgccaatacaaatacaaaaaatgcccggctaattttttttatttttagtagagacggggtttcaccatgttggccaggctggtctcgaactcctgacttcaggtgaactgcccgcctcggccttccaaagtgctaggattacaggcgtgagccactgcgcccggcctatttggcatctcttaatctgtttatgcctgagatttttacagggctggaacactgctgtcacacccaccaaccaagagatatggtcgcccgtcacttctgtcttggttgtgaagcattgttgctctttatatggggcccaagatgtgccggcagctaaatcccattagggagggtcactcctggtcgcacagaggcccaggctgcggaaatgactggcccaggtgacttggtgacttagcaggcaggctgagctctaacctagggctactggcttctgatcccagaggg

SEQ ID NO: 931650 - DNA, 634 bp, Homo sapiens
ttcctgtgttcggtgcccagccagaagggcagctcttccccaggtctgggggtgaaggtcccatcccctagaggctggcccctgtgagcagagctgccctcatgccagcccctgctgaccccctgcctgcctacgtccccctgggcaggcccatctctggggccaccccagcagggccatgggctgcccatctctcccttgaataccaccacccttttgttcttgtggggtgtggctaccttttttttttttttttttttttgagacggagtstcgctctgtcgcccaggctggagtgcagtggcgcgatctcggctcactgcaagctccgcctcccgggttcacgccattctcctgcctcagcctcccaagtagctgggactacaggcgcccgccactacgcccggctattttttgtagttttagtagagacggggtttcaccgttttagccgggatggtctcgatctcctgacctcgtgatccgcccgcctcggcctcccaaagtgctgggattacaggcgtgagccaccgcgcccggccgtggctacctttttacttctctgtgaagagatggtgcttcagggaagggaaggaaagtcaggggtgaccgggacatgtgggcactgatcagt

SEQ ID NO: 931651 - DNA, 634 bp, Homo sapiens
ttcctgtgttcggtgcccagccagaagggcagctcttccccaggtctgggggtgaaggtcccatcccctagaggctggcccctgtgagcagagctgccctcatgccagcccctgctgaccccctgcctgcctacgtccccctgggcaggcccatctctggggccaccccagcagggccatgggctgcccatctctcccttgaataccaccacccttttgttcttgtggggtgtggctaccttttttttttttttttttttttgagacggagtgtcgctctgtcgcccaggctggagtgcagtggcgcgatctcggctcactgcaagctccgcctcccgggttcacgccattctcctgcctcagcctcccaagtagctgggactacaggcgcccgccactacgcccggctattttttgtagttttagtagagacggggtttcaccgttttagccrggatggtctcgatctcctgacctcgtgatccgcccgcctcggcctcccaaagtgctgggattacaggcgtgagccaccgcgcccggccgtggctacctttttacttctctgtgaagagatggtgcttcagggaagggaaggaaagtcaggggtgaccgggacatgtgggcactgatcagt

SEQ ID NO: 931652 - DNA, 568 bp, Homo sapiens
atgtgcataagtaatgaggagccaaatgttaatcaccaagacaatggggaaaatgtctccagggcatgtcagagaacttcatggcagccactcccattacaggcataaaggcctaagagggaaaaacgcccctgctatgtgcagccttgggacttgttgcactgcctcctgcctygcagccactccagccatggctaaaagggcccaaggtacagctcaggccatggcttcagagggtgcaagctccaaactttggcagcttccacgtggtgttggtcctgtgggtgtgtggaagacaagaattgaggtttgggaacctccacctggattttggaagatgtatggaaatgcctggatgtccaggcagaggtgtgttgcaggggtggaaccctcatggagaacctctgctagggaagtgcagaaaggaaatgtgaggttggagcctccacacagagtcctcactagggcactgcctagtggaactatgagaagagggcccctgtcctccagactccagaatggtagatccaccaacagcttgcactgcgtgcctcggaaagccacagac

SEQ ID NO: 931653 - DNA, 568 bp, Homo sapiens
atgtgcataagtaatgaggagccaaatgttaatcaccaagacaatggggaaaatgtctccagggcatgtcagagaacttcatggcagccactcccattacaggcataaaggcctaagagggaaaaacgcccctgctatgtgcagccttgggacttgttgcactgcctcctgccttscagccactccagccatggctaaaagggcccaaggtacagctcaggccatggcttcagagggtgcaagctccaaactttggcagcttccacgtggtgttggtcctgtgggtgtgtggaagacaagaattgaggtttgggaacctccacctggattttggaagatgtatggaaatgcctggatgtccaggcagaggtgtgttgcaggggtggaaccctcatggagaacctctgctagggaagtgcagaaaggaaatgtgaggttggagcctccacacagagtcctcactagggcactgcctagtggaactatgagaagagggcccctgtcctccagactccagaatggtagatccaccaacagcttgcactgcgtgcctcggaaagccacagac

SEQ ID NO: 931654 - DNA, 568 bp, Homo sapiens
atgtgcataagtaatgaggagccaaatgttaatcaccaagacaatggggaaaatgtctccagggcatgtcagagaacttcatggcagccactcccattacaggcataaaggcctaagagggaaaaacgcccctgctatgtgcagccttgggacttgttgcactgcctcctgccttgcagccactccagccatggctaaaagggcccaaggtacagctcaggccatggcttcagagggtgcaagctccaaactttggcagcttccacgtggtgttggtcctgtgggtgtgtggaagacaagaattgaggtttgggaacctccacctggattttggaagaygtatggaaatgcctggatgtccaggcagaggtgtgttgcaggggtggaaccctcatggagaacctctgctagggaagtgcagaaaggaaatgtgaggttggagcctccacacagagtcctcactagggcactgcctagtggaactatgagaagagggcccctgtcctccagactccagaatggtagatccaccaacagcttgcactgcgtgcctcggaaagccacagac

SEQ ID NO: 931655 - DNA, 643 bp, Homo sapiens
tatgttgcccagactgatctcaaactcctgggctcaagctattctctgacctcagcctcccaaagtgctgagattatagttgtgaaccactgcaggcagctacttttggaatttatatatatgcataccgagaccagcttggtcatggagaccctaacccagyggcattagaggaattaaagacacacacacagaaatatagagtgtggagtgggatcagggagctgacagccttcagagctgagagccccaaacggagtttgacccacatatttattgatggcaagccaatgataagcattctttctatagactatagattaactaaaattattccttacaggaaacaaagggatgggccaaaacaaagggataggctctggctagttatctgcagcaggaacatgtccttaaggcacagattgctgatgctattgtttgtggtttaagaatgcctttaagcagttttctgccctgggtgggctaggtgttccttccctcattctggtaaacccacaaccttcagtgtgggcgtcatgaccatcaagaacatgtcacagtgctgcagagattttgtttatggccagttttgggggcctgttcccaacatgtctcccttttttgttttgcaaagcaataaaag

SEQ ID NO: 931656 - DNA, 585 bp, Homo sapiens
acaaaaaattagccaggcatggtgacgtgtgcctgtaatcccagctactaaggcaggagaatcgcttgaacccgggaggcggaggttgcagtgagccgagatcgcgccactgcacaccagcctgggctatagggtgagactccatctcaaagaaacaaaaacaaaaaacacacaaaaaaaacaaaaagtaattgatayactcttttagctcaataaatactaaagagtaagtgttttagctgggcacagtggacatgcctgtaatcccaactattcagaagttcgaggtaagaggattgcttgagcccaggagtttgagaccatcctgggcaacattgcgagacctctgtctctaccaaaaaaattttttttaattaggtgtgcatggtggtgcacgcttgtggtcccagccacttgggaggctaaggcaagaggatcgcttgaacccaggaggttgaggctgcaactacactccagtttgggtaacagagtaagatcctctgtctaaaaaaaagggacgtctttactatgagcagtgaacaccactccttcatgttctgtttttcagtttatatttgttttctc

SEQ ID NO: 931657 - DNA, 536 bp, Homo sapiens
tgggttcatctcactggagctcattggacagtgggggcaggaaagtgggtgcagcccaccgagtgtcagccgaagctgggcgaggcaggaagcgcaaggggtcagggaattccctttcctagaaaaggcaaggggtgacagayggcacctggaaaatcgggtcactcccaccctaatactgcgcttttccaacagtcttagcaaacggcacaccaggagattatatcccacggatggcttggagggtcccaagcccacggagcctcgctcattgctagcacagcagtctgagattgaactgcaaggcggcagcgaggctgggggaggggcgcccaccattgctgaggtttgagtaggtaaacaaagctgctgggaagctcgaactgggtggagcccactgcagctcaaggaggcctgcctgcctctgtagaccccacctctgggggcagggcatagcgaaacaaaaggcagcagaaatctctgcaaacttaaatgtccctgtctgaccactttgaagacagtattgattctcctag

SEQ ID NO: 931658 - DNA, 536 bp, Homo sapiens
tgggttcatctcactggagctcattggacagtgggggcaggaaagtgggtgcagcccaccgagtgtcagccgaagctgggcgaggcaggaagcgcaaggggtcagggaattccctttcctagaaaaggcaaggggtgacagatggcacctggaaaatcgggtcactcccaccctaatactgcgcttttccaacagtcttagcaaacggcacaccaggagattatatcccacggmtggcttggagggtcccaagcccacggagcctcgctcattgctagcacagcagtctgagattgaactgcaaggcggcagcgaggctgggggaggggcgcccaccattgctgaggtttgagtaggtaaacaaagctgctgggaagctcgaactgggtggagcccactgcagctcaaggaggcctgcctgcctctgtagaccccacctctgggggcagggcatagcgaaacaaaaggcagcagaaatctctgcaaacttaaatgtccctgtctgaccactttgaagacagtattgattctcctag

SEQ ID NO: 931659 - DNA, 654 bp, Homo sapiens
  misc_feature 1, 2, 3, 4, 5, 6, 7, 8, 9, 10, 11, 12, 13, 14, 15, 16, 17,18, 19, 20, 21, 22, 23, 24, 25, 26, 27, 28, 29, 30, 31,32: n = A,T,C or G
nnnnnnnnnnnnnnnnnnnnnnnnnnnnnnnnaattaattttgttagcaaaaaaaaaatttaatgacaaagaacactaaaacagatgactaaatcagtggttttcaatcctgattgttcatcagaatcactggagagttgtttaaaaaaaaaaaaaaagaaaaaaaacagaggagtacctcttgagctccaccattgaacaattaaatagaatctctctaaggattgggcctggccaggcttttttttttttttttttcttttwaaccttgccaggggattccgaaaagccagggggtaaaaaacactagtccaaatcaagctgtgagcactgtgcgtagctgtcttaaaatgttttctgtccccaatcctgaaactggggtaagttggttacaggtgtttccttcccttctatttggaatttaaaattctactaaaactgacaatatatactcagccttcccccacatacaccttgtccccaccaatctgtcctttaagtctgtgaggtagaaattctctccattaacatggtcatcccatttatggaatagatacattctgacaaagctgaccagaagatggaattccctatttcgacctcagtttccccactggcttcaatttaaagcagaaggtaggtggcttctggttt

SEQ ID NO: 931660 - DNA, 576 bp, Homo sapiens
acctcccctgaccaggtatggggatgaacggtaacctgccgtgatgaatgttgcttgccccaacacccctgaaggcgagggaacagaaaacctggctgtggccatggaccctccaagcccccactgtggtggttgccattgtagctcccttgggggagggcctacagtatgacttgcttgtcattccttsggtgttcaatgcatagtccccacggttgactgttcataggggaatggccagggaaggaaccctcctcaggggacatatgtactgtctgtgtggcatgttatgagctcccccgtgacttttgcatggagacgggactcaaaggaaccatggggagctgagaaagtatggtaccatctcccagggcaaaagctcatggtgaccacgttgttatccagggatgaaagtttagcttgtattttgcctgagggacgtgatttacctctgttagtacctgtgcctgctctatcattttggctgtaggttaacatgctccaactgcattgtggactgggcccacacctacgctgaagtgaccaatgtttccaactctttgatctgtaccaccc

SEQ ID NO: 931661 - DNA, 552 bp, Homo sapiens
agtagctgtggcaatcacaaattattgtccttgtgagttgtgattttattgttactctgattttatagtattttaaaattttgcccatgggtaagtttttaattagggatacagagaaggaaagatgaggaaattcacatctaccttgcatgtaagcaagagtaatgccatcaatatgtctattagaagaaacataataattgtcataactaaaccacaggcagrcagtgaagtgtaagtgcagttccctattagcacattaaaattgatcagttctgtgtgttgttctgtggacaataaaataagatcatttttgctaatatggttacagtatactgttgcatcttagctatgttatctccataacggaagtctggaaaacaataactctttaaaaaattaagttcaggccaggcgtggtggctcgcacctgtaatctcagcactttgggaggccaaggcaggcggattgcctgaagtcaggagttcaagaccagcctggccaacatagtgaaaccccatctctactaaaaatacaaaaattagccaggct

SEQ ID NO: 931662 - DNA, 577 bp, Homo sapiens
ttcagggtgcgcgtgtctgtgtgtgttagaacttgtgagtttctgcgtgtgtgtgagtatgggtgtgttttcagtgtgtgtgtgtgtgtgtgtgtgtgtgtgtgtagctcattctgtaggttctctagaattgtgtgttgggtaakgttttcctctgaaacgtctaatttgatcagccggccatacagtaatttttttcaattaagacatactttttttatactagctctttaatttaatttggctattctgtactgttaatttctcttgatatgatatctgctttcttgcatgttgtttttttaaatatttgaaatcagttatcatactgatatgtcaaattttcacgcaattctaatcatttctctcattcctgagcctgtttgtattacccgatttatttcctggtcatgggtcacacgaaacgcttttctacatgtagtcagattttaaatttaggactcactctgcggataccgcatagctgaggcaatcgactttgttgtttacttctaaagagagttgagatttcctctcacaggcacttcattgattggaaaccgatttgatgcttgga

SEQ ID NO: 931663 - DNA, 568 bp, Homo sapiens
atcaatgtggatactggtctcgtgccatttaggctacttggataaaaaagaaaaaagaatcttgtccaccttcagaaagggaaaagtggcccttcctgtaccagttgtcagtgtaaccccttcgaactagtaataaccaatccccttgatccttgctggaaaaaaggggagcgtataacccttgaaatcaakggggttggactggatcctcgagtaaatatcatggtttgaggagtttataaacgctctcctgagccagtatttcaaaccttctatgatgaactgaatgcgccagtaccagaaattccaggaaaaacaagaaatttgtttttgcaattagctgaacatgtagccaattctctcaatgtcacgtcatgttatgtatgtggaagaactgtaatgggatatcaatggccatgggaagcctgagaattagtacctacagacccagttcccaataaattcctgactcaaaagaatcaccctgataacttctgggtcctaaaagcctcaatcattagacaatactgtattgcaagagtgggggaggacttcactcttcctgtgg

SEQ ID NO: 931664 - DNA, 651 bp, Homo sapiens
ggggtctgtgagaaatttaaccttactaatagctatctacacatagatcatcaagggcaaatagttgaagacatagttagaaatatgacataactggcacatgtacccatgcaagtgtggcatggatttgatcctggggccatgtttggaaaatggttcccagctctagaaagatttaaaacccttataatagaagttataatagtaatagaaacctgcttactgttctgttgttttctacctgtacttcctcaaatgatcaaaagcttcattgctaccttagttcaccaaaatgcttcagcgcaagtgtactatattaatcactattgatctgtcttgcaaaacgacacaggtagtgagaatgaaagtgagaactcccactattgagtgaaattctcaaagagggggaataagggargagaccacccctcgtattgtcttatgcccaatttcttcctccaaagaaagaagaagtaaaaactaaaaggcagaaatgaaaccaacaggcagacagcccggtgtcatgccctgggcctggttaaagatcgacccctgacttaactggttatgttatctatagattccagacattgtatggaaaagcattgtgaaaatccctgtcctgttctgttctgttctgattaccagtgc

SEQ ID NO: 931665 - DNA, 556 bp, Homo sapiens
aatgcaacacaatggggaaaaggcagtctcttcaacaaatggtgctggaaaaactgggcatcccatgccaaaaaatacatctagatacaggcctcacaccctctacaaaaattaacttgaaatggaagtaaatgttaaatgaaaacctataaaattcctagacaataacccacagaagaaaatctagattatcttgggtatggtgataactttttagatgcaatgttgaatgcatgataaatgaacaaaataattgataagctaaactttcactaaaataaaaaacttgtgtkctgtaaaagatgtcaacagaatgagaagacaagacatacattaggagaaaatgtttgcaacacacataactgataaagaactgttattcaaaatatacatagaactcaaactcaacaagaaagtgaaaaccccaccttaaaatggaaaaaaaagctgaacggatgccttaacagagaagatgtacagatggaaaataagaatggaaaaatatccttaaaatcataaatcatcagagaacagcaaattaaaaaagaatgaggcg

SEQ ID NO: 931666 - DNA, 700 bp, Homo sapiens
tctcctcttcactgagagctgaacactcatcaggatgacctgcctgcagaaagaagctacccacttcggtatgtgagagctattctgtcactcagtagagctcttctctgccttgcttttgctccggttgtacctcgttcttcctggatgtgagacaagaactcggtgctggccaaayggcaggactgaaggagttgtaacacaaacagggctaaacacctcctcaccccttacaccattacaggcaaagagaaggagaaaagagctgtggcccttcagggagcccagacctagggactccctgagccagggctttgacaccctctttggggctctgcagttaatggcatctccaagcttctgggcaccacagtgttcccctcctctagacaagagtatccacagcagaaactacttgtgatgcatcttatccagccacaggcttgcatggagccagcacttgtgccggcccttggagctgcctgacccagcgcagcagccggcatgcctggctgtgcacagtggctggaccttgtgcttgcttgctcacacaccccttgctgttctgagcctggatcatgcttggcaggcatgggatctgggcagatagtgcaagctgagcacatcctgccaggttgggtggatgtaatgagcccagcaagcccaaacaaaactcaggcaaaggcctcaccagccacaa

SEQ ID NO: 931667 - DNA, 618 bp, Homo sapiens
aaagagcagttctgtgggcagccttggactgatccaatttttcctcttttttgcttatagttctcagaataactctagaatgttgtgagaatgcaatgtcatgagataggaagagaccggccagatagcctggactctgttctagtcccctctcctctaagaaacagaatgtcctttacaatactttagcccagtgaatcacatggacccagggtataaaacccagagtgggctgcattctgtggtcyttcagctgctgtgcaagtggggcacctgcagacaagaaatctgttctggatagtgttttcctgagtcttgggtgaccgactcaccctgaatcctaagcttctgttgtctcttgatgtctatctgtaagtaataaactcactttgtgctgtttgttgtatatatgtgtgatctgtcctgctggactcagacaagttagtacccagtgcacagggaacctgcttcacagaagcttataggggaatactgttatggtgaattacaggcccttttaaaggaaagcaaaatatatccatgaaggttgtttctctctttttatatattatctaaattattttatctgctatggaaaatgataaaccgattaaggta

SEQ ID NO: 931668 - DNA, 555 bp, Homo sapiens
tcacaacaggccaacaaaagtgtcatctggtaaggagcagagcttttaacaggcatagataactgaagaaaaaatatcatgagcacaaaagtcattgatggagaatatttgtaagggaacatcatacctctatacctatgatctctacaatccatctaacctagtgtttacagaacgcatakaacagttgtgaggctgaaatgacttcaattgaaacattatttcagtcggtcactgggtgatatatacatatacttattttactacttgcctgacttgcaggcaaaaatgtgtgagtgatgtattttgaaaatatcctggaaaatattttttaaagtgtctttaaataattcatcatcgtattattactgttgattgcctttctctttgtccattatggagtatattaaagcttcttaattaatgttttaaaaattctacatcaacaatgacaattagttctaaaattgtattagagtctgaagaaatgtgatgtatttgactatcctatctttttgtgcaaattttattttggtagttgtccccaactgtaat

SEQ ID NO: 931669 - DNA, 555 bp, Homo sapiens
tcacaacaggccaacaaaagtgtcatctggtaaggagcagagcttttaacaggcatagataactgaagaaaaaatatcatgagcacaaaagtcattgatggagaatatttgtaagggaacatcatacctctatacctatgatctctacaatccatctaacctagtgtttacagaacgcatagaacagttgtgaggctgaaatgacttcaattgaaacattatttcagtcggtcactggktgatatatacatatacttattttactacttgcctgacttgcaggcaaaaatgtgtgagtgatgtattttgaaaatatcctggaaaatattttttaaagtgtctttaaataattcatcatcgtattattactgttgattgcctttctctttgtccattatggagtatattaaagcttcttaattaatgttttaaaaattctacatcaacaatgacaattagttctaaaattgtattagagtctgaagaaatgtgatgtatttgactatcctatctttttgtgcaaattttattttggtagttgtccccaactgtaat

SEQ ID NO: 931670 - DNA, 790 bp, Homo sapiens
taagttaaagccaatgttgtttaccattctgaaaatcctagggcccttaagaattatgcaaaatctatgttgcctgtgctccctaaatgaaacaacaaagcatggatgacagcacatctgtttacagcatggtttactgaatattataagcccactgctgagacctactgtttagaaaaagagattcctttcaaaatattaccgtttactgacaatgcacctggtcacccaagagctctgatggagatgtacaagaagattaatgttgttttcatgctggctaacacaatatccattctgcagcccmtggataaagcagtaatttctactttgaagtcttattatttaagaaatacatttaataagcctgtagctgccattcatagtgatttttctgatggaaatgggcaaagtaaactgaaaaccttctggaaaggattcaccattctagatgtcattaagaaagttataattggctaggcacagaggctcatgcctgtagtcccagcgctttgagaggccaaggcaggtagatcacctgaggtcaggagttcgagaccagcctagccaatatggtgaaaccccatctctactaaaaatacaaaaattagctaggtgtggtggcaggcacctgtaattcccagctactcaggaggctgaggcaggagaattgcttgaacctgggaggtggaggttgcagtgagccaagattgcaccattgcactccagcttgggtgacaagagtgaaactccatctcaaaaaaaaaaaaattatgatttacagggggag

SEQ ID NO: 931671 - DNA, 783 bp, Homo sapiens
atcatttaactcaattctgatgctatctaccaggagatagtgtcgcatcgcacaggttgagggctcagtctcacaagagtgtcccccacttcagatgccagtcacaagtcccaggttgccattaccctgtcactgggttatattaatttgctaggatrgctcacaaaactcaaggaaacactttacgtacgttacaaaggatgtcataaaggacacagatgaacagccagatggaagagatgcatggggcacagtatgtggcaaggggtgtggagcttccatgccctctcttggcttaccaccctccatatgccttcacgtgttcagcaatcaggaagctctttgaaccctgtccttctggagttttatggaggcttccttacataggtgtgattgattacatcattgaccattggagatcaactcaacccttatctcctcttccttcccaggaggtcagggggcagaggatggagctaaaagttccaatcctctaatcacatggttggttcccctggcaaccagcccccatcctgaggctatctaggagcccaccaagagttgcctcattagaacaaaagatgcccctgtcactcaggaaattccaagggatttagaagctttttctcaggaaccagggcagagaccaaatatacattcctattctatcacaatgtcacaggcttcttttcctttacaatatagtgacatatggctattgagtacttgcaatgtggctattttaagttgagatatacattggatttgcagacagtgcaaaaa

SEQ ID NO: 931672 - DNA, 590 bp, Homo sapiens
gcaaaataaatgcatttgatatttctgattccctgttcctaagaggcaaggagtttagtgactctatatatgatacctttgaacatttgtggagaaccaaggaatataatgaagttggctggttgctcctaagttcactgggcaaagtgatgaacgaaaaggatgagctgagggattctatttcctggttctagatacacatacatagccaaaaagtttctcagggtgccctgggtaagaatcttctcttctgtggacaaagagctgaaattgctgaaaatcagacacaagctcttatgcaagtggctgacctgcaatggaaggttcatgctcagcttcaccaastgtctactgtcaaagggagggctttgattgggaaagaatgggaccctgtaagttgggatgggaatatgggggactctgatgaagctagggacacctaactcctaaattctaatgagccttttttgccagaggaaatggcatccccaccccccgtagtggcaacatacttttacccacacactccagtaccagcctttccatctttaagattaaccctgcattgccccggggaaacagggatgtcc

SEQ ID NO: 931673 - DNA, 619 bp, Homo sapiens
gggtccacccagttcgagcttcccggctgctttgtttacctaatcaagcctgggcaatggcggacgcccctcccccagcctcactgccgccttgcagtttgatctcagactgctgtgctagcaatcagcgagactccgtgggcgtaggagcctccgagccaggtgcgggatataatcttgtggtgcgccgttttttaagcccatcagaaaagcrcagtattcgggtgggagtgacccaattttccaggtgccgtccgtcacccctttctttgactcagaaagggaactccctgaccccttgcgcttcccaagtgaggcaatgcctcgccctgctttggctgacgcacggtgtgcacacccactgacctgcgcccactgtctggcactccctagtgagatgaacccggtacctcagatggaaatgcagaaatcacccatcttctgcgtcgctcacgctaggagctgtagactggagctgttcctattcggccatcttggctcctcccccagaaaaatacttcttataaggaattggctcatgcaattacggaggctgacaagccccaacatctgcagtgggcaaactggagacccgggaaaaggataatgtagtttcagc

SEQ ID NO: 931674 - DNA, 619 bp, Homo sapiens
gggtccacccagttcgagcttcccggctgctttgtttacctaatcaagcctgggcaatggcggacgcccctcccccagcctcactgccgccttgcagtttgatctcagactgctgtgctagcaatcagcgagactccgtgggcgtaggagcctccgagccaggtgcgggatataatcttgtggtgcgccgttttttaagcccatcagaaaagcacagtattcgggtgggagtgacccaattttccaggtgccgtccgtcacccctttctttgactcagaaagggaactccctgaccccttgcgcttcccaagtgaggcaatgcctcgccctgcttyggctgacgcacggtgtgcacacccactgacctgcgcccactgtctggcactccctagtgagatgaacccggtacctcagatggaaatgcagaaatcacccatcttctgcgtcgctcacgctaggagctgtagactggagctgttcctattcggccatcttggctcctcccccagaaaaatacttcttataaggaattggctcatgcaattacggaggctgacaagccccaacatctgcagtgggcaaactggagacccgggaaaaggataatgtagtttcagc

SEQ ID NO: 931675 - DNA, 576 bp, Homo sapiens
aggtggggccttttagaggtagttaggtcacaagggtgaagtcctcatgagtgagattaatgcccttataataaaagagaccccagagagctgccttgtcccttccaccatgtgaggacacagcaagaagctggcagtctgcaatccaggggcaggccctcaccagaacctgaccgtgctggcacctgatcttgaacttcccaatctccagaattggaagaaataaatttctgttgttatgagcccctcagtctcaggtatttggtttttatagcagcccaaatagacaaagacacgctctgatggttaagggtttggaagaagcaagactgggaaatggctgagraggcctgtgaaggtgtctgtgaactgacctctcaggtaaatgtgaagtgaggagctatttgtggcccacatgaatgcttgccacaaggccttgatacagagggggcctttgtgactacgtaagtaggatggatggcccactctgtgagatgttagactcctttcccagatatcccaatgctcacaaaaattggggtatcccagatacctcagtgctcacaaagtgagtgt

SEQ ID NO: 931676 - DNA, 611 bp, Homo sapiens
gcagtggctcacacctgtattcccagcactttgggaggctgaggcaggtggatcgcttaaggtaaggagctcaagaccagcccggcgaacatggtgaaaccccatctctactaataatacaaaaattagctgggcatggtggtgggtgcctgtaatcccagctactcaggaggctgaggcaggtggattgcttgaacctgggaggccgaggttgcagtgagctgagatcgtgcaactgctctccagcctgagtgacaaagagcaagactcygtccccccgaccccccacccaccaacaaaaaaggcagtagtatgtttagtaattgtgtccagttgcaagtaactgaaaatatgactaaatgagattttatttttctcaagtaagttcccatctttggttcaggtgctttgaaatgtcaaagctgaggctgattgtgattctatttgctttccttcttactgcaagatggtccactagaatgtacacacaacaagggcaaggatatttgcttactgctatatcgccatagcttggaagaatggcaggtactcattaactgaccatttgctgagtggagcgccaggcagcagaaaaagaagaatatgcaaaa

SEQ ID NO: 931677 - DNA, 610 bp, Homo sapiens
attgcattacttctaactctttaatcagatagtgaaaacaaaaccagaaagagaaagattggttccaaaacgtgtctctctgttgtcaacacatattgtgttcctgaatatcacaatccatcaatgtatcttacaaatgcaaatattcagactatagtttgttttatgtatacttgcatgttactgaaatattgaaaacctaagtcaaaattacttttaaaaaacttagccacaaaatcctaaaataatatgtaaaatattcttatcctaataagaatcaggctttggatttcaaatgtagaattatttactccttaccttctaaggaatttgaatcacaggtgaaaacacaaagccaatgtccctgaagaatgtataatctaatttaaaaaaaggaaactactgakgatacatttggcaattgaaaaatgcagttataaatgatggacacaacattatgccatgtccatcttcatgcgtgcaaaaggagccactcagaggtgctcttgccccacgctcctcctctcagatgatgacaacttcattctttcaattcctcaagcccaaaccctggagtcatccttgctcctctttgttatacctcacacac

SEQ ID NO: 931678 - DNA, 555 bp, Homo sapiens
aaatctctggttctaaggaaagatgagatggagatacaaaatgcatggcttttcagtttatagataatatttaaaaccatggaactagatgcaatcaccaaataaatgagtgttagtaacaaagaagaggttcagggactgaactttsgagtactcagaaattctgaaattagggaaacaaaggcaactagaaaatataattaaagagaaacagtcccagaagtgcaaagaaatccaagagtggcaccctggaaagcaagtgaaaaattgcattaaggagaaaatggtctgctatgttaaatgctgctgatacaggtcagtaagttaagaacttattggcctttgcctttagcaatttggggtcatttataatcataaaaaaaattaaaaaaaaaacagtttccatgaagtattggggaaaaaacctgattggaatggatttacaaaacagtagaagaaatattggtacataatatgtaaacattcctttcaagatgtttggctataaagcagtaggcagcaaatttcctttttaaatggctggttagtaaatat

SEQ ID NO: 931679 - DNA, 555 bp, Homo sapiens
aaatctctggttctaaggaaagatgagatggagatacaaaatgcatggcttttcagtttatagataatatttaaaaccatggaactagatgcaatcaccaaataaatgagtgttagtaacaaagaagaggttcagggactgaactttcgagtactcagaaattctgaaattagggaaacaaaggcaactagaaaatataattaaagagaaacagtcccagaagtgcaaagaaatccaagagtggcaccctggaaagcaagtgaaaaattgcattaaggagaaaatggtctgctatgttaaatgctgctgatacaggtcagtaagttaagaacttattggcctttgcctttagcaatttggggtcatttataatcataaaaaaaattaaaaaaaaaacagtttccatgaagtrttggggaaaaaacctgattggaatggatttacaaaacagtagaagaaatattggtacataatatgtaaacattcctttcaagatgtttggctataaagcagtaggcagcaaatttcctttttaaatggctggttagtaaatat

SEQ ID NO: 931680 - DNA, 589 bp, Homo sapiens
aggtgacttcaccctcccctggagaggactcattagggattgttttgcagccccaggaggcaggcctgggtggtgccccattcctccctgggacgttctggaactttgtggcctccctggcaggaagaagccacgctctgggccccacattaattgatactttactaatgagcttmataaatgccccagggcactcctaaggacaggaaactggaaggaattgagctccagctcagtctcccccaggccctcctaccctcagatttccttcagaccagaggccctatattctagggcacaaggtccgcaggtgagagctgttcattggtcagtcagcaggcacctgatacaattatggtgcagtcagggaaggcttcctggaaggggaacaatataaatgtttcacaagagcagggactctcttttgttacagttgtatacccagctcctagcacaggtcctggcacaaagtaggtggtcaatacatgtgagagacaggaagaaagagagggagagaaggaagaaaggaatatggtcagaaggaaatgaaaggtaataactaagctgaaaacagatgagtatgagctac

SEQ ID NO: 931681 - DNA, 585 bp, Homo sapiens
ttgtaatgctgattttcctcccagccatccccaaaggcacccacagccctttgtcacaatgagtgccttgaggaaagggaagtaataagacttttaagggattgctggctctaaactgacactaattcctgaagatgaatactacctgtggccyatcagtcagaataggtctttatgcaggtcaggtcattgatggacttttggcccagacctctctcatagttgaccgactgtctccctgaacccaaactgcactcatttccttagttctggaattcataattggaagagacagtctcagcaactggcagaatccccaaatccacaggtttccaacccgtggagtaagggctattatggtaggcaaggtcaaggagaagcccctagaagtgctgctctttctacaaaaataattagccacaagcaatactgcattctggaaggactgcagaaatcagtgctacgatcaggatacaggggtgatgattgcaccacattcctgttcaatgcaccaatttggtccatggagaagacagaccgatattggagaatgatagtggattatcataaattattcagatggtg

SEQ ID NO: 931682 - DNA, 585 bp, Homo sapiens
ttgtaatgctgattttcctcccagccatccccaaaggcacccacagccctttgtcacaatgagtgccttgaggaaagggaagtaataagacttttaagggattgctggctctaaactgacactaattcctgaagatgaatactacctgtggcctatcagtcagaataggtctttatgcaggtcaggtcattgatggacttttrgcccagacctctctcatagttgaccgactgtctccctgaacccaaactgcactcatttccttagttctggaattcataattggaagagacagtctcagcaactggcagaatccccaaatccacaggtttccaacccgtggagtaagggctattatggtaggcaaggtcaaggagaagcccctagaagtgctgctctttctacaaaaataattagccacaagcaatactgcattctggaaggactgcagaaatcagtgctacgatcaggatacaggggtgatgattgcaccacattcctgttcaatgcaccaatttggtccatggagaagacagaccgatattggagaatgatagtggattatcataaattattcagatggtg

SEQ ID NO: 931683 - DNA, 585 bp, Homo sapiens
ttgtaatgctgattttcctcccagccatccccaaaggcacccacagccctttgtcacaatgagtgccttgaggaaagggaagtaataagacttttaagggattgctggctctaaactgacactaattcctgaagatgaatactacctgtggcctatcagtcagaataggtctttatgcaggtcaggtcattgatggacttttggcccagacctstctcatagttgaccgactgtctccctgaacccaaactgcactcatttccttagttctggaattcataattggaagagacagtctcagcaactggcagaatccccaaatccacaggtttccaacccgtggagtaagggctattatggtaggcaaggtcaaggagaagcccctagaagtgctgctctttctacaaaaataattagccacaagcaatactgcattctggaaggactgcagaaatcagtgctacgatcaggatacaggggtgatgattgcaccacattcctgttcaatgcaccaatttggtccatggagaagacagaccgatattggagaatgatagtggattatcataaattattcagatggtg

SEQ ID NO: 931684 - DNA, 585 bp, Homo sapiens
ttgtaatgctgattttcctcccagccatccccaaaggcacccacagccctttgtcacaatgagtgccttgaggaaagggaagtaataagacttttaagggattgctggctctaaactgacactaattcctgaagatgaatactacctgtggcctatcagtcagaataggtctttatgcaggtcaggtcattgatggacttttggcccagacctctctcatagttgaccgactgtctccctgaacccaaactgcactcatttccttarttctggaattcataattggaagagacagtctcagcaactggcagaatccccaaatccacaggtttccaacccgtggagtaagggctattatggtaggcaaggtcaaggagaagcccctagaagtgctgctctttctacaaaaataattagccacaagcaatactgcattctggaaggactgcagaaatcagtgctacgatcaggatacaggggtgatgattgcaccacattcctgttcaatgcaccaatttggtccatggagaagacagaccgatattggagaatgatagtggattatcataaattattcagatggtg

SEQ ID NO: 931685 - DNA, 688 bp, Homo sapiens
tcagaaccctctccgcatctccagattctctatactcttgcccttggctctggcttagggcttcaacaattcatggtgtaaaaatcactaaggactctgggcgcggtggctcatgcctggaatcctagcactttgagagtctgaggtgggcagatcacaaggtcaggagttcgagaccagcctggccaacatagtgaaacccccgtctctactaaaaatacacacacacaaaaattagctgggygtggtgtgggtgcctgtaatcccagctacttgggagactgaggcaggagaatcgcttgaacccgggagacaagaggttgcagtgagctgagattgtgccactgcactacggccagtgcaagactccatctcaaaaaaaaaaaagtcactaaggagactgttaatacacatgcccctcaacaccaaggggctacgtcctgataaaccaattctaagttgaaactgaaaatgcatttaagacacctagcctggcttacacgtgctcagaacatttacactgccagcagcttacagttgggcagaatcatctgacacaaagcctattttatagtaaactgttaaataagtttgtgttatttatttatttatttttgagacagggccttgctgtgttgcccaggctgagtgcagtggtgagatcatggcccactgcagccctgacctc

SEQ ID NO: 931686 - DNA, 688 bp, Homo sapiens
tcagaaccctctccgcatctccagattctctatactcttgcccttggctctggcttagggcttcaacaattcatggtgtaaaaatcactaaggactctgggcgcggtggctcatgcctggaatcctagcactttgagagtctgaggtgggcagatcacaaggtcaggagttcgagaccagcctggccaacatagtgaaacccccgtctctactaaaaatacacacacacaaaaattagctgggtgtggtgtgggtgcctgtaatcccagctacttgggagactgaggcaggagaatcgcttgaacccgggagacaagaggttgcagtgagctgagattgygccactgcactacggccagtgcaagactccatctcaaaaaaaaaaaagtcactaaggagactgttaatacacatgcccctcaacaccaaggggctacgtcctgataaaccaattctaagttgaaactgaaaatgcatttaagacacctagcctggcttacacgtgctcagaacatttacactgccagcagcttacagttgggcagaatcatctgacacaaagcctattttatagtaaactgttaaataagtttgtgttatttatttatttatttttgagacagggccttgctgtgttgcccaggctgagtgcagtggtgagatcatggcccactgcagccctgacctc

SEQ ID NO: 931687 - DNA, 642 bp, Homo sapiens
tatactcaattatgctagcaccataaaataaataaagtaaaaaataaattaataaaataataaaataaataaaataaaatataaataaataaaaagtcatcttggtccttgtattagtctgttctcatgctgctataaagggctgcccaggactgggtaatttataaacgaaagaggtttaatcaactcacagttgcacagggctggggaggcctcaagaaacttacaatcatagtggaaggggaggcaaacacatccttcttcacctggtggcaggaagaagtgctgaacaaagggggaaaagccccttatagaaccatcagatctcgtgagaactcactcactatcactagaacagcatgggggtaactgcccccataatttaattacctcccmctgggtccctcccacaacatgtggggattatgggaactacaattcaagatgagatttgggtggggacacagccaaaccatatcagttgtttattagattgccatgtagtttgatcagttttgggtttctgtttttctttttttaaaaaatagagatggagtctcattttgttgcccaggctggaagtataaaggcatgatcataactcactgcagccttaaacttctgggctcaagcaatcctccc

SEQ ID NO: 931688 - DNA, 658 bp, Homo sapiens
caaactgacctgctttcttccttctcttttcctgccccttgcatcttgcaaaggactgaatgtttgtattcccccagcaattcatacgttgaaacttttaatcacctagttgatgatattaggaggcaggcctctgggaggtgactacgtcatgagggtggagactccatgagcaggattagtgcccttataaaagaggccccagggagctgccttggcccttccatcacacaaggacacagcaagtaggtgccatctaggaaccagaaagaagatcctcacacagcactagatccactggtgccttgagtttggacttcccagctttcagaactgtgagaaataagtttctgttgtttataagctacccagttcatggctttttttttttttctttttgagagagggtcttactttgttgccaaggttggagtgcagtggcgcaatcacagctcactgcagccttgacctcttgggctyaggtggtcctcccacctcagcctcctgagtagctgggactacaggtacacaccccccacaccgggctaatttttgtatttttttgtagggtcggggtttcactatattgcccaggccagtctcgaactcctgcactcaagccatccgcccgctttggcctcccaaagtgctgggatta

SEQ ID NO: 931689 - DNA, 556 bp, Homo sapiens
ggcatatacatggaacacagatatcttaacagtgtctgaccattcagagaggtctattcatattcctcgtacctagacccccttgtcatcaattttccaatcatgctgtgaccattcaggcaatctttggccacagtcaatgagttaatatttctctcttctaccaggcacaatgaacaaccaggttgcattaatagaagcattacccagagagacactttttccttatcattgtccatggatgtccaagaaagggctgtaattctgcagctgatcactgtctttttggtgcctaagtattgtccagagccatctgtaaaccacactcaagttttctttcccttwatcagcaactgtttatgaggcatgggtgtaggctaggagagataggtaatgtagttggtgaaggagacatggaaaattaggatacttcttatgcaaattatttgtgccttcagggcatgtatgagcccagtcttacattgaccactttgatttgatgacagagaactcctgttcatgtccaacattatggcttggtaagttcaacaatggt

SEQ ID NO: 931690 - DNA, 796 bp, Homo sapiens
tgtgcagtatgtgtgtgtgtgtgtgtgtgtgtttcacccaaaatgtggcatgaaacagacttacataaaaaacaacagaaaggcctttttgcagcactgcttggaaacccccatcctgcttgataagccttcttcgctgtgttgcccctgcaggggccactcctgcctaagctgggtggtggtcccccacctcacctgtgggcagctcatcctggaggacacagcatgggtgagggggtgcctattctcagttgtccctaggcacaaaaattctgctacttttcttttttaggraagtgattcccttccagaaaatatttttttcttgcttcaagtagaatacttttttttttttttttttaaatacagggtctcactgtgtcaccccggctggagtgtagtggcaccatcacggctcactgcagccttggcctcctcaggctcaagtgatcctcctttctcagcctcctgagtagctggggctataggtgagcacaaccactctcagttaatttttgtattttttgtagagatggggttttgccgtgttgcccaggctggtcttgaactcctggactcaagcgatctacccacttcgacctcacaaaatgagggcttacaggtgtgagccactgcacccggccagcactctcagaattgatccttgtcatgttcctctcacccatcactgtagctgaagccctggagaagccactgattaccctctaatcgtcctaggtgttggtttctctgttaacataatgtctataatcggaactcttaaccaggaaaactt

SEQ ID NO: 931691 - DNA, 731 bp, Homo sapiens
gtatcttcactggaagtagattccatctcaagaaaccattttttgctcatccatgggaattaactcctcatctgttcaagttgtatcatgagattgtagcaattcagtcacatcttcagggtccacctctagttctcttgatatttctaccacatgtgtggttacttgaacccctcagagtcatccatgaagtttagaaccaacctcttgcacactcctgttaatgttgatattttgacctcctcccatgaattgcacatgttcttaatggcatctagagtggcgaataatttccagaaggttttcaatgtacttgaaaatccaaatccatcagagcagccatctctgatctttttgtcaccagggaccagttttgtagaagacaatttttccatggacccagagtgsggctggggggatggttttgggatgaacctgttctacctaagatgatgaggcattagcttctcataaggagcatgcaacctagatccctcacatgagcagttcacaaaagggtttgtgctcctgtaagaatctaatgctgctgatctgacaggaggcggagctcaggccataatgctcactcacctgctgctcacctcctgtggtgtgacctggttcctaacaggccatggactggtaccagagcacaggcagagtagattttagtataattcttaagggccctaggattgctggaatggtacacgagcactggttttaactta

SEQ ID NO: 931692 - DNA, 739 bp, Homo sapiens
tcctcttcttataaagccaccagtcccattcccatgataacccaatactccattaattaatgaattgcgtaaaccatttttctttctttcttttttttttttttgagatggagtttcgctcttgttgtccaagctggagtgcagtggcacaatctcggctcactgcaacctctatctcctgggttcaagcaattctcctgcctcagcctcccgagtagctgggattacaggcgtgcaccaccatgcctgcctaattgtttgtatttttggtagaaacggggtctcaccatgttagccaggctggtcttgaactcctgacctcaggtgatctgcccttctyggcctcccaaagtgctgggattacaggcgttagccaccgtgcccggacgccatttttcattcattagagcacagtcctcgtgacccaatcacctcttaaactccctgcctctcaatactgccacattttgtggattaaatttcaacatggtttttggaggagacatcattcaaaccatagcaggctagtctgatcttctatctggaaatctaaaactttctccattgatcagcaataaggctgtttcactttcttaccattcatatgtttgctagagcaggacttttaatttttttcaagactttttctttatattcactacttgggtaactattggtgccagactcccagcttttgtcctattttgacttttgacatgactttttcacaaagattaat

SEQ ID NO: 931693 - DNA, 825 bp, Homo sapiens
ccagcaatataccttcactgtcgtacctcagaggtatatcagctctccgggtttgtgtcataatcttgtttgcagagatcttgatcacttttcccttccgcaggatatcacaccagttcattagttcattacattgatgacagtatgtgaccggatctagtgagcaagaagtagccaacacactggacttattgatgagacatttgcatgccaggggatgggaaattaactaaaattcagggaccttctacctcagtaaaatttctagtggtccagtggtgtggggcctctcaagatattccttctaaggtgaaggataagttgctgcatttgccccctcctacaaccaagaaagagggacaacgcctagtgggtctatttggattttggaggcaatacattcctcattctggtrtgttactccagcccatttatcgagtgacctaaaaggctgccagttttgagtagggtccagaacaggagaaggctctgcaacaggtctaggctgttgtgaaagctgctgtgccacttgggccatattacctagcagattcaatggtgcttgagatgtcagtggcagatagggatgctatttggagcctttagcaggcccccataggtgaatcacagcagaggcctctaggattttggagcaaggacctatcttctgcagataactactctccttttgagagacagttcttggctggttactgggctttggtagaaactgaatgtttgactatgggccatcaagtcaccatgtaacctaaactgcctgtcataaactcgtgctttctgacccatctagccataaagtggggc

SEQ ID NO: 931694 - DNA, 817 bp, Homo sapiens
tacctcagtaaaatttctagtggtccagtggtgtggggcctctcaagatattccttctaaggtgaaggataagttgctgcatttgccccctcctacaaccaagaaagagggacaacgcctagtgggtctatttggattttggaggcaatacattcctcattctggtgtgttactccagcccatttatcgagtgacctaaaaggctgccagttttgagtagggtccagaacaggagaaggctctgcaacaggtctaggctgttgtgaaagctgctgtgccacttgggccatattacctagcagattcartggtgcttgagatgtcagtggcagatagggatgctatttggagcctttagcaggcccccataggtgaatcacagcagaggcctctaggattttggagcaaggacctatcttctgcagataactactctccttttgagagacagttcttggctggttactgggctttggtagaaactgaatgtttgactatgggccatcaagtcaccatgtaacctaaactgcctgtcataaactcgtgctttctgacccatctagccataaagtggggcatgcacagcggcattccatcatcaaatcgaagtggtatatatgtgatcaggcttgagcaagtcctgagggcacaagtaagttatgtgagcaagtggctcaaatgcccatggtccctgctcctgccatctagctctctttcccccagcctgcaccagtggcctcatggggagctccctgtgaacagttgaaaaaggaagagaagacaagggcctggtttacagatggttctgcatgatacg

SEQ ID NO: 931695 - DNA, 575 bp, Homo sapiens
gttactccagcccatttatcgagtgacctaaaaggctgccagttttgagtagggtccagaacaggagaaggctctgcaacaggtctaggctgttgtgaaagctgctgtgccacttgggccatattacctagcagattcaatggtgcttgagatgtcagtggcagatagggatgctatttggagcctttagcaggcccccataggtgaatcmcagcagaggcctctaggattttggagcaaggacctatcttctgcagataactactctccttttgagagacagttcttggctggttactgggctttggtagaaactgaatgtttgactatgggccatcaagtcaccatgtaacctaaactgcctgtcataaactcgtgctttctgacccatctagccataaagtggggcatgcacagcggcattccatcatcaaatcgaagtggtatatatgtgatcaggcttgagcaagtcctgagggcacaagtaagttatgtgagcaagtggctcaaatgcccatggtccctgctcctgccatctagctctctttcccccagcctgcaccagtggcctcatg

SEQ ID NO: 931696 - DNA, 817 bp, Homo sapiens
tacctcagtaaaatttctagtggtccagtggtgtggggcctctcaagatattccttctaaggtgaaggataagttgctgcatttgccccctcctacaaccaagaaagagggacaacgcctagtgggtctatttggattttggaggcaatacattcctcattctggtgtgttactccagcccatttatcgagtgacctaaaaggctgccagttttgagtagggtccagaacaggagaaggctctgcaacaggtctaggctgttgtgaaagctgctgtgccacttgggccatattacctagcagattcaatggtgcttgagatgtcagtggcagatagggatgctatttggagcctttagcaggcccccataggtgaatcacagcagaggcctctaggattttggagcaaggacctatcttctgcagataactactctccttttgagagacagttcttggctggttactgggctttggtagaaactgaatgtttgactatgggccatcaagtcaccatgtaacctaaactgcctgtcataaactcgtgctttctgacccatctagccataaagtggggcatgcacagcggcattccatcatcaaatcgaagtggtatatatgtgatcaggcttgagcaagtcctgagggcacaagtaagttatgtgagsaagtggctcaaatgcccatggtccctgctcctgccatctagctctctttcccccagcctgcaccagtggcctcatggggagctccctgtgaacagttgaaaaaggaagagaagacaagggcctggtttacagatggttctgcatgatacg

SEQ ID NO: 931697 - DNA, 584 bp, Homo sapiens
ttgtcgtttcttactatggttatttggagcttctctctttttctctttgttaatctagctagaaggctgtcaatcttgtttatcattccaaaaaaacaatttttggttttgttgattctttgtgtggattttggggtctcaatttctttcagttctgctctaattttagtgtttcttttcttctgctagctttgggattagtttattcttgcttttctagttcctctgggtgtgactttagacccttaatttgagatctttctaactttttgatgtaggtgattagcactataaactttcctcttgacactgattttgctgcatcccagagactttggttatgttgtgtctctgttttcacttatttcaaagaatatttytatttctgtcttaattttattgtttacccaaaagtcattcaggagcaagttatttaatttccatgtaattatgagattttgagagatcttcttcgtattgatttgtatgtctactccactgtggtccaagagtatggttggtatgatttcaattttttaaaaatgtagtgagactggctttatggccgagcatgtggttgatct

SEQ ID NO: 931698 - DNA, 545 bp, Homo sapiens
ccgattccttttcaggttttcatctctagctcacccaggccagacagtcctcacacacatgcaccactccaaaacttgtttcaggaagtcatttaattgcaaacactttgctctttggagttacacaaatgagtctatgtttttttctgttctgtggcatatttgcattttaatcctcatttaattttgtctagaagtactacattttttattgggggtttcggaaactgactgggaaatgtgtctcacctcccctcagggagggggctaacaagcactatttattatcmccatcatcatcatcctcatcatcaccagtagtttcaaagctcttacatgggaccatcctttccaataccctaaaatggcaactacaaactgtcaaccactgccctcattcataagattcatggtcactatccacaatatcaaagacatggaatcaagccagatggtcattcacaatggataggattaaaaaaaatgtggaatgtgtacatgtacactgtggaatactatatagccataaagagaacaaaatcatg

SEQ ID NO: 931699 - DNA, 579 bp, Homo sapiens
ctccagcctgggcgacagagcgagactctgtctcaaaaaagaaaaaaaaggtattcataacactttgtagatttcacattttctcaatataaatatacagggacaatatctcattatcatcccaccatcttattttgcagggtttttttttcttgataggaagataatttcctctcacttgtgtgaatctatttgacaactctatcaattyctgtttttctgaggacacttccttacacatctagtgagtagaacttagttatagtacttagccatcgattaatttttaaaaatcatggaacaaaatgatagtttggccgttttaaaaggatgcaatatagttcagtgaatactccatacagtactaaatttaaaatgcagacgttcgtaactattaaaatgttactaagtaattattaaataagtaaacttagtatttaataaatgatcaaatattatagtattaggcacatagctattaaaatgcagaattataagcatttatgcactgaaataactgcacacacagacctagcattcatatagattatcttttgggatcttcacaactctatgaga

SEQ ID NO: 931700 - DNA, 744 bp, Homo sapiens
gcaaaggactcagataaaccatggcacttttttcaaaagaaaaaggtgaattgacttgctctacagctatcgcaacattataaaatgatgttgtattactcaagattctccagcaaagccagcagaatgtgtctatgtagagagagaggtttattgtggaagcttggtaacttcaaaatctacaaaatctagagctggcaggctggatactcaaggaagagttacagttgagtccaaaggaaagtttgctgacrgaattccttctttcttagaggaagtcagtctttgctctatattaagtccttcaactgattgggtgaggcccacccacattagggaaggtaatttgcattacttgaagaccaccggtttacgtgttcatctcatctttaaaaacatgttgacagaaacatccagaaaaataaccaaatatctgagcaccatggcctagccaagttgacataaaattaatcatcacagatgacaattaagaaagcatggcattggccaggcacagtggctcatgcctataatcccagcattttgggaggccaaggcaggaggatcacttgatgccaggagttcaagaccatcctaggcaatatagcaagatgctgccttttcaaaaacaaaaaatttatataattttccacagtccagttctggaggccaaaagtctgaaatcaaggtgacagcagggccatgctccctccaaaggctctaggaaaagatccttccttgcct

SEQ ID NO: 931701 - DNA, 744 bp, Homo sapiens
gcaaaggactcagataaaccatggcacttttttcaaaagaaaaaggtgaattgacttgctctacagctatcgcaacattataaaatgatgttgtattactcaagattctccagcaaagccagcagaatgtgtctatgtagagagagaggtttattgtggaagcttggtaacttcaaaatctacaaaatctagagctggcaggctggatactcaaggaagagttacagttgagtccaaaggaaagtttgctgacggaattccttctttcttagaggaagtcagtctttgctctatattaagtccttcaactgattgggtgaggcccacccacattagggaaggtaatttgcattactygaagaccaccggtttacgtgttcatctcatctttaaaaacatgttgacagaaacatccagaaaaataaccaaatatctgagcaccatggcctagccaagttgacataaaattaatcatcacagatgacaattaagaaagcatggcattggccaggcacagtggctcatgcctataatcccagcattttgggaggccaaggcaggaggatcacttgatgccaggagttcaagaccatcctaggcaatatagcaagatgctgccttttcaaaaacaaaaaatttatataattttccacagtccagttctggaggccaaaagtctgaaatcaaggtgacagcagggccatgctccctccaaaggctctaggaaaagatccttccttgcct

SEQ ID NO: 931702 - DNA, 744 bp, Homo sapiens
gcaaaggactcagataaaccatggcacttttttcaaaagaaaaaggtgaattgacttgctctacagctatcgcaacattataaaatgatgttgtattactcaagattctccagcaaagccagcagaatgtgtctatgtagagagagaggtttattgtggaagcttggtaacttcaaaatctacaaaatctagagctggcaggctggatactcaaggaagagttacagttgagtccaaaggaaagtttgctgacggaattccttctttcttagaggaagtcagtctttgctctatattaagtccttcaactgattgggtgaggcccacccacattagggaaggtaatttgcattacttgaagaccaccggtttacgtgttcatctcatctttaaaaacrtgttgacagaaacatccagaaaaataaccaaatatctgagcaccatggcctagccaagttgacataaaattaatcatcacagatgacaattaagaaagcatggcattggccaggcacagtggctcatgcctataatcccagcattttgggaggccaaggcaggaggatcacttgatgccaggagttcaagaccatcctaggcaatatagcaagatgctgccttttcaaaaacaaaaaatttatataattttccacagtccagttctggaggccaaaagtctgaaatcaaggtgacagcagggccatgctccctccaaaggctctaggaaaagatccttccttgcct

SEQ ID NO: 931703 - DNA, 744 bp, Homo sapiens
gcaaaggactcagataaaccatggcacttttttcaaaagaaaaaggtgaattgacttgctctacagctatcgcaacattataaaatgatgttgtattactcaagattctccagcaaagccagcagaatgtgtctatgtagagagagaggtttattgtggaagcttggtaacttcaaaatctacaaaatctagagctggcaggctggatactcaaggaagagttacagttgagtccaaaggaaagtttgctgacggaattccttctttcttagaggaagtcagtctttgctctatattaagtccttcaactgattgggtgaggcccacccacattagggaaggtaatttgcattacttgaagaccaccggtttacgtgttcatctcatctttaaaaacatgttgacagaaacatccagaaaaataaccaaatatctragcaccatggcctagccaagttgacataaaattaatcatcacagatgacaattaagaaagcatggcattggccaggcacagtggctcatgcctataatcccagcattttgggaggccaaggcaggaggatcacttgatgccaggagttcaagaccatcctaggcaatatagcaagatgctgccttttcaaaaacaaaaaatttatataattttccacagtccagttctggaggccaaaagtctgaaatcaaggtgacagcagggccatgctccctccaaaggctctaggaaaagatccttccttgcct

SEQ ID NO: 931704 - DNA, 485 bp, Homo sapiens
ctgagatggacctgtgaggctgcagccgggttgggggaggggtgtccgccattgctgaggcttgagtaggtaaacaaagcggccaggaagctcaaactgggcggagcctacctcagctcagcaaggcctactgcctctatagactccacctctgtgggcagggcatagcagaacaaaaggcagcagaaacttctgcagacttaaacatctctgacagcagtggttctcccagcatggtgtttgagctctgagaatggacagtcagcctcctcaaggggtccctgacacccgtgtagcctaamtgggagacacctcccagtagggggcgacagacacctcatacaggtgggtgcccccctgggacgaagcttccagaggaaggatcaggcagcaataattgctgttctgaaatatttgctgttctgcagcctctgctgctgatacccaggcaaacggggtctggagtggacctccagcaaactcca

SEQ ID NO: 931705 - DNA, 628 bp, Homo sapiens
tactgggaaagtagtaaacatttgttgaattaatatcttaactaataacttatgttccctcctactcttcacttacttctagaccactttacttcctctctcctcccacaaaattacaacttcttataagtacatgctttgtgactataccattagcttcccttccattttattcatatactggcctcttcatcactctcatcatattttgaataacatagcacttgacttgctgtcatccttgtttgcaatgtggatattgaatccaagcagaaagtccagccaacacccyagcctcacagctccttcctcccttggtcccaacaactttcaagtcttaattgtaggttttctactctgtgagcaccatttcttatctctccagcttgtatattctaatcactcactgcaacaattctttgatgccagtggtattaataattaattgtttacaccattttttttgcccttgataatagccttcctcttcttttcttcttcccctgagtagatgccaaggtcttcctcacagagtttcaatttcttgcccctctcttcttccacatttcttgcctgtcaaaaccccaactctggttaaacctaattctctgcctgctttgcctacatc

SEQ ID NO: 931706 - DNA, 746 bp, Homo sapiens
  misc_feature 582: n = A,T,C or G
gtaggagcctaatgataagccccagctaacaaggccaggtgggcttaacacagaccaacccccttcccactttttgtaatctgtcacttctctgacgtcattgagtccccactcaccctctctgttctttcattcttgctttaaaatgcccagttatctctacaaatcaaagttgagttcagttcaagctaggctcttttccctattgcaataatatgtcactgattaaaatctgttcttaccactttatttatttatttatttatttatttatttattattttgagacggagacttgctatgtggcctaggctggagtgcaatggcacaatcttggtttactgcaaaatctgcctcccgagttcaggcgattctcctgcctcagcctcctgagtagctgggattacaggtgtgcaccaccatgcccagctaatttttgttttttagtagagatggggtttcaccatgttggtcaggctggtctcgaattccttgcctcaagtgatccgcctgcctcggcctcccaaagcrctgggattacaggcgtgagcctctgtgcctgtcctgtccttaccactttanctagtgtctggctttgtttatctatgagatgatccagcaattctactcccaggtatatacccacgaaaaatgaagatatatatccacacagaaacttgtatacaaatgtttatagcaacattatttataatagccaaaaggtgaaaacagcccaaatgcccact

SEQ ID NO: 931707 - DNA, 789 bp, Homo sapiens
agttgacatcatgtatttcagctaagcagtcccttttaaaatatcctaggaattattttaaagaaaaaataaattgatgtacttcagctcattggtcagcaggaattgggcctaactccaatgataagattgaaggattcttgaagctttctcttaatggtgagtataccaatctgcttgggctgccataacaaaatgccatcgaatgggtggcttaaataatagaaatgtattttctgatgtttctgagggctaggaatccaagatcaaggtgcccacagtgtcgtttctggtgtggcctcttttcctgctttgtaggtggacacattctctgtgtatcctcacatggccttgctccgtgcctacagagagagcaagctctggtgtcttcctcttacaaggatacaagtcctgttggattaaggccccacccttatggcctcagttaaccttaattgccttcctaaaggccctgtttccaaatacagtcacattsagggttagggcttcaacacatgaactggggagatggaagaaagattcagtccataacagtgagaaagaagttttcagatgcaaaactattcagtcttgcagactattgttctatcataatggcagacaaaataagaacatgaaattttatttgttcaaccagaagatttttctctgctcccactgctctttcctcaagtacccaaaaccttctagtatattttccaattgtgtaaacgaactcccggaagtgaatattaaccaaactcagatatccaatacttaccagaggat

SEQ ID NO: 931708 - DNA, 764 bp, Homo sapiens
aataaagagaggaagagcagaaaatttccaaggtgggccctccatgcgaatgaagaacagagcaggtgtttggcaaagttagcttgggggagggagggatggacttagtgggggagggaaggtgtgaaaataattgtattttgtttatgtcttaaagaaaacgtccctaaaatgtgtcacttaaggaaggatacagtttcagcaacagaagtggggggcatatctgccataattggctatgcaataaaagagattttaaaaacacattttgcagtagttattttggcctttttctttgagacagagtctcrctctgtcgcccaggctggagtgcagtggcgtgatctcggctcactgccagctccgcctcctgggttcacaccattctcctgcctcagcctcccaagtagctgggactacaggcgcccaccaccatgactggctaattgcttttgtatttttagtagagatggggtttcactgtgttagccaggatggttttgatcccctgacctcgtgatctgcccacctcagcctcccaaagtgctgggattacaggcgtgagccaccgtgcccggctattttggccttttaaagatatattcagaatgattacatgtctctcttgagaggcagtatccacagtagtcatgctcacaggctgtggaatcagatttgaattctgaccctgccactagttgatgtcacgatttaacctgtgtctcaacttcctcatctgcacaatttcccatctgtggtttata

SEQ ID NO: 931709 - DNA, 610 bp, Homo sapiens
catgcaacaaactgtgggcagcattaattcaaaagattaacaaggccgggggctgtggctcatgcctggaatcccagcactttgggaggccaaggcaggcagatcacctgaagttgggagttcgagaccagtctgaccaatatggagaaaccccatctctagtaaaaatacaaaattagccaggcgggcatgttggcacatgcctgtaatcccagctacttgggaggctgagtcaggagaatcatttgaatccgggaggcggaggttgtggtgagccgagatcgcaccattgcactccagcctgggcaacaagagggaaactccatctcaaaaaataataaaaaataaataaatgaaagattaacaaaagacttgggccaggtgcagtggctcacgcctgtaatcttcagcgctttgggaggtcgaggagggcggatcgattgagctcargagttccagaccagtctgggcaacatggcaaaaccctgtctctacaaaaaatacaaaaattagcatgacatagtggcacatgcctgtagtctcagctcctcggggggctgaggtgggagaatcgcttgagcccaggaggttgaggctgcagtgagcaaag

SEQ ID NO: 931710 - DNA, 575 bp, Homo sapiens
tgtcaccaatataaagtagatcagattggggtgctgtggttcatgctcataatcccaggtacttgggaggctgaggtaggaagatcacttgagcctaggagttgaaggctgtaatgagccatggtagtgcccctgtactccagcctgggtcacagagcaagaccctttctctaaaataaataaataaataaataaatagtggattaaataagagaraagtttatttctccatctcatgtccagggctgatagggtggctttaccatgttggggacccaggatcttcctgtctaggagctctgccatccctaaagtattcatcattcttatttgtactgtccaagatggttgaccatccagtctgcatatcagctatcaggaggggtggaaagagaaagaagagggcatgcctgtcccttttagggcatgatcctgtaggtgaatgagtcacttctgccatatcacattaaacagaacttagttgcatggtcactccgagctgccaggaggctgggaaatgactcttcattctaccatggtccatgcagtcaaaaactgggcattctcttaggtaa

SEQ ID NO: 931711 - DNA, 847 bp, Homo sapiens
ctaagcccatcactgcccggggccggtggtgctggctggccgctccaagtgcgggacccgccgagcccacacccacctggaactcacagtggcccgtgagccccacgtgcagccccagttcccactcccgcctctccctccacacctccctgcaagcagagggagccggctccgacctcagccagcccagaaaggggctcccatagtgcagcggcaggctgaagggctcctcaagtgcagccagagtgggcgccaaggctgaggaggtgccaagagtgagcgagggctgccagcacactgtcacctctcaatcccccctcaaacaggacaccccaactgctgttgggaatttggctgatgactgctctagctacttcctgctggataggggcgatgaaggggccctgcagttgtactgtcctccagaggggagctytctaggccagtaaaagtgccagcgggttggtccaggggtcctcagtagaagttgttagttgaactcatttagggctccatttgtaagaccatctgtagcttgatggcctcaattctagaggaatagcttaaggagactaaagagacaatttaaaagagatatgaatatacttagattggattaagatttagagatgaggggtgaagtaaattatctatcttgagttccttttttagaaaggtgatctaaaatactatctgagcataatcacttagtgacaccatggaggaggaactagccaggtggttcaatgaccataataaggactatgaagctgtatctgggtgaaatacaactgcattaattcagatttggatggatttactaatagctcctagtctatcaatacct

SEQ ID NO: 931712 - DNA, 847 bp, Homo sapiens
ctaagcccatcactgcccggggccggtggtgctggctggccgctccaagtgcgggacccgccgagcccacacccacctggaactcacagtggcccgtgagccccacgtgcagccccagttcccactcccgcctctccctccacacctccctgcaagcagagggagccggctccgacctcagccagcccagaaaggggctcccatagtgcagcggcaggctgaagggctcctcaagtgcagccagagtgggcgccaaggctgaggaggtgccaagagtgagcgagggctgccagcacactgtcacctctcaatcccccctcaaacaggacaccccaactgctgttgggaatttggctgatgactgctctagctacttcctgctggataggggcgatgaaggggccctgcagttgtactgtcctccagaggggagctttctaggccagtaaaagtgccagcgggttggtccaggggtcctcagtagaagttgttagttgaactcatttagggctccatttgtaagaccatctgtagcttgatggcctcaattctagaggaatagcttaaggakactaaagagacaatttaaaagagatatgaatatacttagattggattaagatttagagatgaggggtgaagtaaattatctatcttgagttccttttttagaaaggtgatctaaaatactatctgagcataatcacttagtgacaccatggaggaggaactagccaggtggttcaatgaccataataaggactatgaagctgtatctgggtgaaatacaactgcattaattcagatttggatggatttactaatagctcctagtctatcaatacct

SEQ ID NO: 931713 - DNA, 539 bp, Homo sapiens
aaagaaaacacaaaatgatcgtgatcagatgtttatttaacatctatagagagcccatatatatgtgttttttaatccctgagctatcaagactacattttacctgttcaaataaagattaacccacctcccagccataatcagtatccagttaatttttaggaggatgctagaaggatgatataccacctgagtggctgcctggagcctggggcatggagttgcagtgcttggtgtgattacctgggcagagccaaggcrcctcatgaagctgcggatggggagaagccctgggatacttctcacctgaaacacagattggtagagcacagccccagctcatgggagaagaaatgaaatgatgaaaacttactttacataggaagaagctgagatatgaagttgactccacttatccaagaccccacagctcctgagaactggaaaaaaagagtaagactgaggtctaacaggcttcaaagcccaaaccgttcctgccccatcatttagaatccaaagaaatccttacaacaagattt

SEQ ID NO: 931714 - DNA, 544 bp, Homo sapiens
aaccaataggatagatggacggatggatggacaggtagataggtagatttagacagacagatttattataaggagttgccttatgcaattttgaaggctgagaagtcccaggatcagcagtctgaaggcctgagaaccagggtgggaatttcagtgtgagtccaaaagcttgcaagaggagagctggcagtgtaaattctagtccaagtatgaaggcttgagaatcaggagagtcaatgatgtakgttctagtccaagcctgagggcaggagaagaccaatgactcagcttaagaccttcaggcagaaacagtgaattctctcttgttcagcattttgttctattcaggccttcaactgactggatgaggctcacccatattagatgctttacttagtctattgattcaaatgtcagtctcatccagaaacgccctcacacccagaataatgtccacccaaatatctgaggacccccatagtccagtcaagctgacatctaaaatgaaccactaaaaggggattagatcactctttgagagtgt

SEQ ID NO: 931715 - DNA, 631 bp, Homo sapiens
catggaccccagatcttcctttagctactgcctcatttttctttctctttacagcaaaccttactgaaataagaagtctatatgttactttcatttattcacctctcaatcactctttaacccaaagtaatctgagttattctcctgctactsttctgagcctactcctataggtcacaaggaataagcttgttgcaaaatttattaaatagatgcttttcaggcataatcatatttaaccccctcacagcatttgacactggaaataacttcctctaacttaagaaaatctcctcgttggcttatgtgttgttatatactcctggtttcttccataactctctggccccttcctctcagttttccttgtgttctcatcttcatctgtccaggtcttcagtgttggtattggtcacagtctcctctaaatgtaagagcatatctatttcagtaggtttaattttccatccacattctgacattttcgaaatttttatttccaacacatatgtcttttctgaacttcagacccagttaaactattgcctgctgaacacgttttcttggttttctacaggtatttggaactcagtacagaacaatttatcttttatttcaaacctgttctttc

SEQ ID NO: 931716 - DNA, 576 bp, Homo sapiens
ctgctcggaaggctgagacttgagcccaggagttcgagtctgtggtggactgtgatcacacaagtgctttccagcttgggtgacagagtaagactctgtctctaataaaaataaaaaagaaattgtgggccaggcrcggtggcttacgcctgtaatcccagcactttgggaggctgaggcgcgggcagatcacgaggtcaggagatcgagaccatcctggttaacgcagtgaaacactgtctctaactaaaaatacaaaaaattagccgagcgtggtggcaggcacctgtagtcccagctactcgggaggctgaggcagaagaatggtgcaaacccaggaggtgggactccgcctcaaaacaaaacaaaaaaaaaaagaaattacgtataatgttcaatcttctcttcagtattttcctaggcaatagattacttgtcttaggttattttgcttttaatgattacaaagttcgactgtataaacaaggagatagagatctttccacagaaatcttagaataatttacctatttttccaaaataaacaattactttaaaaataaatctttcatacat

SEQ ID NO: 931717 - DNA, 671 bp, Homo sapiens
tgttgctctggcgacccttcgacctggatttgagcccccacgaatggacaccacttgccgagaccagctcagtcggggagaccctaacccagcagcgctagaggaattaaagacacacacacagaactacagaggtgtgaagtaggaaatcaggggtctcacagccttcagagctgagaaccccgaacagagatttacccacgtatttattaatggcaaaccagtcattagcattgtctctatagatgttaaattaactaaaagtatcccttatgggaaaagggatgggctgaattaaaggaataggttggactagttaactgcagcaggagcatgtccttaaggcacagatcactcatgctattgtttgtggcttaagaacgcctttaagcagttttccgtcctgggcgggccaggtgttccttgccctcattcccataaacccacaaccttccagcttgggckttagggccattatgaacatgttacagtgctgcagagattttgtttatggtcaattttagggacagtttatggccagattttggggggcctgctcccaacactttctaatttttttgtacccattgaccatctccattccccacgccctacccactccccccaccacattatgcttcccagcctctggtaagcatccttctactctc

SEQ ID NO: 931718 - DNA, 624 bp, Homo sapiens
atcagtaattacatcatcagttaagaatagccttctgtaatcccagcactttgggaggccaaggcgggcagatcacctgaggttaggagttcaagaccagcctgaccaacgtggagaaaccccatctctactaaaaatacaaaattagccgggcatggtggttcatgcctgtaattccagctactcgggaggccgaggcaggagaatcgcttgaacccggaaggcagagrttgcagtgagccaagatcaaggcattgtactccagcctgggcaacaagagcgaaaattccatgtccaaaaaaacaaggccgggcacagtggctcaggcctgtaatcccagcactttgggaggccgaggcgggcagatcacaaggtcaggagatcgagaccatcctggctaacacggtgaaaccccgtctctactaaaaatacaaaatattagctgggcgtgctggcgggcgcctgtagtcccagctactcgggaggctgaggcaggagaatggcgtgaacccgggaggcggagcttgcagtgagccaagatcgtgccactgcactccagcctaggcgatagagagagactccgtctcaaaaaaaaaaaaaaaaacacacacacacataaaaaca

SEQ ID NO: 931719 - DNA, 620 bp, Homo sapiens
tgctaggctcagcggggaaagccttcagctctatcgcaacagtcagacagctttggtgcatgggaaggatcttggagaagaggcagtctttccccccttgttcaccaccatatgcacagttgggacttctcccacaggagctcgacatggatgcaactatagacggccattctggaacacatcaaggcgactgcatccccacaagaggagcaccctccaggatcaggcttgcacaagaaacagtcacaattcctctctatttggaacaccaacacctacagatgaaaagaggtgcctgtctgatctgaatagccagagcgctgggacaggagcatatctaagaagtggaaaacgtccctgctgaccttgcaggggagctaaggtggctccaacccttctccctgataagacctcactgtgactcaccgagggctcctccagccacctctgtcaagcctgggtcttcatttacccacttgcttyacccacaaccgattcctactcagggacacctcttctactggcctgaaacctgaaccatcaaaccagtaaataaaatactgggggaaaataaataaataaaaagtgcatgagatgggagaaggagataagctttaaga

SEQ ID NO: 931720 - DNA, 453 bp, Homo sapiens
agagtttcagccacatggtcacctgttgccccattgtcaggcattctgtcactatcagggctcagcagtatactaggagctgatttttgttcttttttaaaccaaaaccaaaaaacacacaaacaaaaaaccatgattctccattgcaggtagcatgcctttactctagaacctcatgggcctgctttgggattccatcactagagcttgtcacaacccctaggtggcatctcttgccaccaccgatgcctccaacaccacagagtctactggatcatatggctgaagtggtaggactgcagaaactttgcctgttctgggccttcttaaagctagcaggcttttgtgttacttatgtatgggccaaagcaatatctctakgatgtgtagaatacactaccaatggaactgaaaagtcctaccagcactgttgtgctcccttcttcaagacag

SEQ ID NO: 931721 - DNA, 710 bp, Homo sapiens
agtcactatcagattgtgtttgtgataattcactgtcattctccaagatccatctgtcttctacaccagccaaatagacaagttgaataaagatgtggtaggtaggccaggtacagtggctcacgcctgtaatcccagcagtttgggaggccaaggcaggtggatcacgaggtcaggagatcgagaccatcctggctaacacagtgaaaccccgtctctactaaaagtacaaaaaattagctgggcgtggtggcgggcacctgtagtcccagctacttgggaggctgaggcaggagaatggcgtgaacccgggaggcggagcttgcagtgagccaagtttgcgccactgcactccagagcctgggtgacagagggagactccgtctcaaaaaaaaaaaaaaaaaaaaaaaaaaaaaaaaaagatgtggtagaactcacatcttacttccttcaggtctttggtagtggcaccaatctctgaaatttctccaggcatgcattgtgctttaaatcagcaagcagtatatggtgccgtttcttccttagccgtttcattccttatcctgagataagggttttgaaagtgggagtgatttctcctattgtcattcctagtattccataagagaaagttttgatttamccccaactttggccctctccattccaaagagaggactgcttccaccaataggtacaacaatgtttac

SEQ ID NO: 931722 - DNA, 640 bp, Homo sapiens
tgaaatgaacactgaaaaagctccctctggccatagatgggaaaacgtgaatatcaataaggaaagttaccacaatgagttgaattcagaaatttgctaacattattctaaaaaaaatcatgtttggaaggtgttaggaatcaactcattatctagaaaactggcaaatgaaaggacatattttcatttcagtagcatcccagataacaaataaaaaatgaaaaaaaataagaatatcactttttcacacccattaatgaaaaacttatgatcaccaatgtccactaatactgagaaaaggaaaagacaaggcattataagcctttagatataagtactcagwagcagctatgcttgccctaatgatttgaatgtgaatctggccaagcttctagatttaactacaaacttacagtacatgaaggaaaatgtatagtatgtgaaataatattatggcaataattttaggaaaatgaagactatggagaatctacatggcaatcaaccagcttctccaagaattttcaaaataaaaaaagaattgcgaggcacagtggctcatgcctgtaatctcagcactttggaaggctgaaggagtttgataccagcctggctaaaaccgactccacgtccacaaaaa

SEQ ID NO: 931723 - DNA, 783 bp, Homo sapiens
ccatgaacccgggcatgcctgtgctctgggggcggggagggggcgcgggggaggaagcttcctggtaagtgcctgctccagctacctggcctcctggcctcctcagctcccagcacccactctgattttggaacaaagttgtggccgagcctgggggctgggtgcagcgctgatattccagccccctackgtctccgccccctccggactttgggcactgaccagcatgggagagaggacaagggggtgctgagggtggctcagcgcaggcctgcaggcacccctctgcatgaacaacctgagcaccatgaaaagcggcaggaggcagacgcactcctgggtggaaagggtaggtcctccatgaaaatccactttcaagccaggggcagcttgaagcctggcggccgggctccgaattcggctattcagggcagtctcaactccgactggagtgagaacttacggtgcttttcctggcctgctcatggccacccacggaccaatcatcatccacttcctcccctctgaagcccaaaaaaactccggactcccacactcaggcggacgttgggacgacctgccagcagatagaagctgcccaccccactcccctcctcacccctaagggcagagagctgcacagacccctggatgacctgcctgtggaaaggagttaaacacattgggtctcctgagagttgtactgtcacccataaagcacctctttgccttgctcattctctatttgtccacttacctcatccttcctggacatgggacaag

SEQ ID NO: 931724 - DNA, 783 bp, Homo sapiens
ccatgaacccgggcatgcctgtgctctgggggcggggagggggcgcgggggaggaagcttcctggtaagtgcctgctccagctacctggcctcctggcctcctcagctcccagcacccactctgattttggaacaaagttgtggccgagcctgggggctgggtgcagcgctgatattccagccccctacggtctccgccccctccggactttgggcactgaccagcatgggagagaggacaagggggtgctgagggtggctcagcgcaggcctgcaggcacccctctgcatgaacaacctgagcaccatgaaaagcggcaggaggcagacgcactcctgggtggaaagggtaggtcctccatgaaaatccactttcaagccaggggcagcttgaagcctggcggccgggctccgaattcggctattcagggcagtctcaactcygactggagtgagaacttacggtgcttttcctggcctgctcatggccacccacggaccaatcatcatccacttcctcccctctgaagcccaaaaaaactccggactcccacactcaggcggacgttgggacgacctgccagcagatagaagctgcccaccccactcccctcctcacccctaagggcagagagctgcacagacccctggatgacctgcctgtggaaaggagttaaacacattgggtctcctgagagttgtactgtcacccataaagcacctctttgccttgctcattctctatttgtccacttacctcatccttcctggacatgggacaag

SEQ ID NO: 931725 - DNA, 783 bp, Homo sapiens
ccatgaacccgggcatgcctgtgctctgggggcggggagggggcgcgggggaggaagcttcctggtaagtgcctgctccagctacctggcctcctggcctcctcagctcccagcacccactctgattttggaacaaagttgtggccgagcctgggggctgggtgcagcgctgatattccagccccctacggtctccgccccctccggactttgggcactgaccagcatgggagagaggacaagggggtgctgagggtggctcagcgcaggcctgcaggcacccctctgcatgaacaacctgagcaccatgaaaagcggcaggaggcagacgcactcctgggtggaaagggtaggtcctccatgaaaatccactttcaagccaggggcagcttgaagcctggcggccgggctccgaattcggctattcagggcagtctcaactccgactggagtgagaacttacggtgcttttyctggcctgctcatggccacccacggaccaatcatcatccacttcctcccctctgaagcccaaaaaaactccggactcccacactcaggcggacgttgggacgacctgccagcagatagaagctgcccaccccactcccctcctcacccctaagggcagagagctgcacagacccctggatgacctgcctgtggaaaggagttaaacacattgggtctcctgagagttgtactgtcacccataaagcacctctttgccttgctcattctctatttgtccacttacctcatccttcctggacatgggacaag

SEQ ID NO: 931726 - DNA, 597 bp, Homo sapiens
tgagttagattccagacattctattacgcactccaaatcaatcatacccaaactgtagtctctgggggcagcaaaagcgtcacctgcgaccctgctagaagtgtagactttcggctgggcgaggtggctcacgcctgtaatcccagcactttggaaggcccaggcgggcagatcacgaggtcaggagtttgagaccagactgaccaacatggtgaaaccctgtctctactaaaaatacaaaacttagcgggacatggtggcgtgcaccwataatcccagctactcaggaggctgaggcagaaaaattacttgaactggggaggcagaggttacagtgagccaagatcacgccactgcactccagcttgggcaacagagtgagactccatctcaaaaaaaaaattaaaaaaggccagcgtggtggctcacgcctgtaatcccagcactttgggaggccgaggcgggcggatcatggggtcaggagatcgagatcatcctggctaacacggtgaaaccccatctctactaaaaatacaaaaaattagccaggcgtggtggcgggtgcctgtagtcccagctactcgggaggctgaggca

SEQ ID NO: 931727 - DNA, 611 bp, Homo sapiens
gttgagttagattccagacattctattacgcactccaaatcaatcatacccaaactgtagtctctgggggcagcaaaagcgtcacctgcgaccctgctagaagtgtagactttcggctgggcgaggtggctcacgcctgtaatcccagcactttggaaggcccaggcgggcagatcacgaggtcaggagtttgagaccagactgaccaacatggtgaaaccctgtctctactaaaaatacaaaacttagcgggacatggtggcgtgcacctataatcccagctactcaggaggctgaggcagaaaaattacttgaactggggaggcagaggttacagtgagccaagatcacgccactgcactccagcttgggcaacagagtgagactccatctcaaaaaaaaaattaaaaaaggccagcgtggtggctcacgcctrtaatcccagcactttgggaggccgaggcgggcggatcatggggtcaggagatcgagatcatcctggctaacacggtgaaaccccatctctactaaaaatacaaaaaattagccaggcgtggtggcgggtgcctgtagtcccagctactcgggaggctgaggcaagagaatggcgt

SEQ ID NO: 931728 - DNA, 563 bp, Homo sapiens
cacattcttctcatgagcacatggagcattctttaaaacagagcatatgttaggcaaaaaaacaaaacaaaaccaaaaatcaaaaacaaacaaacaaaaaacactcaacaaatttataaaaaccaaaatttattaaatatcttctgagaccagcatgatacaaaagaaaaaaaaaaacarcaagaactcaagaacaagagaaacattgaaaactgtacaaatatatagaaattaaacaacatgatcttggtaaccattgggttagtaaagaattaagaaaacattttaaaaaatacttgcaacaaatgaaagtgtaaagacagcatagcaaaacttacgggatacagcaaaagcagtactaagaggaaagcttatggaaataaatgcccatatcaaaaaaatagatttcaaaccaaattatgcaccacaagggactaacaaattaagaacaaaccaaacctaaatttagtagaaggaaagaaataacagagatcaaagcagaattaagtgaaataaaggctaaagttacagtacaaaaatcaatgaatctaaaagttgttttt

SEQ ID NO: 931729 - DNA, 653 bp, Homo sapiens
cacttggaaaattgggtgactctcaccctaatactgtgatttccaacggtcttagcaaacggcacaccaggatattgtatcccacacctggctcggagggtcccatgccgatggagcctcgctcattgatagcacagcagtctgagatcaatctgcaaggaggcagcaaggctgggggaggggtgcccrccattgctgaggcttgagtaggtgaacaaagaggccaggaaactcaaactgggtggagcccatcacagctcaaggaggcctacctgcctatgtagactccacctctgggggcagggcacagccgaacagaaggcagcagaaccctctgcaaacttaaatgtccctgtctgacagctttgaagagagtagtggttctcccagcacggagtttgagatctgagaacagacagactgccccctcaagtgggtccctgacccccgagtagcctaactgggaggcaccctccagtaggggcagactgacacctaacacagccgggtacccctctgacacaaagattccaaaggaatgatcaggcagcaacatttgctgttaagcaatattcgctgttcttcagcctctgctgctgatacccaggcaaacagggtctagagtggacctcctgcaaactcccactgacctg

SEQ ID NO: 931730 - DNA, 645 bp, Homo sapiens
cacttggaaaattgggtgactctcaccctaatactgtgatttccaacggtcttagcaaacggcacaccaggatattgtatcccacacctggctcggagggtcccatgccgatggagcctcgctcattgatagcacagcagtctgagatcaatctgcaaggaggcagcaaggctgggggaggggtgcccaccattgctgaggcttgagtaggtgaacaaagaggccaggaaactcaaactgggtggagcccatcacagctcaaggaggcctacctgcctatgtagactccacctctgggggcagggcacagccgaacagaaggcagcagaaccctctgcaaacttaaatgtccctgtctgacagctttgaagagagtagtggttctcccagcayggagtttgagatctgagaacagacagactgccccctcaagtgggtccctgacccccgagtagcctaactgggaggcaccctccagtaggggcagactgacacctaacacagccgggtacccctctgacacaaagattccaaaggaatgatcaggcagcaacatttgctgttaagcaatattcgctgttcttcagcctctgctgctgatacccaggcaaacagggtctagagtggacctcctgcaaactccca

SEQ ID NO: 931731 - DNA, 628 bp, Homo sapiens
tattgcacacttcacagacttcagtattgtgtaaacataatatttatatgcactgggaaattgaaacatttttgggactctttgcattataatatttgcttaattgcagtgatctggacctgatccctcaacatctttaagatatgattttatctctttgaagacacaacactttattatctttttcattagttatatatttactagaacttctatcaagaagttttatagttttactgttatatatgtatataattgttatatatgtatgaagttctatatgtataaaactatgtatatatagttatatatgtatatatgactatatgtgtgtgtgcatgtttcttcyttttcaatttttattttaaaatcagagagtacatgtgcaggtttgttacaaaggtatattacatgatactgaggtttggggtatgactgaacttgtcacccaagtagtgagcatagtacctaataggtagtttttcagctcttgctcttctccccctcttcttcctctagtagtccccagtgtctatggttcccttctttatgtccctgtatactcaatgtttagcacccacttatacatgagaacatgtggtatttggttttctcttcacttaggata

SEQ ID NO: 931732 - DNA, 596 bp, Homo sapiens
tttgggtggagagttctgtagatgtctattacgtccacttggtgcagagctgagttcaatttctgggtatctttgttaactttctgtctcattgatctatgtcgtctatgttataactatctgtctcgttgtctaatgttgacagtggggtgttaaagtctcccattattattgtgtgggagtstaagtttctttgtaggtcactaaggacttgctttatgaatctgggtgctcctgtattgggtgcatatatatttagcatagttagcccttcttgttgaattgatctctttaccattatataatggccttctttgtctcttttgatctttgttgctttaaagtctgttttatcagagactaggattacaacccctgcctttttctgttttccatttgcttggtagatcttcctccatccctttattttaagcctatgtgtgtctctgcacgtgagatgggtttcctgaatacagcacactgatgggtcttgactctttatccaatttgccagtctatgtcttttaattggagcatttagcccatttaccttcaaagttaatatcattatgtgtgaatttgatcccgtcattatg

SEQ ID NO: 931733 - DNA, 738 bp, Homo sapiens
tggctcctgggggcagtttccccaatgcagttctcatgatagtgaaggagttctcatgaaatctgacggttttaaaagtggcagtttcccctgcactctctctctcctgctgtgtgtaagatgtgccttgcttccccttcagcttacaccatgattgtaagtttcctggagcctcccmagccatgcagaactgtgagtcaattaaacctcttttgtttataaattacccagtctcaggtagtgtctttatagcagtgttagaatggactaatacaaacagccacaggaggaaactgagcagcagacatcttggtggtggagcttgctctccataaacatgccacaccttttttacatcctctaaggcagggattggtcactaaaataatagatggaacaagggtatcctccaaagacataagggtacaatgtgaatttttaagaggaaaaatattgccaatttcttgtaacctttgactgtcaaattatacatggcatatgacccaatctttgggctgtacactctggtagagagaggatgtgggcagcaaggcattttcagagttattgcaggtaggttgcaaatccatattttcactgagccttgtctgaggtctgaatgatggctcacaattaactgctattttcataagcatatagatgctcttgtgatgaagaacatacaaatttatttaaaaattccttgcagacagctacccatacattgttggtctaccc

SEQ ID NO: 931734 - DNA, 570 bp, Homo sapiens
acctgaatctagatgaggggaacacggtggtgcctggaagcttggagatgccaggaacacaagaaccccaaagagggtgtcacaggtctgggtttcttttcagcttagctacgtaattaaaagggtaccctaggtatgggttccccgaagggctgcagctcttctctccttctcgttgcccacaacatggcgagcagggggcgtgttttagccgtgtttgtgttacagttctcagtactgccattcagcaggtccagagttcttgtcctccctccaggaagaatgaggtatgtcaacaactggaggtgagcaaggcagagaggagttcacggagcgacagcatagctctcaggagacccacagtggatggctcctttccacaggcaggtcgtccagacaagtgtccagctctcrgtggagaggagacctatggtgggtggctcctttccacaggcaggtcgacccgacaagtgtccagccctcagtggagaggagacttctgatgggtagccccttcccacagacagattgcctcgaagagtcgaggagacctaacccaaagtgggtagc

SEQ ID NO: 931735 - DNA, 600 bp, Homo sapiens
gagctgaacagacatctggatgatctgcctgttgaaagaagctacccacttcaggtctctggagagctgtactgtagctcaataaaacacctctttgccttgctcaccttgcagttgcccacgcacctcattcttcctggaaacaagacaagtacttgggacctgctgaatggcacaaacagggctgaaacatgcccccctagtcagcatgttgtgagcacgagaagaggagaagaaaaaagagagaaaagaggagagaaaagttgaggcyctttggggagttcagctctaagagttccctgagccagggctcttacacgctatttggcgttctgcagttcctgggatctccaagctgctgggtgacaaagtgttccctggtgcctgcagtggaagccacttgcggtacacctggtccagccatagcctcgcagggaaccagcacctgtgccagcacctggagcagcccgccagccccagccagtgtgccttgttgtacacagtggccggaccctgggatcgctcgcttacacactcctcaccgcttcatgcctggctcaccattggcaggcatcggatctgagccagtagtacaagccg

SEQ ID NO: 931736 - DNA, 598 bp, Homo sapiens
ggatgttagattgtttccactttttggctgttataaataatattactatgaatattcacattgaggttttcgcatagatatatgtgtcatggtttggatgtttgtcacctccaaacttcatgctgaaatgtaatttctaatgttgtaagtggggcctggtgagaggtattgaatcatggggcggatccctcatgaatggcttagcaccatcaccttggtgaagagttctcatttagttagttcacatgagatctggttgtttaaaagagtgtggtgcctcccacctcctctttcttgctcccactttcaccatgagatgctagctctccctttgccttctgccatgatcgtaagcttccygaggcttcaccaaaagccaagtacatgctggtgccgtgcctgtacagcctgcagaactgtgagccaatgaaacctcttttctttacaaattacccagcctcaggtatttctttacagcaacacaagaatgacctgataccatatgctttcaatttccttgggtatatacctaggagtggaattgctaggtcacatggttactcttatatttaactttttgaggaactgccaagtattt

SEQ ID NO: 931737 - DNA, 602 bp, Homo sapiens
agagggtgaggcaatggagactttggtggtggggtgaggaaagttggaaccccaagcagcctgtcacccagcccaggggacatgagctcctgattttacctttgacatgtgttttgtaagcgaagtctgatgggacaatggagcatgcacatgggcagaggagctccatgccatgtgtgtgcccagtgttcctgtggccctttttgcacaaagcatctgtgaggccccagaggtgcggggtgcataggaattcagcaggactcaaatcaagtccaaggaaagcaggttacatgtgtggctatggaggtcgtggggtggggtgcagtaagaagaagctgcactttctgttccaaccaggacgtgcttcaagtgcagaaagaasacaatgacattctaagcaatgggaatgacccattctgtccttgccttttcctgctacttccttggtataagacaaccacctatgctgacaatgatgacagagaaagaaaaagaaggatagggaaatcacaggctttttttcgactcagtacttccttagtcctccataagctgaaggtagaaagtggtggcagaatgcgttcatctcaagacgtaaacta

SEQ ID NO: 931738 - DNA, 592 bp, Homo sapiens
aagccattcttccacctcagcctcccgagtagctgggattgcaggtgcccgccaccgcgcccggctagttttttgtatttttggtaaagacaggatttcaccatgttggccagacttgtctcaaactcctgacctcaggtgatctgcctgccttggcctcccaaagttttaggattacaggcgtgagccaccatgcccagcccattttatkttatatgttacctttccccacccccagaagaatccctaggcttacacaggctgctaaagaactcatgacatccaggaaattaagaacccctgggtcatactctctgtccatggctccacttggtaggtcgaattcatagtctgtttctccttttctttctctggactggcttattttgcttgtcagtttgcacagtaaacataatctcttgagagctgtgctaagcattttctcacatgccattcctgcatcaccgctgcaaggttttactctaagtaggttccactctattccttggagggtctccatcaggactaagcccaggtgccacagtggtgaccttgtattagcacaccctctgttggcttctccatcatccct

SEQ ID NO: 931739 - DNA, 619 bp, Homo sapiens
cagacccttctcctatccctgttgtcctcctctttataaccctgcctcttgggaatcatcccaaaagctcactcactaccagcctaagtaccgagggggccaaaacctataaagaacacagaacccaactctccaggcaatataaagggtgaaagagtaaagccaggagacccataggaagaaaaaaaaaatcttagaagagagaaaaagagacagagagacaaagagggagtcaaagagacagagacagagagtcaaagagagagagagaaaaagagacagacagaagtagtaaagagaaagcaatgtaccctattcctttaaaagccagggtaaatttaaaacctataattgataattgaaagtcttctcygtgaccctataacactccaatactgcctgtaaagaagccagacgggtcacaccggtgagtgcaagaccttcgagctattaatcagatagtccaaactacccgccctgtcattatagtaatagacttaaaagatgccttctgggcttgtccgttagcagagaacaactgggacctatttgcctttgagtgtgaagaccctcactccagtcaaaaatagcaatactgatagacattctgaccccaagg

SEQ ID NO: 931740 - DNA, 619 bp, Homo sapiens
cagacccttctcctatccctgttgtcctcctctttataaccctgcctcttgggaatcatcccaaaagctcactcactaccagcctaagtaccgagggggccaaaacctataaagaacacagaacccaactctccaggcaatataaagggtgaaagagtaaagccaggagacccataggaagaaaaaaaaaatcttagaagagagaaaaagagacagagagacaaagagggagtcaaagagacagagacagagagtcaaagagagagagagaaaaagagacagacagaagtagtaaagagaaagcaatgtaccctattcctttaaaagccagggtaaatttaaaacctataattgataattgaaagtcttctctgtgaccctataacactccaatactgcctgtaaagaagccagacgggtcacaccggtgagtgcaagaccttcgagctattaatcagatagtccaaactacccrccctgtcattatagtaatagacttaaaagatgccttctgggcttgtccgttagcagagaacaactgggacctatttgcctttgagtgtgaagaccctcactccagtcaaaaatagcaatactgatagacattctgaccccaagg

SEQ ID NO: 931741 - DNA, 589 bp, Homo sapiens
ctttccgcatctccgtctattctgttgttatgcttcaaattttactttgaaactcctgtagtaaatgtatttccaaagttcagcttggttctttcttaaaatgattatgtcatttttcaactcctggatcattttcatattttccttgtattgggtttcaaccttctyttgtatctcaatgaccttccttgccatccagattctgaattctatgtctgacgtttcagccatttcaatctggttagattccattgcgggggcactaatgtgattgtttggaggtaagaagacactctggctttcagtgtggccagagttcttgcactgggtctttctcatcttcaaggggtgatgatcctttatctatttggaattgctatcttttaaatggagattttagtttgtattgtcattattgcccttgaggatttggctgtggcacaacatgggtatagctgaaagactatatttctggatgcttttactgggcaaggttcagtttcacactcctggactgtgttctctaaccctggagtactggttctgggtcagtggtttcatccccttcttcctcgaggtcaagccccag

SEQ ID NO: 931742 - DNA, 589 bp, Homo sapiens
ctttccgcatctccgtctattctgttgttatgcttcaaattttactttgaaactcctgtagtaaatgtatttccaaagttcagcttggttctttcttaaaatgattatgtcatttttcaactcctggatcattttcatattttccttgtattgggtttcaaccttcttttgtatctcaatgaccttccttgccatccagattctgaattctatgtctgacgtttcagccatttcaatctggttagattccattgcgggggcactaatgtgattgtttggaggtaagaagacactctggctttcagtgtgkccagagttcttgcactgggtctttctcatcttcaaggggtgatgatcctttatctatttggaattgctatcttttaaatggagattttagtttgtattgtcattattgcccttgaggatttggctgtggcacaacatgggtatagctgaaagactatatttctggatgcttttactgggcaaggttcagtttcacactcctggactgtgttctctaaccctggagtactggttctgggtcagtggtttcatccccttcttcctcgaggtcaagccccag

SEQ ID NO: 931743 - DNA, 553 bp, Homo sapiens
cagcctggagtttattgtccatatcactatcaacatttttggcaaagccattcaacaagtctctaggaagttccaaactttcctatattttcctgtcttcttctgaaccctccaaactgttccaacctctgcctgttacccmgttccaaagtcacttccacattttcaggtatcttttctgtagcacctcacttctggtaccaatttactgtattagtccattttcatgctgctgataaagacatacttgagactgggcaatttacacaagaaagaggtttaatggacttacagttccatgtggctaggaaggcctcaaaatcatggcagaaggcaaaaggcactttttacatggcagtggcaagagaaagaatgaaagctaaatgaaacggctttctacttatcaaaccatcagatttcgtaagacatattaactaccaagagaacagtatgggagaaacctcagccatgattcgattatctcccattgggtcccgcccacaacacatgggaattatgggagtacaattcaagatgagatgtggtggggaca

SEQ ID NO: 931744 - DNA, 740 bp, Homo sapiens
acctactcaagcctcagcaatggcgggcacccctcccccagcctcgctgctgccttgcagttcgatctcagactgctgtgctagcaatgagcgagcctccgtgggcgtgggaccatgcgagccaggcacgggatacaatctcctggtgtgcagtttgctaagaccattggaaaagcgcagtattagggtgggagtgacccgattttccaggtgccatctgtcacagctttgcttggctagcaaaaggaattccctgaccccttgcgcttcctgggtgaggcgatgcctcgccctgcttccgctcacgctcggtgtgctgcacccactgtcctgcaaacactgtccaacaagccccagtgagatgaacccagtacctcagttggaartgcagaaatcacccatcttctgtgtcgctcacgctgggagctgtagactggagctgttcctattcggccatcttggaaccgccccaagatgattcttttttatagtatagtaataaaaataacaactaactctcatataccacttattacgggccaagcagtgttctaagaactaaatatgcattaactcatttaataatcagcattgctatgagggaggcactactttaccactgtgcagattaggaaactgaggcaaaaaaagtcaaatgagtatacttgtcacactgctactaaacggtagaaccagaatttgtagcacttaaaagtgcaggctctgaggctcaaatatct

SEQ ID NO: 931745 - DNA, 704 bp, Homo sapiens
gtttacctactcaagcctcagcaatggcgggcacccctcccccagcctcgctgctgccttgcagttcgatctcagactgctgtgctagcaatgagcgagcctccgtgggcgtgggaccatgcgagccaggcacgggatacaatctcctggtgtgcagtttgctaagaccattggaaaagcgcagtattagggtgggagtgacccgattttccaggtgccatctgtcacagctttgcttggctagcaaaaggaattccctgaccccttgcgcttcctgggtgaggcgatgcctcgccctgcttccgctcacgctcggtgtgctgcacccactgtcctgcaaacactgtccaacaagccccagtgagatgaacccagtacctcagttggaagtgcagaaatcacccatcttctgtgtcgctcacgctgggagcygtagactggagctgttcctattcggccatcttggaaccgccccaagatgattcttttttatagtatagtaataaaaataacaactaactctcatataccacttattacgggccaagcagtgttctaagaactaaatatgcattaactcatttaataatcagcattgctatgagggaggcactactttaccactgtgcagattaggaaactgaggcaaaaaaagtcaaatgagtatacttgtcacactgctactaaacggtagaaccagaatt

SEQ ID NO: 931746 - DNA, 475 bp, Homo sapiens
ctttgcttttatctggtggtgtgtggcagtggcatagggaccatgtttgccacaaggattcccttttccatactgttacaaagctccactgggtttctgactcttttctggggtaaagagaatcaaagacaatattataagggacaaaactcaagtgacaaaacatgtagcaagaaaatagaagctttgrgagagttaaaactgcttatcagtttccaaaacaaagtggggctttgttagtttattggaaatatttcatggggatatctgatttcactagatgcttgtttctgactttaggaagtttacattgacttctaaggggttcgagacatctaacaccttatttttccctcctttatgattttgctgtaatgctgttttcatcaatatatattccatagattttataatataaatatatttaatttggcatttgttttttatgaaaatgcaatgaaggaagacttgggga

SEQ ID NO: 931747 - DNA, 521 bp, Homo sapiens
aaataaagggaaagagtacaaaagagaggaattttaaagctgggtgtccaggggagacagcacatgtcagcaggttccatgatgccccgagccgtaaaaccagcaagtttttattagtgattttcaaaaggggagggagtgtatgaatagggtgtgggtcacagagatcacgtgcttcacaaggtaataaaatatcacaaggcaaatggaggcagagcaagatcacaggaccacaggaccggggtgaaattaaaattgccaatcaagtttcagccatgmattgtcattgataacatcttatcaggagacagagtttgagagcagacaactgatctgaccaaaatttattaggcgggaatttcctcgtcctaataagcctgggagcactacgggacaccggggcttatttcatcccttatctacagtcgtaaaagacagatgtccccaaagcggccatttcagaggtttccccttagggatgcattctctttctcagggatgttccttgctgagaaaaagaa

SEQ ID NO: 931748 - DNA, 614 bp, Homo sapiens
ctgatctgaccaaaatttattaggcgggaatttcctcgtcctaataagcctgggagcactacgggacaccggggcttatttcatcccttatctacagtcgtaaaagacagatgtccccaaagcggccatttcagaggtttccccttagggatgcattctctttctcagggatgttccttgctgagaaaaagaattcagcgatatttcccctatttgcttttgaaagaagagaaatatggctctgctccacccggcccacaggcagccagactttaaggttatctcccttgttccctgaacattgctgttatcctattcttttttcaaggtgcccagatttcatattgtttaaacaatttgtcmagttaacacaatcatcacagggtcctaaggcgacattcatcctcagcttacgaagatgacggattaagagattaaagtaaagacaggcataggaaatcacaaggtattgatttgggaagtgataagtgtccatgaaatcttcacgatttatgttcagagattgcagtaaagacaggcataagaaattataaaagtatcgatttggggaactaataaatgtccatgaaatcttcacaatttatgttctgcca

SEQ ID NO: 931749 - DNA, 480 bp, Homo sapiens
tgcagacttaaacatccctgtctgagagctctgaagagagcagtggttctcccagcacggtgtttgagctctgagaacagagacactgcctccttaagtgggtctctgacccctgagtagcctaactgggagaaacctcccagtaagggccaaatgacacctcataatccaggtgcccscctgagacgaagcttccagaggaaggatcaggcagcaacatttgctgttctgcagcctccgctggtgatacccaggcaaacagggtctggagtgggcctacagcaaactccaacccacctgcagctgagggtcctgactgttagaaggaaaactaataaacataaaggacatccacaccaaaaccccatctctaggtcaccatcatcaaagaccaaaaggtagataaaaccacaaatatggggagaaacgagagcagaaaagctgaaaattccaaaaatcagagctcctcttctcctacaa

SEQ ID NO: 931750 - DNA, 480 bp, Homo sapiens
tgcagacttaaacatccctgtctgagagctctgaagagagcagtggttctcccagcacggtgtttgagctctgagaacagagacactgcctccttaagtgggtctctgacccctgagtagcctaactgggagaaacctcccagtaagggccaaatgacacctcataatccaggtgcccgyctgagacgaagcttccagaggaaggatcaggcagcaacatttgctgttctgcagcctccgctggtgatacccaggcaaacagggtctggagtgggcctacagcaaactccaacccacctgcagctgagggtcctgactgttagaaggaaaactaataaacataaaggacatccacaccaaaaccccatctctaggtcaccatcatcaaagaccaaaaggtagataaaaccacaaatatggggagaaacgagagcagaaaagctgaaaattccaaaaatcagagctcctcttctcctacaa

SEQ ID NO: 931751 - DNA, 629 bp, Homo sapiens
ataatatctgcacgttcagtttgcagcccatctcttcagcctcacagcccaggcaaatatcccagataacttcaaacctggcaaaatctggaggtcgggacctacagtgagttaaaggcatatctttatcataactgttctttgtttcataaccatagtgagacatgggaagatgttatttcattttctttaaaaaataaacattaagctctagttttaaacctaacttaaccaccatctgcatagcattaaaatcagcaaacatgcccaggaaaactattcgatggatataattagtttgcataaaatagggttttttcatttctggaatttggttcatctaatacttcttctagacaatgttgatgactttaaaatatgatttttataatttttgtaattcatcttttttccagtagctgtagtgagtatggkttcgctatgaattagtatagtgtactcaaaagcaggagccaaaactaatttacattttacagataacgtttctaaaattacatcatttattcatttattatcaggggataaaaaaattgccttatgttatctactcatcttttttaattgacttttttttttagctttttgttattcacaatgggtgattttta

SEQ ID NO: 931752 - DNA, 559 bp, Homo sapiens
cagacattcacagaattggtaccaatctgatcgacactatttcaaaagatagagaaagagggaatcctccctaaatcattctatgaagccagtatcaccctgataccaaaaccagggaagtacataaaaaaaaaaaaamaaaaactacagatcaatacccctgatgaaagcagatgcagaaatcctcaacaaaatactagcaaatcaaatccaacagcatatcaaaaagatgatctagtggatccaccatgatcaactggatgcagggatggtttaacatatgtaagtcaataaagtgtgacacaccacataaacagaattaaaaacaaaaatcaccatgattatctcaatagatgcagaaaaagcatttgacaaaatccagcatctctttatgactaaaaccctcagcaaaatcggcacagaagggacataccttaaggtaacaaaagccacctacaacaaaccgatagccaacattatactgaacagggaaatgttgaaagcattcccccctgaaaactggaaaagacaaggatgcccactttcactacttctattc

SEQ ID NO: 931753 - DNA, 610 bp, Homo sapiens
atatatttatacatttgctcaaaccaagaagacacaaggagtagtttgataatctctaatccatacttccgtgcaaagcaaatgtaacaattatattaaaatttgccaatttccttgaggtaaatttcatatataatgaaatgcacaaatcttaagaggactatttgatgaatttttatgaatgcttgcacttatgtaactcaaacctgtatcaagatacagaatgtttttatcatgctagaaagatttccatgtcccttcccatgcagtgtccctcctgcccagataactatttttctgatctttttttttccaccgtarattaactttacctgctttggaacattatataaatggaagcactgaatatatacttttttgcatacatagcataatgtctatgagatgaatccacaattttgcatgtgtcaatagtatcagtagtagtcactttttgtctgaatagtagtttggctaagttgttggaatatatagaatacaatttttggagtctattctcctcttagtggacatttgggttgtttatagttttaggttattattagtaaagtttctatgtactttcttgtatgagtatgtttgtggactt

SEQ ID NO: 931754 - DNA, 610 bp, Homo sapiens
atatatttatacatttgctcaaaccaagaagacacaaggagtagtttgataatctctaatccatacttccgtgcaaagcaaatgtaacaattatattaaaatttgccaatttccttgaggtaaatttcatatataatgaaatgcacaaatcttaagaggactatttgatgaatttttatgaatgcttgcacttatgtaactcaaacctgtatcaagatacagaatgtttttatcatgctagaaagatttccatgtcccttcccatgcagtgtccctcctgcccagataactatttttctgatctttttttttccaccgtagattaactttacctgctttggaacattatataaatggaagcactgaatatatacttttttgcatacatagcataatgtctatgagatgaatccacaattttgcatgtgtcaatagtatcagtagtagtcactttttgtctgartagtagtttggctaagttgttggaatatatagaatacaatttttggagtctattctcctcttagtggacatttgggttgtttatagttttaggttattattagtaaagtttctatgtactttcttgtatgagtatgtttgtggactt

SEQ ID NO: 931755 - DNA, 643 bp, Homo sapiens
ttttttttttaattttaatctctttgttcaatttttctgatacatttttgaattgcttttctgtgttatcttaaagatcactaagtttctttaaaattgctattttgaactcttgttcagagagctgacaaatcaccttcttgttagggtcagtcactggattttttctttgtccttttggggagtttgtggttccttgtttgttattgtttcttgtgagtttttatttatgtctttgcattttaggattagttattaatccccaaattctctgactggcttgttttggttttcatttagtatatttgcttagtaaacctttaccactatgtctctgcctcctgttcagctctagatagtyccttaagctcacatttgccacggctctattaaatagttggagcattgcctgttccaaataggggagatccaaagggattatctggcagtgtggaaaggctgaccaggggttcatgttcagggacctgtgaaccatacctcctgcagcatagtgccactgaacagccactctgatttggtgtctcctttggccaagttacaaagcagagtccccagggatggggatggtagtcctacctacccgctttgtccctgcctgtcctcagagatatttctctttggg

SEQ ID NO: 931756 - DNA, 594 bp, Homo sapiens
ttgaagccagcacaacactgggtcttccctgctgtaaccactccctggccactgcctatgtttgctcaaggccttggggctctacaataaacaggtggaaaagccatccaggtctgtgcccttcccttcagggtggcaagttcccccaagccccaggtgggtccagagatgttgtctaggagtcagggactagagtaaaaaacctttgaagtctacctggcattctattgyattaaaattgagctggggggactcgggggaaagtgtgggaggggagtaggggataaaagactacacattgggtacggcgtacaccgcttgggtgatgggcaccaaaatctcagaaatcaccactaagaacttatctgtgtaaccaaacaccacctgttccccaaaaacctattgaaataataataataataaataataataaaatgaataaacaaaaacactgagctggcactcaaaccacaaaacacagtctttcccactctttcctcccctgtccaaaggcagaggagcctcactccacagcccacaagaagtactgctggattatcactggtattcatttaaggcagaaaggctattaag

SEQ ID NO: 931757 - DNA, 594 bp, Homo sapiens
ttgaagccagcacaacactgggtcttccctgctgtaaccactccctggccactgcctatgtttgctcaaggccttggggctctacaataaacaggtggaaaagccatccaggtctgtgcccttcccttcagggtggcaagttcccccaagccccaggtgggtccagagatgttgtctaggagtcagggactagagtaaaaaacctttgaagtctacctggcattctattgtattaaaattgagctggggggactcgggggaaagtgtgrgaggggagtaggggataaaagactacacattgggtacggcgtacaccgcttgggtgatgggcaccaaaatctcagaaatcaccactaagaacttatctgtgtaaccaaacaccacctgttccccaaaaacctattgaaataataataataataaataataataaaatgaataaacaaaaacactgagctggcactcaaaccacaaaacacagtctttcccactctttcctcccctgtccaaaggcagaggagcctcactccacagcccacaagaagtactgctggattatcactggtattcatttaaggcagaaaggctattaag

SEQ ID NO: 931758 - DNA, 843 bp, Homo sapiens
cctaatttaactcaattctgacactgtctacctggtgatggtgtcagatcccccaggttgagggctcagtcccacaagactgcccccgacttcagatgccaatcaaaagccctgggttgttttacctgagcttctgagcaaccacctataaatcgggggttttcatggctcccttcttgagtttgattaatttgctacagcaggtcttagaactcagggatacacttacttacatttatcattttatgataaaggatattgcaaaagatacagatgaatagccagatggaagagacacataaggcgaggtacggggaagagatgtggagcttcttttccctctccaagagcaccatcctccaagaacctccacagatgcaactgtcaagaagctctccaaacccagttcttttgggtttttatggaagtttcattacactggcatcattgattaaatcattggccattgrtgatcaacttaaccttccacccgtttccgtttcatggaggttggggatggagctgaaagtcccaatgttgtaaccacgccttggtctttcctgtgaccagccatctagcggctcccagccaccagctctctaataagagagcaaaagatactctatgtaaaaaatactcctattattctggagattccaaggattttaaggtctatgtgtcaggaaattgaacaaagaccagatatatatttcagaatgtcatagtctaccctctggttttttaacagagatctcttaagtcaaaacaatacaccactataaaagatgctggctggcacattcctataattccatccaatcattaataattagtccagtccat

SEQ ID NO: 931759 - DNA, 542 bp, Homo sapiens
cctgtaccctcattgcatctaggaaggaactaacttgcttttgatttacaggctcataggtggaagggacttgccttgtcttggatgagactttggagtgtggacttttgagttgatgctgtaatgagttaagattttggaggactgtggccgggcgtggtggctcacgcctgtaatcccagcactttgggaggcygaggtgggtggatcacgaggtcaggagattgagaccatcctggctaacacagtgaaaccccatctctaataaaagtacaaaaaaattagccaggcgtggtggcagatgcctgtagtcccagctgctctagaggctgaggcagaagaatggtgtcaacccaggagatggagcttgtagtgagccgagatcacaccactgcactccagcctgggcgacagagctagactctatttaaaaaaaaaaaaagattttggaggactgttgggaaggcatgattggttttgaaatgtacggagatgagatttgggaggggccaggggcagaatgatatggtttggctgtgttc

SEQ ID NO: 931760 - DNA, 827 bp, Homo sapiens
catgggtcatatgtaacatgcatttttattcagtatgcaggtgttcatgaaccaccttcatgaatattcatagctcctcctatcatctgttgaatatatatacttggccaacccattcaacataaatccctatttcaccctcccctcttgaagtgcctactttcagggtctgctggaggctacagttcccagcctgtgggatggccagtctacaggttgtgacccctattataagaaataaaggctccttttctaaatgtataaatctcaggatttttttcagttgataaaattgaggctaacttcctaagagccatgcacctcattggcttgtatgagcatgatagctgaactaaactgkagttctgtcaggagtggggaatgcaaaatgggtgttgggtaggcgaccagcaatgtccaccagagatgggctccagatccttctcattcttggttgcccttgcgaaaataagtagttcaaaatctaagctgttggaactctaaattattttgagccttaaagaaatctggctggacacggtggctgtgattccagcactttgggaggccgaggcagggagatcacttgatgacaggagttcgagactagcccagccaacatagcgaagccccatctctactaaaaattcaaaaaattagctaagcgtggtggcacacggctgtaatcccagctactcgggaggctgaggcacgaattgcttgaacccaggaggcggaggttgcagtgagcaagattgacccaccacactccagtatgggcgacagagggaaactcggtctcagaaaaaaaaaggaatgtaattatg

SEQ ID NO: 931761 - DNA, 647 bp, Homo sapiens
gccggagagatgagtaatccaaatacgattcctcaggccgggcacagtggctcacacctgtaaccctagcactttgggaggccaaggcaggcagatcacctgaggtcaggagttcaagaccagcctggccaacatggtgaaaccctgtctctactaaaaatacaaaaattagccaggcatggtgatgcacgtctgtaatcccaggtctttgggaggctgaggcaggagaatctcttgaacctgggaggcggaggttgcggtgagccaagaccacaccattgcactccagcctgggcaacaagagtgaaactcggtctcaaacaaacaaatacgatttcttcctaaaggtgaaggttttaagcttcagagtcagttttttttttttttttttttttaaaaaggagcctcattctgtcgcccggagctgatgtggtggtgcgtgcctgtagtccctactactcaggaggctgagaygggaggatcccttgagcccagggatttgaggcttcattgaactgggatggcaccactgccactccagcctgggcaacagcaggaccctgtctcaaaaaaagaaaaaaacaaaggattcaaaaggattcagctgttttgtattcagctgaggtaagtggcggcatggagcatgg

SEQ ID NO: 931762 - DNA, 410 bp, Homo sapiens
agtcaaatcagccaagcagtttttcaggctcttagtattcagtgaaacctttatatcccttacggtcctccgtcttcaagaaaagtaggactaaaggtcttttaaaaaaacacacctcaccaagctcagccaccaacttaaaaaggactggacaatacttttaccactttcccttctcagaattcaggcctgtcctcggactgctacagggtacagcccatttaagctcctrtatagacgctcctttttattaggccccagtatcattccagacaccagaccaacttagactgtgcccccaaaaaacttgtcatccctactatcttctgtctagtcatactcctattcaccgttctcaactactcatacatgccctgctcttgtttacactgccggtttacactgtttct

SEQ ID NO: 931763 - DNA, 654 bp, Homo sapiens
  misc_feature 1, 2, 3, 4, 5, 6, 7, 8, 9, 10, 11, 12, 13, 14, 15, 16, 17,18, 19, 20, 21, 22, 23, 24, 25, 26, 27, 28, 29: n = A,T,C or G
nnnnnnnnnnnnnnnnnnnnnnnnnnnnngtagaggatcccctgttagctacaagaaacgtttccaagttaagttcatttgcagagctccagttccagatacgcttaggttaatgccctccttatttgctttcacagacccaatcacacagccagtcccccacacagcaagctaaattctagtatatacgtccctaaggtatatggggaggacatgtatatttgagtatatgtgtcctcaaatatccttgtaccttaacaagacttctgaaatcacagagaaaacaaggctaaggttatctttataaagctcttttggatttgatccatttcttgaatgagacttcctcccaaagtccatgccccgtcccaaaggggaaagcattttctttctgtgtgcktgtgtgtgtgtgtgtgtgtgtgtgtgtgtgtgtgtgtgtgagtctcgttctgtagcccaggctggagtgcagtggtgcaatctcagctcaatcaatgcaacctctgcctcccgggttcaagcaattctcgtgcctcagcctgctgagtagctgggattacaggcatgcaccaccacacctggctaatattttgtatatttttagtaaagatggggtttcgccatgttgcccaggctggttttgaactcctgagc

SEQ ID NO: 931764 - DNA, 652 bp, Homo sapiens
ttctttctgtgtgcttgtgtgtgtgtgtgtgtgtgtgtgtgtgtgtgtgtgtgtgagtctcgttctgtagcccaggctggagtgcagtggtgcaatctcagctcaatcaatgcaacctctgcctcccgggttcaagcaattctcgtgcctcagcctgctgagtagctgggattacaggcatgcaccaccacacctggctaatattttgtatatttttagtaaagatggggtttcgccatgttgcccaggctggttttgaactcctgagctcaggcaatccgcccacctcaaccttccaaagtgctgggattacaggcatgagacaccacgcccagctgagcaaagcattttcaaggccctggagtccagtttccccttcaagggtgytgtggataccctggaattttctgccaaattgccataagaagctcactttctggaccttcatgggccccctccctggtccattctcctgagaatgggccacaccactggtgtgcttgcttctgggtccaaggggcgggcaagaatttaggtggagtttggacacatggatgagaagttcccacagatgcacacttgtctgtcccatggtcaggaaagatctgagagttggagaggaaagtggctaggccagaaggggcctggagct

SEQ ID NO: 931765 - DNA, 617 bp, Homo sapiens
gtcctaagtgtccattaactgacaagtgcataaacaaaatccagtgtatccatgtaacaaagtatcatgtggccataaaaagtaagtactgatacatgttacggcatagacaaaccttgcaagcattatgccaagtgacagaatccagtaacaaatcccatatgatagataatcccatttatatgaaacacatgtaatagggaatccagaggcagaaagatctggtgattgccagcgctacaactgcggggatgcagatgatggatgtggagagacggaattgaaagctaaaggcacagraggcaggatgttgtggtccatgcctgtactcctagctactagggaggctgagatgggaggattgcttgagcccagtagttcaagactgcactaagctatgattacaccactgcactccagcctgggctggttgactgagcaagaccccatctcttaaaaaaataaataaatagaaataaaataaggtaaagggcataggatttcatttgtaattttttttgaggtggaaaaacaattctaaaattgattggagtgttggttcccaacatctgtgaatatactaaaaaccactgaactatatactttgagtgggtgaa

SEQ ID NO: 931766 - DNA, 617 bp, Homo sapiens
gtcctaagtgtccattaactgacaagtgcataaacaaaatccagtgtatccatgtaacaaagtatcatgtggccataaaaagtaagtactgatacatgttacggcatagacaaaccttgcaagcattatgccaagtgacagaatccagtaacaaatcccatatgatagataatcccatttatatgaaacacatgtaatagggaatccagaggcagaaagatctggtgattgccagcgctacaactgcggggatgcagatgatggatgtggagagacggaattgaaagctaaaggcacagaaggcaggatgttgtggtccatgcctgtactcctagctactagggaggctgagatgggaggattgcttgagcccagtagttcaagactgcactaagctatgattacaccactgcactccagcctgggctggttgactgagcaaraccccatctcttaaaaaaataaataaatagaaataaaataaggtaaagggcataggatttcatttgtaattttttttgaggtggaaaaacaattctaaaattgattggagtgttggttcccaacatctgtgaatatactaaaaaccactgaactatatactttgagtgggtgaa

SEQ ID NO: 931767 - DNA, 778 bp, Homo sapiens
agtgtcctgccactcaccaatgccaggggtccctatccaacccagccctttacaggtaccctgtagtttcctggtttccaaacttcaactcaatgattattaaaataatgtttctagggtacataaagcacttgtacctaaacctggcataattttttttaactattccctttatgagagaagcacttagctmaatctaatttttttttttttttctgagcttcctcagttcttccattcccaggataagctcaatgcttaggcatcggtttccactaaaagaagaaaaagtaccctacatttatcactgtgcatgtccctaaagtggtcttagcttaaggcctctaaggctgggtacatttacttttaaaaactctgttcctggtacacagtaagaactcagtattctactgttattattgtttttattgtcttattacatgatcttccagacaagttccatatagtcttagttccacctggggagattcctctcagtgctttgtggttctgtgagccgtgtgcaagcttatattataactcaaagtactgtactttgggaaagaagtgtgtaggtcataaaagggttcccaagtatggatcatgtaaaactggggtggggaaagggaaattataaacatagatgtctaacatcccaattaatttttaaagaataacttgaaaataacatgtttttttctaattataaaaacaatacatgttcattgcagaaaactttaaaaataacatttattgagggggcttctgtttatacaag

SEQ ID NO: 931768 - DNA, 709 bp, Homo sapiens
gcagctaagggatctcttttctcagcccttgtttgtttcccagtgtgggcattttcttgcctgctctatctacctttctcttacatatctagatgctcttgtgatctgacggattgaggacaaatcagctaaccaccctaagttagtgggtcttttagcctataagacataacaggttctattttattttattttttaccattactatttggctagttggtaaggcttttttttttggtcaacttttattttaagttccagggtacatgtgtgggatgtccaagttggtgacataggtaaatacaaggctactttttttttttttttgagatggagtcttgctctgttgcccaggctggagtgcagtggcgcgatctcagctcactgcaagctctgcctcctgggttcacaccattctcctgccttagcctcccgagtagctgggactacaggtgcccgccaccacactcagctaattttttgtatttttagtagagacagggtttcaccatgttagccaggatggtctcgatctcctgacctcgtgatccaccygcctcggcctcccaaagtgctgggattacaggcgtgagccaccacgcctggccaaggctatgttttatatggaactgaagacattgagttcaactgatatcgaaacagttgtttagcttggtctctttactgaaacatacaatcaggtgtgaga

SEQ ID NO: 931769 - DNA, 545 bp, Homo sapiens
aaattttattcttaaaacctttgtttaataaggtatatagaggaactataattacacaggtgaggaattggagactcagaaaggttaaataatttgcccgaggtcatgaagctggtaggtggtagaactgggttgcaagtaaccaggtgtgctttgtccctggattgcattctgttttcacttgacaataacgcctctcggaaagagcaaataacctccacatgcagggtctttgtcttatctctcagaggtatttgtctccccactgcctcacatacactcagctctcaagatatttgaccccaagagaattggccagatagagatgtgagracgtgtgagttgaagcccaatgttattactctctggcacataaagggccacaatgtctgagtaatactggaatcagaagacatgaataaacagaggtcaaggtggtggtttaatcccaacgacatgtaaacaaactcacttttaaaagttagtactattaactcgtggagtaaagctcttattcgacagcaagttaaatttactttgttttt

SEQ ID NO: 931770 - DNA, 641 bp, Homo sapiens
agcaatcccataagactagcagaggaacagcatacttgagactagtccaactgagtgcaatacagctatcaaaatgatgagcaaataaatggtggttgctttaaagcattaagtttgaggtggtttgttataaagcagtagataactaagtgtgatgatatttgtgagccacgtaaataactgccaaagagcaacttcagtaagaggaggatcttaataatcaggtgcacaagatgacacaatctatggatattagtctttttctccaaccacccatgcccttgcccaattggcccatgaacaaagtgaccataaagacaaggrtaaaaattacacatgggttcagcaacatggattttcatttcccaaggctgatctgactacagtcactgctgagtacccaaaatgccaatagcagagaccaacatttaactccataccattccatgtctagatcagccagtcacttagtgccaggttgattatactggcatcacaggaagctcagtgttttgttctcattgaaacagacatttaccctggacagaaatttttcttctctgcctgcaatgcttctgccaaaacaaccatctgtggacttaagagaaacacatattcactactgtgatattccacacatc

SEQ ID NO: 931771 - DNA, 737 bp, Homo sapiens
aaccacccatgcccttgcccaattggcccatgaacaaagtgaccataaagacaaggataaaaattacacatgggttcagcaacatggattttcatttcccaaggctgatctgactacagtcactgctgagtacccaaaatgccaatagcagagaccaacatttaactccataccattccatgtctagatcagccagtcacttagtgccaggttgattatactggcatcacaggaagctcagtgttttgttctcattgaaacagacatttaccctggacagaaatttttcttctctgcctgcaatgcttctgscaaaacaaccatctgtggacttaagagaaacacatattcactactgtgatattccacacatcattgttactgaccaggaaacttcttttgtagcaaatgaaatctggcaatgggctcttgcttatggaactcactggtattaccacatttcccatcaccctgaagcagatggcttgataaaataatgaaaccttttgaaaattcagttacagcacagtgtaggataattgtatggctgagataatgtcctcccgaaggtggtacatgtcctgaatcagcaacaaaaatatggtaccatttctccaattgctaggatccatggctctgggaatcacaggggtagaagtggaaaaggctcctccttaacccttaaccccaaagatcaactagcaaaatttttgtttcctgtccctgcaattctaggt

SEQ ID NO: 931772 - DNA, 570 bp, Homo sapiens
catttaactccataccattccatgtctagatcagccagtcacttagtgccaggttgattatactggcatcacaggaagctcagtgttttgttctcattgaaacagacatttaccctggacagaaatttttcttctctgcctgcaatgcttctgccaaaacaaccatctgtggacttaagagaaacacatattcactactgtgatattccacacatcattgttactgaccaggaaacttcttttgtagcaaatgaaatctggcaatggrctcttgcttatggaactcactggtattaccacatttcccatcaccctgaagcagatggcttgataaaataatgaaaccttttgaaaattcagttacagcacagtgtaggataattgtatggctgagataatgtcctcccgaaggtggtacatgtcctgaatcagcaacaaaaatatggtaccatttctccaattgctaggatccatggctctgggaatcacaggggtagaagtggaaaaggctcctccttaacccttaaccccaaagatcaactagcaaaatttttgtttcctgtccctgca

SEQ ID NO: 931773 - DNA, 574 bp, Homo sapiens
caaattactaaaacacattttatcctacctccttaacaactatcctttataatatctggaaggaagaattcttgggatccttggaattccagactggaaggcagtgttggtgaggaggactggttgctagcccacatgactgcacttgcacagacatccaagcaagaatgtataagctctgtttacactcctgcaagtggccatcccttggccacccataaggcctaggtgtgagaacatgagcagcatggtttacccttgcaaggatgatttggtaaagagacacttatggacatggccaagtgggggacatgtgcaggtttgctmcatggctatattgtttgattttgaggtttggggtacacgtgatcccatcacccaagtagtgagtatagtaaggaataggtagtttttcagctatttcttcactctctctcatcctccttagtagtcctcagtgtctattgctcccatcttgatgtccatgtgtacccaatgcttagctaccacttataagtgagaacatgtgatatttggttttctgtttctgtgttaatttgcttaggataatggc

SEQ ID NO: 931774 - DNA, 751 bp, Homo sapiens
acatggggctagcctgacagagggtggaaatgctttctttaacttttctctttgaaacattgctgattattttatgttttgttttccagagtcaagaaaatgtctctttttagctaattatagcttacagcaactgggtaaccttttgtgagcaaaattaaaacatctgcatttctccctacctgatttctctaaaatttggaaactattcatgagtatttgtattttgtggcaatatagttatttgcataagatcaataagaatctgttttcttttgtaacagaacacattggatacaccggttattttaccaaggctttggctggaatgttacatttttgaatgtgaccaaactgctttgaggaattgaggctgactttataaagccaatagacatgggaaagactggcctcatgccttgcccacacggttcycttacaaggttcctcagcttgcggtaagtaaagactgtcattttctgatgcacccaggaaccacaagatattttgggtcattgagaagataggaattcactcaatttttacatatgttacaagcagtcccacagtgaatccctggcttggcttactagtctttagaggttttaaaagtgtaatctgagatttcttattaaaaattctgcaaagtcaatggaaaagagcctatatggccaatcattcttcttgttgcacattttgcaaataatcaggccaagtataatactaaaacttatttagccaataaatttgt

SEQ ID NO: 931775 - DNA, 617 bp, Homo sapiens
gatggattattcatgagttttctgggaaaggagtggacaattcctggaactacgggttcatcccctttttagaccaaatagtgtaatttcctgacattgccatgacgtttgtaaactttcatggcactagtgggagtgtctttcagcatgctaatgaattataattagcatataatgagctgtgaggatgsccagaagtcacactccttgccatcttggttttggtgagttttgaccagcttctttactgtaacctattttatctgccaggtctttatgacctgtatctcctgccaacctcttatctcatgctgtgactaagaatgccttaacctcctgggaatgcagctcagtaagttccatccttattttacccaacctctatacaagatggagtcactctggtttaaatgcctctgacaactccattttggtttgatctattagggcacaatgcaggagctcagtctaaatcaatagcctcctgtaaattttatttaacaaaggcaaatggaaaactgttttagacatgcaaggatgcagaatgtataacaattatacaacatttgaaaaaaataactgttggagaaactgaaaccaaataaaagttcttctga

SEQ ID NO: 931776 - DNA, 617 bp, Homo sapiens
gatggattattcatgagttttctgggaaaggagtggacaattcctggaactacgggttcatcccctttttagaccaaatagtgtaatttcctgacattgccatgacgtttgtaaactttcatggcactagtgggagtgtctttcagcatgctaatgaattataattagcatataatgagctgtgaggatgcccagaagtcacactccttgccatcttggttttggtgagttttgaccagcttctttactgtaacctattttatctgccaggtctttatgacctgtatctcctgccaacctcttatctcatgctgtgactaagaatgccttaacctcctgggaatgcagctcagtaagttccatccttattttacccaacctctatacaagatggagtcactctggtttaaatgcctctgacaactccatttyggtttgatctattagggcacaatgcaggagctcagtctaaatcaatagcctcctgtaaattttatttaacaaaggcaaatggaaaactgttttagacatgcaaggatgcagaatgtataacaattatacaacatttgaaaaaaataactgttggagaaactgaaaccaaataaaagttcttctga

SEQ ID NO: 931777 - DNA, 634 bp, Homo sapiens
caaatgctaatgtctaaactctaacaacgggagagacaggttttagggaggaaaacaaattttttttgaagatatgtcaagaaactaagaagccaaaatgttgaaagcaacctctatgtggaggtattaaagccaccaggaatagtgacagaaataatgtaagaaaatgagtgagccagagccaaaaatcttccaaagatgcggagacatgatgctagccagttgatgactgcaaatgcatraggagagaaaggtaagattggttagtatagtctgatgacataaaactcaactatgggtatttgtaggtaggaaggagagagaatgtccacaagcagcaacaagggaaatggaagatcctatccatcaccaggttcggggtaaaagtggtaagagaaaaaaaagttcatcatttgagaaggctgcagagaaaacattgtcctcagggacagccaagtgtctgttgaaaaggacagtaagggaaatggaatgttcaaaaccaatactgaggacataagaaattttgttgataactgtgactgcagaagggcacaggaaaaaggcttcaagagttaaaaagagatggatatgggacctcttgattcaagagaaggcttggatacttgaaaataac

SEQ ID NO: 931778 - DNA, 455 bp, Homo sapiens
tccttaacctctgacaaacttgaatcttgtcttcatttccataattttgtcatttcaagaatgttacgtaagtgtaatcatacagtatgtaacctttagggattggctttttttactcaacataattctttggagattcatccaggttgttgtgtgtgtcaatagttcaktcttttttattgttgagttgttgtaaaataagttattgcaaggattaaatgatacaaagcttagcacaatgtctgcctaaataaatattgactattattattgattcatcaataataataattaaatatttttcttagagacttcccctaccaccctgtctaaaaatagtcagctatgttaccctctttctcttaccctgctttattgatttacttcataagccttctcactatctcacactgtgtgtgtgtgtgtgtgtgtgtgtgttatgtgtgtgtcggggt

SEQ ID NO: 931779 - DNA, 686 bp, Homo sapiens
aacattaatagccttgtgttgtccaataaattaaatctaaatgaaggtgcggggtccattccaagatggccaaataggaacagctccggtctgcagctctcagtgtgactgatgcagaagacaggtgatttctccatttccaactgaggtacctggttcatctcattgggactggtcagaaagtgggtgcagcccacagagggcaagctgaagyaggacgggatattgcctcacccaggaagcacaaggggcctggaaatttccctttcctagccaagggaagccatgacagactgtactgggaaaattgggactctgccacctagacactgcacttttccaacagtcttagcaaatggcacaccaggaaattaaatcccatgcatggctcagcaggtcccatgcccacagagccttgctcactgctagtccaagatagaactgcaaggtggcaagcctggctggggaaggggcgtccgccattgctgaggcttgagtaggtaaacaaagtagccagaaagcttgaactcggtggggcccactgcagctcaactaggcccacctgcctttgtaaactccacctctgggggctgggcatagctgaaaaaaaggcaacagaaacttctgcagacttaaacatccctgtctgacagctctgaagagagcagtggttctcccagcatggt

SEQ ID NO: 931780 - DNA, 645 bp, Homo sapiens
gtaggggaggagccaagatggccaaataggaacagctccagtctacagctcccagcctgagcgacgcagaagacgggtgatttctgcatttccatctgaggtaccaggttcatctcactagggagtgccagacagtgggcgcaggtcagtgggtgcacgcaccgtgcgcgagccgaagcagggcgaggcattgcctcactcgggaagcacaaggggtcagggagttccctttcctaatcaaagaaaggggtgacagacggcacctggaaaatcgggtcactcccacccgaatactgcgcttttctgacgggcttaaaaaacagcgcaccacgagattatatcccacacctggctcggagggtcctaccccatggagtctccctgattgctagcacagcagtgtgagatcaaactgcaaggcagcagcgaggcttggggaggggcgcccaccattgcccaggcttgcttaggtaaacaaagcagccgggaagctygacctgggtggagcctaccacagctcaaggaggcctgcatgcctctgtaggctccatctctgggggcaaggcacagacaaaaagacagcagtaacctctgcagacttaaatgtccctgtctgacagctttgaagagagcaggggttctccc

SEQ ID NO: 931781 - DNA, 573 bp, Homo sapiens
gaatgtcattggtattttgatagggattacactgaatcagtaaatggctttgggtagtatggacattttaactatatttattctcccaatccatgaacatggaatatgttttcactttttggtgtccacttctatttctttcgtcagcgtttcatagtttttatttattatagcactctcacttctttggttaatgtctaggtatttaatcttgatttctggctattataaatgggattatttttaaatttcattttcagattgttcactgttggcatatgaaaatgttactgatttttgtatattaattttgtatcctacaactttattgaatttgtttagcagttctaatagttttttggtagagtctttaggtttttccaaatttaagattatatcatctgcaaaccaggataatttgacttcttcctttcaratttggatacccttcatttctttctcttatctgattgctctagttaggacttccagtactatgttaaataacagtggtgaaatgcttgtcgtgttccagatcttagaggaagggctttttgattttccccattcaga

SEQ ID NO: 931782 - DNA, 580 bp, Homo sapiens
gcagaagacgggtgatttctgcatttccatctgaggtaccgggttcatctcactagggagtaccagacagtgggcgcaggccagtgggtgtgcgcaccgtgtgcgagccaaagcagggcgaggcattgcctcacctgggaagcacgaggggtcagggagtcccctttccgagtcaaagaaaggggtgacggacgcacctggaaaatcgggtcactcccaccygaatattgcgcttttcggaccggcttaaaaagcggcgaaccacgagattatatcccacacctggctcagagggtcctacgcccatggaatctcgctgactgctagcacagcagtctgagatcaaactgcaaggcgacagcgaggctgggggaggggcgcccgccattgcccaggcttgcttaggtaaacaaagcagccaggaagctcgaactgggtggagcccaccacagctcaaggaggcctgcctgcctctgtaggctccacctctgggggcagggcacagacaaacaaaaagacagcagtaacctctgcagacttaagtgtccctgtctgacagctttgaagagagcagtggttc

SEQ ID NO: 931783 - DNA, 568 bp, Homo sapiens
tgagcctctctctggaatttttcttcttagttattgttcttttcaactccaaaatttctacttgcttcttttgtataatttctatttctttattgatgttttctgtttgatgtaacattgttatatcttcctttacttcyttaatcaaggttttctttagtactttcaacatatttataagggctaatttgaagttatttttctgttaaatcccattagtcactctcatgggcaatttctaccaactgctattatttctagtatatggtcatactttcctgtttctttgcaggtgtcaatcattgttgttgttattgttggaaaccaaacatttaaataatatatcaaaacaaatctggatactgtttccccctcacaatgtggtttgttatttatatttgctagttcctttgtttagtgactggctgaattattttcgtgtagtctatttcccattccatatgattaaccctatgatgttgcttctaaaggaggcacacctttggacatatccaaagttaccctggaattaaagtggttttagcagggctcctttttctctttcttg

SEQ ID NO: 931784 - DNA, 599 bp, Homo sapiens
cccaactaaaacctctactgaaactgttcatcattcattttcattaagcaaataaatacttattaaacaccttctctgctccaggatctatgctagggtttgaaaatacataggtgaataaaatatggcccctgtcttcaatgagcttacagtctagcatatgaagagaatgatttttagtgataaaaagtgatagataacataaagtatatagggccaagggcggtaggttggcaaattgtatcttggaggtctcaggaaagacttcagagaaagtagcctaatatatgatgtttagtcccagagacttgaaggcagaaattggggtcacccaggtttcaggttgagaacacgagggmtcaccaggaagtgtcagaattcatgcattcaataaacattcagtgggcaccaatgagcggcaggcactgtgcaaagatgatacccaacatgaacccactcacaggctaacagtctgctttgatcctcaggaaaattgtggagcaactcaaatttgtccatcactacctccatttctgaatcttttgcactccttattcatggagctcttcttcctcacctccgcaacgtccattgatatt

SEQ ID NO: 931785 - DNA, 787 bp, Homo sapiens
  misc_feature 233: n = A,T,C or G
cagctgggagtacaagggcccgccaccacgcccggctacatgttttgtatttttagtagagaccggggtttcatcatgttagccaggctggtctcaacctcctgacctcagttgatcctcctgcctcggcctcccaaagtgttgggattacaggcgtaaactaccgcacccggcccttgccttgtttctaaatacacacaagaatgttaatcatagcacctaatagcccaaanattggaaacaatcccaaaagctattatcagcagtatatatatatatatatatatatatatttttgtttttttttttttttgagacagagtctcgctctgtcgcccaggatggagtgcaktggcgtgatctcggctcactgcaagctccgcctcccgggttcacgccattcgcctgcctcagcctcccgagtagctgggactacaggcgcccgccaccacgcccagctaatttttttttgtatttttagtagagatggggtttcaccgtgttagccaggatggtctcgatctcttgacctcgtgatctgcccgcctcagcctcccaaagtgctgggattacaggcgtgaaccaccgcgcccagcctattctttctttagaatagatcagtggtggcgtattcatacaatggactattccgcagtgatgaaaatgaattatagatatttgcaaaaatatgaattacataaaccatattgagcaaaagacgccaacagatacatactctctttacataaggtgttagatacacagagatagataaatacgtgtaaat

SEQ ID NO: 931786 - DNA, 791 bp, Homo sapiens
tatgtttgtgttttaagctaagtattattacaaaagagtcaaaaagtttaaaaaattaaaactttatgaagtaaaaacctacagcaagctatggttaatttattattgaagaaagactttttataaatttagtagtctaaatgtacagtgtttacaaagtccacagtagtgtgtagtaatgtcctaggcctccacattcactcaccactcactcactgactcacccagagcaacttccagtcctgcaagctgtattcatggtaagtgccccatatagatctaacattttttatyttttatactatattttattgtatcatgtttatatttcaatatgtttagatatacaaacaccaagtattatagctacctactatattcagtgcagtaatatgctgtacaggtttgtagtatagaagcagtaggctatgccacatagcctaggggtagagtaggctatagcatctagatttgtttaagtacactctgtggtgttcacacaacgacacaatcacccaatgggaagcaagaggcagagaaagatggcagaatagaaggatccattgattgccccccaccctcagaccccctgcaaggacatcaagttaacaactatctacacagaaaaaaaaacaccctcataagaaccaaaaatcaagtaagcactcattgtacctggttttaacttcatagcactgaaaaaggcaatgaaaggatagaaaaaacagtcctgaatcatggatgccaccccattcccacccctggtggcagcaactctgtgtgctgaggga

SEQ ID NO: 931787 - DNA, 564 bp, Homo sapiens
tttttctcttcagaacatggatcattctcaagaatagaccatatgttaggtaacgaaacaagactttaaaatgttttaaaaagtaaaattgtatccagcatcttccctgaccacaataaaataaaactaaaaattaataacaataagaattttggaaactataagaacacacagaaattaaatcatatgctcctgaatgactagtgggtcaatgaggaaattaagaagaaaatagagtaatttattgaaacaaatgataatgaaaaatattgtaccaaaacctattaaatacagtgaaagcagtaataagaggaaggtttatggctaaacgtgcctacagaaaagtagaagaactttaaataaacaaccttaagatgcatcttaaastactagaaaagtaagagcaaaatacaccccaaattagcagaagaatatgaatcataaatatcaaagcagaaataaataaatttttaaatttttaaattttaaaaatgaagaaaaacaacaaaaactaccaatgaaacaaggagttggtttgctaaaaacatatatgaaataaacaaa

SEQ ID NO: 931788 - DNA, 624 bp, Homo sapiens
cccttgatttcttctcctgcctgattaccctggccagaacttccaacagtatgttgaataggagtgttgagagagggcaaccctgtcttgtgctagttttcaaagggaatgcttccagtttttgcccattccatacgatattggctgtgggtttgtcatagatagctcttattattttgaaatacatcccatcaatacttaatttatagagtttttagcatgaaggttgttgaattttgtggaaggccttttctgcatctattgagattatcatatggtttttgctcttggttctgcttatatgctggattatgtttattgatttacatatgttgaactagctttgcatcccatgaatgaagcccacgtgatcatggtggataagctttttgatgtgctgctggattcggtttgctagtattttattgaggatttttgcataggtgttcatcagggatattggtctaaamttctcttttttggttgtgtctctgccaggccttggtatcaggatgatgctggcctcataaaatgagttaggaaggattccctctttttctattgattgtaatagtttcagaaggaatggtaccagctcctccctgtacctctggtagaattcag

SEQ ID NO: 931789 - DNA, 621 bp, Homo sapiens
gctgcatcctcacatggtctttctttggagcactcacagtaagagcgggctctctgatgtctcatcttataaggaaattaatcctacctgataaggaccccacccttacggactcatttaatcttaattacttccttagactccccagctctaaagacagccacactgggggttagggcttcagcataagaatttgggaggacacaaacattcagtccataacattccacctccaacctccagaaattcatgttctccttgtgtgcaaatatcatcctgacagccctgaatgttttaactcattccagcatcaaccctaaagtctaaagtccaaastctcatctaaactcatctaaatcagacatgggtgagactcaaggtatgattcatcatgaggtagaatgcctcttgtattagtcctttttcacactgcagataaagaaatacccaagagtgggtgatttataaagaaaaagagatttgatggactcaagttccgcatggctggggaggcctcacaatcatggtggaaggtgaaaagcatgtcttacatggtggcagacaatggagaaaatgagaaccaagcaaaagggttttcctcttataaaactatcagatctc

SEQ ID NO: 931790 - DNA, 413 bp, Homo sapiens
cagcatgataaagcaccagtcagaattgtgaggcccctgttctaggccctagctcccaaatatttgtagacataccctgggccagaagagaaccaaaggaaggaattcactgtcttgaaggaaagaactcccctcaggaaggatccatcacctgctaactgaggagtccttgggccatgaataaccagcagtgacacccaagtattatgttgagggccttaggtgagatgctgaaacttgctgacctcaggtgaaactgaggacattcmcaactaaggtggttatagagtaagactccttctacttaagaaaagcagaggaaaaagtaaaggggactttgtcttgtaccttaagtaccatcttggccacagcggggtagggcagcaaacaggcttttaaggtccccagttcca

SEQ ID NO: 931791 - DNA, 632 bp, Homo sapiens
agccagggagagaaccagtccttcatctcttacgccacaatgctacattcctctgggaaaaaaactgcctactcattcttggtttttaatgctagttagagtcttagggtaaggtttttttccatgactaactagtgctcttttgttttctgtgtgggtgtttgggaacaagctaactggttgtgttttttgttttgttctgttcataacaattatacagtgtaaggcaataacaaagcatttgtttaacactttaggggttaggaagaaattgttttaactccaattctcygccctcattgttgataggcagatattttaaagttgtgttttttcatctggggtttgaattccctaaattcttatgaaaattatgtgaatatatgcttactttttttctttgtttgtttttgagatggagttgcgctcttgttgctcaggctggagtgcaatggcgcgattttggcttaccacaacctccgcctcccgggttcaagcgattttcctgcctcagcctcccaagtagctgggattactggcatgcaccaccacacccgtttaactttgtatttttagtagagacggggtttctccatgttggtcagactggtctcgagctcccgacctcaggt

SEQ ID NO: 931792 - DNA, 632 bp, Homo sapiens
agccagggagagaaccagtccttcatctcttacgccacaatgctacattcctctgggaaaaaaactgcctactcattcttggtttttaatgctagttagagtcttagggtaaggtttttttccatgactaactagtgctcttttgttttctgtgtgggtgtttgggaacaagctaactggttgtgttttttgttttgttctgttcataacaattatacagtgtaaggcaataacaaagcatttgtttaacactttaggggttaggaagaaattgttttaactccaattctccgccctcattgttgataggcagatattttaaagttgtgttttttcatctggggtttgaattccctaaattcttatgaaaattatgtgaatatatgcttactttttttctttgtttgtttttgagatggagttgygctcttgttgctcaggctggagtgcaatggcgcgattttggcttaccacaacctccgcctcccgggttcaagcgattttcctgcctcagcctcccaagtagctgggattactggcatgcaccaccacacccgtttaactttgtatttttagtagagacggggtttctccatgttggtcagactggtctcgagctcccgacctcaggt

SEQ ID NO: 931793 - DNA, 777 bp, Homo sapiens
tttataaagaaaaaggaatgtatttcttataattatggaggttgagaagtccaagatggaggttctacatctcatgagagccttttgctggtggggactctgtgcagagtcctgagatagctcagggtatcacatgatgaggggtcgagtgtgctgatatgctagctcacatctctcttcttacaaagccaccaattcccctcccatgataattcattaatccattaacaagggaggaactgtcataattcactcacctgttaaaggcaccacctctcaatactgccacactggggattaaatttcaacatgagttttgcaggggacaaatatttataccataacacatgacgagttattctaatggataggaggtttcttttgggggtgacaaatggctctaagattagatcgttgtaatgagatgaacatcttcgtcaaatatacttaaaacattgaattgcacagtttacacaggtgaattttatggtatgttaattatatttcagaaaagctgataaactaaaaagaaaatgaaatttctgrccattggcccatgacacatattatttctcagtatgagtgctgaaacaagttgatttaggagtgttctttcaatttattggactaagtagaaaattgtttttttatgtgaaatgttcttttttaagagaccaggcaggtcttgctttgtcacctaggttggagtgcagtggtaccaccttggttcactgcagcctcaacctcttgggcttgagtaatcctcccagctcagcc

SEQ ID NO: 931794 - DNA, 585 bp, Homo sapiens
tgtcttactggaactctctctggctcttgtcatatgcttgccctgaggaagagttgctgtggaaaggcccatatggcaaggaaataagggaggcttcagtccaatggcccttgagggaccaaattctcccaacaactatgtgagtaagcttggaaggagattcttgtccaaatgagtgtgattgttaatactgggtgtcaacttgattgaaggatatgaagtatttatcctgggtgtgtctgtgagggtattgccaaaggagattaacatttgagtcagtggggytgggaaaggcagatccaccctcaatccgggtgagcacaatctaattagctgccagcatggctagaataaaaagcaggcagaaaaatgggaaaagagagactggcctagcctcccagcctacatctttctcccctactggatgcttcctgccctcaaacatcggactccaagttcttcagctttggaactccaactggctctctttgctcctcagcctgcagacggcctactgtgggagctggtaattgtgtgagttaatactgaataaactcatatatatattccattagttctgtccct

SEQ ID NO: 931795 - DNA, 703 bp, Homo sapiens
tgcagccctgtgtcatagcctcatctgtaagccatgttcccacagtgatagaaaaccacattatctccccaggtggctttcctcacaaattgcttacaacgaaatttcttgagtccctaaatattccagggtacatgtcactcctataaactaggcatacaaaactgagttctgttgactcttaaccgtgacaatgtcaattaccagcctatcttcacaggtacagcacaaggacaagaacagaaatcatccctctgcctactctgagacaaatgcacaatggactttttcattttctccctcttttcacatgtaaaatatggatttactgaggctaatcagagcctcacaagaatgtaaccatttgtctcactgcctaccctccctctccctcctttttcccccctcctacttgctctttcccctttaaatactgaagctcccaaacccccctggacaaagcataggctgcagatctcctgcatcttatatttttccctgcckgcatcctcagccttgtgtagacaaacctctgttaatcgagacctacctcagtcactttgtattaacagtggctagtgtgactgagaaactgaggtttcagttgaatttaattttattaatttcactgaaatagccacatggggctcggggctaccctgctggagagctcaggtatagaccagttcctactctaggcctc

SEQ ID NO: 931796 - DNA, 576 bp, Homo sapiens
cagaagtcgtcacgatcccttgtgcacctgttgaagccacaggcgcctaccctttgtcactctccttgtgcctggtactccctactagtttgtttctctccctttgggtgacgtaccatttccttggtctggcctattttcatgtcctaggccagcaccttgaaggagcagttccttctcttgcttgaccctggctggccaaccacagagctctgatttcccactgctgtttgtttccctggttatgtgtggcaccatctctgtggtgaagtcacaggtgcaagcccacgtggatgcagaygtgcacatgtgtgtgacgtttcgggtttgtttccatcctctccagtatcggcagtggctgaaggaagaatatggagagagccctttgcaggatgcagaagaagccaaaaacattctgggtaaatataaggagcaagggcgcacagagccccagcccggcgccaggcggtggagcagttttccggcactggctccgctgacctacgataattatacgacggagacctaacgcaagcgacctgctgccttccttcccactgcttgtcttcagtgtgc

SEQ ID NO: 931797 - DNA, 551 bp, Homo sapiens
  misc_feature 518, 519, 520, 521, 522, 523, 524, 525, 526, 527, 528, 529,530, 531, 532, 533, 534, 535, 536, 537, 538, 539, 540, 541,542, 543, 544, 545, 546, 547, 548, 549, 550, 551: n = A,T,C or G
aatatcacgataccatggatactgagcaaacacaaagcagcttggagcaggagtggggtttaaagcctgaaggctcccaagctgtgcctggtgttcaccctttagttgctagacagtggaaaggtagggggagccccagaggaggggcctttgtagtgaggagggaatctggacagcgaatattttcygattctgccgattcgtgtggccgcgaaagatcactgaatgcgtccgttgctaagtggcttagactagcatctgatgatcttcaaaggcctttcacgctctacaatttgattttcttcaatacatgtcaaatttgatttgctgatttagctcattgccaaccatctatctctcaaggctgagttttcctcaagaggaaaaggtttcccttcacgactaaaacgttcccaaacctgtattcacagaattatgccacttttatagatttgtagcctttctaaattcaaaggctgttctcagaaatggtacttgtgagcaccccatataaaggnnnnnnnnnnnnnnnnnnnnnnnnnnnnnnnnnn

SEQ ID NO: 931798 - DNA, 551 bp, Homo sapiens
  misc_feature 518, 519, 520, 521, 522, 523, 524, 525, 526, 527, 528, 529,530, 531, 532, 533, 534, 535, 536, 537, 538, 539, 540, 541,542, 543, 544, 545, 546, 547, 548, 549, 550, 551: n = A,T,C or G
aatatcacgataccatggatactgagcaaacacaaagcagcttggagcaggagtggggtttaaagcctgaaggctcccaagctgtgcctggtgttcaccctttagttgctagacagtggaaaggtagggggagccccagaggaggggcctttgtagtgaggagggaatctggacagcgaatattttctgattctgccgattcgtgtggccgcgaaagatcactgaatgcgtccgttgctaagtggcttagactagcatctgatgatcttcaaaggcctttcacgctctacaatttgattttcttcaatacatgtcaaatttgatttgctgatttagctcattgccaaccatctatctctcraggctgagttttcctcaagaggaaaaggtttcccttcacgactaaaacgttcccaaacctgtattcacagaattatgccacttttatagatttgtagcctttctaaattcaaaggctgttctcagaaatggtacttgtgagcaccccatataaaggnnnnnnnnnnnnnnnnnnnnnnnnnnnnnnnnnn

SEQ ID NO: 931799 - DNA, 587 bp, Homo sapiens
gaaaatcacttgaacccgggagccagagattgcagtgagccgagatcacaccactgcacttcagcctgggcaacagagtgagactccatctcaaaaaaaaaaaaaaaaaaaaagaagtagaaattttaaaaaattaggctgagggaaaatttcaagtatgaaaatagagctaaaatattgattttcttagatgwcaaattttagtcaagagttggaatgcatattggtcaataaaacacatcagtttatgaatgaaaaaaaccaattaggtcagtggctcactttgtacctgaagaattatataaactattaaacaaacaaggcaggtggcatggagtcacaaaggaaatggcagtgatgagaaggaaaaatgtggctcattttctcccaatacattcttcttgtatctgactgcattatcttgctatgaatatcacccgaatctaagtaatgattcaagttaaattgtgttatttaaaaaagagcattttgagatatacaaacacaaagctgaagagcaaattaatattgagttccaaattcccataatcacataaccagaaagaacattgaaaaaaatgttcaaa

SEQ ID NO: 931800 - DNA, 596 bp, Homo sapiens
atctctggatcccagataccatggagatataaaaagtggtgagactcaggctatattttaaaggaataaaagcaggtttgctgatgagttgtgtggaagacagagtggagtcagtgatgactaccaagtttttgctcatccatatcacctggataggagtaaaggagtagtaagggagaaatggaaaataaaaatcaaggttytggaacacagatccaaactggttcatcatatccacctgttacccagacatgccacaatttgctttgtttcagacccttgccaaacaaaacactattcagagttgggacgctaactttgtaaccatttttcttttctttctttgagatggagtcttgctctgtcgcccaggctggagttcagtggtgtgatttcggctcactgcaacctccacctcctgggttcaagcgattgtcctggcttagcctcccgagtagctggatcacaggtgtgcgccaccatgcccagctaattttttttttttttttttttttttttttttggatttttggtaggcacagggtttcaccatgttggccaggctggtctcaaactcctgacctcaggtgatctac

SEQ ID NO: 931801 - DNA, 729 bp, Homo sapiens
atattacatagaaagatttctttgagaagtgggaaaaaaagcagacaacaaatatgtagtataaaatcctgtatcatcagggtggggaaatgtacattttaactgagtgatgtcttgatggtgaatgggaaagctattgagaggagagaaggagtctgttgttttcctgggttatctcagcttgaatcctatctgatgcctgagaggagagaggagagggcacccgctcctccaggggaagcctccaggggtgggaggggccccctagaaggcctggctgcaggcttgagtcagaagccagggaagggacctagcctttgttttttattttccttttgagataagagtctcaatctgttgcccaagctggagggcagtggcacgatattggctcactgcaacctccgccttccaagttcacatgattttcctgcctcagcctcccaagtagctgggactattggtgcccgccaccacacccagctaamcttcttcttcttttttttttttttttttgtagagacagggtttcaccatgttgaccaggctgatctcgatccacctgccttggcttcccaaagtgctgggattttgggtgtaagccaccatgccccgccaggacctagtctttgaaatgccaaggcagagaattcggggaagtgtgggtggtggggcatagacagaaatgacccgtgcttttcaccgcagtggagatctgctcctctgagg

SEQ ID NO: 931802 - DNA, 595 bp, Homo sapiens
taaatctgcgtaagtaatgagaagcagaatgttaatccccaagacagggggaaaatgtctccagggcacatcagaggtcttcacagtagcccctctcatcacaggcctggaggcctaggagaaaatggttttgtggatcaggcccagggtgcccctgctgtgtgcagtctagggacttggtgccctgcatcccagccactccagcgtgactaaaaggggcaaaggtacagcttggactgttgcttcagaaggtggaagctgccaagccttggaagcttccacgtggtgttgagcctgtgggtgcacagaagtcaagaaccaaggtttgggaacctccacctagatttcagacgatgtatagaaatgcctrgatgtccaggcaaaagtttgctgcaggggcggggtcacaatggagaacctctgctgctgggcagtgcagaagggaaatgtggagtcagagcccccagagccccaagacagagtccctactggggtaccacgctgtgagaggagggccaccttcctccagaccccagaaaggtagatccactgacagtttgcactgtgtgcctggaaaagccacagacactcaatg

SEQ ID NO: 931803 - DNA, 633 bp, Homo sapiens
ttttggttgcaccgacaaggtggctgtcatctgggagacacagagattttcattttcaaggaactcagaaggtagctgggcagagtttctagcaaaaacaacatttttcttagggagagcctctcggctcttattttatccatataattgatacacagtacaaatagatttagaacaggtttttaaaaagctatgtaaagcagagcagaatttcgagtcgttacttataaatggcagtagttagatgtgtcaaaataacatgcttggttttgtttagtgctcttcagtgggtctttgaatgtcagagttggaatgaactggctcacctctgcatttgactcaaaactatgaataaaaccacattgatttctgaacacagattactttttctctcaaatctaagttgtgcttaattgtaatcattccctttcactagttcacgatgggggaaataacatgaatacccaatgtcctaggatagayagcttcttcagcaatgtgggtgcaatgtgagggggtaatacaggtggttctaagtttccactttttaaatgaaataaataatttcaatagaaacattaaaattgcaagtaaagtgaaaaagagacagtttccactatcctggcaatgtat

SEQ ID NO: 931804 - DNA, 600 bp, Homo sapiens
agacaattagtgaactgaaagatgagcatgaaccttcttctcccaccatcaggggtgaagaaggagcctacaatcccacccatttctgccccacactcacagccttactaacactacctgccttgaatctatctggacaatctcattttgccttatctgtgtttataccagtcaccagaagaacccccagattcttgggttctccttcatcactgggytcttatctccatatcaactctgcatattccctgttttgtccttctctaccgtccccaacttctgaagccatgtcattttgtaatgtagaatgcacagattgacaagtttccatcattaaccttcctcctgaacctttccttcactttgatgctgtaggtgagccaggttcttcacaggggacagaattgcccctgcagtcctctcagccagcagcgttcccaggccttctcttctcataactcttccagtgactaagaccaatatgcttagagttatctggaaaaactcttgcattctgaactcatatccaacccatcatcaaatcatgttggttctaccttcaagacacatccagagtctgacattttctcaccagtctca

SEQ ID NO: 931805 - DNA, 600 bp, Homo sapiens
agacaattagtgaactgaaagatgagcatgaaccttcttctcccaccatcaggggtgaagaaggagcctacaatcccacccatttctgccccacactcacagccttactaacactacctgccttgaatctatctggacaatctcattttgccttatctgtgtttataccagtcaccagaagaacccccagattcttgggttctccttcatcactgggttcttatctccatatcaactctgcatattccctgttttgtccttctctacygtccccaacttctgaagccatgtcattttgtaatgtagaatgcacagattgacaagtttccatcattaaccttcctcctgaacctttccttcactttgatgctgtaggtgagccaggttcttcacaggggacagaattgcccctgcagtcctctcagccagcagcgttcccaggccttctcttctcataactcttccagtgactaagaccaatatgcttagagttatctggaaaaactcttgcattctgaactcatatccaacccatcatcaaatcatgttggttctaccttcaagacacatccagagtctgacattttctcaccagtctca

SEQ ID NO: 931806 - DNA, 600 bp, Homo sapiens
agacaattagtgaactgaaagatgagcatgaaccttcttctcccaccatcaggggtgaagaaggagcctacaatcccacccatttctgccccacactcacagccttactaacactacctgccttgaatctatctggacaatctcattttgccttatctgtgtttataccagtcaccagaagaacccccagattcttgggttctccttcatcactgggttcttatctccatatcaactctgcatattccctgttttgtccttctctaccgtccccaacttctgaagccatgtcattttgtaatgtagaatgcacagattgacaagtttccatcattaaccttcctcctgaacctttccttcactttgatgctgtaggtgagccaggttcttcacaggggacagaattgcccctgcagtcctctcagccagcagcgttcccaggccttctcttctcataaytcttccagtgactaagaccaatatgcttagagttatctggaaaaactcttgcattctgaactcatatccaacccatcatcaaatcatgttggttctaccttcaagacacatccagagtctgacattttctcaccagtctca

SEQ ID NO: 931807 - DNA, 675 bp, Homo sapiens
cctccctgtctgactgggcctatattaaggggtcattgacctctacctcctgggtcttttgcatctttcaagacagaattgtggcctcagtgatcttggagtctcgttgaatagcattctccaaattaggctcagagaaaagtttatatttctcttaggcctttgggcattcttgaaaakactcacttgcttctcttctccactgtaaatgcaatttacagctccttaaaatctacagcatcttctgcaacactttctgcatctataatggaatgtttctgccaccactgctttcactggctctccctccactgttcagatttgtggggtttttttagctcagttgtatttatctctatataacaatgtatacccgtatgatctactttacagaaaattaagataaggaaatgcatacatataaaataaataatttagggagaattactaacattataaaactgtgtttcgcctcctagagcattcactgtaatttagttttaacagtgggttttcctggtgtatctaaaatatagtttaactttctttaaattatttgttttacacctagaaaataatgtatcggatgaatataaggaatttgtttttcagatgtgcacatattccctaggccacaaccaactgggagatataactagaggtgtgttaattata

SEQ ID NO: 931808 - DNA, 605 bp, Homo sapiens
gcaggtctctcaggttggggactaggtcttttatgcttcaggagaaatctgggtgacaaagtacagcatttactacaaatatcactgctagatatgaacataatatattcagataaatgtaagcaattccttttaccaaaacagccgaagatgcatgtgaagaatgacaaggttagagaaatgtaggcatgggtgagatcataagrtttcttatatattagggcaaagaaaataagcttgaccatgaaatctttatgggaccattttttacatttccttttactgtgatcattgtgatcattgcaatagatgcaaataaatgccgctgaaaaatatttaacatcatttcaggctagtgactcctcaaacatgcaataggagatttcctaaacccaataaaggaatctcagttaaaactacagctaacatcttacttaaagacaaaagactgaatgctgtctctctaatatcaggaacaaggtaaggatgactgcacttaaccacttctattcaccatgataatggaagtcctagccagtgcaatagtcaagaaaaagaaaagaatatagaatgaaaaaacagaaataaaactgcaactatttgaa

SEQ ID NO: 931809 - DNA, 627 bp, Homo sapiens
gttgggatcttatatggagtttgtccagcaatgataatctgcctgactctttgtaaggatttttaaatcagcatcttctcacctttgtgatctcatgggtcttggggaatgagcaacagcttctccatccaaaaagttagagagtttctgttttaaaactttctactgtaaaaacacatcttttaagtagatgttatatcaaaatgtgaactcttctatttttgatctaggtaaagatccagagaaaggtatagagaatgaaccagaggaagatgaagaaatggatttgtgagcaaaagaactgccttgatgtcctactgatgctcattcactctgatagacatgaaaaaaatcacaacactgttactaatagcaaaaccatacttttaaaaccagacttgttcttytttttttttttttgaggcgaagtctcactctgttgcccgggccagagtacaatggcgtgatctcggctcactgcaacctctgccctgggttcaagcaattctcttgcctcagcttccttagtatctgggattacgggtgtgtgccatcacacctggctaatttttgtatttttagtagagatggagttttgccatgttggccaggctggtctcgaactcc

SEQ ID NO: 931810 - DNA, 626 bp, Homo sapiens
agtgaacccctgtgagctgcactgccggcccgcgaatgagtactttgccgagaagctgcgggacgccgtggttgatggcaccccctgctaccaggtccgagccagccgggacctctgcatcaacggcatctgtaaggtgtgcctggttaggaagaggctctcccagcactgcctgcccccagccccactggcgggccccaggttctctcctggtcctcctcgggccaccctccccatgctctaccattgggcttcccagcccctaccctctatgacmtctaaggcaaagcccctaccacgcctcctggcactggggaccccccccaagtcaggcctcgccccactgcgtctccttggatgcctgcaccagcaccgccccagccaggaaaccggagcccaggcagtggcttgacctcttgctggctggctgaccccaggcagtggtttgctccctgatagaggggttaaatgaggtggcacaggtgacatgaagggctctgagccccgaagagtagccctcagtgtttggtaacaatttatattcttatttttaataacaacgatggcctctcctctttgcccatgtctccagccacctacttgtccttgcttcttgccctctaaac

SEQ ID NO: 931811 - DNA, 621 bp, Homo sapiens
catggcaggacaggaccaatgaggttttcaaatgatgaggaacccgagggctgcggagcaccccacctgcccccgagacccagccccacgctgcccactttgtacccggtcagcagcacccactcctctcctagtcctgacgtggcggagctgtggacaggagggacagtagcctgggagtcagctctggagggtggcctggggcctgtggayagtgaactgtggcccactgttggggtggcttctctccctcctcctcccatagcccctctgccagagatgaagggcaacgacagtcccctgcagccggggactcccaccttcccaaccccaggaccaggcttatgggaccttcagactgtggcagtgtgggggaccttcctccccacaaccctgactgacctcgggcacacgcctgagcctgccctgaacccaggacccaagggtcagcctgagtccctcagccctgaggtgcccctgagctctaggctgctgtccatgccagcttgggacagccccgccaacagccacagagcccctgagacccagccactgcctcccagcctggctgaagcggggccccccacggacccgttggttgtcaggaacgccggctgacaa

SEQ ID NO: 931812 - DNA, 734 bp, Homo sapiens
ctgtgtggccaccaggcccagtcctgcccagcaggcagcagcttccctgaggctctgcctggctcctccaggctggactcagcccactgctacctggctctgccctcagtggctccaccctcctttggcagtgacctgcagacgtctgagctgcatgaaagaagctggctagtgccccctccctgggtccccagatggtcactgcaggagaagcaagcttctgttcagattcctaattttggggtgggaaggggcaggctgaggcccacagggcttgttttgcgcggggacaggcagcgatttggctgctggtaccaggacccagccttccttccctggtgcctctgggaagcgacgaggctggtcaggatagctggtcaggggtgcccacagggtctcctcccccgaacctctgcaccaatgacactggcacacaggccctttgtcccatgtgagcagggacggctggttgctggggggatttgacttttcattctcatggtcttcctgggaggtgggtggaggagcctattttgmaaataaggaaactgaggcccagaagagggcccctgtcttgctgaggtcttgctagcctaggtgggtagtttcctggctgtggaggcctggcgaggatgggctctgcctggctttcacgggtctgtgccccgcagtgctccaccacctgtggcctgggtgccctctggaggccggtgcgctgtagctccagccgggat

SEQ ID NO: 931813 - DNA, 757 bp, Homo sapiens
atcaaatctcacgtcctttttcccagcatttaaactgtaggccacagactggtggaaaagcaggcggagccaaccaccatctgctaagtgtgctacatgcctaatgtttccacgtattatctcatttaatcctcagcacctctgcaaggaaaaggctaacttccttttgaagttaaagaaacagagacttagagatgcaaagtagttgaattatgaccagtggaaccgaggccggaatccagtttgaatctaaggagtcttttttgtttgtctgttttgttttgttttgagagagtgtcactctgtgtcccaggctgcagtgcagtggtgcaatctcagctcactgcaaccttcacctcccgggckcaagtgattctcgtgtctcagcctcctgagtagctgggattacaggcatgcaccaccaggcccggctaattattattattttttttaattttagtagagatgagctttcaccatgttggccatgttggtctcaaactcctgacctcaagtgattgtcctgcctcagcctcccaaagtgctgggattgcaggcgtgagccaccacacccgacataaggagcctcttataccactgtctcttcctctgctctgtgattggggggctccatgcctctagctgggatgatgatgtccagacctgggaggaccccagggctacccacctctaaaagtcagagggcaggaagcaagaaacagtcataggactgccccggagggtgctggggtcacct

SEQ ID NO: 931814 - DNA, 561 bp, Homo sapiens
gaatggatcaagcagaggaaagaatcagtgagatcaaagacaggctattggaaaatacacaggagaaaaaaataatgaaaagaaaaatcacctacaagacatagaaaattactacctcagaaagccaattctaagaattactggtcttccagaagcagttgagcaagaacaaggggtagaaagcttattcaaaaaataataatagaacgctttctaaaacttaggaaacagataaatatccaggtacaggaagatcagagaataccaaatggattctagccaaataagactaccacaaggtatataataaactctcaaagttcaagaaacaagaaaggatcctgaaagcagcaagagaaaagaagcaaataacayacaaaggagctccaattcatctggcaacagacatctcaatgaaaaccatacaggccaagagggaataataatgacattttcaaaaagtgctgaaagaagaaaaaaagtgccatataaaaatactgtgcccagcaaagctatccctccaacaaaagctgagaaaattcaccaccatgagacccatct

SEQ ID NO: 931815 - DNA, 558 bp, Homo sapiens
ttttctttttctgaggtagaagctgtgattgtcaattttagaccattcttcttttctaaaatagacatttagtcctataaatttccctctatgtactgctttagtttaccttctttctgctgaatttcccctattattcatgtatgttatattcacctttcctgctaacatattaaccctagttacttttatagtcactgtgataattctaacatctaggatatagctcartctatttttgttgctttacatcttgacaatggattgttttttctaatgtttcttataattttagacatattgctgtaagagactgcagactgaggtaaatagaatatattgatacagactctcctcctaccaggctgttggtgtatggctgtagcaatctagtcaggaattgatatggatatgtgtcttgttgttgccctcactatgtccagtgcaccacaggctttggattcctctagcagcaggctgctattactttgtagtatttagaatagggcctgtgttgccagagatttttcctcagtgtttctttttctccctcaggtt

SEQ ID NO: 931816 - DNA, 756 bp, Homo sapiens
tggtttcatgggctggtgttgaatgtctgcagcttttcctgatacacaatgcaagctgtcagtggatctaccattctggggtctggaggacagtggccctcttctcatacctccactaggcaatgccccagtagggactctgtgttggggctccaacccctacagtccccttggcactcccttagcagagattgtccatgagagccctgcccctgcagcaaacttctgcctggacatccaggcatttccatacatgttctgaaacctargtggagtttctcaaaccccaattcttgacttctgtgcactggaagactcaatgccacgtggaagctgccaaggcttgagacttgcaccctctgaagccacagcctgatcactatattggcccctttcagccatggctggagaggctgggaggcagggtacgaagtccctaggctgcacacagcacagggaccctgggcctggccctcgagaccactttttcctcctaggcctctgggcctgtggtgggaggggatgccatgaagaagacctctgacatgccctggagacattgttccgtttcttggggattaacattcagctagttgttacttatgcaaatttctgcagcaggttagtatttctcctcagaaaacgggattttattttctatcacattttatcacataaaagtgcaaattttttgaacttttatgttctgtttcccttataaaactaaatgcctttaacagcacccaagtcacctct

SEQ ID NO: 931817 - DNA, 741 bp, Homo sapiens
atcacataaaagtgcaaattttttgaacttttatgttctgtttcccttataaaactaaatgcctttaacagcacccaagtcacctcttaaatgctttggggcttaaaaatttcttctgccagataccctacattatctccctcaagttcaaagttccacacatctctggggcaggggcaaaatgccaccagtctctactaaaacctaacaagagttgcttttgctccagttccctacaagttccacatcttcttctgagatcacctcagcctggatttcattgtccacatcgttatcagcattttgatcaaagccattcaataagtctttatggagttccaaactttcccacattttcctatcttcttctgagtcctccaaactgttccaacctctgcctgttacccagtttccaaagtatcttccacatttttgggtatctcttcmgcagcaccccattcctggtaccacctacctgaattagtccgttttcatgttgctgataaagacataccaacactgggtaatttatacaaaaaaaaaatggtttaatggacttacagttccacatggctggggaagactcacaatcacggtggaagtcaaggaggagccagtcacatcttacatggatggcagcaggcaaagggagagcttattcagggaaataacaccttataaagctgtcagatcttgtgagacttattcactgtcacaagaaaagcacaggaaagaactgcc

SEQ ID NO: 931818 - DNA, 741 bp, Homo sapiens
atcacataaaagtgcaaattttttgaacttttatgttctgtttcccttataaaactaaatgcctttaacagcacccaagtcacctcttaaatgctttggggcttaaaaatttcttctgccagataccctacattatctccctcaagttcaaagttccacacatctctggggcaggggcaaaatgccaccagtctctactaaaacctaacaagagttgcttttgctccagttccctacaagttccacatcttcttctgagatcacctcagcctggatttcattgtccacatcgttatcagcattttgatcaaagccattcaataagtctttatggagttccaaactttcccacattttcctatcttcttctgagtcctccaaactgttccaacctctgcctgttacccagtttccaaagtatcttccacatttttgggtatctcttcagcagcaccccattcctggtaccacctacctgaattagtccrttttcatgttgctgataaagacataccaacactgggtaatttatacaaaaaaaaaatggtttaatggacttacagttccacatggctggggaagactcacaatcacggtggaagtcaaggaggagccagtcacatcttacatggatggcagcaggcaaagggagagcttattcagggaaataacaccttataaagctgtcagatcttgtgagacttattcactgtcacaagaaaagcacaggaaagaactgcc

SEQ ID NO: 931819 - DNA, 616 bp, Homo sapiens
tccttcccacaacacatgggaatttaagatgagatttgggtggggagacagccaaaccatatcagtaaacataatgatgttatatatctgtgtattttgagagtgatcagtagcaatgaactcacctattatccagattcttgttttaaaatactattctccagtgacaaaatacaggactacttggagaaatgccttattctgagactgggacagtggaaatatcagatgagtttggaacacttttttgaccaggaaacaatgcttagtaaacaaacatatgaaggcatgtcaaagggacacaaagccaacctaaaagtgaacacccaatgacaaaaatctgaamaatttgagaatatatatatatatatataattcacatattagtcaattagcaaccaaagtataaaataaatatgtgtccttactaatataaataaatttatgaataaataaggagaaaagacaaatatttttacaaagtaattccaaataatatgtgtagatacttcccctacataaaaggtgggacttaatccttctcagcaaaagcatgctacatgtagcaatgtaacagtgtcaatttgtttgttttggtaaatataccatagtaatc

SEQ ID NO: 931820 - DNA, 581 bp, Homo sapiens
ggttagaacgtttaaaatataccgtcttagcaattttcaagtatatgttaagttgctactaattatagtcaccgtactgtgcaacagaccttggaactcattcttcctgtgcagctgaattttgcatcctttgaccaacatctccyctgccctctccctggccctggtacccacccttccactctctgcttctctgagttcagctgtcttaggttccacgttgaagtgggatcatatggcatttgtctttctgtacctggcttatctcatttaacataatgtcctccaacttcactcatgttgttacaaatgacaggatttccttcttttcaaggctgaatggcaatggtatgccattgtgcaccatgcatgtttctttgatcagttcatccattgggggcactcaggtggatgccacaccttggttattgtaaacaatgctgcaatgaacacaggactacagatattttttggatcctgatttatttcctttggatatgcccagtagtggagttgctgggtaatatgtttgttctatttttaatgttttgaggaaactcaaaacttttcataatgagggc

SEQ ID NO: 931821 - DNA, 602 bp, Homo sapiens
ggaatgtcctaagttgatctgtactaatttccaggaattaatttgcaccttgggctgtgccttaaattatagctggatttatcagccagcttctatttgtaatatgggtgactatggtccttaactcctctcctaatttttgctctgagaagaaaattatcatcataccatgaaagtagtatatgaactctatcttttaggttattctttacyagattatggaaatgtgataatgaatttttttaaaaatccatgataagacagtaaacatatacttgtttctattctgcaaagcttaaaatattcctacttgaaattaaaaaaaaaaaaaaatcttaggaggcccctgagattggtttaatgctctgttgtagctatcttgaaattcttcataatttttgagtaagtatccatgcattttcattttatactcagctctacgaattatgtagttaatcttgataacatatcagagcctcttgtctactttattttctgtacattcttaatcatatcaggtacagatgaagcatgcaaatgaaccaccttgatactctactgtaactgtccaggggctacctacttattgaccagttagaact

SEQ ID NO: 931822 - DNA, 637 bp, Homo sapiens
tgactttcttgttataaaacgtctgaataaatatagattctctctgttattattaggtgttatttatttccacaacctacaaaaaatcttcaggcagggtactatttaaaggtgcaatattgaaaaattccacataaaatcaggaaaaaagaaagaatgttcatctcactactattcttctacacattactgtaagcactaaccattataaaaggaaaataaagggcataatgattgaataggaaaaacaaaattgtctttacttgaaaatgagatgattatggraaaaaactaaggaatacatttcaaaagctactagaactaaataatatatatatatatgaaatttatagcaaataaggttaatatagaaaagtgcatgttgagtgttccttatccagatatctgaaatctgaaatgctctaaaagctgaaactttttgagagctgacgtgatgctcaaggaaatgttcacttaagcattacagattttggatttctggattagcactactgaatttgtaagtataatgtaaatattctgaaatctgaaaataatttgaaatctgaaatacctctggtcccaagcattttttaactcattatatgtgctcatttattttttttaacaaatacct

SEQ ID NO: 931823 - DNA, 637 bp, Homo sapiens
tgactttcttgttataaaacgtctgaataaatatagattctctctgttattattaggtgttatttatttccacaacctacaaaaaatcttcaggcagggtactatttaaaggtgcaatattgaaaaattccacataaaatcaggaaaaaagaaagaatgttcatctcactactattcttctacacattactgtaagcactaaccattataaaaggaaaataaagggcataatgattgaataggaaaaacaaaattgtctttacttgaaaatgagatgattatggaaaaaaactaaggaatacatttcaaaagctactagaactaaataatatatatatatatgaaatttatagcaaataaggttaatatakaaaagtgcatgttgagtgttccttatccagatatctgaaatctgaaatgctctaaaagctgaaactttttgagagctgacgtgatgctcaaggaaatgttcacttaagcattacagattttggatttctggattagcactactgaatttgtaagtataatgtaaatattctgaaatctgaaaataatttgaaatctgaaatacctctggtcccaagcattttttaactcattatatgtgctcatttattttttttaacaaatacct

SEQ ID NO: 931824 - DNA, 555 bp, Homo sapiens
acacactgtcttccacaatggttgaactaacttatactcccaccagcagtgtaaaagcgttcctatttctccacatcctctccagcatctgttgtttcctgggtttttaatgatcgcaactctaactggtataagatgatgtctcattgtggtatctcagtgatgatgagctttttttccatatgttttttggctgcttcaatgtcttcatttgagaagtgtgttcatatcctttgcccactttttgatggggttgtttgttttgggtgaaggatatrtcctatagtttttactagaacaaaaaatttgattattttatgggaaagtatactgtaaacatttgctactcaacctagaaaaattcacagggtttactttcttttcttctaccaccaagcatgaatgcggtatgcatttcacagatgcttctcctattggaatattcaatgccaggatgtactcattgctgtcccataattatttcaacttttgtggcctccttgttgcgttgtccaaattgctgtttcataacttttctactttcttcaaatctct

SEQ ID NO: 931825 - DNA, 555 bp, Homo sapiens
acacactgtcttccacaatggttgaactaacttatactcccaccagcagtgtaaaagcgttcctatttctccacatcctctccagcatctgttgtttcctgggtttttaatgatcgcaactctaactggtataagatgatgtctcattgtggtatctcagtgatgatgagctttttttccatatgttttttggctgcttcaatgtcttcatttgagaagtgtgttcatatcctttgcccactttttgatggggttgtttgttttgggtgaaggatatatcctatagtttttactagaacaaaaaatttgattattttatgggaaagtatactgtaaacatttgctactcaacctagaaaaattcacagggtttactttcttttcttctaccaccaagcatgaatgyggtatgcatttcacagatgcttctcctattggaatattcaatgccaggatgtactcattgctgtcccataattatttcaacttttgtggcctccttgttgcgttgtccaaattgctgtttcataacttttctactttcttcaaatctct

SEQ ID NO: 931826 - DNA, 481 bp, Homo sapiens
caagtagcctaagtgacacaagaccagtatccacgttcatttccatacagccctaattcatcacaaatgtacttattttctgccatatagcctctttcctaattaagacaaccacatcctattcctaacttattactattaatgacagcacaggcatcaaatttcaaggtgacttgtttgggcacccctttttcttctgttttggctaacattttactcatatcatgtatgagcccccacaagtcctcagttcttaaccttatttcaaaaactatggtcatgggaggctcagatrggtcataacacacatcaggttggtcatttcctgggctacataccttgtatagaataacattatacaaacaatttctttttagagttccagtacacttataataaccataagataataggaccgtagcaaccttttgtcctacctcagtgacttgatgtatacactgcgaacagtcctcagtctggg

SEQ ID NO: 931827 - DNA, 593 bp, Homo sapiens
tactgtacaagtccaaattttaaggcaaatgagtcccatgatgagttttctcatgcttcagccatgcgtggaccagtcagcttctgggtgtgactggagaagggcttgttgtcttcttcagagtcactgtgcaggggttggcgaagctgctcccrtccacgtaccgctcacagtctactgatgttcaaggatggtctcggagattgggcctactagaataaactgaatccaacacctccacacagttatgttcaactgggctctccaataccaggagcaaggtcgtggggtttagagtgttgcaaacttcaatggttatgcagggattttcacatagcaagctttggtacttggttaatctagcatttgttaaccaatgatgtcctttggtatttatcaaagttaccacagcatgggggtcctgtatattcaggttttgcccaagggttagtttatctgcttcttgtgctaacaaggctattgctgccagggcccttagacatgggggctagcctttggaaaccatgtctagttgttttgagagataggccactggccttggccagagccccacagtctaggttaaaactccg

SEQ ID NO: 931828 - DNA, 563 bp, Homo sapiens
aggacttccagtattatgttcaagggataaaagtaggcatccttgttttgttccagttctcatggggaatgctttcaagtttgccctgctcagtataatttggctatgggtttctcatagatggcttttattaacttgaggtatgtcctttctatgccaattttggtgggggtttttatcataaagtgatgctggattttgtaaaatgctttttctgcatctattgagatgatcatactatttttgtttttaattctgtttatgtgmtgtattacatttattgacttgtgtatgttgaaccatccctgtatcccacttgatcatgatgtattatctttttgatatgctgttggatttggttagctaatatttcattgaggatttttgcatctatgttcttcagggatattggtcagtagttttccttttttttgttatgtcctttcctggttttggtactagggcaatactggcttcacagaataacttagggaggattctctctttcaatatcttttggaatatttttagcagtattggtaccaattctgctttgaatgtct

SEQ ID NO: 931829 - DNA, 723 bp, Homo sapiens
acagctgctctatgaacatatggccagactacttttttaaggaggtcccaatcccattctttctgactgaatgagacctcctatctggagtccctggccatctacagatgcatttgagccagcaacaggtccataccaccttggaacagaacttccaaaggaaggggcaggctgccatctgtgctgttttgcagccttcactggtgatacctccagacactgaaaaatctgaggtgaccatgsactggagcagacccccagcatactgtagcagcctgacagaaaggtggccagactgttaaaagaaaaaaaaaatccatccaaaagtcagtaacctcaaagattgaaggcaaataagcccagaaagatgagaaggagtcagtgccagaccactgaaaactcaaaaagccaaagtgtcctctttctcccaaatgaccacataacctctccagcaaaatttcagatgaggctgagatagctaaaatgacagaagtagaattcagaatatggaaagttcagaatatggaaagttcatggaactaaaggagtacattgtaactcaatgcaaggaagctaagaatcatgctaaaatattgcaggagctaacaaagtagccagtatagagaagactgtaactgacctgatagagctgaaagacacagtacaggaacttcataatgcaatcacaagtattaatagcagaatacaacaagcggaggaaag

SEQ ID NO: 931830 - DNA, 723 bp, Homo sapiens
acagctgctctatgaacatatggccagactacttttttaaggaggtcccaatcccattctttctgactgaatgagacctcctatctggagtccctggccatctacagatgcatttgagccagcaacaggtccataccaccttggaacagaacttccaaaggaaggggcaggctgccatctgtgctgttttgcagccttcactggtgatacctccagacactgaaaaatctgaggtgaccatgcactggagcagacccccagcatactgtagcagccygacagaaaggtggccagactgttaaaagaaaaaaaaaatccatccaaaagtcagtaacctcaaagattgaaggcaaataagcccagaaagatgagaaggagtcagtgccagaccactgaaaactcaaaaagccaaagtgtcctctttctcccaaatgaccacataacctctccagcaaaatttcagatgaggctgagatagctaaaatgacagaagtagaattcagaatatggaaagttcagaatatggaaagttcatggaactaaaggagtacattgtaactcaatgcaaggaagctaagaatcatgctaaaatattgcaggagctaacaaagtagccagtatagagaagactgtaactgacctgatagagctgaaagacacagtacaggaacttcataatgcaatcacaagtattaatagcagaatacaacaagcggaggaaag

SEQ ID NO: 931831 - DNA, 647 bp, Homo sapiens
aaagtaagtctctaatttctccctttaagccaacaatgtagcctaaaaaatgcaagaaaagcatattttaaatgcatttttatttattttagaataaaattctattaagtcctaaaataatgttttagataaaatagaaaagtcttaaaaattgaaaaataattttgcaaaagaatacagaaagtatattcacctttttcttgtgcttctgcataggtatgaggaaaacttggggattttaaagtaacagcttattggacagaaggagataacacatatcagattatagatggtataaattgaagtagctggcaaaatctcagtagaaatccygagaacaaactgagctaacctctggaagcatatgtgtttatatcctaaacctacaaccttacaaagttctggaaaacccagaacacagaaacacatatttcattaaccatcagaacaatggaattattagacatcatgtggcttcaggaaaataccttatacacatgtgaaagaaaaagagtgaagagggcaaatgacatttgtattagtccgttctcgcactgctataaagaaatacctgagactcggtaatttataaagaaaagaggtttaatcggctcatggttctgcaggctgtacaggaaacatggcag

SEQ ID NO: 931832 - DNA, 611 bp, Homo sapiens
gtaaatggctgagctattactgatcaagatgaaaggaagagaactgctcctctctgttcaggtcagtacaggctcaagtcccctcccttgggccatgtggatgtgtgttacagctacatttgttaaactgaatgacagtccttaagggcaaagctatacaatctgtcaccarctaccatggtgcatggtatatcttagaatgtaaatcattcaaaaatactttaaagtcataaatgatattttaattacaatatgtcagaaaatagagaaaaagaataagccaatttatctcataattaattttcccccttttatgcatttccttccttactcctttttcctatgcatatgtttcatgtaactgtagtcacagagcaaacataatttgtatcctgctttctgaacactgttctattgttatgaactgaattgtgttcttccttcccaaattcatatgcactaacctccaatgtaactgtatttggagaccaggtctttaaggaaagtaactaaggttaatgagatcttaagggtgagatactaatcctataggactgatgtgtgtgtgtgtgtgtgtgtgtgtgtgtgtaattttttctttttatttttga

SEQ ID NO: 931833 - DNA, 587 bp, Homo sapiens
tggcacaccaggagattatatcccttgcctggctcagagggtcccatgcccacagagccttgctcactgctagcacagcagtctgagatcaaactgcaagatggcagtgaggctgggggtggggcatctgccattgttgaggcttgagtaggtaaacaaagctgccaggaaactcgaactgggtggagcccaccacagctcaaggaggcctgcctgcatctgtagactccacctctggggkcagggaatagctgaacaaaaggcagcagaaacttctgcagacttaaacatgcctgtcttacagctttgaagagagtagtggtcctcctaccatggagtttgagatctgagaacggacagactgcctcctcagtgtgggttcctgacccctgaggagccaaacttggaggcatctcccagtaggggccgattgacacctcataaggctgggtgcccctcagagatgaagctttcagaggaaggatcaggcagcaacattttccgttctgcaatatttgctgttctgcaacctctgctgatgatcaccaagtgaacagggtctggagtggacttccagcaaactccaa

SEQ ID NO: 931834 - DNA, 683 bp, Homo sapiens
ggacctgatagatatctacagaactctccacccaaaacaacagaatatacattcttctcagtgccacatggcacttactctcaaatccatgacataattggaagtaaaacactcctcagcaaatgcataagaactgaaatcataacagtctctcagaccatagcacaatcaaattagaactcaagattaagaaactcacccaaaaccacacaactacatggaaactaaacaacctgctcctgaatgtctactgggtaaataatgaaattaaggcagaaatcaagaagttctttgaaaccaaggataacaaaaagacaacgtaccagaatctctgggatgcagctaaagcagtgttaagagggaaaggtatagcactaaatgtccacaacaaaaagctagaaagatctcaaattgacactgtaacatcacaactraaagaactaaagaaccaagagcaaaaaaaccctaaagctagaagaagacaagaaataaccaagatcagactggaactgaaggagatggagacatgaaaaatccttaaaaaaaatcaactaatccaggagctggttttttgaaaaaatttataaaatagactactagctagactaataaacaagaaaagagaggagaatcaaacagacacaataaaaaaatgataaagtagatatcataactgatcccac

SEQ ID NO: 931835 - DNA, 460 bp, Homo sapiens
acctccgtggctgtaataaggacgaaattagatacagtgtgtaggttgcctagctggtgtctgacacaaaaaggtcctcagtaaacagtatgaatggattcaaagccatttaacctctaaacttccctccactctatgcagaaaggccttctctccagcccatgaaaccctaattgccttcttttctccccacacttgctattgtgggctccctactggaaggctctcctttcactcagcctaaccaaatcccccacaaaagcctgactcaggtccccactcagcagcctcaggcctggcatcacatggcctctcgatggtggamccagcattgcgggttgctctctcggcaggcatgtctggccatccacacctgggggcagagaacactccatcttcccctgtgccctccacaacacccaagacaaagctgggcacatgcagcatgctcgataggggc

SEQ ID NO: 931836 - DNA, 692 bp, Homo sapiens
gtttggtcagttccaggtttgaataatgacacctctgttcactacctagtgatcttgaccaggcttctctaagcctcagtttcctcatctgtgaaataaaaagaatacctatcttattgtgactattattaaagaaatgaaattgtgtatgtaaaatgcttggcaaacagaaagcactcaagaaaagctaacttatggctgggtgcggtggctcatgcctataatcccagcactttgggaggccaaggcgggtgatcacctgaggtcatgagtttgagaccagcctggccaacatggtgaaatgctgtctctactaaaaatacaaaaaaattagctgggcatggtggcatgtgtctgtaatcccagctactcgggaggctgagataggagaatcgcttgaacccaggagggggaggctgcagtgagctgagatcatgccactgcactccagcctgggcaatagagyaagactgtgtctcagacaaacaaacaaacaaagaaaaaacaaacaaaaaaaagaaaagctaacatttctactgactcttcctagctgatttgtgaaaacaaggtgatgggccaatttggagaaaaatatgggtagaagttggtgacctgacttcacttagccaagtcttttattcactgaccatattgccatcatcttacctgtgttccagaactggttaattgtt

SEQ ID NO: 931837 - DNA, 654 bp, Homo sapiens
gagtcctaggccggacacagtggctcacgcctgtaatcccaacacttttggaggccaaggcaggtggatcacttgaggtcaggagttcaagaccagcctggccaatatggtgaaaccccatctctactaaaaatacaaaaaaattagatgggcgtggtggcacatgcctgtaatcccagctacacaggaggttgaggcaggagaatcgcttggaccaaggaggtggaggttgcaatgagccaagattgcaccactgcattccagcctgggtgacagagcaagaccccatctcaaaaaaaaaarcgggggcagggcggggcggggagaatccttttgacctgtgaccgttacttctcaaggttaggcatttattcattcagcaaatccttcatgaacacttattatgtttcacatgtgataatagaaattcaaagttaataatattgagagaaaagggctaattgagagcaatagatggctttggcttgatgttcctcccatcgtgactgggtgtccaaatccttctctcccatctcactcaccaaacacctaaatccctatacacagccctccaaaatccctaagggctacctgtcacttgttacaggctggaagatttccgcctgagggtgtaaactgcacagcctccttcat

SEQ ID NO: 931838 - DNA, 431 bp, Homo sapiens
atactagatcagctaatatgcaacccatttccatgcatgtgagaccagaagaaccaagttgctggcccacagactcatgcactaaataaatttttattgtttcaagaggcattttgtgttgtttattatgcagcattattatggcaataggtaattagtacctataaggaaygtgctactgtagcataaaacagacatatgtggaattagctttggatgaagtaggtagcaaacagaagctggaaaagtgtcaatgataccactaacaaagcctggaaaaatgatgaggcaactcttagaacaaagtgaaaaaatgatcacccatgctacgtcggcatgaaacatctgttagaactggtcacttaaaataacttgaagatgcaaaatgtaccttacgaatttttggacttgatctcaggcagaaatgtgaa

SEQ ID NO: 931839 - DNA, 431 bp, Homo sapiens
atactagatcagctaatatgcaacccatttccatgcatgtgagaccagaagaaccaagttgctggcccacagactcatgcactaaataaatttttattgtttcaagaggcattttgtgttgtttattatgcagcattattatggcaataggtaattagtacctataaggaacgtgctactgtagcataaaacagacatatgtggaattagctttggatgargtaggtagcaaacagaagctggaaaagtgtcaatgataccactaacaaagcctggaaaaatgatgaggcaactcttagaacaaagtgaaaaaatgatcacccatgctacgtcggcatgaaacatctgttagaactggtcacttaaaataacttgaagatgcaaaatgtaccttacgaatttttggacttgatctcaggcagaaatgtgaa

SEQ ID NO: 931840 - DNA, 431 bp, Homo sapiens
atactagatcagctaatatgcaacccatttccatgcatgtgagaccagaagaaccaagttgctggcccacagactcatgcactaaataaatttttattgtttcaagaggcattttgtgttgtttattatgcagcattattatggcaataggtaattagtacctataaggaacgtgctactgtagcataaaacagacatatgtggaattagctttggatgaagtaggtagcaaacagaagctggaaaagtgtcaatgatacyactaacaaagcctggaaaaatgatgaggcaactcttagaacaaagtgaaaaaatgatcacccatgctacgtcggcatgaaacatctgttagaactggtcacttaaaataacttgaagatgcaaaatgtaccttacgaatttttggacttgatctcaggcagaaatgtgaa

SEQ ID NO: 931841 - DNA, 464 bp, Homo sapiens
atggtggatgggaggcaggactggattgcagctcccacttggacagacaaagcagcgtgtggaggcttgtatcatgaactttgactgcaggaataaatcaggaacactgagagaacccacagaccctcagaaagaagcggattgctcctgcaggtctcaggagacaccccaaatgctgtgggagcccaaactgcaaactgtggaagtgggaaaggggaatagtcagctcctgaacacacatcctcactggggaacctaaaggtstagatcacaggagaagattttgaccttacttggagctgagtcaatttagagagccaagtgacatacactgctagagaaagcagggcgtaaggccctgtgggctcactgggttccctagccatccatttgttgccttgcctcacaggggtccttgaggagggctaccagaggcactggcaaatggtcacaaagagaaggaa

SEQ ID NO: 931842 - DNA, 503 bp, Homo sapiens
agattgctaagtccgtaaaggtatgctcccagagttctaacccagtaccaaggaaagatctggatttactcaataaaccatgagcatatattcaacgcacacttcctctctgccaggctctgcaccaggtaatatactttcttaggtagtaattatcagatttaaagtgctaattatagttaacatataattagacaagcacactagagggcagtgtctgttggtaatggtyagtcttttaggaccttagagctgcaggtcagggttctaagaagtgaatcactctctttgataattatcaaacctaacaacgaccatacctcctaagcacatctcagtactaaagttcattgactgtcagacttttctcagtgtttgctcagacaaaaggaagacgagctttgaaagctgtgatgggacttgagacactcctttatatgctagcagcatataaacaaaatcacaaaaaatcttggctttccactgaccatcatcccaggtaa

SEQ ID NO: 931843 - DNA, 503 bp, Homo sapiens
agattgctaagtccgtaaaggtatgctcccagagttctaacccagtaccaaggaaagatctggatttactcaataaaccatgagcatatattcaacgcacacttcctctctgccaggctctgcaccaggtaatatactttcttaggtagtaattatcagatttaaagtgctaattatagttaacatataattagacaagcacactagagggcagtgtctgttggtaatggtcagtcttttaggaccttagagctgcaggtcagggttctaagaagtgaatcactctctttgataattatcaaacctaacaacraccatacctcctaagcacatctcagtactaaagttcattgactgtcagacttttctcagtgtttgctcagacaaaaggaagacgagctttgaaagctgtgatgggacttgagacactcctttatatgctagcagcatataaacaaaatcacaaaaaatcttggctttccactgaccatcatcccaggtaa

SEQ ID NO: 931844 - DNA, 631 bp, Homo sapiens
cagctgataaacaccttcagcaatgttttaggatacaagaatcaatgtacaaaaattactagcatttctatacaccaacaatagccaaaccaacagccaaatcaaaaacacaatcccattcacaattgccacaaaaagaataaaatacctagtaatacagcttaaaaggaaggtgaaagatctctacaatgaaattacaaaacactgcttaaagaaaacagagatgacacaaacaaatggaaaaatatccacgttcatggataggaagaatcaatatcattaaaattgccatattgcctgaagcaatttagagattcattactgtcaaactaccaatgacatgyttcacagaactagaaaaaaactatttaaaattgatatggaaccaaaaaagagcccaaataaccaaggcaattttaatcaaaaaagaacaaaactggaagcatcatgttacccaacttcaaactatactacagggctacagtaaccaaaatagcatgggactggtacaaaaacagacacatagaccaattgaacagaatagagagcccagaaataaggccacacacctacaaccatctgatctttggactccttattcaataaatggtgctggcataactggctagct

SEQ ID NO: 931845 - DNA, 595 bp, Homo sapiens
ttttaaattaaggccttgaactgcttggatgagccccactcacatatggaagataatatgttttactcaagtctaaggatttaaatgttaatctcatctaaaaaatacctttacagaaacacttagaattgttccagacttgtctactggtagttctttaagtggtctatcatgaccctttgacataaacccatcattgtggttttttgttgttgttgttcttcttctttttgttttttgagaaattccttaatttctgacacacaataagcaactcagtcttataccgtatacttcctgctagagtcataagttagctatttctccaagcatcctgtattgaagaawtgtattagaaactaaggcttccgggcgtggtggcgggctcctgtagtcccagctactcaggaggctgaggcaggagaatggcgtgagcctgggaggcggagcttgcagtgagcagagatcgtgccactgcactccaacctgggcgacagagtgagactccgtctcaaaaaacaataacaacaaaaaaaaagaaactaaggcctgcatgctaagcattcttcggctactgggaagttgttgcttctgg

SEQ ID NO: 931846 - DNA, 645 bp, Homo sapiens
acccaggagcaacacagagccgggacaacctcccatatcaagggaaacagtgagtgaatgtgtgacctgggaaaccccacttctcccacagatctttgcaaccctcaggtcaggatatctccttgtgaacccacttcaccagggccttcagttggacagacagagctatatggatttttggcactcgtggagacgctgggaccttagatacctgggctccagacttcctggtaaaagtaactgcaactccagcaaagtgggaggttagacccgtgcatataacccaaggaaataggctgaatccagagggctcagcagcgacagcctgaaggccccacttccatgacacctcacaggataagacccactggcttggaattccagccagctcccagagcatcattgcacttcctaagaaggagatcctggtgggaggggcaggcagccatctttgctctttgggcaccttagcttttscagccttcaggctttggagaatctgagctgaccaggggaagggatcctcaagcacagcacaacagctctaccagaatgtggccagactgctgctttaagcaggtgcccgatcctattcctcctcactggataggaccttccaacaggggcctccagccacccctgccc

SEQ ID NO: 931847 - DNA, 794 bp, Homo sapiens
atgagggagggtgagagtggtcagaataaggactaaagaggacatggagaggggcgaggagctttgaaaaggggggttggggactaggaagtcagacttgattaaccccagcttttgccacaaatcaaccctgtcagcaccccctgcagatacacagaagtcattgtattggggctgtgtcatggcaatctataaagatctttcaaactgaccatttttactataaaggaaatgatatccgaacgtaaattaaggagttatcactgcctttcaagattctggggaagtctggagttgtgtyagtttttgctgcataaccaaaccccctccccaccccctacaacttagtggcttaaaataacaaacatttattatttatttattattattattttttgagatggagtcttgctctgtcactcaggctggagtgtagtggcactatctcagctcactgcaacctccacttcccgggttcaagtgattctcctgcctcggcctcccgagtagctgggactacaggcaaatgccaccacgcccagctaattttttgtatttttagtagagatgaggtttcactgtgttagccaggatggtctcgatctcctgacctagtgattcacctgcctcagcctcccaaagtgctgggactataggcatgagctaccgcgcccggccctattatttcttgtaattctgtgggctggccaaacagttctattctgaaccaccttggatagggctggttggtctaggatggcctcatttactgttgtcgcagataggatagccgg

SEQ ID NO: 931848 - DNA, 854 bp, Homo sapiens
cccccacaggaatgcagcctggaggcacctatagtcagactttctggaacaattcagggtgagtgcagccccacaggaggagcacactccagattcaggcctgcatgagaggcagagacacaattccctcctacttggaacatcaacattcctatagatgaaaagaggtgcctgtctgatctgaatagctgaaacagtaggacaggaatgaggctgggaggtgaatagctttcctgctgacctggcaagggagctgaggtagctcccactcttcaccctgataaaaccttagcacagctacttgagagctcccccagctaccatcatcaaggccrggacgttggcccaccattcggtattacatctacccacctcccttagccacaactgagccagctaaagaatttataaggtttgttattaagctactcaaagagataccagaggaaggtgaaaccaacttctaaaaattaaaaaaaatatatacagggtatggatgcaaaattttccagagaaatagatatcatgaaggaaaaacagtcacaacttctggaaataacagacacaattagagaaatacaaaatgcacaggaaagtttcaacaatagactagaacaagtagaaaagagaaatcagagcttgaagacaaggctttcagattaacccaatcagaccaagacaaataaacttttttttttaataacaaagcctgcaactaatttgggattacgtaaagcagtcaaatctaagaataattggtattcctgaggaagaagagaaatctaaaagtttggaaaaattatttgaggaaataattatgctaaacttccctggccttgttatagatctagaca

SEQ ID NO: 931849 - DNA, 659 bp, Homo sapiens
agttcattcatgatttggctttctgcttgcctgttgttggtgcatacgaatgctagtgatttctgcacattgattttgtatcctgagactttgctgaagttgcttatcagcttaagaagcttttgggctgagacgggagggttttctagatttaggatcatgtcatctgcaaacaaagataatttcacttcctctcttcctatttgaataccctttacttatttgtcttgactgattgccctggccagaacttccaatactatgttaaataggagtggtgagagagggcatccttatcttrtgctggttttcaacaggggtcctttcagattttccccattcagtatgatattggctgtgggtttgtcatacatggctcttattttgaggtatgttccttcaatacctagtttattgagagtttttaacatgaggggatgttgaattttatcgaaggccttttctgcatcttaaaatacattaataactgaagaaattaagtacctttcaaatattttttaagatttggaaacatgcaaaaaacaaggtcagaaggagccaagtcagaactgtaaggttaatgcctagcgatttcccatcaaaactcttgcaaaattgtcctcatttgatgaggaattggcagaagcattgttgtggtg

SEQ ID NO: 931850 - DNA, 679 bp, Homo sapiens
ttcattcatgatttggctttctgcttgcctgttgttggtgcatacgaatgctagtgatttctgcacattgattttgtatcctgagactttgctgaagttgcttatcagcttaagaagcttttgggctgagacgggagggttttctagatttaggatcatgtcatctgcaaacaaagataatttcacttcctctcttcctatttgaataccctttacttatttgtcttgactgattgccctggccagaacttccaatactatgttaaataggagtggtgagagagggcatccttatcttgtgctggttttcaacaggggtcctttcagattttccccattcagtatgatattggctgtgggtttgtcatacatgrctcttattttgaggtatgttccttcaatacctagtttattgagagtttttaacatgaggggatgttgaattttatcgaaggccttttctgcatcttaaaatacattaataactgaagaaattaagtacctttcaaatattttttaagatttggaaacatgcaaaaaacaaggtcagaaggagccaagtcagaactgtaaggttaatgcctagcgatttcccatcaaaactcttgcaaaattgtcctcatttgatgaggaattggcagaagcattgttgtggtggaggaggactctctggtgaagc

SEQ ID NO: 931851 - DNA, 708 bp, Homo sapiens
acaaatgtgtgccaccatgccccgttaatttttgtatttttaatagggacagggtttcaccatgtcggccaggctggttttgaaccctgacctcaggtgattcccctgccttggcctcccaaaatgccaggattactggcatgagccaccacacccagcctttgctttccttttaaacatatgttctaatttcaaaccatctctttgtgaatgcataaaattgaagactttcaaaatcaaccaggccacctctttaatgatttgctgcttagaaatttcttctgccagataccttaaatcatctctctcaagttcaaatttccacagatctctagggcagggggaaaatggcaccagtctctttgctaaagtatagtgagtcacctttattccagtttccaacaagtttctcatccctttctgagacarcctgagcctggactttattgtccatatcactatcaccattttgatcaatgcaattcaacaagtctctaggaagttttaaactttcccacatcttcctgtcttcttctgagccctccaaactgtgtttcaacccttgcccgtcatacagttccaaagtcacttccacatttttgggtatctttacagcagtaccccactctctgcagtaccaagcactgtattagtctgttctcagaatgcaataaagaaatacccaagactaggtaatttatagaggaa

SEQ ID NO: 931852 - DNA, 709 bp, Homo sapiens
tagcttgataagttcctgtttttcctcaagttgcaaaacctgtcacagtatgattaactgcctttgttctgcttctgtaagcccgtttgcctgccctgtaagttttgcgccactagatggcctacccccttggttgcatgtataaaagtcaagccctrtctttgttcagggctcagctttttcaatgtgaatctgctgggcctgagtgcactcaataaatcaccctatttcacctgtttggtctctccagtcctctgattcctgcagtatttttctgggggctcctgtgggattggagatgacaggtttactgtctcctttgcctgtgggacttgaaccccaggcaaggggagacccatgacccctggtgccatcagaagaacttcaacgcagagaggagattggctgtcctgcaactcagtgcccttccctgatagtgcaacgaaatctaaggggctgtaggacgattcttgggacagtgtgcttcaggaccatggtaagatttggggcccaaggcaggacccatcccataaggatggaaggggagcctgaccacttcccagggtgtaactagtagctcgacacaggatgcgagactggctcgcaaagttggggaaacttacaccccacccgacccaggatgtgaaagtggtttgcaaagttggtccagaaagcaactgggaagtgtgtgactgcttatgaaagaggc

SEQ ID NO: 931853 - DNA, 558 bp, Homo sapiens
gagctaggaggtagttgatggccagtctattttggtagatggcatttctcatttgtgtagcttgccaggctagctgatttaagacccttgcagcatcattagtaattagctcaagtactgcctgtaaccttatgatgcggttgagcatatatataggggtgcagtatccccatgttccatattctgcccaggtggctgggccatagtattggattattctttcagggggcaattcattgtctttccacttccctatggttatgccatctcctgtggttatgcccctcttgcttttccttttagttacatcatagwtggggtaccgtaagacttccccttgccttagcaggattagaaagaaagagggcctaattgttccaagtacacaggcccctgaccatttagctggcagttgtcaatatgcctgtggcccacagttccagtagaggccagagggtgcctgccaggtattggagcttcaagctggtaccaggagtggtttaaagaagggaaacgggagaatgggcctgggtgcggtgatttggagtcattcttttt

SEQ ID NO: 931854 - DNA, 595 bp, Homo sapiens
tttaaactgttggtcttctgtcggccttcctccaaaggaacatacagccttctgccaggacaactgggtgctggaggaaaggaaataatcaggccttttagggactactggacagtggctctgaactgactagttctaaggaatccaaaacatcactgtggtccacctgtcagagtaggagtttatggaggtcagatgataaaccaagttttggctcaagtctgtctcacagtgggtccagtgtatccctgaacccatcttgttatttccccagttccggaatgcataattggaacagacttactcaacagctagtagcatcacctcattggttccctcacctgtggagtgagggctattatggtgggaaatgacaaagcgaagccactagaactccctgyacctacgaaactagtcaatcagaagcaatacagattagtattgcagtaattagtgccatcatcaaggacttgaaagatgaggtcgtggtgattcccattacatccccattcaactctcctatgtgacctgtgcataaaacacacggatcttggagaatgacggtggattatcataggtttaaccaggtagcaac

SEQ ID NO: 931855 - DNA, 591 bp, Homo sapiens
ggacatcaaacactggttcaggcctccctctatgcggcctttcctccggcagggtagacttcttacttggctgttgatttccaagagaaagagtcccaagcacacgaaaacagaagttgcagatcccatgaggcccagtctcaaatcacacaggatcccttcatccacactggattggcccaaacaagtctgagtgccagccaggactcaackgtccccctgtagatgggaggatagcacagaatgggcagccgtctgtaagccactacacatcaaaccctttcagggaagataattttaaatagaagtggtttcagagtcctctgcattttcagggcacccaagtgtagatgtgctttggcacttgtcactctgcactgtaactacctgcttcacttgtccacgtaagtccctgtggacttcttttttttgaggacatagatgtgtctaactgtacatccagcacctaggccagtgtgcaatagaattcaagaaatgcttattggataaatggctgaatatgtggataaaatatcggtcacaagtacatcgagaattctttgtagagttgctgcttcctggttaactcag

SEQ ID NO: 931856 - DNA, 573 bp, Homo sapiens
gagactgggaagtaggagagtgagactagtgagttatctgctggaaggtgtgtgataaattagcaataggtacaaagaaaactaagcaaatgttaatgcaattaacaacttgggaaaaaataatacgaggccgggcacggtggctcacacctgtaattccagcactttgggaggccgaggcaagtggatcacctgaggtcaggaattcaagaccascctggccaacatggtgaaaccccgtctctactaaaaaatacaaaaattagctgggcgcagtggtgcacgactgtaaccccagctacttgggaggccgaagcaggagaatcacttgaacctgggaggcagaggttgcagtaaaccaagatcgcaccactgcactccagcctgggcgacagagtgagactccgtctcaaaagaaaaaaaaagaaaagaattgtaatcttactgcagtacttggttagtggtaagcaatatgcacatggaaacaatatttacataggcataatcacataaacactgaatattactctaaccagaaacactgactagactgtatcaggagaccaagaagag

SEQ ID NO: 931857 - DNA, 789 bp, Homo sapiens
tttgtaaatctctatttgattattttctcttctggaaagcatcacgtccctatttcactacaatattgaatgtaattattaaatatacccagtaacatagtgatgtacttcttcaacacttaatgaaaaaaggtcattaagtgttaaaacccactgtccagtataaaatattttaaataaattaaagacaagataacaatgtttcttctaaaacacattctagcaagtcacttctcagctcaatattcccctgttgcttcctgcttacccaactaagatcttcaggccctcacactgtggcctgcaaggctgtacagggcctggggcacagttaaccccctgtcctctttccctatactctcagctctctcactctgccctggctacactgaactatcttctgttccttgaaaagcccaaggacattcacacttcagtactctgtgtactgttccctctgcctgaaatagcagcccctgagccccttccatcctttccatcaggcctccactcaaatarcaccttatcaggaaggattttcctcttcacctgaaaaaatcgctccctttacctttatcttccttcactctccatctgctctaccctggtctgctattcttcccatcccttgtcatggcctgatatacttcatattttagatgtttttatcttttaattgtctactagaatgtaaactccatgaaagagggaatttgctttgtttactgctatatcccctggaagtatctggcacataccctcactcagtaagtaattgtgaaatgaacg

SEQ ID NO: 931858 - DNA, 553 bp, Homo sapiens
tttcccctcagaaaatgggtttttcttttctatcccatcatcaagctgcaaattttctgaacttttatgctctggtttccttttaaaactgaatgcttttaatagcacccaagtcacctcttgaatgttttgttgcttagaaatttcttccaccagataccctaaatcatctccctcaagttcaaattttcaaagatctctagggcaggggcataatgccaccaatttctttgctaaattgtagcaagagtcacctttactccagttcccaacaagttcctcatctcagatggagatctgagatcatctcggcctggatttcattgtccatatcattatcaacagtttggtcaaagccattygacaagtttctaggaagttccaaactttcccaaattttcctgtcatttgagccctcagagtctctaggaagttccaaactttctcatatttttctatcttcttctgagcctccaaagtgttccaatctctgcctgttacccagttccaaagtcgcttccatatctgtcggtatctttacagcagcacccta

SEQ ID NO: 931859 - DNA, 768 bp, Homo sapiens
  misc_feature 686: n = A,T,C or G
cctgctctaagctgaaggagcagaagtcgctcaccaaagagaaggaggagctggagctgctgaaggaggacgtgcaggactacagcgagaacatgcaagagatcaagaaggaactctcaaagactggtaggtgaagaaaaatatgtgaaagcatctaaagccaccaagagactgacagagggtgcagcagatgatcgggcagatcgaggkcttgatctcacacctggagatggaccagggcctgcaagctgggcctggcctagggcgcgcccgtaggggagaacatcatcagtgtcactgagctcatcagcaccatgaagcaagtcaggcacattccagaaagcaagctcaccagcctggcctcagcactggatgaagacaagaatggcaaggtcaacatcaatgacctcatcaatgtgattgagttggtggacaaagatgttcatgcctccaccagccaggtggccaagattgtagcgaccttggagaaagaagagaagatggaggagaagactgagaaggagccgcagaggtgaagagctagagctgctggcctagccacctgtcctcctgctgccccactgccctggcgagggccgtgagagcaattgctttgaggtgattctcagtgctcatctaatacattggctggaatgaatcagagacttccataatcaagtaaattntaattttcatcattccatggatattcacttagtctggaatcccagaacccctccacagaattgtgttggaaccacactgtgg

SEQ ID NO: 931860 - DNA, 591 bp, Homo sapiens
gacataagcataatttggttttgatagatagcttaagaatatcagcttccttcttctagtcaacaataaaagaatgggaaacagtaagagcacaatgcacagagtttggttctgagcaccaatgtgcactcactctcaaactgggagcctcctgcgggcagggctggtgcctgtgttattccatgtgatgtgggcaggtgatgtaacccctggacataggctttgccttcctaagagggcctgatgctttccagatgagattccacatcttcttacgttgcggtggagaaaaccagcttctgaacctggaagcatcaccttccygtgcccggcgcagaacagctcctggaagccaaacacctctagaaggggagggagcagcatgaggaaggtaagagagacagggtcctgctcggaaggctccagttaggtggtgatggggactcactgctgggcaaggggcaccagaataaagatggggatcagttctcccctaactcacgtacttcctgcagagaaatcagcctgcaacgcaggatccaggcgaacagaggagggtgatagcaagccctccagtggggcagagggagg

SEQ ID NO: 931861 - DNA, 611 bp, Homo sapiens
tcctgagtctgagggggacatggtgaacctttatgtctagctaaggggttgtaaatacaccaatcggcactctatatctagctcaaggtttgtaaacacaccagtcagcaccctgtgtctagctcagggtttgtgaatgcaccaatcgacactctgtatctagctactctggtggggacttggagaacctttgtgtccacactctgtatctagctaatttggtggggacgtggataacctttgtgtctagctcagggattgtaaacgcaccaatcagygccctgtcaaaacagaccactcagctctaccaatcagcaggatgtgggtggggccagataagataataaaagcaggctgcccgagccagcagtggcaacccactcggtccccttcctcattgtggaagctttgttctttccctttttgcaataaatcttgctactgctcactctttgggtccacactgcctttatgagctgtaacactcaccgcgaacatctgcagcttcactcctgaggccagaaggactacgaacccaccgggaggaacaattccagacgtgccacctgaagagctgtaacactcacccgcgaaggtgcgcagcttcactc

SEQ ID NO: 931862 - DNA, 629 bp, Homo sapiens
aaggacaaaaaaccacacaccacatgttctcactcataggtgggaattgaagaatgagaacacatggacacaggaaggggaacatcacacactggggactgttgtggggtggggggacggtggagggatagcatcaggagatatacctagcattaggagttaatgggtgcagcacaccaacatggcacatgtatacatatgtaacaaacctgcacgttgtgcacatgtaccctaaaacttaaagtataataataataagaaaaagaaataaagcaagwagacaaggttagagaaaaaagagtaaaaagaaacaaacaaagcctccaagaaatatgggactatatgaaaagaccaaatctacatttgattggtgtaactgaaagtgatggggagaatggaaccatgttggaaaacactcttcaggatattatccaggagaactttccaaacatagcaaggcaggccaacaatcaaattcaggaaatacagaaaacaccacaaaaatactcctcaagaagtgcacacaagacatgtaattgtcagatacaccaaggttaaaatgaaggaaaaggtgttcagggcagccagagagaaagggcgagatagtcacaaagggctgcccatcagac

SEQ ID NO: 931863 - DNA, 606 bp, Homo sapiens
gtaaggtaaagaagatgacagatagctatttttccaggtatgtttgcctattttctagtatgatttaagaaatacaaaatgaaggttaataagaaaagattttaaaaaatatattttgaaaagtggggatcaacatgatggtcaactgtttcctaaagttacttaagatatgttcttacaatgattattttttcatttctacttatctgtagtatttttatgtctacttgtcaatagtattcaaaatayggctgcacctaaatttagaagactagcgataccaagactctttcagcctcatgattctatggcatatcactacatgtcagaaaatcagtaaccttttaaaaataaaatactctcataatcgttgtataaaaatattttgtcactactcttgttttatgcctttaccttatattatcaaaattttaattatatctatagatatgattccaagcatacgtatggatttgtttaatcatcttatcaagtttttttatttttaatttttaaatttattttatggttactaggcttccccagtaagaaaaagaatgcttaattgatgattaacatatttaataagaccagaaaatgcagtat

SEQ ID NO: 931864 - DNA, 606 bp, Homo sapiens
acaaaaaaagctactagaactaataaatgaatctagcaagtgtgtaatataaagtttgacaaagatcaattgtacttctgtatgtaatcaatgaacaatcagaaattgaaattaagaaagcataactatttataatatcataagaatgttaaatactcggttggggggaggtgggagggatagcatyaggagatatacctaatgctaaatgatgagttaatgggtgcagcacctgagcatggcacatgtatacatatgtaactaaccggcacattgtgcacatgtaccctaaaacttaaagcataataataataataataaaaagaaaaacaaaaacaaacaaaaaagaatgttaaatactcagagatgcactttactaatgacatgaaagccctacgatactgaaaactgttacacatttatgggaggagttaaagatttgaaaaaacagggagttatcaaaagactaaatactgttcaggtatcatttctccccagattatctatagattcagcacaatcccaatagcatcaaagtttttcccagaaattgaaaaactgattttaaaatcattatggaaataaaatggacctaggctagacaaa

SEQ ID NO: 931865 - DNA, 606 bp, Homo sapiens
acaaaaaaagctactagaactaataaatgaatctagcaagtgtgtaatataaagtttgacaaagatcaattgtacttctgtatgtaatcaatgaacaatcagaaattgaaattaagaaagcataactatttataatatcataagaatgttaaatactcggttggggggaggtgggagggatagcatcaggagatatacctaatgytaaatgatgagttaatgggtgcagcacctgagcatggcacatgtatacatatgtaactaaccggcacattgtgcacatgtaccctaaaacttaaagcataataataataataataaaaagaaaaacaaaaacaaacaaaaaagaatgttaaatactcagagatgcactttactaatgacatgaaagccctacgatactgaaaactgttacacatttatgggaggagttaaagatttgaaaaaacagggagttatcaaaagactaaatactgttcaggtatcatttctccccagattatctatagattcagcacaatcccaatagcatcaaagtttttcccagaaattgaaaaactgattttaaaatcattatggaaataaaatggacctaggctagacaaa

SEQ ID NO: 931866 - DNA, 731 bp, Homo sapiens
gccagcactaagggaggcctggcctttctctctgctgcagccgtggtggcttttgtcttgttgctgcaacatgcatagcacagtgtcacctcagaacctgtgcctggctgttccttctgcccccctcagaggctcttgttcccaatatccacttggctgcctgcttagtccttcacgtctttgctcaaaagtcacttctcacggccaggagcagtggctcacactgtaatcaacactttgggaggccgaggcaggcctctaaatagattagaataagggaatccagaacactggtggaagaggtgggtcaccattataagcaggggaggtcttattgagaaggtgacttttttttttgcttgtttgttttttgagacagagtcttactctgtcgcccaggctggaatgcaatgacttggtcttggctcactgcagcctccgtctcctgggttcaagcaattctcctgcctcagcctcccragtaactgggattacaggcgcacgccaccacactggctaattttttgtatttttaatagagatggggtttcaccatgttgcccaggctggtctcgaactcctgacctcaggacaatctgcctgcctcagcctcccaatgtgctaggattacaggcctgagccaccacgcctgacctgtttattacttcttgtatgtgaactcccattagagtgtcagctctacaagggcaaggatttgttcactgctgtat

SEQ ID NO: 931867 - DNA, 708 bp, Homo sapiens
gtctcctgggttcaagcaattctcctgcctcagcctcccgagtaactgggattacaggcgcacgccaccacactggctaattttttgtatttttaatagagatggggtttcaccatgttgcccaggctggtctcgaactcctgacctcaggacaatctgcctgcctcagcctcccaatgtgctaggattacaggcctgagccaccacgcctgacctgwttattacttcttgtatgtgaactcccattagagtgtcagctctacaagggcaaggatttgttcactgctgtatccccatcacttaaaacagcacctggctcctagtaggtgcccaatacatagtcatttagagctttgacccagccccagcttatgtagggtggctgagtcctttcccaggtagtggtgtaggctttggggcaagtgagaagtagtttcaagtttctcaaaagcgtaggccctcaaacctgtgtggaaggctcctatcccaaaacacatatccccaggaaaacctgttgtgccctcctgcggaggcacctcatgggactggtcttggtcttatgcccatccaggtagaaatgaaggaaggcagctcagttggcagagcacagatttggagcattctagaccctgcttcaagcagtgttgtctcaaaagcaaatcacctttcattttgggtgcccattctcattagctaatagaatacaat

SEQ ID NO: 931868 - DNA, 612 bp, Homo sapiens
ctctccaggagatcctcagtgtcatcagaagctgaaaaaaacagtgctgagaaacgtggcctgccgtctttccagctaagggagatggcccattcgaccctgggttgtcctctgcaaacgygctgctgcaggttgcatggcaccatctcctgattgcaatttgctttcctgagggagtgaactgactgaaattggatggtaataagttgctaggttattttccactttttagtttatgaggcttattcattttgctttaacattaaccactgccttccttttaaggagctggtgaggcagcgcatggcaacaggttcagggtgaggagtggcaccacctcctttcagtgaggatttgggaagggtgaaaagcaccctaatcttctcagccgcatgtgaacaaaccacctgtcaaggtgggtccttcctatagggaggttgatgtcagcccttcagggaggtctcagttttcttcctccacttcctaatcccttcattataattccttccacaacagaataagtttcttgagcaatgcagcaatatccagcaattttagatagacatttaccttttgacctagaaatctcacttctacgaatccatcctaaag

SEQ ID NO: 931869 - DNA, 736 bp, Homo sapiens
ttcagctggcaaagccagcaatgtatgtttacagtcctacctcaggggtatatcaactctctggctttgtgtaataatcttattcagagaaaccttgatcacttttagcttccacaagatatcacactggtccattacactgatgacattatgctgactggatccactgagcaagaagcagcaaacacactggacttattggtgagacatttgcatgccagaagatrggaaataaaatcaactaaaattcagggaacttctacctcagtaaaatttccaggggtccagttgtgtgtggtctgtcaagacattccttctaagatgaaggataagttgctgcatttggcaccccctgcaaccaagaaaaaggcacaatgcctagtggacctatttgggttttggaggcaacacatccctcatttgggtatgttactctggcccatttatcaagtgactcaaaaggctgccagttttgagtggggtccagaacaggagaaggctctgctacaggtcaaggctgctgtgcaagctgctctgacagttgggccataagacccagcagatccaattgtgcctgaggtgtcagtggcagatagggatgctgtttggagcctttggtaggtccgtataggtgaatcacagcagaggcctctaggattttggagcaaggttctgccatcttctgcagataactactctccttttaagagacagcttttggcctgttactgggctt

SEQ ID NO: 931870 - DNA, 735 bp, Homo sapiens
cctgcaaccaagaaaaaggcacaatgcctagtggacctatttgggttttggaggcaacacatccctcatttgggtatgttactctggcccatttatcaagtgactcaaaaggctgccagttttgagtggggtccagaacaggagaaggctctgctacaggtcaaggctgctgtgcaagctgctctgacagttgggccataagacccagmagatccaattgtgcctgaggtgtcagtggcagatagggatgctgtttggagcctttggtaggtccgtataggtgaatcacagcagaggcctctaggattttggagcaaggttctgccatcttctgcagataactactctccttttaagagacagcttttggcctgttactgggctttggtagaaattgaatgttatcctttgggtgatcaagtaaccatgcaacctgaactgtctgtcatgaactgggtgctttctttcccatttagtcataaagtgagttgtgcacagcagcattccatcatcagatggaagtggtatatatgcgattgggctcaagcagatcctgaaggcacaagtaagttacatgaggaagtggttcaaatgtccatggtctctactccttccaccctgccttttctttcccagcctgcaccagtggcctcatggggagttccctatgatcagatgacagaggatgaaaagattagggcctggttcacagatggtcctgcacaatatgcagat

SEQ ID NO: 931871 - DNA, 816 bp, Homo sapiens
caggcagcaagaggcaccagcacagatgctggctctatgaaaggctgcggctggatcagatgtaacatgagtggcttccattgagggcactcgcatctggacaacgggaatgcagtggcacctggaagcttagagattccaggaaccacagagccccaaagaggtgtcactgccctggcttggggagcccctaggtctgggctccctgaagggctgcagcccttctctccttctcatcacctgcaacatggtgagaagtgggcaggggggtatgtttcagcctgtttttgttacagctctttcagttccaccattcagcaggtcccaagttcttgtcccacgtccaggaagaatgaggtatgcagacaactggagggtgagcaaggtggagaggattttcactgagcaacagaacagctctcaggagacctgaagtgggtagcttatttctgcaggcaggttgccctgatgagtgtccagatctcagtggagaggagactctgcagtgggtagctcctttacacaggcaggttgtctcaatgagtgtccacctctcaacagagaggagacccacagtgggyagctcctttatgcaggcaggttgtcccaatgagtgtccagctctcaacagagaggagacccacagtgggtagctcctttacacaggcaggtcattccaatgagcatccagctctcagcagagaggagacccgcactgggtagcccctttctgtaggcaggtcatccagactagtgtccagctctcagtggagaggagacccatggtgggtagcccatttccacaggcagatcatc

SEQ ID NO: 931872 - DNA, 648 bp, Homo sapiens
gttttggtttttggatttttttgtattttggatatttgcatatacataatgagatatcctggggatgggacccaagtctaaacacagaatttgtttctgtttcatatgtaccttatagacatagcccgaaggtaatttaatacaatagttttagtaattttatgcatgaaacaaagttttgactgtggtggttttttttgttttctgttttttktttttttgagacagagtctcgctctgtcatccaggctggagtgcagtggcgtgatcttggctcactgtaacctccgcctcctgggttaaagcaattctcctgcctcagcctcccaagtagctggggttacaggcatgtgccaccatgcctggctaatttttgtatttttagtagagatggggttatcgccctgttggccaggctggtcttgaactcctgacctcaggtgatctgcccacctcggcctcccaaagtgctgggattacaggcgtgagccaccgtgcctggtcagttttgactgtgttttaactgcaacctgtcagtctcacttgaggttagttgtggaattttctacttgcggcatcgtatcggtgctcaaatagcattgaaacttgcaaaaatagcagaagctcctcttgacaggtgtcaacgtg

SEQ ID NO: 931873 - DNA, 732 bp, Homo sapiens
gtgagagggcagtacttgcccccaaaattgcagccaccaatgacagcatctaacgacccagccagtttgaggaagccatctttccaccttcaccaccttgatcattcactcttcagccaagaagatgtactgtccaagccatcccttctcccatgggctctgatttctacagatgatagaggtagacatcttcctgattccaagtctgcaactagctggttcagggtcagagtaagtaataaggccagagcctggtccaaagtcaatatcaggctctggttcagagtcaagattaagggcagagccagaggacaaaggacagaacctcctccttctcatgtgaaaggccagatccacacgctygcgtatgcatgtgaatccctctgtgcgtgagcatataaatgtgtgtgtgtgtgtgcgtatgtgtgtgtgtttgtgggtgagagccctcttactagaggctatggccaagttgctctgtttttcaggcactagaagctcagggattatcaagcttctcacaggtttatgcaaatgtttgaaacatgaaaaaaatatagaaagctataaaaaatgtaaatactaaatatagtaaatgttaacagtatgtcatagtcatagtcaactgaagttcagccatgttcttgtgtggtcaagtttaaaatgtatttatgtgggatgtgggtgtgtggaataggtttgatgtggaatgaggtagtcaggacctttgga

SEQ ID NO: 931874 - DNA, 632 bp, Homo sapiens
aatgatgtcactgtctctgttttacctatgaaaaagcaaactcatacagattgcagctagtggttgaatttacttatttcttttttggtttttagctgatttctctttggttgcctggatagcattaacacctggaaataaggaaaattttattttctcctgatacttgtagttcctttgtttttataaccttattgaattgcccagaacttctagagcataattacgtagaataggcatccttgtctcattcctgaatttcctggaaattcytatggtattttactgctaagaatgcagttggctgttggttttgtatatatgccatgttttaaaattattcttctgtttctagttcataaaagatttgttccccatttgacatctttcaaagagacctatttgctgccatatcccatcactgatgattgggagggaggatttagctcgattctctattgctctgctcctaatagaattgtaggggccgaggtgaccaggaggcccgacactcatggagagacctgaaataggttcctatcctggcccctggacctcatcttggaacagctttggcttgaggtactaggacatctagggctttgagtcagtggttggcatcatcgatgtgg

SEQ ID NO: 931875 - DNA, 631 bp, Homo sapiens
gcgtgtgccaccacacaggctaatattttcttttagagatgagttctcactatgttgcccaggctggtcttgaactcctgggctcaagcagtgctaccaccttggcctcccaaagtgttggaattacaggcatgagccaccatgcctggctcacttagtgtcattctaaagccctcattcttaaacatactgtttattaaagcagcagaaattatctgctcaaaaatatttgctcagtctattaamttctccttaccttgaacacaaacacaagggacatacgactttcatatcaataagccaagttatttggcattattgacatgttgttaaatcttacagcttaacaatctttaacataagaggactattgcttttgagtggactgcacaaaaatagtttttccacctagtcagctatggggtgggtagggagtgagaagcagcagggatactttaggagatgataggtttatatagttttgtccaagaactggttaaagccttgcaggtctgggacctgattatccattcactcagggagtggtcctgggagaactgcgttatgcaaaagaaactcccagtaatcattaggaagtagattgctgcatatctagttttcggtagtggag

SEQ ID NO: 931876 - DNA, 589 bp, Homo sapiens
attttttttttttttgttaaagactcagcgtcttgctctgtttaccagactggactgcagtgatgtgtgaacatggcctcaaactcctatttatttatttttggagacagggcctcacttgtgccaaaggctggagtgcagtggtgcagtcataggtcactgcaaccttgacctcctgggctcaagaaatcctcccacctcagcctcctaagttgctgggactacagatgaatgccaccatgtttggctgatttttacaattttaaattttttgcctgggcgcagtggctcatgcctgtaatctcagcactttgggaggctgaggcgggcagatcacctgaggtcaggagttcragaccagcctggccaacatggcaaaaccttgtctctaccaaaaatacaaaaatttgctgggtatggtggtgcgtgcctgtagtcccagctacttggaggctgaggcacgataatcgcttgaacccaggaggcagatgttgtaataagctgagactgcgccactgcactccagcctgggtgacagagtgagacccgtctcaaaaaaaataaaaataaataaataaataaatttttt

SEQ ID NO: 931877 - DNA, 593 bp, Homo sapiens
agttaggactacaggcacgcaccacaatgcccagttaatttttgtatttttagtagagacggggttttaccatgttggccaggatggtctcgaactcctgacctcaagtgatccgcctccctcgacctcccaaaagtgctggaattataggcatgagccactgcacccggcctaatttttattaaaaawttttttttttgtataggtagggtcttgccatgttgcacaggctgctcttgaactcctggcctcaagcaatcctacctggacctcccaaagtcctgggattacaggtataagacactatgcccagtccagatgcagctttgtattttatttgtttgtttgtttgtttgtttttgagatggagcctcactctgttgcccaggctggagtgcagtggcgcaatctcagctcacagtaacctctcaggttcaatcgattctcctgcctcatcctcccaagtagctggaactacaggcataagccaccacgcccggctaatttttgtatttttagtagatacggggtttcaccatgttggctacgctggtctcgaactcctggcctcaggtgatccacccacctcgacc

SEQ ID NO: 931878 - DNA, 730 bp, Homo sapiens
aagttgcagtgagccgatagtgccacctcgctccggactgggtgggtgaaagagcaaaactccatcttaaaaaaaagtggctgggcgcggtggctcacgcctgtattccagcactttgggaggctgaggtagaacgatcacaaggtcaggagatccagaccatcctggctaacacggtgaaaccccgtctctactagaaatacaaaaatattagccgggcatggtggcaggcgcctgtagtcccagctactcgggaggctgaggcaggagaatggcgtgaacccgggaggcggagcttgcagtgagccgagatcgtgccactgcactccagcctgggcaacagagcaagcctctgtctcaaaaaaaaaaaaaaaaagtwtcctagtaacctagcccaaagttttttccagttactcaccaatcctacttttggccccttcccgccaccccgccccctctggttcccaagtgcaagtgtggtacctagcagacttggcaaactggcctgtttgaatcttagttccctctagcgacagaaccattcagatggagcacctatttcattcatgaaacatgactagttacagtccattgagagataaaatgccagatcctaagaaccaaatgtctctcctgcactacacagtagtggcacaacccaatgccccaaagctcctttgatcactttctttcaagtctctgccagccaggccatttgaggagcactccc

SEQ ID NO: 931879 - DNA, 538 bp, Homo sapiens
ttatgttcttctctaaactggttattccagttagcaattcatctaaccttttttcaaggttcttagcttccttgcattgggttagaaagtgctcttttagatcggaggagtttgttattacccaccttctgaagcgtacttctgtcaattcgtcaaactcattcttcgtccagttttgttcccttgctggcaaggagttgtgatcctttggaggagaagaggygttcaggtttttggagttttcagcctttttgcactggtttttcctcatcttcgtggatttatctacttttggtctttgatgttggtgacctttggatggggttggtgtggatgtcctttatgttaatgttgatgctattcctttctgtttgctagttttccttctaacaggcccctctgctgcatatctgctggagcttgctggaggtccactccagaccctgttcgcctgggtatcaccagcagaggctgcagaacagcaaagattgctgcctgttccttcctctggaagctttgtcccagaggggcaccaaca

SEQ ID NO: 931880 - DNA, 538 bp, Homo sapiens
ttatgttcttctctaaactggttattccagttagcaattcatctaaccttttttcaaggttcttagcttccttgcattgggttagaaagtgctcttttagatcggaggagtttgttattacccaccttctgaagcgtacttctgtcaattcgtcaaactcattcttcgtccagttttgttcccttgctggcaaggagttgtgatcctttggaggagaagaggcgttcaggtttttggagttttcagcctttttgcactggtttttcctcatcttcgtggatttatctacttttggtctttgatgttggtgacctttggatggggttggtgtggatgtcctttatgttratgttgatgctattcctttctgtttgctagttttccttctaacaggcccctctgctgcatatctgctggagcttgctggaggtccactccagaccctgttcgcctgggtatcaccagcagaggctgcagaacagcaaagattgctgcctgttccttcctctggaagctttgtcccagaggggcaccaaca

SEQ ID NO: 931881 - DNA, 577 bp, Homo sapiens
tggatttaagtcttgctgtttgtttcttattcatcctatgtgttctttgatctttttacacctcctttcctgatatcttttgaattagttaatactttaatacaatattaaagcatacagcattttaatacactatattaatacaatatatttaataaaatatttaattgtatctattgcctttttagttatacttcttgtttgttttttgttctaccttgarttaacattttacagttcacatgtaatgtaaaaagctaacaacacaaggctgtcacttaaccctacttccgtgttccttgtgttgattttgtcaaaaattttagttctacatatgttataaaactcacaatacattattattatattcactttgaacagtctattgtcttttagaatatcaaggaacaagaaaaagtattattattattattattattattattattattattttgagacagaatctctctctgttgcccaggctggagtgcagtggtgcaatctcagctcactgcaacctctgcctcctgggttcaaacaattttccccctcaatgttagagtagctgggacta

SEQ ID NO: 931882 - DNA, 577 bp, Homo sapiens
tggatttaagtcttgctgtttgtttcttattcatcctatgtgttctttgatctttttacacctcctttcctgatatcttttgaattagttaatactttaatacaatattaaagcatacagcattttaatacactatattaatacaatatatttaataaaatatttaattgtatctattgcctttttagttatacttcttgtttgttttttgttctaccttgaattaacattttacagttcacatgtaatgtaaaaagctaacaacacaaggctgtcacttaaccctacttccgtgttccttgtgttgattttgtcaaaaattttagttctacatatgttataaaactcacaatayattattattatattcactttgaacagtctattgtcttttagaatatcaaggaacaagaaaaagtattattattattattattattattattattattattttgagacagaatctctctctgttgcccaggctggagtgcagtggtgcaatctcagctcactgcaacctctgcctcctgggttcaaacaattttccccctcaatgttagagtagctgggacta

SEQ ID NO: 931883 - DNA, 774 bp, Homo sapiens
agaagcaggcaaatccaggtgctggcacaggtgctggctctgtggaagcctgtggctggatcagatgcactgcaagcagctttcactgtgggtacctgcatctggatgagcagaaagcattggttcctggaagcttgaagacaccagaaactctagagccccaaaacrggtgtcacaaccttgcctctggaagtccccaggtctgggatcctggaagggttgcagctcttctcacttgttgcctgcaacatggtgactgtgtgtatgtgtgtgtggggggggtgtttcaggcctttttgtgttacagctctttcagtcccaccaattggtggggcctgagttctcgtaccacatccaggaagaatgaggtatgcggacaactagagggtggacaaagcaaagaggtgacttactgagccacagtacagctctcaggaaacccaaagtgggtagctcctttcaacaggcaggtcatcccgatgagaatgcacccctcagcagagaggaggcctggcaggcaagttgtcctcatgtctctgtgagtctgtctgagactggggtttttatgggcctcagaagggagaaaatgcatgctaattggtccatgggtgaccatagatgggcccagaaaaagcacctttaagtactccctctgggcagtggattcctcccagaactgagagtctaggcttcaggactcccctggcttgaaagtggggcttcactgggagcttgccccttttcacccacaaccctgtctgcctcctgccacca

SEQ ID NO: 931884 - DNA, 669 bp, Homo sapiens
aatccaggtgctggcacaggtgctggctctgtggaagcctgtggctggatcagatgcactgcaagcagctttcactgtgggtacctgcatctggatgagcagaaagcattggttcctggaagcttgaagacaccagaaactctagagccccaaaacgggtgtcacaaccttgcctctggaagtccccaggtctgggatcctggaagggttgcagctcttctcacttgttgcctgcaacatggtgactgtgtgtatgtgtgtgtggggggggtgtttcaggcctttttgtgttacagctctttcagtcccaccaattggtggggcctgagttctcgtaccacatccaggaagaatgaggtatgcggacaactagagggtggacaaagcaaagaggtgacttactgagccacagtacagctctcaggaaacccaaagtgggtagctcctttcaacaggcaggtcatccygatgagaatgcacccctcagcagagaggaggcctggcaggcaagttgtcctcatgtctctgtgagtctgtctgagactggggtttttatgggcctcagaagggagaaaatgcatgctaattggtccatgggtgaccatagatgggcccagaaaaagcacctttaagtactccctctgggcagtggattcctcccagaactga

SEQ ID NO: 931885 - DNA, 766 bp, Homo sapiens
ccaggaagaatgaggtatgcggacaactagagggtggacaaagcaaagaggtgacttactgagccacagtacagctctcaggaaacccaaagtgggtagctcctttcaacaggcaggtcatcccgatgagaatgcacccctcagcagagaggaggcctggcaggcaagttgtcctcatgtctctgtgagtctgtctgagactggggtttttatgggcctcagaagggagaaaatgcatgctaattggtccatgggtgaccayagatgggcccagaaaaagcacctttaagtactccctctgggcagtggattcctcccagaactgagagtctaggcttcaggactcccctggcttgaaagtggggcttcactgggagcttgccccttttcacccacaaccctgtctgcctcctgccaccatctatatgtcattcatggtacccacactacttgtgcaaaaaggtacctgcaggcctgcactgagccacccttagcccctcatttggcctccctcccatgctcgtcagtgcccaaagcctggagggagctgaggcggctgggtgctggcatgtcagcaccaccccaccctgagcacatgcacatctggctgggttgccacagcacccaggctcagccacaactttgctctgccccagagcagaagccagtagttgggagaggccaggcagtggggataggcacttccaagcttgtgggtgtaggggggcttcccaggttcctgagagcacaaggatgcccgggtctg

SEQ ID NO: 931886 - DNA, 804 bp, Homo sapiens
ccaccaattggtggggcctgagttctcgtaccacatccaggaagaatgaggtatgcggacaactagagggtggacaaagcaaagaggtgacttactgagccacagtacagctctcaggaaacccaaagtgggtagctcctttcaacaggcaggtcatcccgatgagaatgcacccctcagcagagaggaggcctggcaggcaagttgtcctcatgtctctgtgagtctgtctgagactggggtttttatgggcctcagaagggagaaaatgcatgctaattggtccatgggtgaccatagatgggcccagaaaaagcacctttaagtactccctctgggcagtggattcctcccagaactgagagtctaggcttcaggmctcccctggcttgaaagtggggcttcactgggagcttgccccttttcacccacaaccctgtctgcctcctgccaccatctatatgtcattcatggtacccacactacttgtgcaaaaaggtacctgcaggcctgcactgagccacccttagcccctcatttggcctccctcccatgctcgtcagtgcccaaagcctggagggagctgaggcggctgggtgctggcatgtcagcaccaccccaccctgagcacatgcacatctggctgggttgccacagcacccaggctcagccacaactttgctctgccccagagcagaagccagtagttgggagaggccaggcagtggggataggcacttccaagcttgtgggtgtaggggggcttcccaggttcctgagagcacaaggatgcccgggtctgca

SEQ ID NO: 931887 - DNA, 766 bp, Homo sapiens
ccaggaagaatgaggtatgcggacaactagagggtggacaaagcaaagaggtgacttactgagccacagtacagctctcaggaaacccaaagtgggtagctcctttcaacaggcaggtcatcccgatgagaatgcacccctcagcagagaggaggcctggcaggcaagttgtcctcatgtctctgtgagtctgtctgagactggggtttttatgggcctcagaagggagaaaatgcatgctaattggtccatgggtgaccatagatgggcccagaaaaagcacctttaagtactccctctgggcagtggattcctcccagaactgagagtctaggcttcaggactcccctggcttgaargtggggcttcactgggagcttgccccttttcacccacaaccctgtctgcctcctgccaccatctatatgtcattcatggtacccacactacttgtgcaaaaaggtacctgcaggcctgcactgagccacccttagcccctcatttggcctccctcccatgctcgtcagtgcccaaagcctggagggagctgaggcggctgggtgctggcatgtcagcaccaccccaccctgagcacatgcacatctggctgggttgccacagcacccaggctcagccacaactttgctctgccccagagcagaagccagtagttgggagaggccaggcagtggggataggcacttccaagcttgtgggtgtaggggggcttcccaggttcctgagagcacaaggatgcccgggtctg

SEQ ID NO: 931888 - DNA, 607 bp, Homo sapiens
ctcagcagagaggaggcctggcaggcaagttgtcctcatgtctctgtgagtctgtctgagactggggtttttatgggcctcagaagggagaaaatgcatgctaattggtccatgggtgaccatagatgggcccagaaaaagcacctttaagtactccctctgggcagtggattcctcccagaactgagagtctaggcttcaggactcccctggcttgaaagtggggcttcactgggagcttgccccttttcacccacaaccctgtctgcctcctgccaccatctatatgtcattcatggtacccacactacttgtgcaaaaaggtacctgcaggcctgcactgagccacccttagcccctcatttggcctccctcccatgctcgtcagtgcccaaagcctggagggwgctgaggcggctgggtgctggcatgtcagcaccaccccaccctgagcacatgcacatctggctgggttgccacagcacccaggctcagccacaactttgctctgccccagagcagaagccagtagttgggagaggccaggcagtggggataggcacttccaagcttgtgggtgtaggggggcttcccaggttcctgagag

SEQ ID NO: 931889 - DNA, 614 bp, Homo sapiens
gataactaagctgattttggctggtgtcagcagcgctgacccaaggcctaggatttaaatcaaggctttaaggaaagcaaagaatcactgaacatttacttttttttcttttctagttgtcttgaagcagtttaggttagctaatttgtttttaatgcccctttaacattaatgtaacttttaagtatgtattatatcttgaagatatttataaaattaataagttgggtccttttaaatcttccttggtaaaataaaaattccctataattcatctaaattgaatattgcttacagaaataatttttacttgagtagtatttaaagacatctgtacattatggatattatagttatttaatagktctgaaaggcttataaaatggtgtgtatttttataaatgtcctattatattatttctccatatggtttacttaatggtttttcctaagaagaataattatcttttcttagaagacttacaactgcatgtagatgaaaagactgttttattctctattttaaattgaaccaaagataaatttttctgccattgactacatgagccacctatagtgcatgagcctgagtcttcagaacaattcatcagcaa

SEQ ID NO: 931890 - DNA, 614 bp, Homo sapiens
gataactaagctgattttggctggtgtcagcagcgctgacccaaggcctaggatttaaatcaaggctttaaggaaagcaaagaatcactgaacatttacttttttttcttttctagttgtcttgaagcagtttaggttagctaatttgtttttaatgcccctttaacattaatgtaacttttaagtatgtattatatcttgaagatatttataaaattaataagttgggtccttttaaatcttccttggtaaaataaaaattccctataattcatctaaattgaatattgcttacagaaataatttttacttgagtagtatttaaagacatctgtacattatggatattatagttatttaataggtctgaaaggcttataaaatggtgtrtatttttataaatgtcctattatattatttctccatatggtttacttaatggtttttcctaagaagaataattatcttttcttagaagacttacaactgcatgtagatgaaaagactgttttattctctattttaaattgaaccaaagataaatttttctgccattgactacatgagccacctatagtgcatgagcctgagtcttcagaacaattcatcagcaa

SEQ ID NO: 931891 - DNA, 580 bp, Homo sapiens
tgcctacaaccgcccattcccagagttgctctgtcccagggaggtgggggttttatctataagtcgctgactgggggctgctgcctttttttcagagagggaatctagaggatgcagtctggcctcagaggccttgctgagctgcggtgggctccacccagtttgaacttgctggtggctttgtttacactgtgggggaaaactgcctactcaagcctcagcaatggtggatgcccctccygccaccaagctggagtgtcccaggtcgagctcagactgttgtgttgtgctggccgcgagactttcaagccagcggatcttagcttgctgggctccgtgggggtgggactcgcggagccagagcacttggctccctggcttcagccctcttgccaggagagtgaacggttctgtctcgctggatttccaggtgccactggggtgtgagaaataaactcctgcagctagctcggagtctgcctaaatggccacccagttttgtgctggaaacacaggggccctggtggtgtaggcactggagggaatctcctggtctgcgggttgcgaagactgtgggaat

SEQ ID NO: 931892 - DNA, 643 bp, Homo sapiens
atatcaacaaaattttacactcatactttaaaatccattgatctatcttgcattttgagtgaatcttttacccaagcatgattttgtaacatcatgccttggttgtctgaaaaatactgatacagtgagttatacagatcttccaaatgttgacacattacgttatacaatatcataaatcacattcatcaatatcatttccaatctcatcagaaaagtcttttgtactggaaatttatcaggttcacagttgcagatggaagtgtttcagaattctgattttcacttgaaggcaaaaattgtatcattggtaaaatatcatcagttgttttcctataattgacaagctcacttatttcgttttcaagaaaatgtctgcaaaatacacaaggctgcataaccatatatttttgccrgtagctctttcatgtgaaaatggtgtttcatgtaaaaaagtggctagtacagcttacaactcaattatgcagatgtgtctcctcaaggcaaccatctttcttcagtatatgatagaaatggattatgcatagtttccatctttataacatagaatattaaaaagatgtacccacaggttaagatctaataaaaataataatatttactgatttatcaaggacagtat

SEQ ID NO: 931893 - DNA, 402 bp, Homo sapiens
agtgtggctgtggctcgcagactgagaggtgcaattcaagctaaacatccccttaggggaccaattagtaatgattccataggaatcattgtgcagcacctctgcctgttctgcaatgcaatcttactaaacaagtatgttcattttttctaactgggtccaatcctktttacaaaaaggtttttgagggtggtatgcctcaattatagtagcagatttattatggtaaatactgagatcagaaagcatgtgtaactgtgttatagagtgattgcatctaggcattattgccagccaagattgataaatatgcccaataagtataattgttctctgtgtcagcccttgctgaaggaatactcatggcagtggtgatcactgctatcatagctaccattaaat

SEQ ID NO: 931894 - DNA, 784 bp, Homo sapiens
ttagcagtgtgaaaataaacaatacagagaattggtactggcagagtgaggtactgctataaagacaacctgaaaatgtgaaggcaactttgaaactgggtaacaggcagaggttggaacagtttggagggcttagaagataggaagatgtgggaaagtttgaaacttcctagagacttgttgaatggttttgaccaaaatgctgatagtcgtattgacaatgaagtccaggctgagatggtctcagatggagacgagaaactattgggaactggagcaaaggccattcttgctatgctttagcagagactggcagcattttgcccctgccctagagatctgtggagctttgaacttgagagagatgatttagggtatctgtcagaataaatttctaagcagaaaagcattcaaatataacctggctttttctgaaagcatacagtcaagtcatatgcgttcacaaagagatggtatgaaattggaacttatgtttaaaagggaagcaaagcataaaagtttggaaattttgcagcctgaccawgtggtagaaaagaaaaaccaattttctgaggaggaattcaagccggctgcagaaatttacataagtaatcaggagctgaatgttaattgccaaacaatggggaaatgtctccagggcatttcagaggtcttcaaggcagcccctcccattacaagcccagaggcctaggagggaaaaatggtttcatgggccctgctgctctgtgcagccttgggacttggtgccctgtgccccagccac

SEQ ID NO: 931895 - DNA, 599 bp, Homo sapiens
aagttggagtgcctgttaaatgggtattctctgtctctgttttgactgaggcccaaagatagtaactgtcaatgctactcatattgcagaacaatctgtgaatccatcaaagcagaccttgccaaggaggcggctgggaataatttggggaccctcggaagaccacttgcctccattcttttagaaatattggacacgaaattagaaaggttttytgtgggaaagatattggtatgctgctgttccactacttggcctccaggacttttctgagggacaaagatgcctgctagggattcactttatatctgtgtcaggagatgatgggtctgtgttagtctgttttatgctgctgtaacagagtaccacagactgggtaatttatgatgaacagaagtttatgtggttcatggttctggaggctggaagtccaagagcatgatgccgacatctgacaagggccttcatgctgcattatgtcatgacagaaagtggaacggcaaaagaggtcaagagcaagagcaagaggaggctgaacttgcttttataacaagcctactctcttaataatgaacccacttccacgataatggtgttag

SEQ ID NO: 931896 - DNA, 805 bp, Homo sapiens
tgactctcccaatcagtgactcagcctaagcttaggacccaatctgcagccctacccaaattccaaaagtcaaacagcagtaccatttaactagggaatacacattgtgtcttcatccaatcagaggacccagctaccatctctgcctgattgcagaacccagccagtggtctcaccaaatagaagagctcagatccatctgatctcaaagcaaaggcagaggctcagcaagctagagagtctaacgccaagctctacctgcttagcgccrttaccaggtagccgacctagaatcacaggctagacttcagtgagagtataactttgccaaagaatacctgtaaaggacggaagaggtgaccatttcttcaaatgcacaagcaccaatgtaaggacacaaagattatgaagaatcagaataatgacatctccagaagaaacaaataaagcttcaacaataggccctaaagaaatggagagctatgaaataactaacaaaaaattaatatagttctcttaaagaagttcagtcagctataagaatataaggatagaagattaaataaaatatgaaaaataatacaaaatgagaagcttgacaaagaaataggatgtataaaaacaaaacccaactatatgctacctacaagagacttacctcactattaaagattcaaatagactaaaagtgaagtaacagaaaaagatatttcatgcaaatggaaatagaaaaaaaaatcgtaaaattcatacagaaacacacacaaaaaagcctgactagccaaggcagtcttgaacaaaatga

SEQ ID NO: 931897 - DNA, 805 bp, Homo sapiens
tgactctcccaatcagtgactcagcctaagcttaggacccaatctgcagccctacccaaattccaaaagtcaaacagcagtaccatttaactagggaatacacattgtgtcttcatccaatcagaggacccagctaccatctctgcctgattgcagaacccagccagtggtctcaccaaatagaagagctcagatccatctgatctcaaagcaaaggcagaggctcagcaagctagagagtctaacgccaagctctacctgcttagcgccattaccaggtagccgacctagaatcacaggctagacttcagtgagagtataactttgccaaagaatacctgtaaaggacrgaagaggtgaccatttcttcaaatgcacaagcaccaatgtaaggacacaaagattatgaagaatcagaataatgacatctccagaagaaacaaataaagcttcaacaataggccctaaagaaatggagagctatgaaataactaacaaaaaattaatatagttctcttaaagaagttcagtcagctataagaatataaggatagaagattaaataaaatatgaaaaataatacaaaatgagaagcttgacaaagaaataggatgtataaaaacaaaacccaactatatgctacctacaagagacttacctcactattaaagattcaaatagactaaaagtgaagtaacagaaaaagatatttcatgcaaatggaaatagaaaaaaaaatcgtaaaattcatacagaaacacacacaaaaaagcctgactagccaaggcagtcttgaacaaaatga

SEQ ID NO: 931898 - DNA, 644 bp, Homo sapiens
gtgcacactaccacactcagctgattattattattattattattattactggtagagatggagtcttgaatgttgcccaggctggtctcaaactcctgggctcaagtgattctcctgcctcagcctcccaaagtgctgggattacaagcataaaccaccttgccctgccataacccattttcttttttctttctttctctctttttttgttgagatagggtctcctctgtcacccaggctggagtgcagtggcacaatcacagctcactgcagcctcaaactcccagcatcagtggatcctcccaactcagcctcccaarcatctgggattacaggtgtgtgccacaatgcctggctaacttttgtattttttgtagggatggggttttgccatgttccccaggctggtctcaaactactgcactcaagtgatctacccaccctggccttccaaagtgctgggattataagcatgagcccctcgaacagccataagctattttcaaaccattttgatcactccaaaagaaacccacgccctttggcagtcactccacattccctcctcacctcagcctattctctattctagacatttcatataactggaattatacagtatgtgaccttttgcatctggcttt

SEQ ID NO: 931899 - DNA, 644 bp, Homo sapiens
gtgcacactaccacactcagctgattattattattattattattattactggtagagatggagtcttgaatgttgcccaggctggtctcaaactcctgggctcaagtgattctcctgcctcagcctcccaaagtgctgggattacaagcataaaccaccttgccctgccataacccattttcttttttctttctttctctctttttttgttgagatagggtctcctctgtcacccaggctggagtgcagtggcacaatcacagctcactgcagcctcaaactcccagcatcagtggatcctcccaactcagcctcccaagcatctgggattacaggygtgtgccacaatgcctggctaacttttgtattttttgtagggatggggttttgccatgttccccaggctggtctcaaactactgcactcaagtgatctacccaccctggccttccaaagtgctgggattataagcatgagcccctcgaacagccataagctattttcaaaccattttgatcactccaaaagaaacccacgccctttggcagtcactccacattccctcctcacctcagcctattctctattctagacatttcatataactggaattatacagtatgtgaccttttgcatctggcttt

SEQ ID NO: 931900 - DNA, 644 bp, Homo sapiens
gtgcacactaccacactcagctgattattattattattattattattactggtagagatggagtcttgaatgttgcccaggctggtctcaaactcctgggctcaagtgattctcctgcctcagcctcccaaagtgctgggattacaagcataaaccaccttgccctgccataacccattttcttttttctttctttctctctttttttgttgagatagggtctcctctgtcacccaggctggagtgcagtggcacaatcacagctcactgcagcctcaaactcccagcatcagtggatcctcccaactcagcctcccaagcatctgggattacaggtrtgtgccacaatgcctggctaacttttgtattttttgtagggatggggttttgccatgttccccaggctggtctcaaactactgcactcaagtgatctacccaccctggccttccaaagtgctgggattataagcatgagcccctcgaacagccataagctattttcaaaccattttgatcactccaaaagaaacccacgccctttggcagtcactccacattccctcctcacctcagcctattctctattctagacatttcatataactggaattatacagtatgtgaccttttgcatctggcttt

SEQ ID NO: 931901 - DNA, 582 bp, Homo sapiens
ttttcaaaccattttgatcactccaaaagaaacccacgccctttggcagtcactccacattccctcctcacctcagcctattctctattctagacatttcatataactggaattatacagtatgtgaccttttgcatctggctttcttcacttagcctgttttgaagattcatccatattgtagcatgtgtcttcatyttgttcatggctgaataatattccattgtctgaatgtatcacacttggtttatccattcatcatttgatggatatgtgggtagtttttactctttggatattatgaatactactactatgaatattgatatacaagtttttgtatggagatatgttcttatttttcttggttatatacctagaagtggaattactggatcatatggttaactctatgtgtaacattttgaggaactgctaagctgtttaaaaagtatctgcgtcattttacaatctcacaggcaacgtatgaagattttaacttcacattttctccaacacttgctactgtctgtctgtcttttcttttttttcccttgatacagggcctcattctgtcaccca

SEQ ID NO: 931902 - DNA, 582 bp, Homo sapiens
ttttcaaaccattttgatcactccaaaagaaacccacgccctttggcagtcactccacattccctcctcacctcagcctattctctattctagacatttcatataactggaattatacagtatgtgaccttttgcatctggctttcttcacttagcctgttttgaagattcatccatattgtagcatgtgtcttcattttgttcatggctgaataatattccattgtctgaatgtatcacacttggtttatccattcatcatttgatggatatgtgggtagtttttactctttggatattatgaatactactactatgaatattgatatacaagtytttgtatggagatatgttcttatttttcttggttatatacctagaagtggaattactggatcatatggttaactctatgtgtaacattttgaggaactgctaagctgtttaaaaagtatctgcgtcattttacaatctcacaggcaacgtatgaagattttaacttcacattttctccaacacttgctactgtctgtctgtcttttcttttttttcccttgatacagggcctcattctgtcaccca

SEQ ID NO: 931903 - DNA, 602 bp, Homo sapiens
ctaagtgttattacaaaagagtaaaaaaagtttaaacattaaaaagtttataaagtaaaaaagtcccagtaagctaaccttaatttattactgaagaaatacatttaaaaaataaatttagtgaagcctaagtgtacagttgtacagkgggttttttttttttttttttttttttttgcgacagagtttcactcttgtcacccaggctggagggcaatggtgcgatctctgctcactgcaacctccgcctcccgggttcaagcaattcttctgtctcagcctcccaagtagctgggattacaagtgcctgccactatgcccggctaatttttgtattttttagtagagatggggtttcaccatattggccaggctggtcctggaactcctgacctcaagtaatccacccgccttggcctcccaaagtgctggaattacaggtgtgagcctccgtgccaggccgtgtacagtgtttataaagcctatgttagtgtacagtaatgtcttatgccctcacgttcactcaccactcactcattcactcacccagagaaacttccagttctgcaagctccattcttgttaagtgccctacacaggtg

SEQ ID NO: 931904 - DNA, 602 bp, Homo sapiens
ctaagtgttattacaaaagagtaaaaaaagtttaaacattaaaaagtttataaagtaaaaaagtcccagtaagctaaccttaatttattactgaagaaatacatttaaaaaataaatttagtgaagcctaagtgtacagttgtacagggggttttktttttttttttttttttttttgcgacagagtttcactcttgtcacccaggctggagggcaatggtgcgatctctgctcactgcaacctccgcctcccgggttcaagcaattcttctgtctcagcctcccaagtagctgggattacaagtgcctgccactatgcccggctaatttttgtattttttagtagagatggggtttcaccatattggccaggctggtcctggaactcctgacctcaagtaatccacccgccttggcctcccaaagtgctggaattacaggtgtgagcctccgtgccaggccgtgtacagtgtttataaagcctatgttagtgtacagtaatgtcttatgccctcacgttcactcaccactcactcattcactcacccagagaaacttccagttctgcaagctccattcttgttaagtgccctacacaggtg

SEQ ID NO: 931905 - DNA, 550 bp, Homo sapiens
gtagatccactgacagcttgcaccatgcccctggaaaagccacaaacactcaacaacaacccgtgaaattagccaggagtgggggctataccttgcaaatccacaggggcagaactgcccaagaccatgggaacccacctcttgtatcagcgttacctggatgtgcgacatggagtcaaaggagatcattttggagctttaagatttgactgccccactggattttggacttgcagggggcctgtagcccctttgttttggccaatttctcccatttgagatagctgtatttacccaattcctgtaccctcattgtatctaggaagtaactaacctgcttttgatttatasgctcataggcagaagggaattgccttgtcttggatgagactttggactttggactgtggacttttgagttaatgctgaaatgagttaagactttggggaactgttgggaaggcatgattggttttgaaatgtgaggacatgagatttgagaggggccatgggtgaaattatatggttttcccccacccaaatctcatct

SEQ ID NO: 931906 - DNA, 554 bp, Homo sapiens
acagtgcaatcaaattagaactcagggttaagaaactcgctaaaaactgcacaactacatggaaactgaacaactgctcctgaatgactactgggtacatagagaaattaaggcaaaaataaataagttatttgaaaccaatgagaacaaagacacaacgtaccagaatctctgggacacagccaaagcaatgtttagagggaaatttatagcactaaatgctcacaggagaaagtgaaaaagatctaaaatcrgcaccctatcttcacagttaaaagaactagagaaccaagagcaagcaaattcaaaagctagcagaagacaagaaataactaagatcagagcagaactgaaggagacagagacacaaaaaacctttcaaaaaatcaatgaatccaggaggtggttttttgaaaagattaacaaaatacatagaccacttgccaggctaataaagaagaaaagagagaagaaacaaatagacacagtagaaaatgataaaggggatatcaccactgatcccacagaaatacaaactaccatcacagaatact

SEQ ID NO: 931907 - DNA, 624 bp, Homo sapiens
tgagttcatgtcctttacagggacatggatgaagctggaaaccatcattctgagcaaactatcacaaggacagaaaaccaaacactacatgttctcacttataggtgggaattgaacagtaagaacacatggacacagggtggggaacatcacacactggggcctgccggggggtggggggaggggggagggatagcattaggagatayacctaatgtaaatgacgagttaacgggtgcagcacaccaacacggcacatgtatacatatgtaacaaacctgcacgttgtgcacatgtaccctagaacttaaagtaaaataaaaaagaaaagaaaagaaaagaaaggttcagttgttcccttagcctgaaggccttgaaggtccaacagaatatatttttagatgtttacctggggttggaagtgcagttttgagctccttgtaagaagaccaagaaatcttatttctccttaaaaaaaaaattaatccttgagtccttagcatctattacagtacttgcactacagtggatacttacatgattttttttaatgcatcaatcttccataaaggggcatagtttatatgatatcagccttattatcatgttgccttaactctttga

SEQ ID NO: 931908 - DNA, 588 bp, Homo sapiens
aagagggcatccttgtcttgtggcagttttcaaggggaatgcttccagcttttgcccatttagtatgatattggctatggatttgtcataaatggctcttattattttgaggtacattcctcaaatgtacctttctttattgagagttttaacatgaagggatgttgaattttatgaaggccttttctgcatctattgagaaaatcatgtgttttttgtctttagttctgtttatgtaatgaattacatttattgatttgcatatcttgaaccagccttgcawcccggcaatcaagccaacttgattatagtggataagctttttgatgtgctgctagatttggtctttcagtattttgttgaggatttttacattgatgttcatattggtctgaagttttctttttttgtcaggttttggtatcaggatgatgctgccaggttttggtatcaggatgatgctgccagcttttggtatcaggatgatgctggcctcataaaatgatttagggaggattccctctttttctattgtttggaatagtttcagaaggaatggtaccagctcctttttgtacctctggtaaa

SEQ ID NO: 931909 - DNA, 617 bp, Homo sapiens
cattatcttaagtgaactagtacagtaacagaaaaccaagtattacaagttcttagttgtagatgggagctaaaactttgagtacacatggacacaaagggaacaatagacaatggggactgcttgaagtgggagagttgggagagaagcataggtttgaaagctatcaggtactatgctgtctaatttgatgatggaatcattcatacaccaagcctcagagacatgcaatttacttatgtaacaaaccaacacatgtacctactgaaccttttttttttttttttttttttttttttttggaracaaaattttgctctgtcccccaggctggagtgcagtggtgcaatcttggctcactgcaacctctgtctcgtgggctcaagcgattctcctgcctcaacctcctgagtagctgggactacaggcatgcaccaccacaccaggctaatttttgtatttttagtagagacaagttttcaccatattggccatgaagtttcgaactcctgacctcaagtgatctgcctgcctcggcctcccaaagtgttgggattacaggtgtcagccaccgcgcctggccctgaacctaaaatttttttaaaagtaaaaaaact

SEQ ID NO: 931910 - DNA, 633 bp, Homo sapiens
gaacaattcagagaaactgggtcactcatacattgctgttgggaatgcaaaatggtgcagccattctggagagtagttttgcaggttctttaaaagctaaacatgtaattaccattcatcctagcaattgcactcctagatatttatctcagaaaaaaattaaatcacattcacactcctagatatttatccaagaaaaaaattaaaacatattcacactcctatttatcccagaaaaaaattaaaacatattcacacaaaaagctgtgttcatagaagctttattataatagtacaaaacaagaaacatcccataagtccttcaatgagtgaatggttgaacaaactgtggtgcatctatactayagaataccactgagcaataaaaaggaaagaacctgttgatacatgcagcagcttggaggaatctccagagaacaatgctgagagaaaaaagccaattccaaaaggttacattctgtatgattccatctatataccatcctggaaatgataaaatttaaaaaccagagagaagtacactagttgggtcaaggagggatgggagggaaagcgagatggcatggctataaaaggacaacatgaagaatgcggggagtgatgtaaatgttc

SEQ ID NO: 931911 - DNA, 681 bp, Homo sapiens
cctgagggacttgtcctgggatcagacattttgaggactttcttgacccttggctgatatccttgcaggcaggacctgcagctaagcaagacgtaggactgcaagctgggttggcaccctccccctagggagttctccaggccttgccccctctgtccccagcctggaagccctmcctggtaccataccccagccgatgagtatgtacccccagaagtacttccgctcagagaagaaggagacggcaagcagggtgtacaggtagaggccctccaccagcagccagaagaagttagccatgacacaatattggaaaaagaccatggctgccttacagcccacctgcagggggaggagaaaagacggggttcactggggctgtcaagggtccttgactgcccacactcgtgtctggggggacaaacacagttgcagtgcagccaacttaatctctttgttgttttgcattatccccttaaaaatgtactcattggttttcccattttccctaattttagatcctctgatacttcgggataaactggtgattttaattatccatccatcaattcatctattcaccttcccatctatatatctacccatctgcccattcaatcatctacccacctatccatgtatccatttatttacccactcacccactagacattcactatc

SEQ ID NO: 931912 - DNA, 602 bp, Homo sapiens
tgagtctggtggggacgtggagaacctttatgtctagctcagggattgtaaacacaccaatccacactctgtatctagctcaaggtttgtaaacacaccaatcagcaccctgtgtctagctcagggtttgtgagtgcaccaatcgacactctgtatctagctgctctggtggggccttggagaacctgtgtgtggaaactccgtatctaactaatctgatggggacgtggagaacctttgtatctagctcagggattgtaaacgcaccaatcagcgccctgtcaaaacaggcctctaggctctaccaatcarcaggatgtgggtggggccagataagagaataaaagcaggctgcccgagccagcagcggcaagccgttccggtccccttccattgtgtggaagctctgttctttggctttttgcaataaatcttgctgctgctcactgggtccacgctgctttttatgagctgtaacactcaccacaaaagtctgcagcttcactcctgaagccagtgagaccacgagcccagcgggaggaacaagcaactccagatgcgccgctttaagagctgtaacactcaccgcgaaagtctgcagc

SEQ ID NO: 931913 - DNA, 602 bp, Homo sapiens
tgagtctggtggggacgtggagaacctttatgtctagctcagggattgtaaacacaccaatccacactctgtatctagctcaaggtttgtaaacacaccaatcagcaccctgtgtctagctcagggtttgtgagtgcaccaatcgacactctgtatctagctgctctggtggggccttggagaacctgtgtgtggaaactccgtatctaactaatctgatggggacgtggagaacctttgtatctagctcagggattgtaaacgcaccaatcagcgccctgtcaaaacaggcctctaggctctaccaatcaacaggatgtgggtggggccagataagagaataaaagcaggctgcccgagccagcagcsgcaagccgttccggtccccttccattgtgtggaagctctgttctttggctttttgcaataaatcttgctgctgctcactgggtccacgctgctttttatgagctgtaacactcaccacaaaagtctgcagcttcactcctgaagccagtgagaccacgagcccagcgggaggaacaagcaactccagatgcgccgctttaagagctgtaacactcaccgcgaaagtctgcagc

SEQ ID NO: 931914 - DNA, 602 bp, Homo sapiens
tgagtctggtggggacgtggagaacctttatgtctagctcagggattgtaaacacaccaatccacactctgtatctagctcaaggtttgtaaacacaccaatcagcaccctgtgtctagctcagggtttgtgagtgcaccaatcgacactctgtatctagctgctctggtggggccttggagaacctgtgtgtggaaactccgtatctaactaatctgatggggacgtggagaacctttgtatctagctcagggattgtaaacgcaccaatcagcgccctgtcaaaacaggcctctaggctctaccaatcaacaggatgtgggtggggccagataagagaataaaagcaggctgcccgagccagcagcggcaagccgttccggtccccttccattgtgtggragctctgttctttggctttttgcaataaatcttgctgctgctcactgggtccacgctgctttttatgagctgtaacactcaccacaaaagtctgcagcttcactcctgaagccagtgagaccacgagcccagcgggaggaacaagcaactccagatgcgccgctttaagagctgtaacactcaccgcgaaagtctgcagc

SEQ ID NO: 931915 - DNA, 726 bp, Homo sapiens
  misc_feature 82, 92, 94, 95, 105, 107: n = A,T,C or G
gtatggcatctccggagaactggccatgcgtcctcttgccagcctgtctgggggccagaagagccgagtggcctttgctcangatgactatngnnccctgggtgnangcccttcattttttccagagctcttcccctcccatttccccttcttgcccagtagaaaactgtatcagaaggctttattttctctcaccgcaccccttcactgcccaccttcctggttctgccttccagccccaacttctacattctaggatgaacccacaaaccacctggacatggagaccattgaggctctgggccgtgcctcaacaatttcagggtgagtgtgccttcaccctgaccactcctcccaggcctcggtgcctcttgtgtccccctgagcacctcctgccctcctgtctttcagggtggtgtgattctggtgtcccacgatgagcgctttatcaggctggtgtgccgggagttgtgggtatgcgaaggaggcggcgtcacccgtgtggaaggaggatttgaccagtaccgcgccctcctccaggaacagttycgccgcgaaggcttcctctagggccaccaggctgaggactcgcccaggacatggactggtctctcagacccctgggccaccatgtaggccaccactccaggccgtggacttcccccaacttggggacagccttattcccaaatgtctctatccttttgactggagcatcttctgcac

SEQ ID NO: 931916 - DNA, 741 bp, Homo sapiens
cattatttagtgccatgtatgtctttgaaagcattttgtgcctactcagagtaagagagggaagaattggagggtttgcacaaagaaagaacaagactggccaggcacggtggctcacgcctgtaatccagcactttgggaggccgaggtgggcaggtcacgaggtcagaakttcaacaccagcctggccaacatggtgaaaccccgtctttaataaaaatacaaaaattagctgggagtgatggcgggcacctgtaatcccagctactcgggaggctgaggcaggagaatggcttgaacccgggaggtggaggttgcaatgagccgagatcacaccatggcactgcagactgggtgacagagcaagactccatcttggggggcgggcgggaaggaaagaataagatctcatttacattgtttaaaagatcatctgtctgtagtgctgggaataactacagatggttcaaggtgaccaattaggaggctactaaaataatttaggtgagaagtgttggttgcttgaactagagacgtagtggcagaaattgaaataattagtcagatcttacatgtattttgtaggtagagccattacttggcagatagattagatataaagaggaaaggagcaggcaaggttgattccaaagattctggcctgagaaactggaagaatgaatgtagttgacattgctgagataggaaagactgcaagaagagcacgtttggaatgcaata

SEQ ID NO: 931917 - DNA, 741 bp, Homo sapiens
cattatttagtgccatgtatgtctttgaaagcattttgtgcctactcagagtaagagagggaagaattggagggtttgcacaaagaaagaacaagactggccaggcacggtggctcacgcctgtaatccagcactttgggaggccgaggtgggcaggtcacgaggtcagaagttcaacaccagcctggccaacatggtgaaaccccgtctttaataaaaatacaaaaattagctgggagtgatggcgggcacctgtaatcccagctactcgggaggctgaggcaggagaatggcttgaacccgggaggtggaggttgcaatgagccgagatcacaccatggcactgcagactgggtgacagagcaagactccatcttggggggcgggcgggaaggaaagaataagatctcatttacattgtttaaaagatcatctgtctgtagtgctgggaataactacagatggttcaaggtgaccaattaggaggctactaaaataatttaggtgagaagtgttggttgcttgaactagagacrtagtggcagaaattgaaataattagtcagatcttacatgtattttgtaggtagagccattacttggcagatagattagatataaagaggaaaggagcaggcaaggttgattccaaagattctggcctgagaaactggaagaatgaatgtagttgacattgctgagataggaaagactgcaagaagagcacgtttggaatgcaata

SEQ ID NO: 931918 - DNA, 614 bp, Homo sapiens
gtagaggtcttttgactcctttgttttgtatattcctaagtattttttttttttttgcagctattataaaaggggttgagttcttgatttgattcaccacttggtcactgttggtgtatagaagagctactgatttgtgtacattaatctcatatctggaaactttgctgaattctttkatccattctaggagttttctggaggagtccttagggttttcaatgtaaatgaacatatcatcggcaaacagggacagtttgacttcctctatactgatttggatgccgtttgtctctttctcttgtctgattgctctgactaaggcttgcagtactacgttgaagaggagtggtgacagagggcatccttgccttgttcccgttctcagggggaatgcttttaacttttccccattcagtacttttttggctgtgggtttgtaatagatggcttttattacattaaggtataacccttgtatgccgattttgctgagggttttgatcacaaagggatgctggattttgttgaatgatttttctgcatctattgagatgattgtgtgatttttgtttttaattctgttgatgtgttgaatcacatttatttatttg

SEQ ID NO: 931919 - DNA, 466 bp, Homo sapiens
gatgacaacgtgcctaggtgaagatctttttgtgatgaatttcccaggtgttctttgtgcttcttgtgtttggctatctaggtctctcacaagacctgggaagttttccttgattattcccccaaatatgttttccaagcttttagaattctcttcttcctcagkaacaccgaatattcttaggcatggtcatttaacataatcccaaacttcttggaggctttgttcacattttcttattcttttttctttgtctttgttggattgagttagttcaaaaaccttgttttcgagctctgaatttctttcttctacttgtttaattctattgctgagactttccaaagctttgcatttctaaaattgtgtccaaaagttcctgaattgttgattgttttttctttaagctatctatttcattgactatttctcccttcacttcttgtatcattttttggatttactt

SEQ ID NO: 931920 - DNA, 621 bp, Homo sapiens
cgcctgcttcagcctcccaaagtgctgggattacaagtataaagataaacagcacccaactgggaggtttatcttattgatcccgaaatactttcaatttgtctcaatcctttcatgaggtaatgcactttttgtctacatagacgctcaggccacatgtggacttttatttgaagtgaataagcagaaattacatagaattacaataaaagatcattattcctgtgattttaactggccagtctcaccaattattttcatgaccgccacagggagtcgggcatggggatatagatcctgcagtatcccccaaaaatattcccatcgtggcctgcaattcctgagactgagagaggagtgatataagatgagctagaattacatggaaagagcaaaggaraatggttatattagaaaaagaattcactctacctcctctgggttgcaagaggaagctcagaaagcagttctgagccccataacttatttatgggcttaccgaaaccccaatcactctcataccacaaaacaacgtgcaccatccaatttacttgaaggaaagtttcagaagcagatacaagagaaagaaaagagtaactggagactcatgataaagctgcc

SEQ ID NO: 931921 - DNA, 771 bp, Homo sapiens
gacttacataccccttttgggtatacaccaccatttgggtgatgtggattgttggatgctacagtatggtgcctggcaatcagggtggaatatttgaaattgggaaccgacctagcttattggagagctattgtcaaatatagtcaaaagaaaatatgtgaaggaaggtacataacccaaactgaagagatttgtgttttctaaastgttctgattgagaaattttaaaaactagaattagcctcagccatcagtgaagtctagaaagccttcgttggaattagattgtctaagtacgctgtggtaggactgagatctttcaaatcagatgcccctgatgcttgggctgacccatcagagctttagcttttttctgtctgcatcttacaggctccagttaaactagccatttgcaggtactttgataatgacacagtgctgtcccatatccttaatggctttggcattccattatgggaccttcctgagagagttaatactctggttagattttataactttacacacacacaggaatttgtgttttgagctaactttatggaaggtaggttcttcatgcaattttgtagggcccaactttttggaagggtcagcagcattctgaatccaaagatgtgcattatgctggctttctggtcatcatggggagcatcaatgacaaggttttctctagtgataaatacagattgattcctgacctaatcagatacgttgtataagtgtaggtacaaagtgaaatcacttcagcaa

SEQ ID NO: 931922 - DNA, 662 bp, Homo sapiens
gaggacatgtttacttattctccaccattatcagtcagttgataaatgagagtctgaaggaaatttccatgtgactttttcaaatctgccgaacagaaaagtcctggatggattgtagagtttaatggaagaactaacctttttatgcattttgtgtgtgtgtgtgtgtgtgtgtgtgtgtgcgcgtgtgtgtgtgtgtgtatttttttcttttttgagatggagtcttgctctgttgcccaggctggactgcagtggcgtagtcatggctcactgcaacgtccgcctcctgggttcaagcgagtttccagcctcagcctcctgagtagctgggactacaggcgtaagccaccacacccagctaatttttgtatttttactagagacagggtatcactatgttggccaggttggtcttgaactcctgacctcagatgatccgcctgcctctgtctcccaaagtgttgggattacaggcgtgagccaccaygcctggccaatattttttatgtggtagaatgaaaacaaacttgtgcccatatattcagaaatataagattatgacttctggagaatgcaagatttttttctcctatttaaaaaaatgtttcttatattttttcatgaatcaatagcactccaccaacccacagatttagatg

SEQ ID NO: 931923 - DNA, 826 bp, Homo sapiens
gtcagaataaggactagaatccaggtttctgactttttgttggggttctttctaatacagtgtgccagtcagcttttctttaggataattagacatgatcattcagtttcgagcttcggtgtacatttaagcaggggccctctgtccaccaggactggtgtcttgacgatcctatagggtcaagaggatggaatgaagcattttaggactgctgaggccgtcccttttctagtccccagtctgaccctgtagaccattgctcaaattaaactgatgcttcacacttctcactaagagcttgtgtcatttgggggtgggggttctggggaagatcccaaaaggaccagttcttagaaaaattgcctgctmtcattagaggagcaccacgccggcactcagtggtgtgtctgctgcaggaggaagtgtgggagaggatgtcagctctgggaaggcttgtctcataattaaggatgagtctgttgcctcttaatggggatccttttttttcccaccctcatgctttcacggagactgtggagcagcttggcaggctcaaattgttttgaggacaaaaggttattgtcaccaggaccttcataatgcagttggcctcttccctggctcccccacctccccttccccctctcctcagatagtttgcacagtggctagatttacaaagccattctcttcgcagtgcccccagtgctgagttcattcctgatggagtcttcccttgctctccctatcacccccttggctctcacctcctgcgcatggtgtcattggtcccggtgccagaatccccaagctggggcccatcctc

SEQ ID NO: 931924 - DNA, 826 bp, Homo sapiens
gtcagaataaggactagaatccaggtttctgactttttgttggggttctttctaatacagtgtgccagtcagcttttctttaggataattagacatgatcattcagtttcgagcttcggtgtacatttaagcaggggccctctgtccaccaggactggtgtcttgacgatcctatagggtcaagaggatggaatgaagcattttaggactgctgaggccgtcccttttctagtccccagtctgaccctgtagaccattgctcaaattaaactgatgcttcacacttctcactaagagcttgtgtcatttgggggtgggggttctggggaagatcccaaaaggaccagttcttagaaaaattgcctgctctcattagaggagcamcacgccggcactcagtggtgtgtctgctgcaggaggaagtgtgggagaggatgtcagctctgggaaggcttgtctcataattaaggatgagtctgttgcctcttaatggggatccttttttttcccaccctcatgctttcacggagactgtggagcagcttggcaggctcaaattgttttgaggacaaaaggttattgtcaccaggaccttcataatgcagttggcctcttccctggctcccccacctccccttccccctctcctcagatagtttgcacagtggctagatttacaaagccattctcttcgcagtgcccccagtgctgagttcattcctgatggagtcttcccttgctctccctatcacccccttggctctcacctcctgcgcatggtgtcattggtcccggtgccagaatccccaagctggggcccatcctc

SEQ ID NO: 931925 - DNA, 826 bp, Homo sapiens
gtcagaataaggactagaatccaggtttctgactttttgttggggttctttctaatacagtgtgccagtcagcttttctttaggataattagacatgatcattcagtttcgagcttcggtgtacatttaagcaggggccctctgtccaccaggactggtgtcttgacgatcctatagggtcaagaggatggaatgaagcattttaggactgctgaggccgtcccttttctagtccccagtctgaccctgtagaccattgctcaaattaaactgatgcttcacacttctcactaagagcttgtgtcatttgggggtgggggttctggggaagatcccaaaaggaccagttcttagaaaaattgcctgctctcattagaggagcaccacgccggcactcmgtggtgtgtctgctgcaggaggaagtgtgggagaggatgtcagctctgggaaggcttgtctcataattaaggatgagtctgttgcctcttaatggggatccttttttttcccaccctcatgctttcacggagactgtggagcagcttggcaggctcaaattgttttgaggacaaaaggttattgtcaccaggaccttcataatgcagttggcctcttccctggctcccccacctccccttccccctctcctcagatagtttgcacagtggctagatttacaaagccattctcttcgcagtgcccccagtgctgagttcattcctgatggagtcttcccttgctctccctatcacccccttggctctcacctcctgcgcatggtgtcattggtcccggtgccagaatccccaagctggggcccatcctc

SEQ ID NO: 931926 - DNA, 627 bp, Homo sapiens
gctgagacttccctgggtatccaacttcaagtctagattatgtgcttacataattataatgaccagaagatctacattgtgttcagcagcagcaacatgtaggcactctcctaagtgctttgcatgagttaaattatataatacagcaaccctctttccctgtctctgtctctccctctctctctacacacacacacacacacatacacacacatgcatatatataggcttgtaaatatatgtctgtatatgtgtgtatatgcatatcacacatatatgttcaacaaatatatatatatatatatatatatatatatatatatatatatgcacacatcccatttttctgataaagcaacgaaagcaagagaggcaggccagtgtcacgcaagtggttaatgacagytgacctttgtcatttggacctttgtcattagaactttgtcaacagacctttgtcaacagacctttgtcatttggaccagaccaccatcctctagttcccactctctccaccatgtctcactgcctttcatcttttgattacttacctatgccagttagtttcctaaccagctttttaggtgatccccatgagcaccctgtgaggttggtgctaccattacc

SEQ ID NO: 931927 - DNA, 623 bp, Homo sapiens
ctcatggcaacctctgcctccccggttcaagcgattctcctgcctcagcctcccgagtagctgggtttacaggcatacaccaccacgccaggctaatttctcgtatttttagtagagacagggtttctccatattggtcaggttggtctcaaactcccgacctcaggtgatctacccgcctcggcctcccaaagtgatgggattacatatatatatatacacgtatatatatatgtgtatatatatattatatacgtatatatatacacgtatatatacacatatatatacatatatacacatatacatatatacacatatatacatatatatacatatatacatatatacatatatatacacatatayatacatatatacatatatatacatatatacatatatatacacatatatatatatagcgaaaaacaatctttaaaaaatcaccagaaaatgtagtgcttatagacagacgacttatcttttgttaatcacacctcatcctcctttttcacacatacatacagtctaagtaccagatttgcacattcagtttcagcaagaagaattcatttaattcccccactctctgctcacaagacctattctcaggatccatt

SEQ ID NO: 931928 - DNA, 619 bp, Homo sapiens
cttgtttctaacctcactagctaactgcctttgatcattactatatgtaaaacaagctaatgatgggaggaaattagtttatagtttaaagcaaggatgataatagccactttcaaaaactcatccctgaggagataaagagggccatacacataaataaccatggtatgttaaatgtttataggagcattgtgacctgaccaaggacaaagaagcttcacaacccccttaggctcctgccaatgccttgatgtctgyggtcacctgttaccctctgatctcaggcccctccttgattccccttcacccaaataaaaagaagcttggaagtcatgccttttaagatggtccttcaggacattagtatgccagcttctcagtttgctggctttctgaaataaactagcttttctagccccagtgatagaggcaggaggcagagaaatcctaggcagacaagggcgggtccctggtaaaaccccaccttcaagcaaaagacagtttaaagcctgaaggccaagctacaaatcaaatccactcaccgggttgagaacctgtcttcctgtttgacacactttcctttagttcccacccttcacctattttacatatacctacc

SEQ ID NO: 931929 - DNA, 762 bp, Homo sapiens
tagttagccattcgtcttattttttttcaaggtttttaacttctttgccatgggttcgaacttcctcctttagctcagagtagtttgatcgtctgaagccttctcctctgaactcatcaaaatcattctccgtccagctttgttccattgctggtgaggagctgtgttcctttggaggaggagaggcactctgatttttagagtttccagtttttgtrctctgtttttcccccatctttgtggttttatctacctttggtctttgatggtggtgacgtacagatgggattttggtgcggatgtcctatctgttagttttccttctaacagtgaggaccctcagccacaggtctgttggagtttgctagaggtccactccagaccctgttttcctgggtatcagcagcagaggctgcagaacagcggatattggtgaacagcaaatgttgctgcctgattgttcctctggaagttttgtctcagaggggtacccagccgtgtgaggtgtcagtcggcccctactagggggtgcctcccagataggctacttggggctcagggacccacttgaggaggcagtctgtctgttctcagatctcaagctgtgtgctgggagaaccactactctcttcaaagctgtcagacagggacatttaagtctgcagaggtttctgctgccttttgtttggctatgccctgcccccagaggtggagtctacagtggcaggcaggcctccttgagctgcagtgggctccacccag

SEQ ID NO: 931930 - DNA, 587 bp, Homo sapiens
caaataacagcaataatcacagtccctacccttaaggagttacattttggttgagagagatagtaatgaaattcataggtaaatacatagtggtccgatggagataaaagccacagaagggctcttttcaggcccttctttccctggcatgcttacatawcaataccctccttccctctgtgacaacacatactttctttggatttactgatactcattacctcgaggacagtaggatagccagcaatcagttcatctcaaaggtgactttgcatatcttttctgttgtgtatttgtttcatgcatggttactcagagatcaatatgcttttctaatttctaaattccttcttagacagtaatggtaattaattatccctggatcttgcaaatgtaatgagagtgggatcaatttcactgagctaagcctttagtcactgtttggggagtttgagtcctttttagccctaggattggtgtccctagatgtccaagttccttgcctaaagaggcctcatactgaacccacaactacttttctcctgattggtatcctactctgaatgacaggggataaccagtgagaa

SEQ ID NO: 931931 - DNA, 609 bp, Homo sapiens
tggtctgcaaggccacatcttagtaacaaagttagccttcaaaaggccttgccctactggatcctccagatctaatccagagtattttctatctgatctctgagcctctgcaggaatgcagagggagtttcctctttttcttgttgaatttcgaatgcctttgagacattttgtgttcaagagtggactctttgatccctttaattattagttccctgaggttctgcatttgggcctggtccctgggatcattattatcccatttgggttctacatttggaaatttttatttggctggcaacactccttgcccaggagggtgttgcctctcccagatagtcatgaccactctcctaatcattktcctttcttctcctgtgaacaggatattcatgatggacatcaattcagcccaggtgtaaaagccggtcttctaaataaaagggatcttctaggagtggtttcatttcctcttgaaattcctaacttcagtacttgtaagaggagcatttacaaagacaatccctccccatcccatgggaacttccctaagagggaacatgctagatatctgctgtgtggaagggatagggaagttctcaatatccc

SEQ ID NO: 931932 - DNA, 745 bp, Homo sapiens
aacaagcaaccccccagccccgttcttcggtggggagggctgaggcgggaagaattagaggcggggtgtgccagccgccctgtgcttcctgacccttagagacgagatctgaaaaggcaaatttcagggaaaaccatgctgatcacgcaacagcaacaggcttaggttgaggcctcattaacttaaaatcctacgtctcccacgcacccttcgcaatcaggccagggagcgttgaggtcaggcctagagaccgtgggaggagcgaggcctccgcgtgcctcactctccataggctgtgcctcactctccataggctgtgcccgcgctgagtcagggccagcccccgcccacatccctgccagcagggcccggcacccagcaggagccagcagcagcccccaccccatgaaggaagggcccccaagcctggctggaaccgaccggaaaaatgctcatttacacaatcctttggaattaaagttcaagcagttctcaaaaaaaaaaaamaaaacaaaacacacacacacacacacacacacacacacacacacacataaaaccctgaaaaccaaaccaaatccaagtcacttgaagaaacagcagcctgtagtcagcactgcacccacccaacagccaggtaacaggcaggtgtcctccaagcagcccagtaccccctccacccccacctcactggcagaaggaactcgtcagaccagtccagtttcggtcttcatttaaatttcaa

SEQ ID NO: 931933 - DNA, 769 bp, Homo sapiens
ggattttttgtggggttttctgtgtatagattatgtcatctgcaaacagagacaattttatttcttcctttcttatttgaatgccctttattcatgtttttttttttcataactgctctggctaggacttcgactattatgtagaatagaagcaaagaaagtaggcatccttgccttgtttctggatctcagaggaaaagctttcagtttttcaacatcgactatgatgctagcagtgggctttaaaatgcaaataaaaaccacaacgagacgtcacttcacacccgttaggatggttgttattttaaaaagggggattggacagtatggggagatattagagctctaatacattattggtgtacgtgtaatggtaagccactacggaaaacagcacagaaggtctgcaaaaattttaaaatatgactatcttatgatccagcaamcttacttctgggaatatatccaaaagaattgaaagcaggatctcaaagggatatctacattgcagcattattcacaatagccaagacatgcaagcaacctaaattttcaatggatgaatgaataagaaaatgtgtgtgcgtgtgtgtgtgtgtgtacaacacaaagtggaatattattcatccttaaaaaataaggatatcttgcttatgtgacaataaaaatgaacctgtaggacattatcataagtgaaataaatcagttacagaaggatgagtgatgcatgattccacatacatgaactatttaaaacagtcaaactcat

SEQ ID NO: 931934 - DNA, 647 bp, Homo sapiens
accattgtcatccccagccgctgagtgcagaactcattccggcctcgtggcagggatgtccacctctttctacggaaggcctaccagaaattcaccatcttcgcatgaaacggctggaattccttcaacaggctagcaaggggcaagatttacccacccctgaccaggataatggctaccacagcctggaggaggaacacagccttctccggatggatccaaaacactgcagagataacccaacacagtttgttcctgctgctggagacattcctggaaacacccaggaatccactgaagraaaaatagaattattaactacagaggttccacttgctttggaagaagagagcccttctgagggctgtccatctagtgagatacctatggaaaaggagcctggagagggccgaataagtgtagttgattactcatacctagaaggtgaccttcccatttctgccagaccagcttgtagtaacaaactgatagattatattttgggaggtgcatccagtgacctggaaacaagttctgatccagaaggtgaggattgggatgaggaagctgaggatgatggttttgatagtgatagctcactgtcagactcagaccttgaacaagaccctgaagggcttcacctttgg

SEQ ID NO: 931935 - DNA, 723 bp, Homo sapiens
tctatgttgctgcaaaggacataatttcattcctttttatgacgacatagtattccatatcatttctaccaacttctatgaacaaagcacattgtcaggcttgcctagattcaaggagtggagaagtagaccccaccacttaatgggagctctgtggtagctgtcatctaaaatggacccaaattatgtttattttctggaatgtgtacttctctgyagtcacctcccacactgaaccagggctagcctgactgaccaaagaatatagtagacgtgatgatgtgtgacttccaagggtagaatgtaacaggcattgcaccttccaccttgttctcttggatcactctttatggggagtcaggcaccattccatgaggacattcaagcaggctatgtaaacccacatgaagataaactgaagcttctactagaagccagcaccaacatgccagccataggagtgagccatcttgcaagagggtcctccagccccagtcatgtcttcaaatgactgcatcctcagccagcatctggctacaacctcatgagagtccccaagccagaaccacttagtaaagccactccctaactcctgatccacagaacactgtgagagatagtaaacgattagtgttattttaagccactgagttttagagtgatttgttatgcaaccttagataataaatacaagctgcaaataatctgtggcatagacagata

SEQ ID NO: 931936 - DNA, 641 bp, Homo sapiens
tcgggtgggagtgacctgattttcccggtgctgtctgtcaccccttctttgattaggaaagggaactaactccctgactccttgcgcttcccaagtgaggcaatgcctcgccctgcttcggctggcgcagggtgcgcgcacccactgacctgcgcccactgtctggcactccctagtgagatgaacccggtacctcagatggaaatgcagaaatcacccgtcttctgtgtcgctcaggctgggagctgtagaccagagctgttcctattcggccatcttggctcctccccaaaagattcttaattacatctgcaaagtcccttttgccatatgaagtgacatactcagaggttctgaggattaggagctggacrtctctggggaataattattctgcccaccccaggagtaagagtggggagacagaagacagcactggagtcatcctctggggagaaagtgaaaacccagccactcctcctcatcccctcatccaggactgtttggggtctgagagtttttctaaaaatagggagaagatggtgtgtggatctgagggtgaagccagaagggatgtggggaaggggaagggctagcaggtggctgttggaactctgtgaggtcttcaggagaaagatgac

SEQ ID NO: 931937 - DNA, 641 bp, Homo sapiens
tcgggtgggagtgacctgattttcccggtgctgtctgtcaccccttctttgattaggaaagggaactaactccctgactccttgcgcttcccaagtgaggcaatgcctcgccctgcttcggctggcgcagggtgcgcgcacccactgacctgcgcccactgtctggcactccctagtgagatgaacccggtacctcagatggaaatgcagaaatcacccgtcttctgtgtcgctcaggctgggagctgtagaccagagctgttcctattcggccatcttggctcctccccaaaagattcttaattacatctgcaaagtcccttttgccatatgaagtgacatactcagaggttctgaggattaggagctggacatctytggggaataattattctgcccaccccaggagtaagagtggggagacagaagacagcactggagtcatcctctggggagaaagtgaaaacccagccactcctcctcatcccctcatccaggactgtttggggtctgagagtttttctaaaaatagggagaagatggtgtgtggatctgagggtgaagccagaagggatgtggggaaggggaagggctagcaggtggctgttggaactctgtgaggtcttcaggagaaagatgac

SEQ ID NO: 931938 - DNA, 600 bp, Homo sapiens
atacactgctttctcaagctcatgtggaacattcaccaagatagaccacattctggactataaacataccttaacaaatctaaaagaatagaaatcatacaaagaatgtcctcagaccacaatacaattaaattagaaatcacatggaaagataattgggaaaaccagaaacgtttggagattaaacaacatatttctaaacaacatatgggtcaaagagaagtctcaagagaaattttaaaatattttgaactaaaaaatgcaacttatcaaagtttgtgggatgcagcaaaagcagtgaggtttccatagtattaaaaktaacatgttagaaaagaaaaaaaggtggaaaattattaagcttcaccttaggaaactggagaaagaagagcagtgtaaacccaaaggaagcagaagaaaagaaataataaaaatcagagcagaaatcagtgaaactgaaaactggaaaacaacagagaaagtcaatataaccaaaagctgcttctttgaaaacatcaataaaattgaaatctctatctaggctaagaaaaaaagaaagaagatgcaaattactaacatcagaaatgaaagaatggccat

SEQ ID NO: 931939 - DNA, 567 bp, Homo sapiens
ctcaagactatggggaaaatatctccaggccatgtcggagagcttcacggccattcctcacaccacaggcccagaggcccaggaggaaaaagtggtttcatgggccaggcccagggtctctgtgttgtgtgcagccwagggacttggtgctctgtgtcccagccactccaggtgtggctgaaaaggccaatgtacagctcaggctgtggcttcagagggtggaagccccaagccttggcagtgtccacgtggtcttgagcctgaaggtacacagaagtcaagaattgaggtttgggaacctttgcctagatttcagaagatatatggaaactcttggatgcacaggcaaaagtttgctgcagggacagggacctcacgagaatctcttctagggcagtacagatggaaatgtggggttggagccccttcacaaagtccctactggggcactgcctagtagagttgtgagaagagggccaccatcttccagaccccacaacagtagatccactgatggcttgcaccatgcacctggaaaagccacagacactcaaacgcagcccgtga

SEQ ID NO: 931940 - DNA, 585 bp, Homo sapiens
atggtcatatatgggttttattgtgtggaggcacataccttgtatacctaattcattgagagtttttaatcatgaagggatattgaattttgtcaaatttttttgtctgcatctattgaggtgatcatatgctttttgcctttcttttaatgtgatatatcacatttattgatttccatatgttgaaccatccttgccttcctagaatgtctcctacttgatcataataaatgatctttttaatatgctggtgaattttatttgatagtgtcttcttgaggatttttacrtctatgttcataaggaatattggcctgtaattttattttttgttgtgtccttgtcacaacaaaatgtttagaaatcagggtaatgctggcctactaaaatgagtttggaagtatgctcttctcttcatttttctggaatagtttgaggaaaagcggcatcagttcttctttgcatgtttgatagaatttggcaatgaagacagcaggtgctggtcttttctaaaaagccaaattaaatgctacatttatgttaaaattctgtggtatgtaatttaagaagaaaaaagcaactaag

SEQ ID NO: 931941 - DNA, 585 bp, Homo sapiens
atggtcatatatgggttttattgtgtggaggcacataccttgtatacctaattcattgagagtttttaatcatgaagggatattgaattttgtcaaatttttttgtctgcatctattgaggtgatcatatgctttttgcctttcttttaatgtgatatatcacatttattgatttccatatgttgaaccatccttgccttcctagaatgtctcctacttgatcataataaatgatctttttaatatgctggtgaattttatttgatagtgtcttcttgaggatttttacgtctatgttcataaggaatattggcctgtaattttattttttgttgtgtccttgtcacaayaaaatgtttagaaatcagggtaatgctggcctactaaaatgagtttggaagtatgctcttctcttcatttttctggaatagtttgaggaaaagcggcatcagttcttctttgcatgtttgatagaatttggcaatgaagacagcaggtgctggtcttttctaaaaagccaaattaaatgctacatttatgttaaaattctgtggtatgtaatttaagaagaaaaaagcaactaag

SEQ ID NO: 931942 - DNA, 591 bp, Homo sapiens
acataattagcaacagagttagtttgaattcttgtttttctatgtggatgccttttatttctttctcttgtctgattgctctggcaaaagtcaaaatatccattataagaaagaactgaacgaacttctgaaattgagaaattctctacaagaatatcacaayacaattggaagtattaacagcagaatcaaccaagatgaggaaagagtcccagagctcaaagaccagttatttgaatcaaatcagtcagacaaaaataaaaaattaaaaaaaaaacaaaatctttgagaaatatgggattgcgtagcgagaccaaatctatgactaatcagcattcctgagagagaaaaagagagtaagcaaattggaaaacatatctgaagatacggtccatgaaaattttccaatcttgctagagagctggatatgcaaattcaaggaatacagaaaacctttgtaagatactatacaagatgaccaacccaaggcatgcagtaacaagattcaccaaggtcaaggcaaatgaataaatattaaaggcagctagagagaaaggtcaggtcacttacaaagggagctccatcagacta

SEQ ID NO: 931943 - DNA, 811 bp, Homo sapiens
agcagaaaccataaaagccagaagagataggggacctcttatcaacatcctcaaagaaatgaaattcccaccaagcatttcatgtcccactaaactaagcttcataagcaaaggagaaataaaagctttctcagaaaagcaaacactaagaaaatttgttgccaccagataagccttacaagaggtcattaagggagtcataaacatggagacaaaagattgatacctgctaccacaaaaacacactcaagcacataacccaccggcaatataaagcaattatacaataaaagtgtgcaggaatttttattgcctttcattttcatgagatattatactgatccattacattgatgattttatactgtttggatcyagtgggcaagaattagcaactactctagacttattggtaagacatttctgtgtcagggtatggggaataaatctgactaaagttcacagacctatatctcagtgaaatttttaggaatccagagatatcaagcatttctagatattccttctaatatgaaggtttaattgcagctagctcctcctacaaccaaaaaaaatgcagaatgcctagtgggtctctttcaatttttgaggcaacatatttcccatttgagtgggttactctggatcattctccaagtgcccagaacactactaattttgagtgggttccattacaagcgaagtctctacaacaggtccaggctgctgtgcatgctactctgcctcttgaaccatatgatctagcagatccaatggtgcttaatgtgtcagtgataaatagggataatgt

SEQ ID NO: 931944 - DNA, 811 bp, Homo sapiens
agcagaaaccataaaagccagaagagataggggacctcttatcaacatcctcaaagaaatgaaattcccaccaagcatttcatgtcccactaaactaagcttcataagcaaaggagaaataaaagctttctcagaaaagcaaacactaagaaaatttgttgccaccagataagccttacaagaggtcattaagggagtcataaacatggagacaaaagattgatacctgctaccacaaaaacacactcaagcacataacccaccggcaatataaagcaattatacaataaaagtgtgcaggaatttttattgcctttcattttcatgagatattatactgatccattacattgatgattttatactgtttggatccagtgggcaagwattagcaactactctagacttattggtaagacatttctgtgtcagggtatggggaataaatctgactaaagttcacagacctatatctcagtgaaatttttaggaatccagagatatcaagcatttctagatattccttctaatatgaaggtttaattgcagctagctcctcctacaaccaaaaaaaatgcagaatgcctagtgggtctctttcaatttttgaggcaacatatttcccatttgagtgggttactctggatcattctccaagtgcccagaacactactaattttgagtgggttccattacaagcgaagtctctacaacaggtccaggctgctgtgcatgctactctgcctcttgaaccatatgatctagcagatccaatggtgcttaatgtgtcagtgataaatagggataatgt

SEQ ID NO: 931945 - DNA, 593 bp, Homo sapiens
tgtgcttgttggccatctgtatatcttctttggagaagtgcttattcaattcgattgcccattgggttgtttgtcttttgttgtttaaatgtaagagctctttctatatgctggatactaaacccttaccagatatctgatttacagatattttatccattcctgtatgtttccttttcacaatcttgctaatggcttttattgacygaaagctttgagatttttaaagtgcaatttatttttatttcctttttggcatgtgtttttggtgttaaagctaagaatcaactgccaaatccaaggttagggaaaacaccttatgttttcttctaacagttttatagttttagcatctatatatgtttttgatcaattttgagattctttttgtatattgtgtgctatggtctgaatatgtatgttgccctaaaattcataggctgaaatccttatcctcagggtgatggtattaggaggtggtggctttgggagattaatagaccatgggggcagagctctcataagtgctattcattctcttattaaaaatgtctgtgagaaacttcttacccctttagttatgtgacattaga

SEQ ID NO: 931946 - DNA, 588 bp, Homo sapiens
aactgaatgcaagttccttccttctgcaggcagaaccaaccaaggtgggtaaggaggacatctgtcatttctccccatgcccgtgccaggctaagctctggaaaggaggctctggaatgtttcttggggacccaccagcctctgagttcttggggacccaccagcctctgagttctttcttccagctcccttccttcctgtggccaatcagtgactcctcttttctctaactttttgctgtgttatcttttcttgaagccaaaaatgtgaagtgactgaatagagggatgacccaagggatggaagataaaaggtggacaagaactgatttcttaaaattttaattaataaattaattcattattattattttctgagacagggctttactctgtcacccaggctggaatgcagtggcacgatcatggttcactgcagcctcgtcctcctgggsccaagcgatcctcccacttcagcctcctgagtagctgagaccacaggcacacactgaaatgcctggctaattttttctatttttttgtggagacagggtctcactatgttgcccaggctggtctcaaactccta

SEQ ID NO: 931947 - DNA, 676 bp, Homo sapiens
gaccccagcaccctccggggcagtcctatgactgtttcttgcttcctgccctctgacttttagaggtgggtagccctggggtcctcccaggtctggacatcatcatcccagctagaggcatggagccccccaatcacagaggaagagacagtggtataagaggctccttatgtcgggtgtggtggctcacgcctgcaatcccagcactttgggaggctgaggcaggacaatcacttgaggtcaggagtttgagaccaacatggccaacatggtgaaagctcatctctactaaaattaaaaaaaawaataataattagccgggcctggtggtgcatgcctgtaatcccagctactcaggaggctgagacacgagaatcacttgagcccgggagatgaaggttgcagtgagctgagattgcaccactgcactgcagcctgggacacagagtgacactctctcaaaacaaaacaaaacagacaaacaaaaaagactccttagattcaaactggattccggcctcggttccactggtcataattcaactactttgcatctctaagtctctgtttctttaacttcaaaaggaagttagccttttccttgcagaggtgctgaggattaaatgagataatacgtggaaacattaggcatgtagcacacttagcagatggtggt

SEQ ID NO: 931948 - DNA, 753 bp, Homo sapiens
caggtgaccccagcaccctccggggcagtcctatgactgtttcttgcttcctgccctctgacttttagaggtgggtagccctggggtcctcccaggtctggacatcatcatcccagctagaggcatggagccccccaatcacagaggaagagacagtggtataagaggctccttatgtcgggtgtggtggctcacgcctgcaatcccagcactttgggaggctgaggcaggacaatcacttgaggtcaggagtttgagaccaacatggccaacatggtgaaagctcatctctactaaaattaaaaaaaataataataattagccgggcctggtggtgcatgcctgtaatcccagctactcaggaggctgagacacgagaatcacttgmgcccgggagatgaaggttgcagtgagctgagattgcaccactgcactgcagcctgggacacagagtgacactctctcaaaacaaaacaaaacagacaaacaaaaaagactccttagattcaaactggattccggcctcggttccactggtcataattcaactactttgcatctctaagtctctgtttctttaacttcaaaaggaagttagccttttccttgcagaggtgctgaggattaaatgagataatacgtggaaacattaggcatgtagcacacttagcagatggtggttggctccgcctgcttttccaccagtctgtggcctacagtttaaatgctgggaaaaaggacgtgagatttgat

SEQ ID NO: 931949 - DNA, 643 bp, Homo sapiens
ttccattcttcccgtcactttcaggtacaccaatcaaatgtagatttggtctcttctcatagtcccatatttcttggaggctttgtgtgtttcttttcatgcttttttctctaatcttgtcttctcactttatttcattaatttgatcttcaatcactgatatccttttgtcctttcgtccacttgatcgaatcgtctattgaagcttatgtgtgcatcacgaagttctcatgctgtggttttcagctccatcaggtcatttaagcacttcttgacactgtttattctagttaaccrttcatttaaccttttttcaatgtttctagcttccttgcgatgggttagaacatgctcctttagctcagagtagtttgttataaccgacctgctgaagcctacttctgtcaactcgtcaaattccttctccgtacagttttgatccgttgctggcaaggagctgcgatcttttggaggagaagaggtgctctggtttttggaattttcagtttttctgctctggtttctccccatctttgtggttttatctatctttggtctttgatgttggggttttgatgtggatttcctttttgttgatgttgatactattcctttctgtttgttagttttccttctaacagta

SEQ ID NO: 931950 - DNA, 584 bp, Homo sapiens
agaaaattaacaagaatattcaggacttgaactcagctctggatcaagtggacctaatagacatctacagaactctccaccccaaatcaagagaatatacattcttcttagtgccacatgacacttactgtaaaattgaccacataattggatgtaaaacactcctcagaaaatgcaaaagaacagaaatcataacaaacaatctctcacaccacagtgcaatcaaattagaactcaggattaaaaccaaacaaccacactcactcaaaaccaaacaactgcatacaagttgaacaacctgctcctgaatgactcctgggtaaaaaacaaaattaaggcagaaataatgaagtgctttgaaaccaatgagaacaaagagacaatgtaccagaatctctgggacacagctaaarcagtgttaagagggaaatttatagcactaaatgctcatgtcagaaagctagaaagatctcaaattgacaccctaacatcacaattaaaagggctagagaagcaagagcaaactgatctaaaagctaacagaaggcaagaaataactaagatcagatcagaattgaagaaga

SEQ ID NO: 931951 - DNA, 682 bp, Homo sapiens
cacccagattgagggtgggtctgcctttctcagttcactgactcaaatgttaatctcctttggcaacaccctcacagacacacccaggaacaatactttgcatccttcaatccaatcaagttgacattcaatattaaccatcacaagtccaccccttgttaacttgaacccatacacatctcctgaaatcatatataaacttcaaataaagacaatattaaggacataattatacctaacataatacagctatcctttrtacaaccagaaatgcatgagtccccaactccaatgctattacataaagttaacaacacttaaatgttgatatgaagtcaataaatcttatgtcacatgataaaggaaaaataaagggagtaagatgaagatattttcttagtacaagtgtatacatgcacaaacatgttcttaacaaaatgaggaggaaatactcatgacaattacaatcctcagttcttcaactggtcacgtgataatagccacccattctgtattccctttgccttcagcaagcacctcagcaagtcatgggttttttacctggtagagtgacccaaaccttcattcctgaagggtctaggctgtttgtggattgggctgttgtagtttcccattgaccttagtcacagggcatggtaataataagatacgccctaaggga

SEQ ID NO: 931952 - DNA, 565 bp, Homo sapiens
gtggctttgctactgactagcacttggggagtctaccctgtctgtggcttcctggaagctaatgaagttcagggcagcatgcaaacgaggacaggcaatgcactgtgcctgatgctgtctccacagcacacccatgtctacctstttgttccaaaatatttgtttcagccgagtatggtggtgcgtacctacaatcccaacactttgggaggccaagacaggaggatcacctgaccctaggagttcaagaccatcctgagcaacgtggccagacccgagctctacaaaaaatttaaaaaattagccaggcatggtggctctcacctgtagtcccagctactcaggaggctgaggcagagggagcccttgaacccaggacttccagtctgcagtgagctgtgatcacaccactgcactccagcctgggcaacaaagtgagaccctgtctcttaaaaaataaaaatgaaataaacgtttgtttccatccccaaaacatttgttatttccatgtgaatcagggaggagtaaaaaacggttccacacaaagccttctgatgggcttcta

SEQ ID NO: 931953 - DNA, 687 bp, Homo sapiens
acatattcctcgtttgggtgtgttactctggcacatttagcaagtgacctgaaaggccgccagttttgagtgaggtccagaataggagaaggttctgcaacaggtccaggctgctatgcaaactcctctgccacttggtccatacgagccagcagatccaatggtgcttgagatgtcagtggcagatagggatgctgtttggagcctttggcaggacctcataggtaaatcacagtggaggcctctaggattttggagcaaggccctgccatcttctgcarataactaatctccttttgagagacaactcttggcctgttactgcgctttggtggaaactgaatgtttgaccatgggtcatcatgttaccctgtgaactgaactgcttatcatgaactgggtgctttctaacccatcaagccataaaatgggttatgtatagcaccattccatcatcaaatggaagtggtatatatgtgattgggcttgagcaggtcctgaaggcacaagtaagttacatgaagaagtttctcaaatggccatggtctccactcctgccaccctgccttctctcccctcgcctgcactgatggcctcatggggagttccctatgatcagttgacagaggaagaaaagactagggcttgcttcacagatggttctgcacgatatgcaggcaccaccct

SEQ ID NO: 931954 - DNA, 624 bp, Homo sapiens
gaatggcctttcgaagtccacaattacaatgctaactatgtgacaatactttgcagggctggggaaaagttctccagaaggccatgtatgctctgaatcagcatccaatatatggtactgtttctcttatagacaggattcactaaaattcaggcaccttctacctcagtaaaatttctagggatccagtggtgtggagtctgttgagatattccttctaaggtgaaggataagttgctgcatttggcccctcctataaccaagaaaaaggcacaatgcctaggggggctatttggattttggaggaaacacattcctcatttgggtttgttactctggcacatttatcaactgacccaaaaggctgccagttttgagtggggtccagaatcaagggatggaagtggaagtggcamcactcaccatctcccctagtgatccactagcaaatttttttgcttcccattcctgcgacattacattctgctggcctagaggtcttagttccagagggaggaacattgcccccaggagacacaacaattccattagactggaagttaagactttgggctcctcctacctttaagtcaacaggcttagaagggagtaacagtgttggct

SEQ ID NO: 931955 - DNA, 549 bp, Homo sapiens
aggtctgttggagtttgctagaggtccactccagaccctatttgcctgggtatcagcagcggtggctgcaaaacagtggattttcgtgaaccgcgaatgctgctgtctgatcgttcctctggaagttttgtctcagaggagtacctggccgtgtgatgtgtcagtctgcccctactggggggtgcctcccagttaggctgcttgggggtcagggatcagggacccacttgaggaggcagtctgcccgttctcagatctctagctgcgtgctgggagaaccactgctctcttcaaagttgtcagacagggacatttaagtctgcagaggttactgctgtctttttgtttgtctgtgccctgcccccagaggtggagcctacagaggcaggcaggcctccttgaataatgcagacagctmttgatttcagcaggctctagttcaaagttccacctgtttgcaaatatctcaactctgagagggaaatgataactttatgatgttttcttctcttctgtaggaaaatgacagtgaccacattaaattacatt

SEQ ID NO: 931956 - DNA, 625 bp, Homo sapiens
gggtgcagtgtggcatgttatactcatactcaccctggcagtggcaggttgtcagggtttacacacacacaccagtggggcccatgcagttgcagtgaggcctctgcatatgtgcacactgacgaaacagtgagtraagactgtgcacagtgcatgccggcaatgcagtgaggggggactgtaagtaggtgtgcactattggaggtatatttgcagaagctctgcaatgagagcagagtagtgtctgctgctatggtgatggccactgagaagcaccctcgttgggcatccaaagctgccctccaacagggtatggactggcggggaccccaggagaggccagtcaacaggagagcatctaatcacactgggatgtcccacgggcaagacagcccttctctgtgcaggtctgacaatcaataatgaccaaagtcactcagaggcatgcggtaagccttaggaaatgggtgtccctggctgtgcttcactggaaccattcttatgtcaaactatctgggctctacacatactggaatcctgtctttgctacttctccaagcaactctccttgctagctcgaatgtccatggggattgtgaagtctcctaaagctaggattctggag

SEQ ID NO: 931957 - DNA, 625 bp, Homo sapiens
gggtgcagtgtggcatgttatactcatactcaccctggcagtggcaggttgtcagggtttacacacacacaccagtggggcccatgcagttgcagtgaggcctctgcatatgtgcacactgacgaaacagtgagtaragactgtgcacagtgcatgccggcaatgcagtgaggggggactgtaagtaggtgtgcactattggaggtatatttgcagaagctctgcaatgagagcagagtagtgtctgctgctatggtgatggccactgagaagcaccctcgttgggcatccaaagctgccctccaacagggtatggactggcggggaccccaggagaggccagtcaacaggagagcatctaatcacactgggatgtcccacgggcaagacagcccttctctgtgcaggtctgacaatcaataatgaccaaagtcactcagaggcatgcggtaagccttaggaaatgggtgtccctggctgtgcttcactggaaccattcttatgtcaaactatctgggctctacacatactggaatcctgtctttgctacttctccaagcaactctccttgctagctcgaatgtccatggggattgtgaagtctcctaaagctaggattctggag

SEQ ID NO: 931958 - DNA, 625 bp, Homo sapiens
gggtgcagtgtggcatgttatactcatactcaccctggcagtggcaggttgtcagggtttacacacacacaccagtggggcccatgcagttgcagtgaggcctctgcatatgtgcacactgacgaaacagtgagtaaagactgtgcacagtgcatgccggcaatgcagtgaggggggactgtaagtaggtgtgcactattggaggtatatttgcagaagctctgcaatgagagcagagtagtgtctgctgctatggtgatggccactgagaagcaccctcgttgggcatscaaagctgccctccaacagggtatggactggcggggaccccaggagaggccagtcaacaggagagcatctaatcacactgggatgtcccacgggcaagacagcccttctctgtgcaggtctgacaatcaataatgaccaaagtcactcagaggcatgcggtaagccttaggaaatgggtgtccctggctgtgcttcactggaaccattcttatgtcaaactatctgggctctacacatactggaatcctgtctttgctacttctccaagcaactctccttgctagctcgaatgtccatggggattgtgaagtctcctaaagctaggattctggag

SEQ ID NO: 931959 - DNA, 613 bp, Homo sapiens
accttccttgaacagttaggcttctccaaaaaatcttaaataatcactgatatgggttggttctgtgtcttcacccaaatctcattttgtagctcccataatttccacgtgttgtgggagggacccagtgggagatgactgaatcatgagggcaggtctgtcccatgctgttgccgtgatagtgaatgggtctcacgagatctgacggtgttaaaaatgggagtttctctgaacaatstctttttttgcctgctgccgtctatgtaagatgtagcttgctctttcttgccttccaccatgattatgatgcctctccagccatgtggaactgtaagtccaacaaaccactttcttttgtaaattgcccagttgcaggtatgtttttatcagcagcatgaaaatgaactaatacagtaaattgttacagtagagtggggtgctggtgaaaacatatccaaaaatgtggaagcgacgttggaactgggtaacaggcagaggttggaacagtttggaggactcagaagaagacaggaaaatgtggccaagtttggaacttcctagagacttgctgaatggctttgaacaaaatgctgacagtgatatggacgatgaa

SEQ ID NO: 931960 - DNA, 447 bp, Homo sapiens
aacttgttgggaaccggagtaaaggtgagtcttgcaaacacactggtggcattttgcccggccctatagatttgtagaactttgaacttgagagacatgatttagggtatctggcagaagaaatttctaagcaggaaagcacttacratgtgacttcggtgctgttgaaagcattcagttttataaggcaagcagagcataaaaatttggaaaatttgcagcctgacaatgcaatagaaaagaaaatcccattttctgaggagaaatccaagccagctacagacatttgcataagataatggggaaaatgtctccaggacatgtcaaaggtctttacctcagcctctcccatcacaggcacagagacctaggaggaagaagcggttttgtgggctgggcccagggttcctttgctgtgtgcagcctagggacttcatcccctgcatc

SEQ ID NO: 931961 - DNA, 447 bp, Homo sapiens
aacttgttgggaaccggagtaaaggtgagtcttgcaaacacactggtggcattttgcccggccctatagatttgtagaactttgaacttgagagacatgatttagggtatctggcagaagaaatttctaagcaggaaagcacttacgatgtgacttcggtgctgttgaaagcattcagttttataaggsaagcagagcataaaaatttggaaaatttgcagcctgacaatgcaatagaaaagaaaatcccattttctgaggagaaatccaagccagctacagacatttgcataagataatggggaaaatgtctccaggacatgtcaaaggtctttacctcagcctctcccatcacaggcacagagacctaggaggaagaagcggttttgtgggctgggcccagggttcctttgctgtgtgcagcctagggacttcatcccctgcatc

SEQ ID NO: 931962 - DNA, 749 bp, Homo sapiens
acccttaccaagaattgaatctgctggcacctttaacttggacttgccagcctgcagaactgtgaaaaacaaatgtcttttgtgatcaagtgccaagatgacttactagaagcagctagtatgctccactctcgtgaaaaggaaatagactggccagtaaacactagcacttcaactggatcttccaagaggacatgttgggattcagcaaggaagcaacagaagccatggagaacaaaaacagcaagacacaacagccacccacccaggattgagtggagtcaggggaggatccttaccacaaagaaatagtgactgagagagagccccatggccccatacttctgtcatggacctttgtaatcataggcacaggtgatccaccctgagtccctccccctggggccttcagactaacaaggagagctgcatagaatctgggcagagctccagatcaggcacatgagaagtcccggaggtcttagacccctaarcaccccagtgctagttgccatagcttcaccaacaaggaaggccaagttctctgcatgccaaaggttagtggctacattcatggttctgaggagcagagggactcatgccttgcctctggtaaacctctctgggcaaagcacactgacctggaactccagaacagccatgaaacacccacttgacctctttgactggcagcagctctgcatttctctgggatgaagctcccagaggcaatagacatatctgctgtt

SEQ ID NO: 931963 - DNA, 575 bp, Homo sapiens
ctacggattccactgctttggatgaaaagtcatctataaattatatccttccttttcatatgtgaattgtcttttttttgttgttttcttcactgctttcaggacttttgctttgctttgggtttttactggtttgaatatagtgtttaggtgcatttctctttgtgtatatcttacttgagactttttgagctttgtggatttgaaaaccaatgttgtcatcaaatttggggaatttttaggcattactactctaaatattttttgtgatttgtattttccttctatctttctagaactccaattatacatatgttgaaatgtttgataatgtttaataaatctctgcatctctcttcacttttatcctttttttcggtgcttttcaaattggatactttttaatttatctaatttttwaaatctcagttctttcttctgccaagtcagtgctactgattaacccattcaatgaatttttatttcagatattgtgtttttcagtcttagaattttgatcttttttttaaaaaaaatacttttcccttctccactgagatttcctgtttactcac

SEQ ID NO: 931964 - DNA, 475 bp, Homo sapiens
ctgtttgatgtgctcaaggctatgaccccaggcttcgagaaaagactccaccaagttccatgagcacctgtaggagagccggcctctgggtagatttcacccaaagaagctaaaacgctcacgtggtgcttatgggatcacagacrtgtttgtccctgatgctgcaggagaactggccactcacaggtggacctgatggccagagctactagcggggaccaggggtaacatgggtccccctccccgagccatgaagagctgcctgcggccatcttggccctcgcaccccgtctctgtcaccccaggcccctgtaacttgcttaacgcttcctgaggggtggtttgggtttttttttttttcttcctctcctcttgtagcaacagattaaaaaacaacaccctgacccaagccgagacaggttccaaacctcaacctgcagccggaagggggaagtgaaactcggctgggggtggg

SEQ ID NO: 931965 - DNA, 632 bp, Homo sapiens
tgctcaaggctatgaccccaggcttcgagaaaagactccaccaagttccatgagcacctgtaggagagccggcctctgggtagatttcacccaaagaagctaaaacgctcacgtggtgcttatgggatcacagacgtgtttgtccctgatgctgcaggagaactggccactcacaggtggacctgatggccagagctactagcggggaccaggggtaacatgggtccccctccccgagccatgaagagctgcctgcggccatcttggccctcgcaccccgtctctgtcaccccaggcccctgtaacttgcttaacgcttcctgaggggtggtttgggtttttttttttttcttcctctcctcttgtagcaacagattaaaaaacaacaccctgacccaagccgagacaggttccaaacctcaacctgcagccggaagggggaagtgaaactyggctgggggtgggggctcagaagccgccccagaaagcactgaaagccacagcacgtacacccactccagggatctgccagcaccctgtggggcccagactacaggctgatggcggaggcttcgagtgacccgggtgccgaggagcgggaagagttgctggggtaagggtctgcggcgacg

SEQ ID NO: 931966 - DNA, 476 bp, Homo sapiens
ccactccagggatctgccagcaccctgtggggcccagactacaggctgatggcggaggcttcgagtgacccgggtgcygaggagcgggaagagttgctggggtaagggtctgcggcgacgcccggcgccctgtgccgtgtccacgggtgcatagtccttgagctgcatggagggtggagaactgaggtgcctgatggggaatctggggcccccaatgggagaacttggatgtccgatggggaaactggggacccacagacaggtggcaggaagtcttgctgggacccccctctcacaacaagggtggaggtctcttccgcctgcctctgtgccctggactcactgggggaggcgcgtgggatcctaagcccatggtggatgcctgaagcgaggagaccccaagacgtgtcctggactgccagggaggagctggggactgtgggccctgttagcttgggaagaggcaaggtgggggc

SEQ ID NO: 931967 - DNA, 611 bp, Homo sapiens
gggtccagcacgtggggtggtaccccaggcctgggtcagacagggacatggcaggggacacaggacagaggggtccccagctgccacctcacccaccgcaattcatttagtagcaggcacaggggcagctccggcacggctttctcaggcctatgccggagcctcgagggctggagagcgggaagacaggcagtgctcggggagttgcagcaggacrtcaccaggagggcgaagcggccacgggaggggggccccgggacattgcgcagcaaggaggctgcaggggctcggcctgcgggcgccggtcccacgaggcactgcggcccagggtctggtgcggagagggcccacagtggacttggtgacgctgtatgccctcaccgctcagcccctggggctggcttggcagacagtacagcatccaggggagtcaagggcatggggcgagaccagactaggcgaggcgggcggggcggagtgaatgagctctcaggagggaggatggtgcaggcaggggtgaggagcgcagcgggcggcgagcgggaggcactggcctccagagcccgtggccaaggcgggcctcgcgggcggcgacggagccgggatcggtg

SEQ ID NO: 931968 - DNA, 538 bp, Homo sapiens
cccccaacccccagaaacaagagggtcctgtttctgctctaggcctgcaaaagcccctggcagggttggaggggaagagctcagggcctggggccaggaggaagggtgaggaagaggtagggaagaaataggagcgagacaggccgcgtccttgaaggctgggaagggaggagacggagcaaagaggacaggggctcgggaagaagattgggaggaaaggggcttgggagaaaggggaggggggcgtgcccggcccgggctctggcactgctggctggtcccgcttactccccctccgctgtgtggcagaarcttggagcggtggcacccgcgaggccctggcagctcgaccccagcggcaccgtgcggagcagcaaggcctggccctccgaggcccccgtgccaggggaagagaaagaggacagagggaggaggaggcagggcagcgagagaccccagcctgtcctctttccctcgcgtcggctagagccagggtcctgcacctccggcggcagggacgggcccttaccttccgcgt

SEQ ID NO: 931969 - DNA, 538 bp, Homo sapiens
cccccaacccccagaaacaagagggtcctgtttctgctctaggcctgcaaaagcccctggcagggttggaggggaagagctcagggcctggggccaggaggaagggtgaggaagaggtagggaagaaataggagcgagacaggccgcgtccttgaaggctgggaagggaggagacggagcaaagaggacaggggctcgggaagaagattgggaggaaaggggcttgggagaaaggggaggggggcgtgcccggcccgggctctggcactgctggctggtcccgcttactccccctccgctgtgtggcagaaactyggagcggtggcacccgcgaggccctggcagctcgaccccagcggcaccgtgcggagcagcaaggcctggccctccgaggcccccgtgccaggggaagagaaagaggacagagggaggaggaggcagggcagcgagagaccccagcctgtcctctttccctcgcgtcggctagagccagggtcctgcacctccggcggcagggacgggcccttaccttccgcgt

SEQ ID NO: 931970 - DNA, 596 bp, Homo sapiens
ctagagacttattgacaattgtgaccaaaaatgctgatagtgatatgaacagagatggccaggctattgaggtctcagatagaaatgaggaactaattggaaactggagtaaagtcacacttgctataatttagcagagagactggcagcattgtgcccctgctctaaagatctgtggaatgttgagagagatgattagggatctygtggaataaatttctatgcagcaaaatgttcaaggtgtaaacttgctgcttctaacagtatatattcatatctgttcacaaagtgatgatctaaaattgcaatatatttaaaagggaagaagagcataaaatattggaaaatttgcagcttgaccatgcaatagaaaagaaaaacccattttctgggaaggaattcaaggctgcagaaatttgcatcattgaaaaaaagtgaaatgttaatagccaagacaatggagaaaatgcctccagggcatttcagagaccttcatgggagcccctcccatcacaggcctggagacctaggagggaaaaatgtttttttgagccaggcccagggccacgctgctctgtgtagccttgggacatggc

SEQ ID NO: 931971 - DNA, 601 bp, Homo sapiens
cgcagatttggtcttttcacatagtcccatatttcttggaggctttgttcatttctttttactcttttttctctaaacttcacttctcactttatttcattaatttgatcttcaatcactgataccctttcttccacttgatcaaatcggctactgaagcttgtacatgcatcatgaagttctcatgccatggttttcagctccatcaggtcatttaaggtgttcactatgctgtttattctagttagccattagtctaaccttttttcaagatttttagcttccttgcgatgggttagaacatgctcctttagctcagaggagtttgttattatcgaccttctgaagcctgcttctgtcaacttgtcaaagtcattctttgttccattgctggtgaggagctgcaatcctttgsaggagaaggggcactctggtttttagaattttcatcttttctgctctggtttctccctatctttgtggttttatctacctttggtctttgatgttggtgagctacagatggggttttggtgtggatgtcctttttgttaatgttgatgctattcctttctatttgttagttttcgttctaagagtc

SEQ ID NO: 931972 - DNA, 539 bp, Homo sapiens
cttccctccttcccctattgtaactttctttctgatattataaaagtcactcatggctgggcgtggtggctcacgcctgtaatcccagcacgttgggaggcagaggcaggcagatcacctgaggtcaggagttccagaccagcctggccaacatggtgaaaccccgtctctactaaaaacacaaaaagttagccaggcgtggtggcgggcacctgtaatcccagctactcaggaggctgaggcaggagaatggcgtgaacctgggaggcagaggttacagtgagtcgagatcgcgccactgcactccagcctgggcartaagagtgaagcttcgtctcaaaaacaaagtcacacacgcttcttgtacgagggtcatttggccgaggggccagatggctcaccatctagttgggacaggccatgagctcggaatgctttttacatatttacatggttgagaagaaaatcaggagaataatgttttgggacatgggaaaatgacatggaatttgcattttagtgtccataaatgaagtttt

SEQ ID NO: 931973 - DNA, 725 bp, Homo sapiens
acctggccttattagctgtgtgttgttggctctgtcactgctagctatgtgaccttgggcaagccacataacctctctttgcttcaatttcccgtttgcaaaatgggaataataaccgcatgtacacatagggctgttatgaggactgaatgagtcagtatgtagaaatcacaagaaaagtgtctagcatatagttacctttgataaagtataagtaatataagcataagccagtattatggtttggatcatatttgtatgttgataagagcaacttcaacaagataaaagtttatatatctttcaggggccaggtgcggkggctcactgtaatcccagcactttggaggcagacgtgggcagatcacctgaggttaggagttagagaccagcctggtcaacatggtgaaacctcatctctattaaaagtataaaattagctgggcatggtggcaagtgcctgtaatcccagctatttgaaaggctgaggcaggagaatcgcttgaacccaggaggcagaggttgcagtgagccaagatcaagccattgcactccagcctgggcaaaaaagtgaaactctgtctcaaaaaaaaaaaaaaaaaaaaaaaccaaaatgtttatatatctttcaaataaaagaagtcggaggtaggcagcccagggctggtatagcagctccttggtcactgggggcagaagcgctgtcttcctccacccctctacca

SEQ ID NO: 931974 - DNA, 541 bp, Homo sapiens
tagggagcatgagtgatacatgaaagactagaagagaatgaagaggtcattgggaaggtctgagtcgccctgttaagaatataggccattaacttaagggcaatggaaaaccatagaaaggttttagaccttacaacctctctgtgcctcggctacttcatctataattacacctacatcrcagactcttcgtaagaattaactgagaacagtgcctgacacatagaaagcatttaatatgtattctagattatcatgaggataatgtttgtatctggattgtttttaaaatctccagcagagctgaggacggagttcaaattgaatgaaatactgaacaaattgaatgaaatactgaacaaattgtagggccagcaatccaagcaactcgatgagtctggggaaggaggatgtgaaacagtagtgcaaatgctaagaaaataagcactacttaaagagacagaaggtttcaggggatgagcagaagtttctcagaccatagtacatgagacacataggatcagaaatgatttactactga

SEQ ID NO: 931975 - DNA, 795 bp, Homo sapiens
aggagggatgaacaggcagagcacagagaatttttgggggcagtgagactattctgtacgacacgtctgtcaaagcccatggaatgtacaatgtgaagagtgaaccctaatgtcaactatgacctttagttcataatagtaatcaatatgggggtcatcaattgtaacaaatgaaccacactaatacaaaatgttaacaacaggggaaactgtgtgtagggacaggaagagtggtgtgggagtatgtggaaactctctgtactttttttgtgtgktttttttttttttttacattattactttatttttaaaatatactgagacagggtctcgctatgttaccgaggctggtcttgaactcctgagctcaagtgatctgcccgcctctgcctcccaaagtactgggattacaggcatgagccaccatgcctggctggaactctctgcactttgtttaatttttctggaaaccaaatactgtttcaaaaaataaaatctattaattaaaaaactatttagggtgagctacatgaaaatgccatttctataggtttaaaattactgaatatcaatgattttacatgacttaacataactagataattagataataatgagaacactacataacaaaagttataggatacagtcaaatttacactaaaatatatatatacatacatgtaagtgctttcaaacaaaaaaagaattgaaatctggattcagctataaaccaccaactttataagcctcctgagggtagtcaacatgtttctctcactgaccactgtatta

SEQ ID NO: 931976 - DNA, 689 bp, Homo sapiens
ccacttcaccttgtcacacgaacagcctggctgctcacacaaagcctgttcgtggactctcttcacgtggacgcgcgtgacacaccttaagtgctttaatatgtactcctaagagcaaaaacattgtcttttataatcccagtgccattattacactcaagaaacctaacattgatattttaagggacactttttcaaaaaaaaggtaaaattatgactygtacagatactaaaaaaaaaagttaaagatttattcaattcattaataatgaggaaactgcaagacgctactgccagttcaaaagataatccaaagaagacacacatttattgataaggatactgaaaggaataagcaaactgaggcaaaactggctgcttcttgtctgtggtcaaggattgttttgcattgttatccatgatctacaatttattgagttgtaaaataactcaaaggccgtgaaaggtgcagagcccctataggatcaaaattagataaccctgaagggtgggtgggtgggttctagaccttttcctataaagggctagattgtaaatgtttttggttttgcaagccatatggtttttgtacagatactcaactgtcagtgaacatgcaagtaatcttagacaatatgtgaagggtgaatgctgctgtgtgccaataaactttatttacaaacacaggt

SEQ ID NO: 931977 - DNA, 689 bp, Homo sapiens
ccacttcaccttgtcacacgaacagcctggctgctcacacaaagcctgttcgtggactctcttcacgtggacgcgcgtgacacaccttaagtgctttaatatgtactcctaagagcaaaaacattgtcttttataatcccagtgccattattacactcaagaaacctaacattgatattttaagggacactttttcaaaaaaaaggtaaaattatgactcgtacagatactaaaaaaaaaagttaaagatttattcaattcattaataatgaggaaactgcaagacgctacwgccagttcaaaagataatccaaagaagacacacatttattgataaggatactgaaaggaataagcaaactgaggcaaaactggctgcttcttgtctgtggtcaaggattgttttgcattgttatccatgatctacaatttattgagttgtaaaataactcaaaggccgtgaaaggtgcagagcccctataggatcaaaattagataaccctgaagggtgggtgggtgggttctagaccttttcctataaagggctagattgtaaatgtttttggttttgcaagccatatggtttttgtacagatactcaactgtcagtgaacatgcaagtaatcttagacaatatgtgaagggtgaatgctgctgtgtgccaataaactttatttacaaacacaggt

SEQ ID NO: 931978 - DNA, 689 bp, Homo sapiens
ccacttcaccttgtcacacgaacagcctggctgctcacacaaagcctgttcgtggactctcttcacgtggacgcgcgtgacacaccttaagtgctttaatatgtactcctaagagcaaaaacattgtcttttataatcccagtgccattattacactcaagaaacctaacattgatattttaagggacactttttcaaaaaaaaggtaaaattatgactcgtacagatactaaaaaaaaaagttaaagatttattcaattcattaataatgaggaaactgcaagacgctactgccagttcaaaagataatccaaagaagacacacatttattgwtaaggatactgaaaggaataagcaaactgaggcaaaactggctgcttcttgtctgtggtcaaggattgttttgcattgttatccatgatctacaatttattgagttgtaaaataactcaaaggccgtgaaaggtgcagagcccctataggatcaaaattagataaccctgaagggtgggtgggtgggttctagaccttttcctataaagggctagattgtaaatgtttttggttttgcaagccatatggtttttgtacagatactcaactgtcagtgaacatgcaagtaatcttagacaatatgtgaagggtgaatgctgctgtgtgccaataaactttatttacaaacacaggt

SEQ ID NO: 931979 - DNA, 591 bp, Homo sapiens
tcatttatttgtaaagatttatattgacaaacttcttgcaggattaataaagacaaaagagacaatgcaaatgagcaatcccatgcataaaaaggggacattattatacacgagacataagagtatattaagagggggctgggtgcagtggctcacgcctgtaatcccagcactttgggaggccgaggcaggaggatcacaaggtcagatgatcgagaccatggtgaaaccccatctctactaaaaatacaaaaaaaaaaaaaaaaattagccaggcgtggtggtgggcacctgtagtcccagctactcgggaggctgaggcaggagaatggcgtgaacccgggaggcrgagcttgcagtaagctgagatggcaccactgcactccagcctgggcgacagagcaagactctgtctcaaaaaaaaaaaaaagagtatattaaggataactttgtgctaataactttgaaaacagatgcaaagaataaattattagaaaatacaactcagggctgggcacagtggctcatgcctgtaatctcagcactttgggaggccaaggtgggaggatcacttgagcccaggaattcgag

SEQ ID NO: 931980 - DNA, 554 bp, Homo sapiens
tgatgttgagtgcctgtggcttttctcggtacagggtgcaagctgccagtggatcttctggggcctagaggacagtggccctcttcttacagctccactaggcagtgcgccagtggggactctgtggggggggctccaacyccacattttccctctgcgctgccttagcagaggttctccatgagggctctgcccctgcagcagcttctgctggacacccaggcttttccatacatactctaaagtctaggcctcaactcttgtactctgaacacccacagccttactacaatatggaagccaccaaggcatacagtttgcaccctctgaagcagcagcctgagctgcacctgggcccctttgagccatggctagagctagagtgactgagatgcggggagcagtgtcccaaggctgcacagggcagcaggaccctaggcctggcccatgaaaccattcttccttcctagacctctgggcctgtgatgggaggagctgctgtgaaggtctctgaagtggcttccaggtcttttccccattgtcttggctattag

SEQ ID NO: 931981 - DNA, 554 bp, Homo sapiens
tgatgttgagtgcctgtggcttttctcggtacagggtgcaagctgccagtggatcttctggggcctagaggacagtggccctcttcttacagctccactaggcagtgcgccagtggggactctgtggggggggctccaactccacattttccctctgcgctgccttagcagaggttctccatgagggctctgcccctgcagcagcttctgctggacacccaggcttttccatacatactctaaagtctaggcctcaactcttgtactctgaacacccacagccttactacaatatggaagccaccaaggcrtacagtttgcaccctctgaagcagcagcctgagctgcacctgggcccctttgagccatggctagagctagagtgactgagatgcggggagcagtgtcccaaggctgcacagggcagcaggaccctaggcctggcccatgaaaccattcttccttcctagacctctgggcctgtgatgggaggagctgctgtgaaggtctctgaagtggcttccaggtcttttccccattgtcttggctattag

SEQ ID NO: 931982 - DNA, 595 bp, Homo sapiens
tccccacctgccaaatactcccccaagtcccccatcaccccattgcttcctgctttccgctgatggggcagtcagcatggaggccaggcttggcaccgcaggagggattccggagcgctggtagtcctgcacgctggaaaggcttttctcaggagtcttccctggctycctgggaggctgagctgcagggaaatgcccagtgtgcaccccgcccgccagctttcctggaaccttctgtagagtgagccaagaaagaatctgcccacagggccctggggctataaattctctcttttccctgctcctggagatgaaccaggaagaaagctcatgcctcttccctgggtggatgctctcaataacaataacaaggcccagtgtggtggcccatggctgtaatcccatcactttgggaggctgaggcaagcggatggcttgagcacaggagtttgagactagtctggctctacaagaaatacaaagaaaattagccaggcgtggtggcatgcgcttgtggtcccagctactcaggaggctgaggagttcgaaccagagcaactccatcttgaataggggctgggtaaaataaggctga

SEQ ID NO: 931983 - DNA, 595 bp, Homo sapiens
tccccacctgccaaatactcccccaagtcccccatcaccccattgcttcctgctttccgctgatggggcagtcagcatggaggccaggcttggcaccgcaggagggattccggagcgctggtagtcctgcacgctggaaaggcttttctcaggagtcttccctggctccctgggaggctgagctgcagggaaatgcccagtgtgcaccccgcccgccagctttcctggaaccttctgtagagtgagccaagaaagaatctgcccacagggccctggggctataaattctctcttttccctgctcctggagatgaaccaggaagaaagctcatgcctcttccctgggtggatgctctcaataamaataacaaggcccagtgtggtggcccatggctgtaatcccatcactttgggaggctgaggcaagcggatggcttgagcacaggagtttgagactagtctggctctacaagaaatacaaagaaaattagccaggcgtggtggcatgcgcttgtggtcccagctactcaggaggctgaggagttcgaaccagagcaactccatcttgaataggggctgggtaaaataaggctga

SEQ ID NO: 931984 - DNA, 793 bp, Homo sapiens
tttcttgttgattttggatagttggataactgtatgctttggggatggtcatcttgtatagtttcttacaggagtttctgaatttcttgggtctgcatgttgacctctagcaaaattggggaaattttcctgaattaaactcttgaatatattttccaagttgtctactttttcttcttctctctcaggaatgccaataagtcataggttttgccatattacataatccaatgttcctcaaaatctttgttcagtttttaaagttatttaaaaaaaatttgtctcactggtttggttcaaaggaacagttttcttgctgtaaaagcctttctctttctttgtctagcctattgtttaggcttccaactgcattttgaaattcccgtagtgaatttttcaattccaacagttcttttttgttcttttttgtttagccatgccatctttcgtatcttgaacctttttstgtgcttgtttgtctctttgttttggatttcagctttctcctcaatctcactgagttacctcaccattcatatatttaactctctagcaacaatttcggacattgcaatctggttaggacccattgctaaggagtatatacaatcttttggaggtgacaaaacactctagctttttaagctgccagagttcttgctataatttctacttatctaagggatctcttgcttctttttttgagttttctatcatttggatggggttttaatttttttattctttttttcccttgagggtttgactgtggtgtatgttgtgtataattgaa

SEQ ID NO: 931985 - DNA, 793 bp, Homo sapiens
tttcttgttgattttggatagttggataactgtatgctttggggatggtcatcttgtatagtttcttacaggagtttctgaatttcttgggtctgcatgttgacctctagcaaaattggggaaattttcctgaattaaactcttgaatatattttccaagttgtctactttttcttcttctctctcaggaatgccaataagtcataggttttgccatattacataatccaatgttcctcaaaatctttgttcagtttttaaagttatttaaaaaaaatttgtctcactggtttggttcaaaggaacagttttcttgctgtaaaagcctttctctttctttgtctagcctattgtttaggcttccaactgcattttgaaattcccgtagtgaatttttcaattccaacagttcttttttgttcttttttgtttagccatgccatctttcgtatcttgaacctttttgtgtgcttgtttgtctctttgttttggatttcagctttctcctcaatytcactgagttacctcaccattcatatatttaactctctagcaacaatttcggacattgcaatctggttaggacccattgctaaggagtatatacaatcttttggaggtgacaaaacactctagctttttaagctgccagagttcttgctataatttctacttatctaagggatctcttgcttctttttttgagttttctatcatttggatggggttttaatttttttattctttttttcccttgagggtttgactgtggtgtatgttgtgtataattgaa

SEQ ID NO: 931986 - DNA, 793 bp, Homo sapiens
tttcttgttgattttggatagttggataactgtatgctttggggatggtcatcttgtatagtttcttacaggagtttctgaatttcttgggtctgcatgttgacctctagcaaaattggggaaattttcctgaattaaactcttgaatatattttccaagttgtctactttttcttcttctctctcaggaatgccaataagtcataggttttgccatattacataatccaatgttcctcaaaatctttgttcagtttttaaagttatttaaaaaaaatttgtctcactggtttggttcaaaggaacagttttcttgctgtaaaagcctttctctttctttgtctagcctattgtttaggcttccaactgcattttgaaattcccgtagtgaatttttcaattccaacagttcttttttgttcttttttgtttagccatgccatctttcgtatcttgaacctttttgtgtgcttgtttgtctctttgttttggatttcagctttctcctcaatctcactgagttacctcrccattcatatatttaactctctagcaacaatttcggacattgcaatctggttaggacccattgctaaggagtatatacaatcttttggaggtgacaaaacactctagctttttaagctgccagagttcttgctataatttctacttatctaagggatctcttgcttctttttttgagttttctatcatttggatggggttttaatttttttattctttttttcccttgagggtttgactgtggtgtatgttgtgtataattgaa

SEQ ID NO: 931987 - DNA, 815 bp, Homo sapiens
cctgattgttagaaggaaaactaacaaacagaaaggacatccacaccaaaaccccatctgtatgtcaccatcatcaaagaccaaaggtagataaaaacacaaagatggggaaaaaaacagagcagaaaaactggaaactctaaaaattagagcrcttctcatcctccaaaggaatgcagctcctcaccagcaatggaacaaagctggatggagaatgactttgacgagttgagagaagaaggcttcagatgatcaaactactccaagctaaaggaggaacttcgaacccatggcaaagaagttaaaaacctcaaaaaaaaattagatgaatggcaaactagaataaccaatgcagagaagtccttaaaggacctgatggagctgaaaaccacggcacgagaaaacattttaaggccaggcatagtggcccacacttgttatcttagcactttgggaggctgaggtgggaagatcatttgggttcaggagtttgaggatacagtgagctatgattatgttatggtactctaacctgggtgacagagtaagattctgtttctaaaacaaaaagcaatgacaaaaaaaccaaaagatttgctgcatttctttctaacttatttttgtttatatagcatttgtcctgcataatactaagtaatgctaaatagtactattattaaataatattaaatattattgaataataacaatattaaatttttaattctaaaactatttattgtgtacctattatggctccaaaactcttctaggcaatcaaaatacaattataaacttggaagagaaattctctg

SEQ ID NO: 931988 - DNA, 644 bp, Homo sapiens
tacagaaacttcttccactaacacttgagcctctcaaactatttataagagttggaattaacttctttcaaactcctgttaatgttgatattttgaccatctctcacgaatcatgaatgttcttaatggtatctagaatgttggatcttttccagaaggttttcaatttcagatacatgagagraagatcaaaatatttaatttaaattaattaatttaatcttctatttatgacagctatatccttatggaatgtattccttaaataataagactagaaatttgaactgactccttgatctatgggctgcaaatggatgttgtgttagcaggcgtgaaaaaaaaaagttaacctccttgtatcatcagagctcttgggtgagtaggtacattgtcaatgagcactaatgttcagaatgaaatctttctttttaagcagttggtttcaacagtgggcttaaaatatccagtatgggcttaaaatatgcagtagactatactgcaaaatagatgtgctgtcatccaagctttgctgttcaatttgtagaagacaagcagaatatatttagtatcattctcaggggtcctaggattcttggaatggtaaataatggtaaatgagcattggattaaacttaaagtca

SEQ ID NO: 931989 - DNA, 644 bp, Homo sapiens
tacagaaacttcttccactaacacttgagcctctcaaactatttataagagttggaattaacttctttcaaactcctgttaatgttgatattttgaccatctctcacgaatcatgaatgttcttaatggtatctagaatgttggatcttttccagaaggttttcaatttcagatacatgagagaaagatcaaaatatttaatttaaattaattaatttaatcttctatttatgacagctatatccttatggaatgtattccttaaataataagactagaaatttgaactgactccttgatctatgggctgcaaatggatgttgtgttagcaggcgtgaaaaaaaaaagttaacctccttgtatcatcagagctcttgggtgagtaggtacattgtcaatgagcactaatgttcagaatgaaatctttctttytaagcagttggtttcaacagtgggcttaaaatatccagtatgggcttaaaatatgcagtagactatactgcaaaatagatgtgctgtcatccaagctttgctgttcaatttgtagaagacaagcagaatatatttagtatcattctcaggggtcctaggattcttggaatggtaaataatggtaaatgagcattggattaaacttaaagtca

SEQ ID NO: 931990 - DNA, 877 bp, Homo sapiens
cccatgcctcctgatgaagagacacctcccagcaggggtagacatacacctcatacaggagagcactggctggcatctgacgggagcccctctgggacgaagcttccagaggaagtagcaggcagcaatctctgctgttctccagtctctgctggtgatacccaggcaaatagagtctggagtggacccccagcaaactccagcagacctgcagaaaagaggcctgagtgttagacggaaaactaacaaacagaaagcagtagcatcaatatcaacaaaaaggatgaccacgcaaaaactccgtctgaaggtcaccaacatcaaagactaaaggtagataaatccacaaagatgaggaacaaccagcgtaaaatgcagaaaattccaaaaaacagaatgcctcttctcctccaaaggatcacaactcttcgtcagcaaaggaacaaaactggatggagaacgagtttgctgarttgacaggaataggcttcagaaggtgggtaataacaaactcctccaagctaaaggagcatgttctaacccaatgcaaggaagctaagaaccttgataaaaggttagaggaattgctaactaaaataaccactttagagaagaacataaatgacctgatgtagctgaaaaacacagcatgagaacttcgtgaagcatacgcaagtatcactagccaaatcgattaagcagaagaaaggatatcagagattgaagatcaacttaatgaaataaagcatgaagacaagagtagagaaaaaaagaatgaaaaggaatgaacaaagcctccaagaaatatgggactatgtgaaaagaccaaacctacatttgattgatgtacctgaaagtgacggagagaatggaaccc

SEQ ID NO: 931991 - DNA, 610 bp, Homo sapiens
atactacattgtgaaggagaataatatttgatgacatgcttcaatagcttaaaagtgtatatatatttttaatttattccaaaaaatgggatacacgtgcaggtttgttacataggtatatgtgttccatggtggtttgctgcacctattgatctgtcctctaagtgccttcccctcaccccctaccccagcaacaggccctggtgtgtgctattcccctctctgtgtccatgtgttctcaatgttcagctcccatttatgagtgagaacatgtggtgtttggttttctgttcctgtgttagcttgctgaagatgatggcttccaatttcatccatgtccctgcaaaggacaagatctccttcctttttatggctgcataatattccatgatgtatatgtaccacattgtctttatccagcctatcattgatggggaattgggttggttccatktctttgctattgtaaatagtgctgtaataaacgtatgtgtgcatgtgtctttatagtagactgatttatattcctttgggtatttactcagtaattggattgcttggtcaaatagtatttctggttctagatccttaaggaatcgccacactgtct

SEQ ID NO: 931992 - DNA, 784 bp, Homo sapiens
tgtttttttaatgtgcatccccttgacctagcaattcaatcttagaaattaatcctaaggaaataatcatgactgtgtatgagtaattcactccaaggatattcatgttagcattgtttgttttaaaaattggaagcaatgggccgggcacggtggctcacgcctgtaatcccagcactttggactttgggaggccgaggtaggaggatcacttgaggtcaggagttcaagaccagcctggccaacatggtgaaatcccgtctctactaaaaatacaaaaattatccgggtgtggtggcrtgtgcctgtaatcccaactacttggaaggctgaggcaggagaatcacttgaactcgggaggcggaggttgcagtgagccgagatcacgtcatcgcactccagcctgggacacaggagagaaacgccgtctcaaaaataaataaataaataaataaataaataaataaataaaaatagaaaacaatggaagcgtttctaatgaggggctgtttactaggtggccgttcattttcattcattcaggtatttattgagcaggcatcatgtgccaggcagtgtattagacattaggcatacagcagccggtgaatgaatgaacaaaatctctgtcctctgggaggggagacaaccagggaaccagtaagcaagtgcaatatccgttgtgggtcagcgggtggtgggggtaagaggagaaggcagcaaaggcaatgctggaggtgagtgccgatggagactagagggaaggtgaggaagtgagtgagct

SEQ ID NO: 931993 - DNA, 784 bp, Homo sapiens
tgtttttttaatgtgcatccccttgacctagcaattcaatcttagaaattaatcctaaggaaataatcatgactgtgtatgagtaattcactccaaggatattcatgttagcattgtttgttttaaaaattggaagcaatgggccgggcacggtggctcacgcctgtaatcccagcactttggactttgggaggccgaggtaggaggatcacttgaggtcaggagttcaagaccagcctggccaacatggtgaaatcccgtctctactaaaaatacaaaaattatccgggtgtggtggcatgtgcctgtaatcccaactacttggaaggctgaggcaggagaatcacttgaactcgggaggcggaggttgcagtgagccgagatcacgtcatcgcactccagcctgggacacaggagagaaackccgtctcaaaaataaataaataaataaataaataaataaataaataaaaatagaaaacaatggaagcgtttctaatgaggggctgtttactaggtggccgttcattttcattcattcaggtatttattgagcaggcatcatgtgccaggcagtgtattagacattaggcatacagcagccggtgaatgaatgaacaaaatctctgtcctctgggaggggagacaaccagggaaccagtaagcaagtgcaatatccgttgtgggtcagcgggtggtgggggtaagaggagaaggcagcaaaggcaatgctggaggtgagtgccgatggagactagagggaaggtgaggaagtgagtgagct

SEQ ID NO: 931994 - DNA, 784 bp, Homo sapiens
tgtttttttaatgtgcatccccttgacctagcaattcaatcttagaaattaatcctaaggaaataatcatgactgtgtatgagtaattcactccaaggatattcatgttagcattgtttgttttaaaaattggaagcaatgggccgggcacggtggctcacgcctgtaatcccagcactttggactttgggaggccgaggtaggaggatcacttgaggtcaggagttcaagaccagcctggccaacatggtgaaatcccgtctctactaaaaatacaaaaattatccgggtgtggtggcatgtgcctgtaatcccaactacttggaaggctgaggcaggagaatcacttgaactcgggaggcggaggttgcagtgagccgagatcacgtcatcgcactccagcctgggacacaggagagaaacgccgtctcaaaaataaataaataaataaataaataaataaataaataaaaatagaaaacaatggaagcgtttctaatgaggggctgtttactaggtggccgttcattttcattcattcaggtatttattgagcaggcatcrtgtgccaggcagtgtattagacattaggcatacagcagccggtgaatgaatgaacaaaatctctgtcctctgggaggggagacaaccagggaaccagtaagcaagtgcaatatccgttgtgggtcagcgggtggtgggggtaagaggagaaggcagcaaaggcaatgctggaggtgagtgccgatggagactagagggaaggtgaggaagtgagtgagct

SEQ ID NO: 931995 - DNA, 642 bp, Homo sapiens
ggctgacatacacctcctgcactgataactatttgctgctgcacttgcccctagctgggcttggccgctgctgcagagggccatcctctgcctcacatcctctgatgagtcctgggcaggttcaggtgggccctgggcctgagccatggtatgtactctctggctgcagccccaccagaaaaatactcactgtctgaagaccagcacctggaggctctggagttagtgcagtgctttcaactgggggtgtcttgcttcctctgattcccaggggatatctggcaatgtctggaaacatttttggttttcacaactagaggttactactggcatctagtgggtaaaggccagggatgttgttaactatcatacaaggcacaggacagccaccccacatcaaagaattattcagccaaaaatgtcaatagtgctgagatttaaaasctttgggcagtgtcattaaacataacaatacctgccattaattgagcacttgctgtgtgtcagaggctgtgctaagtactttacatgcactttctcatttaatcctcaccaccacggtatgagacaggcagtgccattttcccattgtacaaatgaggaaatagagagactgaaggtgaactcacttgcacaatgatg

SEQ ID NO: 931996 - DNA, 680 bp, Homo sapiens
caagcaccattggatctgctggatcatatggcccaagtggcaaagcagcttacacagcagcctggacctgttgcagagctttctcctgttctggatcccactcaaaattggcagccttttaagccacttgataaatgggatggagtaacacacccaaacgaggaatgtggtgcctccaaaatccatgttgtgcctttttcttgattgtaggaggggccaaatgcagcaacatatccttcaccttagaaggaatatctcgatgggcytcacaccactggatccctagaaattttactgaggtagaggtccctgaatttcagccggatgtattgcgcatccactggcacacaaatgtctcaccagtaagtacagtgtgtttattactgcttactccctggatccaatcagcataaggtcatcaaggtaatggaccagtgcgatatcttgtggaagtgaaaagtgatcaagatctcttctaataagatcatgacaaaagccggactgttgatatatccctgaggtagaactgtaaaggcatgttgctggccttgctagctgaagcccagttgcttcttatggaacttatggacaggaatggagcaaatgccaagtcattggctgcataccaggtactaggagatgtgttaatttgctcaaatcaatgaaaccacatatggtaa

SEQ ID NO: 931997 - DNA, 634 bp, Homo sapiens
  misc_feature 269, 296: n = A,T,C or G
ctctcagaaactcttggggattaggtagccccttccgagcacccgcatcttttgccacatatacttacatgagaaaagaatgttataaaactgcttctctctgctctcacaaaggccatacacatcaccaaggaaaaatgatccgaggtgactaccctgagaaatggggggccaatgcttgttggacatgttatacccatataggtatgtctgacagaagaggcatccaagatgaggctaaagaatggcatactcaacaagtaattaanaacttagtccagctctgcctgtactcnccagtccatacaagaaggtagacctttccaggctacaagaaacacttaactctcattcttgtctctggaggctgtttaacggtatctctttcaggaatactagaggcctttcctagtaatccaaccaactgttggatrtgtctccccttgtgtattcaaccatatgtcccagtccctgtccccagagagtggaacttatccgccccattcctaaacaccaccaaattaatcggtcccatagtcaccgatttaccagtcacacaggcctcaaatctcacatgcataaacttcagcatgactctcaataagtgcacctccaatgtcagtcctgggtatca

SEQ ID NO: 931998 - DNA, 538 bp, Homo sapiens
ttatttgttgggaggaacaagaacttgaccaaaatacaaaagaaaatactgaggactgacatgatcataaggaactttgcaaagctaaacataaccaagaaatctaggaggctacacacatactcaggactgtgcacatgcccaggaaaggactgagacaatactgtcaatcacaatattagtagagctgttgacaattaaaacaaaaaaatgaagcctaacattttaatttaacttttaataaatattccatgtttattaaaaataaaaaattaaaaaaaaaaaaaagaaaaagaaaatgagctgatggaaaaagaaatgttcraagaattccgggaaaaggactagaacttgaacagaaagattataatgttatagttcagcacatgtgagatttagctgtgcaaccttggacaaggcacttagttaattacattaattaattaattttttttggagatggagtctcgctctgtcgcccagactggaatgtagtggcgaaatctcagctcactgcaaactctgcttccaggttgaa

SEQ ID NO: 931999 - DNA, 590 bp, Homo sapiens
ctcacacctgtaatcccagcattttgggaggccaaggtgggtggatctagagatcaagaccatccaggccaacatggtgaaactccatctgtattaaaaacacaaaaattagctgggtgtggtggtgtgctcctgtagtcccagctacttgggaggctgaggcaggagaattgcttgaacctgggagatggaggttgcagtgagccgagatcgctctgcagtccagcctggtgacagagtgagactctgtctcaaawaaaataaaataaaataaataaaataaaataaaataaaataaaaataaaagaagaaaaaatgtgaaatcaaccacagaaagagatttaagaaatcctctctacttggaaattataaataaaatactttaaataactgctgagttaaataagttgaaactgagatcataaactacttagaaattatgaacacaacttctttttccagcaaaacaatagagtaggacatcctacttgctacaaatatctaaaatggattaaaaaatgacaaaataattgtagatggatggctgagtttgtcagaaaggaagaaaaatttttggtttcaggaaatag

SEQ ID NO: 932000 - DNA, 847 bp, Homo sapiens
atgattgtaaaataaacatacttttagacaaagactggcttttgttgatatcactaagaaggatgaacccacaaaggactaggaagttaaaagcatcagtgagtaaggaaagctttaactgtatttacatcttgcagaagattggctttaagttactctgttcttgcttttaatatactcacttgacaaaatcccactgctggttaaatgcaagtctctactactctgtgcctacagccatgtagctaactagaactaaagcgaactacgctgactaccctcactttacattgatgatgatgaacctcaagtgggtctttactgctctggggcaatcatactatactttcctggttccttaattttcctactcttctttatgactacttcacaccttcgttcctcttttcaaaccactgtttcctcttctttcacttgatcactacttctttcctctctttaattaaaaaaagaagccgcctcttaccaccattttcaccactttacctatgcccttattccactttgctctcttttgcagtgaaacaccttrgatattcacacagtttctaaatcctatttcccattatttcggactcattccacttaggcttcttctcatcctcactacctgaagttgctctttggatatcaccagtgacctccatgtggctatatgcaattgtcaattctcggttctcatgttagttggcctatcagcagcatttgactattgatttgccctcttgtctggtaactgtagcagatgctatagatgtcctgctcatatcccctcatatcaatgcatgcttttccactttcagttactagtatctctttttctgag

SEQ ID NO: 932001 - DNA, 729 bp, Homo sapiens
atggttttctttgctgtgcacaagttttttagtttgctgctgtttgatttgtctgtttttgctttgttgtttatgctttatgtgtcatatcccaaaaattgttgcccagaccagtggcattgagatttcctctgtattttctaccagtagttttacctcttcaggtcttatatttgtctttaatccattttgagttggttgttgtatatgcaataagacaaggatctagtttcattcttctgcaaatggatatctaatcttctcagcatcatttatttgaggctatccttttctcattgtgtattcatagcactattgtcaaaaatcaattgaccagaaattcatgagttcatttctggatttcctaatagtaccatgctgttttaattaccatagctttacaaatatgctttaaaattagggagtttgatgcctccagcgttgttctttttgttcaagrttgttttgtttggggtaatttgtggctgcatacacatttaagggttgttttttatatttctgtgaaaaattgttgtggaattttttttttgagacagagtcacgctctgtcccccagactggagtgtagtggcatgcaatctcggctcactgcaaattccatctcctgggttcaagcgattctcccgcctcagccttccaagtaactgggactacaggcatgtcccgcccggctaatttttgtatttttagtagagatggggtttcacc

SEQ ID NO: 932002 - DNA, 777 bp, Homo sapiens
atctgagcattatgctagtggcccagggaccaccctgcctctgcttattacagccagagcctgaatgtactaccaaagagcttgaggacaagttcaccagcccagttcatcctaccagtacttgatcatgccatccaggggcctgaggatcactcagcttagtccaccactgttggcatttgaacatctctcttggagtctgaggtcagtctgaaccaacttgccaatgccaccatagctggcactcactcacatgcatccctgtgggtcaggggactggcctgtccaaccctgttgcagccaccgccaccaccagcataagccacttgggttccagtaggttgtcctaccactgctactaccatcacccacatcacgcccaacaccaaaggatgtgagaacttgcccatacactcattccactactgccactaccatcatccaaggaagtcacttrgaggcccaagaattggcccacctatacctgctaacatggaagccagtacatactgctctggggctcaaggacaggcatgctcagcccaatgctgctactactggggcctgaagatcggcccatctggcatcttagtccccagcaaaacttcaccacagccttctctaataaccataccctaagccactgaggaaatcacagataccactgatactgtttacagccaaataaatcatacagagtctactctactgcatgcacccacaataaaagccaaagtgtccaagccacccaacaatatctgtacatctttagggaaa

SEQ ID NO: 932003 - DNA, 613 bp, Homo sapiens
agcatcagcaagctactgtcttaaaatctgagctccccgagtgcaaaatttctgtcccttttaagggctcacaacactaaagatttcacatgaaagggttgtgattgattgagcaatctagggggtatgtgacaggggcttcatgcactggtggtcagagtgaaacagaacagagctgggagtttcacaatgttcttacatacaatgtctggaatctatggataacatcagttgctaagtcatgagttgaattttaactagtaggtttaggccaggcaggcccaggcctggtttcgggcctggcgccaggctgcctgcctttggtttcacttccttgtttttttccttaaaacaggtactgagtataaaacaatataaaacaatatragagggtctctctcttccctcaccatcagactaagagtggatttctcagcataaaccttacaggccaggaagaaatgggatgacatatgcaaaatgatgaaagaaaaaaaaaaggaaaaggaaaacctgccatacgaggataccatatactgcaaattattcttcataaatgaaggagaaagaaagccttcccagagaagcaaagtgagggaattaatctctacta

SEQ ID NO: 932004 - DNA, 528 bp, Homo sapiens
gaaacagtaaaaacatcagtggttgccaggggttggagggagagaaggatgaatagagcacagaggatttttaggaaagtaaaaccactttacatgatactacaatagtggatatatgttattatacatttgccagaacttatagaatgtacaacataaagagtgagcctaatttaaactatgtactttgggtgataacaatgtgttaatgagtttcattgattataatgagaagaacatttaattattacctgaattttggtgatggtaacacacaggtgggtcaaactcaccaaattgtatgcattaattatgtgtagtctttttatataccaataaataaatacaactggaaaaataagttggcaaacartgttttaaaaagtctataaacatatacacacagtggtatagataggaggggactgtctaatatgtattgtaaaattgtcatagaataaataacttctccttgaaagggcagtattcagaagcagcacttgtttgaaaataaatgttcaagatggg

SEQ ID NO: 932005 - DNA, 716 bp, Homo sapiens
ctgcagcactatagctcctttctgggatatatctgaaggtcagcaataaagggaaatcctcccagtgggcagaacttcaagcaatgcacctggttgttcacgttgcttgaaaggagaaatggctggacacgtgattatataccaattcatgatctgtgaccaatgatatggctggatgatcagggatttggagggaccatgattagaaaaattgatgacaaggtaattttgagaatagatatgtaaatggacctctctgaataaacagaaagataccgatatttgtatgccatgtgaatgcttaccaaaggatgaattgtgcagagggggattttaataatcaactggatggataatctcttctgtggatatcagtcaaygcctctcctcagccactcctgtcatctcccagtgagctcataaacaaagtggttgtggtggcaggaatggaaattatgctgggctcagcaacactgacttgactacactcaagttccgctcaccaacactgacttgactacaaccactcctgagtacccaatgtgccaacaacagagacaaacactaaatcttcaatgtggttctattctccaagggtaatgagcaagctaccctggttgcaggccaattacattgaactgcttccatcttggaaagtccaattttttttttttttttgagacagagtagtgctctgttgtccagatttgaatgca

SEQ ID NO: 932006 - DNA, 591 bp, Homo sapiens
gggggaggttcccccatactgttctcatggtagcaaataagtctcacgatatctgatggttttatcaggggttttatcaggggtttccacttctgcatcttcttcattttctcttgccgccgccatgtaagaagtacctttcacctctcagcatgattctgaggcctccycagccatgtaagtccaattaaacctctttttcttcccagtctcaggtatgtctttatcagcagtgtgaaaacggactaatacaggaaccttggaaggggagaaaccatatatttcatatgggagggcctgaggaaagactggcagacagaacctaggctgattctccaatgacccccactttctgatatcaatgcccctgttaattacatcccatgaatatgggaggaatctgtgaagcatctaacttatagaatatggcaaaggtgacagaatggcattcctatgataacattatgttatgtaagacttcatattgctagtagactcttctgctggccatgaagaagcaaactgctatgttgctgcctatggagtagaccacatggcaggcaacttgaatggactctaggagctaatggc

SEQ ID NO: 932007 - DNA, 601 bp, Homo sapiens
catccaggtgtttccatacatcctctgaaatacatgcggaggttctcaaagctcaactcttgttttctgtgcacctgaaggctgaacaccacgtggaagctgccaagtcttcttggcagaaggaagctaccttctgaagcaatagcccaagctgtaccttggcccctatagtcatgtctgtagctggagtggctgggatacagcgcatcatgtcccaaggctgcacagagcacagggaccctgggcccaggaaggtccctcatgggcctccaggcctgtgatrggagggcctgccatgtagatctttgaaatgccttggagacattttccccattgttgcttatgcaaatttctgcagctggcttgaatttctccctatgaaatgtttttttcttttctactgcatggtcagactgcaaattttccaatcttttatgttctgcttcccttttaaatataagttccaattttagatcatctctttgtgaacacatatgactatatgctgttaggagcacccaggtcacatcttgagtaatttgttgcttagaactttcttctgacagataccctaaatcatctctctcgagttcaaagttcc

SEQ ID NO: 932008 - DNA, 601 bp, Homo sapiens
catccaggtgtttccatacatcctctgaaatacatgcggaggttctcaaagctcaactcttgttttctgtgcacctgaaggctgaacaccacgtggaagctgccaagtcttcttggcagaaggaagctaccttctgaagcaatagcccaagctgtaccttggcccctatagtcatgtctgtagctggagtggctgggatacagcgcatcatgtcccaaggctgcacagagcacagggaccctgggcccaggaaggtccctcatgggcctccaggcctgtgatgggagggcctgccatgtagatctttgaaatgccttggagacrttttccccattgttgcttatgcaaatttctgcagctggcttgaatttctccctatgaaatgtttttttcttttctactgcatggtcagactgcaaattttccaatcttttatgttctgcttcccttttaaatataagttccaattttagatcatctctttgtgaacacatatgactatatgctgttaggagcacccaggtcacatcttgagtaatttgttgcttagaactttcttctgacagataccctaaatcatctctctcgagttcaaagttcc

SEQ ID NO: 932009 - DNA, 601 bp, Homo sapiens
catccaggtgtttccatacatcctctgaaatacatgcggaggttctcaaagctcaactcttgttttctgtgcacctgaaggctgaacaccacgtggaagctgccaagtcttcttggcagaaggaagctaccttctgaagcaatagcccaagctgtaccttggcccctatagtcatgtctgtagctggagtggctgggatacagcgcatcatgtcccaaggctgcacagagcacagggaccctgggcccaggaaggtccctcatgggcctccaggcctgtgatgggagggcctgccatgtagatctttgaaatgccttggagacattttccccattgttgcttatgcaaatttctgcrgctggcttgaatttctccctatgaaatgtttttttcttttctactgcatggtcagactgcaaattttccaatcttttatgttctgcttcccttttaaatataagttccaattttagatcatctctttgtgaacacatatgactatatgctgttaggagcacccaggtcacatcttgagtaatttgttgcttagaactttcttctgacagataccctaaatcatctctctcgagttcaaagttcc

SEQ ID NO: 932010 - DNA, 731 bp, Homo sapiens
tagtgctttttttcaggagctcttgtaaggcaggcctagtggtcacaaaatccctcagcatttgcttgactgtaaaggattttatttctccttcacttatgaagcttaattggctggatatgaaattctggcttgaaaattctttttttaagaatgttgaatgttggcccccactctcttctggcttttagggtttctgccaagagatccgctgttagtctgatgagcttcccactgtgggtaacccagcctttctctctggctgcccctaacatttttttcttcatttcaagcttggtgartctgaagatcatgtgtcttgtggttgctcttctcaaggagtatctttgtggtgctctctgtatttcctgaatttgaatgttggcctgccttgctaggttggggatattctcctggataatatcctgatgtgtgtttcccaacttggttccattctcctgtcattttcaggtacacaaatcaaatgtaggtttggtcttttcacataggcccatatttcctggaggctttgcttgttccttttcattcttttttctctaatcttgtctcatgctttatttcattaagttgatcttcaatctctgatatcctttcttccactcgatcgattcggttattgatacctgtatatgcttcacgaagttctcgtgctgtgtttttcggctccatcaggtcatttatgttcttctctaaactggttattctagtta

SEQ ID NO: 932011 - DNA, 731 bp, Homo sapiens
tagtgctttttttcaggagctcttgtaaggcaggcctagtggtcacaaaatccctcagcatttgcttgactgtaaaggattttatttctccttcacttatgaagcttaattggctggatatgaaattctggcttgaaaattctttttttaagaatgttgaatgttggcccccactctcttctggcttttagggtttctgccaagagatccgctgttagtctgatgagcttcccactgtgggtaacccagcctttctctctggctgcccctaacatttttttcttcatttcaagcttggtgaatctgaagatcatgtgtcttgtggttgctcttctcaaggagtatctttgtggtgctctctgtatttcctgaatttgaatgttggcctgccttgctaggttggggatattctcctggataatatcctgatgtgtgtttyccaacttggttccattctcctgtcattttcaggtacacaaatcaaatgtaggtttggtcttttcacataggcccatatttcctggaggctttgcttgttccttttcattcttttttctctaatcttgtctcatgctttatttcattaagttgatcttcaatctctgatatcctttcttccactcgatcgattcggttattgatacctgtatatgcttcacgaagttctcgtgctgtgtttttcggctccatcaggtcatttatgttcttctctaaactggttattctagtta

SEQ ID NO: 932012 - DNA, 731 bp, Homo sapiens
tagtgctttttttcaggagctcttgtaaggcaggcctagtggtcacaaaatccctcagcatttgcttgactgtaaaggattttatttctccttcacttatgaagcttaattggctggatatgaaattctggcttgaaaattctttttttaagaatgttgaatgttggcccccactctcttctggcttttagggtttctgccaagagatccgctgttagtctgatgagcttcccactgtgggtaacccagcctttctctctggctgcccctaacatttttttcttcatttcaagcttggtgaatctgaagatcatgtgtcttgtggttgctcttctcaaggagtatctttgtggtgctctctgtatttcctgaatttgaatgttggcctgccttgctaggttggggatattctcctggataatatcctgatgtgtgtttcccaacttggttccattctcctgtcattttcaggtacacaaatcaaatgtaggtttggtcttttcacataggcccatatttcctggaggctttgcttgttccttttcattcytttttctctaatcttgtctcatgctttatttcattaagttgatcttcaatctctgatatcctttcttccactcgatcgattcggttattgatacctgtatatgcttcacgaagttctcgtgctgtgtttttcggctccatcaggtcatttatgttcttctctaaactggttattctagtta

SEQ ID NO: 932013 - DNA, 618 bp, Homo sapiens
acaggtttgagatatctctttggagattgcaagcttccataaaccttggtggctttcacatagtgtcaagtttgctggcacacagaatacaagaataaaggaggcttggcagcttccacctagattccagagaatgtctggraaagcatgggtgcccaagcagaagcctgctacaggggcagaaccccacagagaaactctactaaggcaatgtattagtcggttttcatgctgctatgaaaaaatacccaagactgggtaatttataaaggaaagaggtctaattgactcacagttctgcagggcttgggaggcctcaggaaacctaaaatcatggcagaagaggaagcaaacacacctttcttgatatggcagcaggaaggagaagttcagagcaaagtgggggaaaaaccccttataaaaccatcagatcttgtgagaactcactcactattacgagaacagcatggaggtgactacctccatgattcaattaccttccactgggtccctcccatgacacatggggattatggggactgtaattcaagatgagatttgggtggggattcagacagaccataccattctacccctaccccctgctaaatctcatgt

SEQ ID NO: 932014 - DNA, 618 bp, Homo sapiens
acaggtttgagatatctctttggagattgcaagcttccataaaccttggtggctttcacatagtgtcaagtttgctggcacacagaatacaagaataaaggaggcttggcagcttccacctagattccagagaatgtctgggaaagcatgggtgcccaagcagaagcctgctrcaggggcagaaccccacagagaaactctactaaggcaatgtattagtcggttttcatgctgctatgaaaaaatacccaagactgggtaatttataaaggaaagaggtctaattgactcacagttctgcagggcttgggaggcctcaggaaacctaaaatcatggcagaagaggaagcaaacacacctttcttgatatggcagcaggaaggagaagttcagagcaaagtgggggaaaaaccccttataaaaccatcagatcttgtgagaactcactcactattacgagaacagcatggaggtgactacctccatgattcaattaccttccactgggtccctcccatgacacatggggattatggggactgtaattcaagatgagatttgggtggggattcagacagaccataccattctacccctaccccctgctaaatctcatgt

SEQ ID NO: 932015 - DNA, 645 bp, Homo sapiens
agagattttccaggcttgccttcctttgtggcttttatttctctgtattcatttttatgtcagagtccaaagatcatcaaatgtttcatgtaacaccaacataaaatgattctggtattctgttgaatatacgaatttagaggctcaatttagtgtatttccttatggagctgacmcataattatttgctgaagaaatcttttggatctgctgataagaacacccttggcccactttcacaatatggttgaatagcagtctactcagggagaagtaatggttagacccttcaattctcaaaagaggattcaatcattcatgcaaaaaatatttattgactgccaaccatatgccaaacccactgttcaggtcatttggattgtatcagtgaataaaaacacaaaaatgtttgctcttgtgaagcaaatcagaaagactgcagaaagttaaaacaaaacattgaatctgcaattattttgcaacaaaaaacaatcatttccaggtatttctgaaaacctacattctcacagtagcatatttataaaaagcatggtaaatagaaattgtgtttatataggttttctgtgattgccataacaaaatatgaaaaactaggtggtttaaacaacaaaaatgtattatctt

SEQ ID NO: 932016 - DNA, 654 bp, Homo sapiens
tcctggatttggaaaggaaggaaggaaaacaaaggggattctctatagaatgtagattttcccacaagacactttgcagggcaagtttaagatatggcagagaaacatgttttggaatagaacattttgattttctttcttgttattccagagttacattggaaaataaatcacgatatacaaggttaaataaaacccatctgatgagaatttgtsgtttgtaggacatgattccccagactccttagataggagtttctgcaagataaaaaaaaaaagtcagagtttagtcctcaaaggctatgatgtgccttaaggagaaaataggtgtgttggagaagcttcattcaggcatgagttatagtgctgttggctgtaagttcaatgttaatgagtcaatgatatagattaaatatgtgtaagaaacacatagaaagcaaggttatgtatcaattggttaatgaaaatatttgaccagaggctcacaggtacctaaccttgtatttcctctaggagtgatgatttggtatttgttaattcagtgtttgtaatgattttgtagtacacatctacctccaataacaagaatttgctgtattgacaaaggttcaggtaaagggtaccacaagggatagagaagcaatccagggctca

SEQ ID NO: 932017 - DNA, 654 bp, Homo sapiens
tcctggatttggaaaggaaggaaggaaaacaaaggggattctctatagaatgtagattttcccacaagacactttgcagggcaagtttaagatatggcagagaaacatgttttggaatagaacattttgattttctttcttgttattccagagttacattggaaaataaatcacgatatacaaggttaaataaaacccatctgatgagaatttgtggtttgtaggacatgattccccagactccttagataggartttctgcaagataaaaaaaaaaagtcagagtttagtcctcaaaggctatgatgtgccttaaggagaaaataggtgtgttggagaagcttcattcaggcatgagttatagtgctgttggctgtaagttcaatgttaatgagtcaatgatatagattaaatatgtgtaagaaacacatagaaagcaaggttatgtatcaattggttaatgaaaatatttgaccagaggctcacaggtacctaaccttgtatttcctctaggagtgatgatttggtatttgttaattcagtgtttgtaatgattttgtagtacacatctacctccaataacaagaatttgctgtattgacaaaggttcaggtaaagggtaccacaagggatagagaagcaatccagggctca

SEQ ID NO: 932018 - DNA, 616 bp, Homo sapiens
ttccttatttctcataatacagtatttcatagtatgaatagatcacaatttgttatttatttcactcttgatagacatttaggttgtttccatttggagttattattcagtactgctatgaatattcttaaacatgtatactggtgcacataaacatatgttttatgagggtatataacttggaggtgaattkctgtgtcataaattatgcatatcttgtattttatttgataatgtcaatctgtttgctatagtaattgtgccaatttacacttccatcaacaacatttgagttcttgatgttctacaaccttgaaagcttggtttgatactctagtgaggtatagtggtgtatcagtatggctttagtgtacatttccctgctaacaaatgaggttgagaattaatgctcatttcatattcattatctgtcaaatcttctgcctgttttttttgttgtgttgtctgtttttgttttcttttgactggtaggttcgtaggaattctttatgtatcttagatatgaaccctgaaccccttgttgattacacacattgaaaaatggtgttccacttcgaggtttgctttttctctcctttagtgatgcactttaatg

SEQ ID NO: 932019 - DNA, 769 bp, Homo sapiens
ttttcactttttgtagagatggggttttgccatgttgctcaggctgctctcaaactcctgacctcaagtgatctacccgcctgagtctcccaacatgctgagattacaggcgtgagccaccgtgctcagcctgaactttatattcttaactgtattttaaatagtgtagtaaatgccttcccttggtacgtggttggtatagatataaaaaattccatttccctttagaggttggcttgaaaattatctttacaatacacgggtttggatattggtgacagtccttctgacatttccagataaattaaaaacgtgtatggatatccacacgattaaggagaaactgattttgtatcaattaaatatacaaaaatcttccctgttaaattcacayaatgcatatagtcctaggaccttaaatatattcacagttgagttggtgttccttaggagtgtgtgatgctcatgtttgcagatgtcagtgccatggtcatgccgataactgcgacacaacaagccagccatatagatgcctctgctcccaggagagcttcactgaaggacttcatgtgagttctattttatgcatggaaatctaaaaaaaaaatagtagagatggtgactataaattctatgaacttaatcttggcctaacaaatgaaaataaatttaaaaactgatatgaacttaaaatgtcaattattgcagattttttaagaaaaataacagccatcaattaagttgaaattgtagtttttaaaaataattt

SEQ ID NO: 932020 - DNA, 592 bp, Homo sapiens
ttacaatgttctatccatacttaggttcaaagaaataatttctgatgcatcttcctaatttatcaaaagaaacattttaacagccttaaagtgacaacactaaaatcctctaacacattaatcatagaaaatgacataaaatatgttctaaaagagctataagtgcaaattcaattttctatagacattttaaaatggatcaaggtagcttcatttcatcttgaatttatattacagtagataggaatctttgacttttatcattttcagttggcatacacaatcaaagcaatacatggaaatggatttctcatgcttgagtaaccagacgttctcctttcttakaactgttttccctacttgctgttttgaaattctaggctattattttagataagtttatggtagctgttgtaacagaaagacccctgaagctcaatggctttatacaacagaagcttattttgggcccacatgaattccaactggtgacaggtgtgaggatgggcttctgctccatttagtcatccaagaatctctactaaacggattctgacatatttaactcttggtttctaagatatccatattg

SEQ ID NO: 932021 - DNA, 540 bp, Homo sapiens
tgtctcccttactgttattgacaacttgttttgggcatgctttgctcacacctactatgatctcttctgccaacccttctaagatcattctgtgatcattacaatccggttttgctcccggctccctactttacaccctccgaaggtcaacttagatatttctccttcagctacatactgccartttatatcagtgccatagaagagacactggtaatgcatcttttgatgctttatttgaacaactctgtccccaaatcccagacaggttatcatattttgcaataacttctctgtccacattattcaatggccgagttcaataaatgcttggaggttttcaaactccttattctcattcaacacatccttgtatctcctgaaaaatagtgggtttgcagatatttacctgggcctttagtgtatcagctagcatgccagttgttacttggtccgtttattctttaacccatccaaggattcatctatgcctcaatgttccttcaaggacaatcaccacccaattctattatctgactc

SEQ ID NO: 932022 - DNA, 540 bp, Homo sapiens
tgtctcccttactgttattgacaacttgttttgggcatgctttgctcacacctactatgatctcttctgccaacccttctaagatcattctgtgatcattacaatccggttttgctcccggctccctactttacaccctccgaaggtcaacttagatatttctccttcagctacatactgccagtttatatcagtgccatagaagagacacyggtaatgcatcttttgatgctttatttgaacaactctgtccccaaatcccagacaggttatcatattttgcaataacttctctgtccacattattcaatggccgagttcaataaatgcttggaggttttcaaactccttattctcattcaacacatccttgtatctcctgaaaaatagtgggtttgcagatatttacctgggcctttagtgtatcagctagcatgccagttgttacttggtccgtttattctttaacccatccaaggattcatctatgcctcaatgttccttcaaggacaatcaccacccaattctattatctgactc

SEQ ID NO: 932023 - DNA, 574 bp, Homo sapiens
ccgggttctttcataatgttttcaaggttcataatggatgaaccttattttcaaggtttataatggtgtcattatggctgaaccttgaaatcattatgacaagtgaaagaagctagtcacaaaagaccgtggtagcaaggttcattcatgctaccatgttgtagcatctatcagtgctycattttttttcattcctttttatggtcaaatagtattccattgtatagatataacacatttcatttatctttggctactatgaatgatactgttataaacattcatgtacaagtttttgtgtggatatatgctttcattcctcttgggtatatacctaggagtggaattgctggtcatatggtaactcagtgtttacatgtttgaggtgctgataaatcattttctaaagtggctgccatgtcttacattcctaattaccagtgtatgggagttctcattcctccaccttttcaccaatacttacagtagttccttatctgtagttttgattttctgttgtttcagttacttatggtcaacacggtccaaaaatattaaataaaaaatttccaga

SEQ ID NO: 932024 - DNA, 574 bp, Homo sapiens
ttctttgctaagactttcttttttttatttgcttcaagtatgttcataattgttcactaaagcattacaatcatggctcctttagaatctttgaaagataactaatatcactattaccttgaagttgatatctattcattttcttttgtcattcaagcagaagttttcctggttgttactatgatgaaggatttttagttaaaacctgggygtttttggtattatgttatgagactctggaccttatttaaattttgttttaactggccttttctgaaatgacttgggcaaggagaagggggcactgccttcttactgccagatgcagataatagtctaggttccctccttggccttctttgacaaacagtaggaggagctcttcactactgctgggcaggagtggtatttctggctctccgcaaggcctccattgataccttcctggctgggaggggcaggagtgccttgttactactctccacacagactccactgactctgcatggaaaaatagaggggtagccgtactacccaggaccactgggtaatgacaaaagttctgactcccact

SEQ ID NO: 932025 - DNA, 589 bp, Homo sapiens
tactaatgactttatttgaggaactgcatagggtagtgaatatacattaatagctgtgtgcctttgggaaaattaactaaattgtctgtgctcagtttccctgtccgtaaagtggtattaacgctgtctattttatagggtagtcatgagaatttaatgagaacatttatataaaatgcttatctcaatacttggcacatagtaaatactcaaacgaaaagctgttgatgttatcattrttattactatgatgactgttggcattcacaattataaccatacctgcagtgtgaatcctcattgaaaagaaacttccatcacatgctaaatattctcaaggaatattttcctaaccataaaccagtcaagggatgagcccttgataaagaaaggattttttaacgagaatcctttattacctccaaaattacatgtgctaactttaccataaacccaaaggagcagaatcacctacattgggaaaaaaaaaatcttgtttgtatagtaatttgcagttcacagagctccttcccatccatttgtctatctaaacttcgtaaccactcagaaaagagaatttgatttcccc

SEQ ID NO: 932026 - DNA, 506 bp, Homo sapiens
aaagtaatagttggagacttaaatgcctactttaaataagagaacaaccagacagaagatcaaaaaggaaatggaagacttgaacactataaaccaactaaacctaacaaacatcttcagaacaccccacccagcagcagcagaatatatattcttctcatrtatttatgaaacattctccaaaatagaccacataatataccataaaacaagcctcaatgaactaaaacacattaaaatcatatgtattatgtgctctgaccacaataaaattaagtaaaacatcaaatgataggtaaacttaggtaattcacaatacagtcatgtatcacttaatgataggaatatgcactgaaaaatggctcattaggtgattttgtagttatgcaaacatcatagggtgtactcagagaaacctaattaatacaggctactatacaactaggctatatggtatagcctgttgctcctaggctgcaaacctatatagcatgatactgcactaa

SEQ ID NO: 932027 - DNA, 750 bp, Homo sapiens
tagtgctttttttcaggagctcttgtaaggcaggcctagtggtcacaaaatccctcagcatttgcttgactgtaaaggattttatttctccttcacttatgaagcttaattggctggatatgaaattctggcttgaaaattctttttttaagaatgttgaatgttggcccccactctcttctggcttttagggtttctgccaagagatccgctgttagtctgatgagcttcccactgtgggtaacccagcctttctctctggctgcccctaacatttttttcttcatttcaagcttggtgartctgaagatcatgtgtcttgtggttgctcttctcaaggagtatctttgtggtgctctctgtatttcctgaatttgaatgttggcctgccttgctaggttggggatattctcctggataatatcctgatgtgtgtttcccaacttggttccattctcctgtcattttcaggtacacaaatcaaatgtaggtttggtcttttcacataggcccatatttcctggaggctttgcttgttccttttcattcttttttctctaatcttgtctcatgctttatttcattaagttgatcttcaatctctgatatcctttcttccactcgatcgattcggttattgatacctgtatatgcttcacgaagttctcgtgctgtgtttttcggctccatcaggtcatttatgttcttctctaaactggttattctagttagcggttcctgtaacatttt

SEQ ID NO: 932028 - DNA, 750 bp, Homo sapiens
tagtgctttttttcaggagctcttgtaaggcaggcctagtggtcacaaaatccctcagcatttgcttgactgtaaaggattttatttctccttcacttatgaagcttaattggctggatatgaaattctggcttgaaaattctttttttaagaatgttgaatgttggcccccactctcttctggcttttagggtttctgccaagagatccgctgttagtctgatgagcttcccactgtgggtaacccagcctttctctctggctgcccctaacatttttttcttcatttcaagcttggtgaatctgaagatcatgtgtcttgtggttgctcttctcaaggagtatctttgtggtgctctctgtatttcctgaatttgaatgttggcctgccttgctaggttggggatattctcctggataatatcctgatgtgtgtttyccaacttggttccattctcctgtcattttcaggtacacaaatcaaatgtaggtttggtcttttcacataggcccatatttcctggaggctttgcttgttccttttcattcttttttctctaatcttgtctcatgctttatttcattaagttgatcttcaatctctgatatcctttcttccactcgatcgattcggttattgatacctgtatatgcttcacgaagttctcgtgctgtgtttttcggctccatcaggtcatttatgttcttctctaaactggttattctagttagcggttcctgtaacatttt

SEQ ID NO: 932029 - DNA, 750 bp, Homo sapiens
tagtgctttttttcaggagctcttgtaaggcaggcctagtggtcacaaaatccctcagcatttgcttgactgtaaaggattttatttctccttcacttatgaagcttaattggctggatatgaaattctggcttgaaaattctttttttaagaatgttgaatgttggcccccactctcttctggcttttagggtttctgccaagagatccgctgttagtctgatgagcttcccactgtgggtaacccagcctttctctctggctgcccctaacatttttttcttcatttcaagcttggtgaatctgaagatcatgtgtcttgtggttgctcttctcaaggagtatctttgtggtgctctctgtatttcctgaatttgaatgttggcctgccttgctaggttggggatattctcctggataatatcctgatgtgtgtttcccaacttggttccattctcctgtcattttcaggtacacaaatcaaatgtaggtttggtcttttcacataggcccatatttcctggaggctttgcttgttccttttcattcytttttctctaatcttgtctcatgctttatttcattaagttgatcttcaatctctgatatcctttcttccactcgatcgattcggttattgatacctgtatatgcttcacgaagttctcgtgctgtgtttttcggctccatcaggtcatttatgttcttctctaaactggttattctagttagcggttcctgtaacatttt

SEQ ID NO: 932030 - DNA, 755 bp, Homo sapiens
  misc_feature 170: n = A,T,C or G
atcaagatcatcctggccaatatggtgaaaccccgtctctactaaaaatacaaaaattagctgggcgtggtggcaggcgcctttaatcccagctacttcggaggctgaggcaggagaagcgcttgaacccggcaggtggagcttgcagtgagccaagatcgcgccactgncactctggccatggtgacagagcaagactgtctcaaaaaacaaaacaaaacaaaaaacaaacaaacaaacaaacaaaaaaggttgggaggctcacataccagatagttaggttatctcaacccataataatgaagacaatgtgaaattggcttagagaaggatgaagacatcaatggagcaggatagagagtgtagaaatggactgatatgaaaacttgatctatgacagaggcagcactataactagtgcagaaaggatgggctgtttaataatttatgctgtgacataaccaaaaggaaaaattaaaattcaatccttaactcacattatataaaataaatcttaagtagattaaagatttaatatgagaattaaaactacaagatttcaatagaaaawatagaagaatatctttatggttgtagagaaataatatcgtttaaaaaataagattccttacatgagaagcagaaagtacaaaacataaggtaaacgattgatagatctgtcatttaaattaatgtatgcctaaccaaagctatcatgaacaggttaaagacaagatagaggaaacatttgtaat

SEQ ID NO: 932031 - DNA, 575 bp, Homo sapiens
ctgaattacctgttgctacaaagatggcaggcagacaataaaaatatattagattttgacgtaaaccaaattttaaataaattgttttctgtacacataaaatagtgtgaaataccattaaatataatcattaaacatgtattaatgagtagtattaaatatactttcaaaatgataaaagtctgcttttcaaagcwaaatgaacaatgagagaaagttatcttggaagaaaagtaatagaacaaagaaatacaggtggaggctgggcatggtggctcacgcctgtaattctcgcactttggaaggctgaggtgggaggatcccttgaggccaggagttggtggtgcatgcctgcagtcccagctactcgggaggctaaggcctgaggatcacttgagcccaggagtttgaggctgcagtgagctatggactgcgccactgcactccaacctggacaagagtgataccttatcttcaaaaaaaaaaaaaaaaaaaaaggagagagagaaaagaaacataggttgagtatcccttatccaaaatgcttgggaccagaagtatttcagaaagaaaat

SEQ ID NO: 932032 - DNA, 575 bp, Homo sapiens
ctgaattacctgttgctacaaagatggcaggcagacaataaaaatatattagattttgacgtaaaccaaattttaaataaattgttttctgtacacataaaatagtgtgaaataccattaaatataatcattaaacatgtattaatgagtagtattaaatatactttcaaaatgataaaagtctgcttttcaaagcaaaatgaacaatgagagaaagttatcttggaagaaaagtaatagaacaaagaaatacaggtggaggctgggcatggtggytcacgcctgtaattctcgcactttggaaggctgaggtgggaggatcccttgaggccaggagttggtggtgcatgcctgcagtcccagctactcgggaggctaaggcctgaggatcacttgagcccaggagtttgaggctgcagtgagctatggactgcgccactgcactccaacctggacaagagtgataccttatcttcaaaaaaaaaaaaaaaaaaaaaggagagagagaaaagaaacataggttgagtatcccttatccaaaatgcttgggaccagaagtatttcagaaagaaaat

SEQ ID NO: 932033 - DNA, 575 bp, Homo sapiens
ctgaattacctgttgctacaaagatggcaggcagacaataaaaatatattagattttgacgtaaaccaaattttaaataaattgttttctgtacacataaaatagtgtgaaataccattaaatataatcattaaacatgtattaatgagtagtattaaatatactttcaaaatgataaaagtctgcttttcaaagcaaaatgaacaatgagagaaagttatcttggaagaaaagtaatagaacaaagaaatacaggtggaggctgggcatggtggctyacgcctgtaattctcgcactttggaaggctgaggtgggaggatcccttgaggccaggagttggtggtgcatgcctgcagtcccagctactcgggaggctaaggcctgaggatcacttgagcccaggagtttgaggctgcagtgagctatggactgcgccactgcactccaacctggacaagagtgataccttatcttcaaaaaaaaaaaaaaaaaaaaaggagagagagaaaagaaacataggttgagtatcccttatccaaaatgcttgggaccagaagtatttcagaaagaaaat

SEQ ID NO: 932034 - DNA, 572 bp, Homo sapiens
agctgtgaccctcccagcccagtgtactttcgagagaccatagttcctctactctcataaaatctcctgttcccttgaggcttggctatatggctgtaccatctcttacgacttctcattgcagatatataacaaattcatagtcactatcctttgtccacggaaaacatcaytggcatcttgctcaaagtcttctttctctaagctctgctgtctacttaattttaatttcaacagcaacccgtctaatacctagaccactcagtttttttgcctcatctttggcgataatcctctcttactaaaacctatttttgtggctcaagtattttcaacacatttgttccatggcttccttgagtctcttggcccaccaaccaaatgccttttttagaaactcccttgtttttatttccttccccatctagcttagattatagagattttcgtttcttccactctacagaagtggaataggaatatactatgttctcttgtcttactgtcttttcatagcaccttcccagaaaaggcccaaccctgtgaaaaactgagttttttttctatatttg

SEQ ID NO: 932035 - DNA, 750 bp, Homo sapiens
ggatgtaaagtagggaagagcaagaacgatctggaacccatgagcaagagctgaaatctacaagcacagactgaaacctaggtcagtcctcattgtccccaactttgatggcatgggtgtcctgcaggaaacactggtgcccttaggcagggagctggctcaggggtcacagcagccaaacaaggatccaggggcaggtggacccaccgcaggcaggtaaaggacaatgttcaggagatgcagaagtggctggtgactctgccccgsgcttccaggcatcagtaagagtatggctgctgctctacttccacacaccaaatctcatgccacagaaaattgccctttatggcccacccaaccagaaaaacatagaaaaaggaattctgggaaatgcaattcaactagccaagctaacacattaccaagccagtgaccatggtttcttgggatagcttgggggtgacgtatcagtgttctaccatgagcaaacctacctgcaagggctgagagctgaaggaagctgacaaacctggtttctcagaaagaaacttttttgttttttagagacagagtcttgctctgttgcccaggctggagtgcagtggcacaatcatggctcactgtagcctcagacttctgggctcaagcaatgctcctgcctcagcttcctgagtagctgggactataggtgcaccgcagcacacttggttaaggttttccatttttttgtagcaatgaggtctcaccact

SEQ ID NO: 932036 - DNA, 750 bp, Homo sapiens
ggatgtaaagtagggaagagcaagaacgatctggaacccatgagcaagagctgaaatctacaagcacagactgaaacctaggtcagtcctcattgtccccaactttgatggcatgggtgtcctgcaggaaacactggtgcccttaggcagggagctggctcaggggtcacagcagccaaacaaggatccaggggcaggtggacccaccgcaggcaggtaaaggacaatgttcaggagatgcagaagtggctggtgactctgccccgcscttccaggcatcagtaagagtatggctgctgctctacttccacacaccaaatctcatgccacagaaaattgccctttatggcccacccaaccagaaaaacatagaaaaaggaattctgggaaatgcaattcaactagccaagctaacacattaccaagccagtgaccatggtttcttgggatagcttgggggtgacgtatcagtgttctaccatgagcaaacctacctgcaagggctgagagctgaaggaagctgacaaacctggtttctcagaaagaaacttttttgttttttagagacagagtcttgctctgttgcccaggctggagtgcagtggcacaatcatggctcactgtagcctcagacttctgggctcaagcaatgctcctgcctcagcttcctgagtagctgggactataggtgcaccgcagcacacttggttaaggttttccatttttttgtagcaatgaggtctcaccact

SEQ ID NO: 932037 - DNA, 595 bp, Homo sapiens
aaaaattaaattaaattaaattaaattttaaaaggctgggcaagatggctgacccctgtaatcccagcactttgggaggccaagacagatggatcacttgaggtcagaaagaccagcctggtcaacatggtgaaactccatctctactaaaaatacaaaaattagctgggtgaggtggcaggcacctgtaatcccagctactcaggaggctgaggcaggagtcttgcttgaacccaggagacagaggttgcagtgagcagagaccgcgccagtgagcagagaccacgccactgcactccagcctgggtgacagagcaagcytctgtctcaacaacaacaacaacaataaaaaacaacaaaaaaggtgcaacttagtctagagctaatttttccccactaccgaggcaagaccaatcccccaagaaccctgaggtttttgaggctggctggtggcacaagcagaatgcactcgcacctctaatcatttcaggtggttctttctctggccttgggtctgccctttgatgtcgtgagtgggctgagcatcactcaaaggatgactggagaagggctcgctgcagatctctgggattct

SEQ ID NO: 932038 - DNA, 546 bp, Homo sapiens
tggctgcagacccaggtatctttgcactatcgggggcgggaacccccaacgcccacaggcttgaaagtgcctggtcctgctggttggcctctccccactcccagtgcccacaccaattttggagcaaagttgtggccaagcccagggtgctttcacaacccaaccagatgtggaggtgcttggggcagcaccgacacgccagccccctgytgcctcggcctcctttagacattgggtgctgatgagcacaggagggaggccaagagggggctaagggcagcttagcttgtgtctgcaggtgcctcttggcatgaacagcctgagcgccatgggcacagtggacagcaggtaatggcagcaggaggcagacacggtccctggtggaaaagggcaggtccacggtgaaaccccaccttcaggccaggaactgccttaagcctgggggctgggagtgagaacttactgtgctttttccagggccacccatggccacccatggcccaatcagcatgcccttcctcccctctgaacccccataaaaacccg

SEQ ID NO: 932039 - DNA, 546 bp, Homo sapiens
tggctgcagacccaggtatctttgcactatcgggggcgggaacccccaacgcccacaggcttgaaagtgcctggtcctgctggttggcctctccccactcccagtgcccacaccaattttggagcaaagttgtggccaagcccagggtgctttcacaacccaaccagatgtggaggtgcttggggcagcaccgacacgccagccccctgttgcctcggcctcctttagacattgggtgctgatgagcacaggagggaggccaagagggggctaagggcagcttagcttgtgtctgcaggtgcctcttggcatgaacagcctgagcgccatgggcacagtggacagcaggtaatggcagcaggaggcagacacggtcsctggtggaaaagggcaggtccacggtgaaaccccaccttcaggccaggaactgccttaagcctgggggctgggagtgagaacttactgtgctttttccagggccacccatggccacccatggcccaatcagcatgcccttcctcccctctgaacccccataaaaacccg

SEQ ID NO: 932040 - DNA, 612 bp, Homo sapiens
gctataaggttctgaaatttcaaactgggggaatgtgataaatcttggtggcctgtctttcccagggacttgtcatagtgctagaatgaaacctgtgtacagagtgtggcctttgttcttgtctgcatcaacacatagaggaggttcatcatactgagctgtggcmaaagagaacaggtcttggctcaagtgacatagactccggaagctctttcccaacttagtgtactttcttgaataaatgtttcttcattttctgtagaacaacaggatttccagatattttagcttgttttattattacattaatgtgtagtgatggtcatttggttggggagaggctccatgcagcttctcatgccaccattatggaaaacattctccaagattaaatctatattttagatgtcagtaatatctgctccaactcaattttgtagaaattgacaaattgattctaaaagtaatgtgtaaacttataatagaaacaactagagtcgtcaaaaacttttaggaaaaaaggaaaagttggagtaattactcaattttaagacttgaaattaagtttcagtagtcgaggcagtatgtttttggtataagcatatgcataag

SEQ ID NO: 932041 - DNA, 605 bp, Homo sapiens
aaggggacataccctgcgaagccacagggatggagctgcccaagagcatgggaactcacctcttgcatcagcgtgacctggatatgagacatggagtcaaaggagatcatttgggagctttaaaatttgactgcccygctggattttagacttgcatggagccttcagtccctttgttttggccaatttctcccatttggaatgggagtatttatccaatacctgtacccccactgtatctagcaagtaacgaatctgcttgtgattttacgaggttcataggcagaagtgacttgccttgtctcagatgatactttggacatggacttttgagttaatgctggaatgagttaagactttgggggactgttgattggttttgaaatgagaacatgagatttgggaggtgccagggcgtgaatgatatggctaggctcagtgtccccaccataatctcatcttgaagtctaatcccttcacatccagggagggacctggtgggagctgattggattatgggggcagtttcccacatgttgttcttgtgatggtgagttttcacaagatctgatggtttaaaggtgtggcacttccacttctaactc

SEQ ID NO: 932042 - DNA, 657 bp, Homo sapiens
ctcctgggtcgagtgggaagttggagaacttttctgtgtctagctaaaggattgtaaatgcaccaatcagcattctgtaaaaacgcaccaatcagtgctctgtgtctagctaaaggattgtaaacacaccaatcagcrctctgtaaaaatgcacgaatcagtgctctgtgtctagctaaaggactgtaagcacaacaatcagcaggatgtgggtggggccaaataagggaataaaagctggccacctgagccagcagcagcaacccactcgggtccccttccacagcatggaagctttgttctttcgctcttcataataaatcttgctgctcgctcactctttgggtctgtaccacctttaagagctgtaacactcgccgtgaaggtccgtggcttcattcctgaagtcagcaagaccacaaacccactggaaggaagaaactccggacacatctgaacatctgaaggaacaaactctggacacgccacctttaagagctgtaacactcaccgcgaaggtccgcggcttcattcttgaaagtcagcgagatcaagaacccactggaaggaataaattccagacacagtactgcctgatcattacctagtgcagacccaagagtaagctctgccatgagcaaaagtcccatgattctt

SEQ ID NO: 932043 - DNA, 583 bp, Homo sapiens
tttcctgccagttatagtctcattaattcaacagccttcattgattgcctcctgcatgccaggaactgtgctttgcccggtggcttccagagaatgacaagtgaacaatgataatgacataatttatgtggcaaaaatgcaactcctaaggagtgcctctctcaaattgagttactttttcactattgaataaattgtaatttgaaaggctagtaaaagtgccctcttttggtgagccatgccaatcaatacgtgccattttcaatgcttcattctgcttttctcctattcakgcagactggagaaaaagcaagcatttgaaggctgaggttactgagttaggtttcttaatacagtgaggttttttttttttcttttttttgtttttgagtgatttgtttctgaagaatagacagcctagggcagcaggctaagtggactgctttcctggacccccaaccccccaaacccccacccaacagtgggcttgcctgtccactggtcatggaggcagggtgagggggatagggaatagcctctgccaaaatcttctgggagatgcagatactctgatggccccagg

SEQ ID NO: 932044 - DNA, 608 bp, Homo sapiens
tggacaacgaactttatcattagaagactcagtttcctcctctgaacactggagagaataataacatgcaggcattcaagaagggataatttccctgataaccttcacttctagacaaacacaataaacataaccaaacgacggagtggttccatcaaatgtacttttttttttttttgagatggagtctcactccgtcagtcaggctggagtcttgctccgtcgcccaggctggagtgcagtggcgcgatctctgctcactgcaacctctgcctcctgggttcaagggattctcctgcctcagcttctcgagtagctgggtctacaggcacctgccaccacacctggttaattttttgtatttttagtagagatggggtttcactgtgttagccaggatggtctcgatctcctgacctcctgatccacccacctyggcctcccaaagtgctgggattacaggcgtgagccaccgtgcctggcccaaatgtacatttaaataaacatgttcggacacacacccccattcccaccacgaaaaggagagtgtgccgaagaaagaaaataagactccagttcttttttttaactcctattatctacttttc

SEQ ID NO: 932045 - DNA, 589 bp, Homo sapiens
cagctgccagcatggccagaataaaagcaggcagaagaatgggaaaagactagactggctgagtctcccagcctacacctttctcctgtgctggacgctgcctcccttgaacatcagactccaagctttgggacccttggacctttgmccaccaacagagggctgcactgtttgcttccctagttttgaggttttgagactcagactggcttccttgttgctcagcttgcagacaacctattgtgggacctccccttgtgatggtatgagtcaatactcttaataaacaggcgtgatggctcacgcctgtaatcccagcactttgggaggtcaaggtgcgtggaccatgaggtcaggagatcgagaccatcctggctaacacagtgaaatgccgtcttttctaaaaatacaaaaaaattagccaggcatggtggtgggtgcctgtagtcccagctactcggaaggctgaggtaggagaatggcgtgaacccaggaagcagaccttgcagtgaactgagattgtgccactgcacttcagcctgggcaacagagcaagactctgtctcaaaaataaaaaaaaataaaaaat

SEQ ID NO: 932046 - DNA, 594 bp, Homo sapiens
ttatgctaataagatgacccatgactaggactgagactggctactgcagtggtcccagggtggagtcgggccacaccagaaagaccattcatgtgactggagggttggactttgatccctgtaaggcgacatcagcctggattctggggaggtgaaagcactggagtttgagttcaaccacgtgggcagtgatccaatcagccgcatcaacccagtaagacccgattacaaatgctggacactggagctcacctgagtgtcctggcctggtgtactccatgtgaccgttgccacgcaacaatgtcaggagggtaatgcatgactgaggaaacaggagatccatgtttagaaccctcctagtctcaggttctaccctgtgggtttcttcctttgactgcttatgrtttatatcttcctcctgatataaaattgtaagtataagtatagcactttctgaagttctgtgagtcattttattcaactaccaaaaatgaagacgtttatgaagatgtcaacatttgcagccaactggcctgaagtgaaggtgggcctggagacccctgaaattgcagctggggtcagaatcttaggtat

SEQ ID NO: 932047 - DNA, 701 bp, Homo sapiens
gcataacattgggaatgtactaaatgccactggtttgtacacataaaaaaggatagcatgaatcctagcactttgggaggccgaggcgggcagatcacctaaggtcaggagtccgagaccagcctgaccaacatggagaaaccccatctctactaaaaatacaaaattagccaggtgtggtggcacatgtctgtaatcccagctactcaggaggctgaggcaggagaattgcttgaacccaggaggcgaaggttgcagtgagccaagatcgcaccattgcactccagcctaggcaacaagagcgaaactgtgtctcaaaaaataaataaaaaataaaataaataaaaagataccatgggccgggcgcagtggctcacgcctgtamtcccagcactttgggaggccgaggcaggtggatcacctgaggttgagagttcgagacagcctgaccaacatggagaaaccctgtctctgctaaaaatacaaaattagccaggcgtggtggcacatgcctgtaatcccagctactcaggaggctgagaaaggagaattgcttgaaccccggaggcagaggttgcggtgagctgagatcacgccattgcactccagcctgggcaacagtgaaactccatctcaaaaaaaaaaaaaaaaggatagcatgataaattttatgttaggtatattttcccaaaatttataaa

SEQ ID NO: 932048 - DNA, 701 bp, Homo sapiens
gcataacattgggaatgtactaaatgccactggtttgtacacataaaaaaggatagcatgaatcctagcactttgggaggccgaggcgggcagatcacctaaggtcaggagtccgagaccagcctgaccaacatggagaaaccccatctctactaaaaatacaaaattagccaggtgtggtggcacatgtctgtaatcccagctactcaggaggctgaggcaggagaattgcttgaacccaggaggcgaaggttgcagtgagccaagatcgcaccattgcactccagcctaggcaacaagagcgaaactgtgtctcaaaaaataaataaaaaataaaataaataaaaagataccatgggccgggcgcagtggctcacgcctgtactcccagcactttgggaggccgaggcaggyggatcacctgaggttgagagttcgagacagcctgaccaacatggagaaaccctgtctctgctaaaaatacaaaattagccaggcgtggtggcacatgcctgtaatcccagctactcaggaggctgagaaaggagaattgcttgaaccccggaggcagaggttgcggtgagctgagatcacgccattgcactccagcctgggcaacagtgaaactccatctcaaaaaaaaaaaaaaaaggatagcatgataaattttatgttaggtatattttcccaaaatttataaa

SEQ ID NO: 932049 - DNA, 593 bp, Homo sapiens
aataatgaatacttaattcacatgtgcttatagaaaaaactttaaacaataaaaataaccaattgttagatttacatctttttctgtcactatatataaaaggaatcaagaattttcatgcagcttccgggtattcttgagactggtatatcgtttctttttgaaaagtgcattattgcataacaacacgctaaatatatttttmtatttttatatatttgtaagcatattttagctcaaaaatagcaaaagtatacatagcttatagcacagtttgggaaatgctgatgtatatggtaataatgcattgtttgagatgatttaaaattatattaggatattaggagcccaatatagtgatccaaattgagatcctcttgtctagtatcctttaaaatgacaaaacatcaaatctagaaaatagataagaagtgaattttaagataaaggtacaacagattttctatttttacaaaaatcattagtgattttcaaaaatatattctagaattcaagctgttaatttaaaaagtgcatatttaataataaagtgaacaaaactggctgttagaaaaaacacttcatcttgctgt

SEQ ID NO: 932050 - DNA, 577 bp, Homo sapiens
ccaggcccccatttgcagaggctgacagttcccagagtgactttcatcagaaaacaggctcttagaggagacagtcagaggagggggcttcatcctctcccctgcacagccccttgtaaggattggaaagctagggtctctgcccatgaggtggcagtcaccctaasctgtggtgtgggaggaagcctagggaatataagttggtgctgggacagcatttcctggtcctgacttggagaaggtgttaaaatcccgacattcctgactccttctttgtgggagcccctgccctgcagatctcacggggttgttgtgagggtcacctggggtgatgggtttggaagtgctttgtgaatgacacagtgggccttcctattcctgtcactggccctttgaccttgaatactaattgcctgggatctccaggtttcaaggtctaatcctggtagggtacgaggtgtccccagtggaacattctacagcacttcctgagaggtcccttgcttccaactttgcccagcataaccactgctcctgttccctcagcctggagagcttgcccaggggcacaagatgg

SEQ ID NO: 932051 - DNA, 541 bp, Homo sapiens
agcttacagtgctaaatgcctgcatcaaaaactgaaagataacaaattgacaaattaacatcacacctcaaagaactaaagaaagaagaacaaacaaaactcaaagctagcataagaaaataaataacaaagatcaaagcagaatgaaatgaaattgaaaagttaacaaaaaatacaaaagaaaaataaaacaaaaagttgattttttgaaaagataaacaaaaattgatagataattagctagatctatcaagaaaataagagagaagattcaaataaactcacttagaaatgaaaatgragaccttacaactggcaccacagagatacaaaagataatttgggactactacgagcatctctttgcagacaaactggaaaacttagaggaaataaataaatttcgggaaacatacaaccctcctagattaaatcaggaagaaatagaaaccatgaacagaccaataacaagcagtgaaattgaatcagtagtaaaaaaaaataaaaaatgccaacatcacaaaaagcccagggccggata

SEQ ID NO: 932052 - DNA, 807 bp, Homo sapiens
ttattcacctatccaagttcatagaagattccattccaggctctgcaccaagtattttccatctataacagggataaagttttagatatattttctaagttttcttacggttgggctgatttctgtccttgcaccctgctagggtctgactgtttctgccttctcagaatttgtatgttgaaattttaactcctaaggtgacggtatcagagggtgaagacttagggaggtgattaggtcatgggggcagatccacatgaatgggattagtgcccttatgaggcactcaaggaaaagccctcgcctcttccaccaatgtgaggacacagtgagaaagcaccatctatgaaccagaaaacaggcctaagcagacatggaatttgctggtgccttcatcttagacttcccagacttgagaacggtgagaaatacgtttctgttttttataagctacccagtctatggtagtttgttgtagtagccagaataaaccaagatacagccaatttcatcatttgggctgaactttgagagtgaaatcttagaggaatgaggagcaaatgatataggacagttgcattcagacaggaagggaaagtaacaggaaagcttaccccttcccatcctgtcagataatggaggcagaaaaaaaaagtasaacaaaaaggttcctattcccacataagaatcacacatcaaatgcaaaagtcttttaggaacatagaagtatggggcaatacactaatatcagagcagtagattattttccaaggcagagtctgcaggcccctagaacaacttgtgcct

SEQ ID NO: 932053 - DNA, 751 bp, Homo sapiens
tatattatttcttcagtttggtgtttcccaagtcatgtatgtatttcaaatatgaacccctaaatgatgtggacatatcctggtttatgaattctcagggaacaaattttccctacctgtagcagaggtcaaaacaatcaagctttctcttaatttctatttgccaatttttctatctcactttttacactggagtgtgtccctttgagactttccactttactgggggtctctcttctaatatcaacccttgcctaagcccaagacctcacttccagcctcatggtggtgggtaaaatcaaagccccttcctaataaacgttggtgactccttccatttgagaagccaaagaaaatgccagactaagcttaatagtcagacgtttccaatttttctttatttttaacttctgctaaaatcttgtactctcccaaaatctacactttgcatctaaaagccctttggttatatttcagccacactttatatattctatggaaagaggggttttaagattatctaatttgcaacattgctagcaatgtgagtgacctattttttwaaactgcacatgatttttatgtgaaatattcagaggaaaattctttaacataaatataatcatataatattgaaacttgcaacttattactatttgttatacctaacttacaactaaatattttctctttgagatgagttatctatcatcatattattgagttccagattctcttaaaatgtttaata

SEQ ID NO: 932054 - DNA, 597 bp, Homo sapiens
atattgagaggggacagcgtactggcagccctcacagccctcgctcgctcttggtgcctccttggcctgggcgcccactctggccacgcttcaggagcccttcagcccgctgctgcactgtgagaacctcttcctgggatgcctgaggacggagccggctccctcagccagcggggaggtgtggagggagacgcacctggcgggaacccggtctcccaggcgcttgcgggccagctagagtttcgggtgggcttgggcttggcgggcaccgcactgggagcctgcccgcctgggcagtgaggggctcagcaccggggccagcagcagcggagggtaagctgtcccccagcagtcactcgatttcttgccrggcctttgctgcctccagtggggcaggctcaggacgtgcagcccgccatgcctgagcctccccgtcattccctccacagtgggcttctgcgtatgggagcctcccagacaagtgccgtcccctgctacatgtgcctggtcccatccaccacccaacggctgaggagtgcgggcacacagggtgggactggcagtcagctctacctgcggccccactgccggatccac

SEQ ID NO: 932055 - DNA, 735 bp, Homo sapiens
tgtgggaggccagcgcccgccttaccacgctggtgacgaggctcgccctgctgcagagaccattcacgctgcccaggaactccagcaggtctcttgccagctccaccaccagggagggtttcagcgtacacagggccaggaactgagaactcagcacactgcccagaaagccgggtctacgcctgctctgtgcagacctatgaccccatccccatccaggccaaggcctggagaaacccgggaagcgtctgagtggtaggtgtatgctgcaccctccgatagaggaacacagaagactgccagcctcagagaaactgttctcactggggagaaggctggcaccagcgctggcctcaggccaggctcagagtggaaccaggatgggcctgcatgcatcaggcctttggagagaaggaccccaggggacaagacggggaagagggacctgagctaaccctgaagaggacaggctcggcagaaagaaggacgggaatgttcttgagargcagagagaagtgcctggggctgggtgtggggctgtgggtgggggtggcagggtctgaggctgctgagggcccagctaggggtggtgccgaagccactgaaggggaggggggaggggagagggggaggagtccaggaggcacccgcccagggctgtggcaggagcgcaggagggacctacctgtgcacaccggcagcgtaccctggggccgggtagagcgagtcgctcct

SEQ ID NO: 932056 - DNA, 634 bp, Homo sapiens
ttcattcagcaaacagttcctgggtaccctcaaggcagcaggcagtgctccaggccctggcaatgcagacatgagttcaaacagaacccctgctggattctttgatatctcaggacatctcagcacacctggcacagggaagtgcccagatagcgtgtgtggaggtgaattaattctcaaacccccygccctgacctgttagaccccgggggctattgtgtgtttggcctgagcccaggcctttaacaatgggccaccggtgtcatagaaaggagtggctggtgctgattcgaacttagtgtgtgcctggaccacacttggttctgttgttgttgttgttgttattgttttgtttttgttttttttgagacgaagtctcgctctgttccccaggctggagtgcagtggtgcgatctcggctcactgcaagctctgcctcctgggttcatgccattctcctgcctcagcctcccgagtagctgggactacaggcgcccgccaccaagcccggctaattttttgtatttttagtagagacggggtttcaccgtgttagccagaatggtctcgatctcctgacctcgtgatccacccgccttggcctcccatagggctgggattacaggtgtgagcc

SEQ ID NO: 932057 - DNA, 634 bp, Homo sapiens
ttcattcagcaaacagttcctgggtaccctcaaggcagcaggcagtgctccaggccctggcaatgcagacatgagttcaaacagaacccctgctggattctttgatatctcaggacatctcagcacacctggcacagggaagtgcccagatagcgtgtgtggaggtgaattaattctcaaaccccccgccctgacctgttagaccccgggggctattgtgtgtttggcctgagcccaggcctttaacaatgggccaccggtgtcatagaaaggagtggctggtgctgattcgaacttagtgtgtgcctggaccacacttggttctgttgttgttgttgttgttattgttttgtttttgttttttttgagacgaagtctcgctctgttccccaggctggagtgcagtggygcgatctcggctcactgcaagctctgcctcctgggttcatgccattctcctgcctcagcctcccgagtagctgggactacaggcgcccgccaccaagcccggctaattttttgtatttttagtagagacggggtttcaccgtgttagccagaatggtctcgatctcctgacctcgtgatccacccgccttggcctcccatagggctgggattacaggtgtgagcc

SEQ ID NO: 932058 - DNA, 574 bp, Homo sapiens
ggctgagacaggagaagggcatgaacccaggaggcggagcttgcagtgagccaagatcccgccactgcaccccagcctgggcaacagagcgagactctgtctcaaaaaacaaaacaaaaaacaaacaaacaaaaaaacccaaacaaacaaaaaaacccaaacaaacaaaaaggtactatttgtagtagtcaaaaactggaagttaaccaactgttttcaatagtagaatgaataagttataaacaatggrattctaccagcaatggaatgaatagtcttcaactacatgcgatatggatgaacctcacaaaacagtgaacactatgattccatttaaataaagcataagatttggcaaaatagtctatgatactggaaggcatgagtaaagtggaacacaaggtagtttgtggggttccagtaatgtactgtttcttgttctaggtgctgcttcaactacctgtacacctaagatttatttgtacgtttctgtgagtatattcttgtatttgtctgttcttgctttgttataaagaaatgcccaaggctgggtaatgtataagaaaagaggttt

SEQ ID NO: 932059 - DNA, 605 bp, Homo sapiens
cacaatcaataaccaaaaggctatacaatatagtgacaataaccaattaaagtcagcttgaggagctaaaaacaaaatattcctgggttgcttcctcctgctacttgttccttgctctttattttatgcctatatttaactccccacctacttttttgtaagattttaatgtcattcatagaactttgttcattatttgatcttggtagtagatccaacttctctactcttcattttctttttttayatggatttttttatttccaacttttattttaagtttaagagtacatgtgcagatgtgcaggtttattacataggtacatgtgtgtcatgggggtttgctgcacagatcatcccatcacctaggtattaagctcagcatgcattagctatttttcctggtgctctccctcctcctgccccccactaacagatcttagcgtgcgttgttcctcaccccatgtgtccatgtgtcctcatcatttagctcccacttataagtgagaacatgtggtgtttggttttctgctcctgcattagtttgataaggataatggcctccaacttcatccatgtcctcacaaaggacatgatctggtttg

SEQ ID NO: 932060 - DNA, 754 bp, Homo sapiens
gggggtttctaaatatacaatcacgtcatctgcaaacagagacaatttgacttcctcttttcctaagtaaataccctttatttctttctcctgcctgattgccctggccagaacttccaaaactatcttgaatgggagtagtgagagagggcatccttgtcttgtgtggattttcaaagggaatgcctctagtttttgcccattcagtatgatattggctgtgggtttgtcataaatagctcttattattttgagatacgttccatcaatacctagtttactgagagtttttagcatgaaggctgttgaattttgtcaaaggccttttctgggtctactgagataatcatgtggtttttgtcattggttctgtttatgtgatggattatgtttattgatttgtgtatgttgaactagccttgcatcccaaggatgaagccracttgatcatggtggataagctttttgatgatgtgctgctggattcggtttgccagtattttattgaggattttcgtgttgatgttcatcagggatattggcctgaaattttctttttttgttgtgtctctgccaggttttggtatcaggatgatgctggcctcataaaatgagttaggaaggattccctgtttttctattgtttggaataatttcagaaggaatggtaccagctcctttttgtacctctggtagaatttggctgttaatccatctggtcctggactttttttggttagtaggctattaattg

SEQ ID NO: 932061 - DNA, 634 bp, Homo sapiens
taaccattacaagtccaccccttgtcaacttgaacccatacacatctcctgaaatcatacttagtctccaaatacagacaataataaggttgtaattatgcctaacgtaatacagctatcctttgtacaactggaagcacgctaatgcttwacctaaatgctattatataaagttaacaacacttaaatgctgatatgaagtcaataaatcttatgtaacatgataaaggaaaaagaaaggagataaaatgaagatatttcctttgtacaagtgtatgtatgcacaaacatgttcttaacaaaataagcaggaggccaggcatggtggctcacacctgtaatcccagcaatttgggaggccgaggtgggcggttcaactgaggtggggagtttgataccagcctgacgaacatgaggaaattccgtctttactaaaaatataaaattagccaggggtagtggcgcatgcctgtaatcccagctactcgggagactgaggcaggagaatctcttgaaccagggaggcggaggttgcggtgagctgagatcgcaccattgcgctccagcctgggcaaaaagagcgaaactttgtctctaaataaatacataaataaggaggaaatatgacaattac

SEQ ID NO: 932062 - DNA, 634 bp, Homo sapiens
taaccattacaagtccaccccttgtcaacttgaacccatacacatctcctgaaatcatacttagtctccaaatacagacaataataaggttgtaattatgcctaacgtaatacagctatcctttgtacaactggaagcacgctaatgcttaacctaaatgctattatataaagttaacaacacttaaatgctkatatgaagtcaataaatcttatgtaacatgataaaggaaaaagaaaggagataaaatgaagatatttcctttgtacaagtgtatgtatgcacaaacatgttcttaacaaaataagcaggaggccaggcatggtggctcacacctgtaatcccagcaatttgggaggccgaggtgggcggttcaactgaggtggggagtttgataccagcctgacgaacatgaggaaattccgtctttactaaaaatataaaattagccaggggtagtggcgcatgcctgtaatcccagctactcgggagactgaggcaggagaatctcttgaaccagggaggcggaggttgcggtgagctgagatcgcaccattgcgctccagcctgggcaaaaagagcgaaactttgtctctaaataaatacataaataaggaggaaatatgacaattac

SEQ ID NO: 932063 - DNA, 634 bp, Homo sapiens
taaccattacaagtccaccccttgtcaacttgaacccatacacatctcctgaaatcatacttagtctccaaatacagacaataataaggttgtaattatgcctaacgtaatacagctatcctttgtacaactggaagcacgctaatgcttaacctaaatgctattatataaagttaacaacacttaaatgctgatatgaagtcaataaatcttatgtaacatgataaaggaaaaagaaaggagataaaatgaagatatttcctttgtacaagtgtatgtatgcacaaacatgttcttaacaaaataagcaggaggccaggcatggtggctcacacctgtaatcccagcaatttgggaggccgaggtgggcggttcaactgaggtggggagtttgataccagcctgacgaacatgaggaaattccgtctttactaaaaatataaaattagccagrggtagtggcgcatgcctgtaatcccagctactcgggagactgaggcaggagaatctcttgaaccagggaggcggaggttgcggtgagctgagatcgcaccattgcgctccagcctgggcaaaaagagcgaaactttgtctctaaataaatacataaataaggaggaaatatgacaattac

SEQ ID NO: 932064 - DNA, 574 bp, Homo sapiens
ttcggttgaagccaatgttcatttaccactttgaaaatcctgaggccttttttcagaattatgctaaatctactctgcctctactctacaaatggaacaacaaagcctggatgacagcacatctgtcacagcatgatttactgaatattttaaaagtttcagttaagccagatgaataagttsgagagatcgactatagaatgttatacttatagtccacaatactgtattatacaattaaaaaatcgttaagagggtagatcacatgttaagcattcttaccaaattttaaaaacaagtgtagttattaataaggagaaaaaatatataataatccccaaaatatttttaaagccatttttaaaaaatttaacattcattttttactgctttattgagttacaattcacacattatatactttcaacatctatctttaatttaatttttaaaattatcctggtttatataaaccaaaaggaaactttctttttttttttttttttttgttttttgagacggagtctcactctgtcgcccaggctggagtgcggtggcgcgatctcagctcact

SEQ ID NO: 932065 - DNA, 699 bp, Homo sapiens
ggcaacctgttccccaaagaactgctcaaagatctgctttcatctttaaccccatttgctccaagttggggttttgatgaagttccaacagaagccttgtttatttccaccccgggtatctttcttcctgatgtgctgatggatggcatgccggctggtgctgcccttactccttacctgtctgtggctgaaatattttaatatatagttggcaccctccctcatttcttgagtttctcgttttcttgttcatattagtaggtcagggaattaaatataaaggcttatttcaccctattgtccaaaattcatrctaagagtctgtataaaagtgactttaaaaccacttgcactgaataaaactttcaaacacatgaagtttggacgtaagcccggtgggatttggccctttttgctcagagctcaggtgtactctattagtttaggtgaggaaggagactttaggaaagcaagttgcaaatctaatattctgggaatttgtggaagttttatctgcatcaacataatgaagaagtaaacattttggcagagttgctaaagaagttcatggttgtgaataattcctgggtctttcataataatttatggtgctggaaagaaaccatttttggttctaacacagctctgggctgggttgtagagttttcaaagcatgtttccttaggagcagtgcagggt

SEQ ID NO: 932066 - DNA, 623 bp, Homo sapiens
ttttgtagagacagggttttaccatgttgcccaggttggtcttgaactcctgaactcaggcaatccacccacctcagcctcccaaagtgctgggattgcagtcatgaactacctcatctggccccagaagccattttttaggkattcactcagaagatatagatatagatatagcttttcctaatttttttttacttaatttttcacttaatattattagccaacctatgatttctgtaataagtatatgcattcataaattatagcatattttctcaatttagagttctttccaacaacaaaattgttattttcctgtgaaggaactatgggtagttgctatggccaaccatgatactaaaagagaaaatatagttggttgttatttctgtaaaagttctcactgaattgtgtgcatgtacagaaagacaagtttttgcaatcaaaataagtatgtggtgtttaaacataacattcttctccaatgtagaagagggtccaacgtatctcttacattggacatgagtagcttggggaacattgaaccctttgtgtctataccaacaccacgggagaaggtagcaatggagtatctgcagtcagccagccgaattctcacaagg

SEQ ID NO: 932067 - DNA, 629 bp, Homo sapiens
acaagcacgtgccaccatgcccagctactttttgtacttttagtagagatggggttttgccatgttggccaggctggtctcgaactcctgacctcaggtgatctgcccaccttggccagtgctgagattaaaggcataagccaccatgcccagcctgtgagcttgtgtttggttttgagcttctggagtctggacaggtggccatggtgaggcttagggtcatgtcctcactgcctagaccagtaacttcaaagcagagtcacgcccaagagtcaccccttcttggtcatcctgggagtgatcagatcctccaggcatcctctttaaaactgtgtactgtgtcctgagttgtatacctggagcgtaatttcaggactcagaatggyccagccctcgtagctgtcctaggtaccatgtgagtactcagaacccaggactgctagggaagacattagggaatatacctgtgttagtttctaaattattttaagtaatttaaaatcttaaaattatgttatattacaataagtaatagatgattatgagataaccgagtgatttctaaataagttaaaaatctgaaagattattaaacataagtttatatatgttggcatcttatttttgtg

SEQ ID NO: 932068 - DNA, 488 bp, Homo sapiens
ttgagaagattagttgaggaaatatagataacatgtttgttacagtaaatagtacatagtaagcatttaatgcatgttgactgtttgttctggttttctattgctgcatcaccaattagcccaaaacttaatggcttaaaagatccattttattttgctcatgattttgtggaaaggattctactgggtggctctcccttggagtctgtcatgcaggtgtaattggaaagaggacagaagtcatctcaagtgggtgctacatcctggatggctcattcgcaaggcaggcgcttcattctggggctgtcaatstgacacctacacatggcattttccatgccatttgcactactcacagcatggatgctaaattctgagaaggagtagcccaaaagtgaaagttccaagagactcaggtagaaactgccacctttcctcaccttgttagaagtcatacagcctcacttacacaacattctgttgtttac

SEQ ID NO: 932069 - DNA, 630 bp, Homo sapiens
aggttttcactttcctccattgctttgtattcctgattagagatgctagtaaccccatcctcaaaatcttccagccctccctgcttttcctcaagtcctgcattcaaccagtcaccaaattctgcgttttctatcattttgtcatttttttttaatttttttaatttacatgyaaatataatcattttacttccttcctagaaccctatcatcttcaggacaaagtccatgtatcttatgattcctattgaacttcccaaaatgtccagaatgcccacacattatctctctccctccctttgcacatgctgttccttattctggaatttatccttctcccttgcaacactgtcttcttgggaaattcccagtcattcatcaagactcatcccaaacataatttccattttgaattttgatcttaccttccagaaacgctaatactgtccaggtggtcatttctctatgctcccacagcaccaggtatacacacttctatggcagcagtcagcatatggatttatagcggggttggccacttttcaatctcccatatgaagccataagctctttgaagactaagacactgggtttcaatgggccacttaagtctccaggggccactggctg

SEQ ID NO: 932070 - DNA, 569 bp, Homo sapiens
ggtcctgggctttctttggttggtaggctattaattactgcctcaatttcagagattgttattattctgttcagggattcagctacttcctggtttagtcttggtagggcgtatgcgtccaggagtttatccatttgttctagattttctaatttatttacatagaggtgtttatagtattctctgatggtagtttgtatttctgtggggtcagtgtgatatcccctttatcattttttattgtttctgtttgattcttctccttcttcctctttattagtctagctaatggtctattttgttaattaaaaaaaaaacaaaaacaaagaacagccaggcgyggtggctcatgcctgtaatcccagcattttgggaggccaaggcgggcagatcacgagatcaggagattgagaccatcctggctaacacagtgaaaccctgtctctactaaaaatacaaaaaaattagctgggcatggtggcttgcgcctgtagtcccagctactcgggaggctgaggcaggagaatcgcttgaactcaggaggcgaggttgcggtaagccaagatcat

SEQ ID NO: 932071 - DNA, 613 bp, Homo sapiens
agcagattttattcaaagcaatgacagactgatggtaaccttctcactcaacaggaacatagaagccacaacaaagtacagtgatatatttctaatatacaaaaagaaaataactgctgcacagaaaaagatatttagtaaatgaaggtgaaataaaagacgttgtcaagtcaacaaaacagacacatactaaaaagaacttctaaagggtacacttaaaatataagcactcgacatcaaagaatgtaataaatacatgggtgatgctaagtgaatcttgactacataaaataataatgtcttaaatttatatattaatatttatatatattctattataatatattacaaaaatagcatataaatcaggaggastaaatgaagttaaggtgttctaaactctttacattgtgtgacagaaggaaaaagctatcaatttacattatactttgataagcaaaggtagaatatgaccttcagtgaataaaaagactactaggagattaataaataaataagctcctaacagataacataaagcagtatctttatggctatgagataggaaaatatttcttaaataggacacaaaaaacactaaaaggaaagaatt

SEQ ID NO: 932072 - DNA, 681 bp, Homo sapiens
  misc_feature 653, 672: n = A,T,C or G
tggttttttttcacatataaaacaaggcagatggactagatgacttaatcctttacaatcttaataccgtgtgaatttgttttcctgtgtaactcgagtttagaggatgtgagggatctttttgggcaaggactgacctcaggaaggaaatcattttcactaagccttgaaagatttggttgggtagataaaaggaaaaagaaaagctragaatgcagaaatagatacataaaaattatttaggccaggaaagtctttggtgtatttgaggaatatgaggcataggattgacatggtgcagtcacgtgagatgaaattgactcagcagttcagagttcagtggccctaatgccatagtttagtcctcagtctgtaggttatgggcagctagtcaggacgatgtgtagccagggagagtcatagcacttgttacctttagtcaacttctgcatgataattaaggtatatttaaccaattctgacttctttctcccaacaaaaaaactgaacacagagaaaccctctagggagctagttattaggtggtgcaaaagtaattgcagtttttgtcattacttgtaatagaaactacttttgcaccaacctaatagaatttctttcactcaacaacaactggaaacatagagactgangagaatccagagatgatgntgtaaatcc

SEQ ID NO: 932073 - DNA, 590 bp, Homo sapiens
accatggctctctgtgactcagtaactgcatgttgcctgcctgccccacgccaggacagaatgtcaccccagtcctgcctagtgtttcccccacaacttgttcccaatgatcaggaccccccccccccgcccccgggcgcccaggttcactccccaaaccgcccctttgcaagagctccctctgctgttctgttccttgcgctttgggcccccagctactttgtccacgcctcctctgggacagggtgtggttggatgctcacacagaagaaagcccaccccgctccgccttcttygtgtggaagctcaatttggaaagtcatggttgggccaagtcggtcatgactgtctctttccctcctgcttgagactggctggggcaggggcttgtgccagttctgccagtgagacattagagggagcctatgggggcttctgtgagggattgtcttttctgaaaagaaagaagtggccaaaaagaagatgcttcccttgcttctggcatgattaccgactgcagatgtgatggttggagtggggcagccacactgtgatcatgagggagtgacatcaacattctgttaggggtg

SEQ ID NO: 932074 - DNA, 602 bp, Homo sapiens
tagcttctaaaaagagagtcagcctgtcctttgaagctttaagccaggcattaacttcactctagctttgacagccctagatgacatcttcttccaatacaaggctgattcatccacattgaaaacctgttgtttggtatagccaccttcatcgatcatctttgctagatcttctggacaatttgctacagcttctacatcagcacttgctgcttcatcttgtgcttttatggaggtggcttcttycctcaaacttcatgaaccaacctctgctagcttcaaactttccttctgcagctttctcacctctctcatagttcaaagaattgaagagcattagggccttcttctagagtaggcttggctaaaggagacttgtggctggtttcatcttctatccagagaactgaaactttctccatataagcaataaggctctttcactttatcactcgtgtattcactggagtagcacttttaatttccttcaaaacctttacattcacaacttggctggttggtgcaagaagcctagctttcagcctgtctcaacttttgacatatgttcctcactgaacttcaatcatttctagcattagatt

SEQ ID NO: 932075 - DNA, 505 bp, Homo sapiens; identical to SEQ ID NO: 925696

SEQ ID NO: 932076 - DNA, 591 bp, Homo sapiens
tgatcctggagcatcttgccatgtcagaaagtaaggaagttttttaaataacagagaagcaaacaaaaatgaaaaaacacaaggtgtcaattaaaagtgctgccaatggccagattggaaaaagttgagcaatgaagtaaataactaaatgtatgtattggaatatagtacaaagcacaaaataaatacccataaacctatagtgctataaataaatgattgagtaaatcagtgagagaggatagacaactgtcacatggaagaattccaaasaatttatataagtgctcccccagaatgaggtagagtgtaactgctccccgcttaagtgtgggctgtgattaatgacttctttccaaagagtagagcatgaaaaggaggttcagtagtccccccttatccatggggatagttctaagacccccagtggatgccccaaacctcagatagtatcaaaccatacatatactgggttatctcctatacaaacatacctacgataaagcttaatttataaattaggcacagagagaaaccaacaataaccaataattaagttattattagtattttaagtaaaataggggttcc

SEQ ID NO: 932077 - DNA, 736 bp, Homo sapiens
ccatctaaatttctttattatttgtagagatgaggtcttgccatgttacccaggctggtctcaactcctgggctcaagcgatcctcctgcctcagtctctcaaagtgctgggattacaggtgtgagccactgtgcccagcctaattgcagtaagacaaaaattctagggcaccaagaggctaaagtcagcacagcttttcttgtgtcctgtattctctgtctaatgtgttgcccaaataatayctaattgttagccattcccctccatctctggcctaaaagtgatagtccaggtatccacatgggctggttcccagaactgccattgctcactctccaaagaggggaaggtggggaagggaaggtgactatagctcagctcctgagctagtatctggctgttatttcaacaaccggagttggggtttgggctcattttttcccctagccagcaattatggaccagtagtaacacaagtgacagcttcctgtgactgacttcacaattaggaggtctaagattccatttgggtatttgcttaaggatcccacataattgtcccaacggtcattagtagaggggaggtaagccttcattaataataaagagaaagcccacattcaaggtggtgtttgagcaggggcagggtgagggctgtcccggtgctcattgcaccagcacactcacattccttctcatttggggcccacctgcaggaagtggcacaggatcagc

SEQ ID NO: 932078 - DNA, 700 bp, Homo sapiens
gactcaagagcagccagtgttctatgtcctgatgatctttctgtatttattagtaacatatttgggtagttacagagccagcctggatttatgtctccccaaaaacctccaacaccattttcagtgacaaattgagatctatagaagagactcatgggttgagtataaacctggcctcagactagctttcagaatcctcacttgggaatctctgtttcacgtgaaaacttcaactggatggattttgtgtgcccacaaaggctaaaatgaactttaaatagaatgttaaagcatagcttataaaatgttaacaaaacctagttctagtctttagtgtaattaccactttctttttctaaaattcttatttatttatttatttatttatttatttatttatttatttatttattgagacagggtctcactctgtttccttggctggagggcagtggctcgatcayggctcaatgcagcctcgaccttccgggctcaatcaaccctcccacctcagcctctcaagtagctgggactacaggcatgtaccactatgcctgactaatttttacagaaacagagtttcgccatgttgcccagactggtctcaaactcctagacttaagggatctgcccacctcagcctcctgaagtgttgggattacaggcatgagccactgcacctggcttttttctttttttt

SEQ ID NO: 932079 - DNA, 450 bp, Homo sapiens
ctgtataaatagacacatttacaacttcctgtccatttggctatcaatcattgtaacaaaggtactaataataacaacttgcatgtgtagcagttcacagcttgcacagggatttacatgtccttcagtatccctatctatgtgtaatgaaaatattttttccgcaggcactattaaattcaactcactttgccaaggtagcattagatgttagctttgttttgatgaagagtcctgacttaggtcctctgagcactgtcmgccaggatgttgttcccaatccccatgatggtgattgataggttattgatccttgggacagggccaaatgacgctggtccttttgatgacatgtgttcctcctagggcagtaggagggtctggggctgaccagaagatgcaggcaatctctgagcacgcaggctgagggaaaggcaggttgaggctcaa

SEQ ID NO: 932080 - DNA, 645 bp, Homo sapiens
aaaatctgtataaatagacacatttacaacttcctgtccatttggctatcaatcattgtaacaaaggtactaataataacaacttgcatgtgtagcagttcacagcttgcacagggatttacatgtccttcagtatccctatctatgtgtaatgaaaatattttttccgcaggcactattaaattcaactcactttgccaaggtagcattagatgttagctttgttttgatgaagagtcctgacttaggtcctctgagcactgtccgccaggatgttgttcccartccccatgatggtgattgataggttattgatccttgggacagggccaaatgacgctggtccttttgatgacatgtgttcctcctagggcagtaggagggtctggggctgaccagaagatgcaggcaatctctgagcacgcaggctgagggaaaggcaggttgaggctcaactgcaggagctgagacatttggattgggataaaatgtgaccaggcctatgtagcttttgactgtctgtgtgggtcacgctttctgaaggagtcttggaagtcttggtttcaaccaaggtggcccagtagttgtgacttgtgtgccagctcccaccacttggtagaacctacttggaggactgcattgagg

SEQ ID NO: 932081 - DNA, 681 bp, Homo sapiens
agctttgcagaaaaatgcctcggaaagcttcaccagagagtccttctcctccatgaaagtgctcctgctcattcctctcatcaaagaacaattttgggatttaaatggggcacaattaacatcctaatttgcctcttctaacttctttttgtttcccaatcttaaaaaatctgtaaaaggtgcccattttcttttcagtgaatactgtaaaaaagtctccagtgacatggttaaattcccaagaccctcagttctttagcgatagaccatggctgatttcattggttacaaaagcatcttgaacttgatggggcttatggtaagaaatacttcatagtttttatctttcaattccatgtccatgggctttttraagttccctatcactggagaaaaagaagcaagtagaaaaggactttcttttctaccactaaataatatctgtaccagtatattgtacctttagtccctttcagatatactgtgtctactcttttctactgttaagtcctccacttgtgcactggatcttgttttctgttgtctaacctagatttttctcttgcccatttctttccaacatgaattccttcagttctactggatcttcctatcagcatgtaaacatgctgtaatgtcttgcacttaaaaaaaaaaaaagcccataaaaccctcctttga

SEQ ID NO: 932082 - DNA, 826 bp, Homo sapiens
cctgcatagcttacacttccaatgaaaagggcaaggaaattatcaagtggaaaaataaataatatcatttgagatagtgcaaatgccatgaaactaatttaaagaggatagagaatggctggaaaggagaggaggtgctttggctaaggcggtgaggagagatttctccgagggggtgatgtttgaactaagtaataccgagtagaagcagccagctatgcagtccaggtggagagaatggaggatggcgagtggaaaggcctagcatggggaggaaggtcagtgtggctgggtggtaaggagccaggaagatgggatcagagacttgggtggcagaagttcaatattgtttaagtaaagagatgaagaarcatttattgaggatatactatatacaaaccaaactttgaccaaagcctgccttttgagagtaaatacttcctaaattataatgtggaaaattgttttatatagaaaaacagagatagggaaaggatcacaggctcccccattaattctcattaagatgaaacagaccttttaattccttcagttgtacaggctgctgttatgtcattactgtcatgtcatgtataagggtctcctctttgttaaggtcttgtagaaacatgtaaaaaaaagggatagttttactttaatgatttaacttctctcaagtcccagccagaatatactctggagtctagctcttcttgaaggcagaacatgtctgtgtacagggaaggaaaggtattgatacaaacttcttgaggccttttcctttaagctcaaacagaagatcacaagtgtttgaagcagatgtgtc

SEQ ID NO: 932083 - DNA, 596 bp, Homo sapiens
tacttgttgattttgtatcttgtaatttcactgaatttgttcattagttctaacagggtttttggtgtgtcctagttgtacattttatatacaagtctgcctgtgatccattttcagttaatttttttaaaggtgtaagatctgtgtctagtttcatttatttgcataygaatgtcccattgttcaagcaccatttgttgaaaagactttctctgttgtagtgcttctgcttctttgtcaaaaatcagtgggctatatttatgtgggtaaatttctgggctgtctattctgttccattaacctatttgtctattcttttgccaatagcatactgttttgatcactatttttataagtcagctttgtagtaagacttgaagtcaagtggtgtcagtcctccaagtttgttcttctccttcagtaagtgctgactattctggcttttttgccatccacataaactttagactcagtttgtcaataaacataaaataccttgctgggatttttactagattgcattgaatctatagataactctgggaagaactaacatcttgaaaatattgagtctacctatccatcaatacggaata

SEQ ID NO: 932084 - DNA, 772 bp, Homo sapiens
ggctgggagcccctgcagttgtggctggcatctgaagtgagagagatcttgtgggggaacatgcccttcatctgtgaagtctctcagaattgccttgcaaccacccgactgtcatgggtcttgcctaagctggagggaacttgttgaacaacaacagaaaattaattgtggccttgcctgtagcctagagtatgttcctttgttattccatctcagagataacatttcttcccttgtagcacctgcttcagtttattacacttgattaggtgaccgctaattgaagttaacttccctccctagtgaagcagccatgtgtctgctttgctttccattttactcctggcacctcccagtgcctggaacttaatatttgcctagttatttacagttacttagtgaaattaattagaacgagacttactcctaccccaatacactcatatycagattaaaagattcatggctaatatctacaattgattttcctaacagtgaaaaaagttatctacattttttttttgacacagagtttcgctcttgtcacccaggttggagtgcagtggtgcaatttcagctcattgcaaactctatctcccaggttcaagcgattcacctgcctcagcctcccgagtagctggaattacaggtgtctgccaccacatccagctaatttttgtatttttagtagaggtggagtttcaccatgttggccaggctggtctcaatctcttcacctcaggtgatccacctacctctgcctcccaaggtg

SEQ ID NO: 932085 - DNA, 772 bp, Homo sapiens
ggctgggagcccctgcagttgtggctggcatctgaagtgagagagatcttgtgggggaacatgcccttcatctgtgaagtctctcagaattgccttgcaaccacccgactgtcatgggtcttgcctaagctggagggaacttgttgaacaacaacagaaaattaattgtggccttgcctgtagcctagagtatgttcctttgttattccatctcagagataacatttcttcccttgtagcacctgcttcagtttattacacttgattaggtgaccgctaattgaagttaacttccctccctagtgaagcagccatgtgtctgctttgctttccattttactcctggcacctcccagtgcctggaacttaatatttgcctagttatttacagttacttagtgaaattaattagaacgagacttactcctaccccaatacactcatattcagattaaaagattcatggctaatatctacaattgattttcctaacagtgaaaaaagttatctacattttttttttgacacagagtttcgctcttgtcacccaggttggagtgcagtggtgcaatttcagctcattgcaamctctatctcccaggttcaagcgattcacctgcctcagcctcccgagtagctggaattacaggtgtctgccaccacatccagctaatttttgtatttttagtagaggtggagtttcaccatgttggccaggctggtctcaatctcttcacctcaggtgatccacctacctctgcctcccaaggtg

SEQ ID NO: 932086 - DNA, 772 bp, Homo sapiens
ggctgggagcccctgcagttgtggctggcatctgaagtgagagagatcttgtgggggaacatgcccttcatctgtgaagtctctcagaattgccttgcaaccacccgactgtcatgggtcttgcctaagctggagggaacttgttgaacaacaacagaaaattaattgtggccttgcctgtagcctagagtatgttcctttgttattccatctcagagataacatttcttcccttgtagcacctgcttcagtttattacacttgattaggtgaccgctaattgaagttaacttccctccctagtgaagcagccatgtgtctgctttgctttccattttactcctggcacctcccagtgcctggaacttaatatttgcctagttatttacagttacttagtgaaattaattagaacgagacttactcctaccccaatacactcatattcagattaaaagattcatggctaatatctacaattgattttcctaacagtgaaaaaagttatctacattttttttttgacacagagtttcgctcttgtcacccaggttggagtgcagtggtgcaatttcagctcattgcaaactctatctcccaggttcaagcgattcrcctgcctcagcctcccgagtagctggaattacaggtgtctgccaccacatccagctaatttttgtatttttagtagaggtggagtttcaccatgttggccaggctggtctcaatctcttcacctcaggtgatccacctacctctgcctcccaaggtg

SEQ ID NO: 932087 - DNA, 634 bp, Homo sapiens
cttgcctgcccccagacccccacatatttctgtaactcctgttttaccttaccccatctctgtctagcttcaagattgactggttaagataactaaattgtaagttttctcagaattgtcacgggttaaataatttactgtctttgcctgaaacctgtatcctgccttgttttcccrcctcaaacgacatataagcaagcctgctttctttgtcagagtcagcagccattttgggcatgagtctgctgtgggcctggatgcctgaattaaataaagttctctttggtctctaaaggtctctttgtcttccttggctggagttttactgttatacttatgagggttatagaaagaccacagactctgggcaactgaattcattcttttactggaggtgtgactttttttgttttgtttcgtttttcgtttttttgagatggagtctcactctgttgccaggctggagtgcagtggcatgatttcggctcactgtaatctccgcctcccaggttcaagcgattctcctgcttcagcctcccaagtagctgggactacaggcgtgcaccaccacgcccagctaatttttgtatttttagtagagacggggttttgccgtgttggccaggatggtctg

SEQ ID NO: 932088 - DNA, 603 bp, Homo sapiens
ataaagttctctttggtctctaaaggtctctttgtcttccttggctggagttttactgttatacttatgagggttatagaaagaccacagactctgggcaactgaattcattcttttactggaggtgtgactttttttgttttgtttcgtttttcgtttttttgagatggagtctcactctgttgccaggctggagtgcagtggcatgatttcggctcactgtaatctccgcctcccaggttcaagcgattctcctgcttcagcctcccaagtagctgggactacaggcgtgcaccaccacgcccagctaatttttgtatttttagtagagacggggttttgccgtgttggccaggatggtctggttctcttgacctcatgatctgcccacctcagcctcccaaagtgctgggattacaggcgtgagccactgygccaggcctggaggtgtgactttgagcatactgtttcatctctctgtggcccagtttcttcctcataaaaaggggttaacaacatcacctatggcgtgtgagggggattaaacaagataagatatgaaaggcccttgtaaacatgtatttttcaaagaaattgctatac

SEQ ID NO: 932089 - DNA, 617 bp, Homo sapiens
aacatttttttttttcagagcaggagtgaaagtttatttaaaagctttagaacagtaaggaaaggaaggaaaggaaagagaagaaggagagtacaacttggaagatggtcaagtgggcagcttgagaaaccaagtgcatagcttgacctcttgacttggggtttcatatggtttggctgtgtccccacccaaatctcctcttgaattgtagctccctcccgtaattcccacgtattgtgggaaggacccggtgggaggtaattgaatcatgagggtgtgtctttcccatgctgttctcatgacagtgaataagtcttatgagatctgatggttttataaaggggagttccgcyacacaagccctcttgcctactgccatgtaagacatgaccctgctcctcattcgcattccgccatgattgtgaggcctccccagccatgtgaactgtgagttcattaaacctctttcctttataaattacccagtctcaggtatgtctttattagcagcgtgagaacaaactaacacagggttttatactttggcctacttccaagatcttgccttaaccctccccactcctgagatcttattgggaagctgctgatcagtttca

SEQ ID NO: 932090 - DNA, 672 bp, Homo sapiens
tctaagactaggcagctggacagcgaccacttccttgattaaacattgcagactgtccacgtctctcctgaaaatccaatgagaagacagaaaaggaatgaaacagacataaacccacaaacacgaagagaatgagagaggaaaaataaaaacaagtcctggaagatggaaaggtgaccgtagtgacagactgagcagagcagaggagagtgaaccctagggcccccagagagggtgctggcagggagcagcccagttcattctggcagaccagcttcaggaccaggaagcaccacatcccatgcagtggtaaggtatagggggctgtgggaggtctatatttgttgtataccaagatcmttttctctgcctatgaagccaagtaacaacccttctgttgcccaattccctcctcaagggggctttcctttgaaacaatcaagccagagagtgcctaaacttggcacagcaggcacagcaaagagtgtggaaatggaatttgaaggcagggaattaaatgaacatctataccctaaacagtgggacccctctccaactcactcacctcatcctgttcccagaatgcccgtacctatctgtgtgtccctcgggcaagggattaaagaactctcctccagaggaaaacgtgaagagcccaagagaaaaacctct

SEQ ID NO: 932091 - DNA, 600 bp, Homo sapiens
tccctggcctgggagggaaggggctgaaagtgtcccataacaagagcagctcctgccatgccctgcggtctaggagggcagtcccggggctctttctgagctaaggattcctcatttgtgaaaggaaagataagccttttcttcatgaagaatggtttctaataaccaagaaattgttccatctgctaacacgggctctattttaaatgcttaatgaamcttttctcataatggccttggggtcagtaagctgagatgagatttttgcctagagaggcctacagcggaaagagctgtcaaatgcccaagaatgtgaaaagaatctgacttgaggagacactaggttctcacctgggccccaggaaacaagaggcatcttggggtgagaacagtgctgtctacttccgctgcataccactcattccaagtgctttaccgtattaactcattgaagcctcacaactaccctatgaggtagatggatttttttcagggaaggaaactgaggcacagagaggcaactgggattcaaacgttgtgctgccactgctgcagcagtgcttgtccaaggctgcagggagtcttggatgagtgccagga

SEQ ID NO: 932092 - DNA, 564 bp, Homo sapiens
atctacgtaatcaggagctgcatgtgaggtttgggttttggggttgggagggcgaaatcaagggttcaatcttgggtgtgttgagtttgaggtgcctattagacatgtgcagcaggtagctgggtaggtgagtctggggccaggggagacattaaggttacaggtagaaatctggactctctagtgcagagatggtatttaagtcatgggactaagtagaaagagaatagaagtgactgggggcagtggctcacgcctataatcccagcactttgggaggctgaggtgggcgggtcacttgaggtgaggaggtcgagaccagcctggccaacatagcgaaaccctgtctctactaaaaacacaaaaattagccgggcgtggtcgcrtgtgcttgtagtcccagctacttgggaggctgaggcaggagaatcacttgaacctgggaggcagaggctgcagtgagctgagatcacaccactgcactccagtctgggcaacggagttgagacttcatctcaaaaaacaaaaacaaaacaacaaccaaaaaaaaaaaaaagaagagaa

SEQ ID NO: 932093 - DNA, 658 bp, Homo sapiens
tagggcaaagtcagcccagaggaaagggtgtgtttcccatcttcaaccaccagagggaacatttttcctatttctgcaacactgccatctgtcgtggcttagccatggcagtactactattttggttagttgtttattgctttattttgcagatgaaaactccgctattgagagaggtgaaatattctatcccagcagaaaatcttccagtgagtcaaatatctgctagtsagttgacaaaaaaaatctagagctctttccgtcagcacttggaaatattcttattgttactgttggatgacccctggtttgtagacaccgcctatagggcaatggttgggttcagaattacagagtgagaggcataagcatcaaagcacagagaaacatattaataaaagcctctgagaaataaaaatgagatcccaaatccaccaactgactgaacagaacccctcttggccaaggggacctcagagtaatcttgaaaattgagttctcagtcatgacagtatgtgaggtcagacattccttgtaatatcccctcccttgataatcaccattaagctttcttccctaaggaccaaacagaaaccagccctttacagagactctaccactgatatcaactaaccagtaatgactgcccctccctttt

SEQ ID NO: 932094 - DNA, 575 bp, Homo sapiens
ctggacaactggaggccacaagtggaattgacaatccactggtcccccaccaacatacagcgggtgctggtgctggtagacactggcacagattgtactctcatctgtgggaacctggataaatttccaggcaaggctgcatatatagatggctatagaggtcagtcagtgaaagtgaaacctgcatctttgcaccttggcatyggctgcttggctccccacttataaactatgtttctcccatacctgaatacattttgggggtggatactttacatggcttggctttacaaaccacggatggggaattcagactccaagtatgtggggttaagctggtactccacagacatacacatcactagctccatgtcttgccacaacccttatggattacttccacgtgtcaataccacttgccaggtgagcatacagagataactgagactattaagaagttagaaaaggtgcagataatgtgtaacacctacagaccctacaattttccagtatggccagtcaagaagcctgacggaacttggcagatgacagtggattattgagaactaaataaa

SEQ ID NO: 932095 - DNA, 760 bp, Homo sapiens
aaaaagactcatgaaaagcaagtgtctgactttaggtttctagttaaacatgtaaacagctcataagtcatctctcctgtccttgaacaaactggcaaatcacacttcttctaagatccatggaaagttgagatcacaagacaaactatcaattcaaaaataggaaagacaagaaaataaggataaaatttaccagaagcaaaaactatagctctcttctggcaggaacacacaaagcttaattgacttattgctaaacaataggtatggactaattgatagagaaaatctcatggggggtcatccttaggggaacctccacacttttttgtgagtattacttctaaaagtcccacattttcatgagttttacctytaaaagccctcaccagcttctcaggatgatgactgcacaaaaatcccctcttgtttttggcaggaggaggggaaaatttaccatttgaaatacatccagagcattatattctcaattagcaaaggcttgtgtcatagaaaaaaatactactagagccaacaaccatgagctagagcctaactgacacagaaaaatggaaatgcctaactccaggacctttggacattcctattacacttaagcagggaaggggaggaagagatgtgagaagcaccttgaagaggtacagcccactaaaaaaccaatgcctgattacaggaatatggagtggctttcctccccacactgcactaccccattaacaaggcttctggataataacag

SEQ ID NO: 932096 - DNA, 760 bp, Homo sapiens
aaaaagactcatgaaaagcaagtgtctgactttaggtttctagttaaacatgtaaacagctcataagtcatctctcctgtccttgaacaaactggcaaatcacacttcttctaagatccatggaaagttgagatcacaagacaaactatcaattcaaaaataggaaagacaagaaaataaggataaaatttaccagaagcaaaaactatagctctcttctggcaggaacacacaaagcttaattgacttattgctaaacaataggtatggactaattgatagagaaaatctcatggggggtcatccttaggggaacctccacacttttttgtgagtattacttctaaaagtcccacattttcatgagttttacctctaaaagccctcaccagcttctcaggatgatgactgcacaaaaatcccctcttgtttttggcaggaggaggggaaaatttaccatttgaaatacatccagagcattatattctcaattagcaaaggcttgtgtcatagaaaaaaatactactagagccaacaaccatgagctagagcctwactgacacagaaaaatggaaatgcctaactccaggacctttggacattcctattacacttaagcagggaaggggaggaagagatgtgagaagcaccttgaagaggtacagcccactaaaaaaccaatgcctgattacaggaatatggagtggctttcctccccacactgcactaccccattaacaaggcttctggataataacag

SEQ ID NO: 932097 - DNA, 568 bp, Homo sapiens
gcattctacatgcataggtgtaaaatcctttgaatgtgaggacttctttgatatctgtggtggcatgacagatatcacaaaaattatgcatggacctttttttaaaaaaaaaacaactcatcagctatcgttagtgttagtgtattttatgtgtggctcaagacaattcttcttcttccaatgtggcccagggtagtcaaaaggttggacacccatgctacagcctcgaatttccaggctcaagagatccttccacctcagcctcctgagtagctggaactacaggtgcataccaccactcctgacttcactgtaatgtttaaaatcagatcaytgaaggtttaatttacatacatcacaataaccaaatttgtaaaggtacaattcaatgaatattgacaaaggtagatggggtattaataccaccacaatcagcacacagtatttccatcatgtcagtcgtcaaccaccctccccagtctttaaaaacaatgatctattgctatcccttcaatttcaccttttccaaaatatcgtataaatgaaatcccacagtatgtaactttct

SEQ ID NO: 932098 - DNA, 568 bp, Homo sapiens
gcattctacatgcataggtgtaaaatcctttgaatgtgaggacttctttgatatctgtggtggcatgacagatatcacaaaaattatgcatggacctttttttaaaaaaaaaacaactcatcagctatcgttagtgttagtgtattttatgtgtggctcaagacaattcttcttcttccaatgtggcccagggtagtcaaaaggttggacacccatgctacagcctcgaatttccaggctcaagagatccttccacctcagcctcctgagtagctggaactacaggtgcataccaccactcctgacttcactgtaatgtttaaaatcagatcattgaaggtttaatttacatacatcacaataaccaaatttgtaaaggtacaattcaatgaatattgacaaaggtagayggggtattaataccaccacaatcagcacacagtatttccatcatgtcagtcgtcaaccaccctccccagtctttaaaaacaatgatctattgctatcccttcaatttcaccttttccaaaatatcgtataaatgaaatcccacagtatgtaactttct

SEQ ID NO: 932099 - DNA, 822 bp, Homo sapiens
catggtgactcacacctataatcccagcactttgggaggctgaggtgggcggatcatttgaggtcaggagttcgggactggcctgaccaacatggtgaaatcccgtctctactaaaaatacaaataaataaataaataaataaataaataaataaataaataaataaattagccgggtatggcggtgcatgcctgtaatcccagctactcgggaggctgaggcagaagaattggttgaccttggaagccaagggttccattgaaccaagattcgcccccttgcattccagcctgggtggcagagcaagcctccataaaaaaaagaaaaagtaaaaaaagatgcccccctcccaatatataggtaatcaaaaattaacccattcaactaaaatactaaatgttgaaatccagcaaatatttactgagcatatactacatgcaacaaatatatgtgtcaggttgtgctgtaactgaaacaaaagtaaaatayggtcccttttctaaataagtttaaaagtactgatggaaacagacatgcaaatagcaaatacaaaattaaacaagtgccataataaaggtatagtacaaaaaatactaatgactcacctctagcaaagtacttcaagttaccttatttttctttctacactgatctaagcctcattacttccaaacatacttccaaactgccccaggtaattcacaaacaaaaatacacaacagaacaaggtgaagaccagaaaactaaatgtactccagattcccatttatatctgttaaaagaggttactagaagccaaaaatactcatttaagaaatatc

SEQ ID NO: 932100 - DNA, 697 bp, Homo sapiens
aatgatctgcatgtggagaggagctacccactgtgggtctcctcactgctgagagccggacacactgggacgtcctgcctgtggagtggagctacccactgtgggtctcctctgatctgttctgttgctcaataaagcacctcttcaccttgctcaccctccacttgtcctagatatgagacaagaacttaggattcactgaatggcagggttgaaagagttgtaacataaacaggattgaaacacacccctcacttgcccactgcgggtgatgagaaggagggaagagagaagggctatggyttttcagggagcccatacctcagagatctccaagccagggctgtgacaccctctttggggctttgcagttcctggtgtctccaagcttctgggagccactgtgttccctggttccagtcatggaagctgcttgtggtatgcttggtccaaccacaacctcacagggagtcagctcccgtgttggtgcctggagctgcccacctggctgcagatggtgtgcctggctgtgtgcagtggctggaccccacaatcactcactcatataccccttgccactcctcacctgggtagcccttggcaggcatgggatctggaccaatagcacaagctgagtgcagcctgccaggccaatgatcccagcaggcccaagcaaaactcaggcaaaggcaccacc

SEQ ID NO: 932101 - DNA, 649 bp, Homo sapiens
gtgggggcagggacagatctgagcagtgaggtatggacagccgtctcactgctccactaaccacaccactgtctccagtggtgctgttatccctccactttgcgctctcctcacaggctcctgaatgtcctctaggttgtctccaaactgctaaatctcaggtgtgctgacaggtctcagccgtggccagtgttttcctcggccttgaagttttgaggaagttactcccattggcaaggccttgtttgggggcctcctgtgtgtcctgcccccttttatttggctcctgccctcagaatgggtcagagtcatgtatttcagtgcagagtgcagattcccagtgctagcagttccttccagaaggatgaggtcattgaaagaaggaggaaacacaagacggtcactcctrtaggggaagatggcagggtactagggccagggcctgaggtgagggcaggagcctggaggaggcctgcctaccagagctcaggtctggcttagggagggaaatggctggactagtggctgcaaacaagttgagaaggaccttgaaactcttccagggagggttatgagagccaccaacagtaacaggatagaaaccctgtgatttggtggtactgtggcagagacaatgctgtgtttacca

SEQ ID NO: 932102 - DNA, 616 bp, Homo sapiens
agctgaaagtacataaacttttttgcttcttttccatcattataagtgtctatcagggagtaatgcactctccatatctccatatattttgccaagaaattacacaaagcccaaactcatggcaacaaaaacatctaaacagctattgacatcatcttggatcccccatacccttcatcaagacgcaagataaatggagaacactctaaattaattgaagacaacaggtaaaaaaaattaaactttatgtacataatcattttatatataattatgccaataatcatacaagtacatgtttaaatatttgatttgaataataaatttagttgtcattttgcataccttgttattctggtaccaaatatttgtttaaaaaaatggaaaatacaattttagcctaaatagtcatakaaatgggtcctggagtaatttcctttacaaaaatagaaatattgataaacttaattattaaattatgtgtaaataaatatataaaggtttattttaaaaattttaacatttaaggtagatgaaggcaaaataaataaaatatactggtttgtgcacataaaaatatattttataattgagattagtaaacatgagcaaaatc

SEQ ID NO: 932103 - DNA, 610 bp, Homo sapiens
ttaaggcaaggaccggccattttcacttcttttgtggtggaatgtcatcagttaaggtagggcagggcattttgacttcttttgtgattcttcagttacttcaggccatctgggtgtatatgtgcaagtcaccgggggtgtgatggcttrgcttgggctcagaggcctgacattcctgccttcttatattaataagaaaaataaagcaaaatagtgttgaagtgttagggcggcgaaaatttttggggggtggtatggagagagaatgggcgatgtttctcagggctgcttcaagtgggattaggggcggcgtgggaacctagagtgggagagattaagctgaaggaagattttgtggtaaggggtgacattgtggggttgttagaagaaacatttgtcatttagaattattggtgatggcctggatacagttttgtatgaattgaaaaactaaacagaataagagaaggagaaaaacaggtattaaaggtctaagaattgggaggacccaggacatctaattagagagtgcctaaggaggttcagcatagtcctgccagcaaagattatttactttaagacttaagagtggcagtttggggatagcatc

SEQ ID NO: 932104 - DNA, 610 bp, Homo sapiens
ttaaggcaaggaccggccattttcacttcttttgtggtggaatgtcatcagttaaggtagggcagggcattttgacttcttttgtgattcttcagttacttcaggccatctgggtgtatatgtgcaagtcaccgggggtgtgatggcttggcttgggctcagaggcctgacattcctgccttcttatattaataagaaaaataaagcaaaatagtgttgaagtgttrgggcggcgaaaatttttggggggtggtatggagagagaatgggcgatgtttctcagggctgcttcaagtgggattaggggcggcgtgggaacctagagtgggagagattaagctgaaggaagattttgtggtaaggggtgacattgtggggttgttagaagaaacatttgtcatttagaattattggtgatggcctggatacagttttgtatgaattgaaaaactaaacagaataagagaaggagaaaaacaggtattaaaggtctaagaattgggaggacccaggacatctaattagagagtgcctaaggaggttcagcatagtcctgccagcaaagattatttactttaagacttaagagtggcagtttggggatagcatc

SEQ ID NO: 932105 - DNA, 663 bp, Homo sapiens
gcttcccgaatttgggaacctcagttgcctcttgcctatgcagctagattttatatactgagattttaataggttgcctccctccctcatttgctcctccccattcctctcatttaaacagagagttatctctgaactatgaaaccttgaaaaagctctcaggcagagcagaaggcagaaggaggcaaagctttctggcttttgtttgcgggaaacccaagaagcctgagggaaaattagggagtttgctaaggaatgaagggaagaagctggtttgcaggtattggtggtgtttagggacaaaaatagagcatcttggtggggaagaagaagagagaggcctgagggtctctgatcagcagggagcatggttctgcttcctgagaggtggcacgtccccaggaaggaatcgktgctggcttgtgactacaagcagactcacaaacagtgcctgaatcccaaacatgacatgaagataacagcattactgggcccaaagggaccatgtgggcagggccgacggttgtctcagtggtaccacatgtctgatgaggagcacgttgccactccccactatccctctccccaacagtgatattggcactaggtgagaccctggagctgtgttgcaccacccctgctgctgaagaggggaagaactca

SEQ ID NO: 932106 - DNA, 748 bp, Homo sapiens
tgcccagctgctcaccttatcctatgtaaagtgctgatttgctgagtgcaagatgagtatataattgactattctcctacctgctccttttctcttgcaacacgtagactcagtaatgtgaccacacactcccctttcccctccagcctgcttttcccctttaaatagggaaaccctcaaaatcatctttggagaagggcacatgaaaccacctttgcaaaaattgtatcagtgaggaaaattataacagtaagcgaagctaactgttcaacccccatctcgcctttctctgaatttttcctgggctattgggccacgataactttggaagacatttaggctatagtttaaatgataataggccttgccccaaactcaactgcttttgtaaagttaatggaaggccatcaggttcactggagggacctgagtcctgctaaggcacagacataaagggatcagccattattccggaggttataagatgcaacttccccaattgctcctgcaaataacaccactatygtagattggccttttgagatatatttccagtttttctgtatgtccgatgcccatggctccacctggaccggatggctccacctggactgccaaccctgttcctgtggccccacccagaagagattcagcccacaggagaacttcaaccccttatgatttaatccccccaaccaatcagcagcaagtatctgttacttggccactcccaccacttcccctaagc

SEQ ID NO: 932107 - DNA, 727 bp, Homo sapiens; identical to SEQ ID NO: 923030

SEQ ID NO: 932108 - DNA, 727 bp, Homo sapiens; identical to SEQ ID NO: 923031

SEQ ID NO: 932109 - DNA, 727 bp, Homo sapiens; identical to SEQ ID NO: 923032

SEQ ID NO: 932110 - DNA, 727 bp, Homo sapiens; identical to SEQ ID NO: 923033

SEQ ID NO: 932111 - DNA, 574 bp, Homo sapiens
ctaaagtcaattcagaggtcaaatatattcttccccaaactaatacagtgctgaaacaagacaaaatctggctggaagatataggtttctctaattcttctcccacagactttaaataggccatgagataaaccaaagaacatgtaaccatccacaatacgggggaatttaattctttctccaatctgacaggatgctagcagtgtcagcattggtattcttaggatgtctgtgattggtgctaatccttggcaagaactgcacttttctcataggttataaaaatggtacatattgtgtatatattacatacatgtatctgtatacattccatatgcataacatagattcagtgcagaaatcagatcacggagcaggcatctatgagtagcagcaaggagcamgtgctctttacatgacctacttacagaaggcagagtctccccgtcaggcagtcttcagcatgacaattagcagtttttcctgcagtttggtcagcaggaatgacacaaacctctccctagcacaagccactcagccctgtcgggttcgtgctgctctttggataacggca

SEQ ID NO: 932112 - DNA, 639 bp, Homo sapiens
tctttcctctggaaaaaagatgcattttactgtttaaaattactagttttaaaatttcatgtataataaaagaaaaataatttatcccttttaatggatttgaaaaaaaatccctttcaatggatttgaaaaatatgtttatgctgaatgcaataatatctgctgaatatagcattttgttttgccctgctccactcttaaacrtgcatacatgtatacatacacacatgcacatatatgcacatacatatgcacatatataaaggtaaacagcctagttaggagttcataatgtggccaattatacctattgatgtagaagtttcatttaaaactgtctcttgttatccataaaagatatattccaagactgctagtgattgtctgaaatcaaagatggtagtaaattcaatggcctttatgtttctgttcatgttttccatccatacatttaatgtatttttcatcttaactaagtgtttaccatgcactgtggctataactttttcagtttaaggtagcagaaactagcatgaatttatttttccttcttcacaatttcatgggtagaagatttgttcctaccacagatcttagcaacctcagaatatgattttttttctttcctcatgaagtcaa

SEQ ID NO: 932113 - DNA, 574 bp, Homo sapiens
tcatccagatggaaaatcaacaaaatacatcaaacttaagctacactctagaccaaatggatcgaacagatatttacagaacattccacccaacagctacagaatatatacctttttcaggatgagaaaaggacattctccaggatagaccatattttaggccacaaaacaagtcttaacaaattttgtataaagtaaaacaatatgaagtatctattatgaatacaatggaataaaattaaaaatgaaggggtgcagaacaaatagtggaatggaagtctacactgttcatctctcatacaggaacatcaaattttaacatctatctgcacacggaaaagcattgtcacaagaacccaaaatccggtaagaaattatagtacctggtttaaactttatattatgaaaaraagcattgaggagggcaagagagacagccttgaatcactaatgccagtcgtcccccatcttctggcagagatcatatggtgcaaacagataatctgtggcagtctggagaggaagagcgcagtgagtggggaattttacattgaactcagtgctgccctgtcac

SEQ ID NO: 932114 - DNA, 739 bp, Homo sapiens
tggctcacacctataatcccagcactttgggaggccaaggcaggaggatcgcctgaggtcaggagtttgagaccagcctgggcaacatggagaaaccatgtctctactaaaaataaaaaaattggccagtgccacttgtctgtagttccaggtacttaggaggctgaggcgggagaatcacttgaagtcaggaggtggaggttgcagtgagccgagatygtgtcactgcactccttgactccttaacatttccccatgttaagcttatgcgccagtggaatagacctactcacagatcttcaaataatccatgttttcttaaacttttcagcatttgcacatgccatactctgcctagaacagatatcctctgcctctgtagtaaattcttcttccttcaagacatgacagagctactcaggaaagtcttacctggctgaggccttgctttacttacttaacatattcacacaagccacacacacacgcacacacacaagcacacacgcacacgtgcagggagatggggggtagagagagaaagagagagagaaagatttggccttactctttgcattaaattggcttccataactagggaaatggccttgtgttctagtcctaaagagatggtagtcttaaggagataacaaacagaggaaaacaagaagcagaaaattctactaccaacacctatgaaatacatgttatatatattatatacataggcaagtataaa

SEQ ID NO: 932115 - DNA, 739 bp, Homo sapiens
tggctcacacctataatcccagcactttgggaggccaaggcaggaggatcgcctgaggtcaggagtttgagaccagcctgggcaacatggagaaaccatgtctctactaaaaataaaaaaattggccagtgccacttgtctgtagttccaggtacttaggaggctgaggcgggagaatcacttgaagtcaggaggtggaggttgcagtgagccgagatcgtgtcactgcactccttgactccttaacatttccccatgttaagcttatgcgccagtggaatagacctactcacagatcttcaaataatccatgttttcttaaacytttcagcatttgcacatgccatactctgcctagaacagatatcctctgcctctgtagtaaattcttcttccttcaagacatgacagagctactcaggaaagtcttacctggctgaggccttgctttacttacttaacatattcacacaagccacacacacacgcacacacacaagcacacacgcacacgtgcagggagatggggggtagagagagaaagagagagagaaagatttggccttactctttgcattaaattggcttccataactagggaaatggccttgtgttctagtcctaaagagatggtagtcttaaggagataacaaacagaggaaaacaagaagcagaaaattctactaccaacacctatgaaatacatgttatatatattatatacataggcaagtataaa

SEQ ID NO: 932116 - DNA, 739 bp, Homo sapiens
tggctcacacctataatcccagcactttgggaggccaaggcaggaggatcgcctgaggtcaggagtttgagaccagcctgggcaacatggagaaaccatgtctctactaaaaataaaaaaattggccagtgccacttgtctgtagttccaggtacttaggaggctgaggcgggagaatcacttgaagtcaggaggtggaggttgcagtgagccgagatcgtgtcactgcactccttgactccttaacatttccccatgttaagcttatgcgccagtggaatagacctactcacagatcttcaaataatccatgttttcttaaacttttcagcatttgcacatgccatactctgcctagaacagatatcctctgcctctgtagtaaattcttcttccttcaagacatgacagagctactcaggaaagtcttmcctggctgaggccttgctttacttacttaacatattcacacaagccacacacacacgcacacacacaagcacacacgcacacgtgcagggagatggggggtagagagagaaagagagagagaaagatttggccttactctttgcattaaattggcttccataactagggaaatggccttgtgttctagtcctaaagagatggtagtcttaaggagataacaaacagaggaaaacaagaagcagaaaattctactaccaacacctatgaaatacatgttatatatattatatacataggcaagtataaa

SEQ ID NO: 932117 - DNA, 786 bp, Homo sapiens
taatctacctttgcctcagtttcttcatttggttgtttgtttgtttctttgagacagagtcttgctctgtcacccaggctggagtgcagtggtgcaatctcagctcactgcaacctgtgtccccctggttcaagcaattcttgtgcctcggcctccctagtatctgggattacaagcgcccgccaccacgccaagctaatttttgtatttttagtagagacagggtttcgccatgttggccaggctggtctcgagctcctgacctcaagtratccacctgcctcggcctcccaaagtgctgggattacaagcgtgagccaccaagcccagccagtttcttcatttgtaaactggggagaatgatggcattacctctcaggattgctttgaggaaaatttgagtgaaaacatgcaaggtgtagaataatacccaccccataggaatcactcaataaatgctgactacggctgttactgtggtgattgttatcatcggttatcattgctgttgtcattattagtgctggggaagccaccacctttcatcatgccaagtactgcctggcacctccatgaatgtcctcccccttaactaaccacagtaacacacggacagcgttgtcgtggcctgtgcaggactgagctggacttgaacccaggaccaaccccacagctcatcttccttccccagccccaggggccctggggactcacagtgggaacaacgcctaccttgcccacacctggagctgccctgcctcactgctaccccaggcgggtgtctac

SEQ ID NO: 932118 - DNA, 759 bp, Homo sapiens
agagactttgctctttcacatgccttttctgttatgtctgaaagtcccacacctttattagggagagacatatttgccaaagctggggccattatctacatgaatatggggaacaagtgacccatttgttgtcccctacttgaagaagaaatcaactttgagctctgggccttagaaggacaatttggaagggcaaagaatatccatccagtccacatyaagctaaaagacaccaccacttttccttatcaaaggaaatatcacttaaggcctgaagttctcaaaggattacaggatattgttagaaatttaaaagctcaaggtttagtaaaaaaatgtagcagtctttgaaacaccccaatcctaggaatacaaaaaccaaatagtggagactagggcaagacctcaggtttcacctatctaccttcaggaaatttttttcatctgtgataacacagcctatcgatgccaaaatggcactccaaaagaactatgctatgtctcatttctagcacctcccatgtccatatatactgaacaagagttacaaagtctccttataccccaatctcgccacacccgagcccttattgtcccttttacagtaggagcaggaatactaggcaggcttgggactggaattggaggcataacctcctccacccaattctattataaattatcatgagaattaaatgatgacatggaatgagttgccgactccctagtgaccctacaaagccagcttaattgtctagc

SEQ ID NO: 932119 - DNA, 838 bp, Homo sapiens
caaaagaactatgctatgtctcatttctagcacctcccatgtccatatatactgaacaagagttacaaagtctccttataccccaatctcgccacacccgagcccttattgtcccttttacagtaggagcaggaatactaggcaggcttgggactggaattggaggcataacctcctccacccaattctattataaattatcatgagaattaaatgatgacatggaatgagttgccgactccctagtgaccctacaaagccagcttaattgtctagctgtggtagtccttcaaaatcagagagccctagrgttattaacaactgaaagaggaggaacctgcctcttcttaggagaagaatgttgctatttcgttaaccagtcaggaatcattactgaaaaggttaaagaaataagagaacaaatagaaagtagacagaaaggagctttaacactcagggccctggaatatgtttaacaaatgtgtaccttggctcctcccctttctaagccctgtgacagtcatcctactattactcgctttcgggccttgcatttttaacctccttgtcaaatttgtctcctccaggatcaaggccatcaagctgcaaatggacttacaaatggaacctcaaatgagctcaactcacggcttctactgagaacccctggatccacctgctggtccctcactagcctaaaaagttcccctctggaggacaccacaactgcagggccccttcttcacccctaaccatcaggaagtagccagaacgactgctgccagttcccaacagcaattggtgtgtcctgtctagaggggggactgaggaggttcca

SEQ ID NO: 932120 - DNA, 838 bp, Homo sapiens
caaaagaactatgctatgtctcatttctagcacctcccatgtccatatatactgaacaagagttacaaagtctccttataccccaatctcgccacacccgagcccttattgtcccttttacagtaggagcaggaatactaggcaggcttgggactggaattggaggcataacctcctccacccaattctattataaattatcatgagaattaaatgatgacatggaatgagttgccgactccctagtgaccctacaaagccagcttaattgtctagctgtggtagtccttcaaaatcagagagccctaggsttattaacaactgaaagaggaggaacctgcctcttcttaggagaagaatgttgctatttcgttaaccagtcaggaatcattactgaaaaggttaaagaaataagagaacaaatagaaagtagacagaaaggagctttaacactcagggccctggaatatgtttaacaaatgtgtaccttggctcctcccctttctaagccctgtgacagtcatcctactattactcgctttcgggccttgcatttttaacctccttgtcaaatttgtctcctccaggatcaaggccatcaagctgcaaatggacttacaaatggaacctcaaatgagctcaactcacggcttctactgagaacccctggatccacctgctggtccctcactagcctaaaaagttcccctctggaggacaccacaactgcagggccccttcttcacccctaaccatcaggaagtagccagaacgactgctgccagttcccaacagcaattggtgtgtcctgtctagaggggggactgaggaggttcca

SEQ ID NO: 932121 - DNA, 838 bp, Homo sapiens
caaaagaactatgctatgtctcatttctagcacctcccatgtccatatatactgaacaagagttacaaagtctccttataccccaatctcgccacacccgagcccttattgtcccttttacagtaggagcaggaatactaggcaggcttgggactggaattggaggcataacctcctccacccaattctattataaattatcatgagaattaaatgatgacatggaatgagttgccgactccctagtgaccctacaaagccagcttaattgtctagctgtggtagtccttcaaaatcagagagccctagggttattaacaactgaaagaggaggaacctgcctcttcttaggagaagaatgttgctatttcgttaaccagtcaggaatcattactgaaaaggttaaagaaataagagaacaaatagaaagtagacaraaaggagctttaacactcagggccctggaatatgtttaacaaatgtgtaccttggctcctcccctttctaagccctgtgacagtcatcctactattactcgctttcgggccttgcatttttaacctccttgtcaaatttgtctcctccaggatcaaggccatcaagctgcaaatggacttacaaatggaacctcaaatgagctcaactcacggcttctactgagaacccctggatccacctgctggtccctcactagcctaaaaagttcccctctggaggacaccacaactgcagggccccttcttcacccctaaccatcaggaagtagccagaacgactgctgccagttcccaacagcaattggtgtgtcctgtctagaggggggactgaggaggttcca

SEQ ID NO: 932122 - DNA, 575 bp, Homo sapiens
gaccccttgcctgaaccagtggggtcgtggaaaccctggctccaactctgggtgcgcgtcttccaccaaaggcaccacaatgtggcaagaagtcccccggaaggcagagacaggtggccaggctttcagggggagattgaggaggccagcatgtcttgtgagaggtcaaggccttcccgggagcccccgcacccaacccaggggggtcgtggagtccgtggctcccacccatggtatgtgtctcttccaccgaaggcaccccaaagcaacaagamgtcccctggtagacagaaacgggctgccaggtttttagggggaggttgaggcaggcctgggacaaaaggggtgagcccaaagtggaggcctgcatgccctgctgtatgtcacggctttccaggcagaccccgtgcctgacctggggggtcatcgagtccctggctcccaccctgggtgcgtgtctctcccaccaaaggcactccaaaacggcaagaagtccctcgggggacaaagaccagcggccaggttttcagggagtggttgaggaggccgggatgccccaccagaggtcaggacct

SEQ ID NO: 932123 - DNA, 568 bp, Homo sapiens
gaccccttgcctgaaccagtggggtcgtggaaaccctggctccaactctgggtgcgcgtcttccaccaaaggcaccacaatgtggcaagaagtcccccggaaggcagagacaggtggccaggctttcagggggagattgaggaggccagcatgtcttgtgagaggtcaaggccttcccgggagcccccgcacccaacccaggggggtcgtggagtccgtggctcccacccatggtatgtgtctcttccaccgaaggcaccccaaagcaacaagaagtcccctggtagacagaaacgggctgccaggyttttagggggaggttgaggcaggcctgggacaaaaggggtgagcccaaagtggaggcctgcatgccctgctgtatgtcacggctttccaggcagaccccgtgcctgacctggggggtcatcgagtccctggctcccaccctgggtgcgtgtctctcccaccaaaggcactccaaaacggcaagaagtccctcgggggacaaagaccagcggccaggttttcagggagtggttgaggaggccgggatgccccaccagaggtc

SEQ ID NO: 932124 - DNA, 568 bp, Homo sapiens
gaccccttgcctgaaccagtggggtcgtggaaaccctggctccaactctgggtgcgcgtcttccaccaaaggcaccacaatgtggcaagaagtcccccggaaggcagagacaggtggccaggctttcagggggagattgaggaggccagcatgtcttgtgagaggtcaaggccttcccgggagcccccgcacccaacccaggggggtcgtggagtccgtggctcccacccatggtatgtgtctcttccaccgaaggcaccccaaagcaacaagaagtcccctggtagacagaaacgggctgccaggtttttagggggaggttgaggcaggcctgggacaaaaggggtgagcccaaagtggaggcctgcatgccctgctgtatgtcacggctttccaggcagaccccgtgcctgamctggggggtcatcgagtccctggctcccaccctgggtgcgtgtctctcccaccaaaggcactccaaaacggcaagaagtccctcgggggacaaagaccagcggccaggttttcagggagtggttgaggaggccgggatgccccaccagaggtc

SEQ ID NO: 932125 - DNA, 611 bp, Homo sapiens
gattggagaagaaaaagggtatgatctaatgctaacagactgagtggggaaacccagcaaggcctgtgtgtctaaagtcttcttggcctctctgtgcagcattccttccttccaggtatggggcaggaccctctctggaacggkggtgtgatgacctacaatgaaacaggtaaaatctgatagtttttttgttgttgttgtttctttgtttgagacagagtctcgctgtgtcccccaggctggagtgcagtggcgtggtcttggctcactgcaacctcagcctcccgggttcaagccttcctcatgcctcagccacacgagtagctgggactacaggtgcctgcctaatttttttgtattttcagtagagatggggtttcatcaagttggccaggctggtctcaaactcctaactttaagtgatccgccttccttggcctcccaaagtgctgggattacaggcatgagccaccgtgcccagctatttttttaaagacaaggtctcattctgtcacccaggctggagtgcagtggtgcaatcacagctcactgcagtcttgaccaagctcccatctcagcctcccaagtagctgggatcacaggcatgcacc

SEQ ID NO: 932126 - DNA, 611 bp, Homo sapiens
gattggagaagaaaaagggtatgatctaatgctaacagactgagtggggaaacccagcaaggcctgtgtgtctaaagtcttcttggcctctctgtgcagcattccttccttccaggtatggggcaggaccctctctggaacggtggtgtgatgacctacaatgaaacaggtaaaatctgatagttttkttgttgttgttgtttctttgtttgagacagagtctcgctgtgtcccccaggctggagtgcagtggcgtggtcttggctcactgcaacctcagcctcccgggttcaagccttcctcatgcctcagccacacgagtagctgggactacaggtgcctgcctaatttttttgtattttcagtagagatggggtttcatcaagttggccaggctggtctcaaactcctaactttaagtgatccgccttccttggcctcccaaagtgctgggattacaggcatgagccaccgtgcccagctatttttttaaagacaaggtctcattctgtcacccaggctggagtgcagtggtgcaatcacagctcactgcagtcttgaccaagctcccatctcagcctcccaagtagctgggatcacaggcatgcacc

SEQ ID NO: 932127 - DNA, 596 bp, Homo sapiens
gggggggctgacccccccacctccctcccagacggggcagccggccaggcagaggggttcctcagttcccagtaggggtggccgggcagaggtgcccctcgcctcccggacagggcggctggccgggcggggggctgacccccccacctccctcccggacggggcggctggcctggtggggggctgacccccacctccctcccggacggggtggctgccgggcggagatgctcctcacttcccagacggggtggctgccggacggcggggctcctcacttctcagacagggcggctgccgggcggaggggctcctcacctctcagtcggggcggttgccaggcagagggtctcctyacttctcagacggggcggccgggcagagacgctcctcacctcccagacggggttgcggccgggcagaggcgctcctcacatcccagacggggcggcggggcagaggcgctctccacatcccagacgatgggcgggcgggcagagacgctcctcacttcctagatgggatggtggtggggaagaggcgctcctcacttcctagatgggatggcggccgggcagagacgatcctcactttcc

SEQ ID NO: 932128 - DNA, 602 bp, Homo sapiens
caggatcccagtctgctaggtgggagagatgtctcctgcttgagccccttgggtgtggtgtagaactggaaactgcatcaagagtgactaaaccctgcctctgaaacaagaaagctaaacctgcattcaaagtggatgctgaggcaacataaaattattataaaattatacatttattataaatttatgatttattttaaagtaaaattaaatatgctgtaaatttgtaaatacagttgatccttgagcaacatggatttgaactgtgtggatccacttatatgcagatttttttcccaaccaaatagagattgaaaatacagtatgctttggatccgaaacccaacccaggttggaggtagaagtccaggttccccgtgtggtttctactgacaatgtgtgaggagaggcttgttgtcagcyagtgagggttaatgtcctgtctttttctgacatcactctttttttttttttttttttaatttggagacagagtctcactctgttccccaggctggagtgcagtgacgcgatcttagctcactgcaactaccatctcccaggttcaagcaattcttgtgcctcatcctcctgagtagctg

SEQ ID NO: 932129 - DNA, 570 bp, Homo sapiens
aggctccatgggcgtgggaccctccgagccaggtgcgggatatgatgtcctggtgtgccatgtgctcagttggaaatgcagaaatcacctgtcttctgcgtcactcacgctgggagctgcagactggagctgttcctattcggccatcttagaaccgctatttttttatttttatttttattttagtagagatgttacagaatttcaccacgttggccaggatggtctcaatctcctgaccttgtgatccgcccmccttggcctcccaaagtgctaggattacaggcatgagccaccacgcccggcctctatttcttttcttaatggactatctaggacctccagtaacatataaagctgtaatagtgttaaccatctttgtcctgttcctgatcttagacagaatgcatctaaagtttctccataaaaggtttgctttaggttattggcataaatcctttatcaagttaaggatattcccctttattcctattttctgagttcttgtaacatacacctatcaaagttatgtttttcctttattgaaataatcatgtgattttcctccca

SEQ ID NO: 932130 - DNA, 547 bp, Homo sapiens
gatgccagcattgagtgtctatagcttttccaggtgtagggtgcaagctgctggtcaatctaccattcttgggtctgaagagcactgaccctcttctcacagctcaactaggtagtgccccactggggactctgtaagtggtccaaccccacatttccccttggtactaccttagcagaggttctatgtgaggattctgccagcccctacagcagtgttctacctggacacccaggctwtctccatatatcctctaaaatctaggcggaggctaccaaacctcaactcttgcattctgtgcacccacaggcttaacaccacatggaagtcaccaagacttacagcttgcactctctggagctgtggcccaagctgtaccagggccactttgagctaaagctggagccggagtggcagggaagcagggagcagtgtctcaaggttgcacagagcagcagggtcccaggcctggccctcaaaactattcttccccaggaggcctctgggccagtgatgggaggggctgccaaaggtctctgaaatgtct

SEQ ID NO: 932131 - DNA, 626 bp, Homo sapiens
catgcaaatgtctcaccaataagtccagtgtatttactacttcttgctcactggatccaatcagcataatatcatcaatgtaacggaccagtgtgatatctcatggaagagagaagcgatcaaagtctctcagataagattatgacacaaagccaaagagttratatatccctaaagtaggacagtaaaggtatattgctggtcttgacagctaaaggcaaattgcttctggtgggccttatggacaggaatggagaaaaaggcatttgccaagtcaatgactgcataccaggtaccagatatgttaatttgctcaagcaatgaaaccacatctggtacagcaactgatataggagtcaccacttggttaagcttatgataatccactgtcattctacaagatccatctgtcttctgcacaggccaaacgggagagttgaaaggggatgtggtgggaatcaccagcctgcatacttcaatccttgatggtgccgctaatctccgcaatccctccagggatgtgatattgtttttgatttactattttttctaggtagaggcagctctaatggcttccatttgacctttcaccataatagccctcaccctaccagtcacggagccaa

SEQ ID NO: 932132 - DNA, 693 bp, Homo sapiens
aaagaaagaaaacaggaaactgtattgtgtcgggggaggcgggagggagatgaggaaacggtttggattttgtgtgtgggagggtattttttgggggtagttgtctgtaactttcctaagtgctttttttccttttcttttttaaagtaagttgcaggctttggcttggaaaaccccagggggatggggggcagaaacctgaggctgctgcccctttatctgccttcacggtactgtccccttcccccagctcctccctgaccccatgggccaggcctcagaccttccagctaaccgcttcccatgagccactactctgatgtcagcctataaccaaaggagctgggggggtccaggcctggtgaccaacctttctcagcccactcaatcagggtgctccccacctgcaggcaggaggcaacaccctatctgctaccatcagcccctkccagagcccatctgccccgcccagccctgccctgcccagccataccctgctctgccccatctgggggtgccctgctcagggatgggctggcagggctgtacccagcctccctggtaagcagagactcaagaaacctctggggtcctgttttctggtcgtgtgatcccaggggtgcacatgggccccttgggtgtctgaacagaagggcatgggagggagggctgcacccctgcagtcttactctg

SEQ ID NO: 932133 - DNA, 545 bp, Homo sapiens
attctcgtgcctcagcctcccgagtagctgaaattaccagcacatgctaccatgtccagctaatttttgtatttttagtagagacgatgttttgctatattggccaggctggtctcaaactcctgacctcaagtgatctacccaccttggcctcccaaagtgctgggattagaagagtgagccaccatgtctggcctaacttttgtatttttagtagagacagggtttcaccatgttggcaaggatggtctcaaactcctgacctcaagtgatccacctgcctcggcctcccaaaatgctgggattaaaggcataagccaccaygcccagcacaacatacatttttaactcaacaaagactaccttcaaatcagacagaaatctgtcttacgacagaatacttctagttccctttcctattcttcatgttattgttgtcatacctgtacttgtacacattttacaaatgctataatacattgctataatttctacttttaaatgtcaattctcatttaaataaatttaaaaatacagaaaaggtt

SEQ ID NO: 932134 - DNA, 669 bp, Homo sapiens
agcaccatgtttcctgcagaacctacagaatctacatacagcctgcagaaccatgagccaattaacctcttttgtttataaattacccagtctctggtatttctttctttcttttttttttttttttgagacagaatctcactctgttgccaggctggagtgccgtggtgtgatctctgctcacggcagtctctgtctcccaggttcaagcgattcctctgcctcagcctcccgagtagctgggactacaggcacgcaccaccacacctggctaattgtattttagtagagatggggtttcaccatgttggccaggatggtcttgatctcctgacctcatgatctgcaccccttggcctcccaaagtgctgggattacagrcatgagccaccgtgcccggcctggtatttctttatagcagtgtaagaatggactaatacagtgggacagacataagatagacattcccattccaagggggagaaataggcaagaagaaaggggtcccaagtaagtccaaaacccaacaaagaaaaccacattaagtcttaaaggtatagaataatctcctttgattccatgtcctgcatcttgggcacaccaagacacgggctgagcccccaaggcctcaggcagccctgcccctatctatggctttgttgggctcag

SEQ ID NO: 932135 - DNA, 669 bp, Homo sapiens
agcaccatgtttcctgcagaacctacagaatctacatacagcctgcagaaccatgagccaattaacctcttttgtttataaattacccagtctctggtatttctttctttcttttttttttttttttgagacagaatctcactctgttgccaggctggagtgccgtggtgtgatctctgctcacggcagtctctgtctcccaggttcaagcgattcctctgcctcagcctcccgagtagctgggactacaggcacgcaccaccacacctggctaattgtattttagtagagatggggtttcaccatgttggccaggatggtcttgatctcctgacctcatgatctgcaccccttggcctcccaaagtgctgggattacagacatgagccaccgtgcccrgcctggtatttctttatagcagtgtaagaatggactaatacagtgggacagacataagatagacattcccattccaagggggagaaataggcaagaagaaaggggtcccaagtaagtccaaaacccaacaaagaaaaccacattaagtcttaaaggtatagaataatctcctttgattccatgtcctgcatcttgggcacaccaagacacgggctgagcccccaaggcctcaggcagccctgcccctatctatggctttgttgggctcag

SEQ ID NO: 932136 - DNA, 783 bp, Homo sapiens
ctctctttagaatttattctacacaataaattctctcatttttatttttatatggggatggctttagtcttatttttgacagagaggtttttaaatgtagaatatttaattgatattttttcccttttagcactttgaatatgtcatgccactaccttcaggcctacgtaattttaatgccaaatcagtagttggtgtttgtgacaataccaatgtaataagttatttttcttgtgttgttcttcaaattctctttgcattggctttttgacagtttagccatggtggatatattgtagatttcttctaattaaamtttagtgagcttcttagatgtggatcaatatttccatcaagttgaaaagtttcagctattatttctgcaaatatttttttccttttcctttcaccttattttccgaaattcctgttatacatatgctggtgtatttaatggtgcccatagctctctaaatttttataaaatttccttattttttttcattctgtttctcaaactgggtagtctcaattgacctatttctatgtacaaggttgcagattatcttcttctgacactcagatctactgttgagccactctagtaacttttgtaaattttggttattgtattcttcatctacaaaatttaaatttaaattaatttatatatcttttctcatgttattttgtgagatattaccatacttttctttaattctttgaatatattttctttttgttatttgaaaatattcttattagctgagttaaagtttctgg

SEQ ID NO: 932137 - DNA, 585 bp, Homo sapiens
tgggtgtgtacgtgcgtgtgtggattaggggagtgacactggcttagatggcaaagattggcagctgagggactgtttgctcccttttattcctgaccctacaaccagctgcttgtcccttggcactctggcatcagatgtggtgtgaggatattccacctgttctttgagctggtccagtgttgctggagagctctgcttgctgccttggtctgcagtggcagctgtgctttcctacaagcccaacttcatatattctgtggttttgggttttgaatgtttcctagtttaatcaaggatgggcatttctgtttccattttgtgttatttttagttatccatggaaagatasaaacagaactatctttagtattaaaattacaagtttccaggaatcagttctgaaattattttgcatctttgaagtgtcttaaattttaaaaattggtcttggccaggtgcggtggctcacgcctgtaatcccagcacttcggaggccaaggcaggcagatcacggggtcaggagatcgagaccatcctggtgaacactgtgaaaccccgtctctactaaaaaaatacaaaaaa

SEQ ID NO: 932138 - DNA, 801 bp, Homo sapiens
agcgacagtgctgccatacatccccagcggagctccccatggatcctgcccttgttgcccattcattttacccacagtcatcagacttttcttccttaagtgccaccttgatcatcccactcctctgctcaagagccttctctggctgtctatggctcacagcaggaaatctcagctccttggcctggcataatgagcccctgtggctttggcctcaaactgaccttcccagccctctcccagccctgcctgagctaacctcattagctcagcaagctaagccaagcaagaccactcactccaccacaggtcccctgtggtgggaaatatttcaagttttgcagggaaaatgtgaggcttgtgaattaagtgttttgtcttttccatcctgcaagacccagttcaaagaccmacatccctggaagccactcttgactttgtcgttaggagttcctgctttttcctttaaccttccatgtgagttctttgtccctttccttgaaccctcggcagtgcataacccagggttccgggactgagtcactgatttacctacctaatgtcccttcccagcctgcgatgtccccaagggcaaacttggggctcaagtattcccagggctcacaggcaggagccagccaaggctgccgagatccaatggaaccagtgagcgctggcctcattcctgtttcagaatgccactttgtgctctgtgtcccccaccgaggaactcccacgcccacccaatctgatgggttgtgctttctacctgccagaggaaaagcttcctgcagtgcaggg

SEQ ID NO: 932139 - DNA, 801 bp, Homo sapiens
agcgacagtgctgccatacatccccagcggagctccccatggatcctgcccttgttgcccattcattttacccacagtcatcagacttttcttccttaagtgccaccttgatcatcccactcctctgctcaagagccttctctggctgtctatggctcacagcaggaaatctcagctccttggcctggcataatgagcccctgtggctttggcctcaaactgaccttcccagccctctcccagccctgcctgagctaacctcattagctcagcaagctaagccaagcaagaccactcactccaccacaggtcccctgtggtgggaaatatttcaagttttgcagggaaaatgtgaggcttgtgaattaagtgttttgtcttttccatcctgcaagacccagttcaaagacccmcatccctggaagccactcttgactttgtcgttaggagttcctgctttttcctttaaccttccatgtgagttctttgtccctttccttgaaccctcggcagtgcataacccagggttccgggactgagtcactgatttacctacctaatgtcccttcccagcctgcgatgtccccaagggcaaacttggggctcaagtattcccagggctcacaggcaggagccagccaaggctgccgagatccaatggaaccagtgagcgctggcctcattcctgtttcagaatgccactttgtgctctgtgtcccccaccgaggaactcccacgcccacccaatctgatgggttgtgctttctacctgccagaggaaaagcttcctgcagtgcaggg

SEQ ID NO: 932140 - DNA, 633 bp, Homo sapiens
atattccttgatgacagcacagccatccagcattatcttacaatgacaataatatcgtgagtacaactatgctgccgagggacagattcctttattcggaaattatttcagccatttggttgtcctcttcagcaatcagcttaagaaattggagtcaaccatatattgatattcagattctgaatattaagtatcagtttctcttttaatcttagacgtcgtggtggaaggaaaaatcagttagcaaagaagcaaacccagaaacagtgtrtctttttgatgtctttatgcctttagacaatgttgaacacagtgagaaggataggttccctttattgaatgttttttgtggaaacttagtttttcaatgcatcataggcccaaatcagtgtgcactactttggacattatccttggaagaaggaacagcttttcttcttctggcaccacagtgtatctgcatttgaatttctcccattgtgcatgagcacctcgtgggccacaaagatgcgctttgagagcaccctgagatgaagtttattttaaaaggaacaacaaccaacaccaccaccagctccacaggggccgtccagtgtacattattctcatctccttgggttattagtcttgatt

SEQ ID NO: 932141 - DNA, 474 bp, Homo sapiens
cagaaaccaactaaacagttattttatgttaactggtatccagatgtttccaaagaatattagtgaaatgcagacatctgcaactatacacagcacaaagcactgatctgatttttaacttaattaccacagatattccttagtatgctcaagtctaatgagcagtgcatgctaagtttctctaggagaaataaaaatcaaaagcagaaactagcttaagttgctayagtgatgaagaaaacaaaccagctcattactttaaaaaagattcagtgaaaaccacaattgactaagcttgaatttttcttccttttcctagctgactcaaaagcaaacacacaaaagcctccagctagagtcactgttttttttttataattaatcattaacaaaacatttatgaaaatccaaatggttttaaaattacttcaacctggttctcttaatagggtttgatttattcatcagaaatct

SEQ ID NO: 932142 - DNA, 590 bp, Homo sapiens
ggactccatgaagggaagggtggccccagctcaggctgtctcagaaatgggaaggaacaaagtctgcagaagctctaccctggggcccaggggacagcaggcacaggggctgagaggcatctcccatttaccctccccccagggtcttcctgccttggtggcctcagacatcagtggcgcaggggcctccctgaggactggcatgaagatgagaagggggtggtgacagtccattgttccaggagacacaagtgttacwtttgtttactaggccgatgttacaaactgatttttaaaacaatgcttgcagagtcatggaacaaataccacggagcagcacctagcacagaggaaggccccctgccctgggcatctgtgggaaaccagggccccaagtctgcggtgagctggtgcagaaactctgagctgaggagctaacattatacccatctgcaactgagagaacctgccaggctccaacaaagccaaacgggaaactctccccgggagacaccgtcctcatccagggaaaccaggattctcatggaacgtcattttctactgaagaggagcgcagaggaaaaactccc

SEQ ID NO: 932143 - DNA, 609 bp, Homo sapiens
ctctgcactcactagctctgtgattctgggcaagtcgcaaattgtgagcctcagtttccctaatgtaaaatggtagtaaatataggcctcgttttgattgtaaagtggtgtagctattgtggaaaactttagcagttcctcaaaaaattacagacagtttccatatgacccaacaagttgattactggatatatacccaaaagaacagaagacaggtactcgaacatatacacaaatcatatcgtagcagcataattygcgatagccaaaaggtggaaacagcccaaatgtccatcagtggacaaatggatagacaaaatgcaatattcatacaatggaatattattttattcagccataaaaagaatgaaatcctgacacatgctccaacatgagcaaaccttggaaacatcacgctaagtgaatgaagccagtcacaaaaggacacacactgtgtgactccatcttggtgaaatgttcagaaaaggccaacccatagagaaaaagcagaggagtggttgccaggggctaggggaggggaatgagaagtggcctaatgttttggcctagagatttccctttggggtgataatctacccccttctgtca

SEQ ID NO: 932144 - DNA, 668 bp, Homo sapiens
cagtagaatctggagctgatctactcaaagaaattatcaagaaagcaagggttggccgggcgcggtggctcatgcctataatcccagcactttgggaggctgagccaggcggatcacctgaggccaggagttcaagactgacctggccaacatggtgaaaccctatctctactaaaaatacaaaaaaaaaaaaaaaaattagccaggtgtggtggcaggcacctgtaaatcccagctacttgggaagctgaggcaggagaatagcttgaacttgggaggtggagattgcagtgagcagagatcacgccactgcacttcattcagcctgggtgacagagcgggactacatcaaaaaaaaaaaaaaaaagaaagaaagaaagaaagagagagagaaaggaagaaaggaaggaaggaaggagacagagagaaaaagagagaaagaaaaagaaagaaaraaaagaaagaaagaaggaaggaaggaaagaaagaaagaaagaaagaaagaaagaaagaaagaaagaaagaaagagaaagaaagaaagaaaaagaaagaaagaaaatgaacaaacggggagaaagaaagaaagcagggttcctggcctttggcacttccccaccctggagaccagcatggtgttatcttacccaaaccactcccagccccaggc

SEQ ID NO: 932145 - DNA, 748 bp, Homo sapiens
gtggtggctcacacctgtaatcccagcactttgggaggccgagacaggcggatcacctgaggtcaggagttcgagaccagcctggccatcatggcgaaatcccatctctactaaaaatacaaaaattagctggtcatggtggcgcacgcctgtaatcccagctactcaggaggctgaggcaggagaattgcttgaacccgggaggtggaggttgtggtgaggtgagatggccccactgtactccagcctgggccgcagagcgagactccatctcaaaaaaaaaagaaagagagaaactttatcaaccagtgtttcttcaagtgtccacccacatcagcatctcctggggtgcttttaaaagcacatttgactttagttctgccctctaaagtttgtgaacctcagtctggaactccagcatttgggggtttataatttgcaaccagaacaaaaaagaaaagccccatcccactgcctcactcagcccctctgctgctaacaacacactcactgcagggccaggggctgaagtctcccttgaaggatgttcggcaaggctggggccttcctcagggacccgccattgaatgccagcgaaggccttrtcccaagaacaggggttgaaggcaggaaatggatgggagggaggtagacagtgactatctgaccaatggcatttatccttttggaggtccctgaccctctcaagaacctggtgaaagccaaaggtctcttctcatacctgggc

SEQ ID NO: 932146 - DNA, 663 bp, Homo sapiens
cagagtgagattccgtctcaaaaaaaaaaaaaaaaggcaatggtaggctgggcacggtggctcacacctgtaatcccagcactttgggaggctgaggctggtgaatcacgatgtcagaagatcgagaccatcctggctaacacggtgaaatgccatctctactaaaaatataaaaaaattagccaagcgtggtggcaggcgccagtagtcccagctacttgggaggytgaggcaggaaaatggcgtgaacctgggaggcacagcttgcagtgagccgagatcacaccactgcactccagcttgggcgacagagtgagactccgtttcaaaaaaaaaaaaaaaaaaaaaaaagcaatagtagagatgagaatgaaataaatggacaaccccaataagtgtcacctgggtcgccagagtgatgccaagtcccatacaagtgacctcatgcccatgctcaccttcttgctgggccacggtacagtaataggaggaagggtggtcagagactaaggtcaagcgaattaacaaggtagccctggttcaggtccctgatccacaacttcctggctgtgtggacgtgggtgagtcctaaccctccctgagtctcttctgagaaatgagggtaacagtacctacttcataaggtgggtagctgtgagacta

SEQ ID NO: 932147 - DNA, 573 bp, Homo sapiens
caaccaaaggtctgactgcctgcagggttgggaagaatacagccatatttttctttttacagaggcctataaatggacgtgcaagtaggagagatattgctgaattcttttcccagcgaggaatattaataattaataccctggggaaggaatgcattcctkggggggggggggggtctataaatggctgctctgggagtgtcggtcttatgcggttgagataaggactgaaatacgccctggtctcctgcagtaccctcaggcttattagagaggggaaaagatcccaccctggtgaatttgaggtcagactggttctctgctcttgaaccctgttttctgttgtttaagatgtttatcaagaccatatgtgcacagccgaacatagaccctcatcagtaattctaattttgccctttgccttgtgatatttattgccctttaaagcatgtgatctttgtaacctactccctgttcatacactccctccccttttaaagtccttaataaaaacctgctggttttgcggctcaggggacatcacggacctactgatatgtgatgtcacccccg

SEQ ID NO: 932148 - DNA, 573 bp, Homo sapiens
caaccaaaggtctgactgcctgcagggttgggaagaatacagccatatttttctttttacagaggcctataaatggacgtgcaagtaggagagatattgctgaattcttttcccagcgaggaatattaataattaataccctggggaaggaatgcattcctgggggggggggggggtctataaatggctgctctgggagtgtcggtcttatgcggttgagataaggactgaaatacgccctggtctcctgcagtaccctcaggcttattagrgaggggaaaagatcccaccctggtgaatttgaggtcagactggttctctgctcttgaaccctgttttctgttgtttaagatgtttatcaagaccatatgtgcacagccgaacatagaccctcatcagtaattctaattttgccctttgccttgtgatatttattgccctttaaagcatgtgatctttgtaacctactccctgttcatacactccctccccttttaaagtccttaataaaaacctgctggttttgcggctcaggggacatcacggacctactgatatgtgatgtcacccccg

SEQ ID NO: 932149 - DNA, 573 bp, Homo sapiens
caaccaaaggtctgactgcctgcagggttgggaagaatacagccatatttttctttttacagaggcctataaatggacgtgcaagtaggagagatattgctgaattcttttcccagcgaggaatattaataattaataccctggggaaggaatgcattcctgggggggggggggggtctataaatggctgctctgggagtgtcggtcttatgcggttgagataaggactgaaatacgccctggtctcctgcagtaccctcaggcttattagagwggggaaaagatcccaccctggtgaatttgaggtcagactggttctctgctcttgaaccctgttttctgttgtttaagatgtttatcaagaccatatgtgcacagccgaacatagaccctcatcagtaattctaattttgccctttgccttgtgatatttattgccctttaaagcatgtgatctttgtaacctactccctgttcatacactccctccccttttaaagtccttaataaaaacctgctggttttgcggctcaggggacatcacggacctactgatatgtgatgtcacccccg

SEQ ID NO: 932150 - DNA, 610 bp, Homo sapiens
gggctgggccatgaatgtgactctacttctctccagtagtaaacaaagacctgcttattaaatcgaattgctttttactgctatggtggttaatcttttggtttattctatgtttttactatctcatatcctctacctttccctttactcttgtaggctgaatacatcctagtactccagaaagaccagggctaggtacaagtgtcaaactcaaagaaatttagtccagtgacccagcactaacgtaaaataattttaatcttyaattacatatttcaaaaagttttctttttcttttttcttttctttttttttttaagatggagtctcgctctgtggcccaggctggagtgcagtggcgcaatctcggctcacagcaagctccgcctcccaggttcacaccattctcctgcctcagcttccagagtagctgggactataggcacccgccaccatgcctggctaattttgtttttgtatttttagtagagacaggggttcaccatgttagctaagatagtctcgatctcctgaccttgtgatccacccgcctcggcctcccaaagtgctgggattacaggcgtgagccaccatgcccagccaaaagttt

SEQ ID NO: 932151 - DNA, 588 bp, Homo sapiens
ccccagttaagatggctttcatccaaaagagaggcaataataaatgctggccaggatggggagagagcagaaacctcatacactgttggtggaaatgtaaattaatatagctactatggaaaacagtatggaggttcttcacaaaactgacaataaaactaccatacaatccagcagtcccactgctgagtatacatccaaaagaaaggaaatcaatatattgaagagatagctgcattcccatgtttatttcagcactcttcacaatagccaagatatggaatcaacctaaatatccaccaatggatgaattgataaagaatatgtggtacatgcacacaatggaatattattcagccataaaaagaaatgaagttctgttattcagaacagcatagatggaactggaggacrttatgttgagtgaaatgtggcaggcacagaaagacaaatgtcacgtgttctcactcatatgtgggaacgaaagaaaaaaaatgaacttttggagatagagtagaatgatagttaccagagaaagggtagtgtgaaagggtagtgaagaggggatggttaaaggatacaaaaaca

SEQ ID NO: 932152 - DNA, 588 bp, Homo sapiens
ccccagttaagatggctttcatccaaaagagaggcaataataaatgctggccaggatggggagagagcagaaacctcatacactgttggtggaaatgtaaattaatatagctactatggaaaacagtatggaggttcttcacaaaactgacaataaaactaccatacaatccagcagtcccactgctgagtatacatccaaaagaaaggaaatcaatatattgaagagatagctgcattcccatgtttatttcagcactcttcacaatagccaagatatggaatcaacctaaatatccaccaatggatgaattgataaagaatatgtggtacatgcacacaatggaatattattcagccataaaaagaaatgaagttctgttattcagaacagcatagatggaactggaggacgttatgttgagtgaaatrtggcaggcacagaaagacaaatgtcacgtgttctcactcatatgtgggaacgaaagaaaaaaaatgaacttttggagatagagtagaatgatagttaccagagaaagggtagtgtgaaagggtagtgaagaggggatggttaaaggatacaaaaaca

SEQ ID NO: 932153 - DNA, 775 bp, Homo sapiens
aattagaatacaactacatgaattacattattataattttagtgcatagtttcaaaaatccagataaatggttaaacacattaaataaatggagaatttttttttaaatgggagcttccctgcacaagctctcttctcttgtctactgccatgtgagacatgcctttcaccttccgccatgattgtaaagcctcccaagccactgggaactgtaagtccattaaacctcttttttttgtaaattgcccagttttgggtatgtctttatcagcagtgtgaaaacgaactaatacagtgaattagtacaagtagagtggggtgctgctgaaaagatacctgaaaatgtggaagcaactttggaactgggtaacaggtagagtttggaacagtttggagggctcagaagaagaaggaaaatgaggggaagtttggaactctctagagacttgttgaatggctttgataaaaatgctgataatgaaatggacaatgaarttcaggctgaagtggtctcagatggagatgaggaacttgttgggaactagagcaaaggtgactcttgttgtattttagcaaagagactggcagcattttgccctgctctggagatttgtggaactttgaacttgagagagatgatttagggtttctggtggaaggcttgggtgctgttaaacgcattcagttttaaaagggaaacagagcatgaaagttcagaaaatttgcaatctgacaatgcaatagaaaagaaaatatcattttctgaggagaaata

SEQ ID NO: 932154 - DNA, 585 bp, Homo sapiens
tgccagtgtggccagaagaaaagcaggcagaacgtggaaagaccagactggtttagtcttctggtctacatctttctcccatgctggatgttttctgcccttgaatattggactccaaagttcttcaactttgggattcaactggcttccttgctcctcagcttgcagagagcctattgtgcgacctcaccttgtgatcgtgtgagttaatacaccttaaaaaactcccctttatatatacatctatcytattttttctgtccctctagagaaccccaactaatacgcccgtagactggacatgtctaataggatacttgcatccagaatatgttaaaaaaattctgaaaacccaacaatataaaaacaaacagccaacttaaaaaatgggcaaacatttgaacaaacactttattagaaaagatctataaaagacaaataaggataaagtaatatgctcaacaatcattagttttcaggagaatgcaatataagataacaatgagatgccattacactaagatagttaaaacaaagcaaaacaaaacaaaactgacaatcccaaatgctgatgatgatgcagag

SEQ ID NO: 932155 - DNA, 574 bp, Homo sapiens
tctacctggtctgatcttcatgggcttcagctctgcagtctagcagggataattgacacttaattaatagtgtttcattctcctctagcttgaacatatttctttctctttcaacattgaagccagtagttctaaaaatcaaacatgcaaacatgcatcagtcacctggagggcttgttaaaacacaggttactgggtctgccctcaaggtttctgattcagcacatctgaggtggagccctaraatttgcatttctgagttcccaggtgatgccgacattttggtccacaggccacactttaagaacctctgattcaaactattcagagtttatttcatatccaaaagtgattatttaaaaagtatcttagattaatgctcctcaaactgattgatttttccaatcatgtaccaaatacatagtcctatttcacatgaccagtattcagcttttgctgcaagcaactcaccatgccagttccacacacctgaacaggttatatcctgtttaacaagatcagcccactgatcacatactaggatgtcatggcaatgtcaatttatgatagaagt

SEQ ID NO: 932156 - DNA, 718 bp, Homo sapiens
cctgtaatctcagctactcgggaggctgaggcaggagaattgcttgaacctgagaggcggaggttgcagtgagtcgagattgtaccactgcactccagccctgggcgacagagcaagactccatctaaaaaaaaaaaaaaaaaaaagtctcagggctgtctctgcactgctccaggttcctgaggacggcggttggggctgggggagtcttctgtccctggggtaggctgagaagcaagagctccttttcccaactctgcccaaagctggaaaggttgttagagctgctaaaaaagctggcatctgcctctccttttgctcatcttcctttctggtttccatgggaatctgtggctcaggatgatcaggggttgacaggatggcgctgtggaaggagtctgtgtcaggcacagccatcccacrtgggaaggagccggctggtaagaaagtgagttccctgtccctgggagtgtgcaagcagggtaggggctgaatggctagagtgactccagaaaggggttcagatggggcagaggaagcagtctggaggccacttccctgagacaatcatgttttgtgtgattggctctgggggccccaccagccccaccttccagacgtccctgggcctcacaaagggggttgctgcaccctaggcactgcctctgatccagccccaactcctgtgctctgtgcctggcctatgctgaacacggac

SEQ ID NO: 932157 - DNA, 696 bp, Homo sapiens
taacctcacaagcacatcgtctgctcattcctgggcacaggccaagctaactatgggaggaatttagtttatagtttaattttaaaacaaaaatgaggctgggtgcggtggctgacacctgtaatcccagcactttgggaggccgaggcaggcagatcatgaggtcaggagattgagaccaccctggctaacacggtgaaaccccatctctgctaaaaatacaaaaaattagctgggcatggtgacgggcacctgtagtcccagctactcaggaggctgaggcaggagaatggcrtgaacccgggagacagagcttgcagtgagccgagatcgtgccactgcactccagcctgggcgacagagcaagactccgtctcaaacaacaacaacaacaacaacaaatgatgatagcctcttcctgaaactaaccccctttttgcaaggggaccaaaactgcctttataaaactttataaaactaacaaattgtccataagtttagaattatggcttagaagttatgaagccaaaggtcacaagatttgtaacctccccaattgctcctatagataacaccactattgtaaaacctaagaccggtatttgagatatttttcagaccttgcattctgaggaaccagatgttaccacccagaccagtaacctacgtcaggaaactgactcaaccagtcctgtg

SEQ ID NO: 932158 - DNA, 587 bp, Homo sapiens
ggagggtgaggtgaaacaatcacttgagcccgggaggcagagtttgcagtgagccatgattgtgacactgcactgtagcctgggtgacagagtgagaccctgtctcaacaacaacagcaacaacaaatgaagaaaaattctccctcaacatcccccctcaaatctctttggatttaacagctttattgagatattatatatatatatatatatatayacacacatacatacacacacacacacatatacgtatatgtatacatatacatatatatacacatatacatatatatacacatatacgtatatgtatatgtgtgtgtgtatatatgtatatatataattttcctattaaaattttaagtataaaattcaatggattatagcatatttatagatttatgccaccatcactacaatctaattttagaacattttcatcactacaaaagtagtatcacacccatttgcagttactctccattctccactctgaaccccacctttaggcaatcactaaataactttccatctctatagattggtctattgtggacatttcataaaaattgaatcacataatacat

SEQ ID NO: 932159 - DNA, 741 bp, Homo sapiens
ttgaacagataaagaaaactaatacaaaagaaattaaaccataccaccagagaaaatcatcttcactaaacagaagttaagaaggaaggaaagaaggaagagaaaatcacaagacaaccagaaagcaaataacaaaagggcaggagtcagtccttacttatcagtaataacattaaatgtaaatggactaaacccttcaatcaaaagtcatagagtggctgaacgaatgaaaaaacaagacccaatgattcatcgcctggaagaaacatacttcacctataaagatacacataaactgaaaatgaaaaggtagaaaaagatatttcatgccaatagagacttaaawagagcaacagtagctataattacatcagagtaaatagatttcaacacaaaatctataagaagagacaaaaaggttattatataatgataaaagggtcattttagccatatgatataataattgtaaatatatgcacccaaacctggaacactcaggtatatagagcaaatattattagacttaaagaaagagatagaccaaatacaataatagttggagactatttattacattcagcattggacatatttcccagacagaaaatcaacaaagaaacatcagacttaatctacactctagaacaattatcagggaaaccagcccccaatatttcaatgtagattctttctattttccctaagtgtcagccagtctgataaataaagagaaagagt

SEQ ID NO: 932160 - DNA, 597 bp, Homo sapiens
gccaccacattttttttatccagtctatcattgatgggcatttgagttggtcccaagactttgctattgtgagcagtgctgcaataaacatacgtgtgcttatgtctttatagtagaatgatttataatcctttgggtatatacccagcaatgggatttttgggtcaaatcacacttctagttctaaatccttgaagaatcacactatcttcygcaatggttgaaataatttacactcccatcaatggtgtaaaagcattcttatttctccacgtcctctccagcatctattgtttctgattttttttcatgatcaccattctaactggtgtgagatggtatctcattgtggttttgatttgcatttctctaatgactagtagttatgagctttaatagttttgttgaatgcataaatgtcttcttctgagaagtgtctgttcatatccttcacccactttttgatagggtttttttttcttgtaaatttgattaagttctttgtagattctggatattagcccttcgtcagatggagagattgcaaaaagtttctcccattctctaggttgcctgttcactctaatgatagtttct

SEQ ID NO: 932161 - DNA, 554 bp, Homo sapiens
attaaaaggaagaaaatgtgcaatcatctcaataaaataaatgcagataaataattccataaaatgaatatatttaattttaaaaccactcaataaatgcacacatgcacaaaactgtttataaaggaagagtaaaacaggcttttccttaacataatagagaatatctgcacaagtcccacaccgaataatatccttaatggtgaaatagtaaacacatttcttttaaagccaaggataaaatacaggtgcctgttatgaaccacttcctttaattaaccatggcattggaaactcttgccacttgtataatataggcaaagaaacaaatgtaaatkattggaaaggaagaaacaaagctatcatttttctcaggtgataggactatcttcataggaaacccaaaagaactacaaacagatcgttagaattaatatggcactttaactaggttgttgattataagatcaacatacaaaattaaactccatttctatacaccagcttcaaagtattagaaaatattttcaaaactaccacacactttataatag

SEQ ID NO: 932162 - DNA, 554 bp, Homo sapiens
attaaaaggaagaaaatgtgcaatcatctcaataaaataaatgcagataaataattccataaaatgaatatatttaattttaaaaccactcaataaatgcacacatgcacaaaactgtttataaaggaagagtaaaacaggcttttccttaacataatagagaatatctgcacaagtcccacaccgaataatatccttaatggtgaaatagtaaacacatttcttttaaagccaaggataaaatacaggtgcctgttatgaaccacttcctttaattaaccatggcattggaaactcttgccacttgtataatataggcaaagaaacaaatgtaaatgattggaaaggaagaaacaaagctawcatttttctcaggtgataggactatcttcataggaaacccaaaagaactacaaacagatcgttagaattaatatggcactttaactaggttgttgattataagatcaacatacaaaattaaactccatttctatacaccagcttcaaagtattagaaaatattttcaaaactaccacacactttataatag

SEQ ID NO: 932163 - DNA, 661 bp, Homo sapiens
cacaagaagtaggcatgggttctataaagattctaagaggtcttacttagtgtgtgagcagctgaagccttgaagtgtgggtggatgagccagtgctttgctttcagttgcacccgcccagccagaagtgagctctcgcccccacttctcttcccctataacctgagagcatttcttgtctgctgggctcttcttttgccctstacagaaccaatttaatgaaatgaataaaaaaaggaataaaaggaaaagggcaaacagcacatggggcccttggcagaggacagcctccgacatgaaagactccgaggcacatcaaagatgccgagagacaaacacacagcgcccgcccctgcctgcaccatcactgtgactttccaagccccagcagctccccagagccctccttttctgaggcttagggatgcgggtaagtgggccacggccctggcagcctgagaaggttcagctgctcccacttctgctggctcctgggcaactctctgcaggtccccacaggccccattctccaccccgggtggtggaggacagccacacacaagcagccggaaagaaatcagagcgtgctcaggcctggggctggggttggaggggagaagagggagggcccagacctgggagtgggcagggctcctgtgag

SEQ ID NO: 932164 - DNA, 661 bp, Homo sapiens
cacaagaagtaggcatgggttctataaagattctaagaggtcttacttagtgtgtgagcagctgaagccttgaagtgtgggtggatgagccagtgctttgctttcagttgcacccgcccagccagaagtgagctctcgcccccacttctcttcccctataacctgagagcatttcttgtctgctgggctcttcttttgccctctacagaaccaatttaatgaaatgaataaaaaaaggaataaaaggaaaagrgcaaacagcacatggggcccttggcagaggacagcctccgacatgaaagactccgaggcacatcaaagatgccgagagacaaacacacagcgcccgcccctgcctgcaccatcactgtgactttccaagccccagcagctccccagagccctccttttctgaggcttagggatgcgggtaagtgggccacggccctggcagcctgagaaggttcagctgctcccacttctgctggctcctgggcaactctctgcaggtccccacaggccccattctccaccccgggtggtggaggacagccacacacaagcagccggaaagaaatcagagcgtgctcaggcctggggctggggttggaggggagaagagggagggcccagacctgggagtgggcagggctcctgtgag

SEQ ID NO: 932165 - DNA, 661 bp, Homo sapiens
cacaagaagtaggcatgggttctataaagattctaagaggtcttacttagtgtgtgagcagctgaagccttgaagtgtgggtggatgagccagtgctttgctttcagttgcacccgcccagccagaagtgagctctcgcccccacttctcttcccctataacctgagagcatttcttgtctgctgggctcttcttttgccctctacagaaccaatttaatgaaatgaataaaaaaaggaataaaaggaaaagggcaaacagcacatggggcccttggcagaggacagcctccgacatgaaagactccgaggcacatcaaagatgccgagagacaaacacayagcgcccgcccctgcctgcaccatcactgtgactttccaagccccagcagctccccagagccctccttttctgaggcttagggatgcgggtaagtgggccacggccctggcagcctgagaaggttcagctgctcccacttctgctggctcctgggcaactctctgcaggtccccacaggccccattctccaccccgggtggtggaggacagccacacacaagcagccggaaagaaatcagagcgtgctcaggcctggggctggggttggaggggagaagagggagggcccagacctgggagtgggcagggctcctgtgag

SEQ ID NO: 932166 - DNA, 661 bp, Homo sapiens
cacaagaagtaggcatgggttctataaagattctaagaggtcttacttagtgtgtgagcagctgaagccttgaagtgtgggtggatgagccagtgctttgctttcagttgcacccgcccagccagaagtgagctctcgcccccacttctcttcccctataacctgagagcatttcttgtctgctgggctcttcttttgccctctacagaaccaatttaatgaaatgaataaaaaaaggaataaaaggaaaagggcaaacagcacatggggcccttggcagaggacagcctccgacatgaaagactccgaggcacatcaaagatgccgagagacaaacacacagcgcccgcccctgcctgcaccatcactgtgactttccaagccccagcagctccccagagccctccttttctgaggcttagggatgcgggtaagtgggccacggccctggcagcctgagaaggttcagctgctcccacktctgctggctcctgggcaactctctgcaggtccccacaggccccattctccaccccgggtggtggaggacagccacacacaagcagccggaaagaaatcagagcgtgctcaggcctggggctggggttggaggggagaagagggagggcccagacctgggagtgggcagggctcctgtgag

SEQ ID NO: 932167 - DNA, 757 bp, Homo sapiens
gattatctccacccgccaccctcctgccctgctattgccttggataagcttttgcaattggcagggcacccagttacatggtcttagagcatgctatactttttgcttttttataatattttccccaattgcatggttgtgtgtgtaaggtcaktctctcttatagattcctcagttccaggaggatagtctcttcctttctctctttgtctttgcaacattcttcgcagctagaatattgcccagcaagcaggagctcagtaaaaatgggtgaggtgagcaggtatatgccccagagctggatgttgaggtgtgcttcccacaggctgcacctgcccaccaatgcgaggtgaggacctgcatgagccaggcattgtcagaccctgggcaaattcagaagggtgggcatgaaccctgctttctgaggagaaaggggtggtcagtggccaattctactttaatgtggtaagtgccagaaaatgtggaagctcagagttgtacgggaacatagaggatgaggacgaggctgaagctggagtctacaggaagtgtgactggagacagggaggccagaattgggtccagaaggcttcaggaggttttctaggaggcctgctgcagactgctggacgtctctgtggctgttgtagtgggcagagtccctgctggcagaattcttagctttgtgtctgctggtaggctccttcttatttttaagcttatgatagagatgatatgctgggaaaccacatgttac

SEQ ID NO: 932168 - DNA, 671 bp, Homo sapiens
gcccttatatcatgggactggactagaaatagatgagcatctgtgcaggaaataacgatgatactctctgtggcacagcgtcactgagcttgagctcaagaacatgatagacctggatttgaatccctgcttgccacctactagctatgaaactttaggaaggtttcttaaactctctttaagagttagttttctgcccaggcatggtggctcaggcttgtaatcccagcactttgggaggtcaaggccggcagatcgcttgaggtcaggagttccagaccagcctggccaacatggtgaaaccccatttccatcaaaaatacaaaaattagctggatgcctgtaatcctagctactcaggaggctgaggcaggagaattacttgaacccaggaggcagaggttggcagttagccaagattgtgtcactgcactccagcctgggagacaaagtgagactctgtctcaaaaaaaaaaaaagacwtagttttctgtctgtttaataggaatgctaacagtagtcacttcataggatttttgtgaggattaaatgacaagatatacacaaaactttaagcccacagtgcagtacaaagcaagagctcagtacaaagtacaagggtgtaatatttatttattttgttattattattattatttgaacccacatag

SEQ ID NO: 932169 - DNA, 569 bp, Homo sapiens
ctactggtccacagagtgttatgaacatataatttgctaagttaattttaaattgacttaaacgtactggtgaattcaccgattaactgttcttttccagtattactcttagaaatgtccttcccttgatatattttatgttctaaaaaattaatttcattttaagaatcacatcctccaaaacaaaagaaacaaaagctcccatacaattctaatgmtagttataggtaacattaaaaaatggcataccaactgtaaaaaccaaaaacaaaaaaacaaacaaacaaacaaaacaattcccatgaaagccagaggcaaacaatgcaaattttaatgtcaatattgtcatttttttcctaggttaggggacaatataaccacatttataaacttattctttttgtctctcctcatgttgacctcacacatagcatattatgccattaaaacaacaaaaaaaggagaaaatgctatattgaaatccagtattttcttacaacaattccttactgtgaattgtgaatgaaaattaaattctttaatcactaggaaagactctgagtgtgaaa

SEQ ID NO: 932170 - DNA, 580 bp, Homo sapiens
ctatttggactaatttttgtatcaaggtaacactggccccacagaataaattgggaagtgaatatttctcttttttaaaaaagctagtcaagaattaatatcaattattcaatactaacaaatattgttataaattattaatttctctaatttttattttcttccttctgcttgctttagktttgctattttttccagtgccttaatgtggaaggtcatcttatctcatcctttcatttgtcttttcattttctaaatagtgtctttttagcatcaggtgagctccccaggttggtagtactccatgtttattgctgtacaacaatgacaggtaatatgtcctgaagacaatggaaacttaacattcaaaatcctcctagattccaccttatatgatatgtctcttcctttaattggtcctaatttctaccctttctctattataaaccatgagtacaatggcattcaatgagttctgtgagtctttctagtaaattcttgaatctgagggtgttcaggggaaacccctgaaatggcagttggtgtcagaagtgagaatcgtcttatatggcctcttcct

SEQ ID NO: 932171 - DNA, 586 bp, Homo sapiens
acacctatcagacgtacatttggtcttttcacgtagtcccatatttcttggaggtttgttcgtttctttttattcttttttatctaaacttcccttcttgcttcatttcattcatttcttcttccatcacttataccctttcttccagttgatcacatcggctcctgaagcttctgcattctttacgtagatctcaagccttggctttcagctccatcagctcctttaagcacttctctgyattggttattctagatatacattcgtctaaatttttttcaaagtttttaacttctttgcccttggtttgaatttcctcctgtagctcagagtagtttgatcgtctgaagccttcttctctcaactcatcaaagtcattctccacccagcttttttccattgctggtgaggaactgcgttcctttggaggaggagaggtgctctgctttttagaatttccaatttttctgctgtgttttttccccatctttgtggttgtatctacttttggtctttgatgatggtgatgtacagatgggtttttggtgtttatgtcctttctgtttgtaagttttccttctaacag

SEQ ID NO: 932172 - DNA, 616 bp, Homo sapiens
atatagctgtttaaataggagaaattggccaaaacaaaggggttacaggccccatgcaagtccaaaatccagtggggaagtcaaattttaaagcttcaaaatgatctcctttgactctagttctcacatccaggttatgctgatgtaagaggtgggttctcatggtcttgggcagttccacctttgtggctttgcagggtacagcctccctcccagctactttcatgggctggcgttgagtgtctgtggcttttccaggagcatggtgcaagctgttggtggatctaccattctggkgtctggaggatggtggccctcttctcacagctccactaggcagagcccaagtagggactctgtgtgggggctccaaccccacatttcccttccacagtgccctagcagaggttctccctaagggccccacctctgcagcaaacttgcctgggcatccaggagtttccatacatcttctgaaatctagatggaggctcccaaacctcaattcttgacttctgtgcacctacaggctcaacaccacgtgcaaactgcaaaggcttagggcttccacccactgaagtcacagcccaagctctacatttgccctttggagcca

SEQ ID NO: 932173 - DNA, 657 bp, Homo sapiens
atctcgaagcttgaatatatgaaagaaccctttaagattaaaaaacccatattatctcccataagttatttcttcggactattgccttattaaaattttctagttcttatttttgcattgaaaaggagaatgatgatttttaaataagttcctactcacttttaatttctactatgacagttttattgcttttcatggcaatagattcctctggttcaacaagaagggcagaacaaggaagtacagaaacatctcaatatatctcaaaaagttatttaacatggacagtgtcatttagaatctttarcatccctatcaaatggatgccattattatcccccttttacaggatattaaaacttacatactgtaaataaccagctgaaagtcatatagcatggaaaatacaataagcatacaaagaagcaatggcatttgaagtggaggagggtgaaggattaaaaggctaaacttagtttggttaagaaaaaagaaaactagaaggtggcaaactcttgttggaaaggggaaggatttggacagagcaaggtagtggagtagatctctccagtaatcatacccctatggacacatctatatgaacaactatccacatatgaaattatctttacaagagctaatgaaccctgaatacat

SEQ ID NO: 932174 - DNA, 709 bp, Homo sapiens
cattgcctcacccgcgaagtgcaaggggtcagggaattccctttcctagtcaaagaaagtggtgacagatggcatctggaaagttgggtcactcccaccctaacactgcgcttttccaatgggcttaaaaaatgtcacaccaggatattatatcctgcacctggctcagagagtcctacgtccatggagcctcaytcattgctagcacagcagtctaagatcaaactgcaaggtggcagcgaggttgggggagggacgcctgccattgctaaggcatgagtaggtaaacaaagtagccaggaagcaggaactgggtggagcccaccagagctcaaggaggcctgcctgcctctgtaggctccacctctgggggcagggcacagacaaacaaaaagtcagcagtatcctctgcagacttaaatatccctctctgacagctttgaagagtgtagtggttctcccagctcacagcttgtgatctgagaatggacaaactgcctcctcaagtgggtccttgactcctgagtagcctaactgggaggcaccccccagtagggttggactgaaacctcacacagcctggtactcttctgagacaaaacttccaggggaacgatcaggcagcagcatctgcggttcaccaatatccactgttctgcagtcaccgctgctgatacacaggcaaacagggtctggaatggacttccaa

SEQ ID NO: 932175 - DNA, 647 bp, Homo sapiens
ttctcacatctccaagatgtttcacagaaagcttctgtctagtttttatgtgaagataattcctttttcaccataggcctcaaagtgctgacaaatatccctttgcagattttacaggaacagaatttccaatctgttcaatgaaaagaaatggttacctctgtgagatgaaagcacacaccacaaccctttggaaattctaccaaatactgcttccaaaatgctcatcaaaagaaargttcacctctgtgggatgaatgcacatatcaaaaatatgattctcagaaagcttctatctcatttttatgtgaaagtgtttcctttttcaccatgggcctcaaagtgctcaaaaatatccctttgcagatcctaaaaaaagactgtttccaaaccgctgagtcaaaggagtggttcaactctgtgagatgaatgcacacatcataaagaagtttctcacaaactttctttatagtttttatgtgaacatatttccttttaaccatagacctcaaagtgctcacaaatatccctttgcagattctacaaaaagacggtttcccaactgctcaatcaaaagaattgttgaactctgtgagatgaatacatacatcacaaagcagtttctcagaaaactttagtctagtttt

SEQ ID NO: 932176 - DNA, 647 bp, Homo sapiens
ttctcacatctccaagatgtttcacagaaagcttctgtctagtttttatgtgaagataattcctttttcaccataggcctcaaagtgctgacaaatatccctttgcagattttacaggaacagaatttccaatctgttcaatgaaaagaaatggttacctctgtgagatgaaagcacacaccacaaccctttggaaattctaccaaatactgcttccaaaatgctcatcaaaagaaaagttcacctctgtgggatgaatgcacatatcaaaaatatgattctcagaaagcttctatctcrtttttatgtgaaagtgtttcctttttcaccatgggcctcaaagtgctcaaaaatatccctttgcagatcctaaaaaaagactgtttccaaaccgctgagtcaaaggagtggttcaactctgtgagatgaatgcacacatcataaagaagtttctcacaaactttctttatagtttttatgtgaacatatttccttttaaccatagacctcaaagtgctcacaaatatccctttgcagattctacaaaaagacggtttcccaactgctcaatcaaaagaattgttgaactctgtgagatgaatacatacatcacaaagcagtttctcagaaaactttagtctagtttt

SEQ ID NO: 932177 - DNA, 588 bp, Homo sapiens
acagagtaagtcagctgaattttagaatacttaaccctaacctggtgttctaggtctttcctttttgtaattattattattatttggagtcagggtcatgctccatcactcaggctggagtgcagtggcacaatcacaatgccctgcagccttgagcttctgggctcaagtgattctggcacctctgcctttgmctcccaagtatttgtaccacaggtacgtgggcccagctaatttttttttttttttttttctcatagagacagggtctcaggctggtctggaactcctgggctcaagcaatcctcccacctctgccttcacttcccaaatagctgagaccacaggcacacgccaccaccatacccagcttattttttttatcagtttggtgcaagagtaattgtgggttttgctattgaaagtaatggaaaaacccataattactttttgcaccgccctaataattttttgtggagacagggtcttgccctgttgtctaggctggtttccaactcctgggcttgagtgaccctcctgcctaggcctctaaaagttctgggattacagatgggagccactgcacca

SEQ ID NO: 932178 - DNA, 517 bp, Homo sapiens
caccatgttagccaggatggttttgatctcctgacctcctgatccacccgcctctgtctcccaaagtgctgggattacaggcgtgagccaccacgcccggcctctttctttctttctcttttttttttttttgagacggggtcttgctctgtcaccaggctggagtgcagcggtgtgatcttggctcactgcaacctccgcctcctggcttcaagcgattctcctgcctcagcctcctgagtagctgggactacaggtgtgcaccatcacacccaactaatttttgtatttttagtagagacggggtttcaccatgttggtcaggatggtctctatctcctgacctygtgatccgcccagctcggcctctcaaagtgctgggattgcaggtatgaaccaccgctcctggccctttctttttttgagatggagtctcactctgttgccaggctggagtgcagtgacatgatctcggctcaccgccaatctccgcctcctggtttcaagtgattctcct

SEQ ID NO: 932179 - DNA, 608 bp, Homo sapiens
  misc_feature 1, 2, 3, 4, 5, 6, 7, 8, 9, 10, 11, 12, 13, 14, 15, 16, 17,18, 19, 20, 21, 22, 23, 24, 25, 26, 27, 28: n = A,T,C or G
nnnnnnnnnnnnnnnnnnnnnnnnnnnnttttttaaatcctaggtcaggtgctatttgactttatgacaagtgcaaacttttcttttatgtcacccatggcgctgatgaggagagccaaccatagaatagatacatgttagcccgggcatggtagttcatccctgtaatcccagcactttgggaggttgaggcgaccagatcacgtggtcaggagatcgagaccagcctggccaatatggcaaaaccccatgtytattaaaaatacaaaaattagccagtcaaggtggcatgcaactgtagtcccagctactcaggaggttgaggcaggagaatcacttggccctgggaagcggaggttgcagtgagccaagatcataccattgcactccagcctgggtgacaaagtgagattttgtttcaaaaaaaaaaaaaaaaaaaaaaaaaaagatacaggttctcggttatactttgcagatttcagttgttcctaatctctctaacttcatgtcaatctttccttatccatctcctgcactctgactccacaatcagcaatagaaacagaagaaataactgaaccaagaatgttttaccagttcctacaatt

SEQ ID NO: 932180 - DNA, 608 bp, Homo sapiens
  misc_feature 1, 2, 3, 4, 5, 6, 7, 8, 9, 10, 11, 12, 13, 14, 15, 16, 17,18, 19, 20, 21, 22, 23, 24, 25, 26, 27, 28: n = A,T,C or G
nnnnnnnnnnnnnnnnnnnnnnnnnnnnttttttaaatcctaggtcaggtgctatttgactttatgacaagtgcaaacttttcttttatgtcacccatggcgctgatgaggagagccaaccatagaatagatacatgttagcccgggcatggtagttcatccctgtaatcccagcactttgggaggttgaggcgaccagatcacgtggtcaggagatcgagaccagcctggccaatatggcaaaaccccatgtttattaaaaatacaaaaattagccagtcaaggtggcatgcaactgtagtcccagctactcaggaggytgaggcaggagaatcacttggccctgggaagcggaggttgcagtgagccaagatcataccattgcactccagcctgggtgacaaagtgagattttgtttcaaaaaaaaaaaaaaaaaaaaaaaaaaagatacaggttctcggttatactttgcagatttcagttgttcctaatctctctaacttcatgtcaatctttccttatccatctcctgcactctgactccacaatcagcaatagaaacagaagaaataactgaaccaagaatgttttaccagttcctacaatt

SEQ ID NO: 932181 - DNA, 608 bp, Homo sapiens
  misc_feature 1, 2, 3, 4, 5, 6, 7, 8, 9, 10, 11, 12, 13, 14, 15, 16, 17,18, 19, 20, 21, 22, 23, 24, 25, 26, 27, 28: n = A,T,C or G
nnnnnnnnnnnnnnnnnnnnnnnnnnnnttttttaaatcctaggtcaggtgctatttgactttatgacaagtgcaaacttttcttttatgtcacccatggcgctgatgaggagagccaaccatagaatagatacatgttagcccgggcatggtagttcatccctgtaatcccagcactttgggaggttgaggcgaccagatcacgtggtcaggagatcgagaccagcctggccaatatggcaaaaccccatgtttattaaaaatacaaaaattagccagtcaaggtggcatgcaactgtagtcccagctactcaggaggttgaggcaggagaatcacttggccctgggaagcggaggttgcagtgagccaagatcataccattgcactccagcctgggtgacaragtgagattttgtttcaaaaaaaaaaaaaaaaaaaaaaaaaaagatacaggttctcggttatactttgcagatttcagttgttcctaatctctctaacttcatgtcaatctttccttatccatctcctgcactctgactccacaatcagcaatagaaacagaagaaataactgaaccaagaatgttttaccagttcctacaatt

SEQ ID NO: 932182 - DNA, 583 bp, Homo sapiens
acagcacaatattaattttggttctggaaagacctcaggatgctagcagcttcctgccttgtattggtcaggacagtcttgggttaggttgcactaacaaaaaatcccaagaatttattcaaacaacaatggcttattcttgttcatgctacatgtcctttgtgatttggctgcggtctctgctctgtttcttcagttaggagcttaggctgacggacactctatcatcatggtagggtgaagagtagaaggtgatwtacacacttagttattccccagaagtacaatgttatcatgtgccacaaagaataggaccagaatatttgggcttagccacgatgactatcacctatctttactaaaggcttctgtgggggaagtaagaaatggagcaggtctcaaactgttatatctgctcttgctctgtgtggcaatcttacttcagctagaattctctaacctttgggcagtactcaataaagtgaattgaacatctttggtgatgtcttttctgtgcaatcctgtagtctatctgagatgtttcagtccccctagtggaacctcactgcattcttcagttccc

SEQ ID NO: 932183 - DNA, 638 bp, Homo sapiens
gctgtcttccttcgccaccccctgagaggcaagccccgcctgtccacacgtagacaagtgtgtgtacacacattgacacacacctctagtctatgcaacttgcacatgcttactgtaaatacaacagcccacacaaaatcacatggtggatgtacccgctagacactccaggatatcgactctgccaagctctttctagacatccatgcaagctgtgtacacgtgcattgctcagcatccacaaatgcggacatggaatttgcatgcacatgggatctccatatatgcactccygccttgttcacaacctgtacacaccccagcccaccactgatccacctccgtgtggattagactgaggaccaggcaaggcctaaccacaactctcactttacatcttctgatgcagcgagtggatttttgacagcggcagtggaggtttcatggaggaggggggactgggaggagttttggggggtaaaggggaggttctggcagaagaagggaactaggccttccctgaagtccaccaggaaggcacccagacacatgcccttccccccagcagccctacctctggccccttgcctgctgccaggccagggaaaggagaagctaaaagtggccagtctgagttg

SEQ ID NO: 932184 - DNA, 552 bp, Homo sapiens
caccatgccaggctaatttttgtatttttagtagagatggggatttgccatgttggccaggctggtctcagactcctgacctcaagtgatctgcctgccttggcctcccaaagtgctgggattacaggctgagccaccgcacccagcccttttgcctcttcccaaccataacttctagctgcttcagtgttccgaacttatgaaaggcaggaacacgtagtcagcaaatagttactgagctccttctttgtgccaggcactggactaggcccttgggatacagcaatgaatcagacaggaggagtcccataccttgtgatgctgacattctaggctctctcctccataggcttaaagtytagtcgtagaacagaggcaaatacacaacaatgtctgaagaagtcctgaaatgggacaatataatagggaattctgaacctcccctctagtggttcaaggctccaaggtgaaagatttgacgctgttggctgtgagatttggagattctgtgggcttgcatgaccccagctcctggttgccaggggtaaccca

SEQ ID NO: 932185 - DNA, 570 bp, Homo sapiens
gctctgcagttcttgaggacatcagagaggacacccctggccctgtcacaatcccttccagagagcaccagcggcctggcttgtccctggatgttgaaaagtagctgttccccacggcctttctttctcagaggaacatgcccaaccaggcagggaagagtcctgactacaagccaatgggctgcccgacacccataaggatggctgctatcaaaagcacagaaaataacaaggcattggcgagggtgtggggaagttgcaaccctcatgcattgctggtgggaatggaagatggcgccgctgctgcggaaaaggaaggtttggcggttccttaaacaatcagatggaattgccatatggtcagcaaccctgctcctgggtacagccccaagagaactgagagccgcaactccaactgagaagtgcamttcgtgttcacggcagcatcactctcaatagccacacggggcggcagcccagtgtccacggatggacgaatggagaaacagaacatgctccatgcatagagggaatatgaccagccttacaatgggaggaaattctgacaca

SEQ ID NO: 932186 - DNA, 725 bp, Homo sapiens
aatgtcatcctttctctggaccccttctggcaacacacgcccagtccctcaggggtacaggtttaatatttcctctcttctggagtcttccggggaaaatgtatacctccagggaaatgctgtgtgcctctctgtcatccaagacaggccacttaatctccctttgcctgagcacagcccactgcacgcatgttctagctctgtgatgcaccaccacgaaaaaaataacagcagaaccagcccttcctttctattcactgaaggagaaaaaacagaattaactgcttcatagacagtcaaaataagctttctgctggcctcagtgacaatgcttgacatccataatgcagaatggaggtgagtcctgggtccccagcacccctcctgctggaagaggccaggacacacgaagggtctctcatgggaagcagccatcgtggctctcagctcatggaaagcggggtacgtgaccagcactggccagggtgcgacgcttggggtattcgcagggaaatgagggcaaagcattttgcaaagagcgtgcagggcygggcaaaatactaaataattcaaaaatcatgatgaccttgccttgggaacttttggagcaacagaatggtttagaataatgacccatccaatgacattctggctcacagacaagagacaatattcaaacgccacctctggtcacccctggcctgagggacatttgttttggtggc

SEQ ID NO: 932187 - DNA, 604 bp, Homo sapiens
gaatctcctggaggaaacttgtcttgaccaaatgacgggatttaggaggaccgtgttcctgctcccggggatgtcacattactgtaggaacacagggtgtcattcaatggcagggacctggtgtgctggctcttggcgagcccaggggaccaggatctggcaaggtgaggagagtggtgcccttaggctggtggagcggcaggggaagggaggtgggtagggctggggcaggagggagagagggaagcagccgcagcttggggctctgggaagaaggaagccactgggctgagaggagcaagggctgtggatgttgcctggaaatagagtaaatagagtttctttcaatcaaatcatattttaaatgcactgggggaggctcagtctgtaaagaagtcttgccagaaatctttcccagaaaataacccttttgctaaaggcaaaaacactttccttaagttatctgttttgatatrgagtgttcttaaaagccaggcacacctacacgtgtgaaaacaaggagaaagcccgcaaacatgcgaacggagcctcaagcgtgtacacatgtgccgtgcgtgtgccaacctcgctgcgtgtacctggg

SEQ ID NO: 932188 - DNA, 604 bp, Homo sapiens
gaatctcctggaggaaacttgtcttgaccaaatgacgggatttaggaggaccgtgttcctgctcccggggatgtcacattactgtaggaacacagggtgtcattcaatggcagggacctggtgtgctggctcttggcgagcccaggggaccaggatctggcaaggtgaggagagtggtgcccttaggctggtggagcggcaggggaagggaggtgggtagggctggggcaggagggagagagggaagcagccgcagcttggggctctgggaagaaggaagccactgggctgagaggagcaagggctgtggatgttgcctggaaatagagtaaatagagtttctttcaatcaaatcatattttaaatgcactgggggaggctcagtctgtaaagaagtcttgccagaaatctttcccagaaaataacccttttgctaaaggcaaaaacactttccttaagttatctgttttgatatggagtrttcttaaaagccaggcacacctacacgtgtgaaaacaaggagaaagcccgcaaacatgcgaacggagcctcaagcgtgtacacatgtgccgtgcgtgtgccaacctcgctgcgtgtacctggg

SEQ ID NO: 932189 - DNA, 652 bp, Homo sapiens
ttctttcaatcaaatcatattttaaatgcactgggggaggctcagtctgtaaagaagtcttgccagaaatctttcccagaaaataacccttttgctaaaggcaaaaacactttccttaagttatctgttttgatatggagtgttcttaaaagccaggcacacctacacgtgtgaaaacaaggagaaagcccgcaaacatgcgaacggagcctcaagcgtgtacacatgtgccgtgcgtgtgccaacctcgctgcgtgtacctgggcgcagccagctctcgcattttctcatcastctggttcaatttaaattaaagcaaatgttgaaagccctcccttccaggttttatttgctgccctaagtcttcagcagcaactcattagcttaatgggttttcttaattctcatctattagcagatcctgtttctgcatggaaagccggtcctttccaaagaagaaaggctcagccttgttctacctggacacagagcagcctgcccccgcaccaccacccacacaccagccccctcgcctggaaacccctctgggagatggtggtcccttgccctgggaagctgcggcttctcgtctttacttctctcacgcccactctcctcgtcagcccctcctctccctggaatctgctccatg

SEQ ID NO: 932190 - DNA, 699 bp, Homo sapiens
ggtctgttggagtttgctggaggtccactccagaccctgtttgcctggatatcagcagcggaggctgcagaacagcgaatattgctgaacagcaaatgttgctgcccagttgttcctctggaagctttgtctcagagaggtacctggccatgagaggtgtcaatctgcccctaagggataaagaaaatgtggcrcatatacatcatggaatactatgcagccataaaaagagattaattcatgtcctttgctgggacatggatgaagctggaaaccatcattttcagcaaactaacacaggaacagataaccagacaccacatattctcactcataagtgggagttgaacaatgagaacacatggacacaggtagggaaacatcacacactggggcctgtcatgtggtttgggactagaggagagatagcattaggagaaatacctgatgtagctgacaggttgataggtgaagcaaaccaccatagcacgtgtatacctgtgtaataaatgtgcacgttctgcacatgtatcccagaacatgaagtataataattcaaaaaagaaagaaaacaaaaagaaatttgaacaaaattagaaaataagattgttgcaggaagtcagggaccctgaatggaaggactgttgaagccgcagcagaagaacagaaatcatgaagatttcatggacatttaatagt

SEQ ID NO: 932191 - DNA, 699 bp, Homo sapiens
ggtctgttggagtttgctggaggtccactccagaccctgtttgcctggatatcagcagcggaggctgcagaacagcgaatattgctgaacagcaaatgttgctgcccagttgttcctctggaagctttgtctcagagaggtacctggccatgagaggtgtcaatctgcccctaagggataaagaaaatgtggcacatatacatcatggaatactatgcagccataaaaagagattaattcatgtcctttgctgggacatggatgaagctggaaaccatcattttcagcaaactaacacaggaacagataaccagacaccacatattctcactcataagtgggagttgaacaatgagaacasatggacacaggtagggaaacatcacacactggggcctgtcatgtggtttgggactagaggagagatagcattaggagaaatacctgatgtagctgacaggttgataggtgaagcaaaccaccatagcacgtgtatacctgtgtaataaatgtgcacgttctgcacatgtatcccagaacatgaagtataataattcaaaaaagaaagaaaacaaaaagaaatttgaacaaaattagaaaataagattgttgcaggaagtcagggaccctgaatggaaggactgttgaagccgcagcagaagaacagaaatcatgaagatttcatggacatttaatagt

SEQ ID NO: 932192 - DNA, 740 bp, Homo sapiens
gagatagcattaggagaaatacctgatgtagctgacaggttgataggtgaagcaaaccaccatagcacgtgtatacctgtgtaataaatgtgcacgttctgcacatgtatcccagaacatgaagtataataattcaaaaaagaaagaaaacaaaaagaaatttgaacaaaattagaaaataagattgttgcaggaagtcagggaccctgaatggaaggactgttgaagccgcagcagaagaacagaaatcatgaagatttcatggacatttaatagttccccaaattaatacttttgcaatttcttacgcctgtctctcacgtttcttacrtttatctctgaacataaattatgaagatttcatggacatttatcacttccccaatcaatactcttataatttcctatgcctgtctttactttaatctcttaatcccatcatcttcataagctgaggatgtatgtcgcctcaggaccgtgcgatgattgcattaactgtacaaattgtttgtaaagcatgtgtgtttgaacaatatgaaatctgggcaccctcaaaaagaataggataacagcgattttcaggggacaagggagataaccataagatctgactgcctacagggccgggcagaacagagtcatatttttcttcttgtagaaagcaaataggagaaatatcattgaattcttttcctagcaaggaataaccctggagaaggaatgcattcccaggaataggt

SEQ ID NO: 932193 - DNA, 740 bp, Homo sapiens
gagatagcattaggagaaatacctgatgtagctgacaggttgataggtgaagcaaaccaccatagcacgtgtatacctgtgtaataaatgtgcacgttctgcacatgtatcccagaacatgaagtataataattcaaaaaagaaagaaaacaaaaagaaatttgaacaaaattagaaaataagattgttgcaggaagtcagggaccctgaatggaaggactgttgaagccgcagcagaagaacagaaatcatgaagatttcatggacatttaatagttccccaaattaatacttttgcaatttcttacgcctgtctctcacgtttcttacatttatctctgaacataaattatgaagatttcatggacatttatcacttccccaatcaatactcttataatttcctatgcctktctttactttaatctcttaatcccatcatcttcataagctgaggatgtatgtcgcctcaggaccgtgcgatgattgcattaactgtacaaattgtttgtaaagcatgtgtgtttgaacaatatgaaatctgggcaccctcaaaaagaataggataacagcgattttcaggggacaagggagataaccataagatctgactgcctacagggccgggcagaacagagtcatatttttcttcttgtagaaagcaaataggagaaatatcattgaattcttttcctagcaaggaataaccctggagaaggaatgcattcccaggaataggt

SEQ ID NO: 932194 - DNA, 600 bp, Homo sapiens
cccatgccactgctctgcctatgaagtagccattctttatttctttactttcttaataaacttgttttcactttacagagccaccccaaattctttcttgtacaaggtccaagaaccctctcttggggtctggatcaggaccmctttctggtaacagaagtaggagtctttcaagttagcagaaaagggaatttgagttcattgtgtgtggtcttctttgctgcaacaagtaaaaagcccagcttcataagatgccttcatgtggtataaaataacatggatatcctcccttggatttccttaagtcttcaagatgtggttaaattcctttccttctcatgatgtcttctcatagcaccatcagtgcaccgtgaaatcaaacttctgtgatttcagagaatttattaaactatctgacaagtgtttgctttgtctctgcatttagagtgcatgttttgtatctcccagagagcacaatagcttgtcttgtcatgatagtgtaagctgaaaagtatctgagataggtctcaatcaatgtaaaggtgtattttgccaatgtcattcaacatgcccaggaaaaaggaacacaaaactacagga

SEQ ID NO: 932195 - DNA, 600 bp, Homo sapiens
cccatgccactgctctgcctatgaagtagccattctttatttctttactttcttaataaacttgttttcactttacagagccaccccaaattctttcttgtacaaggtccaagaaccctctcttggggtctggatcaggacccctttctggtaacagaagtaggagtctttcaagttagcagamaagggaatttgagttcattgtgtgtggtcttctttgctgcaacaagtaaaaagcccagcttcataagatgccttcatgtggtataaaataacatggatatcctcccttggatttccttaagtcttcaagatgtggttaaattcctttccttctcatgatgtcttctcatagcaccatcagtgcaccgtgaaatcaaacttctgtgatttcagagaatttattaaactatctgacaagtgtttgctttgtctctgcatttagagtgcatgttttgtatctcccagagagcacaatagcttgtcttgtcatgatagtgtaagctgaaaagtatctgagataggtctcaatcaatgtaaaggtgtattttgccaatgtcattcaacatgcccaggaaaaaggaacacaaaactacagga

SEQ ID NO: 932196 - DNA, 639 bp, Homo sapiens
ttttgtatttgtagagatgaggtttcaccatattgcccaggctggtcttgaactcctgggctcaagcaagccacccaccttggccacccaaagtgctggattacaggcatgaaccactgtaccccgccaatttttttttttttcttgagacagagtctcactctgtcgcccaggctggaatgcagtggcaccatcttggctcacrgcaacctccgcctcctgggttcaagcgattctcctgcctcagcttcccaagtagctgggactacaggtgcccgtcaccacgcctggctaatttttgtatttttagtagagatggggttttgccatgtcggccaggctggtctcgaactcctggcctcgaacgcctgacctcataatctgtccgactcggcctcccaaagtgctgggattataggtgtgagccaccgtgcccggccctaaatttttattttccactctgttgcccaggctggtgtgcagcagcatgatcacaactcactgcatcctcaacctcctgggctcaatccatcctcccagctcagcctcccaagtagctgggaccacaggcgcacactaccatgactagctaattaaaaaatatattttttctgtagaggtggggctctccctatgttg

SEQ ID NO: 932197 - DNA, 666 bp, Homo sapiens
ctgaagcctctctccacggagctgttctggggcagtggctccccagaaaagctgcgcacctggatgcggtagccccgggggtgaccccacttgttgctgtggttgctggccaggtacaggtagcgaggggtggcgcctcccatggggaaggtggcttgctcctctgtctccagcagcttccgggtcacctgcagcctctgcatctggtgctcagggctccagggcacagccatggggacaaaggccatatcctcggcccagacccagttctccagtcctgctcagggtgggatcggggagggccagtcatgcaattgccctggcccctctggactctgcccccacctggcttcagagtgggggcagagtgggggccaaagagcagcccagaactgagtgtgcccctgcttctcttccctctccccaagatagtcccagtccagggatttggaggagggctttctccctkctgtcttctctggtaataatcccagatgccttgcgactgggcctccaccaatgtcctccctctgaggggctgcatgggagggtgtttacctgaggttggaacaatcctgtgggcaataggcaggtggcactccctctgacctgaagacttctcctcacatgtgaagccctgtggcattgccaggactgccttatcat

SEQ ID NO: 932198 - DNA, 730 bp, Homo sapiens; identical to SEQ ID NO: 931878

SEQ ID NO: 932199 - DNA, 738 bp, Homo sapiens
cttatccaccacgatcaagttggcttcataccttggatgcaaggctggttcaacatatgcaaattaataaaagtaatctaccacataaacagaagcaatgacaaaaaccacatgattatctcaatagatgcagaaaagtccttcaacaaaattcaacgcctcttcatgctaaaaactctcaataaactagatatcaatgaaacgtatctcaaaataataagagctatgtatgacaaacacacagccaataccatacygaatgggcaaaaactagaagcattccctttgaaaaccagcacaagacatgccctctctcaccactcctattcaacatagtattggaagttctcgccagggcaatcaggcaagagaaagaaataaagggtactcaaataggaaaagatgaagtcaaattgtctctgtttgcagatgacatgactgtatatttagaaaaccccattgtctcagccctaaatctccttaagctgataagcaacttcagcaaagtctcaggatacaaaatcaatgtgcaaaaatcacaagcattcctatacatcaacaacagacaaacagaaagccaaatcaggagtgaactcccattcacaattgctacaaagagaataaaatacctaggaatacaacttacaagggatgtaaagcacctcttcaaggagaactgcaaaccactgctcaaggaaataagagaggacacaaatgaatcaaaaacattccatgctc

SEQ ID NO: 932200 - DNA, 788 bp, Homo sapiens
ctcatttttactacagattccagttattctcctatagccatttgattgtgtttattggtgggaatgacactcatcctatttaattttttttaaaataatatagcccaaaaactgatttcataaaaataaaaaaacctctttttttttttttttgagatggagtttcgctcttgttgcccaggctggagtgcaatggcacaatctcaactcactgcaacctctgcctcccgggttcaagtgattcttctacctcagcctcccaagtagctgggattacaagtgcccaccaccatgcctagctaattttttgtatttagtagagactgggtttcaccatgttggtcaggctgatctcatactcctgacctcaggtgatccaccygtcttcgccgcccaaagtgctgtgattacaggcatgagcaactgagcgtgaccagatacttttcttttcttaaagaaggtctgctaatgggcaggtaggtcatgtacggacaggcataacttctcctcacctaggccgcagcagcacctgtcttacacaagctccaggcctacctgcgcctctgctcctgagatgtatttcctttttaacttctcgcctccacccagcaacccctgccctggagtttctttagttgtactggctacagttttgagggactgttctccatacaaattggagctctcctctgccaccaagtgaaagtgtgctagaaaagagttcactgaatgaccctcttgttgccattgaatttcatacagggtctcaccaatccacgtgcaaacag

SEQ ID NO: 932201 - DNA, 788 bp, Homo sapiens
ctcatttttactacagattccagttattctcctatagccatttgattgtgtttattggtgggaatgacactcatcctatttaattttttttaaaataatatagcccaaaaactgatttcataaaaataaaaaaacctctttttttttttttttgagatggagtttcgctcttgttgcccaggctggagtgcaatggcacaatctcaactcactgcaacctctgcctcccgggttcaagtgattcttctacctcagcctcccaagtagctgggattacaagtgcccaccaccatgcctagctaattttttgtatttagtagagactgggtttcaccatgttggtcaggctgatctcatactcctgacctcaggtgatccacccgtcttcgccgcccaaagtgctgtgattacaggcatgagcaactgagcgtgaccagatacttttcttttcttaaagaaggtctgctaatgggcaggtaggtcatgtacggacaggcataacttctcctcacctaggccgcagcagcacctgtcttacacaagctccaggcctacctgcgcctctgctcctgagatgtatttcctttttaacttctcrcctccacccagcaacccctgccctggagtttctttagttgtactggctacagttttgagggactgttctccatacaaattggagctctcctctgccaccaagtgaaagtgtgctagaaaagagttcactgaatgaccctcttgttgccattgaatttcatacagggtctcaccaatccacgtgcaaacag

SEQ ID NO: 932202 - DNA, 569 bp, Homo sapiens
ctcctccaggccattttaagttgtgaggaggcagccctgctgcttgagctgtgaggactgtctatgtacatgcagagtttggtaataacatctgcaatagtgacacatgtgtttgttactgtgctacatggtcattagatataaatagcaagccattcmcataaataaaaatatttacttttttaatgagaccaacctggccaacagggtgaaaccccctctctactaaaaatacaaaaattagctgggcatggtggcaggcacctgtaatcccagctactcgggaggctgaggcaggagaatcgcttgaacccaggaggcagaggttgcaatgagctaagatcgtgcaattgccctacagcctgggcaacaaagtgagactccgcctcaaaaaaaaaaaaaaattgcaataagaagaaaacgggccaagtgtggtggttcacacctgtaatcccattacttgggaaggctgaggtgcgagcatcactagaagccaggagttcaagaccagcctgggaaacaaaccaagatcccatctctaccaaaaaaaaaaaaaaaaaaaaaaaaaa

SEQ ID NO: 932203 - DNA, 569 bp, Homo sapiens
ctcctccaggccattttaagttgtgaggaggcagccctgctgcttgagctgtgaggactgtctatgtacatgcagagtttggtaataacatctgcaatagtgacacatgtgtttgttactgtgctacatggtcattagatataaatagcaagccattcacataaataaaaatatttacttttttaatgagaccaacctggccaacagggtgaaaccccctctctactaaaaatacaaaaattagctgggcatggtggcaggcacctgtaatcccagctactcgggaggctgaggcaggagaatcgcttgaacccaggaggcagaggttgcaatgagctaagatcgtgcaattgccctmcagcctgggcaacaaagtgagactccgcctcaaaaaaaaaaaaaaattgcaataagaagaaaacgggccaagtgtggtggttcacacctgtaatcccattacttgggaaggctgaggtgcgagcatcactagaagccaggagttcaagaccagcctgggaaacaaaccaagatcccatctctaccaaaaaaaaaaaaaaaaaaaaaaaaaa

SEQ ID NO: 932204 - DNA, 815 bp, Homo sapiens
ggcattagatattgcagtagcaactaggcgatcagccatttgattccctggagtcaaaggtcctggaagaggtgtatgagcccgaatatgagtaatgtagaaagggtgcattctactcctaattgctgtttgcagttgggtaaataaagtcatcagttgttcatctgtatgaaatcgtaactgagcattttcaattaattgtgtggaatgaaccacatatgaagaatcagaaatcacattaataggtatatcaaaagcagtcaatacctcaattatagctacaagctctgctttttgagccgaagtatagggcgtctggaaaactttacctttcgatccagaataagaagctttaccattactagacccatctgtgaagacattttcagcactttcaattggtttaaatttagttattttagggagaatccaattagttaatttcaaaaattgaaataattttgttttaggaaaatggttattgaaaatacycacaaagtcagctacgtgggtttgccaagtaagactatttataaaagttgctgtatttgtgcctttgtaagaggaacaataatttttccaggatcatatccatgtaatttaacaatccgagttctcccatttcctatcatagtagcaattcgatccaaataaggggtcaaagtctgtgaattagcatgtggaagaaaaagccattctactaagtcctgctcttggacaataacacagtaggtgaatactgagttgaaaaaattagcaaatctagagtcttctcttgatctattctattcatttgagctttacagacttgcttt

SEQ ID NO: 932205 - DNA, 605 bp, Homo sapiens
gccactgaagcttagaggttagactgaagtcttgtctgaggtcacacagtgcctacctgttccagcaaaggggttctttgtcttcgcttggagtctctcctgaggggtgtgtgtgtgtgtgtgttgtgcttgtgcctgtgaggctgtgtctttgtacatttgggcatatctggggttctcttcrtgtccctgtgtgtttctttttgtatgaatgactgtgtgtgtctattgtgtgtccctgtgggtctgtgtgtgtgtcactgtctccttgtataagtcctatgtgtgtctgggtccccatatgtgtctctaaaggtgtttctcttggtatctgtaactttgtgtgtccatgtgtatccttgttatgtgtcctgtgtgtcttgtgtctgtgcacccttgtatgtgtcagagtccctgtattaggagctgcgatgccaaatgagtgacatcttctccacccccaccagcctcctgggctctgtctccagcatgaaccagcctggtggctgtgacctggccagggcagctcaacactcagcgttctacaccaagcccaggtgaaagtatcacaaatttgttgagcaatcgaagcccaagctcccatc

SEQ ID NO: 932206 - DNA, 601 bp, Homo sapiens
gagaaggagatttgcattgcaatagaatagaagagtgacatgatctaacttatcttttaaaacagtcactccagcttctgtgttgaaatagactgtcaggtaacaatggtggaagtagagtgaccaattatgaggcagattgtaagcatctggatgggagccaatggtggcatgggctaaggcaccagcagtgagagagggtaagagacagattgtggctgtgttttgcaggtagaggtaacgagaatttgccaaaattggatgtggagtgtaagagcaagcagagaatcagaggaacttcaaagcacctcgtctgaacagttgcaggctggagtgactggtagctgggctagagaaagatacaggtgaatattgtggggtggtggggagcatagaggatgtgccttaggcatattaagaaagcttatcagacacatgtgatggttgatattaagtgtcarcttgactggattgaaggatgcctagatggctggtaaagtattgtttctgggtgtgtctttaagggtgttaccagagaagactgacatttgagtcagtgacctgggagaggaagacccaccctcaatgtgggtgggcacca

SEQ ID NO: 932207 - DNA, 645 bp, Homo sapiens
cgcagggccccctgcagagccagccacagagccacccccgtccccagggcactcgctgcagcactgagccccctgaggcccacagccacccaggcagggagcaagtggcctggtcacttctggttcgattgaccaggatcgtggtgtcactttttaaaatttaaaattaatttttgaaatcaaagtcagacacacccatgktaaaaaaaaaaaaaaaaacaatcccaagggtacagaagagcttatgaataaaagtagttttctcctctacccctctcattccttccgtgccatggttttaattgaccctgtttttaattcttctggtagttttctctatttccaagtaatctgtttaaatcagtttctagattttaccccatgtcaatgacaaatgaggatttgatgctctgatcctttctcatgcctgatacccctccctgtctccccattttggatagttacatttgggggtcatctcggtgatttttgtaactttacgcaggacacttagagctctctagaatcccactgactttagtgggtcttgatgtagggtgggcaagccccgacactggagcttagcctgagagggttcttggcctcccccaggaaagatttcaaaggcaagcgccagtggtaggg

SEQ ID NO: 932208 - DNA, 642 bp, Homo sapiens
gggaggccaaggtgggtggaccacctgaggtcaggagtttgagaccagcctggccaacatggtgaaaccccgtctctactaaaaatacaaaaattagctgggcgtggtggcgcatgcctgtaatcccagctactagggaggctgaggcaggagaatcacttgaacccaggaggcaggggtagcagtgagccgagatagtgccactgcactccagcctgggcaacrgagtgagactccatttaaaaaaaaaaacaaaacacaaaaacacagacttgaagataacaccattcggacttcagaacagcaaacccaatacctgcagccctctggagcactggccctgagccctgactataacacagacacttctggcatttctcgggcatctactatgtgtcaggccctggaggaggggaggactccagcgcagggaggagccgggtctgagtcattacctccacattctcatgccaagtccatagtcggtactcacggagacagtttatgagttctccagaccatccaatactttcattaccagggtgtaaatatgacttagcctgggcaggatgtccagaggtggggaggtgggaaagttggggaggtgggcaaggatgagagctggggttgctgggaatgctg

SEQ ID NO: 932209 - DNA, 615 bp, Homo sapiens
tgaggtcaggagtttgagaccagcctggccaacatggtgaaaccccgtctctactaaaaatacaaaaattagctgggcgtggtggcgcatgcctgtaatcccagctactagggaggctgaggcaggagaatcacttgaacccaggaggcaggggtagcagtgagccgagatagtgccactgcactccagcctgggcaacggagtgagacyccatttaaaaaaaaaaacaaaacacaaaaacacagacttgaagataacaccattcggacttcagaacagcaaacccaatacctgcagccctctggagcactggccctgagccctgactataacacagacacttctggcatttctcgggcatctactatgtgtcaggccctggaggaggggaggactccagcgcagggaggagccgggtctgagtcattacctccacattctcatgccaagtccatagtcggtactcacggagacagtttatgagttctccagaccatccaatactttcattaccagggtgtaaatatgacttagcctgggcaggatgtccagaggtggggaggtgggaaagttggggaggtgggcaaggatgagagctggggttgctgggaatgc

SEQ ID NO: 932210 - DNA, 787 bp, Homo sapiens
gtcaccagagtccctgaggaagcctctaggggtggaattatgaagcccaggccagactcttctagaatccccagaggttcccaggtaccagttcctgtgagtactttgaagcaacgtgcttctcagtggatgatgcttccctgaacctgatttctcctgggggtttaatggcacagagatgtctcacaggatgtgtgcatcctgggatcttccaaaaggttttcacaaaagtgccatcctagtccctgaaaactggtaaactctattctcaaggggcccacagtctgatggggaaatagacgagtaagccaggaccagtgccgcatactatgggatagccatctttgcctagatagatcaaagayggctttctagaggtgatagccattgagcagggttttgcaggacaagtaggagtttgccagtctgcaaagggaggaagggcttgcaggcagagggctcagcatgagcaaaggcaaggacgagtgaaagagttatgtcttgtgggtgagtcagagccaatggccccaattatcatggtaggaatgtctggcttttagaagagcagagacctgtggggaaggtacagggaaggtagcctacggctgcccctgcttgtctacaggggcctctgctaagatgaagacgggaggtgtgcctttctgtggggaagctctggtcctgttagtcaactctcaaggggccagaatctgaatctggcaggctagatctcccttcctccatctcccagagcaaagcattcctggcttttgtgcatggaaaggaa

SEQ ID NO: 932211 - DNA, 623 bp, Homo sapiens
gtcactccagaggcacgcagggccgggccccccccagtgcctctgggctcccccaaccaaaatcttgtgtcagccccaacccctcagcagtcctgcccctgccctcaccggtcaccccagggtgactttcagccggtgactcgtggggctccctgctttgtactctgccctcacctcctattgtccaaaaatggatctccctgggcccttcgggctcacgttcccaaggaaccggatgccccagcacctgccctcaccagtcaccccagggtgactttgggcaggtgactcctggggctccccactccatactcggccctcacctacygctgccccaagcctgacttccctgggctctttgggctcacgtctccaagtacctgggtcccaaccctgtgaccccatgccaatctcaaagaggcaacttgggcacagcactgatgggataatgggtttggtttggttttctcccaggcttctactctccagagagactttaacagttttttctaagttctccacttcatatttgaattctccatggttctgggaccagagtgcccatcagtcagtgatctttgaagtgagatttgctcatcttctgtgcaagagatcttgggaaa

SEQ ID NO: 932212 - DNA, 623 bp, Homo sapiens
gtcactccagaggcacgcagggccgggccccccccagtgcctctgggctcccccaaccaaaatcttgtgtcagccccaacccctcagcagtcctgcccctgccctcaccggtcaccccagggtgactttcagccggtgactcgtggggctccctgctttgtactctgccctcacctcctattgtccaaaaatggatctccctgggcccttcgggctcacgttcccaaggaaccggatgccccagcacctgccctcaccagtcaccccagggtgactttgggcaggtgactcctggggctccccactccatactcggccctcacctaccgctgccccaagcctgacttccctgggctctttgggctcacgtctccaagtacctgggkcccaaccctgtgaccccatgccaatctcaaagaggcaacttgggcacagcactgatgggataatgggtttggtttggttttctcccaggcttctactctccagagagactttaacagttttttctaagttctccacttcatatttgaattctccatggttctgggaccagagtgcccatcagtcagtgatctttgaagtgagatttgctcatcttctgtgcaagagatcttgggaaa

SEQ ID NO: 932213 - DNA, 667 bp, Homo sapiens
tgacaatggaaatgaagctctctgcattcctgttaggcatactgcatacatcttaggctctctgcatgcctcttaggcacttacatttacatatatttgtatctcattacatagtgatacagtcctaaaataaataatgagttattttctagactaatttgatgaggcttttatttgataacaaattaaaattatgccaccagatgcctatactttgacttataaaatgtgttgtgttctgcatgggcaaayagaaagtgcagaaattgaacggctgcctggtaaaattacctaaatccacaatgccactggacaacattgaactagatatttaaataagtgaaagtaatcaagtagttgagttcactgataaaattatacttggaatcttacatcattcccagattaatatatacaatgtatatcaaatgtcattgctatgggaatggaaactgttacacatgaggttaaatttttataaagaattttttttcctctagaactgacattgagaaacttgataccctctctttatggcatgtcttaagaaaatgtcaacccaatgtcaaaggataattaatttttttaaagaaaagaaaaataatggttctcatacaaatgtaaaatgaatatatgttcatgattttatttaactgattaataaata

SEQ ID NO: 932214 - DNA, 597 bp, Homo sapiens
agacctcctaacaatctaaaaagatggacctccaatttcaaataataaataaaaagagtaagtacttgaacaggcagtatatgcacattttttaaaataaaagattgagttaaattttgtaaaatgtaggccgggcgtggtggctcacgcctgtaatcccagcactttgggaggcagagacgagcagatcacgaggtcaggagatcgagaccatcctggctaacactgtgaaaccccgtctctactaaaaatacaaaaaattagccgggcgtggtggcgggcacctgtagtcccagctacttgggaggctgaaacaggagaatggcatgaacccaggaggcagagcttgcagtgagctgagattgcrccactgcactccagcctgggcaacagagcgagactccgtctcaaaaaaaaaaaaaaaaagaaatgttaagtaagaatctcatttgagctacatgtgtgaaaatatgtcttttacattattatataacacagattttggatatgacgagtgctgaactgaggcttttcacttgatatgcattacaaattagaatttttcactcacaaaacatgcttatgacaattttatat

SEQ ID NO: 932215 - DNA, 469 bp, Homo sapiens
gaggtggagtttgcggtgagccgagatcgcgccactgcactccagcctgggcgacagagcgagactccgtccccctcaaaaaagaaaaaaaaaagaactccctttttagaaagatcttttattcaacttaccaaaatttaaattgccaatgacacagaaaccagcacaaataagtacttgtaacttacccaggtacaagtgaatttctatgactgaaattcaggggcattctaagcaagaatagttcaatagaaactaatctcattatttttcatttttatkaagtcatatttattattcatagtgtggtttctcatcaaggagttatttaacatgccaaatgcctgcacctctttaactaggtctttatgcatagggaatgtttaaatatccacaaaagtaatacatactaaccaattttttagattttaacatatatatttgaagatacgttttccccaaatgtaca

SEQ ID NO: 932216 - DNA, 616 bp, Homo sapiens
ctgccttctgagttctttcacttccgaattcttatcgtcctgcagccccaccacagtcaatgactaagttcctctggactttcacatggatcgtaatagacaacttcatcctgtttttctaaaaaggtattaatgattgtttaaaacatattttattatttgtaaaaatacattgaatttttttaaatgtaaggaaaataaagatcacttgtaatcccaccactgagaaycactattaacatataaaaaatctatgtgtataaatgtaatatacatatacacatgtgtatatatacatgactatacacatgtatgtaagtagcatgtgtgtatatacatgtaagtagtatatgcatgtatatatacctgtatagacatacgtatatatacacatgcacacacacacacatactacttacatagctacacgtatcaatggagttctaaaagaacactttccatgggatggaaataaatttttaggccaggtgcggtggctcacgcctgtaatcccagcactttgggaggccaaggcaggctgcacacctgaggtcaggagttcaagaccagcctggccaacatggcaaaaccccatctctactaaaaatacaaaact

SEQ ID NO: 932217 - DNA, 551 bp, Homo sapiens
  misc_feature 1, 2, 3, 4, 5, 6, 7, 8, 9, 10, 11, 12, 13, 14, 15, 16, 17,18, 19, 20, 21, 22, 23, 24: n = A,T,C or G
nnnnnnnnnnnnnnnnnnnnnnnngcagataatcatgcacttaatgaagcgctaaatcaaagtatttttggcatatgtgagtttcattttatcacattttttactggtactatagctatttgcaagtacatatagaactacagtgttacatataaactaccaaaaagcaactttwtaaaaaaattttattattcttatactttaagttttagggtagatgtgcacaaagtacaggttagttccatatgtatacatgtgccatgttggtgtgctgcacccattcacttgtcatttagcattaggtatacctcctaatgctatccctccccctccccccaccccacaacagtccccggtgtgtgatgttccccttcctgtgtctatgtgttctcattcttcaattcccacctatgagtgagaacatgcggtgtttgtttttttgtccttgcgatagtttgctgagaatgatggtttccagtttcatccatgtccctacaaaggacgtgaactcatcatttttttatggctgcatagcattcgttggtgtatat

SEQ ID NO: 932218 - DNA, 637 bp, Homo sapiens
  misc_feature 55: n = A,T,C or G
agatcataccactgcactccagcctgagtgacaaagtaagaccctatctcaaaanataaaaaaaaaagaaacagactcactgcattacggattttcttttaccacccagagggcattctaagttttatttaatgataaagggaagagaaactctttataacactgtctggctttgtgtctcaggcaggaaatatacaggaagaggctggatcaacttgtatcataaaggaagggagctttcaaagattactcaaaaggattccctgatcatcaaaaatataacagtggagacatcacaccctaaaagccaatggattggtcatcatgayaataaggaaaacaaagcttcctggtcatctttatacatatcagaacaccaatgcatcattgtgaaaactggtgaagtctccctgtattatcaagagcaaccaagattaataacaaagctttttttcacagaagagaattccagctaatgaactcagagaagatgaagttagaaaatcactatggtgcagcccctaatgataggtctaggtgatgacactaatgcctgctggagctatgagatggacaattaatacagaatgtcatcaaggaaggagcaggctgacaagacctaacccacccaaacctg

SEQ ID NO: 932219 - DNA, 612 bp, Homo sapiens
tgctccccaaaggagtacttccctctctgtaaagagaaagaattaaagactctccttccagtaagaggatcacaatggcctttagcacacacttctgccctggctgtgtgtgccactgaagcaaaaccaacctcctgccagagggtgcctggcaagaggtcagcagcaagataagccactcaaggattactggatccaggtgtggacaagggtagatcagaagcgagaaggccaggaaagcaattcaagagggcaggaaacatctggaaggttcatgcctcccttgagggctttgaggggtggatrttgtcctgtctagtatcaggaagcagggctctagccatgagctccaaagagctggtacaaaactgtttctggggcttgaatggaccaagcccagaggccagtatctgaagccagggaataaagtcagagtgggagaagaaagggcaattagacactgagttgggttggaaaactactgggctaggaccgagattataacttaacagtcaaaaacaacaataatggtaaacataaggggttcattcttctaacattcaacaatcttgctatgctccaggggtacagataaataaaactattccctta

SEQ ID NO: 932220 - DNA, 602 bp, Homo sapiens
atagccagacatggtggcagacacctgtaatcccagctacccaggaggttgaggcaggagaatcacttgaactcagaagacggaggttgccctactgcattccagcctaggcaacagagcaggattctgtcttaaaaaaacaaacaaacaaacaaaaaacacaacacagaaaaaaaaaargaaaaaaaaaagaaacaagaaacaagaaaaaaatcccagctgcttccactgcaaacataagtttgggtggaacagtgattcctggaaatggagtattgagcagaaaataccatatatgtctactacacacaatgtttctttaactgctttatttctaacaattttaaggccacaaaaaccctataaaaagccactgctttcttcagaaaggaattgtcctaggttacacctcccactctccgaagcaaacccttactgtccgttcttactggatctccatagaacctgcaatgctctgtttcatgtcctgattctttctgagtccatcctctttggagtgctgactgatttagaaggtcccacctagcgccttattccacttctgaagcacagcccctctggttactctagcttcgtgcttt

SEQ ID NO: 932221 - DNA, 602 bp, Homo sapiens
atagccagacatggtggcagacacctgtaatcccagctacccaggaggttgaggcaggagaatcacttgaactcagaagacggaggttgccctactgcattccagcctaggcaacagagcaggattctgtcttaaaaaaacaaacaaacaaacaaaaaacacaacacagaaaaaaaaaaggraaaaaaaaagaaacaagaaacaagaaaaaaatcccagctgcttccactgcaaacataagtttgggtggaacagtgattcctggaaatggagtattgagcagaaaataccatatatgtctactacacacaatgtttctttaactgctttatttctaacaattttaaggccacaaaaaccctataaaaagccactgctttcttcagaaaggaattgtcctaggttacacctcccactctccgaagcaaacccttactgtccgttcttactggatctccatagaacctgcaatgctctgtttcatgtcctgattctttctgagtccatcctctttggagtgctgactgatttagaaggtcccacctagcgccttattccacttctgaagcacagcccctctggttactctagcttcgtgcttt

SEQ ID NO: 932222 - DNA, 723 bp, Homo sapiens
tgtggaaagtcccgaatggtgactgcaagaccttccagggtcccaactgcccagccacctgtggccgagtcctccctgatggtgagagcacctcccttgagtgacctttcctgggtgcagaggccgaatcccgggatatacacctcccagagcagccttctgggtcacagccggcaaaatctgaggcctgctgtttgcagtgctgacctcctgggccccaaagttcacagcgcctccttcctgctctgaactcacctgtgattcctggggcagtgtctgggcccttccactcttctttcctctccctctccccattcccttgcttagtgtatgtgagcgtgccctctgccctctcttcatctgtgcctctcttcagggaagagagctgtggtaggctatgaagatgggaccatcaggatttgggacctgaagcagggaagccctatccatgtactgaaaggtatcagaggtgggggaagtgttagcctgggcctttgtagggaggggctgagaacctggggcaggactcagaggggaggtmggacgaagcctgagctgcctccctgctctatgctagggactgagggtcaccagggcccactcacctgtgttgctgccaaccaggatggcagcttgatcctaactggctctgtggactgccaggccaagctggtcagtgccaccaccggcaaggtgagtggacctggagcccggctggggcct

SEQ ID NO: 932223 - DNA, 782 bp, Homo sapiens
gccaataatatgatttgtcaacttactgtgtaagcaacttttcaggaatcttatttcatacgtgtggtataaaaactctgcatatcatagatttgaagagcatgtcattaatcacatgaatttagtatatgaagtttccttttgagggtggagccaagatggccgaataggaggagctccggtctacagctcccagcgtgagcgacgcagaaaatgggtgatttctgcatttccatctgaggtaccgggttcatctcactagagagtgccagacagtgggtgcaggacagtgggtgcagtgcaccatgcgcaagccaaagcaggacgaggcattgcctcactcgggaagygcaaggggtcagggagttccctttcctaatcaaagaaaggggtgacagacggcacctggaaaatccaatcactcccaccccactactgcgcttttccgacgggcttaaaaaacggcacaccaggagattatatcccacacatggctcggagggtcctacgcccacggagtctcgctgattgctagcacagcagtctgagatcaaactgcaaggcggcagccaggctgggggaggggcacctaccattgcccaggcttgcttaggtaaacaaaggagccaggaagctcgaactgggtggagcccaccacagctcaaggaggcctgcctgcctctgtaggctccacctctgggggcagggcacagacaaacaaaaagacagcagacttaaatgtccctgtctgacagctatgaagagggtagtggctctcccag

SEQ ID NO: 932224 - DNA, 642 bp, Homo sapiens
tcatagccgttattgatgcctaccttcttctactacccattctgtattccctttgccttcagcaagcacctcagcagatggtggtttttttcctggtggagtgacccgaaccttcattcctgatttgtagtcctgcctggattgggctgttgtagtttcccattgaccttaatcacagggcattagataatactaagagatgtcctaatggatctcctgtattccatgcatactcttccttacctctgttgtggagtaagagactaattccatcttttttttttttttgagatggagtgtcgctctgtcgcccaggctggagtgcagtggtgcaatctcggctctctgcaggctccgcctcacgggttcacaccattctcctgcctcagcctcccgagtagctgggactacaggcacttgccaccatgcccagctaatgttttgtattttgtgtagtagagacggggtttcaccgtgttagccaggatggtctcmatctcctgacctcatgatccgcccgccttggcctcccaaaatgctgggattacaggcgtgagccaccacacccggccgagactgattccatcttgatagtccagatcaatcactccagccaacaccataactcctccttagcctgtt

SEQ ID NO: 932225 - DNA, 574 bp, Homo sapiens
gaccaggctgatctgtactcctgacctaaagtgatccgcctgcctcggcctcccaaagtgctgggattacaggcgtgagccactgtgcctggccacacctagctaatttttaatttttttcaaatggagtctctgtcacccaggctggagtgcagtggcacgatcttggctcactgyaacctctgcctcccaggttcaagcgattctcctgcctcagcttcccaaatagttaggactacaggtgcataccacaacacccagctaatttttgtattttttgtagcttcttccctggccaagaagcttttttttttttcttgacacggagtcttgctctgtcgcccaggctggagtgcagtggcgtgatctcggttcactgcaaccttcgcctcccaggttcatgccattctcctgcctcagcctcccaagtagctgggactacaggcacctatcaccacgcccagctaatttcttctatttttagtagagatggggtttcaccatgttagccaggatgctctcaatatcctgaccttgtgatctgccctcctcggcctcgcaaaatgctgggatt

SEQ ID NO: 932226 - DNA, 669 bp, Homo sapiens
agcagtcttgctgcctcagcctcccaggtagctaggactacaggtgtattacaactacaggcatgcgccaccacgcccagctttaaaaaaaaactttctgtagagagagggtctcactatgttgcccaggctggtcttgaacttctggcctcaagccatcctcccatttcagcctcccaaagttttaggagtataggtgtgaggcaccatacccagtctggatgcttttaatttcartttctttttctttttttttgagacggagtctcgctctgttgcccaggctggtgtgcagtggtgctatctcggctcacggcaagctctgcctcccaggttcatgccattctcctgactcagcctcccgagtgcttttaattccttactcttgccttattgagctagctggaaactcagtacagaatagaattgttgcaagcagatatctttgccttgttcccaatcttagggggaaagcatttaatctttgaccactctttaaatgtgatatcaagtataggtttttcatagatgccctttattgggttaaggaaattctattctactcctaatttcttgagttttttcatgatttgaatattgaattgtattgaatattgaattgttcagtttttcaaatgtcttttctgcatgtgttgcgatcttgtggtt

SEQ ID NO: 932227 - DNA, 791 bp, Homo sapiens
tcaacttttaaggccattgccattgaagtagagaatgattgtttttaatgctttgaaaatacagtgcctttaccttgagtgcaatatgtaaagtcctaaataaatttattaattttcgatgcttccttggggttatcttcactttagttgttttagaggtcatttcaaggtctggataggttcattcccattgtggaaggcagaaggacacaattctgggagaatctttaagccaaattgctataggtctaggatcacttcagttatgaactgcatgtccattgaaaattcacaggttgaaaccctaacccttaatgtaacggtatttgaaagtgggggcttggggaggtaataaggtttagatgagattgtgtctggagttagttccagcagtgagttcatggtctcacagacttcaagaatgcagccttggactttgcggtaagtgtgacagctcttaaagatggcacaaccccaaagagtgagcggtagcaaggtttgttgtgaagagcgaaagaacaaagcttccacagcgtggaaggggaccagagcggattgaggctgatggctggggtggccagcttttatttccttacttgtccccrcccatgttctatttttgtcctatcagagtgcccttttttcaatccttcctgcgattggctacttttaagatcctgctgattggtgcattttacagagtgttgattggtgcattttacagagcgctgattggtgcattttacaatcctcttgtaagacaaaaaatttctccaagtccccacccgacc

SEQ ID NO: 932228 - DNA, 594 bp, Homo sapiens
catacactgccgggtgcggtggctctcgcctgtaatcccagcactttgggaggcaaaggtgggcggatcacgaggtcaggagatcgagaccatcctggttaacawggtgaaaccctatctctactaaaaatataaaaaattagccgggcatggtgtcaggcgcccgtagtcccagctacttgagaggctgaggcagaagaatggcatgaactcaggaggcggagcttgcagtgagccgagatcgcaccactgcactccagcctgggcaacagagactctgtctcaaaaaaacagacagacagacatacactgacagatattttgcctgtcagtgcggctaaggggctctgcagcctgagtctgcagtgtagtcctcaatgccaggcgaagttcgcatttatttagtacagactaaatgacaaaggtctcgagtaaacaccactagagggtaattaacattgccgaccccctgaatagcgagcaatcatgcaccagtggatgatcaaaggttggtcttaggaccacatgagtaaacaagctatttaggtaaactcccccacattcctatgtatctgcaccctaagcttttaagag

SEQ ID NO: 932229 - DNA, 594 bp, Homo sapiens
catacactgccgggtgcggtggctctcgcctgtaatcccagcactttgggaggcaaaggtgggcggatcacgaggtcaggagatcgagaccatcctggttaacaaggtgaaaccctatctctactaaaaatataaaaaattagccgggcatggtgtcaggcgcccgtagtcccagctacttgagaggctgaggcagaagaatggcatgaacycaggaggcggagcttgcagtgagccgagatcgcaccactgcactccagcctgggcaacagagactctgtctcaaaaaaacagacagacagacatacactgacagatattttgcctgtcagtgcggctaaggggctctgcagcctgagtctgcagtgtagtcctcaatgccaggcgaagttcgcatttatttagtacagactaaatgacaaaggtctcgagtaaacaccactagagggtaattaacattgccgaccccctgaatagcgagcaatcatgcaccagtggatgatcaaaggttggtcttaggaccacatgagtaaacaagctatttaggtaaactcccccacattcctatgtatctgcaccctaagcttttaagag

SEQ ID NO: 932230 - DNA, 660 bp, Homo sapiens
tccaagtggggccactgtgatatgaaggaggattgtttgaattcaggagattgaggctgcagcgagccgtgatcacaccactgcactccagcctgcatgacagagtgagaccctgtctcaaaacaaacaggccgggcacagtggctcacgcctgtamtcgcagcactttgggaggccaaagtgggtggatcacctgaggtcaggagcttgagaccagcctggccaacatggcgaaacctcgtctctactaaagataaaaaattagctgggcatggtggtgggcacctgtaatcccagctactcgggaggctgaggcaggagaatcacttgaacccaggaggcggaggctgcagtgagccgagatcatgccactgccctccagcctgggcgacagaacaagactttgtctcaataaaacaaacaaccaaaaagaaaagaaaaaagatacttttctaatatatgactgggaaaaatgggaaactataaaggaaaagatggacagatttgactgcctaaaaattaaaactttctcaatagggcaaaacaataacataagcaaagtttaaaggtctgttgacaatgggaggaaaatacgtctagcgctctctgtatcaatgccccaactctgggtttgtgtggcattggtctagacagcactgt

SEQ ID NO: 932231 - DNA, 740 bp, Homo sapiens
gcagtaggcactcagtacaatgaatctccccagcctccccactctcagcttagtcacctcccaatagcatcccttttccagccagaccacactggcttgccctgatgagtgttcatgccttaggtacagccagagtttcatctggataccctatgactatttctatcactatatgacatttttttttttttttttgagatggagtctcgctctgtcacccaggctggagtgcagtggcacgatctcggctcactgcaagctccgcctcccaggttcacgccattcttctgcctcagcctccagagtacctggcactacaggcacccgctaccacactcggctaattttttgtatttttagtggagatggggtttcaccgtgttagccaggatggtctcgatctcctgacctcgtgatctgcctgcctcagcctcccaaagtgctgggattacaggcatgagccaccgggcccggcctgttcaggttttatctyccccactagatgatacactttgagaggaactcttttgtatagaattttggagttcgaagagattttagtgtttatctcatccaaacttctcacctaatgtctgaatcccctttatgaatctctgataactttttttttcttttgaaatagggtcttgctatgtcacccaggctggagtgcagtgactcactcttggctcactgcaacctctgcttcccctactcaagcgatcctctcacctcagcct

SEQ ID NO: 932232 - DNA, 740 bp, Homo sapiens
gcagtaggcactcagtacaatgaatctccccagcctccccactctcagcttagtcacctcccaatagcatcccttttccagccagaccacactggcttgccctgatgagtgttcatgccttaggtacagccagagtttcatctggataccctatgactatttctatcactatatgacatttttttttttttttttgagatggagtctcgctctgtcacccaggctggagtgcagtggcacgatctcggctcactgcaagctccgcctcccaggttcacgccattcttctgcctcagcctccagagtacctggcactacaggcacccgctaccacactcggctaattttttgtatttttagtggagatggggtttcaccgtgttagccaggatggtctcgatctcctgacctcgtgatctgcctgcctcagcctcccaaagtgctgggattacaggcatgagccaccgggcccggcctgttcaggttttatcttccccactagatgatacactttgagaggaactcttttgtatagaaytttggagttcgaagagattttagtgtttatctcatccaaacttctcacctaatgtctgaatcccctttatgaatctctgataactttttttttcttttgaaatagggtcttgctatgtcacccaggctggagtgcagtgactcactcttggctcactgcaacctctgcttcccctactcaagcgatcctctcacctcagcct

SEQ ID NO: 932233 - DNA, 608 bp, Homo sapiens
gaacaggagtaaaggtcattcttgctatgcaaagagactggcagcatttttgcccctgccctagagatttgagaaactttgaacttgagggagatgatttagggtatctggtggaagaaatttctaaccagtgaagcatacaagaggtgacttgggtgtgttaaaagcattcatttttaaaagggaaacagagcataaaagtttggamaatttgtagcctgatgatgcaatagaaaagaaaaattcattttcggaggagaaattgaagccagctgcagaaatttacataagtaacaaggagccaaatgtaaatcactaagacaatggggaaaatgtcttcagggtatgtcagagatctttaaggcagcttgtcccattacaggcccagaggcctaggaggaaaaaatggttttgtgggctgggcccagggccccctgctgtgtgcagcctagggacttagcgccctgtatcccagctgtggtagccatggctaaaaggtgccaaggtacagctcagactgttgcttcagagggtgctagcctcaagccttggcagcttccacgtggctttgagcctgcgagttcacagatgtcaagaattgaggattg

SEQ ID NO: 932234 - DNA, 668 bp, Homo sapiens
aaactacttcaggcatgttgcaggatacaaaatcaatgtacaaaaaacactagcattctatacaccaacaacagccaaacccagagccaaatcaggaagtcaatcccattcacaactgccatgaaagagtaaaatacctcagaatgcaactaacagtgaggtgaaagatctgtacaataagaattatacaatagcactcaaagaaaaaagagaagacacacaatgaagaaacatcccatgttcatgcctaggaaaaatcgatatcagatttccaagagaaaaacgaacaacaccattaagaagtgggcaaaggacatgaatagagacttctcaacagaagwcatacatgcagccaacaagcatatgaaacaaagctcaacatcatgaaaaccacgataagataccttctcacaccagtcagaatgcttattactaaaaagccaaaaaataacagatgctggtgagattgtgggaaaaaaaggaatgtgcatatactcagagaaatataaatcattctacctaaagccacatgcatgtgaatgttcattgcagcactattcatcatagcaaagacatggaatcaacctaaatgcccatcaacaacagcttggataaagaaaatgtggtacatatacaccatggatactatgcagccatgaaaaagaaac

SEQ ID NO: 932235 - DNA, 668 bp, Homo sapiens
aaactacttcaggcatgttgcaggatacaaaatcaatgtacaaaaaacactagcattctatacaccaacaacagccaaacccagagccaaatcaggaagtcaatcccattcacaactgccatgaaagagtaaaatacctcagaatgcaactaacagtgaggtgaaagatctgtacaataagaattatacaatagcactcaaagaaaaaagagaagacacacaatgaagaaacatcccatgttcatgcctaggaaaaatcgatatcagatttccaagagaaaaacgaacaacaccattaagaagtgggcaaaggacatgaatagagacttctcaacagaagacatacatgcagccaacaagcatatgaaacaaagctcaacatcatgaaaaccacgataagataccttctcacaccagtsagaatgcttattactaaaaagccaaaaaataacagatgctggtgagattgtgggaaaaaaaggaatgtgcatatactcagagaaatataaatcattctacctaaagccacatgcatgtgaatgttcattgcagcactattcatcatagcaaagacatggaatcaacctaaatgcccatcaacaacagcttggataaagaaaatgtggtacatatacaccatggatactatgcagccatgaaaaagaaac

SEQ ID NO: 932236 - DNA, 638 bp, Homo sapiens
catccccggggctgcagagggtgtcctggccttcccctatcagctctgcacccctgaggactcccatccctaggagtccctctgcccaactttggtgcatgttaagccataattaatctgcttcctcatctcttattcatcaaagccacagcagcagcaaagggggctggcacaaggamgggaccgacaaccaaaccctggcagtggccccaagaatcccactgggcctgcccatctccaaatgcctctgacccttcactagcgagggcctcctcccacagaatggcatcctggattgtgccacactaggcaggccccctgacggaccatgcgcacctcccaccacctggaggctgctggggaccgtcaatgggacgtatgcattgcacagtgatggcccttacctctgcgtcccccagccctggactggatcccttgtggcccatctccaggatgggagcctgaacggagatgaaaggacactcggccaagtgggacatgccaggctggcacctggacccctggtccgccactcttcctggtgcctagaggaaggggtgagtccccagggctcctggaccttgagatgagcctcgggccacttgtgtttgccagcagatgggctcagggtcttctct

SEQ ID NO: 932237 - DNA, 638 bp, Homo sapiens
catccccggggctgcagagggtgtcctggccttcccctatcagctctgcacccctgaggactcccatccctaggagtccctctgcccaactttggtgcatgttaagccataattaatctgcttcctcatctcttattcatcaaagccacagcagcagcaaagggggctggcacaaggaagggaccgacaaccaaaccctggcagtggccccaagaatcccactgggcctgcccatctccaaatgcctctgacccttcactagcgagggcctcctcccacagaatggcatcctggattgtgccacactaggcaggccccctgacggaccatgcgcacctcccaccacctggaggmtgctggggaccgtcaatgggacgtatgcattgcacagtgatggcccttacctctgcgtcccccagccctggactggatcccttgtggcccatctccaggatgggagcctgaacggagatgaaaggacactcggccaagtgggacatgccaggctggcacctggacccctggtccgccactcttcctggtgcctagaggaaggggtgagtccccagggctcctggaccttgagatgagcctcgggccacttgtgtttgccagcagatgggctcagggtcttctct

SEQ ID NO: 932238 - DNA, 710 bp, Homo sapiens
ttctctgattagtctgctgaattatgaattaggttccgggtccctgtgcagctgttcccggcttgtcatccccaccactttatttccccatctgtttataaaaccaggagcgccgtcctgcaataaacacttcaaacgctttttttaggggctaattaattgtgttgcatttcttcaacacagcatgcaggccggacctgccccgaattcccaatgcgggtgtggctcctgctgagcgcctggggagggagccaggcctggagcctggggggctgcatgtggctgccccaagtttgctttctccaaggcagccctccacctttatgtggcgggctgggctgtctcaggaatgcgccggccatgtcaggttccccctagattccccctcckcaccctttggctgaagtcctcctgctcggaccataggacactcttgaaattatctgtggcacatccaaggtcaaggtcacgccctgctgccagctacagtgctgaccctgagggctccacctcccaggcccactgagcatcacgctatcttccctgccttgcctgcccagagcacctctgccctccaggaccccctcagcgagtgcggtgggcgagtgcagtgggtgggtggcccatctaggcaagccaatctctcctcggatccgtgcacctctttggagaaggcctctgggagccccagccctgctgtgcaccctgag

SEQ ID NO: 932239 - DNA, 710 bp, Homo sapiens
ttctctgattagtctgctgaattatgaattaggttccgggtccctgtgcagctgttcccggcttgtcatccccaccactttatttccccatctgtttataaaaccaggagcgccgtcctgcaataaacacttcaaacgctttttttaggggctaattaattgtgttgcatttcttcaacacagcatgcaggccggacctgccccgaattcccaatgcgggtgtggctcctgctgagcgcctggggagggagccaggcctggagcctggggggctgcatgtggctgccccaagtttgctttctccaaggcagccctccacctttatgtggcgggctgggctgtctcaggaatgcgccggccatgtcaggttccccctagattccccctcctcaccctttggctgaagtcctcctgctcggaccataggacactcttgaaattatctgtggcacatccaaggtcaaggtcacgccctgctgccagctacagtgctgaccctgagggctccacctcccaggcccactgagcatcacgctrtcttccctgccttgcctgcccagagcacctctgccctccaggaccccctcagcgagtgcggtgggcgagtgcagtgggtgggtggcccatctaggcaagccaatctctcctcggatccgtgcacctctttggagaaggcctctgggagccccagccctgctgtgcaccctgag

SEQ ID NO: 932240 - DNA, 673 bp, Homo sapiens
ggtccagagctggagactgacccccctgtgtaggacctctgggaagtccccaggacccaagacggctcagggctagtgaggtagggacaggtggctatttcaagcccccagcgggcttcctgcctggggcacctgggcacagtggagaaagatggctcccggcagaacacatgcccccatccttyggggccagatgccttgggttgggcacggagcagggcccccagcagacacagaggccagggtgggaagggccagggcaccgggcagtctcttgccctgtgtcagggctccaggcctatggtggggctgggcctacccaccctgtcactttccccatacggctttggggtcccaggggttcaggggcccctcctgcctgacccagccttaactttttgttgtttcttctcattacaaaagaagcatgttcaaaagaaccccacagtcctccatgaaccccacagtatcccgtgaactccagagtcctccatgaaccctacagactctcatgcaccccacagtcccccatgaaccacatagtcccctatgtaccccacaagctcccatgtaccctatagtccccgatgcaccccacagtcccctatgtaccccacaagcccccatgcaccccacaggcccttatgtaccccacaggcccccatgcacccca

SEQ ID NO: 932241 - DNA, 764 bp, Homo sapiens
gtagctatggtaaagacaagaatgtaatttatggctgggcgtggtggctcacgcctgtaatcctagcactttgggaggccgaggtgggtggatcaccaggtcaagagatcaagacgggggaggagccaagatggccgaataggaacagctccggtctacagctctcagcgtgagcgacgcagaagacgggtgatttctgcatttccatctgaggtaccgggttcatctcactagggagtgccagacagtgggcgcaggtcagtgggtgcgtgcaccgtgtgcgagctgaagcaggatgaggcattgactcacttgggaagcrcaaggggtcagggagttccctttctgagtcaaagaaagtggtgagggatggcacctggaaaatcgagtcactcccacccgaatactgcgcttttgcgacgggcttaaaaaacggcgcaccatgagattatatcccgcacctggctcagagggtcctacgcccatggaatctcactgattgctagcacagcagtctgagatcaaactgcaaggtggcagcaaggctgggggaggggcacccgccattgcccaggcttgattaagtaaacaaagcagccaggaagctccaactgggtggagcccaccacagctcaaggaggcctgcctgcctctgtaggctccacctctgggggcagggcacagacaaacaaaaagacagcagtgacctctgcagacttaaatgtccctgtctgacagcttgaagagagcagtggttctcccag

SEQ ID NO: 932242 - DNA, 629 bp, Homo sapiens
cactccatctctctagccaacacccttgggcttgttgagcttgggatgtctgtaaagcaaccaaatattatgcaggcattcagacacttgattctaaggtttggaaagatggaacggggagacttgtgaattgtcagtacatagatgcccaatatgccatgggagcatatgataccacctaagggttgggtgragagagaaaagacatagaaagagagaggaagtacaataactgaacttcagaaaatgcaaaatcaggacattgaggtgatgtaagttgaactattgagaggacccctgtagcagaaacgaggagacaacggagcaagggatgaccagagagagtgggagagagagactaggaaataagtgaagaacattttgaatcagaaggtagtagagagctttcttgacagggattctgatagtttgagtgaaatgaggactaaatattgaccactgaatttggaaacattcagattaactatgactttgaccaaaactgcttctgtggaatggtaagggcaaatgcctgagtgcttgactggcttgggtttaagggaaatagaagtaacgagggaaaaggaatataaactactctgtgaggaactttgtggtaaaagcaagtg

SEQ ID NO: 932243 - DNA, 572 bp, Homo sapiens
caaatattatgcaggcattcagacacttgattctaaggtttggaaagatggaacggggagacttgtgaattgtcagtacatagatgcccaatatgccatgggagcatatgataccacctaagggttgggtggagagagaaaagacatagaaagagagaggaagtacaataactgaacttcagaaaatgcaaaatcaggacattgaggtgatgtaagttgaactattgagaggacccctgtagcagaaacgaggagacaacggagcaagggatgaccagagagagtgggagagagagactaggaaataagtgaagaacattttsaatcagaaggtagtagagagctttcttgacagggattctgatagtttgagtgaaatgaggactaaatattgaccactgaatttggaaacattcagattaactatgactttgaccaaaactgcttctgtggaatggtaagggcaaatgcctgagtgcttgactggcttgggtttaagggaaatagaagtaacgagggaaaaggaatataaactactctgtgaggaactttgtggtaaaagcaagtgaaga

SEQ ID NO: 932244 - DNA, 806 bp, Homo sapiens
tggagaagaaaacccctgcgcagaaggctagactcaaagagggaccggcccctctcccccattcccccttcttcctttctttcttttttttttttgagacggaatctcgctctgttgcccaggctggagtgcagtggcgtgatctcgtctcactgcaacctctgcctcccgggttcaagmaattctcctgcctcagtctcctgagtagctgggactacaggcgcccgccaccatgcctggctcattttttgtatttttagtagagatggggtttcactgtgttagccaggatggtctcgatctcctgaccttgtgatccacccacctcagcctcccaaagtgttgggattacaggcgtgagccaccgcgcccggccgattcctccttctttctagtgaggttccctgagggggactcttcaggctccatctgagtccattccagcctagcccagggatgaggactcagtaggtgctcaataaatgcataatcaaactggttctcccatcctttgcccttgggtaagggagtacattctcctgaaaagtaggtagctgggatgacccaggctccttctgttttgtaattattattattattgagacgaggtcttgctttgtcacccaggctggagtgcaatggcacgatctcagctcaccgcaacctctgcctctcgggttcaagcgattctcctgcctcagcttcccgactagctgggattacaggcatatgccactacgcccagctaattttatatcttcagtagagatggggtttctctacgttgtctaggctggtcttgaact

SEQ ID NO: 932245 - DNA, 785 bp, Homo sapiens
ggttccattcacaccacacgcttatcccttcatctcttgattccagttgtaacaggcattggagtcacttgctctgacacagaactgatttatttataagttttcaaatctcaaacacagaatgttatagctacaacagcatggagatgtcacgtgacctcttggtttcagaatgtaagtgctgaggccattgggagagtgatggttaaatcaaggcaatagagaattttcactaccattggatacaaatcactgacaactggtattttgtatrtaagtgcaggctcctggatacataaaatagagacttttcactaacattggatacaaaccactgacaactgatattttgtatataagtgcaggctcctggatacataaaatacacacttaatgaaaagttgttagtaagttgaaaatgtcacactatctgtccatttcccttctttcattttattgacaataaaccaccatgcagttggtgaggaagtatggctatgctgtgagtgcttcctggaccagcctccttcctggccatgggaaagatgaggatgacaatgaaggagaaggtgtatctacttttgtggctgctctagtagcgcactgtgcagtatggtagctcctagccaccagtggctgtcaaaattaaagttaggccaggtgcggtggctcatgtctgtcatcccagcacttttggagactacggtgggtggtttgcttgagctcaggagtttgagatcagtctgggcaacatagagaaatcctgactctgcaaacaaacaaac

SEQ ID NO: 932246 - DNA, 552 bp, Homo sapiens
caccttaaaatggacacatcctaatctttggaagttgagaatacgttactttacatggcaaaaggatatttgcagatgccatcaaaataagcaccttgagctagggagcgtatcctgggttattcatgtgggtccaatctaatcacatgccttcttgaaatcagcagaggtttctcattccctcgctttcagagagaaatgtgactgtgggagaggatgggagagatacaactaaattggctttgaaggtggaggaaggggaccrtcagccaaggaatgtgggtggcctctagaagctgtgaaaagtcaggaaatagattcttctctagagactccagaaaggaatgtagctctgctgatacctatattttggccagcaagacctgtgtctggtttataacctatagaaatgtaaaatggtaaatttgcattgttttaagccactgagtttgtgataatttgttacagcagcaataggacaccaatgcaggctggaatgataagaaagaaacttccatgaaaatgatggcacagctttgtttgtaattggag

SEQ ID NO: 932247 - DNA, 543 bp, Homo sapiens
tgtgttgctgcaaaggacctgacttcattctttttatagctctgtagtattccattttatatatatatatatatacacacacacaacattttctttatccagtctaccattgatgggcatctaggttgattccatgtctttgctmttgtgaatagtgctgtaatgaacatactggcgcatgtgtctttttggtagaatgatttattttttctttggttatatacccagtagtgggattgctgagtggaatagtagttctaaattctttgagaaatctccaaactgctttccgtagttgctgaactaatttacattcccaccaacagtgtatgagtgtttccttttctctgcagccttgctgacatttctctgatgattggtgatgttgagcattttttcatgtttgttggctgcctgtatgtcttcttttgagaaatgtctgttcatatcctttgcccctcttttaatgaggttatttgttttttccttgttggtttgtttaagttccttatagattctaggtattagacctttgtctgatgt

SEQ ID NO: 932248 - DNA, 604 bp, Homo sapiens
caatgccctattaaaagactacaacagcaaaatactttttcctaaaattcaccattaattcatttatttatccaacagacatatacttggcacctactaggcactacacacaattctaggcactggagataaaaataaagctcagccttcatggagacaatgtgcgtgcgcgcatgtgtgtgtcagagagagagagagcgagagatgcaggtgaggagagagtagacagataaataaacaagtagctattcgtgctatgaagaaaaataaagtggaataagaaggcagaggggrtttggggtgccattttagatatgatggtcaagaaaggcctaagtttgtgacatttgaacagaagcgtgcaccgagtaaggaaatgaaccatagaagtatcttgggaggagtattccaggcaaaaggaacagcaagtacaaggacctgaagtgagaaacagtttggcttgttcacagaacaaaaagggcagtcagcgtgactagagcatactgaacaagaggaagaatgcacaggaaattacataggaaaggcagtcagaagtcagatcacatggactctttcaggtcatagtaagggcctggtaatatat

SEQ ID NO: 932249 - DNA, 725 bp, Homo sapiens
gtgtatatgtactatacattttaaatccaatccaccattgatgggcacctaggttgattccctgtctttgctgttgtaaatagtgctgcaataaacatatgagtgcatgtggctttctggtaaaataatttattttcctttgtayatatactcattaatgggattgctgagttgaatggtagttctatttttagtctttgcaaaatctccaaactgctttctacagtggccgaagtaatttacattcccaccaacagtgtataaggatttcctttgctccacagcctctccaacatctgttgttgttttttttttttttttacttttcagtaatagccattctgagtggtgtgagatggtctctcattgtggttttgagttgcatttctctgatgattagtgatgtttgtacatttaaaaatgtttgttggcccattgtgtgtcatcttttgagaagtgtctgttcatgtcctttgcccactttataatggtattatttgtgttttttattgaattatttaagttcttagataaagattctcagtattagtcctttgtcagatgcatagtttacaaatattttctctcattctgtaggttgtctctttactctctcgatagtttcttttgctgtgtacaagctcttcagtttaattaggtcccacttgtcaatttttgtttttgttgtaattgctttagaggacttagtcataaattccttgcca

SEQ ID NO: 932250 - DNA, 725 bp, Homo sapiens
gtgtatatgtactatacattttaaatccaatccaccattgatgggcacctaggttgattccctgtctttgctgttgtaaatagtgctgcaataaacatatgagtgcatgtggctttctggtaaaataatttattttcctttgtacatatactcattaatgggattgctgagttgaatggtagttctatttttagtctttgcaaaatctccaaactgctttctacagtggccgaagtaatttacattcccaccaacagtgtataaggatttcctttgctccacagcctctccaacatctgttgttgttttttttttttttttacttttcagtaatagccattctgagtggtgtgagatggtctctcattgtggttttgagttgcatttctctgatgattagtgatgtttgtacatttaaaaatgtttgttggcccattgtgtgtcwtcttttgagaagtgtctgttcatgtcctttgcccactttataatggtattatttgtgttttttattgaattatttaagttcttagataaagattctcagtattagtcctttgtcagatgcatagtttacaaatattttctctcattctgtaggttgtctctttactctctcgatagtttcttttgctgtgtacaagctcttcagtttaattaggtcccacttgtcaatttttgtttttgttgtaattgctttagaggacttagtcataaattccttgcca

SEQ ID NO: 932251 - DNA, 617 bp, Homo sapiens
acacaaaggccgaggcgcggacctgctgttcctttcatgccaatcagtcctggggttgtaatgactacaattttctgatttgaagtcaaaaccaaatggcccagaagagtgattcagactccacgtggccctcttcctgagaagaagaagcacaaatggatttttctttcttaagcccaattgtgtgctgctcatcgacccctcatcatttctgagctctattttcttccctcctgcttgaggcacaattaacggaggcccaraaagttttttgcttcctgtgtcttggctttgtgggtatagcttggccttggtgctgagaaaatgccgaggagcccaaagccctggagttgccttgggagagtcgctcacccttctgggcctcaggatggagggtccaggggctacagagctgtcagcctatgccctgagctgggactctgtggaaatgtgggtagcccagtctgcccagggtgactgactcagactctccaggggtcattgactctttgggtcaaacatctgctcttcaccatgtgaattttaaagtgtaaaccagctgggcacagtggctcacacctgtaatcccagcacttcggaaggccaaggcgagtgga

SEQ ID NO: 932252 - DNA, 617 bp, Homo sapiens
acacaaaggccgaggcgcggacctgctgttcctttcatgccaatcagtcctggggttgtaatgactacaattttctgatttgaagtcaaaaccaaatggcccagaagagtgattcagactccacgtggccctcttcctgagaagaagaagcacaaatggatttttctttcttaagcccaattgtgtgctgctcatcgacccctcatcatttctgagctctattttcttccctcctgcttgaggcacaattaacggaggcccagaaagttttttgcttcctgtgtcttggctttgtgggtatagcttggccttggtgctgaraaaatgccgaggagcccaaagccctggagttgccttgggagagtcgctcacccttctgggcctcaggatggagggtccaggggctacagagctgtcagcctatgccctgagctgggactctgtggaaatgtgggtagcccagtctgcccagggtgactgactcagactctccaggggtcattgactctttgggtcaaacatctgctcttcaccatgtgaattttaaagtgtaaaccagctgggcacagtggctcacacctgtaatcccagcacttcggaaggccaaggcgagtgga

SEQ ID NO: 932253 - DNA, 564 bp, Homo sapiens
cttcacagaaaaaaaaaatcctaaaatttatacagaaccacaaaagacccagaatagtacaagctgtcctgagccaaaagaacaaaaatggaggaatcccattacttggcttcaattatactacagcgctgtagtaactcactacagagctgtagtaactcaaacagcctttgtcatttgaccttgggcaaattaaataacctgcaagagttctattcttttctatttgtaaaatagaaataaatatgtgtatcacacaaggctattaccaggattaaatggcatagcatatgtaatggtagtggcatgaaaacagacacattgaccaatggaacagaacagagaacccmcaaataaatccatacatctacagtaagctcatttttgacaaagatgtcaagatcacacattgggctaaagacagtctcttcaacaaatgatgctgtgaaaattggatagctatatgcagaagaatgaaatgagatcctgcctctcaccatacacaaaaatcaaatctaaatggatttaagacttaaatctaagacctcaacctatgaaactact

SEQ ID NO: 932254 - DNA, 632 bp, Homo sapiens
aatatagttaaaaatattgcagtgggaggttagtctttttcaatgagttgccattttttttgttcttatcagtttaattatttaccaaagaacagttgaattgctgctatgttcttcccacataaacagaaatttattttaagtaaaatataattttttgttytaagtataagtttttagaaaaaaaatctgatcttacctttctttctctcataagaaattacatcaaaattctatgtttactgaaaaaagaaatcaatcaatcatttccttttacttgttactagtatttgtctcaacatatggactaactaggaaagaaagaaaaaaataaccctgcagctcagagcatcagtcataccgcagagaggactgcatgccaaaaagccactgataaaagttaaagcaaacaaaatcataagactcagactttagctgaaatatgttagaagagaaaactgggcccaggtgcaatggctcacgcctgtaatcccagcactttgggaagccgaggcgtgcggatcacgaggtcagggattggagaccagtctagccaacattgtgaaacactgtctctactaaaagataccaaaaaaaaaaaaaaaaaaaaaaaaaacctaaactaaagtaaa

SEQ ID NO: 932255 - DNA, 574 bp, Homo sapiens
atctggtcctgggcctcttttggtggtaggctacttattacagcctcaatttcagaattcattattggtctattcagggattcaatttcttcctgcttcagtcttgggagggtgtatgtgtccaggaatttatccatttcttctagatggcctggtttatgtgtatagacgtgtttatagtattctgtgatagttgtttgtgtttttctgtggcatsagttgtgatatctcccttatcatttctgattgtgtttattagattcttctctcttttcttctttattattctagctagtggtctattttgttataaaaaaaaaaaaccagttcttggattctttgatttttttctaaaggctttttaaagttcagctctgatctcggtaatttcttgtcttctgctagctttgcagtttgtttgctcttggttctctaattcttttagttggcatgttaggttgttaacttgagatctttccagctttttgatgtgggcatttagtactataaatttcctgcttaacactgctttagctgcatcccagagattctgctacattgtctcttcattctc

SEQ ID NO: 932256 - DNA, 558 bp, Homo sapiens
taggctataaaaaattggttgcttatatttcctgcctttcgagacttttaatcttagaagccagttaccatgctgtggagcccaaactgtctttggagaggcccatgtggagatgaacagagacccccagctctcagccggcaccaacttgctaaccatgagtgagctgtgtgaaggagacaagctttctctaccaagccctagtaaatttcacacttttaagctaaaaataaatgatttttaaaaaacattattttaagccagtaagttttggtgagatttgttctgcagcaagacaaccgataatgattttgatacaccagaggcagggtgctgccttaacaaaatcctcaatcatatggcattggacttgagactaggtgatgggctgaagctggagggatctttaggagaatktaagtgaaaacttaaaaggacttctagaagaatactagaggaagcctatggagctttgaggacttaaaaaaaaaaaaaaaggaaggaaaaatctcagacaaccctctgttaaacaatagggcttcaataaatcttaagggt

SEQ ID NO: 932257 - DNA, 598 bp, Homo sapiens
gtccactctagaccctagttgccttgatttttcctgtatctggaggcatcaccagtgaaggctgtgaaacagcagagatggcagcctgctccttcctctggaagctctgtcccagcgggataatgactggttgtcagcccaaatgtgcctgtaggaggtatctggagactcctgttgggaggtctcatccagtcaggaggaatgggatcacggaaccacttaaagaatcagtctggctcatttttgtagagcaagtgtgctgcattgaggggggacccttcctcatctggactgtttgtattctccmaagccagcaggctggaatggctaagtctaccaaatcgcagagacggccgccacccctaccccaagaaacttgttcctgcctcaggcagactccagcctgttgctgtgggctggccagaattccaggccagtgggtcttaccttgtgaagtgccatggaagtgggccctgcagaatgacgctgcttggctccctgaattcagcccccttctttagggatatatacaggtggactctttccttgctgggtagcacaggactggagtatgtaaaactcctgggcctgtgtgtgt

SEQ ID NO: 932258 - DNA, 725 bp, Homo sapiens
acaagtataaaacacctctactccctccttagtgaccgatcatacaccccttaccatcccattaaaactgaatcacccttacctcgctcaatgccaatatcccatcccacagcatgctttaaaaggattaaagtctgttatcactcgcctgttayagcatggccttttaaagcctataaactctccttacaattcccccattgtacctgtcctaaaaccagacaagacttacaggttagttcaggatctgcaccttatcaaccaaattgttttgcctatccacacccgtggtgccaaacccatatactctcctatcctcaatacctgcctctacaacccattattctgttgtagatctcaaacatgctttctttactattcttttgcacccttcatcccagcctctcttcgcttttaggctcagcaaattacctcggctgtactgccacaagccttcacagacagcccccattacttcaatcaagcccaaatttcatcctcatctgttacctatcttggcataattctcataaaaacacacgtgctctccctgctgatcatgtccgactaatctcccaaacctcaatcccttctacaaaacaacaactcctttccttcctaggcatggttaatgcggtcagaattcatacacaagagccaggactgcaccctgtagcctttctgcccaaacaacttgacctttctgttttagcctagccctcatg

SEQ ID NO: 932259 - DNA, 725 bp, Homo sapiens
acaagtataaaacacctctactccctccttagtgaccgatcatacaccccttaccatcccattaaaactgaatcacccttacctcgctcaatgccaatatcccatcccacagcatgctttaaaaggattaaagtctgttatcactcgcctgttatagcatggccttttaaagcctataaactctccttacaattcccccattgtacctgtcctaaaaccagacaagacttacaggttagttcaggatctgcaccttatcaaccaaattgttttgcctatccacacccgtggtgccaaacccatatactctcctatcctcaatacctgcctctacaacccattattctgttgtagatctcaaacatgctttctttactattcytttgcacccttcatcccagcctctcttcgcttttaggctcagcaaattacctcggctgtactgccacaagccttcacagacagcccccattacttcaatcaagcccaaatttcatcctcatctgttacctatcttggcataattctcataaaaacacacgtgctctccctgctgatcatgtccgactaatctcccaaacctcaatcccttctacaaaacaacaactcctttccttcctaggcatggttaatgcggtcagaattcatacacaagagccaggactgcaccctgtagcctttctgcccaaacaacttgacctttctgttttagcctagccctcatg

SEQ ID NO: 932260 - DNA, 592 bp, Homo sapiens
tcctgggtccagtggggacttggagaacttttctgtctagctaaaggattgtaagtgcaccaatcagcactctgtgtctagctaaaggattgtaaatgcagcaatcagcactctgtaaaaatgcaccaatcagcactctgtgtctagctaaagtgtatatccaccaatcagcactctgtaaaatggacaaatcagcactctgtaaaatggaccaatcagcaggacatgggtggggccaaataagggaataaaagtgaccacccaagccagcacggtaacctgctcaggtgccytttggtgatgtggaagctttgttctttcactcttcacaataaatcttgctgctgctcactctgtgagacaacactacctttataagctgtaacactcaacgcgagagtctgcggcttcactactgaggtcagtgaaaccacgaacccactgggaggaacaaacaactccagacatgccacctttaagagctgtaacacgcattgcaaaggtctgtggcttcactcctgaagtcagcaagaccgtgaacccaccagaaggaagaaactctagacacatctgaacatatgaaggaacaaac

SEQ ID NO: 932261 - DNA, 466 bp, Homo sapiens
aataccacattattttaattatagcagttctatagtgtttcaatgcctggtagggttagtcatcccttcctccatcagtttttattttttgtgttgtgctgtgtattctatatgttcatttttctacatgaagttcaatattgtatagtctatcaatagttacatagyaagcttgttggtatttttattgagatcacattaaatttatagatcaacttagggacagctgacatttcaagatgttgagtcatcatatttttctatttatttagctatattttatatcttcagaagtgttttaaagtttttctaatgtaggttttgcatatttctcagtaaatttccccaagtatattaacttcttggttggtattataaatgagcttttctctttatttttttgagagagtcttgctctgttgcccaggctggaatgcagtggcatgacattggctcactgcaacct

SEQ ID NO: 932262 - DNA, 671 bp, Homo sapiens
ctgttaaattgtactactcgtgtaatatttcattttcttgctttattatttagatttaaaataattaaaatagaatacattttaacttttaaaaatattatttaaactcagcaaactatttaatgtataaactaaaatttgcacttaccaaacatcaatattacaccttgtaatttacaccttgtttcactgttttagatgttaaatacaaattaaaactctaagtggtcaagtagaatgagagtkttgaagacactcaaggtctgtttctttgtttttgcaactactgtgctattattgtttgactctcacatagcaatgcaggaatatgtgcttacaggggtaggagaatgaactgtccacagctgtccacaatgttcccacagagagcttgaaataagcatgttgctgaggctggaagtgttgggggtaaaactaggagttctccgaatttacttccatgcagaatataatgtttattaaagaataggtaacaaaaatgtgctaatctgaagtgtacttgcatatgattaaaacttaacaatgaccacagcggttgtttagaaattaggccaacaaaagatttttccaggtaataatagtttaccactgacattgtttagaattgccagctcatggtaataacaaaaagcagaccaacttttcgtcca

SEQ ID NO: 932263 - DNA, 671 bp, Homo sapiens
ctgttaaattgtactactcgtgtaatatttcattttcttgctttattatttagatttaaaataattaaaatagaatacattttaacttttaaaaatattatttaaactcagcaaactatttaatgtataaactaaaatttgcacttaccaaacatcaatattacaccttgtaatttacaccttgtttcactgttttagatgttaaatacaaattaaaactctaagtggtcaagtagaatgagagttttgaagacactcaaggtctgtttctttgtttttgcaacwactgtgctattattgtttgactctcacatagcaatgcaggaatatgtgcttacaggggtaggagaatgaactgtccacagctgtccacaatgttcccacagagagcttgaaataagcatgttgctgaggctggaagtgttgggggtaaaactaggagttctccgaatttacttccatgcagaatataatgtttattaaagaataggtaacaaaaatgtgctaatctgaagtgtacttgcatatgattaaaacttaacaatgaccacagcggttgtttagaaattaggccaacaaaagatttttccaggtaataatagtttaccactgacattgtttagaattgccagctcatggtaataacaaaaagcagaccaacttttcgtcca

SEQ ID NO: 932264 - DNA, 671 bp, Homo sapiens
ctgttaaattgtactactcgtgtaatatttcattttcttgctttattatttagatttaaaataattaaaatagaatacattttaacttttaaaaatattatttaaactcagcaaactatttaatgtataaactaaaatttgcacttaccaaacatcaatattacaccttgtaatttacaccttgtttcactgttttagatgttaaatacaaattaaaactctaagtggtcaagtagaatgagagttttgaagacactcaaggtctgtttctttgtttttgcaactactgtgctattattgtttgactctcacatagcaatgcaggaatatgtgcttacaggggtaggagaatgaactgtccacagctgtccacaatgttcccacagagagcttgaaataagcatgttgctgaggctggaagygttgggggtaaaactaggagttctccgaatttacttccatgcagaatataatgtttattaaagaataggtaacaaaaatgtgctaatctgaagtgtacttgcatatgattaaaacttaacaatgaccacagcggttgtttagaaattaggccaacaaaagatttttccaggtaataatagtttaccactgacattgtttagaattgccagctcatggtaataacaaaaagcagaccaacttttcgtcca

SEQ ID NO: 932265 - DNA, 682 bp, Homo sapiens
tattccctgccaggcacccatggagtctccccctcccccagccagggagtccaaccccatcagacagcaattaagcttctctctagggtggaggaactatttgcataagaataagaggtttttcccccaggcatccctttttcttctccactccatcagcagttaacttttaaatgagtttatttttccttttagaagacattttcttaggctaggaatgataaggatcattatcataatttagtccacctatttatgtggactaattatgtttatattctctgtaaagttttaattgtgaaaaaggatttgtgaggttggtcttaagctgtagccaatgtggtatgctttgcatgtctgtgtggtcagtagcaaactttgctgcacacctycatcttgttttatgtcctgagggcatatgtcctgagggtgtggcctgtaaccacatggcaaggctttgtttagcaatcctgcctagggaatgagtcctttctggtttgatatctgcacattttcctagccctgtctcttaaagggctccacccagcgactgggttttcttctgcctgtctgtgtagctatatatgtgttatgtatatgatgtctgtaaaaagagctctaattaatttggcctaaaggaagacaagcacttgaatcaagtatttttttaagggaagataaa

SEQ ID NO: 932266 - DNA, 737 bp, Homo sapiens
ctgtggacccaggcattcctgcactttggaggcccatgaaggcctcccctatcctcacaggcttgcaagtgcctgcttccactgcctggcttcttcctgctgtcagtgcttgctctgatcttagagcaaaggctgggctgagcctgggggctgtcacagcctgaccaggtgtgtgcacgctcaaggcagtgctgacacaccagtcccctgctgcctcaccccctctggactttgggcactgatgagcatggaagggaagccaaggggggactgagggcaactcagccctggcctgcagacacctcttggcatgaacagcctgggcaccatgaacakcagtgagaggcaaacaggctcctgcgcagaagggggcaagtccccagagaagccccgccttcaggccagggagggcctgaaggctgggggccaggctgccagtcccgtggactggagtgggaacttgtggtaccttttctgggcccactcatggccacccatggaccaactggcatgcacttcctcccctcttaggcccataaaagccccaggctcagccagagctgggcaatgtcaggatgacctgctgcagaaaggagctacccacctcagggcctcctctctgctgagagctgcagagattatggaatgacctgcctgcagagaggagcaacccactccaggaccccccgtctgctgagagctgcagacatgatgggattacctgcctacagaaaaca

SEQ ID NO: 932267 - DNA, 740 bp, Homo sapiens
gtgcagcaaaccaacgtggcacatgtatacctatgtaacaaaactgcactttgtgcacatgtaccccagaacttaaaatatattaaaatattgttatatatattatatattttatatttatacatatttatatatatatatatatatatatatatatatatatataattgaatactactcagccataaaaaggaatgaaataatggcatttgcagcgacctggatggaattggagccaattattctaagtgaagtaactcaggaatggaaaaccaaatatcgcatgttctctctcataagtgggagataaactatgaggacacagaggcataagaataatacaatggacttttgggactcagggggaaagggtgggagggggtgagggataaaatactacacattgggtacagtgtatactgctcagttgatgggtgcaccaagatttcagaaatcacgacttaagaacttattcatgtaaccaaacaccacctgttcccacgaaacctacggaaataaaaaatttwaaaaaaaagttagctgggtgtggtggcgtgtgcctatagtctcagctactcgggaagctgaggcaggagaatcgcttttacccgggaagcaaaggttgcagtgagccaagatcacaccactgcactccagcctgggcgacagaccaggactctgtctcaaataataataataacaatcaaacatcaggagatgacccagtctttttaatatat

SEQ ID NO: 932268 - DNA, 537 bp, Homo sapiens
tgtctgaagctgggtaatatataaagaaaaggggcttatttgactcattgttttgcaggctgtacaagaatcatggtgccagcatctgcttctgacaaggacctcaggctgcttgcacttatggcaaaaggtgaaggagagccaacttgtcacatgacaagaaagagagaggccagagacaagagagggaagatgccaggctgtgttaaacaagctcttgcatgaaatgatagagcaagaactcactcattaggaggagagggcaccaagccattcatgagggatctggccccataaccctaacacctcccagtcagccctacctgtcacactggagattaaatttcaatgtaagatttggaggggacagatagccaaactrtgttagaagtcccaaataaagaaaacagtcttcgtatatttggaactttaaaatacacttcctaagtattcttgggtcaaaagaagaaataaaaatgaaaacaaaaatgcctagagctgaacgacaaaatactacattttaagcactgtggagta

SEQ ID NO: 932269 - DNA, 592 bp, Homo sapiens
catacacacccagactccccatgcaagcaagctcacatgttaccatgagcacattatcttctccactgtatcagtggtatgtgtgaataagtgtaagaagtgattacttattggtagcatataaattcagagtcagaacggggcgagatggctcatgactgtaatcccaatacatcaggaggctgaggtgggaggattgcttgaggctgagagtttgagaccatcctgggcagtgaggtcttgcctctacaaaaaatttaaaaattagccggacatggtggcatacccctgtagtcccagctactcaggaggcccaggtgggaggattgcttgaagccagcagattgaggctactgtgacytacgatcatgcccctgcactccagcctgggtgacagagagagagtctgtcttgaataaataaatacattcattgtcaggaatgatggtgatgccaaacaaccccagactgtcaacttgggtggctgagacagtgagaactttgccttccgatgtttcaatgtacacagacttttgtttcatgtacaaaattattaaaaatattgtataaaattacctttcagctatatgta

SEQ ID NO: 932270 - DNA, 575 bp, Homo sapiens
gagagagaatgagagtcaagctaaaggggtttccccttataaaaccatcagatcttgtgagacttattcactaccatgaaaacagtatgagggaaaccacccccatgattcaattgtctcccatcaggtccctcccacaacacwtgggaatcatgggagctacaattcaagatgagatctgggtggggacacagcgaaactctatcgagtgctcacacatgcagaagaattgcatagacttgccataagtagatctcaagctcaattgtgtctataactgtattaactcacacaatctttgctattcactcaacatgatatgtttttggtaaggcttagtgtgtctcaaagctattaatatagtgatatagccaattccattgagcaagcattgccttgcagtgcctaaaaatatactcagaattggtagtgagaggacattctgatactgaatcttgccaaacacactatattgcagaaaatgttactatattatccaaaaggtaaatgatcccttgccaatttattgtttccattataattttatattttaattacttaatattatatattgc

SEQ ID NO: 932271 - DNA, 624 bp, Homo sapiens
tgaaacagagtaagaagtccagaaatagatccacacaaataaggtcaactgatctttgacaaagaagagccaattaaatgagaaaaaggtcatcttttcagaaaatattgcgctgattacccttaagatatatataaaaagaaaatgttgctgaagcaactggacattgatgtggaaaaagaaaaacttatacacaaaccttacaccttaaacaaaacttaaggtgaatcattgatctaaacatataatgcaaaattataaaactacttcttgaagaaaacagaaaaaattctatatgatattgaatttggtagtaagtttttatatacaacaccaatagcacaatatggaagaaaaaaattaataaattgggcttcattaaaatttaaatttctactttgaaaaaaacaattaagagagtgaaaagataagccacaaactgggagaaattatwtgtgaaacacatggctgataaaagacttgtaatcaaaatatacaaaaaaactcctcaaactcaacaaaaagaaaacaaaaacccaattttatgtatgtacgtatgtatgtatgtatgtattttgagatggagtttcattcttgttgcccagactggagtgcaatggttca

SEQ ID NO: 932272 - DNA, 624 bp, Homo sapiens
tgaaacagagtaagaagtccagaaatagatccacacaaataaggtcaactgatctttgacaaagaagagccaattaaatgagaaaaaggtcatcttttcagaaaatattgcgctgattacccttaagatatatataaaaagaaaatgttgctgaagcaactggacattgatgtggaaaaagaaaaacttatacacaaaccttacaccttaaacaaaacttaaggtgaatcattgatctaaacatataatgcaaaattataaaactacttcttgaagaaaacagaaaaaattctatatgatattgaatttggtagtaagtttttatatacaacaccaatagcacaatatggaagaaaaaaattaataaattgggcttcattaaaatttaaatttctactttgaaaaaaacaattaagagagtgaaaagataagccacaaactgggagaaattattwgtgaaacacatggctgataaaagacttgtaatcaaaatatacaaaaaaactcctcaaactcaacaaaaagaaaacaaaaacccaattttatgtatgtacgtatgtatgtatgtatgtattttgagatggagtttcattcttgttgcccagactggagtgcaatggttca

SEQ ID NO: 932273 - DNA, 620 bp, Homo sapiens
tgcacatgaattttgaaattttatttcatttttctatttttttttcatgggcatctagtgttgttatattcttatgtcctgccttgcctctaagagcataacatgagcaaattggagttggggtaacccaatggtggaggtgtgaaaggggagatgstctggaaaagatggtagaatccactgattgagagaaggagactccaaacaggcacccgagtgaaagatttttggcttgcctggaacaggataagaaaattgagtggcagaaatgcttttatatatgtattgtggaacattaatttcactgtggaatcaatagtttcacttgaaaatgtgaaaggttctcactgttaaagttaatggagtagaaataaatttgaagtacttcatattgctagcattgtgatgttatatggcatacatcacatgacctttacacagtgagcttggatagacaaatgccttcgcattaatcaagatgggagctagaagattaaaattttgttctagagctttgtgttcttggagaaaactaacgattgtcttctaactttcgatttctgagtcatctgtggctaaaacatatatgccattgtttgaagtaaaaatgcatgttacat

SEQ ID NO: 932274 - DNA, 608 bp, Homo sapiens
tctcccctacttggagattacctcatgacagacatctataacctgactgcaactgagatggcaccagccagcactccaagtggacaacaactcaaaataacccttggaagaagacatgcaggcctgtatcttgtgttactctggcatggttctcatactaagtatcccctttttattttttatttatttttaacatattttttgaaacagagtctctctctgttgctcaggctggagtgcagtggtgtgaacrtggctcactgcagcctcaactcccaggctcaagcagtcctcccaactcttagcctccagagtagctgggactacaggtgtgcaccaccacatctggctaattttttttgtatcttttgtagagatgggttttcactatgttgcccaggctagtttcaaactcctcggttcaagcaatcggacagcctcggcctcacaaagtgctgggattacaggcatgagccactgcgcctggccaagtctccccctttaaaatcccttccttcagtctaacacttgaaatggtcttttggaggcacaagcctggccatttcccaattgctagcatttgaataaagttgctttccttttactcg

SEQ ID NO: 932275 - DNA, 630 bp, Homo sapiens
gagaatagtaattggttcctcaaaaaattaaacatggaactaccatatgaccaaggaagtccgtttctgggtatatacccaaaagaatgaaagatagagatatctgtacaccatgttcatagcaacattattcacaataacccaaaggtgggaaacaacccaaatgtccacgacagatcagtggataaacaatataccgtatctacctgcagtggactattattcagctttagaaggaaggaaattctgaaacgtgccacaacatgagcgagccttgaagacattatgctaagtgaaataagccagtcacaaaaggacaaatattatatgatcctgcttatgcgaggtacttagagtagtgaaactcacagagacagaaagtagaatggccrttgccagggtctcggggatggggtgggattgaggagttagtgtttaatggagtttcagtttttcaagatgaaaagaattctggagatggatatggttgcacaatttagtgtacttaatgccattgaactgtacacttaaaaatggtcatgagggtaaattttgtgtattttaccacaatttcaaaaattttaccacaatttcaaacctctcaacaattctatgaagtaggtactatta

SEQ ID NO: 932276 - DNA, 649 bp, Homo sapiens
atgaggaccaccctaactgaagttttaaatgtggggatgtgctgcgtgaagattagtagccttgtagcaggatgagccgtggacaaaaccccacagacaccaagatagtgaaggaagtagcttttaatcagttggaagcatcggcagtctagtgtcttaaaatccgagtttgttgagtgcacaatttctgtcccttttaagggctcacaacactaaagattttacatgacagggccgtgatcgattgagcaatctagggggtatgtgacaggggctgcatgcaccggtaatcagagtgaaacaacagaacgagaagtktcacaatgtccttccatacaatgtctggaatctacggataacatcggttgctaggtcatgggttgaattttaactatcaggctaaggtcaggcaggcccaggcctggttttgggtctggtgcctggcaccggctgcctgcctttggttttgcttccttgtttcttaaaacaggtactgagcataaaacaatatagaacaatacgggggggatctctttctctcttctctcagctttatctgcaagaccccttcaaagtaatctgcaaaatactaggcatctgggagaagtttgactaatcttgaaatataaaatcacaacctacaaagggt

SEQ ID NO: 932277 - DNA, 597 bp, Homo sapiens
aggcaggagaatcgcttgaacctgggaggcagaggttgcagtgagctgagatagtgccactgtactccagcctgggcaacaagaacaaaacttcatctcaaaaaaaaaaaaaaaaatttactaagatgttatttgcctttttcatgctcattctcttacagtgkagtttccaggggccacataactcgtgatatcacaatagatttaatgtgaaaacaaacaggagaaaccagctttttctactaagccacatagtaaagagatttccaaaagcataaaataagaccacttcccactaaatttttaaaattattctaggaaaagtacagttatttttcataagaaatttaaaaatgttaacatgtaatgagtgtattatacatatctctaatattttaatttctcagttttaacttctaatattaaaaaacagataaaacatacataagtagaagctctatgggatctgcagtaattttaaagagtttaaagaagacgtaaccaaaaagttttgagaactgctgtgctaaagaaccagactgctaacagaaaaataatctaatgagaatgcaggacttagaggaaatgcagaatgac

SEQ ID NO: 932278 - DNA, 578 bp, Homo sapiens
cttgctgataaaacaggttgcagtaaagaagcccacaaaaaccaagatggcgatgagagtgacctctggtcgtcctcactgttacactcccaccaacgccatgacagtttacaaatgccatggcaatgtcaggaagttaccctacatggtctagaaaggcgagacatgactaatccacccctcgtttagcacatcatcaaaaaatgaccataaaaatgggcaattggcaaycctgagaactcctctgtctatggagtagccattcttttattccttttttttgttaataaatttgctttcactttatagactcaccctgaggatggcttgagcccaggagtttgagaccagcctgggcaacatagtgagaccgtctccctacaaaaaatttttctaattggtggacatggtgacacaagcctataattccagctatgttggaggctgaggtgggaggattgcttgagcctaggagatggaggctgcagtgagccatgattgcactgctgcattccagcctgagcaacagagcaagatcctgactcaaacaaaaaaaatacgtaaaaaagaaaacaatc

SEQ ID NO: 932279 - DNA, 822 bp, Homo sapiens
ccaatgctcattgaccattccaaaaataccaaggcccttaagaattatgctaaatctattttgcctgtgctctgtaagtggcgccaacaaagcctagatgacaccacatctgtttctaccatggtttactgagtattttaagcccactgttsagatctactgctcaggggaaaaaaaattcctttaaaaatattactgcttgggggaagtgggggagagcatcaggaaaaatagctaaatgcatgccaggcttaatacctaggtgatgggttgataggtgcagcaaaccatcatggcatatgtttacctatgtaataattctgcacattatacacatgtatcccagaacttaaaataaatttaaaaatatatgaataaaattactgctccctgacaacacacctagtcactcaagagctctgataaagattcacaaggaaaataaaggttgttttcatgcctgataacacaatatccattttacatcccatggggtaattttggctttcaagtctttttattttaaacatatactctgtaaggctatagttgccataggtagtgattctgctgatagagctgagcaaagccaatcaaaaaaccacctggaaagaattcaccagtttcgatgccattaaatacattttggttcagaagaggaggtattgacatttttatcaacatgaacgagagtttggaagaagttgattccagtccttatggatgactttgaggggtttaagacttcagtggaagaagtaactgcagatgtgatagaaacagcaaaagaactataactaaatgtggaacctgaagatgtga

SEQ ID NO: 932280 - DNA, 580 bp, Homo sapiens
caatttaccatgcctttggaatgtcatgggcaacagtccggtgaaatcttttcccaattaggtagctgccaccttatcactaaaactatttctgttctgtggtcatttccatttcctgcattatgtaatgagcactcctgtgttatttaaccagtatctgtgggagtccagaaagttggagcagaaagaacatgtagttcacyctcaccatgttgagtatggagaaactcctgttgaaacaaaatgaagacaggcgaattgacgtgctccagatcttagttctgttagcagaaccagaactaagatggatcttctgacttgcttccctggcagcctatccagtgttctttctactagattggccactgtaataaaaataacatcctaacgtaaccatttcctttattagatcttttggccagagttattaaaaaaaaagcattgattaaaattaaattaaacttagtcaattgtttatcttgacttgttcaagttatttcccttctttcaagcagtaagtggtcaaaaggtagatagcatggaagggaaaaattaagtgttttataatactcattctgca

SEQ ID NO: 932281 - DNA, 631 bp, Homo sapiens
ggctggagtgcaatggcacaatcttagctcactgcaacctctgcctcccaggttcaattgattctcctgcctcagcctcccgattagctgagattacaggcacgtaccaccatgcccggctaattttgtatttttagtagagayggggtttcttcatgttggtcaggctggtctcgaactcctgacctcaggtgatctgcccgcgtcggcctcccaaagtgctgggattagaggcatgagccaccgtgcccagcctgaaatagtttttaatttaaagatgaagtagacttgcattgtaaaaacccagattcctaatttctcttgaaagataaggtagcagcagggcctcatccgtccattgcacaatcagctagggctgaacaatacctacaatacctatcctctggcatagagtatttcaggggtgaaagaagtttgacacagccagagcttgcgtgcatgcttgggaaaaagaggtgaaaatgaaacccagtttggagagaggtctgcaccagaagttcctagcacatgttcagctaacaataagatggttcgtagacacaagggactgtgataaatcagtattatgagactcaaggttggtcacgatatgagataagatcaaagtgtt

SEQ ID NO: 932282 - DNA, 631 bp, Homo sapiens
ggctggagtgcaatggcacaatcttagctcactgcaacctctgcctcccaggttcaattgattctcctgcctcagcctcccgattagctgagattacaggcacgtaccaccatgcccggctaattttgtatttttagtagagacggggtttcttcatgttggtcaggctggtctcgaactcctgacctcaggtgatctgcccgcstcggcctcccaaagtgctgggattagaggcatgagccaccgtgcccagcctgaaatagtttttaatttaaagatgaagtagacttgcattgtaaaaacccagattcctaatttctcttgaaagataaggtagcagcagggcctcatccgtccattgcacaatcagctagggctgaacaatacctacaatacctatcctctggcatagagtatttcaggggtgaaagaagtttgacacagccagagcttgcgtgcatgcttgggaaaaagaggtgaaaatgaaacccagtttggagagaggtctgcaccagaagttcctagcacatgttcagctaacaataagatggttcgtagacacaagggactgtgataaatcagtattatgagactcaaggttggtcacgatatgagataagatcaaagtgtt

SEQ ID NO: 932283 - DNA, 726 bp, Homo sapiens
atctctccacagtggttgagagaactgcagcataagcgaggcagagagagagagagagagagagagacagagaagagagagaggaagagacagaggcaaaaggaaaatcaaagagagaaagagagatatatacaagcagttaagaaaaaaaacagtgtaccctattcctttaaaagccaaggtaaatttaaaacctgtaactgataattgagggtattctctgttaccctataacactccaataccactttgttgtcagtgtaaacaagggcatatcctgaaagcactgaggccttcctatcaaaaatccttaacccagtaacccgcggmtggcccaaatgcattcaatctgtagcagcaactgctttgctaacagaaaaaaagcaaaaaaataagttttagaggaaacctcattgtgagcacacctcactagttcagttcagaactatcctaaatcaaaaaagcaaaaaagtagcttactaactcaaaaatcttaaagtatggggctattctgttagaaaaaaaaaagaaagaaaaaaaggggggtggaatttatgtaaaaagagtattatatggtaaattcttgtcctgaaataaattaactcattgtttaaagaaagaaatatttgtaataagtcagaaagttaaagcatgtcaaaaaattgtctacaaaagtcatgaaagagaaaaatgttataaaaaaatttacacaagaaatgttgtata

SEQ ID NO: 932284 - DNA, 631 bp, Homo sapiens
ttctcttaattaggaaagaggctatatggcagaaaataagtacatttatcatgaattaggactgtgtgaaaataaatgtagatactggtcttgtgtcatttaggctacttgaataaaaagtgaaaaaaatcctgtccaccttcagcaagggaaaagtggcccttcctgtaccagtggtcagtgtaactccttagaactagtaataaccaacctccttaatcctcgctagaaaaaagaggaacytgtagctctagaaattgatggagctggactggatcttcaaataaatatcgtggtttgagaaaaagtttataaacgctctcctgagccagtatttcaaaccttctctgataaacaaaatgtgccagtaccagaaattccaggaaaaacaagaaatttgtttttgcaattagccaagcatgtagcccagtctctcaatgtcacttcacgttatgtatgtggaggaactgtaataggagatcaatggccatgggaagcctgagaattagtacctccagacccagttcctgatgaattcccagcccaaaagaatcaccctgatcacttctaggtcctaaaagcctcaatcattagacaatactgtatagcaagagtggggaagaacttcacc

SEQ ID NO: 932285 - DNA, 631 bp, Homo sapiens
ttctcttaattaggaaagaggctatatggcagaaaataagtacatttatcatgaattaggactgtgtgaaaataaatgtagatactggtcttgtgtcatttaggctacttgaataaaaagtgaaaaaaatcctgtccaccttcagcaagggaaaagtggcccttcctgtaccagtggtcagtgtaactccttagaactagtaataaccaacctccttaatcctcgctagaaaaaagaggaacttgtagctctagaaattgatggagctggactggatcttcaaataaatatcgtggtttgagaaaaagtttataaacgctctcctgagccagtatttcaaaycttctctgataaacaaaatgtgccagtaccagaaattccaggaaaaacaagaaatttgtttttgcaattagccaagcatgtagcccagtctctcaatgtcacttcacgttatgtatgtggaggaactgtaataggagatcaatggccatgggaagcctgagaattagtacctccagacccagttcctgatgaattcccagcccaaaagaatcaccctgatcacttctaggtcctaaaagcctcaatcattagacaatactgtatagcaagagtggggaagaacttcacc

SEQ ID NO: 932286 - DNA, 633 bp, Homo sapiens
ctgccttgggcaaaaactgtataatagcactacaaaaacagttacgtggtagagttcaaaccacacgaagaagaatccattcagtaaatgttgggaacaagccccccaaaatctggccataaactggccccaaatctggccataaacaaaatctctgcagcactgtgacatgttcatgatggccataacgcctacgctggaaggttgtgggtttaccggaatgagggcaaggaacacctggaccgcccagsgtggaaaatcgcataaaggcattcttaagccacatagcgtagcatgagcgatctgtgccttaaggacatgttcctgctgcagttaactagcccaacctattcctttaattcgacgtgagccactgcacctggcccacaaatctttctaaactaaagctgactgcatcttggctggggcgcagtggctcaggcctgtaatcccagcactttgggaggccgaggtgggcagatcacgagatcaggagatcgagacaatcctggctaacatggtgaaaccccatctctactaaaaatacaaaaaattagccaggcgtgatggcgggcgcctgtagtcccagctacttgggaggctgaggcaggagaatggcgtgaacctgggagg

SEQ ID NO: 932287 - DNA, 728 bp, Homo sapiens
caaagctaagaatggcttttgtatttttaaatctttggaaacatatcaaaagaagaataatattttgtgacatgtggaaatgatgcaaaagctcggtgtccacagtaaataaagtggcatcaggacacagccgccctcattcacatatgcattcatgtgttgtctctggctgttttcatgctctgagggcagtgttgatctttctggaaactgccaaactgttttgcaaagtgtgggtatcattacacattctcatctgcagtttaaaagaatttcagtttccccrcatccttgccaacactcagtatggtcagtctttttcattttagccctttttatagagttgtggcatgtcatttggttttaatttgcatttgtctagtgataattatattgagcagcttttcatgtgcctgtttgcctggatatcttctttaggaagtgtctgttcagaccttttaaatgtttcttttactgtgctattattactagatttgagaagttttcaatataatctgcatacaagtccttggttagataaattatttacaaatattttctctctgtgctcaactttttcttttgttaacagtgtctgtgatggttaatattgtcaacttaattggattgaaaaaagtattgatcctgggtgtgtctgtgagggtgttggcaaaggagattaacgtttgagtcagtgggctggggaaggcagacccacccttaatctg

SEQ ID NO: 932288 - DNA, 621 bp, Homo sapiens
aggctgacagttttgagtgaggtccagaacaggagaaggctctgcaacaggtccaggctgctgtgaaagcttctctgccacttaagccatatgacccagcaatccaatgttgcgtgggtgtcagtggcagatagggatgctgtttggagcctttggcaggcccctttagatgaatcatagaagaggcctctaggattttggarcaagattctgccatcttctggagataactactctccttttgagaaacagctcttggtttgttactgagctttggtcgaaactgaacgtttgactatgggtcatcaagtcaccatgagacctgaactacctatcatgaactaggtgctttctgatccatctagccataaagtgggtcatgcacagcagcattccatcatcaagtggaagtggcatatacgtgagcaggctccagtgggtcttgaaggcacaagtaagttacatgaggaagtggctcaaatgcccatggtctccactcctgctaccttgccttctcttccccagcctgcaccgatggcctcatgggtagttccctatgatcagatgacagaaggaggaagagaaccatcacagatggttctgcacaatatgcaggcacca

SEQ ID NO: 932289 - DNA, 739 bp, Homo sapiens
gtaaactaacagagcattccaagctgtgctgtctagctttggcaccagactcaggactggatttcccagcaggggcttggtgtctggagttgtttcccctcacacgccacgccatttgctttctcttgcttcagctatggcttttcttactgtagggtgagcattgggtttagggtcagaagctctggtccaaaactcgagtctccttttccatggctctgtgtctttgagaagccacttgagctctctgacctgcagcgtcctcatttgaaaagtggctagggccaacaggactgtttacagtcaccttcccatctggaacaaattcgtctccagggcagagggcaggggcgggtgaggatgctgcagggacatggggggctgcgccccagggccaagctgtcccacagtcctggagctgggagtagtcatgctgggagttagagagcccagggctgtctccctcatcagcttkctctcggtgtggcctggagataaaaccctcggctcattaatgtcatatgacctgtgtgaacacatggagcactgtgcccggcacagaggccgttccacaagcttcagctcccgtcattgccggggaccttccctgacactggcgatcagtccccagcttctagcagggcttgtctggcagggtcttccttccttagactgttcttccttggggaacaaggtcattaaaggatggctttcttctctcctggggacagtgagggca

SEQ ID NO: 932290 - DNA, 602 bp, Homo sapiens
ctcaatcaatgttgccttctcgaccctgtcattcttttcttctttcatcttttcatttcgccccatctgcacctggcctcatttctgtacatggctttgtatctagtggccgcaagatgcactatgtgtattttcacatggaaatgtccatggccagagtgaggaactgaaaggatgtctttttgaaacggaattaggaagacacctacttttgtttacagaagggaaagatgaatggaacatcatcgaggatcttgcaggagccctctctgatacagggaaagcctgtagaccattttctgttctttctcttggccacagacattcctttcaacatgtgctgaccttctgctcgaaggtctccttgagaacattgtctcagaaatctctgttgcaatatttgaacggatcactcaaccctttcyactcttaaattttctctaccgtctcaccttaggcaatataaagtcctggttcactctcaggaacgagagctgacccagttaagggagaagttacgggaagggagagatgcctcccgctcattgaatgagcatctccaggccctcctcactctggatgagccggacaagtcccagggg

SEQ ID NO: 932291 - DNA, 601 bp, Homo sapiens
acagtttcattacaacctatatgcgcccataggtcctgcctgcggcaatgacatctctcgggtcagtaagggccacttggaacaggaatatcacccctatctggaagaccaggtggaggcttatcaccttcacagtaaggtactcactgtccacgtcaagagccaagccaaggtactgttcctccaatgagtaaacagcactgctgtagggctggcctaagtcaggcagttcaagataacctgaaggagtcgaataacatctatccagtgagtcctgcaagacttcaggctctttctcatccagcagctccctgctgagcctggaaaagtaggaaaaagtaaagaataagccagggggaatcagaaaccacacagccccagctagatttcatggctaacataaggaactgtttaaaaagaaawaggacagatccattaatgaggtaatgaattattgcctttatgttgggatagaccagggccaggtagaaaagaatgaaagagaaagacagggagagggagggagagagagagagagagagagaggagaaagtaagctcagcgagttggccgggtgacacactgatgaaggggtcaaagg

SEQ ID NO: 932292 - DNA, 760 bp, Homo sapiens
tgcctgggtccaatgtgctgagagcgggctcagcttgccacaggcatggctggagactaggaatagagccttgctcactgacccatttcatgtctaggcttccaactgagactacagtttcattacaacctatatgcgcccataggtcctgcctgcggcaatgacatctctcgggtcagtaagggccacttggaacaggaatatcacccctatctggaagaccaggtggaggcttatcaccttcacagtaaggtactcactgtccacgtcaagagccaagccaaggtactgttcctccaatgagtaaacagcactgctgtagggctggcctaagtcaggcagttcaagataacctgaaggagtcgaataacatctatccagtgagtcctgcaagacttcaggctctttctcatccagcagctccctgctgagcctggaaagtaggaaaaagtaaagaataagccagggggaatcagaaaccacacagccccagctagatttcatggctaacataaggaactgtttaaamagaaaaaggacagatccattaatgaggtaatgaattattgcctttatgttgggatagaccagggccaggtagaaaagaatgaaagagaaagacagggagagggagggagagagagagagagagagagagaggagaaagtaagctcagcgagttggccgggtgacacactgatgaaggggttaaaggacactctgagttagtgccctcgggacacacagcgaacagtgatca

SEQ ID NO: 932293 - DNA, 611 bp, Homo sapiens
tagaatggcgatcattaaaaagtcaggaatcaacaagtgctggagaggatgtggagaaataggaacacttttatactgttggtgggtctttaaactagttcaaccattgtggaagacagtgtggcaattcctcaaggatctagaactagaaatactatttgacccagccatccgattactgagtatacacccaaaggattataaatcatgctgttataaagacacatgaacatgtatgtttattgtggcactattcacaatagcaaagayttggaaccaacccaaatgtccatcaatgatagactggattaagaaaatgtggcacatatacaccatggaatactatgcagccataaaaaatgatgagttcatgtcctttgtagggacatggatgaagctggaaaccatcattctcagcaaactatctcaagggcaaaaaaaccaaacaccacatgttctcactcataggtgggaattgaacagtgagaacacttggacacaggaaggggaacatcacacaccggggcctatcgtggggttgggggagggaggagggatagcattaggagatatacctaacgtaaatgactagttaaagggtgcagcacacc

SEQ ID NO: 932294 - DNA, 614 bp, Homo sapiens
gctgctccagccatggctgaaaggagccaacatagagcttgagctgtggcttcgagggtgcaagcctcatccttggcagcttccatatggtgttgagcctgcaggtgcacagagccaagaatttgggtttgggaacctctgcctagtattcacaagatgtatagaaatgcctgaatgcccagacagaagttcgcttcaggagcagacctcacatgcagaatctctgctagggctgtgcagaagggaaatgtggggttgaagctcccacacagagtcctactgggcaccacccactggagttgtgagaagaaggccaccatcctccagaccccagaatggtagatctacctacaacttgcactgtgcacctggaaaagccacagacactcaacaccagcctgtgaaagcagccagaaggtggctgtaccctgcaaagccacagagktggagctgcccaagaccatgggaacccacctcttgcatcagcatgacctggatttcagacatggagtcaaaggagatcattttggagctttaagatttgacagccctgctggattttggacttcagtggggcctgtagcccctttgttttggccaatttctccgatttg

SEQ ID NO: 932295 - DNA, 596 bp, Homo sapiens
acaaacattcaaaccatagcagtcatggttctgacatatacacaagagtaaccctgtgatttcttttctttgtatagaatattataattttttctcttttttataggatattataattgctcaaggcattgattaccaggtcagggtcaccaagtgtattagtttgctagagctgctgtaacaaagtactgcagactgggtggcttaaatatattgcctcaaagttctggaggctaagtccaaggtcaagatgttggcaaggttggttccttctgaaagctgtgaggtagartctgttccaggcctctctggaagcttctggtggtttagctggcaatctttgctgttccttggcttgtagacaacataacatcccaatttctgccttcatcttcacatggtattcctcctatgtgtctctgtgtctaaatttatctttttattttattttttaaagggatggagtctctcactctgtcacccaggctcctaggctggagtgcagtagcaaaatcatagctcactgcagtcttgaactcctgggctcaagagatcctcccgacccagcttcctaagtagctgggactacaggtgca

SEQ ID NO: 932296 - DNA, 579 bp, Homo sapiens
ttataatatcatataaagattctataggatatttactttcctcatatgtatcataacatactacaaaggaatataaccagtttagagggaagaattttccgtaggaaaaaaaagagctagaaatctgacatttcatgcagtccctttcatatcactccttcccattacctctgttattcgtcactttcctgtaacttggatgcagtcatcctctttttacgtttaaagtccagtctattagaagacaatagttgctgaagtttatttggaaaaaaggaagaacgtgctcacaacaggagagcaaaagtcaaattgtacaattaattattttgccaaatacttgaatgggttatcatttcaaattggtgacatgtcaaaaatcttgcattgagaaccastataccatcttttaattcattcagaatggtgggttaatatacctccacactgatgagctttttttttttttttttttttttttttgaggcaaaatctttctctgtcacccaggccaaagtgcaggggcatgaccacgggtcactctatccaccacctcccagggtcaagcaatttttttta

SEQ ID NO: 932297 - DNA, 650 bp, Homo sapiens
gaagcagagaccacggcgtatatccaaggggcctgagagcagaggaaacctgtgccttacatctcagacagagaacggaggtgataacaggatctcaaagagaaataaacgcatgaagcatccaggcgatgcagtcagggagcctcgcagagattcctgtgcctgagcataatttctaagaagcggaattacttctatggctgcaagagaagcaaagagatggcagagtgtgccactggacaagcaggggtctcgcggataggaacgaaggcgacccccgcaatatcaggaggattaggaaaagacagagagcatgaaaactagatgtcttagtggagaagagtgtaacaycagaagctccctgctgtgctcagagcatcatggaagagctggggtaagggagggagggacccaaactgcctgaagagaagattctaggaatgaggcttaaaataaaacaggccgggtgcggtggctcacacctgtaatcccagcactttggaaggccgcagcgggtggatcacaagctcaggagtcgagaccagcccggccaacacactgaaaccctgtctccagtaaaaacaaacaaacaaacaaacaaacaaacaaaatacaaaaaattagccagatgtgatggcgggggcctgtaa

SEQ ID NO: 932298 - DNA, 785 bp, Homo sapiens
gaatgtaaaatggtgcagccactgtggagaacagtttggctgttcctcaaaaagttaaacatggaattaccatgtgtattagtccgttttcacactgctgataaagacatacctgagactgggaagaaaaagaggtttaattggacttacagttccacatggytggggaggcctcagaattatggtgggaggcaaaaggcacttcttgcgtggcaaggggcaagagaaaaatgaggaagaagcaaaagcggaaacccctgataaacccgtcagatcttgtgagacttattcaccaccacgagaatagcatgggaaagaccggcccccatgattcaattacctccctctggtgccctcccacaatacgtgggaattctgggagatacaattcaaattgagattttggtggggacaccgccaaaccatatcattccacccttggcccctccaaatcttatgtcctcacatttcaaaaccaatcataccttcccaacagtcccccaaagtcttatttcagcattaacccgaaagtccacagcccaaagtctcatctgagacaaggcaagtcccttccgcctatgagcctgtaaaatcagaagcaagctagttacttcctagatacaatgggggtacaggtattgggtaaatacagccattccaaatgggagaaatgggccaaaacaaaggggttacagggcccatgcaagtctgaaatccagcagggcagtcacattttaaagctccaaaatgatctcctttgactccaggtctcgcatccaggtcac

SEQ ID NO: 932299 - DNA, 669 bp, Homo sapiens
ttttttgaacaggaactgtgtcttttcaggagggaagtctactatgaaggccacatgaagataaaaaagctgtttatgttgggcagggtggctcatgcttgtaatctcagtgctttgggaggctgaggcaggaggatcgcttgaactcagcaggtgggggcagcagtgaggtatgactgtacctctgcactccagaccaggcaacagaaggggaccccacagcttttttaaaaaaagctgcttggagaatggatggaaaaacatgaagacaccatagaaattggctccaagtccctagtcctctasacgtcatcctctggtgtgaaggcctctgccctcctgactgctggagaccggtgtccccttctctccacatcccagccgtggctgccctctcagaccctccattctgatgatgggcaacatgaaaatgttaaggacccttggcaaactctagggtttctttatgattagtaatcctttctgatgatctgaaaatgtattagctcacttctcccaatgctcaacagcatgaaagcctgtgttctctcctgccccgaacaacaggatctcctttcccccccttaacacccctccatcatcattcttcccagtgtgctgatgggcaatgagcactcttgatagagcggcccccagggagaaatgttc

SEQ ID NO: 932300 - DNA, 597 bp, Homo sapiens
tgatgctgctataaacaaacctactgtgctgccggtcatgcacaaaattatagcatatacaattatgtacagtatgaaataattgataatgatcataaatgactgctactaatttatgtatttactctactatgctgtttattgttattttagactgtactccttctatgtatacagataaattaactataaaacartatcaggcaggtccttcaggaggtattctagaagaaagaattattttaggaggtgacagctccatgttttttgttgccccctgaagacattccagtctttcagaccttccagaggaagaagatatggaggtgaaggaagacagtgatatcaatgaccctgaaccttgtagttctagactaatgtgtgtgtttgtgtctgatatggtttggctctgtaacccacccaaatctcatctcgatttgtaatcatgtgtcaagggagggacccataatccccacatgttgagggagagaggtgcttggatcatgggaaagatttctcccattctgttcacatgatagtgagttctcatgagatctgatggttatataactgttacataactgtttgacagttcct

SEQ ID NO: 932301 - DNA, 657 bp, Homo sapiens
atccaatatggaagtcctagccagagcaattagggaagaaaaaagaaataaaaagaatccaaactggaaaataagaaattaaattgtcacggtttgcccacaatgtgaacttatatatagaaaaccttaaagatgccaccaaaaaatgatcagaacaaataaaagaattcagtaaattttcagaatacaaaaatcagtagcatttccatacactaacaacaaattatcctataaagaaatcaagaaaacactcccatttacaatagctacaaaaaatacttgataataaatgttatcaaggagatgaaagatttctatactgatatctataaaatgctgatgaaggaaattggaaaagacacaaataaatggaaagatagcttgtgttcatggattgaaaaaatcatatttttaaaatgtccacwctacccaaagtgatctacagattcaacgaaaaccctatcaaaattcccatgtcatttttcacagaaaaatgactgtatacctagaaaaccctaaagactcatccaaaaagcttctagatttgataaatgaattccattaagtttcaggatacaaaaccaatgtacacaaattagtactgctatacagcaagagtgaccaagctgagaatcaaatcaaaacctcaatccctcc

SEQ ID NO: 932302 - DNA, 629 bp, Homo sapiens
gaaactagtattctaaacaagataaagaatatttccgtcactccagaaaggtttcttgtgatctttgccatccacccccaccatctaacatcataatgagctttcatcttttaattcctaatagcatagattagttttaccttttcttggattttataaaaacagaagcatatgacatgtgttattttgtatctggcttttaaactcagcattacgatttagagattcatgcgtattgttgcattttctgtagttgtttctttttactgcggactaatgtttcattatatacttaaccctaagtttgtttattatcattttatccttttatggacatttgggttgtttcaaatcttaggccaccrataaggttttcattagcatgcgaatttaaatcatttcatagacatgtcttagctaaacacgaatgggattatcaggtcataaggtagctgtttgtttacatctacctgaaattacctgaagtttctattaagtttttcagagtggttagccattgtaaattcccaacatcaatgtatgagagttcaagttactccaacaattaattcaccaacatttggtgttgtgttttacttatgccattatattttctgcatttctaatgc

SEQ ID NO: 932303 - DNA, 419 bp, Homo sapiens
  misc_feature 291: n = A,T,C or G
ctgtgtcaccattggctcctgggtcctggctccaggtggggagaagcagtttctctttctggggcaacaaataaaatccctccgggcacaggagtgctcattgctggttggttatgccagtctgtctctatttttagaaagaaccacaagaaggaggaaaagaatctagagaaataagtacagttggttcctccctgaggcagaagctgggttctgtgggwtgaagcacagatgcaaagccattgtcctgccacccagcagtgcagtcggagatggatggcatgaatctanaataccatgggaatgggtccttgccctgggccgtaaacatttgagactcagagccaggagataggatgaaaaaattgcagtgatgagacccacaaagggcagcagccatctcttaagggatcaacttg

SEQ ID NO: 932304 - DNA, 759 bp, Homo sapiens
actgtgggactgggatgactggcacagtcctaacaggtcctcaagacacaaaagctgggcagaagctgggtggggctaccgtgcaatgggactcgttcctcacccccaagaactttgggggaatgggtgagttgaactggcaagaagcaacctactcttgccacaagcctctggaatcccaccgggaggagacccctcaaccactacagacacagagttggcaggggaagtgcttagaggagtggtaggagcagcatggtagccgatatggagcccagagggtttgttgcaggaacatctatagcagagcacggccagggatacccatctctccagacttgacttgcctccataggagactttagcyctaggggaactgtcagatatgaattctgcagggcagtcttcccatcagatggggcagatccaaccttagtaccccctggtctgctgacctctcccagtgctccagcctggtttttttctgcttgcagtacagactcaggttccctggggacccgcatcttagcttctgcaatggcagaccatatctaattggtggagagctccagcggggtggcccctagggccatgcaccaacctgcctgctccctccctctgctgcagcttcttccaagcccatggccaaccacccctgccccctgacatcatttggctggcttgtatgtgtgcaggtggattttcccttcccttcaccaccagcttgtgtgagcacgtgtacgctgccctgcctctgct

SEQ ID NO: 932305 - DNA, 681 bp, Homo sapiens
tgtgggactgggatgactggcacagtcctaacaggtcctcaagacacaaaagctgggcagaagctgggtggggctaccgtgcaatgggactcgttcctcacccccaagaactttgggggaatgggtgagttgaactggcaagaagcaacctactcttgccacaagcctctggaatcccaccgggaggagacccctcaaccactacagacacagagttggcaggggaagtgcttagaggagtggtaggagcagcatggtagccgatatggagcccagagggtttgttgcaggaacatctatagcagagcacggccagggatacccatctctccagacttgacttgcctccataggagactttagccctaggggaactgtcagatatgaattctgcagggcagtcttcccatcagatggggcagatccaaccttagtaccccctggtctgctgacctctcccagtgctccagcctggtttttttctgcttgmagtacagactcaggttccctggggacccgcatcttagcttctgcaatggcagaccatatctaattggtggagagctccagcggggtggcccctagggccatgcaccaacctgcctgctccctccctctgctgcagcttcttccaagcccatggccaaccacccctgccccctgacatcatttggctggctt

SEQ ID NO: 932306 - DNA, 900 bp, Homo sapiens
agacacagagttggcaggggaagtgcttagaggagtggtaggagcagcatggtagccgatatggagcccagagggtttgttgcaggaacatctatagcagagcacggccagggatacccatctctccagacttgacttgcctccataggagactttagccctaggggaactgtcagatatgaattctgcagggcagtcttcccatcagatggggcagatccaaccttagtaccccctggtctgctgacctctcccagtgctccagcctggtttttttctgcttgcagtacagactcaggttccctggggacccgcatcttagcttctgcaatggcagaccatatctaattggtggagagctccagcggggtggcccctagggccatgcaccaacctgcctgctccctccctctgctgcagcttcttccaagcccatggccaaccacccctgccccctgacatcatttggctggcttgtatgtgtgcaggtggattttcccttcccttcaccaccagcttgtgtgagcacgtgtacgctgccctgcctctgctgccagcaggagtgcactctgctccccttcctcggccatactaccattgcagtcagagctgtagtgggcacagagcccaccagtcctgcctctgtcagtgacctgcccctgtgccaacactgccaccagaatgaaactaggcactgaaaacaatgaaccctcccctgccctgagtagccacagagggtgcacacacacctgaacccaccagtgycctgcccccatactaacaccaccatcagtgcaccaatgcacacagtcaccaatgggggcctgctgaccccccaagttatgctgactctacccctgctgtcaatgccttcatggaggcaggcatctcagcacctgc

SEQ ID NO: 932307 - DNA, 567 bp, Homo sapiens
cagggcaccaagtcccaaggctgcacactgcagggggaccttgggcctggcccacaaaaccattttttcctcctaggcttccaggcctgtgatgggaggggctgccgtgaagacctctgacatgcttctgaattttccccattgactttgtgattaccatttgactcccagatacttaggcaaatttctgctgctggcttgaatttctctccagaaaatgggtttttctttcctactgcatcatcaggctgcaagttttccaaatttttatattctgcttccttttgaacgttttgctacttagaaatttcttccaccagatatcctgaattatctctctcaagttcaaagttccacaagtctctagggcaggggcaaaatgttgmcagtctttttgcatggcaagactgatctttactgctgttcccaacaagttcctcatctccatctgacagcaccgcagcctggactttgttatccatatcactatcagaatttaggtcaaagccactcaacaagtgtctaggaagttccaaactttcccaatcttcctgtcttctgagccct

SEQ ID NO: 932308 - DNA, 724 bp, Homo sapiens
tgaagaaagtttaaaaaagatgcataaacaaagtggaaatactaatagaaaacctaaaaaaatatgaatagttcatcccttgtttagcatataattatgaagtaacaataaatatccttggttaagcagctcaagccactgctctgccaatgaagtagccattcttttattacttactttcttaataaacttgctatcgctttatgaacttgccctaaattcttttttgtataaaatccaaaaacctcttggggtctggattgggacccttttccagtaacatctttctggtgaatccagaagggactgtactgaagagacccctgacccaaggaaatagactgcagcaccagttggctgactttgggaaagtagtggggtacccaagtaaagaatgggattgggttagaggcccaacttaggggagtgagagtctctcctaagaaagagtaggttaaaggaccctcttaataaaaaggctargatgcttgagcgaacttgggtttgaggtccaatttaggaaggttagagtccttctaagattttgaggggttggactatcctctcagtaaatgtcctcttggccaagaatggatttggcattatggcatgttaaccactattctctttggattaatctgccttgtactctttgctgatggctgtaggtgacaggagtaggcaggtacaggatcactgtgatagcagcagtggcccttctgga

SEQ ID NO: 932309 - DNA, 644 bp, Homo sapiens
ttgagatgcacctttcaccttctgccacgattgtgaggcctcccagccacatggaactataagtccattaaacttattttgtgagttgcccagtctcagtatgtctctataagcagtgtgaaaacaaactaatagagtaaattggtatcagaagtgggtgctgctgaaaagatacccaaaaatgtggaagtgactttgtaactgggtaacaggcagaggttggatccattaggagggctcagaagaaaaccggaagatgtgggaaagtttggaacttcctagagacttgttgaatggctttaaccaaaatactgataatgatatggacaatgaaatccaggctgaggtggcctcagatggagatgaggaacttgttggaaactggagtaaagatgactcttgttatgttttggtgaagagactggtggcattttgcccctgccctagagatctgyggaagtttgaacttgagagagatcatttagggtatctggcagaagatatttctaagcagcacaaattcaagaggtgacttgggtgctgctaaaggcattcagttttaaaagagaaacacagcataaaagtttggaaagtttgcagcctgacagtgcgatagaaagaaaatcccattttctgaggagaaa

SEQ ID NO: 932310 - DNA, 677 bp, Homo sapiens
aactgatgacattccaccacaaaagaagtgaaaatggcctgttcctgccttaactgatgacattgtcttgtgaaattccttctcctggctcatcctggctcaaaagctcccctattgagcaccttgtgacccccactctgcccgccagagaacaaccccctttgactgtaattttcctttatctacccaaatactataaaagggccccacccttatctcccttcgctgactctcttttcggactcagcccacctgcacccaggtgaaataaacagccttgttgctcacacaaagcctgtttggtggtctcttcacacggacgcrcatgaaaattagtacttaggtttttgggaatcaacagttgtgcatgaattattgactgcatggggggtaggtgcccacattgttcaagggtcaactgtatatactaagccttgtgttaaatgttttatattacattttatatcaacaatgctgtgagctgcgctctattgttttgcgttttatacattttgcataaagtcaataagtgacttgcccaaagatcacatatatgtagttaagtggcagaggtagtatccattccttctctgtcagtcagggtcaaccatagaagtagagccaagagttggcaggagtttcttcttcccttgagaaaaactcagttctgcttttaa

SEQ ID NO: 932311 - DNA, 778 bp, Homo sapiens
caaggtgaagtgctttactgagcgacagtagagctctcaggagacccgaaatgggtagctcctctctgcaggcaggttgtcctgtaatccgtgcagccatcagtggagaggggacccagagtgggtagctcctattctcatgcaggtcatcccaatgaatgtacagctattaatagagaggagacccatagtgggtagttctctccacaggtacgtcatcccattgtctgcccaagtctggctgagtctgaggtttttatgggcttcagatggaaggaagtgcatgmtgattagtccatgggtggccatgggcaggctagaaaaagcaccataagttctcactctgatccactgaagtgacagcctggcccccagccttcaggccatccctggcttgaaggtgggatttcacccgggacccacctctttctgcccaggagcctgtatgtctcctgatggcattcatggggcccaggctgctcatgctgaggggtgcctgaagtcctacaccaagctgccctcagcaccccctcagcctccctcccatgcctgtcagtggccaaagtctggaggggcctgaggcagcaggaggctggcatgtcagtactaccctgagtatgcacacccagccaagtcatgacagcacctgagctcagccacaattttgctctgaaatcaaagtgggcactgggaatggggagaggccaggcagtgggagcaggcacttctgagcctgctgaggcaagggagcttcctgggcccctgagagcacaaggat

SEQ ID NO: 932312 - DNA, 778 bp, Homo sapiens
caaggtgaagtgctttactgagcgacagtagagctctcaggagacccgaaatgggtagctcctctctgcaggcaggttgtcctgtaatccgtgcagccatcagtggagaggggacccagagtgggtagctcctattctcatgcaggtcatcccaatgaatgtacagctattaatagagaggagacccatagtgggtagttctctccacaggtacgtcatcccattgtctgcccaagtctggctgagtctgaggtttttatgggcttcagatggaaggaagtgcatgctgattagtccatgggtggccatgggcaggctagaaaaagcaccataagttctcactctgatccactgaagtgacagcctggcccccagccttcaggccatccctggcttgaaggtgggatttcacccgggacccacctctttctgcccaggagcctgtatgtctcctgatggcattcatggggcccaggctgctcatgctgaggggtgcctgaagtcctacaccaagctgccctcagcaccccctcagcctccctcccatgcctgtcrgtggccaaagtctggaggggcctgaggcagcaggaggctggcatgtcagtactaccctgagtatgcacacccagccaagtcatgacagcacctgagctcagccacaattttgctctgaaatcaaagtgggcactgggaatggggagaggccaggcagtgggagcaggcacttctgagcctgctgaggcaagggagcttcctgggcccctgagagcacaaggat

SEQ ID NO: 932313 - DNA, 784 bp, Homo sapiens
acgtgcctttcttgtgatgcccgaaagtcccacacccttattagggaaggacgtattagacaaagctggggccattatctacatgaatatggagaacaaattacccatttgttggcccctacttgaaaaaggaatcaactttgaagtctgggccttaaaaggacaatttggaagggcaaagaatgcccatccactccaaatcaggctaaaagaccccaccacttttccttatcaaaggcaatatcccttaaggcctgaaactctcaaaggattacagaatattgttaaatatttaaaagctcaaggtttactaaaaaaaaatgtagcagtccttacaacaccccaatcctaggaatacaaaaaacaaatgttcagtggagactaatgcaagacctcaggtttcacctgtccaacttcaggcatttttttcatctgtgataacacagcctatccatgcctaaatggcactctgaaagaacaatgctttctttcctttctagcacctcccatgtccatatatactgaagaagagttgcaaagtctccttataccccaatctcgccacatgtgagcccttattgtcccttttactgtaggagccggaatactygacgggcttgggattggaattggaggcacaacttcctccacccagttctattataaattatcatgagaattaaatgatgacatggaatcagttgccgactccctagtgaccctacaaagccagcttaattctctagctacagtagtccttcaaaaccaaagacccctagaatta

SEQ ID NO: 932314 - DNA, 743 bp, Homo sapiens
gcccctcactgcccagtaccggtggggccggccggctgctccaagtgcagcgtctgcggagcccacgcccacccgaaactcacgctggcccacaagcaccacaggggaagcctgcgcctctccctccacacctcctcgcaagctgagggagccggctccagccttggccagcccagaaaggggctcccacagtgcaggggtgggctgaggggctcctcaagtgccgccaaagtgggagcccaggcagaggaggtgccgagagcaagccagggctgtgaggactgccagcaygctctcacctgtcaatttccttaagattcatttttatttttattgtcctgtggtctgtgactgtggttggtataatttcagattttttgaatttgctgaggattgttttatgtctgattatatggtcaatttaaggtatatgccatgtgcaaataaaaggtaacgtatattcttctggttttgggtggagcattctgtatgtatctattaggttcttttggtcaagtattgagttcaggtcctaaatacctttattagttttctgcctcagtgacctttctgatactgccagtgaagcactgaagtctccaatcattattgtgtgcctgcctaagtctctttgtaagtgtctaagaacttgctttatgaatatggtgctcccgtttggggtgcatacatattaaagattatttaggtctccttgtggaattgcatcttttaccattatgcaa

SEQ ID NO: 932315 - DNA, 692 bp, Homo sapiens
aatttaaggtatatgccatgtgcaaataaaaggtaacgtatattcttctggttttgggtggagcattctgtatgtatckattaggttcttttggtcaagtattgagttcaggtcctaaatacctttattagttttctgcctcagtgacctttctgatactgccagtgaagcactgaagtctccaatcattattgtgtgcctgcctaagtctctttgtaagtgtctaagaacttgctttatgaatatggtgctcccgtttggggtgcatacatattaaagattatttaggtctccttgtggaattgcatcttttaccattatgcaatgcccttctccatcttttttaatctttgctggtttaaagtccactttgtcttaaattagaacagcaaccccttcttttcttctgttttctgtttgcttgctagatttttctccacccctttactttgagcctcttcgtgtcactgcatgggagatgggtctcttgaagacagcataccattcagtcatgcttcattatccaatttgccactctgccttttaattgggggacttccacctatttatattcaaagttaatgttgatatgtgcaaatgagttcctgtcatcatgttattagcaggttattatgcagacttgtttggttggttgctttatagtgtcactggtctatgtacgtaagtgtgtt

SEQ ID NO: 932316 - DNA, 692 bp, Homo sapiens
aatttaaggtatatgccatgtgcaaataaaaggtaacgtatattcttctggttttgggtggagcattctgtatgtatctattaggttcttttggtcaagtattgagttcaggtcctaaatacctttattagttttctgcctcagtgacctttctgatactgccagtgaagcactgaagtctccaatcattattgtgtgcctgcctaagtctctttgtaagtgtctaagaacttgctttatgaatatggtgctcccgtttggggtgcatacatattaaagattatttaggtctccttgtggaattgcatcttttaccattatgcaatgcccttctccatcttttttaatctttgctggtttaaagtccactttgtcttaaattagaacagcaaccccttcttttcttctgttttctgtttgctygctagatttttctccacccctttactttgagcctcttcgtgtcactgcatgggagatgggtctcttgaagacagcataccattcagtcatgcttcattatccaatttgccactctgccttttaattgggggacttccacctatttatattcaaagttaatgttgatatgtgcaaatgagttcctgtcatcatgttattagcaggttattatgcagacttgtttggttggttgctttatagtgtcactggtctatgtacgtaagtgtgtt

SEQ ID NO: 932317 - DNA, 678 bp, Homo sapiens
aatttaaggtatatgccatgtgcaaataaaaggtaacgtatattcttctggttttgggtggagcattctgtatgtatctattaggttcttttggtcaagtattgagttcaggtcctaaatacctttattagttttctgcctcagtgacctttctgatactgccagtgaagcactgaagtctccaatcattattgtgtgcctgcctaagtctctttgtaagtgtctaagaacttgctttatgaatatggtgctcccgtttggggtgcatacatattaaagattatttaggtctccttgtggaattgcatcttttaccattatgcaatgcccttctccatcttttttaatctttgctggtttaaagtccactttgtcttaaattagaacagcaaccccttcttttcttctgttttctgtttgcttgctagatttttctccacccctttactttgagcctcttcgtgtcactgcatgggagatgggtctcttgaagacagcataccattcrgtcatgcttcattatccaatttgccactctgccttttaattgggggacttccacctatttatattcaaagttaatgttgatatgtgcaaatgagttcctgtcatcatgttattagcaggttattatgcagacttgtttggttggttgctttatagtgtcactggtctatg

SEQ ID NO: 932318 - DNA, 605 bp, Homo sapiens
gtggctgggactcagggtgccatgttctgaggctgcatagagcagcgggaccctgtacctagctcatgaaaccattattcccttctaggcctccaggtctatgatgggaggggctattgtgaaaatttctgaaatgccctgcagacatttcccccactatcttagcaattaacattcacctcctctttacttatgcaaatttcttcagccagaagcttgaatggmttccccccaaaatgggtttttcttttctacaacatggttagcctataaattttccaaacttttaggctctgcttcccttttaaacacaaatttcaatttcagatcacctctttgtgaattcatatgactgtatgcttccagaaacagccaggtcaaatcttgaatgctttgctgcttagaaatttcttctgccagatatcctaaatcatctttcccaagttcaaagttccacagatccctagggcaggggtaaaatgccacccatgtctttgctaaagcatagcaagagtgacctttgctccagttaccagtaagttcctcatctccattcaagatcacctcagcctggacttcattgtccatatcactatcagcatttt

SEQ ID NO: 932319 - DNA, 752 bp, Homo sapiens
tattgcaggaaaaggagctacatgccagcaatacaatggtgaacataaatagacctgacactgatagcttaggataagtctattcttgcatagccctgcagacacatataaaacacacaaaaatggatgcacacacttggttctcaccgtccaagttcccatacaaacaactccaaggccaaatctcccagaaaatatcagattaagtcactaatctagactgtagctacgaaatcataggtaaaagccaaaggaagagtctgaagaaatgatcattatctaaggacacttcctccttccaagtcacgttaacatgtgacggctctgtgctaaaaggctgtgaggctgggccgggcgcagtggctcacgcctgtaatcccagctctttgggaggccgaggcgggcggatcacgaggtcaggagatcgagaccatcctggctaacacggtgaaaccccgtgtctactaaaaatacaaaaaattagctgggcgaggtggcgggcgcctgtagtcccagctactcgggaggctggggcaggagaatggygtgaactcgggaggcggagcttgcagtgagctgagatcgcgccactgcactccagcctgggcaacagagcgagactccatctcaaaaaaaaataaataaataaaaataaaaaaaaaaagctgtgaggccttgcacaagtcacaacatctgatactcagtttccttatgtgttaaatggggataatagaacctagatgagtcgatat

SEQ ID NO: 932320 - DNA, 633 bp, Homo sapiens
gattgggcaggtgcaggtccacagtggtactcacagtaggacaggtcaggtgtgtgtttcaggtgggctaatcaccatagatgggagcgtgcatctccaatgtccgcttggattgtcagctttctttggaataattaagagaaggtaaaggaagaggaaaaggastaaagaaatcatctttgtacattttaatctgagctgttttcgagcagtgtgataaggtaggttgtcaaaatgtcagcttctccttatctctaattgacttaagtagaggcagctctaatccttgtgtgcacaggagcctggaatggagagatgaggccaattgattcctactttttaattaacaggtgagctgcttaaaaacaatagtatattgggggcaggttgggaacaggaaggaatgtgagggagggtcatctccaccacagtggcatttagagaaatattaacaagtgtcagcatttgatttgaatcaggggctggagcagagggaaaagttatgtcttatgcatggatgtggtctcaaaagactgctgccaaagtgacaaaaaaaatttatacttctctccatacacaaatggaaagacccttcgatttttgaagtatcatgagggagacctcgaggtattc

SEQ ID NO: 932321 - DNA, 633 bp, Homo sapiens
gattgggcaggtgcaggtccacagtggtactcacagtaggacaggtcaggtgtgtgtttcaggtgggctaatcaccatagatgggagcgtgcatctccaatgtccgcttggattgtcagctttctttggaataattaagagaaggtaaaggaagaggaaaaggactaaagaaatcatctttgtacattttaatctgagctgttttcgagcagtgtgataaggtaggttgtcraaatgtcagcttctccttatctctaattgacttaagtagaggcagctctaatccttgtgtgcacaggagcctggaatggagagatgaggccaattgattcctactttttaattaacaggtgagctgcttaaaaacaatagtatattgggggcaggttgggaacaggaaggaatgtgagggagggtcatctccaccacagtggcatttagagaaatattaacaagtgtcagcatttgatttgaatcaggggctggagcagagggaaaagttatgtcttatgcatggatgtggtctcaaaagactgctgccaaagtgacaaaaaaaatttatacttctctccatacacaaatggaaagacccttcgatttttgaagtatcatgagggagacctcgaggtattc

SEQ ID NO: 932322 - DNA, 503 bp, Homo sapiens
acaaggtgagacagcaagcatgttcacagcaccttcactaggagtagatttcatctcgaggaaccactttctttgctcatccataagaagcaactcctcatctgtttaatttttttaatgagattgcagcaattcagtcacatcatcagcctccacttgtaattctacttctcttgttatttccaccacatctgcaattacttcctccaatgaagttttaaacccgtcagtgtcattcatgagggktgaaataaatttcttccaaactcctggtaatgttgataatgcatatagagatacacagttactatatatgtttccagttatccagaagacctagctaagataaccgatgaaggtggctacagtaagcaacaaattttcagtgttgacaaaacagcattctattttaaaaagttgccatccaagactttcattgttgtagagatgacagtgcctggcttaaaagcttcaaaggacaggctgattttcttggcaggaga

SEQ ID NO: 932323 - DNA, 619 bp, Homo sapiens
aaggaattgcacgataaaatcagagaaacccagctttattgctgtgaagacacatttacattttagatataccccaaatatttacagtttggttgatggaatgctgcagcatggagacagttgtagagattaccatgttaatcagataagcatttcaccttttttaaaatttaatgccagtttgtacacagcagaggttacttacaaaaatatgtggattagatgagctaaaagcagaacccgtctgtatgctattattttcattttttcttttaaaaatactctcctggtgttaggaaagagatgcatgttgctatgttattaattggtttcaaaggcttgctagcaaatactatatacagtgtaaggttttaaaaattataaatggattgcctcccgtgatattattgtgcttagatgtagtaataataattttgaaaatgctagcctagaatgttagagtcmgaaagaatcttcaagcatccagatttttcttttgacacattagaagacaaagccttcgagttacttgcagcttggcatgacttttagctgagcccagactggagtccaagcctcactgaagctcgtgacacacctcttgcacacagccttactt

SEQ ID NO: 932324 - DNA, 596 bp, Homo sapiens
cggtgctgcctctgaggacaaggctggctccagcgggctcagtgctgactaccaggatgcaggaggcctgcccgctcgccatagctgcgaagccggctgattacatttcaggcttttgtttattccccatcccaacccrctccttcatccacacagactgctcggacctggactcaggccaggctggacaccaggcagacggagggacgtccccagcagccagctccctctgtccgagcagacggagggacgtccccagcagccagctccctgtgtccaaacagacggagggacgtccctagcagccagctccctctgtctgagcagatggagggacgtccccagcagccggctccctctgtcctagccctgggaaggtggggtcctccagagctcccctccgcagccccagccactcccatgctccagctcctgccccctcccggggctctatctccccacagagaaagggggtccctccgctgggcaggcacagcctccttccaggccttgttacgggcacctgcacacgtgcctgtgccacctaagctgtgcccgcgccacctaagctctgcccgccacctcggcagatgcca

SEQ ID NO: 932325 - DNA, 568 bp, Homo sapiens
atttgataaccctgaaacacaatttttcccatgaaaatctaatttattggccaggtgcggtggctcacgcctgtaatcccagcactttgggaggccgaggtgggcggatcatgaggtcaggagatcaagaccatcctggctaatacggtgaaaccccgtctctactaaaaatacaaaaaattagcagggcgtggtggcgggcgcctgtagtcccagctactcgggaggctgaggcaggagaatggcatgaacccgggaggcagagcttggagtgagccgagatcactttactgcactccagcctgggcgacagagcgagactctgtctcaaaaaaaamaaaaaaaaaagtctattttataatttccttaagatagccatataatgttagagtaaaacaaatggtcatgttcatcattatattctaaaaaaaaattctatatttgaagcatttgttactaacagaatgtctctcttgatatggaaactcatgatgaaaagaaaatagtaaataaattgttccagttttacactccccagttttcagcaatttacctaaaaactgaagtg

SEQ ID NO: 932326 - DNA, 573 bp, Homo sapiens
ttaagactgtctgggttaagacacaggttgtggagaccaaggtttcatcgtgcaggtgaagtctccaggcagcaggcttctgagagaagagactgtaaatgtttcttctcagagttaagaagtctgttctagcagaaattccaaaagggaggagggtgtcatgaggcacgtctgacctcactctccccatcacggtcagattagtttttcaggttagctttggaacacccttgccaacaggaggggtcaattcagatgatcgcaagacttagawttttatttttggtttacaatacacacacacacatacacacacacacacccctcatggttgccacctcgtatgttgcagaaaacataaaatgagatgggtcacagatctaaatgtgacatgtaaaacaataacattttcagcagaaaacacaagaaaaataccttcacattcttcagagaaagcaagattcttaaacataacaaaaaagttttctttccatgaaataagtaattgataaaggggacttcattaaaaatatgaacaacgtttcttcaaaagacagcatggagagtgaaaag

SEQ ID NO: 932327 - DNA, 573 bp, Homo sapiens
ttaagactgtctgggttaagacacaggttgtggagaccaaggtttcatcgtgcaggtgaagtctccaggcagcaggcttctgagagaagagactgtaaatgtttcttctcagagttaagaagtctgttctagcagaaattccaaaagggaggagggtgtcatgaggcacgtctgacctcactctccccatcacggtcagattagtttttcaggttagctttggaacacccttgccaacaggaggggtcaattcagatgatcgcaagacttagaattttatttttggtttacaatacacacacacacatacayacacacacacccctcatggttgccacctcgtatgttgcagaaaacataaaatgagatgggtcacagatctaaatgtgacatgtaaaacaataacattttcagcagaaaacacaagaaaaataccttcacattcttcagagaaagcaagattcttaaacataacaaaaaagttttctttccatgaaataagtaattgataaaggggacttcattaaaaatatgaacaacgtttcttcaaaagacagcatggagagtgaaaag

SEQ ID NO: 932328 - DNA, 580 bp, Homo sapiens
cttaagactgtctgggttaagacacaggttgtggagaccaaggtttcatcgtgcaggtgaagtctccaggcagcaggcttctgagagaagagactgtaaatgtttcttctcagagttaagaagtctgttctagcagaaattccaaaagggaggagggtgtcatgaggcacgtctgacctcactctccccatcacggtcagattagtttttcaggttagctttggaacacccttgccaacaggaggggtcaattcagatgatcgcaagacttagaattttatttttggtttacaatacacacacacacatacacacacacacacccctcatggttgccacctcrtatgttgcagaaaacataaaatgagatgggtcacagatctaaatgtgacatgtaaaacaataacattttcagcagaaaacacaagaaaaataccttcacattcttcagagaaagcaagattcttaaacataacaaaaaagttttctttccatgaaataagtaattgataaaggggacttcattaaaaatatgaacaacgtttcttcaaaagacagcatggagagtgaaaaggccaat

SEQ ID NO: 932329 - DNA, 629 bp, Homo sapiens
ctgcagtgagccatgattgcaccactgagctccagcctgggcaacagagtgagagtctgtctctaaaaattaaaaaaaaaaaattgtgaggaagaagaggagggaagaagaggtctacaaagagaaatacttcccagaatagggaagagaatgtaacttcaggaaagtcataacagaggcatagtggtacccagggaacaattaaaagagctccttctacattaaataagaaattggaggtgaaaagtttttgcatattaattttcaaatttcaacatctattttaaagtatagattcactctctgatcacattctgtagatttttcatcgcattgggtcataatggtgtatgtataatcattaaatttggatcatggataataatayttagggtaattttttatgtttcatttttattggctttcactgcagtggaagtataaatatgattcttatggaaataaagaaaacttactctgtttgttctaaccaaagggattaagggaatatatgaggtctcatttgagttggacctcaacctcctgaattgaaaaaataaagcaaaacaaacttattattaaggaaaattacaaataaacataaatgtgaagagaatagtaaaataatt

SEQ ID NO: 932330 - DNA, 579 bp, Homo sapiens
ccagtgttagggggaggagcggctccaggacagaccatggacaccaaaatccaggaatgctcaagtccctcataagaaatagcatagttgtaatcccagcactttgggaggccgaggcgggtggatcatgaggtcaggagatcgagaccatcctggctaacaaggtgaaaccccgtctctactaaaaatacaaaaaattagccgggcgyggtggcgggcgcctgtagtcccagctactcgggaggctgaggcaggagaatggcgtgaacccgggaagcggagcttgcagtgagccgagattgcgccactgcagtccgcagtccggcctgggcgacagagcgagactccgtctcaaaaaaagaaaaaaagaaaaaaaaaaaaaaaaaaaaagaaatagcatagtattagcatgtaacttgtgaatgcctgtatactttaaatcatctcccagattacttgtaacaccaatataatgtaaatagttcttacactgtatttttatttgtattatttttgttgttatattgttattttttaatttttctgaatatttcccatctgctgttggttgaatctgca

SEQ ID NO: 932331 - DNA, 558 bp, Homo sapiens
ttaatttctcgttaccattagaacactcagtaatcatatgaattgtgcatttgtttgttttgcttaactctttttgtttgtttatgtttggggttttgttgttgttgtttcacttttctcccatctcttcctgacttggtgaaatccaaagaatgctccaaattgtggggaacaaggcttctgaattggctaaaactcatgtggctgcaaaaaaaaaaaaaaawtccagttagcagaaatgatttttttaacttttttatttttattttttacataagtggttgcatcttttgctagccaaggccaaactgagggagtagtggtggcgacccaaagttaagattctgccctgttcactacagaaacctgagtttggttcctaagtctagttctttctgtttgatatttgtgttacttttaaaatatcagcagtttgtcccagctatgatgtggtagtaaaagattcagaagtattttctttacaagttctatgttgaaaagcttaattaaaagcaaatttctttttttttaaattatactttaagttctggggtacat

SEQ ID NO: 932332 - DNA, 597 bp, Homo sapiens
cttttacaatactaatttttgaatcaatcaataaaggatgtttctccatttatttatgccattttaacttttttcatcaatgtgctatagttttcagtgtgcaaatctttcacattcttgattaaatttactcctaagtcttttacatatttttatatctgttttgattctattataaattgaattgcctyattaatttatttttcaggtaatagtttgtcattaatgtatagaaacaataatgctatctgtatgattttgtaactattaactttattgaatttctttatcagctttaaccgtttattgtggtggagtctttaagattttctctaccttgagtgcgccaggcgcggggagcctaggacctggagcgagagccgcctacctgcagccgccgcccacggcacggcagccaccgtggcgctcctgctgcgcttcgtgctcctgtgcagagtcgcggatttcatcagaggttggagtatcactactcctgagcagatgattgaaaaagccaaaggggaaactgcctatctgccatgcaaatttacgcttagtcctgaagaccagggaccactggacatcgagtggctgata

SEQ ID NO: 932333 - DNA, 605 bp, Homo sapiens
ctcctgagtagctgggattacaggcatctgccttcatccccggctaatttttgtatttttattggagacagggtttcaccatgttggccaggctggtcttgaacctctgacctcaggtgacctgcctgtcttggcctcccaaagtgctgggattataggcatgagccaccacccctggccagaatattgctacttttgcaaatagctacaattgaccctgatctggactttgagttgatcacagctttgtaaaagaggatagcattgtaaaactgcaaaattagattaataataacatagaatgctttcagtataagaaataatactatcctaagcaaaaataaataaataaataaaactggaggaattatattatctaacttcatattatactacagaattacagtaaccaaaagagtagggtactgrcataaaaagaggcccatagatcaatgaaacacaatagagaacccagtaacaaatctacatacctacagtgaactcatttttgacaaaggtgccaagaacatacactggtgggaaatggtgttgaaaaaactggatatccatatgcagaagaatgaaaacagactagtatctatcac

SEQ ID NO: 932334 - DNA, 761 bp, Homo sapiens
tagggagggctgaggtcagaccagctccatctcatgtgcaagaccatccaacagaatagaccaagaagaggaaagaatcccagaatctggaaactggctttctgaaataaaacaggcaaacaagaatgggggaaaaaagaatgaaagggaatgaacaaaacatccgagaaatatgggattatataaacgactaaatctatgactgattaatgtacctgaaagagatgaggagaatggaaccaacttggaaaacacatttcagaatatcattcatgagaatgtccccaacctagccagacaggccaacactcaacttcaggaaatccagagaacctcagtaagatatgccatgagaagatcatccccaagacacataatcatcagattctctgcggtcaaaatraaagaaaaagtgttaaaggcagctagggagaaaggcaacatcacctgcaaagggaattccatcagacttagcagacctctcaactgaaactgtacaagccagaaaagatattcaacatcttaaagaaaagaaatttcaacccggaatttcatgtccagcaaaattaagcatcataagtgaaggagaaacaagatccttttcaggcaagcaaatgctgagggaattcattatcaccagacctaccttacaagagctcctgaaggaagcactaaatatggaaagaaaagaccaccaccagccactacaaaaacacactgaagtacacagacaagtgatgctaaaaaccaaccacatacat

SEQ ID NO: 932335 - DNA, 761 bp, Homo sapiens
tagggagggctgaggtcagaccagctccatctcatgtgcaagaccatccaacagaatagaccaagaagaggaaagaatcccagaatctggaaactggctttctgaaataaaacaggcaaacaagaatgggggaaaaaagaatgaaagggaatgaacaaaacatccgagaaatatgggattatataaacgactaaatctatgactgattaatgtacctgaaagagatgaggagaatggaaccaacttggaaaacacatttcagaatatcattcatgagaatgtccccaacctagccagacaggccaacactcaacttcaggaaatccagagaacctcagtaagatatgccatgagaagatcatccccaagacacataatcatcagattctctgcggtcaaaatgaaagaaaaagtgttaaaggcagctagggagaaaggcaacatcacctgcaaagggaattccatcagacttagcagacctctcaactgaaactgtacaagccagaaaagatattcaacatcttaaagaaaagaaatttcaacccrgaatttcatgtccagcaaaattaagcatcataagtgaaggagaaacaagatccttttcaggcaagcaaatgctgagggaattcattatcaccagacctaccttacaagagctcctgaaggaagcactaaatatggaaagaaaagaccaccaccagccactacaaaaacacactgaagtacacagacaagtgatgctaaaaaccaaccacatacat

SEQ ID NO: 932336 - DNA, 761 bp, Homo sapiens
attcccggcttatttttatttttatattttattttattttcacacaaggtctcactcttgcccaggctggagtggagtggctcacagccaccaggtgatttgggcccacaagtcacccttgctaagaggcagagtccagagcagaaactgggtagatgccaaaggcagcactccctactccacacatgggtttctgtcaagtaaatcaccagccaggtgaggtgcatacagcatctagggagatgggacaccgtgttgtcccctccttcagccaggaggccccacactgagcgccactgcctccactgtctgatgctacaggagaaacgtttcctgctggttaaggaagtagaaactgcagatcacttttcatcttattggaaatcactctttgacactcttgcctcatcttcactcagtacacattgactctaccagcaatagcgtaaaaataaacacagattaaggaaataggaatcctttattcctgggacttaaaagcttgactttctccagtaagtcaattaccagtgcccacggcaggaagagctctgatgccagggttgacagcaygctggaaaaccggaggagtgtttgcatttctggggcctcaagtaatgagaagttcttccaagaacactgacaggggtattattgccctattttagaattattactctgaagatcagggaatttcaggcggttgaactcatgccacagcacctgtgcttttctggtaggggagggatggagtccagctc

SEQ ID NO: 932337 - DNA, 752 bp, Homo sapiens
atgtgtgcttgtttttatttgagagattatatcctcttaaaaggaaaacaagtaacagagtaatgaagataaaataatctcatttttataaaaagtgtattttatatgtttgcatatttgtatatgagaaacactgcgcagtggtatcatgtgttacctaagaaagaatagaggagtagagggaaatagttgactttccttcatatatctgtgccaatgttattttttcttttggttttgtgctagaaatacaaattgaaaaaaaaattttaatgaaacgtaagtattgaagaaccaatgagataaattaattaaaattatgatagacaccatgatagagtcagtatttatattaataatattttaatacaacagggtgtacattcgtaagtgtgaataacattttgaaatatcttattttttaacataatttttatatttccagtaaattcagccaccaccrtacctatttcctattttatataacttgaggcaccttgatgcttcatttttcacaaattgtttccttattgagtgatatgcttttatatttatttaaaactatgcacgtctacaaaaacgcattagttaatttaaatcttgaaaggttgtaggatcatgtatttgtccattttcacactgctataaagaactacctgagactgggtaatttatgaagaaaagatatttaattgactcagttccacagacttaacaggaagcatgactgggaggcctcaggaaacttacaa

SEQ ID NO: 932338 - DNA, 641 bp, Homo sapiens
aagtctgggattttaatttttctttgctattaataaaacctcattcagtctatattaacttagaattggtatagatggctccttcctgattctgtaagtactttaaggtttagctgattccagacagcttgcatgtttgagcagacaattattaggcaattttcctaactctgcttctgtaagagtttccttatcacttactgaatatccattgtgtctttttccttaatcgcctgggaggaaccatctatcatcctgtcctgaagggagctcctcctatgtctggttggaccttaagatttaggtcccttgttaggaaacctgcttggttaaggatttttgataggaaggctactggttgtcagtggcctcagtgctttcgggctatgcccttgtttacactgtcaacaaggtggtattggagtgttacagggtcacagagaagaccttcagttatcaattataggttttaaacttacsatggcttttaaaggaataggatacacggtgtttttctttactacttccatctctctttctctttgacttcttctttgtctctctctttctgactccctctttgtctctgtctcttcctctctctgtctgactttctctttctctctttcctttctgctggt

SEQ ID NO: 932339 - DNA, 666 bp, Homo sapiens
ctggagtttgtttcttctgatgttcagatgtgttccgagtttcttccttccggtgggttcttggtctcgctagctcaagagtgaaactgcagaccttcgcagtgagtgttacagctcttaaggtggcgcgtctagacttgctcgttcctcccagtgggtttgtggtctcgctggcttcaggagcgaagctgcagaccrtcatcgtgagtgttacagctcatgaaagcagtgtggaccccacaactgaacagcaggaacttaatacaaagagcaaaaaaacaaatcctcccccacgtggaaggggacccgagtgagtcgctactgccggtggggcagcctgcttttattctttatctggccccacccatatcctgatgattggtccattttagagagagctgattggtctgttttacagagagctgattggtccattttgacagggtgctgattggtgcatttacaatccctgagctagacacgaaagttctccacctccccaccagattagctagatacagagtgtcgattggtgcattcacaaaccctgagctagacacagggtgctgattggtgtgtttacaaaccttgtgctagatacagagtgccaattggtgtatttacaatccattagctagacataaaagttctccaagtccccaccag

SEQ ID NO: 932340 - DNA, 633 bp, Homo sapiens
gagtttcttccttccggtgggttcttggtctcgctagctcaagagtgaaactgcagaccttcgcagtgagtgttacagctcttaaggtggcgcgtctagacttgctcgttcctcccagtgggtttgtggtctcgctggcttcaggagcgaagctgcagaccgtcatcgtgagtgttacagctcatgaaagcagtgtggaccccacaactgaacagcaggaacttaatacaaagagcaaaaaaacaaatcctcccccacgtggaaggsgacccgagtgagtcgctactgccggtggggcagcctgcttttattctttatctggccccacccatatcctgatgattggtccattttagagagagctgattggtctgttttacagagagctgattggtccattttgacagggtgctgattggtgcatttacaatccctgagctagacacgaaagttctccacctccccaccagattagctagatacagagtgtcgattggtgcattcacaaaccctgagctagacacagggtgctgattggtgtgtttacaaaccttgtgctagatacagagtgccaattggtgtatttacaatccattagctagacataaaagttctccaagtccccaccagact

SEQ ID NO: 932341 - DNA, 807 bp, Homo sapiens
cttggactggtgattatctctgaggggcgtgggagggtgattttgctctctgatttgaacacttctcagctatttgagttttttcatcattattttaaatgatggaaattaaacatttttactttatttaaaaattatttttcaatgccaagtttctcagaaagcctaaaagagcaataaagatcgatatgaggacttggtttgaatattggctctgtaacttactagccatgtgacctttagctatcaatttaatctctcttgaaatcacatccattacttgacaaggaggcaggcagcatatgactcccacctggttgtacaatggggaacctttttggacactgaaccacactaaggaatagtagataactgaatagatgagcttttggagaggaggttagcttaatgctgtttcatgtcatttgatattgacattaataggctccataaagcttcttccctttttatccaggatgtgaaccagacatctttaagattgcagcagttaattttatccattcaagcttcccaatcaatgcttttacttggaaaatatttatgcttaggatgctgaaaagctttctcckcagtcaggtccctaaggcattctaatatcactttttagagttgagtgctgagaccttgggcccttgaagtgagaaacaataaataataatgactacagaacttggcaaatataaagctctaggcaaagttgtagaaagagtactcaagtgtgcagaataaacaagataatatatataactttctcagtttttgatcctaaaaattagaagtaaaaac

SEQ ID NO: 932342 - DNA, 762 bp, Homo sapiens
gtaactctggaggtgggtggaactagataaatctagtgttttataagttcctgaggtgattcttttaatcaggtaaggctggcaagtaccagtctaattcaatacatctgaacctcccgggaagcttttcaaaccaggcaaacccatttttatctccatctgccttcagagattctgagtaagtctagaatatgtattgaaaaaacttcttaggtgattcttatgcttccctttcccatcccttcctcagttaaaaacccatttctacttgtttcacgtataatatatacactgtggtccacaacttcrcacttccaccccaaaagagactgaaatatggatgctttgggaggccaaggcgggaggatcacgaggtcaggagatcgagaccatcctggctaacacggtgaaaccctgtctctactaaaaaatacaaaaaattagccgggcatggtggtggagcctgtagtcccagctactcgggaggctgaggcaggagaacggcgtgaacccgggaggcggagcttgcagtgagccaagatggcgccactgcactccagcctgggcgacagagcgagactccgtcgcaaaaaaagaaaaaagaaaaagaaaaagaaaatgaaatatggatggtaagctctgtgtcttataattttgaatccaacacatgccaaggacataatggcataatggttgttcagttgaattaaaatttctgttttattcccttatccatccctgggttcaagtttaaactatgat

SEQ ID NO: 932343 - DNA, 762 bp, Homo sapiens
gtaactctggaggtgggtggaactagataaatctagtgttttataagttcctgaggtgattcttttaatcaggtaaggctggcaagtaccagtctaattcaatacatctgaacctcccgggaagcttttcaaaccaggcaaacccatttttatctccatctgccttcagagattctgagtaagtctagaatatgtattgaaaaaacttcttaggtgattcttatgcttccctttcccatcccttcctcagttaaaaacccatttctacttgtttcacgtataatatatacactgtggtccacaacttcacacttccaccccaaaagagactgaaatatggatgctttgggaggccaaggcgggmggatcacgaggtcaggagatcgagaccatcctggctaacacggtgaaaccctgtctctactaaaaaatacaaaaaattagccgggcatggtggtggagcctgtagtcccagctactcgggaggctgaggcaggagaacggcgtgaacccgggaggcggagcttgcagtgagccaagatggcgccactgcactccagcctgggcgacagagcgagactccgtcgcaaaaaaagaaaaaagaaaaagaaaaagaaaatgaaatatggatggtaagctctgtgtcttataattttgaatccaacacatgccaaggacataatggcataatggttgttcagttgaattaaaatttctgttttattcccttatccatccctgggttcaagtttaaactatgat

SEQ ID NO: 932344 - DNA, 753 bp, Homo sapiens
ccttcacagtgagtgttacagatcttaaaggtggcgcgtccggagttgttcgttcctcccggtgggttcgtggtttcactgacttcaggagtaaagccgtagacctttgtggtgagtgttacagctcataaaggcagtgtggacccaaagagtgagcagcagcaagatttgttgcgaagagcgaaagaacaaaacttccacgacrtggaagcagacccgagcaggttgccgctgctggctggggtggcctgcttttattcccttatttggctccacccatatcctgctgattggtccattttacagagagctgattggtccactttacaaagtgctgattggtccattttacagagtgctgattggtccattttacagagtgctgattggtccattttgacagagtgctgattggtgcgtttacaaacttttagctacacacagagtgctgattggtgcgtttacaatcctttagctagacagaaaagttctctgagtccccacctgacccagaagcccagccagcttcacctttcaatcccccctctaaacaggacaccccaattgctgatgggaatttggctgatgactgctctagctactttctgctggataggggcgaagaaggggccctgtaggtgtagtgtcctccagaggggaactctttaggccagtggaagggccagcaggtcagtccaggggtcctcggtagaagttgttagttgaactcatttggggttccatttgtaagac

SEQ ID NO: 932345 - DNA, 753 bp, Homo sapiens
ccttcacagtgagtgttacagatcttaaaggtggcgcgtccggagttgttcgttcctcccggtgggttcgtggtttcactgacttcaggagtaaagccgtagacctttgtggtgagtgttacagctcataaaggcagtgtggacccaaagagtgagcagcagcaagatttgttgcgaagagcgaaagaacaaaacttccacgacatggaagcagacccgagcaggttgccgctgctggctggggtggcctgcttttattcccttatttggctccacccatatcctgctgattggtccattttacagagagctgattggtccactttacaaagtgctgattggtccattttacagagtgctgattggtccattttacagagtgctgattggtccattttgacagagtgctgattggtgcgtttacaaacttttagctacacacagagtgctgattggtgcgtttacaatcctttagctagacagaaaagttctctgagtccccacctgacccagaagcccagccagcttcacctytcaatcccccctctaaacaggacaccccaattgctgatgggaatttggctgatgactgctctagctactttctgctggataggggcgaagaaggggccctgtaggtgtagtgtcctccagaggggaactctttaggccagtggaagggccagcaggtcagtccaggggtcctcggtagaagttgttagttgaactcatttggggttccatttgtaagac

SEQ ID NO: 932346 - DNA, 621 bp, Homo sapiens
gttgacaaatgggatctaattaaaccaaagaacttctgcacagctaaagaaactatcatcagagtgagcaggcaacctacagaatggaagaaaatttttgcaatctatccatctgacaaagggctaatatctataatctacaagaaacttaaacaaatttatgagaaaaaaacaaccccatcaaaaagtgggygaaggatatgaacagacacatctcaaaaggacatttatgcggccaacaaacatatgaaaaaaagctcatcatcactggtcattagagaaatgcaaatcaaaagcacaatgagatatcatctcatgccagttagaatggtgatcattaaaaagtcaggaaacaaaatttgcattttattttaccctgttgatgctgtataaatccaggtctcagcaggaaacagatggaacactcaaattaggataattcaagaagagtataataaagggactatttgcaaaggtgtgggtatcgtgtaagaaaagcacagggacattacagcgctgtgggactagtaaatgaagctctgtttatctcccccaggtctgaaaaaggttgggggaggagatagccattgccagagctaccagacttggtggggagacaca

SEQ ID NO: 932347 - DNA, 631 bp, Homo sapiens
agtaacagttggcttacatcttcagtgattcaagtctgcaaggtgtatatgattgtgcttcggggggaaagcagagaagccactttctgtacttacaacggagttcacttcagtgctataaacgtcaccgcagccctgcttgtaataaagtccagactagcaatctgcctttgggttgagctgttctcctacaagataagctgttaagtcatgccttgattttaggtctctcggccgagcaggctaagcatccggagttcctgtggggcagccggctgggaaagccaccctcakgtccttccctccgacgccacggtggctactatggaagcggctatggtggcagcggctgcgatccgaaggggcccctccatgcactacgcagggcagaggagggcgcgcggtgtcttgcaggccaggacgcaggcgctgggtaggtcaggcgggcgctgggtcctggttcttctggcaccttgactctggatccgggcatcagggctctggataggggacctgggcgcgcccccgcggcagcgctcctccaggcggaggggagtggacatgtaactgggcgggttcagggctgcccggagcatgccaggagcaagaggagggatcctgtgagagacaa

SEQ ID NO: 932348 - DNA, 633 bp, Homo sapiens
gaggaatcagtgaaattcaagagaagatggataaaacatttctattttgactaattgtcactgcaggattatgtgagtttaaggacagaagcaatcagagctgaatatcagaagatgcctgcatttctccatgaagaagagcaacatcacttggagaggctgcgaaaggagggcgaggacatttttcagcaactcaatgaaagccaagccagaatggaacatcccagggagcttttaagaggaatgtatgaggatctgaagcaaatgtaccataaagcagatgtggagctactcctggtacggactgaccatggsgtatcatgatgttgaacattcacatacatgggtgtttttcctctctcctgaaatccgtctcccccttcacttccattatttgtttccaaaaacatgattcgataactaatgctacttggttgggaaggtatagcctctcctagtgattctactagaccgaaggtccctcctaccttatccaccagcaacaaaactttgtagaatggctaaggtaacagacagccccaagaaatatttcccatcaaaagtcagtgatttatttaggatttttgaaagtggataaaatgagaagtgattcattggcatttaggctaattt

SEQ ID NO: 932349 - DNA, 704 bp, Homo sapiens
atcaatcacaggagacattatcggtttgacacctataatttttttttctttaaggaatctccacactattttccatagtggctgtactagtttacattcccaccagtggtgtagaagtgtttcctgatgactacatccacgccaacatctactgttttttgattttctgattatgaccattcttgcaggagtaaggtggtatcacattgtggttttgatttgcatttctctcattattaatgatgttgatcattttttcatatgtttgttgtccatttgaatatcttcttttgagaattgtttattcatatccttagcccactttttgatggcattgtttgttttttgttactgatttttccgagtatattgtagattctggatgttagttgtttgtcaaattgtatagattgtgaagattttctcccactctgtgggttgtctgtttactctgctgactgttccttttgctggcaaaaaaattagtttaattaagtcccaactaggttawctttgttttcattgtatttgcttttgggttcttggtcatgaaattcttgcctaagctaatgcctagaagggtttttccaatgttatcttctagaatttttatagattcaggtcttagatttaagtccttatccatcttgagttgatttttgtataaggtgaggatcctcatgtataagataaggatccagctg

SEQ ID NO: 932350 - DNA, 631 bp, Homo sapiens
taagcccgttggaaaagtgcagtattcgggtgggagtgaccctattttccaggtgccgtctgtcacccctttctttgaccaggaaagggaactccctgaccccttgcacttcccgagtgaggcaatgccttgccctgctttggctggcgcacggtcgctgcacccactgtcctgtgcccactgtctggcactccctagtgagatgaacccggtacctcagatggaaatgcagaaatcacccgtcttctgcrtcactcatgctgggagctgtagactggagctgttcttattcggccatcttggctcctcctagcaatgttatttctaagccagaatccttacaatgaaaggcaatgaagttggaaaagagtctcattccctaacctgggagaatgattcagggttctccgtttgtgtggggctcttccaaggctctattcctgcttttaaaatcacagtttcatgttttttttattgaagagagtcctcaaagtgattaacccaggactgaaaaaacctgagtccacccctgcctcagcaatgctttcagcacaaaagcattcagtctgtatgataattgcataatcccagtgttgtgtggtataatatcaaaccccaaactcatcatgta

SEQ ID NO: 932351 - DNA, 599 bp, Homo sapiens
ctaccagatgtacaaagaactgctaccaattcttctgaaacggctccaaaaaaatcaaggaagagggaatcctccccaactcagtctacaaagccatattaccctgatgtctaagccaggcaatattacatacaaaaaagaatattacagactaatatttctgatgaacatagatgcaaaagtcctcaacgaaatactagcaaacttaatctaacagcacatcaaagagataatacacaatgatccagttggttttatttaagggatgcaargatggttcaacagacacaaaacaataaatgcaattcatcactaaaacagaattaaaaacaaaagcatatgatcacttcaatagatgcagaaaaagcatttgataaaattgagcatttctttacgataaaaaagtaaacaaaccaggcatcaaaggagtatacctgaaaaaataaaagccatgtatgataaactcatagccaacatcatacaaaatggggaaaataaagcattctccctgtgttacttcattattatgtcactataaagaaatacctgaggctgggtaatttataaagaaaagagatgtaatagtctcatggttctgc

SEQ ID NO: 932352 - DNA, 599 bp, Homo sapiens
ctaccagatgtacaaagaactgctaccaattcttctgaaacggctccaaaaaaatcaaggaagagggaatcctccccaactcagtctacaaagccatattaccctgatgtctaagccaggcaatattacatacaaaaaagaatattacagactaatatttctgatgaacatagatgcaaaagtcctcaacgaaatactagcaaacttaatctaacagcacatcaaagagataatacacaatgatccagttggttttatttaagggatgcaaggatggttcaacagacacaaaacaataaatgcaattcatcactaaaacagaattaaaaacaaaagcatatgatcacttcaatagatgcagaaaaagcatttgataaaattgagcatttctttacgataaaaaagtaaacaaaccaggcatcaaaggagyatacctgaaaaaataaaagccatgtatgataaactcatagccaacatcatacaaaatggggaaaataaagcattctccctgtgttacttcattattatgtcactataaagaaatacctgaggctgggtaatttataaagaaaagagatgtaatagtctcatggttctgc

SEQ ID NO: 932353 - DNA, 622 bp, Homo sapiens
gttgtagctggtattgataactaccttctactacctattctgtattccctttgccttcagcaagcacctcagcaggtcatggtttttttcttggtggagtgacccaaaccttcattccttcattcctgaagggtctggactatttgtagtcctgcctggattgggctgttgtagtttcccattgaccttaactacagggcatggtaatactaagagacacctcaagggatctcctgtatccacacatactcttccttatctccatggtatagtagtaaactgattttatcttgatagtttgcatcaatcaccccagccmacgctgtaactcccttattagcctgttttcttaaaggtaagaggagcccaaagtgtccaggtagggatcttaacttccagtttaatggaatcactgttgtgtctcctggtggcagcattcctccctctggaactaagacctctaggccagcagagcataaagtcatgggaacaggaagcaaaaattttgctagtggtttgctaggggtgatggtgagtggtgccacttccacttccatcccttgattactggacctgtgattaattagcaaatgccagacctctacatgggtcagactattct

SEQ ID NO: 932354 - DNA, 620 bp, Homo sapiens
aagaggagcccaaagtgtccaggtagggatcttaacttccagtttaatggaatcactgttgtgtctcctggtggcagcattcctccctctggaactaagacctctaggccagcagagcataaagtcatgggaacaggaagcaaaaattttgctagtggtttgctaggggtgatggtgagtggtgccacttccacttccatcccttgattactggacctgtgattaattagcaaatgccagacctctacatgggtcagactattctgattgctgctttgcctcttctkcccattacagtagctatgccaaccttgcctttgactatttagtgctgcctttggcccctgctgccctgggacccaagtattcccattgcatttaaattttgtagttgagtgactgtggttcccactattagatctcagatacagggaagagcaattacagggctcttcaaagatgcaggtgctgccctcacaaacctatttcacaaagcattggtcatgggtatatcttctggaccctcccatctgggatgagtaggtctaaaatgactaattcactccagcatcccaatctccctaagcctttggatcccttccactacattaaaccaaagg

SEQ ID NO: 932355 - DNA, 713 bp, Homo sapiens
gatatgggtgccctttatttctttctcttatctgattgctctggctagaacttccagtattatgttaaatagaagtggtaaaagtaggcattcctgtcttgttccacttcccagagagaatgctttcagcttttccctgttcaatataatgttggctgtgggtttgttgtaaatggttttttttttttgagacagagtttcactcttgtcatccaggttggagtgcagtggcgtaatcttggctcactgcaacctccacctcctggattcaagctattctcctgcctcagcagcccgagtagctgggattacaggcccacattaccargcccagctaattttttgtatttttagtagagacggggtttcgccatgttaagcaggctggtctcgaactcctgacctcaggtgattcgcccacctcggccttccaaagtgctgggattacaggtgtgagccaccgcgcccggcccataaatggcttttattactttaaggtatgcctttctatgctgattttgctgaggattttaaacataaagcgatgatggattttgtcaagtgctttttctgcatctattgagatgattatgtaatttttgtttttaattgtttatttggtgtatcacattgattgacttatgtatgttaaaccacccctgcatcactggtatgaacccacttgatcatggcggattatctctttgatatcc

SEQ ID NO: 932356 - DNA, 713 bp, Homo sapiens
gatatgggtgccctttatttctttctcttatctgattgctctggctagaacttccagtattatgttaaatagaagtggtaaaagtaggcattcctgtcttgttccacttcccagagagaatgctttcagcttttccctgttcaatataatgttggctgtgggtttgttgtaaatggttttttttttttgagacagagtttcactcttgtcatccaggttggagtgcagtggcgtaatcttggctcactgcaacctccacctcctggattcaagctattctcctgcctcagcagcccgagtagctgggattacaggcccacattaccaggcccagctaattttttgtatttttagtagagacggggtttcgccatgttaagcaggctggtctcgaactcctgacctcaggtgattcgcccacctcggccttccaaagtgctgggattacaggtgtgagccacygcgcccggcccataaatggcttttattactttaaggtatgcctttctatgctgattttgctgaggattttaaacataaagcgatgatggattttgtcaagtgctttttctgcatctattgagatgattatgtaatttttgtttttaattgtttatttggtgtatcacattgattgacttatgtatgttaaaccacccctgcatcactggtatgaacccacttgatcatggcggattatctctttgatatcc

SEQ ID NO: 932357 - DNA, 621 bp, Homo sapiens
ccgtctggccccagactttttttgttggcaaattttttattatcatttcagtctccctgcttgttattggtctgttcatagattctatatcttcctgatttaatctaggagggttgtatatttccaggaatttattcatctcctctaagttttctagtttacaaagtaaagatgttcatagtagccttgaataatctttgtatttctgtgttatcagtcataatatctcttgcttagtttcraattgagtttattaggaccttctcttttttttttcttggttaatctcgctaatggtctatcaattttatttatcttttcaaagaaccagctttttgtttcatttatcttttgtatttttgttgttgttgttgtttcaacttcattttattctgctctgatctttgttatttcttttcttctgtggggtatgggtttggattgttcttgtttctccagttccatgaagtatgaccttagattgtctatttgtgctcttctagactttttggtgtaggcattcaatgagatgaagtttccttttagcaccatttttgctgtatctcagaggttttgacagattgtgtcattattatcattcagttcaaataatttttttta

SEQ ID NO: 932358 - DNA, 584 bp, Homo sapiens
gtctggccccagactttttttgttggcaaattttttattatcatttcagtctccctgcttgttattggtctgttcatagattctatatcttcctgatttaatctaggagggttgtatatttccaggaatttattcatctcctctaagttttctagtttacaaagtaaagatgttcatagtagccttgaataatctttgtatttctgtgttatcagtcataatatctcttgcttagtttcaaattgagtttattaggaccttctcttttttttttcttggttaatctcgctaatggtctatcaattttmtttatcttttcaaagaaccagctttttgtttcatttatcttttgtatttttgttgttgttgttgtttcaacttcattttattctgctctgatctttgttatttcttttcttctgtggggtatgggtttggattgttcttgtttctccagttccatgaagtatgaccttagattgtctatttgtgctcttctagactttttggtgtaggcattcaatgagatgaagtttccttttagcaccatttttgctgtatctcagaggttttgacagattgtg

SEQ ID NO: 932359 - DNA, 584 bp, Homo sapiens
gtctggccccagactttttttgttggcaaattttttattatcatttcagtctccctgcttgttattggtctgttcatagattctatatcttcctgatttaatctaggagggttgtatatttccaggaatttattcatctcctctaagttttctagtttacaaagtaaagatgttcatagtagccttgaataatctttgtatttctgtgttatcagtcataatatctcttgcttagtttcaaattgagtttattaggaccttctcttttttttttcttggttaatctcgctaatggtctatcaattttatttatcttttcaaakaaccagctttttgtttcatttatcttttgtatttttgttgttgttgttgtttcaacttcattttattctgctctgatctttgttatttcttttcttctgtggggtatgggtttggattgttcttgtttctccagttccatgaagtatgaccttagattgtctatttgtgctcttctagactttttggtgtaggcattcaatgagatgaagtttccttttagcaccatttttgctgtatctcagaggttttgacagattgtg

SEQ ID NO: 932360 - DNA, 550 bp, Homo sapiens
gggttgaggttaatgtgagggaatcggggaggcagtgactgtaggctaagaatggttggaaagatgataggagccttagtgtagtgtcagtgctaaagaggggatgttgatacaggatgtgtacagctcagatgtcaaggatgatgaaacttgaaaaggaatactgcattgagtgccttcagacagcaggttgaatggcatgaccagcaacgatctagaaaagggggaaggagagggtgacggtgaaggcaaaactggtgcctgctggtttgagttaggccatgaggaagtgacagacatgggttagagagtcggtacaaaaggacttgttacgggtcgtatctaggctggtgagstctttggatttcagatagtggctagagattatagtaacatagcacctggaaagaaggggagaagccagcgctgggaaagtgttcttgggagtggtgagagggtaatgattggacagagcctagggagagtttgagcctgagaatgaggtaatagaaaacaagcagtcatgacagtaaaagggacagaaattggt

SEQ ID NO: 932361 - DNA, 628 bp, Homo sapiens
ctcaagcctcagcaattgcgggcgcccctcccccagcctcactgtcaccttgcagttcggtctcagactgctgtgcttgcagtgagcaaggctctgtgggcatgggaccctctgagccgcacgcaggatataatctcctggtgtgccatttgctaagaccattggaaaagcgcactattagggtgggagtgacctgattttccaggtgccatgtgtcayggcttcccttggctaggaaagggaattccctgaccccttgcacttcctgggtgaggcgatgcctcgccctgcttcggctcacgatctgtgggctgcacccactgtcctgcactcactgtccgacaagccccagtgagatgaacccgctacctcagttggaaatgcagaaatcacacgtcttctgtgttgctcatgctgggagctgtagactggagctgttcctattcagccatcttggaacctccccttcagatgtggtgtcttaaaacaatatgctttttttttttttttttgaggcagagtctagctctgtcatccaggctggagtccagtggtataatcttggctcactgcaacctctgcctctcgggttcaattgattctcccgcctcagcctcccgagtagctg

SEQ ID NO: 932362 - DNA, 767 bp, Homo sapiens
gcctcagcaattgcgggcgcccctcccccagcctcactgtcaccttgcagttcggtctcagactgctgtgcttgcagtgagcaaggctctgtgggcatgggaccctctgagccgcacgcaggatataatctcctggtgtgccatttgctaagaccattggaaaagcgcactattagggtgggagtgacctgattttccaggtgccatgtgtcatggcttcccttggctaggaaagggaattccctgaccccttgcacttcctgggtgaggcgatgcctcgccctgcttcggctcacgatctgtgggctgcacccactgtcctgcactcactgtccgacaagccccagtgagrtgaacccgctacctcagttggaaatgcagaaatcacacgtcttctgtgttgctcatgctgggagctgtagactggagctgttcctattcagccatcttggaacctccccttcagatgtggtgtcttaaaacaatatgctttttttttttttttttgaggcagagtctagctctgtcatccaggctggagtccagtggtataatcttggctcactgcaacctctgcctctcgggttcaattgattctcccgcctcagcctcccgagtagctgggattaacaggtgtccgccaccacatccagctaatttttatatttttggtagagatggggtttcactgtgttggctaggctggtctcgaactcctcacctcgtgatcctcctgcctcggcctctcaaagtgctgggattataag

SEQ ID NO: 932363 - DNA, 582 bp, Homo sapiens
ttgaaaggccccgtagtgttatgtagggtgtaggtctacacagttattacctactgtcagcaaaactgaatagctgggagggaataattatacaatcccttttgccataagccacttctgaacatattgcaatatgtactggattcattttaaagtggttgtaactaaatgaatcacaacctttggggatagggtaacagatagtatattaagactgtgtaaagtctgtaagaagtcagtatattaaaatctgtcaggaaaggtcatccttgactatgggttaatatctgtagtcagtaccttgaatagtgccaatatgtgttggctctaatctttgatatgactctaggcaggatatgagatctgaaactttcactgatggagtatgaaccagattgacaaacttcttagtgaagagaagtttctsctgtgtgtgtgtgtgtgtgtgtgtgtgtgtgtgtgtgtgtgtgtgtgttttcatgattctgggtattttaatgttaaagtatatataggattttatagtttttggactttgggatctagggagaaaaaggatgtatatcctgtcctactcgccct

SEQ ID NO: 932364 - DNA, 630 bp, Homo sapiens
cacccatggagggagcatttggactagctctagccagagggccatccccgtggggagcctgagttccagcaagccttgccactttaggctgaagggctctgaggtcctaattgaacttgaggggcagtctaggccacaaggactgcaattcctaggcaagttgaagtactgagctgggctcaaagccagtgggytttcggggcactcaaactactgagatatcagcagagacagctaagggaatgcttggaccacccatcccctaacccaaagttatatagcttgcagctccaaaatagaccccttccttctgtttgaggagaggagaatgaggagtaaacagaattttctcttgcatcttgggtaccagctcagccacagaagtataggacaccagtcaggatcatgaggttcccattccaggacctaagctactggacagcatttctagacaaactctgagacagaaagcaacctgctgccttgaagggaaggacccatcctggcagagtttataacctactgacaaaagagccccttggccctaagaagcagcagtgataccgaagtagtatgccttggccttgggtgagattctgagacatgctggcttcaggtaagaagccagca

SEQ ID NO: 932365 - DNA, 630 bp, Homo sapiens
cacccatggagggagcatttggactagctctagccagagggccatccccgtggggagcctgagttccagcaagccttgccactttaggctgaagggctctgaggtcctaattgaacttgaggggcagtctaggccacaaggactgcaattcctaggcaagttgaagtactgagctgggctcaaagccagtgggctttcggggcactcaaactactgagatatcagcagagacagctaagggaatgcttggaccacccatcccctaacccaaagttatatagcttgcagctccaaaatagaccccttccttctgtttgaggagaggagaatgaggagtaaacagaattttctcttgcatcttgggtaccagctcagccacagaagtataggacaccagtcaggatcatgaggytcccattccaggacctaagctactggacagcatttctagacaaactctgagacagaaagcaacctgctgccttgaagggaaggacccatcctggcagagtttataacctactgacaaaagagccccttggccctaagaagcagcagtgataccgaagtagtatgccttggccttgggtgagattctgagacatgctggcttcaggtaagaagccagca

SEQ ID NO: 932366 - DNA, 643 bp, Homo sapiens
tttagaaattgaccaaccaattttaaaaattcatatggaattacatagggtccagaatagacaaaagaatcttgaagaagtaggagctctcacatgacccagtttcaaaacttactaccaagcaatgttaatcaacactggcaaaaggacagacatacacatgaatggaatcgaaaygggagttcagaataaaatcatgcatctatggtcaactgattttcaacaaggatgccaagaccatttaatgtgagtattttcaaaagagagtgctggatttaccagacagctacacagaaaagaatcaggctggaccctttcctcacaccatatgcaaaaactaactcaaaataaagacctcaaaataagagctaaaactacaaagccattagaagaaaccaaagagtaaacctcatgaccttggatttggcaaagattcttggaatatgacatcaaaagcataagcaacaaaaggaaaaataaagtggacttcattaaaattagaaacatttgtgcttcaaaggataccattgagaaaatgaaaagacaaaccacaggatgtgaaaaattatttgcaaatcatatacccgataaggaacttgtataccaaatatacaatggacttttacaactcaatagtaaaatg

SEQ ID NO: 932367 - DNA, 643 bp, Homo sapiens
tttagaaattgaccaaccaattttaaaaattcatatggaattacatagggtccagaatagacaaaagaatcttgaagaagtaggagctctcacatgacccagtttcaaaacttactaccaagcaatgttaatcaacactggcaaaaggacagacatacacatgaatggaatcgaaacgggagttcagaataaaatcatgcatctatggtcaactgattttcaacaaggatgccaagaccatttaatgtgagtattttcaaaagagagtgctggatttacyagacagctacacagaaaagaatcaggctggaccctttcctcacaccatatgcaaaaactaactcaaaataaagacctcaaaataagagctaaaactacaaagccattagaagaaaccaaagagtaaacctcatgaccttggatttggcaaagattcttggaatatgacatcaaaagcataagcaacaaaaggaaaaataaagtggacttcattaaaattagaaacatttgtgcttcaaaggataccattgagaaaatgaaaagacaaaccacaggatgtgaaaaattatttgcaaatcatatacccgataaggaacttgtataccaaatatacaatggacttttacaactcaatagtaaaatg

SEQ ID NO: 932368 - DNA, 646 bp, Homo sapiens
aaacataccaaacccacctgcatgttggatttgatgctaactctactttattatttttgagatggagtctcattctgttgcccaggctggagtgcagcggtgtgatcttagctcactgcaacctctgcctcccaggttcaaatgattctcttgcctcagccttcctagtagctgggattagaggcatgcaccatcacacctggctaatttttttttttttttttgtatttttagtagaggcagggttttaccatgttgaccaggctggtctggaactcctgacctcagrtgatccacctgccgcagcctcccaaagtgctgggattacaggcatgagccaccgcacccggcctgacgctacctttaaattgtggtttgaatccatctacttctctccacctctagcattaccttagactaggctaccatgatcatttttataattagatcacttccagcaaacctttcactaatcacccaatctcacgtagtccttccaccatgatcaagaccttctgttttagactcgtcattgaacttattactatttttacttggggttttttggtatgttttatatttatttattgtccccctccccatacccaaataagacaggtgtggcacaaggttagcctgttacttg

SEQ ID NO: 932369 - DNA, 550 bp, Homo sapiens
gggcagggtgacccaatcataatgatgatttaggaggagtcattaatggaatattcaggatgaattcaaatgacagactggaggctgaaacacttgttggtaggcaccggcactgggtacatagggaagagagaagactgcaggaaatacagtaaggaagagaactggcaaagggacaatataaactgaaaatataaacagattaatgagaagttaagaaaaattaattcatatgaatggaaaccaggggtgtttgggaccacatttgtcctttwgaggtgcctcttgtggcaaacagcgtttttttgttttgttatgtttttgtttttagttctgggatacatgtgcagaacgtgcaggtttcttagataggtatacatgtgccatggtggtttgctgcacctatcaacttatcatctagtttttaagccccacagccattaggtatttgtcctaatgctctccctcctcttgcccctcacccccgtgacaggcctgggtgtgtgatgttcccctccctgtgtcatgtgttctcattgttcagctcccg

SEQ ID NO: 932370 - DNA, 550 bp, Homo sapiens
gggcagggtgacccaatcataatgatgatttaggaggagtcattaatggaatattcaggatgaattcaaatgacagactggaggctgaaacacttgttggtaggcaccggcactgggtacatagggaagagagaagactgcaggaaatacagtaaggaagagaactggcaaagggacaatataaactgaaaatataaacagattaatgagaagttaagaaaaattaattcatatgaatggaaaccaggggtgtttgggaccacatttgtccttttgaggtgcctcttgtggcaaacagygtttttttgttttgttatgtttttgtttttagttctgggatacatgtgcagaacgtgcaggtttcttagataggtatacatgtgccatggtggtttgctgcacctatcaacttatcatctagtttttaagccccacagccattaggtatttgtcctaatgctctccctcctcttgcccctcacccccgtgacaggcctgggtgtgtgatgttcccctccctgtgtcatgtgttctcattgttcagctcccg

SEQ ID NO: 932371 - DNA, 589 bp, Homo sapiens
tcaccaagtccctgggctgcacacagcacggagaccctgggcccagcccctgaaaccattttttcctcctaggccttcaagcctgtgatgtgaggagctgccacaaaggtctctgacatgctctggagacgttttccccattgtcttggggattaacawtcagctcctcattacttatgcaaatttctgcagccagcttgaatttttcctcagaagatgagattttcttttctattgcattgtcaggctgcaaattttccaaacttttatgctctgtttcccttttgaaactaaatacctttaacagcacccaagccacctcttgaatgctttgctgcttagaaatttcttccattagataccctaaatcatctctttcaagttcaaaattccacaaatctctatggcagggacaaaatgccaccagtctacttgctaaaacataacaagagtcacctttgctccagttcctaataagttcctcatctctacctgacaccttatggttcatatcactgtcagtagttttgtcaaagccactcaacaagtctctaggaagttccaaactttcccacattttcctatcatc

SEQ ID NO: 932372 - DNA, 581 bp, Homo sapiens
ttgtaaatcacccagtctcaggtatgtctttatcagcagcacgaaaatggactaatacagtaaattggtaccagtagagtgtggcgttattgaaaaggtatcagaaaatgtgaaagcgactttggaactgggtaatagcaggggttggaacagtttggagggctcagaagaaaacaggaaaatgtagggaagtttggaacttcctagagacttgttgaatggccttgcccaaaatgcaggtagtaacatggacaatgaagtccaggctgaggtggtctcagatggaaatgaggaacttgttaggaactggagcaaaggtgaatcctgttatgttttagcaaasagactggcagcattttgcctctgccctagagatttgttgaactttgaacttgagagagatgatttagggtatctggcagaagaaatttctaagcagcaaaggattcaagaggtgacttgggtgctgttaaaggcatttagttttataaaagaagcagagcatgaaagtttggaaaatttgcaacctgataatgtgatagaaaaaaaaatagaaaaaaaaaaatcccattttctgggag

SEQ ID NO: 932373 - DNA, 581 bp, Homo sapiens
ttgtaaatcacccagtctcaggtatgtctttatcagcagcacgaaaatggactaatacagtaaattggtaccagtagagtgtggcgttattgaaaaggtatcagaaaatgtgaaagcgactttggaactgggtaatagcaggggttggaacagtttggagggctcagaagaaaacaggaaaatgtagggaagtttggaacttcctagagacttgttgaatggccttgcccaaaatgcaggtagtaacatggacaatgaagtccaggctgaggtggtctcagatggaaatgaggaacttgttaggaactggagcaaaggtgaatcctgttatgttttagcaaagagactggcagcattttgcctctgccctagagatttgttgaactttgaacttgagasagatgatttagggtatctggcagaagaaatttctaagcagcaaaggattcaagaggtgacttgggtgctgttaaaggcatttagttttataaaagaagcagagcatgaaagtttggaaaatttgcaacctgataatgtgatagaaaaaaaaatagaaaaaaaaaaatcccattttctgggag

SEQ ID NO: 932374 - DNA, 595 bp, Homo sapiens
caaccctgtagctgcttgcagattcattacaaagtccaggtgagattagcttagcccagctcagatcaacagaattacccaggtaacccatgaagtcatgacaaataacaaatggtggatcctttaagtcattgggttttgggatggtttgttatacagcattatcgtggcaatagataatttatacacacacacacacacacacactcacacacacacacacatatatatatatatwttttttctttttttttgagacagagtctctgtcacccaggctggagtgcagtggcgccatctcggctcactgcaatctccgcctcctgggttcaagtgattctcctgcctcagtctcctgagtacctgggattacgggtgtgtgacacgatgtccagctaatttttgtatttttagtattgatggggtttcaccatgttggccaggctggtcttgaactcctgaccacaagtgatctgcccacctcggtctcccaaagtgctaggattacaggcgtgagccactgtgcctggccacatgtatcatttttctatgcatgcataacaaattacctgaaatcaagatatcagccaggcct

SEQ ID NO: 932375 - DNA, 575 bp, Homo sapiens
ctgcatatcctacagaaccatttgtaaaccaagccccattattctcttcatctgtcaactgattgtaggataatccttgttaaggccataggttcagactgggagagaaggcaatgcagcaagagtggaaaccatgaatatttgggccctttgttcatgtaactaacttgtgccttcagggcttgctctagcctgatcatatatatatatcacttctacttgataatggcgtatttatgcatatgtccccaacatgtatggttttgtgggtcagataacactaaattttgataggcagctcagatcacacattgacttggtgtctatgtattcartttctactaaggtccagtagcagaccaagagctaactctcaaaaggagagtcttatttacggatgacggcatgagaaacttgctccaaaattctaaagtcctcagcagtgatttacttacaggggcctgccgaaggcttcttacagcatgcttatctgccactgaactttaagaaacattggatcttttgaatcatatgccctaggtggcagagcagtttgcacagaagccttgacatgt

SEQ ID NO: 932376 - DNA, 575 bp, Homo sapiens
ctgcatatcctacagaaccatttgtaaaccaagccccattattctcttcatctgtcaactgattgtaggataatccttgttaaggccataggttcagactgggagagaaggcaatgcagcaagagtggaaaccatgaatatttgggccctttgttcatgtaactaacttgtgccttcagggcttgctctagcctgatcatatatatatatcacttctacttgataatggcgtatttatgcatatgtccccaacatgtatggttttgtgggtcagataacactaaattttgataggcagctcagatcacacattgacttggtgtctatgtattcaatttctactaaggtccagtagcagaccaagagctaactctcaaaaggagagtcttatttacrgatgacggcatgagaaacttgctccaaaattctaaagtcctcagcagtgatttacttacaggggcctgccgaaggcttcttacagcatgcttatctgccactgaactttaagaaacattggatcttttgaatcatatgccctaggtggcagagcagtttgcacagaagccttgacatgt

SEQ ID NO: 932377 - DNA, 586 bp, Homo sapiens
taagctggtgttgagtgtctgtggcttttctaggtgccagtgcaagctgtaagtgaatctatcattctggtgtctgaagaataatggccctcttctcacagctccactaggcagtgcttcaatggagactttgtgtgggtgctacaaccgcacatttcccttctgtacttccacagtagaggttctccatgagacttctgcccctgcagcacacttctgcctggacacccrggcatttccatcctctaaaatccaggcaggggctcccaaacctcaactcttgccttctgcacacttgcagttccaacaccacatggaagctacaaaggcttagggactgtaccctttgaagcaatggcctgagctgtaccgtgaacccttttagtcccagatggaactgcagtgactggaatgaaggacaccatgtccaaaggctgcacagagtagtgggggccctgaacctggcccacaaaaccatttttcttcctagacctcctggcctgtgatgagaggtgctgccatgaaggtctctcacatgccctgcagacattttccccattgtcttgtctattaacatttacctcct

SEQ ID NO: 932378 - DNA, 586 bp, Homo sapiens
taagctggtgttgagtgtctgtggcttttctaggtgccagtgcaagctgtaagtgaatctatcattctggtgtctgaagaataatggccctcttctcacagctccactaggcagtgcttcaatggagactttgtgtgggtgctacaaccgcacatttcccttctgtacttccacagtagaggttctccatgagacttctgcccctgcagcacacttctgcctggacacccaggcatttccatcctctaaaatccaggcaggggctcccaaacctcaactcttgccttctgcacacttgcagttccaacaccacatggaagctacaaaggcttagggactgtaccctttgaagcaatggcctgagctgtaccktgaacccttttagtcccagatggaactgcagtgactggaatgaaggacaccatgtccaaaggctgcacagagtagtgggggccctgaacctggcccacaaaaccatttttcttcctagacctcctggcctgtgatgagaggtgctgccatgaaggtctctcacatgccctgcagacattttccccattgtcttgtctattaacatttacctcct

SEQ ID NO: 932379 - DNA, 605 bp, Homo sapiens
aattgaaatcagtgctcatttgccattctgaaaatcctagagcccttcagaattatgctaaatctactctgcctgtgctctagaaatggaacagcaaagcctggatgatagcacatctgtttatggtatggtttaatgaatattttaagcccactgttgagacctacagttaaaaagaaaaaagatttatttcaaaatattactgaccattggcaatgcacctggtcagccaagagttctgatggagatatgcaagaagattaatgctgtttttgtgtttttggagacagtctcactctgtcrcccaggcaggagtgtagtggtacaatctcggctcactgcaacctccacctcccaggttcaagcaatcgtcttgcctcagccccccaagtagctgggattacatgtgcatgctaccacacctgactaatttgtgtgtttttagtagagacagggtttcgccatgttggacaggctagtctcaaactcctgacatcaggtgatccacctgcctcagctttccaaagtgctgggattacgggcgtgagtcaccgtgcctgacctaatgtttttatgcccactaacacaacgtccattctgcagcc

SEQ ID NO: 932380 - DNA, 605 bp, Homo sapiens
aattgaaatcagtgctcatttgccattctgaaaatcctagagcccttcagaattatgctaaatctactctgcctgtgctctagaaatggaacagcaaagcctggatgatagcacatctgtttatggtatggtttaatgaatattttaagcccactgttgagacctacagttaaaaagaaaaaagatttatttcaaaatattactgaccattggcaatgcacctggtcagccaagagttctgatggagatatgcaagaagattaatgctgtttttgtgtttttggagacagtctcactctgtcacccaggcaggagtgtagtggtacaatctcggctcactgcaacctccacctcccaggttcaagcaatcgtcttgcctcagccccccaagtagctgggattacatgtgcrtgctaccacacctgactaatttgtgtgtttttagtagagacagggtttcgccatgttggacaggctagtctcaaactcctgacatcaggtgatccacctgcctcagctttccaaagtgctgggattacgggcgtgagtcaccgtgcctgacctaatgtttttatgcccactaacacaacgtccattctgcagcc

SEQ ID NO: 932381 - DNA, 604 bp, Homo sapiens
gagtctaaaattcatatgggctgggcatggtctacagttacatggataagtaaggcatggtctacagtgtccgtgtgatggaacattattcagccacagaaggaaggaaatgccgacacattccgcaacatggatgggcctcagagacgctgtgcctagggaaagaagccagacacaaaaggctacatattgtgtgatcctgtccgtgtaaaatgtccagaacaggcaaatccactgagtgaggaratagatctgtggttgcctgcaatcgcaggggcagggagtggggagtgtgtttaatggatgtggggtttctggggggatgatgaaaatgttccaaaattgattgcagtgatggctgcgtggttctttgaatacactaaaaaatacaaatcactgaattgagccatttaaattggtgaatggtctgggcgcggtggctcatgcctgtaatcccagcactttgggaggctgagatgggtggatcacctgagatcaggcgttcaagaccagcctggccaacattgcaacacgctgtctctactaaaaaggcaaaaattagcgcacgcctgcaatcccagctactcgggaggctgaggcagga

SEQ ID NO: 932382 - DNA, 704 bp, Homo sapiens
gggtgtaggtgtgcaggatggctgagccgttaggacagtgcaagggcaccgtctcctcgtggacccgcctctcctggcagcaggtgcactggtgctgcatggcctgggcctctgctgagtacctgtggacgcagggkggccctcacatcagccaccttggccccgccgtttctctgcccagccatggtgacacatgggcctctggggtcctgggccagacggccgcccccttctgtccacagtggcctgctctgtgggcacgtgaggcttcaccttctcaggatggggcagctctgggcccccagggtcccttggctcccggctctgtcttctgtggcctgcacttcccctgtctgaaccagctcctccaatcctgctgaccctaagcagcccttgacccttcctcctgcctcttctagctaagggtcaacccttctggcccctcctgctgacagccaaccacagtggcaagccatggggggcttcacagaaggctctggttccacccaccctccccagggggacacctggacctgggttcgcagcggggagctctgtgccatgtggctcggctcagccgggccctggcctggctaggagagcggccccaggctttctgccaatggacgtggagagggggagccctgctggggagccccttccctccttcctggagctggcgtaggccctcctgacccagagca

SEQ ID NO: 932383 - DNA, 661 bp, Homo sapiens
aaaaaggcaagccatagaccaacaaaatatttgcaaattgtatatccaataaaggatgtgtaagtagaatatatcaagaactctttaaactcaacagcaggaaaaccaacaacccaactaaaaatgggcaaaagattggaacacacacttcaaggaagacatagaagtggcaaagaggttgagagtggtggctcatggctgtaattccagcactttggaaggctgaggcaggtggatcacctgaggtcaggagtttgagatgagcctgaccaacatggtgaaaccctgtctctactaaaaatacaaaaaaaaattagccaggtgtggtggcgggcacctgtaatcccagctactcaggaggctgaggcagaagaattgcttgaaactaggaggtggagattgcagtgagccgagatcaygccactgcactccagcctgggcgacagagtgagactctatctcaaaaaaaaaaaaaaaaaagtggcaaagaagcacctgaaagcactctcagcacgtccatcatcagagaaatgcaaactaaaagcacagcaagctgccactgcatgcctattccagcactacattaaaaacaatggctataccaatggctgctggggacatggaggaactggatctcccatcactgacgctgggaaagcaa

SEQ ID NO: 932384 - DNA, 641 bp, Homo sapiens
gaggcaacactcatcctcctcagcttatgaagatgatgggattaagagattaaagtaaaacaggcataggaaatcacaagggtattgactggggaagtgataagtgtccatgaaatcttcacaatttatgttcagagattgaagtaaagacaggcgtaagaaattataaaagtgttaatttggggaactaataaatgtccatgaaatcttcacaatttatgttcttctgccatggcttcagccagtccctccgttcagggtccctgacttcccgcaacaggtgtaaaacttccaaaagaaataagagtaccaagaaaatgtaattattttagtacatgataggaaatayatagttgtgttgggaagatggaggaaactcagaaagcatgaccaatgaagtgtcagaactaaatccaaacataaatatgaatatgttgaaactttttttagaaagaaggagaaaagtggggctggcagaaaggaaaaattagactcaggtttatgcttattatgaaacatatatgtaaataaaaaagacacaggaagttgaaaataagataaaaaaatcaaatcagggagatggtaacaaaaattaagaatggatggcaatgctaatatcaaattattaatagaattcaaga

SEQ ID NO: 932385 - DNA, 598 bp, Homo sapiens
tgtactcacccaggctagagtacagtgccatgatcttggcccactgcaacctccgcctgccggattcaagtgattctcgtgcctcccaagtagctgggattacaggcacatgtcaccatgcctggctaaatttggtgtttttagtagagacagggtttcgccatgttgtccaggctggtctcgaactcctgacctcaggtgatccacccacttcggcctcccaaagtgctgggattacaggtgtgagccactgcacctggccacacacacacacacacacacacacacacacacacacctagaaataaatacatataawtttttttcttttttttaaatagagacgaggtcttgctatatcatccaaactggtcttgaactcctgggctcaagttatgcacccaccttggtcccccaaagcactgagattataggtgtgaaccaccacgccccagcctgaattctttgaaattaagctgcaccatcttggagtcatgtcacattgctatttgagggtaaaaggatccaaaggcatctagaaaggttgaagctaatgggttgctgctcggtgagggaaggagggacagcctgctctgga

SEQ ID NO: 932386 - DNA, 558 bp, Homo sapiens
atctctacaaaaaataccagaaaaattagctgggcgtggtggtgtgtgcctgtagtcccagctacttggcaggctgaggtgggaggattgtttgagcccaggaggttgaggctaccgtgacctaggattgcaccactgcactccagcctgggtgacaaaagtgagaccctgtctcaaaaaaaagaaaaaagtccgggtgtggtggctcatgcctgtaatcccagcactttgggaggccaaggtgggcagaccacctgacgtcaggagttygagaccagcctggccaacatggtgaaaccctgtctctactaaaaatacaaaaaaataaagttagccaggtgtgttggcatgtgcctgtaatcccagctactcgggaggctgagaggcaggagaatcacctgaatctgggaggtggaggttgcagtgagccgagatcacaccattgcactccagcctgggtgacagagtgactccatctcaaaaaaaaaaaaaaaaaaaacacagaaatgtcaggatgagtaagctgagtacagagtaaaacttgacattaagaagaaa

SEQ ID NO: 932387 - DNA, 594 bp, Homo sapiens
tatcgttttaatttctagaattttaagtctttttaaaagatatctttcatacctctacttaacatgttaaatcttccctttagttccttgaacatatggaatacagttacagcttttaatagctttgcttactactaattctgttatctctgttatttctgggttggttttgattgattgcattttcttctattatgggtcatattttcttgctgctttgcatgcctggtaattttaccttttgttttaccttattgggtaaaattctgtgtgctttattgtgggacatgattaagtatttgaattagtttgatctcttcaggtttgggttttaagctttgttagacaggaccagggcagcaattagtctagggctagtattttccccactaccgaggcaaaaaccttttgagtactctacccagcgttctctgarttaccagattttccacactggttggtaggaagaactatgcctggctttgtgtgagctgtggggtttgtagagtctaatccttttgggttattccgtcctggcctctggtagtttccccacacatggatgctggtgagtcctcaggtgaaggcttcagg

SEQ ID NO: 932388 - DNA, 768 bp, Homo sapiens
agacacagcctggacatgaaaggaactcacttcctaaaagggaaagactccacatcctggatattggatgacatctctcgacccacttggggccagggagatctcaccaccctgaagggaaggacacaagcctggttgttggttgttgtatacaagatgtacacaaaatctgctgattatagaacccttgggccttgagtgaacataaatggtagcctctcagtggttgccacaggccttgagtgagacccagtgttgtgctgccttcaggtctgacccactgtagtgccactagtggtggctacagggataattgtgtcatcccttccccagctccaggaagctcagcacagagaragacttcatttgtttggggaaaattaaaggaagagaacaagggtctctgcctggtaatctaaagaattctcccagatcttactcaagaccagcaaggcagtacctctatgagcctgcaagagccacagcattaccaggcttggggtgccctctaatgcagttaccaaatacttatattacaacattcaagtcccttcaaatacttagaaagccttcccaagaataatgggtacaaacaagcgtagactgcaaagactccaataaatacctaactcgtcaatgcacagacaccaatgaacatacacaagcatcaagtttatccaagaaaacatgacctcagcaaatgaaataaggcaccagagactaatcccagagagatagagatatgcggcctttcagacagagaattca

SEQ ID NO: 932389 - DNA, 630 bp, Homo sapiens
ccaattctgtgaagaaagtaattggtagcttgatggggatggcattgaatctataaattaccttgggcagtatagccattttcactatattgatttttcctatccatgagcatggaacgttcttccatttgcttgtgtcctcttttattttgttgagcagtggtttgtagttctccttgaagaggtccttcacataccttgcaaattggattcctaggtattttattctctttgtagcaattgtgratgggagttcactcatgatttggctctccgtttttctgttattggcatataggaatgcttgtgatttttgcacattgattttgtatcctgagactttgctgaagttgcttttcagcttaagaagattttgggctgagatgatggggttttctaaatatacagtcatgtcatctgcagacagggacaatttgacttcctcttttcctaatcgaataacctttatttctttctcttgcctgactgccctggccagaactttcaacactatgttgaatagaaacggtaagagagggcatccttgtcttgtgctggttttcaaagggaatgcttccagcttttgcccattcagtatgatattggctgtgggtttgtcacaaatagctc

SEQ ID NO: 932390 - DNA, 487 bp, Homo sapiens
ctgattgcacttggtttaggtgagcttagtaggcagactgagacgagttgggttttcaagatggcagaatgctgtttttctgcacagtgctttctgacttgtctttagcctttgctttagtcagctgcttaaggccctgaatggctaattgctaaagctcttagttcccattagccttgacagggtctccagaagtggaattgcctcatgtgtgatgctagatagtagacagtcttgataatagcctgacctgctttctcctagtgcatccactctgggagagcgtggacctggttcctgggggcgatcgmcagtcacccatcaacattcggtggagggacagtgtttatgatcccggcttaaaaccactgaccatctcttatgacccagccacctgcctccacgtctggaataatgggtactctttcctcgtggaatttgaagattctacagataaatcaggtgagggcaagatctggtggtcttg

SEQ ID NO: 932391 - DNA, 591 bp, Homo sapiens
ctatattctatgactctctaaaggggaataccatgtgattcatgtttgaacagtatttaaagaggctttagataaaaataacaatatgggtaaggtatccaaattacctcctacctggtttctggcctcctctatcatgccagaaataatcttatattttttatataatttatatgatgaaatctttatattaaacttaatatagaatatattacatattaagatttcaaaatacctcaattttatgaatattttaattcatatataatgaacaattgcyatataagtatataaataaaatataaatatgaattaaattataagcactatattatgtaataaaatatattatttgaataaatggcattgtgctacacaaaatacttccaatctttttcatttgaaagtacttttgagatttatcctttttttaaaaaaaaagtagctcttagctcagtggttgccatcagcgggtgactttgtccttcaggggatatttggcaactcctggagccgtttttgtttgtttggttgttgttttttttcttgagacggagtctcactctgtcacccaggctggagtgcagtggc

SEQ ID NO: 932392 - DNA, 616 bp, Homo sapiens
gtcttatttatctattttcagacttggcgcctcacgtaaggcaaaagctcattaagaaaccacgagggggtcctagggagctgccgcgaaggcccggggccaccctcacttgcaggtgcggcgactaaacccaggttccgccgtagggtggctcagctctccagcgcccgtgcagtgcggccgggggcagaacgccctccagggttcagcaccaaaccccccgtgggtcactgtcccacagggctgagagtcagaggcctgggggagatccacaacgcgtctgtggtgaaaaggctagaaagtgtaacaggatcaccactcacagggagtgagtccgcattaagaaaagtagatctgtaatagcaaaattttgagataggactgttttaaaagttgattctttcaaagtttaacttkaaaccctggttgactcgatgttttaaactctggcaactacattttttccaggcaggtgaacaaaatctgacacccgagagtcctgggcaccacccccagtctgggggctttgcagtccaggtgcccagagaagtggctgccgccgcggatgcacagggtgcccttggagggactcacccgaaacgcagtgccttcctcg

SEQ ID NO: 932393 - DNA, 616 bp, Homo sapiens
gtcttatttatctattttcagacttggcgcctcacgtaaggcaaaagctcattaagaaaccacgagggggtcctagggagctgccgcgaaggcccggggccaccctcacttgcaggtgcggcgactaaacccaggttccgccgtagggtggctcagctctccagcgcccgtgcagtgcggccgggggcagaacgccctccagggttcagcaccaaaccccccgtgggtcactgtcccacagggctgagagtcagaggcctgggggagatccacaacgcgtctgtggtgaaaaggctagaaagtgtaacaggatcaccactcacagggagtgagtccgcattaagaaaagtagatctgtaatagcaaaattttgagataggactgttttaaaagttgattctttcaaagtttaactttaaaccctggttgactcgatgttktaaactctggcaactacattttttccaggcaggtgaacaaaatctgacacccgagagtcctgggcaccacccccagtctgggggctttgcagtccaggtgcccagagaagtggctgccgccgcggatgcacagggtgcccttggagggactcacccgaaacgcagtgccttcctcg

SEQ ID NO: 932394 - DNA, 616 bp, Homo sapiens
gtcttatttatctattttcagacttggcgcctcacgtaaggcaaaagctcattaagaaaccacgagggggtcctagggagctgccgcgaaggcccggggccaccctcacttgcaggtgcggcgactaaacccaggttccgccgtagggtggctcagctctccagcgcccgtgcagtgcggccgggggcagaacgccctccagggttcagcaccaaaccccccgtgggtcactgtcccacagggctgagagtcagaggcctgggggagatccacaacgcgtctgtggtgaaaaggctagaaagtgtaacaggatcaccactcacagggagtgagtccgcattaagaaaagtagatctgtaatagcaaaattttgagataggactgttttaaaagttgattctttcaaagtttaactttaaaccctggttgactcgatgttttaaackctggcaactacattttttccaggcaggtgaacaaaatctgacacccgagagtcctgggcaccacccccagtctgggggctttgcagtccaggtgcccagagaagtggctgccgccgcggatgcacagggtgcccttggagggactcacccgaaacgcagtgccttcctcg

SEQ ID NO: 932395 - DNA, 799 bp, Homo sapiens
gtcagtcgccagggcagtacgcagatgcgtgcccaggtgtgagtttaaaaaagaaaaaggaaaaaaattcaagcgcataatgtttcttctgccggttgaaggtgaaaccccaaagccacccaggccatcggcaacagcagggcgagttctagctgtgtggctggtggagcccacaggtgtgcccagtggccagcggtgacggcacgggggcccaccctgtgcaccccactggaggagccctgcccttcaccactcctggcctggttcttcttcagtcttcatccctgatgtccgtcaaacccaaccatggggacacagtgacacccggcagaagggtgccagggaccaggaggaggccagggcggtgcttccctgccccagcctagcaattaagggcatcgccgctgtgattctacatgaacacagttcactccgctgtacctgggctgggccgkaggccctggctgctggcagtggctgcaccagtgaccgctacagtggccgggtgccgctggctgctctcttctagtccagacctgcggttactgccacaggcctcagcagggcctggtgacgagctctgcacagccggccgggaagtgtcactttcccggatgaggagaggaaacatgtttcttgcaaatgggctgtgcgcttgtggaagagctcctctgcactgcgcttcctccgctcccaagggccccatcaaaatggggctggggtaacagcagccccaggtaaggcaggtgagattttctcttacagcaagacactgtgagggaggggccgggatcccctt

SEQ ID NO: 932396 - DNA, 799 bp, Homo sapiens
gtcagtcgccagggcagtacgcagatgcgtgcccaggtgtgagtttaaaaaagaaaaaggaaaaaaattcaagcgcataatgtttcttctgccggttgaaggtgaaaccccaaagccacccaggccatcggcaacagcagggcgagttctagctgtgtggctggtggagcccacaggtgtgcccagtggccagcggtgacggcacgggggcccaccctgtgcaccccactggaggagccctgcccttcaccactcctggcctggttcttcttcagtcttcatccctgatgtccgtcaaacccaaccatggggacacagtgacacccggcagaagggtgccagggaccaggaggaggccagggcggtgcttccctgccccagcctagcaattaagggcatcgccgctgtgattctacatgaacacagttcactccgctgtacctgggctgggccggaggccctggctgctggcagtggctgcaccagtgaccgctacagtggccgggtgccgctggctgctctcttctagtccagacctgcggttactgccacaggcctcagcagggcctggtgacgagctctgcacagccggccgggaagtgtcactttcccggatgaggagaggaaacatgtttcttgcaaatgggctgtgcgcttgtgraagagctcctctgcactgcgcttcctccgctcccaagggccccatcaaaatggggctggggtaacagcagccccaggtaaggcaggtgagattttctcttacagcaagacactgtgagggaggggccgggatcccctt

SEQ ID NO: 932397 - DNA, 628 bp, Homo sapiens
catatctaagccaccacaaaccaaagataaagagaaaaccttgaagactctggagcaaaaggacacattacttacaggggaacaaggacaagaatcaccacagagttctcattagaaactgtgtaagacagagagtagtccagtaatatctttaaagtgcgtgaaagaaactgtcaacctagaattctgtacacamaaaaattctttcccaaaagaaggtaacaagacaaacatatcctctcttgccacttgtcttcaacactgaactggaaattatagccagggaagttaggcgagcaaaagaaataaaacatatcatattggaaagaagaataaagccatctctgttcacagatgacatgatcctgaatattgaaaatcattcaaaatccattttaatagagtatcagaacttaaaaaccaatgcagcagtattgtacccacaagctcaatatccagtaaccatttgtatcagaatcccctacactagtaatgaaaaccctaaaaatgcaatcaagaaaacactttcatttataatcatagcaaaaataataaaatgcttaagaataaacctagtaaaagaaatgtaagacttgtactgaaacattattgaatgatactaaagaag

SEQ ID NO: 932398 - DNA, 629 bp, Homo sapiens
acatatctaagccaccacaaaccaaagataaagagaaaaccttgaagactctggagcaaaaggacacattacttacaggggaacaaggacaagaatcaccacagagttctcattagaaactgtgtaagacagagagtagtccagtaatatctttaaagtgcgtgaaagaaactgtcaacctagaattctgtacacacaaaaattctttcccaaaagaaggtaacaagacaaacatatcctctcttgccacttgtcttcaacactgaactggaaattatagccagggaagttaggcgagcaaaagaaataaaacatatcatattggaargaagaataaagccatctctgttcacagatgacatgatcctgaatattgaaaatcattcaaaatccattttaatagagtatcagaacttaaaaaccaatgcagcagtattgtacccacaagctcaatatccagtaaccatttgtatcagaatcccctacactagtaatgaaaaccctaaaaatgcaatcaagaaaacactttcatttataatcatagcaaaaataataaaatgcttaagaataaacctagtaaaagaaatgtaagacttgtactgaaacattattgaatgatactaaagaag

SEQ ID NO: 932399 - DNA, 690 bp, Homo sapiens
cccagttaatccctctccttatccctcaagcccaggcaaccattgatctgggttttctcactatacattcgatttgatgtttccagaactttctgtaaacagaatgataaagtatgtgctcttttctgtctcttccttggctcagaatcatgcctttgagatgtctccttgttgggagtatcagtagtgtgttcctgttcattataagtaacagcccgtcaccctktgtgtcacagtttgtttcacctgttgatgcgcgtttgaattgttcctgtcctgactgttatgaacaaagctgctgtaaacattcatgtgcaagtctttgtgtgggcatatatattcatttctcctggataaataccggagagtgaattgcttggtcatatggtaggtgtgtgtttaactttataagaaattgtccaactgttttccaaagtggtttgctgacctgagttcctgccagtaacaacagcgtgccagttgtggcgcatccatgtcgacacttggcattctgccttttcggggttttttttattttattttttgagatggcgtctcactttcttgtccaggctgcagtgcagtggcacagtctcagctcactgcaacctccgcctcccgggttcctgcaattctcgtgccttagcctgttgagtaagtgggattacaggcgggcgccaccacgcccag

SEQ ID NO: 932400 - DNA, 604 bp, Homo sapiens
gctgttcctcccccacccccgtctctagagggggtgatgacactcacaggcatcagcttgcagatgaagggcctagatgtgtaacgcagggctcgctgcctgggtttcccaaatcctgggccaccctcctgcaaagctcaagagagkagagcgaaggacccttcagtgcagcagaaaccaccggacaatgggaaaggtgcacagcaacccatcaacccgaggccccaaggggcctagagtctcatattcactaatgaaacatggtcgggggcgggggaacaggcaacagcagcataaaatcaatgtctcccctgcctcacagcatttctgccatctctcagaccatccaaaaatcaggtgccgctgtactgctccaggtcatgtggtcagtccacacgcggccttcaaagaagctgagagccgcagcccagcacagtggctcatgcctataatcttagcactttgggaggccaaggcgggaagaaaacttgaggtcaggagttcaaaaccagcctggccaatatggtgaaaccccgtctctactaaaaacacaaaaaaattagttgggtgtggtggtacatgcctgtaatcccagctacttgga

SEQ ID NO: 932401 - DNA, 605 bp, Homo sapiens
cacttcctggggctgccatgacaaaggaccacaaaccaggaggcttaaaacagcagatctagccgggggtgcggtggctcatgcctgtaatcccagcactttgggaggctgaggcaggcggatcatctgagttcaggagtttgagaccagcctgtctgacttggtgaaaccccgtctctactaaaaatacaaaaattagctgcacgtggtggtacgtgcctgtagtcccagctacttgggaggctgaggcaggagaatcgcttgaacccgggaggtggaggttccagtgagccaagatgcactccagcccaggtgacaaagcgagactctgtctcaaaagaaagaaagaaaacagacctgtgttttctcacagtgctggaggscaggactctgaaatcagggtgtcagcaggctgcactccttctagaggctccgggggagggtccttcctgcctcctccagcttctgggggctccaggcattccttggcctgtggctgcatcatgcctgtctctgccttggtctctacgaggccctctttcctgtgtgcctcagatctccctctccttcctgtcatgaggacacttggccctggatttatgtct

SEQ ID NO: 932402 - DNA, 652 bp, Homo sapiens
ctttatgtctagctaagggattgtgaatacaccaatgggcactctgtatctagctcaaggtttgtcaatgcaccaatcagcactctgtgtctagctcagggtttgtaaatacaccaatcagcactctgtatcttgctaatctagtggggatgtggagaacttttgtgtccggctcagggattgtaaacgcaccaatcagcaccctgtctaaatggaccaatcagctctctgtaaaacagaccaatcagctctctgtaaaatggaccaatcagcaggatgtgggtggggccagataagggaataaaagcaggctgccagagccagcagtggtaacccgctgggcttcccttccacattgtggagggtttgttctttcactctgtgcaataaatcttgttgctgctcactgtttgggtccacactgcctttatgagctgtaacactcayggtgaaggtctgcagcttctctcctgaggccagcgagaccacgaacccaccagaaggaagaaactccagacacgctgcctttaagaactgttaacactcaccgagagggtccgcggcttcattcttgatgtcagtgagaccgagaacccaccaattccggacacagaggtgctatggaggttgggcccacagagaagatgctcct

SEQ ID NO: 932403 - DNA, 594 bp, Homo sapiens
tccctgcactgggtgggtaactgactgttcttcagatgaacttttttttgttcaggttctaaagtcaaggctagggggcaatattagaagtcttttttggtcaacattaagccatagtttctaaatcagctttaggaggaataatgtatttggatattgatctgaccttttgtttttatttctaagttggtttggcactgaaaaagagaggtttgttatccaggccacacccctaatgccgtgacatccaggaatccgttttagtggaatccagatctctaagaaagagatataaaatatttgttcctatccaactgtgattactrtatttccaactatgttgctgtcggtaagtagagtctgcatacatgtttctggttcatatatgcctagggttccagagcattacatttccatcaaaatgtagatcccgagaatgccagagagggtcaggccgaggatagaacagacagtgattttcagatactgcagtaggaaggtggatccatgtcttggctggtacttgtaaccatgaagtgtgggaaagtaatgaccagattgagtaaatgaccagaaattcaaaactaagccaca

SEQ ID NO: 932404 - DNA, 594 bp, Homo sapiens
tccctgcactgggtgggtaactgactgttcttcagatgaacttttttttgttcaggttctaaagtcaaggctagggggcaatattagaagtcttttttggtcaacattaagccatagtttctaaatcagctttaggaggaataatgtatttggatattgatctgaccttttgtttttatttctaagttggtttggcactgaaaaagagaggtttgttatccaggccacacccctaatgccgtgacatccaggaatccgttttagtggaatccagatctctaagaaagagatataaaatatttgttcctatccaactgtgattactgtatttccaactatgttgctgtckgtaagtagagtctgcatacatgtttctggttcatatatgcctagggttccagagcattacatttccatcaaaatgtagatcccgagaatgccagagagggtcaggccgaggatagaacagacagtgattttcagatactgcagtaggaaggtggatccatgtcttggctggtacttgtaaccatgaagtgtgggaaagtaatgaccagattgagtaaatgaccagaaattcaaaactaagccaca

SEQ ID NO: 932405 - DNA, 594 bp, Homo sapiens
tccctgcactgggtgggtaactgactgttcttcagatgaacttttttttgttcaggttctaaagtcaaggctagggggcaatattagaagtcttttttggtcaacattaagccatagtttctaaatcagctttaggaggaataatgtatttggatattgatctgaccttttgtttttatttctaagttggtttggcactgaaaaagagaggtttgttatccaggccacacccctaatgccgtgacatccaggaatccgttttagtggaatccagatctctaagaaagagatataaaatatttgttcctatccaactgtgattactgtatttccaactatgttgctgtcggtaagtagagtctgcatacrtgtttctggttcatatatgcctagggttccagagcattacatttccatcaaaatgtagatcccgagaatgccagagagggtcaggccgaggatagaacagacagtgattttcagatactgcagtaggaaggtggatccatgtcttggctggtacttgtaaccatgaagtgtgggaaagtaatgaccagattgagtaaatgaccagaaattcaaaactaagccaca

SEQ ID NO: 932406 - DNA, 778 bp, Homo sapiens
agactgcttttttaagcactttcccaatgccattcctcctcactgggcaaaacctccaaactggggtctccagccacctcctacaggtgtgtttgggccagcaacaagttcattcatacctccctagggcaaagcttccaaagggagcggtaggctgccatctttgctgtttcacaggcttcactgatgataactccaggtactggaaaatctgaggctactagagactggagcgggccctgggcatactgcagcagccctatggaaaagtggccagactgttacctgggttcccattcctatatcttctcactaggcaagtcttgcaggcctggacctctacctaaccccccctaccagaactgttgagccagtagcaactcagccactccctggagagagcctccaggggcaactgaaagcctctctgccactgcttctgcagtggaactgtccttgctaccctcagactgatgaaggagctaacacccttatctacaccttcaacaagctttaattgaccaaagcccatctctcatgggttctacacactccccactgctyatgacagggaacccctggattggcccccacagcacgaattctccatcctgattgctgattgcagtaaacagttgctgtattctccaggggtggtggaactctgaggagacaaacaaaagacccttggctacaaccactactaatgtcccttcctcttctgcctcaaagttaggaaagaaatataaacactgagattgccccagagctgcagtgg

SEQ ID NO: 932407 - DNA, 673 bp, Homo sapiens
tttatgtatttcactattatctctgttcttgaggtcactgacatctattgtatatgcctggtggaaatgctatctaatggaagacaatggcacctctcttcccaactctgcagtcagtgacgtcaagccagtagcttgagactggtgactgtgggaatatttataccacagaaattggcaaatactacaaattacagcttctatttttccagagagcctgttgttaaacatttcccaaaacaaaccagagatgattctgaaagatggtggagaaggtaaatatttttagtagacataacttcaagggttctctcattgtctactttgcctaggggaagaaatagctagaccagaacataggcagtgactattggttkgactgggcagccagggtcttggaagaagcacagttggatgattggcgtcaataaattcagaaagaagacccttaggaatgagcgctgggtgtgcgaatacctgtggtccacgcaaatgctcaccaataagtctttactgcggagaagggtcccgatcatttgtattaaggccctgctacctatgactgtcaatcaccaacctccccaaccatcattgtgcttgcttgggaacccagcaacaaagggaccatggtttcaggatggatcctattcatgagctcaaaaatacagacagc

SEQ ID NO: 932408 - DNA, 567 bp, Homo sapiens
gtggcagctcaagatccaaggctgcttcaatcttgtggcacctacttctcaacacaagtgctctacagtttaccaagcaggagagggtagtatagaggacactgcatcagaaattaaatgcatcagcctggaagtgacatcagtcccttctgctcacatcctttgaccgcaaactaagtcatagagtaagaaaggatattccttgtaggtggcaagaagtagaagagcatgagatatgagtaaatgctgataatatctgctatataatttcaactctattattttgtatcttcaaatatacagtatagttgatttaatgcccacctttrtatcttcaaatatatagcccttcttgtattaattcatttatcacttcaatagctcacttgattatgaaatgattactgattataaaaaattacctcagtgtcttttgaaatgccaagtctgtattttaatcccataacctcttcacagacatactggtaatataaaatgatattaatattttaatattttgctcttccaatatagaaaaaagtacaattaaaacacaatggaactgat

SEQ ID NO: 932409 - DNA, 550 bp, Homo sapiens
cactagttaccagcttgtctagtctcatgaggcagaacacccatgcatatcacaggttacataaagagggtttattacttacagatagatagcaaggggcaagagatgccgagggcctgttgtaaacccatcccccaagactcagggaagctgcctggggtggatagagcttcaactgcacacgcttcatttgcagcactgcagagggaccctggaaagcagcattccatgggttttataccctaaggtcacatgacatgtggggctgaagcactgatggaatcttgtttctgagggagactgggacagagctctggctattccgkccagctcctctctatctcaaggatgtggcattctcagcacattctaaatttttttttttttttttgagataaggcctcactctgttgccctgactggagtgctgtggtgcaatgatggctcactgcagccttgacctcccaggctcatgcaatcctcccacctcgcctccaaggtagctgagactacaggtgtgcacaccatgcctggctaattttttttttaa

SEQ ID NO: 932410 - DNA, 564 bp, Homo sapiens
aaactcctgacctcaagtgatcctcctgtctcagcctcccaaagtgtggggattacaagtgtgagccaccgtgcccagcctgactggtgtttgtataagggattagagacacagacaaaatagagagggaagaccatgaagacacggggagaaagtgaccatctaaaagccaaggagagtcctcagaagaaattaaccctgctgacaccttgatcttggatatccagacyccaggacggtgaggaaatcaatcttttgtttaaaccactcagtctgtgctacattgctacaacagcacaagcagactaacacaggccccagtctgaaatggtctctcccctcccttctctcagctaccattggaacttcatttggtatttaatcaagcactgcttcaatgttatctcgcccactaatatctcacacagtaaaactgcttactacttttttcccatccattttttctcctgtctccccaaccaggtccttcacaaagtctatgagtataggctttgccttacaaaatatacatcttgaaatcttttgatggctgagccctccagg

SEQ ID NO: 932411 - DNA, 564 bp, Homo sapiens
aaactcctgacctcaagtgatcctcctgtctcagcctcccaaagtgtggggattacaagtgtgagccaccgtgcccagcctgactggtgtttgtataagggattagagacacagacaaaatagagagggaagaccatgaagacacggggagaaagtgaccatctaaaagccaaggagagtcctcagaagaaattaaccctgctgacaccttgatcttggatatccagactscaggacggtgaggaaatcaatcttttgtttaaaccactcagtctgtgctacattgctacaacagcacaagcagactaacacaggccccagtctgaaatggtctctcccctcccttctctcagctaccattggaacttcatttggtatttaatcaagcactgcttcaatgttatctcgcccactaatatctcacacagtaaaactgcttactacttttttcccatccattttttctcctgtctccccaaccaggtccttcacaaagtctatgagtataggctttgccttacaaaatatacatcttgaaatcttttgatggctgagccctccagg

SEQ ID NO: 932412 - DNA, 444 bp, Homo sapiens
atctgaaacaactataggtgagaatttttgcatgggaaatattttattccgaccctacagggtaaaagaagggctataaactaaagccgaagatattcagcagatttctgacgtggacatcagaagtgtggacatgagtgtgctttgagcgcactgtggaagagcagtggttgtccagcaaggtcctaggtgcctccgtggcctttcgtacagtgggcaagttgggyaggactcatcttaaaaatcgtgtatgttacaaataacaaaatttatttatttatttttttgagacagagtcttgctctgttgcccaggctggagtgcagtggcgctatctcggctcactgcaacctccacctcccggagggttcaagtgattctcctgcctcagcctcccaggtggctgggattacaggtgcccaccaccatgcccagctaattttt

SEQ ID NO: 932413 - DNA, 687 bp, Homo sapiens
tatggcccagactggagtgcaatggtgtgaccacagctcatggcagcttccaactcctgggctcaagtgatcctcctgcctcagccttgcaagtccctgggattataggcacaagacattgtgactgagatctcttattaatataaatttccttctaagctctgcatttattgcttcccgtaagttttggtgttatgtcttcactttaattcattccaaatattttctaatttcccttgtgattttctttaaccattcattatttatgagtttgttgtttaatttccatatctgtgaatttcccaactttccttctgttaataatttctcatttaattcccttgtgaggggagagcatactttgtatgatttcaatccttttaattttataaggcttgttttatggcctaatacatggcctatctttgaaaatgttttacgggcacttgtgaagagtatgtwttctgatgttcttgggtggaatgttctctaggtgtctataaggtctagttgctttatagtgttaagtcttctatttccttgttgatcgtctgcctggtagttttatctattattgaaaagtgggtattgcatttctccctttagttgttgctttttatttcatgtatcttgcttggtcttgttgcttttatggaattgttgattttctcaggtctttatccacta

SEQ ID NO: 932414 - DNA, 800 bp, Homo sapiens
  misc_feature 647, 648, 649, 650, 651, 652, 653, 654, 655, 656, 657, 658,659, 660, 661, 662, 663, 664, 665, 666, 667, 668, 669, 670,671, 672, 673, 674, 675, 676, 677, 678, 679, 680, 681, 682,683, 684, 685, 686, 687, 688, 689, 690, 691, 692, 693: n = A,T,C or G
  misc_feature 694, 695, 696, 697, 698, 699, 700, 701, 702, 703, 704, 705,706, 707, 708, 709, 710, 711, 712, 713, 714, 715, 716, 717,718, 719, 720, 721, 722, 723, 724, 725, 726, 727, 728, 729,730, 731, 732, 733, 734, 735, 736, 737, 738, 739, 740: n = A,T,C or G
  misc_feature 741, 742, 743, 744, 745, 746: n = A,T,C or G
aattaacacaggaacagaaaatgaaatatcgcacgtcgtcacttataaatgggagctaaatattgagtactcatgaacacaaaggggaacaatagacaccaggacttacttgagggtggatggtgagaagaaggtgaggactgaaaaaccacctattgaatattatattactgtgtccagaactggtgtgttcttggtctcactgacttcaagaatgaagccgcaggccaaggcgggtggatcacgaagtcaggagatccagaccatcctggctaacacggtgaaaccctgtctctactaaaactacaaaaaattagccgggcgcagtgaagggcgcctgtagtcccagctactcagggccctgaggcaggagaatggcgtgaacccgggaagcagmccttgcagtgagccgagatcgcgccactgcagtccggcctgggtgaaagagcgagacgcagtctcaaaaaaaaaaaaaaaaaaaaagaagccgcggaccctcgcggtgagtgttacagttcttaaaggcggcgtgtctggagtttgttccttctgatgttcggaggtgtctggagtttcttccttctggtggggttcgtggtctcgctgactcaggagtgaagctgcggaccttcgcggtgagtgttacnnnnnnnnnnnnnnnnnnnnnnnnnnnnnnnnnnnnnnnnnnnnnnnnnnnnnnnnnnnnnnnnnnnnnnnnnnnnnnnnnnnnnnnnnnnnnnnnnnnnagtgttacagctcacaaaggcagtgtggacccaaagagtgagcagcagcaagat

SEQ ID NO: 932415 - DNA, 633 bp, Homo sapiens
ctcatccgatttgaatatgctttatttctttctcttgcctgaatgccctggccagaacttccaataatatgttgaataggagtggtgagagaggacatccttgttttgtgccagttttcaaagggaatacttccagctttttcccattcaatatgatattggctgtgggtttgtcataaatggctcttgttattttgagatacattccagcaatacctagtttattgagtgtttttagcatgaaggggtgttgaattttatcaaaggccttttctgcatctgttgagataawcatgtggtttttgtcattgtttctgtttatgtgatggattatatttattgatttgcacatgttgaaccagccttgcatcccagggataaaaccgacttgatcatggtggataagctttttattgtgctgctggatttggtttgccagtattttattgaggatttttacactgatgttcatcagggatattggcctaaaatttcctttttttgctgtgtctctgccaggttttgggattagggtgatgctggagtcaaaaaatgagttaggaaggagtccctctttttctattgtttgtaatactttcagaaggaatggtttcagctccaatttgtaattct

SEQ ID NO: 932416 - DNA, 633 bp, Homo sapiens
ctcatccgatttgaatatgctttatttctttctcttgcctgaatgccctggccagaacttccaataatatgttgaataggagtggtgagagaggacatccttgttttgtgccagttttcaaagggaatacttccagctttttcccattcaatatgatattggctgtgggtttgtcataaatggctcttgttattttgagatacattccagcaatacctagtttattgagtgtttttagcatgaaggggtgttgaattttatcaaaggccttttctgcatctgttgagataatcatgtggtttttgtcattgtttctgtttatgtgatggattatatttattgatttgcacatgttgaaccagccttgcatcccagggataaaaccgacttgatcatggtggataagctttttaytgtgctgctggatttggtttgccagtattttattgaggatttttacactgatgttcatcagggatattggcctaaaatttcctttttttgctgtgtctctgccaggttttgggattagggtgatgctggagtcaaaaaatgagttaggaaggagtccctctttttctattgtttgtaatactttcagaaggaatggtttcagctccaatttgtaattct

SEQ ID NO: 932417 - DNA, 607 bp, Homo sapiens
aatagaatagactaaatcctaaactcttcatttcctccaatttaattttcttccacagaattaacaaaaatgaaaactgctctgtttctgaagccctataagctgaaactagatgcatttttcgaaacaattctcaagcctgatgtccagggtcacacaaatattcacaaacccacccaatgccataaccagagacatcaaactacaaacctggaaaataagttgaagttttcacccattagacagcttttcccaagatgtttcccagcacatgttataatgagactcttaaccatcttagtgcccacttttccacttggcaagctgaaggccctttaatttattcatttggctgcctttcagcctcagttcatatctcaaaacyattataaaactaggactgtcatattactattaatttttcttttcatttttccttttaaaactctgtatctgtaacttttaaagtttttgcagacaccaactcctaagagaataatgctggcccagcactttatgaaactatggaacagatataattgaacttaataacagactcccggtagaattagtctccgagtcactcctttcaatcctcccatgttgc

SEQ ID NO: 932418 - DNA, 804 bp, Homo sapiens
agcctactacactgttacttaatttgtataagcagaaaacttccaggtccagtggacaaaagactaatttgaattataaacatagagcatcaccgcccctcaatcaatttccagatttgagccagtttacagatccaggaacccttgaatgaaggggaggccaagtccctttgaggaacccccactacactacccacaattatactgttaatctttctcccatctttccccaaggagacctccgcccttttaccagggtaactgtgcattggggaaagggaaataatcagacctttcagggactactgaacactacttctgaggtgacattgattccaggggacccaaaatgtcactgtggccctcaagttagaggaggggcttgtgaatgtcaggtaattaatggagttgtagctcaagtctgacctacagtgggtccagtgggtccctggactcatcctgtggtcatttctccagtgccagaatgcataattggcatggatatacttagtagttagcagaatccccacataggctccctgaccagtacggtgagggctattattgtgkcaaaggccaaatggaagctattagagctgcctctacctagaaaaatagtaaatcaaaaccaatatctcatccctggagggattgctgagatcagtgccaccatcaaggacttaaaggacgcaaaggtggtgattcccaccacatcttaattcagctctcccatttggcctgtgcagaagacagatggaccttggagaatgacaatggattatcataagcttaaccaagtggtga

SEQ ID NO: 932419 - DNA, 606 bp, Homo sapiens
aactagaaaagcaagtttccaagttcagcagctactccaacaggaaaaaacatcatgtggaaggttggtgtgctgcttaagaaagggtgagaaccaaagttcacacccctgccactccctaccatagaaaatcaaacccataggcgccaacaaaattaatcatcttaagaatccttgtgttaaaagtcaaggaaatcagatataaatctagaataaaagactggttaataaagggagaaaaaaaaaaacgaatcctcaacaggtaatrtggtttcttttactatctgatgaaggtcaagatgatgttataaaaatagtgaattcacactaaggaggcacaatatctgacatttctttgtcaccaattctcagaattctaacatggaacaacaatcatcataataaactgtggttttgtgaactgtgacctattgaattactagaggggtttcacccaatgttaacccctcaatgacttttttttttttttgtatctgatgttattgtctccatttgcaaagggcagttatgacagagcaattgtgacccagggtgagcacccatgtgtcatccctggcagatttctgccttctcataggactttgc

SEQ ID NO: 932420 - DNA, 681 bp, Homo sapiens
tgaagtgggaggagcacttgagcccaggaagtggaggtggcaatgagctgagattgcactactgcactccagcctgaatgacagagtgagactctgtctcaaaaagtaagtaaataggccaggcatagtggctcatgcctgtaatccctgcactttgggaggctgaggcgggcggatcacgaggtcaggagatcaagaccagcctggctaacatggtgaaacccgtctctactaaaaatacaaaaaataaaaaaatagccgggtgtagtggcgggtgcctgtggtcccagctactcaggaggctgaggcaggagaacggcgtgaacctgggaggcggagcttgcagtgagccgagatcgcgccactgcactctagcctgggcgacagagcaagactccgtctcaaaccaaaccaaaccaaaccaaaccaaaccaaaccaaaccaaaacaaaacaaaacmaaataaaaaattagccaggagtggtggcacacatctgtgatcccagctactcgggagggtgaggcaggagaatcatttgaacccgagaggcggaggttgcagtgagctgatatcgtgtcactgcactcaggctgggtgacagagcaagactctgtctcaaaaaaaaaaaaaaaaaaaaaagcaaaaaagtaagtaaataaaatagatttttttaaaaaagaa

SEQ ID NO: 932421 - DNA, 656 bp, Homo sapiens
tggggacctcaagaggaaaggaatttattcaattcatacaggtatttgatggcaccaacccatggctgggcttaaggctttaaaaacgtcttatctgagattccttatggaacaaagttgcatcaaagccaatttaaaaaggagcctataagggaaataattattcttgctgtgctttgtgcaaataattaggccaagtataagaagactaaagtttattttgcaaacaaatctgtcctgtcatgatttgtttttaataaaaatgaggactggagagaaaaattctatttatttcttattttttttcttttttcttttttttttttgagatggagtctctcactctattgcccaggctggagtgcagaagcatgatctcgactccctgcaacctctttcacctgggttcaagcgattctcctgccatggccttctgagtagctgggattacaggcacccaccmccacgcccagctcatttttgtatttttagtagagatggggtttcaccatgttggccaggctggtctcaaactcctgaactcaagtgatctgcccaccttggcctcccaaagtgctgggattacaggcatgagcaccatgtctggaaaattatgtttcaagaactatggtatacctgttcttagattctagtct

SEQ ID NO: 932422 - DNA, 624 bp, Homo sapiens
agatatctacatacagaagcatagttaacaaaaatactcatgttgtccagtcatgcaggcttctggtgtttttccatttcctggattctcaactttagccctcctgccatctcttcattcacttatgcaaaaaatgtatacattacactccaaatacctaatgtgtaattagattcccataaaacaaatctaaccaaaatatttgaaacatcagaggcttcatkttaatcaccttttatatataaaaatatttgccatgattattgagttacattttaacaaacctgcacgttgtgcacatgtaccctaaaacttaaagtacaataataataaaatttaaaaataaataaataaataatacttaagaaatatatttcttgattgttttgcttccacagtcagtttgacatgcagtgcatcgcattttgctaacatgaagcacctgtcctattgtcgatgtgtgacccctacagagagaagaattgagtccctgtggttgactctcattcttccaccttctgcttccagtaagctctgaagcaacaataatccaatattctgttcgagtgcgaatataccaggtccacataaagtgagttttctcaggtttcctcatcagaaacc

SEQ ID NO: 932423 - DNA, 612 bp, Homo sapiens
ccagagactggtgtttttgtctgcccctggcccgcagccgcggggtgctcggccttcacttccactcctgctcacctgagccagggcagaatttcaaggctggatctcagcattttttttcccccctgagggcattgggaagaccagaacaggccctccggaaaagagccaaagctggatcctgagcaaaaaggcaaagatggttcaagggttgggagcgggaggctaccgccagtttcttcagagtcagaagctaggcccacttcaccacagtatgcattcagccggaattgtagcctgccaagaccctgtgggtccttgggggtgtgctgggcgtctttcagttgttgttgctttgttttttaaaaggaaaaacatacaaggccgccaaaccccagcatccatcccgagtagagctgacaggttttgtcttctttttggggggtggggtggtggtgrggacagtggcctgagtggggaaggcaggaggagtgagggaggaggtcgcttgcagagtttagggtctagaatcaggatggactcccctcctcacctcctgagtgtgtgtctatgtgacagtgtgatttgccttacggctctcgatctgtctcc

SEQ ID NO: 932424 - DNA, 590 bp, Homo sapiens
gctatggagagacactcctgcttgagaaaaggagagggaagagtaaaggagactttgtcttggagcttaggtaccagctcggccacagttggtagaacaccaagagggctcttgggtcctcagttccagggtttggctctggaaaagcatttctggaccttccctgggccataggggagcccattgcccagaagggagaatcccaggcttggccgcattcaccatgagatcactgaagagctcttaagatttgagtgaacattggcagtagccagccgatacttgttgtggatataggacagtgatggctacagggagagactcttctgcttatgcgaagggaaaggaagaatgggaaagatttttttcttgtggcttggctttcagctcagcctcatagcatagaacaccaagtagattcctaaggtttcygactcagatcctggctcctggatggcatctctagacgttcccagggctgcagagaactcactactttgaagggaaggacataagcctggctggctttgccgccagcccacctggggctgattttagagccccagggcattgagcaaacataggtgata

SEQ ID NO: 932425 - DNA, 590 bp, Homo sapiens
agaaggctctacaacaggaccaggttgttgtgcaagctgctctgcctcttgggccatatgacccagcagatccaatggtgcttgaggtgtcagtggcagatagggatgctgtttggagcctttggtaggcccccataggtgaatcacaatgaaggcctctaggagtttgaagcaagaccctgccatcttctgcagataactactctccttttgagagacaactcttggcctgttactaggctttggtggaaactgaatgtttgactgtgggtcattaagtgaccatgcgacctgaactgcctatcatgaactgggtgctttctgacccatctagccataaagtgggtcatgcacagcagcattccatcatcatatggaagtggtatatatgtgatcgggctcaagcaggtcctgaaggcacatgtaattcacaggagaaagaggctcaaatrctcatggtctccactcctgccaccctgccttccctcccctgcactaattgcctcatggggagttccttatgatcagttggcagaggaagagaagtctggggcctggttcacagatgattctgcatgatatgcaggcac

SEQ ID NO: 932426 - DNA, 558 bp, Homo sapiens
ctgtgggcactgggggagggagaacacagcaactgtgaggcattaaactaagtactgtcctgttagagtagaaataaaaactgaaccaaacttgactgatgccagcccacatagggagcattttaacaagctctagccagagggaaatcttcaatcccagaggtcagaacttgagtrcccatataccttgccactgagggccaaggtgctgtcagtctgtaagtaaacttgaaaggtagccttggccataaggactacaactcttaggtgagccctggggcttaagtacacccagagacattgcactggggagggcatgagacatactgagaaaccagctggggcagccaaaggagtgctggtctcactcattccttaacccaggtgcacaggtcatggctccaaaagagacccctttcttcagcttgaggagaggagaagaaaaagtagggaggactttgtcttgcatcatacataccacctcagccatagcaggatagggcaccagtcagagtcatgagatctttgtggcaggtccttactcccagataacatttc

SEQ ID NO: 932427 - DNA, 558 bp, Homo sapiens
ctgtgggcactgggggagggagaacacagcaactgtgaggcattaaactaagtactgtcctgttagagtagaaataaaaactgaaccaaacttgactgatgccagcccacatagggagcattttaacaagctctagccagagggaaatcttcaatcccagaggtcagaacttgagtgcccatataccttgccactgagggccaaggtgctgtcagtctgtaagtaaacttgaaaggtagccttggccataaggactacaactcttaggtgagccctggggcttaagtacacccagagacattgcactggggagggcatgagacatactgagaaaccagctggggcagccaaaggagtgctggyctcactcattccttaacccaggtgcacaggtcatggctccaaaagagacccctttcttcagcttgaggagaggagaagaaaaagtagggaggactttgtcttgcatcatacataccacctcagccatagcaggatagggcaccagtcagagtcatgagatctttgtggcaggtccttactcccagataacatttc

SEQ ID NO: 932428 - DNA, 646 bp, Homo sapiens
ctctccagaaagaaatttgagggcatttttgggctcattttctgatgtatatcagtattaaaatgtctgtttcacagtgactgaaaagagctttcataaactttgccatgttttctagttgttttaggcagtaaagttctgtagcaattagttcttcatgtctggaaacaaaattatcctttaaaagtatgattatcgttccattcactctagatcttaacttctttgctgcttgaataactgacccttaaaaaatcatttttgtcctcctgcattttagtattcataatgttgaacgttaagttatgcaaagcaaaacttataaagacctatactgcataatagaaaaagaagttgcctgtgaattgagaaaaacaaaagtattcatttgctggctccattaagtataacttcacattttattgtacttacactgatatataatacaattttacaattccagtaactcttytggtgggatcaactctaatttatccacaagtacgatctcaaatgcctactacctaaaggactctatcctaaaaatcttttgggaatcagtttcatatgatgcattttgcactgttgcccatcatgcctgtccataatggcccatggtcatatgttatgggttaatgcatcactc

SEQ ID NO: 932429 - DNA, 630 bp, Homo sapiens
ggaaggaccccactatgttactgacaattttttcaacgaatctttctcccatccttccctcaaaagaccttcagccttttaccagggtaactgtgcgttgttgaaaagaaaatgatcagacatttcagggagtactggacactggctctgagctgayattgatttcagaagacccaaaacatcactgcggtcttacagttaaagtaggggcttttggaggtcaggtaattagtagcgttttagctcaggtcttacttacagtgggtccagaggtttccctgactcatcctatgttcagttccccagtgtctgaatgcataattggcatagacatacttagcatcttgcagaacccccacactggctctctgactggtagggttagggctattatggagggaaaggcaaaatagaagccattagaactgtctctacctagaaaaaatagaaaatcaaaaacaatatcacatccttggagggattgcagagattagtgcaaccatcaaggacttgaaagacgcatgggtggtgatttccaccacatcctctttcaatgctcccatttggcctattgagaagacagatgaatgttggggaataatagtggaatatcatacacttaaccaagtg

SEQ ID NO: 932430 - DNA, 630 bp, Homo sapiens
ggaaggaccccactatgttactgacaattttttcaacgaatctttctcccatccttccctcaaaagaccttcagccttttaccagggtaactgtgcgttgttgaaaagaaaatgatcagacatttcagggagtactggacactggctctgagctgatattgatttcagaagacccaaaacatcactgcggtcttacagttaaagtaggggcttttggaggtcaggtaattagtagcgttttagctcaggtcttacttacagtgggtccagaggtttccctgactcatcctatgttcagttccccagtgtctgaatgcataattggcataracatacttagcatcttgcagaacccccacactggctctctgactggtagggttagggctattatggagggaaaggcaaaatagaagccattagaactgtctctacctagaaaaaatagaaaatcaaaaacaatatcacatccttggagggattgcagagattagtgcaaccatcaaggacttgaaagacgcatgggtggtgatttccaccacatcctctttcaatgctcccatttggcctattgagaagacagatgaatgttggggaataatagtggaatatcatacacttaaccaagtg

SEQ ID NO: 932431 - DNA, 833 bp, Homo sapiens
actgacactgcccgatcacctcagaagcctacaggaccatcagagatactcttggtaactctcacagtggaaagtaaatccgtccccttcttaatacggaggctacccactccacattaccttattttcaaaggcctgtttctcttgcctccataactgttgtgggtattgacggccaggcttctaaacctcttaaaactccccaactctggtgccaacttagacaatactctcttaagcactcctttaattatccccacctgcccagttcccttattaggccgagacactttaactaaattatctgcttccctgactattcctggactacagcaacacctcattgccrccttttcccccagttcaaagcctccttcacatcctccctttgtatcccccgaccttaacccacaagtataagacacctctactccttccttggtgaccgatcatgcaccccttaccatcccattaaaacctaatcactcttaccccgctcaatgccaatatcccatcccacagcatgctttgaaaagattaaagcctgttatcacttgcctgttacagcatggccttttaaagcctataaactctccttacaattcccccattttagctgtcctaaaaccagacaagccttacaggttagttcaggatctgcgccttatcaaccaaattgttttgcctatccaccccgtggtgccaaacccatatactctcctatcctcaatacctccctccacaatccattattctgttctggatctcaaacatgctgtctttactattcctttgcacccttcaccccagcctctctttgctttcgcttagac

SEQ ID NO: 932432 - DNA, 576 bp, Homo sapiens
agaatttcatgtacttttaactttcacagttgtgatattattcctatatgtctggttaattgagatcattgacaattatgatataagaaaatccagagcagggaaaaaagagcaatattttatgtcttggaaggtactgtcaaatatttaaattataaactgaatgtgcacttaaggcaaggtgkggggtaagaacatgggatggggaagcgttgcacagaagcagatagtctagagaaaatcaaacatctaaatttgttcacctgaaataataatgtggttttgatttttttttttttttagacagagtctcattctgtcgcccaggctggagtgcagtggtgtgatctcggctcactgcaacctctgcctcctgagttcaagtgattctcctgcctcagcctcccaagtaactgggattaaaggtgcctgccactcccggctaattttgtgtatttttagtagaggcaggggtttcaccatattggccaggctgatctcgaatgcctgacctcgtaatccacccacctcggcctcccaaagtgctgggattacaggcatgagccactgtgcctg

SEQ ID NO: 932433 - DNA, 750 bp, Homo sapiens; identical to SEQ ID NO: 926699

SEQ ID NO: 932434 - DNA, 750 bp, Homo sapiens; identical to SEQ ID NO: 926700

SEQ ID NO: 932435 - DNA, 552 bp, Homo sapiens
cagtggagtgatctcggctcactgcaacctccgcctccagggttcaagagattcttgtgcctcagcctccccagcacctacgattacaggcaagtgccaccatgcctggctaattttttgtatttttagttgagacagggttttatcaggttggccaggctggtcttgaactcctgatctcatgatctgcccgcctcagcctcccaaagtgctgagattacaggcatgagccactgtatctggccatctttttttttttttrgagacagggtctccctctgtcacctaggcaggagggcagtggcacaacacagcacactgtaatcttgaactcctgggctcaagggatcctcccacctatctctcaagtagctgggataaaaggtgcatgccaccacatccagctaattgctttaacttctggtagaggtgggtgtctcacaatgttgcccagattgctttcaaactcctgacatgatgtaattctcccgccttgacctcccaaggcactaggattacaggtgtaagccaccgtgcccagcctcataccat

SEQ ID NO: 932436 - DNA, 552 bp, Homo sapiens
cagtggagtgatctcggctcactgcaacctccgcctccagggttcaagagattcttgtgcctcagcctccccagcacctacgattacaggcaagtgccaccatgcctggctaattttttgtatttttagttgagacagggttttatcaggttggccaggctggtcttgaactcctgatctcatgatctgcccgcctcagcctcccaaagtgctgagattacaggcatgagccactgtatctggccatctttttttttttttggagacagggtctccctctgtcacctaggcaggagggcagtggcacaacacagcwcactgtaatcttgaactcctgggctcaagggatcctcccacctatctctcaagtagctgggataaaaggtgcatgccaccacatccagctaattgctttaacttctggtagaggtgggtgtctcacaatgttgcccagattgctttcaaactcctgacatgatgtaattctcccgccttgacctcccaaggcactaggattacaggtgtaagccaccgtgcccagcctcataccat

SEQ ID NO: 932437 - DNA, 552 bp, Homo sapiens
cagtggagtgatctcggctcactgcaacctccgcctccagggttcaagagattcttgtgcctcagcctccccagcacctacgattacaggcaagtgccaccatgcctggctaattttttgtatttttagttgagacagggttttatcaggttggccaggctggtcttgaactcctgatctcatgatctgcccgcctcagcctcccaaagtgctgagattacaggcatgagccactgtatctggccatctttttttttttttggagacagggtctccctctgtcacctaggcaggagggcagtggcacaacacagcacactgyaatcttgaactcctgggctcaagggatcctcccacctatctctcaagtagctgggataaaaggtgcatgccaccacatccagctaattgctttaacttctggtagaggtgggtgtctcacaatgttgcccagattgctttcaaactcctgacatgatgtaattctcccgccttgacctcccaaggcactaggattacaggtgtaagccaccgtgcccagcctcataccat

SEQ ID NO: 932438 - DNA, 541 bp, Homo sapiens
gggttgaggttaatgtgagggaatcggggaggcagtgactgtaggctaagaatggttggaaagatgataggagccttagtgtagtgtcagtgctaaagaggggatgttgatacaggatgtgtacagctcagatgtcaaggatgatgaaacttgaaaaggaatactgcattgagtgccttcagacagcaggttgaatggcatgaccagcaacgatctagaaaagtgggaaggagagggtgacggtgaaggcaaaactggtgcctgctggtttgagttaggccatgaggaagtgacagacatgggttagagagtcggtacaaaaggacttgttacgggtcgtatctaggctggtgagstctttggatttcagatagtggctagagattatagtaacatagcacctggaaagaaggggagaagccagcgctgggaaagtgttcttgggagtggtgagagggtaatgattggacagagcctagggagagtttgagcctgagaatgaggtaatagaaaacaagcagtcatgacagtaaaagggaca

SEQ ID NO: 932439 - DNA, 592 bp, Homo sapiens
tcttgttgatgctgttcttgttgctttcagtttgtttgtttgtttttctttcagtagtcagttccctcttctgtggggctgctgcagtttgctgacggttcgctttgggccctattcatctgattcgctcctgcctctggaaatgtcactcaaggaggctggagaacagcaaagatgggtgcctgctccttcctctgggatccctgacctcgaggggcactgacctgatgccaataggaatgctcttgtataggatatctgacagttcctgttgggggggtctcacccagttgggtggcatgggaagcaagacctggttaaggaggcactttggctatcccttggtggaggaggtgtactgtgccggggagggggtggggggaacccgcttgtctgggctgactggattactttttgtaagtctgctcgtctgtggagacttaagccacccctcycccttaggggttcaggcctagggagatcagagttctgtccctgagcccctgggtagaattggagttcctgcagggaagccctgcagccacagtgctggctgccgcccctcccccaagaagctcagatggcttagact

SEQ ID NO: 932440 - DNA, 657 bp, Homo sapiens
tgggtatcaccagcggaggctgcagaacagcaaatattgctgcctgatccttcctctggaagcttcgtcccagagaggtagcaccctatatgaggtgtctgtcggcccccagtggtaggtgtttcccagttaggctacacgggggtcagggacccatttgaggaggcagtctgtccgttctcagagctcaaacgctgtgctgggagaaccactgctctcttcagagctgtcagacagggacatttaagtctgcagaagtttctgctgccttttgttcagctatgccctgcccacagaggtggagtctggatgcattaggccttgttgagctgcggtgggctctrcccagtttgagcttcctggccgctttgtttacctactcaagcctcagcaatggtggacgcccctcccctagctaggctgccacctcgcagattgatcccagactgctgcgctagcagtcaggaaggctccttgggcatgggacccactgagccaggcatggtagagaatcactttgtctgctggttgctaagaccttgggaaaagtgcagtatttgggcagggggtgtcccgttcttccagatagtctgtcacggcttcccttggctaggaaagggaaatcgcccgaccccttgtgcttcctgggtgaggcga

SEQ ID NO: 932441 - DNA, 604 bp, Homo sapiens
cttgttgagctgcggtgggctctgcccagtttgagcttcctggccgctttgtttacctactcaagcctcagcaatggtggacgcccctcccctagctaggctgccacctcgcagattgatcccagactgctgcgctagcagtcaggaaggctccttgggcatgggacccactgagccaggcatggtagagaatcactttgtctgctggttgctaagaccttgggaaaagtgcagtatttgggcagggggtgtcccgttcttccagatagtctgtcacggcttcccttggctaggaaagggaaatcgcccgaccmcttgtgcttcctgggtgaggcgatgccctgccctgcttcagctcgccctctgtgggcagcacccactgtacaaccaatcccaatgagatgaaccaggtacctcagttggaaatgcagaaattacccgtcttctgtgttgatcacgctgggagcagcagatgggagctgttcctatttggccatcttggcaacttcctttttaacattttttttgagacagagtctcactctgtcacccaggctggagtgcagtggtgcagtctcggctccctgcaacctccacctcctag

SEQ ID NO: 932442 - DNA, 604 bp, Homo sapiens
cttgttgagctgcggtgggctctgcccagtttgagcttcctggccgctttgtttacctactcaagcctcagcaatggtggacgcccctcccctagctaggctgccacctcgcagattgatcccagactgctgcgctagcagtcaggaaggctccttgggcatgggacccactgagccaggcatggtagagaatcactttgtctgctggttgctaagaccttgggaaaagtgcagtatttgggcagggggtgtcccgttcttccagatagtctgtcacggcttcccttggctaggaaagggaaatcgcccgacccmttgtgcttcctgggtgaggcgatgccctgccctgcttcagctcgccctctgtgggcagcacccactgtacaaccaatcccaatgagatgaaccaggtacctcagttggaaatgcagaaattacccgtcttctgtgttgatcacgctgggagcagcagatgggagctgttcctatttggccatcttggcaacttcctttttaacattttttttgagacagagtctcactctgtcacccaggctggagtgcagtggtgcagtctcggctccctgcaacctccacctcctag

SEQ ID NO: 932443 - DNA, 604 bp, Homo sapiens
cttgttgagctgcggtgggctctgcccagtttgagcttcctggccgctttgtttacctactcaagcctcagcaatggtggacgcccctcccctagctaggctgccacctcgcagattgatcccagactgctgcgctagcagtcaggaaggctccttgggcatgggacccactgagccaggcatggtagagaatcactttgtctgctggttgctaagaccttgggaaaagtgcagtatttgggcagggggtgtcccgttcttccagatagtctgtcacggcttcccttggctaggaaagggaaatcgcccgaccccttgtgcttccygggtgaggcgatgccctgccctgcttcagctcgccctctgtgggcagcacccactgtacaaccaatcccaatgagatgaaccaggtacctcagttggaaatgcagaaattacccgtcttctgtgttgatcacgctgggagcagcagatgggagctgttcctatttggccatcttggcaacttcctttttaacattttttttgagacagagtctcactctgtcacccaggctggagtgcagtggtgcagtctcggctccctgcaacctccacctcctag

SEQ ID NO: 932444 - DNA, 604 bp, Homo sapiens
cttgttgagctgcggtgggctctgcccagtttgagcttcctggccgctttgtttacctactcaagcctcagcaatggtggacgcccctcccctagctaggctgccacctcgcagattgatcccagactgctgcgctagcagtcaggaaggctccttgggcatgggacccactgagccaggcatggtagagaatcactttgtctgctggttgctaagaccttgggaaaagtgcagtatttgggcagggggtgtcccgttcttccagatagtctgtcacggcttcccttggctaggaaagggaaatcgcccgaccccttgtgcttcctgggtgaggcgatgccctgccctgcttcagctcgccctctgtgggcagcacccactgtacaaccaatcccaatgagatgaaccaggtacctcagttggaaatgcagaaattacccgtcttctgtgttgatcacgctgggagcagcagatgggagctgttcctattyggccatcttggcaacttcctttttaacattttttttgagacagagtctcactctgtcacccaggctggagtgcagtggtgcagtctcggctccctgcaacctccacctcctag

SEQ ID NO: 932445 - DNA, 636 bp, Homo sapiens
actgttctagtccaggagcaatgggacagggacccaggccgggtgcggtggctcacgcctgtaatcccagcactttgggaggccaaggcgggtggatcacctgaggtcaggagtttggcaccagcctggccaacatggagaaaccctgtctctactaaaaatacaaaaattggctgggcatggtggagtgcacctgtaatcccagctacttgggaggctaaggcataatcatcacttgaacccaggaggtgaaggttgcagtgagccaagatcatgccactgcactccagcctgggcgacagagtgaggctctctcaagaaaaaaaaaagaaagcaatggactttgaggcagagaccttgatgcagcggggatcccagcacccctatattgtgctcagccagaggccagggcatttgtcaaccaaggacccatccaccaagactccctggcacgagctgggctgcaaagcccaaccaggcagagaagaaactgccaggctstcttctgggctaccggccccaggcgccagcatttgagtggcccgtgggagccaatatttatcgtgttttaatttagtggcatcagtcctctatccaggtgggatcagcggctgctgaattagagaacgccccctt

SEQ ID NO: 932446 - DNA, 710 bp, Homo sapiens
tctgcttgccattttccttcccgtcagaattggcaactctttcccttcttcacttctgaattccatgtgtgcctgcagggatgtgggtggaggctggaaagtgagctggaggggagcatgttgggggaacttgctggggatgggatttctgtgtggacagccatgctccaggcctggatcagcctagagcgctttcaaaatgacccacatcccaaagtttggcagctcggctgtgtcatgctgacttggcttcctgcgtttctccacttgcaccctcctgccccactcctgcacccatgtccttggctaccmctgtcactgaggaccagacacagccatcacccccccaggtgggggtcagcccaccctgccctgtcctagagtcacatctctgaacttcaaagactgttcagacccatcaccaatgtctaattagacccagctcagagaatcgctaatacatttatgcagctcactttctgatcacgtctatatctccagtaagcacacgcacctcacacttgcacacccacatgcacccacgcacgcacccacgcacacacccacgcacacactcacacgcacacagtcgcacacacacgcgcgaacacttatctgtctttaaaagtatcatactaacagtaaagaacatttaaaaatattgacctctgatcctactgcaatccaacagttatttttgcaatcatcgt

SEQ ID NO: 932447 - DNA, 710 bp, Homo sapiens
tctgcttgccattttccttcccgtcagaattggcaactctttcccttcttcacttctgaattccatgtgtgcctgcagggatgtgggtggaggctggaaagtgagctggaggggagcatgttgggggaacttgctggggatgggatttctgtgtggacagccatgctccaggcctggatcagcctagagcgctttcaaaatgacccacatcccaaagtttggcagctcggctgtgtcatgctgacttggcttcctgcgtttctccacttgcaccctcctgccccactcctgcacccatgtccttggctacccctgtcactgaggaccagacacagccatcacccccccaggtgggggtcagcccaccctgccctgtcctagagtcacatctctgaacttcaaagactgttcagacccatcaccaatgtctaattagacccagctcagagaatcgctaatmcatttatgcagctcactttctgatcacgtctatatctccagtaagcacacgcacctcacacttgcacacccacatgcacccacgcacgcacccacgcacacacccacgcacacactcacacgcacacagtcgcacacacacgcgcgaacacttatctgtctttaaaagtatcatactaacagtaaagaacatttaaaaatattgacctctgatcctactgcaatccaacagttatttttgcaatcatcgt

SEQ ID NO: 932448 - DNA, 599 bp, Homo sapiens
cccatctacagttggatgtttaatgggtatttcaaatttgccatgtacaaactgaatgttggccttctcccttcatgaaaattgatcttttaaaacccccaattcagtccgtggcaacctcgtttttctacttgcagctaaaaatcttaattttgttacttcttgtttttatactccccatcaatctgtcrtcaaaccctgttcacttaacttcaaatatattcagaatctgcaattttttacgacctccattgctactaccctagtgcaaagctaccatcattcctcccctgagtttttacagcactcttaacttgtcacttgcttccagccttgaacctccacagcttattcttaacctaagcaacatcatatttcttctctggtcaaaaccctagaagagtttcccatctcacatgtaccattcagggttctccagaacattgaaccagtaggagatgatagatagatagatagatagatagatagatagatagatagatagatagatgatagatagatagatagatagatagatagatagatagatagatagataatacagagagagagactttaaggaattggctcatgtgatt

SEQ ID NO: 932449 - DNA, 615 bp, Homo sapiens
ataaaaaggatggcagcaggagaatagcaaagaggaatgccaggccagtgcctgacacacagtaggctgctgaaatagtatctgctgaaagcactgtcagcagacagccatcagacaatggagaaaagaattagtgagctggtagagaatcaaatccmcaatatcaaagtaagcaaatagatgaaaacaaagcaaaagtacctagtagactttttaaaacacgaatacccaacttgagaataataagtatgacaagataaaaatgcagggattctctgaacaaacattaaggaaatatttgaagaaaaattcccaggattggccgggcatggtggctcacacctgtaatcccagcactttgggaggccgaggcgggcggatcacctgaggccaggagttcgagaccagcctggccaacatggcgaaaccctgtctacactaaaagtacaaaaaattagcccagcgtggtggtgggtgcctgtaatcccagctactcaataggctgaggcaggggaattgcttgaacccgggaggcggaggctgcagtgagctgagatcacaccattgaactccagcctgggcaatgagagagaaacttcgtctaaaaaaaaaaaa

SEQ ID NO: 932450 - DNA, 615 bp, Homo sapiens
ataaaaaggatggcagcaggagaatagcaaagaggaatgccaggccagtgcctgacacacagtaggctgctgaaatagtatctgctgaaagcactgtcagcagacagccatcagacaatggagaaaagaattagtgagctggtagagaatcaaatccacaatatcaaagtaagcaaatagatgaaaacaaagcaaaagtacctagtagactttttaaaacacgaatacccaacttgagaataataagtatgacaagataaaaatgcagggattctctgaacaaacattaaggaaatatttgaagaaaaattcccaggattggccgggcatggtggctcacacctgtaatcccagcactttgggaggccgaggcgggcggatcacctgaggccaggagttcgagaccagcctggccaacatggcgaaaccctgtctacactaaaagtacaaaaaattagcccrgcgtggtggtgggtgcctgtaatcccagctactcaataggctgaggcaggggaattgcttgaacccgggaggcggaggctgcagtgagctgagatcacaccattgaactccagcctgggcaatgagagagaaacttcgtctaaaaaaaaaaaa

SEQ ID NO: 932451 - DNA, 477 bp, Homo sapiens
acctgcagtgtaaacaagagcagggcatgtatgagtagttgagaatggtgaataggagtatgactagacaaaagatagtagggatgacaagtttttttggggcacagtctaagttggtctggtgtcaaatgagactggggcctaataaaaaggagcatctatacaggagcttaaatgggctgtaccttgtagcattctgaggacaggcctgaattctgagaagcgaaagtggtaaaagtattgtccagtcctttttaagttggtggctgagcttggtgaggtgtgtytttaaaagacctttagtccgttctacttttcttgaagacggaggaccgtaagggatataaaggtttcactgaatactaagagcctgaaaaactgcttgactaataaaggcggtctgttatcagactgtatagaggtgggaaggctaaactgaggaattatgtttgacaggagggaagaaatgactgtggt

SEQ ID NO: 932452 - DNA, 669 bp, Homo sapiens
ggagaaacagtgtaaacctgcagtgtaaacaagagcagggcatgtatgagtagttgagaatggtgaataggagtatgactagacaaaagatagtagggatgacaagtttttttggggcacagtctaagttggtctggtgtcaaatgagactggggcctaataaaaaggagcatctatacaggagcttaaatgggctgtaccttgtagcattctgaggacaggcctgaattctgagaagcgaaagtggtaaaagtattgtccagtcctttttaagttggtggctgagcttggtgaggtgtgtttttaaaagacctttagtccgttctacttttcttgaagacggaggaccgtaagggatataaaggtttcactgaatactaagagcctgaaaaactgcttgactaataaaggcggtctgttatcagactgtatagaggtgggaaggctaaactgaggaattatgtytgacaggagggaagaaatgactgtggtggccttctcagaccctgtaggaaaggcctttacttattcagtgaaagtgtctatttagactaagaggtattttagtttcctgactcagggcatgttgagtaaagctaatttgccagtcctgggtggggcaaatcctcgagcttgatgtgtagggaagggagggggcctgaataatcc

SEQ ID NO: 932453 - DNA, 763 bp, Homo sapiens
aaatcttctataatgtaatgtgcttaaaagatccacattttatcatctctgtagtattttattgattagaagcatttcacagatttcactcacactaaaggtgagggtactgtacaagcatgtaaacatgaagaggagaatattatgcaggcccccttaaaacccgttcaccacaaatcatgataataaccccagatccccaaaataaactatgaattactctcatctttatgttactctcatctttatatttctcccctctttaaaaagaaaatctaaaccagtaactgcacaatcctcaaataattggtgcttttgccaaagataatatctcccaggttactccgcagtacgtttggcgaacatcctttaatgagaaaatacaatctttgacaatctgtcagctttcccattgccactacccttcttcaactgatggcaaatagttttaatcaaaagcattataaagtacagtctttggctctttaaacaaaatccctctccctcatctaatattctgaggttttattttacttcaaatttaaccaaagatatcaatcactgatttttcacagtgtggtcttttgcattgttctattggttcaggagttttctctctccyataattatccttctatttataacacatgtatcacaatgccaggctgttatcttcttcaaatctcttttagcctatcctacacaaagtaagagccttggggtttagcgattagtttgtctagcgacaaattcctattttcta

SEQ ID NO: 932454 - DNA, 565 bp, Homo sapiens
atatctattgttttgatgaggcaactcttggtgggctcctggattttggctggttaccagaatgaccaagcaatgatttgaagcttggaagtttaatcttcacctctcatcctctggggatgagaaaggggctagagattgaatgaataacaaatcatgcytatgttttgaatgttttgaagtctgtataaaaatccctgaagtgcagagaggtttcaggttgttaagcacatctttatgccaggagggtggcataccccaactctatggtaacagaagctcctatacccaggacccttttggatctagccctgtgcacttcatcatctgcctgtccatctttatcctttatcgtatcctctataataaactagtaaatgtaagtaagcatttccctgagtttcatgagtaattctagcatattatcaaacttgggaaggggataatggcaaaccccaatttgtagtcaaatcagacagaagtctgggtaactggtgaccacccctactctgccccaccaccgcagcttgtgattgacatatgaagtggaaacagtcttgtggga

SEQ ID NO: 932455 - DNA, 565 bp, Homo sapiens
atatctattgttttgatgaggcaactcttggtgggctcctggattttggctggttaccagaatgaccaagcaatgatttgaagcttggaagtttaatcttcacctctcatcctctggggatgagaaaggggctagagattgaatgaataacaaatcatgcctatgttttgaatgttttgaagtctgtataaaaatccctgaagtgcagagaggtttcagrttgttaagcacatctttatgccaggagggtggcataccccaactctatggtaacagaagctcctatacccaggacccttttggatctagccctgtgcacttcatcatctgcctgtccatctttatcctttatcgtatcctctataataaactagtaaatgtaagtaagcatttccctgagtttcatgagtaattctagcatattatcaaacttgggaaggggataatggcaaaccccaatttgtagtcaaatcagacagaagtctgggtaactggtgaccacccctactctgccccaccaccgcagcttgtgattgacatatgaagtggaaacagtcttgtggga

SEQ ID NO: 932456 - DNA, 565 bp, Homo sapiens
atatctattgttttgatgaggcaactcttggtgggctcctggattttggctggttaccagaatgaccaagcaatgatttgaagcttggaagtttaatcttcacctctcatcctctggggatgagaaaggggctagagattgaatgaataacaaatcatgcctatgttttgaatgttttgaagtctgtataaaaatccctgaagtgcagagaggtttcaggttgttaagcacatctttatgccaggagggtggcataccccaactctatggtaacagaagctcytatacccaggacccttttggatctagccctgtgcacttcatcatctgcctgtccatctttatcctttatcgtatcctctataataaactagtaaatgtaagtaagcatttccctgagtttcatgagtaattctagcatattatcaaacttgggaaggggataatggcaaaccccaatttgtagtcaaatcagacagaagtctgggtaactggtgaccacccctactctgccccaccaccgcagcttgtgattgacatatgaagtggaaacagtcttgtggga

SEQ ID NO: 932457 - DNA, 658 bp, Homo sapiens
taacacagcactgagagggaaatttaagcactaaatgcttatattagaaaagagaaaaactatcaaatcaataacctaaacttcacctcaagaacctagaaaaagaagagcgtaatacactcaaagcaagcagaaraaggaaaaataaagagcagaaatcaataaaattgaaaacaaagaaatagagaaaagtcaagaaataaaaagctgattatttgaaaagaccaataaaattgacaaaaatggacaaaataaagataagacatgtattattaatatcaagaatgaattaggataccactacagactgtgcagatatcaaatggataagggaatgctgtgaacgattctacatatatcaatttgacaacttagatgaaatggaccacttcctcaggaacactaaataccacaactcactcaatatgaaatacataatttgatcttcataatgattttttttttttgagaccgagtctcactctgtcacccaggctggagtgcagtggcacgatctcagctcactgccacttccgcctcctgggttcaagcaattctcctgcctcagcctcctgagtagctgggattacaggtgcctgccactgttcccggctaatttttgtgtttttagcggagatggggtttcaccatattggcc

SEQ ID NO: 932458 - DNA, 643 bp, Homo sapiens
tgtaatcccagctactcaggaggctgaggcaggagaattgcttgaacctggggaagtggaagttgcagtaagccgtgatcgtgccgctgcactccagcctgggcgacagagtgagtgagactctctcaaaacacacacacacacagactaagatatttgsataggtgatttaacacatttgggtagatttgaggctcagaaactctctgagcctcaaaatgttcctcatttgtaaaatagggctaataacagagtggttgggaggaatccatgagataatgcttgtaaagcactgagcacaaggtgaggaacacaggaaaagctcaacacatggtagctaattaacatttgcctgttctgtgctactcatcatgcttttccctggggagatggaagtggaaaaggaattcacaactccgtggagttgagagttgcctaaataaataaacatatcgtcatgtataatgtgctacaggggtgtggacgatggaaaaattaattttgcctggatagtcaggtaaggctgctgggaggcagtgatactggagttccagattgggcagaggcctcagggattggctcagagttgtcacacagcaaatgcttggggaatagatggtacgaatgactcataagctcaggg

SEQ ID NO: 932459 - DNA, 643 bp, Homo sapiens
tgtaatcccagctactcaggaggctgaggcaggagaattgcttgaacctggggaagtggaagttgcagtaagccgtgatcgtgccgctgcactccagcctgggcgacagagtgagtgagactctctcaaaacacacacacacacagactaagatatttggrtaggtgatttaacacatttgggtagatttgaggctcagaaactctctgagcctcaaaatgttcctcatttgtaaaatagggctaataacagagtggttgggaggaatccatgagataatgcttgtaaagcactgagcacaaggtgaggaacacaggaaaagctcaacacatggtagctaattaacatttgcctgttctgtgctactcatcatgcttttccctggggagatggaagtggaaaaggaattcacaactccgtggagttgagagttgcctaaataaataaacatatcgtcatgtataatgtgctacaggggtgtggacgatggaaaaattaattttgcctggatagtcaggtaaggctgctgggaggcagtgatactggagttccagattgggcagaggcctcagggattggctcagagttgtcacacagcaaatgcttggggaatagatggtacgaatgactcataagctcaggg

SEQ ID NO: 932460 - DNA, 643 bp, Homo sapiens
tgtaatcccagctactcaggaggctgaggcaggagaattgcttgaacctggggaagtggaagttgcagtaagccgtgatcgtgccgctgcactccagcctgggcgacagagtgagtgagactctctcaaaacacacacacacacagactaagatatttggataggtgatttaacacatttgggtagatttgaggctcagaaactctctgagcctcaaaatgttcctcatttgtaaaatagggctaataacagagtggttgggaggaatccatgagataatgcttgtaaagcactgagcacaaggtgaggaacacaggaaaagctcaacacatggtagctaattaacatttgcctgttctgtgctactcatcatgcttttccctggggagatggaagtggaaaaggaattcacaactccgtggagttgagagttgcctaaataaataaacatatcrtcatgtataatgtgctacaggggtgtggacgatggaaaaattaattttgcctggatagtcaggtaaggctgctgggaggcagtgatactggagttccagattgggcagaggcctcagggattggctcagagttgtcacacagcaaatgcttggggaatagatggtacgaatgactcataagctcaggg

SEQ ID NO: 932461 - DNA, 601 bp, Homo sapiens
taaatttccctcagaaaatgggtttttcttttctattgcatcataatgctgcaaattttcctaacttttatgctctgtttcccttttgaaactgaatactttcaatagcacccaagtcacctcttgaatgctttgctgcttagaaatttcttctgccagatactccaaatcatctccctcaagttcaaagttccacagatctctagggtaggggcaaaatgcctccagtctctttgctaaaacatagcaagagtcacctttactccagttctcaacaagttcctcatctccatctgagaccacctcagcctggatttcattgtccatgtcattatcggcattttgatcaaagccattcaacaagtttctgggaagttccaaactttcccacatcttcctgtcttctgaaccctctgaactgttccaatctctrcgtgttacccagttccaaagtcacttccacatttttgggtatgtgtatagcagcaccccactctactggtaccaatttactgtattagtctgttctcacgctgctaataaagatggaccaaagactgagtaatttataaagaaaagagatttaatggacttacagttc

SEQ ID NO: 932462 - DNA, 755 bp, Homo sapiens
  misc_feature 1, 2: n = A,T,C or G
nntggattagttcatcacctacaggggtatatcaactctctggctttgtgtcattatttggttggcagagatcttgatcgtttttcccttccacaagatatcatactggtccattacattgatgacattatgctgattggatccagtgagcgagaaatagcaaacacacacaacttgatgagacatttgcatgccaagggatgggaaataaatccaactaaaattcagggaccttctacctcagtaaaatttctaggggtccagtggtgtggggcccattgagatatctcttctaaggtgaaggataagttgctgcatttggaccctcttacaaccaagaaagaggcacaacgccccrtggctatttggattttggagacaatacattcttcactcgggtttgttattctggcccatttattgagtgagccgaaaggcttgccagttttgagtggggttcagtacaggagaaggctctgcaacaggtccaggcttctgtgcaagctgctctgccacttgggccatatgacccagcagatcccgtggcacttgaggtgtcagtggcagacacggatgctgtttggagcctttggcaggctcccatagaagaatcacagtggaggcctctaggattttggagcaaggtcctgacatgttctgcaggtaactactttccttttgagagacagctcttgacctgttactgggctgtggtagaaactgaacatttgacgatgggttatcaagtcaccaag

SEQ ID NO: 932463 - DNA, 609 bp, Homo sapiens
  misc_feature 287, 313: n = A,T,C or G
atgtcagctgcactgaaatcagatggactgagtagaaatggctttgggcactaccagtgtctatcatacctacatttataatggaaggaaatgctaaatttcagtttgaggttagaatggaatttctttccatctaagctaacagaacttttggtatcccatgaaaaccatgtcaaaaactctaggcctagattagctgtggtggctcaygtctatagtccccccactttgggaggccaagacaggtggatcgcttgagtccaggagttcaagaccagtctgggcgncagaggcacctcctctaaacattaangcaaaaatactagtggtaatggccgccacctgttgtctgtggtcctagctctccaggtcgatggaaacctgagcccaggagggaggtgcagtgagccaaaatggtgccactgcacaaccagccaggtgacagagtgagaccttgtctcaaaacaaaaactaaaccaaaaacaagacaaactcctggtctagaagctcagtaattgtgcattctctttcctggcatactggaagcctcattcttcatctaagttgatcatgtgactgggttctagccaggctaggggacagaagcaa

SEQ ID NO: 932464 - DNA, 526 bp, Homo sapiens
cactgcagtagtgttctcactgaggctgtggccaatgaaggctctggagctgggcctctctacctaatgtgtggctcctcaaacaggcaatctttgctctggactgagccttactcagagctgcactgcagactgaggctgtttcaaccttgttttgttttatcccctctctccctcccttcacagacatcacacttgcattgtgatcagaaggtcttccaacccatttagctttatccttcataggtgcttcccccmagtaaatctcttgcactttgaattccattttggtatctgcttctcaaaggacaaaacctgacacacttggcctctctcatcagccttaagcttagtagttctgtttttctctctgctgaggttcttgggacctcgactagcatgcccaattgttctctctagtcaacagcaaaaaaaaaaaaaaaaaaaaattaagtagtaacaataataataaatacagctatacaggggctcttactatgtgacaaaaattattctaaatatatct

SEQ ID NO: 932465 - DNA, 589 bp, Homo sapiens
aagaggatcctaaaaaagaattaattaatacaaaagaaggcaaacaaagagggcaaaaggaacaaagaacagatagaacaaacaaaataaatagcaagatgatggatgtaaacctaacgcattaaatataaatggtttaaacaaccttaattaaaagacatgggctgtcatattagttgaaagggcaataactaactatatgttgcctacaagagaccctaactatatgctgcctacaaaattgtatattttaaatatacaattatgttaaaggtaaaggagaraaaaaagcacactaacattagtcaaaagaaagctgaagtagctcatattaatattagatgaagtagatttcaaattaacatatttttaccaggtataaagaagttcatttcataatgttaatggaatcaattcatcaacagaacataaatcataaatatgtattgacctaataagagattttcaaagtacatgaaacgaaaactcattgaactgcaaggagaaataggtaaatatacagttagagtagagatttcagtacctctctctcaataatcaatagaacaagtagtcttaaaattattaa

SEQ ID NO: 932466 - DNA, 589 bp, Homo sapiens
aagaggatcctaaaaaagaattaattaatacaaaagaaggcaaacaaagagggcaaaaggaacaaagaacagatagaacaaacaaaataaatagcaagatgatggatgtaaacctaacgcattaaatataaatggtttaaacaaccttaattaaaagacatgggctgtcatattagttgaaagggcaataactaactatatgttgcctacaagagaccctaactatatgctgcctacaaaattgtatattttaaatatacaattatgttaaaggtaaaggagagaaaaaagcacactaacattagtcaaaagaaagctgaagtagctcatattaatattagatgaagtagatttcaaattaacatatttttaccaggkataaagaagttcatttcataatgttaatggaatcaattcatcaacagaacataaatcataaatatgtattgacctaataagagattttcaaagtacatgaaacgaaaactcattgaactgcaaggagaaataggtaaatatacagttagagtagagatttcagtacctctctctcaataatcaatagaacaagtagtcttaaaattattaa

SEQ ID NO: 932467 - DNA, 471 bp, Homo sapiens
gcaaggatgccaaacaactggactcctcatacattgttgatagaaatgaaaaataatatagatactttggaaaacagtttggcagtttctaataaagttgaacatatttttactctacaatccaggacacccgctcccaggtatttaccaaaatgaagtgaaaacttacattcaccccaaaacctgtgtgtgawtgtccgtggtggctttattcttaattgccccaaactggaaacaaacccagatgtctttcagttagtgaatagctaaacaaactgtgtctagccacagaatggagtactgcaaaggattataaaggaaagaaactactgatacaggtaatgacatggatgcatctcggattcattatgccaagggaaagaaacaagacttaaaaaggtacatactggttacatactgtatgattccaattatatgacataaaggcaaaattatagacacagaaaacag

SEQ ID NO: 932468 - DNA, 706 bp, Homo sapiens
aggctgtggcaggagtgttgcttgagcccaggagtttgaggtgcagtgcctgtgattgtgccatgcactccagcctggtagacctggtctcaaaaaaaaaaaaaaaaaaaaaaaaaaaccacctcccacagggagagccttcagaatggggactagtggtcacaaaaatgcattgccttggactgtaggtagcaggtaatcagtctattgtaaattagttagctccacaaatggtgttactagattgactgctcttaagatcctttttagcttaraaacttctggtttttaaataatttgttctctgttagttgctactgtatagattttaaaacgtgtttttgagttaaaatttattatttcagggccatcattatttaatcgaaccatttatatacaagtccacaattcttcacactcaggaaaatacagactatacctagcctcaagtcagtttagtctttttgccaccaaaaaagtacagggcaggtcaagtttagttgccaaataaggtacaaaaagatctctaggtagggctggtctgttttgaaaaaaaaaaaaaattaaaaatcagaaaaataaaattaaaaaaattaaaaattagaaacaaaaagttgaaagcccctccagtattcagagcattttggatttcaggattactaatagagggttgtagatcagtgtgtatatgtgtatgtgtatctgt

SEQ ID NO: 932469 - DNA, 602 bp, Homo sapiens
tctcccctacttggagattacctcatgacagacatctataacctgactgcaactgagatggcaccagccagcactccaagtggacaacaactcaaaataacccttggaagaagacatgcaggcctgtatcttgtgttactctggcatggttctcatactaagtatcccctttttattttttatttatttttaacatattttttgaaacagagtctctctctgttgctcaggctggagtgcagtggtgtgaacrtggctcactgcagcctcaactcccaggctcaagcagtcctcccaactcttagcctccagagtagctgggactacaggtgtgcaccaccacatctggctaattttttttgtatcttttgtagagatgggttttcactatgttgcccaggctagtttcaaactcctcggttcaagcaatcggacagcctcggcctcacaaagtgctgggattacaggcatgagccactgcgcctggccaagtctccccctttaaaatcccttccttcagtctaacacttgaaatggtcttttggaggcacaagcctggccatttcccaattgctagcatttgaataaagttgctttccttt

SEQ ID NO: 932470 - DNA, 634 bp, Homo sapiens
tcatcaagattcaggaagatggcaaaacccaatccaaggaaaataagaattacaataaagtaatacaggtgctgaaggatgaaatagccagtatgaaaaagaacctaattggtctgacagagctgaataacacaatacaagaatttcacaatgtgggccaggtgcagtggctcacgcctgtaatcccagcattttgggaggctgaggtgggcagatcacctgaggtcaggagttcgagaccagactggctaatatggtgaaaccccatccctactaaaaatacaaaaattaaccaggtgtggtggtgagaggtgacagcatgctggcaaccctcacagccctcgctcgctctcggagcctcctcggccttggttcccactctggctgtgcttgaggagcccttcagcctgccgctgcactgtgggagcccctttctggactggccaaggccagagccagctccctcagcttgcggggaggtgtggagggagaggcrcaggcgggaactggggctggcccccatggcacttgcgtgccagcgcaagttccaggtgggcgtgggctctgcagccccgcactcggagcagccagccggccggccccactggccccaggcagtgaggggctcagcacc

SEQ ID NO: 932471 - DNA, 426 bp, Homo sapiens
gaacactgaactatgactctgagagaagggaaacaagaagatcaatccccatgcagtctccaagaggtagcagagaaagaaggaagccacacagagctttgctatctcactgagttgaggagacagagatccgtttggggaggccaaggcagctaaaatttgtgggaaacaatactgagatactaaggctatccaaaaatagatctctaaagatctgcatggagatcyattccagatattaactcacaattgatctgccgacgtgtgagtagaaatcacttaagaccagaaaaagaatcactggaaaattgtagagcaaacaattttcagagttctcaacagttcagaagacagatttccaccatttataatgaagagacacccaagaacactggggacattcagaagagaccccagagagtcatg

SEQ ID NO: 932472 - DNA, 624 bp, Homo sapiens
aattccccctgtcactttcaggtacaccaatcagatgtagatttgttcttttcacatagtcccatatttcttggaggctttgtttgtttctttttactcttttttctgtaaacttctcttctcacttcatttcattcatttgatcttcaaacactcataccctttcttttacttgatcgtatcagatactgaagcttatgcatgcgtcacgtagttctcgtgccatggttttcagctccatcaggtcattaaggtgttctctatgctgtttattctagttagccattcctctaattttttcaaggtttttagcttctttgtgatgggttcgaacatcctcctttagctcggagaagtttgttattacygatcgtctgaagcctttttctctcaactcatcaaagtcattttccatccagctttgttccgttgctggtgaggagctgcgttcctttggaggagaagaggcgctctgatttttagaattttcagcttttctgctctggtttttccccatcttcattgttttatctacctttggtctttgatgatggtgacatacagatggggttttggtgtggatgtcctttctgtttgttagttttccttctaactgtcaggacc

SEQ ID NO: 932473 - DNA, 624 bp, Homo sapiens
aattccccctgtcactttcaggtacaccaatcagatgtagatttgttcttttcacatagtcccatatttcttggaggctttgtttgtttctttttactcttttttctgtaaacttctcttctcacttcatttcattcatttgatcttcaaacactcataccctttcttttacttgatcgtatcagatactgaagcttatgcatgcgtcacgtagttctcgtgccatggttttcagctccatcaggtcattaaggtgttctctatgctgtttattctagttagccattcctctaattttttcaaggtttttagcttctttgtgatgggttcgaacatcctcctttagctcggagaagtttgttattaccgatcgtctgaagcctttttctctcaactcatcaaagtcattttccatccagctttgttccgttgctkgtgaggagctgcgttcctttggaggagaagaggcgctctgatttttagaattttcagcttttctgctctggtttttccccatcttcattgttttatctacctttggtctttgatgatggtgacatacagatggggttttggtgtggatgtcctttctgtttgttagttttccttctaactgtcaggacc

SEQ ID NO: 932474 - DNA, 792 bp, Homo sapiens
ccagacagggatgtttaattctgcagaagtttctgctgcctttttttcagctatgccctgcccccagaggtggagtctacagaggcaggcaggcctccttgagctgcggtgggttccatccagttccagcttcccagccactttgtttacctacttaagcctcagcaatggcggacacccctcccccagcctcgctgccaccttgcagttcgatctcagactactgtgctagcagygagcgaggctccttgggcgtgggaccctctgagccaggtgcgggatataatctcctagtgtgctgtttgctaagactgttggaaaagtgcagtattagggtgggagtgtcccaattttccaggtaccatctgtcacggcttcccttggctaggaaagggaattccccgaccccttgtgcttcccggctgaggcgatgccctgccttgcttcagctcacgctctgtgggctgcacccactgtctgacaagccccagtgagaccaacccggtacctcagttggaaatgcagaaatcacccatcttctgcgtcgcttatgctgggagctgtagactggagctgttcctattcggccatcttagaaccaagtctgagtttctgtttgtttactggcaaattaccattcattgagactgtgccatttatggtcacaccaacagtgaatgagaatggaaggcaaagatcttgagcaaatttagttgactgaaacattagtaatttcagaataacttgaagattttataccaagctgtagtattcattaggtagggagagcca

SEQ ID NO: 932475 - DNA, 792 bp, Homo sapiens
ccagacagggatgtttaattctgcagaagtttctgctgcctttttttcagctatgccctgcccccagaggtggagtctacagaggcaggcaggcctccttgagctgcggtgggttccatccagttccagcttcccagccactttgtttacctacttaagcctcagcaatggcggacacccctcccccagcctcgctgccaccttgcagttcgatctcagactactgtgctagcagcgagcgaggctccttgggcgtgggaccctctgagccakgtgcgggatataatctcctagtgtgctgtttgctaagactgttggaaaagtgcagtattagggtgggagtgtcccaattttccaggtaccatctgtcacggcttcccttggctaggaaagggaattccccgaccccttgtgcttcccggctgaggcgatgccctgccttgcttcagctcacgctctgtgggctgcacccactgtctgacaagccccagtgagaccaacccggtacctcagttggaaatgcagaaatcacccatcttctgcgtcgcttatgctgggagctgtagactggagctgttcctattcggccatcttagaaccaagtctgagtttctgtttgtttactggcaaattaccattcattgagactgtgccatttatggtcacaccaacagtgaatgagaatggaaggcaaagatcttgagcaaatttagttgactgaaacattagtaatttcagaataacttgaagattttataccaagctgtagtattcattaggtagggagagcca

SEQ ID NO: 932476 - DNA, 586 bp, Homo sapiens
actgctctcttcaaagctgtcagacagggacatttaagtctacagaggttactgctgtctttttgtttgtctgtgccctgcccccagaggttgagcctacaaaggcaggcaggcaggcctctttgagctgtggtgggctccacccagttcgagcttcctgactgctttgtttacctaagcaagcctgggcaatggcatgcacccctcccccagcctcgctgccaccttgcagtttgatctcagactgctgtgctagcaatcagcgagactccgtgggtgcaggaccctccaagccakgtgcgggatataatctcctggtgtgctgttttttaagcccattggaaaagcgcagtattcaggtgggagtgacccgattttccaggtgccatctgtcacccctttctttgactaggaaagggaactccctgaccctttgcgcttcccgagtgaggcaatgcctcaccctgcttcagctcacacacggtgcgcacacccactgacctacgcccactgtctggcactccctagtgagatgaacccggtacctcagatggaaatgcagaaatcacccgtcttctgcgtcgct

SEQ ID NO: 932477 - DNA, 690 bp, Homo sapiens
agagagagcaaggggctagtagatgagattcgaaaataattaggggatggagaatgagatcacatgggaccacagtagaccattgtaaagaatctggctcttgctctgagggaaattggaaccactgcagggttttgagaagacaaaatgcttgatatgacttacattaagaaggacctttctggcaagtgtttggagaatagattgtagggggcaatgcagatgcagggaatcaactgcagtaatccaggagagagaccagggtggtacagaccatgctattcacagtgggaggagaagagttggattctggatatattttaargtagattcagcatgattctccaagagtttgggtgtgggttgtgatttaaaaaatgtatattcaaaaatgactgcatttatttttggcccaaagaattggaagtttggaaatcccatcaaatgaaatagaaagacatgaatttatcagatttgagggaagaagatcaggacatgttgaatgtaagagagatattagacatgtgacatttgggttatatctggagtttggaagagaggtatgatctagggatacttgagacttcttggtatatagttggtgaagtcatttgactggatcagatcatctatcatgttactgtaaatagaaaaagttagagggtcaacgattagcctggagccttccaa

SEQ ID NO: 932478 - DNA, 585 bp, Homo sapiens
tacataagagtagaatttcaggttccaacacccttctgtaagtgacctgattgttctcccaaaagaaaaacatacaaatatgcatagatgagtaaagaatatgtcatggcagggggaggagccaagatggccgaataggaacagctccagtctacagctcccagcgtgagcgaggcagaagacgggtgatttctgcatttccatctgaggtaccgggttcatctcactagggagtgccagacagtgggcacaggtcagtgggtgcagcgcaccatgcgcraggtgaagcagggcgaggcattgcctcactcgggaagctcaaggggtcaaggagttccctttcctagtcaaagaaaggggtgacagacggcacctggaaaatcgggtcactcccacctgaatactgcacttttccgacgggcttaaaaaacggcacaccaggagattatatcgcacacctggctcagagggtcctatgcccacggagtcttgctgatcactagcacagaagtctgacatcaaactgcaaggcggcagcgaggctgggggaggggcgcctgccattgcccaggcttgcttaggtaa

SEQ ID NO: 932479 - DNA, 588 bp, Homo sapiens
ggaatatacctaaccaagggggcaaaatacctctacaagtaaaactacaaaacacctctgaaataaatcatagatgacacaaacaaatggaaacacatcccatgctcatggatgggtacgatcaatattgtgaaaatgatgatactgccaaaagcaatctacaaattcaacacaatgcccatcaaaataccaccattattcttcacagaattagaaaaaacaaattytaaaattcatatggaaccaaaaaagagcccgcagagccaaagcaagactaagcaaaaagaacaaatctggaggcatcacactacctgatttcaaactatactataaggccatagtcaccaaaacagcatggtactggtataaaaacaggtacatagaaacaatgaaacagaatagagaacccaaaaataagcccaaacacttataaccaactgatcttcaacaaaccaaacaaagtggggaaaagacacccttttcaacaaatggtgctgggctaattggttatgcacatgtgggagaatgaagctggatccttatctcttaccttatacaaaaatcaactcaagatggattgaggactta

SEQ ID NO: 932480 - DNA, 758 bp, Homo sapiens
atgagaggtcactgcctgggccttgagggttattgggagaactctggcttactctgagagaggcggggaaagccactggagattgtgaagctgagaagaggtgtgatccggcttatgttttacgaggatccctctggctgctgagttgggaacaggctgtagggaggccaggcagcaagcagcagggaggactgatgaagaagcttttgaaacagtttaggtgggagacaacacaacagtgtggaaagtgggaggatgcaggatatgctttaaagatggatttaagaacttggtggtggaccgaatatgggatgtgagatacgggatgtgagagagaggatggtcaagggatatgtggtagccagcacaggcccagtgatgctgctggaagcatcagcgtcacagtctcagtggcttatggcagcagtgattccctcctacacaccatgcccacygtgggtcggccagggctccatcctgcattgtcctcctgccacagcccaggccatgcggcagcctctgcgtgaacattgtcagtcactgtagcaggggagagagcatggcatgctgtttcttgaagcttctgcccagaatgacatacttcacttctgtgtatacttcattgctcaaagcaagacatgcagccatgtccgagttcaacagggcggggaggtagatagaatccttgtgggagggcaccttgtgtctctgaacaacaatccagtcttccacaggaggcacccagggtctggcctgag

SEQ ID NO: 932481 - DNA, 557 bp, Homo sapiens
ccatccccagttggtggggggaagctgtttttcacagaagactgccaactaataaatataaaaggaaccatagagttagaaaaacccttatttgcaattcccaattaaataattgattcaggcaataaaattattggcactgaaatgattgggtaaaagttaatggggaggccaggcacagaggttcacccctgtaatcctagtacttttggaggccgaggtgggtggattgcctaagctcaggagttcaagaccagcctgagcaacacagcaaaacttcatctctactaaaaatataaaaattagctgggagtggtggcaaragcctataatcccagctactcaggaggctgaggcaggagaatcacttgaacccaggaggcggaggttgcagtgagccgagatcatgccactgcactccaacctgggagagagagcaagactctgtctcaaaaaataaaaaaaataaataaaaaataaaagttaatggggaatggaatattcacatggcaatgaattatcccagaaattattttctaagtgcaatgggaaaactg

SEQ ID NO: 932482 - DNA, 670 bp, Homo sapiens
catgatgagtagaagataggttttactcatgctacaatcaatattaattccttgcagttcaaagacactgaggccctgtctaataatacagaggttgaacttggacttgggagatgactcctgtctctcgtactctctgtggctctgctttctgttattttactcataagcttgttttgtctccttgctgagaaytgtcaaacatgaaatgtaatttcaggctatagtgaagaaggatgacataggccgaaaaaattggcaatcatttggcctgtacatgttgcttttattttttttctggacttaagatatagaccaaaccttgacatttctggcctttgagtctttcacaactgtgattataatacattagctcttctagaagttagaagtgactttggattaagtctttcataaggtggctaaatgaatttatatggctcatcagaattcactagattggttaagcaggaaatttacagagatttttttctttgctgtaaatgtttttctaaattgaaaaacttctaatactgtcttctggaatactagaaataagtgcaagtgattgtttttggcaggaggccacataaacatttctgcttctctgtgacttatgggtagcattgatataaattgttaaaaataatgatcgtagatagataatgta

SEQ ID NO: 932483 - DNA, 670 bp, Homo sapiens
catgatgagtagaagataggttttactcatgctacaatcaatattaattccttgcagttcaaagacactgaggccctgtctaataatacagaggttgaacttggacttgggagatgactcctgtctctcgtactctctgtggctctgctttctgttattttactcataagcttgttttgtctccttgctgagaactgtcaaacatgaaatgtaatttcaggctatagtgaagaaggatgacataggccgaaaaaattggcaatcatttggcctgtacatgttgcttttattttttttctggacttaagatatagaccamaccttgacatttctggcctttgagtctttcacaactgtgattataatacattagctcttctagaagttagaagtgactttggattaagtctttcataaggtggctaaatgaatttatatggctcatcagaattcactagattggttaagcaggaaatttacagagatttttttctttgctgtaaatgtttttctaaattgaaaaacttctaatactgtcttctggaatactagaaataagtgcaagtgattgtttttggcaggaggccacataaacatttctgcttctctgtgacttatgggtagcattgatataaattgttaaaaataatgatcgtagatagataatgta

SEQ ID NO: 932484 - DNA, 598 bp, Homo sapiens
tctaacattagaatcataaggcttctattttttttgagacaaggtcttgctctgttgcccaggctggagtgtagaggcataatcttggctcactgcaacctccacctccaaggcttgagtgatcctcccacctgagcctcccgagtagctgggaccacagacatgcaccacyatgcctggctaatttttgagtttttgtagaggtgggaggctcactatattgcctaggctggtctttaactcatgtgctcaagcaatcctcccaccaaagtgttgggatcacaggtgtgagccactgtgcccagcctcataaggcttttgtttaaggatctcttaagacatttttttcaggccatgaattccagcaactagtttgaagacccccacagaggatcgagatcagcatgagaacccggcttcttcatctccctgtcccatgacttcaccccacactttttaaccaaccagtgatctccgctcttcaacccactccaaaacccttaaaaaccctatcctggctaatttttgtaaatttagtagagatggggttgtatgtatgttggccaggctggtcttgaactcccaacctcaggtgatc

SEQ ID NO: 932485 - DNA, 598 bp, Homo sapiens
tctaacattagaatcataaggcttctattttttttgagacaaggtcttgctctgttgcccaggctggagtgtagaggcataatcttggctcactgcaacctccacctccaaggcttgagtgatcctcccacctgagcctcccgagtagctgggaccacagacatgcaccactatgcctggctaatttttgagtttttgtagaggtgggaggctcactatattgcctaggctggtctttaactcrtgtgctcaagcaatcctcccaccaaagtgttgggatcacaggtgtgagccactgtgcccagcctcataaggcttttgtttaaggatctcttaagacatttttttcaggccatgaattccagcaactagtttgaagacccccacagaggatcgagatcagcatgagaacccggcttcttcatctccctgtcccatgacttcaccccacactttttaaccaaccagtgatctccgctcttcaacccactccaaaacccttaaaaaccctatcctggctaatttttgtaaatttagtagagatggggttgtatgtatgttggccaggctggtcttgaactcccaacctcaggtgatc

SEQ ID NO: 932486 - DNA, 598 bp, Homo sapiens
tctaacattagaatcataaggcttctattttttttgagacaaggtcttgctctgttgcccaggctggagtgtagaggcataatcttggctcactgcaacctccacctccaaggcttgagtgatcctcccacctgagcctcccgagtagctgggaccacagacatgcaccactatgcctggctaatttttgagtttttgtagaggtgggaggctcactatattgcctaggctggtctttaactcatgtgctcaagcaatcctcccaccaaagtgttgggatcacaggtgtgagccactgtgcccagcctcataaggcttttgtttaaggatctcttaagacatttttttcagrccatgaattccagcaactagtttgaagacccccacagaggatcgagatcagcatgagaacccggcttcttcatctccctgtcccatgacttcaccccacactttttaaccaaccagtgatctccgctcttcaacccactccaaaacccttaaaaaccctatcctggctaatttttgtaaatttagtagagatggggttgtatgtatgttggccaggctggtcttgaactcccaacctcaggtgatc

SEQ ID NO: 932487 - DNA, 604 bp, Homo sapiens
tgcgagataattgaatcataggggtggatactcccatactgttcttttagtagtatgggagattggatctcacgagagccaatggtttgataagggaaaacccatttcacttgattctcattctctctcttgtctgctgygtgcctttcaccttctgccatgattacgaggcctccccagccatgtggaactgtgagtcgaattaaacctctttctttcgtagattacccagactcaggtatgtctttatcagcagtgtgaaaacagactaatatacctggcttctgatgaggtctcaggaagcttttaatcatggcagaaggcaaagagggagcaagaacatcccactgtgaaaacaggagcagagagagagaggaggggcagggaggtgccacacacctttaaacaaccagatctcatgagaactcactcactatcacgaagatagcccaagacatgagggatccacccccatgattcaaacacctccagcactagcatgagatctgtgtgaggacaaatatccacactatatcataattgtttcaggaatctaaaatgaaatgcccagaatagttcctggcacatagcaacctccacgtaa

SEQ ID NO: 932488 - DNA, 604 bp, Homo sapiens
tgcgagataattgaatcataggggtggatactcccatactgttcttttagtagtatgggagattggatctcacgagagccaatggtttgataagggaaaacccatttcacttgattctcattctctctcttgtctgctgcgtgcctttcaccttctgccatgattacgaggcctccccagccatgtggaactgtgagtcgaattaaacctctttctttcgtagattacccagactcaggtatgtctttatcagcagtgtgaaaacagactaatatacctggcttctgatgaggtctcaggaagcttttaatcatggcrgaaggcaaagagggagcaagaacatcccactgtgaaaacaggagcagagagagagaggaggggcagggaggtgccacacacctttaaacaaccagatctcatgagaactcactcactatcacgaagatagcccaagacatgagggatccacccccatgattcaaacacctccagcactagcatgagatctgtgtgaggacaaatatccacactatatcataattgtttcaggaatctaaaatgaaatgcccagaatagttcctggcacatagcaacctccacgtaa

SEQ ID NO: 932489 - DNA, 561 bp, Homo sapiens
actcctttcttcattttctggaagcggacttcaaggacattgactagctgacatagtctcatgtgcacacttgtgaccagagaaaaccaccagagaaggagtcacaggtgtttcaagaggagggaagtggtgtgaaccagaagggagaggtgtacagagatacgggcagggcccgacarccacacagcaaaacccttccttgtgctcccggccagatccaccatgtttgaattctctatccctccaccccatgaaagtttctatcatcctgttggtgacaccactgaagcagttctcagacatgcaccctccactcctttcccatcctcaatggatgggaaagtctagtcaacatttcctgaagcattttacacagaatatgggtcctacaagaagcttcgagaaaaggagttctggaggtcaaacaagttttctaaattttgtcttttatttttctttggagattcacattcaccagtttttttagaacagttggtttatccttattatttgtaatatctttatttcattttatatttatttatttattttttgaggagg

SEQ ID NO: 932490 - DNA, 649 bp, Homo sapiens
gtgagggaagaaagatggagagagagagagactggtacagacacctgcacatttggggataaacagccagtgctccgtgggagatgggagagggacctggatcttgggatcttgcccaccacaccccagcttgtctagaaagtgcctcaggagttccagacaagcacagaggtcccagcagacacctgaaaaaggtttagaaaaccacttttgttcaacatcccaaatctttgcgccaccttgcaacttaccaaggatgcagcagggtcagaagctccccatcatttctgctcccggagcgcaggtgcaagagcatccatccctgcaggggcaggcaggtaggtacccaacaggattgcagtctggcacgtgggaaatcccgtgactcctggtcccctccctaattytcctaggaacatgaagccccccattgagctctgttagttctccatggggctaggcttcaggtgattggagagccctgccaaggccagccatggatacactgtggacagcacagcccatttttaaagctgcaggtagagcagaagtcagctgctagtacatccaggtcttgaaaggtgtgtctgcagcctttcctgctgtagaaataaagacaatcagaatctgtgttgaagagagttaagaa

SEQ ID NO: 932491 - DNA, 623 bp, Homo sapiens
gggcacagtggcttacgcctgtaatctcagcactttgggaggccgaggcaggcagatcatgaggtcaggagatcgagaccatcctggctaacacggtgaaaccccgtctctactaaaaatacaaaaaattagccaggcgtggtggcggtcacctgtagtcccagctactcaggaggctgaggcaggagaatggcgtaaatccagggggcagagcttgcagtgagccgagrtcgccccactgcactccagcgtgggcgtcagagcaagactctgtctcaaaaaaaaaaaaaaaaagaaagaaaaggtgatatttgaattagatcattctgccttcattaatcaactgaaatatttctgtagaaaaaattttgtctgcaaccatgcggaagaccagcgatacagcttgcatggagggatgtttgattttctctttatttaccaacttttaaaaatagttggctccttagcatcctccaatcgtgatcagttagcattttcttcttcttagaatccttgtgaactcaaggatttaagcattttcatgtgtttcacctggccagtgcttatccctattgaggctcaacgatttttgtctttggtcagtgagagcctctgggttcaga

SEQ ID NO: 932492 - DNA, 623 bp, Homo sapiens
gggcacagtggcttacgcctgtaatctcagcactttgggaggccgaggcaggcagatcatgaggtcaggagatcgagaccatcctggctaacacggtgaaaccccgtctctactaaaaatacaaaaaattagccaggcgtggtggcggtcacctgtagtcccagctactcaggaggctgaggcaggagaatggcgtaaatccagggggcagagcttgcagtgagccgagatcgccccactgcactccagcgtgggcgtcagagcaagactctgtctcaaaaaaaaaaaaaaaaagaaagaaaaggtgatatttgaattagatcattctgccttcattaatcaactgaaatatttctgtagaaaaaattttgtctgcaaccatgcrgaagaccagcgatacagcttgcatggagggatgtttgattttctctttatttaccaacttttaaaaatagttggctccttagcatcctccaatcgtgatcagttagcattttcttcttcttagaatccttgtgaactcaaggatttaagcattttcatgtgtttcacctggccagtgcttatccctattgaggctcaacgatttttgtctttggtcagtgagagcctctgggttcaga

SEQ ID NO: 932493 - DNA, 585 bp, Homo sapiens
cagagcccagtggcttataaacaacacgcagttcttcctcacagttctggagactgggggtctgaaatcagggtgccagcatggttgggttctggtgagagcctcttctggactgcagatggcacattctagctgtgtccctgcatggtgggaagmgaatgagactcctctctggggtccctttgataaaggcactaatcccatttgcaggggctccaacctcaggacctaatcacctcccaaaggccccacctcctaatgccattcgttacctttggagttgggtttttttcaacataggaattttggttgggctgtggggagcataaacattcagtccataaccgaaaggaagtcagcacagatgaaatgtaactctgctctttcacttaattctcacagcaaactggcaagggaggcaacgtgactcttcctattttatgaggaaaaaaacgggctcaagaggtgaaggaatgctttctgggttagagagttaaccaaagtagagttaggggcccaatctagggtgtagatgccaggcccgcctgtccctgcagggagcaggcagtgacctcctctgacggg

SEQ ID NO: 932494 - DNA, 635 bp, Homo sapiens
attatccaattaaagtgaaaagcaccatataaatgctacagaggctaagacttaaatagccacatatggtttggggaaaagcactccagtgcatcagctagcagtaaaaacatgcaggagcgaaatgatctggctggaaatgaactgcaaattgataaacatttagttgctaatgcagtgtttattattttttactaggataaaaattaacttgtgcggccttagccagcaaacacactgaactctaccatctgggtagtggaatcggtatttctgtagcctcgggttacaggtgactgttgccagatttgattttattrgcaaataggtcctggtgtgtccggacaacagaaccgcgggatgcttctggaagcacaaacacgccagcgcaccaaagggtaacattcgagagggagcttagggccaccctcaaccagactcagaatcctgtatttcccaaaaagaggttgctacttgtgttgaagaatcgcctttagccttcgaaatcagccagggctgcaaggcgacgacctctcgagacccggggggttcgggcagcgggggatggggggcgcctgaagctgggaatggacgcagggggcggacgccggcgggaccacgtgacagcgccagca

SEQ ID NO: 932495 - DNA, 635 bp, Homo sapiens
attatccaattaaagtgaaaagcaccatataaatgctacagaggctaagacttaaatagccacatatggtttggggaaaagcactccagtgcatcagctagcagtaaaaacatgcaggagcgaaatgatctggctggaaatgaactgcaaattgataaacatttagttgctaatgcagtgtttattattttttactaggataaaaattaacttgtgcggccttagccagcaaacacactgaactctaccatctgggtagtggaatcggtatttctgtagcctcgggttacaggtgactgttgccagatttgattttattggcaaataggtcctggtgtgtccggacaacagaaccgcgggatgcttctggaagcacaaacacgccagcgcaccaaagkgtaacattcgagagggagcttagggccaccctcaaccagactcagaatcctgtatttcccaaaaagaggttgctacttgtgttgaagaatcgcctttagccttcgaaatcagccagggctgcaaggcgacgacctctcgagacccggggggttcgggcagcgggggatggggggcgcctgaagctgggaatggacgcagggggcggacgccggcgggaccacgtgacagcgccagca

SEQ ID NO: 932496 - DNA, 646 bp, Homo sapiens
taaagcaggcagaagaacacggggggactagacttgctgagtcttctggcctccatctttctcctgtgctggattcttcctgcccttgaacatcagattccaagttcttcagtgtttggactcttggacccacaccagtgctttgccaggggctatcaggcctttggccacagactgaaggctgcactgtcaacctccctacttttgaggtttttggacttgggctggcttctttgcccctcagcttgcagatggcctattgtggaacttcaccttgtgactgtgtgagtcaattctcctagtaaactccctttcatatattcatstatcctattagtcctgtccctctagagaaccctgactaatgcacaccttaataaaaaatgtcatcatcctggccaattccatctgcaaagaccctattccaagtaaggtcatattctgaggtttcaagtggatgtgtgttttttggggacactgttcaaccccaccacactgtctttgaatacatcaggctgcttcccagcccagggcttatgcctctgcagtgccctctgcctgggaccccgatgcccacatctctgtgtggctgcctcttcttcttcttctacactttgagcttaaatatcccttcttcttagcaggt

SEQ ID NO: 932497 - DNA, 769 bp, Homo sapiens
agcattttacatttccaccagcaacgtatgagggttccaagttttccacattcttgtcaacctttgttattgtccatctttttaactctagtcatcctagtggggagtgaagtggtttcttgtgcttttgttttttggagactcacttcattgcccaggctgcagtgcagtggcactatctcggctcactgcaacttccgcctcccaggcccaagtgattctcccacttcagcctcccgagtagctgtgattacaggcgcatgccaccatacccagctaattttttgtattttcagtaaagacagggttcaccatgttggctaggctggtcttgaactcctgagctcaggcaatccgcctgtctcagcctcccaaattgctaggattacaggcataagacaccacacctggcctgttttattcttaatgactaatgttgagcatattactgaccattgtatgtcttctttggaaaaatayctattcaaatcctttacctatctataaattaggttgcctgtctttttattgttaaagtgtaagcgttctttatatattctgaatacttaccagatatataatttgcagatattgtcttccagtgtggggttgtctcttcactttcttaatagtgtccttttaagcacaaaagttttaaattttgatgaagtctaatttacccattttttctttggctgcatgtacatttgatgtcctatttgagaaaccattacctagtctgaggccataacgatttacacttaggttt

SEQ ID NO: 932498 - DNA, 608 bp, Homo sapiens
acaggcctagcaagtttttctgatctgttccttggactaaatttcctcacttttttctgacacatttttctggatggttttaataaccaaatatcctccagcaagggttgagtgttgtctaggtggcccgcctacagtcttagcctctcagactcttcaactcatggaaatcctgttttctagcaagcaastcagcaggtacaaatcaggagaccaaggggtcatttcctcaaagttcctaaaaagtcactgataccttccaggctaaattccataacactgtataaacgtcaatgaattttaaaaaaccattattaggtgcattttaatgtactccaagcttgttttcaacttaatttgacccacttttttttttttaagtccatgtgatcattttactcagttctacattttccctttagttctaatggtctttgattgttgttaatatttgcaattgttgactctggcttttatttgtttttgctgcttttcagggtcttaagaaagtaaaattttttgcccatattgaattgactataatattttaatattcttttaaatattgctcacattagcccatttgttgttttaataggtcttaagtt

SEQ ID NO: 932499 - DNA, 708 bp, Homo sapiens
aaaagcaggcatggaaagaggacacttgctgcgtcttctggcctccctctttctccagtgctggatgcttcctgcccttgagcatcagactccaagttcttcaggttttggactcttcaggttttggacttatatcattgatttaccaggggctctcaggcctttggycacagactgaagtctgtactgttggtttccttaattttgaggttttgggactgggactggcttcctggctcctcagctttcagacagcatattgtgggactccaccatgtgatcatgtgagtcaaaccccttcaaatatattcatctattagtccatccatttagagaaccctgactaatacagattttggtgccaggagtattagtctgttctcattgcagctaataaagacatacccaaggaaatataagacatacccaagggaatataagaaagacataccaaattttataaattactggataatttataaaggatagagatttaattgactcacattccacatggctggagaggcctcaaaatcagggaagaggcaaaggaggagaaaaggcgcatcttacgtggcatcaggcaagatagcctgtgcagggaaattcccctctataaaaccatcaggtcttgtgaaacctattcactatcataagaacagcacaggaaagacccagtgccatgattcaattacctccttccagatt

SEQ ID NO: 932500 - DNA, 616 bp, Homo sapiens
taaagacacatgcacacatatgtttattgcagcactatttacaatagcaaagacttggaatcaacccaaatgcccatcaatgatagactggataaagaaaatgtggtacatatatgccatggaatactatgcagccataaaaaagtaagttcatgtcctttgcagggacatggatgaagctggaagccatcatcctcagcaaactaacacaggaacagaaaaacaaacacctcatgttctccctcataagtgagagttcaacaatgagaaaacatgggcagagggaggggaatatcacacaccagggcctgtygggggctgggggcaaggggagagatagcgttaggagaaatacctaatgcatgcagggcttaaaacctacatgatgggttaatgggtgcagcaaaccaccaaggcacatgtatacctatgttacaaacctgaacgttctggatatgtatcccagaactaaaagtaaaatttttttttttaaaaaaagaaatttctaggaagttccaaacttttccacattttcctgtctttttctgagccctccaaactgttccaacctctgcctgttacccagttccaaagttgccttcacattttcaggtat

SEQ ID NO: 932501 - DNA, 593 bp, Homo sapiens
cagaagaaagagaactactgtctcaggaaggtttctaatggggagtagatacctgagagagggaacgtgtgtctcaagaacctctggcccttcatgacaagcataaaagaataaagaaaggaactttcacccagagtggaagtccacagccaaggtgaaggcggctttcctttgctacctttgggaacttcagtccatctgactgcatcgtgcccactggccctaaagtaaagcctgccgtgcacacagcctgctcctcttacgggtggcacacgcctccacagatcctgcatgcaygcagctctcactcaagcgagagacttgctggagagagaaagggacctgtgatgaattgccgagaaatcctcatcagcaatctgtgggggagggcggagaaccaccagacagagcaattgattctgaaaagtctaaaataattcaggaaacagaaaatattttagaacaaaattaatttgctctaaaaaaaaaagctttctttttttaacttttttttcttcaagtttcattttaagttccagggtacacttgcagcatgtgcaggatgtgcaggatgtgcaggtttgttacataca

SEQ ID NO: 932502 - DNA, 593 bp, Homo sapiens
cagaagaaagagaactactgtctcaggaaggtttctaatggggagtagatacctgagagagggaacgtgtgtctcaagaacctctggcccttcatgacaagcataaaagaataaagaaaggaactttcacccagagtggaagtccacagccaaggtgaaggcggctttcctttgctacctttgggaacttcagtccatctgactgcatcgtgcccactggccctaaagtaaagcctgccgtgcacacagcctgctcctcttacgggtggcacacgcctccacagatcctgcatgcatgcagctctcactcaagcgagagacttgctggagagagaaagggacctgtgatgaattgccgagaaatcctcatcagcaatctgtgggggagggcrgagaaccaccagacagagcaattgattctgaaaagtctaaaataattcaggaaacagaaaatattttagaacaaaattaatttgctctaaaaaaaaaagctttctttttttaacttttttttcttcaagtttcattttaagttccagggtacacttgcagcatgtgcaggatgtgcaggatgtgcaggtttgttacataca

SEQ ID NO: 932503 - DNA, 587 bp, Homo sapiens
aaagaggtgggaccaggtgcagttgctcacacctgtaatcccagcactttaggaggccaaagcgggtggatcacttgaggtcaggagtttgaggccagcgtgaccaatgtggtgaaaccctgtctctactaaaaatacaaaagaattgctgggcatggtggcgggtgcctgtaakcccagctactcgggaggctgaggcaggagaatcacttgaacccaagaggcagaggttgcagtgagccaagatcctgatactgcactccagcctgggtgacagagcaaggctccatctcaaaaacagacaaacaaacgagatggaatttggttctttacatcaaaaggtgaactacaagacacagggacagtttgtgtgcactttctataagctgctgaaactagcttaaggtctgcagttgcttgtcagaaaagagtatttgtaaggtcagtactctgtccagagttgcagtgatctgagttataaatcaaagttaggaggaatgtgataatttgtgtaatagctcctattcttagcaaatttagcaagaccgtggtttttcttgtagctgtagaaatttagggagttgcca

SEQ ID NO: 932504 - DNA, 665 bp, Homo sapiens
catagagatatatggttatgtgaaaatccaagtgaaaaaaacagcagtgtacctcatctttatgtaagtggaaagaaaacttatttatatttcattgtacatacaaataaaaaaatagtttccattatatcattccagaggtaagtgactacttcccatcccaggggggaaaatgggaggctgagraagatacattttcagtttatatagtttttgtatcacttaaaatttgcaacatgtgatatattaactatttttaaagtcagtgaattattttaagctcacttacaatttgtatcttcaaagaagtatttatgattactttaatattttataaagctaagggcaggtagactacaaatggattagtttgagaatcagtctcattcctttataagcatgcattttaacattccaaaaagaaaacgtctcttcccatcaccaagatatcctacattcaaaattcttaacagaattatatttttactttataaagcaagaattaattacttattagttagataaactataaacaatacagggcacaatggcagatataagaaaaaactgtaacttctgcatgataaccattaacatcgatagattatttttaaaaagtctgaaatttcatatgaactcttcagcaatgtaagaattatgtataa

SEQ ID NO: 932505 - DNA, 552 bp, Homo sapiens
gtgcccctgcctgtaccatcctaagagaggtttctgcttcctgtgtcctgctctgtgggctccccaggtacccctgtagtttttgcctaatactttggaaccaacaataataacttatgaaatctttatttcaaacacagcttgaatttcatccattttcatcttacccaaagagatagattctctagtctgcaatctggatggtcagaatggagaaatccccttacctgcaaacacaggtcttttattytgtaaccactgtctgtctggttttctgttttggagtctcccagggtgatggtgccgccagataaaagttctaatgagagagggagggtgggagggaggttccggtggcaaggcagggcggaaggtaagcggagaccttctccaatcagaagtctagaaggcagggcacgcagtaggtctgcagaatgactcagaacccgcgtatgaatgctgtctattcatgggtccaggcttttgttaaagcctgggcctgcattttaaagagggagtcagggaactggctggactggtctgacaactaag

SEQ ID NO: 932506 - DNA, 699 bp, Homo sapiens
ctcagaggggactgaggtgacaaaacaggatcccatcatttggtaaacaggactcaagcatgaagtctgaggggtgtggggaggtgcagggtgggtagcaaatggctgtgaaaagcaagagactttccacgggcaaagctaagtctagatgtacccagattagcgacttttccttaaaaggtttttccagccaggagcaagggactgggtgaatcatccctaagacgggtgacaggmggcaggaataaagcatgaataaagcatcaggaagggactaggatttaaaactggcccctcaatgcttctacactgctggtgagaatgtaagttagttcagccactgtggaaagctgtctggagagttctcaaataacttaaactagaactaccatttgacctagcaatcccatttactgggtatatgcccaaaggaatacaaaatattctaccataaagacacacacaggcatatattcatcacagcactgtttacaatagcaaagaccaagatgcccatcgatggtggattggataaagaaaatgtggtgcatatacaacatggaatactgtgcagccacagaaacgaatgaaatcatgtccattacagcaacatggatagagctggaggccattaccctaaacaaattaacgcaggaacagaaaactaaatactgcatgttcttacttataagtgggggc

SEQ ID NO: 932507 - DNA, 699 bp, Homo sapiens
ctcagaggggactgaggtgacaaaacaggatcccatcatttggtaaacaggactcaagcatgaagtctgaggggtgtggggaggtgcagggtgggtagcaaatggctgtgaaaagcaagagactttccacgggcaaagctaagtctagatgtacccagattagcgacttttccttaaaaggtttttccagccaggagcaagggactgggtgaatcatccctaagacgggtgacaggaggcaggaataaagcatgaataaagcatcaggaagggactaggatttaaaactggcccctcaatgcttctacactgctggtgagaatgtaagttagttcagccactgtggaaagctgtctggagagttctcaaataacttaaactagaactaccmtttgacctagcaatcccatttactgggtatatgcccaaaggaatacaaaatattctaccataaagacacacacaggcatatattcatcacagcactgtttacaatagcaaagaccaagatgcccatcgatggtggattggataaagaaaatgtggtgcatatacaacatggaatactgtgcagccacagaaacgaatgaaatcatgtccattacagcaacatggatagagctggaggccattaccctaaacaaattaacgcaggaacagaaaactaaatactgcatgttcttacttataagtgggggc

SEQ ID NO: 932508 - DNA, 600 bp, Homo sapiens
tctggaaagaatccttgtaagaccagtcctctgtccaaccagagttaggaggcgtctgacaatttgcctgattagctctactgttgggagtttaacaagggtgtggtttttcttgtaaccataggaatttagggagttgccacgccagccaagccctaaaccctgggcttataggtaactttttccctaaccttaagatctgtcttagttggtaaaggggtgtctattttggtctctcagatcacactagaaacctctcaagtcctgtattcttattataaagctgattataaagctttacaatttactttgtgattactgtagcttatcgtaaagcaactgtaatcagtaggattggtgtcaagatgggtacacagatgggtagaaaagaattgagaatccagaaatrgactcatatttacatggtcaatttatttttgacaaaggcaccaaagaaatttagcatagaaagtataatcttcatcaaatgatgctggaaaaattgagtaactatatgcaaaaaagaaagaaaagaaagaaaaaagtgaaaacctcccacctccgtcattacttcataccatataaaaaattaactcagaa

SEQ ID NO: 932509 - DNA, 544 bp, Homo sapiens
tcaaaggagtttatgacatcaccgtataaaatccatttgacatgaaaaccggaactccaactatgagatagtttcaaagctgcatttgcctagaaagtggattgctgcatatgaaccaagtgttgggctatatgactccaytgtcctaagctatttggggttggaaggaagaggggtgaagtagaaaagcaacaagctaatacaagaggagaaaaagtagatgagataacgtcaagacattctcacgagaaacagatgaagaggtggaaatgagtcagtccagcagcttaccaagtatcactgacaggagaggatgcatcctgtgtaaatactggagttcttgtctcagaagcacagggtatcatggaaatggagttgaaagctggggaactgatggaacgtctccatgaggagcaactaactggagccatgggttggtaccaagatgttccctctgccttctacttttgatagaaactaagccagtatggcatggggctctgaaaatgggctgaggggaacatcggtagcctccactaacccc

SEQ ID NO: 932510 - DNA, 583 bp, Homo sapiens
actgctgttatctcatactgagaatgctagttctatacctttgctctcaggctgtgaggaaggggtgctagtccaaaaggccatgggattagatttaaaaaggctaaaattaaatcctagaaaataaagaatatttcattttttaacattttaggaaacaaaatgaatatgcttttaaaacataaaaagccagaatccctcaatttataccaccaatctgactgtcttacatattcatttatccctgtagtttcattctttgctcatttaatacatgagcaagactgacatacaacacataaaatgagaacatctcaatatcatggttttttttgtttttttgtttttttttttttttttggagacaaagtctcactcagtcaggctggagtgcagtggcatgayttcagctcactgctacctccatctcctgtgctcaagcgatccacctgcctcaacctcctgagtagctgctaattataggcacgcaccaccacgcccggctcatttttgtattttcagtagaaacagggtttcaccacattggccaggctggtctcgaactcctgagctcaagtgatct

SEQ ID NO: 932511 - DNA, 551 bp, Homo sapiens
cactccagcctgggcaacaaagcaagaccctatctcgaaaaatatatataataaaaataaaaatcaactccattgatttctacataaatatgcacaggtgatgtccatacagacataaataataatatrtctgacaatgattccatatgatcttcaaaatgtaaaatgcctatctgtttaattggttagtctcattaatgaatatagattcaattctactttcttgttctagatcaattatataatctagcttttggtttcacttatttactgataacaacaggaagaatgacaagatatctattttggaaaattactctggtaggagtaaagatgaaactgatagaattgcatggaaaactagaaaaaagtatggtcttccaataatctatcacatcatataccaaaggcctcataaaactcagatattttatctaaaaatgttattttcatcttaggaatgatcaaagcatgagactacaattgtattaaaatgtgcttgtatcacaagcataggtgctaaaaaggaggggaaaatatcactactgata

SEQ ID NO: 932512 - DNA, 398 bp, Homo sapiens
ctgaacttgagtgaaagctgtccatcaggcatacagggaatgatggaaaaagtgacaacagaagatgaatgctatgtcactaaccttcaaatatgaccttccttgtcttttaaattcttgatatcttaagacttcattaattcatctctctttgccctgggttcaacattgtgctataccaaaactcatgtaaaacaatgatctaaggtaataaaaatggcatttttctttcatgtrgatgcaagctaactggcatttttacaatcaacatatttcctttgtcaatttttgattctgtattggaagtaattcatgggtatttctgaagggaagatggtgtttctgtgttcattgtgatccaaactgtttttagacctagtggcgtttgtaaaacaatt

SEQ ID NO: 932513 - DNA, 742 bp, Homo sapiens
ggatgcgatggcttatgcctgtaatcccaacactttgggaggccgagacgggcggatcacttgaggtcaggagtttgagacctgcctggctaacatggtgaaagcccgtctccactaaaaacacaattagctgggcgtggtggtgggcacctgtaatcccagctactcgggaggctgaggcatgagaattgcttgaacccaggaggtggaggttgcagtgagccaagattgggccactgcactccagcctggacaacacagctaacaagactgtctcaaaaaataaaaaaaacaaagctaagcactatatattaagtagatgattgaatattttaaccaagggtgtaaattattaacgaggatatttaaaaagcaatgaattgaarttgctgacatttttaagagagctgtttctttccctaaagttttaatatcaaacacacacacacacacacacacacacacacacacacacacacatatacttaggtggtgccaataaaaaggaaacaaaaataaaatggagaaatggaggtaatgatgaccccaagctaaaggaagaggaggaggggggtagatatatgttattttcgttctttcctatttcactcttcactggaaaagcacttgagttacagtttgtgattctgttagtccttcaatatggtaaaacaaacaggtttatctcatgtgcaaataatcaatgaggagtggttgcctccaagagcctgggtaatgttga

SEQ ID NO: 932514 - DNA, 746 bp, Homo sapiens
aaatatatccacaatcgaagaaaatatgtggtgtacaggcatagaatgtctttactggatcattgaaatagtaagataaattcaacattttacgttgttttcttttcctccagttagggcttgaggtttgtctctggagagtgactgtcaattggagccctgcctttctggggttctgggcagggggttgtggatgcttaacatgtgcctttcacaggacacttccttaccccagcagtggccaggtgtgcatcccacgaccaggcctccctctcacagaacatctgttgagactaggaaatgcctggtgactgttgcctgacctgtgtcctgtgtatttctgacaagagccactctcagagaccctgaccaggaggagagttaggttccagtgtagctcagctcagacacatggaggccacaggaccaaacrtgggaaatcatagaagtaggtttattactcacagatccagagagaagagggtagctgagaagagggtttagctgtgtccccagccaaatctcatcttgaattcccacatgttgtgggagggaacaggtgtgaggtaattgaatcatgggggcaggtctttcccatgctgttcttctgatagtgaataagtctcacaagatctgatggttttataaaggggagtttccctgcacaagctctcttgtcttgtctgctgccatgtgagacgtgcctttcaccttgtgccatgattgtgaggcctacccagccatgt

SEQ ID NO: 932515 - DNA, 615 bp, Homo sapiens
gcacagcagggaaaaccatgggggtgtttcctgagaaagagggactatagagaggcaccagaaaacccagctcatttgcaggattctggggagtgtcaggagcagttattatattcagaactgagaatttatttctaactcagcaacccgtagttctgactgaggtgcrgtggtgcaatcatagctcatcacagccccaaactcctaggttcatatggtcctctcatctcagcctcctgatagctatgaccacaggtgtgcactactatgcccagctcgtttattttatattttgttttcatttcatttgtaaagactgggtcttgctatgttgcccaggcaggtcacgaactcctatcttcaagcagtcctctaacctaggcctccctaagtactgagattataggcatgagccattgcatctggctcaaaagtatttctgtcttagtggctttagcaaagaagtgccattttggggacatatacaatggtgtgctgtttgggagtgatacaaaaataattataagaatggaatgaatatgtcagtatgttttcaaaagcaagttatcccaagtttttaaacaagcataattttagagtttttgtaactaactt

SEQ ID NO: 932516 - DNA, 595 bp, Homo sapiens
aaatgaacaggcaacaagaggcttgtggataaatttgaaaataaatacaaaaattttaaactagagctaccacgtgatcccacctctgggtacacaaccaaaggaaatgaaatcagtgtctgaaagtgatagctgcaccctcatgttcattgcagcattaacattattatgtagaagaggtgtaaattgcagcrttaatattattacgtagaagaggtgtaaacaacctccatgtccatcaacagatgaaaggacaaagaaaatacagcagacacatagaatggaatatcactcagccataaaaaaggaaatcctgccatttatgacaatacagatgaacctggaggatattctgctaagtggaataagccaggcgcagaagggcaaatactacatgatctcactcacatgtggaatctaaacaggttgaactcatagaagcagagaggaggactgtggttgctagcggctgggagtggggaaatgttggtcaggtgctataaaatttcggttctaagatgaataggttctgggggtctaatgcacagtgtggtgactatggttaataatacgctattgtgtaggccaggcagtg

SEQ ID NO: 932517 - DNA, 573 bp, Homo sapiens
gtgagtaaacaggaaatctcagtggagaagggaaaagtattttttttaaaaaaaagatcaaaattctaagactgaaaaacacaatatctgaaataaaaattcattgaatgggttaatcagtagcactgacttggcagaagaaagaactgagatttwaaaaattagataaattaaaaagtatccaatttgaaaagcaccgaaaaaaaggataaaagtgaagagagatgcagagatttattaaacattatcaaacatttcaacatatgtataattggagttctagaaagatagaaggaaaatacaaatcacaaaaaatatttagagtagtaatgcctaaaaattccccaaatttgatgacaacattggttttcaaatccacaaagctcaaaaagtctcaagtaagatatacacaaagagaaatgcacctaaacactatattcaaaccagtaaaaacccaaagcaaagcaaaagtcctgaaagcagtgaagaaaacaacaaaaaaaagacaattcacatatgaaaaggaaggatataatttatagatgacttttcatccaaagcagtggaatccgt

SEQ ID NO: 932518 - DNA, 598 bp, Homo sapiens
ggcatttatcccagagtaatgaaaacatgttcacacaaagacctctgcatgagtgttcacagcaaatttatttgtaatggcaaaacctgcaaacaacctgaatgtcccccatgggtgactgattaaacaaactgatacatccatctttataatggaatattactctgcaataaaaaggaacaaactactgatacacacaataacttgaatgtatatcaagggcattatgcttagtaaaaaagtgtmaatctcaaaaggttgcaaactatatgattccatttatataacaccgtcaaaataacaaaagtatggtgatgaagaatagattagtggtttccaggggacagaaatagagtgaggattgagaatataaaggtgcagcacaagggatttcttttgtggtgatggaacagcttcgtatgttgattgtggtagaggttacatctatctatacatgggataaaaatgcatagaatggaggcagggcatggtggctcatgcctgtaatcccagcactttgggtggtcagctaaggcaggaggattacttgaggccaggagttcaagaccagcctgggtaacatagtgagacccccatc

SEQ ID NO: 932519 - DNA, 648 bp, Homo sapiens
agaatgcgttgaagaatgggcaaataaaatcgggaatatttagaggtaggaaggtggtgaaaaggttcacaaagaagtttcaatttcaacaaaaagcttttaattcaaagatttttctttctttttctgagagtgatcagaacatgaagatggctgttgggagacaaatctccatgtatcctttatgttcccaaacatcttttgggcaaaggcactaagtgcctttgtgcctgtctgtctttacaagtatgtttrtatcgtgaacacactaggaagatatagatagtgtctctctctggagcaaagggtaggttttttatctttatacagtaaagataatgtctccttatggggcaacaatcagtgaggattattgtccattatgaaagacttgagttccttaccttggttctcccctgtcacatatcccgctacatgtgcagcatctcctggccctttgcacacccttctgtgggagttggggctcagaatgcaacacaaatgatgatactctaggtactactattctgtgcataataaaccatcttttgtctctgactcaagagtctcatggcttttgctagcatccataaaactggcagggcaaatcctgatacccttcacaattcttggcagttttggcagtga

SEQ ID NO: 932520 - DNA, 639 bp, Homo sapiens
gttaaaaataatccaaaataataatcatattttatttattatttattatatgtatacattaatatatacattttacatatttattttccccaattatactggacttcatgtaatgatgaatttggttttagttcctgagtttgatttggatgagtgttgcagtggggagcaggggaggtgtgagcttggggtggtgcgagcttggggtggtgctgaaggcagtgactgggacattttaagctcagggtcrtggtaatacatgttcatggtaatacatgtctctgattttttagacaccccatcacagagggtacagtttattcttggaaccgaggatgatgacgaggaacacattcctcatgaccttttcacagaactggatgagatttgttggcgtgaaggtgaggacgctgagtggcgagaaacagccaggtgaggatttttgttaaagggtgaaggtatactaaagaattttcatgttactagaagaagagatttctaatgcgacaattttgcaaacatctatgattgctgcctgatcttagaagttgctcatctagcctgagcatatcctataacgggatatgggtcagaaagaaatctgaaggcagtaattacagtaaacggtgatgcagagcc

SEQ ID NO: 932521 - DNA, 550 bp, Homo sapiens
actagtgtccgtaattggggggttcttggtctcactgacttcaagaataaagccgcagaccctcacggtgagtgttactgttcttaaaggcggcatgtctggagtttgttccttctgatgtttggatgtgttcattcctccccgtgggttcgtggtcccgttggctcaagagtgaagctgcagacctttgcggtgagtgatacagctcataaagacagtgccaacccagagagtgagcagcagcaagattcattgcaaagagcgaaacaacaaagcatccacagcgtggaaggggacccaagcagatttcaatgctggcttgggcagcctgctttcattcccttatctggccccacccacatcgtgctgattggtccmttttacagagagctgattggtccattttgacagggtgctgattggtgcgtttacaatccctgagctagactcaaaagtactccaagtccccactagattagctagacacagagcactgattggtgcattcaaaaaccctgagctagacacagggtgctgactggtgcattta

SEQ ID NO: 932522 - DNA, 664 bp, Homo sapiens
tagtttgtcactggatactaagagcctaaaaaaatgcttgactgatttgactaataagggctggtcttttatcagactgtatagaggtgggaaggctaaactgaggaattatgtctgacagaagggaagaaatgactgcagtggccttctcagaccctataggaaaggcctctacctatctagtgaaagtgtctacttagacaaagaggtattttagtttttgggactcggggtatgttgagtaaagctaatttgccagtcctgggtgggggcaaatcctcgagcttgttgtgtagggaaggggcctgaataatccttgaggagtagcagatggaatagcagatggaacactaagaagttatttccttgaggatagatttctacgatggaaaggaaatgaaaggttctaagaggcrggctagtggcttgtactatagcatagcctgcctttgctggtgtgtggtgattaggcctggtggaactgccatcaataaatcaagcgtgatcagggtgagaaacagggacgaaggaaatgtggggaaatgggatgaacatcaggtggatcagagagatgcagtcatgagggtcaggtgtggtgtctggaataatgtgggaggctggattgaagtccgggccaggaacaatggtaattgtgggacttaac

SEQ ID NO: 932523 - DNA, 662 bp, Homo sapiens
gtttaatggacttacagttccacatggccggggagcgtcataatcatggcagaaggcaaggagaagcaagtcacatcttacatgggtggtggccagcaaaaagagagagcttgtgcagggaaattcccatttttaaaaccatcagatcttgtgacattcattcaccatcacagctctagtagttggtgtcccagtagggatctgtgtgagggctccaaccccacatttccctttcacactgccctagcagaggttctctatgagggtcctacctgcagcaaacttctacctggacatccaggtgtttccatacatcttctgaaatctaggcagaggttcccaaaccccaattcttgacttctgtgcacctgcaggctcaatagcatgtgaaagctgccaaggcttggggatcgcacttgcaccctctgaagctatgacctgagctatgccttgrcccctttagtcatggctggagcatctggaatacagagtatgaagtccctagagtgcacacagtagggaggccctgggcccagcccatgaaacaattttttcctcctaggcctttgggctgtgatgggaggagctacctcaaaggtctctgacatgcccttgagacattttccccatttttttttggagattaacatttgactcctcat

SEQ ID NO: 932524 - DNA, 502 bp, Homo sapiens
gtcagggtcagtccaagtgaaagcgaagagaggctgggatgaagggtgcaaaggaacagtaaagaaagcatgtttgagatctagaacagaataatgggttgtagaggcacgtattgaggataggagagtgtatgggtttggcaccatggggtgcataggcaaaacaatttggttgataaggcgcagatcctgaactaatctgtaagacttgtccrgtttttgggcaggaaaaatgggggaattgtaaggagagttataggttttagaagcccatgctgtagcaggcgagcgataataggctttaatccttttaaagcgtgctgtgggatgggatattggcgttgagtggggtgagggtgattaggttttaatgggatggtaacaggcatgtgatcggttgccagggaaggagtggagatgtcccatacttgtgggttaaggtgggggaataggagaggaagatacacaggaggctttgggttggggagaagggcagcaatga

SEQ ID NO: 932525 - DNA, 502 bp, Homo sapiens
gtcagggtcagtccaagtgaaagcgaagagaggctgggatgaagggtgcaaaggaacagtaaagaaagcatgtttgagatctagaacagaataatgggttgtagaggcacgtattgaggataggagagtgtatgggtttggcaccatggggtgcataggcaaaacaatttggttgataaggcgcagatcctgaactaatctgtaagacttgtccagtttttgggcaggaaaaatgggggaattgtaaggagagttataggttttagaagcccatgctgtagcaggcgagcgataataggctttaatccttttaaagcgtgctgtgggatgggatattggcgttgagyggggtgagggtgattaggttttaatgggatggtaacaggcatgtgatcggttgccagggaaggagtggagatgtcccatacttgtgggttaaggtgggggaataggagaggaagatacacaggaggctttgggttggggagaagggcagcaatga

SEQ ID NO: 932526 - DNA, 695 bp, Homo sapiens
ctgtgttgaaacacatgctctcgtgtcttttattttatttcctaactgctctggctaggacttccagtcattactatattgaatgagagtgacgaaattagacattctaatcttccagtacttagaggaaaagctttctgcttctctccattctgtatgatgttagctctggagatgtcatatatggcttttattatgctgaaatgtgttccttcagttcctaatttgttgcggttttatcatgagagggatgtttaatattattaagtacttttctgcatctattgagatgatcatatagttttcgttttttattctgttgatgtgatgtatcacaatcattgatttgcatatgttgaatcatccttgcatctctgggacaaatcccacatgattatggtgtgttacctttttgatgrgtttttgaattcagtgtacaaatattttgttaaagacttgtctatgttcatcagggatagttttcgtgtagtttgtttttgttgttttttgtgctcctgtgtggttttcgaatgtgagtaatgcaagccttatagaatgacttagtaggaattccctcatcaatgttttttgaaatactgtgagaattccttttatttctttataacagtgtgaaaaaattgttttttatttattaattgctataagttgacctctctttgcactgcttttgctat

SEQ ID NO: 932527 - DNA, 825 bp, Homo sapiens
tctctccattctgtatgatgttagctctggagatgtcatatatggcttttattatgctgaaatgtgttccttcagttcctaatttgttgcggttttatcatgagagggatgtttaatattattaagtacttttctgcatctattgagatgatcatatagttttcgttttttattctgttgatgtgatgtatcacaatcattgatttgcatatgttgaatcatccttgcatctctgggacaaatcccacatgattatggtgtgttacctttttgatgagtttttgaattcagtgtacaaatattttgttaaagacttgtctatgttcatcagggatagttttcgtgtagtttgtttttgttgttttttgtgctcctgtgtggttttcgaatgtgagtaatgcaagccttatagaatgacttagtaggaattccctcatcaatgttttttgaaatactgtgagaattccttttatttctttataacagtgtgaaaaaattgtttkttatttattaattgctataagttgacctctctttgcactgcttttgctatatctcatagatttttgtatgttgtgttttcatttttctttcaattttttttacattttcttcttagtttcttcaccgacctaatgatccgtaaggagcatgtttcttaatttacttgtgtttgtaccatttctaaacttcctcttgttattaatttacacttttagttcattatgtcctgagaacgtacttgatgagattttgttttttaaaagtgtgttgaaacttgtttgatggcctaacatatagtctatcctggagaatgtttcatat

SEQ ID NO: 932528 - DNA, 825 bp, Homo sapiens
tctctccattctgtatgatgttagctctggagatgtcatatatggcttttattatgctgaaatgtgttccttcagttcctaatttgttgcggttttatcatgagagggatgtttaatattattaagtacttttctgcatctattgagatgatcatatagttttcgttttttattctgttgatgtgatgtatcacaatcattgatttgcatatgttgaatcatccttgcatctctgggacaaatcccacatgattatggtgtgttacctttttgatgagtttttgaattcagtgtacaaatattttgttaaagacttgtctatgttcatcagggatagttttcgtgtagtttgtttttgttgttttttgtgctcctgtgtggttttcgaatgtgagtaatgcaagccttatagaatgacttagtaggaattccctcatcaatgttttttgaaatactgtgagaattccttttatttctttataacagtgtgaaaaaattgttttttatttattaattgctataagttgacctctctttgcactgcttttgctatatctcatagatttttgtatgttgtgttttcatttttctttcaattttttttacattttcttcttagtttcttcaccgacctaatgatccgtmaggagcatgtttcttaatttacttgtgtttgtaccatttctaaacttcctcttgttattaatttacacttttagttcattatgtcctgagaacgtacttgatgagattttgttttttaaaagtgtgttgaaacttgtttgatggcctaacatatagtctatcctggagaatgtttcatat

SEQ ID NO: 932529 - DNA, 636 bp, Homo sapiens
atagtttgatgtcactaataataaaatataaattatatttaaaatgatgacacataattatcactgttgtcaaaaataattttaactgaataaatatatattaatttattaagtacatatatctttgttacactattaattaaaaagttgttaggccttcaaaagagtacccaaaaatgtgcaataataatgaaattcagtgacttgagttatttttccaactttcagtcacctttgatatctctgataacttttactaatgtaaaaactatggctttatatatataactttataacataamttttatattttgtcattatgaaggcatatttgtcaaggtagtaggggagaacgtattctatttagcagtgtcttagtttaacttatgcacacagtatgcaaacctccatcatcccctttggctctgcaaattttctaggcagaacgctttcatctctccagtctggactcatctttgcaactccagaccctagcttcctacttgacatctgtacttaaaagtctcacatatacctcaaacttaacatatctgaaagaactctttgttttctccccaatttgttgctactcacttcatttacagtcatgcgatgtataagaatgtttcagtcaac

SEQ ID NO: 932530 - DNA, 582 bp, Homo sapiens
gctagaacagtgccaggcactaggatactcaataaatattgtctgaatgaatacactgcaatagaacagagtcatcctcattgtttagtcatgggaagaaacagttgctttgcctcgggttgtatcaatagccagccattctttgactggctttttggggctggttgctgcagctccttctgcatccagacacctttttctggaatcagctaatccaactgtgcaacttcatgggaaaatgtrtaatgagtaatggggcctcttaaccgggaaaacaaatagaagaaaaataacctgtgaatttatcatcttgccccaaaccttggtacgttaaaagaaatctacacaattgagagccatatttgctggaattcctgaaacagttttgattttaagtgtcttgtctccctgtcccttaagtcattggctgaccatgtgctcatcacagttagactggaaggtagggagagggaaaactaagatagcaggaaagaggtaagaggctctacccaagcttaatttgaactaaattatctcctctagatatgtcattctgttaattattaaaaactccatcaagta

SEQ ID NO: 932531 - DNA, 582 bp, Homo sapiens
gctagaacagtgccaggcactaggatactcaataaatattgtctgaatgaatacactgcaatagaacagagtcatcctcattgtttagtcatgggaagaaacagttgctttgcctcgggttgtatcaatagccagccattctttgactggctttttggggctggttgctgcagctccttctgcatccagacacctttttctggaatcagctaatccaactgtgcaacttcatgggaaaatgtgtaatgagtaatggggcctcttaaccgggaaaacaaatagaagaaaaataacctgtgaatttatcatcttgccccaaaccttggtacgttaaaagaaatctacacaattgagagccatatttgctggaattcctgaaacagttttgattttaagtgtcttgtctccctgtcccttaagtcattggctgaccatrtgctcatcacagttagactggaaggtagggagagggaaaactaagatagcaggaaagaggtaagaggctctacccaagcttaatttgaactaaattatctcctctagatatgtcattctgttaattattaaaaactccatcaagta

SEQ ID NO: 932532 - DNA, 625 bp, Homo sapiens
tttagtttactaacatggtctaaattctagtacagtgataacttgaagaagctcaggcctaacttactaaccataatatcttaccctattggaactgagcttttcccaaagagtacctccagtgtcttcgctccatcaggatcagtcagtcctaccctcacccaactatctatagccctaaaggaccactgatcatggcaagttaaggcaattatcaataaggaagamcaatgataaagtattagaagaagttaagttaaaaccttgtgttgctgaatttgaaatagagaagtatcaatattaacttgtaaggtattttatcttttaaaaattcccttgctctgtccactgaaaagccaagaaataatgatcaacctagtatcaatgaatatctctagagccaatattgtgaatctgaaatctattttccattaaaagaaatcatggctgattctagatctagggcaggaaatgtacaagatgagtctggaacatcttataatagaaaggaaggaaggaagctacacatgatcattaggtgtagggtccagccctacagggcttagcaggtgttctccccgtgtgcaaagatgagagattgtaagaaataaagacacaagacaaa

SEQ ID NO: 932533 - DNA, 544 bp, Homo sapiens
aatagcaatggcaaatacaggaaataaatttatttctctattatataacggtccatgctaagcagtccagggataatatggtggcccccaaagtattagggaccaagggaccctctgtgttcttgttctgacatcctcacgttaacttctccatgttccttgaaaggctattctctttcagcttctggtagaagagcttctgacataacaagacgtggcgatgattttttgtatcaataatcagcatccacagygattctgatgcaagcgtccttgaccacattcaaaacaattaagcattgtttcccatgttatgactctcagaacactaattttgcaagatgctccatataaaaaggattctgttgataaataagtttggaaaactgtacttaacacattcccattttggaaatcacaatgattattaccatattttgaacttaaataagtgctgcagtaaagaaatctgctcaatgttatacaatctgatgtttctcaatcttatttgagctcagcattgttttttcaggtgacttactaa

SEQ ID NO: 932534 - DNA, 644 bp, Homo sapiens
ctacaatgagatattactactcacccactagaatggctaaaattagaaagactaaccataccaagtgttggcaagcatgtgttgggagtataaattggttcaatcactttggaaacttggacagtagctactaaacctaccttatgattcaaaaatttaactctatataattgcacatgcttatcaagagagatgtataagaatatttatagaattttattcacaatagccccaaactggaaaccctcaactattcatcaatagggaatggataaatataacatagaatatgcatagagtactatgaacctaaaaatgaataaatcacttacataatatcattcatggatgttactcgcagatactatgctgagcaaaagaagccagatacaaaaaagtttgtactatatgattttatttatatgagktttaagaaaaacaaactaactgatgatataaattagaatattttgtacccgtggctgggtgcagtggttcacgctggtaatcccagcactttgggaggctgaagcaggcagatcgcttgagtccaggggttggataccaccctgggcaacatggtgaaaactcatccctactaaaaatacaaaaaaattagccaggcatagtggtgcatgcctata

SEQ ID NO: 932535 - DNA, 605 bp, Homo sapiens
aaggcaggaaaggggatagaatatggggatcatcacaccaagaataaggtgcagcccatttagcccctgggtcttaaagagacccatagctctggataatggcagatctatgcgtgacacagttatcatctttgtgcatcttcagagaattgtttttccttttactcctaggaacaatgtcttaagtttgttagtaaattctattgaatttattaaagattcttctgataaattctttttatattcatttcaaaaaagaagaaatttcacactgacagagacattgttattatagcactaaatacttttacactcttcaaattcctttgagrctaactgaaatttctgacagccccacattctacaactttattgtaaattttctgccaaaagtgatgcttccctatacactcctaatacaggtataaatatattatttaatctaggcttaggttgatttaaaattttgaaaattcactccaaaaatatgttctgtaaccgtatggccaccaatgagaaatgtattctttcaaggtaaatctgtgctgccctggtctgacctgggactctggggatactgcgcccctgtgctgagttactgaaat

SEQ ID NO: 932536 - DNA, 621 bp, Homo sapiens
attataccaaaggcaggaaaggggatagaatatggggatcatcacaccaagaataaggtgcagcccatttagcccctgggtcttaaagagacccatagctctggataatggcagatctatgcgtgacacagttatcatctttgtgcatcttcagagaattgtttttccttttactcctaggaacaatgtcttaagtttgttagtaaattctattgaatttattaaagattcttctgataaattctttttatattcatttcaaaaaagaagaaatttcacactgacagagacattgttattatagcactaaatacttttacactcttcaaattcctttgaggctaactgaaatttctgacagccccacattctayaactttattgtaaattttctgccaaaagtgatgcttccctatacactcctaatacaggtataaatatattatttaatctaggcttaggttgatttaaaattttgaaaattcactccaaaaatatgttctgtaaccgtatggccaccaatgagaaatgtattctttcaaggtaaatctgtgctgccctggtctgacctgggactctggggatactgcgcccctgtgctgagttactgaaatgagccag

SEQ ID NO: 932537 - DNA, 671 bp, Homo sapiens
attatataaacttatctacatttttactagtattctggtgtcattttaaattatgtaatgaaatcaaattttaatttggattattgttatctgagttaaggatctaaattttcaatttcttacaaatactacataattatttctgaaacatatattgactaatctcccctttatatgatgtgcattataagagcttgggattgtttcatttgcaaagatgaatgcttgagaagtagatatttratcataacatttcaaaatcgactggataacctagaattgaaaaatagcctacaggttgaaaaactcctgtagtgaagaaagaaaataactaatatacagtgacaatataaatattataagtatttattttattatcgccctgaaatttgataatacaaacatgtaatatctacatatcatccatatatcaggtcagaaaaaatcaatacattcttcaaaaatttagcataacagaaaatgcactctctctccttgatggaattaagttacaaataaaagtaaaaataagtagataagtagatggaagtagatgtttaaaaacaaagaaaaatatttgttttggataacataaaatctcaattgacaattccaatatttccagaactttggctgtcaactggtggagagttttccccaggagacatttg

SEQ ID NO: 932538 - DNA, 575 bp, Homo sapiens
gtaaggtgtttaaattagtaatcaaaaatcttccaacaaagaaaatctcaggtgcagatgactttactagagaattctgccaacatttaaggaagaattaatgccaatatttctcaaacattcctaaaaagttaaagaagaaagaactattctaaactctttttgtgaagctagtataaccctaatatcaaagccagacaatggtgctacaagaaaaaaaattaaatattcctaatgaatgtagatgcaaaatcctcaayaaataccagtaaattgaattcaacagcactataaagtatcatccaccataattatgatggatttgttcctggaatgcaagaagggttcaacatgtgcaaatcaatataatatgccacattaacaaaataactcaaataacgtgttcatctccgtagatggagaaagatcatttgatgaaattcaacattctctcgttagaaaaacacttgaaaaaataggaatagaaagaaattattccaacagaataaaggccatatgtaaaaacccacatttcacaccatattaatgaagaaaaactgaaatctcttcttcta

SEQ ID NO: 932539 - DNA, 632 bp, Homo sapiens
ttctgtatctcatactgtattctgcaaggtactcctgtgaaagaaagttgtgctgcatcagccatctccctcctgaagatccctgcggatgaggatttgtgttttgaaggttctgagaattcctgcaacaacaattctcaaacttatttgtccaggggatcttttcttccactgaatgtagttggggagacatggccttaagccttgagcagagaaagagayaactgttggctcacttacaaccaagtgttgtgtttatgttttaggtttttatgaaactgaggtgctgtttgaggttctaaatgaaattgggtggttgaagagaggctggtgtccctgtagacttagccagccatgagtagttgccttttgttgaaggaggtgttttacaaagggaaatagggtgtctcctgggcatcgcattagcacttaaatacatgtatcactgaaatgaaatgaaatgatgaaatgatgaaatgatgacatgaaatggtgaaatgaaatgaaataatgaagtgaaatgatgaaatgaaatgatgaaatgatgaaatgaaatgaaaagatgaaatgatgaattgaggaaatgatatgaaatgatgaaatgaaatgatgaaatgaaatgaaaaggtgta

SEQ ID NO: 932540 - DNA, 632 bp, Homo sapiens
ttctgtatctcatactgtattctgcaaggtactcctgtgaaagaaagttgtgctgcatcagccatctccctcctgaagatccctgcggatgaggatttgtgttttgaaggttctgagaattcctgcaacaacaattctcaaacttatttgtccaggggatcttttcttccactgaatgtagttggggagacatggccttaagccttgagcagagaaagagataactgttggctcacttacaaccaagtgttgtgtttatgttttaggtttttatgaaactgaggtgctgtttgaggttctaaatgaaattgggtggttgaagagaggctggtgtccctgtagacttagccagccatgagtagttgccttttgttgaaggaggtrttttacaaagggaaatagggtgtctcctgggcatcgcattagcacttaaatacatgtatcactgaaatgaaatgaaatgatgaaatgatgaaatgatgacatgaaatggtgaaatgaaatgaaataatgaagtgaaatgatgaaatgaaatgatgaaatgatgaaatgaaatgaaaagatgaaatgatgaattgaggaaatgatatgaaatgatgaaatgaaatgatgaaatgaaatgaaaaggtgta

SEQ ID NO: 932541 - DNA, 632 bp, Homo sapiens
ttctgtatctcatactgtattctgcaaggtactcctgtgaaagaaagttgtgctgcatcagccatctccctcctgaagatccctgcggatgaggatttgtgttttgaaggttctgagaattcctgcaacaacaattctcaaacttatttgtccaggggatcttttcttccactgaatgtagttggggagacatggccttaagccttgagcagagaaagagataactgttggctcacttacaaccaagtgttgtgtttatgttttaggtttttatgaaactgaggtgctgtttgaggttctaaatgaaattgggtggttgaagagaggctggtgtccctgtagacttagccagccatgagtagttgccttttgttgaaggaggtgttttacaaagggaaatagggtgtctcctgggcatcgcrttagcacttaaatacatgtatcactgaaatgaaatgaaatgatgaaatgatgaaatgatgacatgaaatggtgaaatgaaatgaaataatgaagtgaaatgatgaaatgaaatgatgaaatgatgaaatgaaatgaaaagatgaaatgatgaattgaggaaatgatatgaaatgatgaaatgaaatgatgaaatgaaatgaaaaggtgta

SEQ ID NO: 932542 - DNA, 597 bp, Homo sapiens
ggaaacatccatcatcttgaaaactttttccgcacaaacccactgtgatcgctcaagcaattggtaaggaatccaagagagtctgtatatgatacagatcagggagagcagaacacttgggaggtgaccaggtcttkggggccgagcccttttgaatgggattagtgcctttataaaagaagctcagtggagttcttgtgtgccttccactatgtgaggacatagaaagaaggcaccatctatgaaccatgaaatgggctctcatcaacactgaatttgtgagcattttgacctgagatcttacagcctcaagaagtgtgaaaaaagaaatatctgttgttttttagtcacccagttcatgttattttgttataagaatccaaatagaccaagatattccacttaatatgtaggggaaggtaacaaaaactgacacacctagaatactcatgatgctgggagtatgaaaacaggaaaaacaaaacaaaactgctcttgaaggtgaaggaggaatatactgagctcaccaacacagccaggaaaagaacagaagtgtgagaagtctacattcctgagatcctgagaaaaagtacctgc

SEQ ID NO: 932543 - DNA, 629 bp, Homo sapiens
ataaactttcatttcaattaaaaggaaatttttaaaagaggactaccaaataactactgcagccattgtagtttcataaatgactttttacttccttcatgttgtgttaatgtgtgcctgctaggtcaagacccagatttgacaccgtgtacagtcagyatataagtatcataacagaagattacctatctggataccctagcttctccattcctgagcaagttgggaggccatggggtccaactctctcaatatgtactaagcaaacagagatacttttgccaaaggatattcttcttgatggtaaaaatattagctaacatttgttagctgacaaaaatgaagtatattaaatatgctaagggaaactgtggttcaagtgatagagatttttaattctttttgagatcatgtaattatacccatgacaaggtaagtttgattcagaataatttctgccaaaataaaggatgctgttgatggcctgcttgtcccctgcctattgactattattctcaaactcaagcaaaattaatttttaaataacaggataagaaatattagtaagctctgccttttgtgggtcaggttgaaagtatggaagaaattcagaaaggacatagtcagga

SEQ ID NO: 932544 - DNA, 629 bp, Homo sapiens
ataaactttcatttcaattaaaaggaaatttttaaaagaggactaccaaataactactgcagccattgtagtttcataaatgactttttacttccttcatgttgtgttaatgtgtgcctgctaggtcaagacccagatttgacaccgtgtacagtcagtatataagtatcataacagaagattacctatctggataccctagcttctccattcctgagcaagttgggaggccatggggtmcaactctctcaatatgtactaagcaaacagagatacttttgccaaaggatattcttcttgatggtaaaaatattagctaacatttgttagctgacaaaaatgaagtatattaaatatgctaagggaaactgtggttcaagtgatagagatttttaattctttttgagatcatgtaattatacccatgacaaggtaagtttgattcagaataatttctgccaaaataaaggatgctgttgatggcctgcttgtcccctgcctattgactattattctcaaactcaagcaaaattaatttttaaataacaggataagaaatattagtaagctctgccttttgtgggtcaggttgaaagtatggaagaaattcagaaaggacatagtcagga

SEQ ID NO: 932545 - DNA, 582 bp, Homo sapiens
aggaagaagttctagttctctacagcactgttgggtgactgtagttaatgggaatttattgtgtgttttcaaacaactaaaataaaagattttgaatattctcactgcaaagaaataatacatgatttagataatggatatgataatgactctgacttgatctttacgcattgcataaatatatcaaaatatcactctgtaacccataacatgtacatttattatatgtcaattaaagtaaatttaaaagaggaaagatgaggtaaaggtaaatrtacacaatttaattgctttttcttctataaaacccgagtcagtaccaagaagagtcaatttattagttttctaaaataaaaaaaaatcaaaatcaccaaaaaagagcaatatccaagaaaacattgaaaatgaaacacaacatttagtaagaatagaaaacttgggcactgtatcaccctgttcctagataccgatttactgatgaccatttaaatagaattttattctatctaattcatttatactcccagagttcgaaattacattttacctacaataaatgagataacactttaaattatatgg

SEQ ID NO: 932546 - DNA, 582 bp, Homo sapiens
aggaagaagttctagttctctacagcactgttgggtgactgtagttaatgggaatttattgtgtgttttcaaacaactaaaataaaagattttgaatattctcactgcaaagaaataatacatgatttagataatggatatgataatgactctgacttgatctttacgcattgcataaatatatcaaaatatcactctgtaacccataacatgtacatttattatatgtcaattaaagtaaatttaaaagaggaaagatgaggtaaaggtaaatgtacasaatttaattgctttttcttctataaaacccgagtcagtaccaagaagagtcaatttattagttttctaaaataaaaaaaaatcaaaatcaccaaaaaagagcaatatccaagaaaacattgaaaatgaaacacaacatttagtaagaatagaaaacttgggcactgtatcaccctgttcctagataccgatttactgatgaccatttaaatagaattttattctatctaattcatttatactcccagagttcgaaattacattttacctacaataaatgagataacactttaaattatatgg

SEQ ID NO: 932547 - DNA, 582 bp, Homo sapiens
aggaagaagttctagttctctacagcactgttgggtgactgtagttaatgggaatttattgtgtgttttcaaacaactaaaataaaagattttgaatattctcactgcaaagaaataatacatgatttagataatggatatgataatgactctgacttgatctttacgcattgcataaatatatcaaaatatcactctgtaacccataacatgtacatttattatatgtcaattaaagtaaatttaaaagaggaaagatgaggtaaaggtaaatgtacacaatttaattgctttttmttctataaaacccgagtcagtaccaagaagagtcaatttattagttttctaaaataaaaaaaaatcaaaatcaccaaaaaagagcaatatccaagaaaacattgaaaatgaaacacaacatttagtaagaatagaaaacttgggcactgtatcaccctgttcctagataccgatttactgatgaccatttaaatagaattttattctatctaattcatttatactcccagagttcgaaattacattttacctacaataaatgagataacactttaaattatatgg

SEQ ID NO: 932548 - DNA, 438 bp, Homo sapiens
gacagggaaagttacagactaagttctccaattttattctcaataattttctagcattgcttttctgaacttcagtgtgagatatttcacttttattgaaattttcacacatatgtaactaattattcatttaattaagtctcttttaggctraagagtcaccagttcctctggagttcggaatatacttgtggaaaataataaagtctctaaagtaagaaaagaactgtaaccatgtaagtagggcgtggcctcgaccatgaaactggaagtattgcattacagctaacaaggtgacaaaagtgcttagtacagatgacagattctgtaaaaaaattttaaaatatcaaaatggcactttgttctgtaaacttgccgatacattgcaactttgggtatttctttatgtctaattcagcagttttagaaacactaaag

SEQ ID NO: 932549 - DNA, 624 bp, Homo sapiens
tgcaggagttttctaagccagcgattaactgcagccatcattaaaaattaaattatgtaaatttatagctaaacacattttattaaaaacaaaggaaagaaataccccaaacccaccacttcttgttttattgcattttactactctctaagtttttgaatgtatttatgtccattgtatctgtaagatggaaatattacataacagtgtgtgaacacacacttctttccctgttctgcatgcagtgacctcactgtgcaagcttgacattggccatttcggragcatttataccaccaaaaatgggcaaacactacaaatcaggtctctatgaattgtttgggttcttgtatagacgtgagaaagcaatagaagaaaaagcaaattaaactgaaaagtgtcatattggtagctgttacattgtgaatagcaaaaaaacattatagagtcattcattggaactctaggtgggctatggatgtcagagttgtataataaaaatcaacaaaagctttccgtgagaatcatttggctatagacaattttcaataaagagtttgtatattttattactatttataaactgtgtacaatacatcttttatcagtaaaatttataataaa

SEQ ID NO: 932550 - DNA, 624 bp, Homo sapiens
tgcaggagttttctaagccagcgattaactgcagccatcattaaaaattaaattatgtaaatttatagctaaacacattttattaaaaacaaaggaaagaaataccccaaacccaccacttcttgttttattgcattttactactctctaagtttttgaatgtatttatgtccattgtatctgtaagatggaaatattacataacagtgtgtgaacacacacttctttccctgttctgcatgcagtgacctcactgtgcaagcttgacattggccatttcggaagcatttataccaccaaaaatgggcaaacactacaaatcaggtctctatgaattgtttgggttcttgtatagacgtgagaaagcaatagaagaaaaagcaaattaaactgaaaagtgtcatattggtagctgttacattgtgaatagcaaaaaaacattatagagtcattcattggaactctrggtgggctatggatgtcagagttgtataataaaaatcaacaaaagctttccgtgagaatcatttggctatagacaattttcaataaagagtttgtatattttattactatttataaactgtgtacaatacatcttttatcagtaaaatttataataaa

SEQ ID NO: 932551 - DNA, 766 bp, Homo sapiens
tgggcatctcttagaccagtcaagatggcacataaaattaaccatcacatgatatgacctgcaggtggctataaaggataaataagagctgggtgcagtggctcatgcctgtaatcccaacagtttgggaagccaaggtgggaggatcacttgagcccaggagttcaagaccagcctgggcaacatagtgagaccctgtctctaaaaataaataaataaataaataaataaatagaataaacaagaggaaggcaaaggtggaggtagagagaccagttaggaagctactgtggtcatccatgctggagggaatgtcggtagcagtgggaagggagaggtatggtcacagtttagagatgttgaasaggtcaaatcaacagaacttggcaactagatgtagggaaagaaggggaggggtgagtcaagaatagtcctgcttgaccaggcacagtggttcatacttgttatcccagttctttgggaggctgagggaggaggatcacttgaggccaggagttcaaaattagcctggacaacatagtgagactttgtctctataaaaaataaaaaattagcgggacatggtgctgtgtgcctgtagctccagctactctggaggctgaggcaggaggatcacttgagcccaggagtttgaggctgcagtgagctattattgcacaacagcactccaacctgggcaatagagcaagaccttgtctccaaaaaaattgttttaaaagaatattcctgactgatccttgggtaa

SEQ ID NO: 932552 - DNA, 607 bp, Homo sapiens
atattttcttaaagagataattgcacaagtgtattagtccattcttaaactgacataaagaactacatgacactgggtaatttataaagaaaagaagcttaatcagctcatggttccatgggctatacaggcttctgtttctggagaggcctcaggaaacttacaatcatggcagaaggtgaagcacatcttcacatggctggcaagagagagcragcaaagggggaagtgctacacacttttaaacaaccagatctcatgaaaactcactcactgtgacaaaaacagcaaggggggaagtccacccacatgatccaatcacctcctaccaggcccgtcctccaacattgagaattataaattgacatgagatttgggtggggacacagagtcaagccatatcattctgtccctggcctgtcccaaatcttatgttcttctcacatttcaaaacacaattatgccttcccagttatcccccaaagtcttaactcactccagcattaactcaaaagtccaagtccaacatctcctctgagacaaggcaagtcccttctgcctataagcctgtaaaataaaaatcaagacatccgagacacaatggggg

SEQ ID NO: 932553 - DNA, 714 bp, Homo sapiens
atagaggggatacaccttgccctgaggccaccaggataagtatttgggtttctctggtaatggatagggctatagagcttccaagagtttgtgtcttttgtgttcagctaccagggtttgtagagacaaaccatcaggwcggggcagggttaagtgggtctgacctcagactctccttgggtggggcttgctgcaaccactgtggggaatgtgggggttgttctcaagccaatggagttacgttctgaagggaattaaggctgcctctgatgtgtcatacaggttgtcagggaagtggaggaaagctggcagtgacaggcctcacccagctcccaggaagccagcaaggccagtctcacttctgctgtgctctgtcaacaacaaacagtgccaagtttatatccaggcctccggcacacagggctacaagactccctgctgagaaagaaagcagggcttttaggctttgcccttccctgtctgccacagcttctgtgcttatgtctgcactttgcatttgctccccagactctgcccaggaaaattcactctctcttgaatttactacaaagtttagtggaagccttcttctccctgtggcccttccctgattccactggctgcgttccccaaaggcccctgtgaaattaaagtcagaaatggcttccttggggttccctgaagattgggcatgcctacaaggctcttcccatt

SEQ ID NO: 932554 - DNA, 804 bp, Homo sapiens
cggtaccaattaaacagtaattctccattccctcctcctccaagcccctggcaaccaccattctactttctataactatgaatctgactactttgggtacctcccataggtagaatcattcaatatttgtccttttgtgtctggcttatttcacttagcataatgtcttcaaggtccatccatgttactgtatgtgttgagatttctttcttttgtaaggttaaataatattccattgtatatatatataccacgttttttctatccattcatccattgatgaatacttggttaggatctcttcatcttttggctattgtgaatgatgcagctatgaatattggtgtacaaatatctgttctgagtccctactttcaattcttccaatatatgggaagattatattggaagaagtggaattgctggatcatacagcaattctctctctttctctttgctttttttttttttttgagytgaggttttgctctgtcacccagactggagtgtaggggtgtgatctctgctccctgcaacattgaactcccgggctcaagtggtcctcttgcctcagcctcctgagtaactgggacctcaggcatgtgccaccatgctggtctaattttttatatttttagtagacacaaggtctttctatgttgcccaggctggtctcgaactcctgagctcaagcaattctcctgccttggcctcccaaagtgctaggattctagttatgagccactgcgtccagcctgatatggcaattctatatttattttttgaggaaccactgtattgttt

SEQ ID NO: 932555 - DNA, 861 bp, Homo sapiens
gggtcctgtctgttagaaggaaaactaacaaacagagatgacatccacaccaaaaacccatctgtacatcaccatcatcaaagaccaaaagtagataaaaccacaaagatggggaaaaaacagagcagaaaaactggaaactctaaaaagcagagcacctctcctgctccagaggaatgcagttcctcaccagcaatggaacaaaactggatggagaatgactttgacaagctgagagaagaaggcttcagatgatsaaattactccgagctatgggaggacatccaaaccaaaggcaaataagttgaaaacattgaaaaaaatttagaagagtctataactacaataaacaatacagagaagtcttaaaggagctgatggagctgaaaaccaaggcttgagaactacgtgaagaatgcagaagcctcaggaactgattcaatcaactggaagaaagggtatcagcgatggaagatgaaatgaatgaaatgaagcgagaagggaagtttagataaaaaagaataaaaagaaatgagcaaagcctccaagaaatatgggactatgtgaaaagtccaaatctacgtctgattggtgtacctgaaagtcatggggagaatggaaccaagttggcaaaccattcttttcattgagaaattcggaagcagtctttttgtggaatttgcaaaagaacatatatgagcccactgaggcccattgtgaaatgggaaatatcttcacagtaaaactagacagaaacattctgagaaacttctttgtgatgtttacattcatctcacagagttgaaactttcttttgattgagcagtttggaaaaactctttttgaagtatctacaaatgg

SEQ ID NO: 932556 - DNA, 535 bp, Homo sapiens
tgattgaacagtttggaaacaatctttttatactgtcgtcaagtggatattttgagctgtttgaggcctatggtggaaaaggaaatatcttcacctaaatactacacagaagcattcggagaaactcctttgtgatgtctgcattcagctcacagagttgaacctttcttttgattgagcagttatgaaaccctctttttataggatctgcaagtggatattggaagctatttgagacctattgtggaaaacgaaatatcttcacataaaaactayacagaagcattttcagaaacttttttgtgatgtgtgctttcatctcacagagttgaacctttcttttcattgagcggtttggaaacaccatttttgtagaatctgcaagtggatattttgagtgctttgtgatctatggtggaaaaggaaatatcttcacataaaaactacagaagcattctgagaaaattctttgtgatgtgcggatttatctcacagagttgaacctttcttttgattgagcagtttctaaacactc

SEQ ID NO: 932557 - DNA, 535 bp, Homo sapiens
tgattgaacagtttggaaacaatctttttatactgtcgtcaagtggatattttgagctgtttgaggcctatggtggaaaaggaaatatcttcacctaaatactacacagaagcattcggagaaactcctttgtgatgtctgcattcagctcacagagttgaacctttcttttgattgagcagttatgaaaccctctttttataggatctgcaagtggatattggaagctatttgagacctattgtggaaaacgaaatatcttcacataaaaactatacagaagcattttcagaaacttttttgtgatgtgtgstttcatctcacagagttgaacctttcttttcattgagcggtttggaaacaccatttttgtagaatctgcaagtggatattttgagtgctttgtgatctatggtggaaaaggaaatatcttcacataaaaactacagaagcattctgagaaaattctttgtgatgtgcggatttatctcacagagttgaacctttcttttgattgagcagtttctaaacactc

SEQ ID NO: 932558 - DNA, 586 bp, Homo sapiens
ttttgattgagcagtttggaaacactctttttgtagaatctgcaagtggatatttggagcacttttaggcctattgttgtaaaggaaatatcttcacataaaaactacagagtagcattctgagaaacttctttgtgatgtgtgcattcaactcacagagttgaacctatattttgatagagcagttttgaaactctctctttgtagcatctgcaagtggatatttggagccattctcagcctaagttggaaaaggtattaacttcacataaaaactatacagaagcatggtactgctaccaaaacagagatayagtcaatggaacagaacagagccctcagaaataatgccacgtgtctacaactatctgatcttctacaaacctgagaaaaacaaacaatgggggcaggatttactatttaataaatggtactgggaaaaatggttagacacatgtagaaagctgaaactggatccctttcttacagcttatacaaaaattaattcaagatagattaaagacttaaacgttagacctaaaaccatgaaaaccctggaagaaaacctaggctttaccattcagga

SEQ ID NO: 932559 - DNA, 675 bp, Homo sapiens
aattaaagagcttttgcacagcaaaagaaactatcaccagagtagacagacaaaaggagaatgggagaaactatatatccaactaaggtctgatatccagaatctgtaatgaacttaaacaattaaacaagcaaaaaactatctattacaaaatgggcaaaagacatgaacwgacacttttcaaaggaagatacacaattggccaacaaacatatgaaaagctgttcatcatcactaatcatcagagaaatgtgaatcaaaaccacaatgagataccatttcacaccagtcagaatgtttattattaaaaagtaaaaaaaaaaacaacagttgttgatgagactgcagagaaaaaagaatgcttatacacttttagtgggaatgcaaattagttcagacactctggaaagcagtttgaagatttctcaaacaacttagaactaccacttaacccagcaatcccattactgggtatatactcaaaagaaaacaaatcattctaccaaaaagacacatgcattctcatgttcattgcaggactattcacaatagcaaatacatggagtcaacctaggtgcccattaccagtggcttggataaagaatatgtggtatctacacaccatggactactacacagccataaaaaaatggaatcacgtcctttacagcaaca

SEQ ID NO: 932560 - DNA, 675 bp, Homo sapiens
aattaaagagcttttgcacagcaaaagaaactatcaccagagtagacagacaaaaggagaatgggagaaactatatatccaactaaggtctgatatccagaatctgtaatgaacttaaacaattaaacaagcaaaaaactatctattacaaaatgggcaaaagacatgaacagacacttttcaaaggaagatacacaattggccaacaaacatatgaaaagctgttcatcatcactaatcrtcagagaaatgtgaatcaaaaccacaatgagataccatttcacaccagtcagaatgtttattattaaaaagtaaaaaaaaaaacaacagttgttgatgagactgcagagaaaaaagaatgcttatacacttttagtgggaatgcaaattagttcagacactctggaaagcagtttgaagatttctcaaacaacttagaactaccacttaacccagcaatcccattactgggtatatactcaaaagaaaacaaatcattctaccaaaaagacacatgcattctcatgttcattgcaggactattcacaatagcaaatacatggagtcaacctaggtgcccattaccagtggcttggataaagaatatgtggtatctacacaccatggactactacacagccataaaaaaatggaatcacgtcctttacagcaaca

SEQ ID NO: 932561 - DNA, 614 bp, Homo sapiens
ttttttttttttattagagatgggattttaccatgttggccaggctctgctcttgaactcctgacctcaagtgatcctcctgcctcagcttcccgaagtgctgggattacaggcatgagccaccatgcccagcctgaagttttctgaagagttcttaaaatcaggatactaggctcctagtaaaggcaacagcagcggaaaaaaaggaatgaattagatactatttaggaggcacaactgatagagaattgtaactggctataggtagagatggagtttttgggctggatgactcagaacaaaatgatgattacaaaaaatgaggcaggtrattgatataactaagttttttttaatttgactgcttgttaatcattttatcagccttctcaaaggaagtttctgcatctgttttcccttcttgcctccctgaacctaaagaataaaaacaatggcagcaacatttttctgtggagctggcttataggataggactcggaagcagcacaagtcactccccctcactcccctttctggagtaaacgtgggcaggtggggagggaagcctgcattctgatttagcctcccaccttggcggacaataactcacctct

SEQ ID NO: 932562 - DNA, 482 bp, Homo sapiens
taatcttggataaattactaatcccctctgtgcctcaatttcttcatctgttaacacagggataataatccaaatactatttatttttaaattttattatttatttatttatttatttatttatttatttatttattttgagacagagttttgctctcgttgtccaacctagagtgaaatggcacgatttcsgctcaccgcaacctctgcctccggggttcaagcaattctcccgccccaggctcccgagtagctgggattacaggcatgcgccaccatgcctggctaattttgtatttttagcagagacaaggtttctccacgttggtcaagctggtcttaaactcccaacctcaggtgatctgccagcctcggcctcccagagtgctgagattacaggcatgagccaccacacccggcattatttactttaaaaggttgctttgaggactgagataatcccacatttaaagcagaatgcc

SEQ ID NO: 932563 - DNA, 734 bp, Homo sapiens
gatttgagacagggtctcgctgttgcccaggctggagtgcagtggtgcaatcatagctcactgcagccatgacctcctgagctcaagcagtcctcccacctcaacttcctgagtagctaggactatagctgcacactaccatggccagctaatttttgtattttttgtagagatagggtcttgctgtgttgcccaggctggtctcaaactccttggctcaagcgatccgcctgcctccgcctcccaaagtgctgggattgcaggcataagccaccatgcccagccctttaatttattttttaattgacaaaaattgtatatatcgtgtgcaacgtgttttgaaatrcatacacattgtagaatgagtcaatcaagctacttaacataagcatggcctcacatacatattttgtgtggtcagaacatttagaatttactctcagcaattttctagtacacaatagttgttagttgtagtcactttgttgtacagtagatctctggaacttactcctcctattaactgaaattttgtctcctttgaccaacatctccccattgccttccccaggatgatgatgatgatgatgatgatgattattattattatttttgagatgaagtctcgctcttgtcccccggctagagggcaatggtgtgatctcggctcactgcaacctccgcctcccgtgttcaagcaattctcttgcctcagcctcccgagtagctgggat

SEQ ID NO: 932564 - DNA, 553 bp, Homo sapiens
taaaacaactcttcctgtgctctacagatggaagaaccaagcctggacaacagcacatctacttgcagcatggttgactgaatattttaagcctgatgttttaagctcagaaaaaatgattgctttcaaaatattactgctgattgacaatgcacctgttttactcaagaggtctgagggagatgtgtaagattaatgttgttttcatgcctgctaacacaacatccattcagcagcccatgggtcaatgagtcattttaactttcaagtctaatttaagaaatatattttgtaaggctatagctgccataggtaatgatacctctaatgattctgggagaagtaaactgaaaatcttctggaaagaattatccattmtagatgtcattaagaacattcatgattcataggaggaggtcaaaatatcaactttttctcaaacagaagtttggaaaaaagttgattccaaacctcatgaatgacttcgaggggttcaagactcacttgaagaagtaactgcctatgtgtaaacatagcaaaataaatagaatta

SEQ ID NO: 932565 - DNA, 602 bp, Homo sapiens
agagaaaaggcagaagtaaagaaaatctttgagtgttacacccatattaaaagcagaagaggaataagatatatcaaaggtggttggaaagaaagacactgggataaaaggaaaaccagtttaggacaattgtactaaaatataggtaagagaaggttgcaaaaaggagagatccattatgtcataactactgagaggtgaaacaaagatgactgaaaattgagtatcatctttggaaatatttagcttctgtgagattaataagagctatttcagtgatagggaggattgaaaagcctagatgtgggttgaggagcgaatgtgacaagacaatgtgtagtacattactttggagggctttgatgttaagaagaccagagaaatgtgwttgtttctggagggcaaatgagattttcagaaagatgttagcatctcatgggagtaatccagtgagaggagttttataatataaaagttgagatcttagaaagtaagatgggatggaattagagataaatgaagagtttggactcaaatcaaagcttatttgcttcttttattgtaataggagatcaaaaatgtatgtccagatgctggtggtt

SEQ ID NO: 932566 - DNA, 818 bp, Homo sapiens
ccagactgagggtggttctctgtctcccagttcacagactccaatgttaatattctttgacgacaccctcacagacacaatcaagtgtccaatcaagttgacactcaatattaaccatcacaagtaaattggtacctggtagggggtcaccactatatagatacccaaaaatgtaaaagcaactttggaaytagataaacgcagagcctggaacagtttggagggctcagatgacaggaagatgtgggaaagtttggaacatcctagagacctgttgagtggctttgaccaaaatgctgatagtgatgtggacaataaagtccaggccaaggtggtttcagatagaagtaagaaaattgttgggagctggagtaaatgttactcttgctatacaaaaagactggcaacattttgcccctgccctagagatctgtggatgtttgaccgtgagatatataatttagggtatctggtggaagaaatttctaagcagcaaagcattcaagaggtgatacagcataaaaggttgaaaaacttgcagcctaacagtgcagtagaaaagaaaaacccattttctggaaagaaattcaagctggctgcaaaaatttgcataactaagcagaagccaaatgctagtcaccaagacaatggggacaatgtctccagggcatgtcagagaccttcccagcaagcccctcccatcacaggcctagagtacggaggaaaacatggcttcctgggccaggccctagatactcctgctgtgtgcagcctagggacttggtaccttgcatccaaaccatggctaaaaggggccc

SEQ ID NO: 932567 - DNA, 598 bp, Homo sapiens
agtgttcacttaccattctgaaaattcgatggcctttaagagttatgctaaaacaactcttcctgtgctctacagatggaagaaccaagcctggacaacagcacatctacttgcagcatggttgactgaatattttaagcctgatgttttaagctcagaaaaaatgattgctttcaaaatattactgctgattgacaatgcacctgttttactcaagaggtctgagggagatgtgtaagattaatgttgttttcatgcctgctaacacaacatccattcagcagcccatgggtcaaygagtcattttaactttcaagtctaatttaagaaatatattttgtaaggctatagctgccataggtaatgatacctctaatgattctgggagaagtaaactgaaaatcttctggaaagaattatccattctagatgtcattaagaacattcatgattcataggaggaggtcaaaatatcaactttttctcaaacagaagtttggaaaaaagttgattccaaacctcatgaatgacttcgaggggttcaagactcacttgaagaagtaactgcctatgtgtaaacatagcaaaataaatagaa

SEQ ID NO: 932568 - DNA, 580 bp, Homo sapiens
ctatcagacattcaaagaaaagttgataccaatcttactgacactattccacaaggtagagaaagagggaatcctccctaaatcattctatgaagccaatatccccctaataccaaaaccaggaaaggatgtagaaaaaaaactttgatgaatatagatgcaaaaatccttaacaaaatattagctaaccaaatcaaacagcatatcaaaaagataatcaaccatgatcaagtgggtttcatatcagggatgcagtgatcgatggtcatgtcaatacatgcagaaaaagcaytggacaaaattcagcatccctttgtggttaaaaccctcagcaaaattggcatacaagggacataccttaatgtaatgaaagccatctatgagaaacctacagccaacataatactgaatgaagttaaagcattctctttgagaagtggaatgaaacaacaatgtgcactctcaccactactattcaacatagtactggaagtcttagccagagcaatcagacaagagaaagaaataaagagcatccacactggtaaagaggaagtcaaatagttgattgttgttgttt

SEQ ID NO: 932569 - DNA, 580 bp, Homo sapiens
ctatcagacattcaaagaaaagttgataccaatcttactgacactattccacaaggtagagaaagagggaatcctccctaaatcattctatgaagccaatatccccctaataccaaaaccaggaaaggatgtagaaaaaaaactttgatgaatatagatgcaaaaatccttaacaaaatattagctaaccaaatcaaacagcatatcaaaaagataatcaaccatgatcaagtgggtttcatatcagggatgcagtgatcgatggtcatgtcaatacatgcagaaaaagcattggacaaaattcagcatccctttgtggttaaaaccctcagcaaaattggcatacaagggacatacyttaatgtaatgaaagccatctatgagaaacctacagccaacataatactgaatgaagttaaagcattctctttgagaagtggaatgaaacaacaatgtgcactctcaccactactattcaacatagtactggaagtcttagccagagcaatcagacaagagaaagaaataaagagcatccacactggtaaagaggaagtcaaatagttgattgttgttgttt

SEQ ID NO: 932570 - DNA, 569 bp, Homo sapiens
gtcacttttataactggtacgttaaacttggctccatcttcaaaatgcttccaaaatccatctacttctcactacctcttctgtgaccactgcagtccaacccagcagcatttcttgcctgtcttattgctaatagactcctaactggtttctctgcttttctttcccgaccttgctgaacataacagccggagtaagtcttttacagtgtcagtggcttcctttcttgttcataataaaagtacaacatcattataatgccctatcacctttctactccttacttattcactctgttccagccatcctggcctcagagtttctggtccatgcctgaagcatgtttctgctttgggtatttgctactatctctgcctggaatggaatacccttacctgttgtgcatwtgactgatctctctcttacctcttggaatcttacacaactgtcaccttctcagtaggaccttcctcgttgttctatataacattgcagccctgcttgctactatttccttgcctcattttctccatagcatttaccaccatttaaccttgctgtctattttg

SEQ ID NO: 932571 - DNA, 607 bp, Homo sapiens
cacaccctctcttttcaaatgaatgtgcttcttccatctccaaatattaaataatatatatctttatttatactcttattacaaaatttatttacctacctgtatgtgtttctatgtgcatgtgctttatgttcctgtgatactgtaatcctcataggcagaatctgtgatttgtttaccttcttcagaaaaacaagactggaagatytgaaagaaataacatagtgatggccagaggcattgcatataagaaatgcctcagatgagagccactccacatttttctagcatcataattgctataattgtttttacttcatatagcatatttagacatgcataccatctcttatctcttaccacagttctgagttatcttgaaaaatttctcctattgagcctcaaaaatttacaataaacatttgtatgtttattttaagatgattagcatcatgcttaatatttattataatccatgctatatctattacagaagcccaaaaaattctaatgaaatcatcataaatgatgctgatcattctttaatgtatcaaatcaaatgacaagtgaaaaactatagtttggttgacttcacattggaaatggt

SEQ ID NO: 932572 - DNA, 827 bp, Homo sapiens
atagcagagctgcactatgaaaatatggccaggctgctttttaaagcagaatccccatcctgttcatcctcactgggtgagacctcccaaccagagtctcctaccaccttcaccagtgttctcccaccaacagagatttgaaaactccctgggacaaagctctcagagggaggagcatgccaccatctttgctgttttggcaacttacccatcccagccttcaggctttggagagtcgaagctggccaggggcaggagtggtgtcccagcacagcacatctgcactatgaaaatgtggccagaccgctcaggtcctccatcccgcaactcctcactgggtgtaactcccaaaccagggcctccaggcaaccccaccggtgttctcttcccaacaaagatttgaacactctctaggacagagctcccagtaggaggagcrggtcaccatctttgccgttcagatgacttagctgttccagccttttggctttggatagcccaagccaatcagggcagaagcaatcacccaacacagcacagctactctataaaaatgtggccagactgcttgtttaagtgggtttctgatctcattcctcctcactgagtggaacctccctactggggactccagccacctactatacgtgtgttcaggctggcaacaagtccatacctccctaagatggagctcccagagggaggtgcaggctgccttctctgcagattcacagccttcgctggtgctacctccaggtactggaaaatccagggtgactagggactggagtagacttctagcataccacagcagccctctggaaaag

SEQ ID NO: 932573 - DNA, 827 bp, Homo sapiens
atagcagagctgcactatgaaaatatggccaggctgctttttaaagcagaatccccatcctgttcatcctcactgggtgagacctcccaaccagagtctcctaccaccttcaccagtgttctcccaccaacagagatttgaaaactccctgggacaaagctctcagagggaggagcatgccaccatctttgctgttttggcaacttacccatcccagccttcaggctttggagagtcgaagctggccaggggcaggagtggtgtcccagcacagcacatctgcactatgaaaatgtggccagaccgctcaggtcctccatcccgcaactcctcactgggtgtaactcccaaaccagggcctccaggcaaccccaccggtgttctcttcccaacaaagatttgaacactctctaggacagagctcccagtaggaggagcaggtcaccatctttgccgttcagatgacttagctgttccagccttttggctttggatagcccaagccaatcagggcagaagcartcacccaacacagcacagctactctataaaaatgtggccagactgcttgtttaagtgggtttctgatctcattcctcctcactgagtggaacctccctactggggactccagccacctactatacgtgtgttcaggctggcaacaagtccatacctccctaagatggagctcccagagggaggtgcaggctgccttctctgcagattcacagccttcgctggtgctacctccaggtactggaaaatccagggtgactagggactggagtagacttctagcataccacagcagccctctggaaaag

SEQ ID NO: 932574 - DNA, 705 bp, Homo sapiens
gaaggttaatatgattagaccccaaaatgctaaggactctacctctaatggtatggagaacaccgatagtccttggggtaaactgcttagaaacttatgcaaaataaatgcatctggcactcctgattcaccactcaagagaggtaaggagtttagtgactctctatataatatctttgactatattagagaaccaaggaacataatgaagttggatggttgctcttaagttcactggacaaagtgatgaaataaaatgatggactcagggattctaactccaagcttcagaagcagacactgagcctcaaacctgctaaaatcgccttgagtgagagtcttatctcctgcagaaaaaaagctgaaattgtggaaaaacagacacaagcacttatcatgtgagtggctgacctgtaacaaaaggtgmaggtacagctttgccaggtgtctactgttaaagtaagggcattgattggatcaggctgaatttattggtttggacccactcaatagggaatctgcatttaatgttgcagcttagggagttaaaaaacatttgaatagtttatttgcttggttagctaaaacatggattaaaagatggcccactgtgagtgagctggaaatgcctgatctctcttggtttaatgtagaggaaggaatccaaaagcttagggaaattgggatgctggagtggattagtca

SEQ ID NO: 932575 - DNA, 702 bp, Homo sapiens
acctttactgtcctacctcaggggtatatcaactctccgctttgtttcataatctttgaagagaacttaatctgtttttacttccacaagatatcacactggttcactaaattgatgacattatgctgattggatccrgtgagcaagaaattggaaacacactgaactttttggtgagagatttgtatgccagaggatgggaaataaatccgactaaaattctgggaccttctatctcagtaaaatttctaggttatctcatggtgtggggcctattgaggtatttcttctaaggtgaaggataagttgctgtatttggcccctactacaaccaagaaagaggcacaacacctaatgggactatttgaattttggaagcaacacattcctcatctgggtgtgttactctggcccatttattgagtgacgctttcagggctgccagtttttatgggatccagaacagaagaaggttctgcaacaggtccaggctgctgtgcaagctgctctgccacttgggccatatgacccagcaaatccagtggtgcttgaggtggcagtggcagatagggaagctgtttggaccctttggcaagtccccacaggtgaatcacagtggaggcctccaggattttggagcaaggccctgccatcttctgcagttaactactctccttttgagagacagctcttggcctgtta

SEQ ID NO: 932576 - DNA, 619 bp, Homo sapiens
tatgggatccagaacagaagaaggttctgcaacaggtccaggctgctgtgcaagctgctctgccacttgggccatatgacccagcaaatccagtggtgcttgaggtggcagtggcagatagggaagctgtttggaccctttggcaagtccccacaggtgaatcacagtggaggcctccaggattttggagcaaggccctgccatcttctgcagttaactactctccttttgagagacagctcttggcctgttactgggctttggttgaaaytgaacatttgacaatgggtcatcaagtcaccatgtgacctgaactgtctatcatgaactgattactttctgacccatctagccataaagtgagatgtgcacagcaacattgcatcatcaaatggaagtggtatatatgagaccagggttgagcaggtcctgaaggcacaaataagttacatgaggaagtggctcaaatgcccatggtctccactcctgccactctgacttctctcccctaccctgtgacgatggcttcatggagtgttctctatgatccattgacagaggaagagacgactaggaccggattcacagatggttctgcacaatatgcaggcactgccct

SEQ ID NO: 932577 - DNA, 619 bp, Homo sapiens
tatgggatccagaacagaagaaggttctgcaacaggtccaggctgctgtgcaagctgctctgccacttgggccatatgacccagcaaatccagtggtgcttgaggtggcagtggcagatagggaagctgtttggaccctttggcaagtccccacaggtgaatcacagtggaggcctccaggattttggagcaaggccctgccatcttctgcagttaactactctccttttgagagacagctcttggcctgttactgggctttggttgaaattgaacatttgacaatgggtcatcaagtcaccatgtgacctgaactgtctatcatgaactgattactttctgacccatctagccataaagtgagwtgtgcacagcaacattgcatcatcaaatggaagtggtatatatgagaccagggttgagcaggtcctgaaggcacaaataagttacatgaggaagtggctcaaatgcccatggtctccactcctgccactctgacttctctcccctaccctgtgacgatggcttcatggagtgttctctatgatccattgacagaggaagagacgactaggaccggattcacagatggttctgcacaatatgcaggcactgccct

SEQ ID NO: 932578 - DNA, 545 bp, Homo sapiens
gaaaaatgctgggagggagcctatactctgtaaagccacaggagtggaactgctcaagaccatgggaaccctcctcttgcatcagcatgacctggatgtgagacatggagtcaaaggagataattctggagctttgagatttgactgccccgctggatattagacttgcatggggcctttagcctctttgttgtggccaatttatcccatttggaatgggtatatttatccaatgcctgtacccccattgtatctaggaacaaactaacttgcttttgatttgacaggcttataggaggaatggacctgccttgtctcagatgagactttggactgtcgacttttgacttaatgctgaaatgagttaagactttgggggatggttggtaaggcatgattggttttgaaatgtgagggcatgagatttgggagggtccaggggcaaaatgatatggtttggctgtgtcccacccaaatgtcattttgaattgtagttcccataaytcctacatgttttgggaaggaaacaatgggagataattaaa

SEQ ID NO: 932579 - DNA, 584 bp, Homo sapiens
gaggcacggctgggtttgcaggttccacaggtcaacaggagctgggatcaggcggagcccctcccgctactgaggtgaagtaggagccccatgctcccaggcacagctacagccacccagccacagctccctacctgggcatccttgtgctctcgggaacctgggaagcccctctgcccacacagggtcagaagtgcctgcttcctctcactggcctctccctgctcctggtgaccactccaattttggagcaaagttgttgccaagcccaggcactgtcacaacctggccacgtgtgcacacactcagggcagcactgacacgcyagcaccctcccagccccacctcagccccctccagaacttgggtgctgacaagtgcaggagggaggcctgtggggtgctgagggcagctcagtgtgagcctgcaggtgacccttagcacaaacagcctgggtgccatggatgacatgttaatggcagcaagagtcagacagactcctggacagaaaggggcgggtcgccctgtgaagccccaccttcaagtcagtgttcacccaaagcctggaggctaggctgtcagtt

SEQ ID NO: 932580 - DNA, 584 bp, Homo sapiens
gaggcacggctgggtttgcaggttccacaggtcaacaggagctgggatcaggcggagcccctcccgctactgaggtgaagtaggagccccatgctcccaggcacagctacagccacccagccacagctccctacctgggcatccttgtgctctcgggaacctgggaagcccctctgcccacacagggtcagaagtgcctgcttcctctcactggcctctccctgctcctggtgaccactccaattttggagcaaagttgttgccaagcccaggcactgtcacaacctggccacgtgtgcacacactcagggcagcactgacacgctagcaccctcccagccccacctcagccccctccagaacttgggtgctgacaagtgcaggagggaggcctgtggggtgctgagkgcagctcagtgtgagcctgcaggtgacccttagcacaaacagcctgggtgccatggatgacatgttaatggcagcaagagtcagacagactcctggacagaaaggggcgggtcgccctgtgaagccccaccttcaagtcagtgttcacccaaagcctggaggctaggctgtcagtt

SEQ ID NO: 932581 - DNA, 598 bp, Homo sapiens
attgtaccatcagatatctatcagttgggtgattcctcttctcataaggttcaaagataaccttgggttcctaggcctgtcagaaagtgacattctttttttttttttgtttttgacagagtctttctctgttgcccagcctgcctggagtacagtggcacaatctcggctcactgcagcctccatctcctgggttccagagattctcctgcctctgcctcctgggtagcttcgattacaggtgcacattaccacaactggctaatttttgtatttttagtagagatggggtttcaccatgttggccaggctggtcttgaactcctgacctcaggtgatccacccacctcggcctccyaaattgctgagattacaggcatgagccactgtgcctggcccagaaagtgacattctttacttaccacaggtcagcaaccctgtaaggcactgtgtggacaaggtatgaggccagttttcctgaggggcctttattggctccataagtcaagtttggttccttaaaggaaagcatactattccagtcaaggctttggtaaaataaccagtttctccaattgttttctgttataaatgaaaa

SEQ ID NO: 932582 - DNA, 598 bp, Homo sapiens
attgtaccatcagatatctatcagttgggtgattcctcttctcataaggttcaaagataaccttgggttcctaggcctgtcagaaagtgacattctttttttttttttgtttttgacagagtctttctctgttgcccagcctgcctggagtacagtggcacaatctcggctcactgcagcctccatctcctgggttccagagattctcctgcctctgcctcctgggtagcttcgattacaggtgcacattaccacaactggctaatttttgtatttttagtagagatggggtttcaccatgttggccaggctggtcttgaactcctgacctcaggtgatccacccacctcggcctcctaaattgctgagattacaggcatgagccactgtgcctggcccagaaagtgacattctttacttaccacaggtcagcaaccctgtaaggcactgtgtrgacaaggtatgaggccagttttcctgaggggcctttattggctccataagtcaagtttggttccttaaaggaaagcatactattccagtcaaggctttggtaaaataaccagtttctccaattgttttctgttataaatgaaaa

SEQ ID NO: 932583 - DNA, 439 bp, Homo sapiens
catctcattgggactggttgcacagtgggtgcagcccaaggagggcaagtcaaagcagggtgtggcgctgtctcacctgggaagcgcaaggagtctgggaactccctctcctagctaaggaacaccattagggactgtaccatgcactctggccaagatactgcgcttttcccatggtctttgcaacccacagatcaggagattccctccggtgcctacgccaccagggccctgggtttccagcaccaaactgggtggctatttgrgcagacactgagctagccacaggagttttttttcataccccagtggcacctggaatgccaaggagacagaactgttcactcccctggaaaaggggctgaagccagggagccaagtggtttggctcacgggtcccaccctcatggggcctagcaagctgagatccactggcttg

SEQ ID NO: 932584 - DNA, 625 bp, Homo sapiens
gacttttgagttaatgctgaaataagttaagactttggggaactgttgggaaggcatgattggtttttaaatgtgagggcatgatatttgggaggggacggggcagaaagatagggtttggctatgtccccacccaaatttcatcttgaattgcagttcacataattcccacgtgttgtgggagggacctggtggaagataattgaattataggggagttttccccatgctttctcttggtagtgaataagtttcacaagctctgatggttttataaagggaaacccctctcacttggctctcattttctcttgtctgcaaccatgtaagacatgcctttagcctttcatcatgattgtgagccctgtccagccacctggaactgtgagtccattaagacaccttttcttcataaattccccagtcttggatatgtaaatatttacyagctgcatgcgctcggctaatacaactaatacatctcccactctcctacacccattccatctactaccacttttctcacaggaatgttaataccaagttttcctggggtgacaaacactgttgggctgggttctgaagagccaactttcttggccaagctgaataagatggggagaca

SEQ ID NO: 932585 - DNA, 619 bp, Homo sapiens
tgctactgatttatgtacattgattttgtaacctgagactttactgaattcatttatcaaattcaggagtcttttgaaggaatctttgggttttgtagctataaaatcttaccattagtaaccagaaatagtttgactttcttttttccaatttggatgccctttatttctttctctcrcccaattgctctggctgagacttccagtacagtggtgaatagaagaggtggaagtgggcatcctgtgttgttccagttcttaggggtaacactttcaacttttcctcattcattgcgatgttggctgtgaatctgtcatatgttgctttcattattttaggtatattccttctatgactagttttttgtgcgtttttcataaagcaatggtagaaattactgaatgttttttctgcatttattgagatgatcacatggtttttgtttgtaattctgcttatgtgatgaatcacatttattgacttgcatatgttgaaccatccccacatccctgggatgacaccgacttgatcttggtgaattatctttgcaatatgctgttggattcagtttgctagtattttgttgaggatttttgtatctatgttcgtcaaggatat

SEQ ID NO: 932586 - DNA, 619 bp, Homo sapiens
tgctactgatttatgtacattgattttgtaacctgagactttactgaattcatttatcaaattcaggagtcttttgaaggaatctttgggttttgtagctataaaatcttaccattagtaaccagaaatagtttgactttcttttttccaatttggatgccctttatttctttctctcgcccaattgctctggctgagacttccagtacagtggtgaatagaagaggtggaagtgggcatcctgtgttgttccagttcttaggggtaacactttcaacttttcctcattcattgcgatgttggctgtgaatytgtcatatgttgctttcattattttaggtatattccttctatgactagttttttgtgcgtttttcataaagcaatggtagaaattactgaatgttttttctgcatttattgagatgatcacatggtttttgtttgtaattctgcttatgtgatgaatcacatttattgacttgcatatgttgaaccatccccacatccctgggatgacaccgacttgatcttggtgaattatctttgcaatatgctgttggattcagtttgctagtattttgttgaggatttttgtatctatgttcgtcaaggatat

SEQ ID NO: 932587 - DNA, 656 bp, Homo sapiens
cctcaagtggaaggaaggggtgtcttttggaactgcaagctgcgcagtctgaggtcagaggaggggtatatcagcactcacatagctgtcctgcctggtgtctcagtagatcttgcatccccctagtcctctggctctgggcccagttcagcactaggatttgcctaggagttcccatccttgggtcctaaactgcatttcaagtatatttaggtctccagaacctttatcctgtggtggcaagagttgcaggaactcaawttctgacctctgagcttggtgattccctcctgactaggcctggtttaaatgttctctccatgggtgggcatcagctgagtttggtgtggtttttctttctgctattacagggcagcaatgagttgagtgcctcacaattgttgagttctccctctccccagtgcccaggaacagtctttgaaccatgccactgctgctggaatataagggaagggtggtgtcagcaattcaagactgttttttctatctcttcagtgcctctattagtgatataaagttaaaacgaggtactatgagtgctcacctgatttttggttcatatgaaggtgcttttgttgtgtagatagctgttaaattgttgtccttcacacggggatgatcagtggagccttcta

SEQ ID NO: 932588 - DNA, 512 bp, Homo sapiens
agtctgatgggcttccttttgtgggtaacctgacctttctctctggctgcccttaacattttttcctcatttcaactttggtgaatctgacaattatgtgttttggagttgctcttctcgaggagtatctttgtggcattctctgtatttcctgaatgtgaatgttggcctgccttgttagattggggaagttctcctggataatatcttgcagagtgctttccaacttggttccattctccccatcactttcaggtacacmaatcagacgtagatttggtcttttctcatagtcccatatttcttggaggtttgttcatttctttttattcctttttctctaaacttctcttcctgcttcatttcattcatttcatcttccatcactgatatcctttcttccagttgatctaataggctactgagacttgggcattcatcacgtagtttttgtaccatggttttcagctccatctggtcctttaaggacttatctgcattggttattctac

SEQ ID NO: 932589 - DNA, 733 bp, Homo sapiens
ggagaatcactactctcttcagggatatttaagtctgcagagatttctgctgccttttgtttggctatgacctaaccctagaggtggagtctacagaggcaggcaagcctcctagagctgaagtgggctccacccagktcgagcttcctggctgtttacctactcaagcctcagcaatggctggggaccctcccccagcctcactgccactttgcagtttgatctcagactgctgtgctagcaatgagtgaggctttgtgggcgtaggaccctccaagccaggcgtgagatataatctcctagtgtgccgtttgctaagaccattggaaaagtgcagtattagggtgggagtgacccgatcttccaggtgccatctgtcacccctttctttgactagcagagggaattccctgaccccttgtgcttcctgggtgagttgatgtctcacccttcttctgctcatgctcagtgcactgcacccactgtgctgcaccctcagtctgacactccccagtgagatgaacctggtacctcatttggaaatgcagaaatcacccatcttctgtgtcactcattctgggagctgtagacttgagctgttgctattcggccatcttggctccaatatctgttttgcttgtttctttgtttatgcaatcagtgttaaattgtccagtctaaaatcatgtattatattattttcaagcctcatggtaatttcaaatcaaaaagt

SEQ ID NO: 932590 - DNA, 733 bp, Homo sapiens
ggagaatcactactctcttcagggatatttaagtctgcagagatttctgctgccttttgtttggctatgacctaaccctagaggtggagtctacagaggcaggcaagcctcctagagctgaagtgggctccacccagttcgagcttcctggctgtttacctactcaagcctcagcaatggctggggaccctcccccagcctcactgccactttgcagtttgatctcagactgctgtgctagcaatgagtgaggctttgtgggcstaggaccctccaagccaggcgtgagatataatctcctagtgtgccgtttgctaagaccattggaaaagtgcagtattagggtgggagtgacccgatcttccaggtgccatctgtcacccctttctttgactagcagagggaattccctgaccccttgtgcttcctgggtgagttgatgtctcacccttcttctgctcatgctcagtgcactgcacccactgtgctgcaccctcagtctgacactccccagtgagatgaacctggtacctcatttggaaatgcagaaatcacccatcttctgtgtcactcattctgggagctgtagacttgagctgttgctattcggccatcttggctccaatatctgttttgcttgtttctttgtttatgcaatcagtgttaaattgtccagtctaaaatcatgtattatattattttcaagcctcatggtaatttcaaatcaaaaagt

SEQ ID NO: 932591 - DNA, 733 bp, Homo sapiens
ggagaatcactactctcttcagggatatttaagtctgcagagatttctgctgccttttgtttggctatgacctaaccctagaggtggagtctacagaggcaggcaagcctcctagagctgaagtgggctccacccagttcgagcttcctggctgtttacctactcaagcctcagcaatggctggggaccctcccccagcctcactgccactttgcagtttgatctcagactgctgtgctagcaatgagtgaggctttgtgggcgtaggaccctccaagccaggcrtgagatataatctcctagtgtgccgtttgctaagaccattggaaaagtgcagtattagggtgggagtgacccgatcttccaggtgccatctgtcacccctttctttgactagcagagggaattccctgaccccttgtgcttcctgggtgagttgatgtctcacccttcttctgctcatgctcagtgcactgcacccactgtgctgcaccctcagtctgacactccccagtgagatgaacctggtacctcatttggaaatgcagaaatcacccatcttctgtgtcactcattctgggagctgtagacttgagctgttgctattcggccatcttggctccaatatctgttttgcttgtttctttgtttatgcaatcagtgttaaattgtccagtctaaaatcatgtattatattattttcaagcctcatggtaatttcaaatcaaaaagt

SEQ ID NO: 932592 - DNA, 782 bp, Homo sapiens
tcttggctccaatatctgttttgcttgtttctttgtttatgcaatcagtgttaaattgtccagtctaaaatcatgtattatattattttcaagcctcatggtaatttcaaatcaaaaagtgtaccacagatatacaaaaagtaaaaagcaagaaattagattataattcaagagaaatcaccttcactaaaaggaagacagaaagaaaggaaagaaggaagagaggaaaaaaatcaatcagaaaacaaaaaatagcagaagtaagtgcttatgactgataayattgaatttaaatgaactaaatactccagtcaaaagaaaaatagtggatgagtggatagagaagcagaacaataatctgtgacctacaaaaaaacacactttacctataaagatacatttagactgaaaataaaaggatggaaaaagttattccatgccaatagagaataaaaaaagtagaaatagccatacttataccagacaaaaatagatttcaacaaaagactataggaagaaattaaaaggtcattatatgataataaagagatcaattcatcaagaggatataataattgaaaatatatatgcacccaacactaaagcacctagataaatgaagcaaatattataagagctaaagaaagagacctcaatacaataatggctggacacttcaacaccccactttagtcattggatagatcttccagacagaaaataaataaagaaacatcagaactaatctgtactatagaacaaatgaaactaatagatattta

SEQ ID NO: 932593 - DNA, 618 bp, Homo sapiens
ccagtcatatatagaaaaaggaaatgtctcaataatgagaagaaaacttgatcaatagatacagaaatggcaaataagatggaattagtaggcaacaatattaaaacagttattgtaatgataacattccacaagaagaaggtaaagggaagctagaacatggaagtagagacatggaagacccagcttgaatytctagaggtgaaaaatacaatgtctgagatgaaaaatatactaaatggcatttaaaatagaatagatattatataaaaaaggattggtcaactggaagatgtagcagtagaaactatcaaaaatggaacatggagaaaataatggaaaaaactgaacagaaaatcagcaccaacaggactaatatatgtggaattggagttcctgaagaaggtggggaggagtagaagaaaaaatatttgaaaaaactgtggctgaaaaaatttaaatttgagaaaaactgtaaacccagagatctaagaaccaatgaacccctagcacaagagacatgaggatgacacactgaagcatatcataatcaaattgccccaaaccagtgacaaagataaaatctgaaaggttaccaaagggaaaaggacattatac

SEQ ID NO: 932594 - DNA, 677 bp, Homo sapiens
aaaaaggaaatgtctcaataatgagaagaaaacttgatcaatagatacagaaatggcaaataagatggaattagtaggcaacaatattaaaacagttattgtaatgataacattccacaagaagaaggtaaagggaagctagaacatggaagtagagacatggaagacccagcttgaatttctagaggtgaaaaatacaatgtctgagatgaaaaatatactaaatggcatttaaaatagaatagatattatataaaaaaggattggtcaactggaagakgtagcagtagaaactatcaaaaatggaacatggagaaaataatggaaaaaactgaacagaaaatcagcaccaacaggactaatatatgtggaattggagttcctgaagaaggtggggaggagtagaagaaaaaatatttgaaaaaactgtggctgaaaaaatttaaatttgagaaaaactgtaaacccagagatctaagaaccaatgaacccctagcacaagagacatgaggatgacacactgaagcatatcataatcaaattgccccaaaccagtgacaaagataaaatctgaaaggttaccaaagggaaaaggacattatacagagaggaacaaagatgaaaataggctgagcgtagtggctcacacctgtaatcccagcactttgggaggctga

SEQ ID NO: 932595 - DNA, 846 bp, Homo sapiens
aaaaaggattggtcaactggaagatgtagcagtagaaactatcaaaaatggaacatggagaaaataatggaaaaaactgaacagaaaatcagcaccaacaggactaatatatgtggaattggagttcctgaagaaggtggggaggagtagaagaaaaaatatttgaaaaaactgtggctgaaaaaatttaaatttgagaaaaactgtaaacccagagatctaagaaccaatgaacccctagcacaagagacatgaggatgacacactgaagcatatcataatcaaattgccccaaaccagtgacaaagataaaatctgaaaggttaccaaagggaaaaggacattatacagagaggaacaaagatgaaaataggctgagcgtagtggctcacacctgtaatcccagcactttgggaggctgaggcagggtgatcacttgagaccaggagttcaagaccagcctgggcaacatgacaaaaccccgtctctactaaaaatacaaatattagcagggcatggtggcacgcatctgtaaccccagctactcaggaggctgaggcagggagaatcrcttgaacctgggaggcggagattgcagtgagctgagatggcgccattgcactccagcctgggcgacagagtgagactctgtctcaaaaaaaaaaaaaaaaaaaaaagaaaagaaaagatggcagacatctgtttagaaagaacgcaaggtcaggcgtggtggcacatgcctgttatcccagcactttgtgaggtcaaggcaggatgatcagttgagcccaggagttctagaccagcctgggcaacatggcaaaacgtggactctacataaaatgc

SEQ ID NO: 932596 - DNA, 649 bp, Homo sapiens
atctctcaacgtgccccggcacgcggggattttgtgtttgctgccctggcccctctagaagtaggactgtcccaccctcagactcctcggtggcctccgcaccccaaaaaatgccaggaggaccaggacccgcagcacagcggcctgctgggtgcatgctcagtgggacagcttgggtaccctcaagctgagtcacaggggcaaagtatgtttgcgccacccacatcccaccagagtccgcggtggggctggagccccaggttgccagggcggcgtgggaaactgaagacggggcacctccacttccgaagctcgcgacctcagaggcctccgggtcaagcacatatgcaagccatccaggcgcctcccaacygctccaggagccggggcgctcatctacactcacccccagccagtaaaccccctgccagtaaaccccagagttccagcaaaaggcacaacttttcctagatccggcgccactgggggagctgaaggacgtggaagagcccgctccgctggaaccactcctcagccaggaagaatagcgggctgtgctggaggagctttaggacgcggggctggggctgggtaagggcagggcggcggcctctctttcacggtgaacctctgactcggtatggagagg

SEQ ID NO: 932597 - DNA, 649 bp, Homo sapiens
atctctcaacgtgccccggcacgcggggattttgtgtttgctgccctggcccctctagaagtaggactgtcccaccctcagactcctcggtggcctccgcaccccaaaaaatgccaggaggaccaggacccgcagcacagcggcctgctgggtgcatgctcagtgggacagcttgggtaccctcaagctgagtcacaggggcaaagtatgtttgcgccacccacatcccaccagagtccgcggtggggctggagccccaggttgccagggcggcgtgggaaactgaagacggggcacctccacttccgaagctcgcgacctcagaggcctccgggtcaagcacatatgcaagccatccaggcgcctcccaactgctccaggagccrgggcgctcatctacactcacccccagccagtaaaccccctgccagtaaaccccagagttccagcaaaaggcacaacttttcctagatccggcgccactgggggagctgaaggacgtggaagagcccgctccgctggaaccactcctcagccaggaagaatagcgggctgtgctggaggagctttaggacgcggggctggggctgggtaagggcagggcggcggcctctctttcacggtgaacctctgactcggtatggagagg

SEQ ID NO: 932598 - DNA, 582 bp, Homo sapiens
gaaaaggtacctatgtgacattggcctttgcactactgtacccttttgggtcaggaaaaagctgttcccttaaagtcctaaaatctcttctgtcaggtctaaagggtgggtgggaaacatagtttttaaattttagccacagatgttttattccttgcttaaagcagtgactagataaaggccactagaagagtctccaaygttcctttagaagcatgtgtctgagaacatcttcctgaaacactcccttgtctctgcccaaaatcaccttaggtaggaaaatcacaactcagcaggctgaggggatccaaggggatcattgagctctgaggcttatgagagaagagagagaggtctaagactttttgtgtataaatttatgggttccaagtgcaattttgctgtaagcacggatggcatagtggtgaagtcagggcttttagggtatccatcactggaataatgcacattgtacccattaagtaatttctcactgttcacctcttccatcccctcaccctgctgagtctccattatcattccactctctacatcaatacctacacatcttttagcacccgc

SEQ ID NO: 932599 - DNA, 579 bp, Homo sapiens
cgtgatgtgttgacgtgctattggactctaagagaacttaaggggcagtctaggccacaaggacttcaattattaggcaagtcatattccgagctgggctcagagccagttgaatgtggagggtggggagaatgaggtctactgagacagcaaccagagaagctaagggagtgctcacaacaccactaacccactcccacctagcagcagccacacaacacaragaaacctgtgaatttgggagagggagcgcacagtgattagaggaaccagaataaaaaacagtgacaaccaggtaatacaccatgggcattgggctctgagaagcgctaacttcaggggtgacccagtacatttccagctgtggtagctgtggtgaaagacttctgtttgagaaaagcaggggggaaagtaaagggacctctgcgttgcacatgatatgccagctcaaccgcagtggggtagagcaccaagcggattcttagagtccctgagtccaggcctagggtcttcttggtcagcatttctgcacttgccctgggccaaaggtcgagtcccaggcattgcagaatttatctc

SEQ ID NO: 932600 - DNA, 579 bp, Homo sapiens
cgtgatgtgttgacgtgctattggactctaagagaacttaaggggcagtctaggccacaaggacttcaattattaggcaagtcatattccgagctgggctcagagccagttgaatgtggagggtggggagaatgaggtctactgagacagcaaccagagaagctaagggagtgctcacaacaccactaacccactcccacctagcagcagccacacaacacagagaaacctgtgaatttgggagagggagcgcacagtgattagaggaaccagaataaaaaacagtgacaaccaggtaatacaccatgggcattgggctctgagaagcgctaacttcaggggtgacccagtacatttccagctgtggtagctgtggtgaaagacttctgtttgagaaaagcaggggggaaagtaaagggacctctgcgttgcamatgatatgccagctcaaccgcagtggggtagagcaccaagcggattcttagagtccctgagtccaggcctagggtcttcttggtcagcatttctgcacttgccctgggccaaaggtcgagtcccaggcattgcagaatttatctc

SEQ ID NO: 932601 - DNA, 561 bp, Homo sapiens
cattcccaaagaactatgactgatggtagcataattttccatttgattttgtgtctcaggctgggaattccagcttatctgtccaatgatagagaccttgactttacttggattcttaacagagaaatttgaaaagtcttaccacttactaagaaattttactgcttctgtcatccttaatactcagtaaaagtaaagagaaacaatgacattttaaaactacattagcaaatatatttggcattcttgaacttccttgatcaacagtgtaacctctggccctcctgctcacgatgcccataccttgcaggtctcatgactttcactagcaagtttgactctgtgaggttgaatrtgtcatgactgattttaaactctagcttatctcatcaatacatcacaaattattcatatgatttatgcaatgtatacagtctttttaataataggtaaaaacttcctttcttcacattcttgcaacaggcactaaatgatccaaaagtaaagactatcttaaggaaaatataccagaaagagaaatgccttagaataattttgaaa

SEQ ID NO: 932602 - DNA, 561 bp, Homo sapiens
cattcccaaagaactatgactgatggtagcataattttccatttgattttgtgtctcaggctgggaattccagcttatctgtccaatgatagagaccttgactttacttggattcttaacagagaaatttgaaaagtcttaccacttactaagaaattttactgcttctgtcatccttaatactcagtaaaagtaaagagaaacaatgacattttaaaactacattagcaaatatatttggcattcttgaacttccttgatcaacagtgtaacctctggccctcctgctcacgatgcccataccttgcaggtctcatgactttcactagcaagtttgactctgtgaggttgaatatgtcatgwctgattttaaactctagcttatctcatcaatacatcacaaattattcatatgatttatgcaatgtatacagtctttttaataataggtaaaaacttcctttcttcacattcttgcaacaggcactaaatgatccaaaagtaaagactatcttaaggaaaatataccagaaagagaaatgccttagaataattttgaaa

SEQ ID NO: 932603 - DNA, 617 bp, Homo sapiens
tagaggcctccactgtgattcatctataggggcctgccaaaggctccaaacagcattcctatctcccactgacacctcaagcaccattggatctgctgggtcatatggcccaatggaagagcaggttacacagcagcctgaacctgttgtagagccttctcctgttctggactccacacaaaactggcagtcttttgggtcacttgataagtgggccaaagtagcacaccaaaatgagaaatgcattgtctccaaattccaaataggcccactaggcattgtgcctcttggttgtaggaggggccaaatgcagcaacttatccttcaccctagaaggaatatctcgacaggtcccacaccactacatccctggaaattttactgagatagaatgtccctaaattttaatcagatttatttccaattttcttgcatgaaaatgtctcaccaataagttcagtgtgttttctacttcttgctcactggatgccatcagcwtaatatcattaatgtaatggaccagtgtggtatcttgtggaagcaaaatgtgattaaggtctctctgaataagattatgacacaaaactggagagttgatatacccctgaggtaggaca

SEQ ID NO: 932604 - DNA, 579 bp, Homo sapiens
gaaaagcacaatgaattccaaatagaataaactcaaagagatccacaccagacatgttataatcaaacttttggaggacaaagaaaaaaagaaaatcttagaagcattgagagagaatcaacttgccacatacaagagattctcaatgataataataactaatttgtatcagaaattatagaagctagcaagtaggggaattatatttaaattgctaaagacaaaactcttaaccaagaattctgtatttggtaaamctcttcttgcaaaatgaaggaggcattacagataaataaaaattcagatagtttgtcattagtagacctttcctaccagaaatgttaaagaatgtcctttaggctgaaataaaagaaaattaataatctgaatacatacaaagaaaagaacaccagtaagggcaatttcataagcagatatgcatgtcaggattgatatatcttttgtttgaaactcctcttatttccttatgacttaaaaggcaagtacaaaaaacagtattataaatctgtgtagataaaaacacagtgtttaaagataatatttgtgacaacaacatat

SEQ ID NO: 932605 - DNA, 707 bp, Homo sapiens
gtcaaagatagattttcagaggggatgagtaaccattttgaaacccaagatgagaccaagaaggattaacattttaactctagtaaatgaagttcagggtggatagttattgaatatttactatgtgccaggcttggttattgtcttagtccatttggctgctataacaggttaccataagctaggtagcttataaacaagagaattttattttctacactctggaggctgggaagttcaagattaaggtgccagcagattaggtgtcttgtcagggccctcttcttgcttcatagagggtttctcctcastgtgtcctcagatagtggaaggaataaggcaactctttggggcctctcatacaagggcactaatcccattcatgagggcttcacctcatgacctaattacctccaagggcctcatctcctaatatcagcaccttggagattagttttcaatgaatgaatttgagggagacacaaacattcagcctatggcaataataatctgtttacttgtgctattttatttaatcctcacagcaattccatcagataatagttataatatccccctttttacagaaacatgaattaacgtatagattagttcagaactttttttaaggtcaccagcttgaaaaagtcagatgcagaaattaaacccccaacagcctgacccacaccttcgcttttaccacaaac

SEQ ID NO: 932606 - DNA, 707 bp, Homo sapiens
gtcaaagatagattttcagaggggatgagtaaccattttgaaacccaagatgagaccaagaaggattaacattttaactctagtaaatgaagttcagggtggatagttattgaatatttactatgtgccaggcttggttattgtcttagtccatttggctgctataacaggttaccataagctaggtagcttataaacaagagaattttattttctacactctggaggctgggaagttcaagattaaggtgccagcagattaggtgtcttgtcagggccctcttcttgcttcatagagggtttctcctcactgtgtcctcagatagtggaaggaataaggcaactctttggggcctctcatacaagggcactaatcccattcatgagggcttcacctcatgacctaattacctccaagggcytcatctcctaatatcagcaccttggagattagttttcaatgaatgaatttgagggagacacaaacattcagcctatggcaataataatctgtttacttgtgctattttatttaatcctcacagcaattccatcagataatagttataatatccccctttttacagaaacatgaattaacgtatagattagttcagaactttttttaaggtcaccagcttgaaaaagtcagatgcagaaattaaacccccaacagcctgacccacaccttcgcttttaccacaaac

SEQ ID NO: 932607 - DNA, 707 bp, Homo sapiens
gtcaaagatagattttcagaggggatgagtaaccattttgaaacccaagatgagaccaagaaggattaacattttaactctagtaaatgaagttcagggtggatagttattgaatatttactatgtgccaggcttggttattgtcttagtccatttggctgctataacaggttaccataagctaggtagcttataaacaagagaattttattttctacactctggaggctgggaagttcaagattaaggtgccagcagattaggtgtcttgtcagggccctcttcttgcttcatagagggtttctcctcactgtgtcctcagatagtggaaggaataaggcaactctttggggcctctcatacaagggcactaatcccattcatgagggcttcacctcatgacctaattacctccaagggcctcatctcctaatatcagcaccttggagattagttttcaatgaatgaatttgagggagacacaaacattcagcctatggcaataataatctgtttacttgtgctattttatttaatcctcacagcaattccatcagataatagttrtaatatccccctttttacagaaacatgaattaacgtatagattagttcagaactttttttaaggtcaccagcttgaaaaagtcagatgcagaaattaaacccccaacagcctgacccacaccttcgcttttaccacaaac

SEQ ID NO: 932608 - DNA, 775 bp, Homo sapiens
agactctcagagacaggatgacctgtctgcgagtaggagctacccactctgggtctcatctctgctaagggctgcagattcaatgggacaacctgcctgcagaaaggagttacccacttcaggtctcctgagagcttaatgttgctcaataaagcacctctttgccttgctcacccttcaattgtccatgtacctcattcttcctggacacaggacaagaactcaggacccaccaaatggtgggactgaaagagctataacacaaacagggctgaaacactacgygcccccgccactgcctgcttgccaagttgtgggtgacaagaaggggagaagatttgccgccatttggggtgttcagacctagggtctccccaagccagggctgtgacaccctctttggggctctgtaatttttggcatcttcaagcttctgggcaccaccgtattcccctcgtcctcaggtgcccacagtggaaaccgcttgtgatgcatctgatccagccacaggcttgcatgaagccagagtctgtgctggcatctggagctgactaccccactgcagcagccgatgtgcctggctgtgcacagtggcctgaccccctacttgctcactgacgcacccctcactgctctgtgcctggctccagtctcttccgaggcatgggatccagtctggtagcacgagctgagcacagcctgccaggtcaagtgggcagaatgagtccggcaggccagagaaaatcctgggcaaaggcatcaccgaccacagagg

SEQ ID NO: 932609 - DNA, 547 bp, Homo sapiens
tttctctggtgcctccttgagtagcttaatgattgactttctgaattgtttttctggcaattcagggatttcttcttggtttggatctattactgatgagctagtgtgatcttttgggggtgttaaagaaacttgttttgacatgttgccagaattgtttttctagttccttctcattttggtaggctacatcagagggaagatctggggctcatgagctgctattcagattcttttattccacagggtgcttgctggatgtgggtgctcagggatgtggcttcctgagaaccaaactgaagtgactgttatttctcttctggatctagctgcccagtggagctaycgggctctgggctggtactggggtgtgtctgccaagactcctgtgatgtcatccatcttcaggtctctcagccctgtataccagtacctgctctggggaagataacagtggtatgaagtggatctgtgagggtccttggttgcattttttttattgtgctagttttcggttagtttgactccagccagaaggtggcacttt

SEQ ID NO: 932610 - DNA, 699 bp, Homo sapiens
ggggtggataggcaaaacaatttggttgataaggcgcagattctgaactaacctgtaagccttgtctggttttaggacaggtaaaatgggggaattgtaaggagagtttataggctctaaagggccatgctgtagcaggcgagtgataacaggctttaatctttttaaggtgtgctgtgggatgggatattggcattgagggaagtaagggtgattaggttttaatgagatkgtaaggggtgtgtgattggtcaccaaggagggaatagaggtatcttatacttgtgggttaaggtggagggatatgagacgaggatgtgaaggaagctttgaactagggaaaaggtggcaatgaggtgtggctgtagcctagaaatagtcagggaagcagctaatttggttaaaatatctcagcctaataagggaactgggcaggtggggataattaaaaaagagtgcataaaagagtgttgtccaagttggcaccagagtgggggagttttcaggggtttaaaagcctggccgtcaatacccacaacagttatggaggcaagggaaacaggcccttgaaaagaaggtaatgtggagtgggtagcctccgtattgactaaggggacggacttaaccttccactgtgagagttacccgaagctcggcatccgtgatggtctgtggggcttccgaggcgatccggcagcg

SEQ ID NO: 932611 - DNA, 571 bp, Homo sapiens
gatacagggcccatggatgtccgaaatccagcggggcactcaaatctcaaaggtccaaaatgatcttctttgactccatgtctcacatctgggtcacactgatgcaagaggtgggttcccatggtcttgggcagctccacgcctgtggttctgcagggtacagtctctctcctggctgctttcacaggctggcattragtgcctgcagtttttccaggcacacagtgcaagccctcagtggatctactattctggggtctggaggatggtgatcctcttctcacagttccactaggcagtgccccaacagggactctgtgtgggggctctgactccaaatctcccttctgaactgccctagcagaggttctccatgagggccctgcccctgaagcacacctctgcctcagcatccaggtatttccatacatcttctgaaatctaggcagatgttcccaaacctcaatccttgatttctgtgcacccacaggctcaacaccacatgggagcttccaaggctgtggcttgcaccatttgaaaccatggtctgagttctacgttggcccctttc

SEQ ID NO: 932612 - DNA, 594 bp, Homo sapiens
caatatcactttctcagtgcaatttacccttaccacctgattttacattgcaacaagacctttacctcctccaccttcatattcctatctcccttaccctgtactaattttccttttttgatagcacttattacttaatatattataattkctttatttttttaaacttattatgcatgtgccctcaatacaatgtaaacttcatttaaaaattttggtttttttgctgatgtatcttaaggactaaaacagtgcttagcacttagtatgacctccacaaatacatgtcaaatgaaatatttgttgaaatgctacctttaacacattatattatagttagttcatttatctgtctccaacactaaattgcaaactccatgatacagagactgtcctagtcatctttcatttaaaagctatatttattaaggtacaatttaaagaccctaaaatataccttttagagtaaacaatgaattttgacagatttatagttaccataaccaccaccacaatcaagatatagcatatatctattatctattaccccaaaaagttcactcatgcttttttgcagtcaatctcttgtttcta

SEQ ID NO: 932613 - DNA, 702 bp, Homo sapiens
tcatgtgtttattggctgtttgtttatcttctttggagaaatggctattcaaagccttgtctatttttaaaatgggttacgtgtttttatgattgagttgtaaaagttctttatgttctagatactagaatatatgatttgcaaatatttctcccattctgcatgttttattttcacgtctttgatagtgtcctttgaagcacaaaagtttttaattttttttttaattgagatagagtcttgctctatcacttaggctggagcgcagtggcatgatctcagctcactacaacttccgcttcctgggttcaagcgattctcctgcttcagcttcttgagtagctgaggctacaggtgcgtgccaccactccgggctaattttttgtatttttagtagagacggggtttcaccatgttagccaggatggtctccatccgacctcgygatccgcccgcctcagcctcccaaagtgctgggattacaggagtgagccaccgtgcccagccttagtttttaatttttaaataattccagcttatttatgttttattttgttgcttgtgcttttggtgtcatataggaaaccgatgtctagtccaatgtcatgaagattaatacctgcttcttttaagagttttatggttttagctcttacacttaggtttatgatctattttgatctaattcatatatggtatgag

SEQ ID NO: 932614 - DNA, 633 bp, Homo sapiens
cccgtggagtctgctgaggcctttactggacctgtagtgtggcctggcttcttgctcagctcaatccttcttccttctcctccctcccgcgggttttgaaactaacagcacatcctaatacacttcctgtatggtagtctacatctccgagtttgcttcccagggagcccartctataatacatagatgatcatgatagacctctgagttgggattacttgcttgattttgcagctaaagcacttgagatttaggactcaatggcttgcccagagtcagtggatagcagatctcaggttcaacccaaatctagttcttcccaaagcactctctttctttgttgccactgtctaggtgtgtgactctaaacagtagaaaccatggggttataaaaccggcttgcaggaactgaactcaaagttcatttggttacagctcctgttctttaatctctggatctgagtttcctcctctgcaaaatagggacaacggtacttaaagcaaggtgttagaaggatggagtgcccaactcatcctgatttgcctgggactttcctaatttccccactgaaaaccttatatcctaggaaccccctccatccctgagccttgatggttggtcaccctatgtga

SEQ ID NO: 932615 - DNA, 624 bp, Homo sapiens
aatgtgcctgacattttgcaaaagatgagcctaacatttaataatgattcaccaattcatgatttgtttgaccaaaaaacattcatgtcattatcagtaaagatttcttgcatggtgatggccacaaagcattatcacaggtagtattgggaggaggaggcaatgtttatgacattaagaaaagacagctagctctcttggacctctgcaattaatagaagaaatactagtatcataaaaataaagcttcaaggtctacctttgtaactggacacttatatacttattcccggcctgagagtaatatattmcagattcaaaggtgtctgaacagtaaataaattaaaacatcacacgaaagagaagtaataggaagtgagagttggaatggatctagaagttataaggtttaaaattctcatttcatgtatgataaaactaaagagcacacagagtacagacaattttccacatcttggtaggtctttcccacttcggagcatgcaatcatggcttctctttgttgatgtaagagttggttttggtggtgaaggcttggtgagtcagggcttgctgggttggacatgacgtttgaatacacagttaaagaactcatctaataac

SEQ ID NO: 932616 - DNA, 711 bp, Homo sapiens
aagcccctactttaactggaggaccacaatgacgttttgtttcccctggaatcagcgtcagctcagagccagtgttcagtatttccccaaatgtctgattatttccctttcccaatgcacagttatcctggtaaacggctggaggtctccttggggaagcatggsagaaagattcactgtataaattttcagtattgtatgtggtgtccttccttaagagaacccggcctccccttcattcaaggggttctgggtttgtaaactggctcaagtctgaaaattgattgaggggccatgattcactgcttttataattcaaattagtctttgtttccatttgatctagaagttttctgcttatataaattaagtaggaatgcagctagcttcttaccaatttcacttctaggaatgccatgattgattagccaatgccagaactctacattagtcagattattctgattgctgctttgcctctgctgtccattacagtaggtacacccactatgcctttgacagttgagtgctaccatttggcccctgccaccttgggatccaattcttcccattgtatttaaattttgtagttgagtgactgtcattcccaccgttagatatgacatgcagagaagggcaattacagggctcttcaaagatgcaagtgctgccctcacgaatctgttttgcaaggcattggtcgagggttta

SEQ ID NO: 932617 - DNA, 573 bp, Homo sapiens
gtgatctgcctgcctcagcctcccaaagtgctgagattataggtgtgaaccaccatgcctggcccagtggcaattttttttagatgatctccacaatgaatctcatcatcctccttcttagtcctgtgctgaagtggcagggtgagcaaggaccccaatgtcaactttggaattgcatttagggtataattcaccccagaaggaaatttcaatatgggrtctcagagatgtacacatatgtgcacatatagattagggtttggaagaagaaagggatcttaaagtttatttctccttttacataagaaggaaaaaagcccacttgttacatgattcaccattatttagtaagagaataagaatagatacttaggctggctatatcccactgccctctaccaaacacacataccaccccctccccaccaccacacaaagactcacacaatggggagagggctttagagaggtacatttaggttatggcatcacttacaattattacagagcaaattcattgaatttaaaatcttaatgtggcaagttaatttcccattcaatatttagccagaa

SEQ ID NO: 932618 - DNA, 573 bp, Homo sapiens
gtgatctgcctgcctcagcctcccaaagtgctgagattataggtgtgaaccaccatgcctggcccagtggcaattttttttagatgatctccacaatgaatctcatcatcctccttcttagtcctgtgctgaagtggcagggtgagcaaggaccccaatgtcaactttggaattgcatttagggtataattcaccccagaaggaaatttcaatatggggtctcagagatgtacacatatgtgcacatatagattagggtttggaagaagaaagggatcttaaagtttatttctccttttacataagaaggaaaaaagcccacttgttacatgattcaccattatttagtaagagaataagaatagatacttaggctggctatatcccactgccctctaccaaacacacataccaccccctccccaccrccacacaaagactcacacaatggggagagggctttagagaggtacatttaggttatggcatcacttacaattattacagagcaaattcattgaatttaaaatcttaatgtggcaagttaatttcccattcaatatttagccagaa

SEQ ID NO: 932619 - DNA, 618 bp, Homo sapiens
gctaggataaaagcaggcagaagaatgtggaaagactagagtctccacattctaaaggccgagtctcctggcctacatctttctcccatgctagatgcttcctgccctcaaacattggcctccaagttcttcagctttgggactcttggaccttcaaccatcgrctgaaggctgcactgttggctttcctacttttgaggttttgggacttggactggcttccttgctcctcagttttcagacggcctattgtcagacctcaccttgtgatcgtgtgagtcaatactccttaataaactcccctttatatatacatctatcctattctgtccctctagagaaccctgactaatacatacctcactttatctgattttttttgtttgtttgttttaaagacagggtcttgctctgtcacccaggctggaatgcactggcgcgatcacagcacactacagccttgacctcctgggctcaagtggttctccctccttagcctcccaagtagctgtggctactacaggcatgtgccaccacactcagctaattcttgtattttttgtagagacagggtttcatcacattgcccaacctggtctcaaactcctggactcaagt

SEQ ID NO: 932620 - DNA, 766 bp, Homo sapiens
aagccagctcacaccagctcaaaagggcccattatgggcatctctctccatctctgcttcagtgacagcatgttggttgcttaaaatccaccacaatgagtttttgcattatagaaatcagcaaactccatagatcagggcttctcccaccccagcctgtggttaaacatttaacgacacaccactcactgatttcataggaccctgggcaacttactcaacatccctgaggctaggttttcttatttacctttcagagccgtggtgatgactacataaggtaatgtgtacgtttagctttgcttcccagagaaggaaacagggcagaatgctagcaatatcatcatcccttggccccctcatgtagcctacagattttagtgttggctacatgtctcattaaatacctgttatatgacagcagaggacgctgttcatctgtgtgtctctcctgctgccaaggaagtgtcccctacaaatagctcctggcaggagataggagctatttgtgctatagtttgaatgtgtcccccaaagttcatgtgtwggaaacgagtccgcctgtgcaacagtattgggaggtgggtgccaatgcgaggtgtctgactcatggaggcactgccttcatagatggataaaggcccttatcatgggaatgggttacttattagaggatgagtgtgtcaccacccccttcttctctctatctctctgtacctgtgtgtctccctccctctgctcttccactttctgccaggggatgatg

SEQ ID NO: 932621 - DNA, 751 bp, Homo sapiens
acctcccgggttcacgccattctcctgcctcagcctcccgagtaggtgggactacaggcacccgccaccacgccaggctaattttttgtatttttagtagagatggggtttcaccgtgttagccaggatgatcttgatctcctgacctcgtgatctgcccgcctcrgcctcccaaagtgctgggattacaggcttgagccaccgtgcccggcctgcccccactctttgttgtcccaagtcagaggcgctgccgatatgggttcctggagccagcacccagggctccccggtcttcccgagtgccttctccacctgcctgattgctgctcacccctcccccaggctccaacagatgccaggcttggaggtttgggcagcacaccatcttgccatcaccctccacctccatggtggcttattccagccagtgcagccccattcagtggcactgtcacacctggtgaaagcaagaggcagcccttgctgagaagcagaccgtgtgctgtctccgtgcaccaaatactctctagcacctcagtcactgcccaagggttcattcaattccaaagccagaatgagccttggaggttgtctaacctgacccattcattgcacagagggggaaactgaggcccaacataggcagtgactatccagggatccagcttgaggcagctctaggattagactcaggcagcctgagtcctctggctgttgtcctcccagcgctgttctccccttcccaggggca

SEQ ID NO: 932622 - DNA, 631 bp, Homo sapiens
ctagtcctttatgcttactattgctcccagggccatttcaataaagttatcaaagccacacctctcacactttaggcccccaggctccccaggcctgtgcagctcctctgaagtagcactgtgggaatgggcactggtgctcaccactcctagacataagaagcattttcggccgggcgtggtggctcacgcctgtaatcccagcacttcgggaggcagaggcgggcagatcacgaggtcaggagatcgagaccatcctggctaacatggtgaaaccccgtctctactaaaaatacaagaaattagccgggcgtggtggcaggtgtctgtagtcccacctactcaggaggctgaggcaggagaatggcatgaacccgggaggcggagcttgcagtgagcagagattgtgccactgcactccagcctgggtgacagaccgagactccgtagatcaaaaaaaaaraagaagcattttcccactgtgatggttagtaggttagtactgtcaacttgattggattgaaggatacaaagtattgatcctgggtgtatctgtgagggtgttgccaaaagggattaacatttgagtcagtgggctggggaaggcagacccacccttaatctggtgggc

SEQ ID NO: 932623 - DNA, 631 bp, Homo sapiens
ctagtcctttatgcttactattgctcccagggccatttcaataaagttatcaaagccacacctctcacactttaggcccccaggctccccaggcctgtgcagctcctctgaagtagcactgtgggaatgggcactggtgctcaccactcctagacataagaagcattttcggccgggcgtggtggctcacgcctgtaatcccagcacttcgggaggcagaggcgggcagatcacgaggtcaggagatcgagaccatcctggctaacatggtgaaaccccgtctctactaaaaatacaagaaattagccgggcgtggtggcaggtgtctgtagtcccacctactcaggaggctgaggcaggagaatggcatgaacccgggaggcggagcttgcagtgagcagagattgtgccactgcactccagcctgggtgacagaccgagactccgtagatcaaaaaaaaagaaraagcattttcccactgtgatggttagtaggttagtactgtcaacttgattggattgaaggatacaaagtattgatcctgggtgtatctgtgagggtgttgccaaaagggattaacatttgagtcagtgggctggggaaggcagacccacccttaatctggtgggc

SEQ ID NO: 932624 - DNA, 734 bp, Homo sapiens
atggctaactagaataaacagcgtagagaagaccttaaatgacctgatggagctgaaaaccatggcacaagaacttcgtgacacatgcacaagcttcagtagccaatttgataaagttgaacaaaggatatcagtgattgaaaatcaaattaatgaaataaagctagaagacaagtttagacaaaaaagagtaaaaagaaacaaacaaagcctccaagaaatattggactatgtgaaaagaccaattctacrtttgactggtgtacctgaaagtgatggggagaatggaaccaagttggaaaacactcttcaggatattatccaggagaacaaccccaacctagcaaggcaggccaacattcaaattcaggaaattcagagaatgcaacaaaggtactcctcgagaagagcaaccccaagacacataattgtcagattcaccaaggttgaaatgaaggaaaaagtgttaaaggcagccagagaggaagggcgggttaccctcaaatggaagcccatcagactaacagcagatcattcagcagaaaccctacaagccagaagagagtgggggccaagattcaacattcttaaaggaaagaattttcaacccagaatttcatatccaccaaactaagcttcacaagtgaagcagaaacaaaatcctttacagacaagcaaatgctgagagattttgccaccaccaggcctgccctaaaagagctcctgaaggaagc

SEQ ID NO: 932625 - DNA, 610 bp, Homo sapiens
gcaacagtaacccaaacagcatagtactggtacagaaacagacacatagaccaatggaacagaaaagagaatgaagaaataaaaccacacacagccatctgatcttcaacaaagttgacaaaaataggcaatgcagaaaggactccctgttcaacacatggtgctgagatagctggctaggcatatgcagaagaatgaaactgtcycctacttttcaccatttacaaaaattaactcaatgtaaattaaaattttaaatgtaagatctcaaactaagaatcctagaagaaaacctaggaagcaccattctggacagtagctttgagaaagaatttatgacaaagtactcaaaagtaattgcaacaaaaatgaaaattggcaggtgagacctaattaaactaaagagcatttgcacagcaaaagaaactgtcaaaagagtaaacagacaacctaccaaatggaagaatgtatttgcaaacaacgcatccaaaaaagatctaatattggggatctttaaggaactgaaacaattaaactagcaacaaaacccaaataactccattaaaaagttggagaaagacatgaatggacacttctcaaaagaaatact

SEQ ID NO: 932626 - DNA, 627 bp, Homo sapiens
ctttccgttaaaagagaaaccttaccaaggacttccttacccttactctttgcctaatttctttttaactcctatatcaattatatataatgaccttctttgtctctttttacagttcttttttaaagtctatttatctgatataagtattgctaatcctcctttcttttgrtttccatttgcgtggaatattttttccatcccttcattttcagtctatttttttatttaaaagggaagtgagtcttttatgagcagcatatatgttccttgcttcttttctcttgctgttttcagaatcctctttttgtctttgatttttggcaatttaattataatgtatcttcgggcagtcttttttagatggaatcagattacagacctttgactttcgtgtacctggatatttacgtctttctccaggtttagaaggtttcctgttacaattttttaaaaaaagttttctacccctttctctttttcttctttaactcctattactcaaatatttgctgttttgaggctgtcctataaatcctataaatttctttcttccttttcactcttcacttttttctcttctgactgtatattttcaagtaacctgtcttcaagtttaaagatctc

SEQ ID NO: 932627 - DNA, 627 bp, Homo sapiens
ctttccgttaaaagagaaaccttaccaaggacttccttacccttactctttgcctaatttctttttaactcctatatcaattatatataatgaccttctttgtctctttttacagttcttttttaaagtctatttatctgatataagtattgctaatcctcctttcttttgatttccatttgcgtggaatattttttccatcccttcattttcagtctatttttttatttaaaagggaagtgagtcttttatgagcagcatatatgttccttgcttcttttctcttgctgttttcagaatcctctttttgtctttgatttttggcaatttaattataatgtatcttcgggcagtcttttttagatggaatcagattacagacctttgactttcgtgtacctggatatttacgtctttctccaggtttagaargtttcctgttacaattttttaaaaaaagttttctacccctttctctttttcttctttaactcctattactcaaatatttgctgttttgaggctgtcctataaatcctataaatttctttcttccttttcactcttcacttttttctcttctgactgtatattttcaagtaacctgtcttcaagtttaaagatctc

SEQ ID NO: 932628 - DNA, 733 bp, Homo sapiens
tttgggtagtgtctgcatattgtgcagaaccgtctgtgaaacagtccctagtcttctcttcctctgtcaactgttcatagggaactccccatgaggccagcagtgcaggctgggggagagagggcagggtgacaggagtggagaccatgagcatttaagctacttcctcatgtaacatacttgtgccttcaggacctgtacgagtccaatcacatatataccacctccatttcatgatggaatgctgctgtgcatgacccactttatggctagatgtgtcagaaagcacccagttcatgataggcagtttagatcacgtggtgacttgatgacccatagtcaaatgttcagtttccaccaaagcccagtaacaggctgagagctgtctctcaaaaggataatagttatctgcaaaagatggcagggccttgctycaaaatcctagaggcctctaactgtgattcacctatgggagcctgccaaaggctccaaacagcaaccctatctgccactgacacctcaagtgccattggatctgctgggtcatatggcccaaattgtagagtagcttgccagcagcctggacctgttgcagatccttctcctcttctggacttcactcagaactggcagcctttcaggtcactcaataaatgggccatagtgacacacccaaatgaggaatgtgttgcctccaaaatccaagtaggcccactaggcattatgcctcttt

SEQ ID NO: 932629 - DNA, 718 bp, Homo sapiens
cagtttccaccaaagcccagtaacaggctgagagctgtctctcaaaaggataatagttatctgcaaaagatggcagggccttgcttcaaaatcctagaggcctctaactgtgattcacctatgggagcctgccaaaggctccaaacagcaaccctatctgccactgacacctcaagtkccattggatctgctgggtcatatggcccaaattgtagagtagcttgccagcagcctggacctgttgcagatccttctcctcttctggacttcactcagaactggcagcctttcaggtcactcaataaatgggccatagtgacacacccaaatgaggaatgtgttgcctccaaaatccaagtaggcccactaggcattatgcctctttcttggttgtaggaggggccaaatgcagcaacttatcctttaccttagaaggaatatctcaacagaccccacaccactggacccctagaaattttactgaggtagaagttccctgaattttagtcagatttcccatcatgtggcatgcatacatctcacaaataagtccagtgtatttgctacttgttgctcactggatccaatcagcctaatgtcattaatgtaatggaccagtgtgatatcttgcaatcaaggtctctccgaataagattatgacacaaagctggagagttgatatacccctgaggtaggagagtaaaggtatattgctggc

SEQ ID NO: 932630 - DNA, 742 bp, Homo sapiens
cacctggctaagttttgtatttttagtagagacagggtttcaccatgttggccggactggtctcaaactcctgacctcaggtgatccgcctgcctcagcctcccaaagtgttgagattacaggcgtgagccactgcgcctggctaatttttgtatttttagtaggaacagagtttcaccatgttggccaggctggtcttgaactcctgatctcaagtgatctgcccacctcggccttccaaagtgttgggattacaggcgtcagccactgcaccgggcccctatttttcctttgtatttcagtatttctctttgggaagtttctattgaacttcccttggctgtgtcaaatctacccataagcccatcaaaggcatttttcatatccatatataggattttttatttccagcattttcttttgtttcttagagtttctatctctctgctgacattacccattactatttccattagggcctttaaaatgttaatmatacttattttaaaaagataattccaacatctgaatcatatctaagtgttgttttgatggcagctttgtctcttcagattgtgtttctcctcgtcctttatcatgccttgtaatgctttatagaaatctacacatgcatcaggtaacaggaactgagataaataagtcttcattgtgaacatttattttaatctctctaggggtaggattgtgtttaatatttgctgtagctgtaggtgccaggggc

SEQ ID NO: 932631 - DNA, 640 bp, Homo sapiens
aaaaagtacaatgcctcaggctgggcagggtggctcatgcctctaatcccagcactttgggaagtcgaggcgggcagattacctgaggtcaggagttgagaccagcctggccaacatggtgaaaccccgtcactactaaaaatacaaaaatyagccaggtgtggtggtgggtgcctgtagtcccagctacttgggaggcatgagaatcatttgaacctgggtggcagaggttgcagtgagcctagatcacaccactgctctccagcctgggtgacagagcaagaatccatctcaaaaaaaaagagtacaatgcctcaattagacaaaagcaatatggttttattttctttgagatagattgcacagcagtgtgaatatagtaacagtgtttcatacatttcaaaataactaagagagtaaattttaaatgttctcaccacaaaaaggaataagtatttgaggtgataaatacattaattagcttgatttattattccacgttgtatttataaatcataacatcactttgtatcccataaatatattcaattataatttgccaatttacaattaaaataaaatttaaaaaattctacaaggaaacaaacaaacaaaaaacaagaaaaagaaaacaggataa

SEQ ID NO: 932632 - DNA, 602 bp, Homo sapiens
tctttatactgtctctctttatttctcagccggccgacacttatggaaaatagaaagaacctatgttaaaatactaggggcggattttccccaataacattgaccaatggaacagaatagacaacccagaaatagagtcacactcttacaaccaattgatctttgacaaagtcaacacaaataagcaatggggaaagactccctattcaataaatagtgtggcaaacactggctatcctatgcagaagcatgaaacttgacrcctacctatcatcatatacaaaaatttactcaagatggattaaagacttaaatttaatacctgaaactataaaaaatcctagaagaaaatctaggaaacaccactctggacattagttttcggaaggaatttataactaagtcctcaaaagcaattgcaacaaaaacaaaaattgacaagtgggactaaagagcttctgcacagcaaaagagacaatctatgaacagaaactataaacaatctatagaatgggagaaaatatttacaaactgtccatctgacagatatctaacatggagaatttataaggaatttaaacaaatcaacaagcaaaaaggaa

SEQ ID NO: 932633 - DNA, 565 bp, Homo sapiens
ctccttttatagggtgactacaacactataaatatcatcctggtaatctcgtgtatatttacaattttaatttatgattcatttatgcatttgcttatttatcaaatttttttagagtkcctactatgcacaatcctctacttactgggcaattcattgtaaaataagatgcaatctcttgtctaagaatgctgagtccagttgacagaatgtagttataattgagcttgatgacagtcaagttacataatgtaaagcggtttctgagagccaagaggaagacatccctgactatgactgtagatagggtctcttaggaaggaagtaggccaaatcatttttaatataatacacacaaagaagttaggtcaccttaataaaccctgccagattatgttttctatacacattatttttaatgattcatgacaccttattatctttgagctattaaatatactttctctctcctccccagcaaatgatgccccttaaattgatcaaccctttatttcctttgtatgttcccagtgacattcaggcaacatatataaatgcagtaatt

SEQ ID NO: 932634 - DNA, 615 bp, Homo sapiens
ctcccattttctttatccaatcatctgttgatagacatttgggttgattccatatctttgctattgtgaatagggctgctataaatatgtgaatgcaggtatctttttcttttctttttgagacagggtcacactctgtcacccaggrtggagtgcagtggtgcgatctcagctcactgcaacttctgcctgctgcactcaagagatcctcccacttcaaactcccaagtagctaggaccataggcacgcaacaaaacacttggctgtttttttgtatttttagtagagatgcggccttgtcatgttgtccaggctggtctcaaactcctaagctcaagtactgcacccacctcaacctcacaaactgctgggattacaggtgttagccactgcacccagctggtatccttttgatataatgatttttttttcctttgattatatacccggtagtgggattgcctgatcaattggtagttctattttcagttctttgagaaatctctatactgttttccatagagttgtactaatttacactcctaccgatggtatatagatgttcccttttctctgcatcctcaccaacatattcttttttgactttttcatag

SEQ ID NO: 932635 - DNA, 511 bp, Homo sapiens
gctcacccatggagggagccctacccagaggggaatcgctgatcctatctgtctgagcttgattccccaaaagccttgccaccacaaggctcaggttctctggggccttaaataaacttgaaaggcaatctaggccacaaggtctgcaactcctagatgagtcctagggctgaactgggccaaagacagtgggctggggaggcatgcaacctactgagacaccaggcgggatggctaaaaaagtgctggcatcatcccttccctaaccccaggctgtacarctcacggctccaaaggagactccttccttctgcttgaagagaggcgacagaagagtggggaggattttgttttgcatcttggataccagctcagctacagcaggataagacaccagtcagagtcatgaggctccctttccaggccctatttcccacacgacatttgtagacacaccctgggccagaaaggaatccactgccatgaggggaaagacccctggcaggattca

SEQ ID NO: 932636 - DNA, 738 bp, Homo sapiens
tattttgaattctctgtctgaaaggtcacatctctgtatctttaggattattctctggtggtttactgagtttatttggtgaggtcatgttttcctggatagtactgatgcagtaaatgttctttagtgtctgggcattgaagggttagggacttattgtagtcttcactgtctggggttatttgtagctgtccttcttgggaagactttctagatacttgaaaggactttggtattgtgatctaagctgtatctgccttagggggtaaccaaagcccagtaacactgtcattcttgaagacttgtagaggaaccgccttgatggtcttggataagatccagaattatctagttttctgggcagagactcttgttctcttcccttaactttctcccaaacatacagagtckccgtctctgttctgagccagctaaagccgagggtggtgtgacacaagcacctctgtggccaccaccactatgactgcactgcgtcagacctgaagccagcacagcactgggtatcctccaaggccggttgcaaccactccctgactactgcctatgttcactcaaggcccttgggctctataatcaccaggtgccaaagtcagtcagatcttcgtccttcccttctgggcagggacactgcccaagccctaggtgggtccagaagtaccatctgggagtcagagactagagttaaaaaaccttagaagtctacttggtgttctatta

SEQ ID NO: 932637 - DNA, 738 bp, Homo sapiens
tattttgaattctctgtctgaaaggtcacatctctgtatctttaggattattctctggtggtttactgagtttatttggtgaggtcatgttttcctggatagtactgatgcagtaaatgttctttagtgtctgggcattgaagggttagggacttattgtagtcttcactgtctggggttatttgtagctgtccttcttgggaagactttctagatacttgaaaggactttggtattgtgatctaagctgtatctgccttagggggtaaccaaagcccagtaacactgtcattcttgaagacttgtagaggaaccgccttgatggtcttggataagatccagaattatctagttttctgggcagagactcttgttctcttcccttaactttctcccaaacatacagagtctccgtctckgttctgagccagctaaagccgagggtggtgtgacacaagcacctctgtggccaccaccactatgactgcactgcgtcagacctgaagccagcacagcactgggtatcctccaaggccggttgcaaccactccctgactactgcctatgttcactcaaggcccttgggctctataatcaccaggtgccaaagtcagtcagatcttcgtccttcccttctgggcagggacactgcccaagccctaggtgggtccagaagtaccatctgggagtcagagactagagttaaaaaaccttagaagtctacttggtgttctatta

SEQ ID NO: 932638 - DNA, 738 bp, Homo sapiens
tattttgaattctctgtctgaaaggtcacatctctgtatctttaggattattctctggtggtttactgagtttatttggtgaggtcatgttttcctggatagtactgatgcagtaaatgttctttagtgtctgggcattgaagggttagggacttattgtagtcttcactgtctggggttatttgtagctgtccttcttgggaagactttctagatacttgaaaggactttggtattgtgatctaagctgtatctgccttagggggtaaccaaagcccagtaacactgtcattcttgaagacttgtagaggaaccgccttgatggtcttggataagatccagaattatctagttttctgggcagagactcttgttctcttcccttaactttctcccaaacatacagagtctccgtctctgttctgagccagctaaagccgaggktggtgtgacacaagcacctctgtggccaccaccactatgactgcactgcgtcagacctgaagccagcacagcactgggtatcctccaaggccggttgcaaccactccctgactactgcctatgttcactcaaggcccttgggctctataatcaccaggtgccaaagtcagtcagatcttcgtccttcccttctgggcagggacactgcccaagccctaggtgggtccagaagtaccatctgggagtcagagactagagttaaaaaaccttagaagtctacttggtgttctatta

SEQ ID NO: 932639 - DNA, 738 bp, Homo sapiens
tattttgaattctctgtctgaaaggtcacatctctgtatctttaggattattctctggtggtttactgagtttatttggtgaggtcatgttttcctggatagtactgatgcagtaaatgttctttagtgtctgggcattgaagggttagggacttattgtagtcttcactgtctggggttatttgtagctgtccttcttgggaagactttctagatacttgaaaggactttggtattgtgatctaagctgtatctgccttagggggtaaccaaagcccagtaacactgtcattcttgaagacttgtagaggaaccgccttgatggtcttggataagatccagaattatctagttttctgggcagagactcttgttctcttcccttaactttctcccaaacatacagagtctccgtctctgttctgagccagctaaagccgagggtggtgtgacacaagcacctctgtkgccaccaccactatgactgcactgcgtcagacctgaagccagcacagcactgggtatcctccaaggccggttgcaaccactccctgactactgcctatgttcactcaaggcccttgggctctataatcaccaggtgccaaagtcagtcagatcttcgtccttcccttctgggcagggacactgcccaagccctaggtgggtccagaagtaccatctgggagtcagagactagagttaaaaaaccttagaagtctacttggtgttctatta

SEQ ID NO: 932640 - DNA, 811 bp, Homo sapiens
taatcacacataacactcattaatcaagttacaaaggaggatcattaccaaccggggccatagtgcaggaaaattcctgcctgcaagccacatcagtaggctttgcattactccaaagaccgggtagtggccaactggggtagaacagcatcaactgggtgacatttctgtggagttcagaggaactgtaagacctgggtagtttcttaagttacagccctaaacaatcagagaaatgcaactacagggccatacacaaagaaggctaatagagatgaaatactaaaagattccagataactcttttttgtaaataaattaaatatgccaacatttgctataacaaaatttgtaaagtgggaatttacccattatttcagatgaattaaagttcctaattttagtgctttttaaaaaattatatttatagcatgatctcggctcactgcagcctctgccttctgggttcaagaaattctcctgcctcagcctcccgactagctggggttacaggtgcctgccaccatgctcggctaatattttgtatttttaatagagacagagttttgccatgttggccaggttggtctcaaattcctggcctcaggtgatccacctgcctcagcctcccaaagtgctgggattctaggcrtgagccactgtgcccagcccacgttattgatttatagagaataaggatttagctttcctttctcccatccattcccttcacacaattccctcatcctcctgatagtttcattatatctttttgttagagtaataattatttggtaataattagtactag

SEQ ID NO: 932641 - DNA, 458 bp, Homo sapiens
ttgtcatttcataagcatggaagcccctcaactacaatagtggtatcatctataaagcgatgtcttttacttctcatggatgcagaatcaaattgataagacattaattcaactaataaatagtatagttttttttgtatgtgggttacagtcggatattgccagtcttgctgtgatcctattttgatatrctcttggggtttctttttcccctaatgtgagcatctgatttgtagcacatcagtaaaattaacatatgcagttaaattatacagtaagtactaagtccatattcctcctgcctcaggccagtgatcaatcagatactcttcttcaagaacttcaaccaagagccctggagagaacaggctcagagtcacattaacgatggcacaccagagggacagtccttcaaacaccactgctcactcacctggctgaaattatcactgctagtg

SEQ ID NO: 932642 - DNA, 646 bp, Homo sapiens
caaggtgttctagaaaaatagaaccaataggataaatacagtatagatagatagatttagatgatatagatatagatatacataagaggagatggatcttctctactcggtctgctaatcgaaatgttaacgtcttccagaagcaccctcacagatgcacccaggaataatgttttgccagctatctgagaatcccttagctcagtcaagttgacrgataacattaattatcacaatccaccccttgtcaatttggcacccatacgcatctccttaaactatacttgctcttcaaataaagacaatagcaatgtgataatttctccagcatgatacaacagtccatacaactgaaaacacactaatccactcctcagaaaagaagctaaagtcctagctgtgatttcaatgttcatgtcccctccaaaatttgtgttaaaactcggtccctcagtgggtgcagtacaccgagcatgagccaaagcaggacgaggcattgcctcacccaggaagcacaaggggtcagggaattccctttcctagtgaaagaaaggggtgacagatggcacccggaaaatctggtcactcccaccctaatactgtgcttttccaatgggcttaacaaacagcacaccaggagattata

SEQ ID NO: 932643 - DNA, 457 bp, Homo sapiens
accaataggataaatacagtatagatagatagatttagatgatatagatatagatatacataagaggagatggatcttctctactcggtctgctaatcgaaatgttaacgtcttccagaagcaccctcacagatgcacccaggaataatgttttgccagctatctgagaatcccttagctcagtcaagttgacagataacattaattatcacaatccaccccttgtcaatttggcacccatacgcatctccttaaactatacttgctcttcaaataaagacaatagcaatgtgataatttctccagcatgatacaacagtccatacaactgaaaacacactaatccactcctcagaaaagaagctaaagtcctagctgtgatttcaatgttcatgtcccctccaaaatttgtgttaaaacycggtccctcagtgggtgcagtacaccgagcatgagc

SEQ ID NO: 932644 - DNA, 658 bp, Homo sapiens
aagacaatagcaatgtgataatttctccagcatgatacaacagtccatacaactgaaaacacactaatccactcctcagaaaagaagctaaagtcctagctgtgatttcaatgttcatgtcccctccaaaatttgtgttaaaactcggtccctcagtgggtgcagtacaccgagcatgagccaaagcaggacgaggcattgcctcacccaggaagcacaaggggtcagggaattccctttcctagtgaaagaaaggggtgacagatggcacccggaaaatctggtcactcccaccctaatactgtgcttttccaatgggcttaacaaacagcacaccaggagattatatcccgcacctggcttggagggtcctaagcccatggagcctcactcattgctagcacagcagtctgagatcgaactgcaaggcagcagcaaggctgggggaagggcgtccrccattgctgaggcttgagtaggtaaacaaagcagccaggaagcttgaactgggtcgagcccaccacagctcaaggaggcctgcctgcctctgtaggctccacctctgggggcagggcacagacaaacaaaagacagcaataacatctgcagacttaaatgtctctgtctgacagctttgaagagagaagtcgttctccca

SEQ ID NO: 932645 - DNA, 612 bp, Homo sapiens
  misc_feature 476, 527, 563, 595, 596: n = A,T,C or G
ggccttctttgtctcttttgatctttgttggtttaaagtctgttttatcagagactaggattgcaacccatgtctttttctgttttccatttgcttggtagatcttcctccatccctttattttgagcctatatgtgtctctgcatgtgagatgggtttcctgaatacagcacactgatgggtcttgactctttatccaatttgcagtctgtgtcttttaattggagtatttagtccatttacatttaaggttagtattgttatgtgtgaattttatcctctcattatgatgttagctggttattttgctcattagttgatgcagtttcttcctagcctcgacgatstttacaatttggcatgtttttgtagtggcttttaccagttgttcctttccatgtttagtgcttccttcaggagctcttttagggcaggcctggtggtgacacaatctctcagcatttgcttgtctgtanagtattttatttctccttcacttatgaagcttagtttgcctggatatgaanatctgggttgaaaattctttcctttaggaaatgttngatattgacccccactctctcctggcttgtannagttctgctgaaagac

SEQ ID NO: 932646 - DNA, 658 bp, Homo sapiens
attgtgtccctaatttggctcccggcttgactgttgttggtgtataggaatgctagtaatttttacacattgattttgtattctgagacttcgctgaagttgtctatcagcttaagaggctttgggtgagactacagggttttctagacataggatcatgtcatctgcaaacagggatagtttgacttcctctcttcctacctggatgcctttattttattttcttccctgattgccctggacagaacttccaatattatgttgaataggaggacatccttaccttgtgcgagttytcaaggggaatggttctagcttttgcccattcagtgtgatgttggctgtgggtttgtcatagatggctcttattattttgaggtatgctccttcagtacttattttacagagagttttaaacatgaagccatgttgaattttaccaaaagccttttttttgcatttattgggataatcatgtggtttttgtcttcagttctgtttatgtgatgaatcatatttattgatttgtgtttgttgaactaaccttgcatctcagggttaaagcctacttgatcatggtggataagctttttcatgtgctgctaatttcagtttgccagtattttgttgaggatttttgcatcagtgttcaccaagg

SEQ ID NO: 932647 - DNA, 450 bp, Homo sapiens
atgttccaattaaaaggcaccaactggcaaattggatagtcaagacccattggtgtgctgtagtcaggagacccatctcatatgcaaagacacacacaggctcaaaataaaggaatggaggaatatttaccaagcaaatggaaagcaaaaaaaaaaaaaaaaaaagcagtggttgcaaacctagtctctgataaaacagactttaagccaacaaagatcaaaaaagaccaagaagggcattacataatggtaaagggatcaatgcaacaagaagagctaactatcckaaatatatatgcaccaaatacaggagcacccagattcataaagcaagttcttagagaccaacagtgtgacttagactcccacacaataatagtgagagactttaacaccccactgtcaatattagacagataaacaagacagaaaattaacaaagacatctac

SEQ ID NO: 932648 - DNA, 612 bp, Homo sapiens
gactcctaaaccataatttctaatcttttggataatttgttagtcctacaaaggcaatctagtccctaggcaagaaggaggtctccttatttttatttatttatttatttattttttgagacagagtctcgttctgttgcccaggctggagtacagtggcgcgatcttggctctgcaagctccacctcccaggttcacrccatttttcccgcctcagcctgccaagtagctgggactacaggtgcctgccaccacacctggctaatttttttttttttttttttgtatttttagtagagacggggtttcaccatattagccaggatggtctcgatctcctgacctcgtgatccgcccgcctcggcctcccaaagtgctgggattacatcatctttgttttaaactctaaattaagttcctcgcaaagttagtttgccctatgcccaggaatgaacaaggacagcttggaggttagaagcaagatggagttggttaggtcagatctctttcgctgtcacagttataattttgcaatggtagtttcactatgacgttgtagaagctttcatggatatattcattcatttatcttgggcacattcttaggagtga

SEQ ID NO: 932649 - DNA, 612 bp, Homo sapiens
gactcctaaaccataatttctaatcttttggataatttgttagtcctacaaaggcaatctagtccctaggcaagaaggaggtctccttatttttatttatttatttatttattttttgagacagagtctcgttctgttgcccaggctggagtacagtggcgcgatcttggctctgcaagctccacctcccaggttcacgccatttttcccgcctcagcctgccaagtagctgggactacaggtgcctgccaccacacctggctaatttttttttttttttttttgtatttttagtagagacggsgtttcaccatattagccaggatggtctcgatctcctgacctcgtgatccgcccgcctcggcctcccaaagtgctgggattacatcatctttgttttaaactctaaattaagttcctcgcaaagttagtttgccctatgcccaggaatgaacaaggacagcttggaggttagaagcaagatggagttggttaggtcagatctctttcgctgtcacagttataattttgcaatggtagtttcactatgacgttgtagaagctttcatggatatattcattcatttatcttgggcacattcttaggagtga

SEQ ID NO: 932650 - DNA, 612 bp, Homo sapiens
gactcctaaaccataatttctaatcttttggataatttgttagtcctacaaaggcaatctagtccctaggcaagaaggaggtctccttatttttatttatttatttatttattttttgagacagagtctcgttctgttgcccaggctggagtacagtggcgcgatcttggctctgcaagctccacctcccaggttcacgccatttttcccgcctcagcctgccaagtagctgggactacaggtgcctgccaccacacctggctaatttttttttttttttttttgtatttttagtagagacggggtttcaccatrttagccaggatggtctcgatctcctgacctcgtgatccgcccgcctcggcctcccaaagtgctgggattacatcatctttgttttaaactctaaattaagttcctcgcaaagttagtttgccctatgcccaggaatgaacaaggacagcttggaggttagaagcaagatggagttggttaggtcagatctctttcgctgtcacagttataattttgcaatggtagtttcactatgacgttgtagaagctttcatggatatattcattcatttatcttgggcacattcttaggagtga

SEQ ID NO: 932651 - DNA, 653 bp, Homo sapiens
tgctatccccaaactgccactcttaactcttgaagtaaataaataatctttgctggcaggactatgctgaatctccttaggcactctctaatcagatatcctgagtcgtcccaattcttagaccttttatacctgcttttttccttctsttattccatttagtttctcaattcatccaaaaccgtatccaggccatcaccaatcattctatacgacaaatgtttcttctaacatccccacaataccaccccttaccacaagacctcccttcagcttaatctctcccactctaggttcccacgccacccctaatcccgctcgaagcagccctgagaaacatcgcccattctctctccataccaccccccaaaaaatttcgctgccccaacacttcaacactattttgtattatttttcttattaatataagaaggcaggaatgtcaggcctctgagcccaagccaaaccatcgcatcccctgtgacttgcacgtataggcccagatggcctgaagtaactgaagaatcacaaaagaagtgaatatgctctgccccaccttaactgatgacattccaccacaaaagaagtgtaaatggctggtccttgccttaagtgatgacattaccttgggaaagtccttttcctggctcatc

SEQ ID NO: 932652 - DNA, 684 bp, Homo sapiens
cttcaatggtaaggttgatttcccaggaatacacctgtctaaggatgattgtcttctgattccctgtagccatttttttttctgtctctgctgaataaacttagtcttgagtcttgaccctgggtaaagagcacagtttaaaagaagggagaaaaatgagtatctctgtgtttcaggtttaaactgcatggccattctaggctgccaatccctatgagaatgcaatgccattttctctatggtctatcaattttaagaactcccaggcagcataaaatgagaaagagatttactgtgaatttggaataatactattctcagaggaaaatcttttcaactattgcaaatataatttctagttccgtaatttgaaakctccatggctgattcctatgtatttctttcccatcttcttgttgggagcttgcctgtgatttcatgtaatgagttttctcttctgtgggaagcgaaaacactgtgcaccttacaggtttgtgatcaccatctccccagcaagcaaaagaaatgcctggggcctttttaggttttttagaaagaaacaagtataaggctgttagtctgattctaaacttttactgcatctctcctgggaacaactccacagctaatgcagcaatctcttccctagaaagtctcaggatacatgctgaaatagttcagttc

SEQ ID NO: 932653 - DNA, 670 bp, Homo sapiens
ctaacccttatgctctgctttcccaaataccagaagaagcagaatggtttacagtcctggaccttaaggatgactttttctgcatcccttacatcctgactctcaattcttctttgcctttgaagatccttcgaacccaacgtctcaactcacctggactsttttaccccaaggtttcaggccatctatttggccaagcattagcccaagacttgagccagttctcatacttggacactctcgtcctttggtatgtgaatgatttacttttagcctcctgttcagaaactttgtgccatcaagccacccaagcgctcttaaacttcctcaccacttgtggctacaaggtttccaaaccaaaggctcagctctgctcacagcagtttaaatacttagggctaaaattatccaaaggaaccagggccctcagtgaggaatgtaaccagcctatactggcttatcctcatcccacaacgctggatactgccaaaggaacctgaaaatgcaggagacaatgctagctattcctgcgaacctctacaggatctgtgcctgctcttcaaatgacaaccgtgaggaaagtaactagaatcgtagatccccgtggccctcccttgtcacatttttctctttactgttctcttacccactttcactctcattgcacctc

SEQ ID NO: 932654 - DNA, 708 bp, Homo sapiens
tgaattcagattcacaaacaccaagcttatgttttatgctaacattttaaactcacattaagggttttgatctgtgatatagggattaccataaaaatttttaataaagaacctgaaaaggaaggctatatttgtagtacccagggcttatatcccatggctctgagttttacccaggcctcttttgtgaaaagttagyctctttcttaataagatgccattatttctcatctacacattggcttagccaattagccaattttaaattgttcaggggtaactactagtcttaaaattgtcactcaactgtgagcccctgaaggacaagaaccctgccctccattggtacagcccatgcttaatggagcatgttataggcactaatgatatgttttcttgatggatgagtgaatgactacgtctctttctaccttctaatgtcagctttttatttattatttacagtataaaccaatacatacaacatctatataaatttataaaacccatattagtcagtatttccacctgatataactaataaatgtttcagtgactggagtggaacttgaaattctttactagtataaagtttaaactttatctttgggttttatttgtgtatttatgatattccaagtctccaatggcttgggtaatttgaaattgacaatttccattaatattgttaaatgtacacatttgtag

SEQ ID NO: 932655 - DNA, 708 bp, Homo sapiens
tgaattcagattcacaaacaccaagcttatgttttatgctaacattttaaactcacattaagggttttgatctgtgatatagggattaccataaaaatttttaataaagaacctgaaaaggaaggctatatttgtagtacccagggcttatatcccatggctctgagttttacccaggcctcttttgtgaaaagttagtctctttcttaataagatgccattatttctcatctacacattggcttagccaattagccaattttaaattgttcaggggtaactactagtcttaaaattgtcactcaactgtgagcccctgaaggacaagaaccctgccctccattggtacagcccatgcttaatggagcatgttataggcactaatgatatgttttcttgatggatgagtgaatgactacgtctctttctaccttctaatgtcagctttttatttattatttacagtataaaccaatacatacaacatctatataaayttataaaacccatattagtcagtatttccacctgatataactaataaatgtttcagtgactggagtggaacttgaaattctttactagtataaagtttaaactttatctttgggttttatttgtgtatttatgatattccaagtctccaatggcttgggtaatttgaaattgacaatttccattaatattgttaaatgtacacatttgtag

SEQ ID NO: 932656 - DNA, 678 bp, Homo sapiens
attcaaagactggaaacaacccaaatgctcctcaattggtgagtaaatagacaaactatagtacgtctgtacaagggaatactactcagcaatgtaaaggaacragctactgatacatgcaataatgtggatgaacctcaaagcatgatgctaagtgaaataagccagactaaatggttacagactatagaatacaactcatagaacattctggaaaaagcaaaatgataggaacagaaaacaactcaatggttgtctggaggtagggatgaggtagactacaaaagagcagaagggactttggggaggtcatggaactgtgctatatgtttatcgtggtggtggttatgggattttatacatttgttgaaagtcatagaactctgggaggccgaggcaggaggatcacttgagtccaggagttcaagaccaggctgggcaacatagcaagactctgcctgtacaaaaaaatagaaaaaaattgccaggcatgctggcatgcacctgtagtcccagctacttggaaggctgaggtgtgaggattgcttgagcccaggaattagaggccgtagtgagctatgatcatgccactgcactccagcctgggcaacagcgcaagaccctgtctcaaaaaaaaaaaaaaaaaaacaactcatagaactgcacagattttatttc

SEQ ID NO: 932657 - DNA, 632 bp, Homo sapiens
tctagatccttgaggaatcgccacactgacttccacaatggttgaactagtttacactcccaccaacagtgtaaaagcgttcctatttctccacatcctctccagcacctgttgtttcctgactttttaatgattgccattcgaactggtgtgagatggtatctcattgtgrttttgatttgcatttctctgatggccagtgatgatgagcattttttcatgtgtctgttggctgcataaatgtcttcttttgagaagtgtcagaaataacagtatttcttttacagagtttatataaaagttcaataagatcatgggtaacacatttagtacagagtctgcatcatgtgttcaggaagtatttacttgctatgataattactattaacaataaagatcttaaataatttcatatatagaatgtctttgtaaggccgaattgtcagcattgaaaactaattttccaaaaccatttttatcatcttctgtttataaccttcctgtcgtatccactcataaccctaaggacggaacgtgccgcagatctgaggtctgttgagaggtatggcactgtccttggccccagcaagtcatatcccactcttaagacctgtgacctggcctggcacggt

SEQ ID NO: 932658 - DNA, 632 bp, Homo sapiens
tctagatccttgaggaatcgccacactgacttccacaatggttgaactagtttacactcccaccaacagtgtaaaagcgttcctatttctccacatcctctccagcacctgttgtttcctgactttttaatgattgccattcgaactggtgtgagatggtatctcattgtgattttgatttgcatttctctgatggccagtgatgatgagcattttttcatgtgtctgttggctgcataaatgtcttcttttgagaagtgtcagaaataacagtatttcttttacagagtttatataaaagttcaataagatcatgggtaacacatttagtacagagtctgcatcatgtgttcaggaagtatttacttgctatgataattactattaacaataaagatcttaaataatttcatatatrgaatgtctttgtaaggccgaattgtcagcattgaaaactaattttccaaaaccatttttatcatcttctgtttataaccttcctgtcgtatccactcataaccctaaggacggaacgtgccgcagatctgaggtctgttgagaggtatggcactgtccttggccccagcaagtcatatcccactcttaagacctgtgacctggcctggcacggt

SEQ ID NO: 932659 - DNA, 834 bp, Homo sapiens
gagccagagtgggcataaaaaatcctgttatccaaatattagagagctgtgttcttattgctgattgtcagttctaaacacagaagtgcagacgaagagactttggctattatctttgtacctccctcactgttgcaagcccctcctcctatgggctgaattgacttccaagaaatttaaagaacgggtgacctttcttccctcttcacatccccttcatctttttctttttccactttggggtgcaggatattaatgattaggacattcaaaagaaagtaaatatatggggaaaattagaaagtgactaaaatgtatggtcaggtaaaggtamaagcatagaaaagacctgaaaaaaaaacttaagtttagaatgtaggctgattcttggcacagagattacctacaaaaatctttaaagaccgaaaagaataaaaacaatttaaaaaagcaaaccatgggaaagaagaagaacgtgattttgttttagcacattattatatataaatgtccagttttcaacaacaacaaaaaatcaacaaggcatacaaagaaatgggaaagtatgggcaattcaaagggtaaaaatatcaacagaaactcttcttgaaaaagacctgatagcagttccactggacagaaaaacaactaaaagatattcaaaaaggctgggcgcagtggctcacgcctgtaatcctaacactttgaacaccttgggaggccaaggtgggcagatcacctgaggctaggagtttgagatcagcttggccaacattatgaaaccctgtctctactaaaaatacaaaaattaaccaggcgttgtggctcatgcct

SEQ ID NO: 932660 - DNA, 834 bp, Homo sapiens
gagccagagtgggcataaaaaatcctgttatccaaatattagagagctgtgttcttattgctgattgtcagttctaaacacagaagtgcagacgaagagactttggctattatctttgtacctccctcactgttgcaagcccctcctcctatgggctgaattgacttccaagaaatttaaagaacgggtgacctttcttccctcttcacatccccttcatctttttctttttccactttggggtgcaggatattaatgattaggacattcaaaagaaagtaaatatatggggaaaattagaaagtgactaaaatgtatggtcaggtaaaggtacaagcatagaaaagacctgaaaaaaaaacttaagtttagaatgtaggctgattcttggcacagagattacctacaaaaatctttaaaraccgaaaagaataaaaacaatttaaaaaagcaaaccatgggaaagaagaagaacgtgattttgttttagcacattattatatataaatgtccagttttcaacaacaacaaaaaatcaacaaggcatacaaagaaatgggaaagtatgggcaattcaaagggtaaaaatatcaacagaaactcttcttgaaaaagacctgatagcagttccactggacagaaaaacaactaaaagatattcaaaaaggctgggcgcagtggctcacgcctgtaatcctaacactttgaacaccttgggaggccaaggtgggcagatcacctgaggctaggagtttgagatcagcttggccaacattatgaaaccctgtctctactaaaaatacaaaaattaaccaggcgttgtggctcatgcct

SEQ ID NO: 932661 - DNA, 834 bp, Homo sapiens
gagccagagtgggcataaaaaatcctgttatccaaatattagagagctgtgttcttattgctgattgtcagttctaaacacagaagtgcagacgaagagactttggctattatctttgtacctccctcactgttgcaagcccctcctcctatgggctgaattgacttccaagaaatttaaagaacgggtgacctttcttccctcttcacatccccttcatctttttctttttccactttggggtgcaggatattaatgattaggacattcaaaagaaagtaaatatatggggaaaattagaaagtgactaaaatgtatggtcaggtaaaggtacaagcatagaaaagacctgaaaaaaaaacttaagtttagaatgtaggctgattcttggcacagagattacctacaaaaatctttaaagaccgaaaagaataaaaacaatttaaaaaagcaaaccrtgggaaagaagaagaacgtgattttgttttagcacattattatatataaatgtccagttttcaacaacaacaaaaaatcaacaaggcatacaaagaaatgggaaagtatgggcaattcaaagggtaaaaatatcaacagaaactcttcttgaaaaagacctgatagcagttccactggacagaaaaacaactaaaagatattcaaaaaggctgggcgcagtggctcacgcctgtaatcctaacactttgaacaccttgggaggccaaggtgggcagatcacctgaggctaggagtttgagatcagcttggccaacattatgaaaccctgtctctactaaaaatacaaaaattaaccaggcgttgtggctcatgcct

SEQ ID NO: 932662 - DNA, 476 bp, Homo sapiens
cttttgtgatcttttaaaactgattggatgaaaaaatggaaaatgtaacataagaagtgtcagacctctgagcccaagctaagccatcatatcccctgtgacctgcacgtacacatccagatggccggttcctgccttaactgatgacattccaccataaaagaagtgaaaatggcctgttcctgccttaactgatgacattgtcttgtgaaattccttttcctggctcatcctgtctcaaaaagctcccctactgagcaccttgtgacccacccccccactctgccctccagagaacaactcccctttcactgtaattttcctttatctayccaaatcccataaaacggccccacccttatctcccttcactgactctcttttcagactcagcccgcctgcacccaggtgaaataaacagccacgttgctcacacaaagcctgtttggtggtctcttcacacggacgcgcatgaa

SEQ ID NO: 932663 - DNA, 707 bp, Homo sapiens
aggtagccggagtactggcggaaagacggctgcttggccagcccggggaggcgctggatctcgtcctggtcgggggctgcctcgcctcgggacgcccaggacactagcagcagcagcagcagcagcagcaggaacagcggcggcggcgcggctcggatcatctacgggaggcagcagaggggctgttgactcgctcctcagcgcttccgtgcagcagcccccggggagttgctgscggcgcctccgcgagggaagccccggccccagcgccagctcccacccgcgagcctcctctgccgcgcaccgatcccgggctcggggatcccctccagcctccggtgccagctcacctctgctcccccgcgtccttgctctccaggaggcgcccggggactggaagtcatgtgtacgagtcacgtgaactccggcgccacgtgacagtcttcctcccgccccttctttggtccctacggacctggggggcggtggcggtcaatgccgggtcaaggtccgcgggcctcgcagatcgtagcccgggcgcacgcgatcagatgatcctgttgtggacggctaagttgtaggcgggatggctgagaaagcggcgctaggacccccgggcagaggctcggggaagggagtcaggggggaaatgccttacaaggtcgccttgcggtcaccatcattgcccgccgcccaaaatagccccc

SEQ ID NO: 932664 - DNA, 554 bp, Homo sapiens
aaaaatcaaaagaaaatagattaaagacttaaacctaaggcctcaaactataaaactacaagaaaccattggggaacatctctaggacattggtctgggcaaagatttcttgagcaataccccacaagccaggaaacgaagccaaaattggacaaatgggatcrcatcaagttaaaaagcttctgttcagcaaaggagacaatagaaaaactgaagagacagcccacaaaatgggagaaaatatttgcaaactacccatctgacaagggtttattaaccagaacatttaaaggagcttaaacaacactataggaaaaatacctaatagtctgatttttaaaaatgggcaaaatatttaaaatatttgaatagacatgtctcaaaagaagatacacacattgcaaacaggcatgtgtaaaggtgctcaatgggccaggcacggtggctcacgccggtaatcccagaagtttgggaggccgaggtgggtggatcacctgaagtcaggagttcaagaccagcctggtcaatatggtgaaaccccgtctctattaaaa

SEQ ID NO: 932665 - DNA, 613 bp, Homo sapiens
caaaaatgtaaacctacaggccaatatccctgatttacataaatgcaaaaatcttcaacaaaatactagcaaatcaaatttaccggcacatcaaaaagatggccaggcgcagtggttcacacctgtaatcccatcactttggaaggctgaggtgggcaaatcatgaggtcaagagatcgaaaccatcctggccaaaatggtaaaacycccccgtctctactaaaaatacaaaaattagctgggcgtggtggcgcttgcctgtagtcccagctactcgggagtctgaggcaggaaaatcgcttgaatctgggaggaggaggttgcagtgagcagagattgcgccattgcactccagcctggaagacagagtgagactccatctcaataataataataataataataataataatagtaataatacacagtaatcaagtgggttctattccagggattcaaggatgtttcagcatttgtaaatcaataaatgtgatttaccaaataaacagaattaaagacaaaaaccatataagcatcttagtagatgcaaaaaaggcatttgataaaatccggcatctcttcttgataaaaacaccctcaagaaattaggcat

SEQ ID NO: 932666 - DNA, 499 bp, Homo sapiens
atcctccatcgctatctctggattgccctcaagctgcctgccagcctcccactggacgtggccacctgatataaaaattcacccgacaggtgccacttcctgcttgttccaggtgctggcaggacagaagagggccctacccttgctgagtttacaatttaataggctagascaacagtaaagtaactaacaagatcactccaggtaatgataagggttgagaagggcctgtgtggggcagtgtggggcagtggttatgagcagggactctggagccagagtgcctgggttctcatcctgcttctgcagcgtggtagctggatggccttggacaagtcgcctgacctccccgtgcctcagcagtaaagtaaagatatgaggattacattcgttgatactcgtaaaacacttaaaactgcctagcacatggaaaatgctatatatgggcttttaaaatagcaagatagtgtctggggaggccactttgtattgggtggtc

SEQ ID NO: 932667 - DNA, 591 bp, Homo sapiens; identical to SEQ ID NO: 930639

SEQ ID NO: 932668 - DNA, 671 bp, Homo sapiens
ctttgagggactgtcaggaaggcatgattgtgttttgaaatgtgagaaagacatgagatttgggagggcccaggggcggaataatatggtttgtttctttgttcacacctacatctcatcttgaattgtaatcaatccccatctgtcaagggaaggacctagtggcaggtgattggaacaggtgagtggtttcccccacgctgttattgtgataatgaatgagttgtcacaagagctgatggttttaaagtgtggcacttcctcattcttacacgatttctttcttgcctgccgcaatgtaagacatgcctccttccccttccaccatgattrtacatttcctgaggcctctccagccatagagaactgtaagtcatttaaatttttttttaataaattacctagtctccggcagttctttatagcagtgtgaaaatggactaatgcactgaactctggcaaaaataacataacaaagagatttgtttaatattcctaaattggtcctggaacaaaatcctaatctgattctggcaatttgcaaagaagagtaataaattttaagtgatacagaaacagaaccctggagattatgagacgatattagtaaaaaaatgatttataggccggatgcagtggctcacacctgtaatcccagcactttgggagga

SEQ ID NO: 932669 - DNA, 609 bp, Homo sapiens
aaccattttaactgtacctgaaaaatctgtcatgatgccattctctcttactccagcttctctatttctttcttcttcttgttaacctctcaaaagttgattgggtaaggaaaaccattcttggtcattgctggaggagggcagccaagatggctgaataggaacagctccagtctacagctcccagcgtgagcgatgcagaagacgggtgatttctgcatttccatttgaggtaccrggttcatctcactagggagtgccagacagtgggtgcaggacagtgggtgcagtgcaccatgcacgagccgaagcagggcgaggcattgcctcactcgggaagcgcaaggggtcagggagttccctttcctagtcaaagaaaggggtgacagacggcatctggaaaatcggttcactcctaccttaatactgcgcttttctgacaggcttaaaaaacggtgcaccaggagattatatcccgcacatggcttggagggtcctatgcccacggagtctcactgattgctagcacagcagtctgagatcaaactgcaaggcagcagcaaggctgggggaggggtgcccgccattgcccaggcttgcttgggtaaa

SEQ ID NO: 932670 - DNA, 609 bp, Homo sapiens
aaccattttaactgtacctgaaaaatctgtcatgatgccattctctcttactccagcttctctatttctttcttcttcttgttaacctctcaaaagttgattgggtaaggaaaaccattcttggtcattgctggaggagggcagccaagatggctgaataggaacagctccagtctacagctcccagcgtgagcgatgcagaagacgggtgatttctgcatttccatttgaggtaccgggttcatctcactagggagtgccagacagtgggtgcaggacagtgggtgcagtgcaccatgcacgagccgaagcagggygaggcattgcctcactcgggaagcgcaaggggtcagggagttccctttcctagtcaaagaaaggggtgacagacggcatctggaaaatcggttcactcctaccttaatactgcgcttttctgacaggcttaaaaaacggtgcaccaggagattatatcccgcacatggcttggagggtcctatgcccacggagtctcactgattgctagcacagcagtctgagatcaaactgcaaggcagcagcaaggctgggggaggggtgcccgccattgcccaggcttgcttgggtaaa

SEQ ID NO: 932671 - DNA, 752 bp, Homo sapiens
ttaacatagtctactgattatctgccaaataaattgcggctagcctatgattattgtttaggacaaagaatcatctcttttacctataatgtagttgcttaagtcccatttgttgtcccactattgctgagctattgtcacattaaccattttaactgtacctgaaaaatctgtcatgatgccattctctcttactccagcttctctatttctttcttcttcttgttaacctctcaaaagttgattgggtaaggaaaaccattcttggtcattgctggaggagggcagccaagatggctgaataggaacagctccagtctacagctcccagcgtgagcgatgcagaagacgggtgatttctgcatttccatttgaggtaccgggttcatctcactagggagtgccagacagtgggtgcaggacagtgggtgcagtgcaccatgcacgagccgaagcagggcgaggcattgcctcactcgggaagcgcaaggggtcagggagttccctttcctagtcaaagaaaggggtgacagacgkcatctggaaaatcggttcactcctaccttaatactgcgcttttctgacaggcttaaaaaacggtgcaccaggagattatatcccgcacatggcttggagggtcctatgcccacggagtctcactgattgctagcacagcagtctgagatcaaactgcaaggcagcagcaaggctgggggaggggtgcccgccattgcccaggcttgcttgggtaa

SEQ ID NO: 932672 - DNA, 548 bp, Homo sapiens
ttaaaatctaggatgaggttcagttgacctcattattcacagatcctgcattcccaaatttatgtacttactaaaagttatttctcatccccaaatcattactcatggtgctttcatggtcattctcagacacacatagaatggcaaaaaatttgatgcacacattcccacctgaggtcgaaggtcaaacaagttgaggctttgtctttttgaaaaaaattaactttttttttttttttttgagatggagtctcgctctgtcgcccaggctggaatgcaatggygcgatcttggctcactgcaagttccgcctcccaggttcatgtcattctcctgcctcagcctcccaagtagctgggactacagacgcctgccaccacgcctggctaattttttttttttttttttttgagacagagtctcactcttttgcccaggccggactgcagtggcgctatctcggctcactgcaagctccgcctcccaggttcatgccattctcctgcctcagcctcccgagtagctgggactacaggcacccgccacct

SEQ ID NO: 932673 - DNA, 609 bp, Homo sapiens
gaagcatagggggtggcagagaagggagtgcccaggccttaggagcatgagggaaagaaaggaggcaacatgcaaattagtaacaggaagtgggacaggcgacaggagctggaagggctactccctcctagattgggctgcaaagaccccagcctcccagctttctggagccccttgctattccaagtaagctccagagaccagcggcatctgcatcaccagggctctcatcagaaaaacagaatctcagaccccaycctagacctcccgaatatacattgccacaagatcctcagatttcctgtgcacactaaagtttgagaagcacaagattaggagtcaaaatccctgagttcctggtccagctattgctatcaaattgctgtgtggttttgcaggacttgcttgacctctctgggtgctagaatttcttcctctgggctacaggatgagtgaggcttgtttctttctcctgggttctgagaggctcaagtcagacccttcatctgcaggcctcggaagcatgggagggcctttacagaaaaacgtttccattttctaccaggctgcccccttccgctttcttggagtcattagtacacagagagg

SEQ ID NO: 932674 - DNA, 641 bp, Homo sapiens
ttactgagagaaaggtgttaaaatcttcaactctaatcatggttttatttttttctttaatttttgccttttcactttccttcgtgtattttgaaactattacttcatgcatgcacatttaggattattatgttttactgataaattgtcccctttgtcattatgaaatgtctttctataaatctaataatattatccttcttgaagtcacttttgtttgatattatttcagtgatttcagctttcttatatttactgttcatatggtatatcttttttcattcttttagttacaacttagtttcaccattatatataatggcatcattatatataatgtgcatgcatagtaaaaarcatataattgggtcctgctttttctgtgttttagttgaagtatttagaccatttacaactaatgtaattatttttatggttgaatttaacataccattatggtagttgttttccattcatctctttttgtgttgccattattctgtcttcattttggtttacagaatattattagtattccattctatttccttcattgtctttttaatgatacctttttttttgtatttttacattaggtctaaaaatatactccttaacttataagcaagttttcttagagt

SEQ ID NO: 932675 - DNA, 721 bp, Homo sapiens
gcttaattgggcctgcctcagaaaaaccagcttcttctcaaaacaaggcttcatcccgccatggtgccctcggggccagtgaactcactgggaggaaatgtgactcccacttttccatttgaagaacgtggggcatttcctagatggggctctatgccacggatctggtcgcagcttggtgagcttgagaaaagagtgcaagctccctctcttctaccctgacctgagagagccttgtagtctctcaaagttttgtamtttgctttcaaggtagcatgagatggtatggttttctttaattccagttcatagtgaacagtcacaattatacagtatctttaaatgtctttttaatttaattttattttattttatttagagacagggtctccctgtgttgcccaatgcagtgttgcatttataggcacaatcatggtgcacttcagccttgaactcctgggctcaaacaatcctcccaccagagcacctgagtagatgggactataggtacatgccactgcagactttaaagtgtctttctattgtatttgagtcatcccaattacaaggcttctgttccccagtcccatttgatagaccacttgtccattgtgaggaattaagtgatgatgacaaacttgtaaccctccattgttgaaataggggaaaggagctgaccgtggcctgaagaaaggccatgtcttgccagagtggccatgag

SEQ ID NO: 932676 - DNA, 528 bp, Homo sapiens
aaacaatttatcatgccattttcaacattatttttctaagattcatctgtgttgttcagtttacagttcatgcactttcaatgctgtgttttactccattatgtgaacagaccatatattaaatattcattttcctcttgatggatatttgcattacttccctttttgaaattatacccagtgcttctatgaactttttgtacatataccctggtagacacatgcaacagttcccctaaggcatatacctactaataaaattactagatcacaakgtacccccaacttttctaggcatgtccaactgctctacaaaatttatatcaccttatgtaaccatcacataatacttttacaaagtttaaaaataaaactgaacagccgggcatggtggctcacgcctgcaatcccagcactttgagaggctgaggcaggcggactgccagagctcaggtgttcgaaaccaccctgggcaacatggtgaaaccccatctctactgaaatacaaaaaaattagctgggcatggt

SEQ ID NO: 932677 - DNA, 776 bp, Homo sapiens
tccaaacttttatgctctgcttcccttataaaactgagtatctttaacagcacccaagtcacctgttgaatgctttgctgcttagaaatttcctctgccagataccctaaatcatctctctcaagttcaaagttccacaaatctcttgggcagggggaaaatgcttcctgtttctttgctaaaacataccaagagtcacctttgctccatttcccaacaagtttctcatttccatctgagaccacctcagcctggactttcttgtccatatcactatcagcatttttgtcaaagccattcaaccagtctctagggagttccaaactttccsacatttccctatcttcttctgagccctccgaactgttccagcctctgcctattaccaagttccaaagttgcttccacatttttgggtatcttttcagcaatgcactctaatcttaccaatttgctgtattagttcattttcatgctgctgataaagacatacaagagactaagaaatctacaaaagaaagaggcttattggacttacatttccacgtggctggagacctcacaatcatggcagaaggtgaaaggcacgtctcacatggcagcagacaagagaagagagagcttgtgcagggaaactcccatttttgataccatcagatctcatgagacttattcactgtcatgagaaaggcatgggaaagacctgcccccatgattcatttatctcccaccaggtccctcccacaacatatgggaattatgggagccacaaggtg

SEQ ID NO: 932678 - DNA, 637 bp, Homo sapiens
ggaatggccttttgtagtcacaactacaataccaactaagtgacaatcctttgcagggctagggcaaagttctccacaaggccatgtacactctgaaagttctccacaaggccatgtacactctgaatcagcttccaatatatggtactatttctcctgtagccaggattyccaggtccaggaatcaagggttggaagtgaaagtggcaccactcacaatcacccctaatgatccactggcaacatttttgcttcctgtttccaagacattatgttctgctggcctagaggtcttttttttttttttttttttttttttgagacagagtctcgctctgtcgcccaggctggagtgcagtggcgggatctcggctcactgcaagctccgcctcccgggttcacgccattctcctgcctcagcctcccaagtagctgggactacaggcgcccgccactacgcccagctaattttttgtatttttagtagagacggggtttcaccgttttagccgggatggtctcgatctcctgacctcgtgatccgcccgcctggcctagagatcttaattccagagggaggaacactgcctccagaagacacaacaacaattccattaaactggaagttaagattgcc

SEQ ID NO: 932679 - DNA, 634 bp, Homo sapiens
actgggctgcccaccccccaaccaccttcagttgcagatacacaccaagaattacctcctccaaccaggtatggggatgaatggaaacctgttgttgcctgcccctgtggcctacccctgtggcccctgaaggcagggaacagaaaacctggctttggccatggaccctccaagaccccactgccagtggttggccatcatagctctcttgggggagggcctacatcatgacttgcatgtcactccttgggtgttcaatacatggcccctgcggttgaccgttcatagagaaatggccagggaaggaacccttctccaggggacatatgtactgtctgtgtggcctatcatgagcttccctgtgactttggcacagatacaagactcaaaggaaccatgcggagctgataaagtgtggcaccatctcccagggcaaaaactrttggcatctgcattgttatccagagatgaaaggttagactgtattttgcctgagggacatgatttaactctgttagtacctgtgcctgctctgtcatttcgaccgtaggttgacatgctccaactgcattgtggactgggcccacaccttcactgaggtgaccaatgtttccaactgttggatctgcaccat

SEQ ID NO: 932680 - DNA, 603 bp, Homo sapiens
gttttttcaggaatggatactcctcaaatttttgtaagtcattggttaatttccatagttctgaaaaagttgcttttgatgatttgtgctagtgttcttgcctctatatagaatcagatttttggaagacttgctccactattccattattaatttttattgttaatcaacctytgcattctttcataaacttcattagtcatgatgtgttgccctttttatatattgttaggctgatttgttgaaattttgtttacaatttttacatctgtattcatgaagatcttgtctgtagtttttggactgtctttgtctggatttgtatcaaagtgacattggtctcccttttctggaagaactgttataaatctagaattattttttctctttaatgtataaatgtatagataatagcatttatccatgaagccattgggcctggaatttgtgtgtgtgtgtgtgtgtgtgtgtgtgtgtaaaagtgtttttgtttctttttaaccacaattcaattccttcaataaatatgaagctattcaggttatttatcttgagtgagctttcctaacttgtatctttcaaggaattttccaatttcatcta

SEQ ID NO: 932681 - DNA, 629 bp, Homo sapiens
atggatactcctcaaatttttgtaagtcattggttaatttccatagttctgaaaaagttgcttttgatgatttgtgctagtgttcttgcctctatatagaatcagatttttggaagacttgctccactattccattattaatttttattgttaatcaacctttgcattctttcataaacttcattagtcatgatgtgttgccckttttatatattgttaggctgatttgttgaaattttgtttacaatttttacatctgtattcatgaagatcttgtctgtagtttttggactgtctttgtctggatttgtatcaaagtgacattggtctcccttttctggaagaactgttataaatctagaattattttttctctttaatgtataaatgtatagataatagcatttatccatgaagccattgggcctggaatttgtgtgtgtgtgtgtgtgtgtgtgtgtgtgtaaaagtgtttttgtttctttttaaccacaattcaattccttcaataaatatgaagctattcaggttatttatcttgagtgagctttcctaacttgtatctttcaaggaattttccaatttcatctaagttattaaatttattggtgtcaatttgttcataatat

SEQ ID NO: 932682 - DNA, 682 bp, Homo sapiens
actgtctttgtctggatttgtatcaaagtgacattggtctcccttttctggaagaactgttataaatctagaattattttttctctttaatgtataaatgtatagataatagcatttatccatgaagccattgggcctggaatttgtgtgtgtgtgtgtgtgtgtgtgtgtgtgtaaaagtgtttttgtttctttttaaccacaattcaattccttcaataaatatgaagctattcaggttatttatcttgagtgagctttcctaacttgtatctttcaaggaattttccaatttcatctaagttattaaattyattggtgtcaatttgttcataatattccccccttgttatccttttaatatgcagaaactatagtaagatcagttctctcattcttgatataatttctatactttcgttttctttcgataaattgtattttaatttcatgccattaaaaatttctatttgccttcttttttgacccatgggttatttagatgtgcttatttccaaatatttggagacatttcagataccattctgttattgattgattcgcattttaatttcattttgttcagagaatgtactttgtatgacttaaacacgtttaaatcaagacttgttttgtaatacagaatatagtttattattgtgaatgtgccatgtccacttga

SEQ ID NO: 932683 - DNA, 682 bp, Homo sapiens
actgtctttgtctggatttgtatcaaagtgacattggtctcccttttctggaagaactgttataaatctagaattattttttctctttaatgtataaatgtatagataatagcatttatccatgaagccattgggcctggaatttgtgtgtgtgtgtgtgtgtgtgtgtgtgtgtaaaagtgtttttgtttctttttaaccacaattcaattccttcaataaatatgaagctattcaggttatttatcttgagtgagctttcctaacttgtatctttcaaggaattttccaatttcatctaagttattaaatttattggtgtyaatttgttcataatattccccccttgttatccttttaatatgcagaaactatagtaagatcagttctctcattcttgatataatttctatactttcgttttctttcgataaattgtattttaatttcatgccattaaaaatttctatttgccttcttttttgacccatgggttatttagatgtgcttatttccaaatatttggagacatttcagataccattctgttattgattgattcgcattttaatttcattttgttcagagaatgtactttgtatgacttaaacacgtttaaatcaagacttgttttgtaatacagaatatagtttattattgtgaatgtgccatgtccacttga

SEQ ID NO: 932684 - DNA, 615 bp, Homo sapiens
ctcttgcgtgagccctgaaaagctgggttctccgcagtcctcgggcctgcagaagtggcccactcctccctgttagaggctagcacccccacccccacttccatgagaatgatgaggaggtcttcaccttgcaaggcaacacatgcccctctccacctcaggatctgccccaacatccactccctgtcagatcaaccactaggaccaagtcagagcataacctggttggggaaatgttgggcctggtgagggaagaagggaactatatgttgaagaatctgtaggaactagcaaacatacaacagcaaaagttgggaacgtatgtatggggctgggtcctgaaagtgctagatcaagagggaaaggattataaagtcggacaasggagtttgttgatatgggaagtctctcccatgctatagaattatacatcctggcaaggacctgggagattatactctgggaatacactgttaggttggtactcagaagtatagcaagagtgatgagctaccaggactactagaacttctgtggaaaatgatggaggaagagatcgaaaggctcagataagtgggcatgctagactgggaatactattcaatccagaaaatc

SEQ ID NO: 932685 - DNA, 773 bp, Homo sapiens
gcctcccgtggagccgtgggaagggggtgctgcctgctgacaatggaatttcagggccttggggacacgcaggctccaggcaggagctcccttgggttgggagatgcgccccccagtactggtcataagaaagagaagcaaagatgagtacaactgacatgtrtaagaattttcacctttatcggcacacagggatgacattctaagggacctgggaggcagcagacactttttaattagtttgatgacatggccatttggacagccgggaagacaggtcgatgtaatcattaatacatcttattgctttacaaggcaataaactaaggaaacgggatccagtttgtggttttctccttttacctgggctcctgtttgtgtatatgtgtgtgtttatccaagtttaaactttcagggttatataaccgttccccttggcttacaatcaaacttccagattagctggaggtgccctgcgcaagttaggagttggtgtgggggtgagccacgtgaccgagcctggcttcctggttggggctgctctctaagcagaggtgtttgcttgcagctccgggaagagcgttgtctggagatcctggtacccattcttcaggctttggggacaatgccctgagcatctcctgttctcaaaactgtagctatataaaattagaaatcctatcaagctttgttccttgtaaagaatgtccagtgcactgagatgtctatactggcaggaaccacttgaaaggaagtcaaaatttccagttatt

SEQ ID NO: 932686 - DNA, 773 bp, Homo sapiens
gcctcccgtggagccgtgggaagggggtgctgcctgctgacaatggaatttcagggccttggggacacgcaggctccaggcaggagctcccttgggttgggagatgcgccccccagtactggtcataagaaagagaagcaaagatgagtacaactgacatgtgtaagaattttcacctttatcggcacacagggatgacattcwaagggacctgggaggcagcagacactttttaattagtttgatgacatggccatttggacagccgggaagacaggtcgatgtaatcattaatacatcttattgctttacaaggcaataaactaaggaaacgggatccagtttgtggttttctccttttacctgggctcctgtttgtgtatatgtgtgtgtttatccaagtttaaactttcagggttatataaccgttccccttggcttacaatcaaacttccagattagctggaggtgccctgcgcaagttaggagttggtgtgggggtgagccacgtgaccgagcctggcttcctggttggggctgctctctaagcagaggtgtttgcttgcagctccgggaagagcgttgtctggagatcctggtacccattcttcaggctttggggacaatgccctgagcatctcctgttctcaaaactgtagctatataaaattagaaatcctatcaagctttgttccttgtaaagaatgtccagtgcactgagatgtctatactggcaggaaccacttgaaaggaagtcaaaatttccagttatt

SEQ ID NO: 932687 - DNA, 773 bp, Homo sapiens
gcctcccgtggagccgtgggaagggggtgctgcctgctgacaatggaatttcagggccttggggacacgcaggctccaggcaggagctcccttgggttgggagatgcgccccccagtactggtcataagaaagagaagcaaagatgagtacaactgacatgtgtaagaattttcacctttatcggcacacagggatgacattctaagggacctgggaggcagcagacactttttaattagtttgatgacatggccatttggacagccgggaagacaggtcgatgtaatcattaatacatcttattgctttacaaggcaataaactaaggaaacgggatccagtttgyggttttctccttttacctgggctcctgtttgtgtatatgtgtgtgtttatccaagtttaaactttcagggttatataaccgttccccttggcttacaatcaaacttccagattagctggaggtgccctgcgcaagttaggagttggtgtgggggtgagccacgtgaccgagcctggcttcctggttggggctgctctctaagcagaggtgtttgcttgcagctccgggaagagcgttgtctggagatcctggtacccattcttcaggctttggggacaatgccctgagcatctcctgttctcaaaactgtagctatataaaattagaaatcctatcaagctttgttccttgtaaagaatgtccagtgcactgagatgtctatactggcaggaaccacttgaaaggaagtcaaaatttccagttatt

SEQ ID NO: 932688 - DNA, 605 bp, Homo sapiens
agagcagcctggccaacatggcaaaaccgcgtctctactgaaaaaatacaaaaattagccaggtgtggtggtgcatgcctgtagcccccagctactcgggaggctgaggcaggagaattgcttgaactagggaggcggaggttgcagtttgccgagatcgcaccattatactccagcctgggtgacagagcaagactccctctcaagacaaacaaacaaacaagtcaaacaaacgaaragacaaaaaaaaaaaatatatcaggcttagatcacatttaacatcctctgcaaagaatgggcatggaaataccaagttcctctgactaacttggagaaaaaaaatatgaatgggaactgctgcttccacaaatacacccatgcaaatttaaccagccccggggtgctgctgggagatgagattagagggactgacttgagtcacctacaaacctgaagaaaatcttccatctgctgacaaagttcaccatcccgctggatgttttcttttagtgattttgtcctgacaaacagcaagtgcagttctgcctccgtgttctccagagataatctaaaagaagaaaggggagagtgggcagttggaacaa

SEQ ID NO: 932689 - DNA, 641 bp, Homo sapiens
aggcaagtcagggcctcagtttcctgtccagaaaacatggggtgggtgggtattcttgacttctagctctcaaatttggtgatccagggaggctcagagggtccttagagggatgttcatggtacattaagagtcagggggattgtcctccctgmaatgaggaggctctgaaaccctgagaagaagtattcccagatcttaccacctttgagatgattttacacacacacacacacacacacacacacacacacacacaggaagagattgtaaaactatctgtaaaactattctaattctgctgcaattatagactattttaagcaaatgtgctctgcgtctggaatctttttataattgctttgattcgtctataacgattaactgccagaaaacccagaagcttcccccaccccaatcttctgatgttcccttaagttcctctgtggctttagacccatgtctttctattccatggtaacttcagggtgggggagcctggggatagctttgtgattgagggagggtgcagctcatggtgcacttgcattcattcattcattcacaccccctgagcacctgctggcatgggactcacgtcttcattctatgtctgtccacattccctccttaataagctt

SEQ ID NO: 932690 - DNA, 641 bp, Homo sapiens
aggcaagtcagggcctcagtttcctgtccagaaaacatggggtgggtgggtattcttgacttctagctctcaaatttggtgatccagggaggctcagagggtccttagagggatgttcatggtacattaagagtcagggggattgtcctccctgaaatgaggaggmtctgaaaccctgagaagaagtattcccagatcttaccacctttgagatgattttacacacacacacacacacacacacacacacacacacacaggaagagattgtaaaactatctgtaaaactattctaattctgctgcaattatagactattttaagcaaatgtgctctgcgtctggaatctttttataattgctttgattcgtctataacgattaactgccagaaaacccagaagcttcccccaccccaatcttctgatgttcccttaagttcctctgtggctttagacccatgtctttctattccatggtaacttcagggtgggggagcctggggatagctttgtgattgagggagggtgcagctcatggtgcacttgcattcattcattcattcacaccccctgagcacctgctggcatgggactcacgtcttcattctatgtctgtccacattccctccttaataagctt

SEQ ID NO: 932691 - DNA, 659 bp, Homo sapiens
gaatgaatgagcatcagaaccagagtcagataaggcagaaatgttaaaattacaaataatgaatttcataaaactatgattaatatgctaagatctttattagaaaaagtagacaacatgcaagcacagatgataatgtaaaaagggataaaaattctaaagaaagaataaaaaagaamtactagagaccaaaaacagtataacataaagaatgactttgatggacttattagtagactatacatggctaagaaaagaatctctgagcatgtgaataggagaataagaacttccaaaattaaaaagcaaacagaaaaaaaggctgaaaaacaaacaaacagaaaagaatgtccaagaactgtgggataaatacaaaagatataacatgcataatgggaatatcagaaggagaagcatgagagaaaaaaacagaagcaatattttaaggaataatgatgaagaattttccccaattaatgtaatatacatcacatatccaggaatcttagagaataccaagcaggataattgttgagaaaatgacgcttaggcataacatatttaaacttcagaaaatcaataatgaagtcacaaaagaagccagggggatggtgtgggggagacactttacctacagagaagcaaagaaaaaagaatca

SEQ ID NO: 932692 - DNA, 636 bp, Homo sapiens
tcaccccagagctgctgcatgcagcccgggagtgccaagccaagatctgcagccagcactcaagagaaagaggagtccacaatttcagagccctcagagggagcatggctgcaaacatgaggaaatacagaggagctacatgactgaggaagagactacctactgatcattatgcttaagcaccacctactagttcacatcccaaacttcaacatcaaaaatgttttgctatcataccccccctgtgaaaccaaaagcaaaaattcagctacaaataaaggtcttgcacaaagcatcagccctctgaaaacatccagaatataagtttactgactgtactcaatttatatcaaagttamacacacacacacacacacacacacacacacacacacacacgagaaagaactgaaagaaccagcgtaagaactctggtaactcaaatggcagagtatattctttcttccaaatgaatgcactagtttcccagaaatgattcttaaatgggctgaggttcctgaaatgacagacgtagaattaagaatatggacaggaatgaagatcatcgagattcaggtgaatattgaaacacaatccaaagaagttgtggattataagaaaacaatacaggagctg

SEQ ID NO: 932693 - DNA, 575 bp, Homo sapiens
taaatattgctgcagtaactgaccaaccatatgcagaagaaagaggctggatcccttttttatcgccatatacaaaaattagcttaagatggattaaagacttaaatataagacctcaaactatgaaaatcctagaagaaaacctagaacacaccattctggaaattggccttggaaaacaaatcatgaataagttgctcaaaagcaattgttctaaagcatttacaagaaaaacaaaaattgayctgtgggacctaattaaactgaagagcttttgcatagcaaaaagtacagagtatacaacctatagaatgggagaaaatatttgcaaacgatgtatccaaaaaggtatgatatccagatctataaggaacttaaagaaatcaataagtaaaaacaaaccctattaaaaagtgaacaaatgacatggacagacacttctcaacagtagacatacaaatggccaacaaacgtggaaaattctcaacatcactcgtcatcagagaatgcaaataaaaaccacaataaaacaccatcttttgtcagtcagaatggttattattaaaaagtcaaaa

SEQ ID NO: 932694 - DNA, 552 bp, Homo sapiens
aagaatataaattgtgaagatttcatgaacatttattagttccccaaattaatacttttataatttcttacacctttctttactgcaatctctgaacataaattgtgaagatttcatggacacttatcacttccccaatcaatacccttgtggtttcctatgcctgtccttactttaatctcttaatcctgtcatctttgtwagctgaggaggatgtatgtcacctcaggaccctgtgatggttgcgttaactgcacaaattgtagagcatgtgtgtttgaacaatatgaaatctgggcaccttgataaaagaacaggataacagcaatgttcagggaacaagggagataaccttaaactcttgactgccggtgagccaggtggaacagagccatatttctcttctttcaaaagtaaatgggagaaatattgctgaattctttttctcagcaaggaacaaccctgagaaagagaatgcgtccctgaggggaggtctctaaaatggctgctttgggggtggctgtcttttacggtcatagctgtgggacgaaa

SEQ ID NO: 932695 - DNA, 657 bp, Homo sapiens
ccgtggcagaagaatataaattgtgaagatttcatgaacatttattagttccccaaattaatacttttataatttcttacacctttctttactgcaatctctgaacataaattgtgaagatttcatggacacttatcacttccccaatcaatacccttgtggtttcctatgcctgtccttactttaatctcttaatcctgtcatctttgttagctgaggaggatgtatgtcacctcaggaccctgtgatggttgcgttaactgcacaaattgtagagcatgtgtgtttgaacaatatgaaatctgggcacmttgataaaagaacaggataacagcaatgttcagggaacaagggagataaccttaaactcttgactgccggtgagccaggtggaacagagccatatttctcttctttcaaaagtaaatgggagaaatattgctgaattctttttctcagcaaggaacaaccctgagaaagagaatgcgtccctgaggggaggtctctaaaatggctgctttgggggtggctgtcttttacggtcatagctgtgggacgaaataagccccggtctcccgtagtgctcccaggctcattaggacgaggaaattcctgcctaataatttttggtcagactggttgtctgctctcaaaccc

SEQ ID NO: 932696 - DNA, 601 bp, Homo sapiens
atgctggcatcatagaatgaactgggaaataattctttcctctttaatattctggtatatcttgtgtagaattggtattatatcttccttaattggctggtagaattcaccactgaagacatttggcatggagtttgtttgcggaaggcttcttagtacaaaatataattctttggtaaagggatgtcagactatttcttcttaaataaactttgatagttcaaatattttttaaacattttctatttcatataatctgtagaaggtactgayataaagctgctcataattttacttgcttttctttttatatctgctaaatccatggtaatgtcatctttctcattcttgatattgagaatttatttttctcttttttttcttgattaatctagctgcaggtttatcaattttgttgattttctccaagaacaagaatttttattcatcattatttttgttttgtattttatttatgttcaatctgatctttattatttcttttcttttctttattttatacttaatttggtcttcttttcctaattttaaggtggaagttgaggtcatcgattttacatttcttcttacataaagtata

SEQ ID NO: 932697 - DNA, 601 bp, Homo sapiens
atgctggcatcatagaatgaactgggaaataattctttcctctttaatattctggtatatcttgtgtagaattggtattatatcttccttaattggctggtagaattcaccactgaagacatttggcatggagtttgtttgcggaaggcttcttagtacaaaatataattctttggtaaagggatgtcagactatttcttcttaaataaactttgatagttcaaatattttttaaacattttctatttcatataatctgtagaaggtactgacataaagctgctcataattttacttgcttttctttttatatctgytaaatccatggtaatgtcatctttctcattcttgatattgagaatttatttttctcttttttttcttgattaatctagctgcaggtttatcaattttgttgattttctccaagaacaagaatttttattcatcattatttttgttttgtattttatttatgttcaatctgatctttattatttcttttcttttctttattttatacttaatttggtcttcttttcctaattttaaggtggaagttgaggtcatcgattttacatttcttcttacataaagtata

SEQ ID NO: 932698 - DNA, 561 bp, Homo sapiens
gcaacataccaagactctgtctctacatttttcttttttttaattgggtaggtgtggtgtgcttatagtcctagctactcaggaggctgaggtggaaggattgattgagcccaggagttcaaggcaacagcatgctattacataccaactgcactccagcctgggtcacagaacaagtcccaataataataatartacaataataataataatttggattctttttctggaatgttttgaatttctttttcattaggatcttttgctggagtattattatgttcgttggaggtgccatgttcccttgcttttttatgttttctttatgcttatgttgacatctgcacatctggtgtaacagttgcttcttccagtttttaaatttgctttaatagcagaacactttttcctaaagatgtatctacggtgttggttatgtaggacactttggctttgattctgtgtccatgcagtaatgtagtctctgtatcattccttcagctgtgaacagcatccacggtctctgattttcttggtggcttagggagcagttattggtgg

SEQ ID NO: 932699 - DNA, 656 bp, Homo sapiens
atacctgtggttgtgcacattcaattttaattcgcaatccattgtaaaacgtcttatcacccccgaccagagaaagaccctgtagacattagtcactcctcattctgtctcaaaccctctccctgaccctcagccctaggtagcaactatctagtgcgatcaatcccatatgcatagatttccatattgtggacatttcctataaacggaattgcacaataggtgagctgctatgactgacataacacgtagcacaatattttcaagattcatccacattgtaggcttacccacagggggaaaccattttttggggggttttagtaacaccggtgttttctccttcctttcatccttctttccttccttccttccttccttccgtccttccttccttctttccttccttcctttcttccttgyttccttccttccttcctcctatttctctcttactccttctgccctctctctttcatatgccttaggtgcatcccacattctgcgttttttgggggaaatcctcgacaggtgcgggaaatttgtgttattgtaactatttaccgctatctctctttcacggctctccatcacttgtgaacatctattggtttatcccaagtcactaagcatatttttattaggtacacctgttt

SEQ ID NO: 932700 - DNA, 581 bp, Homo sapiens
gtcacagcccatgctggcacgacgctccagcaggtcggcgtccctgcgggccacactaccggtgacatggctagcatgaccctccttcctggcagtgacactgttgatgtgaaccccagtttcacatctgtcatttataaatgggaccattttcccttttcgctctcccttccattcacagggcttttcattctctctgtttctgcctccgtttcagatatttactcacctttttctctctcactatgtctgccgtggtctccatgagactgcgccacataacattccccyattaaaggtcatgaattcagtggctttcagtatacctgtggttgtgcacattcaattttaattcgcaatccattgtaaaacgtcttatcacccccgaccagagaaaaacgctgtagacattagtcactcctccttctgtctcaaaccctctccctgactctcagccctaggtagcaactacctagtgcgatcaatcccatatgcatagatttccatattgtggacatttcctataaaccgaattgcacaataggtgagctgctatgactgacataacacgtagcacaata

SEQ ID NO: 932701 - DNA, 671 bp, Homo sapiens
aataacctaacattacacctgaaggggggaaaaaaaaaactaatgacaaaccaagcaaaaggaagaaaataacagattagagcagagataagcagaataataccagaaaaaaaaggaaaaaaaaaacacactgagttttttttaaagatcaataacaattttaaaactcacagctatattaagaaaaaaagagaaatctcaaatactaaaatmgtaaataaaagaggtgacagtacaacagatgccacagaaatgaaaaaaattacaagagactaatgtgagcaaccgtatgccacaaaactgggcaacctagaataaatttataaattcctagaaacacaaaccaccatactgaatcacggagaaataaaaaatccaaagagacctgtaactagtaagaagattcaaccagtaatcaaaaaccccccaaaaaagaaaattccaggtccagataacttcactggagaattttaccaaacatttcaagaagaattaatgccaatcctctgcaaaatattccaaaaatgttcaaaaaccagaaggggacattccaatccattctatcaggtcaacatttatctggttccagagccagatgaacaccttttgtaataaaaagactcaaagaattagtaatatatggaaactcctcagtaaataaagattgtaca

SEQ ID NO: 932702 - DNA, 712 bp, Homo sapiens
cctgtaactagtaagaagattcaaccagtaatcaaaaaccccccaaaaaagaaaattccaggtccagataacttcactggagaattttaccaaacatttcaagaagaattaatgccaatcctctgcaaaatattccaaaaatgttcaaaaaccagaaggggacattccaatccattctatcaggtcaacatttatctggttccagagccagatgaacaccttttgtaataaaaagactcaaagaattagtaatatatggaaactcctcagtaaataaagattgtacatgaaaagctcacagctaacatcatactcaatggtgaaaaactaaaatcttttcctctaggatcaggaataagatagcaacatcccttcctgccacttctattcaccaaagcactggaatttctactcagaataattaggcaagagaaagtaataaaaagcatgcaaattggaaaggaaaaagtacaaarttttgttcacagacaacaggatgtaatgggaaaaatcctgaaattccacaaaatactggtaaaataatgaaattcaacaaagtttcaggatacagtaaaacacacaagtcagttgcatttccataaactaacaatgaacaatctgcaaataaaattttaaaaagagaggccaggtgcagtggctcacacttataatcccagcactttgggaggccaagtcgggtagaccacctgag

SEQ ID NO: 932703 - DNA, 712 bp, Homo sapiens
cctgtaactagtaagaagattcaaccagtaatcaaaaaccccccaaaaaagaaaattccaggtccagataacttcactggagaattttaccaaacatttcaagaagaattaatgccaatcctctgcaaaatattccaaaaatgttcaaaaaccagaaggggacattccaatccattctatcaggtcaacatttatctggttccagagccagatgaacaccttttgtaataaaaagactcaaagaattagtaatatatggaaactcctcagtaaataaagattgtacatgaaaagctcacagctaacatcatactcaatggtgaaaaactaaaatcttttcctctaggatcaggaataagatagcaacatcccttcctgccacttctattcaccaaagcactggaatttctactcagaataattaggcaagagaaagtaataaaaagcatgcaaattggaaaggaaaaagtacaaagttttgttcacagacaacaggatgtaatgggaaaaatcctgaaattccacaaaatactggtaaaataatgaaattcaacaaagtttcaggatacagtaamacacacaagtcagttgcatttccataaactaacaatgaacaatctgcaaataaaattttaaaaagagaggccaggtgcagtggctcacacttataatcccagcactttgggaggccaagtcgggtagaccacctgag

SEQ ID NO: 932704 - DNA, 659 bp, Homo sapiens
gagtgtgggaggcaaggaggtcttcccttcagcacatgtgccccagctgcccagcaccatgcaatgcagctagtaggtgatcaacaaatgtttgacgaacaaatgaatgaacaagatgaaatgcatgtgtgttagtcctgggagctcaaaaagatttgaaaagacagggagtaaaagaaaggcaacatgggctgggcactgaaacccagaagtagcaaagcaaagaccggaagatggagactgttcatggagtttgaacatgatcctttgaataataagaagagatgaagctttttcagccgggagcaataggatctgagagtcatgtgcagtttggatgagaaggaaggggaagaacctggcagtaacaaggccagtgargagactaatgcagaatgcgggcttatggctccaaggcctcaaattgagagtcaacaacccaaaggggaagaatggacaaagccaacagtaagcaagggatggacagaggacactgccacacaggtgattcctccctccccaaaaaccacccagcaggacccctgctccttctcccaacaagctcagcctcttcctgcctgcctccacgcccaaacctctccccatcaccaggggcttctgttagcagagcagaggcatcagcagggacctttgcccct

SEQ ID NO: 932705 - DNA, 595 bp, Homo sapiens
tgcctcagcctcccgagtagctgggactacaggcgtccgccaccacgcccgcctaatttttttgtatttttttagtagagagggggtttcactgtgttagccaggatggtcttgatctcctgaccttgcgatccgcccgcctcggcctcccaaagtgctgggattataggcgtgagccaccgcgccctgcctcgttactgtttttcataggtgctttagagacattgcaatttatgaagtaaggtctaaaggatccaggggcttgcttagcacacagaggctagctagttaatgaccgagtttgggctagaacctcagtcccctaatacctcactatggttctcttttcagagtatgagactttaactatagtgtgggaaagacatgatttgagtttgcatcttgtggagagattttaccttccaggtggatatcagtgtttgaagaaatgaatcrtactcatcccaatttcaacatattcacagatgcttagcaattaaatcatttttttttttggtttctatttctcaataaacagttttatagaaaccctgcctcctttccatgctccaatacactggctggtggaagaggc

SEQ ID NO: 932706 - DNA, 777 bp, Homo sapiens
tggggacagacacaaagcaaggccatgcaagttcattcttatgacctcaacgatgctttatctccttcttacccatcatagccatgtttgaaaattcatcgagacaacaactatttcattgaggatgagatgaaaataagcataaataaaagttctaatttttttttccataacccaatggatccagttttgcacccactgtgataccagcatcctatatgtgtatatactggcccacaaaaaaaaaaatttagacttcttagcacattcaaaatgcttttccccatccaactatcaaccatatctttactctcatctcgtaccaaaatcttttggtccagccatgtcaaacttctcactttgagcttttgtatatgatgatccccgtactgagaatggccttcgtgcatacctcttcttgcagaacatcttatttttaagaactcsgttcaaatgtcacttcctctgggcagcctgtgctgactcctattggcagaatgtattgctctcaccattgtattcctacaacactatttaaatcctaggatagaacaaatcctattgtaattttcttatctgaaacaaggctcttttcccccttttaaactgttaagctccttgaggatacgatctatggcttaatcatctttagccaacacaagacccagccacaatagatggtcaattaattttcacttaaagaatgagacaagactctgggcctgaccctttcctttatgcctttcgtagggctgcagtgtacaaccttgcagactt

SEQ ID NO: 932707 - DNA, 654 bp, Homo sapiens
tgctgggaggaagatgacatgttagttatccagaacaaagcaaaggctaggaatctctgtgccttggaaaggggaggtggggattgacagatacctgggtactggaagatctctccattagtgaggcaggctaatgagaaaacagaaaagaaagataccccaaggtattcttatctcaagsattctgaatatctggaaataaatgggagcaggaactaagaattaaggttttgctgacaatgaccaatcagaagaggcttttgatctctactatggtttgaatgtttgtcccctccaaaattcatgttgaaatttagtcaccattgtaacaatattaagaagtggaacttttaagaggtgattaggacatgatggctctgccctcatataaaaaggccagttctgccccctcttgcccacttcttgctcttctgcctttcacctgtgatgatgaatcaaaagggccctcaccagatgctggcaccttcattttggacttcttagcctccagcaccatgagaaaataaatttccattctttgtaaattacccagcctcaggtgttctgttacagcggcatgaacgaactaaagcaatgctttgctgtctaaagtagagctttaggagactgaagcccacacttgagaagaaactg

SEQ ID NO: 932708 - DNA, 654 bp, Homo sapiens
tgctgggaggaagatgacatgttagttatccagaacaaagcaaaggctaggaatctctgtgccttggaaaggggaggtggggattgacagatacctgggtactggaagatctctccattagtgaggcaggctaatgagaaaacagaaaagaaagataccccaaggtattcttatctcaagcattctgaatatctggaaataaatgggagcaggarctaagaattaaggttttgctgacaatgaccaatcagaagaggcttttgatctctactatggtttgaatgtttgtcccctccaaaattcatgttgaaatttagtcaccattgtaacaatattaagaagtggaacttttaagaggtgattaggacatgatggctctgccctcatataaaaaggccagttctgccccctcttgcccacttcttgctcttctgcctttcacctgtgatgatgaatcaaaagggccctcaccagatgctggcaccttcattttggacttcttagcctccagcaccatgagaaaataaatttccattctttgtaaattacccagcctcaggtgttctgttacagcggcatgaacgaactaaagcaatgctttgctgtctaaagtagagctttaggagactgaagcccacacttgagaagaaactg

SEQ ID NO: 932709 - DNA, 647 bp, Homo sapiens
gaacttttaagaggtgattaggacatgatggctctgccctcatataaaaaggccagttctgccccctcttgcccacttcttgctcttctgcctttcacctgtgatgatgaatcaaaagggccctcaccagatgctggcaccttcattttggacttcttagcctccagcaccatgagaaaataaatttccattctttgtaaattacccagcctcaggtgttctgttacagcggcatgaacgaactaaagcaatgctttgctgtctaaagtagagctttaggagactgaagcccacacttgagaagaaactgggctatgtagatcatgatgttcacacattttataaaatgcaaaatatttaaatgtaaaagaagttacctaaatattggataattagaagtgtaattaagtaaactagcccatttcctctacacaatctcttaattaagaatttgyaggatcttgtttctatagaagtgcatttacattagtctccatgtctagtaagtatctacccacttaggtattctgtgggctgcgttctgtttgaactctgatctctctaccactttcccagcctcttaccattctaagggtcagacccttcaccaccacctctagtcatatgaaagaagttataaatcacct

SEQ ID NO: 932710 - DNA, 567 bp, Homo sapiens
tgcataagtaatgaggagccaaatgttaatccccaagacaatggggagaatatctccagggcatgtcagaagtcttcacagcaaccccttccatcacaggcccagtggcctagaagaaaatggttttgtgggccargcccagggtcttcgtgctatgtgcagcctagggacttggtgacctgtgtcccagccttcttcagccaccgatgaaagaagccaacatagagttcaggccatggtttcagagggtgaaagctccaagccttgacagcttccacatggtgttaagcttgctagaattgaggtttgggaaactccacctagatttcataagatgtatggaaatgcctggatgctcatgcagaagtttgctgcaggggcaggacactcatggagagcctctgctagggcggtgtggaagggaaatatggggctggagcccccacacagagaccctactggggtactgcctagtggggctgtgagaagagcgccacaccatcctccagaccccagaacagtagatccaccaacagcttgcactatgtgcctggaaaagatgcagac

SEQ ID NO: 932711 - DNA, 567 bp, Homo sapiens
tgcataagtaatgaggagccaaatgttaatccccaagacaatggggagaatatctccagggcatgtcagaagtcttcacagcaaccccttccatcacaggcccagtggcctagaagaaaatggttttgtgggccaggcccagggtcttcgtgctatgtgcagcctagggacttggtgacctgtgtcccagccttcttcagccaccgwtgaaagaagccaacatagagttcaggccatggtttcagagggtgaaagctccaagccttgacagcttccacatggtgttaagcttgctagaattgaggtttgggaaactccacctagatttcataagatgtatggaaatgcctggatgctcatgcagaagtttgctgcaggggcaggacactcatggagagcctctgctagggcggtgtggaagggaaatatggggctggagcccccacacagagaccctactggggtactgcctagtggggctgtgagaagagcgccacaccatcctccagaccccagaacagtagatccaccaacagcttgcactatgtgcctggaaaagatgcagac

SEQ ID NO: 932712 - DNA, 567 bp, Homo sapiens
tgcataagtaatgaggagccaaatgttaatccccaagacaatggggagaatatctccagggcatgtcagaagtcttcacagcaaccccttccatcacaggcccagtggcctagaagaaaatggttttgtgggccaggcccagggtcttcgtgctatgtgcagcctagggacttggtgacctgtgtcccagccttcttcagccaccgatgaaagaagccaacatagagttcaggccatggtttcagagggtgaaagctccaagccttgacagcttccacatggtgttaagcttgctagaattgaggtttgggaaactccacctagatttcataagatgtatggaaatgcctggatgctcatgcagaagtttgctgcaggggcaggacactcatggagagcctctgctagggyggtgtggaagggaaatatggggctggagcccccacacagagaccctactggggtactgcctagtggggctgtgagaagagcgccacaccatcctccagaccccagaacagtagatccaccaacagcttgcactatgtgcctggaaaagatgcagac

SEQ ID NO: 932713 - DNA, 750 bp, Homo sapiens
ggcacaggtgctagctccgtgtgaggctgcggctggaccagatgtaccacaagtggcttccactgcaggcacctgaacaaggggaatacgttggtgcccaaaagcttggaaatgccaggaaccacagagccccaaagaagatgctacagccctggctcggggagcccctaaatctgggctccctgaagggtcgaagctcttctttccttcttgacatggtgagcagtggggtgggggaggggagtgttagagggggttcagtgcatgtttaaaccctgtttgcgttgctgctctttcagtcctgccatttgatgggtcccaatttcttgtcccgcatccaggatgaatgaagtatgcagamaactggagggtgagcaaggtgaagaggagctttattgagtgacagaacagctctcaggagacccgaagtaggtagatcctttctgcaggcaggtcatcccaatgagtatctggccctcagtggagaggagacccatagtgcgggtcttagacggaagtgaggatagatggaagatgacctttccacagtcaggtcatcccaacaagtgtccagcttaagagaagacctgtggtgggtagcttctttcctcaggcaggtcatcttgatgaagagacccaaagtgagtagctccttcccacagctagtagtcctgacctctctctttgagtctggctgagtttgaatttttataggctccagaagggaggaagtacatgctgataggtcca

SEQ ID NO: 932714 - DNA, 639 bp, Homo sapiens
cctgggtcgagtaggggctcagaaagctgtgaaactcagtcatttcctgcatcaggacttactttggtcctggatgaataatattgaagatacatgcttaaaatattcctaacatcagaatttgtgcctgtgttttcttccccaagaaagctataaacagcgaaaattttgttgtaagcttccctgtgtcctctctccctctctcccttccccctcccctgaaactaaaagaaatgttaaaagcctgtttttctgtgaccagcataccttgtctatgctcccaattccaattccttgtaaacacaatttgtgaaatcctgtgagatcctgtctcctttgccatgccgctgcaaggtcataaagtagataaaacttaagttacaattccggttttcctcaagatctgagacatgttaattktctttgtttcttgctctggtaacatcttcccgctgcacgtagttccctccttaaagagtttaaaaggtgatcaaaaaatctaacactggctacccgctcgggaccccttccacgctgtggaagctttgtactgtcactgcttaataaagtctacagccttttttctctcggtctgatccgtgtctctctctcactgtgggctaccgccacaccaaatct

SEQ ID NO: 932715 - DNA, 639 bp, Homo sapiens
cctgggtcgagtaggggctcagaaagctgtgaaactcagtcatttcctgcatcaggacttactttggtcctggatgaataatattgaagatacatgcttaaaatattcctaacatcagaatttgtgcctgtgttttcttccccaagaaagctataaacagcgaaaattttgttgtaagcttccctgtgtcctctctccctctctcccttccccctcccctgaaactaaaagaaatgttaaaagcctgtttttctgtgaccagcataccttgtctatgctcccaattccaattccttgtaaacacaatttgtgaaatcctgtgagatcctgtctcctttgccatgccgctgcaaggtcataaagtagataaaacttaagttacaattccggttttcctcaagatctgagacatgttaattgtctttgtttcttgctctggtaacatcttcccgctgcacgtagttccckccttaaagagtttaaaaggtgatcaaaaaatctaacactggctacccgctcgggaccccttccacgctgtggaagctttgtactgtcactgcttaataaagtctacagccttttttctctcggtctgatccgtgtctctctctcactgtgggctaccgccacaccaaatct

SEQ ID NO: 932716 - DNA, 611 bp, Homo sapiens
ggaatatctgcaaacaacaataatatcagctatgccatctttcactattttagccagtatcgagttgaatgaacatagaaaaatacaaaactgaattcttccctgtaaattccccgttttgacgacgcacttgtagccacgtagccacgcctacttaagacaattacaaaaggcgaagaagactgactcaggcttaagctgccagccagagagggagtcatttcattggcgtttgagtcagcaaaggtattgtcctcacatctctggctattaaagtattttctgttgttgtttttctctttggctgttttctctcacattgccttctctaaagctacagcctctcctttcttttcttgtccctccctggtttggtatgtgacctaraattacagtcagatttcagaaaatgattctctcattttgctgataaggactgattcgttttactgagggacggcagaactagtttcctatgagggcatgggtgaatacaactgaggcttctcatgggagggaatctctactatccaaaattattaggagaaaattgaaaatttccaactctgtctctctcttacctctgtgtaaggcaaataccttattcttgt

SEQ ID NO: 932717 - DNA, 634 bp, Homo sapiens
ggcaaagtaggtggtattatttatgccccctcaccgctttttttttttttttttctgagacagagccttgctctgtcacccaggctggagtgcagtggcgccatctcggctcaccgcaacctccgcctcccaggttcaagcggttcttctgactcagcctccctagtagctgggattacaggcagccaccatcatgcccagctaattttttgtatttttagtagagayggggtttcaccatgttggtcaggctggtctcgaactcctgacctcaggtgatccacctgcctcaagtctctcccaaagtgttgggattataggcatgagacaccatgtccggccttatgcccattttatagccaaagaaactgaggctcacccaagtagtttttttcaaaactagaattcatgcctcagtgtgtctgcctcttttcaccttactggagatggtccaagcagagaaaatgtggttggtttcttctgtaggtggacctgggctcctcgaaggaggtgacaggcatcatcacccagggggcccgtaactttggctctgtccagtttgtggcatcctacaaggttgcctacagtaatgacagtgcgaactggactgagtaccaggaccccaggactggca

SEQ ID NO: 932718 - DNA, 550 bp, Homo sapiens
gattgaaatcccagcactgtgggaggccaaggcaataaaatcgcttgagcccaggagtttgagaccagcatgggcaacatagggagaccctgtctctacaaaaaatacaaaaacattagccgagtgcggtggtgcaggcctatagtcccagccactctggaggctgaggcaggagaattgcttgggcccaggaggatggagctgcagtgagccgtgatcacaccactgcattccagcctgggcaacaaagcaagaccctgtctcaaaaaaattaaaaatgtcttcggacattgccaaatgcccctggggggcaccttgtccctggctgagtgctgctgccggagccccttccrtggatcccagtgtcccccacatggattttggggtctgaacctcttgcagcctcctcttggctgccgcatctccttgctgttcctccattcccactgatgctcccctggctaatgggctttggatgcgtgcatcagaatcacctgggcttggctgggcgcagtggcgcatgcctgtaatcctagcactttggcaggcc

SEQ ID NO: 932719 - DNA, 670 bp, Homo sapiens
cctaattctgaatgacttttgggtaaataatgaaattaaggcagaaatcaagaaattctttgaaattaatgagaacaaggataaaacataccaagatctctgagacccagcaaaagcattaagaggaaagtctatagcactaaatgcccacatcaaaagttagaaaggtcttaaattaacaacctaatgtcacaggaagcagaatttttctacaggaagcagaaaaattagaggaaatcaacaacaaagccagcagaagaaaagaaataaccaaaatcagagctgaactgaacaaaatggagatgtgaaaactgacacaaaagatcaatgaaaccaaaagttggttctttgaaaatataaataagattgataggctgctagttagactaatcaagaaaaagagagaagatccaaataaacacaatcagaaatgacaaagggaacattatcatcaactccacagaaatacaaaaaaccttcagagactatttaaaacacctctatacacacaagctagaaaacmtagaaaaaatggataaattcctggatacatacaacctccaagacctaaccaggaggaaactgaaaccctgaacagaccattggtgtgttccaaaattgaatcagtaataaaaaacctgccaatcagaaaaagcccaggaccagataa

SEQ ID NO: 932720 - DNA, 499 bp, Homo sapiens
atcattttacattcccccaacagtgtactagggttcaaatttcttcacatccttgccaacacttgttgacttttcaataatagccatcttaacaggtgtgatatctcattatgattttgatttgtatttacctgatgattaatgatgataaacagtttttgtatacccattggacayttgtaatgtcttctttggataaatatgtattcaagtgctcagtccattttttatttatttatttttttgctattgagttgaaaagtttccttatatgttttggaatattagccctttaacaaatatatggtttacaaatatattcccccattctgtaggtttcctcttcactctgttgtttcctttactgtgtagaagctttttaatttgatatagccccactgtctgtttttgtttttgttgcctgtgcctttggtgtcttatccaataaatcattgccaacaccagtgtcaatgagattttcccctatgttttcttctag

SEQ ID NO: 932721 - DNA, 655 bp, Homo sapiens
aatgtactgtaaatgtctgttaagtccctttggtctatgatgtagtttaaatccaatgtttctttttgattttctttctagggatgtctccaatgctaatagtggattgttgaagtctccatctattatcgtattggagcctatccctctctttagatctaataatatttgctttatatatctgggtgctgtggtattgggtgcatatacatttacaattgttattttcttgctgacttgwtccttttgttattattatataatgttcttcattgtttcttttgacagctttttacttgaagtctgttttgtctgatataggtatagctatccctgcttgcttttcgtttctgtttgtgtggaatatctttttctctctctttgctttcaagtgtttgacagtgaagtgattctattttaggcaacatatatttgcatcttgttatgtttatccattcatccagtgtgtatttttaaaatcggcatttaattcatttatattcaaggttatacttgataggtgaagacgttttttgtctgcctgtgttatttcaaaggacctgtcttcaaattcagaaattttttattctgcttggtctagtctgatgttaaagctcttgattgtattttttatttcattcatttaattcctcat

SEQ ID NO: 932722 - DNA, 549 bp, Homo sapiens
acttgataggtgaagacgttttttgtctgcctgtgttatttcaaaggacctgtcttcaaattcagaaattttttattctgcttggtctagtctgatgttaaagctcttgattgtattttttatttcattcatttaattcctcatagcattcctgtggttctttttttaatgacatctatctctttgttgaagtactcattcaaatcatgatttttcccctgatttcattgaatcctcaatctgtattctcttgtatctcagtgtttccttaagattattattttgaatatttttctggaattttatrtatttccttatgctaggggtctgttactagataattatcgtgttcctttgtgtcatgtttccttgctttttcatgtttgatatgtctctatgtagatttcacatatctggtgtaatagtcacgtcttttggggaaggttttgtagggaaagacttatttgtttagatgggtcttgggtgttggttcagcagggtacactggatttgattctggatggacacagtagtatagtcaccatgtag

SEQ ID NO: 932723 - DNA, 809 bp, Homo sapiens
tgaagttgtcacttggctaagctcacaagaatccactgtgattctctaatatccatctgtcttcttcacaggccaaatatgggagttaaatggagatgtggtaggaatcgccattcctgtgtttttcaggtccctgatggtggcactaatctctgcaattcctccatgcagtattgctttcagtttactactttcatagatggagggagttctatggcgtcttcttggcctttcccaaaataaaagccttcattccacagatcaggaaagcaatgattctgccagttactgagaatatctattccaattatgcatcctagaaccagggaaataaccactggatatgttcagggacccacagagccaactgtgagatggaccttagccaaaactctactgatcagttgagctccataartccttactcattgatggatcacagtgacattcagagtcctctggaattagtgttagttcagagacagtgtctagtagtccccaaaagctctgattgttcccttctccccagtgcacaaataccacggtaaaaggccataggtccctttggggaaggctgggagaaatactaacagcataaatttttggaagtatactagggtccttccttgaaggacctccctttcattaaaggagttctgagtctgtaaagtagctcaagtctgggaattgattgagaggccatgactctgtttttatgatgcaggttagacttttgttccctcgacccagaacttttctgcttatacagatgaggttagaatttagtaggcttcctatctactcatgtc

SEQ ID NO: 932724 - DNA, 537 bp, Homo sapiens
ttccttccctactctctgcagcccagatgggaaaacttggaggctacaatctgaatatatttttctcccattttaacccgagctgcctaacacacagtgggggcagggtgggtgaagggcctggggaaaagcagggctggatcatggatcccgggggaaatttagagatgcaaagtggttgtcacctctctgtggaacccagctccatacctggtccttgccacacagccctttctacagagaatagctctggggcgtttggggatccctatggccccgggtggcttcctgtcccccgctgcctatgctkcttcccttgcctgctgtcagagcccaacatggaggaggaggttgccgtcctgggagcctgagggagctcttcccttgcctgctggcagagcccaacgtggaggaggaggttgccgccctgggagcctgagggagctcttcccttgcctgctggcagagcccaacatggaggaggaagttgccgccctgagagcctgagggagctgtgtctgactggggcttctgcct

SEQ ID NO: 932725 - DNA, 563 bp, Homo sapiens
ggaggcagtggaggcaggagaggctggggaggctgtgtcctttccatgattctgcccaggatcctaggcccctgtactccctgagcttccccacccccagcactggaaccatgttgcacaatggtctctccactaagatcctgatggcggcccctatcctgctgtgctccctatttcaaccctaacagctctcacagtgggcagcacatagtaggtgctcaggaaacactggtgggagagcacatgggtctgcttagcaccttcctctctcctccagctctcccctgtcatgaaataattctgataacgacacatggcctttgagaccctcttctattactttccatatgctaatccatctatacctcacagcagccctgggggtgggtgctattacgatgcccattttacagaggaggagactgasgtataaagagggtaagtgacataggcacactacaggggccggggccaagtgattgcagcactcaatccccaaaggcaaggtggatgcagttaccataaaagacagcagagtcaaagctgcaaccagaatagcctga

SEQ ID NO: 932726 - DNA, 560 bp, Homo sapiens
ctgaaacaattttgaaaaagaacaaggttgaaggactttcacatcttcatgtagaaacttattataaagtcacagttgtaaagacagtaggactaggatcaagataaacatatacatctggaacagaattgagaatccagaaataaatctctatattttaagtcaattgagttttggcaaaggtgtcaaggcaattcactgggcaaaagattacatttaacaaatggtgctgggaccagatgcaaaccagatgcaaaaaagatgaacttagatcctcacctcacaccatatacaaaaattattatggattatagatttaaatgtaagagctaaaaatacaacttttagaataaaatataggagaaaatcttcaagaccttggattaggcaaakatttcttagatatgacactaaaagcacagtcattacaagaaaaaaattgaaaaattagacctcatcaaaatttaaaacgtttgcacttcaaaatacatcataacaaaaataaacagacaagcaacagactggggggaaatgtttgcaaaactcatgtcaaaataaag

SEQ ID NO: 932727 - DNA, 577 bp, Homo sapiens
gaggaggatagcctcgggcaagttttcaagcctgtctcgccctctgcctggaaatactctgggctgttgagaagagggcacggtggaagtaaggcccttcggtgtgtgtgggagcagggtgaggcctgtgactgccagcttaaccccacttccctgacaacctgcatgactcagcagagacagccgtaatcctcctaggtacacacctccagtgacctgggaatcttacccccatcccccacagcagccacagcaagacccacccaaggagagtctgagctcagacatgcctagccccgcccccacctgatggtccttacctatccacctggtagcagaatacaagaggcatttaatcttgggagttctagggccccacycactgctggtccctctccacgttactatagctgatgctttctggaaagtgtcacctcctggaaggaggccaaccagcacaaaaatagagcattaaaccaccaaagctaaggaccctcacagagtccattgcaccatctgccacctccactgaacaggcactggtgtccatggctgagagacccatagacagttcaca

SEQ ID NO: 932728 - DNA, 601 bp, Homo sapiens
ctacaaaaaatgcattacagataagcaaatggcttaaatgaaaaactgaaacctcaaaattctacaaagaaaacatggaattactttgtaatattagagtgagtaggaatattatcagtatgacatgaaactaagaaatcataaaagattattatatctttcaaattttcatgcataataaataaaaaacaaatacacttaaaggacaaacaaaaatctggaagaaataacataaaaatgccatttktgtgtgtgtatataagaaagagctactgcaaaccaacaagagaataatctactacgtcacagaaaagttggcaaagaacataaacacgctcatagaagaggaaatacaaaacttctagacataggaaaagaagctcacacaataaaagaagtaaaagttaaagctaaaatgagataatattcagttggcaaagatcaaaaatattctaaaattacacatttttcaagggagggaaaatagaaaacctgtcctattttgttggtagaagattaaatgagcacaaagaccatttgagaacatctattaaaaagactcataggaacagctccggtctgcagctctcagcgagatcga

SEQ ID NO: 932729 - DNA, 705 bp, Homo sapiens
ctacatgctattaccttcacttaagtctcaatggtcagaattttgacaccctctattctaatctataatacattgacctataatgtaagcctcaaaagacaatgttattactttaaattcaaatttagaagacaggaagaagggtaaactcagtggcatgccagtaaaccagttctcaaaaacataaatttaattttaatgttgmcaacttctgttgtacaaatactcccactgtggctgactttgagctatcaaaatttctgcaaatgtaacagtcacctcttatgagctagaacaaatcagctccagaccatgactggaatgtcctaccctcaacctgcaaaaaatgagccaccgtaaaaacgcaagaaaatccacctatgcctaaaattcacctgtagttttctttgcttcctggagttattgggacaaattcttaccactgtgtggaattcaagtccatctcacacggagattatgtttatttgcctgtttatttatttataccttcttttttgaagaaaggatttgaggtggattatctaaatccattcaatataaaaatagataaaattgaatttcaaataagtagatgaggaatgtagaacaaagagaaaatgaaagctttaatagtaataaagagaaaaatgaaatcaagtgtgagcttagcacacaaaatacatggtataaaggccttgtgagcca

SEQ ID NO: 932730 - DNA, 671 bp, Homo sapiens
gagaatctggagttaccacctcacttattacattcaatggaccaaatcccccctcaattctcaaaggggtagctggtcaaacatttataacatttttcaaggtaagtgaaagtcaactaattattaatgaaggcaaccaaaaaagagagaagtatatgttttttatttatagaaaccttccctttatgacacagtatgaatctatgaacataaaaatcttagattcagtattctcataatttatcaagatatgtctaagaatcaggatctaaacataaatttccacattggcaggccaaatgacaaaacttcaggttccaaaaggcagaggagtgccattgaatagctttgtaattagctctctggtgggtagacctgggcatcatagaagagcttcaccaatcaatctcaagtatcaaaaagaacatagaaacagaagcaaaacaccaaagaatrtaacaaacactcaatgtaaagaggtcttaccaagagttactcttgttttttcactctttggtgaaaatataaaagatgcatagaaaaatacgaaaaaagacagggatggtatccctaattccagtgccctagcatagtaattattatatttgagtgcttccctttaataacaatagaaacaacagcaattgattacattcctttatttcaaaaac

SEQ ID NO: 932731 - DNA, 567 bp, Homo sapiens
gctgctttctcagaatggatttccagagtgcaggccaactgaagagaaggagctgaaagactccagagaggttgatcagtgacaataggtattgctgcctttgttcaagatctgcttaacttttaaactaaggtgaaataagcatacccgtttctaaattatctttcttttttttcacagattagattttaaatgatgatggaagaacactcagcatattctggatattagaggtaaagttaagctatctctctctatctctatctctatctctatctctgtctatgtatctaaaggaccataaatgcaatgcagcgatgtgataagtaggaccatagggtccaaggaccccatggaattgcagttagaagaatcatattttactaccctatccgtgttgtttaacaggcagggaayaaattttcagctcactcagggaaatttttctcttagctttaatttaccataatgaatcaattacaagaaagtatttgttaaggcgggcagaagaaaacttttggaggtgatagatacgtttacagcatagcttgtgaagatggtttcatg

SEQ ID NO: 932732 - DNA, 802 bp, Homo sapiens
ggatgatggggaacatggtaaggtcagtgaattccatgacggcacttctttttttttttttttttttttttttttttaagatggagtcttgctctgtcgccaggctggagtgcagtggtgcgatctcggctcactgcaagctccacctgctgggttcacgccattctcttgcctcagcctcccaagtagctgggactacaggcacccgccaccacacccggctaattttttgtatttttagtagagacagggtttcaccatgttggccaggatggtctcgatctcctgacctcgtgatccacccacctcggcctcccaaagtgctgggattacaggtgtgagccaccacgcccagcctgccacacttytttagccataaagtgagtgccttggtcagaggcaatgctgtgtggaataccatgacgatggataaagcattccatgagtccatggatggtagtcttggcagaagcattgtgtgcagggtaggcaaacccacattcagaatgtctattccagtgaggacaaacttcacagacacactcaggatcaatattttgcatccttcaatccaatcaagttgacactcagtattaaccatcacagttagtatcatttacaaagatagaagagatgggaaagcagatttagtgagcaaaatccaattcgctggagacaactttaaggtgcctattacaaatccaggtggaggtcaggcagttgactaaacatttcacagagggagctcaggacatgagataaaaatttagaagtcggcataagtggtctttaatgacatagg

SEQ ID NO: 932733 - DNA, 602 bp, Homo sapiens
tcagaatgagagctattacagctggaataaatcttgggtatcatctaattaaaggctgtccaatcttttggcttcctcaggtcacattggaagaaaaagaattgtcttaggccacacataaaacacacttatgctaatgatatctgatgagctaaaatatatatatatatatatatatatatatatatatatatgtggagatakatatatatatatatatatatatatataatgttttaacaaagtttacaaatttgtgttgggctgcattcaaagccatcctgggccacatgcagcccaagggccatgggttggacaagctcaatctaatcctatgccatttatgctcatcagaataggatacaatctcaatggcttaatatgaaaacttgcatatactattatcataatagattgctcacactgaaagtagagtagtgccctagggcacctctcttccatgtggtaactcaggtatttcaatttggtcctattttgtgcctacttgatttcaacccataccctccatactcaccatagcagggaaagaaagaacctgaagaccacacatctattcttttttttttttcagtgcatgtgca

SEQ ID NO: 932734 - DNA, 631 bp, Homo sapiens
tagataatcaggaacatttgaatatgaactgtatataagacaaaattaagagattgctgttaattctgttaggtgcattactgtcatggtgctggggaaactatgcaaagaaaacatgatattatcactcaaaaattcataccaatcatttacatatgaaatgacatgacatctgggatttgctttaaagcagtccagcaagcaaagaaacaggcaaacaaaattgaggggaggtgctaataggtaggaggtgatactggcaaaatgttgattatctttgaakctgagtgactgagacatgaaggctcactggagtacttgttctaccttctttacgttaaaaaattttcataaaaagagtactacaaaaattgccatctaagaggatgaagtcatttctggggctgaggagcatatagaatgtgcacttgaaaattgagcactttttgaaacttactataagcagttcatgtcaggaaggggattgctgtgccttactctagagcccattccttttttttttatgagtgcgacagagataaaatccaaacgtgatcactgcagaagtgatgtcttagaaaaatatattcaattctaatccatagatatggaagtggtggaaaaataatga

SEQ ID NO: 932735 - DNA, 586 bp, Homo sapiens
  misc_feature 1, 2, 3, 4, 5, 6, 7, 8, 9, 10, 11, 12: n = A,T,C or G
nnnnnnnnnnnngcaaataaattttaccttgtcggtgcttcccaatgaataagcacaaagaaaacacaaagaactcatagaccccacactgggataaaccaaggcactgagaaaacaagcatatgcccatgatcacacagcaaaatcaagcttagggagttctgggtgctacacacattcattcatcactagctcttccaytggataaaatatttttttctttataaaacacttaagacttcatttttagagcaattttaggttcacagcaaaattaagaagaaggtatagaaattccccacataccctccctcccacaattgcacagcctccccattatcaacatccccactagagctgtgcatttgttacaactgatgaacctacatggactcatcattatcactggagcccacagtttacattagggttcactcttggtcttatacattctatgggtttggaaaaatgtctaatgacatgtacccaccattagagtatcctacagagtggttttactgccctaagaattctctgttctctgcctattcatccctgcacaaccctccccgcccccacccccgga

SEQ ID NO: 932736 - DNA, 628 bp, Homo sapiens
ctttaagttgaagccagtgctcatttaccattctttacattcttaagaattatgctgattctattctgctcgtgctctgtcaatggaataacaaagcctggatgatagcacatctgtttacagcatggtttactgaatattttagcccaccattgagacctgctcagaaaaaratttctttcaaaatgttactgttcattgacagtgcacctagtcaaccaggagttctgatggagatgtacaaggagattaatgttgttttcatgcctgctaatacaacatctattctacagcccatggatcaaggagtaattttgactttgaagtcttattgtttaagaaatacatttcataaggctttagctgccatagatattgatttctctgatggattggggcaaagtcaattgaaaaccttctggaaaggattcaccattctagatgccattaagaacactcacatctgtaatcccagcactttgggagaccgaggcgggcagatcacgaggtcaagagatcgagaccatcctggccaacatggtgaaattccatctccactaaaaatataaaaattagctgggcgtggtggcacgcacctgtagtcccagctacttgggaggctgaggca

SEQ ID NO: 932737 - DNA, 473 bp, Homo sapiens
tgggaggccgaggcaggaaaatcgcctggacccaggaggtggaggttgtagtgagccgagatcgtgccactgcactccagcctgggcaacagagcaagactcagtctcaaaaaaaaagaaaaaaaaagagtaccccatcagcctgggccccaaggatggaaatgaatcacagataacactggccacagggatggtatagaaaggtactaggtccccagggtacccggaagggatgaagtagagatgaacagaatggagtttaggtcayggagcttaagaaggccaggttactacttctgcttctaagacacaaccataggcaatacggctcaagaggatcacctaccccgagccaggagacaaccttaaactgaagtctagtgtggttccttggaaatccttgtgacttggccctcttgtgaggcataaattgaatctggcctgagaatatcctaatactctgtttcctctga

SEQ ID NO: 932738 - DNA, 749 bp, Homo sapiens
tctgtcaaaatgagaaggtcactgctgccacgcttgggaggactcagggctatagcatggccctggggtgggacctgttctcccatcccttgcctcacgtccctgtttttgtttgtttgtttgtttgtgacggagccttggtctgttgcccaggcttgagtacaatggcacagtctcggctcactgcaacctccgcctcctgggttcaagcaattcttgtgcctcagcctccccggtagctgggactataggcatgcaccaccacrccaggctaatttttttttttccaagatggagtcttgctctgtcgcccaggttggagtttagtggcaccatattggtttactgcaacctctgcctcccgggttcaagcaattctcctgcctcagtctaccagggagttaggactacgggcctgtgccatcacgcccggctaatttttgtatttttcatagagataaggtttcaccatgttggccaggctggtctttaactcctgaactcaagtgatccacctgcctcggccttccaaagtgctgggattacaggagtgagccaccgtgcccggccacgtctctctttttaacactaatgttaccctgacctttgaacgtagaatgcccttctgttgcaggaaaacctcttttcaaaccatgtttgtcctttgctggcatgccacagcaacagtcaccaacacagaagacttctgtgaccaaatatttggaggattttccccacacacaccaagc

SEQ ID NO: 932739 - DNA, 729 bp, Homo sapiens
aaggtcactgctgccacgcttgggaggactcagggctatagcatggccctggggtgggacctgttctcccatcccttgcctcacgtccctgtttttgtttgtttgtttgtttgtgacggagccttggtctgttgcccaggcttgagtacaatggcacagtctcggctcactgcaacctccgcctcctgggttcaagcaattcttgtgcctcagcctccccggtagctgggactataggcatgcaccaccacgccaggctaatttttttttttccaagatggagtcttgctctgtcgcccaggttggagtttagtggcaccatattggtttactgcaacctctgcctcccgggttcaagcaattctcctgcctcagtctaccagggagttaggactacgggcctgtgccatcacgcccggctaatttttgtatttttcatagagataaggtttcaccatgttggccaggctggtctttaactcctgaactcaagtgatccacctgcctcggccttccaaagtgctgggattacaggagtgagccaccgtgcccggccaygtctctctttttaacactaatgttaccctgacctttgaacgtagaatgcccttctgttgcaggaaaacctcttttcaaaccatgtttgtcctttgctggcatgccacagcaacagtcaccaacacagaagacttctgtgaccaaatatttggaggattttccccacacaca

SEQ ID NO: 932740 - DNA, 539 bp, Homo sapiens
tgagccactgcacctggcctctatctactattgttccaatgatctaatgacttcaaaatcactcctccatatttccagaagaccttcctctccacattgggtggcggggcaggggggggggggggtctcactctcatcccaggtgacttttattacgttggtgcaaaagtagttgcagtttttgccattacctttattttattttatttatttatttattttttgagacggagtctcgcactgttgcccgggctagagtgcagtggcacaatctcagttcactgcaacctctgcctcctaggttcaagcaattctcccgcctcagcctcmcaagtagctgggattacaggcatctgctaccacgcccggctaattttttgtatttttagtagagatggggtttccctatgtaggccaggctgttctccagtgcctgacctcatgatccacctgagatcatgctgggattacaggcgtgagccaccgcgaccggcctatttttttattttttatctatttattttttgagacagagtctc

SEQ ID NO: 932741 - DNA, 727 bp, Homo sapiens
aacacgcagcggtttgctgattttcctccttactctgtggaagtcagctttaaacggtgtgtcccaagggaagcccagtcggtatatttatacatgaggatgcctagaaagccacgtcttcacagtatttcatatatttacagaaaacaaacatatggctcagcagtgtgttgaatatattttatatatctatagctgtatatttctacctttctgtgtgtatctaaaaccacagattattaaattcgaaataggtggtagagatcatcctgtaactagtagatttccatgccacagttcayttttaggtgaggaaaatgaaagtctacagagagtaaatgacttgtccaaggaggcaaagctattacagttggtgacagagtcaggctagaaaacagggggtctgctttttcctggttcctgcttcaccccaacaggatccattcttgctgctctctgccctctctgtgcctccaaagactaactccttgagttgcatctcttgggctccccttcccattggcttctggttggtttggccaatgagaggcactggtgtaaggtggaggggaggtagagagggaggctggggtgtttctgcccaccacccctgctttgacatctcacctctgacagtagctctgacccttcatgacgacagccttctcctctaggttccagctctcacctgcctttccttgctcctttagtcgtagggaaggtggca

SEQ ID NO: 932742 - DNA, 727 bp, Homo sapiens
aacacgcagcggtttgctgattttcctccttactctgtggaagtcagctttaaacggtgtgtcccaagggaagcccagtcggtatatttatacatgaggatgcctagaaagccacgtcttcacagtatttcatatatttacagaaaacaaacatatggctcagcagtgtgttgaatatattttatatatctatagctgtatatttctacctttctgtgtgtatctaaaaccacagattattaaattcgaaataggtggtagagatcatcctgtaactagtagatttccatgccacagttcacttttaggtgaggaaaatgaaagtctacagagagtaaatgacttgtccaaggaggcaaagctattacagttggtgacagagtcaggctrgaaaacagggggtctgctttttcctggttcctgcttcaccccaacaggatccattcttgctgctctctgccctctctgtgcctccaaagactaactccttgagttgcatctcttgggctccccttcccattggcttctggttggtttggccaatgagaggcactggtgtaaggtggaggggaggtagagagggaggctggggtgtttctgcccaccacccctgctttgacatctcacctctgacagtagctctgacccttcatgacgacagccttctcctctaggttccagctctcacctgcctttccttgctcctttagtcgtagggaaggtggca

SEQ ID NO: 932743 - DNA, 721 bp, Homo sapiens
ggcagatagcattttgctaaattagtggacatattcacagttttaagccctgtaaccacataggtgatgctgctggcagagtattccctgcttgctatgctcactctctcccgaagaaattttcttgcctgtgaaaaacaggctatgattaaggtattaagatgacttagtgactgatgagactgagcgtctgtcctgcttccatcactgcttccacagacattaattctgatcttggctgttactgacccrgaacagggaaatcgccttctcctctgctgcctttcgcacagagcctcatcaatcctgcactgagatcttcactgctgagggatcttgttcccatggaatgtgggctgagcatttctcaaaggacactgtgtaggctgggcatggtggctcacgcctgtaacccccacccgccaaggcaagtggatcgcctgaggtcaggaattcaagaccagcctaggcaacatggtgaaaccccgtctctactaaaaatacaaaagtagcagggtgtggtggtgcatatctataattccagctacttgggaggctgaggtgggagaattgattgaacctgggaagtgcaggttgcagtgagctgagatggtgccactgcactccagcctgggcaacagagtgaaactctgtctcaaaaaaaaaaaaaaaaaaaaggacactgtgtgccgtggaactctagctctggggaatgttcatg

SEQ ID NO: 932744 - DNA, 607 bp, Homo sapiens
tccttttgcaacagaacgaaattggagaaagtgtttattctaccaaggctttgactggaagggtatgcttccctttaaggagtcagtcttggcttgcagagacaataaaaacccagtggggaaactggcctcatacacttgccaacacagtacctatacagrgtttctgacctgtagtcagtaaacaatgtcactttctaacaggtccagaagctccaagtttatcttgggaccttaggaggaaaggatcacttaacttgcaggttggactctgctttaaaaggtcttatctgagattccttggggaacagagttccatcaaagccaatcctaaaggcttatatagaaataattattcttgctgcactttatgcaaacagtcaggccaaatatgaaagtaaagtctatttttcaaaccgctcagtcctatgatgatacgttttttaaacaaaaatgaggactggagagagagaaattatatttcaaaacttataatacatttgtcattaaattccaaactcactagttgtttttaatattttgcctacattttacactaaccctgcttgttcctgtgaacctaccagcaatctccagctgcagctca

SEQ ID NO: 932745 - DNA, 607 bp, Homo sapiens
tccttttgcaacagaacgaaattggagaaagtgtttattctaccaaggctttgactggaagggtatgcttccctttaaggagtcagtcttggcttgcagagacaataaaaacccagtggggaaactggcctcatacacttgccaacacagtacctatacaggrtttctgacctgtagtcagtaaacaatgtcactttctaacaggtccagaagctccaagtttatcttgggaccttaggaggaaaggatcacttaacttgcaggttggactctgctttaaaaggtcttatctgagattccttggggaacagagttccatcaaagccaatcctaaaggcttatatagaaataattattcttgctgcactttatgcaaacagtcaggccaaatatgaaagtaaagtctatttttcaaaccgctcagtcctatgatgatacgttttttaaacaaaaatgaggactggagagagagaaattatatttcaaaacttataatacatttgtcattaaattccaaactcactagttgtttttaatattttgcctacattttacactaaccctgcttgttcctgtgaacctaccagcaatctccagctgcagctca

SEQ ID NO: 932746 - DNA, 594 bp, Homo sapiens
ggggctgccccccacctcccccaccgggcggctgctgggcggagacgctcctcacttcccagacaggcggctgccaggcggaggggctcctcacttctcagatggggcggccggtcagggatgctcctcacctcccagacggggtggcagcggggcagagacactcctcagttcccagacggggtcgcggccgggyagaggcgctcttcacgtctcagacggggcagcggggcagaggcactccccacatcccagacgatgggcagccgggcagagacgctcctcacttcctagacgggatgatggccgggaagaggcgctcctcacttcccagactgggtggctgggcagaggggctcctcacatcccagatgatgggtggccaggcagagacgctcctcacttcctagatggggtggcagccgggcagaggctgcaatctcggcactttgggaggccaaggcaggcggctgggaggtggaggttgtagcgagccgagatcatgccccctgcactccagcctgggcaacattgagcactgagtgagcgagactcagtctgcaatcccggcacctcaggaggcagaggctggca

SEQ ID NO: 932747 - DNA, 777 bp, Homo sapiens
ccttcccaacagtcccccaaagtcttaactcatttcaacattaactcaaaagtccacagtctaatatctgatctgagacaaggcaagtcccttccgcctatgagcctgtaaaatcaaaagcaagttagttacctcctagatacagtggggttacaggaattgagtaaatacagaaattccatttgggagaaattggccaaaacgaaggggctacaagcctcatgccagtccaaaatccagcagggcaatcaaatctgaaggctacaaaataatctcctttgactgcrtgtctcacatccagttcacacttatgcaagatatgtgttctcatgatcttgggcagctctgcccttgtggctttgcaggatccaggctccctgcctgctgctttcacaggctggcattgagtgtctgcagcttttcaaggcacagaatgcaagctgttggtagatctaccattctggggtctggaagatggttgaccttttctcacagctccactaggcggtgctgcagtagggagtctgtgtgggggctctgaccccacatttctctttcgcacttccctagcagaggttctccatgacagccccacccctgcagcaaacttcttcctggatatgcagaagtttccatacatcctctgatatctaggcagaggttcccaaacctcaattcttgacttctgtgcactcacagactcaacactacatggaagctgccaaggcttgaggcttgcagcctctgaagccacagcccaagctctatgctggcccc

SEQ ID NO: 932748 - DNA, 560 bp, Homo sapiens
atagcattgaatctataaattactttgggcagtatggccattttcacaatatagattcttcctatccatgagcgtgtaatgtttttccatttgtttgtgtcctctcttatttccttgagcagttgtttgtagctctccttgaagaggtccttcacatcccttgtatgttgtattcctaggtattttattctttttgtagcaaatgtgaatgggagtacattcttaagrtggtttgatgatcatttgttgattggagcctgatatcaatgttagcttagatttagcatttttggcatagggctcttacgttggatctttacagacagtaaaggaattctgggccttttagggtacttgaatccttagatattagaagccacctcaaatgctaagagtttggtttattctcagatcactggactcatctaagtcctaaaataaaatattgttatatctgttacccagccagatctccctaggatattgtaattttataggtgtggaccaggctgaccattgcatattaagacagttctcatggactccccaccagaaatggt

SEQ ID NO: 932749 - DNA, 781 bp, Homo sapiens
ctataatttctaatcttttggctaattcgttagtcctacaaaggcagtctagttcccaggaaagaaggggatttgttttgggagagggctgttatcatctttgttgtaaattgtaaactaagtttctcccaaagttagatcagcctacacccaggaacgaacaaggacagcttggaggttagaagcaagatggagtcggttaggtcagacctctttcactgtctcagttataattttgcaatggcagtttcagttgttgatctggcagatgttttcttttcccatctggaaagaggatcaaagcagaggacatttatgcagaaaagatagcaaaatatattccatgctgcaaggttatgttaactcttcaggtttttgtcacagtatagtaggaaggaactttgtgtatcttaacattccacagagcatcatagtatttattatattgatgacatcatgttaattgtgttggtgcaaggaagtgggaagtattctggataccttggcaagacccatgggtcttgcrtcatagcctgagagataaatcctacaatgatttaggggtctgccatacttatgaagattttagggactcaatggtttgggctatgcagggatatcccctttaaggtaaagcaaatgttatcgtacttcaaacttttcacccccaaaaaagagcacagtagcaatgggcctctttggactgtagtgacagtacatattctacttcagaatactgctttgactaatttcttaggtaagttgggagactattttgagt

SEQ ID NO: 932750 - DNA, 668 bp, Homo sapiens
cagagcaccaagacaaaaacagacatagttttaccagatttattggtaagtaaattaaaactctaaacaaattaaaacaggccgggtgcggtggctcatgcctgtaatcccagcactttgggaggccaaggcgggcagatcacaaggtcaggagatcgagaccatcctggctaacayggtgaaatcccatctctactaaaaatacaaaaaattagccgggtgtgggggcgggtgcctgtagtcccagctactcaggaagctgaggcaggagaatggcatggacccgggaggcagagcttgtagtgagccgagattgtgccactgcacttcagcctgggcgacagagcaagactctgcctcaaaaaaaaaaaattaaaacaaacatatattcatatatgttatatataagtgcatgggtatacatatgtacataaatcacaaagttccaataaattattcaaataaaatataagatttgagataaatttgccttttgtggaatctccctgcaatactcagacccctgggaaacaggcgttcaatcttctccgccattagggatataaaagtggaaaagcttgaaaagtagtactggattcctattgagcaaaagaaaaagaaaaaagcggtggctcacgcctatatcccagcactttgggaggccaagg

SEQ ID NO: 932751 - DNA, 668 bp, Homo sapiens
cagagcaccaagacaaaaacagacatagttttaccagatttattggtaagtaaattaaaactctaaacaaattaaaacaggccgggtgcggtggctcatgcctgtaatcccagcactttgggaggccaaggcgggcagatcacaaggtcaggagatcgagaccatcctggctaacacggtgaaatcccatctctactaaaaatacaaaaaattagccgggtgtgggggcgggtgcctgtagtcccagctactcaggaagctgaggcaggagaatggcatggacccgggaggcagagcttgtagtgagccgagattgtgccactgcacttcagcctgggcgacagagcaagactctgcctcaaaaaaaaaaaattaaaacaaacatatattcatatatgttatatataagtgcatgggtatacatatgtacataaatcrcaaagttccaataaattattcaaataaaatataagatttgagataaatttgccttttgtggaatctccctgcaatactcagacccctgggaaacaggcgttcaatcttctccgccattagggatataaaagtggaaaagcttgaaaagtagtactggattcctattgagcaaaagaaaaagaaaaaagcggtggctcacgcctatatcccagcactttgggaggccaagg

SEQ ID NO: 932752 - DNA, 720 bp, Homo sapiens
tttgggctgagactatggggttttctagatagaaaatcatgtcatttgcaaacggagatagtttgacttcctctctttctttttggatgccctttatttctttctcttgcctgattgctctggctaggactttcaatactatgttgaatagaagtgatgagagagggcatccttgtcttgtgctggttttcaaggagaatgatgctagtttttgcctattcagtgtactgttggctgtgacctttacagaactcttcacccaaaaacaacacagtatacattctcctcatcaccacatggcatgtactctaaaattaaccacataattggacataaaacaatcctcaacaagtgtaaaaagaaccaaaatcatatcaaacacactctaggaccacagcacaataaaaataawagttgagactatgaaaattgctcaaaaccaaataattacatggaaattaaacaatacaatatgtcctgagtgacttttgggtaaataatgaaattaaggcagaaatcaggaagttctttgaaaataatgagaacaaaaatacaatataaaatacaatatactagcatgcacaaccggttcccccaaacatggagtcctgcagcccagttcttacctgaatcaggatggagggtgtggtgggtccaagtggagctgttggccatgtgcctacttgctgcgtacctgcagatcccactccctcaggtctc

SEQ ID NO: 932753 - DNA, 595 bp, Homo sapiens
atcaatgtatgttttctctttctttctgctatgtgcaaccccaaaccataatattatatataaaactgacataataaaaatctgaaaaatggaaggaagaaggaaaacccaaccagaaacctcaggacctaagaaatgaccctgtggtaggttccctaggtttactttgtttcatacatcccatacttggtgccaaagaagccagcaactcagaaaccacaayagacccagacagcctcccccagcagcctactgtctatatccagagaactgggatagtctagcaaaagattttaggtaataactgctctacaccaaacaatcaccacaagaagaactgtgggtctgtccaccattaatgtcagcaaagatggagcaggggacctgagcttccacccttgccaagctgtaatgaagcacctcgatgccatcctggggtggtcagcaaaggctgagtagaaagctgggactcattctagtccatgtatcagtgaagactatctggggatcatggatttttatccctaccagcagtaaaaaggtgcctcagctttctgtgggagagtgtcagaggaggccaagtagagtcagcttt

SEQ ID NO: 932754 - DNA, 673 bp, Homo sapiens
atgcacaagcctcagtagccgatgtgatcaactggaagaaagggtgtcagtgatggaagatcaaatgaatgaagtgaagccagaagagaagtttagagaaaaaagaataaaaataaatgaataaagcctgcaagaaatatgtgactatgtgaaaagaccaaatctacgtctgattggtgtacctgaaattgatggggagaatggaaccaagttggaaaacactctgcaggatattatccaggagaacttccccaatctagcaaggcaggccaacattcaaattcgggaaatacagagaatgccacaaagatactcctcgagaagagcaactccaagacacataattgtcagactgaccaaagytgaaatgaaggaaaaaatgttaagggcagccagagagaaaggtcgggttgcctacaaagggaagcctatcagattaaccactgatctcttggcagaaattctacaagccaaaagagagtggggacaaatattcaacatttttaaacaaaagaattttcaacccagaatttcatatccagccaaactaagcttcataagtgaaggagaaataaaatactttacagaaaagcaaatgctgagagattttgtcaccaccaggcttgccctaaaagagctcctgaaggaagcactaaacatggaatggaacaac

SEQ ID NO: 932755 - DNA, 673 bp, Homo sapiens
atgcacaagcctcagtagccgatgtgatcaactggaagaaagggtgtcagtgatggaagatcaaatgaatgaagtgaagccagaagagaagtttagagaaaaaagaataaaaataaatgaataaagcctgcaagaaatatgtgactatgtgaaaagaccaaatctacgtctgattggtgtacctgaaattgatggggagaatggaaccaagttggaaaacactctgcaggatattatccaggagaacttccccaatctagcaaggcaggccaacattcaaattcgggaaatacagagaatgccacaaagatactcctcgagaagagcaactccaagacacataattgtcagactgaccaaagttgaaatgaaggaaaaaatgttaagggcagccagagagaaaggtcgggttgcctacaaagggaagcctatcagattaaccactgatctcttggcagaaattctacaagccaaaagagagtggggacaaatattcaacattyttaaacaaaagaattttcaacccagaatttcatatccagccaaactaagcttcataagtgaaggagaaataaaatactttacagaaaagcaaatgctgagagattttgtcaccaccaggcttgccctaaaagagctcctgaaggaagcactaaacatggaatggaacaac

SEQ ID NO: 932756 - DNA, 704 bp, Homo sapiens
aaaaatcataagaaactgcaatgggattcaccgatagggaactgtcaaagactccaaagaacatctctatctgtgtatgacactgcaagatgtttgttggattgtatggaccaagtgtcagggtagctttcccagcagtctggacattttgcagagccttcttttgttctgggctctactttaaaactcaaataaggaatatgttgctgaccaaaaaaaaaaaaaaatccaaaaaaggccaactaggtgttgtgctctttttcggttgtagaagaggccaaatgtgacaactatccttaactttagaaggaacgtctcaacacrtttcacacctctgtacccttaaaaatatgtctataatacttgatatttcttgcttgctagttctaaccagaataatattatcaatataatgccttgataatattatttcttctttgcttattgtttcagaggcatgaaacccaaagttactggatggcagtgtaaactttgttttgtgatgttttgtggaaggcagaagtgattgtgtccctatggactaaattatgacatagggttggagaatttatattgctggcattaaaagctcaaaacaaactgatttctggcagtctttcataacaaggataaaggaaaagcatttgcctgaacaatagctgcatatcaggtaccagaggatgccttaatttgctcagacaatg

SEQ ID NO: 932757 - DNA, 739 bp, Homo sapiens
caagaacttcaaaacacctaagccacagcagtcaggcattccttcaggacttcctcccccaggatcttgcttcaagtgccagaaatctggccactgggccaaggaatgcccgcagcccgggagtcctcctaagccgtgtcccatctgtgcaggaccccactggaaattgaactgtccaactggcccaaggctctgactgacttcttcccagatcttctcagcttagcggctgaagactgacactgcstgatcacctcggaagcctcctggaccatcacagatgcttctggtaactcttactgcggaggataagtccaaccccttcttaatcaatatggaggctacccactccacattaccttcaagggcttgtttctcttgcctccataactgttgtgggtattgacggccagtcttctaaacctcttaaaattccccaaatctggtgccaacttggacaatattcttttatgcactcctttttagttatccccacctgcccagtccccttattaggctgagatattttaacaaaattatctgttttcctgactattcctaggctacagccatacctcattgctgcccttttccccagttcaaagcctccttcacatcctccccttgtatctccccaccttaacccacaagtatgggacacctctactccctccttgatgacgaatcatgcaccccttaccatcccattaaaacctaatcacccttaccctgctcaatg

SEQ ID NO: 932758 - DNA, 739 bp, Homo sapiens
caagaacttcaaaacacctaagccacagcagtcaggcattccttcaggacttcctcccccaggatcttgcttcaagtgccagaaatctggccactgggccaaggaatgcccgcagcccgggagtcctcctaagccgtgtcccatctgtgcaggaccccactggaaattgaactgtccaactggcccaaggctctgactgacttcttcccagatcttctcagcttagcggctgaagactgacactgcgtgatcacctcggaagcctcctggaccatcacagatgcttckggtaactcttactgcggaggataagtccaaccccttcttaatcaatatggaggctacccactccacattaccttcaagggcttgtttctcttgcctccataactgttgtgggtattgacggccagtcttctaaacctcttaaaattccccaaatctggtgccaacttggacaatattcttttatgcactcctttttagttatccccacctgcccagtccccttattaggctgagatattttaacaaaattatctgttttcctgactattcctaggctacagccatacctcattgctgcccttttccccagttcaaagcctccttcacatcctccccttgtatctccccaccttaacccacaagtatgggacacctctactccctccttgatgacgaatcatgcaccccttaccatcccattaaaacctaatcacccttaccctgctcaatg

SEQ ID NO: 932759 - DNA, 694 bp, Homo sapiens
cccattgtctgtccagctatggctgagctcagagcttttgtgggcctcaggggaggaagtgtgtgccaattggtccatgggtggccatgggcaggactggaaaaggcactgcaagttcccactctggtctgtgggactgccagcctagcccccagccttcagtgcctccctggcctgaaggtacagcctcaccagggtcccgcccccttccaccagggtgcccgtctgccccctgctgccgaccatggcacccaggctgctcaggctgctcacgccaagggtcacctgcaagccagtgctgagttcctctcagcaccccctcatgttccccacaatgcttgttggtgttcaaagtccagagggggccaaggcagcagggggctggcgtgtcagtgctgcycccgaacatgtacacaccatgccaggctatgacagtgcctgtgcttagccccaaccctgctccgagatgggagtgggcaccaggagtggggagaggccaggtaatgggagcagacacccctgaggctgcgggggcagtggaggccttcctgggcccctgagggtgcagagtgcagagacacccaagtcctgcgcttgggagggtggggctcccgtctgctccatggagcatgctggcagccctggccacatctttcagcctggggtgggggcttgaggtcctcactgggcccct

SEQ ID NO: 932760 - DNA, 597 bp, Homo sapiens
ccaggcttaactaccatgcctggctaatttttgtattttttagcagagatggagtttcaccatgttgcccaggttggtctcgaactccagacccgtgatccacccacctcggccttccaaagtattgggattataggcgtgagccaccacaccgtctccatagtggttatactaattcacattcacaacaacagtatatgaaggtttccttttctccacatcctttccagcatttgttattgcctgtgttttggataaaagacattttaactrgagttaagtgctatgtcattgtagttttgatttacatttctctaatgatcgattatgttgagcaccttttcatatacctgtttgccatttgtatgtgttcttttgagtaatagttattcaattcttttgctcatttttaaattggattattagttttttcctgtaaagtattttgtctccttatatatttgggttattaattcccagatggatagtatgcaaatattttctactactctgtgggttgtctcttcactttgttgattatttcctttgctgtgcataaactttttaacttgttgtgatcctatttgtccatttttg

SEQ ID NO: 932761 - DNA, 597 bp, Homo sapiens
ccaggcttaactaccatgcctggctaatttttgtattttttagcagagatggagtttcaccatgttgcccaggttggtctcgaactccagacccgtgatccacccacctcggccttccaaagtattgggattataggcgtgagccaccacaccgtctccatagtggttatactaattcacattcacaacaacagtatatgaaggtttccttttctccacatcctttccagcatttgttattgcctgtgttttggataaaagacattttaactggagttaagtgctatgtcattgtagttttgatttacatttctctaatgatcgattatgttgagcaccttttcatatacctgtttgccatttgtatgtgttcttttgagtaatagttattcaattcttttgctcatttttaaattggattattagttttttcctrtaaagtattttgtctccttatatatttgggttattaattcccagatggatagtatgcaaatattttctactactctgtgggttgtctcttcactttgttgattatttcctttgctgtgcataaactttttaacttgttgtgatcctatttgtccatttttg

SEQ ID NO: 932762 - DNA, 611 bp, Homo sapiens
ccctgccacacacagggtggggttgcaggttccttcccctcatgacactcccccataatggggcctcctctcccctcacaacacctgcattcaggtaggtttcttctcctagccccgggggtctcccgccttccaggtctcagctctcctcctcactgaccgtgcagcactccacagtcttcatcctctcccctcctgctcacacctttcatggctcccstgcccacagactaaggccttgactcctctccttgccatttagggctttctgaagtcagcccccaccctccttggcaggcttctgtcctgaggagggacccaaggtaggttccttgtgtgtccccttggcactgtctcccaatttcttcctcaaggctttcttgggccaccccagcagggagcttctctccctctttcctctatacaaatagaaatcctctactgacatttggcttttcattaatccattcattccctgagcatttattgagactgactgtgtgctaggccctgtgccagtgatggagatgaagcagacatgagccaaccttcaataacttgtaactgggtcaaagaggcagatggttggttacaaagggcctccaatccat

SEQ ID NO: 932763 - DNA, 611 bp, Homo sapiens
ccctgccacacacagggtggggttgcaggttccttcccctcatgacactcccccataatggggcctcctctcccctcacaacacctgcattcaggtaggtttcttctcctagccccgggggtctcccgccttccaggtctcagctctcctcctcactgaccgtgcagcactccacagtcttcatcctctcccctcctgctcacacctttcatggctcccgtgcccacagactaaggccttgactcctctccttgccatttagggctttctgaagtcagcccccaccctccttggcaggcttctgtcctgagragggacccaaggtaggttccttgtgtgtccccttggcactgtctcccaatttcttcctcaaggctttcttgggccaccccagcagggagcttctctccctctttcctctatacaaatagaaatcctctactgacatttggcttttcattaatccattcattccctgagcatttattgagactgactgtgtgctaggccctgtgccagtgatggagatgaagcagacatgagccaaccttcaataacttgtaactgggtcaaagaggcagatggttggttacaaagggcctccaatccat

SEQ ID NO: 932764 - DNA, 626 bp, Homo sapiens
atgaagttcttgttctgtgcttttcagctccatcaggttgtttatgttcctctctaaactggatattctagttagcaattcctctaacatttcttcaaggttcttagcttctttgcattgggttagaaaatgctcctttagctcactgtagttttttattacccatcttctgaagcctacttctgtcaattcatccatctgatcctctgtccagttctgcgcccttgatggagagatgttgtgatcatttggaggacaagaggcactctggccttttgggttttcatcattttttcattgattctttctcatcttcgtgagtttgtttagtttyggtctttgagtatgatgacccttggatggggtttttgtgggggctttttcattgttgttgttgtttatgctgttgttgctttcctcttgattttctttcaataatttggtccctcttctgtagggctgctgcagtttgctgggggttcacttcaggccctattcatctgattcgctcctgtgcctggagatgttattcaaggaggctggagagcagcaaagctgggcgcctgctcctttttctgggacccctgacctcaaggggcaccaacctgttgccagcaggattgttt

SEQ ID NO: 932765 - DNA, 626 bp, Homo sapiens
atgaagttcttgttctgtgcttttcagctccatcaggttgtttatgttcctctctaaactggatattctagttagcaattcctctaacatttcttcaaggttcttagcttctttgcattgggttagaaaatgctcctttagctcactgtagttttttattacccatcttctgaagcctacttctgtcaattcatccatctgatcctctgtccagttctgcgcccttgatggagagatgttgtgatcatttggaggacaagaggcactctggccttttgggttttcatcattttttcattgattctttctcatcttcgtgagtttgtttagtttcggtctttgagtatgatgacccttggatggggtttttgtggggrctttttcattgttgttgttgtttatgctgttgttgctttcctcttgattttctttcaataatttggtccctcttctgtagggctgctgcagtttgctgggggttcacttcaggccctattcatctgattcgctcctgtgcctggagatgttattcaaggaggctggagagcagcaaagctgggcgcctgctcctttttctgggacccctgacctcaaggggcaccaacctgttgccagcaggattgttt

SEQ ID NO: 932766 - DNA, 626 bp, Homo sapiens
atgaagttcttgttctgtgcttttcagctccatcaggttgtttatgttcctctctaaactggatattctagttagcaattcctctaacatttcttcaaggttcttagcttctttgcattgggttagaaaatgctcctttagctcactgtagttttttattacccatcttctgaagcctacttctgtcaattcatccatctgatcctctgtccagttctgcgcccttgatggagagatgttgtgatcatttggaggacaagaggcactctggccttttgggttttcatcattttttcattgattctttctcatcttcgtgagtttgtttagtttcggtctttgagtatgatgacccttggatggggtttttgtgggggctttttcattgttgttgttgtttrtgctgttgttgctttcctcttgattttctttcaataatttggtccctcttctgtagggctgctgcagtttgctgggggttcacttcaggccctattcatctgattcgctcctgtgcctggagatgttattcaaggaggctggagagcagcaaagctgggcgcctgctcctttttctgggacccctgacctcaaggggcaccaacctgttgccagcaggattgttt

SEQ ID NO: 932767 - DNA, 626 bp, Homo sapiens
atgaagttcttgttctgtgcttttcagctccatcaggttgtttatgttcctctctaaactggatattctagttagcaattcctctaacatttcttcaaggttcttagcttctttgcattgggttagaaaatgctcctttagctcactgtagttttttattacccatcttctgaagcctacttctgtcaattcatccatctgatcctctgtccagttctgcgcccttgatggagagatgttgtgatcatttggaggacaagaggcactctggccttttgggttttcatcattttttcattgattctttctcatcttcgtgagtttgtttagtttcggtctttgagtatgatgacccttggatggggtttttgtgggggctttttcattgttgttgttgtttatgctgttgttgctttcctcttgwttttctttcaataatttggtccctcttctgtagggctgctgcagtttgctgggggttcacttcaggccctattcatctgattcgctcctgtgcctggagatgttattcaaggaggctggagagcagcaaagctgggcgcctgctcctttttctgggacccctgacctcaaggggcaccaacctgttgccagcaggattgttt

SEQ ID NO: 932768 - DNA, 623 bp, Homo sapiens
gacccttggatggggtttttgtgggggctttttcattgttgttgttgtttatgctgttgttgctttcctcttgattttctttcaataatttggtccctcttctgtagggctgctgcagtttgctgggggttcacttcaggccctattcatctgattcgctcctgtgcctggagatgttattcaaggaggctggagagcagcaaagctgggcgcctgctcctttttctgggacccctgacctcaaggggcaccaaccygttgccagcaggattgtttctttatacggtgtctgacaacccctgtcagagggtctcacccagttgggtggcatggggagcaagacccgtttaatgaagcactttgtcccttggtagagagggtgtgtttcactgggcgtgggggggaacccactggtctaggctgcctggattcctcagaactaccaggaggagaggctaagtctgctggtctgcagagactatggccacccttccccataggggctcagacccagggagatctgaattctctccctgagcctctggctagagttattggagatcctgcagggaagccctgcccactgaggaaggatgggttggggttaagcctgaagaggcact

SEQ ID NO: 932769 - DNA, 743 bp, Homo sapiens
cagcaatataccttcactgtcctacctcaggggtatagaaactctctggctttgtgtcataatcttattcggagagagaccttgattgctttttgcttctgcaagatatcacactggtccattacatgatgacattatgttgattggatccagtgagcaagaagtagcaaacacacgggacttattggtgaggcatttgcatgccagaggatgggaaataaatccaactaaaatcagggatcttctacctcagtaaaattgctaggggtccagtggtgtgggacctgtcgagatattccttttaaggtaaaggataagttgctgtatttggcccctcctacaacaaaaaagaggcacaacgcctagcgggcctatttggattttggaggcaacacattcctcatttgggtgtgttactccagtgcatttatcaagtgacccgaaaggctgccagttttgagtggggtccagaacaggagaaggctctgcaacaggtccaggctgctgtgcaagctgctctgccacttgggccatatgatccagcagatccaatggtgtttaaggtgtcagtsgccgacagggatgctgtttggagactttggcaggctcccataggtgaatcacagcagaggcttctaggattttggagcaaggccctgccatcttctgcagataactactctccttttaagagacagctcttggcctgttactaagctttggtggaaactgtacatttggct

SEQ ID NO: 932770 - DNA, 573 bp, Homo sapiens
gctgtgcaagctgctctgccacttgggccatatgatccagcagatccaatggtgtttaaggtgtcagtcgccgacagggatgctgtttggagactttggcaggctcccataggtgaatcacagcagaggcttctaggattttggagcaaggccctgccatcttctgcagataactactctccttttaagagacagctcttggcctgttactaagctttggtggaaactgtacatttggctatgggtcatcaatgtgacctgaactgcctaygtgacccgaactgcctatcatgaactgggtgctttctgacccatgtagccataaagtgagtcgtgcacagcagcatttcatcatcaaatggaagtggcatatacgggattgggcttgagcaggtcctgaaggcacaagtaagttacatgaggaagtggctcaaatgcccatgatctccactcctgccatcctgccttctcttccccagcctacaccgatggcctcatggggagctccctatgatcagttgacaggaagagaagaccagggcctggttcacagatggttctgcacaatacgcg

SEQ ID NO: 932771 - DNA, 619 bp, Homo sapiens
attcaaagtgctgaaagagaaaaacaacaacaactggtagccaagaatactatacccagaaaagctatccctcaaaaatgaagggtaaagaaattctttctcagatgagaaaataatgaaataattcatcatcgttataccagccctacaaaaaatgtttaaggtaatcctatatctgaaagtgaaagaaagatatctaccatcatgaaaacacaagaaagtataaaactcactggtagagcagatatacaaataagaaagagaaaggagtcaaatattatcactataaaaaaaccccatcaaattgtaaagtaaacaacagaagaggaagaaagaatatgtaraacaatcagaaaataattaacaatatgacagaaatccccacctattaataaaaaccttgaaagtaaatggcttaaattcatcaattaaaagatataaaacagctgaatgtattaaaaaacaagatgcaagtacaagaaacctatttcatctataaagatacacatagactaaaagagaagggacgaaaaaaaatccatgcaaatgaaaaccaaaagtgtgaaggagtagctatgtttatatcagaaattgacttcaagttaaaaaacataaaaag

SEQ ID NO: 932772 - DNA, 575 bp, Homo sapiens
ccttcctgccttagccttccaagtagctgagactacagtgtgcaccaccatgcctggctaattttttcaattttttgtgtgaagatcaatgtctcactttgttgcccgggctagtttcgaactcctggcttcaagtgatcctcctgccttggcctttaaaagtgctgggattacaggcatgaaccactatgcccaaccctgattaccaactttagacaatatctccttattccatgctaggaaaaggaagtacagccactgttttcagccccayttctcattctcacaattcatcacactggctggctataaacccagaaccttcagcgttttagtaccacccagcagctcccctgctgcatattctaggcaaggatttctagcgcctgtatcatccatcatcatgctcccatctcttttgtgtctctctgaaatttgttgaaatttcctatatttaataacttcttctccttttttcttaaatatggttttgtttgcttatttgcttattgttttgtacttcactctacttatttcgtaagaagcaatgatgaaagaaaggcaaatgcatttat

SEQ ID NO: 932773 - DNA, 628 bp, Homo sapiens
acaagtatacacgtacaattaaatagatattcatcttaaaatgtatttaatttaatttttttatttttttttaaagagatgaggtctatgttgcccaagttggtctcaaactcctgagctcaagtgatcctcccacctcagcctcccaaagtgctaggattacaggcatgaaccaccaagcctggccttaaaatgtattttagcaagtacatactgtgtgtcaggcatcattacaggtgttggaccacagcagagaacaacagaaaagttyaaagaaccctgacaggtttatagtatttacccattgatagggcttatagtatttacccattgttgcaggttaggctctccaaggaaatgggctctgagattggggtttagtgcacaggatgtttctctttttaaaatttcttttaaaattattattaatttttttttggtagagacaaggcctcactatgttgcccaggttggtcttgaacttctgggcttaagctatcctcctgccttggccttccaaagtgctgggattataagcatgagccaccacaccgggcctgcagaatgtttcttaggcagtgctcttgggaatatctttggagaggaggggaaagccagattgggcaga

SEQ ID NO: 932774 - DNA, 628 bp, Homo sapiens
acaagtatacacgtacaattaaatagatattcatcttaaaatgtatttaatttaatttttttatttttttttaaagagatgaggtctatgttgcccaagttggtctcaaactcctgagctcaagtgatcctcccacctcagcctcccaaagtgctaggattacaggcatgaaccaccaagcctggccttaaaatgtattttagcaagtacatactgtgtgtcaggcatcattacaggtgttggaccacagcagagaacaacagaaaagtttaaagaaccctgacaggtttatagtatttacccattgatagggcttatagtatttacccattgttgcaggttaggctctccaaggaaatgggctctgagattgrggtttagtgcacaggatgtttctctttttaaaatttcttttaaaattattattaatttttttttggtagagacaaggcctcactatgttgcccaggttggtcttgaacttctgggcttaagctatcctcctgccttggccttccaaagtgctgggattataagcatgagccaccacaccgggcctgcagaatgtttcttaggcagtgctcttgggaatatctttggagaggaggggaaagccagattgggcaga

SEQ ID NO: 932775 - DNA, 625 bp, Homo sapiens
aagttgttaatgttccttcaaaatgtgaaattctagagcttaatatctataaatagagctttcattgttatgcctcaaaattcaacagctttctcagttgacagacatttgtctcatattccttaagttaccttttcctactcaggaataaccttttcttacttttcaaagaataaaagacatacagatttggcaacaagtaggttattagtaacattcaagcaaataatagcrcaactttttaatgatagtagatttaattataaagccttataaaggaaattgataatatattccaaatgagacatcttattcgaatgctctgtggatcattaaaacacatttattactgttggtcaaggaatgcaaccctattccacttcatattaaggtgagaattatgaattaattccttagtattcataatgtttaaatagattaagatcaatttccttaaactccagtgtctctaaatacctttctaatttactgtttccattgtcatccgttgtatagcatggtgtcttttacctggtcaacatatcacctcctcttgctggctagtctatgtatgttccagtttgactgttcagctatagtctgagtaagaactggatatgtcctt

SEQ ID NO: 932776 - DNA, 625 bp, Homo sapiens
aagttgttaatgttccttcaaaatgtgaaattctagagcttaatatctataaatagagctttcattgttatgcctcaaaattcaacagctttctcagttgacagacatttgtctcatattccttaagttaccttttcctactcaggaataaccttttcttacttttcaaagaataaaagacatacagatttggcaacaagtaggttattagtaacattcaagcaaataatagcgcaactttttaatgatagtagatttaattataaagccttataaaggaaattgataatatattccaaatgagacatcttattcgaatgctctgtggatcattaaaacacatttattactgttggtcaaggaaygcaaccctattccacttcatattaaggtgagaattatgaattaattccttagtattcataatgtttaaatagattaagatcaatttccttaaactccagtgtctctaaatacctttctaatttactgtttccattgtcatccgttgtatagcatggtgtcttttacctggtcaacatatcacctcctcttgctggctagtctatgtatgttccagtttgactgttcagctatagtctgagtaagaactggatatgtcctt

SEQ ID NO: 932777 - DNA, 625 bp, Homo sapiens
aagttgttaatgttccttcaaaatgtgaaattctagagcttaatatctataaatagagctttcattgttatgcctcaaaattcaacagctttctcagttgacagacatttgtctcatattccttaagttaccttttcctactcaggaataaccttttcttacttttcaaagaataaaagacatacagatttggcaacaagtaggttattagtaacattcaagcaaataatagcgcaactttttaatgatagtagatttaattataaagccttataaaggaaattgataatatattccaaatgagacatcttattcgaatgctctgtggatcattaaaacacatttattactgttggtcaaggaatgcaaccctattccacttcatattaaggtgagarttatgaattaattccttagtattcataatgtttaaatagattaagatcaatttccttaaactccagtgtctctaaatacctttctaatttactgtttccattgtcatccgttgtatagcatggtgtcttttacctggtcaacatatcacctcctcttgctggctagtctatgtatgttccagtttgactgttcagctatagtctgagtaagaactggatatgtcctt

SEQ ID NO: 932778 - DNA, 669 bp, Homo sapiens
caatcagcacactgtaaaatggaccaataagtgctctgtaaaatggatcaatcagcactctgtaaagtggaccaatcagcactctgtaaaatggaccaatcagcaggttgtgtgtgggaacaaataagggaataaaagctggccaccccaaatgaagatggaaaccatcattctgagcaaactaccacaaggacagaaaaccaaacactgcgtgttctcactcataggtgggaattgaacaatgagaacacttggacacagggtggggaacatcacacaccgggrcctgtcatggggtcgggggaggggggagggatagcattaggagaaatacctaatgtaaatgatgagttaatgggtgcagcacaccaacatggcacatgtaaatatatgtaacaaacctgcacattgtgcacatgtaccctagaacttaaagtatatataaaaaaaaaaaagctggccaccccagccagcagcggcaacccactcgggtccccttccacgctgtggaagctttcttcgttcgctcttcacagtaaatcttgctgctgctcactctttgggtccgtgccacctttaagagctgtaacactcacctcaaagtccgcagcttcattcttgaaatcagcgagaccaagaacccactggaaggaaccaactccagacaca

SEQ ID NO: 932779 - DNA, 669 bp, Homo sapiens
caatcagcacactgtaaaatggaccaataagtgctctgtaaaatggatcaatcagcactctgtaaagtggaccaatcagcactctgtaaaatggaccaatcagcaggttgtgtgtgggaacaaataagggaataaaagctggccaccccaaatgaagatggaaaccatcattctgagcaaactaccacaaggacagaaaaccaaacactgcgtgttctcactcataggtgggaattgaacaatgagaacacttggacacagggtggggaacatcacacaccgggacctgtcatggggtcgggggagsggggagggatagcattaggagaaatacctaatgtaaatgatgagttaatgggtgcagcacaccaacatggcacatgtaaatatatgtaacaaacctgcacattgtgcacatgtaccctagaacttaaagtatatataaaaaaaaaaaagctggccaccccagccagcagcggcaacccactcgggtccccttccacgctgtggaagctttcttcgttcgctcttcacagtaaatcttgctgctgctcactctttgggtccgtgccacctttaagagctgtaacactcacctcaaagtccgcagcttcattcttgaaatcagcgagaccaagaacccactggaaggaaccaactccagacaca

SEQ ID NO: 932780 - DNA, 669 bp, Homo sapiens
caatcagcacactgtaaaatggaccaataagtgctctgtaaaatggatcaatcagcactctgtaaagtggaccaatcagcactctgtaaaatggaccaatcagcaggttgtgtgtgggaacaaataagggaataaaagctggccaccccaaatgaagatggaaaccatcattctgagcaaactaccacaaggacagaaaaccaaacactgcgtgttctcactcataggtgggaattgaacaatgagaacacttggacacagggtggggaacatcacacaccgggacctgtcatggggtcgggggaggggggagggatagcattaggagaaatacctaatgtaaatgatgagttaatgggtgcagcacaccaacatggcacatgtaaatatatgtaacaaacctgcacattgtgcacatgtaccctagaacttaaagtatatawaaaaaaaaaaaagctggccaccccagccagcagcggcaacccactcgggtccccttccacgctgtggaagctttcttcgttcgctcttcacagtaaatcttgctgctgctcactctttgggtccgtgccacctttaagagctgtaacactcacctcaaagtccgcagcttcattcttgaaatcagcgagaccaagaacccactggaaggaaccaactccagacaca

SEQ ID NO: 932781 - DNA, 599 bp, Homo sapiens
accagacattcaaagaagaattggtaccaatctcaatgaaacaattccaaaagacagagaaagaggaaatcctccctagatcattctgtgaagccagtatcaccctaataccaaaacaaggaaaacacataaaaaaaaaagaaaagaaaaccatagaccaatatcctgatgaacatagatgcaaaaatcctcaacaaaatactacctagacaaatccaacaccatatcaaaaagataatccaccatgatcaaatgggttttcatatcagggatgcagggagagtttgacatatgtaagtcaataaatgtggtagaccacatgaacagaattaaaaacaaaaatcacwtgattatctcaatagacacagtaaaggcatttgacaaaatccagcatctctttatggttaaaaccctcaaaaaatcagcataaaagggacataacttaaggtaataaaagccatctatgacaaaaccacagccaacattataccaaatagggaaaagtagaaagcattccccctgagaactggaagaagacaaggatgcccactttcacccacttctatttagcctagttctggaagtcctagccagagcaa

SEQ ID NO: 932782 - DNA, 665 bp, Homo sapiens
atgcactcagggtggtgctgacatgccagcccccccacttcctcagtcccctcctaactacaggcactgatgactgtgggagagaggccaggagtgatgctgagggcagctcagcatgggcctgcaggcatcccttggcatraacagcttggacaccatggacaacatgttgatggcaggaggcagacgggttcctgggcagaaaggggtgggtccctggtctcttcaagccagggatggcctgaagcctggaggctgagctgtcagttccaggtagagtccacagcccagaatgagaacttatgatgctttctctgggcctgcccatggccacccattgaccaatcagcatgcacttcctcccttctgagcccataaaaatcctggactcagtcagactcacgcagacattgagactactggctgcaggaaggagctacccattttgggtctccccaacttgttgggatgacctgcctgtggaaaggagctacccattctgggtcccctcttctctgagagctggacactcattggatgacctgcctgtggaaaggagctacccattctgggtctccctccactgagagctggacacttgggactatctgcctgcagaaaggagatacccactatgggtatcctctctgctgagagctgggtgc

SEQ ID NO: 932783 - DNA, 708 bp, Homo sapiens
aaaaatcctggactcagtcagactcacgcagacattgagactactggctgcaggaaggagctacccattttgggtctccccaacttgttgggatgacctgcctgtggaaaggagctacccattctgggtcccctcttctctgagagctggacactcattggatgacctgcctgtggaaaggagctacccattctgggtctccctccactgagagctggacacttgggactatctgcctgcagaaaggagatacccactatgggtatcctctctgctgagagctgggtgcttattgggatgacctgcctgtggaaaggaactacccacttcaggtctcctgagagctgttctgtcattcaatgaggcacctctccaccttgctcaccctccagttgtccgcatacctcattcctcctggacacagggcaagaactcaggacctgccaaatgatgggactgaaagagctgtaacacaaacagggctgaaacacactccctacttgccrtgttgcaggtgatgagaagaagagaagaactgcagcccttcggtgaccccagacctaggaactccctgagccagggctatgactccctctttggggctctgcaattcctggcaactccaagcttctgggtgccaccacattccctggtgcctgcagtggtagccacttgtggtatgcctggtccagccgcagccttgcaggg

SEQ ID NO: 932784 - DNA, 586 bp, Homo sapiens
agcatctctatctgccactgacacctcaagcatcattggatctgctggctcatatggcccaagtggcagagcaacttgcacagcagactggacctgttgcagggccttcttctgttctggactccactcaaaactggcagcctttcgggtcactaaataaatgggctggggtaacacatccaaatgaagaatgtgttgccagcaaaatccaagtaggcccactaggcattgtgcctctttcttggttgtaggagaggccaaatgcagaaacttttccttcactttggaaggaatatcttgacaggccccacatccctgtactcctagaaattttactgaggtagaagttccctgaattttartcatatttatttcccatcctctggcatgcaaatgtctcatcaataagtccagtgagtttgctacttcttgctcactggatccaatcagcataatgtcatcaatgtaatgaaccagtgtgatattttgtggaagtggaaaacaatcaaagtctctccaaataagattatgacacaaagccagagttgatatacctctgaggtaggacagtaaagttatatttttg

SEQ ID NO: 932785 - DNA, 636 bp, Homo sapiens
tagccttgtagtatagtttgaagtcaggtagcgtgatggctccagcttcgttcttttggcttaggattgacttggcaatattttaaaactatcttagctttttgaaatttgatgtgagcttcttgacttttcacagctttccagttgatttttggaaactaaaatatgcatttgttcttcagcttggtttatcaaactttagtttgcttgatacaggtaagactatactttctatttaaaactttcttctttcaaacctagactcacagagaataattttacatagtataaatgcctaatgcatagtaaaaattcaattaaataacaaatatatgatgtaattatagaatwatataagctgcaaagctaaaattattaaatagatgacatccataccacagtaagtgaatattgcttaaattagatgaaatatatagttaagtaaattgtgaagtctctcaaagtttcacatttttaggggtatgcaatactaatttctaacagaaagttattacgtgttattcctatgtcataaattactggtgtgaaattaaataaaagttgttggaactttaaattattctgagcctttagaggaatgtggttatgcagtttgaatcacgcagcatgcagctg

SEQ ID NO: 932786 - DNA, 448 bp, Homo sapiens
gtgagtcaattaaatatattttcgttataaattacccattctcagatagttctttatagcagtgtgaaaacagactaatgcaatcattatcaagtattctgtactgtatgtaattgaatgtgacatcacttttgtacaactggcaatacaataagcttgatttcactaacatcaccacaaaaatgtgagtttttcattgtattgtgatgttacaatgtctacgatgtcactaggctataaggacattttaggtccattgaaatcttatggggccaccatcrtatatgtgttcaatcactaattgaacgtttttatatggcatatgactgtataggtcaaacattatcaaattgtataccttaaatatgtgtagtttattgtatttcaattttatctcaataaaaccactttaaaatatccatactgtaaggactcatcaccccataac

SEQ ID NO: 932787 - DNA, 639 bp, Homo sapiens
ttcaatatgttgcattccctcttaatccactgtctcttggcctagttcaacactaggactcacctaagagctgcagtctttatggcctagactaattttcaagtttgcttggagacacagcgtgctgtagtccttgctggtgaggtttgcaagcactcaagtttagactactgggatttgtgattcccttttggctagggctggtttgaatgctcccttcatgggcaagcctcaactgagtttggtcatgtgtttctatctgctctttcagggtagcactgagttcactgcctcacaattgctgtcttttctctcccccagcacccagagatgctctctacaccaggccactgcmcttatgggtgtgggaagggtattggcagttcaggacttttttttttatctcttcaatttctttattaacgatatgaatttaataccaggtactataagtgcttacctgatttttggtacttatgaaggttgttttttgttttgttttgtttttgtttttttttgttctgtgtggattttgccttggtgtatttctggtgggggggtatgatcattgaagcttttttattcagccatcttgtttaacttctgattccagccggaccttttctgccaccatcaggg

SEQ ID NO: 932788 - DNA, 639 bp, Homo sapiens
ttcaatatgttgcattccctcttaatccactgtctcttggcctagttcaacactaggactcacctaagagctgcagtctttatggcctagactaattttcaagtttgcttggagacacagcgtgctgtagtccttgctggtgaggtttgcaagcactcaagtttagactactgggatttgtgattcccttttggctagggctggtttgaatgctcccttcatgggcaagcctcaactgagtttggtcatgtgtttctatctgctctttcagggtagcactgagttcactgcctcacaattgctgtcttttctctcccccagcacccagagatgctctctacaccaggccactgcccttatgggtgtgggaagggtattggcagttcaggacttttttttttatctcttcaatttctttattaacratatgaatttaataccaggtactataagtgcttacctgatttttggtacttatgaaggttgttttttgttttgttttgtttttgtttttttttgttctgtgtggattttgccttggtgtatttctggtgggggggtatgatcattgaagcttttttattcagccatcttgtttaacttctgattccagccggaccttttctgccaccatcaggg

SEQ ID NO: 932789 - DNA, 488 bp, Homo sapiens
tatcgtgtaatattggctgtgggtttgtcataaatagctcttattattttgaggtatgttccatcaatacctagcttattgagagtttttagcatgaaggggtgtgaattttgtcgaagaccttttctgcatctattgagataatcatgtgttttttgtctttggttctgtttatgtgattgattacatttattgatgtgcgtatgttgaaccaggcttgcatcccaggtatgaagccaacttgatcgtggtggataagcattttgatgtgctgctggattcagtttgccastatgttattgaggatttttgcttcgatattcatcagaaatattggcctgtaattttcttttttttgttgtgtctctgccaggttttggtatcaggatgatactggcctcataaaataagttagggaggattccctctttttctattgtttggaatagtttcagaaggaatggtactagctccactttgtagctctg

SEQ ID NO: 932790 - DNA, 644 bp, Homo sapiens
caaaccaaagcacctcccgtgatggttaattatatacgtcaccttgcctaggccatggtgccacagggtttagacaaatgccagtctttgtgtgtgtgtgtgtgtgtgtgtgtgtgtgtgtgtgtgtgtgtgtcagagagagagagagagagagagagagagagacggagtcttactctgttgccaggttagagtgtagtggcgcgatctccgctcactgcaacctccacctcctgggtttaagcgattctcctgcctcagcctttcgagtagctgggattacaggcacacaccaccatgcccagctaatttttgtgttttagtagagacgaggtttcaccatgttggccaggatggtcttgatctcttgtggtctcgcgatccacctgccgtagcctccaaagtgctgggattacaggtgtgagccaccacrcccggccaggaaggcattttttagatgtgatttgctgtaaaatgtgtagcctttgagtagaggaaatgaccttccacaatgtgggtgggcttcatccaattagttgtaggcctgaagagaaaagagtgaagttccccaagtaggagggagtctcggacctccttcccatgcaagctgcggcaccaggtcttccctgggtctccggcctgct

SEQ ID NO: 932791 - DNA, 571 bp, Homo sapiens
tgctgggaaaactggctatccatatgtagaaagctgaaactggatcccttctttacaccttatacaaaaaataattcaaaatggattaaagacttaaatgttagacccaaaaccataaaaaccctagaagaaaacctaggcaataccattcaggacattggcatgggcaaggacttcatgactaaaacaccaaaagcaatggcaacaaaagccaaaattgacaaatggaatctaactaaactaaagagcttctgcactgcaaaagaaactaccatcaaagcaaacaggcaacctacagaatgggagaaaatttttgcaatctactcatctgamaaagggctaatatccagaatctacaaagaactcaaacaaatttacaagaaaaaaacaaacaaccccatcaaaaagtgggcaaagggtctgaacagacacttctcaaaagaagacatttatgcagccaacacacacatgaagaaatgctcatcatcactggccatcagagaaatgcaaattaaaaccacaatgagataccatctcataccagttagaatggcgatcattaaaaagtcag

SEQ ID NO: 932792 - DNA, 607 bp, Homo sapiens
gattcttagttggcctaggaaatccagctagtcctgtctctcagtgccccctctcaacaggaaaacccaagtgctgttggggaggttggctgacaactgctctaactgcttcctgttgaattggggcatagtaggggtcatgcagttgagatttcctcgggaggggtgccttygatgtcatcaacattggagcatgggctagcaggccagtccaggggtccatggtagatcttagtcatggactacatctggggctccatttgaagaaccatttgtagttttacatcttcagttctggaagagacaaacttaacaaggaggttacagatacaggaattgaaatgtatgacctgcagtgcagggggttctttctgtggcacacttcataggccctgactatctgcttgatagttttgaaaaggcctggtcctgtaaataatgatttggccatctgatgggtgctatcaatgcctaagtgaaaagtttggtgaagggttttaagtaattttcactggttagctgcaggcaggagtatttttccttctttggtggctagccttcctgaggggaggaaactatgtcctcgtgagtttccccatcctatttc

SEQ ID NO: 932793 - DNA, 607 bp, Homo sapiens
gattcttagttggcctaggaaatccagctagtcctgtctctcagtgccccctctcaacaggaaaacccaagtgctgttggggaggttggctgacaactgctctaactgcttcctgttgaattggggcatagtaggggtcatgcagttgagatttcctcgggaggggtgcctttgatgtcatcaacattggagcatgggctagcaggccagtccaggggtccatggtagatcttagtcatggactacatctggggctccatttgaagaaccatttgtagttttacatcttcagttctggaasagacaaacttaacaaggaggttacagatacaggaattgaaatgtatgacctgcagtgcagggggttctttctgtggcacacttcataggccctgactatctgcttgatagttttgaaaaggcctggtcctgtaaataatgatttggccatctgatgggtgctatcaatgcctaagtgaaaagtttggtgaagggttttaagtaattttcactggttagctgcaggcaggagtatttttccttctttggtggctagccttcctgaggggaggaaactatgtcctcgtgagtttccccatcctatttc

SEQ ID NO: 932794 - DNA, 607 bp, Homo sapiens
gattcttagttggcctaggaaatccagctagtcctgtctctcagtgccccctctcaacaggaaaacccaagtgctgttggggaggttggctgacaactgctctaactgcttcctgttgaattggggcatagtaggggtcatgcagttgagatttcctcgggaggggtgcctttgatgtcatcaacattggagcatgggctagcaggccagtccaggggtccatggtagatcttagtcatggactacatctggggctccatttgaagaaccatttgtagttttacatcttcagttctggaagagacaaacttaacaaggaggttacagatacaggaattgaaatgtatgacctgcagtgcagggggttctttctktggcacacttcataggccctgactatctgcttgatagttttgaaaaggcctggtcctgtaaataatgatttggccatctgatgggtgctatcaatgcctaagtgaaaagtttggtgaagggttttaagtaattttcactggttagctgcaggcaggagtatttttccttctttggtggctagccttcctgaggggaggaaactatgtcctcgtgagtttccccatcctatttc

SEQ ID NO: 932795 - DNA, 731 bp, Homo sapiens
tcctccacccagaacccatgtgtaagtgaaggctccagcctagcacaacagtccaggagcaccaggaccccactcactcttgccccagttcacctgtggggcaaaagctccaccctgacagaggcaagccaagctactacaccacccaaggctgcagggatgtcactccaagagaagggagccactgccccagcctccagctctggagcaacggcacagagatcttgggcagacagagagacaggctgcaagagcagagagctccaaagctctccccaagggaagtgaaagcttttggaacacagggtggggaagttcaaaggtgctgtcaaaaatgatgcttttggtgataaacaggtaagatgaggtatttagctccatgacagcaacaagctaaaccattggtggtctagaaaattatcagggagaaccagggacagagatagctaagaagagccctcctgaaatagaaatgagcctcaaagactacctgtgcacaggagcacaattttaackggatcaaactgtggagcaatttatgtccccagggcattgttggaaacaatggagcaatcagcaggcaattagtggaggctaacaacagtgtgtaataccaatggagacaaacagcttaacagacaggtcacggacagggacagtcagaacacctgtcatctcaggaaaactatatgcatgcccatagacaacattggaggcttcacagtagtggg

SEQ ID NO: 932796 - DNA, 577 bp, Homo sapiens
gactattatgaataatgctgctatgaacattcatgtgtaagtttttgtgtggacatatgttttcctttcccttgggaatatgatgaagcctggcattgccaggtcatatgataactctatgtttaagctttggaggaactgccagactatttccaaagcagttccaacttcattgcaaagcattttacattccctccagcaacatatgagtgtttcaatttttccacattttctccaacacttgttattatgtgtctgtttattatagccattcttgtgagtgtgaagtggtatcttaacatggtttggatttgcacttccctgatggctaatgatgtttctatggtttgaatgttggagtcctccaaaattcatgttataacctaagacctaatgtgacgatgttaagaagtgaggccttcaaggtggtgattaggtcatgagggctctgccctcrtgaatgaaattaatgcccttataaaaaggcttcacataacatttcttcttcttttttcctttcttctcctgccatgtgaagatgccactgcgagaacgggaacaatggaacaggccctca

SEQ ID NO: 932797 - DNA, 689 bp, Homo sapiens
ttttgactattatgaataatgctgctatgaacattcatgtgtaagtttttgtgtggacatatgttttcctttcccttgggaatatgatgaagcctggcattgccaggtcatatgataactctatgtttaagctttggaggaactgccagactatttccaaagcagttccaacttcattgcaaagcattttacattccctccagcaacatatgagtgtttcaatttttccacattttctccaacacttgttattatgtgtctgtttattatagccattcttgtgagtgtgaagtggtatcttaacatggtttggatttgcacttccctgatggctaatgatgtttctatggtttgaatgttggagtcctccaaaattcatgttataacctaagacctaatgtgacgatgttaagaagtgaggccttcaaggtggtgattaggtcatgagggctctgccctcatgaatgaaattaatgcccttataaaaaggcttcacataacatttcttcttcttttttcctttcttctcctgccatgtgaagatgccactgcragaacgggaacaatggaacaggccctcaccaaatgccaaatgtgctatcaccttgattttggatttcccagcctccggaactgtgaggaataaatttttttacttataaattacttagtctcaggtattttgttac

SEQ ID NO: 932798 - DNA, 753 bp, Homo sapiens
agtagagaaatgcttctctgaaatgataggtcaaaatacacagaagccggcttaaagaggtcccaccaggcaaacctgagacagtatgtacatcaaaataaatgatattagtggaatatgacccattaaaataaaatagcgtaagtccatactaatacaaataatcagggagtaaagaaagcttcaccttacagtggaacatcaactgatgaatgtgaaagaaaaggtgaaattagaaaatcactacttgccatcaatcctagtcataaattaggtcaagaaacatcaatgaatactaaaattagtgaggaaaaggtgcaaggaacaagatgtttatatgagaagtacttcccccacaaaatccatactgactataaagagaaaaaagattaacctcacagtggagaaacctgatagacacaccttaaccaagtggtcaaggaaaaactgaaatcatgtaccacctgataggatgcaaacaaaaaacacagaatcacatatgtgatactcctgctaaaaacataactgcatttaatcatgatgaaacatcaggcaaatmcaaataggaggtcattctacaaaataactgacctgtaatattcagaagtatcaaagttatgaaactcagggaaagactgagttactatttgagatttaaaaagaccaaagaggactgggcgtggtggctcagacctgtaatgccaacagtttgggaggctgaggcaggcagatcacttgaggccaggagttcga

SEQ ID NO: 932799 - DNA, 732 bp, Homo sapiens
gtccccaacagataagatggtaatcactcatctatttgctattctatggatttgcctttggacatttcatatctgcatatggacatttcatataaatggaaccatgcaatatgtggtctctttggtggacttactttaacttagcataatgtctccaagctcttccatgttatagaatgtattactacttaatttctttttatggcccaatatcccattgaatccattgcatagagatactacagttatccatttatcagttgatgaatggttctacttacttttttctttttgaggcagggtctcattctgtcaccaaggttggagtgcagtgctccaatcacagctcactgcggcctctacttcctgggctcaggtgatcctcccacgtcagcctyccaagcagtggggactacaagcacacgacaccatgcccagctaattttttgtatttttagtagagatggggtcgcatcatgttgcttaggctggtctccaattcctgggctcaagcaatccacctgcctaggcctctcagtgaagggattacaggtgtgagccaccacacctgactggttctatttactttcgtattttgtcccttaatatctttctccctccctcttgcccttccttctttccttcctctcttctctagtcctccttccttccctctctcattctttctttcctctttcaaatacttgttattccacacctaccatgttatgg

SEQ ID NO: 932800 - DNA, 732 bp, Homo sapiens
gtccccaacagataagatggtaatcactcatctatttgctattctatggatttgcctttggacatttcatatctgcatatggacatttcatataaatggaaccatgcaatatgtggtctctttggtggacttactttaacttagcataatgtctccaagctcttccatgttatagaatgtattactacttaatttctttttatggcccaatatcccattgaatccattgcatagagatactacagttatccatttatcagttgatgaatggttctacttacttttttctttttgaggcagggtctcattctgtcaccaaggttggagtgcagtgctccaatcacagctcactgcggcctctacttcctgggctcaggtgatcctcccacgtcagcctcccaagyagtggggactacaagcacacgacaccatgcccagctaattttttgtatttttagtagagatggggtcgcatcatgttgcttaggctggtctccaattcctgggctcaagcaatccacctgcctaggcctctcagtgaagggattacaggtgtgagccaccacacctgactggttctatttactttcgtattttgtcccttaatatctttctccctccctcttgcccttccttctttccttcctctcttctctagtcctccttccttccctctctcattctttctttcctctttcaaatacttgttattccacacctaccatgttatgg

SEQ ID NO: 932801 - DNA, 551 bp, Homo sapiens
ggtcgtgaactcttgacctcaggtgatccacccacctcggcctcccaaagtgctgggattacaggcgtgagccaccacacccggccagatgttggtgatttgtattctggtttttctttgtttttatttttatttttttgaccagtccaaatagaatcattcagttgtgttgacctttttaaagaagttttgggcttcgttaattttttatgccatctccctgttttctattgtgttaaacttctgctctttattatttccttcctactacttactatgtgttatattttcctcttcttttctaacttataaaggtggaaccttaggtcttttrttttagatattcttttctaatgaaaatatatatgctgcaagttcctctctattgcttttattgaatcccacaagttgtgtttttttgtttttgtttttgccattgttgttgttttgagacagggtctcaatttgtcacccaggctggagggcaggggtgtgatctcggctcactgaagcctcgacctcctgggtccaagcgatcctcctacctcagc

SEQ ID NO: 932802 - DNA, 653 bp, Homo sapiens
aaatgatgatgtgtaacaggcagtcacagaaaaggtcacatacttcctcctttatgtgtaaaaactatgttgtaactgctctgagtggggattcttaccaccttgggctgagttctcctggtttgtgaattgttcctttgtatgcacaataaacttttaccatttttctaacttcatgtagttttatatttgacattatggatatatcctacataaacagaagtctttgaggtccacaataatatttttaaatatacttttttagtgcaattttaggttcacagcaaaattgagtggaagatacagaaatattccatatattccctgtcctcagacatgcatagcctccccattaccaacatctgccatcagagtgatacatttgttcaactgatgaacctacatggacacatcattatcacccaaagtcagtttacattggrgttcaccgttggtgttgtacattctatgggtttataattacatctattcaccattacagtatcatccagaacagtttcattgtcctaaaaatcctttgtgctctgtctcgtcatccctctctcctccctaatccctggcaacctctgatctttttactgtcaccataattttgtcttttccagaatgtcatatagttgaaatcatacagt

SEQ ID NO: 932803 - DNA, 661 bp, Homo sapiens
gagatatatggttatgtgaaaatccaagtgaaaaaaacagcagtgtacctcatctttatgtaagtggaaagaaaacttatttatatttcattgtacatacaaataaaaaaatagtttccattatatcattccagaggtaagtgactacttcccatcccaggggggaaaatgggaggctgagraagatacattttcagtttatatagtttttgtatcacttaaaatttgcaacatgtgatatattaactatttttaaagtcagtgaattattttaagctcacttacaatttgtatcttcaaagaagtatttatgattactttaatattttataaagctaagggcaggtagactacaaatggattagtttgagaatcagtctcattcctttataagcatgcattttaacattccaaaaagaaaacgtctcttcccatcaccaagatatcctacattcaaaattcttaacagaattatatttttactttataaagcaagaattaattacttattagttagataaactataaacaatacagggcacaatggcagatataagaaaaaactgtaacttctgcatgataaccattaacatcgatagattatttttaaaaagtctgaaatttcatatgaactcttcagcaatgtaagaattatgtataa

SEQ ID NO: 932804 - DNA, 599 bp, Homo sapiens
  misc_feature 1, 2, 3, 4, 5, 6, 7, 8, 9, 10, 11, 12, 13, 14, 15, 16, 17,18, 19, 20, 21, 22, 23, 24, 25, 26, 27, 28, 29: n = A,T,C or G
nnnnnnnnnnnnnnnnnnnnnnnnnnnnnacaaaaaccacggtcttgctaaatttgctaagaataggagctattacacaaattatcacattcctcctaactttgatttataactcagatcactgcaactctggacagagtactgaccttacaaatactcttttctgacaagcaactgcagaccttaagctagtttcagcagcttatagaaagtgcacacaaactgtccctgtgtcttgtagttcaccttttgatgtaaagaaccaaattccatctcgtttgtttgtctgtttttgagatggagccttgctctgtcacccaggctggagtgcagtatcaggatcttggctcactgcaacctctgcctcttgggttcaagtgattctcctgcctcagcctcccgagtagctgggmttacaggcacccgccaccatgcccagcaattcttttgtatttttagtagagacagggtttcaccacattggtcacgctggcctcaaactcctgacctcaagtgatccacccgctttggcctcctaaagtgctgggattacaggtgtgagcaactgcacctggtcccacctctttttgatgctaaaa

SEQ ID NO: 932805 - DNA, 479 bp, Homo sapiens
accagctgttctgaggggcccagcagaaagctgattcatggaagaatgcagtttccacatcctgattattattattattattattattattattttgagacagtgtctcactctgttgcccaggctggagtgcaacggcgcaatctcggctcactgcaacctcctgctcctgggttcaagtgattctcctgcctcagcctcctgagtaactggatctataggcatgcgccaccatgcccagctaacttttgtatttttagtagagayggggtttcaccatgtagtccaggcaggtcttgaactcctgacctcaggtgatctgcctgcctcagcctcccaaagtgctgggactataggcgtaagccactgcactgggtcaacacattctgattatttcgttcactttactccaaccaatcaatgaccccagttttctagcccttcaccctccatgatccccttaaaaacctttgcccaga

SEQ ID NO: 932806 - DNA, 633 bp, Homo sapiens
aagcaggcagaaaaatgtgaaatgagagactggcctagcctcccgcccacatctttctcccatgctggatgcttcctgccctcgaacatcggactccaagttcttcagttttgggacttggactggctctccttggtcctcagcctgcagatggcctattgtggaaccttgtgatcatgtgaattaataataaactcccctttatatayacacacacacacacacacacacacacacacacacacacacacacatatatatatatatttcattagctctgtccctctagagaatcctaatacagattttgataccaggaatggttctagaggaacagaatattaatgatggagttctttcattggattttgggtttctggagttggctgcttaatatgattagacccagaaatgctacagactctacttctaatagtatggagaacactgatagtccttggtgtgaactgcttagagagttatgcaatataaatgcatttgacactcctgattcattgctcgtgagaggcaaggagtttagtgactctttacttaatacctttgaccatatgtggtgaaccaaggaacataatgaagctggttggttgctcctaagttcaatggacaatgtga

SEQ ID NO: 932807 - DNA, 472 bp, Homo sapiens
tttcttcatccagtctatcattgatgggcatttgggttggttccaagtttttgctgttatgaataactgtaataaacagatgtgtgcatgtgtctttatagcagaatgacttataatcctttgggtatatgcctagtaatgggattgctgggtcaaatggtatttctggttctagatccttaaggaatygccacactgtcttccacaatggttgaactaatttacactcccaccgacatgtcactgttatttttatcaactcagtgctacgattatgcaccgtatcccttctacatttaaggcagtttgtttcatggtgagattgctgttttgatccttggtatcatccttaacccaaacagaagtgacttctgagtgttctgttgttttcaattttctgattaacagaaaaataccatatgagtattatctttggcttttacttctatgcattcacttgtttagttaactt

SEQ ID NO: 932808 - DNA, 472 bp, Homo sapiens
tttcttcatccagtctatcattgatgggcatttgggttggttccaagtttttgctgttatgaataactgtaataaacagatgtgtgcatgtgtctttatagcagaatgacttataatcctttgggtatatgcctagtaatgggattgctgggtcaaatggtatttctggttctagatccttaaggaattgccacactgtcttccacaatggttgaactaatttacactcccaccgacatgtcactgttatttttatcaactcagtgctacgattatgcaccgtatcccttctacatttaaggcagtttgtttcatggtgagattrctgttttgatccttggtatcatccttaacccaaacagaagtgacttctgagtgttctgttgttttcaattttctgattaacagaaaaataccatatgagtattatctttggcttttacttctatgcattcacttgtttagttaactt

SEQ ID NO: 932809 - DNA, 570 bp, Homo sapiens
gactttatcaaaattaagagccctctctttttttttttttttttttgagacttaattttgctctgtcaccaaagttggagttctgtggggtgatcttggcttactgcaacctccacgtcccgggttcaagtgattctcatgcctcagcctctcaagtggctggaattacaggcacatgccaccacamcccgctaatttttttgtatttttagtagagatgcggcttcaccatgttggcctggctggtctcaaactcctaacctcaagtaatccactgccttggcctcccaaagtgctgggattataggcatgagcccatgcccagccaagagctctctctttgaaagacactgttgagagaatgaaaagaaaagccatgaactcagaaaaaaaatttgtcaattgcctatattaattttacttttttttttttttttgagacggagtctcgctctgtcacccaagctggagtgcagtggcgtgatctcggctcacccttctaagctccgcctcccgggttcacaccgttctcctgcctctgcctcccaagtagctgggactacaggcatg

SEQ ID NO: 932810 - DNA, 570 bp, Homo sapiens
gactttatcaaaattaagagccctctctttttttttttttttttttgagacttaattttgctctgtcaccaaagttggagttctgtggggtgatcttggcttactgcaacctccacgtcccgggttcaagtgattctcatgcctcagcctctcaagtggctggaattacaggcacatgccaccacaacccgctaatttttttgtatttttagtagagatgcggcttcaccatgttggcctggctggtctcaaactcctaacctcaagtaatccactgccttggcctcccaaagtgctgggattataggcatgagcccatgcccagccaagagctctctctttgaragacactgttgagagaatgaaaagaaaagccatgaactcagaaaaaaaatttgtcaattgcctatattaattttacttttttttttttttttgagacggagtctcgctctgtcacccaagctggagtgcagtggcgtgatctcggctcacccttctaagctccgcctcccgggttcacaccgttctcctgcctctgcctcccaagtagctgggactacaggcatg

SEQ ID NO: 932811 - DNA, 585 bp, Homo sapiens
tatttaaaatctcaccttgcatgttctcactcataggtgggaattgaacaatgagaacacatggatacaggaagaggaacatcacacactggggcctgttgtggagtgggggcaggggggagggatagcattaggagatatacctaatgttaaatgacgagttaatgggtgcagcacaccaacatggcacatgtatacatatgtaacaaacctgcgcattgtgcacatgtaccctaaaacttaaagtataataaaataaaataaaatctcaccttgcatctggataacataggcttcaaccagatgttcatggggaacccacacatgggcttctgatgttccctctctgcatagtgttcttctctctcctgtcctaccctgcagattctagttcgtgcagctactaygtgaattgtggttgggaaattgtccccaggcagagagccagggcgagcatggggcttgtcatgtgaatttcccttctcgttgcaattgtaatcttgtgctgcctgttgtcatttgcctgaaaacagttgcctcatatatttggttcagttttattgtgcctggcttatggcacatggt

SEQ ID NO: 932812 - DNA, 601 bp, Homo sapiens
ctgcactcacagagagggaacaaaaacaggcaagtgaattcaacaccttcaactgagatatccaggttctcacattggaactaaataggcaagcaacttggatcactgagacagaaacttaacaaagatattcaggacctgaactcagctctgaatcaacyggacctgatagatatgtatagaactctccagccaaaaccaacagaatatacattcttctcattgccacacaatacttactctaaaattgactacataataggaagacactcctcagcaaatgcaaaagaactaaaataataacaaacagtttctcagaccacagtgcaataaaattagaactcaagattaagaaatccactcaaaaccacacaactacacggaaactgaagaacctgctcctgaatgactcttgggtaaataatgaaattaaggcagaaatcaagaagttctctgaaactaatgagaacaaagagaaaacatacccaaatctctaggatgcagctaaaacagtgttaagagggcactaaatgcccacatcaaaaagctagaaagatctcaagttaataacctaacatcccaaccaaaagaactagagaac

SEQ ID NO: 932813 - DNA, 601 bp, Homo sapiens
ctgcactcacagagagggaacaaaaacaggcaagtgaattcaacaccttcaactgagatatccaggttctcacattggaactaaataggcaagcaacttggatcactgagacagaaacttaacaaagatattcaggacctgaactcagctctgaatcaactggacctgatagatatgtatagaactctccagccaaaaccaacagaatatacattcttctcattgccacacaatacttactctaaaatkgactacataataggaagacactcctcagcaaatgcaaaagaactaaaataataacaaacagtttctcagaccacagtgcaataaaattagaactcaagattaagaaatccactcaaaaccacacaactacacggaaactgaagaacctgctcctgaatgactcttgggtaaataatgaaattaaggcagaaatcaagaagttctctgaaactaatgagaacaaagagaaaacatacccaaatctctaggatgcagctaaaacagtgttaagagggcactaaatgcccacatcaaaaagctagaaagatctcaagttaataacctaacatcccaaccaaaagaactagagaac

SEQ ID NO: 932814 - DNA, 565 bp, Homo sapiens
caaagtgatgttgttagcagtggccaattcatatatgtctgggtctgtggcaacctcaattctcaccttctcagaagaaagaaattgactgaggggcataaggcagaaggagagaccaaggcaaattttagagcaggtgtgaacatttattaaaaagctttagagtaggaatgaaaggaagtcaagtacatttggaagagtgtcaagtgggagacttgagagatcaagagcactgtttgacctttaacttggggttttatatgtaggcatgcttctggggtcttgtgttccttctgattcttcccttgggctgcgctgtcctgttcgtgtgcgcagtggcctgctaacacttgggaggggccacaagcgcagtgtgtttattggaggtrtacacacgctcacttgacacgttcttcccttaccagtcaaatgctccattttgcttcttagtgcgagtgcttgagccgctcacccaactcctgagatcttatcaagaaactgctgatcaccagtttcaggatttttctatctgttgggagactgcctttccctggtccagctgtga

SEQ ID NO: 932815 - DNA, 628 bp, Homo sapiens
ctttccgttaaaagagaaaccttaccaaggacttccttacccttactctttgcctaatttctttttaactcctatatcaattatatataatgaccttctttgtctctttttacagttcttttttaaagtctatttatctgatataagtattgctaatcctcctttcttttgrtttccatttgcgtggaatattttttccatcccttcattttcagtctatttttttatttaaaagggaagtgagtcttttatgagcagcatatatgttccttgcttcttttctcttgctgttttcagaatcctctttttgtctttgatttttggcaatttaattataatgtatcttcgggcagtcttttttagatggaatcagattacagacctttgactttcgtgtacctggatatttacgtctttctccaggtttagaaggtttcctgttacaattttttaaaaaaagttttctacccctttctctttttcttctttaactcctattactcaaatatttgctgttttgaggctgtcctataaatcctataaatttctttcttccttttcactcttcacttttttctcttctgactgtatattttcaagtaacctgtcttcaagtttaaagatctct

SEQ ID NO: 932816 - DNA, 628 bp, Homo sapiens
ctttccgttaaaagagaaaccttaccaaggacttccttacccttactctttgcctaatttctttttaactcctatatcaattatatataatgaccttctttgtctctttttacagttcttttttaaagtctatttatctgatataagtattgctaatcctcctttcttttgatttccatttgcgtggaatattttttccatcccttcattttcagtctatttttttatttaaaagggaagtgagtcttttatgagcagcatatatgttccttgcttcttttctcttgctgttttcagaatcctctttttgtctttgatttttggcaatttaattataatgtatcttcgggcagtcttttttagatggaatcagattacagacctttgactttcgtgtacctggatatttacgtctttctccaggtttagaargtttcctgttacaattttttaaaaaaagttttctacccctttctctttttcttctttaactcctattactcaaatatttgctgttttgaggctgtcctataaatcctataaatttctttcttccttttcactcttcacttttttctcttctgactgtatattttcaagtaacctgtcttcaagtttaaagatctct

SEQ ID NO: 932817 - DNA, 628 bp, Homo sapiens
ctggatatttacgtctttctccaggtttagaaggtttcctgttacaattttttaaaaaaagttttctacccctttctctttttcttctttaactcctattactcaaatatttgctgttttgaggctgtcctataaatcctataaatttctttcttccttttcactcttcacttttttctcttctgactgtatattttcaagtaacctgtcttcaagtttaaagatctctcgctgcttaatctggtctgctgttgatgctctctattgcatttttcattttgtttattgcatttttcagatccaggatttctgtttgatatacaatctctctattaaatttctcatatttcttgttctggtctcttactgttttamtcatattattgaattgtctctccgtattttcttgaaggtcactgagcttccttaaaacagttattttgaattatttgtcaagctgttcatatattttcacttctttagggtcagtaaatggcacctgattttgtttgtttggtaacataatgtttactgattgttcctgatttttgtgcttgtacatcaatgtctgtgaatttgaagaagtatttattttagtctttgcaaactgaaaagccctagaaaaagc

SEQ ID NO: 932818 - DNA, 754 bp, Homo sapiens
tttgggtagtgtctgcatattgtgcagaaccgtctgtgaaacagtccctagtcttctcttcctctgtcaactgttcatagggaactccccatgaggccagcagtgcaggctgggggagagagggcagggtgacaggagtggagaccatgagcatttaagctacttcctcatgtaacatacttgtgccttcaggacctgtacgagtccaatcacatatataccacctccatttcatgatggaatgctgctgtgcatgacccactttatggctagatgtgtcagaaagcacccagttcatgataggcagtttagatcacgtggtgacttgatgacccatagtcaaatgttcagtttccaccaaagcccagtaacaggctgagagctgtctctcaaaaggataatagttatctgcaaaagatggcagggccttgctycaaaatcctagaggcctctaactgtgattcacctatgggagcctgccaaaggctccaaacagcaaccctatctgccactgacacctcaagtgccattggatctgctgggtcatatggcccaaattgtagagtagcttgccagcagcctggacctgttgcagatccttctcctcttctggacttcactcagaactggcagcctttcaggtcactcaataaatgggccatagtgacacacccaaatgaggaatgtgttgcctccaaaatccaagtaggcccactaggcattatgcctctttcttggttgtaggaggggccaa

SEQ ID NO: 932819 - DNA, 685 bp, Homo sapiens
gctgtctctcaaaaggataatagttatctgcaaaagatggcagggccttgcttcaaaatcctagaggcctctaactgtgattcacctatgggagcctgccaaaggctccaaacagcaaccctatctgccactgacacctcaagtkccattggatctgctgggtcatatggcccaaattgtagagtagcttgccagcagcctggacctgttgcagatccttctcctcttctggacttcactcagaactggcagcctttcaggtcactcaataaatgggccatagtgacacacccaaatgaggaatgtgttgcctccaaaatccaagtaggcccactaggcattatgcctctttcttggttgtaggaggggccaaatgcagcaacttatcctttaccttagaaggaatatctcaacagaccccacaccactggacccctagaaattttactgaggtagaagttccctgaattttagtcagatttcccatcatgtggcatgcatacatctcacaaataagtccagtgtatttgctacttgttgctcactggatccaatcagcctaatgtcattaatgtaatggaccagtgtgatatcttgcaatcaaggtctctccgaataagattatgacacaaagctggagagttgatatacccctgaggtaggagagtaaaggtatattgctggc

SEQ ID NO: 932820 - DNA, 627 bp, Homo sapiens
tcctttatgcttactattgctcccagggccatttcaataaagttatcaaagccacacctctcacactttaggcccccaggctccccaggcctgtgcagctcctctgaagtagcactgtgggaatgggcactggtgctcaccactcctagacataagaagcattttcggccgggcgtggtggctcacgcctgtaatcccagcacttcgggaggcagaggcgggcagatcacgaggtcaggagatcgagaccatcctggctaacatggtgaaaccccgtctctactaaaaatacaagaaattagccgggcgtggtggcaggtgtctgtagtcccacctactcaggaggctgaggcaggagaatggcatgaacccgggaggcggagcttgcagtgagcagagattgtgccactgcactccagcctgggtgacagaccgagactccgtagatcaaaaaaaaaraagaagcattttcccactgtgatggttagtaggttagtactgtcaacttgattggattgaaggatacaaagtattgatcctgggtgtatctgtgagggtgttgccaaaagggattaacatttgagtcagtgggctggggaaggcagacccacccttaatctggtgggc

SEQ ID NO: 932821 - DNA, 627 bp, Homo sapiens
tcctttatgcttactattgctcccagggccatttcaataaagttatcaaagccacacctctcacactttaggcccccaggctccccaggcctgtgcagctcctctgaagtagcactgtgggaatgggcactggtgctcaccactcctagacataagaagcattttcggccgggcgtggtggctcacgcctgtaatcccagcacttcgggaggcagaggcgggcagatcacgaggtcaggagatcgagaccatcctggctaacatggtgaaaccccgtctctactaaaaatacaagaaattagccgggcgtggtggcaggtgtctgtagtcccacctactcaggaggctgaggcaggagaatggcatgaacccgggaggcggagcttgcagtgagcagagattgtgccactgcactccagcctgggtgacagaccgagactccgtagatcaaaaaaaaagaaraagcattttcccactgtgatggttagtaggttagtactgtcaacttgattggattgaaggatacaaagtattgatcctgggtgtatctgtgagggtgttgccaaaagggattaacatttgagtcagtgggctggggaaggcagacccacccttaatctggtgggc

SEQ ID NO: 932822 - DNA, 572 bp, Homo sapiens
ctttaatatcatgggtaaaaattccccataagttccccgataccccaataattggactggttaagaattctcaaaagttaggctgggtgcagtggctcatgttggcaatcccagcactttgggaggctgaggccggtggaycacttgaggtcaggagtttgaaaccagcctggccaatggtgaaaccccacctctactaaaactacaaaaattagccgggtgtagtggtatgcatctgtaatcccagctactcgggaggctgaggcaggagaatcacttgaacccaggaggcggaggttgcagtgagccaagattgtgccactgcactccaacctaggtaacagagtgagactctgtctcaaaaaaaaaaaaaaaaatcctaaagtttaataagaagaccaactggtttataaaactgctaacccaagtaaaacaaaaattgaatatcaacgaaatattttgccagatttgcatgctaaatcaccaatattgaaattgtttagatatataatttaaataaactcccatggtctaagccaaattacctataactcatcagtttacaagtgcca

SEQ ID NO: 932823 - DNA, 648 bp, Homo sapiens
caaggagatcacaaggtcaggagatcgtgaccatcctggccaacatggggaaaccccatctctactaaaaatacaaaaattagctgggcgtggtgatgtgcacctgtagtcccagctacttgggatactaaggcaggagaattgcttgaagccaggaggtggaggttgcagtgagccaagactgcaccactgcactccagcctggtgacagagtgagaccctgtctcacaaaaaaaaaaaaaaaaaaaaaaaaraaagattaagtaattaaagccgtcttttgcaatgaatgcattgctttgaaattcttagaaaactctgccctttataaaagtttaatccattttttacttcaataaattttatcttaaaaagaaatttctgttctctacttataggaaacttttcttttttttttttctagtttgtattccaaattaacgtggtacctctgtaagtttcttccaaaggcatattgagggataccgaggtttgcagtacaattaaacctatcacacaggttgtgagcataggacccaagaagtagtttttcaaccctggcccactctgtccctccccgttcttatttcccagtgtctattattcccacctttatgacaatgtgcacccaatatataactcccacat

SEQ ID NO: 932824 - DNA, 746 bp, Homo sapiens
ccatgcatcagagatatatgtgggtttggttccagacaactgcaataaagtgttatacaatttcttttggtttcccagtgcatgtaaaagtatgtttatactgtgctgtataaagtgtgcaatagcatatgtctacaaagtatgcacactttaatttacaaatactttattgttaacaagtgctaacagtcatctgagccttcagaaagctgcaatctttttgtgtgtgtgtgacagggttttactctgtggctcaggctggagtaattgcagcctcaacctcatgctcaatcaaacccccacctcagactcctgactagctgggactacaggtgcatgccaccgtgtccagctaatttttgtattttttttttttttttgtagagatggggttttgccatgttgccttgacktcctgggctcaagcaatccacacaccttggcctcccaaggtgttgggatgacaggtgtgagccactgcacctggccaagtttcagtcttcttgctgatggagggtcttacgttaatgtaaggtggtggttgctgagcgttggggtggctgtggcaatttcttaaaataagacaacgttgaagtttgctgtgtcaagtgactctccctttcacaaaagaattaactgtagcatacaatgatagctttttacccacagtagaactttcaaaattggattcaatgccgtcaaaccttcatactgctgtaccaactaagtttatgtattatcgtaaa

SEQ ID NO: 932825 - DNA, 698 bp, Homo sapiens
aaattatcttgatcctgcctttggattttaaaaacagtttcactgagatatcattcacatttgagagagttcaaccatttaaaatgtacaactgagtatctattagtatattcacagcattttcatcaccctgaaaagcaaccccacatctcctaggcatgactgcagccttcctccatgtccctccacctacctctgttgtaggcaaccaccatctatctacttttgtctccatatgtttgcctgttctgcttatttcatatacatagagttatacaatacgtagtcctctgtgactggctttttcacttagcataatgttttcagaattcacttagcgtaatrttttagcacacattggtagtttatttcttcttatagttaaatgatattctattccatggctatactggttttccattcattcatcagttgatggacctttaggttagtttccactttttagctcttatgaaaaatgctgctgtgaacattcacttacaagttattatgtggacacaggtttttatttatctgccattggactttatcctcagagttaattgggcagatttcagcacttgtcttgctcatgctattctttctaccttttcagtttctgttcatctggcctcattcactcagatgtggcagacaatttattgttttcatgaagctttctctgactgttctctcat

SEQ ID NO: 932826 - DNA, 635 bp, Homo sapiens
ggaaaaacaggtgtacctaataaaaatgtgcttagtgacttgggataaaccaatagatgttcacaactgatggagagccgtgaaagagagatagcggtacatagttacaataacacaagtttcctgcacctgtcgaggatttccccaaaaaaacgcagaatgtgggatgcacctaaggcatatgaaagagagagggcagaaggagtaagagagaaataggaggaaggaaggaaggaaggaaagaaggaaggtaggaaggaaggaaggaaggaaagaaggaaggaaggaaggaagcaaagaaggacgaacggaaggagraaacacccggtgttactaaaacccccaaaaaatatggtttccccctgtgggtaagcctacagtgtggatgaatcttgaaaatattgtgctacgtgttatgtcagtcataacagctcacctattgtgcaattccgtttataggaaatgtccacaatatggaaatctatgcatatggggttgatcgcactaggtagttgctacctagggctgagggtcagggagagggtttgagacagaatgaggagtgactaatgtctacagggtttttctctggtcgggggtgataagacgttctacaatggattgcgaattaaaat

SEQ ID NO: 932827 - DNA, 622 bp, Homo sapiens
aaaacaggtgtacctaataaaaatgtgcttagtgacttgggataaaccaatagatgttcacaactgatggagagccgtgaaagagagatagcggtacatagttacaataacacaagtttcctgcacctgtcgaggatttccccaaaaaaacgcagaatgtgggatgcacctaaggcatatgaaagagagagggcagaaggagtaagagagaaataggaggaaggaaggaaggaaggaaagaaggaaggtaggaaggaaggaaggaaggaaagaaggaaggaaggaaggaagcaaagaaggacgaacggaaggaggaaacacccggtgttactaaaacccccaaaaaatatggtttccccctgtgggtaagcctacartgtggatgaatcttgaaaatattgtgctacgtgttatgtcagtcataacagctcacctattgtgcaattccgtttataggaaatgtccacaatatggaaatctatgcatatggggttgatcgcactaggtagttgctacctagggctgagggtcagggagagggtttgagacagaatgaggagtgactaatgtctacagggtttttctctggtcgggggtgataagacgttctacaatggattgc

SEQ ID NO: 932828 - DNA, 638 bp, Homo sapiens
tgtccaacctcaggacactgctggctgcattcctgaggctccagctccagccttggctgaaagatgcacaggtacagcttgggtcactgcttcagagggtgcaagcttcaaggcttggtggcttccacattgtgttaagccagcagctgcacacagcacaaaactagamgcttgcaagcctttgtctagactccagagtatgtacggaaaaacctgggtgttcacacagaatcttttccaagaggcagagcctcgtgggaaacttttactagggcagtacagaaggagaatttagggctggagtccctaaatatggaggcaccattctccagactccagattcatagactcaccaacagctggcacccttagtatggaaatgctacaggcactcaacatcagcccagcccatgagggcagctgtggggtatagaccctgcacagccacaggtgcagagctgcccaaggccttggaagcccaggcatcacacacctgtgctctagatgtgagatgtagattcagaaaagatgatttggagctgtaggattcaatgactggcctgctgggtttttgacttgcatggggtctgtaagtccttgtacatttcagtaaatgctggaatgagttaagtcattgg

SEQ ID NO: 932829 - DNA, 638 bp, Homo sapiens
tgtccaacctcaggacactgctggctgcattcctgaggctccagctccagccttggctgaaagatgcacaggtacagcttgggtcactgcttcagagggtgcaagcttcaaggcttggtggcttccacattgtgttaagccagcagctgcacacagcacaaaactagacgcttgcaagcctttgtctagactccagagtatgtacggaaaaacctgggtgttcacacaraatcttttccaagaggcagagcctcgtgggaaacttttactagggcagtacagaaggagaatttagggctggagtccctaaatatggaggcaccattctccagactccagattcatagactcaccaacagctggcacccttagtatggaaatgctacaggcactcaacatcagcccagcccatgagggcagctgtggggtatagaccctgcacagccacaggtgcagagctgcccaaggccttggaagcccaggcatcacacacctgtgctctagatgtgagatgtagattcagaaaagatgatttggagctgtaggattcaatgactggcctgctgggtttttgacttgcatggggtctgtaagtccttgtacatttcagtaaatgctggaatgagttaagtcattgg

SEQ ID NO: 932830 - DNA, 638 bp, Homo sapiens
tgtccaacctcaggacactgctggctgcattcctgaggctccagctccagccttggctgaaagatgcacaggtacagcttgggtcactgcttcagagggtgcaagcttcaaggcttggtggcttccacattgtgttaagccagcagctgcacacagcacaaaactagacgcttgcaagcctttgtctagactccagagtatgtacggaaaaacctgggtgttcacacagaatcttttccaagaggcagagcctcrtgggaaacttttactagggcagtacagaaggagaatttagggctggagtccctaaatatggaggcaccattctccagactccagattcatagactcaccaacagctggcacccttagtatggaaatgctacaggcactcaacatcagcccagcccatgagggcagctgtggggtatagaccctgcacagccacaggtgcagagctgcccaaggccttggaagcccaggcatcacacacctgtgctctagatgtgagatgtagattcagaaaagatgatttggagctgtaggattcaatgactggcctgctgggtttttgacttgcatggggtctgtaagtccttgtacatttcagtaaatgctggaatgagttaagtcattgg

SEQ ID NO: 932831 - DNA, 685 bp, Homo sapiens
ctgtcttgcctccaccactgggtgaacgcccacagggaggcagggacttttgcatccactagcattctgccgcagttggacactttggtcccctcagtgcagtggactccaaacctccaagagccagagaacaaagttggggcccaagacaagttccccagagttaaagcacacagtccaggaattgggagctgcacattagcccccctaaaatcctccaaaaacaaagccagttggttgaatccaccttatcccacaatgaaaccctcaagatcatcaaatacaataaaagaaaaataccctgtccgaaggtcagcaacctcaaagatggaargtggataagcctataaagatgagaaagaatctgtgcgagaacactgaaaactcaaaaagtcagcatgccttctttcctccaaatgactgtatcaactctccagcaagtgttcagaactgggctgaggctgagatgtctggaatgatacaagcagggttcaggatatgcataggaacaaagttcactgagtgaaagaagtatgttgtcatgcaatacaagtgagctaaaaatcattgtaaaacattgtaggagctaacagacaaaatagcaagtataaagaagacataaccgacctaatagagctgaaaagcacactataagaattttcataatgcagtcacatagtgatta

SEQ ID NO: 932832 - DNA, 588 bp, Homo sapiens
agaaaagatattcaacttcttaaagaaaagaaatttcacgtagtatggcagagacagatataccatataataacatggtgttattataaatggttaaaagaaaaagaaatctcaacccagaatttcatgtccagcaaaattaagcatcataagtgaaggagaaacaagatccttttcagacaagcaaatgctgagagaattcattatcaccagatctaccttacaagagctcctgaatgaagcactaaatatggaaagaaaagaccatcaccagccactacaaaaatgcaccgaagtactcagaccagtaatgytaaaaaccaaccacatacacaagtctgcaaaataactagctgacagcatgacgacaggatctaatccacacataccattactaaccttaaatggaaatgggctaaatgctccgattgaaagacacagggggcaagctggataaagaaccaagacccatttgagtatgccgtctccaagaaacccatctcacatgcagtgccatacctaggctcaaaatgaaggaatggtgaaaaatctttcaagccaatggaaaacagaagaaatcaggtgtta

SEQ ID NO: 932833 - DNA, 578 bp, Homo sapiens
taacatctggcctttgggcaggctcaaaactttgaaagttaataatgtaagattcaattgtgtatgggctatcccgtaatccctgtttctcccccttttttgtttttattatcagttgttcatctgtatgaaatcttaactgagcattttcaattaactgtgtggaatgacccatgtatgaagaatcagaaatcacattaacaggcatatcaaaagcagccaacacctcaattacagctacaagctccrccttttgagctgaagtatagggtgtctggaaaactttagcttttgatccagaataagaacctttaccattactagtcccatctgtgaaacaaggaaaacgcttagcaggctgcaggttgtttactgcaggaattgtaaatgcaaaccgttcacagtcttgctcagctaaaagggtagtaaagaaacagtcttttaaatctgtgactattaaaggccaatttttcggaattatagtagagaagggaatcctggctgttatatttccataggttgtataactgaattgatggctcttaagtcagttaacattctccatttacctgattttt

SEQ ID NO: 932834 - DNA, 578 bp, Homo sapiens
taacatctggcctttgggcaggctcaaaactttgaaagttaataatgtaagattcaattgtgtatgggctatcccgtaatccctgtttctcccccttttttgtttttattatcagttgttcatctgtatgaaatcttaactgagcattttcaattaactgtgtggaatgacccatgtatgaagaatcagaaatcacattaacaggcatatcaaaagcagccaacacctcaattacagctacaagctccgcyttttgagctgaagtatagggtgtctggaaaactttagcttttgatccagaataagaacctttaccattactagtcccatctgtgaaacaaggaaaacgcttagcaggctgcaggttgtttactgcaggaattgtaaatgcaaaccgttcacagtcttgctcagctaaaagggtagtaaagaaacagtcttttaaatctgtgactattaaaggccaatttttcggaattatagtagagaagggaatcctggctgttatatttccataggttgtataactgaattgatggctcttaagtcagttaacattctccatttacctgattttt

SEQ ID NO: 932835 - DNA, 539 bp, Homo sapiens
attatactagacagtaaataaacttttcctttgttccagaaggaggtactggttttctattccaaagctgttttctatacaaacatgcttgaaaacaatcatttggaacaagaaagtcagcgtacatacttgcaaaatgtgcggaaattaaagagacaaaaaaactgtttctctaccaatttctatttttttwaaatcacattttccccatataatatgcttttaatatgtgataatattctgaaattgtcttagcatttacccccatttctgagtccagaaggatacaataaatttaatttaatttagtaacacttcaaatagtagtgattgtaatagcagagctagtttgtagcataaagaaaaaataataatattattaggtgacacaaataatgctagccaccatttctaagtgtcatggtaagtacagtgattattttctttttttctgactcttttttattgtattttttattttttttcccataggttattggggtacgctggtatttggttccatgaataacttctttact

SEQ ID NO: 932836 - DNA, 881 bp, Homo sapiens
atagccttgtaaattggaggtagccagttactctgaggggcttgggtggggcctgtaggaaacacacggacatatacatgtgcctttaggattctggtaccatctattgaagtggctactttggggtatataccctgaccccactcagaaaactggcttctgattttgtggccctcacccaggaactgacttagcacaagaagatagtcaccattgtaaaatggcagagactaaaacaaaatattgccatgtgtttacaggtcatgttcccaaggacatgaaacaagatggaggcctgtagccaagtttgttactgatcattttgttgggctggcttgaacagcagtcgtatggggtcctgggtctacatcttaacctaaagtaccctttcttctgacagaaccatacagaaagacacayaaagcacacaagagtgtctacagcttgacaccaacctcacaaatcctttttcattaaaactttacagagaatattagcaattatccttatttatcccttttaccaatttgcacagggagagagaagccaaaagcccaactggtaagaaatttttacccttttgttggcatgtcaggcttctgggttcccttcctcctagctcaactctaagccaagcattttaatggttgggaaattaatttttccaaagttggaagaacattataaaagagaagccattttaaaccatgaaagaaggaaaaacaccatagaaaagtctggtagtttcaattaagattgtgaacaggtatttcctatcctactgggaatggtatttgctgtatttcttccccttttctattttctcttttctcttttggcccactataggagacatattgctcatctttgatattctctga

SEQ ID NO: 932837 - DNA, 881 bp, Homo sapiens
atagccttgtaaattggaggtagccagttactctgaggggcttgggtggggcctgtaggaaacacacggacatatacatgtgcctttaggattctggtaccatctattgaagtggctactttggggtatataccctgaccccactcagaaaactggcttctgattttgtggccctcacccaggaactgacttagcacaagaagatagtcaccattgtaaaatggcagagactaaaacaaaatattgccatgtgtttacaggtcatgttcccaaggacatgaaacaagatggaggcctgtagccaagtttgttactgatcattttgttgggctggcttgaacagcagtcgtatggggtcctgggtctacatcttaacctaaagtaccctttcttctgacagaaccatacagaaagacacacaaagcacacmagagtgtctacagcttgacaccaacctcacaaatcctttttcattaaaactttacagagaatattagcaattatccttatttatcccttttaccaatttgcacagggagagagaagccaaaagcccaactggtaagaaatttttacccttttgttggcatgtcaggcttctgggttcccttcctcctagctcaactctaagccaagcattttaatggttgggaaattaatttttccaaagttggaagaacattataaaagagaagccattttaaaccatgaaagaaggaaaaacaccatagaaaagtctggtagtttcaattaagattgtgaacaggtatttcctatcctactgggaatggtatttgctgtatttcttccccttttctattttctcttttctcttttggcccactataggagacatattgctcatctttgatattctctga

SEQ ID NO: 932838 - DNA, 577 bp, Homo sapiens
agtcccatatttcttggagtctttattcgtttctttttactcttttttctccaaccttgtcttctcgttttatttcattaatttaatcttcaatcaccaataccctttcttccacttgattgaatcggctattgaagcttgtgcatgcatcacaaagttcycgtgccatggttttcagctccatcaggtcatttatgttcttctctacactgtttattctagttagccattcgtctaacttttttcaaggtttttagcttcctcgtgatgggtttgaacatgctcctttagcttggagaagtttgttcttaccaaccttctgaagcctacttctgtcaactcgtcgaagtcattctccgtccagctttgttccacttctggcgaggagctgcgatcctttggaggagaagaggcgctctggtttttagaattttcagcttttctgttctgatttctcctcatctctgtggttttatctacctttggtctttgatgttggtgacctacagatggggttttggtgtagatgccctttttgttgatgttcaattcctttctgttagttagttttccttct

SEQ ID NO: 932839 - DNA, 577 bp, Homo sapiens
agtcccatatttcttggagtctttattcgtttctttttactcttttttctccaaccttgtcttctcgttttatttcattaatttaatcttcaatcaccaataccctttcttccacttgattgaatcggctattgaagcttgtgcatgcatcacaaagttctcgtgccatggttttcagctccatcaggtcatttatgttcttctctacactgtttattctagttagccattcgtctaacttttttcaaggtttttagcttcctcgtgatgggtttgaacatgctcctttagcttggagaagtttgttmttaccaaccttctgaagcctacttctgtcaactcgtcgaagtcattctccgtccagctttgttccacttctggcgaggagctgcgatcctttggaggagaagaggcgctctggtttttagaattttcagcttttctgttctgatttctcctcatctctgtggttttatctacctttggtctttgatgttggtgacctacagatggggttttggtgtagatgccctttttgttgatgttcaattcctttctgttagttagttttccttct

SEQ ID NO: 932840 - DNA, 637 bp, Homo sapiens
aagagagcatgagcaaaagggaaaaagtcccttataaaaccatcagatcttgtgagaactcactcactatcatgagaacagtatgatggtaactgcctccatgatgaaattacttcccactggatccctcccatgacacatggagatcatgggaactacagataaagatgagatttgggtggggacataaccaaattatatccttctacctctggcccctcccaaatcttatgtcctcacatattaaaacaaaatcatgcccttccaacagtcccccaaagttttgcctcattttagcattacctcataagtacaagtccaaagtctcacctgagacaaggcaagtcctttttgccaatgagcctgtaaarttaaaaaaaaaaaaaaagttagttacttcctagatacaatggaggtacaaccattgggtaaatacacccattaacaatgggagaaattggccaaaacaaagggtctacaggacccatgcaaattcaaaatctaacaaggcagtaattaaattttaaagctccaaaacaatctcctttgactccctgtctcacatccaggtcatgtgatacaagaagtgggctctcacaggcttgagcagctctgccccctgtggctttgcaaggca

SEQ ID NO: 932841 - DNA, 694 bp, Homo sapiens
ataaaaataatccaggtgagaaattattgatggggacaggaggcagaaaaattctgggcagaataatgcaggtacccagcaagggtcccaccctcaagcctagaaccatggcccaaagtgagaacatgcattcctgttttcctgttcaaatgttgccttttctaaaaccacccttaacccaccccactgttgcaggaagtcagggaccccaaacggagggcccggctggagctgcggcagaggaatataaattgtgaagatttcattttaatatggacacatatccattcccaaaattaatacttttataatttcttacacctgtctttactgcaatctctgaacataaattgtgaagatctcatggacatttatcacttctctaataatactcttattattatggacatgcaagtaggagagagatcactgaattcttttcccagcagggaatattaataattaataccctggggaaggagcattcctcaggggaagtctataaatggctgctctgggagtgtctgccttatatrgttgagataaggactgaaatacgccctggtctcctgcagtaccctcaggcttcttagggtggggaaaagatcccaccctggtaaatctgaggtcagaccggttctctgctctcgaaccctgttttctgttgtttaagatgtttatcaatacaatacgt

SEQ ID NO: 932842 - DNA, 570 bp, Homo sapiens
ggagcgaccagaatcataaaacaagttcttagagacctacctacaaagagacttagataaccacataataatactgggagacttcaacaccttactcataatgttagatcattgaggcagaaaaccaacaaagatattcaggacctaaatttgacacttgaccaaacagaactaacagatatctaaagaatactctacccagcaaaaacaggatatacattcttctcatttgcacaaggcacatgctctaagatcgaccacatgctcagccataaagcaattctcaaccaatttaaaaaagcccaaatcataccaacaacactctttgaccacataacattgaaaataaaaatcaataccaagaagagcactcaaagccatatgatagaatggaaattaaacatttgcttggkaatgacttttgggtaaagaacgaaattaaggcagaaataaaaaaaaaatatttgaaactgatgaaaacaaagaaacaacatcccagtatctatgggatacaggtaaagtaggcttgtatttaaaaaagcaacttttaagttcaggggtacatgtgca

SEQ ID NO: 932843 - DNA, 616 bp, Homo sapiens
gtaagttcttacattgtggggctgacagacttactataagccaaggaagttaacccacattcaaaagtaggtaccagttctgttaaggatagttattactgtctccagcatagaatgagttcagggtgacatatttatcaccaagtttctggttattcttgttgagagatgctaacacagtgagggttcatcatggctctcttctgctgacaaaagtgtctgcagtaggggttgttacctatgacttggtgagaagctgccacatactgcactcattgataatgtccatctcttccaccatgttgctattcatggaccatttgtacatagactaatattatgagatctttggggtgtcgcttttctggctggaaacctgtggccagtggcacctttgcctgaggtttgctcaggcccmctgggcttgtttccatcaggctttgctcagctcatgctgccggcctggatcccatggctccaagggagactggagtcagatgtggagtggtgacggatgtgtgagcaaacatggggtctggccactgcacagtcagacacaccagccactgctgcagggcaggcaactctaggtgccggcatgggtgccagctctccg

SEQ ID NO: 932844 - DNA, 457 bp, Homo sapiens
aaatctggcctttgggggccagggtgaaagaaaacacaactagaggtgaaataagcaggtgttttcctttatttgtttgctctcattatttgagtgggaagagcaagataacttcctatatggcaaagtacacagaagaattcaaacttttcatcaaatttctttgtttcttaatggcaaattgacagtgttctttctggaaataaatttaccgtcatggctatagagtacaagaatgaaaacaaaaaagtctttgktggtctgagctaaaactaaaatacacttatgacactaaatcctactctgcccactccttaaatattaaacaaacattaatacagaacttactccagcccaccttttattacagataactgtaatttcctcatctcccctatcagaaataaactccttgaggtcaggaatgatattattcatttgtgttccaaacgcagat

SEQ ID NO: 932845 - DNA, 628 bp, Homo sapiens
atgacctcatagcactataattaaggtgatcatctgagtggaaatgactattatgaagcatccttctctgttttattatgtagagccattgtaatgggaatacgggatttcctatgttaatgctgatatttctgtgatccaataaatccttcttcacaatcatctcccagaggaaagaaggcattctgtgcagcagctctaggaaacatcaggtccccaatgtcctagacatcctaccctctttggccaggccattaagctgtgaaaaaacacactcagtaacttggataatgtcatagagtggtccttcccacagcagagtcaatgtaaagacctatgggagggcttcaggaatgactcctcagacaggagccctgggaagggcttctccaagagagaaagtgcactccagaggcaagagcactggccaagtcctgacctgataycggatgagctgtgtgatcatgggcacatcacgtctctgagccttggtgttcttcctgtgagatgggccaataacaccaggcacctcataggatggatgtgaagactgcatgatagagtagatagaaggcagttaaagcaacacctggtgctatggtttggatgtggtttgaccctgcaaaag

SEQ ID NO: 932846 - DNA, 598 bp, Homo sapiens
gtccttcccacagcagagtcaatgtaaagacctatgggagggcttcaggaatgactcctcagacaggagccctgggaagggcttctccaagagagaaagtgcactccagaggcaagagcactggccaagtcctgacctgataccggatgagctgtgtgatcatgggcacatcacgtctctgagccttggtgttcttcctgtgagatgggccaataacaccaggcacctcataggatggatgtgaagactgcatgatagagtagatagaaggcagttaaagcaacacctggtgctatggtttggatgtggtttgaccctgcaaaagctcatgttgaaatttggttcccaaggtggcagtgatgggaggtgggacctagtgggggatagttgagtcacaggggcagatccctcatgcatayattaatacccccttgagggagggagggagttctagctgtcgtgagactggattagtcactggagagcaggttgttataaaagcaaattcagctttctaaactctcttgctttctatatcaccttgtggtctctttgcgaatgtcagatccccttctgctttttgccatgagtgggagca

SEQ ID NO: 932847 - DNA, 585 bp, Homo sapiens
taccactatccaattggctgaccagccatatatccccaaggaagggatgggggaagaaaagctgagtgttctaaggaagtagcttattgaggaagggtataccaggagactcctcccactacagggcatcatgctgcttccctacaaggtcccaccatctccacctcagggtgtcctctgggaggagtgacaaagggactgatattcacttgacactamaagagacttggcagctgtgggcatcttggggtggccccaggcagctctgaaacccaggaccaggaaaccatagaggatgggctggggactcatcactctgtaacgtttccaaagaggaaacttaatccaaagacattctcaaaaggtgtctctgtctagggatgatgaagggaggacagtaacaaagattttatttattaatattcattttttttacagcaaaatgtctggtggtttttctctgcttcctctcatgtgaaatgttcacaaacacaaaaccttttacaaagagccatatattgctatgtataaacaaaatgacaattaaaatactagcctctgtttgaaaaataaactgggggacaa

SEQ ID NO: 932848 - DNA, 585 bp, Homo sapiens
taccactatccaattggctgaccagccatatatccccaaggaagggatgggggaagaaaagctgagtgttctaaggaagtagcttattgaggaagggtataccaggagactcctcccactacagggcatcatgctgcttccctacaaggtcccaccatctccacctcagggtgtcctctgggaggagtgacaaagggactgatattcacttgacactaaaagagacttggcagctgtgggcatcttggggtggccccaggcagctctgaaacccaggaccaggaaaccatagaggatgggctggggactcatcactctgtaacgtttccaaagaggaaacttaatccaaagacattctcaaaaggtgtctctgtctagggatgatgaagggaggacagtaacaaagattttatttattaatattcattttttttacagcraaatgtctggtggtttttctctgcttcctctcatgtgaaatgttcacaaacacaaaaccttttacaaagagccatatattgctatgtataaacaaaatgacaattaaaatactagcctctgtttgaaaaataaactgggggacaa

SEQ ID NO: 932849 - DNA, 658 bp, Homo sapiens
ggttatttaggtggaccccaaatccagtgacagggcgcttaagggagactgaagaggagacacagacacagaggaggaggctgggtggagacaagggcaaagactggagcgatgccacctctagccggagcatacctggagccccagaggctggagcaggcaggaagaggcctcccctggagcttctggagggagcatggcccttccgacagcttgattttggacttttggcctccagaactgtaagagatgacatttctgctgtctggagaccccagtttgtggcacrcagttgtggcagccccatgaaactgatagagtgactgcccctcgacgaggccagagagaacaccatcttcctcctcagacgcagccggggctggggagccgtgtccccgcagggaagaagagctggtctgggagctgcggcccctctgcctgtgggtcagactttcagattgctgccactggggattctctcaaagtgtcctttggtgcctctgaaccctccaacccaccgtgtgctcactgagcatgttgatggcatggaaggtggggcctggccaggccgggccggggagcctggaggctgggcccctaaggggcttgggcctcacctgggccatcctcgagttcttttcagggcagcgaggggcat

SEQ ID NO: 932850 - DNA, 791 bp, Homo sapiens
agagtttggtgaatgtgggttggaagaagaagggagagggccgcggccagccctgaatgggtttgggaagctttggccaagctttcgccaggctcttacggaacaaatacttctagggccattgagacctcacctatgccaccaagcacctccggagggttggcttgtcacctcgcatcctggggtgacactgtcctttcaaaattcatgcccccagaaacctcagaatggggccttatttggaaatggtctgcgcagatgaagygaccttcccttgggatgagggtgttccagatgaggatggccctaaatccagtgcgtggtgtccttgtaagtaaaagagaggacacggagacacacagaggagccgggcaggaggccatgtgaccaccagggcggagagtggactgatgtaatcacagccaaggagcgccctgagccacaggcagcgggaagaggcagggaggagccgcccagtagccttctgagggacgccttgagttcggaattccgacctccagagccgcgagagaacacgaccgagagggctgtgtcctgcgctctggcagcaggggaaaccggcgcacccgtgcgctgctgggccctgccttgctcttctgtgttgtgcggccatcgtcacccgtgttgctggaagagtgagtgacgtctccatgcaaaaaacgctggcccagcgccccacacgggacacagttgtcatcactgtcaacaacagtgttgacagtcacataattatggccatccagggtgctcacagcatcctcggctcacct

SEQ ID NO: 932851 - DNA, 772 bp, Homo sapiens
gcaattgtccagaaacacgatcagaaatgtaataaatgctgctattacacctaaaataattaacactaaatctctaactttatcaaatatacagagagcattcaaacttcaaatttggtgagtgtaatttaacaacttacatttgctcgtgtgctttataatactcaaattccgtactccctggctcacagcatgtgaggtgagaatggagttaataatttggggcagttcttttattttctttctttctttctttttttttttttttttttgagacagagtctcgctctgtcgcccaggctggagtgcagtggcgcgatctcggctcactgcaagctctgcctcccgggttcacaccattctcctgcctcagccycccgagtagctgggactacaggtgcctgccaccatgcccggctaatattttgttattattattattttttttttaattagaaacggggtttcaccgtgttatccaggatggtctcgatctcctgacaataggtgcctgccaccatgcccgggtggaactacaggtgcctgccaccatgcccggctaattttttgtaatttttttttttttttagtagagacggggtttcaccgtgttagccaggatggtctcgatctcctgacctcgtgatccacccaaagtgctgggattacaggagtgagacaccgcgccagtcctggggcagttcttttcaaaatgtgttcggtgacattaaactccagagtttttacagtctgagttgtttctttattgcca

SEQ ID NO: 932852 - DNA, 456 bp, Homo sapiens
gtcttgcctaattgctctggctagaactgccagtgctacgttgaatacaagtggcaaatgcaccatccttgtcttgttctagatgttaggaaaacagctttcagtgtttcatcattgatcatgatattaactgttgggtttttgtacatcccattgtcatgttgcagaagatcccttctatgcctagtttattgagtatttttattatagcagggcrttatatttcatcaatgttttttctgcatcaattgaaataataacatgcttattcatttcagtgttacagtatattacactgattgattttttatatgttgagccacccttgcattttggggataaatctcaaagggtgatagtttacaatcctttgattatgcagtattgctgctagtattttgctagtattgctagtattgtgctgagatttttgcttatatattcataagggatatt

SEQ ID NO: 932853 - DNA, 456 bp, Homo sapiens
gtcttgcctaattgctctggctagaactgccagtgctacgttgaatacaagtggcaaatgcaccatccttgtcttgttctagatgttaggaaaacagctttcagtgtttcatcattgatcatgatattaactgttgggtttttgtacatcccattgtcatgttgcagaagatcccttctatgcctagtttattgagtatttttattatagcagggcgttatatttcatmaatgttttttctgcatcaattgaaataataacatgcttattcatttcagtgttacagtatattacactgattgattttttatatgttgagccacccttgcattttggggataaatctcaaagggtgatagtttacaatcctttgattatgcagtattgctgctagtattttgctagtattgctagtattgtgctgagatttttgcttatatattcataagggatatt

SEQ ID NO: 932854 - DNA, 456 bp, Homo sapiens
gtcttgcctaattgctctggctagaactgccagtgctacgttgaatacaagtggcaaatgcaccatccttgtcttgttctagatgttaggaaaacagctttcagtgtttcatcattgatcatgatattaactgttgggtttttgtacatcccattgtcatgttgcagaagatcccttctatgcctagtttattgagtatttttattatagcagggcgttatatttcatcaatgttttttctgcatcaattgaaataataacrtgcttattcatttcagtgttacagtatattacactgattgattttttatatgttgagccacccttgcattttggggataaatctcaaagggtgatagtttacaatcctttgattatgcagtattgctgctagtattttgctagtattgctagtattgtgctgagatttttgcttatatattcataagggatatt

SEQ ID NO: 932855 - DNA, 605 bp, Homo sapiens
acacacccagataatccagtatgatctccccatttcgagatccttaatcacatctgcagagttctctgccatgtaaggtcatatcttcataggttctgaggattaggacctggggatcttaggggagctattattttgtctactaractcaatgatttggcttcccaccatcctaccaaaaacacttttcctaaggtgactaatgtcctccatctttctagtttcatgagaaatatctgttttacttggccactcagcagcattgagtgcagttacctcacttcttctcataggagtagttgcagtgactgcataatctccagtttctctttcttcactggctgctccttctcaggctcccttgcaaatgactttgcctcgagccataaacattaaaaatccgtgcagtgttgagcaaggttgtctttcctctctgtggttggccatccttttcaaagtagtaccctttttcagttgctgtaaagaaagagaagcctagaaacatccttgttttaattatcatctatatattcatgattcccaaatctgtatttccatttctgacttctgtgatcaagaacagattatttggctgccttttcaat

SEQ ID NO: 932856 - DNA, 618 bp, Homo sapiens
cactgagatggaaagcagagatgcatccatccacacttcctgcagagcggcccaagccccaaccccacctcgagctcctggatgcactgctatcaagaacaatgaggggctgaggggatggccagcctatgttgctgactccatcatcctaaccctccttctgccttctggtctcctcgtgcctcctcccagatcacccttctcttcccagcgccctaaagcctgtggggtgatgtcccattctggctgctccaggtgggagatgtgcgcgtgtctccctgccagttacccaggcttcactcttcgaacctggaccacagtctctggtgatgtgtgtagtggccacatcatgcaaatatagtctcaccattcctaggagctaaatgggtgtgtctagaaggggcatcagttcatcgggggagaggtgtgcacctgtatgkggggcaggagggtgtgcaagttcctggaggtgggttactccaaggcatgggcagtgcagagggagcctcgcctgggctcttgcctctttcccagatgcatccaatgggtcttggcaagttttgtttctcactctccctcttctccatttcccctgacccgccagggactctccaaata

SEQ ID NO: 932857 - DNA, 498 bp, Homo sapiens
ccctcagaccacaatggaataaaaactgaaagcaacaagatctcccaaaaccacataattacatgaaaattaaacaacttgcacctgaatgacttgtgtaaacaataaaattgaggcaaaaagaattatttgaaataaataaaaacagagacacaacattccaaaatcaccaggatgcagcaaaagcagtgttaagggggaattttatagctctaaacatctacatcaagaagttagaaagattccaaattaccaatctaacatcacatgtaaagaacctagtgaacaaactaacccaaaactagaagaaataactaaaatcagaacaaaactgaaygtaattgagactcaaaaatacatataaaaaatcaactgagcaaaacttggtttcttgaaagagtaaacaaaattgatagatcactacctaaattaacaaaaataaggagaaaagatccaaataagaacaatcagaaatgacaaaaatagcattacaactgc

SEQ ID NO: 932858 - DNA, 778 bp, Homo sapiens
cccaagcagctgggactacaggtgtgcgccaccacgcccagctagtttttgtatttttagtagagacagggtttcaccatgttggtcaggctggtctcaactcctggctcaagtgatccacccgtctcggcctctcaaagtgctgggattacaggcatgaactaccatgcccagcccaaaatctctatttcaataaaattacttaaatctgtttcttgacttacatagtcaaaatcttcaactgtcatattaagttatacacacatacacatatacatacatatacatatgtgtatgtatgtatwatacatacacatatacatacatatacacatatatgtatgtgtatgtatgtataatatacatattatacatagttatacatatatacacatacacatatatacacatgttatatacacatatatacatatgttatacatatatacacatgttatacatacatatatacccatacacatatgtatatacacattcctgaatatatatataggaaacttattattctaaaatcctggcatttttgataatccaggactaactcatagtggggaagagggtttctttatgtccctagcatctctgcttctttccctcatgacaccatagttaaagggtccagaggcagactctttaccaaaggaagaagtattagagtcgagatagaaatgagcaggcaggcattcaccttcaagaccaccagcccagctcactcagcttttttaccaatctctaaaactccttctctcctgaattc

SEQ ID NO: 932859 - DNA, 576 bp, Homo sapiens
gccaagagagctatctcccctaaccctggcatcacccctcccctaacgcaggctatagagctcatggcttcaaaagagacctctctctatagcttgaagagaggagagggaagactggggagactttgtcttgcatcttggataccagctcagccacagcagggtaaggcaccagtcaagtgaggcaccccctttcaggccctagctcccacaccataccctgggccagaaaggaacccrctgacttgaaggaaaaaatccagacctgccagcattcatcacctgctaacgaaacagactttgggccctgaataaccagccatgatagccaggtactatattaagggccttggtgagcctctgagacttgctggcttcagataccagcaccatcacacggcggtagagcaccaagtgggctcctggggtctacaatttcaggatttgactcttggatggcatttctggacctgcctgggccagatgggagtccactgccgtaaatggtaagccccaggtcaggcagcattcactacaagctgactcaagagaacttgagccttaaggaaacatcca

SEQ ID NO: 932860 - DNA, 576 bp, Homo sapiens
gccaagagagctatctcccctaaccctggcatcacccctcccctaacgcaggctatagagctcatggcttcaaaagagacctctctctatagcttgaagagaggagagggaagactggggagactttgtcttgcatcttggataccagctcagccacagcagggtaaggcaccagtcaagtgaggcaccccctttcaggccctagctcccacaccataccctgggccagaaaggaacccactgacttgaaggaaaaaatccagacctgccagcattcatcacctgctaacgaaacagactttgggccctgaataaccagccatgatagccaggtactatattaagggccttggtgagcctctgagacttgctggcttcagataccagcaccatcacayggcggtagagcaccaagtgggctcctggggtctacaatttcaggatttgactcttggatggcatttctggacctgcctgggccagatgggagtccactgccgtaaatggtaagccccaggtcaggcagcattcactacaagctgactcaagagaacttgagccttaaggaaacatcca

SEQ ID NO: 932861 - DNA, 611 bp, Homo sapiens
ctggtggggccttggagaacctttatgtctagctcagggattgtaaatacaccaatcggcactctgtatctagctcaaggtttgtaaacacaccaatcagcaccctgtgtctagctcagggtttgtgaatgcaccaatccacactctgtatctagctactctggtggggccttggagaacctttgtgtggacactctctatctagctaatctggtggggacstggagaacctttgtgtctagctcagggattgtaaatgcaccagtcagcgccctgtcaaaacagaccactgggctctactaatcagcaggatgtgggtggggccagataaaagaataaaagcaggctgctggagccagcagtggcaacccgctcgagtccccttccacactgtggaagctttgttctttcgctctttgcaataaatcttgctactgctcactctttgggtccacgctgcttttgtgagctgtaacactcaccgcgaaggtctgcagcttcactcctgaagccagcgagaccacgagcccaccgggaggaaggaacaactccagacgagctgccttaagagctgtaacactcaccgccaaggtctgcagcttcactcctgg

SEQ ID NO: 932862 - DNA, 611 bp, Homo sapiens
ctggtggggccttggagaacctttatgtctagctcagggattgtaaatacaccaatcggcactctgtatctagctcaaggtttgtaaacacaccaatcagcaccctgtgtctagctcagggtttgtgaatgcaccaatccacactctgtatctagctactctggtggggccttggagaacctttgtgtggacactctctatctagctaatctggtggggacgtggagaacctttgtgtctagctcagggattgtaaatgcaccartcagcgccctgtcaaaacagaccactgggctctactaatcagcaggatgtgggtggggccagataaaagaataaaagcaggctgctggagccagcagtggcaacccgctcgagtccccttccacactgtggaagctttgttctttcgctctttgcaataaatcttgctactgctcactctttgggtccacgctgcttttgtgagctgtaacactcaccgcgaaggtctgcagcttcactcctgaagccagcgagaccacgagcccaccgggaggaaggaacaactccagacgagctgccttaagagctgtaacactcaccgccaaggtctgcagcttcactcctgg

SEQ ID NO: 932863 - DNA, 591 bp, Homo sapiens
gagtctggtggggccttggagaacctttatgtctagctcagggattgtaaatacaccaatcggcactctgtatctagctcaaggtttgtaaacacaccaatcagcaccctgtgtctagctcagggtttgtgaatgcaccaatccacactctgtatctagctactctggtggggccttggagaacctttgtgtggacactctctatctagctaatctggtggggacgtggagaacctttgtgtctagctcagggattgtaaatgcaccagtcagcgccctgtcaaaacagaccactgggctctactaatcagcaggatgtgggtggggccagataaaagaataaaagcaggctgctggagccagcagtggcaacccsctcgagtccccttccacactgtggaagctttgttctttcgctctttgcaataaatcttgctactgctcactctttgggtccacgctgcttttgtgagctgtaacactcaccgcgaaggtctgcagcttcactcctgaagccagcgagaccacgagcccaccgggaggaaggaacaactccagacgagctgccttaagagctgtaacactcaccgc

SEQ ID NO: 932864 - DNA, 752 bp, Homo sapiens
tgtttgctttatttgaacaggatttgaactagtggccacctgcgattggctgaaactcagctaatgcgattgggtaagactcagctacttgttataagagtaggtcgcaagtctgttcacaaatgtgtttaggtcacagtttactatgtatggagaaacatttaggccaaacttaaaatatgtaaggaggcagctttaggctacatttaattttttaacaatttcccccctttagatcaacctctcaagattgagaggttggtaaatttggcaattttgagaggctgaccaaaactttaggcattgaagtcactctgtctccatcgttaacggacttatttcatctcaaatcccactggaaaacagcagaacagttttgtaggtggaaacaaggacacagaaatagaaaaaaagaacctgactgattatttcaggttacttgttttttagtggagtttagagcagaggggacttygttattatgatgcaatctcctgttttcaagagtttaaaaaaaatttggtctgttttgggatctctctgcttccttaaagtttcagtttgattacatcgcagttagcatgattgagtccattttgatttggactggtctgttggggccagtctagaacaaagacctcccataattttgtttaacaaaagaatcaaatgagcaaacacttagcaaagtaagtcttacagcagatactgagaactgcagaaaagaacaaagaaaccaagaaaacaagagc

SEQ ID NO: 932865 - DNA, 708 bp, Homo sapiens
gctgaggcaggagaatggcgtgaacccgggaggcggagcttgcagtgagctgagatagcaccactgcactccagcttgggtgacagagcaagactctgtctcaaaaaaaaaaaaaaaaaataaataaataaataaataaataaaataaacaaataaataaaaataagtaaaaaagacaatgctgatatcagatatctaaaatggactttgtaaaatcacctctaaattcctgaaagagataaaaagtattaaagcataattaatttgatcctgtatggcattcccaaaactctactaaaagattgcaccagtgtgaatatacaaatacatatactttacaaacgggtatatttaccacaggagctttctacttgtatcactagaaacttttaaaacaatcacccttcttacaaacttttattacgtatctccaagggatagctcyctaaaaacctccgaaataccacttactgcttagaaattttgtagaaaaactttttttttaaagcaaaaacagttgtaaacatattcaattaatacaaatgcttaatcaagaaaagggttttgggggagttttttgtttggctttttgtttgtttttttgctgtctgggtttattttctttgcttaatttacagagaattcacttcccagccaactttgcttatttttgaaatactatgcaatttggtcttctaagaatagttg

SEQ ID NO: 932866 - DNA, 551 bp, Homo sapiens
agaagattcctacatggggtagaaagtttgcatagatcagtggttttcaaactatttagcaatggaaccccgattgcaaaattaataaaattatattttattagtaaattatttttaagtttaaagccttccttttacttcctataaaagccactgatatgrtttggctgtgtccccacccaaatcttaacttgagttgtatctcccagaattcccatgtgtgtgggagggacccagggggaggtaattgaatcatgggggttggtctttcctgtgctattcttgagatagtgaataagtcttacgagatctgatgggtttatcaggggtttctgcttttgcttcttcctcatttttctcttgccaccaccgtgtaagaagtgcctttctcctcctgccatgattctggggacccccagccatgtagaattataagtccaattaagcatctttttcttcccagtctcaggtgtgtctttgtcagcagtgtgaaaatggactgatatagccactatccatgagatcagtaaatgcatttcagtgcaaacaaa

SEQ ID NO: 932867 - DNA, 659 bp, Homo sapiens
aatttgggtgtgttaatctggcccatttattgagtgacccaagaggctgacagttttgagtggggtccagaacaggagaaggctctgcaacaggtccaggctgttgtgcaagctgctctgtcatttaggccatatgacccagcatatccaatggtgcttaaggtgtcagtggcagatagggatgctgtttggagactttttcaggcactcataggtgaatcaaagtggaggcctctaggatttgggaacaaggccattttctgcagatagctactctccttttgagagacagctcttggcctgttactgggctttggtggaaactgaacgtttaactatgggtcattaagtcaccatgcaacctgaattgcctatcataaactgggtgctttctgacccatctagccataaagtgggtcgtgcacaggagcattccatcatcaaatgaagtatatacatgatcgggcttaagcagttcctgaaggcacaaataagttacatgaggaagtgactyaagtgtccataatctccactcctgcagccctgcctcctccccgagcctgcaccaatggcctcatgtggagttgcctatgatcagttgacagagcaagagaagactagggccacagatagttctgcatgatatgcaggcacaccca

SEQ ID NO: 932868 - DNA, 713 bp, Homo sapiens
attagggtgtctgttagtattacaatgctctataattaaggtcagtggaaaactacaacagcccaatccaggcagtactacaaatggcccagactcttaaggattgaaggtttgggtcacttcaccaggaaaaatccatgacatgctggggtgcctgctgaaggcaaagggaatacagaatgggtagcagaagaaggtagtcatcaataccagctacaatcgtgtgaccaactgcagaaatgaaaactgtaattgtcatgagcatttcctctttcttttgctaaaaacatgctwgtgcatgtatacacttatgctaagaaaatatcttcattttattcccttctcgtttatcatgtggcataagattattattactattattgacttcatatcagcatttaagtgttgttaagtttatgtaatagtatctggcttagggattggtgcatttctggttgtatgaaggatagttgtattatgttaggtgtaattacgaccttattattttctttatctgaagattatgcatgatctcaggagatgtgtatgggtttaagttgacaaaggggtggacttgtgatgattattactgagtgtcaacttgattgggttgaaggatgcaaagtattgatcctgggtgtgtctgtgagggtgtcgtcaaagggattaacatttgagtcagtgggctggggaaggcagatccacccttaatc

SEQ ID NO: 932869 - DNA, 713 bp, Homo sapiens
attagggtgtctgttagtattacaatgctctataattaaggtcagtggaaaactacaacagcccaatccaggcagtactacaaatggcccagactcttaaggattgaaggtttgggtcacttcaccaggaaaaatccatgacatgctggggtgcctgctgaaggcaaagggaatacagaatgggtagcagaagaaggtagtcatcaataccagctacaatcgtgtgaccaactgcagaaatgaaaactgtaattgtcatgagcatttcctctttcttttgctaaaaacatgcttgtgcatgtatacacttmtgctaagaaaatatcttcattttattcccttctcgtttatcatgtggcataagattattattactattattgacttcatatcagcatttaagtgttgttaagtttatgtaatagtatctggcttagggattggtgcatttctggttgtatgaaggatagttgtattatgttaggtgtaattacgaccttattattttctttatctgaagattatgcatgatctcaggagatgtgtatgggtttaagttgacaaaggggtggacttgtgatgattattactgagtgtcaacttgattgggttgaaggatgcaaagtattgatcctgggtgtgtctgtgagggtgtcgtcaaagggattaacatttgagtcagtgggctggggaaggcagatccacccttaatc

SEQ ID NO: 932870 - DNA, 647 bp, Homo sapiens
gagtgactagaaaggttgccagttttgagtggggttcagaataggagaaggctctgcaacaggtccaggctgctgtgcaagctgctctgccacttgggccatatgacccagcagattcaatggtgcttgaagtgtcagtggcagacagaaattctgtttggagccattggaaggcctccgtaggtgaatcatagcagaggcctctagggatttggatcaaggycctgccatcatttgcagataactactctccttttgagagacagctcttggcctgttactgggctttggtagaaactgaacttttgactatgggtcatcaagtcaccatgcaacctgaactgcccatcatgaactgggtggttttggacccatctacccataaagttgggcatgtatagcagcattccatcatcaaatggaagtggtatatatgtgatcaggcttgagcaggtcctgaaggcacaagtaagttacatgagtaagtggctcaaatgcctatggtccccactgctgccaccatgccttctgtcctccagtctgtcccaatgggctcatggggagttccctatgatcagtcaacagaggaagagaagacagaggcctggttgtcagatggttctgcacaacatgcaggcaccacccga

SEQ ID NO: 932871 - DNA, 528 bp, Homo sapiens
taggattggataggtgtatatgccccatgtgaaaatctgaggatacatgctcaataatgtataaaacctaacctaggagtcctgctggctgcaaacgtagcagcagaagatgtatccaggtggagatcagctcattagaccatttctccagccacacattaagtcaccagctttgctctgagaccttagacatgtgcttagactttccctgccaatctgaaattcattgactcttcctccttcctccatttcagtgtcatagctatgcagagaggaaccaggttactgaaacttggggtaggacttgtcaaaaactaaaaatgcaggacatatacatcaaaatgagatgagctgtttgttatctgatttaaaaaaaaawtttttttaaagagaacaagtctcactctgtcacccaggctggagtacagtggtgcaatcatagctcactgtaaccttgaactcctgggctcaagcaatcctcctgcctcagcctcctgagtagctgggactgcaggcatgtacgaccat

SEQ ID NO: 932872 - DNA, 573 bp, Homo sapiens
ctatccagtctcaggcagcctctattctgttgcctgtgtctggctggaattccaagccagtgggtcttatcttgtgaggtgccgtagaagtggggcctggagaatgacactgctcaactccctggattccacccccttgcaaaaggtatatgtggacctcccaccttgcctgagttccagacctggatccccagggatcctggggctggagtatacmaagctcctggatctctgtgtttgcctgagcagctactctgccaagactccacacagttctgtatgttggaaccaagcccctggtggcatgggttcacaaggggatctcctgatctatgggttacaaagacctgtaggaaaagtgtggtttcctggggttgcacaataactcaccaattcccttggctgggggtaggggttcccttggtgctgtgttattcctaggtggtctgtcatcccaccctgcttttcttcattctctgtgggtggagttgtttccctaatcagtcctggcataagaacctggatatttcagttgaaggtgtcatagtcactgtcccatttcgttcctcccca

SEQ ID NO: 932873 - DNA, 553 bp, Homo sapiens
ttcccttgctggcgaggagttgtgatcctttggaggagaagaggcattctggtttttggaattttcagcctttttgcgctggtttttcctcatcttagtggatttatctacctttggtctttgatgttggtgaccttcagatggggtttttgtgtagacrtcctttttgttgatgttgatgctattctttctgcttgttagttttccttctaatagtcaggcccctctgctgcaggcctgagggagtttgctggaggtccactccagaccctgtttacctgggtatcaccaatggtggctgcagaacaacaaagattgctggcctgttccttcctctggacgcttcatcccagaggagcgcccaccagatgccaaccagagctctcctgtatgaggtatctgttgacccctgctgggagatgtctccaagttaggaggcatgggggtcaggggcccacttgaggaggcagtctgtcccttagaagagcttgagcactgtgctgggagatctgctgctctcttcagagctggcaggcagaaaagtttaagtctg

SEQ ID NO: 932874 - DNA, 672 bp, Homo sapiens
tttgtgtacttattagctctacctttgcacctctcgtttatttctcaaccctctgcaacctgatgtccatgcagagcaatcactggaattgtgctcatctttttgtggccaagtccaatgaatatttttcactccttcgcttacttgtcctgtttgtttaatgtgtatcgagtctcctttmtgcatgaaaccacccacttagtgcttttgcatctctaactcccctgcactcttgagttcctcctgtctctctgcacacctcatatcccccagctcacacttcaaggatgggtgctcctgcacttctgtccttggttcttatctctccacattactctcccttgccaatttcatccatccccagggcctctattataatccacatattgatgattcccaagcctatcttcacattccagatctctcagattcatacctgtattcactgcctacttgtatgaatcaaaagcacctcgcactccatatattcaaatctcatcacctttcctccttttgttcctctagcattcatctctgcaaagggcccttctgtcaggtaaaaccagatactacaactcactcttgattcttccttttctgtcaaccaccacccaaataatcctgtctaattttttcatgtgtcacatatccacgcctttgtccccagactca

SEQ ID NO: 932875 - DNA, 645 bp, Homo sapiens
aggaaagccattagggactgtactgtgaggaacagtgcactccggcccaggtactgcacttttcccacggtcttcacaacctgcagaccaggagattccttccggtgcctacaccaccagggccctgggtttcaagcacaaaactgggcggctgtttgggcagacaccaagctagctgcaagagttttttttcataccccagtggttcctggaatgccagtaagacagaaccattcactcccctggaaaggggctgaagccagggagccaagtggtctggctcggtggatcccatccccacagtgcccagcaacctaagattcaccagcttgaaattcttgctgccagcacagcagtytgaactcagcctgggatgctcgagcttggtgggggaagaggtgtctgccattcctgaggcttgagtaggcagttttaccctcaaagtgtaaacaaagccacctggaagatcgaactgggcagagcatactgcagctcagcaaggccgctgtggccagactgcctctctatattcctcctctctgggcagggcatctctgaaaaaaaaaaaaaaaaaaaaaaaaaaaagcatccccagtcaggggcttagagataaaaccaccatctccctgggacagatgtcacctt

SEQ ID NO: 932876 - DNA, 620 bp, Homo sapiens
tgataagttttcttttataggttacctgatacctttgcctcacagctcttaagattttttccttcatcttgactttagataatctgattactatgtgcctaggcaatgatctttctgtgatgaatttcccaggtgttctttgagctgcttgtatttggatgtctagatctctagcaaggccagggaaattttcttcgattagtccctcaaatatgttttccagacttttaaatttctcttcttccttgggaataccaattattcttaggttggggcatttagcatactcccaaacttcttggtggctttgttcattttttaaaatcctttttgtctttgatggattgagttaattctaaagccttgtcttctagctctgaggttcttttttctgcttgttcaattctattgctgagamtttccagtgcattttgcatttctctaagtgtatccttgatttccagaaattgtgattgttttttatttatactatctatttcactgaagaattttcctttcatattctgtatcatgtttttaatttaagttggacttcacctttctctggtgcctccttgattagcttaataatcaaccttctaaattatttttcctgcaat

SEQ ID NO: 932877 - DNA, 575 bp, Homo sapiens
cctaagcaagcctgggcaattgcgggtgcccctcccccagccttgctgccgccttgcagtttgatctcagactgctgtgctagcaatcagtgagactccgtgggcattggaccctcccagccatgtgtgggatataatctcctggtgggccgttttttaagcctgtcagaaaagcgcagtattagggtggsagtgacctgattttccaggtgccgtctgtcacccctttgtttgactaggaaagggaactccctgaccccttgcacttcccaagtgaggcaatgcctcgccctgcttcggctcgagcacggtgtgtgcacccactgacctgctcccattgtctggcactccctagtgagatgaacccagtaccttagatggaaatgcagaaatcacccgtcttctgcgtcgctcacactgggagctgtagacctgagctgttcctattcggccatcttggctcctcccccagatctttctttctaaaggaatatttcttacacatctttaggacttcattgttaatatctcttcctctataaaacttttcaaagtaatactctgtattattctgt

SEQ ID NO: 932878 - DNA, 748 bp, Homo sapiens
atcattgctgaaacagattaataagacctcaggtatgtggtatatagccattgatttggcaaatgtgttcttttccatttaaattagttaagaggataagaaacagtttgcattcctgtggtacagaacaatatttatttacaattatgcctcaggactatgttaagtctcttgccttctgtcacaacatagtcctaagagatctagaccacctggacatatcaaagagtatcatcctgctgcattacaccaatgacatcatgctgagttggcaagataagaaagaaatggctaaaactgtggaggcctttgtaggatatgtgcatttcaaagaagaaaaccaaatcctacaaagattcagggacttgacactttagtaacatttagacagatttgttgctcaggagattaccatgatattcctttcaaagtaagagacaaattgctgcatcttgcatcttccaccaaaaacaaggaaacaaagtatctggtagaccactttgggtccacaggtagtatacccacatgtaagaataattactagagaagatgaaaacctytcagatttcctggagtagagaagaacactgcagtaaacccaggttgcagtgacatcagtgctgcctcttgggccatgtgattccactgacattatggtgttcagaagtaatgtgatatggagctcatagcaagcccaagtgggagaatcacaatgccatctcctgggatacagggctgtggtatccac

SEQ ID NO: 932879 - DNA, 620 bp, Homo sapiens
atattcacaaactatgcattcaacaaaggactaatatgcagaatctgtaacgaccttaaataatcaaacaagcatgaaacaaccccactaaaaaaagagcaaaagacataaatacacacttctcaaaagaacatacaagcagccaataagcatacgaaaaaacgctcaatatcactaatcatcggagaaatgcaaatcaaaaccacaatgagataccatttcacaccagtcagaatggttattattaaaaagtcaaaaaataacatgctggcaagactatagaggaaagagaatgcttatacacggttggkgggaatattaattactccagccattgtggaaagcagtgtggatatttctcaaagaacttaaaacagagctaccatttaacctagcaattccattactgggtatatacccaaaagaaaagaaattctgccaaaaagacacatgccctcatacactcattgctgtgctattcacaatagcaaatacatggaaataactcaagtgcccatcagtggcagattggataaagaaaatgtggtatatatatataacacagaattctacacagccataaaaaaataaaattatgtccttggcaataatatggacac

SEQ ID NO: 932880 - DNA, 620 bp, Homo sapiens
atattcacaaactatgcattcaacaaaggactaatatgcagaatctgtaacgaccttaaataatcaaacaagcatgaaacaaccccactaaaaaaagagcaaaagacataaatacacacttctcaaaagaacatacaagcagccaataagcatacgaaaaaacgctcaatatcactaatcatcggagaaatgcaaatcaaaaccacaatgagataccatttcacaccagtcagaatggttattattaaaaagtcaaaaaataacatgctggcaagactatagaggaaagagaatgcttatacacggttggtgggaatattaattactccagccattgtggaaagcagkgtggatatttctcaaagaacttaaaacagagctaccatttaacctagcaattccattactgggtatatacccaaaagaaaagaaattctgccaaaaagacacatgccctcatacactcattgctgtgctattcacaatagcaaatacatggaaataactcaagtgcccatcagtggcagattggataaagaaaatgtggtatatatatataacacagaattctacacagccataaaaaaataaaattatgtccttggcaataatatggacac

SEQ ID NO: 932881 - DNA, 620 bp, Homo sapiens
atattcacaaactatgcattcaacaaaggactaatatgcagaatctgtaacgaccttaaataatcaaacaagcatgaaacaaccccactaaaaaaagagcaaaagacataaatacacacttctcaaaagaacatacaagcagccaataagcatacgaaaaaacgctcaatatcactaatcatcggagaaatgcaaatcaaaaccacaatgagataccatttcacaccagtcagaatggttattattaaaaagtcaaaaaataacatgctggcaagactatagaggaaagagaatgcttatacacggttggtgggaatattaattactccagccattgtggaaagcagtgkggatatttctcaaagaacttaaaacagagctaccatttaacctagcaattccattactgggtatatacccaaaagaaaagaaattctgccaaaaagacacatgccctcatacactcattgctgtgctattcacaatagcaaatacatggaaataactcaagtgcccatcagtggcagattggataaagaaaatgtggtatatatatataacacagaattctacacagccataaaaaaataaaattatgtccttggcaataatatggacac

SEQ ID NO: 932882 - DNA, 568 bp, Homo sapiens
tcacttaacatctctcagactcatcttcttcatgtctaatacagcaaccctacaaatcctatataaagcacttgacacgtagaggcactcaatgcacattgtctattattactatttctctcttagatcgcttcagtaaaaacaaagttaattacggctaatatrttgggaagaaatcatttgggttgggatgggggtgggagtaaatacttcttgattcattcagttgcccattttaccaaagtacaaaacaagatatacttaaaactcacaatgcatgaaggcatatacaactatacaattcctgaacgtaaaaagtattcacattgttgttgggtgttggtgcaagtttctcaatagtcataagttacaaatcataatgttgttcatcagcagcaaggcattaccgtggtatttgggtgaggggtgttttaaataaagaagggaggagacttaaagagttgtgagatgaagcagggaatctcaaacatgggatacagtattccaagcatagatttaagtatagagggaaataatggatgaggaagcagaaggtcttggtctgtaa

SEQ ID NO: 932883 - DNA, 835 bp, Homo sapiens
gggttcctgagtctggtggggccttggaggacctttatgtctagctcagggattgtaaatacaccaatcggcactctgtatctagctcaaggtttgtaaacacaccaatcagcaccctgtgtctagctcaaggtttgtgagtgcaccaatcgacactctgtatctagctgctctggtggggccttggagaatctttatgtctagctcagggatttaaatacaccartcagcacccagtgtttagcttaaggtttgcgattgcaccaatggacactctgtatctagctgctcttgtggggccttggagaacctttatgtctagctaagggattgtaaatacaccagtcggcactctgtatctagctcaaggtttgtaaacacaccaatcagcaccctgtgtttagctcaaggtttgtgaatgcaccaatcgacactctgtatctagctgctctggtggggacttggagaacctgtgtgtccaaactctgtatctaactaatctgatggggacgtgaagaacctttgtatctagctcagggattgtaaacacaccaatcagtgccctgacaaaacaggccactcggctctaccaatcagcaggatgtgggtggggccagataagagaataaaagcaggctgcctgagctagctgtggaagggaaggtccccttccacactgtggaagctttgttctttcgctctttgcaataaatcttgctactgctcactctttgggtccatgctgcttttatgagctgtaacactcaccgtgaagatctgcagcttcactcctgagcccagcgagaccacgagcccaccgggaggaacgaacaac

SEQ ID NO: 932884 - DNA, 563 bp, Homo sapiens
aaatctacttaaggcattgatttcgctgcttatcaccaaagtcctggaaatttttcatgcaaaaataaattttttttttttgagacagtcttgcactgttgcccaggctgcagtgcagtggcaatctcggctcactgcaaactctgcctcctgggttcacgccattctcctgcctcagcttcccgagtagctgggactacaggcacctgccaccacgcccggctaatgttttgtatttttagtagagatggggtttcacggtgttagccaggatggtctcgatctcctgacctcgtgatccgyccgcctcggcctcccaaagtgctgggattacaggcatgagccactgcgcccggccaaaaatttttttaaatatagttttatagccctatagtttcattgcctgtgtcttattacctttcagattggaagccttcagaccagggaccatgtcttatttttgttttttgttgcaaaacagattctggtgtcatgtgaacatttaattatataaatggtatgtgatggactcagccacctgccaatacaatagttaaatgctc

SEQ ID NO: 932885 - DNA, 645 bp, Homo sapiens
catgacattagactctcattagggcacacctggcagccactaccagtggataagagttggcattgaagataaaacctatgagccacatatgacttaaaagtttgatacctttgtatggatagatctacatacacatacatgcacatgtacatacacacacaaatgcctcattggagtgcagttcagtcattgtagcttaacctgtaatactcacaccatcatctctattatgaattattccattatttcctaaatgggccccatgttactgtgcttgccctcatacactctattcctaacttttaaaatataacttatatkatgtcattcctttcctcagagctctccagatgttccccctttcacttagagtaaaacagtctacaaaaccctacatggtctcataccgtcatatttctgccttcattttctattttttttttctgtttgccactcttcttcaatcaaactgggctttgtgctattcctagaaaatgcaatgcctggcggactctgtcttgttgccttaaatatactggctgtttccctgtctgcaacataacttcccccaaatatccacatggcctctcactgacttctccaagtctttgcaaagatgtccccaatgggtgtgccctatcctga

SEQ ID NO: 932886 - DNA, 757 bp, Homo sapiens
tggctaaactaccaaaaactaacaataccaattgctagtgaggctacagagcaacggaaactctcattcatttctggtgggaatgtaaaatggtctagccactttggaagacagtttcacagtgtcttataaagctaaatacagtctaaccacacgatcagcaatcacacccctaggtattactgatttgaaaacatgttcacacgaaacctacacayaaatgtttgtaacaactttcttcataaagttttgttggtaagacatattttgccaatggtacagatgtggggtgtgagggaaaagggagaagtcaagtttaacttacaggtttttgacttcctcaactggtgaatggcaatgccatttactgagaaataaagacaaccaactgcagaaggaataggtctaggaagaaaagtcacaatttccttttttgacatgttaaggtgagatacatctaaatttgtcaagtaggtagttggtaatactgggcaggtgagaaaatagagtaaaatctgtaaatttgtatgtaattagtgtctatacatgatatttaaactcatgtatccagaggcagaagcataatacaaaagagggctcaacactgagccctgggatattccaatatttagaagttgaatagaaaaggaggagtgaaaaaacaagagtgaaaaggaacatacagtgaggtaagaagaaaaccaagagagcaccgtaaattcaaagtcaagtaaagaagctgtttcaaggaagtgac

SEQ ID NO: 932887 - DNA, 534 bp, Homo sapiens
attgcaagtatcaaaatgtctaaggtgtgtgtgtacatttgtatctatgtgtaaatagtataggtctatgtatctatagaaatgtaaaaagttatgaacattatggtgaactgatggctgtgtcattaagatcaaatattcactatgtttccatctgtctagtaaactcttctcttttgtacctaaaaattgcaggcttgtttagcctayagtaattttaccccatctttgccttgcttgaggcactttattagttatgcttgttcgtacatttaatttcccatccctaatcatttgtggctcatgtggttcattgatttcagagggaggctgaacatgagcgaaggaaagctgcagaggggaatgaaaatcaaactgccatgaaacctaaaatcattgcagtggcaatgaaatagatgtataaaaagaaaatatttcttatcaaatgtgcaaatattaacataagcatatagttgggatttttgcttttgtttgggattttttgcaattagacagttatttctgcataagagg

SEQ ID NO: 932888 - DNA, 620 bp, Homo sapiens
aagctaatgtataaaatttcaatgaaaatcctagtatttggggggaggggggagggatagcattaggagatatacctaatgctaaatgacgagttaatgggtacagcacaccagcatggcacatgtatacatatgtaactaacctgcacattgtgcacatgtaccctaaaacttaaagtataataataataataagaagaagaagaaraagaaattgtggcatacatatatgatggaatactactcagccataaaaaggaatgaatcaatggcatttgcaatgacctggatgaaattggagacttattctaagtgaggtaactcaggaatggaaaaccaaacattgtatattctcattcataattgggagctaagctatgaggatgcaaaggcataaaaatgacacaatggactttggagactcaggggaaagggtgggaagggcgtgagggataaaagactacaaataggatgcagtgcacactgctcaggtgatgagcgcaccaaaatctcacaaatcaccactaaagaacttactcatatacaaacaccacctgttctccaataacctatggaaataaaaaaattttgaaaaaagaaaaaaaaaagaaaatcctagt

SEQ ID NO: 932889 - DNA, 656 bp, Homo sapiens
gcagctaaaagggccccagatacatcttaggccactgccccagaggctacaaacccaaaactgccaaggcttccacatagtgttaagcctgcaggtgcacagagggtaagagttgaggcttggaagcctctgcccggatttcagaggatgtatggaaaagcctgtatgtccaggcagaagtctgctgcaggggtggagagctcatggagaatctctactatgtcagtgtggaggggaaatgtggaggtagaatcccctcacagagccccaactgggaaactgcctagtggagctatgagaagacagctaccatcctccagatgtcagaatagtagattcaccaacagcttgcaccatgcacctggaaaagccacaggcactcaacaccagcccatgaaaacagccacaggggctgtatcctgcagaaccacaggagtggagctgctyaaggccttgggagcccaccccttgtatcagtgttgcctgagacattgagtcaaagaaattattttggagctttgatatttattgactgccctgctaggttttggatgtgcatgggccctgtagcttctttgttttggccaatttctcccttttggaatgagagcatttacccaatgcctgtaccctcattgtatcatggaagcaactaa

SEQ ID NO: 932890 - DNA, 723 bp, Homo sapiens
atactgaagacttaaaggtttttggcttctgaagcaaaggattttctaggtaatcttgcctataaggtccttgacttgtgccgtcaaatgctgccaactgtgatttgcaggaaatcaggaaataacagtgcggtctgtttttctcctgtgtactgtgtaaggttgggagtttttcattataattaccatttgctagtgaaaagctcatttctcaattttactgttgactggatagaaaccaaatttgccagagatatgtgtgcacgtcctcctctcctccacaatgaactccaacaccagtcaaggcacagtgtcacatgcggtccttagaacaagtcaggagcttctgctcaaaaacctccaggacttgagcttaggccaagattttgcttctttttttttttttttttttttttggtaatctctttgttctctgaacagaaagaatctracagagcaaaaaccaaaatttgaaattatgctaaaataaaaatgcttgtaggttattgcagtgtagattatgcaaaaaaagaatcattaggatagggcaatcagcttccattaaataagcctaaaagcagcagcttgggggataaaaaagaaaaaaaaaagaagaaaagaaaaaagaaaaagacacactgagacattgccttcggtgccccctgctggaacaacggtaattatgcttgttagaatatttagcataattagtctttagctgcc

SEQ ID NO: 932891 - DNA, 616 bp, Homo sapiens
ttcactgctatcaccatccaacaataagtggattccagatcaggttccaagatggccgaataggaacagctccagtctacagctcccaaggtgagcgatgcagaagacgggtgatttctgcatttccaactgaggtaccaggttcatctcactggggcttgtcggacagtaggtgcagcccacggagcatggcggagcatcgcctcacctaggaagcgcaacgggtcggggaattccctttcctagccaagggaagctgtgacagatggtacctggaaaatygggacactcccaccctaatactgcacttttctaacagtcttagcaaacggcacaccaggagattatatcctgtgcctggctcagagggtcccacgcccatggagcctcgctcactgctagcacagcagtctgagattgaactgcaaggtggtagcaaggctgggggaggagcatctgccattgctgaggcttgagtagccaaacaaaatggctgggaagctcgaactgggtggagctcaccacagctcaaggaggcctgcctgcctctgtagactccacctctgggggcagggcatagctgaacgaaaggcagcagaaacttctgcagacttaa

SEQ ID NO: 932892 - DNA, 601 bp, Homo sapiens
ttttttaggtacagtatttttggttgacagtctttttccttcagcactttaaatatattattcaactatctcctgccctggaaggtttcttcttagaagttatttgcttagctttggaactcctttatatgttatttgctgttttgtttttgttattgttgttacatttaggaccttcttttttcctttaatctttgatagtgttaatgtcttgagttaatctyattagaattgaatatgattggagattttgaccttcctgcacatggatatttatatctttctctaggcttggaaagttttattctattatttcattaaataaacttcttatcattttatcttcatctattctgttttgaaggtcaatgactggtaatttgcccttttgatgctgtcttatcaatcacataagctttctttatgacttttcattatgtttttcctctaactttatattttcaaataacctgtctttgagttcacagatcctttattatctttgatcagttatgctgttgatgctctctatggtgtttttttctttgttcattgtgtttttatttccagaatttctatttgatttttaaaattgtttaaa

SEQ ID NO: 932893 - DNA, 576 bp, Homo sapiens
gcccactgccctgaagggagagacagggttttgagcccagcatggcaccagtacttgcccaggaattgcagtctttgttgcctagactgccttgcaaatttgtttagaaacccagagccctttagccaacggtggcaggccttgttggtactcaggtcccaaccattgagacagaagatttacccatggctagggctagtataaatgcctcctccatgggctctggcagagttctgccccatgttgctttccactgtgacagggcaggactgagttccagtgcaaaatcctgtaatcactgtgctctgcctcccttaagcacacagattctctctctgtgccatgaagctgctgccagggaattggggacgggaggtgcaggygattcaagaatgtctttcctaccttcttcagtgctcctttccttaatatgatgttaaaaccaggcactattatagctcatctgagttttttgttcttgtgaaggggcttttttgtgtgggtagttgttcaatttggtcttcctgtgagggagatgattgccagaggcttctatttggctatcttgctctgcct

SEQ ID NO: 932894 - DNA, 576 bp, Homo sapiens
gcccactgccctgaagggagagacagggttttgagcccagcatggcaccagtacttgcccaggaattgcagtctttgttgcctagactgccttgcaaatttgtttagaaacccagagccctttagccaacggtggcaggccttgttggtactcaggtcccaaccattgagacagaagatttacccatggctagggctagtataaatgcctcctccatgggctctggcagagttctgccccatgttgctttccactgtgacagggcaggactgagttccagtgcaaaatcctgtaatcactgtgctctgcctcccttaagcacacagattctctctctgtgccatgaagctgctgccagggaattggggacgggaggtgcaggtgattcaagaatgtctttcctaccttcttcagtgctcctytccttaatatgatgttaaaaccaggcactattatagctcatctgagttttttgttcttgtgaaggggcttttttgtgtgggtagttgttcaatttggtcttcctgtgagggagatgattgccagaggcttctatttggctatcttgctctgcct

SEQ ID NO: 932895 - DNA, 779 bp, Homo sapiens
agattgaggcaggaggattgtttgaacccaggagttcgaggctgcagtgagctaggattgtgccactgcactccagcctgggcaacagagcaagaccctgtctcttgaaaaaaaaaaaaaactttaaaaaaatcacatgttttgaggttggctcagcttcttgaatctgtgtgtttgttgtttttagttagggaattgttgagttttttgtttttatttttatttttttaacaaatttagaagttttttgccattattttatgaagtacttttcagccctgctctcttcctcctctccttctgggggacaccaataacaagacacttagatcttttgttatagtcccacaggtccctkagcaccacctcattactgccaggtactcgtagaagtctaggttcctctttggcctctgttggcaagccagggggagaagaggctcttgattaactgctgggctgagttgggagctccctctccctactaggccactgctttgtctgagaggggaaggattgctttattatttcttaccatctggtttccactgacacccaagtggtgtggccatggtatctctggccagtggtgaaaattctgactctgcagtaggtctctgacactatcccactagggagggaaaacagtgtctcatcattgccacgggaagatagatatccaagctcctcacatggtctctaagggaataaggaactaattactgtgggtggggatgagagtcccaagccctcactacttggccttcttaacctggcat

SEQ ID NO: 932896 - DNA, 602 bp, Homo sapiens
agccagaatagaagggaaccaacatcaaaaaggagacagaggcagagaatagagaaaatggaagagaggcaattaccaaaataattcaagaaaacattatataattgatgggcatgagttattagactgaaaaagcccactggatacccagcacaatggatggagatgtgctccatccttgttctagacctatgccagtttcagagttctagaacaaggaaggattccagaagtatataagttgagaggcaggaatatatacaaaggatcaggaatcagaatggctttgggcttgccaaagcaacattgaaactagaagaccaatgccttcaaatttctaaaggaaaattatttctaagctagaattctacaggcagccaaactatcagtaaaatacagagaaaaatatgttttcatacattccaagatctcaaaaaaactkacatcccattaaatattgctcaagaacctactgaaagacgtgcttcgccaaaatgagagtactacaaaaaggacgagtgcgtgggatacaagacaggagatccaatgaaagagagaggtgaaggcagttcctaaggtgcaggtgatggaaagggatttct

SEQ ID NO: 932897 - DNA, 440 bp, Homo sapiens
gacctggtgggaggtgattggataataagtgtagtttcccccgtactgttcaaatgatagtgaaggaattctcacaggatctgatagttttaaaagtggcagtttcccatgcactctatctctcctgatgccttgtgaagaaggtgcttgcttctccttctgccatgactgtaaatttcctgagacctccccagccatgtggaactgtgagtgaattaaacttcttttatttataaattacacaatcttggatagtatctttatagcagtgtgaaaattgactartacaccagggtaaagcctgccaaacttcctgagttgaggtggagctgagagtctacagagaacaaggaaattagagatttcaggacaaataattatacagtagatattttcaagagagagaactacaaagttctgtagaagttgccttagagtat

SEQ ID NO: 932898 - DNA, 622 bp, Homo sapiens
gttgtagctggtattgataactaccttctactacctattctgtattccctttgccttcagcaagcacctcagcaggtcatggtttttttcttggtggagtgacccaaaccttcattccttcattcctgaagggtctggactatttgtagtcctgcctggattgggctgttgtagtttcccattgaccttaactacagggcatggtaatactaagagacacctcaagggatctcctgtatccacacatactcttccttatctccatggtatagtagtaaactgattttatcttgatagtttgcatcaatcaccccagccmacgctgtaactcccttattagcctgttttcttaaaggtaagaggagcccaaagtgtccagatagggatcttaacttccagtttaatggaatcactgttgtgtctcctggtggcagcattcctccctctggaactaagacctctaagccagcagagcataaagtcatgggaacaggaagcaaaaattttgctagtggtttgctaggggtgatggtgagtggtgccacttccacttccatcccttgattactggacctgtgattaattagcaaatgccagacctctacatgggtcagactattct

SEQ ID NO: 932899 - DNA, 481 bp, Homo sapiens
gtggttgtagctggtattgataactaccttctactacctattctgtattccctttgccttcagcaagcacctcagcaggtcatggtttttttcttggtggagtgacccaaaccttcattccttcattcctgaagggtctggactatttgtagtcctgcctggattgggctgttgtagtttcccattgaccttaactacagggcatggtaatactaagagacacctcaagggatctcctgtatccacacatactcttccttatctccatggtatagtagtaaactgattttatcttgatagtttgcatcaatcaccccagccaacgctgtaactcccttattagcctgttttcttaaaggtaagaggagcccaaagtgtccagrtagggatcttaacttccagtttaatggaatcactgttgtgtctcctggtggcagcattcctccctctggaactaagacctctaagccagcagagcata

SEQ ID NO: 932900 - DNA, 621 bp, Homo sapiens
ttgataactaccttctactacctattctgtattccctttgccttcagcaagcacctcagcaggtcatggtttttttcttggtggagtgacccaaaccttcattccttcattcctgaagggtctggactatttgtagtcctgcctggattgggctgttgtagtttcccattgaccttaactacagggcatggtaatactaagagacacctcaagggatctcctgtatccacacatactcttccttatctccatggtatagtagtaaactgattttatcttgatagtttgcatcaatcaccccagccaacgctgtaactcccttattagcctgttttcttaaaggtaagaggagcccaaagtgtccagatagggatcttaacttccagtttaatggaatcactgttgtgtctcctggtggcagcattcctccctctggaactaagacctctargccagcagagcataaagtcatgggaacaggaagcaaaaattttgctagtggtttgctaggggtgatggtgagtggtgccacttccacttccatcccttgattactggacctgtgattaattagcaaatgccagacctctacatgggtcagactattctgattgctgcttt

SEQ ID NO: 932901 - DNA, 607 bp, Homo sapiens
tgacctgggacaagaaaagaccagcaacttgccagagaatgagaccaattctggagcaattcatgttccagagttctgcagggatcaactgaggctagtcacgggttcctgaaccttcaacataggctttacttttagggaactcaaacaaatgatamggaagcagggcaaggacgtgctgggtagagaagggagggtccctagctagggcttcacccctgggcttgtgcccacggacctagatgaggacaagcatttctgtttttgcgcctaaatgttgtattttctatgaccaccctggcccaccacacccctatcctgtgcttatcaaaaccacgagaccctagcaggcagagacataagtggctggatgtccagaggaacacaccggcggaagagcacactgacaggctccagcagacgaggcaggccatcaacggagggaaccacacggagaaaaaccaccaccaccttcccactccattcccctcctggcctccccatccacctcactgagagctaccacctctcaataaaacatcttgcacccaccctccaagcccatgagtgatccgatttttccagtacactaaggcaagaacctggg

SEQ ID NO: 932902 - DNA, 588 bp, Homo sapiens
caggaaaatctgaggattcacttcatcaacaggaagatggtggcagggaagtcttgcatttgtaagttttaagattatcaattgtcgaaacatttgaagaaggcatgggtaatttttttgtttttgagatagggtctcactctgtcacccaggctggagtgcagtggcacaatctcagctcactgcagcctctacctcctaggctcaagcgatcctcacacctcatcctcttgagtagctgggactacaggtgtgtgccaccatgcctggataattttttatgtttttggtagagacagaattttgtcatgttgcccaagctggtcttgaactcctgagcacaagcgatctgcccatcttggcctcccaaagtgctgggattacaggcataagccaccagataattttttaactsattaatatggtcaaagatgtggctcttttctaaagcacatccttattaagtataatgaaagctacctgtctagctaaccctgtgatgctagacaagtaacttgatctttctgggtgttaatatcttatcactaaatgaggcatatggatgagtttttttttttgggggggggt

SEQ ID NO: 932903 - DNA, 569 bp, Homo sapiens
tcactatcctgagaacagcatgggaaaaacctgcccttatgattcaattccctcccaccaggtccctctcatgacatgtaaggattattacaattcaaggtgagatttgggtgaggacacagagccaaaccatatcattctgctcctggctcttcccaaatctcatgtgctcacatttcaaaaaccaatcatgccttcccaacagtgccccagagtcttaactcatttcagcattaattcaaaagtccacagtctaaagtctcatctgaaataaggctggttccttccatctatgagcctgtaaaatcaaaagcaaattagttactttctagacacgacagaattacagwtattgagtaaatacacccattccaaatgcgagaaattggccaaaacaaatgggctacaggccccacgcaagtctgaaatccagcagggcagccaaatcttaaagctccgaaatgacctcttttgactccatatctcacatctaggtcacactattgcaagaggtcagttcccatggccttgggaagctctgtccctgtggctttgcagggtacagcttc

SEQ ID NO: 932904 - DNA, 650 bp, Homo sapiens
tattccctgccaggcacccatggagtctccccctcccccagccagggagtccaaccccatcagacagcaattaagcttctctctagggtggaggaactatttgcgtaagaataagaggtttttcccccaggcatccctttttcttctccacttcatcagcagttaacttttaaatgagtttatttttccttttagaagacattttcctaggctaggaatgataaggatcattatcataatttagtccacctatttatgtggactaattatgtttatattctctgtaaagttttaattgtgaaaaaggatttgtgaggttggtcttaagctgtagccaatgtggtatgctttgcatgtctgtgtggtcagtagcaaactttgctgcacacctycatcttgttttatgtcctgagggcatatgtcctgagggtgtggcctgtaaccacatggcaaggctttgtttagcaatcctgcctagggaatgagtcctttctggtttgatatctgcacattttcctagccctgtctcttaaagggctccacccagcgactgggttttcttctgcctgtctgtgtagctatatatgtgttatgtatatgatgtctgtaaaaagagctctaattaatttggcctaaaggaagacaagcac

SEQ ID NO: 932905 - DNA, 565 bp, Homo sapiens
gggctaatgcctggccaaatagatgggggctatccttgaacccttggggtaaaacagtccaggtgagttgagacattggatttgaaggatcttcaaaggcaaacaagaactgagagtcaggatgcacagcgatgcagaaaaaggcagccttaaagtccaggactgtaaaccactctatttcctctggtatttgggaaagcagagtataagggttaggtacagctgggtatggagtgacaacggcctcactgataatcctgagatcttgcactaacctccactgtctgatgggtttytgtactcctaaatttggagtattgcaggggctattgcatgcttttactaggccttgggcttttaggtccttaaaaatcttttggagtcattgttggggctcgggtctaagggggtactgcttttgttagggaaaggaggcggaatcctttagtttaacttgaacaggatgggcattctttgctcgtccatattgtccttctgttgcccagacttcaggattaattccttcctcaagcaggggacagcaaacgtgtgttccttctcctat

SEQ ID NO: 932906 - DNA, 607 bp, Homo sapiens
gcctgcaaggtattgccacctagctggtgctgtaactgagaatttaaaaagtcattttatcttcctgtcgaggctgctgttcaggatgatgaaggatatggtaggattagtgaattccatgagcatgggcccattgctgcacttctttagctgtgaagtgagttattggtgagaagcaatgctgtgtggaatactatgacagaggataaagcattctgtgagtccatgaatggtagttttggcagaagcattgcatgtaaggaaggcaaattcatatccagaataagtaaggtcaaaacattgycccttccacgataggagctgtccaatctagtcaacctgcaaccaggtagctggctgatctccccagggaatggtgccatagcaggggatcagtgtcaatctctgttgctggtacattgggctctcagcagtggccgtagcctggtttgccttggtgagtggaagctgatgttgctgaacccatgcataatctccatccctgccaccggggccactttattcatgcgcccattgggcaagcatgaggtggctggcaatagggctgactgatatccacagaacagtcatcctagctatgtaatta

SEQ ID NO: 932907 - DNA, 607 bp, Homo sapiens
gcctgcaaggtattgccacctagctggtgctgtaactgagaatttaaaaagtcattttatcttcctgtcgaggctgctgttcaggatgatgaaggatatggtaggattagtgaattccatgagcatgggcccattgctgcacttctttagctgtgaagtgagttattggtgagaagcaatgctgtgtggaatactatgacagaggataaagcattctgtgagtccatgaatggtagttttggcagaagcattgcatgtaaggaaggcaaattcatatccagaataagtaaggtcaaaacattgccccttccacgataggagctgtccaatctagtcaacctgcaaccaggtagctggctgatctccccagggaatggtgccatagcaggggatcagtgtcaatctctgttgctggtayattgggctctcagcagtggccgtagcctggtttgccttggtgagtggaagctgatgttgctgaacccatgcataatctccatccctgccaccggggccactttattcatgcgcccattgggcaagcatgaggtggctggcaatagggctgactgatatccacagaacagtcatcctagctatgtaatta

SEQ ID NO: 932908 - DNA, 577 bp, Homo sapiens; identical to SEQ ID NO: 932050

SEQ ID NO: 932909 - DNA, 592 bp, Homo sapiens
acagcaagatgaagtgttttttctaacagccagttttgttcactttattattaaatatgcactttttaaattaacagcttgaattctagaatatatttttgaaaatcactaatgatttttgtaaaaatagaaaatctgttgtacctttatcttaaaattcacttcttatctattttctagatttgatgttttgtcattttaaaggatactagacaagaggatctcaatttggatcactatattgggctcctaatatcctaatataattttaaatcatctcaaacaatgcattattaccatatacatcagcatttcccaaactgtgctataagctatgtatacttttgctatttttgagctaaaatatgcttacaaatatataaaaatakaaaaatatatttaggtgttgttatgcaataatgcacttttcaaaaagaaacgatataccagtctcaagaatacccggaagctgcatgaaaattcttgattccttttatatatagtgacagaaaaagatgtaaatctaacaattggttatttttattgtttaaagttttttctataagcacatgtgaattaagtattcattatt

SEQ ID NO: 932910 - DNA, 553 bp, Homo sapiens
ttttgggttgagacgatggggttttccaaatatacaatcatgtcatctgcaaacagagacaatttgacttcctcttttcctatttgaataccctttatttctttctcttgcctgattgccctggtcagaacttccaatactacrtcaaataggagtggtgagagaggtcatccttgtcttgtgccggttttcagagggaatgcttccagcttttgcccatttagtatgatattggctgtgtgtttgtcataaatagctcttattattttgagatacgttccatcaatacttagtttattgagaatttttagcatgaagggtgttgaattttgtcaaaggccttttctgcatctattgagataatcatgtgttttttgtcattggttctctttatgtgatggattatgtttatcgatttgcatatgttgaaccaaccttgcatcccagggatgaagccaacttgatcatggtggataagctttttgatgtgctgctggatttggttccctagtattttatcgaggatttttgcatcaatgttcatcagggatat

SEQ ID NO: 932911 - DNA, 553 bp, Homo sapiens
ttttgggttgagacgatggggttttccaaatatacaatcatgtcatctgcaaacagagacaatttgacttcctcttttcctatttgaataccctttatttctttctcttgcctgattgccctggtcagaacttccaatactacgtcaaataggagtggtgagagaggtcatccttgtcttgtgccrgttttcagagggaatgcttccagcttttgcccatttagtatgatattggctgtgtgtttgtcataaatagctcttattattttgagatacgttccatcaatacttagtttattgagaatttttagcatgaagggtgttgaattttgtcaaaggccttttctgcatctattgagataatcatgtgttttttgtcattggttctctttatgtgatggattatgtttatcgatttgcatatgttgaaccaaccttgcatcccagggatgaagccaacttgatcatggtggataagctttttgatgtgctgctggatttggttccctagtattttatcgaggatttttgcatcaatgttcatcagggatat

SEQ ID NO: 932912 - DNA, 583 bp, Homo sapiens
tggggacgcagaaagagtggcagcggccaggctgcccagcttcgtgaaggctctcggtgcgccgcggcccgcaggcacctggcacgcgccctccctgccgccaggatgcccaagaggaaggtcatctccaccgaaggggccgccaaggaagagcccaagaggacatcggcgagtttgtcagctaaacctcctgcaaaagtggaagcrcagccaaaaaaggcagcagcgaaggataaatcttcagacaaaaaaacgcaaacaaaagggaaaaggggagcaaagggaaaacaggcagaagtggctaaccaagaaactaaagaagatttacctgcagaaaatggtgaaacgaaaactgaggagagtccagcctccctgatgaagcaggagagaaagaagccaagtctgattaataccctacactacgtcttctcagtggtccctgtcccccttcttgtacaatccagaggaatatttttatcaactattttgtaaatgcaagcttttgagtagctctagaaacatttttaagaaggagagaatcccacctcatcccattttttaagtgtaaatgcttttttttaag

SEQ ID NO: 932913 - DNA, 623 bp, Homo sapiens
aatgacaaaaacaaaaatgaaaaaaactatacctatgtatatcatattaaaacttcagaaagttaatgacaaataaaaaatatggaaagaagacagagaaaagaaacaacttgtgtatagcagagttaaggtaagattatatttgacccatcagaaaccatgccagcaagaagagagtggagttaaataattgaatctttaagatagagaaaccaccaaactaaaattctgtacccagcaaaattatccttcaaaagcaaaggaaaaataaagactttgttggacaaaattttttttaaaaagagagtttgttggcagtagacttgctttagaaaaaatgttgaaagamgttctttgatagagctggaaggcattgtgttacatgaaataagccatgcagagaaaggcaaataaaaaagttaaattcatagaagtagagagtagaatggtggttcccagagactggagaaggaggaggaaatgaaaagatattttccaggggtaaaaagttttagttagacaggagaaattggtttttgagaactattgcacagtaatgttgactatggtttataataatgtattatatatttcaaaatagctgagtaaatttcaaataattc

SEQ ID NO: 932914 - DNA, 691 bp, Homo sapiens
ctgtgcacctacaacgtgccagacaccatactcctcaacactctgtaggcacagaaggaacagataaaaatccctaccttcatagatattattctaggggtaacacaggtaaataaaacattaaaatagttttcacatagtagcaaattccatatagcaaaataaaacagaagaaggaatagcaaatgagggagatgccctcttaaacatggtgctgagggaaggcctccctgagaaagatatcatttaccccaaatataaaaaagcaagtaatagaaaaaacaggtaaaaggtgttctagacacttaaacctgccacactgagaactcagggttctgatgcaaaacctcgctgcatagaatgcattaacttatttttatacatttaaacaaacaaactctacttaagaactgtgttctaaaggaaggagcatattacaggaaggcaatttttggtcagagtagayacacttaaaaactaaacctattgaaagaccaagaacaactgaaagtctttgctttgtcagatttttgaccaaaaggaaaattaaagaaacacaccgtgcccatccaatgatttcaccaaggaattttaagagagaaaatcctacttcttcctcacccagtagccagtgaaatgactgagcaaattcacaagttcactggggctgctttcatgtaacacagggaca

SEQ ID NO: 932915 - DNA, 677 bp, Homo sapiens
agtggggttgtcatgggggagaaccctccctgtcctctcccggtgcagcctccatgctatcagtgaggctcagctcactaagatcttcagagagagggaggggggtgggaatctgggcacagtgcgagcctcccctgctcctgcctgcccaccccgcctgagggctctactcaccaccctgcttgtccgcacatccaagctccttgtgggactggggctccagctactggtctggctgctgctgcagactcggagcctcttggctcttcagctccacctgccggaagaccctgggcatgaggacatgtggtggctggcttccagattcctggcccattaatagggtagcgaggrcactgtggggctctgctggcctgcccaggccctggccctctgctccaggcctaagagactgtctcccttgcttagaaaccccatgcctccttccctagcatcaaatctcacgtcctttttcccagcatgtaaactgtaggccacagactggtggaaaagtcagcggagccaaccaccatctgctaagtgtgctacatgcctaatgtttccacgtattatctcatttaatcctcagcacctctgcaaggaaaaggctaacttccttttgaagttaaagaaacagagacttagagatgcaaagtagttgaattatgaccagtgga

SEQ ID NO: 932916 - DNA, 677 bp, Homo sapiens
agtggggttgtcatgggggagaaccctccctgtcctctcccggtgcagcctccatgctatcagtgaggctcagctcactaagatcttcagagagagggaggggggtgggaatctgggcacagtgcgagcctcccctgctcctgcctgcccaccccgcctgagggctctactcaccaccctgcttgtccgcacatccaagctccttgtgggactggggctccagctactggtctggctgctgctgcagactcggagcctcttggctcttcagctccacctgccggaagaccctgggcatgaggacatgtggtggctggcttccagattcctggcccattaatagggtagcgagggcactgtggggctctgctggcctgcccaggccctggccctctgctccaggcctaagagactgtctcccttgcttagaaaccccatgcctccttccctagcatcaaatctcacgtcctttttcccagcatktaaactgtaggccacagactggtggaaaagtcagcggagccaaccaccatctgctaagtgtgctacatgcctaatgtttccacgtattatctcatttaatcctcagcacctctgcaaggaaaaggctaacttccttttgaagttaaagaaacagagacttagagatgcaaagtagttgaattatgaccagtgga

SEQ ID NO: 932917 - DNA, 795 bp, Homo sapiens
cagttccagacttaaggatgggatttagccaggagcccaagcagttctgtgtcattttccccctctgaagaggcacatctaactgccgttagaatatagacgatccagtcttagctacttcctgctgaaagggggcattatttgggggaaacggcagtcagattcttcctagaggtctacccaagggtccctagcaaaaggggctggttatctgaggctctgcctgtctgcccatttggagacttgatggcttcttggcaagaaatagaaacaagctttacaaggtaagtatgcatgaatcaaacatgtattatacaaggaaagaatctagtgccaaagattacagaaagaagtgaaatatactaacaacgttgtatcctgagctctctcaccctgataaaatagaktaaaccttgtataggagcagttaaactttaagagggagtagctgttcttgtcaaatctgtagcagttaagaggtgaaccttaggaattctggagtttgtgagcttgaatggtggccattaaagcttctgcctctttcttgtgtctgaaagaccaatgtggcccctttcaaaaggtcctctaatgtactatctggtcccatggtccgtttctgagtataaactggaggtggtgaagtttgttgcccattctgaaagacagggaatttggcatccctcattcccttcctcctttcagcgaaaactcggaatgtgaggtggaaagaaagcaggcacacctccttttctttcccatccttatccccaagtcccagtgtccttggcaggtgcc

SEQ ID NO: 932918 - DNA, 873 bp, Homo sapiens
tggttatctgaggctctgcctgtctgcccatttggagacttgatggcttcttggcaagaaatagaaacaagctttacaaggtaagtatgcatgaatcaaacatgtattatacaaggaaagaatctagtgccaaagattacagaaagaagtgaaatatactaacaacgttgtatcctgagctctctcaccctgataaaatagattaaaccttgtataggagcagttaaactttaagagggagtagctgttcttgtcaaatctgtagcagttaagaggtgaaccttaggaattctggagtttgtgagcttgaatggtggccattaaagcttctgcctctttcttgtgtctgaaagaccaatgtggcccctttcaaaaggtcctctaatgtactatctggtcccatggtccgtttctgagtataaactggaggtggtgaagtttgttgcccattctgaaagacagggaatttggcatccctcattcccttcctcctttcagcraaaactcggaatgtgaggtggaaagaaagcaggcacacctccttttctttcccatccttatccccaagtcccagtgtccttggcaggtgccacccatggatgccaatgtggcttgcacccataaaccagtgaaggcctagaaaataggaattatccacactcatctatgcctctacctcccctactgtcgacaacctttgagtttcctgggtctcatttatgccatgcagcatggcctccttccatgaagtgggggtttaatcagcaagaattagtcctgctcatttacactgtgcctattgcctggctttagctccctcagatctggttttcctttctagggcctcaatctaaagctcgaaatcgagtttgg

SEQ ID NO: 932919 - DNA, 597 bp, Homo sapiens
tttcatcactccaaagggaagccctgtctccattaagcagcggctactcatcctcccttttcctagctcctagcaaccattaatctgttttctgtccctatggatttatctattacagatattcaagacagctgacataataaatatgttatcttttgtatctgtcttcgttcacttcgcataatatttttaaggttcatccagattatagcatgcatcmgtattttattcttttttatggttgaataatattccattgtatggtttattaaattttgtttctttgtttatctattgtcaacttttggctactgtgaatggtgttgctataaatattcatatacaagtatttgtttgtttgaatacatgttttcagttcttttgagtttatatgcctaagaatgtaatgactgggccatatggtaaatattaactttactttttaagaaactgccaaacttttttctaaagtggctacaatatattacatctctcccagccaagtatgaaggttccagtttttctataatatcaccaacacatatattcaccaccttttttcatgataaccattctagtagctctgagctactatcc

SEQ ID NO: 932920 - DNA, 737 bp, Homo sapiens
tagccttcattaattaaaaaatgatttatcaggggagggccaagatggccgaacagaagcagctccagtctgcagctcccagcaagaccaacacagaaggcaggtgacttctgcgtttccaactgaggtacccaattcgtttcactgggactggttaggcagtagacacgatcgacagagagcgaacagaagcagggtgggccatcgtttgacccaggaactgcaaggagttgggggacctctgtcccagccaagggaagtgatgagggattgtgctacccaccctgggtactatgcttttcctatggatttttgcaatctgcagatcaggagattccctcatgagcctacatcaacagggtcctgggtttyaagcacgaaactgggcggctgattgggcaggcactgagctagctacaggagttttttcccagcattgcctggaaccccaattacacaggagaacagtccactcacctggaaagggggctacagccagggagccaagtggtcgttcagcggttcccactcccaaggagcccagcaagctaagaataactggcttgacattctcattgccagcacagcagtctggaattgacctgggatgatcaagcttggtggggggagaggtatctgccattactgaggcttgaataggtggttttcccctgacaggactaaggagactagcaggtttggactgagcagaattcaccacagcacagcaaaacagc

SEQ ID NO: 932921 - DNA, 511 bp, Homo sapiens
atcctgatgagggggattctcccagcccagggcagtagctctgctaagggacagactgcctcctcaaatgggtccctgactgccatgcctcctgacagggaaagacatcccaacaggggtcgaccgacctccatacaggagaggtctggcatcagaccagtgcccctctgggatgaccttccagaggaaggagcaggcagcaatcttttctgattctgaagcmtccactgatgatacccaggcaagaaggatctggagtggacctccagtaaactgcagcagacctgcagaagaggggcctgactgttagaagaaaaactaacaaacagaaggcaacaacaccacaacatcaataaaaaaagaccccacacaaaaaccccatccaaacatcatcagcttcaaaaatcaaaggtagataaatccatgaagatgaggaaaaaccagtgcaaaacctctgaaaattccaaaaaccagaatgcctcttatcccccaaatgatcgcaacatctctc

SEQ ID NO: 932922 - DNA, 505 bp, Homo sapiens
tgttcagctcaaccacagggacccctctctctgcagggctggccctggcaaggcccgggacaggaaggcctacacggtcctcctatacggaaacggtccaggctatgtgctcaaggacggcgcccggccggatgttacsgagagcgagagcgtagagtgccgtggggtggccccctgagggaccagggtgccaaggatggggggctggcgggaaggggtcacctcttgtctgcctggaactgaaacttcctactgaaactgaaccctccaaccagggagccccgagtatcggcagcagtcagcagtgcccctggacggagagacccacgcaggcgaggacgtggcggtgttcgcgcgcggcccgcaggcgcacctggttcacggcgtgcaggagcagaccttcatagcgcacgtcatggccttcgccgcctgcctggagccctacaccgcctgcgacctggcgccccgcggacatccaccgacgccgcgcacccggggccgtccg

SEQ ID NO: 932923 - DNA, 627 bp, Homo sapiens
aagtacatcctgggccagcgcctggaggagctggactgcatggagaccagaacagctactggggccgtggtgaggggcccccagtgccatctgttggtcccatgcacattgactgagcacctactgtatgccagtgaaagagaataaaagggacaaagaggacttcgtggagttgagcaggcctgcctcccccaccgtgaagcccactcctaggctggcctagtgctcctttccttggtgggcagggggtgggcaaggatgctgtgccctgaggccctgtgccacctcaccagccctccggcccgcaacttcagtacatggtggtgatggtcggctacccagacttccttttcaaactgggtctgtggacaaggagtatgaggtgggactgtgtccctgcctgcccarcctgaccacagcctctctgctaatggcacctgggagggcaggtgcctgcatggcccggttgtggcgctatctgcagccttgccctggtctgcggctgagtgctgcccatgcccctcatagtttaaggtccatgggaagacctattacaagaacatcttgaacagcatctgcttcagcatccagctctcagtcaagaagactgggcaggagatggacaag

SEQ ID NO: 932924 - DNA, 666 bp, Homo sapiens
ggactgtgtccctgcctgcccagcctgaccacagcctctctgctaatggcacctgggagggcaggtgcctgcatggcccggttgtggcgctatctgcagccttgccctggtctgcggctgagtgctgcccatgcccctcatagtttaaggtccatgggaagacctattacaagaacatcttgaacagcatctgcttcagcatccagctctcagtcaagaagactgggcaggagatggacaagtccatgtgggtgcctggcccagagctggggtgtcagaggagggtcatgaggcagtagcgggaaggtggtggcccagcccagaggtggcacagaagatgcattgtcaggagatgggtgtggctgggctgccaggaatgtcctgcagtccgggctctgtgacctttytacagaggtggttgttcccccgacaggtgctcattgccttctatctacgcagcaagaaccagatgggtttggggtgtgtttctatacctattgggtccatatataggtgggtctcccacttgaccacaccctccctatagtgtaaccacagaatgtcctgcagtccaggctctatgacctgacttcagtgatcaagacataacatactctggccaatgcatgcccggtggcatcctaggtggcaagcttctatcaagag

SEQ ID NO: 932925 - DNA, 638 bp, Homo sapiens
tataggagagtgtggggggaacaggcagagcacagaagatttttagtgcagtgaaactcttccgtgtgatactataatggtggatactggtcattatacaatggtcaaacacgtagaaatgtacaacaccaagagtgaacactaatgtaaactatggaagctgagtgataatgatgtgtccatgcaagttcatcagttgtactaaatgtactaatctggtgggggatgttcataatgagggaggttaagcacatgtagggcagaggatatatggaaaatctctgcacttcccrcttaattttgtcatgaacctatacctgctctaaaaaataaagtcttttaaaaataaataattaaataaataacaaataaaataatatcacttgtatttctatttaccagtgatgaacacatgaacaacaaaataaaaatatgataccatttacaatcactttaaaaatgaaatacctaggcgtaacaacaaaacggggcatgtatgctgaaaactagaaagtgctgatgcaggaaatcaaagatcaaaataaatggagagacataatatattcatggattgtaaacaaactcagtaaatatgttaatttcctaaagttgttatacaggttcaatacaattgctat

SEQ ID NO: 932926 - DNA, 638 bp, Homo sapiens
tataggagagtgtggggggaacaggcagagcacagaagatttttagtgcagtgaaactcttccgtgtgatactataatggtggatactggtcattatacaatggtcaaacacgtagaaatgtacaacaccaagagtgaacactaatgtaaactatggaagctgagtgataatgatgtgtccatgcaagttcatcagttgtactaaatgtactaatctggtgggggatgttcataatgagggaggttaagcacatgtagggcagaggatatatggaaaatctctgcacttcccgcttaattttgtcatgaacctatacctgctctaaaaaataaagtcttttaaaaataaataattaaataaataacaaataaaataatatcacttgtatttctatttacyagtgatgaacacatgaacaacaaaataaaaatatgataccatttacaatcactttaaaaatgaaatacctaggcgtaacaacaaaacggggcatgtatgctgaaaactagaaagtgctgatgcaggaaatcaaagatcaaaataaatggagagacataatatattcatggattgtaaacaaactcagtaaatatgttaatttcctaaagttgttatacaggttcaatacaattgctat

SEQ ID NO: 932927 - DNA, 638 bp, Homo sapiens
tataggagagtgtggggggaacaggcagagcacagaagatttttagtgcagtgaaactcttccgtgtgatactataatggtggatactggtcattatacaatggtcaaacacgtagaaatgtacaacaccaagagtgaacactaatgtaaactatggaagctgagtgataatgatgtgtccatgcaagttcatcagttgtactaaatgtactaatctggtgggggatgttcataatgagggaggttaagcacatgtagggcagaggatatatggaaaatctctgcacttcccgcttaattttgtcatgaacctatacctgctctaaaaaataaagtcttttaaaaataaataattaaataaataacaaataaaataatatcacttgtatttctatttaccagtgatgaacacatgaacaacaaaataaaaatatgataccatttacaatcactttaaaaatgaaatayctaggcgtaacaacaaaacggggcatgtatgctgaaaactagaaagtgctgatgcaggaaatcaaagatcaaaataaatggagagacataatatattcatggattgtaaacaaactcagtaaatatgttaatttcctaaagttgttatacaggttcaatacaattgctat

SEQ ID NO: 932928 - DNA, 446 bp, Homo sapiens
actcatgaggctgaggcaggagaatcacttgaacacaggaggcagagttcgcagtgagctgagatcgcgccgctgcactccagcctgggcaacagagcaagactccctctcaaaacaacaacaacaacaacaacaacaaactttagagcgggacwaagaggaagtaaagtacacttggaagagggccagggggcgacttgagagatcaagtgcactgtttgacctttgacttggggttttatctgttgacatagttccagggttgtacatcccttctcccctgattcttccctgggagtgggctgtccacgtgtgcagtggtctgtccacgtgtgcagtggtctgctagcagttgggcggtgagcacgcagtgtgtttactggagttgtgtgcatgctcacttgaggcattcttcccctaccaggtgaatgtccctagaagttaaa

SEQ ID NO: 932929 - DNA, 590 bp, Homo sapiens
ccagagtgtggccccttgtgtgacatggcggcagggctccaggagggaatgtcccaggagtagtcagtccaggagacccaggccgaagctgcaaggcttttcatgcctgagcctcagacatcccagaatgtcccttctaccactttttggtcaagcaagtcactgagaccaacccagattccagggacaggagttagaatccccaccgccttttgaagagcagttcatgctgtgtcgcccaggctagagtgcagtggcgcagtcttagttcaccgtaacctctaactcctggggctaaagcaatcctcctgcctcacttcccaagcagttgggactacaggcatgcagcaccaccaccggctcacttccctctcaatacaagcggctaacgtttatccagctcttgttttgtgccggccccgggytaagcgatgcacatatgtagccagtttcatgaaggacacatgtcctgttaaagtgaacattaacaaaaggtttaattttctctgataaacaccaccagctctgtttgttcgaaatctccatttccactgagcataagattccccacgagggcactcagtatgatt

SEQ ID NO: 932930 - DNA, 620 bp, Homo sapiens
atgacatatttggtatctgtccttattgaaatactctatgggctacggatttgtaaaaatcctattcttctctcagtcattgtagtttctttttttttttttttttttttttttaacttaaattcaggatacaagtgcagatttgttacagkggtaaacttgtgtcatgagggtttgtagtataaattattttatcacccaggtattaagcctggtacccattggttgtttctcttgatcctctccttcctcccaccccccaccctccaaaaggatccagtgtgtgttgttcccccttgtagttatttatttatttatgagatggagtatctccctgtcacccaggctggagtgcaatggcgcgatctcaggtcactgcagcctccacctcccaaattaaagtgattctcctgcctcagcctcccgagtagctgggattacaggagcgtgccaccacgcccggctaattttttgtatctttagtagagacgaggttccaccatgttggccaggcaggtctccaactcctgaccccgtgatctgccctcctcggcctcccaaagtgctgggattacaggtgtgagccaccatgcccagccttctggtttcttttattatca

SEQ ID NO: 932931 - DNA, 680 bp, Homo sapiens
gatgatggcaaacatggtaagaccagtgaattccatgagcatgagaccactgctgcacctctttagatgtaaagtgagtgccttggtcagaggcaatgctgtgtggaataccatgatggtggataagacattctgcaagtccacgatggtagtcttggcagaggcattgaaagcaggataggcaaacccatatccagactaagtgtctattccagtgaggacaaacctctgccctttccatgatataagaggtccaatataatcagcctgccactaggtagctcgctgatcaccccaaggaatggtgctatatcgagcmctcagtgttggtctctgctgctgtcatatttggcactctgcagttgccgtagccaggtcagccttggtgactggaagtccatgttgctgagtccatgcacaacctccattcctgccaccatatccgctttgttcatgtgcccattgggcgatgacaggggtggctgaggaaagaggctgagtggtgtacacagaatgagtcattctatccagttgattattcaactcctcctccactgtggtcacccactggtgagcactaacatgggatacaaatattttcagtttttgactactcagagagatccatccacatacttcttccccaaatttcattgtcaccaattttccaattatgcttc

SEQ ID NO: 932932 - DNA, 725 bp, Homo sapiens
aaggcttcaaacagcattcctatctgccactgacacctcaagcaccattggatctgctgggtcatatggcccaagtggcagaccagcttgcacagtagcctggacctgttgcagatccttctcctgttctggaccgctctcaaaactggcagccttttggttcactcaataaatgggccagagtaacacaccgaaatgaggaatgtgttgcctccaaaatccaaataggcccactaggcattgtacctcttttttggttgtaggatgggccaaatgaggcaacttattattcaccttagaaggaatatcttgacaggtcccacaccactggacccctagaaattttattgagggtagaaggtccatgaattgtagttgtatttatttcccatcctctggcacacaaatgtctcaccartaagtccagtgtgtttgctacttcttgctcactgtatccaacagcatgatgtcattaatgtcatcatatcagtgtgctatcttgcagaagcaaaaagtgatcaaggtctctccaaataagataacgacacaaagccagagagttgatatacccctgaggtaggacagtaaacgtatattgctgagcttgccagatgaaggcaaattgcttctggtgggtgttacagacaggaatggagaaaaaggcatttgccaagtcaatggctgcataccagataccaggagatgtgttaatttgtttaagcaat

SEQ ID NO: 932933 - DNA, 825 bp, Homo sapiens
cacgtgccctgcgagcctgggcctctcccacagggggctgtcttgagccagggagagagggctgtccccatgctccagcccaaactgaccgcgccagcagaggggatttcccaacctgccccggcacgctgggattttgcctaagccaccccggctcctccggaagtggcgctctcccaccctcaggctcctcagtggcctccccaccctggcgaaagccgggaggaccaggacctgcagcgcgacagcctgccrggcccttgcacggtgggacagcctgggcccgctcaagcggggccacagggccaaggtgtgcttgcaccactgcctctcaggggagtccattgtggggctggggccggggtccccaggtcaccggggcggcgtgtgaaccccaagccgggccagttccacctcgccagcccgtcccgctggaggcctacgtgaggcaagggcagatgcaaggcatcccggcgccctcccaggcgctccaggagccggggcgctcgtctgcactcacctacggcctgctgctggatgagctcctgttgagaccggagtttctgcagcaggcgcaacctttcctagaaacggaggcccaggaggccttggatggggctgcctcgctgaaagcacccctcagtgaggaagaatactgggctctgctggaggagctttaggactcggtgttgggacggggtcgggtcggggcagggcggtggcctctctttcgcggggaacacctggctggctatggaggggcgtgtcttccccccaccccctccaccgggctgacaggcctgggattcctgcattctaggacta

SEQ ID NO: 932934 - DNA, 627 bp, Homo sapiens
ccctgcaatgatcacccaggtgatataccacttgtcaaggctctgcctacaggggcattgtgatgtatctctgcactgatcacctaggtcatgtaactcttgtctgggctctgcctacagtggcattgtgacatatctctgcactgatcacccaggtgatgtaactcttatctaggatctgcctgcaggatgctttgtgacatatccctgcaatgatcacccagttgatgtaccacttgtgaaggctctgcctactgggacattgagacktatctctgcactgaccacctaggtcatgtaactcttgtctaggctctgcgtacaggggcattttatcatatcacttcactgatcaccgagatgatgtaactcttgtataggcttcaccgacagtgggcattgtgacatgtctctccactgatcaccgaggtgatgccactcttgactgggatcttcttacagggggcattgtggcgtatatctgccctgatctcccaagtgaggtaactgttgtctaggctctgcctactagagacattgtgacatatctccgcactgatcacccaggtgatgtcacttttgtcaaggatatggctacaggggcattgtgacatgttactgcactta

SEQ ID NO: 932935 - DNA, 627 bp, Homo sapiens
ccctgcaatgatcacccaggtgatataccacttgtcaaggctctgcctacaggggcattgtgatgtatctctgcactgatcacctaggtcatgtaactcttgtctgggctctgcctacagtggcattgtgacatatctctgcactgatcacccaggtgatgtaactcttatctaggatctgcctgcaggatgctttgtgacatatccctgcaatgatcacccagttgatgtaccacttgtgaaggctctgcctactgggacattgagacgtatctctgcactgaccacctaggtcatgtaactcttgtctaggctctgcgtacaggggcattttatcatatcacttcactgatcaccgagatgatgtaactcttgtataggcttcaccgacagtgggcattgtgacatgtctctccactgatcaccgaggtgatgccactcttgactgggatcttcttacagggggyattgtggcgtatatctgccctgatctcccaagtgaggtaactgttgtctaggctctgcctactagagacattgtgacatatctccgcactgatcacccaggtgatgtcacttttgtcaaggatatggctacaggggcattgtgacatgttactgcactta

SEQ ID NO: 932936 - DNA, 596 bp, Homo sapiens
aacttatctaggctctgcctacagtggcattttgacatatctctgcactgatcacccaggtgatctaactcttttctaggatctgcctacatggtgctttgtgacatatccctgcaatgatcacacaggtgatgtaccacttgccaaggctctgcctacagggagattgcgatgtatctctgcactgatcacctaggtcatgtaactcttgtctaagctttgcctacagtggcattgtgacgtatctctgcactgatcatccaagtgatgtaactcttgtctacgatctgcctaaagggactttgtgacataaatctgcactgatcatccaggtgttgtggcttttgtctaggctctgcctaaggggrcattgtgatatatttctgcaatgatcacccaggtaacggactcatgtcttgggtctgcctatgggggcattgtgacatatttctgcactgagcacccaggtgatgaaactgttgtataagctctgcctacaggggaattgtgagagatgttgccactgatcacccaagtgacgtaactattgtctaggctttgcctacagggggctttgtgtcatacctttgcactga

SEQ ID NO: 932937 - DNA, 634 bp, Homo sapiens
cttgtctaggctctggctacaggggtcttgtgacacatgactgcactgatcacccaggtgatgtaacccttttctaggctctgccaaaaggcggcattgtgacataattctgcactgatcacccaggtgatgggactcttrtctaggctcttcctataggggcattgtgacatctctgcagtggtcacgcaggtgatataactcttgtctatatatgcctagtggcggcattgtggcatatttctgcactgatcacccaggtgatggactcttgtcttggatctgcctatgggggcatagtgacatatctctgcactgatcagtcatgtgatgtaacgcttgtctaagctgcccctaaaggagtgttgtgacagatatctccactggtcacccaagtgatgtaacaattttctgggatttgtccacaggggggtttgtgacatatcattgcactgatcacccaggagatgaaactcttgtctaggctctgcctgcaggggctttgtgacatatttcttcagtgatcatccaggtgatataactcttgtctaggctccacatactgggggtattttgaagtatctcttcactgatcacccaggtgatgttacatttatctaggatctgcctacag

SEQ ID NO: 932938 - DNA, 634 bp, Homo sapiens
cttgtctaggctctggctacaggggtcttgtgacacatgactgcactgatcacccaggtgatgtaacccttttctaggctctgccaaaaggcggcattgtgacataattctgcactgatcacccaggtgatgggactcttgtctaggctcttcstataggggcattgtgacatctctgcagtggtcacgcaggtgatataactcttgtctatatatgcctagtggcggcattgtggcatatttctgcactgatcacccaggtgatggactcttgtcttggatctgcctatgggggcatagtgacatatctctgcactgatcagtcatgtgatgtaacgcttgtctaagctgcccctaaaggagtgttgtgacagatatctccactggtcacccaagtgatgtaacaattttctgggatttgtccacaggggggtttgtgacatatcattgcactgatcacccaggagatgaaactcttgtctaggctctgcctgcaggggctttgtgacatatttcttcagtgatcatccaggtgatataactcttgtctaggctccacatactgggggtattttgaagtatctcttcactgatcacccaggtgatgttacatttatctaggatctgcctacag

SEQ ID NO: 932939 - DNA, 634 bp, Homo sapiens
cttgtctaggctctggctacaggggtcttgtgacacatgactgcactgatcacccaggtgatgtaacccttttctaggctctgccaaaaggcggcattgtgacataattctgcactgatcacccaggtgatgggactcttgtctaggctcttcctataggggcattgtgacatctctgcagtggtcacgcaggtgatataactcttgtctatatatgcctagtggcggcattgtggcatatttctgcactgatcacccaggtgatggactcttgtcttggatctgcctatgggggcatagtgacatatctctgcactgatcagtcatgtgatgtaacgcttgtctaagctgcscctaaaggagtgttgtgacagatatctccactggtcacccaagtgatgtaacaattttctgggatttgtccacaggggggtttgtgacatatcattgcactgatcacccaggagatgaaactcttgtctaggctctgcctgcaggggctttgtgacatatttcttcagtgatcatccaggtgatataactcttgtctaggctccacatactgggggtattttgaagtatctcttcactgatcacccaggtgatgttacatttatctaggatctgcctacag

SEQ ID NO: 932940 - DNA, 772 bp, Homo sapiens
ccctgtaggcaaagcccagacagttgttacatcacctgggtgagcagtggagagatctgtcacaatgcccctgtaggcagagcttagacaagggttacatcacctgggtgatctgtgcagagatatgtcaaaacgctcctgaaggctgaacctagataggagttacatcacttgtgtgatcagtgcagagatatgtgagaattcccgtgaaggcagagtctagacaagtgttacatcacctaggttatcagtgcaggtataagkcataaagcctcctgcaggcatagcgtagccaagagtttcctccccagggtgatcagtgcagagatgtgtcacaaagcccctgtacacagagcctagacaagagtttcatcacttggttgatcaggtcagagatgtgtcacaatgtccatgtaggcagatctaagacaacagtccatcacctgggtgatcagtgtagagatatgtaccaatgtcccctgaaggcagtgcctagacaagagttgcatcacctcagagatcagtgcagagatatgtcacaaagccttctgtactcaaagcccatacaaggcttacatcacctaggcgatcagtgcagtgatatgtcacaaaaatccctgtagacagagcctaggaaagagttacatcacctgggtgatcagtgcagatatttgacacaatgcccacatagacagagcctagacaagacttccattacctgggtgatcagtgcagagatatgtcacaaatccccctgtaggcagagtataga

SEQ ID NO: 932941 - DNA, 699 bp, Homo sapiens
atgaagatgtacttttcatctcatgtgtatatataactgatatatataacatatctgttatatatgtatacatatcagtaatatatatatatatatatcttacgatatataataaacaacataggccaggcgcggtggctcacacctgtaatcccagcgctttgggaggcggaggcaggcagatgacttgaggtcaggagttcgagaccagcctggccaacgtggtgaaactaaatatacaaaaattagccaggcatgctggcacctgcctgcaatcccagctacttgggaggctgaggttggaaaattgcttgaacccggcaggcagaggttgcagtgagccaagattgtgccattggacaccagcctgggcaaagaagcgagactccgactcaaaaaaatatatatatatataatgaattccctataaaatgaaaacatacttttcatctgaaaaaatatatatatataatatagtaaatatttttcaagtaagctctcttatctgacaacttttcgcccactgaaataactcacggtatttttgataggggaacragttctctcattaggcacctcctataatgtatataaaccatgttttaaaagcgtacgttaaaaataacaacgctgtatatgcttaactttgtgagttaaatcactcaaattctccaactgctccagccagagaattatgag

SEQ ID NO: 932942 - DNA, 645 bp, Homo sapiens
aggtatgaataaggcacttaaggtctttgttcctttgttagtccaaggatagcaagggaaattccactgcagatgcagtggcagagaggctttcagttgcacctgggggctctgtccaaggagttgcagagctgctactggcttgatagctctggtggggagtggctggaggcccaggcctggaagatgtgcttggtgaggagatatggaaacaagcacccacataagagtctggccactattctgaggcaggagaatggcgtgaacccaggaagcggagcttgcagtgagctgagattgcgccactgcagtccacagtccagcctgggcgacagagcgagactccgtctcaaaaaaaaaamgagtctggccactattctgtaagactgctatggtatgtggagggcctgctccagtccctagttacctcatattttccagtatctggaggtatcaacagtgaagtctgcaaaatagcaaagatggcggtcctctcctcactctgggagatctgtcccattgaggtacaaacctgttgctggcctgaacacactggtaggaggtagctggagagtccagttttgaggtcccaaccagtgaggagaaacaggattggggaccctctttaaaaagcagtctggtcac

SEQ ID NO: 932943 - DNA, 879 bp, Homo sapiens
cttggatgcccacttttttttcctttaacctctttattccccatctctgaccattctatgtagacataaacctatgttcttatttcctagagaaacaaagaggcagcagagttaaaatttgccaataaatcatggaaacttctgtagtacaggttttattaacgatggagtagaattatgcagatccccctagctgcctgagtcctgacacttcctccttcagagaattaacttgattcaagactctggaaagcaagaggatgactaaagatattaacaagattgatttatgcaaaataaactgcaacaatgaatataacgtgcattatgcaaaccagaggcaatgtacttcagaaccagtcatttgaaatcttaattataatggttgtatattgaagcacacagcaatgacaatgtcccatattaaacatttgaccttagagctatcatataaaaattttagtttaggccgggcgcggtggctcacgcctgtaatcccagcactttgggaggccgaggcgggcggatcacgaggtcaggagatcgagaccatcccggctaaaaatggtgaaaccccgtctctactaaaaatacaaaaattagccgggcgtagtggcgggcgcctgtagtcccagctacttgggaggctgaggcaggagaatggcgtgaacccgggaggcggagcttgcagtgagccgagatcccgccactgcactccagcctgggcgacagagcragactccgtctcaaaaaaaaaaaaaaaaaaaaaaaaaaaaaaaaaattttattttaaaaaaaaactttaaaaaagcctttaaaagtcacaacacctaaattgttatgaccttatatgtattttttgacttaacaaatgtgaca

SEQ ID NO: 932944 - DNA, 598 bp, Homo sapiens
tttctaaatatacaattatgtcatctgcaaacagagataatttgacttcctctcttcctatttgagtacgctttatttctttctcttgccggattgccctggccagaacttccaatactatgttgaataggagtggtgagagagagggcatctttgtcytgtgcccattttcaaagagaatgcttccagcttttgcccagttagtatgatattgtctgtgggtttgtcataaatagctcttattattttgagatatgatccatcaatacctagtttcttgagtgcttttagcatgaagcggtgttgagttttatcaaaggccttttctgcatctattgggataatcatgtggtttttgccattggttctgtttatgtgatggagtacgtttattgatttgtgtatgttgaaccagccttgcatcccagggatgaagctgacttgatcatggtggataagctttttgatgtggtgctggatttggtctgccagtattttattgaggattttcgcatcgatgttcatcagggatattggcctgaaatttccttttttttgttgtgtctctgccacgttttggtatcaggatgatgctggc

SEQ ID NO: 932945 - DNA, 598 bp, Homo sapiens
tttctaaatatacaattatgtcatctgcaaacagagataatttgacttcctctcttcctatttgagtacgctttatttctttctcttgccggattgccctggccagaacttccaatactatgttgaataggagtggtgagagagagggcatctttgtcttgtgcccattttcaaagagaatgcttccagcttttgcccagttagtatgatattgtctgtgggtttgtcataaatagctcttattattttgagatatgatccatcaatacctagtttcttgagtgcttttagcatgaagsggtgttgagttttatcaaaggccttttctgcatctattgggataatcatgtggtttttgccattggttctgtttatgtgatggagtacgtttattgatttgtgtatgttgaaccagccttgcatcccagggatgaagctgacttgatcatggtggataagctttttgatgtggtgctggatttggtctgccagtattttattgaggattttcgcatcgatgttcatcagggatattggcctgaaatttccttttttttgttgtgtctctgccacgttttggtatcaggatgatgctggc

SEQ ID NO: 932946 - DNA, 537 bp, Homo sapiens
ctaatttttgtatttttagtagagaaggggtttcaccatcttggccaggctggtctcgaactcctgactctcaggtgatccactcgcctcgacctcccaaagtgctgggattacaggcgtgagccaccgcatccggccaacactggtttctttaaaactatccatgcctgttgtcccttgtaaagtctttgcataaaaccagttggaagaccattgttctctacttcatttaggtgatttgtgttttcttttatattgtccaagatccctttacttgtctgtaatatttcatcttcactgttgagacttcagcaggtacagacagttaggtgattgggatgtatttacartttgatcacttaacctccttgggccttggtttcttaatctatataatataattctctcatgttacttttgttccaatattttatttttctaataccattctatgggctagcaagattccattatgtgttgactctcccaatttctattattcataccacagattaagttcaaaatctttgagaggaa

SEQ ID NO: 932947 - DNA, 479 bp, Homo sapiens
ctaagcaaactaacacagaacagaaaatcaaatgtgttttcttacttataagtgggagctaaaaattgagtgcacatggatacagagaatggaacagatagcagaacctacttgaaggtggaagataagaggaggatgaggattaaaaaatacctgtcaggtactattcttattacctgggtgacaaaatctgtayaccaaacccctgtggcatgcaattaacctatataataaacctgcatatgtacccctgaacctaaaataaaagtttaaaaaagtgaaacaatgctcaactttattaccagaaaaatgaaattaaactacagtggaataacattacatacccaccagaatgtctaaaattttaaatggcagaaaatattgagattttaatgaagatgtggttcatactgctgggaggagtataagttgatataatcactttgaaaaaatggtaatctttaccaaagctgaacata

SEQ ID NO: 932948 - DNA, 635 bp, Homo sapiens
tcttatttctaggttttctatcggttaccatcaggactttaaataatattctcaaaactttattctgtagtctttcaccttaaaacagttcctcttccctctgtgctatttaatagtagggttcccacacgcccatcaggtctctttctctgcttccacctcccaaactattgtcataaatttcaatgtggacattgccagggctcataggatttatattctctttcagaattaaaattatgccttctgtgacttgttgatgagttgattctgtgaaataaaaattaataaacagattactatacaatgaatatgtaaatattcactgcagaatcagctctggaaattttactatttctttgataattttcatttctctatttcttttccattatttggatattgggcctcttaggatttttaaaaaatatctcttaactcatattttaccttttgggkttttgtgtttttgcttttttgctctttattctgggagattttcttaagtttatcttttagcctttctcatgtatttcagcaatgtcttttaatttgtgagacatcttttatattccacaaacctacacaagtaggttaaatctattaaacagattagaaaatataggcctatgaaa

SEQ ID NO: 932949 - DNA, 643 bp, Homo sapiens
cattttactattgagttgtaaaagtccattgtatatttggtatacaagttccttatcgggtatatgatttgcaaataatttttcacatcctgtggtttgtcttttcattttctcaatggtatcctttgaagcacaaatgtttctaattttaatgaagtccactttatttttccttttgttgcttatgcttttgatgtcatattccaagaatctttgccaaatccaaggtcatgaggtttactctttggtttcttctaatggctttgtagttttagctcttattttgaggtctttattttgagttagtttttgcatatggtgtgaggaaagggtccagcctgattcttttctgtgtagctgtctrgtaaatccagcactctcttttgaaaatactcacattaaatggtcttggcatccttgttgaaaatcagttgaccatagatgcatgattttattctgaactcccgtttcgattccattcatgtgtatgtctgtccttttgccagtgttgattaacattgcttggtagtaagttttgaaactgggtcatgtgagagctcctacttgttcaagattcttttgtctattctggaccctatgtaattccatatgaatttttaaaattggttggtcaatttctaaa

SEQ ID NO: 932950 - DNA, 643 bp, Homo sapiens
cattttactattgagttgtaaaagtccattgtatatttggtatacaagttccttatcgggtatatgatttgcaaataatttttcacatcctgtggtttgtcttttcattttctcaatggtatcctttgaagcacaaatgtttctaattttaatgaagtccactttatttttccttttgttgcttatgcttttgatgtcatattccaagaatctttgccaaatccaaggtcatgaggtttactctttggtttcttctaatggctttgtagttttagctcttattttgaggtctttattttgagttagtttttgcatatggtgtgaggaaagggtccagcctgattcttttctgtgtagctgtctggtaaatccagcactctcttttgaaaatactcacattaaatggtcttggcatccttgttgaaaatcagttgaccatagatgcatgattttattctgaactcccrtttcgattccattcatgtgtatgtctgtccttttgccagtgttgattaacattgcttggtagtaagttttgaaactgggtcatgtgagagctcctacttgttcaagattcttttgtctattctggaccctatgtaattccatatgaatttttaaaattggttggtcaatttctaaa

SEQ ID NO: 932951 - DNA, 577 bp, Homo sapiens
gtatgtatcacagtttgtaagtatatatttttgtgcacattaatatccatcttccactagattctaagctctgtgaggtgagggttcgtgttcacttctttcatcattatatcaccaaaataatcatggtctcttgctgaacaaatgtctattgaatgaatgaatgaatgaatgacaccttttctcatgctattcactttgcttaagatgtcttttagtctagctccttcaacactgtagctttctgaattgttctttaggtagagttcattgaatctctctgygccttttccatacttttaattaattctatcattgctggaaatagagtgtatgaaaattatttttatttgtccagccagaataagatctccttgtcaaaaagaacccttttgttgtcctaattagcacaatttctggcacataatagcttgactcaatgttgatattgctcactgagagaaacgcaaaaatgttcagacagtcaatctggattttacaaggtttcccatctgtgctgtgtggaatgctcctgagaatcagttcatggccctggaagcagctctaggagaatatg

SEQ ID NO: 932952 - DNA, 619 bp, Homo sapiens
agaaataaatttagcaaaagatgtacaatacttgtatacagaaaattacaaagcaaaatcagaattaaagaaatcctaaataaatgagggtgatacagtatgtttatgaaaaagaaaattcaacatttttaagaattctacttctaatttctcaaattcaataaaattctaattaaaaccacaagaatacttttccaaggaatttgataagctgattctcattttatatgaatgcgtcaggcagctcctaatgaaaatacagatacttgtcctactagatatcaagactcattagaattatagtaattaaaactatatcatgtactatttgtgcagagatagacaacttgatgaatagaayggaagagcccaacacagaactaggcaaaaaaagaatcatgaaatgacagatggcactctagccactggactattcaataaagttactaaaacaaatagttatccatatggagaaaaatgaaattggactactaccttacccttttcaaagaatcaattccaaataaatttggaacactaagggcaagcctttgaaaaaaaaataaagatatcctcgagaccttgggacagagagtaatttcttaaccatgacacaaaa

SEQ ID NO: 932953 - DNA, 656 bp, Homo sapiens
gccagacatcaagcagcagacccaacagagacccctgggactgggcagggagggaaagggtggggctgggggtgtggggagagctcactgcagtcccgcgagtaatgccgtccgagggtgaaggtgaaggtcggggaagatgggctggtgcccaggacagcggctgagttcatggcactggagaccacagcaaaggcagggacatgcttggcttggaggtcagtgctggggctggtgggctcatctatgcatgtggaaggagaaaggtgtgaaggcggcagacagcagaacctgcttgcctccaccctagccttgccagcccccgtgccactcacctccaggctcagacacatcccaaagggtcctgctggcaacatgcccactgtcaagcgtgactggcccactgtccagactgtggccatggaatccttaccctcaggagtggggctgagacacyctccttagaccggactcctgaggacagagccaatattcccccatcagactgggagcctcctgagggcagggacggtgtctcccccatcagactgagggcactcagagagaatgaattatgtctcccctctcagaccaagagcctcctgagggcagggacagcgtcttccccatcagactgagagcttcctaagggcaaa

SEQ ID NO: 932954 - DNA, 467 bp, Homo sapiens
ctgttggagtttattggaggtccactccagaccctgtttgcctgggtatcagcagcggtggctgcagaacagcggatattggtgaactgcaaatgctgctgcctgatcattcctctggaagtcttgtctcagaggagtaccctgctgcgtgaggtgtcagtctgcccctactggggggtgcctccctgttaggctactcgggtgtcagggacctacttgaagargcagtctgcctgttctcagatctcaaactgcatgctggcagaaccactactctcttcaaagctgtcagacagggacttttaagactgcagagtttattgctgtcttttgtttgtctgtgccctgcccccagaggtggagcctacagaggcaggcaggcctccttgagctgtggtgggctacacccagttcgagcttcccagccgctttggttacctactcaagcctgagcaatggcaagcgcc

SEQ ID NO: 932955 - DNA, 467 bp, Homo sapiens
ctgttggagtttattggaggtccactccagaccctgtttgcctgggtatcagcagcggtggctgcagaacagcggatattggtgaactgcaaatgctgctgcctgatcattcctctggaagtcttgtctcagaggagtaccctgctgcgtgaggtgtcagtctgcccctactggggggtgcctccctgttaggctactcgggtgtcagggacctacttgaagaagcagtctgcctgttctcagatctcaarctgcatgctggcagaaccactactctcttcaaagctgtcagacagggacttttaagactgcagagtttattgctgtcttttgtttgtctgtgccctgcccccagaggtggagcctacagaggcaggcaggcctccttgagctgtggtgggctacacccagttcgagcttcccagccgctttggttacctactcaagcctgagcaatggcaagcgcc

SEQ ID NO: 932956 - DNA, 658 bp, Homo sapiens
taaaatggggctcaccaatctgtgtttcaataagccctctctagatgattctgatgcaagctaaagtctgggaactactgctctaagtagagattgagccagacagggtctgacaccgaggacaacagcagttgctgaaaacataatgaaccaattattaaagagaggggaaattgacacacagaacattaagccctccagtgcacatcttctcagctcccaaaatgttcacggctgttgtgatttctatggttatggtttgttctaatttgtcttgaggtgtctctctcttaagagtggccataagccaagatagccactctgcaggagactgctgacagaggggaaagttaggtttatgtgtgtatcaggtaagacacaataaggaggtgaaactaaaatgcatgaaacagaagaaatgtattattcacaggtcagagagacttggtgcccaaggcaggccagtgtsaagtctggagacagcagggagatcacccactgagcaagtcagtgagcctgtcggggccaccttcatcaaagcccatgggtattacccttcaggcttccctaagggggctgtgaattggctagtttatggaaaacactccagaggggaaaaacttatttacatgatctggtattgaccattaggttttat

SEQ ID NO: 932957 - DNA, 619 bp, Homo sapiens
atgtatttgtgttgtgttaattacaaaagagtcaaaagttaaaatgtaaaagtctgtaaaactcatgaacagtggcatgcacctgtagtcccagctactcgggaggctgaagaggcaggatcacttgaggtcaggagttcgaggctgcagtgagctatgattacacctgtggatagccccactgggcaacatagactctgtccctaaaaaaaaaaaaaaaaaaaaaaaaaaaggtttataaagaaaaaaatgttaccataaactaaggttaatttattattgaggaaraaaaaattttaaaataaatttagtgtagcctcagcatagggtttagcctcaatgtagtatttataatgtctacagggtgcagtaatgtcctaggccttcatagtcattcaccactcattgactcatccagagcaacgtctattcatggtaagtgccctgtacaggtgtatgggtttttattttttatattctatttttattataccttttctttgttgagctatacaaatacttgccactgtgttatggttacctacagtattcagtatagtaacatgccaaacaggttaattgtagcctaggagcaataggttgtaccatatagcctgca

SEQ ID NO: 932958 - DNA, 627 bp, Homo sapiens
aatacttataggccaggcacttggctaactgctttacctatattatctcatatagacttacacaaaacctaagagattcctttgttacaaccattttacagatgaagctgctggggttcagggaagcaaggtaacttgtgcagtgtttcacagctagcggaggtgcaggattctgtgatccttcaggttcaagctttcttcctcaaaacggtatgtacccttctttttctcatattagatggaaataaaccacccatccagttcccttacatctggcaagcccagtgccagggacgtaagsctgggagagccctagatttataggacccaaacaacatcctgcctggggctaggagtgcccacctctggaatgatcaaggagctgtttccagggatatttcttaggggaacggctgcaaagtggcaacaaagttctgtcgcctgccctcctcatggatacccatggcgacagaacgccgccagattgttgaacattctaaacggggaaatcggggcgcggaagagtggggtgggaaacgaacaccgggttgcggaccagaactcagggtcaggtacgccaaggagaggaagtgaggcgaggccagccccacgccaccagccaggggc

SEQ ID NO: 932959 - DNA, 627 bp, Homo sapiens
aatacttataggccaggcacttggctaactgctttacctatattatctcatatagacttacacaaaacctaagagattcctttgttacaaccattttacagatgaagctgctggggttcagggaagcaaggtaacttgtgcagtgtttcacagctagcggaggtgcaggattctgtgatccttcaggttcaagctttcttcctcaaaacggtatgtacccttctttttctcatattagatggaaataaaccacccatccagttcccttacatctggcaagcccagtgccagggacgtaaggctgggagagccctagatttataggacccaaacaacatcctgcctrgggctaggagtgcccacctctggaatgatcaaggagctgtttccagggatatttcttaggggaacggctgcaaagtggcaacaaagttctgtcgcctgccctcctcatggatacccatggcgacagaacgccgccagattgttgaacattctaaacggggaaatcggggcgcggaagagtggggtgggaaacgaacaccgggttgcggaccagaactcagggtcaggtacgccaaggagaggaagtgaggcgaggccagccccacgccaccagccaggggc

SEQ ID NO: 932960 - DNA, 785 bp, Homo sapiens
  misc_feature 549: n = A,T,C or G
acctgcaagcaccatctactggcttagaggctggcccacacagcccattgcaaacactcccaacacaaaagcacagcagttgagaactgggaaagcatcgcactacaactgctactgccattaaccacattgtcctggatgcccaagagcttaagagcccacttacctacctggtacactgctactacaactgacatctgagaaagccacccaaaggaacaagaatttccctgtctggaaccaacagaattgtcactatrttctgtaccagatcccaaggatacacatgcttagcttactattactaccactgaaacttgcaaaagaacccatcaagcattccattccccagcacaaattcatcagtttctatcaataacctcacaatgccacacagaggaatagacagatactactaaggctgtttatagccaatgaaatcatacacagtcttcaccattacatggacccagaaagcaagccaaatggccctacccctaccacatcatagccacatcatcaagaaaaagtttccctcaaacaaaaganaaataagaagaagttactgttgtttcatatgtgcagaaatcaatgtaaagacacaggaaacaaaaaagcaaagtaatatgacaccttcagaagaaaacaataattctccagtaatagatccttaccaaaaagaaatcatcaaaatttcaggtataaaattcaaactattaattttaaagaagctcaatgagatgcaagagaaacctgaaaaccaataaaaataaagcagaaaataa

SEQ ID NO: 932961 - DNA, 675 bp, Homo sapiens
accgcaacctttgcctcccgggttcaagcaagtctcctgccttagcttcctgagtagctgggactacaggcacacaccaccacgcccagctaattttttgtatttttagtagagatggggtttcactatgttggccaggctggtctcaaactcccaacctcaggtatcttccygcctccacctcccagagtgctgggattacaggcgtgagccactgcgtccggcccccacccctctcatttttcagcactgcctcctgagcacctgggaactccagtcttcctgaattttgtctgaccttgacctctgtccttggacctgatgcacacctcagtgaagcttgtaccaagtaagccctgaggcggccgtgagaagccctcgaaagttcccctgttcattattatagttacttttagagacagggtctcactctgtggctcaggctggattgtaccatcacggattactgtagccttcaactcccgtgctcaagtgatcctcccacctcagcctcctgagtagcaaggactgcagtgtgtgtcaccacgctggccaattaaacttttttttgcaaagacaaggtctcactatgtttccccggctgatcttgaacacctggcttcaagtgatcctcccacctcggcctcccaaagtgctgggatgagaggtgtgagc

SEQ ID NO: 932962 - DNA, 575 bp, Homo sapiens
cacctgtaatcccagctactcaggaggctgaggcaggagaattgcttgaacccaggaggcggaggttgcagcgagccgagattgtgccactgcactccagcctggttgacagagcaagactctgtctcagaaaaaaaaaaaaaaaaagacatacccaagaccaggtaatttataaaggaaagaggttcaattgactgacagttccacatggctggrgaggcctcacaatcatggtgagagagtaagggatgtcttacatggtggcaggcaagaagaacttgtggagggaactccccttcataaaccatcagatctcgtgagacttgttcactatcagcacgggaaagacccgccccatgattcaattacctcccaccaagtccctcccacaacatgtgggaattatgggagctacaattcaaggtgagatttgggtggggatgcagccaaaccatagaagacacacagttcgaaatgtatttattaggccaaacttgttcactgttgcttcagtgatctgttggtgcataactaaccactacagattttagtggcttaaaacactattttgtcat

SEQ ID NO: 932963 - DNA, 575 bp, Homo sapiens
cacctgtaatcccagctactcaggaggctgaggcaggagaattgcttgaacccaggaggcggaggttgcagcgagccgagattgtgccactgcactccagcctggttgacagagcaagactctgtctcagaaaaaaaaaaaaaaaaagacatacccaagaccaggtaatttataaaggaaagaggttcaattgactgacagttccacatggctggagaggcctcacaatcatggtgagagagtaagggatgtcttacatggtggcaggcaagaagaacttgtggagggaactccccttcataaaccatcagatctcrtgagacttgttcactatcagcacgggaaagacccgccccatgattcaattacctcccaccaagtccctcccacaacatgtgggaattatgggagctacaattcaaggtgagatttgggtggggatgcagccaaaccatagaagacacacagttcgaaatgtatttattaggccaaacttgttcactgttgcttcagtgatctgttggtgcataactaaccactacagattttagtggcttaaaacactattttgtcat

SEQ ID NO: 932964 - DNA, 639 bp, Homo sapiens
cacagtttctctgagtcaagaatcttaagaattgcttaggtggatgcctctagctcaagatctttcaagaggttgcagccaaattatcaaccagggctgtggtcatcccaagacctgacaagctgaaggatctgctcccaagatctgttgcatggatgttgataggctttagttcctcwcacaccatcacgccgagagcctgtttttcaccatttgggcctctccataaggatgcttgcaacatggaagctttgcttccccagttgcaagtgagaagagagtgagagggaaggacagatagagaaagagagaggcagagagggagtgagaacccaacacagaaggtgttatctttttataacttaatatcagaaataatatgccatcacttccgccctactctatgcattagaagagagttcttaggtcctgcccacactgaaggaaggagattatacaagggcatgaatacgaggaggcagggaccatggggccatctcagaggctgctggccacaggctccatctgtgcttctctgatctctctcatctctcaactctgccccacttctgctcattcttgtatatcaggctggaagcaagatggctacaggatttaagagctttacctccatgcaag

SEQ ID NO: 932965 - DNA, 604 bp, Homo sapiens
ttcataggaagttgcaaaaaaagagtatatagggaggtcccatgcacttttcacccagcctcccccaatgttaacatcttgcataactagtacactatcaaaaccaggaaattgactttgatacaatccatagaacttgttcatatttcaccagttttgcaagcactcatttgtgtacatgcatgtatatagttctatgcaatttgatcgcatgattagctttgtataaccacctccgcaatcaagatacacaactgtttcatcaccttaggggtccttcatgctatccctttgcagactcacgctttctcccctgaccccagtccccaacttctggagaccactggtctgtcttgatagttsaagaatgttgcataactgcaatcacacagtatgtaacctttcaaaattggctttttcccccaactcagtttaattaacttgagatcccaggcaagtttttgtgttcatcaataattgccaccttttccttgcttagttgtattggtggcatggatgtaccacagtttgtttaaccattcacccatcgaaggacactggggttgcaattatcctttataaaggaaaggaatcatttattgat

SEQ ID NO: 932966 - DNA, 718 bp, Homo sapiens
caaagtatttaatagatggctgactactgtaaaacaccaatttttggaagaggaaatgaatgttccaagaggtctaaatgacctgtccaaagcctgttaagtgtcagagtcaggattcaaaatatgcctaagtccggagcacatgccctccctcgactcagcctcctagagccagcagtttcagactactctccctgcacaggcaccaggggaggccagagcagtaacctcagtccaccccaacagcagttcttgtttgcatggaacaagcaaggaattcctctccctaagaggtgtacagcccggacacgtgacattgtttaggaaggttttacatatggtgctttcgtgagcagtttatctctggtgagtagctaaggggagttagggacaaccacaccacccaacatcactgttaacctggcaaaacacttttwttttttttttgagactgagtctctctctgttacccaggctggagtgcaatggcacaatctcagctcaccacaacctccacctcccaggttcaaacgattctcctgcctctgcctcctgagtaactgggattacaggcatgcgccaccacacctggctaatttttgtatttttagtagagacagggtttcaccatgttggccaggctggtctcgaactactaatctcaactttctctttcttatttcacctgatcctcatgagaacatcatgatatccttgc

SEQ ID NO: 932967 - DNA, 586 bp, Homo sapiens
ctgagctcttcatactatcccagtgcaccagaactcagcgaatatccctgaatttaagttttcccaagtgtcagatttaccatcccagtcttatggaagaacaaaaacttttctggttccacttttactctcagcagagtcctgcccaggttaaggctgatccttagtccacaccaagaatcagcaaatgttctgagagctaaaaccacctgcagtcatcagctcacctggagtgattctcttttctctgtaattatagctcacctagtagtcattgctctcacagctctttgatgactttaaaaatgtgattttggccgggcrcggtggctcacacctgtaatcccagccctttgggaggctgaggtgggcagatcactaggtcaagagatcgagaccatcttggtcaacatagtaaaaccccgtctctactaaaaatacaaaaattagccagggcttggtggtacgtgcctgtagtcccagctactagggaggctgaggcaggagaattgcttgaacccgggaggcagaggttgcagtgagctgagatcacgccattgcattccagcctagagacagagcaagc

SEQ ID NO: 932968 - DNA, 563 bp, Homo sapiens
cagcacctgttgtttcctgactttttaatgatcgccattctaactggtatgagatggtatctcattgtggttttgatttgcatttctctgatggccagtgatgatgagcattttttcatgagtctgttggcttcataaatgtcttcttttgagaagtgtctgttcatatcctttgcccactttttgacggtgttgtttgttttcttttcttgtaaatttgtttgagttctttgtagattctggatattagccctttgtcagatgagtagattgcaaaamttttctcccattctgtaggttgcctgtgaggagacattcaaaccatagcaatggtgaagtaagactcttcagtgatagtcaccctatacaagtcaccataatgtagaatcagtgggagtgctaagcttgttttgctgcaactatatggtcccatctgggggtgatggatcatcaggaattagattagtgacagatcatcaggaattagatactcacaaggagcatgcaacctagatcccttgcatgtgtactttacagtagggttcacaatccaatgagaatct

SEQ ID NO: 932969 - DNA, 611 bp, Homo sapiens
aggagaaggaagaggagggcctggtccttgaaggtctgcaattcttgtggaactccaagtgcgcaggtttgtccagacagccacatggaactatctcctgtacataggtgattattttaattcttccctttttttttctgtgtttcctgccaccacatgcattgactcaccccctgaatctcttgaatgcaccacttcctttattgtctrttaccacttttctataggaccttcatatccctagacttggaagttgcctttctcctggcacacagtgctctgcaatttcaacccatcctccaccgtagtgccagagaaatcgccataaagtacttcttgcaagtgccgtgctgccttgcttcaagtcattcctggcccctgctggagccaggtggagagttctagctccagagcctggtgtgtgaaactgaagaggaccctggccttgtggttggatactccagcatatctggacactggcgtaccatcctagccaaatcctgagtgtgtttattaacacagacttggttttgttttttctttgtttggtttgtcctctgtttggtttttcctcttgctgcttgctggtaatgacagtctgtcctgggggc

SEQ ID NO: 932970 - DNA, 567 bp, Homo sapiens
tcctgagctgcaaggactggctgaagggagaggaacactctgagactgtttgccttgtgtgttagtttactagagctgccttaagaaaagtggcacaagctgggtggcctaaaacaacaaaaacatgtcctctcacagtctggaggccagaagtccaacacccaggcattgatagggccgtgctcccgctgaggactctagaaaagaatctgctccaggtacacccagcttctggggggtggctagccatcctgggcgctccttggcctctcgacacattacttggatctctgcctctgtcatygtaccatgttctccctgtgtgactctacgtctctgcacccacatttccctcttctaatgaggacacagtcactgaattaggactcaccctaatccagcatcatctcctcttaacttcattacaactgcaagaatcccccaacccccaccccggccaaccccacttccaaataaggtcacattcacaggtgccaggcattaggacttgcacatacctctcagaggggacacagtttaatgcatgacaccttcaattcccaaggt

SEQ ID NO: 932971 - DNA, 532 bp, Homo sapiens
cctggcctcattcagtctttctgttggctcttcctcatcctggaaatgagctccgggttttatgggaacatgtatgaaatccattagtcctttagcttcccaggagctaccacagaccgaccacctgatgatgcccagtggatacttctcatggagtatttatagaacattttattagtttattaccaatggacctaatgatactccttgcatatgaataagctttcttccagcttaattttcttgactcaattttaggcatccctgcccacatgcttactcttaaaactgtttattttctcaggctccaaaaggaagaacctggacctcttcrgggtaaagatgttagctaccaccttaaataagcctgtatcttcagccccaaaatgagccatcagacaggaccatgtgcatggcaggatgcaggcttgtcatctcaggtgatctccctggcattgcacctgggctggggcagagaggagcgtggcccatgacagcatcacacgatacaaaaatccagaaaaatggccta

SEQ ID NO: 932972 - DNA, 608 bp, Homo sapiens
aaccagttctccttaaattttacttaatcaactcctcatattaagaagtgtacatttgctcaatcaaaatcacaatgagataccatctcacaccagttagaatggcgatcattaaaaagtcaggaaacagcagatgctggagaggatgtggagaaataggaacacttttacactattgggagtgtaaattagttcaaccattgtggaagacagtgtggcaattcctcaaggatctagaactagaaataccatttggcccagcaatcccattactgggtatataaccaaaggattataaatcattctactataaaggcacgtgcacacatatgtttattgcagcaytgttcacaatagcaaagtcttggaaccaaacccagatgcccatcaatgatagactggataaagaaaatgtgccacatatacaccatggaatactatgcagccataaaaaaggatgagttcatgtcccttgcagggacatggataaaactggaaaccatcgttcttagcaaagtaacacaagaagggaaaaccaaacactgcatgttctcactcataagtgggagttgaacaatgagaacacatggaaacagggagttgagcat

SEQ ID NO: 932973 - DNA, 499 bp, Homo sapiens
ccacaggactagaattactgggtgagtactagttctgtgctggggacacacaacttagtgagttgccagctagagtggccaaaggagtgcttgcattgctcctctcccaacatcaggcagtgcagctcacagctctggaaragaccctttccctctgtctgaggagaggagaatgaaaagtaaagaataatttgtctcacaatttggatagcaactcagccactatagtataggacacaaggcagcatcctaaagtctctaatctaggccctagctcccaggcaatatttgtggagacacccttggtcagaagggaaccccctgtcttgaaggaaagaacgcagtcccggtgatggcagcggtggcccatctggagcggccgttgcccttgacgctgggtgcagttggggaggcgcagccaaagctgcatgctccatggtgtcagtgggagccaggaacaggaagaaaccccgcccctgccaagttggaggggcaagag

SEQ ID NO: 932974 - DNA, 634 bp, Homo sapiens
ggcccaagggctgtcagcaggttatgagtccttccctttaaggcagtgggtttcattctggccaagtgtgtgcctagaaatgtcatccagggactatggccaaaatgggggcctcatgactttaattaggactgtgttctactgtggctgagctgatatccaagacacaagacaaagaaaacacgttctggccccacagcagctagaggtggaggtctctgactcccaaagcccaagtgagcatgtgttacagtgtgctttttcagctttgccatctgcaaactgtttgtgctaatcagctcagtattccctctgtcttatcacaagggcagtgsgatagtgtgataaccttctgtatcctgagttcttgcccagtgtactggaagaatcagatcaaacataggctggaaggatgagtgcaaggttttactgagtagtggaggcagttatcagtgagatggatggggagccagaagtgaggagatggagtgggaagatggtctttccctggtgttgggttgcccagcggccagactgttctccaaccaccactgcctaaaatccccttggtgtccagacgtccttcctcttctctctttgtcttctgcgttgttctgttttcgctgggctactg

SEQ ID NO: 932975 - DNA, 679 bp, Homo sapiens
cccacccatggaggtaacatttaaatcagccttagccagaggggaatcacaaatcctagcagtccaaacttgaattcccacaagcctcaccaccacccagtgtctgggccttagataaacttgaaaggcagtgtaggccagaaggactgcagccctaaggcaaatcctagtaataaacttgtcccagagccagtggacttgggggcatatgacttactgatcaccacctggggcagccaagggggtgttggcatcacctttcccctaacccaaggttgcacagcttatggctccaaaaatatccctttcctctgctggagaacaggagatagaagaacagggaggacttggtcttgaaggaaaaacaatttaccctaaacagtatacatggtgaaaatacccttcaaacatgaaggagaagtaaaaactttcccaaacaaaagctgagagatttcatcaacgccagacctgtcttataagaaatgctaaagasagtccttcgatcagaaaaaaaggatgtaatgagtaacaaaaaattttctgaagatacaaaactcactggaaatggtaaacacatggaaaaacacagaatattatcatactgtaattatgggtaaactactcttaggtagaaagactacatgatgaaccaatcgaaaataataactacaacaacttt

SEQ ID NO: 932976 - DNA, 631 bp, Homo sapiens
ctggatggtgttttccaccatgtaccaccagagcctaccccttccccagccaaagggctttactctatcagagagtaactaggcttttctcctgtggaggaaccagttgcctaaaaataagaggttcttccccaggcatttttaaaccttttttcttgcctcttctctaccccatcagcagttaaactttaatttttttttttagaagacatttttttactaggccaggccccacaactgtcactgtttatattttctgcaaagttttggttgtgaaatcagccttcgtcttgtcttacatcctgagggcatggctggtaattgcttggcaaggctttgtttatcaatcctgccttagggggtgaaacctctctggttcaatacctgcatgttttcctagmcttgtcttttaaagggccccatccgacaactgggttttcttttgcctgtctgtgtgtgtactgtgtgtaacgtctgtcaaaagagctctaattaatttggagtaaagaaagacaagtgcttggatctattattttttaaagggaagataaaatctgtggtacctttcagttcatgtgactttaatctttaagaaataaaaacagccctaaacactattggtaaaatgcag

SEQ ID NO: 932977 - DNA, 631 bp, Homo sapiens
atatgctatatattttattgcatagaatatattatatattatatagcatagaatatattaattatataatatatgtgacatattacatattatatataatacattatattattatgctatatctcatatattatatatgcgatatatgtatatatattatacgtacacatatacacatacatacacacatgtatattttaatagctaatatcttacactggtatatttatattacatacgattatatacaaatatttttgtactttatgtttrtgctgtatatacagatgtaattagttgtttatgttatatataatataaacatgatgtatattcttattttcctgtgaggacccactgtcttcttaatacactgtcttctgaccaaagtcttccacacaaatcagcggttactatatatatatataatatttatatacacatatacacatacatacacacatatgtatattttaatagctaatatcttacactgatatatttatattacatatagtaatatactaatatttttgtactttaagtttatactatatatacagatgttgttaggtatttatgttatatataatatattaacatgatgcacattcttgtattctcctgggga

SEQ ID NO: 932978 - DNA, 590 bp, Homo sapiens
gctgctgcactccagcttgggcaacagggtgagactctgtctcaaaaataaaatgaagttaaaaaaatacccaaataacaataaattacatagttctaagcattttacgtatattatctcatttaatcattttagccactctgagaaaactgaagaagcacagagaggttaatcacatgctgaaggtagagctagaaagtgacagagctggactttcagcctaggtagcctcgctcctggatccatgtgcttaatcactgagctgtctcccaaactcttttgtyaagggaagacatgagcccataagtccctggatgatgtctgtttctttatcttagccattctaaagtaagtcactccaatgctatgtttggtttaaaataggggatgagaggaaaggatattttccttgtgtctgtgaattccaggtgacagtgaatagacaaggaggaaatcaacaggaactgaaggattccaggatgcctatgatgctggctggacctttgaggatgagctaactgcatttgagggaatactgtcttattagatctaaaggtgatgttactgacctgtgtctttcctcattagcc

SEQ ID NO: 932979 - DNA, 590 bp, Homo sapiens
gctgctgcactccagcttgggcaacagggtgagactctgtctcaaaaataaaatgaagttaaaaaaatacccaaataacaataaattacatagttctaagcattttacgtatattatctcatttaatcattttagccactctgagaaaactgaagaagcacagagaggttaatcacatgctgaaggtagagctagaaagtgacagagctggactttcagcctaggtagcctcgctcctggatccatgtgcttaatcactgagctgtctcccaaactcttttgtcaagggaagacatgagcccataagtccctggatgatgtctgtttctttatyttagccattctaaagtaagtcactccaatgctatgtttggtttaaaataggggatgagaggaaaggatattttccttgtgtctgtgaattccaggtgacagtgaatagacaaggaggaaatcaacaggaactgaaggattccaggatgcctatgatgctggctggacctttgaggatgagctaactgcatttgagggaatactgtcttattagatctaaaggtgatgttactgacctgtgtctttcctcattagcc

SEQ ID NO: 932980 - DNA, 565 bp, Homo sapiens
gagacactcctcacttcccagacggggcggctgccgggcggaggggctcctcacttctcagacaggacggctgctgggcggaggggctcctcacttctcagacggggcggctgccgggcggagggtctcctcacttctcagatggggcggccgggcggagatgctcctcacctcgcagacggggtcacggccgggcggaggcgctcctcacatcccagacggggcggcggggcagaggccctccccacatctcagacgatgggcggccgggcagagacgctcgtcacttcctagatgggatggcggcaggrcagagacgctcctcactttccagactgggcagccaggcagaggggctcctcacatcccagacgatgggcggccaggcagagacgctcctcacttcccagacggggtggcggctgggcagaggctgcaatctcggcactttgggaggccaaggcaggcggctgggaggtggaggttgtagccagccgagatcacgccactgcactccagcctgggcaccattgagcactgagtgaacgagactccatctgcaatc

SEQ ID NO: 932981 - DNA, 708 bp, Homo sapiens
gcagtgagctgtgggcccgaatgtgtgtaataaaaataagatgtatacattgatctagcagttgctgaagtcggagaaaaagtgcacacagggtgggctccagagtggtcttaatgaaggccgtctcaaagttctgcaataaataaacagtaagcagagtcactaacaatatcgatgagctgagtggagaaagtttctaaggctaatattaaggctccaatctcagctctctgagtgctagtaaatccagaatgagtgagggaattatgtgatctccaccagacagccgcttttccatgtttaccagagccattagtaaacaatgttaaagcattaggtatgggggattgaactattttagtaggcaaaacaacagaagtacgagataagaactgaaggagtttgtcagcaggaagggtatgccctataaggcctgtgtaatcagagagtgctgtttgcaggtccatagataagggtaatactgcttcaaattgctttttacttaaaggaatcctgatgatatcagggtcataacctagcaactkattgcattgtctgaggcctgaatagatgactttattgactcactggacatagagagagagtgttttagtcccggtatgtgagcaaaaaacccattctagaaagcatagctctgggcccatctgtcttgttaaccctgtaggggagtgtttagtgggaaaaaca

SEQ ID NO: 932982 - DNA, 546 bp, Homo sapiens
aggggcaaaggtaaagttcacatcattgcatcagagggtacaagccccaagcttcagtggcttccaggttgtgttgaacctgcattcacagaaggcaagagtttgggatcctccacttagatttcagtggatgtatgaaaacgtttggatgtccaggcagaagtctgctgcaggactggagccctcatggagaamctctactaggtcagggcagtgggagaatgtggggttggagctcccacacagagtccccactgggcactccctagtggagctatgagaagattaccaccatcctccagacgccagaatggaagatctaccaacagcttgcaccatgcacctggaaaaggcataggcattcaacaacaacccatgaaagcaactgtggggctgtaccatgaagagccacaagggcagagctgcccaaggctgtaggagcccaccccttgtatcagcatgccctagatgcaagacatggagtcaaaggaaatcatttcagaattttaggattaagtgactgccctgtggggtttctaactcgta

SEQ ID NO: 932983 - DNA, 759 bp, Homo sapiens
cagctgactcataggaacccctccttagccctaggtatctggtggtaaatgttctttcaaaaagaagcattaggatgcatgacctatgaggccatagacagcaaccaaatctagcccttgtcaaacggttacacatctggtccacctatacctgatcaacctggcagaaaagctactatcagcagagaccctctgtccatactcagtgaccacggacagcttctgatttcccctcacctttaggcatgctcaagtccaagtcaggtaccagtccctgtgtctctccaaacacaaaagtcaagttggaggaatggttctgagaaactcttcacttggctgtaattaacaaagcaacagttccttctgccaccagagggtgtgcagcaaggatgggcagcacaacctgctaccaactctctctaaagaaattcttttctctttttttttttttttttttgagacggagtttcactcttgatgcccaggctggagtgcaatggcgcaatcttggctcactgcaacctccgcctcccaagttcaagtgagtctcttgcctcagtctcctgagtagcygggactatgggtgcgcaccactgcgcctggcaaatttttgtattttttttaaagacagggtttcaccatgttggtcaggctggtctcaaactcctgacctcatgatccgccctcctcagcctcccaaagtgctgggattacaggcatgaggcaccacactcagaccccttgccctcatttttgaca

SEQ ID NO: 932984 - DNA, 794 bp, Homo sapiens
atgctgtcgaaacacggctgggtgtgcatgcactcaggatggcactgacacgccagtcccctggtccctctggagttggtcctctctggactttggccagactttgggaggcgggttgttatgttggtggggaggcactgagggaggcttggcatgggcctgcaggcaaccctctatggtgggaggcagacaggacgggaaggtacggtccctgtcgaaactccactttggtcagaaacggcctgaagcctggggayctgggtgccagttctggttgaccttctcattcagcgaggacttccttgatgaccattcagactgttggatgatgctttttccaggcctcccatggctgcccctgaaccaatcagcatgcacttcttcccttctgagcccataaaatccctggactcaggcctgtgtggtgctcatgcctgtaatctcagtactttgggaggccaaggtgggcagatcacctgaggtctggagtttgagattagcctggccaaatggccaaaacctgtctctactaaaaatacaaaaattagccaggttcagtgctgggtgcctgtgatcccagctacttgggagactgaggcagggagaattgcttgaacccgggaggcagaagttgcagtgagccaagaatgcaccactgtgctccagcttgggtgacagagcgagactccatctcaaaacaaacaaacaaaaacccctggactcagccagacttacacagatgtcagggctaccagctatggaaaggagccacccacatagggtttcctcaactc

SEQ ID NO: 932985 - DNA, 535 bp, Homo sapiens
tctcactaaggagtgccagacagtgggcgcaggtcagtaggtgcatgcaccgtgcacgagccaaagcagggcgagcattgcctcactcgggaagcgcagggggtcagggagttccctttcctagtcaaagaaaggggtgacagacggcacctggaagatagggtcgctcctacctgactactgcacttttccgacgggcttaaaaaacggcgcaccaggagactatatcccgcacctggctcggagggtcctacgcccayggagtcttgctgattgctagcacagcagtctgagatcaaactgcaaggcggtagcgaggctgggggaggggtgcccgccattgcccaggcttgcttaggtaaacaaagcagccaggaagttcgaactgggtggagcccaccacagctcaaggaggcctgcctgcctctgtaggctccacctctgggggcagggcacagacaaacaaaaagacagcagtaacctctgcagacttaagtgtccctgtctgacagctttgaagagagcagtggttctc

SEQ ID NO: 932986 - DNA, 535 bp, Homo sapiens
tctcactaaggagtgccagacagtgggcgcaggtcagtaggtgcatgcaccgtgcacgagccaaagcagggcgagcattgcctcactcgggaagcgcagggggtcagggagttccctttcctagtcaaagaaaggggtgacagacggcacctggaagatagggtcgctcctacctgactactgcacttttccgacgggcttaaaaaacggcgcaccaggagactatatcccgcacctggctcggagggtcctacgcccacggagtctygctgattgctagcacagcagtctgagatcaaactgcaaggcggtagcgaggctgggggaggggtgcccgccattgcccaggcttgcttaggtaaacaaagcagccaggaagttcgaactgggtggagcccaccacagctcaaggaggcctgcctgcctctgtaggctccacctctgggggcagggcacagacaaacaaaaagacagcagtaacctctgcagacttaagtgtccctgtctgacagctttgaagagagcagtggttctc

SEQ ID NO: 932987 - DNA, 535 bp, Homo sapiens
tctcactaaggagtgccagacagtgggcgcaggtcagtaggtgcatgcaccgtgcacgagccaaagcagggcgagcattgcctcactcgggaagcgcagggggtcagggagttccctttcctagtcaaagaaaggggtgacagacggcacctggaagatagggtcgctcctacctgactactgcacttttccgacgggcttaaaaaacggcgcaccaggagactatatcccgcacctggctcggagggtcctacgcccacggagtcttgctgattgctagcacagcagtctgagatcaaactgcaaggyggtagcgaggctgggggaggggtgcccgccattgcccaggcttgcttaggtaaacaaagcagccaggaagttcgaactgggtggagcccaccacagctcaaggaggcctgcctgcctctgtaggctccacctctgggggcagggcacagacaaacaaaaagacagcagtaacctctgcagacttaagtgtccctgtctgacagctttgaagagagcagtggttctc

SEQ ID NO: 932988 - DNA, 772 bp, Homo sapiens
tctatcagacattcaaagaagaactggtaccaatcctattgacactattccaaaaagatagagaaagagggaatcctccctaaatcatgctatgaagccagtatcacccaataccaaaacaaggaaaggacataacaccaacaacaaaaaaaaacagaccaatatctctgaagaatatagatgcaaaaatcctcaacaaaatactagctaatcgaatccaacagcatatcaaaaagataatccaccatgaacaagtgggttkcataccaggaatgcaaggatactttaacacacacaagtcaataaatatgttacaccacatgaacagaactaaaaacaaaaatcatatgatcatctcaacagacacagaaaaagtgtttgacaaaatccagcatcctttatgattaaaaccctcagcaaaactgccgtagaagggacatacctcaagggaataaaacctatctatgacaaatgcacagacaacatatactgaataaggaaaacttgaaagcattcttcctgaaaactggaacgagacaaggatgaccactcccaccacttctgttcaacatagtactactgaagtcctagtcagagcaatcaaacgagaaaaaaataaagggcatccaaatccgtaaagaggaagttgaactgtcattgttcgccaacgatattttatccctagaaaaccctaaagacacacccaaaatgctcccagatctgataagttaatttggtaaagtttcagaatacaaaatcaatgtacacaaat

SEQ ID NO: 932989 - DNA, 609 bp, Homo sapiens
gaccatgatatgttaatcctctgtttataagatacttaactaactgaaacttcctagatgtcttgttttgactttggcaatggtgatttgagccattaagaaatcccacagaagacaaataatcaaagtgtcattattccccagaagtctgcatrtagtctagctcttgcataaagagtgagacaccaattccttgagataattaaagtattaatgtgattaacattgtgtagtcacaacttcctataagttctaagcgttctggaataggaagaaagaaatctaaactaaaactagaaaataaatcaaattatcaggatacttcagacaaaataaagttttgcaaataaattaattgcatgctattcctcaaaaactttagtttgattttttttttttccagacggtttacttttttttttttttttttatggagtcttgctctgtcgctcaggctggagtgcaatggcgccatctcggctcactgcaacctccgcctcctgggttcaagccattctcctgcctcagcctcccgagtagctgggactacaggcacccaccaccacgcccggctgattttttgtatttttagtagagatggggtttcac

SEQ ID NO: 932990 - DNA, 609 bp, Homo sapiens
gaccatgatatgttaatcctctgtttataagatacttaactaactgaaacttcctagatgtcttgttttgactttggcaatggtgatttgagccattaagaaatcccacagaagacaaataatcaaagtgtcattattccccagaagtctgcatgtagtctagctcttgcatraagagtgagacaccaattccttgagataattaaagtattaatgtgattaacattgtgtagtcacaacttcctataagttctaagcgttctggaataggaagaaagaaatctaaactaaaactagaaaataaatcaaattatcaggatacttcagacaaaataaagttttgcaaataaattaattgcatgctattcctcaaaaactttagtttgattttttttttttccagacggtttacttttttttttttttttttatggagtcttgctctgtcgctcaggctggagtgcaatggcgccatctcggctcactgcaacctccgcctcctgggttcaagccattctcctgcctcagcctcccgagtagctgggactacaggcacccaccaccacgcccggctgattttttgtatttttagtagagatggggtttcac

SEQ ID NO: 932991 - DNA, 609 bp, Homo sapiens
gaccatgatatgttaatcctctgtttataagatacttaactaactgaaacttcctagatgtcttgttttgactttggcaatggtgatttgagccattaagaaatcccacagaagacaaataatcaaagtgtcattattccccagaagtctgcatgtagtctagctcttgcataaagagtgagacaccaattccttgagataattaaagtattaatgtgattaacattgtgtagtcacaacttcctataagttctaagcgttctggaataggaagaaagaaatctaaactaaaactagaaaataaatcaaattatcaggatacttcagacaaaataaagttttgcaaataaattaattgcatgctattcctcaaaaactttagtttgattttttttttttccagacggtttactttttttttttttttttwatggagtcttgctctgtcgctcaggctggagtgcaatggcgccatctcggctcactgcaacctccgcctcctgggttcaagccattctcctgcctcagcctcccgagtagctgggactacaggcacccaccaccacgcccggctgattttttgtatttttagtagagatggggtttcac

SEQ ID NO: 932992 - DNA, 631 bp, Homo sapiens
tccactaatttttatctgatttttccttctttgataattctgaagggacaaaacaaggcatcctttgtgtatgtccaaatctagagtcagtaaatcctcacttgatttaatgagatgtccaatatgtctttccagttaaaayggtgtattgaggccggatgaggtggctcacgcctgtaatcccattgggaggccaaggtgggtggatcacctgaggttgggaatttgagaccagcctgaccaacaaggattgggaggccgagatgggtggatcacctgaggtcgggagttcgagaccagcgtgaccaacatggagaaaccccatctctactaaaaatacaaaattagccgggcatggtggcacatgcctgtaatcccaggtactcaggaggctgaggcaggagaattgcttgaacccaggaggcagaggttgcagtgagctgagatggcgccactgcactccagcctgggcaacaagagcgaaactccatctcaaataataacaacataaaataaaataaaatgatgtattgaaatgttcccaactttctgcataaaattttgaatcttactcatgttcagatatgtgaaatacataacatctattctactaaatccagacctaagtgta

SEQ ID NO: 932993 - DNA, 631 bp, Homo sapiens
tccactaatttttatctgatttttccttctttgataattctgaagggacaaaacaaggcatcctttgtgtatgtccaaatctagagtcagtaaatcctcacttgatttaatgagatgtccaatatgtctttccagttaaaacggtgtattgaggccggaygaggtggctcacgcctgtaatcccattgggaggccaaggtgggtggatcacctgaggttgggaatttgagaccagcctgaccaacaaggattgggaggccgagatgggtggatcacctgaggtcgggagttcgagaccagcgtgaccaacatggagaaaccccatctctactaaaaatacaaaattagccgggcatggtggcacatgcctgtaatcccaggtactcaggaggctgaggcaggagaattgcttgaacccaggaggcagaggttgcagtgagctgagatggcgccactgcactccagcctgggcaacaagagcgaaactccatctcaaataataacaacataaaataaaataaaatgatgtattgaaatgttcccaactttctgcataaaattttgaatcttactcatgttcagatatgtgaaatacataacatctattctactaaatccagacctaagtgta

SEQ ID NO: 932994 - DNA, 634 bp, Homo sapiens; identical to SEQ ID NO: 919442

SEQ ID NO: 932995 - DNA, 742 bp, Homo sapiens
cactgctgttttcacactgctgataaagacatacccatgactgggcaatttacagaagaaagaggtttaatggacttacagttccacgtggctagagaggcctcacaatcatggaggaaggcgaaaggcacttcttatatggtggtggcaagagagagaatgagagctaagcgaaatcggtttcccyttatcaaaccatcagttctcatgagactcattccctaccacaagaacaatataggagaaactgcccccataattcaattatctcccactgggtccctctcacaacacataggaattatgggagtacaattcaaaatgagatttgggtggggaaacagacccaaaccatatcagatgttaagtgaaaatcaaatataaactgcataatatttgtgggtagttgtggttttcctgctgagctcactaccactgggccgtgaggttatcttttcccacccactgccactagatgttttctgtacacaaggtagttctcctgcccagcccaccaccactggactccgtctccctgtacgtaagcccctaattaaaccccttgtctcatttgctggctctgggtgctttctttggcctcttgaacttggtgcttttccaactgaggctaacaggggctcagcacaacactgccttctgagagttaatggctgtgtgcccatctagtcttttgcattaagcagtttatgatgggtgggccagctattgagctcaggaatga

SEQ ID NO: 932996 - DNA, 599 bp, Homo sapiens
agccgggtgtggtggcatgcacctatagtcccagctacttgggggactgagacagtaggatcacttgaacctggaggtcaaggctgcagtgagccaagatgacaccactaccctccagcctgggcaacaaagtgagtccctatttcaaaaaaagaaaagaaaatacaatcttaccagagggctgagagctagaaatacttggtaaaaaacaatgttmattactacaaaccgcatttgtgaacgtctccttcaggcttcagaagaggaagctcttggactttcagggcacaaaggatgctaaatgggtattccatgtgtaattggtttttatttttcttgcaattttcaggtacagcaaatcctattcacactttgttacctgtagtctatctttattgtcttaataatttttattaatatatatacatgaattttaaaatagtcacattttagttatatagaaatgtatatattttaagattatttttaatgtaatttaatttatatatgaaggcatttatctttgcactcaaggacttcagccaccctcgttcttttttcccataaagccctacattctagaatcacacatttgcctc

SEQ ID NO: 932997 - DNA, 611 bp, Homo sapiens; identical to SEQ ID NO: 920685

SEQ ID NO: 932998 - DNA, 658 bp, Homo sapiens; identical to SEQ ID NO: 920686

SEQ ID NO: 932999 - DNA, 569 bp, Homo sapiens
gataacttctggtagcctgggactccttgggaaaaacagaagaggcaccacagacccagttttagggaaaaaacaaaacaacaacaacaaaaaacctttttttcccctcatgaaatcccaggaattaaaagcaaatagatccctctcaaaatcaaaggctctgttctgctttttgcatcctttgcatcgcgttatctgagtttggggggtatcagaaattacttcacattatgagagtgctttggtttgtaatacctaggtaggaaatatactttaagtgatagctaatagtagttatggagggatacttgactctttgactctttgcactcttggatcagagaagcatgytcttggccacctggaagataaggaaccatccccagcccccactgaaaggtaagactcccatgagggatgggctgactactaaaccggctgattggctttggcttgccttgcactgaaatgcaaagtaaaagcgctgcactgtcttctcccgtagtgtttccctccttttggggatccaggagccagtaaaaaaaaatggcgctcttaattttggggat

SEQ ID NO: 933000 - DNA, 604 bp, Homo sapiens
tataacatagctacactcaaaaaaatttatcttatatcttatataagtcttctatcttacaaattttcttatttcatatctgcccaaaattgttgtgtttgaggaataaccaggaatgtaacggcacaaacttacagttttatctaacttgggagtcaattccatcctgcccactccctcttygccacaccccatcacacccgcaccctaaccctgcccctaccctgagggaagcaagggaatgtaagctctcatgctctccttcactgctgcttaattcaactttggattagttccagccaccagcatcccagagacctgatgctggagaacaggacagaaactgctgctcaaggacattggttcagagacgtcagtgtggctgaaggaacagaataacaataaaggatttaaaagattagatgtgagtggacttcacggaagacagtggacttcagccaagcagcatagtgtggaaaggacaacggaaggtctgcaagccctaagtctacaatatcacttagtaccacggtcatttaatgtgtatatgataaataacacatgcatcaggtaattttcaacacggatgttgacttcagaatga

SEQ ID NO: 933001 - DNA, 604 bp, Homo sapiens
tataacatagctacactcaaaaaaatttatcttatatcttatataagtcttctatcttacaaattttcttatttcatatctgcccaaaattgttgtgtttgaggaataaccaggaatgtaacggcacaaacttacagttttatctaacttgggagtcaattccatcctgcccactccctcttcgccacaccccatcacacccgyaccctaaccctgcccctaccctgagggaagcaagggaatgtaagctctcatgctctccttcactgctgcttaattcaactttggattagttccagccaccagcatcccagagacctgatgctggagaacaggacagaaactgctgctcaaggacattggttcagagacgtcagtgtggctgaaggaacagaataacaataaaggatttaaaagattagatgtgagtggacttcacggaagacagtggacttcagccaagcagcatagtgtggaaaggacaacggaaggtctgcaagccctaagtctacaatatcacttagtaccacggtcatttaatgtgtatatgataaataacacatgcatcaggtaattttcaacacggatgttgacttcagaatga

SEQ ID NO: 933002 - DNA, 604 bp, Homo sapiens
tataacatagctacactcaaaaaaatttatcttatatcttatataagtcttctatcttacaaattttcttatttcatatctgcccaaaattgttgtgtttgaggaataaccaggaatgtaacggcacaaacttacagttttatctaacttgggagtcaattccatcctgcccactccctcttcgccacaccccatcacacccgcaccctaaccctgcccctaccctgagggaagcaagggaatgtaagctctcatgctctccttcactgctgcttaattcaactttggattagttccagccaccagcatcccagagacctgatgctggagaacaggacagaaactgctgctcaaggacattggttcagagacgtcagtgtggctgaaggaacagaataacartaaaggatttaaaagattagatgtgagtggacttcacggaagacagtggacttcagccaagcagcatagtgtggaaaggacaacggaaggtctgcaagccctaagtctacaatatcacttagtaccacggtcatttaatgtgtatatgataaataacacatgcatcaggtaattttcaacacggatgttgacttcagaatga

SEQ ID NO: 933003 - DNA, 724 bp, Homo sapiens
ctacacaagtgagggcacggccaggcagggtaggacttggcaggtaatagaaacagggtgttatgagggtgtgggtgaggaacaaacctgttgcctgtgatggagattgggtcaggagagaggtgccaggggcaacttctcaggatgaataacattygaagagaaacaggcagaatagacagggttttgagaagccagaaaagggatcatagggcattctgggaagaaggaacattgcaaagagagaagtggaggtaagaatgttaatggagcactgcggtggtattccatggctccagtgagaatggcagggatgaagagatgcataaaagactggcaggcagggtggggcctgattgtgaaaggacttaaccatggcagtgagtttccatttattgtaaaggcattgggagccacataagcctttttgagtgaggagctggctttatcagattggtgttgtaagagaaactgcaaagcctgttgggattggatgagagaaggctgtactagataagttaaggaggatggatgatgcagcaatccatcccgagagggagcgagagggtcagaactggagcgtggtgctgggaacccagtgaatagcacgattcagcctggctgtgctctgacagtctggattatcttggggctgtctcagaggagatctggggctgccccagaagtgggttttactctcactgtgctgtgttgtattaatagc

SEQ ID NO: 933004 - DNA, 731 bp, Homo sapiens
ttcactgtcctgcctcaggggtatatcatctccccggctttgtgccagaatcttgtttgcagagatcttgatcacttttcccttctacaagatatcacatgggtccgttacattgattacactatgctgattggatctagtgagcaagaagtagcaaacacactggagttatttatgagacatttgtgtgccaagggatgggaaataaatctgactaaaattcaggggccttctagctcagtaaaatttctaggggtccagtgatgagaggcctgtcaagatatgccttctaaggcgaaggataagttgctgcatttggcccctactaccaccaagaaagaggcacaacacctagtgggcctatttggattttggaggcaacatattcttcatttgggtgtgttactccagcccatttatctagtgacccgaaatgttgccagttttgagtggggtccagaacagaagaaggctctgcaacaggtctagrctgctgtgcaagctgctctgccacttgggccatatgacccagcagatccaatggtgcttgaggtgtcagtggcagatagggatgctatttggagcctttggcaggcccccatagatgaattacagcaaaggtctctaggattttggagcagggccctgccatcttctgcagataaccatcctcctttcgacatgcacctcttggcttgttatcgggctttgatagaaactgaatgtttgac

SEQ ID NO: 933005 - DNA, 627 bp, Homo sapiens
gaagtgctggatgtagtggcttacacctgtaatcccagcactttgggaggccaaggtgggaggattgcttgaggccagaaatttgagaccaggctggacaacatagcaagaccccatttctatgtgaaaaaaaatttttaaaggaggaggaagagcaaattattcwctctctctctctctctctctctctctttcttttcctttgggacagagttttgctcttgtttcccaggctggagtgcaatggcgtgatctcggctcaccacaacctctgcttcccaggttcaagccattctcctgcctcagcctcccaagtagctgggattacaagcatgtgccaccacgcctggctaattttgtacttttagtagagatagggttttgccatgttggtcaggttggtctcgaactcccgacctccggtgatccgcctgccttggcctcccaaagtgctaggattacaggcgtgagccaccatgctcggcccattctctctcattttgagctaggacatccatctctcctgcctttggacatcagagctcctggttcttgggccttcaaactcgaggacttgtactttacacttgggacttctttccatgagctgtggaaagccactgaaga

SEQ ID NO: 933006 - DNA, 589 bp, Homo sapiens
ggccaataatcatacataagaaggtcaaagggaaaaaaaaagcaaatggtcagccataagtacacggaaaaggtgctgaacaccattagtaattagggaaatacaaatcaaaaccacagtgagatagtacttcacacccaaacaaacacccagaaaatagcaagtgtaggcaaggatgtggagaaactgaaacccttgggccctgctggtgggaacacaggcactgtggaaatggtgrttcctgaaaatataaaatatatatgatccagcaattccatttctgggtaaatgtccaaaagaggagaaagcagggactcaaacagatattgatacactcatgttagtattaatagcagaattattcacagtcaaaaagcagaagtaacccaagggtccattaacagatgagtagataaaaataaaatgtggtacatacagactgttcttcagcttaaaaaggaaattctggctgggcgcagtggctcacgtctgtaatcccagcactttgggaggccgaggcaggtggaccacctgaggtcaagggttcaacaccagcctggccaatatggcaaagccccatcgctactga

SEQ ID NO: 933007 - DNA, 589 bp, Homo sapiens
ggccaataatcatacataagaaggtcaaagggaaaaaaaaagcaaatggtcagccataagtacacggaaaaggtgctgaacaccattagtaattagggaaatacaaatcaaaaccacagtgagatagtacttcacacccaaacaaacacccagaaaatagcaagtgtaggcaaggatgtggagaaactgaaacccttgggccctgctggtgggaacacaggcactgtggaaatggtgattcctgaaaatataaaatatatatgatccagcaattccatttctgggtaaatgtccaaaagaggagaaagcagggactcaaacagatattgatacactcatgttagtattaatagcagmattattcacagtcaaaaagcagaagtaacccaagggtccattaacagatgagtagataaaaataaaatgtggtacatacagactgttcttcagcttaaaaaggaaattctggctgggcgcagtggctcacgtctgtaatcccagcactttgggaggccgaggcaggtggaccacctgaggtcaagggttcaacaccagcctggccaatatggcaaagccccatcgctactga

SEQ ID NO: 933008 - DNA, 735 bp, Homo sapiens
agtgatgacagcacagcagtgtggatgtcctgaatgccacggaactgtacactgaaaaatggtgacggtgctaactttatgtgaatttcaccatgattttaaaagagcccagtgtttattatcaacctcattgcaagaggagctttgttcaaaatttcaagtatttgttcaaaaggtttatttaatgaatatctattagtttctaagccctgtgttcagtgctaagggagaggggagaaaggaaaggccttaagaacctcacacttcatcaggagagaaggggaggaaggtaagccctgaagacatgagaaggatcttcattaaaaaaaattcctgccgggtgcagtggctcacgcctgtaatcccagcactttgggaggctgaggcgggcggatcacctgaggtcaggagttcgagactagcctgaccaatatgatgaaaccctgtctctactaaaaatacaaaaattagctgggcatggtggcgtgcgcctgtaatcgcaattacttgggaggctgaggcaggagaagagcttgaacttgggaggcagaggttgcrgggagccgagatcgtgccattgcactccagcctgggcaataagagtgaaactctgtctcaaaaaaaattcttttaaggggcaggctggactcgaactcctgggctcaagggatcctcctgcctcagcctcccatgtagctgggactacaggtgcacgccactgccccctgctaagat

SEQ ID NO: 933009 - DNA, 757 bp, Homo sapiens
aacagtctagagtgggagatgactccctctctacgactgtccctaggcattggtgctgcccccttcagtgactggccccatgcctgcatttcctttgtcccaaggggactttgatgggctgtgctccccctcccttatgggcagcctacactgtgggtttagatcttcagamgtcctttagccccctgggacccacctgtcccccatgcttcccaacgtcagagccagttgtggggtatatttgcaggagatctggtggtacagtgactctagagcagagagatctcaggcagggcagtggcactatgggtacacaaccagtatggcaccctccatctcattttgggtctgagggaaacataggtgtgcctgcacaagctagcaacctggttctctgtccctgggaagttcctgaatagccacttatagcattgtcttgggtcactagcacagaggggctccttagaagcttggcagtcaggagattgtcagaggagtgaggggaggagagaagcactcccacctactttccatggggctccaagctccttgggggtcaatctctgtggactcttgctgcttcccttttctacaccctgcttcttcccactggccctctgacagatcctggctctcttcccccagttttctgttcagaactgggcctttcaccagtaactttgatcatcttcctgaggagaactggcacctgatgtccctagagagccatctgctcgaggcactgggcactgtgcac

SEQ ID NO: 933010 - DNA, 757 bp, Homo sapiens
aacagtctagagtgggagatgactccctctctacgactgtccctaggcattggtgctgcccccttcagtgactggccccatgcctgcatttcctttgtcccaaggggactttgatgggctgtgctccccctcccttatgggcagcctacactgtgggtttagatcttcagaagtmctttagccccctgggacccacctgtcccccatgcttcccaacgtcagagccagttgtggggtatatttgcaggagatctggtggtacagtgactctagagcagagagatctcaggcagggcagtggcactatgggtacacaaccagtatggcaccctccatctcattttgggtctgagggaaacataggtgtgcctgcacaagctagcaacctggttctctgtccctgggaagttcctgaatagccacttatagcattgtcttgggtcactagcacagaggggctccttagaagcttggcagtcaggagattgtcagaggagtgaggggaggagagaagcactcccacctactttccatggggctccaagctccttgggggtcaatctctgtggactcttgctgcttcccttttctacaccctgcttcttcccactggccctctgacagatcctggctctcttcccccagttttctgttcagaactgggcctttcaccagtaactttgatcatcttcctgaggagaactggcacctgatgtccctagagagccatctgctcgaggcactgggcactgtgcac

SEQ ID NO: 933011 - DNA, 584 bp, Homo sapiens
tatttttagtagagaacggtttcaccatgttggccaggctggtctcaaactcttgacctcaagtgatccacctacctcggcctcccaaaattctgggattacaggcgtgagccaccatgcccagccacatttagtatttatttctaaatacaccttggaaaagtatgtgtaggtataaagcagagctttaacaaattttcttggtttttaaataataatttaaaaatattcttatttgtagtacaaattcattatttgtagttattttaaagttttcccacttgtgtcttttcacactcatacacacrtcatgaaagaattttcatttgtagtcacaaatgcacttgtctcattgtttaaacaataaattagaatagataagtttttgaaggagtaataaactagtaaaccatgatttgtgtttttcagggggaatggatgttgtgttttccgtatttcaaagttttttggatgaatcagcttctggctggtgtttctttactttggaaaatttaatatatggtataatgttaagaaaatcatctgttactgtttaccgatggcaggggatttttattccagtt

SEQ ID NO: 933012 - DNA, 713 bp, Homo sapiens
tgggaggggccaggggcaggatgatatggtttggctgtgtccccacccaaatctcatcttgaattcctgtgggagataattgaatcatggtggcaagtctttcctgtgctgttctcatgacagtgaataagtgtcatgagatctcatggttttaaaaagaggagttcccctgcacaagctctctctttttgcctgctgtcattcatgtaagacgtgacttgctcctccttgccttcagccataattgttaggcttccccagccatgtggaactgtaagtccaattaaacctctttcttttgtaaattgctctrtcttaggtatgtctttatcagcagtgtgaaaacggattaatataggtcccatttatttatttttggttttgtcacatttgcttttggggtgttagtcatgaattctttgcctaggccaatgtccagaaaagttttccaatgttatattccagaatttttatggtttcaggtcttagatttaagtctttatacatcttgagttgatttttgtatagggcgagagatggagatccagtttcactctttttttttttttttttttgagatggagtctcactctgttgcccaggctggagtgcagtggcacgatctcagctcactgcaacctccaccctccaagttcaagcgattttcctgcctcagcgtcccaaataactgagattacaagcacctgccactg

SEQ ID NO: 933013 - DNA, 713 bp, Homo sapiens
tgggaggggccaggggcaggatgatatggtttggctgtgtccccacccaaatctcatcttgaattcctgtgggagataattgaatcatggtggcaagtctttcctgtgctgttctcatgacagtgaataagtgtcatgagatctcatggttttaaaaagaggagttcccctgcacaagctctctctttttgcctgctgtcattcatgtaagacgtgacttgctcctccttgccttcagccataattgttaggcttccccagccatgtggaactgtaagtccaattaaacctctttcttttgtaaattgctctatcttaggtatgtctttatcagcagtgtgaaaacggattaatataggtcccatttatttatttttggttttgtcacatttgcttttggggtgttagtcatgaattctttgcctaggccaatgtccagaaaagttttccaatgttatattccagaatttttatggtttcaggtcttagatttaagtctttatacatcttgagttgatttttgtatagggcgagagatggagatccagtttcactctttttttttttttttttttsagatggagtctcactctgttgcccaggctggagtgcagtggcacgatctcagctcactgcaacctccaccctccaagttcaagcgattttcctgcctcagcgtcccaaataactgagattacaagcacctgccactg

SEQ ID NO: 933014 - DNA, 761 bp, Homo sapiens
aggcccacattcattaagacaatcatttggggtaaatgtgattttttgtttcttttttttgagacagagtcccgctctgtcgcccaggctggagtgcagtggcaccatctcggctcactgcaagcttcacctcctgggttcacaccattctcctgcctcagcctcccaagtagctgggaccacaggcgccgaccaccacgcccagctaattttttgtatttttagtagaaatgggttttcaccgtgttagccaggatggtctcgatctcctgacctcgtgatccacccacctcggcctcccaaagtgcygggattacaggcgtgagccaccgtgcccggccttttttttgagacagggtcttgctctgttgcccagagtggactgcagtgggctgaagtgatcctcacacctcagcctcccaagtaactgggcatacaccaccatgctctttttttttctgtagctatctgcttaggaacaaaaggaaaggcagtttcttgaatgagtcagctttcagcttaattttttcctttaggcatagtgaattggagtcccaggtttttattcttttcatgagagcaaacttttgtttgcaaacagcattatcattttcattactctgcggttgttctctttaaaaaaagagaaaaaagaaaaaaatcccttagcccaggattagcaagtatccaacatgcatactcctgctttccccttcttatcctcttcttagcaagggctgtcatgactggttaaccatatt

SEQ ID NO: 933015 - DNA, 761 bp, Homo sapiens
aggcccacattcattaagacaatcatttggggtaaatgtgattttttgtttcttttttttgagacagagtcccgctctgtcgcccaggctggagtgcagtggcaccatctcggctcactgcaagcttcacctcctgggttcacaccattctcctgcctcagcctcccaagtagctgggaccacaggcgccgaccaccacgcccagctaattttttgtatttttagtagaaatgggttttcaccgtgttagccaggatggtctcgatctcctgacctcgtgatccacccacctcggcctcccaaagtgccgggattacaggcgtgagccaccgtgcccggccttttttttgagacagggtcttgctctgttgcccagagtggactgcagtgggctgaagtgatcctcacacctcagcctcccaagtaactgggcatacaccaccatgctctttttttttctgtagctatctgcttaggaacaaaaggaaaggcagtttctwgaatgagtcagctttcagcttaattttttcctttaggcatagtgaattggagtcccaggtttttattcttttcatgagagcaaacttttgtttgcaaacagcattatcattttcattactctgcggttgttctctttaaaaaaagagaaaaaagaaaaaaatcccttagcccaggattagcaagtatccaacatgcatactcctgctttccccttcttatcctcttcttagcaagggctgtcatgactggttaaccatatt

SEQ ID NO: 933016 - DNA, 831 bp, Homo sapiens
ggccctgagcaggatacttaacctctccaagcctcagtttcctcatcttttttatttttatttttatttattttttattttttttagacagagtcttgctctgttgcccaggttgaaatgcagtggtgcaaacaaggctcactgccacctcagcctcccaagctcaggtgattctccccaatcagcctcctgtatacctgggaccacaggctcatgccaccacacctggctagtttttttttatcttttgtagagacggagtctcactttgttgcccaggctggtctcaaacttaagggctcaagcgatcctccaacctcagcctcccaaagtgctaggattacagatgtgagccaccatcctggtcagtttcctcatctttatttatttatttttcagtcagagtcttactctgccacccaggctggagtacagtggcgtgatcttggctcacggtaactttgcctcttgggttcaaatgattctccagtctcagcctcccgagtagctaggattacaagcgtatgtaatcacacccggttaatttttgtatttttagtagagasggggtttcaccatgttggccaggctagtcttgaactcctgacctcaagtgatccgcccacctcagcctcccaaagtgctctgcctcaaaaaaaagaaaaagaaaatacagaagagtgaacagaaagaaaattgtttcaatcaccttaatctctccacggagagcaaaccactgataacatttggttaactattgtcccatatgctattcccatgcatatgcgtactcacatacagtattttacgaaaagtggaattacgctgtac

SEQ ID NO: 933017 - DNA, 567 bp, Homo sapiens
ataagagtagtgaaagagggcatccttatcttgtgctggttttcaagaggaatgcttccagcttttgcccattcagcatgatattggctgtggttttgtcacaaatggccttattattttgagctatgttccttcaatatctagtttattgagagtttttaacatgaagggatgttgaattttatcaaagggcttttctgcatctattgagataatcatgtggtttttgtcttcatttctgtttatgtgatgaatcacatttattgatctgtgtatgttgaaccaaccttgcatcctggggatgaagccaacttgatcatggtggataagctttttgatgtgctgctggatttggttcaccagtattttgttaaggatttttgcatcgatgttcatcraggatattgtcctgatgtgtttttgttgttgttgttgttgtgtctctgccaggttttggtatcaggatgatgctggcctcatgaatgagttagggagaagtccctccttttcaatgttttggaatattttcagtaggaatggtcccagctcttctttgtacctctggta

SEQ ID NO: 933018 - DNA, 583 bp, Homo sapiens
tctgtctggttctggactttttttgttggtatgctattaattactgcctcaatttcagaacttgttattggcttattcagagatttgacttcttcttggcttagacttgggagcgtgtatgtgtccaggaatttaaccatttcttctaggttttctagtttatttgcatagaggtgtttacggtattctctgatggtagtttgtatttctgtgggatcagtggtgacatcccatatatcctttyttattatgtctatttgattcttctctcttttcttctttattagtctggctagtggtctatgtattttgttgattttttcaaaaaacaagcttctggtttcaatgatttttttaagggtttttcgtgtccctgtctccttcagttctgctctgatcttagttatttgatgtcttctgctagcttttgaatttgtttgctgttgcttctctagttcttttaattttgatgttagggcatcaattttagatctttcctgctttctcttgtgggcatccagagctataagtttcactcttaaacactgctttaaatgtgtctcatagattctggtacattatg

SEQ ID NO: 933019 - DNA, 601 bp, Homo sapiens
tgcttattggaattttctttagaaagcaaagtacttagagcctcttgtcagcttagcttacaagtagccttaactgtgattcccaaatatcagaaaaagctccactcaacatcatttacactgactacagtttaagcttcctttttcatgaggcctggctgtatttcctgtccttggtttctgtgacatctattattaaagtaaaccaactacttacttttctagtttctgtccttatgcccagacattaacaaactgagacaacagatgagttaccattgaagtttytagagagcaatgagaaaagggacttaagaatctacttgaaagacagccttacagacacaaaaataacaatatgacacatcatttcagagagtactaaagggattttaagcgacaatagtcactccagaatccattggttgatagctggtaatcatgttatcatcattcaaaatcagtaactgaaaaaatagaatcacatttttatttagaaaaaaagacgaactgaccctttattttgaaagcttggaatgttgtcttaagacaaacatcctcatgcaaataaaaaactaatttatatacttacaaatcacag

SEQ ID NO: 933020 - DNA, 623 bp, Homo sapiens
ctaggagctttctggaagaggcttcaggatttctgaggtaaccaatcatattgtgagcaaacagtgacagtttgacttcctccttacgaatttggatgccctttatttctttctcttgtctgattgctctggctaggatttccagtactatgttgaagagaagtctgagagtgggcatccttgtcttgttccagttctggagggaattatttcaacatttccccattcagtattctgttggctgtgggtttgycatagatgatttttatttcattgaggtatgtgccttgtatgctgattttgctgtgagttttaatcataaagggatgctggattttttcaaatgctttttctgcatctattgagatgatcacgtgatttttgtttttaattctgtttttgtggtgtatgacatttattgacttgagtatgttaaaccatccctgtatccctggtatgaaacccacttgatcatggtggactatttttctgatacattgttgaattaggttaaccagtattttgttaaggattttagcatctgtgttcatcaaggatatcagtctgtagactgggaggctaggcccatctctcctcttcatgtttttctgcctgctttatat

SEQ ID NO: 933021 - DNA, 699 bp, Homo sapiens
cagctgcaaaaaaacactgaaaaagaaatatgaagtttttttttttctccttggatgtagaaagccacaacagaacactattcccacctaacaatgtgtagaatctatataatgttactttttattttttgagcttaaagtgtacctgaggttgcaaggaaactgaatttcaaaatttccaagtttttttgggagagataagtccagtgaactttttcacacatgaaagggcacagaaagaaaaaatggtagccatcaaagtgggtaagaaaaaaaataaaataaaattttcaataaatttctaaagaccaagtgtgtgctaacatgtcwgattaggatacctgaaagcccagaaactagaacagtctgcacccactcattgattcttttccaagccctcctccaggtgattgtaagaaagatcaggagcagaacaagagatacggacttatattgtggcgcaggacttcaggaggtgattaatgcttgctatggaaaagacacagagatctatgtgcttccctgaatcctttccttctagaaagaataaaactcaagtctctgaaagaagggcaacaaactctctcacccaaaagattcattctaagatccattgttcatgtgggaaaggtataagcaaaacccttctactaaaaaagataaacaaaatctagaaaattagggaatttcagcagagaa

SEQ ID NO: 933022 - DNA, 624 bp, Homo sapiens
aagtccaccccttgtcaacttgaacccatacacatctcctgaaatcatacttagtctccaaatacagacaataataaggttgtaattatgcctaacgtaatacagctatcctttgtacaactggaagcacgctaatgcttwacctaaatgctattatataaagttaacaacacttaaatgctgatatgaagtcaataaatcttatgtaacatgataaaggaaaaagaaaggagataaaatgaagatatttcctttgtacaagtgtatgtatgcacaaacatgttcttaacaaaataagcaggaggccaggcatggtggctcacacctgtaatcccagcaatttgggaggccgaggtgggcggttcaactgaggtggggagtttgataccagcctgacgaacatgaggaaattccgtctttactaaaaatataaaattagccaggggtagtggcgcatgcctgtaatcccagctactcgggagactgaggcaggagaatctcttgaaccagggaggcggaggttgcggtgagctgagatcgcaccattgcgctccagcctgggcaaaaagagcgaaactttgtctctaaataaatacataaataaggaggaaatatgacaattac

SEQ ID NO: 933023 - DNA, 624 bp, Homo sapiens
aagtccaccccttgtcaacttgaacccatacacatctcctgaaatcatacttagtctccaaatacagacaataataaggttgtaattatgcctaacgtaatacagctatcctttgtacaactggaagcacgctaatgcttaacctaaatgctattatataaagttaacaacacttaaatgctkatatgaagtcaataaatcttatgtaacatgataaaggaaaaagaaaggagataaaatgaagatatttcctttgtacaagtgtatgtatgcacaaacatgttcttaacaaaataagcaggaggccaggcatggtggctcacacctgtaatcccagcaatttgggaggccgaggtgggcggttcaactgaggtggggagtttgataccagcctgacgaacatgaggaaattccgtctttactaaaaatataaaattagccaggggtagtggcgcatgcctgtaatcccagctactcgggagactgaggcaggagaatctcttgaaccagggaggcggaggttgcggtgagctgagatcgcaccattgcgctccagcctgggcaaaaagagcgaaactttgtctctaaataaatacataaataaggaggaaatatgacaattac

SEQ ID NO: 933024 - DNA, 624 bp, Homo sapiens
aagtccaccccttgtcaacttgaacccatacacatctcctgaaatcatacttagtctccaaatacagacaataataaggttgtaattatgcctaacgtaatacagctatcctttgtacaactggaagcacgctaatgcttaacctaaatgctattatataaagttaacaacacttaaatgctgatatgaagtcaataaatcttatgtaacatgataaaggaaaaagaaaggagataaaatgaagatatttcctttgtacaagtgtatgtatgcacaaacatgttcttaacaaaataagcaggaggccaggcatggtggctcacacctgtaatcccagcaatttgggaggccgaggtgggcggttcaactgaggtggggagtttgataccagcctgacgaacatgaggaaattccgtctttactaaaaatataaaattagccagrggtagtggcgcatgcctgtaatcccagctactcgggagactgaggcaggagaatctcttgaaccagggaggcggaggttgcggtgagctgagatcgcaccattgcgctccagcctgggcaaaaagagcgaaactttgtctctaaataaatacataaataaggaggaaatatgacaattac

SEQ ID NO: 933025 - DNA, 626 bp, Homo sapiens
accacagcacaataaaaatagaaatcaatactaagaaaattattcaaaaccatccaattacatggaaattaaacaacctggtcctgaatgacatttgggtaaacaatgaaattaagacagaaatcaagaaactctttgaaactaatgagaacaaggatacaacataccagaatctctgggacacagctaaagcagtgttaagagggaaatttatagkgctaaacacccatgtagaaaagttagaaagatctcaaattaacaacctaatgtcatctctagaagaactagagaaacaaaagcaaaacaaccccaaagctagcagaagacgagaaataacaaaaatcgcagctgaactgaaggaaactgggacacatacacaaaacatataaaagatcaaggagtccaaaaattggttttttgaaagaataaataggattgatagaccactagctagactaataaagaagaaaagggagataatccaaataaacacaattagaaagacaaagggcactttcccactaaccccacaggaatacaaaaaaccctcagagactactacaaacgcctctgtgcacacaaactagaaaacctagaagaaactgaaaaattcctggaaacataca

SEQ ID NO: 933026 - DNA, 571 bp, Homo sapiens
agcagccctattcacgacagccaaaaggtggaaacaagtatctgtcaatggatgaatggataaacaaaacgtgatgtagacctacaatggaatattattcagcatagagcagaatgaagtactgatacatgctgcagcatggatgatccttgaaaayatgggctaaagtgaaagaggccagacatatgaggttcccagaataagcaaattgatagagacaaaaatagaatagaggtaactgagatcttggggcagggggaatggggagttattgtttcatgggtacagagtttctatttgggataatgtacaagttatggaaatggatagtggtgattgttgaacaacactgaatgtacataatgcctctgcattgtatacttaaaaatggtcaggccaggtgcggtggctcacacctgtaatcccaacactttgggatgctgagatcagaggattgcttgagcccaggagttcgagaccagcctgagcaacacagcaaagccccatctctccaaaaggaaaaaaaaaatacaaaaattaaccaggcatggtggcacacacttgtggtccc

SEQ ID NO: 933027 - DNA, 616 bp, Homo sapiens
ttttagccactataagcaaacaccagtgtctaggtttttctgtgagaacaagttttccaattgatttgggtaatgtgagtgttggttcacatgaggagtacatgcataatcatataatcatgtcataatcatgtcaaactgttttcaaaagccactgtatgacttttaattcttaccagtaagaaacaagagttcctgctgctctgcatatttgtggtgaaggacttgccagtttttaaacctgttttcttattttagccattctaacaggwattagtatctcactggggtattaatttgcattttcttaatgactaatgatatggaagatcttttcatatgcttattgccatctgtatattttctttggtaaagtatcttcagatctcttatccacttaaaaaattgtttggtttttgttgttaagttttaagaattctatacatatgttctgggtacaaaccctttatcagacatgtaagatataaatattttcacccagccttttttttttgggacagggttttactctgtcacccaggctgaagtgcagccgtgcagttgtggctcacaacagccctgacctcctgggctcatgcaatcctccagcctcatc

SEQ ID NO: 933028 - DNA, 588 bp, Homo sapiens
cccaggtcatctttaacattgctgctgcttcttttttaatgtgctactattatttccctattcatctttcataaacacacctttagcctctttttattttttactatatcttacctcacttgcaggatgtttagtgttaacagctcaagattagaagctaaactacctaagttcataatgctggctttgcatctttctaatttggtaaacttgggaaataattcagtcatttgagcgtcagtttccttatctacaaaatgggtatactaacagtttttacctactattgtgaaaattaagatattttatatagataaatcactttgatcactatatatacaagccctatgtgtgtttgctgtaattatgataatcacccacaattctaygctcttttttacctgtcaccaacctgtgtgggtttattaaaatgctggaataattttagacttatttaaaagttgcaaagatatcatatttactgtatggccttcatccagctccagctaatgttaacacctcacataaccattgtccatttgtcaaacctaagaaattaacattgacacaatattattgactaaatta

SEQ ID NO: 933029 - DNA, 790 bp, Homo sapiens
tctggaagggccttctaaaaagaatgacaatataaatttattgtacaaatggagactttactgagagtgaaaccaggcaatattaatacttaggtagggacaacagatataaaccaggctattctcagcaaatcagaaattatggtcaccctacttgtaagtcacattcaggtgcttagactttcagtgaaagcatagagtatgtatcttctacattttgcctaagtgacttcattctttttttttttgagacagagtctcgctctgttgcycaggctggagtacagcggcacgatctcagctcactgcaagctccacctcccaggttcacgccattcttcttcctcagcctcctgagtagctgggactacaggcgcccaccaccacgcccggctaattttttgtatttttagttgagatggggtttcaccatgttagccaggatggtctcgatctcctgacctcgtgatccgcccgcctcagcctcccaaagtgctgggattacaggcgtgagccactgcacccagccagtgacttcatttttacttttgcctttacttactcatttcacaagtatttgaggatacacttcagagcactgaggttacaaagacaacagtgtctgtcctcaaggtctgtctaggtaagacacacagccaaataaacaattctaatacagttatacagttttagttctgacacctccaatgagctgtagacttgtatttgtcatttccagtcagaatgcaaaacacagatccaaaacagaactttcaatttctcctccaaa

SEQ ID NO: 933030 - DNA, 655 bp, Homo sapiens
gcagcaaccccaacaatgtggacgggttaggtactgttggagggaaagtcagtgtagcttgatgaagcaagcgcaaatcctgtaccggccggtagtccttggtccgtggcttgggaacaggcaggaggggagtgttccaygcagactgacaaggaacaataattccaaaagttcttaggtgcttgagacggacctggataccttgaagggcttctctggggaccgggtcctgtttttgcctaaccggctgggccccagtcttaactggccaatcccggagggttgtcttccgcccgtactcttggccaccgcttagccagagctggtcttctctcttggcctggctcagttcagaaaagtctccattcctcctctcggggaccataagggtcataatgactcccgttctgggtaactttggcagcaaagagccgtgctctgtcaaagagatagtggctctcagcttgctgagcaagtcccttcccataaagggcaagggacagtcaggcatgtaccaaaactgatgaatgactttatgtcctcctacagtacgagtccgaggcaagcagaaagcttgctttgctgaaacccccatggctccgatgatgtcaatcatctttttggataagggggcaaccggggcagttactagcga

SEQ ID NO: 933031 - DNA, 655 bp, Homo sapiens
gcagcaaccccaacaatgtggacgggttaggtactgttggagggaaagtcagtgtagcttgatgaagcaagcgcaaatcctgtaccggccggtagtccttggtccgtggcttgggaacaggcaggaggggagtgttccacgsagactgacaaggaacaataattccaaaagttcttaggtgcttgagacggacctggataccttgaagggcttctctggggaccgggtcctgtttttgcctaaccggctgggccccagtcttaactggccaatcccggagggttgtcttccgcccgtactcttggccaccgcttagccagagctggtcttctctcttggcctggctcagttcagaaaagtctccattcctcctctcggggaccataagggtcataatgactcccgttctgggtaactttggcagcaaagagccgtgctctgtcaaagagatagtggctctcagcttgctgagcaagtcccttcccataaagggcaagggacagtcaggcatgtaccaaaactgatgaatgactttatgtcctcctacagtacgagtccgaggcaagcagaaagcttgctttgctgaaacccccatggctccgatgatgtcaatcatctttttggataagggggcaaccggggcagttactagcga

SEQ ID NO: 933032 - DNA, 655 bp, Homo sapiens
gcagcaaccccaacaatgtggacgggttaggtactgttggagggaaagtcagtgtagcttgatgaagcaagcgcaaatcctgtaccggccggtagtccttggtccgtggcttgggaacaggcaggaggggagtgttccacgcagactgacaaggaacaataattccaaaagttcttaggtgcttgagacggacctggataccttgaagggcttctctggggaccgggtcctgtttttgcctaaccggctgggccccagtcttaactggccaatcccggagggttgtcttcygcccgtactcttggccaccgcttagccagagctggtcttctctcttggcctggctcagttcagaaaagtctccattcctcctctcggggaccataagggtcataatgactcccgttctgggtaactttggcagcaaagagccgtgctctgtcaaagagatagtggctctcagcttgctgagcaagtcccttcccataaagggcaagggacagtcaggcatgtaccaaaactgatgaatgactttatgtcctcctacagtacgagtccgaggcaagcagaaagcttgctttgctgaaacccccatggctccgatgatgtcaatcatctttttggataagggggcaaccggggcagttactagcga

SEQ ID NO: 933033 - DNA, 567 bp, Homo sapiens
tcgccattttgactggtatgagatggtatctcattgtggttttgatttgcctttctctaatgatcagtgatgttgagctttttttcatatgttttttggccatatgaatgtcttcttttgagaagcatctgtgtgtgtcctttgcccactttttaatgaggttgttttttcttgtaaatttgtttaagttccttatgaactctggatattagacctctgtcagatggatagattgcaaaaactttctctcattgtgtaggttgtatgttcactatgatgatagtttcttttgcagtggagaagctctttagtttaattagatcccattcrtcaatttttgcttttgttgctcttctttttttttttttttgacatttttgtcatgaaatctttgcccgtgactatgtcccgaatggtattgcctagattttcttctagggtttttatagttttgggttttacatttaagtctttaagcatcttgagttaatttttgtataaggtgtaaggagggggtccagttttaatctttacctcagtctctcaagtagctgggataacaggcga

SEQ ID NO: 933034 - DNA, 592 bp, Homo sapiens
gcctggggattctgacatcccagggcttattcttagggtcagttcagcagagtcttaaaccaccttcaaaggagtcggtcacgctgccatcctctctgcatctttctgtagtcctttctgataatatttagcaaatcactttagcacagagtcttcgaattctttccagatttacgatggaaacacagaggcaaagagcttggggtagaaagcagaagagcaggtgctgggagagtttgatggtggattttgagttggtcacagtcattttgctttactaagtccagggaagctcatcttcagagttaaccaccacatatatatatatatatatatatatatatatatatatatatatatgtatatatatttttttttttttgagatggagtcttgctctgtcacccaggctgragtgcagtggcacactctcagctcactgcaacctccacttcttgggttcaagtgagcacgtccggctaatttttgtattttttagtagagacggggtttcaccatgttggccaggctggtcttgaactcctgactcaagtgatccacctgcctcagcctcccaaagtgctaggattac

SEQ ID NO: 933035 - DNA, 652 bp, Homo sapiens
ttgccagaatgcaaaagtctgaaaaccatctcaaagaccaaccttaggtcctacaacagtgatattacctataggagcaactggggaagtcacagattttgtgacctctggctgcaggacttctgagcagtaagggatgatagaaatcatgcctacattttagtagaattcagactcttcccacagttagctttgcaaaggtagcttcagtctctgaacgaggaggggattagtttttctgttttttttttctttttttgagacggagtcttactctgtcacccaggctggagtgcagtggtgcaatctcggctcactgcaacctctgcctcccgggttcaagcgattctcctgcctcaacctcctgagtagctgggatcacaggcrcccgccattatgctccactaatttttgtattttttagtagagacggggtttcaccataaaggccaggctggtctcaaactcctgacctcaggtgatccacttgcatcagcctctcaaagtgctgggattacaagcatgagccaccacacctggccaagggaattagttttatggaaggactattagcatccttgcttcaaagttaaactataaacaaaattcctcccatggttagcctggcttatgcccaggaatgagcaaggat

SEQ ID NO: 933036 - DNA, 603 bp, Homo sapiens
gaagataactttggggctgagcatggtagctcatgcctgtaatctcaacactttaggaggccaaggcaggcagatcacttgagaccaggagttcaagaccagcctgagcaacatggcgaaaccccatctctacaaaaaatacaaaatttagccaggtatggtgatacacacaggtggtcccagctcctccagaggctgagatgggagaatcatttgagcccaggaagttaaggctgcagtgagccatgattgcaccactgcactccagcatgggtgacagtgcaagaccttgtatcaaaaaaaaaaaaaataacttttgtattttgtatttacatatagttgttcatagygtgtgcattgatctgccacaaacgaatccacctagtcaggaaatacacacttctatggattttgagagctactctttagacctattttagagaacagttcttttaaaaagtagattgaagtggaggggttgggcagagcactcaggcatgatccatcctatggaagagtaacaaaagtaaaataactccgaactctaaggataaataagactaatctggaggatggccactgtacatgatcaccctagaccta

SEQ ID NO: 933037 - DNA, 611 bp, Homo sapiens
ctgatcgattgtgaactcacatttcctctacacacctcatgtttagcatcccagcatggagagaccatggattgggaaacatcgaaccttaggctcttcatgaagagtttttgtttgctgagttgggtgtctcgtgattgtgttgagcaccacctaacctgcctcctcctccctttccatcatcagagtgtggatcaggctgtcagaaaaggcaggctgggtacttgcaatctytcctcccaccccaatcctctgcagcctcacaagcccaagtacatacttttatacagtgtttgttgtgttaacatatgtagagttatataattcattgcgtaatgcaggtgcttgatttcatccgatttagagttcagaaaaccagtggtaagttacttgtttgacagcatgccactaataagatggggaatgagattctgaacccaggcatttccatggaacattctgtgtgaagtgaatattgaaaatcttgagggtcgttattcattccagacaggttggcaaaatagctataatacacattttctaatgaatggtggttttatagtttaaatgtgtatgtgattctttttgatgtttgtcgatttacttccact

SEQ ID NO: 933038 - DNA, 611 bp, Homo sapiens
ctgatcgattgtgaactcacatttcctctacacacctcatgtttagcatcccagcatggagagaccatggattgggaaacatcgaaccttaggctcttcatgaagagtttttgtttgctgagttgggtgtctcgtgattgtgttgagcaccacctaacctgcctcctcctccctttccatcatcagagtgtggatcaggctgtcagaaaaggcaggctgggtacttgcaatctctcctcccaccccaaycctctgcagcctcacaagcccaagtacatacttttatacagtgtttgttgtgttaacatatgtagagttatataattcattgcgtaatgcaggtgcttgatttcatccgatttagagttcagaaaaccagtggtaagttacttgtttgacagcatgccactaataagatggggaatgagattctgaacccaggcatttccatggaacattctgtgtgaagtgaatattgaaaatcttgagggtcgttattcattccagacaggttggcaaaatagctataatacacattttctaatgaatggtggttttatagtttaaatgtgtatgtgattctttttgatgtttgtcgatttacttccact

SEQ ID NO: 933039 - DNA, 657 bp, Homo sapiens
atcccacctgtcctagaaatggctgattgaaagatgttttctttagaaaaaaaaactaacaaaaaaaacaaaatttactcttaaactgagaggcaagcattaagagccaacccacagcaggactgggagattccaatgtcctcgtttcttctcatccagagtataatcatcaaaatgcaagtaggattcatttttgttttctgtctcagggtttttgtggttggcttgaataaatgctattgagcatggcaaatgaatgcagcgccgccccccccaaaatttccatgtataatggtcatcactgttaattagacacaattaagatccttctataaggagcactgaagaatttgaacagcagtcgtgcaggaggttaggtacataaacctcccttcatagactctcaagagtccatgtatccaatcatcatgtttttcaaactatttttcctagctcttmattttctcacatatgtataacacttgagtaaattatagaaatgaaaactttggtcaagggtaaataaaggcttatttgtattttatatttcaattttcttctacagttgttgcatatcgttttctgatttttttttttttttttttttttttttggggagacagagtctggatctcttacctaggccggacggcagtg

SEQ ID NO: 933040 - DNA, 623 bp, Homo sapiens
ccacactaatactgcgcttttccaatggtcttagcaaacagcacaccaggagattatatcccgtgcctggctcggagggtcccacgcccacggagccttgctcattgctagcatagcagtctgagatcaaactgcaaggcagcagccaggctcggggaggggcgcccgccattgctgaggcttgagtaggtaaacaaagcgaccaggaagcttgaactgggtggagcccactgcagctcaaggaggctggcctgctctgtagactccacctctgggagcagggcgtagccgaacaaaaggcagcagaaacctctgcagacttaaatgtccctgtctgacagccttgaagagagtagtggttcttccagcacagagtttgagatctgagaatggacagactgcatcctcaagtgggtccctgaccmccaggtagcctatctgggaggcacccccccagtaggggcagactgacacctcacatggccgggtacccctctgagacaaaacctccagaggaatgatcagacagcaacatttgctgttcagcaatattcactgttctgcagcctccactgctgatatccaggcaaacagggtctggagtagaactcccgcaaattcca

SEQ ID NO: 933041 - DNA, 439 bp, Homo sapiens
agacagggaaagttacagactaagttctccaattttattctcaataattttctagcattgcttttctgaacttcagtgtgagatatttcacttttattgaaattttcacacatatgtaactaattattcatttaattaagtctcttttaggctraagagtcaccagttcctctggagttcggaatatacttgtggaaaataataaagtctctaaagtaagaaaagaactgtaaccatgtaagtagggcgtggcctcgaccatgaaactggaagtattgcattacagctaacaaggtgacaaaagtgcttagtacagatgacagattctgtaaaaaaattttaaaatatcaaaatggcactttgttctgtaaacttgccgatacattgcaactttgggtatttctttatgtctaattcagcagttttagaaacactaaag

SEQ ID NO: 933042 - DNA, 737 bp, Homo sapiens
cctgagcttttcaaaaacctggacccccaccacatggagtctgctggcacatagactccagagaacggggagctgagcactgaactctgacctcttgctgttctttgatctacatttcttcctgaggggcctgaaagaagccacatccacaggccagaccttaacattcctttctgctgaccccaagtttttagacaaagtctagattccttaatcaatggcaaatcagagagtctttgaatctacctatgacccagaagtgcacccacttcaagacatcccacgtttttaggccaaaccaatgtgtagcccctgtatattgatttatgattgtacttgtaacttctgctttcctgaaatgtacccctgtctttaagaagccttgtttgtaagccactggggaggttgggtctcaagtatgagctgtccccattctccttgcttggtgccctgcaaataartgccctctcttctcctgctgcaaaacctcagtgtggatgtttggctttactgcacttggcaagcagaccccagtccagtgtggtagcaagggctcaatccccaagactgctccccaacttccaatgtcaatcaaaagccccaggttgtttcacctctgcttctggccaactagcttgaaattggggttcccatggccacatccttgggtttaacttgctagagtggctcacggaacttagggagacacttacttatatttactggtttatcacaag

SEQ ID NO: 933043 - DNA, 741 bp, Homo sapiens
cctgagcttttcaaaaacctggacccccaccacatggagtctgctggcacatagactccagagaacggggagctgagcactgaactctgacctcttgctgttctttgatctacatttcttcctgaggggcctgaaagaagccacatccacaggccagaccttaacattcctttctgctgaccccaagtttttagacaaagtctagattccttaatcaatggcaaatcagagagtctttgaatctacctatgacccagaagtgcacccacttcaagacatcccacgtttttaggccaaaccaatgtgtagcccctgtatattgatttatgattgtacttgtaacttctgctttcctgaaatgtacccctgtctttaagaagccttgtttgtaagccactggggaggttgggtctcaagtatgagctgtccccattctccttgcttggtgccctgcaaataagtgccctctcttctcctgctgcaaaacctcagtgtggatgtttggctttactgcacttggcaagcagaccccagtccagtgtggtagcaagggctcartccccaagactgctccccaacttccaatgtcaatcaaaagccccaggttgtttcacctctgcttctggccaactagcttgaaattggggttcccatggccacatccttgggtttaacttgctagagtggctcacggaacttagggagacacttacttatatttactggtttatcacaagagat

SEQ ID NO: 933044 - DNA, 461 bp, Homo sapiens
atggcaggaggtgaagaagaagcaagtaccttcttcacaaagcagcaggaaagagagaagtgcaaaggaggaacttccaaacacttataaaaccattggatctcatgagaactcactcattatcatgagaacaatatgggggaaacagcccctaggatccaatcatctccctccctcaacaagcagggattacaattcgagatgagatttgggtggggacccagagccaaaccatatcacttgtgctggtggagcctgtagaaataaaggagtgattgtgtttgtgtttcagatgaaatgagagtggctsttatcctggataactatcggttggctaattggctggatccctcactggattataaggaacactgtcatgaaaccaggggccttgtcatgatcatcatgtagaatcgtactaggaaactaattcaaactcaataaacatttgttgaataaat

SEQ ID NO: 933045 - DNA, 595 bp, Homo sapiens
ccaagctcgagcatcccaggtcaactgcaagctgctgtgctggcagtgaaaatttctatccagtggatcttagcttgctgggttccatgggggtgggatccactgagctagaccacttggctccctagcttcagccccctttccaggggactgaatggttctgtctcattggcattccaggtgccactggggtatgaaaaataactcatgcagctagctgggtgtctgcccaaacagccgcccagttttgtgcttgaagcccagggccctggtggtacaggcacctgagggaatctcctggtctgtgagttgaaaggaccacaggaaaagaatagtctctgggccagaatgcacygttcctaatggcatagtccctcacagcttcccttggctaggggagggagttccccaaccccttacacttcccaggtgaggtgatgccacaccctgctttggctcaccctctgtgggctgcacccactgtctaaccactcccaatgagatgagcctggtacctcacttgaaatgcagaaatcacccaccttctgttttgatctcgctgggagctgcagactggagctcttcctattcagcc

SEQ ID NO: 933046 - DNA, 778 bp, Homo sapiens
ctgagagtagcagctcggggcagctatgcagtcatatttatacttactttttaattacatgtagattgagaaatggtttatgcagaaatttctgggaaaagggtaataacgtttgggttgtcaggtcattgccatggaaaagggcagtaactcccagatgttgccatggcaatggtaaactaatatggcataccagtgagcatgtcttatggaaagctgcttttgcccagtcyctgttttagctagtccccaatttggtccagtgtccaatcctcacctctggagtaaagacccaactcctaactcggtacaacaccaagaataaaccctaatgtaaactaaaaactttatgtgataaaaatgtatcaatatgggtccttcagttgtagcaaatataccactctggtgggggctgtcggtaatgggggaagctgtgcatgtcagtgggggcagggggcatatgggaaatgtctgtaccctctgttcaattttgctatgaacctaaaactgctctaaaaaataaagcctattttttaaaaagaggcagcgggtgtgatgaaagtggatgtggctagaaaagagcaactgagagatttatttccttgtagtgattgactgtaccattgtccatatcctggttgtaatagtgtactgtatttttataagatgtacctattgggggaaactcggtaaaatgtacacaagggccctctgtattatttcttacaacagtatatgaatctaaaattatgtcaaaatgaaaattttaacttagaaa

SEQ ID NO: 933047 - DNA, 778 bp, Homo sapiens
ctgagagtagcagctcggggcagctatgcagtcatatttatacttactttttaattacatgtagattgagaaatggtttatgcagaaatttctgggaaaagggtaataacgtttgggttgtcaggtcattgccatggaaaagggcagtaactcccagatgttgccatggcaatggtaaactaatatggcataccagtgagcatgtcttatggaaagctgcttttgcccagtctctgttttagctagtccccaatttggtccagtgtccaatcctcacctctggagtaaagacccaactcctaactyggtacaacaccaagaataaaccctaatgtaaactaaaaactttatgtgataaaaatgtatcaatatgggtccttcagttgtagcaaatataccactctggtgggggctgtcggtaatgggggaagctgtgcatgtcagtgggggcagggggcatatgggaaatgtctgtaccctctgttcaattttgctatgaacctaaaactgctctaaaaaataaagcctattttttaaaaagaggcagcgggtgtgatgaaagtggatgtggctagaaaagagcaactgagagatttatttccttgtagtgattgactgtaccattgtccatatcctggttgtaatagtgtactgtatttttataagatgtacctattgggggaaactcggtaaaatgtacacaagggccctctgtattatttcttacaacagtatatgaatctaaaattatgtcaaaatgaaaattttaacttagaaa

SEQ ID NO: 933048 - DNA, 611 bp, Homo sapiens
tttttttttttttttataaatttgtttaagttccttggagattctggatattagccctttgtcagatggatagattgcaaaaattttctcccattctgtaggttgcctgttcactctggatagtttcttctgctgtgcaraagctgtttagtttaatgagatcccatttgtcaattttggcttttgttgccattgcttttggtgttttattcatgaagtctttgcccatgcctatgcctgaatgatattgcctaggttttcttctagggtttttatgattttaggtcttgtatttaaatctttaatccatcttgagttaatttttgtataaggtgtaaggaaggagtccagttccagttttctgcatatggctagcagtttattaaatagggactcctttgcccattgcttgtttttctcaggtttgtcaaagatcagatggttgtagatgtgtggtgttatttctgaggcctctgttctgttccagtggtctatatatctgttttggtaccagtaccatgctgttttggttactgtagccttgtagtatagtttgaagtcaggtagcatgatgcctccagctttgttcttttttcttaggattgtcttgg

SEQ ID NO: 933049 - DNA, 682 bp, Homo sapiens
cctgtttggaggtcaaatagtctattatttggtccactttaagaattaagaatttaatccttgaccagagaatccaggtccagtctcratgctccaagcagaggtcctgtgggtttcacccaatgttgcactcatggagcctcacatgggatttggcctatagtagagactcagtgactcatgactgaatgaatgagtgaatgaatgaacgaatgctcatctgtttgaacaaatgctttcaagatgagaaactgagactgagagaagttaagcaatttgacacggatcatcccccttatttagtaactgtttcctgagcacctactacgtgccaggagctgttggagatgccagggattcaaagtcctcgctatctgggtccaacaaacatctcatatgatgttgggtgttgagaaacaaagcaggacaaggggaggagggtgatcatgggattcagtggttagtgtagatgttctgactttcatcaggtgtctactgtgtgcaaagtgccttacatatttgttctcatgaagagacctcaaccaccctgtgaggtaggctcttttattacatcatcatacccattttacagatgaggaactgaggctctgagaagagcaatgtcttaccacggtgacacttggaggaaataccagacaggggacccaatctgcctgcccag

SEQ ID NO: 933050 - DNA, 719 bp, Homo sapiens
agagataggatcttgctctctcattcaagctggagtgcagtgacacaattgtggttcactgtaacccagatctcttagggtcaagcaattctcccatgtcaccctcctgagtagctgggactacaggtaccatgcctggctaatttctaatattttttgtagaggtgggggtctcactgtgttacccagcgtggtcttgaactcctagcctcaaacaatcatcctgcctcagcctcccaaagtgctgggattgcaggcgtgagccaccatgcccggcccgtatactatttttcaacaactctttttgagtgtcttgagttgcagggaaattaggtatcctgagagtaaaactaccttattttggrcatcctacttgggtgcaacgaagtgacagaggcagatgtttgtggcccttgcatcctaggtggttttgatgccacgaatcaatccctttaaaaacctgtgtgctggcaccttgctagaaagggttggcagtaactaagattaatggctgccatttgttaagcacttactgtgtgccaggcattgtgcaaagttctctacctacaattctcctaggaggtgaaggaaagtattatgtctcctccccattttacagatgaagaaactgaggcccaaagtaggcaagtgacttggagacagtcacacagccagcaaacagaagagcctgaattccagcccaagagccacactcttcc

SEQ ID NO: 933051 - DNA, 710 bp, Homo sapiens
cttgcacagaagtctgaaggtgcaactgaggattcaacaaaaggtgagggagatgtggcaggagcatgggacccatgggcacaaggagagaaggtacgtgtgttgaagtagatctcaaaggccttgcattttaggatattgaacttgggttttcttttcccccccctggggatgacaggaagccaatggaaggccttcatcaaggacatggccccatccaattggcacctcagggggctccatcctgcagacaacaaaggtggaggcagggagcctggacgggagctggagaaacagctccttggagagcaaaggaggcaggagacagtgcgctggtgcagggctggtgagaaggggcagatttgagagatgagtttttaagcagaatcagccaggmtgtggggaccaattggagagaagaaggggggataatgaaggtttcaccgagatctccaggagaaccctatcagaggcaaaatccctgagacggagatgaattttcctcctcactttgcctctatctgcccatgccatgcagcgcttctctgaatacatttgcatatatttatgctgcaggcagccagcgctaaaaggagcatctccctctctctctttttctctctctgaatgtgagctcacatccagcacgattccccttctgcgcagagtcaggagccaggaacttccagggacttcctgagtgaacttgg

SEQ ID NO: 933052 - DNA, 710 bp, Homo sapiens
cttgcacagaagtctgaaggtgcaactgaggattcaacaaaaggtgagggagatgtggcaggagcatgggacccatgggcacaaggagagaaggtacgtgtgttgaagtagatctcaaaggccttgcattttaggatattgaacttgggttttcttttcccccccctggggatgacaggaagccaatggaaggccttcatcaaggacatggccccatccaattggcacctcagggggctccatcctgcagacaacaaaggtggaggcagggagcctggacgggagctggagaaacagctccttggagagcaaaggaggcaggagacagtgcgctggtgcagggctggtgagaaggggcagatttgagagatgagtttttaagcagaatcagccaggatgtggggaccaattggagagmagaaggggggataatgaaggtttcaccgagatctccaggagaaccctatcagaggcaaaatccctgagacggagatgaattttcctcctcactttgcctctatctgcccatgccatgcagcgcttctctgaatacatttgcatatatttatgctgcaggcagccagcgctaaaaggagcatctccctctctctctttttctctctctgaatgtgagctcacatccagcacgattccccttctgcgcagagtcaggagccaggaacttccagggacttcctgagtgaacttgg

SEQ ID NO: 933053 - DNA, 685 bp, Homo sapiens
agaaaccacggttttctactttcttcctgcccaaggagagagaagatagcctcaaaaacagacgtagtctctggaaaattgcctgattctctacataaagtgcatgggaaactcaagccatgagtagtgtttgactcaggaactttgagtgtgcaagggcaagcctcaaggccagctgcctatgargaaataaagatagcctcctcccagtggtctaggtcttgtggtgtccacttgatggaccagccaagactgcctggaatccctactggacacaaacgttggtcatcctatgctggagatttgaagtggtaggtgggagtaccataaatcttcgaaaagtgtgtcagggattctaagttgttttagacaggatatgtcaggtgatgccgcagtaacaacctccaccccttccaaatcttagtgacttaccaaagccaattaatgcctgtttcttattctcgcaaagttcacggtgagtttgggtgactctccaggagagcttttccttgcacagcaaatcaacaatctggaaagcttcaaccttataatacacacatgcttccacagcagggaaatgaagaatggaggatggtgacctggctcttgatttctcctgcctgaagtgacacacatcccatctgcttacataatggtgtccaacttcaagtaatcctcccatatt

SEQ ID NO: 933054 - DNA, 633 bp, Homo sapiens
tgcatatgtttgtattttttacggtgtgagttcaagtagtttggacacccctgagttatacagacacaagcagcaggattctagtggatggaagattacaggcttccactcttaggtagtatttgctccccaaggtggtcttagaaatcagccctctcccctcaaattctacatccttgctgagtgcagtttgaagacactcatcctcaacctcttcattcacagatgaggaagctgaggctcagagcagagctgtggcccatgcaaaggcacagaactagtaagcagctcagtggggaactaatccaggtcttggaattgcccggggtctttctgctgagcccaaacctcgagatactccttagaagtgctggagccagagtgaggcagtggaaatgcaagaagacagggaccagggcctgagatttttcttctcgtcccccccaccgcccgagaggccacttaagcggcgcttaaccgycctgtgatgtattgaaccctctctctgcgcataaatgcggccggtcaaccgctaggcagaaatgccacatatatttcctcccattagatgaaatatgcccctaatttggctggggttttgttttattagacctacggcagcgagggggccct

SEQ ID NO: 933055 - DNA, 747 bp, Homo sapiens
cgtaatcaatctttcagagttgttgtgagaattatctgtcatataacacaagtaaagaattgagaacaatgcctggtttataaacgtccaataacttttggcaagttaatatcatcatccctaagtgactccataaaagctgctgattacattgaagtagcaatttggggtagacaccaatcaagatcaaagtccagcagtaaatcagtaggtagataaattttcatgtttgcaaataataatagcacttgctgaactcttgtcttatgcccaaccctgagctgagattacataagttttcatcttgctgaattcccagagctgggctgtgaggtagactttactgttaacctgtattgatacatcaggaaactgagaattggagagctagttcacctagtttggaagtgatggagctgggattgaaactgatggaaactccaggatccatatccataagctccatactccacagctgagagtttatagatgaggaaactgaggctcagagaagggagatgccttggctgtggtcacacagcggctacttgactgaatcagtttccacatgatcttgtcagtgckgtaagatgaaaggcatctcagagggtggcccagagacagagagagggtctccattttccagctttatttctgggtgtccaggaatgtgttttgagttggacttgaaaaagaaactcccttgacatcagagaggcagtactgggctgggccagtgtgtgccaa

SEQ ID NO: 933056 - DNA, 679 bp, Homo sapiens
tttttggcaagtgacaaaaatatgatttgctttcttgtcactatgacatgacaatgccagcagccatctcctagcagggctgaaagggttaaataagatgatgcttgcacaatgctcagtgcagagcctggaataccattaagccctcaacacatggtaggcagtgagaccattattattatcacagttttagaaaagactagctcctctcatctccctaccgacaccacccccmccaaaaaaaaaaaaaaaaaaaaaaatcaggttacacaatcacacgaagtattttcctaccacttctaagaacaaggactccttggagaaatataattcagatgcagaattcgtgaattaccagggcttttctttagcttttgggagacaatgggaaagaatactgaaaaccaaatgtattgaggggaaagcttagtatacatttaatgcccctctgtggggcagctccaagaagggaggagaaagaaaaagaggttcttggtattagttctcccagaagcaaacgaatgcctcactttgcttaggactacagagcatgtgaagaaaatagtggaatatcttcatctccatccggtgttttgggagggtggaggagagttattagtctgttcctagaaaggcaactgagtcagcaaaaagaggcgagaaatcacaatcagacagc

SEQ ID NO: 933057 - DNA, 559 bp, Homo sapiens
cagagaaactgcaaaataaatgtgagtagtttcggtcatttttaggcatctgtctttgggctccctcagtagcagagcttgagatacagacttcagggcaggtggttcctttgggaggtgaactcaggatgccccagtagaggagtaaccagggagacaggaaaagaagagaycaatacagagtgtgtgaatgagcaggtgactgctgccggcacttggagcacagtcctgctggggaactctggtaggctgcacagagcacacctgggagttgtctctcccaggggtgagggagttgggatatttatcctccaactcccctacatctctggcctaatcccttgcacatgcccagtgtactcagtgggccagagaaagcccctgggcaaaggcagtagtaaagtgagtgggcatgggaagggtgagggacaagcaggcatggtcagggcacccactacatcttgacagaatctctggaagatttcagttaaaaagcaaccttctgctaaaataataacaatgacaacaacaatggcgttgacaacgataataataattc

SEQ ID NO: 933058 - DNA, 736 bp, Homo sapiens
caacatttcaatgtccctcccctcctgtcaccttcgctgccataaacagattcgtaaaaactgcttttgacgccccagctgccattagccacttaaaatcccgtaattatcatcctatcacgggcctgttaacgagcagtaaaaataaggccattgaatatggtaatttattcgtaaattagcctaatgagaataggtttcagacactgtttacttgcgggctgcctgcgccaggcccaggcagcagcgacaggagctatgcctgggagggcggctgggcgcccaccgggtggcaatgccccctccccatggctctgcacccatggcatccattcttgttcccttcatcaagatggcatctggctccgtgggctgtggggacaagtgacagccctgcctgccctagcctggctccagacagtaagatatgaatgtcagggcctatggtcagtgctgatmgctactgggaaacctttacatgctcagtgaccttgggcatatcactctctggccctcagttttctcatctgcaaaatgggattaatgtgccaactaatgaggttattttgaagatgaagcaaggtaacatatagaaatgcttgggacagggcctagcacagagttaggtgctttctacatatattatagccactattatgatctttgggacgttagccccagcagataaaatccagggctggctgacttaccctaaaaaattatccctactgggctg

SEQ ID NO: 933059 - DNA, 579 bp, Homo sapiens
cagccactgcaaaaacatgccaaattgtaaagaccatcgatgctaggaagaaactgctcaactaatgggcaaaataaccagctaacatcataatgacaggatcaaattcaaacataacaatattaaccttaactataaatgggctaaatgccccaattaaaagacacagactggcaaattgratagagtcaagacccatcagtgtgctgtgttcaggagaccaatctcatgtgcagagacacacataggctcaaaataaaggatggaggaagatctaccaagcaaatggaaaggaaaaaaaagcaggggttgcaatcctagtctctgataaaacagactttaaaccaacaaagatcaaaagagacaaagaacgccatgacataatggtaaagggatcaattcaacaagaagagctaactatcctaaatatatatgcacccaatacaggagcacccagattcataaagcaagtcctaagggacctccaaagagacttagactcccgcacaataatagtgggagacattaacaccccactgtcaatatcagacagatcaatgagacagaaagttaacaagg

SEQ ID NO: 933060 - DNA, 579 bp, Homo sapiens
cagccactgcaaaaacatgccaaattgtaaagaccatcgatgctaggaagaaactgctcaactaatgggcaaaataaccagctaacatcataatgacaggatcaaattcaaacataacaatattaaccttaactataaatgggctaaatgccccaattaaaagacacagactggcaaattggatagagtcaagacccatcagtgtgctgtgttcaggagaccaatctcatgtgcagagacacacataggytcaaaataaaggatggaggaagatctaccaagcaaatggaaaggaaaaaaaagcaggggttgcaatcctagtctctgataaaacagactttaaaccaacaaagatcaaaagagacaaagaacgccatgacataatggtaaagggatcaattcaacaagaagagctaactatcctaaatatatatgcacccaatacaggagcacccagattcataaagcaagtcctaagggacctccaaagagacttagactcccgcacaataatagtgggagacattaacaccccactgtcaatatcagacagatcaatgagacagaaagttaacaagg

SEQ ID NO: 933061 - DNA, 555 bp, Homo sapiens
gaatgtcattctaacccccaactttttctaacagccactgggtgtttttctttttctctgccccttatcttcctactgaggataatttggaaggtaaagaagagacacatatgttgcaggagcaacatatgataatgacgatttttctttctgtcttgaaacaatgatcatggtgatttttggccttgtttatgattgtctgcatgtggtaccaagtaccattaggggatggcctctaacagtacaattctgaccatgtcacttctttattcaaaggcatccaatggcattacacctcagccagagaagaagctcttaagagatcaggtgcctcatttcacccatgggctkctccagcatttccagcctcctcactcctgacacatacaggcacgtgctctctgtggagtctttgcacttctcctttccttcctgaaatgctcttcccctgggtgtcttcatcctacctccctcaactctttcatcttgtttaaaaaatgtcattttctcagtgagaacttccttgtcttattcagtttgggcttctctaataaa

SEQ ID NO: 933062 - DNA, 761 bp, Homo sapiens
attcccggcttatttttatttttatattttattttattttcacacaaggtctcactcttgcccaggctggagtggagtggctcacagccaccaggtgatttgggcccacaagtcacccttgctaagaggcagagtccagagcagaaactgggtagatgccaaaggcagcactccctactccacacatgggtttctgtcaagtaaatcaccagccaggtgaggtgcatacagcatctagggagatgggacaccgtgttgtcccctccttcagccaggaggccccacactgagcgccactgcctccactgtctgatgctacaggagaaacgtttcctgctggttaaggaagtagaaactgcagatcacttttcatcttattggaaatcactctttgacactcttgcctcatcttcactcagtacacattgactctaccagcaatagcgtaaaaataaacacagmttaaggaaataggaatcctttattcctgggacttaaaagcttgactttctccagtaagtcaattaccagtgcccacggcaggaagagctctgatgccagggttgacagcacgctggaaaaccggaggagtgtttgcatttctggggcctcaagtaatgagaagttcttccaagaacactgacaggggtattattgccctattttagaattattactctgaagatcagggaatttcaggcggttgaactcatgccacagcacctgtgcttttctggtaggggagggatggagtccagctc

SEQ ID NO: 933063 - DNA, 761 bp, Homo sapiens; identical to SEQ ID NO: 932336

SEQ ID NO: 933064 - DNA, 389 bp, Homo sapiens
tggtccacagaaagggtccagttcttctccacgacaacacccgacaacatgttgcacaaccaacatttcaaaagttgaatgaattgggctacaaagttttgcctcattcaccatattgaactgacctctcaccaaccgactaccacttttccaagcatctagaaaattttttgcagggaaaatgcttccacaaccatcaggatgcagaaaatgctttccaagagttcatcgaatcccgaagcatggatttttaygctacaggaataaacaaacttatttctcattggcaaaaaatgtgttgattgtaatgtttcctattttgataaagatgtgtttgggcctagttataataatttaaaattcgtaatccaaaaccaccattaattttg

SEQ ID NO: 933065 - DNA, 636 bp, Homo sapiens
cacgacaacacccgacaacatgttgcacaaccaacatttcaaaagttgaatgaattgggctacaaagttttgcctcattcaccatattgaactgacctctcaccaaccgactaccacttttccaagcatctagaaaattttttgcagggaaaatgcttccacaaccatcaggatgcagaaaatgctttccaagagttcatcgaatcccgaagcatggatttttacgctacaggaataaacaaacttatttctcattggcaaaaaatgtgttgattgtaaygtttcctattttgataaagatgtgtttgggcctagttataataatttaaaattcgtaatccaaaaccaccattaattttgtaccaacctaacagtacctacatttattacctcaactgctcttcaactttctttttttgagacagagtatccctctgtcacccaggctggagggcagtggcacaaatctcggctcactgcaacctccacctccaggggtcaagtgattctcctgcctcagcctcctgagtagctgggattacagacgtccaccaccacgcccggctaatttttgtatttttaatagagacggggttttgcatgttggccacgctggtctcaaactcctgatctcat

SEQ ID NO: 933066 - DNA, 767 bp, Homo sapiens
gcagactagggagggctgaggtcagaccagctccatctcatgtgcaagaccatccaacagaatagaccaagaagaggaaagaatcccagaatctggaaactggctttctgaaataaaacaggcaaacaagaatgggggaaaaaagaatgaaagggaatgaacaaaacatccgagaaatatgggattatataaacgactaaatctatgactgattaatgtacctgaaagagatgaggagaatggaaccaacttggaaaacacatttcagaatatcattcatgagaatgtccccaacctagccagacaggccaacactcaacttcaggaaatccagagaacctcagtaagatatgccatgagaagatcatccccaagacacataatcatcagattctctgcggtcaaaatraaagaaaaagtgttaaaggcagctagggagaaaggcaacatcacctgcaaagggaattccatcagacttagcagacctctcaactgaaactgtacaagccagaaaagatattcaacatcttaaagaaaagaaatttcaacccggaatttcatgtccagcaaaattaagcatcataagtgaaggagaaacaagatccttttcaggcaagcaaatgctgagggaattcattatcaccagacctaccttacaagagctcctgaaggaagcactaaatatggaaagaaaagaccaccaccagccactacaaaaacacactgaagtacacagacaagtgatgctaaaaaccaaccacatacat

SEQ ID NO: 933067 - DNA, 767 bp, Homo sapiens
gcagactagggagggctgaggtcagaccagctccatctcatgtgcaagaccatccaacagaatagaccaagaagaggaaagaatcccagaatctggaaactggctttctgaaataaaacaggcaaacaagaatgggggaaaaaagaatgaaagggaatgaacaaaacatccgagaaatatgggattatataaacgactaaatctatgactgattaatgtacctgaaagagatgaggagaatggaaccaacttggaaaacacatttcagaatatcattcatgagaatgtccccaacctagccagacaggccaacactcaacttcaggaaatccagagaacctcagtaagatatgccatgagaagatcatccccaagacacataatcatcagattctctgcggtcaaaatgaaagaaaaagtgttaaaggcagctagggagaaaggcaacatcacctgcaaagggaattccatcagacttagcagacctctcaactgaaactgtacaagccagaaaagatattcaacatcttaaagaaaagaaatttcaacccrgaatttcatgtccagcaaaattaagcatcataagtgaaggagaaacaagatccttttcaggcaagcaaatgctgagggaattcattatcaccagacctaccttacaagagctcctgaaggaagcactaaatatggaaagaaaagaccaccaccagccactacaaaaacacactgaagtacacagacaagtgatgctaaaaaccaaccacatacat

SEQ ID NO: 933068 - DNA, 624 bp, Homo sapiens
atgacgagaggatcaaatccacacataccattactaaccttaaatggaaatgggctaaatgctccaattgaaagacacagggggcaagctggataaagaaccaagacccattggagtatgccgtcttcaagaaacccatctcacatgcagtgccctacataggctcaaaataaaggaatggagaaaaatatttcaaggaaatggaaaatagaaaaaagcaggtgttgcactcctagtttctgacaaagcagactataccaataaagattaaaaaraaaaaaaaaaagacagagggctgggcgcggtggttcacgcctgtaatcccagcactttcggaggctgagacagatggatcacaaggtcaggagatcgagaccatcctggctaacacggtgaaaccccgtctctacgaaaaatacaaaaaattagctgggcatggtggcgggtgcctgtagtcccagctacttgggaggctgaggcaggagaatggtgtgaacctgggaagtggagcttgcagtgagccaagatcgtgccactgcactgcagcccaggcaagacagtgagactccgtctcaaaaaaaaaaaaaaaaaaaaaaaaaaaaaaaaaaaaaaaaaaaaaaaaga

SEQ ID NO: 933069 - DNA, 788 bp, Homo sapiens
atagatttggaggagaaattgaaagttctgttttggatctgtgttttgcattctgactggaaatgacaaatacaagtctacagctcattggaggtgtcagaactaaaactgtataactgtattagaattgtttatttggctgtgtgtcttacctagacagaccttgaggacagacactgttgtctttgtaacctcagtgctctgaagtgtatcctcaaatacttgtgaaatgagtwagtaaaggcaaaagtaaaaatgaagtcactggctgggtgcagtggctcacgcctgtaatcccagcactttgggaggctgaggcgggcggatcacgaggtcaggagatcgagaccatcctggctaacatggtgaaaccccatctcaactaaaaatacaaaaaattagccgggcgtggtggtgggcgcctgtagtcccagctactcaggaggctgaggaagaagaatggcgtgaacctgggaggtggagcttgcagtgagctgagatcgtgccgctgtactccagcctgggcaacagagcgagactctgtctcaaaaaaaaaaagaatgaagtcacttaggcaaaatgtagaagatacatactctatgctttcactgaaagtctaagcacctgaatgtgacttacaagtagggtgaccataatttctgatttgctgagaatagcctggtttatatctgttgtccctacctaagtattaatattgcctggtttcactctcagtaaagtctccatttgtacaataaatttatattgttattctttttagaaggccc

SEQ ID NO: 933070 - DNA, 788 bp, Homo sapiens
atagatttggaggagaaattgaaagttctgttttggatctgtgttttgcattctgactggaaatgacaaatacaagtctacagctcattggaggtgtcagaactaaaactgtataactgtattagaattgtttatttggctgtgtgtcttacctagacagaccttgaggacagacactgttgtctttgtaacctcagtgctctgaagtgtatcctcaaatacttgtgaaatgagttagtaaaggcaaaagtaaaaatgaagtcactggctgggtgcagtggctcacgcctgtaatcccagcactttgggaggctgaggcgggcggatcacgaggtcaggagatcgagaccatcctggctaacatggtgaaaccccatctcaactaaaaatacaaaaaattagccgggcgtggtggtgggcgcctgtagtcccagctactcaggaggctgaggaagaagaatggcgtgaacctgggaggtggagcttgcagtgagctgagatcgtgccgctgtactccagcctgrgcaacagagcgagactctgtctcaaaaaaaaaaagaatgaagtcacttaggcaaaatgtagaagatacatactctatgctttcactgaaagtctaagcacctgaatgtgacttacaagtagggtgaccataatttctgatttgctgagaatagcctggtttatatctgttgtccctacctaagtattaatattgcctggtttcactctcagtaaagtctccatttgtacaataaatttatattgttattctttttagaaggccc

SEQ ID NO: 933071 - DNA, 762 bp, Homo sapiens
ccggtgatgaaccaggccacccagtgcaccgcgttgttcaggcccatggtcttcatcacctgcgggtgggccaggggcttggggcaggccccggggaggacgccgcccctccctgccagcccgcgcctccagggagagtcccggcccgcgcacctccttgagccggtgctccttctccgccacgatgtgctggatggtcatggccacggagtagacccaggagatcaccatgcacagcggcatcatgtgctcaatgacaaacaggaagctgcggggaggccgcgctcaggcgccactcagccccagccccagccccagccccgggcgccmagcactcactcatcgcgtgtgtagcaggggtaggggaacatctgcacgtagctgcctggctccaccacatcgtgccccacaaaagtgtcgatgatggcgcgctccatcatgtctgtgggtgggggcagccatcaggtgccgggcaggccctctcgtcctcacacctgtcctcccccatgaatcctccagccggtcttccgggcctgctcctcaccctggatccagacgaagccgtagaggaagtagaagcggccgccagtattgggcccaggccgccagtaggcgcggcggatctcgttggttttctcggtgaagctggagttctggcggatcttgtagtgcacgtgaggcgggagcgagccgtccttccgggtctggaagatcacacctggggccgggaggttggggcggggccaagatgcaggggcggga

SEQ ID NO: 933072 - DNA, 762 bp, Homo sapiens
ccggtgatgaaccaggccacccagtgcaccgcgttgttcaggcccatggtcttcatcacctgcgggtgggccaggggcttggggcaggccccggggaggacgccgcccctccctgccagcccgcgcctccagggagagtcccggcccgcgcacctccttgagccggtgctccttctccgccacgatgtgctggatggtcatggccacggagtagacccaggagatcaccatgcacagcggcatcatgtgctcaatgacaaacaggaagctgcggggaggccgcgctcaggcgccactcagccccagccccagccccagccccgggcgcccagcactcactcatcgcgtgtgtagcaggggtaggggaacatctgcacgtagctgcctggctccaccacatcgtgccccacaamagtgtcgatgatggcgcgctccatcatgtctgtgggtgggggcagccatcaggtgccgggcaggccctctcgtcctcacacctgtcctcccccatgaatcctccagccggtcttccgggcctgctcctcaccctggatccagacgaagccgtagaggaagtagaagcggccgccagtattgggcccaggccgccagtaggcgcggcggatctcgttggttttctcggtgaagctggagttctggcggatcttgtagtgcacgtgaggcgggagcgagccgtccttccgggtctggaagatcacacctggggccgggaggttggggcggggccaagatgcaggggcggga

SEQ ID NO: 933073 - DNA, 724 bp, Homo sapiens
ctcctctgtgccatcttctgctgcctggtcctctcgtcgagtctgtctggtccagcactttccacatatcaagatttttttttttttcttttccttttttgagacagagtcttgttctgtcgcccaggctggagtgcagtggtgcaatctcggctcactgcaagctccgcctcccaggttcacgccattctcctacctcagtctctcgagtagctgagactacaggcgtccgccaccgcgcccggctaattttttgtatttttagtagagacagggtttcaccwtgttagccaggatggcctcgatctgacctcgtgatctgcccacctcggcctcccaaagtactgggattacaggcgtgagccaccgcgcccggcctacgtatcaagcttttgatgcagtcactcgccctgtcattttccagtgtctaattggctccctttttattttgaaatgtccaagtcctcttgatttctgtccccacttttgttttatggtgcataggaatgtttttgttagtctccttgaatgtgaacgtaggtaagtccttttcaggaaattgctcaattctttggagcctgcccgtggtgtgcttgcatttacagaatctgtcagctcccttctgagggtgttagtctcagggcagcttatcttgtctgggggtctttggtgtgtcttccttcctttccttgttctcgcccacgttgggggttttattatgaac

SEQ ID NO: 933074 - DNA, 720 bp, Homo sapiens
ctggtcctctcgtcgagtctgtctggtccagcactttccacatatcaagatttttttttttttcttttccttttttgagacagagtcttgttctgtcgcccaggctggagtgcagtggtgcaatctcggctcactgcaagctccgcctcccaggttcacgccattctcctacctcagtctctcgagtagctgagactacaggcgtccgccaccgcgcccggctaattttttgtatttttagtagagacagggtttcaccttgttagccaggatggyctcgatctgacctcgtgatctgcccacctcggcctcccaaagtactgggattacaggcgtgagccaccgcgcccggcctacgtatcaagcttttgatgcagtcactcgccctgtcattttccagtgtctaattggctccctttttattttgaaatgtccaagtcctcttgatttctgtccccacttttgttttatggtgcataggaatgtttttgttagtctccttgaatgtgaacgtaggtaagtccttttcaggaaattgctcaattctttggagcctgcccgtggtgtgcttgcatttacagaatctgtcagctcccttctgagggtgttagtctcagggcagcttatcttgtctgggggtctttggtgtgtcttccttcctttccttgttctcgcccacgttgggggttttattatgaactgcagtggtccccagggctt

SEQ ID NO: 933075 - DNA, 592 bp, Homo sapiens
ctgaattgggcttatattccctgcctccagaccctatttttctgcctcaatctgaacttgtcctatgtaaataggggcatctcaagaacttcagtctgttcctaatcgatcccactatctcactcttcctaaaacccagctcttcaacccatgctccttcyaccataaaagcatctttatggctcctcatttccactaactcacttccttggtctggtatttgagcttccccacctcatgcgctggcccatccaaaatctggggcatccacatctgaggcttgaaaaggaggggaagaaagtgctgccaaaattctggctaaagccattgaccagcaggaatggcatttaactgaagctttaaaaaaaatgagtgcagggtgggttaagtggctcacacctgtaatcccagcactttgggaggctgaggtgggaagatcgcttgaggccaggagttcaagaccagcctgggcaatatagtgagaactcatctctactaaaaatcaaaaaaattagccgggtgtagtggtgtacacctgtagtcctggctactggggaggctgaggtgggaggatcacttgagtccaggaggt

SEQ ID NO: 933076 - DNA, 592 bp, Homo sapiens
ctgaattgggcttatattccctgcctccagaccctatttttctgcctcaatctgaacttgtcctatgtaaataggggcatctcaagaacttcagtctgttcctaatcgatcccactatctcactcttcctaaaacccagctcttcaacccatgctccttccaccataaaagcatctttatggctcctcatttccactmactcacttccttggtctggtatttgagcttccccacctcatgcgctggcccatccaaaatctggggcatccacatctgaggcttgaaaaggaggggaagaaagtgctgccaaaattctggctaaagccattgaccagcaggaatggcatttaactgaagctttaaaaaaaatgagtgcagggtgggttaagtggctcacacctgtaatcccagcactttgggaggctgaggtgggaagatcgcttgaggccaggagttcaagaccagcctgggcaatatagtgagaactcatctctactaaaaatcaaaaaaattagccgggtgtagtggtgtacacctgtagtcctggctactggggaggctgaggtgggaggatcacttgagtccaggaggt

SEQ ID NO: 933077 - DNA, 592 bp, Homo sapiens
ctgaattgggcttatattccctgcctccagaccctatttttctgcctcaatctgaacttgtcctatgtaaataggggcatctcaagaacttcagtctgttcctaatcgatcccactatctcactcttcctaaaacccagctcttcaacccatgctccttccaccataaaagcatctttatggctcctcatttccactaactcacttccttggtctggtatttgagcttccccacctcaygcgctggcccatccaaaatctggggcatccacatctgaggcttgaaaaggaggggaagaaagtgctgccaaaattctggctaaagccattgaccagcaggaatggcatttaactgaagctttaaaaaaaatgagtgcagggtgggttaagtggctcacacctgtaatcccagcactttgggaggctgaggtgggaagatcgcttgaggccaggagttcaagaccagcctgggcaatatagtgagaactcatctctactaaaaatcaaaaaaattagccgggtgtagtggtgtacacctgtagtcctggctactggggaggctgaggtgggaggatcacttgagtccaggaggt

SEQ ID NO: 933078 - DNA, 580 bp, Homo sapiens
cgactcagtccaaaaggacagcttcaactccgcatgattttctctctcgtccaaccaatcagcattccccattctctgtgccaccgcccgccctcatcaaattgttctttaaattttccagtcagctctatctgggcagcaggcaagatamacccattgggtggttatagggtctcattctgttacccaggctggagtgcagtggcatgatcatagctcactgtagcctcaaactcctggcctcgggcaattctcccagcttagcttcccaagttgctgcaactacaggctcataccacctcgtcaaactaatttctaaattttttgtagagacagagtcttgctgtgttgcccaggctggtctcaaacttctggcctcaagcaatcctctcaccttggcctcccaaaatgctggaattacaatgagccattgcacctgcccttttaattcttaagtacctgaaaaggcgtggtgggtgttgtagtgaaacaggtgtaaccaccaacaagtatctctctgctgcccagacagagctaatttatcaagacaggggatttgcaatagagaaaagtttaattc

SEQ ID NO: 933079 - DNA, 617 bp, Homo sapiens
acgaagagctgagatactgagatgaatgaggcacaatccttgtcttaccctcgctcacaatcctgggggaggcaaggcacagaaacgagcgtcatagagtcatgagtgccgccccgagagtgggagaaacacggtgggaacgtgcatctgaataagtagcaggcaggggcatgaggaggcagagttatttgagttgcttcttgaattttgtgtaagttttctatactgagacagtaaagaggcattcacagaaaagtgttccttctatttctcattctctgatacacagttccatttcctggaagagtttgcctggatcagaactctctagatcccataggctgacctggtcttagccacagtgarctctgtgtctgcgtcctgcaggtgaacccagcatttcgcaaggtcagcgggttctgcggtggcagtattaataatagaaacttcgctgcatttgaataaaatcagtatttttttctttaaaaagcttgatgccaatatctaatctgctttctttcatatttgtcctctcaatatttatttttattttattttttttttttattttttgtttgttttgttttttggagacagggtctcactcggccctaggc

SEQ ID NO: 933080 - DNA, 745 bp, Homo sapiens
aaaatatggccagatggctttttaaagtgggctccaatactgcttctcttcactgggtgggatctcccaaacagagtctccagccactgcctacaggtgcctttggactgaacaggcccttatctccctgggacgaagctcccagagggaggggaagcttgccacttttgctgtttctcagccttcactggagatacctccagatactagaaaatatgagatgactagggactgcagcaggtcccagcataatgcagtagccctacagaaaaggggccagaactgttacatgggtgcccactcccatgtctcctcaccatgcaggtcccccaggtctgggtcttcagccacccccctaccagagataccaagccagtagcaacttggmaagtccctgttcagagcctccagggacaactaaaagcctctctgctactgcctctgcaatagaatttttcttgctaccctcagactaatgaaggagttttatctgaaaagaatcttatttctgatttacttaggaagcttagtttggctgcacatgaagttcttggttgaaaattttttccttaagaagctatccctatccacacctccaacgagttgtacatgacccaaagaaaggcggccagtctacctcccatgggtcccacccaatcttccccacaataccgcactactcatcaccaaacagggaacccctggcttgggcccacagcacagaccctccatcctgggctgattg

SEQ ID NO: 933081 - DNA, 619 bp, Homo sapiens
tttgtaccagtaccaagctcttttggtgactgtggctttgtactatagtttgaacttgggtagtgttatttttgcttaggattgctttgttaatttgggctcttttgtggttccatatgaattttagaatagtttttattttctcaaattctgtgaataatgacattggtggtttataagaaagacactgactctgtaaatggctttgggaagtatggccatttatatgatattgattcttccaatccatgagcatggaatgrttttccatttatttgtgtcagctctgattttcttcagcagtgttttgtacttctgcttgtggagataattcaccttcttggttacctgtattcccagttatttcattttctttgtggctattggatcccagatatctgtagtgagagtgaccagacctctgtccattcatgcactccttctgcaggcaccatttgaggcagggaacaagttgtagcatttaggcaaccccatgcagggttcccaacttcctcctccttttaccacagtgactacatcttttctctatccattccaatgttttctctcagaaaatctgttcaaatcatgaggtagtcaaaatcgcagtccctttctg

SEQ ID NO: 933082 - DNA, 757 bp, Homo sapiens
aacatggtcagactgctgttataagtgtgtactccatcccagatcccatttcccctcattgatgggatctcctgaccagggcctccagctacccttgctggtgttttctggtttgatacaggtttcaaacctctctaggatagagctcccagagggaagaatgggctgccatctttaatgttttgacaacttagccattctgaccttcatgctttgggaagtccaaggcaaccagaggctgaagcagacccccaatacagcacagcttctccacaaaaatgtggctagactgctttgtaaagcaggtccctaattctgttcctcctcactgggaagaacctctgaactggagtctccagcctcttactctaggtgtcttcaggctgtcaacaggtttatatctccttggaatagagatcccagagggaggggcaggctgccatttttgctgtttcacatccttcactgttgagaccttcaaygtactggaaattctgaggagactaagaactggagcagatccccagcatactgcagcagccctatggaatagtggtcagactattatgtgggtgcctgttcccatatctcctcaccaggcaggtcctccaaccctgggccactaaccaccccctgctggggcaattgagttggtagcagttctgcaacttccaaaacagagactccaggggcaactgaaagcctctctgcactgcttctgcaatggaactgcccttgctactctcacacacagagg

SEQ ID NO: 933083 - DNA, 593 bp, Homo sapiens
ccataacaaacttcctactcatcccaaatatgccccatggatttctccacctggtctcaagccagatggttccatcttctcagaattctcatccaccaacctgtgcaaagcgtacctatttcttcaaagtcctctcactctttttaactcccatgatactttgcctacttctccaatagcaataacagcaccacgatcataataggcttccattagttgggtgtcaaactttgggctaaatgttttatgttaatttataatccaatcatcccctggaatagtactgatagtctgttgatatttttaacagaaaaagataaaataaaataaactaacagtaactatgggaattgggcattgtcctcccatttttaaataagaaaatgaagtctcccgttgamtaagtaatacatagatctatcctacacaattagggcctacagaacttgggactcaaaaccacagctagtatacagtccaacgcccaaactatcttagctagtaattgactactgaaattacgaactttcagaatgatagatccagacatcaagctgtctctgcttgcaacataattgtgatttctctgttta

SEQ ID NO: 933084 - DNA, 612 bp, Homo sapiens
ttttctaaatgtatgtggatggaagagaaaaaagctgacttacccagagtcatgcaaagtgtcaaaaataaaattaatagctcttctctaagagaaataaagcgttactttgtaggactctattcacgtgttctgaccagcacaaatgatctccttccttagaggatacattttcactattgaggaattgaattatttcctctaaaayaattctaacaagtgacagtacattgcaatcatactaggagctaagattatagagatgttcttaaggaccttctcatttagcagaggaaggggaagaaaaaaaatcaatggtggttagttataaagtacaatattcaaatgatctgaatggggacaatacaaataactggtagtgtcatcagtgaatgggtgtgtttggaggtgacagggtggtgtgccataggatccagttaagagctcagatcccagatttcaactgtctaacttacaatcttggtctctcctggtgtttgcgtaaacttgggccagctacctgcttttgtggagcttatattctaaccagaaatagaaaaaaagataataagtaacaagtaagtaaataataaagattttaaaaaggaagat

SEQ ID NO: 933085 - DNA, 612 bp, Homo sapiens
ttttctaaatgtatgtggatggaagagaaaaaagctgacttacccagagtcatgcaaagtgtcaaaaataaaattaatagctcttctctaagagaaataaagcgttactttgtaggactctattcacgtgttctgaccagcacaaatgatctccttccttagaggatacattttcactattgaggaattgaattatttcctctaaaacaattctaacaagtgacagtacattgcaatcatactaggagctaagwttatagagatgttcttaaggaccttctcatttagcagaggaaggggaagaaaaaaaatcaatggtggttagttataaagtacaatattcaaatgatctgaatggggacaatacaaataactggtagtgtcatcagtgaatgggtgtgtttggaggtgacagggtggtgtgccataggatccagttaagagctcagatcccagatttcaactgtctaacttacaatcttggtctctcctggtgtttgcgtaaacttgggccagctacctgcttttgtggagcttatattctaaccagaaatagaaaaaaagataataagtaacaagtaagtaaataataaagattttaaaaaggaagat

SEQ ID NO: 933086 - DNA, 612 bp, Homo sapiens
ttttctaaatgtatgtggatggaagagaaaaaagctgacttacccagagtcatgcaaagtgtcaaaaataaaattaatagctcttctctaagagaaataaagcgttactttgtaggactctattcacgtgttctgaccagcacaaatgatctccttccttagaggatacattttcactattgaggaattgaattatttcctctaaaacaattctaacaagtgacagtacattgcaatcatactaggagctaagattatagagatgttcttaaggaccttctcatttagcagaggaaggggaagaaaaaaaatcaatggtggttagttataaagtacaatattmaaatgatctgaatggggacaatacaaataactggtagtgtcatcagtgaatgggtgtgtttggaggtgacagggtggtgtgccataggatccagttaagagctcagatcccagatttcaactgtctaacttacaatcttggtctctcctggtgtttgcgtaaacttgggccagctacctgcttttgtggagcttatattctaaccagaaatagaaaaaaagataataagtaacaagtaagtaaataataaagattttaaaaaggaagat

SEQ ID NO: 933087 - DNA, 612 bp, Homo sapiens
ttttctaaatgtatgtggatggaagagaaaaaagctgacttacccagagtcatgcaaagtgtcaaaaataaaattaatagctcttctctaagagaaataaagcgttactttgtaggactctattcacgtgttctgaccagcacaaatgatctccttccttagaggatacattttcactattgaggaattgaattatttcctctaaaacaattctaacaagtgacagtacattgcaatcatactaggagctaagattatagagatgttcttaaggaccttctcatttagcagaggaaggggaagaaaaaaaatcaatggtggttagttataaagtacaatattcaaatgatctgaatggggacaatacaaataactggtagtgtcatcagtgaatgggtgtgtttggaggtgacagggtggtgtgccataggatccagttaagagctcagatcccagatttcawctgtctaacttacaatcttggtctctcctggtgtttgcgtaaacttgggccagctacctgcttttgtggagcttatattctaaccagaaatagaaaaaaagataataagtaacaagtaagtaaataataaagattttaaaaaggaagat

SEQ ID NO: 933088 - DNA, 577 bp, Homo sapiens
cttaaggtttgagatgatcaataaaactgataaacaccagatagattaactggttgaaaaaaatgcaaactatatatactaagattgaggatatcactttaaatccccatgaaaattaggacaataaaaagagaacattatgaatatcattgagccaataattttgacaaagacaaaatatttgaaagagacaaattaacaagtctcactcaaaaaaaaaaatagaccattctgtttaatttctagtaaaaagtcttccacaaaacaaacttcaccctgaaaaggaaatttgggtggagacagaatgtaaaaacagacctaaaatttaaagcatatataattaaagaaaaaaaataaatgcaatgtgtataacagtctaaarcatatataattaaagaaaaaaaataaatgaaatgtgcataacagtcaagaatttaatctagaatttggataaccaaaaccaagaacagagttgagaaaatgtaaaagtttaaaacctaaaacttgaacacttagtaagaaccattcacaaatcccaaacaagttgtagacatcatccccaaatacaagaaatgac

SEQ ID NO: 933089 - DNA, 619 bp, Homo sapiens
gactggggcaggacattggagttgagctagaggatgtccaaacaatataggagacaactgaaaaagctcccagtggctgtagctgaaaaaaaacagagcaacagagtagcatgaattatcacccagaatagaaaatatatacccatgagcccataatcacataaataaatgagggaaaagacacayctctcatgcagaaaaattccacataattttcatagatgctatgccctcaaggaggtggagcctaactcctcattctgaagtgggctgtagagaatgacttccttccaaagagtgtagtttagaaaatggtggaaaaaggagctcacacacgtgaaaaggacaaacgctgcctcaatgaggtgaccccgacggcatcggggtgactgtacacatggatggtgttgacggtgaccacacccctcacccccaccaggatgtgatgagaataaggtttcacctctagggtcttcctctcaaaaccaataacccctgtcttcttaagagaagagcatcaaataaatcccaattcaagaatattctataaaattcctaaccaaaaactgtcaaagtcttcagtggaagcctgagaaactgtcccagtggagaggactct

SEQ ID NO: 933090 - DNA, 632 bp, Homo sapiens
ggtaaatgatagtgttttttttttcaacgaatagtgctgaaaaactgaatctaaacacagaccttaaacctttcacaaaaattaacagcaaatgaatcatagacctaaatataacagctaaatttataaaactcttacaaataaaacataaaagtaaatttttgtgatcacagatgaagaaatggtttcttaaatatggtgctaaaagctcaaacaagaaaaaatagatacattgtaattcatcacagttaaaaatgtttgcatgtcaaaaatgccatcaagagagtaaaaagacaacccacagaatgcaaaagtgcatttgcaaatcatatatctgataaaggcctcggattcagaatatatgaagaatacttaacaatccaaagacaacccaaatgtaaatatgggcaaaggatttraatagacatttctccaaagaagatattcaaatagccaataagcacaagaaaaattgctctacatgactaaccaattagggaaatgcaaatcgaaactccaatgagatgccacttcacacccactaggatggctagaatcgaaggacagataataacaagtgtagacaagaatgtggagaaatgtgaacccttacacattgctggggagaatgt

SEQ ID NO: 933091 - DNA, 571 bp, Homo sapiens
tacaatagaacaccagatagactttcaaggtgttttactcaggtcactgattcctggatggtatctctggacccacctggtgtctggggaaacttaacgctcagaagggaaggatacagacctggctgcctttgccacttgctgattgtagaaatccggggccttgagtgagcctaggctgtagccagggagtgtttacagcaggccttgrgcaagacccagtgctgtgctgacttcaggtctcactcagtgttgttgtagtggtagtggccacaggggtgcttgtttcatttaactcccagctataggtagctcagaaaagagagagggagagagactctgctagtttgggagaaagtagaggaagagaagaagtgtctctgcttggtaatccagagacttatctaggatcttctccaagaccatcaaggcagtacctctacaagtctgcaggaactacagcgttactgggcttggggtgccccctgaagctcttcaatgttcagacactaaagaacatctaaaatcaacatcatccaggaaagcatgagcttgcctaataaagtaaata

SEQ ID NO: 933092 - DNA, 748 bp, Homo sapiens
agcgttccaatttctccacatgctcaccaatacctgttattttctgcttttttaaatggtagtcattccaagaggtgtgaggtggtatctcaaacatatccacatgcacaagaatgaagttggacccttacataacatcacatacaaaatgaactcaaattggatcaaaggctgggcacagtggctcacgtctgttataccagcactttgggaggccgaggygggcagattacctgaggtcaggaattcgagaccaatctggccaatatggtgaatccccatctctattaaaatacaaaaattagctgggcattgtgatgcgtgtctataatcccagctacttgggaggctgaggcaggagaattgcttgaacccaggaggcagaggttgcagtgagacgagatcgtaccaatgcactctagcctgaatgacagaacgagaccctgtctcaaaacaaaaaacaaaacaagacaaaacaaaacaagaaaaagaagtgggtcaaagagctaaatgtaagatctaaaactataaaactcttagaagaaaatgtaggacaaaagcttcacactattgtatttgttggttatgacaccaaaggcacactcaacaaaagaaaaaaaatacaaaaattggacttcataaaattttgtgcatgaaaaaacaacatcaacagagtaaaaaggcagccaacagagtgagagaaaatattttcaaatcatatatctgacaattaatattcagaatatat

SEQ ID NO: 933093 - DNA, 748 bp, Homo sapiens
agcgttccaatttctccacatgctcaccaatacctgttattttctgcttttttaaatggtagtcattccaagaggtgtgaggtggtatctcaaacatatccacatgcacaagaatgaagttggacccttacataacatcacatacaaaatgaactcaaattggatcaaaggctgggcacagtggctcacgtctgttataccagcactttgggaggccgaggtgggcagattacctgaggtcaggaattcgagaccaatctggccaatatggtgaatccccatctctattaaaatacaaaaattagctgggcattgtgatgcgtgtctataatcccagctacttgggaggctgaggcaggagaattgcttgaacccaggaggcagaggttgcagtgagacgagatcgtaccaatgcactctagcctgaatgacagaaygagaccctgtctcaaaacaaaaaacaaaacaagacaaaacaaaacaagaaaaagaagtgggtcaaagagctaaatgtaagatctaaaactataaaactcttagaagaaaatgtaggacaaaagcttcacactattgtatttgttggttatgacaccaaaggcacactcaacaaaagaaaaaaaatacaaaaattggacttcataaaattttgtgcatgaaaaaacaacatcaacagagtaaaaaggcagccaacagagtgagagaaaatattttcaaatcatatatctgacaattaatattcagaatatat

SEQ ID NO: 933094 - DNA, 742 bp, Homo sapiens
cattaaaccaacaatattaaattagtcttatttatcaaaaagttttcacagacaaagaccgttctgttttggctgggtttatagttttataaccttctgagccaaaccctgacacctcaaaatatctatcagaaacaaatacaaaacctagataaaaatgtatgctgacaattctggagacatttctacttttattttaccaataattttaaagccagyttgtttattaaatatttacttaagtcatgtgaacttgaaaactattttggacttaatttatgggcactcttatttataagccaatttggtaagtgcaacatataacataataaatgtacatatacataaacatatctatgtattcacacacataaagatctaatagcttttaccatggaactctagccatgagatagcaacacaaactcatcagtctatgaacatgttcacagggctatactttgtttgccttgataggtaaaatacagtgaaggctgtgaacgaaaattttgggtaaagcagtttccagggcggttttatttttaaaggccaaaccaccccagggctaaacagtactacagaagaacattacatactacacaggcctcatcttgcttagaataacagcataacagcctgtgtacataaaactccatccaactttcccattcaacagcaaactccagattccactgaatctggggccaaacagtattacaaaagaataacagtttattgaatt

SEQ ID NO: 933095 - DNA, 720 bp, Homo sapiens
ttatttttaaaggccaaaccaccccagggctaaacagtactacagaagaacattacatactacacaggcctcatcttgcttagaataacagcataacagcctgtgtacataaaactccatccaactttcccattcaacagcaaactccagattccactgaatctggggccaaacagtattacaaaagaataacagtttattgaattctaatttcccgtgaccatatcaacacacaaacattcacgagaacacactccaactgctgcagcaacaaacaagccccaagtgtccaaactgaaacagcttgggggcttccttccactctcygtagctgggcttaatcaacctgcaaacaaaaattcccttggaatttcccaagttgagaggtgctaatcctgatgtctggtacccacaaaagacattgatttgaccagacatacacacaacacacaacaaacaagcccccaagattatccaaactgaaacactcagtatgctttcctctcagtaagttgggtttgttcaacctgcaaatgacaatgcctttaaaaattcccaaattgagaggagcagatactgctgtctgggcccacaaagaacgctcacctatatgaatgcagatgtcagatttcaaaggctgttcttcctgggcaatcaggaacagagttgggaccagcagcagtggggccagagagcctaaaacacatctgcaatcaaaat

SEQ ID NO: 933096 - DNA, 601 bp, Homo sapiens
caactttcccattcaacagcaaactccagattccactgaatctggggccaaacagtattacaaaagaataacagtttattgaattctaatttcccgtgaccatatcaacacacaaacattcacgagaacacactccaactgctgcagcaacaaacaagccccaagtgtccaaactgaaacagcttgggggcttccttccactctccgtagctgggcttaatcaacctgcaaacaaaaattcccttggaatttcccaagttragaggtgctaatcctgatgtctggtacccacaaaagacattgatttgaccagacatacacacaacacacaacaaacaagcccccaagattatccaaactgaaacactcagtatgctttcctctcagtaagttgggtttgttcaacctgcaaatgacaatgcctttaaaaattcccaaattgagaggagcagatactgctgtctgggcccacaaagaacgctcacctatatgaatgcagatgtcagatttcaaaggctgttcttcctgggcaatcaggaacagagttgggaccagcagcagtggggccagagagcctaaaacacatctgcaatcaaaattg

SEQ ID NO: 933097 - DNA, 720 bp, Homo sapiens
ttatttttaaaggccaaaccaccccagggctaaacagtactacagaagaacattacatactacacaggcctcatcttgcttagaataacagcataacagcctgtgtacataaaactccatccaactttcccattcaacagcaaactccagattccactgaatctggggccaaacagtattacaaaagaataacagtttattgaattctaatttcccgtgaccatatcaacacacaaacattcacgagaacacactccaactgctgcagcaacaaacaagccccaagtgtccaaactgaaacagcttgggggcttccttccactctccgtagctgggcttaatcaacctgcaaacaaaaattcccttggaatttcccaagttgagaggtgctaatcctgatgtctggtacccacaaaagacattgatttgaccagacatacacacaacacacaacaaacaagcccccaagattatccaaactgaaacactcagtrtgctttcctctcagtaagttgggtttgttcaacctgcaaatgacaatgcctttaaaaattcccaaattgagaggagcagatactgctgtctgggcccacaaagaacgctcacctatatgaatgcagatgtcagatttcaaaggctgttcttcctgggcaatcaggaacagagttgggaccagcagcagtggggccagagagcctaaaacacatctgcaatcaaaat

SEQ ID NO: 933098 - DNA, 550 bp, Homo sapiens
atccatgccttttggaatccttgttcttggaaactagctgccatgttttcaggaagcccaagcatccctatgaagaggtccatgtggagaggatccaaggtatccagtggataaccctggatgagttccaagtcaactataagaagcacttgccagtcatttgagcaagctatcttggaagtacgttctccagcctccagtcaagccttcccagaagacatttcttatctgcatgagtttatcagagatgaactgtccctaytgaacctgcctaaaacagattagtgaacaaaacaattgttattgttttaagtccctaagttgtgtagtagtttattatgcagcaataagcaacatgccaaaatagtaaacaaaaggaatattgaattcttaaaggagtatgaagattagagccaccaacaggaactgaaacaaaatgcaaggatggtgattcctaccaaattccccatttattttgctgatttatcctatgcagaacacagatgaattttgaagaatgacagtgaatttttaatatctcaatcagatg

SEQ ID NO: 933099 - DNA, 645 bp, Homo sapiens
ccaatgcagttctgacactatctacccagagatagagtcagatcccacaggttgaaggttcagcccccaagactgcccccatacacacaccagttgtaagtctgggcctccacaacttctgactagccagcttcaaggtggggttcccatgaccccctctttgkgtttgattaatttgctggagcagctctcagaactcagagaaatgcttacctatgtttacgggtttataattaaaaaatattgcaaaggagacagatgaagagatgcctagggtgaggtatggagaaagggtcacggagcttccatgccctccctgggtgcaccacgctccaggaacctccacatgttcagctatctggaagcttaacaaccctgtcctcttggctttttatggaagcttcatgatgtcagcattccttcccccaggatatagggtgggactgtctcatgggagggtcttaagatccacaatgagaaaggcagaaaggtgggagaacattagagtgaaaggaaggcaggagaaggtcagaggcctgtccctgaggcctaacacccccaacaatataacaaaagactctaacacgggatgtgggagttatgagccaggacccatggatgaaagccgacatatatcataacatc

SEQ ID NO: 933100 - DNA, 585 bp, Homo sapiens
ccaatgcagttctgacactatctacccagagatagagtcagatcccacaggttgaaggttcagcccccaagactgcccccatacacacaccagttgtaagtctgggcctccacaacttctgactagccagcttcaaggtggggttcccatgaccccctctttgggtttgattaatttgctggagcagctctcagaactcagagaaatgyttacctatgtttacgggtttataattaaaaaatattgcaaaggagacagatgaagagatgcctagggtgaggtatggagaaagggtcacggagcttccatgccctccctgggtgcaccacgctccaggaacctccacatgttcagctatctggaagcttaacaaccctgtcctcttggctttttatggaagcttcatgatgtcagcattccttcccccaggatatagggtgggactgtctcatgggagggtcttaagatccacaatgagaaaggcagaaaggtgggagaacattagagtgaaaggaaggcaggagaaggtcagaggcctgtccctgaggcctaacacccccaacaatataacaaaagactctaaca

SEQ ID NO: 933101 - DNA, 585 bp, Homo sapiens
ccaatgcagttctgacactatctacccagagatagagtcagatcccacaggttgaaggttcagcccccaagactgcccccatacacacaccagttgtaagtctgggcctccacaacttctgactagccagcttcaaggtggggttcccatgaccccctctttgggtttgattaatttgctggagcagctctcagaactcagagaaatgcttacctatgtttacgggtttataattaaaaaatattgcaaaggagacagatgaagagatgcctagggtgaggtatggagaaagggtcacggagcttccatgccctccctgggtgcaccackctccaggaacctccacatgttcagctatctggaagcttaacaaccctgtcctcttggctttttatggaagcttcatgatgtcagcattccttcccccaggatatagggtgggactgtctcatgggagggtcttaagatccacaatgagaaaggcagaaaggtgggagaacattagagtgaaaggaaggcaggagaaggtcagaggcctgtccctgaggcctaacacccccaacaatataacaaaagactctaaca

SEQ ID NO: 933102 - DNA, 585 bp, Homo sapiens
ccaatgcagttctgacactatctacccagagatagagtcagatcccacaggttgaaggttcagcccccaagactgcccccatacacacaccagttgtaagtctgggcctccacaacttctgactagccagcttcaaggtggggttcccatgaccccctctttgggtttgattaatttgctggagcagctctcagaactcagagaaatgcttacctatgtttacgggtttataattaaaaaatattgcaaaggagacagatgaagagatgcctagggtgaggtatggagaaagggtcacggagcttccatgccctccctgggtgcaccacgctccaggaacctccacatgttcagctatctggaagcttaacaaccytgtcctcttggctttttatggaagcttcatgatgtcagcattccttcccccaggatatagggtgggactgtctcatgggagggtcttaagatccacaatgagaaaggcagaaaggtgggagaacattagagtgaaaggaaggcaggagaaggtcagaggcctgtccctgaggcctaacacccccaacaatataacaaaagactctaaca

SEQ ID NO: 933103 - DNA, 705 bp, Homo sapiens
ctcagaggggactgaggtgacaaaacaggatcccatcatttggtaaacaggactcaagcatgaagtctgaggggtgtggggaggtgcagggtgggtagcaaatggctgtgaaaagcaagagactttccacgggcaaagctaagtctagatgtacccagattagcgacttttccttaaaaggtttttccagccaggagcaagggactgggtgaatcatccctaagacgggtgacaggmggcaggaataaagcatgaataaagcatcaggaagggactaggatttaaaactggcccctcaatgcttctacactgctggtgagaatgtaagttagttcagccactgtggaaagctgtctggagagttctcaaataacttaaactagaactaccatttgacctagcaatcccatttactgggtatatgcccaaaggaatacaaaatattctaccataaagacacacacaggcatatattcatcacagcactgttcacaatagcaaagacctagatgcccatcgatggtggattggataaagaaaatgtggtgcatatacaccatggaatactgtgcagccacagaaacgaatgaaatcatgtccattacagcaacatggatagagctggaggccattatcctaaacaaattaatgcaggaacagaaaactaaatactgcatgttcttacttataagtgggggctcaaca

SEQ ID NO: 933104 - DNA, 705 bp, Homo sapiens
ctcagaggggactgaggtgacaaaacaggatcccatcatttggtaaacaggactcaagcatgaagtctgaggggtgtggggaggtgcagggtgggtagcaaatggctgtgaaaagcaagagactttccacgggcaaagctaagtctagatgtacccagattagcgacttttccttaaaaggtttttccagccaggagcaagggactgggtgaatcatccctaagacgggtgacaggaggcaggaataaagcatgaataaagcatcaggaagggactaggatttaaaactggcccctcaatgcttctacactgctggtgagaatgtaagttagttcagccactgtggaaagctgtctggagagttctcaaataacttaaactagaactaccmtttgacctagcaatcccatttactgggtatatgcccaaaggaatacaaaatattctaccataaagacacacacaggcatatattcatcacagcactgttcacaatagcaaagacctagatgcccatcgatggtggattggataaagaaaatgtggtgcatatacaccatggaatactgtgcagccacagaaacgaatgaaatcatgtccattacagcaacatggatagagctggaggccattatcctaaacaaattaatgcaggaacagaaaactaaatactgcatgttcttacttataagtgggggctcaaca

SEQ ID NO: 933105 - DNA, 567 bp, Homo sapiens
acatctgtaataccagcactttgggagattgaggcagatcacttgagctcaggagtttgagaccagtctgggcaacatggtgaaaccccatctctactaaaaatacaaaaaattacccaggtgtggtggcgcacacttgtaatcccagctactgggaaggctgaggcaggaaaattgcttgaacccaggaggtggaggtttcagtgagccgagatcacgccactgctctccagccygggcaggcgacagagagagactgtgtctcaaaaaaaaaaaaaaaaaaaaaaaaaaagaaagaaagaaagaaaagaaaagaaaagaaaagaaaattagcagggtgtggaggtgcacacctgtagtcccagctactcatgaggccaaggtgggaggattacttgagcacaggaggtcaaggctgcagtgagttgtgattacattgctgcactacagcttgggtgacagagtgagactctgtctaaaaaagaaagaaaagaaagactattgatacgtgcaaggatatggatgaatctgagaacaattttgctgagcgaaagaaagcagaggaaa

SEQ ID NO: 933106 - DNA, 567 bp, Homo sapiens
acatctgtaataccagcactttgggagattgaggcagatcacttgagctcaggagtttgagaccagtctgggcaacatggtgaaaccccatctctactaaaaatacaaaaaattacccaggtgtggtggcgcacacttgtaatcccagctactgggaaggctgaggcaggaaaattgcttgaacccaggaggtggaggtttcagtgagccgagatcacgccactgctctccagcctgggcaggcgacagagagagactgtgtctcaaaaaaaaaaaaaaaaaaaaaaaaaaagaaagaaagaaagaaaagaaaagaaaagaaaagaaaattagcagggtgtggaggtgcacacctgtagtcccagctactcakgaggccaaggtgggaggattacttgagcacaggaggtcaaggctgcagtgagttgtgattacattgctgcactacagcttgggtgacagagtgagactctgtctaaaaaagaaagaaaagaaagactattgatacgtgcaaggatatggatgaatctgagaacaattttgctgagcgaaagaaagcagaggaaa

SEQ ID NO: 933107 - DNA, 567 bp, Homo sapiens
acatctgtaataccagcactttgggagattgaggcagatcacttgagctcaggagtttgagaccagtctgggcaacatggtgaaaccccatctctactaaaaatacaaaaaattacccaggtgtggtggcgcacacttgtaatcccagctactgggaaggctgaggcaggaaaattgcttgaacccaggaggtggaggtttcagtgagccgagatcacgccactgctctccagcctgggcaggcgacagagagagactgtgtctcaaaaaaaaaaaaaaaaaaaaaaaaaaagaaagaaagaaagaaaagaaaagaaaagaaaagaaaattagcagggtgtggaggtgcacacctgtagtcccagctactcatgaggccaaggtgggaggattacttgagcacaggaggtcaaggctgcartgagttgtgattacattgctgcactacagcttgggtgacagagtgagactctgtctaaaaaagaaagaaaagaaagactattgatacgtgcaaggatatggatgaatctgagaacaattttgctgagcgaaagaaagcagaggaaa

SEQ ID NO: 933108 - DNA, 531 bp, Homo sapiens
atatgcaaaaaactctagagagtaatataacaaatgcacttaatagggacaacctttaacattcagtagagaacattttactctattggcttcagatcttgttttgactgcagcttgattcccacagtcctctctcatccccacccrtcgtgggtcctcagcctcatctcaccaccctgagttgggtatagaatttcctgtccaggtgtttagaattctatacatttatctaaaagcaatatagggtatcatgtgttgggttttatatgctgatgtaaaaggagttgttctgcaatttgctttcttctctccatgttattgagctctatcctgttgctacctgtggacgtaactcgttctcattgctgggtggtatctatcttatggtccctttctcatcatcatgagcatttaagtgaagatcgtcttcaggatttccatgtgctcatgtgggagagtaagtcctgaaagtggaacatcacctgtaaatatattaaagacagggttttccaatttaactgggaaagtctc

SEQ ID NO: 933109 - DNA, 531 bp, Homo sapiens
atatgcaaaaaactctagagagtaatataacaaatgcacttaatagggacaacctttaacattcagtagagaacattttactctattggcttcagatcttgttttgactgcagcttgattcccacagtcctctctcatccccacccatcgtgggtcctcagcctcatctcaccaccctgagttgggtatagaatttcctgtccaggtgtttagaattctatacatttatctaaaagcaatatagggtatcrtgtgttgggttttatatgctgatgtaaaaggagttgttctgcaatttgctttcttctctccatgttattgagctctatcctgttgctacctgtggacgtaactcgttctcattgctgggtggtatctatcttatggtccctttctcatcatcatgagcatttaagtgaagatcgtcttcaggatttccatgtgctcatgtgggagagtaagtcctgaaagtggaacatcacctgtaaatatattaaagacagggttttccaatttaactgggaaagtctc

SEQ ID NO: 933110 - DNA, 531 bp, Homo sapiens
atatgcaaaaaactctagagagtaatataacaaatgcacttaatagggacaacctttaacattcagtagagaacattttactctattggcttcagatcttgttttgactgcagcttgattcccacagtcctctctcatccccacccatcgtgggtcctcagcctcatctcaccaccctgagttgggtatagaatttcctgtccaggtgtttagaattctatacatttatctaaaagcaatatagggtatcatgtgttgggttttatatgctgatgtaaaaggagttgttctgcaatttgctttcttctctccatgttattgagmtctatcctgttgctacctgtggacgtaactcgttctcattgctgggtggtatctatcttatggtccctttctcatcatcatgagcatttaagtgaagatcgtcttcaggatttccatgtgctcatgtgggagagtaagtcctgaaagtggaacatcacctgtaaatatattaaagacagggttttccaatttaactgggaaagtctc

SEQ ID NO: 933111 - DNA, 619 bp, Homo sapiens
ggaggaggaggagttgatggtttaaggagaaatggtgtaaaatgtatacttaagagactgagagtgtgagttgaatggaaatggatcattgggcagcactgagagtccccttgaggtttgtggtcacactgaccagtgacttttccctgaccatatatccttctggtctggccaaccctcacatacatttctgtatcccatctttagtatgccctggcccttgggaaacactcatcccttaataatcatctctgcacatatagagggcattttcccggcaccatgactctagaaggattgcatttcaggcaaggtggcactgggaagactgtcccgagaacaacagagccttctctattcctccgtctctcattcaaggtgtcttatttgggagacagggattaatrttgtaattctgcctcactcccctaggcattgtgttaggtgcttcaggaatacaaagactaatagggatcctgcctgcattcaatgaattcataatctggctggggagcagtgatttgtacacaagcgagcggcctatgtacaatagctaagccaacttgaccatgagcacttccagggatggaactgtgaataactagagcatggggtatat

SEQ ID NO: 933112 - DNA, 663 bp, Homo sapiens
cttcaatgtcagcctcagctagaaagagccactttgcccaagactgtgccttcctggcatagtccacacctagtgatggagtgaggcagcaggataaaggcccagacagctccgttcaatgtgggaaacacagtcggacgatagtctctccagagctccccaggggttagctgagatttccatggtcctgcattgtgattcagctttttcttctgcccaatcctgttacctctcccttcttttgacaggttttggtttgtttataatagactgcttttaagaatactttctgaggccgggtgtggtggctcacgcctgtaaccccagcactttgggaggccaaggcgggcagatcatggggttgggagttcaagaccggcctggccaacatggtgaaacctcatctctactaaaaacacaaaaattagccaggcayggtggcacacgcctgtactcccagctactcgggaggctgaggcagaaaaatcgcttgaacctgggagctagaggttgtggtgagctgagattgcaccattgcactccagcctgggtggcagagcaagactccgtctcaaaaaaaaaaaaaaaaaaaagaatagtttctgatatacagaaaaactgagactatagcacagagtttccatatgccctcattcagttttc

SEQ ID NO: 933113 - DNA, 720 bp, Homo sapiens
gagtgcaaagacagagagaaggccgaccaaagacacaacacagttccaatgttacatttgtaaagaatatcaccactcaatttacagtttgtgtttttaatcctcatgtctttctagcagctaagaaggaccagctccaggtaaacaatacccaattgatctgtaagtcttgccagttctatcactgcatwaatcttagcacattgcaaacacataacatctctcctttgatgattttaggtcgcatccctattcatccgtctgagccttgggctgctacacctgctttgccttttgcaaaacttcttctaactgagcttactcattgtgtccatagagccttaggcatgataatttttgctattgtttccttgatcacactaataacttctgttgtgatatcttctgcagctttgcatagttctgttcaaacagctcagtacatggagaactggacatgcacagccgaccaagcatggctacttcagagtaaaattaacactgagttacaaactgaagtggcaatgttaaaatccacagttctatggttaggggaacaagtacaaagcttgcaattgcagcagcaattgcattgtcattttaatcacactcatatttgtgtaaccaacttggaatataaccaaagtgagtatctgtgggaccttgtgaaagcccatttgcagggaactttcacatccaacatcacctttgatattggtg

SEQ ID NO: 933114 - DNA, 720 bp, Homo sapiens
gagtgcaaagacagagagaaggccgaccaaagacacaacacagttccaatgttacatttgtaaagaatatcaccactcaatttacagtttgtgtttttaatcctcatgtctttctagcagctaagaaggaccagctccaggtaaacaatacccaattgatctgtaagtcttgccagttctatcactgcattaatcttagcacattgcaaacacataacatctctcctttgatgattttaggtcgcatccctattcatccgtctgagccttgggctgctacacctgctttgcctttygcaaaacttcttctaactgagcttactcattgtgtccatagagccttaggcatgataatttttgctattgtttccttgatcacactaataacttctgttgtgatatcttctgcagctttgcatagttctgttcaaacagctcagtacatggagaactggacatgcacagccgaccaagcatggctacttcagagtaaaattaacactgagttacaaactgaagtggcaatgttaaaatccacagttctatggttaggggaacaagtacaaagcttgcaattgcagcagcaattgcattgtcattttaatcacactcatatttgtgtaaccaacttggaatataaccaaagtgagtatctgtgggaccttgtgaaagcccatttgcagggaactttcacatccaacatcacctttgatattggtg

SEQ ID NO: 933115 - DNA, 788 bp, Homo sapiens
tgtatagcagtgctactgatttgtgtacattgattttgtattctgaaactttaccaaattaacttatcagatctgggagcattttgggtgtgtctttagggttttctagggataaaatatcgttggcgaacaatgacagttcaacttcctctttacggatttggatgccctttatttttttctcgtttgattgctctgactaggacttcagtagtactatgttgaacagaagtggtgggagtggtcatccttgtctcgttccagttttcaggaagaatgctttcaagttttccttattcagtatatgttgtctgtgcatttgtcatagataggttttattcccttgaggtatgtcccttctacggcagttttgctgagggttttaatcataaaggatgctggattttgtcaaacactttttctgtgtctgttgagatgatcatatgatttttgtttttagttctgttcatgtggtgtaacatatttattgacttgtgtgtgttaaagtatccttgcattcctggtatgmaacccacttgttcatggtggattatctttttgatatgctgttggattcgattagctagtattttgttgaggatttttgcatctatattcttcagagatattggtctgtttttttttgttgttggtgttatgtcctttccttgttttggtattgggtgatactggcttcatagcatgatttagggaggattccctctttctctatcttttggaatagtgtcaataggattggtaccagttcttctttgaatgtctgatag

SEQ ID NO: 933116 - DNA, 643 bp, Homo sapiens
tttataatatgtcttcttcctcatagtgtggcactggcacaaaagcattcatctccattaagttgtcttctgttaattcctctggtgtggtttctattagctcttgaatttccccaagatccatatcctgaaatcctttaccccatcttttttttttttttctgccatacctacaatctcatccataacttccttgattggctctgtcataaatcctgtgaagtcacgcacaacatctggacagttttctccagtaggaatttattgctttgggctaatggccttcatggcttgttcaataacaacgacattttcaattgtgtgatccttccagactttcatgatgtcctttctatcagggctctctttcatgtcactgacaatcccttccataaagtaccatgtgtaatgagtttaaagtccttatgaccccttgatctagaggctgaattagagaagttgtgtttgggatcaagtagacaacttagacaccttcratcttgaattcatggagttctgggtggccaagggcattgtccaaaatcaaaagaattttacttgcaaggtacctcctgacaaagcactgataaaacaaatgcagaatagggcttctcattgtccaggttgtcttgtaaaagcaaaa

SEQ ID NO: 933117 - DNA, 583 bp, Homo sapiens
acctgttaaagatcccacttcttaaaactgtcacattcacaattaaatgtcaacatgagttttggtggaggcattcaaaccatagcattctgcacctaccctcccctctctgccaaattcacatccttcatacaatgcaaaatatattcattccatcctagtaggctcaaaagtcactccagtattaactcttaatactgttagttaatacttatctaaatctagttaatcgagttatctaggtaatacttatctaaatcaaatatgggtgwgacttcatcctgaaggcaaatgttctgcaaccacgagcctgtgaaatcaaaataagctatctgcttccaaaatacaatgtgcgaaggtatagaagagacattcccattctaaaatggggaaataggcaagaaaagagggataactcatctgaaacaagtccaaaacccaacagggagaacaatattaaatcttaaagttggagaataatttcctttcactccatattctgcatcctgggcacactgggtgggggttggacccctaaggcctcaggcagctcagctcccatagctttcctaggctcagccta

SEQ ID NO: 933118 - DNA, 577 bp, Homo sapiens
tttctatattctttctcatttgaccaatttgatatagccaagtgctgtgacattgaaaacactgcatgcaaaagatggaaaaaccacaaagaagaaaaagccagggcctccaactcaccagttagaggaacactgtgcaaaaatcaggatagccatgtggactagatctgagtaagcggaatgttattgatttagtgcctctcagcttcaagttcagtatttctttatattaytcagtgaaaatgggtttgggctctttaaatatttttccactgcttttgttgcgattgcttttgacatcttcgtcatgaaatctttgcccgtgcctatcttttgaatggtattgcctagattttcttccagggttgttatagtttcagattttacattaagtctttaatccatcttgacttgatttctgtatactgtgtaagggaaaagtccagtttcaattttctgcatatggctagccagttctcccagcaccatttattaaatagagaatcctttacccattgcttgtttttgtcaggtttgtcgaggatcagatggttgtaggtgtgcagtcttatttcta

SEQ ID NO: 933119 - DNA, 604 bp, Homo sapiens
tggcatttaagaagcagatgccagttgggtgccatggctcatgtctgtaattccagcactttgggaggccaaggagagaggaccacttgaggccaggagtctgaaaccagcctaggcaaaatagcaagactctatctctaccaaaaaaaaaaaagaaaaaaaaattagaaattaactgactgtggtggtgcacacctgtagtcctaactacttgggagactgaggtgggagaatcacctgagaccaggagttcaagactggagtgaactataatygtgccactatactccagcctggggcacatagtgagatgctgcctccaaaaagaaaaaagaagaaggaagaagaggaggagtggggcaggggaggaggaagagaaagaagaggaggaggaagaaggaaaagaagaaggagaaggaacagcagatgcgggaaagctctctgttctgtgtctatgtggcttaaagcaggacatgaatttacaaagtcaaaaaatctcacttcccctctctaacagggagaacgaaggttaaccactgaagacaattttagacccttaagggcgtgaagattgcaccagagtgatctatattaacaagctcta

SEQ ID NO: 933120 - DNA, 626 bp, Homo sapiens
gcccctccagaggaacgatcaggcagcaacatttgctgttcagcaatattcgctgttatgcagcctccactgctgatacccaggtaaacagggtctggagtggacatctagcaaaatccaacagacctgcagctgagggtcctgactgttaaaaggaagactgacaaacagaaaggacatctacaccaaaaaaagctgaaattctaaaaatcagaacacctctccccctccaaaggaaggcagctcctcgccagcaatggaacaaagctggatggagaatgactttgacracttgagagaagaaggcttcagatgatcaaacttctctgagctaaaggcagaagttcaaacccatctcaaagaagctaaaaaccttgaaaaaagattagatgaatggctaactagaataaccagtgtagagaagtccttaaatgacctgatggagctgaaaaccatggaacgagaactacgcaaagaatgcacaagcttcagtagctgattcaatcaactggtggaaaacactctgcaggatattatccaggagaactgccccagcctagcaaggcaggacaacattcaaattcaggaaataaagacaatgccacaaagatactcctcaagaagag

SEQ ID NO: 933121 - DNA, 608 bp, Homo sapiens
ccttctcctgcctgattgccctggccagaacttccaatactatgttgaataggagtggtgagagagggcatccctgtcttgtgccagttttcaaaaggaatacttccagtttttgcccattcagtatgatattggctgtgggtttgtcataaatagctgttattactttgagatacattccatcgataccttgtttattgagagtttttagcatgaagggttgttgaattttgtcgaaggccttttctgcatcaatggagataatcatgtggtttttgtcattggttctgtttatgtgacrgattacgtgtattgatttgcatatgttgaaccagtcttgcatcccagggatgaagccaacctgattttggtggataagctttttgatgtgctgctggattcagtttgccaggattttattgaggattttcgcatcaatgttcatcagggcttttggtctaaaattctcttttttgttgggtctctgccaggctttggtatcaggatgatgctggcctcataaaatgagttagggaggattccttctttttctattgactggaatagtttcagaaggaacggtaccagctcctccttcttacctctag

SEQ ID NO: 933122 - DNA, 608 bp, Homo sapiens
ccttctcctgcctgattgccctggccagaacttccaatactatgttgaataggagtggtgagagagggcatccctgtcttgtgccagttttcaaaaggaatacttccagtttttgcccattcagtatgatattggctgtgggtttgtcataaatagctgttattactttgagatacattccatcgataccttgtttattgagagtttttagcatgaagggttgttgaattttgtcgaaggccttttctgcatcaatggagataatcatgtggtttttgtcattggttctgtttatgtgacagattacgtgtattgatttgcatatgttgaaccagtcttgcatcccagggatgaagccaacctgattttggtggatamgctttttgatgtgctgctggattcagtttgccaggattttattgaggattttcgcatcaatgttcatcagggcttttggtctaaaattctcttttttgttgggtctctgccaggctttggtatcaggatgatgctggcctcataaaatgagttagggaggattccttctttttctattgactggaatagtttcagaaggaacggtaccagctcctccttcttacctctag

SEQ ID NO: 933123 - DNA, 745 bp, Homo sapiens
aaggagtctctcttggtagccactacagttgtgaatgtgccagatcacacctgaagccaggacatctcagagtctcatccaaggcccagggtgtttcctaactggctactgctcctgattattcagtgcccaagggctctttagtcagcaggtgatgaattgtgccaggactgcatccctcccttcaagccagtgggttttcttctggcccatgtgtgtctagaaatgtcttccaggagctagggcctaagatgggggcctcactactctacccattgccctatcctgctgtggctgagctggtatccaagttgcaaagtcctctttactcttttctcttcctctcctcaagtggaatgaaggggtcttctttggagcagtgagctgtgctgcctggggttgggggagggatggcacaaccacttctttagctaggtatatcactaggtcatgtgcacctcaagcccactggctctgaccccacayggcactaaaacttgcctaggagttgcagttcttgtggcctagactgcctttcaagttgtttagagcctcagaacactttagcccatggtggcaaggtttgccaaaactcaggttgtaacatctggaatgggtgatttccctctggctagggctgctctaagtggtccctccatgggcatttgctgaggtctgtgcatgttggcagcaccgagttccaacacaaagtcccactctccctccctgagaacagagattctca

SEQ ID NO: 933124 - DNA, 685 bp, Homo sapiens
acatctcagagtctcatccaaggcccagggtgtttcctaactggctactgctcctgattattcagtgcccaagggctctttagtcagcaggtgatgaattgtgccaggactgcatccctcccttcaagccagtgggttttcttctggcccatgtgtgtctagaaatgtcttccaggagctagggcctaagatgggggcctcactactctacccattgccctatcctgctgtggctgagctggtatccaagttgcaaagtcctctttactcttttctcttcctctcctcaagtggaatgaaggggtcttctttggagcagtgagctgtgctgcctggggttgggggagggatggcacaaccacttctttagctaggtatatcactaggtcatgtgcacctcaagcccactggctctgaccccacacggcactaaaacttgcctaggagttgcagttcttgtggcctagactgcctttcaagttgtttagagcctcagaacactttagcccatggtggcaaggtttgccaaaactcaggttgtarcatctggaatgggtgatttccctctggctagggctgctctaagtggtccctccatgggcatttgctgaggtctgtgcatgttggcagcaccgagttccaacacaaagtcccactctccctccctgagaacagagattctcag

SEQ ID NO: 933125 - DNA, 463 bp, Homo sapiens
aggggccaaggtacagctcggcctatggtttcagacagtgcaagccccaaaccttggcagcttccacatggtgttgagcctgcgggtgtacagaagtcaaaaattgaggcttgggaacctccacccagatttcagatgactggaaacgtctggatgcccagatagaagtttgctgcaggggtggagccctcaggggaacctctgctagggcagcatggaagggaaatgtgggatcagagcccccccacacacagagttcctactggrgcaccacctagtggagctatgagaagagggccaccatcctccagaccccagaatggtaggtccaccaacaacgtgcactgtatgcctggaaaagctgcagacactcaacatcagcccgtgaaagcagccaggagtggggctttaccctgcaaagccacagaggtggactgctcaagactatgagaacccacctctt

SEQ ID NO: 933126 - DNA, 599 bp, Homo sapiens
ttttagggaataatatcaacatatgttccaaaactgtaagagatgtccaaagttccaatgtctgaatatgtgctattaatcacaattaaggttgttatgttgggttattgtaagccatggaaataaccaaatttgtcaatcatattcttgactgtaaacaccctggacattttgtcatttacagggaattgttgtcttgttttaatcttcttcttcttaaaaaaaagtttataatcagttatggaactttaacaggtgctcttaaatacagatttctgattaaaaaaatgtacagaactcataaaaagctgaaacgtttacaaatatcaagcagaaaaagagttaactgarcggactgaactaatagaaaattaaagcaatattcttgatttattcttggaacattgctgatccttattttatttttcaaagtcaaggaaacttgtcttgagctagctacagcctttaacaactaagtaaagtatactcctgtaaacaaagtttcaagcatgtttgtttcctctctgcctggttcctccagaatttaaaaactagttgtaacatatagttgtttgcatcagtgcaataagaatccactt

SEQ ID NO: 933127 - DNA, 548 bp, Homo sapiens
cactaaattcttttcttagcaaggaatattaatattaataccctgggaaaggaatgcattcctaggggaggtctataaatggccactctgggaatgtctgtcttatgtgattgagataaggactgagatacgccctggtctcctgcagaaccttcaggcttactagggtggggagaaactctgccctggtaaatttgtggtcagaccggttctctgctctcgaaccctgttttctgttgttgaagatgtttatcaagacaatatgtgcackgctgaacatagacccttatcagtggttctgcttttgccctttgccttgtgtttgttggatgcttatcagtggttccgctttttccttttgtcctgttccctcagaagcatgtgatctttgttagaccgttattagtacgtctgctttttgccttttgaagcatgtgatctttgtacccactccctgttttacaccccctcccgttttgacacccttaataaaaaacctgctggtttgaggctcaggtgggcatcacggacctaccgataggtgatgt

SEQ ID NO: 933128 - DNA, 632 bp, Homo sapiens
tcaatttctacctccatcatcacatggcattttccccctgtgtcttcacattgttttcttataaggacaccagtcatattgtattgagagcccacctactccagtataacctccttttaactaattccatctgaaatgaccctgtctccaaataaggttataacctgaggtagcagaggttaagacttcaacctatatatctggagaacacaattcaactcataacaacatctgttatcagatttagccataagtatttcacatttttgatgccattataaattgtattattaacttacttttaatttctgattcgttgttgctagcatatggaaatacacttaatttttgtgttgatcttatatcctacttttwaaaaatagattttattaaattttctacatagatagtcatctgggaataagtagaatttacttcttcctttctaaattgaatgtcttttttaaaaaacctcattgaggctggatgcagtggctcatgcctgtaatcccagcactttgaaaggccgaggcaggcgggtcacctgaggtcaggagttcgagaccagcctgacgggataaaactctgtctctactaaaaatacaaaaattagccaggcacagtggtgcgta

SEQ ID NO: 933129 - DNA, 775 bp, Homo sapiens
agtgccaaataggaggcaaaaatgctggaatatctcctctcttaccaacctttttccttcttttcctttctccagcaatcccaccctaagcccaaaaaattctacatttcttaatttctactattcagaaaggtgagtcaactaaactcactctctttttttattttttaagtagggatggggtttcaccatgttggccaggatggtctcaatctcctgacctcgtgatccgctggccttggccttccaaagtgctgggattatgggcatgagccactgtgctcggcttaaactcactttcaaaataaggatgttaatacccataagactatttgcaatgtataaaagcattataaatatataaatatatcaaaggtgataattaggaaaaatcataaaaattttaatgggaaattctgcagacagaaacagccttaaaatagatgcttctatcctatgactacatcccaaatgatgatttggaatcgttgagatttagagaaggttgccccctctaaaatagagtcttcccagctttcctgaagtactatgtataacgtgtcaagcttacactattccaaggtccaccagatgttkccatgtcttattttaaagtggaaaatccaaataaattcagtcatttcttttttctttttctttctttctttcttttttttttttttgagacagagccttggtctattgcccaggctggagtgcagtggcacatcttagttcactgcaacctccgcctcctgggttcaagtgaccctcc

SEQ ID NO: 933130 - DNA, 627 bp, Homo sapiens
ggctcaggacaaaaacagaagagaagacaatgttatttttattgtcttattgatacaattgcaatgctaatttttgtaggcaaatctaatttaccaaaggaaaaaccagaggatcaatatatagcatacagtttttaaaaaatttctcctgcaaagaagtcagcttgtgattatttttgtcttgagatttattttcagggaaatataatgagataactggctaggtgmtacttttcagttacttctctaatactgtggtgcaagcttaggaattggttttataaacacttccaaaccatacctcccatccctcagttgcattcctttatgtgggcaataaacaccacttgcagcgttatgaatagagtgagttttagtgggtgtcctccaggagctcatctactcttctatctttagtggcccagggctgattaaaggtctgcactggctaacataatataatatttatcaagagtctagtaagcatgtttaagtgtcagaatgacctgggtttgatatctagttctagttctgtctagctgtgtgaccgtaagctacttaaccttgctttgctgccattttcttacattgcacttcacaggttggttatgaatattaaatgaaata

SEQ ID NO: 933131 - DNA, 645 bp, Homo sapiens
atataattgtagtaattgtagtttccttttttttaacagtaatttccattgctctccaaggatgtccaaataacaccatttcctactaaacttgagcttatctgcccaaatttacctatttgttagaaaatgtttatctaaataaatctatgctttaagctgttttagagatttgcmtacctaagtcagtaacttttaaataatgtttgccaaattgtttatattattattgagtcatctattgggggatccttagggagttagcctgttgtccaatgatgtcatttttggatatgacagtacaattatgtcataaacttggaaaaaatgtgtctattctcagtaaaaggatggcatacatccagctcatccaaaatgatcattgagtaatcacagtaaaaattaaacacaggaggtttccaaaatgtgtactctttcatattcacctaccatgatgatttaatctatcaggacactatacttgcaggcactgatgctcagttaacgttaaagtgcaggtcttacaaaagtgttattaactagcatcataaaaattattcttagaatttagatgtaaccaggtctattttacagagttgagatggataaaattcaatgaaagttgaaaacaatctcatattttcc

SEQ ID NO: 933132 - DNA, 606 bp, Homo sapiens
ctcctctatattttggaatagtttaagtaggatttgtattagtttttctttaaacgtttcatagaattcagcattgaaactaagtcctgggattttgtttactgggagaatttttattacgttttgatattgttacttgttattggtgtgttcaccttttggatttttttttatggttcagtctttgtasgttgtatgtgtctaggaattttaccatttcttctagatttttcactttgtggacttacgttgctcatagaggccacaaataatcctttgaatttctgggatagcagttgtaacgtctccattttcatttctgattttatttatttggaccttttctcattttttctttgtctggctaaagtttgtcaattttgtttaatttttaaaaaaacaactttttgtttcattgatttttgttgttttttatttcagtttcatttatttccgctctgatctttattatttattttcttctaattttgggtttggtttgctcttgcttttatagttgtttaaggtttagaattaggtgttttttgaagttttttctcttatttgttataggcacttaaagctacaagcttccctctgagtagt

SEQ ID NO: 933133 - DNA, 576 bp, Homo sapiens
acattttaacaatattaattcttccaacctgtgaacataaaatatctttacatttacttgtgtcatcaatttctttcatcaaagctttgaaatttttagtgtgcaaatccttcacatccttggttaaatgtatttctaagcactttttattcttagtagctgctgtaaatgaaatatatttcttcatttctgtttcasattgttcattgttagtgcatagaaacactactgacttttatatgttgattttttttatcctgcaactttactatattcatttattagttctaacagttttttttggagtctttaggttttcatacataagatcatgtcatcaccaaacatgaacaattttcttaatcttttcccatttggaagtattttatttgtttctcttacctaattgttctggcaaggagcgctatagtcactttcagcactatagtgaagaggtgaaattagacattcatgtcttgtttctgatcttatagggaaagttgccattgttttcatcattaagtataatgttagctgtggcttgtcatgcatggctttcattgtgttgaggtacat

SEQ ID NO: 933134 - DNA, 572 bp, Homo sapiens
tgcacaagctgggagaaagaagctctggctccatctcttccaaaatctctgctaatgtttcaaacatgccagaaatcctgatgttcacttgttgccccataattccagtttgtctttgaatgcagccactttatctgccaacttgaacacagtggtcattctccactgaagcracagattgagttcgttgagcaggttgaatatgtcacataagtaagcaagttttgtatcccattctgtgtcattgaaatgtgctatttctgaagtggctctcataactcaaaatctctggccagggatctacgtatagaaagccatctcacttctgtgtctgagagatgtgtttgctctgtgtccatctcctcacagagctgcatgaacagacgtgagttaagggcatgtacgttaacgtggttgttaattttaaaatcacatcctgcaaaatgttgttaagttctgctgacgtttttttggctagccagcatttctctatgaaggacacagtgcgtagactcatattcagaagcaacctctttgacccaagcagtgaaaccagaaagccacgcagccat

SEQ ID NO: 933135 - DNA, 730 bp, Homo sapiens
aaccgtggaggagctgccatgggcttttgttgtctacgggtttggggatgggacatccagaggggcctggcaggagtttaattaggattacagatgagggagacagaggaaagcaatggcaagagaagggggcaaacctgaacagaaggttccctccacccttctgctccctctcacttcaatgctggagtaataggatctgccaaatctcactttccccacctgggatggtgttggcaggtggtagggtcaaagagtaaagagaagcgagtctcatgtgggcattttcaattccatcacatacttttacttacatttgcatacaggtcagagtcaaaaatattctattttggtacctgatctgaaattatttgtaaataagacaattaaattcatttactccaaaaccatcacctcaacatctgaagaatgcccagcattgagccaagcactcatgtactaggaaaggtaggaagtggcccccgttctcaagggtccctgtcacacattagctaggaagtttggaggggtcatcaaactgaaactttccagaaacatctgtctgcattgagggtatattcaggrcagaagggttacaatcatgtctgcttcatttttacttgtatgtagtatactttttaagttgtttttcaaaaaagttagtatctaagtggacaaaattaataggagcaattataggagcataacctaggtagagctgcctaatggt

SEQ ID NO: 933136 - DNA, 632 bp, Homo sapiens
gatttgggtgggtgcacagccaaaccatatcattcttcccctggaccctcccaaatctcatgtcctcacatttcaaaatgatatgtctccgatgagtggaggaacacccggttcttcatcttcagtcaaattagataaaacaacatggatacacatggaatggttttgagaagtggagagtttaatatgcaagaaggaagtggggagaaagaaagaagcagatccctggtacacagacagagggagggggcctccaaagccaaaagagggaacttcaagtgccaaggataccagccagttttatgagtaggctggaggaggtggtgtctgatttgcatagggctcacgggattggtttcaccaggtatgtcgttcacatagcccgtgaaaaagctggccctcccaccctagcctgttgatatgcaaatgcagggcaccatgatgttctayacactggggatatgtgggggtggctatgctgctaggcatatgtgagggcaaggataagaggacaatggtggtgagaattgccatgtttgatggactcagtttctaatggctggcatttgcacatcaaagattgcctgccaggctctaaaagtgggggttttccttctagacaagaagcattt

SEQ ID NO: 933137 - DNA, 754 bp, Homo sapiens
tgattttgggtagatctgtgtttccgtctttgtgctgctatcttctcttgtgtatactgtcctgtgaaatctaggtgccttggtctccccagacttcagctttctctcctcaactcaaggagattgcctgagttctgccttcctatgctatgcctggaaactccctcagagcagtaagctatggtaattatagggctcatctcttttgtatcccgtctctgaaggatcactgcccttcattgactgatggctagtgtcttgaaaactgtagtttcatcaaatattcactataaatctaaattaaaattaattaaaattatgcaaaattgaaaattcatttcctcagccacactagccatatttcatgtgctcaattgctttttgtggctaggggttaccatattagacagtacagatctggagatgctcagaaattttactgtttcaccacagctctgttaatataggcrgacttcaaaaatcctgtactttaaggttaatgtatgatagcaactatcaagctacttaagctctccatctcaaagtacttccatttactcactgataaggtgggggtaataatagtgcctactatatatggttgtagtgagggtgaaataatacatacaaagtgctcgaacagtacttggtggtgagctctcgttaaacttgagtctatacattttaaagtaatagggtatagctttggctttttttccctcatgtgtatcgtctgccttatgcgttattgatg

SEQ ID NO: 933138 - DNA, 710 bp, Homo sapiens
acactattactgtcctcatttttcaaagggtcacttgcttggaattggcagaactggtcctggctacctggcttcctagtccacactcttgatcgtaccctgcactttactgtcactcctcaaactaggaaaggagaaggtcttcctggatgaagacagactgagcagtccctgccatctctgggagcaggaaccccatgtttaggacaggggactttgtaattggccttgcatttccccggtcccaggctcttgctcctctcctttggggcattttccaaacctgaagaatcctgaagctttctcagccttgtaataccattgagggcactgcaacttccatggttgcccctggccctggagtcccttagatctaggaatccttccctccttgatcctcaatggagagtccccttaacagattsctgctgatgctggtgtcccaagttgcagcatttgatttctttagccttaaataacttttcttaatgttgtcatgatgatgacaggaatatcagtgatgtcagaaatattctttttctagtacctccttggttgcaacaaagaaattcaaatctactttttctaatattttattttcattttcttttcattttatcttaattttattttttgtagagacagtatcttgctatgttgcctaggctggattcaaactcctgggcccaagtgatcctcctgcctcagcc

SEQ ID NO: 933139 - DNA, 700 bp, Homo sapiens
catggctggggaggcctcaggaaacttatgatcatgatggaaaaagcagcaaacacatccttcttcacatggtggtaggaagaagaagtgcagagcaaagtgggaaagccccttataaaactatcagatcttgtgagaactcactcactatcacaagaacagcatgggggaccacctccattatctaatcacctcccacaaggtccctctccaaacacatgggaattacaattcaagatgagatttgggtggggacatagagccggaccatatcattccacccctggcccctcccaggtttgaaatgtgtttctcacatttcaaaacacaaatatgccttcccaacagttccccaaagtcttaacttatttcagcatttgcccaaaagtccaagtccatattctyatctgagataatgtaagttccttccacctatgagcctgtacaatgaaaagcaagttagttacttcctagatacaatggaggtacaggtattggcttaatacacccattccaaagggagaaattagcaaaaacaaagaggctgcaggcccatgcaagttcgaaatccaatgaggcaataatcaaatcttaaagctccaaaataatctcctttgactccatgtctcacatccaggtcacacagatgcaagaggtggactcccatggccttggcaactctgcccctgtggcttttcag

SEQ ID NO: 933140 - DNA, 634 bp, Homo sapiens
ccaaaagcattgatctaatagccttttcaacaaatgatgctggaaaactggacacccacatgcaagaaactgaaactagtgagaggcctcccactcttcataaaaaattaactcaaattggatcctagatctcaatgtaaaatataaaattataaaactcctggaaggtaacacagaataaaatctagataaccttgagtatggtgatgactttttagataccacamtaaaagcatgatctgtgaaataagtaacagataagctggctttcattaaaattaaaaacttctgctctgtgaaagacaatgtctaaagaaagagaagacaagtcacaaactgggagaaaatatttgcaagagacacatctgataaaggaatgttattcaaaatatacaaagaacacttaaaactcagcaataaaaaagcaaacaacctgattaaaaaatggtccaaagactttaacagacaccccatcaaagaagatatacagatggcaaataagcacatacaaaaaggctctgcattatatgtcatcagggaaatgcaaattgaaatgacaatgagatgccactacatacctattagaatggcggaaatccaaaacactgataacaccaaatgctggtgaggatgt

SEQ ID NO: 933141 - DNA, 718 bp, Homo sapiens
atacctttactgtcctacctcagggatataccaactctcccgctttgtgtcataatattatttagagaggtcttcatcacttttcgcttccacaagatattacactggtcccttacattgatgacattattttgattggatccagtgaacgagaagtagcaaacacactggacttattggtgagacatttgcatgcagaggataggaaataaatctgactaaaattcagggaacttctaccttagtaaaatttctaggggtccagtggtgtggggcctgtcgagatattccttctaaggtaaaggataagttgctgcatttggccccttctacaaccaaggcagaggcacaacacctagtgggtctatttggattttggaggcaaygtgttcctcatttgggtgtgttactctgcctcatgtttcaagtgacctgaaaggctgccagttttgagtggggcccagaacgggagaaggctctgcaacagttccaggctgctgtgtaagctgttctgctctgccacttgggccatatgacccagcagatccaatggtgctggaggtcagtggcagataggaatgctgtttagagcctttggcaggctcccataggtgaatcacagtggaggcctctaggattttggaggatggccctatcaacttctgcagataactactctccttttgagatacagctcttggcctgttactaggctttg

SEQ ID NO: 933142 - DNA, 720 bp, Homo sapiens
ggcacaacacctagtgggtctatttggattttggaggcaacgtgttcctcatttgggtgtgttactctgcctcatgtttcaagtgacctgaaaggctgccagttttgagtggggcccagaacgggagaaggctctgcaacagttccaggctgctgtgtaagctgttctgctctgccacttgggccatatgacccagcagatccaatggtgctggaggtcagtggcagataggaatgctgtttagagcctttggcaggctcccataggtgaatcacagtggaggcctctaggattttggaggatggccctatcaacttctgcagataactactctccttttgagatacagctcttggcctgttactaggctttggtggaaactgaacatttgactacaggtcatcaagtcaccatgagacctgaattgcctatcatgaacttggtgcttgctgacccatctagccataaaatgggtcatgtacagcagcatttcatcatcaaatggaagtgatatatacgtgatcaagctcaagaaggytgtgaaggcacaagtaagttacatgaggaaatggctcaaatgcccgtggtctccactgctgccaccctgccttctcttccccagcccgcaccgatggcctcatggggagctccctatgatcagttgacagaggaagagaagaccagggccaggttcacagatggctctgtatgatatgcagg

SEQ ID NO: 933143 - DNA, 558 bp, Homo sapiens
agagccaaatcatgaatgaactcccatttggaattgctacagaaagaataaagtgcctaggaatacagctaacggagaaatgaaggaccacttcaaggagaactacaaaccactgctcaaagaaatcagagaggacacaaacaaatggaaaaatatctcatgctcatggagaggaataattaatatgatgaaaatggccatactgcccaaagtaatttatagattcaatgacatacccattaaactactgttgacattcttcacagaattagaaaaaagctattttaaaattcatttgaaaacaaaaaaggacctacgaatagccaagacaatyctaagcaaagagaacaaagctggaggcatcacactacccaacttcaaactatactacaaggctacattaatcaaaacagcatggtactggttcaagaacagtcacatagaccaatggaactgaatagagaactcagaaataagactgacaaataaaaccatctgagctttgacaaacctgacaaacctgagaaaaacaagcattagggaaatgattccctattc

SEQ ID NO: 933144 - DNA, 730 bp, Homo sapiens
agcttccctacactgtgcatcggatgttctacgaggccctggataagtatggggacctcatcgctttgggcttcaagcgccaggacaagtgggaacacatctcctactcccaatactacctgctcgcccgcagagccgccaagggcttcctgaaggtaagggggcccctcatggcaaggccttgcccctccccagatgtgcctcccagctctgggcctcacaggcctcctctccaactgcccactgggcaaggctcttaggaacaataactgtaaaagctgtcattgtgcgtggggctgatactccatgctgggccccgtactgagcttttatttgctgagcccctaccatgtgccaagcacttgttactcacttttcatttgtgatcacattcagggtgggctggaacgctcgctgctggcgtgaggggccggacagactcgctgggaargccctgggaggggcagtgagggctgttgagtgaccaaccccttctcctccaaggggattctctgactgaggggaccctgggagggtggagcctgcaggtcccctgcagtctgggtgggggctctgagaggggcatgagggtcccagtccctgcccggctgacctggcctgtctgcctttgacctggagctcggcctgaagcaggcccacagtgtggccatcctcggcttcaactccccggagtggttcttctcggcagtgggcacagtatttgcagggt

SEQ ID NO: 933145 - DNA, 604 bp, Homo sapiens
caggtcagggagggactgaagactggggaccaggctgccagtcccacagacctgagtgggagcttgtggtgcctcctccaggctcacccatggccgcccatggccagtcagcacacacttcctcccttctgaggtccataaaagccctgggctcagcaaactgcaggagaggatggagagacagcgggaagagtagctgtagaaaggagctaccctctctgccagagctgcagagacctgcagagcctttcaaaggacctgcggagaggaggcccccctcctccttgtagagacttccaaatgacctgrggagaggatccccagaacagcctccttctccaggagcaccccccgccaggatcccctagagcagtccccctctccagggttgggtcttctctctgctgagagcagcccccctctacagggtgaggtcttctttttgctgagagcagctcccctctccagggttgggtcttctttctgctgagagcagcaggtggcaggataaccagtgggcagagggggagctaccctctccaggcctcctgtctgctgagagctgaacactccatgggatgacttgctcagaggagctacccac

SEQ ID NO: 933146 - DNA, 594 bp, Homo sapiens
attcacagcaattgtgtttaatctgtagattaatatgaggagggcatcttaatactcttaatttatctaacctataaacttcagacatgtttttacttgcttaaataatctttaacataattcaataactttttagtttttcgtgtaaaaatcttgccctttagttacacttatattaagtattttattcaatttgttgctattgtaaaagaaagtatttccttaattttattttcatatagtgcattgctagtgtatacaaatacaattaatttttgyatattgatcttgtatcctgcaaccttgttaaacttattaattaattcaaatcatttgtatatgtttgtgtgtattccttataattttctatatgtaagatcacactatctgaaaacagatatttttctttcttctgaatctggaggccttttatttcattttcttgtctaattgcttttgctaaactgtccattacaatactaaatagaagtgataagagtggacttccttatcttcttcctgatctttgaggggaagaattaagtctctcaccattaagtataaagttagctatgggattatcacatatgactt

SEQ ID NO: 933147 - DNA, 663 bp, Homo sapiens
ggcgacccttgtgtggtagacccagggactccctccccggggagcacagagggcagcggtgtggccagagccgactcacatggtccatcatctgctgcaggccttggctgaaggggcgccgcccgatgcccatgaggccctcctgcgcctcagggaaggagatgggcccgatgccaggtgccatcccaaactgcttcaccatggagtaggcgatgcgggtgaccttcctcaggtcgtcctgtgcccctggagggcggggtcgagacagaggcatcctcagcactgcaggcgcagagcagtgctgggccccaggtgtcccggtcagagcactgaggcagcaccacctccatccccttcctcccgaggacccacygtgaagctggacagtgaggacgttggcacctcaccactgttccttaagagagtcttaaaactttccgaaatgctcttttatttggaaatctagaacccgggggcatactggagctcactgcatggcagttctcaagcacaagcccaggcctatgcgaggcaaacccatggacctggagcccaggggcccccgggaccctccttcagctctctggatatcccagtgcagtaatggcttcagaacaatgaagccgcttcaattttattccgtttcctgtagccattaccaac

SEQ ID NO: 933148 - DNA, 722 bp, Homo sapiens
actgagagatacccctttttctttttgagacaggatcttgaaggtctgtggcccaggctgaaatgctgtggcatgatcatggctcactgaagcctcaacttcctgggctcaaatgatcctcccacttcagccttccaagtagctgggaccaccagcacgcaccactgtgggcgrcaagtcacccaggtgccgaggcaagagaccgagggcacgagctgttccagtgtaataaaatatataaaataagaatagttatactagatctagatcacagacatgattatatatgaatatcattaattaatttgtagcaattactctttattccaatattataataatcctcgctctacaatcataacctaggaaaaaccaggtcatacagagacaggagctggggggacatggtgagaagtgaccagaagacaagagtgtgagccttttgttatgcccagacagggccaccagagggctccttggtctagcggtaacgccagcgtctggtaggacgcccgttgccaagcagaccatggtctagcagtagcgtcagtgtcaaggaaaaacacccactacttagcagaccaggaaagggagtctccctttccccaggggagtttagagaaaactctgctcctccacctcttgtggagggcctgacatcagtcaggcttgcccacagttatccagaggcctaatcgtctccctgtgatgctgtgcttcag

SEQ ID NO: 933149 - DNA, 728 bp, Homo sapiens
agtggccaatttgatcacctggaagaaagagtatcagtgactgaagatcaaatgaatgaaatgaagtgagaagagaagtttagagaaaaaagagtaaaaagaaatggacaaagcctccaagaaatatgggactatgtgaaaagaccaaatctatgtctaattggtgtacctgaaagtgacagggagaatggaaccaagttgggaaacactctgaaggatattatccaggagaacttccccaacctagcaaggcaggccaacattcaaattcaggaaatacagagaatgccacaaagatactcctcaagaagagcaactccaagacacgtaattgtcagattsaccaaagttgaaatgaaggaaaaaatgttaagggcagccagagagaaaggtcgagttaaccacaaagggaagcccatcagactaacagtggatctctcggcagaaactctacaagctagaagagagtgggggccaatactcaacattcttaaataaaagaattttcaacccagaatttcatatccagccaaactaagcttcataagtgaaggagaaataaaatcctttacagacaagcaaatgctgagagattttgtcaccaccaggcctgccctaaaagagctcctgaaggaagcgctaaacatggaaaggaacaaccggtaccagccactgcaaaaacatgccaaattataaagaccatcgatgccaagaagaaactgcatcaa

SEQ ID NO: 933150 - DNA, 629 bp, Homo sapiens
acatgtcacaggttaatgctataaaacggtggtttggaatcaagaacacaactggacatgctcaatgtgcatatggcaaaatgctacaagatgccattaatatattgaatgaaataatcagaaacccaatgacttctacatccaaaaaaaaaaaaaaaaagagccaactattaaaaggaagcatgaagtagggctctcagtaatgtcctaaaatgagatcttccagttttgggtcttagagaaatmcaagatccatatgcactcatggtgtaatatcgctaccacaaaactaatttaaactaggctttcaactaaagaaaacaaatgtccacaattaaggaagaaagagtctaccacccttgcaggagtcctgttaattagctacagttacgtcccttaaatgatttgaacaataacacccttctggtgtcatagcactttatctccttaaagtgtgatttccagccaagtacctagaattgaatgagagttctctgttaggaagagcaacacagaagaagaagctaccatgagcataaattcaacctggaggaagtctgatttgctgcattttttcgggggctacagttggtcttcaagcacctgggatgattgaattggttctgtga

SEQ ID NO: 933151 - DNA, 755 bp, Homo sapiens
cattttgatagttcttggcaatatttcaaactttatcataattattgtatctattacggtgatcagcaatctttgatgttactattgtagtagttttggggtgccatgaactgtgcccatgtgagatggtgaacttaattgatatgtgttgtgtatgttctgattactgctctgatcgtctctgcctgctcaggctgccctaggccctgagacacaacaatattgaaatcaggccaattaataaccctacaatgtcttctaaatgttcaagtgacacttggacgtctctcactttaaatcaaaagctagaaatgattaagcttagtgaggaaggcaggcgtgtcagaagctgagataggctgcacggtaggcctcttggaccaaacacttagccaagttgtgactgcaaaggaaaagttcttgaaattaagtgttactccagtgaacacaaatgattagaaagccttattgctgataggaaaaaaactttgctctaggtagaagatcaagccagccaaaatactcccttaagcccaggcttaatacagagcaaggccctctgttcaactctgtgaatgctgagagaggtgaggaagcagcagaakaaaagtttaaagctagcagagttcagctcatgaggtttaagggaagaagctgtctccataatataaaagtgcaaggtgaaacagcaagtgatgatgtagaatctgcagcaagttatccagaagtccagaagatatagctaagatgagttt

SEQ ID NO: 933152 - DNA, 489 bp, Homo sapiens
atgcatttttgattaaataggcaggcttgctaatatttgccgatctgaaggatgtaagatggtatctttgtgttttaatatacatttccctaattactgcagagatcgagtttctttttgtctgtttatatgtttcatatgtttattggtcatagaaatcattcctttgttcattttccttttggatggtttgtccttttctcattatttgtagtggttttttttttttttttatgggggggttctgggtttttttttttttttttttaaracggagtctctgttgcccaggctggagtgcagtggcatgatctcagctcactgcaacctctgcctcctgggttcaagcgattctcctgcctcagcttcccaagtagctgggactacaggtgcccatcatcaccccctgctaatttttgtatttttagtaaagatggtgtttcaccatattggccaggctggtctggaattcctgacctcaagtgatct

SEQ ID NO: 933153 - DNA, 731 bp, Homo sapiens
tgctgggcctatttgtaggttttaaaaatattttgaaaaataataataataataataaaagaaaagttttggatatcaattctttctcagttatatacattacaaatatctcttaatttgaagcttttcttctcatattatttatggttttccatgaaaatgtacaaaaggatttgcatttgatttatttttttatttttctttttttttttttgagacggagtttccctcttgttgcccaggctgcagtgcgtttattttgyttttttttttttttttttttgagacggagtttccctcttgttgcccaggctgcagtgcgatggcgcgatctcggctcaccgcaacctccacctcccaggttgaagcaattctcctgcctcagcctcccaaatagctgagattacaggcatgtgccaccacgcccgactaattttgtatttttagtagagatcaggtttcacatgttggtcaggctggtctcaaacctgtgacctcaggtgatctgcccacctcagcctcccaaagtgctgggattacaggtatgagccaccctgcccggcttctattttttttttttttcttttttttgagacggaacctcactctgtcacccaggctagacagctcagtgaggtgatcttggctcactgcaacctccgcctcctgggttcaagagattctcctgcctcagcctccggagtagctgggattacaggcccaaagcacca

SEQ ID NO: 933154 - DNA, 710 bp, Homo sapiens
taccacagcatgggtgggcgcctgggatgtggaaggaagctgaactgcttctagtccaggcttctcaggctgcattcacaggccagagctttttttttttttttttttttgagacagagtctctacctgtctcgcccaggctggagtgcaatggcgcagtcttggctcactgcagcctccgcttcctgggttcaagcgattctcctatctcagcttcccgagtagctgagactrcaggcatgtgccaccacgctcggctaattttgtatttttagtagagacggggtttcaccatgttggccaggctggtctcgaactccggacctcaggtgatccactggccttggcctctaaagtgccgagattacaggtgtgaggcaccgcacccagccctcccgcagttctgattggataacccagcccaggagtgccccggagccctccctctggccgtatgctgagctcagtgcctcacccccaccattttagtccccacccatccctgcagggtcagtcctactgtccccactgcacagatggggaaactgaggctcagaggggttggggaaatttgcccacagtttcagccaacaaaatggagaacaggatccagtccggccccaggccctgctctgctgacctctgttttatcttcccacccgggacccagaggatggggtgctcctcaggactcgccacagagcccgacc

SEQ ID NO: 933155 - DNA, 725 bp, Homo sapiens
aaaagagatcactgctgacccctcccccgctcccagccattcagggctcccagacaccaggctgagggccgaggccagcctgtgacaagttctcacctgtccaaggcaaaaggagataaaagaagacaacgcaaagaggttgttttgtaaagctgaaggtgttcaaaggactggtcttcattcttttttttctttcctttgtgtgtgtgtgtgtgtgtgtgtgagagagagagagagagagagagagasagtgtcctcaaaaaataaaacaatgctatctagtaactggccactgaaaatttttttgttgttttttgagacagggtctcactctgtcacccaggctggagtacagcagtgccatcgtggctcactacagccgtgacctcctgggttcaagcaatcctcccacctcaacctcccgagtagttggcactacaggtgtgtaccaacacacctgactaattttatttatttacttttttagtaaagatgaggtcttgttatgttgcccaggctggtctccaactcctggcctcaagcaatcttcctgcctcagcctcccaaagtactgggattacaggcataagccaccgcacctggcctgaatttttttttgagaaggagtttcactcttgtcgcccaggctggagtgcaatggcgcgatctcggctcactgcaacctccgcctcccaggttcaagtgattatcctgcctcagcctcc

SEQ ID NO: 933156 - DNA, 636 bp, Homo sapiens
atatttgttgcagctctgtttacaatagctaaaatttgtaagcaacctaactgtccatcaacacatgaattaatgatgaaaatgtggtacatacacacaatggagtagtattcagccataagaaagaacgaggctgggtgcagtggctcacgccagtaatctcagcactttgggaggccaaggtgrgcggatcatgaggtcaggagttcgagaccagcctgaccaacatggcgaaaccccatctctactaaaaatacaaaaattagctgggcgtggtggcaggcacctgtaatcccagctactcaggaggttgaggcatgagaatcagttgaacccgggaggcagaggttgcagtgagctgagattgcaccactgcactccagcctcactgacagagtgagactatgtcaaaaaaaaaaaaaaaaaaagagagagagagagaaaaagaatgagatgcagtcatttgcaacaacgtggatggaattggagatcattatgttaatgaaaataagccaggctcaaaaagacaaacatcacacgttctcactcatttgtgggatctaaaaatcaaaacaattgaactcatggacatagagagtagaaggatggttaccagaggctggaaagggtagtaga

SEQ ID NO: 933157 - DNA, 636 bp, Homo sapiens
atatttgttgcagctctgtttacaatagctaaaatttgtaagcaacctaactgtccatcaacacatgaattaatgatgaaaatgtggtacatacacacaatggagtagtattcagccataagaaagaacgaggctgggtgcagtggctcacgccagtaatctcagcactttgggaggccaaggtgggcggatcatgaggtcaggagttcgagaccagcctgaccaacatggcgaaaccccatctctactaaaaatacaaaaattagctgggcgtggtggcaggcacctgtaatcccagctactcaggaggttgaggcatgagaatcagttgaacccgggaggcagaggttgcagtgagctgagattgcaccactgcactccagcctcactgacagagtgagactatgtcaaaaaaaaaaaaaaaaaaagagagagagagaraaaaagaatgagatgcagtcatttgcaacaacgtggatggaattggagatcattatgttaatgaaaataagccaggctcaaaaagacaaacatcacacgttctcactcatttgtgggatctaaaaatcaaaacaattgaactcatggacatagagagtagaaggatggttaccagaggctggaaagggtagtaga

SEQ ID NO: 933158 - DNA, 581 bp, Homo sapiens
agcttcagcagacctaaacattgctgcctgccagctctgaagagagcagcagatctcccagcacagtgctccagctctgctaagggacagactgcctcctcaagtgggtccctgacccccgtgcctcctgactgggagacacctcccagcaggggtcaacagacacctcatacaggagagctctggctgtcatctggcagattcccctctgggatgaagcttccttagtaaggaacaggcagcaatatttgctgttctgyagcctctgctggtgatacccaggcaaacagggtctggagtggaactccaacacactccagcagacctgcagcagaggggcctgactattagaaagaaaactaacaaacagaaaggaatagcatcaatatcaacaaaaaggatgtccatataaaaatctcatctgaaggtcaccaacatcaaagaccaaaggtagataaatccacaaagatgagaaaaaaacagtgcaaaaaggctgaaaattccaaaaaccagtacagctcttctcctccaaaggatcacaactcctcatcagcaagggagcaaaactggacagagaatga

SEQ ID NO: 933159 - DNA, 584 bp, Homo sapiens
taaactaacctctgctagttttaaacttttcttctgcagcttccttacatctctcagccttcatagaactgatgatatttagggctttgatctggattaggctttggcttaagggaatgttgtggttagttttgtcttctatccagaccactaaaactttctccctatcagcaatatggctgtttaactttcttatcatttgtgtgttcagtggagtagcamctttaatttccctcaataactggttttttgcattcacaatgttactaacaattttactcacaattcttacacataaattttagtcataattttatatgtcatcaaatattatttttcattttaaaaaatcatttataaaagtaaatgatttggcacaagaggtctcacttttggcctatctcagtttttgacatggctttctcactaggtttaatcatttctagcttttgatttaaagtgagagatgtgtggctattctttttacttgaacacttagaagccattgtaaggttattaattggcctaatttcaatattgttgtgtcttaggaaatagggaggcctgaggcaagcaagagagat

SEQ ID NO: 933160 - DNA, 686 bp, Homo sapiens
acaagaatcacttgaacctgggaggcagaggttgcagtgagcggagattgcaccattgccctctagcctgggcaacagagtgagactctgtctcaaaaaaccaaaccaaacaaaacaaaacaaacaaacaaacaaaaaatgaaaatatacacctaacttttgggtccttatttaaatttcagataaacagcaaataatcattataacacagtaaacaggctgggcgtggtggctcacgcctgtaatctcagcacttagggaggctgaggtgggcagatcacttgaggcctggagttcaagaccagcctggccaacatgatgaaaccccatctctactaaaaatacaaaaattagtcaggcacggtggctcgtgcctgtaatcccagctacttgggagactgaggcaggataattgcttgaacctgagagacggaggatgcagtgagctgggatcacaccactgcactgtagccwgggtgacagagagagactctgtctcaaaacaaaaacaaaaacaaaaacaaaagatagtaaacatatttttcttgacttcttcatgtctacttttccaaacagattcttgtttatatgcagataacaaggagcttgctaaaatagaaaaacacaggtgaagaaatcaaaaaacaatgcagatgtcataactcatagaccaagacttgggatca

SEQ ID NO: 933161 - DNA, 789 bp, Homo sapiens
ttataaaggggagtttccctacgcaagctcttttgcctgctgccatgtaagagatgtgactttgctccccatttgccttctgccatgatttcgaggcctccccagccatgtggaactgtgagtcaattaaacctctttcctttataaattacccagccttaggtatgtctttattagcaacatgagaacagactaatacaacctgtatgccagaaaggctgggagcacctatggactctggcagataagtagctgggtttatggtytggcagactttaagggttatgtctggagtgtctagcaataaggcctgatactttaataaatgttcccctattatccactggtgccctttagcttctaggaccaccttcccttggtgtggggtcaaaaacctttaggggctattctaatgttagtttattagctttgcctactagaaaagttatggcagcaacagctctaagacatccaggccactctgaggccacctggtctatctgcttagaaaaggaggctactggccttggaatgttccccagttttgtgataagattacccaaggcctatgccttgctttttggccacataaggaaaaaatggttcatccaacttggagactcccaaggctgcagcagagcccaatttctctttgagagtattgaagatttgcttgcagttctaattacattcaagaatctctaaatctttcccttttagtgtatcatataaaggcttggctacgtgtgcagaagcagcaatacccagccatcccctagaaaggcccac

SEQ ID NO: 933162 - DNA, 554 bp, Homo sapiens
tgtctccttcgacctttaagtcaatgccgacaaaaaccagcaggtggcaacagcttggcttctttgagtttggaaatggccaagcagtttgtggtcaataaaaataaattctccccaactaattaattaattctccccaattaattaattttttttagacggagtctcgctgtgttgaccaggctggagtgcagtggcgccatctcggctcacggcaacctctgcctcctgggttcaagtgattctcctgcctcagcctcccaagtagcaggaattacaggcakgcaccactacgcctagctaatttttgcatttttagtagagacaggtttcatcatgttggccaggctggtttccaactcctgacctcaaatgatccacccgccttggcatcccaaagtgctgagattacaggcgtgacgactgcgccaggcctcattttatttttatatgccacttttaccaaaagataaacactgcctgaaaatctagaaaacatagccaccaccatgccactgatacaccaagctatggtattagaatgccttgtcagt

SEQ ID NO: 933163 - DNA, 554 bp, Homo sapiens
tgtctccttcgacctttaagtcaatgccgacaaaaaccagcaggtggcaacagcttggcttctttgagtttggaaatggccaagcagtttgtggtcaataaaaataaattctccccaactaattaattaattctccccaattaattaattttttttagacggagtctcgctgtgttgaccaggctggagtgcagtggcgccatctcggctcacggcaacctctgcctcctgggttcaagtgattctcctgcctcagcctcccaagtagcaggaattacaggcatgcaccactacgcctagctaatttttgyatttttagtagagacaggtttcatcatgttggccaggctggtttccaactcctgacctcaaatgatccacccgccttggcatcccaaagtgctgagattacaggcgtgacgactgcgccaggcctcattttatttttatatgccacttttaccaaaagataaacactgcctgaaaatctagaaaacatagccaccaccatgccactgatacaccaagctatggtattagaatgccttgtcagt

SEQ ID NO: 933164 - DNA, 627 bp, Homo sapiens
gcagttgacaggttttatccctacctaggtgaaaggcctaatgaagccttttaagaactttccattggccagtagccagcagatgaagcttgccatcctgattgtagtcgtcctgaggactgaaagatgtatccccaagaggtagcccattctatttccacaggggaatattgaggttttatttatctgatgggaccctccmagatcagtggggcttcaagtgggtcagaaatttgggcctctctcactgctgatttagctacttggtctgcctgcctattttcctcagctatttcatccatctctttttggtggcctttacaatgtattactgccacttcctgtgggaggaaaactgaggataatagtttattaatttcctgatggtatttaatgggagacccattagccatgaggaagtttgtctctttccagatagtggcatgggcatagaggactagcaaagcatacttagaatcagtataaatgctgtttttcctttgcttaatttgagcaccctcgtgagggtagttagttcagctactttagcacttgtgcccagggagagatgtgctgtgttagtccatttttcatgctgctgataaagacatacccgagactgggaag

SEQ ID NO: 933165 - DNA, 627 bp, Homo sapiens
gcagttgacaggttttatccctacctaggtgaaaggcctaatgaagccttttaagaactttccattggccagtagccagcagatgaagcttgccatcctgattgtagtcgtcctgaggactgaaagatgtatccccaagaggtagcccattctatttccacaggggaatattgaggttttatttatctgatgggaccctccaagatcagtggggcttcaagtgggtcagaaatttgggcctctctcactgctgatttagctacttggtctgcctgcctattttcctcagctatttcatccatctctttttggtggcctttacaatgtattactgccacttcctgtgggaggaaaactgaggataatagtttattaatttcctgatggtatttaatgggagacccattagccatgaggaagtttgtctctttccagatagtggcatgkgcatagaggactagcaaagcatacttagaatcagtataaatgctgtttttcctttgcttaatttgagcaccctcgtgagggtagttagttcagctactttagcacttgtgcccagggagagatgtgctgtgttagtccatttttcatgctgctgataaagacatacccgagactgggaag

SEQ ID NO: 933166 - DNA, 619 bp, Homo sapiens
tagagctcactgcagcttcgaactcctgggctcaagtgatcctcctgtctcacctcctgagtagctgagatgattgcaggtacatgccactatgcccaattaattagtttgcatttttcttataactagctatgtgcagcataatttcatgaactcagtagccatttctctattttcatttacaacaggtatattacagaattttgtgcagtttttaaattgaagtctgtcattttattattgatttgtcggagttagtatataatctagaaataaattmtttgtcagactaacattgtgagtatttaattccagtaggcagatgactttctattttaagagtatgttttaaataaaagattataagatgtcatatttatccactttttgttttatgtttaatatgctttgaattgtaagaaacatgtctccacccaaagtttataaagaagttctcttatgtttacttgcagaagctttataattttagtttatacatctgattctacaatccatattgaattaattgttctaaatgttacaggtaggcattgaaataatgtttattttatatgtggatagcaatttgtttcagcactgtaatttaaaatactatatc

SEQ ID NO: 933167 - DNA, 623 bp, Homo sapiens
  misc_feature 146: n = A,T,C or G
tggttatccagttgcaaagctgcttccactatttcaggcctttttatagtaatgctcccctcctggtaccaattttctgtattagccgttcttgcattgctgtaagggaatacctgagagtgggtaacttataaagaaaagaggtntaactggttcatgatgctatagacatggcagtgtgtccggaattggtgggttcttggtctcactgacttcaagaatgaagccgcggaccttcrcggtgagtgttatagctcttaaggtggcgcgtctggagttgttccttcctcctggtgggttcgcggtcttgctggcttcaggagtgaagctgcagaccttcgtggtgagtgttacagctcataaaagcagtgtggacccaaagagtgagcagtagcaagatttattgcaaagggcgaaagaacaaagcttccacagcgtggaaggcgaccccagcgagttgccactgctggctccgacagcctgcttttattctcttatctggcctcacccacatcctgctgattggtagagccgagtggtctgttttgacagggcgctgattggtgcgtttacaatccctgagctagacacaaaggttctccaagtccccaccagactcggga

SEQ ID NO: 933168 - DNA, 623 bp, Homo sapiens
  misc_feature 146: n = A,T,C or G
tggttatccagttgcaaagctgcttccactatttcaggcctttttatagtaatgctcccctcctggtaccaattttctgtattagccgttcttgcattgctgtaagggaatacctgagagtgggtaacttataaagaaaagaggtntaactggttcatgatgctatagacatggcagtgtgtccggaattggtgggttcttggtctcactgacttcaagaatgaagccgcggaccttcgcggtgagtgttatagctcttaaggtggcgcgtctggagttgttccttcctcctggtgggttcgcggtcttgctggcttcaggagtgaagctgcagaccttcgtggtgagtgttacagctcataaaagcagtgtggacccaaagagtgagcagtagcaagatttattgcaaagggcgaaagaacaaagcttccacagcgtggaaggcgaccccagcgagttgccactgctggctccgrcagcctgcttttattctcttatctggcctcacccacatcctgctgattggtagagccgagtggtctgttttgacagggcgctgattggtgcgtttacaatccctgagctagacacaaaggttctccaagtccccaccagactcggga

SEQ ID NO: 933169 - DNA, 580 bp, Homo sapiens
agtttggtagtatctgcacttctaggcatccactagcgtcttggcatctatcccctgcaggtaagtgggtctactctagcagcaattaataattgaaaaataaaaaatttaaaagatcatttaaaataacatcaaaaccataaagtatttagggataaattaaaccataaaacccttgagttttttggtttgagagaaattgcagagagaaattaaggaaactaaactcaaatagagtgatagatcwtggttatggactgaaagattcactgatttgaagaagtcagtttttcctaagttgatccatagatttaatgtaatcctattaaaatcccaacagtcttttaaaaaataaaagacacaggcaagttgactctaaaatttaaatggaaatataaagtacttaggatagccaaaacaattttgtaaaacaaggataaaatgagaggacttacatcacctgatttcaagccttctaaaatgtattttatttaatccaacatatttgagacattatcattttcaacatgtaatcaataacacagttatgaacgagacatttttacatttttttatttcc

SEQ ID NO: 933170 - DNA, 580 bp, Homo sapiens
agtttggtagtatctgcacttctaggcatccactagcgtcttggcatctatcccctgcaggtaagtgggtctactctagcagcaattaataattgaaaaataaaaaatttaaaagatcatttaaaataacatcaaaaccataaagtatttagggataaattaaaccataaaacccttgagttttttggtttgagagaaattgcagagagaaattaaggaaactaaactcaaatagagtgatagatcttggttatggactgaaagattcactgatttgaagaagtcagtttttcctaarttgatccatagatttaatgtaatcctattaaaatcccaacagtcttttaaaaaataaaagacacaggcaagttgactctaaaatttaaatggaaatataaagtacttaggatagccaaaacaattttgtaaaacaaggataaaatgagaggacttacatcacctgatttcaagccttctaaaatgtattttatttaatccaacatatttgagacattatcattttcaacatgtaatcaataacacagttatgaacgagacatttttacatttttttatttcc

SEQ ID NO: 933171 - DNA, 555 bp, Homo sapiens
aactactgatacacacgacactgtggctgaatctcaaatggttatgctaaatgtaagaaactagactcaaaagcgtacatactgagtgattctacttacatgacattctggagaagacaagatgatagagactgaaaacagataagtgcttgtggggaacagaggttggggcagggactgactacagtrgaacatcaagggagaattttgggggccaatagaaatgttctaaaacttggtcgtggtggtggtcaggagacattttccaaagctcattgacatgctcaccacaaagagtaaattttactatatttaaatttttatttatttttattttttattttttgagatggagtctcactctgtcacccagactggagtgatgtggcacggtcttgactcactgcaacctccgcctcctgggttcaagcgattctccggcctcagcctccaaagtagctgggattacaggtgcctgccaccacacccccctaatttttgtattttcagtagagatggggttttgccatgcctctgttggccagattggtctcg

SEQ ID NO: 933172 - DNA, 638 bp, Homo sapiens
  misc_feature 586, 591, 592, 593, 597: n = A,T,C or G
cgcagagtgggtttgttgaggaaggtttgtttggggtttgtaagcagccgagggtcatttggaattcaagctggggatggaggtgaaggggttccagggtggctgaggcagagctgaagcagcccctaaagaccgcaagccctactcctcccgcagccccacatatactcccattttatgcatgaggagattgaggccggttttgcccaaggtcatccagccagtcagaggtggaggtagatctaggagttgaactcagggcccctctgaggcaccagcggtgccgctgcggggagggtggcatactagaatgttcctcacacttcattaccatgctggtgtcttcttctaggggtagatgggcaaggaagagagtgggatggccagcagtgagttgacacagtgggactgagaggtgccgagggcttggagccctagatgaggccccagccagccggaggcttcctgggggcagcagtcttgragggcttgtaggacttggcctgcagacagggattaggaagagggcattcctggaggatggtgataaaaaggctcagaggtgggaattggctctgctactttnttctnnnaatnggaggcggggaggctggagagggcgtgggtgcgtgggttgt

SEQ ID NO: 933173 - DNA, 608 bp, Homo sapiens
taagttttacttttacttattttttgatttacttattttttattacttagtttgattctactttgcttatccaattttgcaccatacacacatatcacttaggtaataataaaagatttcaatgtaaaaactgaatgttgaaagtaaaacaaatgaattaaagataattgctacaagaatacaaataaaatttaaaatctccaaattggagattgtggagagagtgagcagtaatgaaaaatggatcaatagaaaaaaggaaagatggacgatcagaagaagtataaagaaaatgggataaataggaagtataaattatatactagaattaagtttaattatatattttttcaggtgtacctctgattgaaaagtttaattatattagtagtcacaacaaatataaatagactaaattcatctttaataaaaagagaacctgctatgtatagtatacaayagagacacattagaaacaacgatacagtaaatttgaaaacaagcaaattggccaggcacagtggctcaactctgtaatcccagcactttgggaagctgaggcaggtggatcacttgaggccagaagttcgagaccagtctggccaaca

SEQ ID NO: 933174 - DNA, 509 bp, Homo sapiens
ggaaccacgataaggagtagtggcccaaggcaggaaagcccgtcccatagggatgaaggggactgaccattaatccaacccagagtggctgggggcagcaggagtggcctgccaatttgattgaacctcgtgtccccactaacaaagtgaaaatggttcacagaatctggagacaggaactgggggtgtgtgggtgcatgtgaacctacctgggacatgagagaggctcatttcatccgatgaggagtcctggggtaggagtgatgggtttatgtgtgtgaatgtgggagcctaactaggctcacccaggacacaagagaggttcatttcatccartgaggagtcctggggcaggggaggtgtgtgaaagtgtgtgaaagagatggtctcaggagaggccaacatggggactgatgtggggaggcacagatcccttagtgcaggctgtgtgctctgaggcgagtgtaggcaaaatcaaacctaggatgttgcatacggctgataggatc

SEQ ID NO: 933175 - DNA, 779 bp, Homo sapiens
cccactgcttggagtggacataatgggggaatattggcactctttgactcattgtttacccctttgtatatctccttttggaccattagggttgaaggggtgtccttattagttggggaaggagtcggggggacactggggtagggagatagactctgagggcttcctgtagggctttttacataattgtactttttacataatcacaagttgtcccttaatgaaaagaaagtttgcacatatggcacttcactccatttgccttcctttttacaaaagaggtctagctgtaagatggtgttatagtttatacttccctcaggaggccaggttttttccccttgaagaggatatcatggtgaggttgtactgcagaagaatataagtcatttctttcttagtgtctgagggtcaattggccccaattctccagaatatatcttagggacatttttgccttggggggaacatttcccatctgaaaaaagaacatagggatgccagcacccctggtcattttccaataagcattagtcatagagcggcctctatgttcytaatgcttattcctttccagggtgcataaccacccataggcctctgcttatcagattagttatgttcactgatgtagcagtcctgcacctcttttcccacctctcttgaccacaaagaaaggggtccaggctgctggattctagtggtcctttaccaaattgcccaacattgtttttgtgctcaggggtgagtactagacctgggctgggttcctaagtatt

SEQ ID NO: 933176 - DNA, 779 bp, Homo sapiens
cccactgcttggagtggacataatgggggaatattggcactctttgactcattgtttacccctttgtatatctccttttggaccattagggttgaaggggtgtccttattagttggggaaggagtcggggggacactggggtagggagatagactctgagggcttcctgtagggctttttacataattgtactttttacataatcacaagttgtcccttaatgaaaagaaagtttgcacatatggcacttcactccatttgccttcctttttacaaaagaggtctagctgtaagatggtgttatagtttatacttccctcaggaggccaggttttttccccttgaagaggatatcatggtgaggttgtactgcagaagaatataagtcatttctttcttagtgtctgagggtcaattggccccaattctccagaatatatcttagggacatttttgccttggggggaacatttcccatctgaaaaaagaacatagggatgccagcacccctggtcattttccaataagcattagtcatagagcggcctctatgttcttaatgcttattcctttccagggtgcataaccacccatrggcctctgcttatcagattagttatgttcactgatgtagcagtcctgcacctcttttcccacctctcttgaccacaaagaaaggggtccaggctgctggattctagtggtcctttaccaaattgcccaacattgtttttgtgctcaggggtgagtactagacctgggctgggttcctaagtatt

SEQ ID NO: 933177 - DNA, 626 bp, Homo sapiens
tatagattgaatgcacttgggccatcagtcggtctctgggttaaggatttttgataagaaggctacgggtggtcagtggtctcagtgttttcaggctacgcccttgtttacagtgacaacagggtagtattggagtgttatagggtcatggataagaccttcatttctcaactataggtttttaatttaccctggcttttaaaggaakagggcacactttttttttctacttctatctttctctttctttctctctttgactccctctttgtctctctgcctctctttcctctctcctctctgtctgtctctctttctctgtctgtttctctctctgtctctctctctctctctgtgtgtgtgtctctctctctctgtctctcttctcttagccatttacaaagttggggcccttgccagggtggtagggaacaggtcccacataactgcccatgttgaaagctgtatacctaaatcaggaggggcaccagggacaagactccctgggtttatagcctagatacctaaggatgcagcatagagtttccttagatccctttggagatacaacttgctagaggaaatgaaaatctgaaccattagtacctaggaggcagagatcagag

SEQ ID NO: 933178 - DNA, 626 bp, Homo sapiens
tatagattgaatgcacttgggccatcagtcggtctctgggttaaggatttttgataagaaggctacgggtggtcagtggtctcagtgttttcaggctacgcccttgtttacagtgacaacagggtagtattggagtgttatagggtcatggataagaccttcatttctcaactataggtttttaatttaccctggcttttaaaggaagagggcacactttttttttctacttctatctttctctttctttctctctttgactccctctttgtctctctgcctctctttcctctctcctctctgtctgtctctctytctctgtctgtttctctctctgtctctctctctctctctgtgtgtgtgtctctctctctctgtctctcttctcttagccatttacaaagttggggcccttgccagggtggtagggaacaggtcccacataactgcccatgttgaaagctgtatacctaaatcaggaggggcaccagggacaagactccctgggtttatagcctagatacctaaggatgcagcatagagtttccttagatccctttggagatacaacttgctagaggaaatgaaaatctgaaccattagtacctaggaggcagagatcagag

SEQ ID NO: 933179 - DNA, 763 bp, Homo sapiens
ctgatttttgtacatgtattttgtatcctgaaactttgctgaagttgtttttcagtctaaagagcttttgcaccaagactatagggttttctagatatagaatcatgtcatctgcaaacagggttagtttcctttcctctcttcctgttgggatgcctgttatttatttctcttgcctgattgctctagccaggacttccaattctatgttgaataaaagtagtgagagaagtcatccttttcttgtgccagtttttaagaagaaatgcttccagcttgcgtccattcagcaggttggctgttgatttgtcacagatatcttactattttgaagtatgtaccttcaatgcctggtttgtttagggttytaaacatgaagaatgttacattttattgaaagctttatctacgtctattgagataatcttgtgttttttgtctttagttctgtttatgtgatgaatcacatttattgacttgtgtatgttgaacccaccttgcatcccagggataaagcctacttgatcatagcagattagcttgttgatgtgctgctggattcaattttacagtatttcattgaggatttttgcatcagtgttcatgaagaatttttgcctgagttttcttttttttgttttatgtttgccaggttttggtatcagaatgatgctgttactatataatgagcaggggaagagtttcttctcaatttttttagtagttttagaaagtataataccagcttttctttgtacatcta

SEQ ID NO: 933180 - DNA, 594 bp, Homo sapiens
ccagtgtcaatattagacagataacaagaccgaaaattagcaaggatattcaggacttcaactcagctctggaccaaacgaacctaatagacatctccagaactctccaccccaaatcaacagaatatacattcttctcagtgccacatagcacttattctgaaatcaaccacataattggaagtaaaacactcctcagcaaatgcaaaagaactgaaatcataacaaacagtctatcagatgacagtgcaatcaaattagaactcaggattaagaaattcactccaaactgcacaactacatggaaattgaacaatctgctrctgaatgactactgggtaaataataaaattaaggcagaaatacgagtgcctgcgattgcaggcacgcgccgtgcctgactggttttcgtattttttttggtggatacggggtttcgctgtgttggctgggctggtctccagctcctaaccgcgagtgatccaccagcctcagccccccgaggtgccgggattgcagacggagtctcgttcactcagtgctcaatggtgcccaggctggagtgcagtggcatgatctcggctcgctacaacc

SEQ ID NO: 933181 - DNA, 594 bp, Homo sapiens
ccagtgtcaatattagacagataacaagaccgaaaattagcaaggatattcaggacttcaactcagctctggaccaaacgaacctaatagacatctccagaactctccaccccaaatcaacagaatatacattcttctcagtgccacatagcacttattctgaaatcaaccacataattggaagtaaaacactcctcagcaaatgcaaaagaactgaaatcataacaaacagtctatcagatgacagtgcaatcaaattagaactcaggattaagaaattcactccaaactgcacaactacatggaaattgaacaatctgctgctgaatgactactgggtaaataayaaaattaaggcagaaatacgagtgcctgcgattgcaggcacgcgccgtgcctgactggttttcgtattttttttggtggatacggggtttcgctgtgttggctgggctggtctccagctcctaaccgcgagtgatccaccagcctcagccccccgaggtgccgggattgcagacggagtctcgttcactcagtgctcaatggtgcccaggctggagtgcagtggcatgatctcggctcgctacaacc

SEQ ID NO: 933182 - DNA, 657 bp, Homo sapiens
ttccagagttgccatattatgttctttaaaatgtccaatttttaacaaaaaattacaagacatgcaaacaaactataggccatacatggtggtgtgggggtggcagggtaggaacatggaaacagtcaataaaaactgtccctaaggaagccctgacattgaacctactagacaaagactttaaattagctattttraatatattcaaaaaactaaaaaaaaagtgtgagaacaaatggcttgccaaatagagaatatcgagagagattaaaattatttttaaaaaagaaccaaatataaattctggagttgaaaagtacaataatagcagattagagcttgcaggaaaatcagcaaacttgaagacaggtcataagattatctagtctgagagacagaaaggaaaaacaatgaggaagagtgaacagagcctcagagacctgagggacaccatcaagtgtagcagttgacagacaccactggtctccctctctatcctttccctccctccctgatacttctgtcaccctgcaaaaaaaacaaaaaacaaaaaacaaaaaaaacaaaaacaaaaaaaaacactcctgacctaattgcttttaatcaagtttgctcattttcaacacaaccctgaggataagattctatttcagagat

SEQ ID NO: 933183 - DNA, 657 bp, Homo sapiens
ttccagagttgccatattatgttctttaaaatgtccaatttttaacaaaaaattacaagacatgcaaacaaactataggccatacatggtggtgtgggggtggcagggtaggaacatggaaacagtcaataaaaactgtccctaaggaagccctgacattgaacctactagacaaagactttaaattagctattttgaatatattcaaaaaactaaaaaaaaagtgtgaraacaaatggcttgccaaatagagaatatcgagagagattaaaattatttttaaaaaagaaccaaatataaattctggagttgaaaagtacaataatagcagattagagcttgcaggaaaatcagcaaacttgaagacaggtcataagattatctagtctgagagacagaaaggaaaaacaatgaggaagagtgaacagagcctcagagacctgagggacaccatcaagtgtagcagttgacagacaccactggtctccctctctatcctttccctccctccctgatacttctgtcaccctgcaaaaaaaacaaaaaacaaaaaacaaaaaaaacaaaaacaaaaaaaaacactcctgacctaattgcttttaatcaagtttgctcattttcaacacaaccctgaggataagattctatttcagagat

SEQ ID NO: 933184 - DNA, 632 bp, Homo sapiens
gttggttgttggtctaaagcatgacgaagcaaatatgcaagaaaacaataacagaatcagaggggctacaatcagagtgactcaagtctgctgcaatactgtcaaaggttttttgaaggtactttaaaccctaatttaagatacatatttaaagtacatagaaagttaactaatacagagtaagcatctaatatctagtcaatactggtagcagcagaaacagaggcactgtcaatctaagagcatcccaaataagccctatcatgtaagataaggaaaatattattatttttattattattttattattatagtttaagttctggggtacatgtgcagaacgtgcagttttgttacataggcatacacrtgccatagtggtttgctgtacccatcaacccatcgcctacattaggtgtttctcctaatgctatccctctcctagccccccaccccacaacaggccctggtgtgggatgttgccctccctgtgtccatgtgctctccttcttcaactcccacttatgagtgagaacatgcggtgtttggttttctgttcttgtgctagtttgctgagaataatggcttccagcttcatccatgtcccggcaaaagacgtgaactcatacttt

SEQ ID NO: 933185 - DNA, 731 bp, Homo sapiens
gcagtggcagccttgacctcctgggctcgagtgatcctcctgcctcagccccccaagtagctgggactacaggtgtgtaccaccacactggctaatttttgtattgtttatagagatgaagtttcaccatgctgcgcaggctggtcttgaactcctgggttcaagtgactcacccgccttggccttccaaaatgctgggattacaggtgtgaaccaccacacgcagctccaaatcattttttaatggctttattgagaagtaattcacacaccatacaattcttcaaagtgtacaatttaatgattttagtatattcatagagtcgtgcaaacatcaccrtagtctaattttagaacatttttatcaccccaaaaagaaacccataccaattagaagtcagtccctatccctggactccctgagaccccagccctaggcaaccactaatatttctgtctttcgagatctgggtgttttgtgtaaaaggaatcatacaatgtgtagtcttttgtgactgactgctttaacttaggataatgtactgaagattcttccatgctatagcatgtttcagtacttcattctttttattactgaatgaaatttcatcctgtggtatatttattttgtagggctgtggtcaaagtaacacaaactgctgacttaaaacaacagaggtttattctctcgcagttaaggaagctagaagttcaaaattaaggtgtcagca

SEQ ID NO: 933186 - DNA, 873 bp, Homo sapiens
atccctggactccctgagaccccagccctaggcaaccactaatatttctgtctttcgagatctgggtgttttgtgtaaaaggaatcatacaatgtgtagtcttttgtgactgactgctttaacttaggataatgtactgaagattcttccatgctatagcatgtttcagtacttcattctttttattactgaatgaaatttcatcctgtggtatatttattttgtagggctgtggtcaaagtaacacaaactgctgacttaaaacaacagaggtttattctctcgcagttaaggaagctagaagttcaaaattaaggtgtcagcagggttgtgctcttcctgaaggctctaggggagaatcctaccttgcctcttctagttcctggtggttgttggcaatccatggcatttcttggtttgcagttgcacaacttcagtttctgcctccgtcttcaaatggtcaccttccctgtgtgtctgtctgcacattggattcgctcagcgtaagcctgtttcttctcctcctcctgtaaggacacaagtcatagttgattaagggcgcaccctacttcagtatgacctcatgttaacttgattacatctgcgaagaccctattttcaaataaggtcacattcacaggtcctgggggttagaccttcaacatatctttttggggaatacgattcaactcataacatayggatatgctacattttatttatctgttcatcaactaattgacatttgagttgtttccacttttgggctattatgaatagctatgaactttagtacggacatgtgttttcatttcccttgggtatatacctgccagtggcattgctaggttatataactgccagactgtgttc

SEQ ID NO: 933187 - DNA, 602 bp, Homo sapiens
atctttgaaggcacaaagagttagtattcacagaggatagctatcttatctctcctctctggagggttcagaaaatgtttgatctcatcctggggaaagccagatgataacgttcaatggagcaaagaaaaggtgcacacaaattgaggtgtcttacaaaacaaatggaagtttcatatcctgctacaaagggccagaggaatrtttcccataaaagcattgttgcgagggatgaatgagataaggatgtagacctctgagtatgataaatggttagttcttcctattagttgttgtttctgatgtagaaacagcgtctttctccctatatctggtctaaaatccaacctgataggagacgttttcgtttgggattatggaaagatacaacagttctgggggttgagttcagggctaattttctgaaggataagagagcaagccccagccaagagccaagagaaagcaatgatgaggaagcgggcagtagcagccatttagactggttgctttgtgggactcccttctatttgtacattattaggctttccaacaggggacaataaacagtatgaatccagacaggatgagggtgggttgca

SEQ ID NO: 933188 - DNA, 620 bp, Homo sapiens
aattcattctatgaggccagcatcatcttgataccaaaacctggcagagacacaacaaaaaaagaaatcttcaggccaatatccttgatgaacatagatgcaaaaatcctcaacaaaatacttgcaaactgaattcagcagcacatcaaaaagctaatccaccgtgatcaagtaggcttcatccccaggatgcaaggttggttcaacataaatgtgattcatcatataaacagaactaaagacaaaaaccacatgattatttcagtgacacagaaaagtcttttgataaaattcaacactgcttcaagttaaaaaaactctcaataaactaggtattaaaggaacatacctcaaaataataagagccatctatgasaaacccacagccaacattatacttaatggacaaaagctggaagcattccccttgaaaaccagcacaagacaaggatgccctgtctcaccacttctattcaacatagtattggaagtcctagccagagcaattaggcaagagaaagaaataaatcacatccaaatagaaaagaggaagccaaattatctttgtttgcagatgacgtgattctgtaactaaaaaaccccatagtctcggcccaaaa

SEQ ID NO: 933189 - DNA, 646 bp, Homo sapiens
taccccatatgggacagatagcattccaaaaattttctacagccaaggcaaagtggagcttaaggtgccatccgatcccaaaaaaggatgtagtaatttagcagaaaggaaatccaacaggtaaattgcaaagaacctctaagtaaatatgtccaagaaaaacaaaacaagccagatagagaagactggaataaataactaattattcaatatgaagatatgcccacaagaaacagcagcaggcaggcaaccakgacctccccaaatggacaaagcaagaagccagtgaccgaccctaatgagatagctataggacattggtctgagcaaagattttttgggggagtaaacctcaaaagcacagacaacaaaaggaaaaatagacaaatgagataacattaagctaaacaacttctgaacagcaaagaaaaccatcacaaagtgaagagacaacttacagaatatgagaaaatatttgcaaactattcatctgacaagggattaataaccagaatatataaggaattcaaacacatatcaaaaaaatggtctgacttaaaaacaagcaaaacgatctgaatagacatttttcaaaagaagatatataaatggccaagaggtatatggaaaaaaaaaaaggacagca

SEQ ID NO: 933190 - DNA, 622 bp, Homo sapiens
tcctctccagcaagggcacaaacctggatggagaatgagattgacgaattgacagaagtaggactcagaagatgggtaataacaagctcctctgagctaaaggagcatgttctaccccaatgcaaggaagctaagaaccttgataaaaggttacaggaactgctaactaaaataaccagtttagagaagaacataaatgaccagatggagctgaaaaacacagcacaagaacttcgygaggcatatacaagtatcaatagctcaatcaatcgagtggaagaaaggatatcagggattgaagatcaacttaatgaaataaggtgtgaagataagattagagaaaaacagaaagaaaagaaacaaacaaagcctccaagaaatatggaactatgtgaaaagaccaaacctacgttagattggtgtacctgaaagtgacaaggagaatggaatcaagctggaaaacacacctcaggatattatccaggagaacttctccaacatagcaagacaggccaacattcaaattcaggaaatacagagaacaccactaagatactccttgagaagagcaaccccatgacacataatcatcagattctccaaggttaaaacaaaggaaaaa

SEQ ID NO: 933191 - DNA, 639 bp, Homo sapiens
gactcttctccaaatgattgcaactcctctccagcaagggcacaaacctggatggagaatgagattgacgaattgacagaagtaggactcagaagatgggtaataacaagctcctctgagctaaaggagcatgttctaccccaatgcaaggaagctaagaaccttgataaaaggttacaggaactgctaactaaaataaccagtttagagaagaacataaatgaccagatggagctgaaaaacacagcacaagaacttcgtgaggcatatacaagtatcaatagctcaatcaatcgagtggaagaaaggatatcagggattgaagatcaacttaatgaaataargtgtgaagataagattagagaaaaacagaaagaaaagaaacaaacaaagcctccaagaaatatggaactatgtgaaaagaccaaacctacgttagattggtgtacctgaaagtgacaaggagaatggaatcaagctggaaaacacacctcaggatattatccaggagaacttctccaacatagcaagacaggccaacattcaaattcaggaaatacagagaacaccactaagatactccttgagaagagcaaccccatgacacataatcatcagattctccaaggttaaaacaaa

SEQ ID NO: 933192 - DNA, 639 bp, Homo sapiens
gactcttctccaaatgattgcaactcctctccagcaagggcacaaacctggatggagaatgagattgacgaattgacagaagtaggactcagaagatgggtaataacaagctcctctgagctaaaggagcatgttctaccccaatgcaaggaagctaagaaccttgataaaaggttacaggaactgctaactaaaataaccagtttagagaagaacataaatgaccagatggagctgaaaaacacagcacaagaacttcgtgaggcatatacaagtatcaatagctcaatcaatcgagtggaagaaaggatatcagggattgaagatcaacttaatgaaataaggtgtgaagataagattagagaaaaamagaaagaaaagaaacaaacaaagcctccaagaaatatggaactatgtgaaaagaccaaacctacgttagattggtgtacctgaaagtgacaaggagaatggaatcaagctggaaaacacacctcaggatattatccaggagaacttctccaacatagcaagacaggccaacattcaaattcaggaaatacagagaacaccactaagatactccttgagaagagcaaccccatgacacataatcatcagattctccaaggttaaaacaaa

SEQ ID NO: 933193 - DNA, 816 bp, Homo sapiens
aagactcaaataaatagaacagaaccagagaagactctagatttgctgatttttccaactcagcattaacctactggtgttattgtctaagagcaggacttagtagaatggctttttcttccacatactaattcatggactctaactccttatttaratcaaatcgctactatgataggaaatgggagaacttggattgttaatttacatggatatgatcctggaaaaattgtcgtccctctcacgaaggcacaaatacagcaagcctttataaatagtcttacttggcaaacccatttagctgatttcacgggtgttcttgaaaatcactttccgaaaacaaaattatttcaatttttgaaattaactaattggattctccctaaaattaaatttaaaccaattgaaggtgctgaaaatgtttttacagatgggtctagtaatggtaaatcttcttattctggcttgaaaggtaaggtttttcagactccctatacttcagctcaaaaagccgagcttgtagctgtaattgaggtattgactgcttttattatgcctattaatgtgatttctgattcttcatatgtggttcattccacacaattaattgaaaatgctcagttatgatttgatacagatgaacaactgatgactttatttacccaattgcaaacagcagttaggactagaatgcactctttttaatatcactcacattagggctcatacacctcttccaggacctttaactgaagggaatcaaatggctgatcacctagttgctactgcaatatctaatgccagacactttcacaa

SEQ ID NO: 933194 - DNA, 792 bp, Homo sapiens
  misc_feature 786, 787, 788, 789, 790, 791, 792: n = A,T,C or G
ttcatatgtggttcattccacacaattaattgaaaatgctcagttatgatttgatacagatgaacaactgatgactttatttacccaattgcaaacagcagttaggactagaatgcactctttttaatatcactcacattagggctcatacacctcttccaggacctttaactgaagggaatcaaatggctgatcacctagttgctactgcaatatctaatgccagacactttcacaatttaacccatattaatgcctctggtctcaaacgcagatacagcattacctggaaagaagctaaagctattatccagygatgcccaacttgccaaatggtgcgttccttatcttttacaggaggagttaatcctcgaggactggaacctaattctctttggcaaatggatgtcacacatgttccctcgtttgggagactagcttatgtacatgtatgtgtggacaccttttctcattttgtctgggctacatgccaatcaggagagtcttctgtctgtgttaagtgtcaccttttgcagtgatgggcattccagcttctattaaacagataatgccccaggctacactagccaagctctaggtacatttttctctatatggaatattaaacacattactggcatcccatataattctcaaggacaagccacagtagaaagaatgaatctctcccataaaatgacaattgcaaaagcagaaagggggaaactaggaccatggacaccacatatacaattgaatctaacattattgatgaacaacaagtcnnnnnnn

SEQ ID NO: 933195 - DNA, 792 bp, Homo sapiens
  misc_feature 786, 787, 788, 789, 790, 791, 792: n = A,T,C or G
ttcatatgtggttcattccacacaattaattgaaaatgctcagttatgatttgatacagatgaacaactgatgactttatttacccaattgcaaacagcagttaggactagaatgcactctttttaatatcactcacattagggctcatacacctcttccaggacctttaactgaagggaatcaaatggctgatcacctagttgctactgcaatatctaatgccagacactttcacaatttaacccatattaatgcctctggtctcaaacgcagatacagcattacctggaaagaagctaaagctattatccagcgatgcccaacttgccaaatggtgcgttccttatcttttacaggaggagttaatcctcgaggactggaacctaattctctttggcaaatggatgtcacacatgttccctcgtttgggagactagcttatgtacatgtaygtgtggacaccttttctcattttgtctgggctacatgccaatcaggagagtcttctgtctgtgttaagtgtcaccttttgcagtgatgggcattccagcttctattaaacagataatgccccaggctacactagccaagctctaggtacatttttctctatatggaatattaaacacattactggcatcccatataattctcaaggacaagccacagtagaaagaatgaatctctcccataaaatgacaattgcaaaagcagaaagggggaaactaggaccatggacaccacatatacaattgaatctaacattattgatgaacaacaagtcnnnnnnn

SEQ ID NO: 933196 - DNA, 620 bp, Homo sapiens
gaatgaatattatcttttatttgtatttatttatttattttttggtggcagaaggacaaactttactgagcccctcatcactagttctctttctcctgcacagtcttggctccccggagacgtccagtctggcggacagcaatgagacccactttgcggtcagcgggggcatctctgcggatggtggagggcttgccgatgtgctggtggttgccacctccgaaaggatgctccacaaggttcatggccacaccccgtactcgtggccagcagttcctctttgccttatatttgtggtgggcccggccagccttcaagatggctttgtcatttcggccacctctggccactacaccacccacagctctgttggctgaggaaataaccttgttggcgcrggagggcagcttcatgggtcttctgagtctcagggttgtgggagataacggtggcaccgttccctgatgcccgggccagcttgccacggtcttcaggcttctccttcaagcagcacacggtcgtactctcaggcatggtgtccacagagagaacactgccaatgttgagctggaccttcttgccgcaatacacaaactgacccatgtgaataccctcagcgg

SEQ ID NO: 933197 - DNA, 427 bp, Homo sapiens
gcctgcagtgagccgagatcgcgcccctgccctccagcctgggcgacagcgagactccctctcaaaaaaaaaaaaaaaaaaaaaaaaaaaaaatatatatatatatatatatatatatatatatatatatatatatatatatrtatgtatataagccctgttactgaagtttttcctaagcatcctgtatcttaggtaaaaactagggtaactgtctacctcctgtcaggaatcctagaatagcaacaataacagtttgtgtagcagctcataattcaaaaatctgtatcttttctataattcatcttttaattagaactttctgccacctggttgacagaaatgttataacaattaatttggggctctccctttcctcaaggtatagacaaagtactaggtaacattatggcaataatagtaattg

SEQ ID NO: 933198 - DNA, 427 bp, Homo sapiens
gcctgcagtgagccgagatcgcgcccctgccctccagcctgggcgacagcgagactccctctcaaaaaaaaaaaaaaaaaaaaaaaaaaaaaatatatatatatatatatatatatatatatatatatatatatatatatatatrtgtatataagccctgttactgaagtttttcctaagcatcctgtatcttaggtaaaaactagggtaactgtctacctcctgtcaggaatcctagaatagcaacaataacagtttgtgtagcagctcataattcaaaaatctgtatcttttctataattcatcttttaattagaactttctgccacctggttgacagaaatgttataacaattaatttggggctctccctttcctcaaggtatagacaaagtactaggtaacattatggcaataatagtaattg

SEQ ID NO: 933199 - DNA, 427 bp, Homo sapiens
gcctgcagtgagccgagatcgcgcccctgccctccagcctgggcgacagcgagactccctctcaaaaaaaaaaaaaaaaaaaaaaaaaaaaaatatatatatatatatatatatatatatatatatatatatatatatatatatatgtatataagccctgttactgaagwttttcctaagcatcctgtatcttaggtaaaaactagggtaactgtctacctcctgtcaggaatcctagaatagcaacaataacagtttgtgtagcagctcataattcaaaaatctgtatcttttctataattcatcttttaattagaactttctgccacctggttgacagaaatgttataacaattaatttggggctctccctttcctcaaggtatagacaaagtactaggtaacattatggcaataatagtaattg

SEQ ID NO: 933200 - DNA, 427 bp, Homo sapiens
gcctgcagtgagccgagatcgcgcccctgccctccagcctgggcgacagcgagactccctctcaaaaaaaaaaaaaaaaaaaaaaaaaaaaaatatatatatatatatatatatatatatatatatatatatatatatatatatatgtatataagccctgttactgaagtttttcctaagsatcctgtatcttaggtaaaaactagggtaactgtctacctcctgtcaggaatcctagaatagcaacaataacagtttgtgtagcagctcataattcaaaaatctgtatcttttctataattcatcttttaattagaactttctgccacctggttgacagaaatgttataacaattaatttggggctctccctttcctcaaggtatagacaaagtactaggtaacattatggcaataatagtaattg

SEQ ID NO: 933201 - DNA, 651 bp, Homo sapiens
aaaatgaaaatactttaaggctgggtgccgtggctcacacctgtaatcccagcactttgggaggccaaggcagacagatcactagagctcaggaattcaagaccagcctggccaacatggcaaaaacccttctctaattaaaataaggctgggcgtggcagctcatgactgtaatctcagcacttctggaggctgaggcaggcagatcacgaggtcaagagatggagaccatcctggccaacatggtgaaaccccatctttagtaaaaatacaaaaattatctgggcgtggtgttgtgtgcctgtagcccccgctactcaggagtctgaggcaggagaatcgcttgaacccaggaggtaaasggtgcagtgagccgagatcatgccactgcactccagcctggcgacagagcgagactctgtctcagaaaaaaaaaaaaacgtctggtgcggtggctcactcctgtaatcccagcactttgggaagcccaggcgggtggatcacgagatcaggagtttgagaccagcctggccaacatggtgaaaccctgtctctactaaaaatacaaaaattagccagacacggtggcatgcgcctgtaatcccagctacttgggagcctgaggcaggagaatcgcttgaacctgggaga

SEQ ID NO: 933202 - DNA, 744 bp, Homo sapiens
cttgagttctggccaacaagatgtgaacaaaagtgatgtatgctcctttccagactgggccataaaaccctggcatggtcttccagttcaagagccagcaaacgttttctgtaataatagtaagtatttttggctttttgggccatgaagtctctgtcccaactactcaactctgccacagtagcacaaatgaagccatagacaatatgtaaatggatragcatggctatattccaatacaactttatttacaccaataaagagatggtgaactggatttggcccacaggttgtaatttgctgagccctttactagttactctctccacgtttcacggaaaccctggaagccaagtgttgcagatgctgagaatgccaagatagggggcctgggtcactgaaagtctatagggagcagggtccccctgcccccacccccaccagagtacaccatgacacgagcttccattgtgttaggttattagatactgtggatgtttgttacagcagcaaacctatcctgactcatagatcaatgatccagaaaccaaatgctcatgtctgtagctgggaagaacaaaatataagaatttagattgagactgctagaaggatcatagtaattacagtaaaaaaaaagttcacatattcagtattttgtgctttttaaatcctcaggagcacaatctcatttgtagcctcataacaaccccacaagtcaggctcagcagatgtcattatctg

SEQ ID NO: 933203 - DNA, 631 bp, Homo sapiens
ctgggaggcctaagttacctccacatgggcctctccatgtgttctgggcttcctcacagcatagagactgggtttcaagggtgagtgtccaagagaaaccagtggaagtgatatggtttcctaacccagcctcagagggcatgcaatgtcacttttgctgtattctactcatggggacagtcacaaagtccctcttaggtctaagggtaggggaaatagactcctacatggacatttttcagacatgtttaaaaaccattcaggatctaccttggtttatggcatcaagggaggctttttygtaaacacatttcttcagcagagacgtgaaaaattggaggaagttatccagggaaggagagggtcggaagagccttctataccatcaatagagaaggtcatttggacagatgagaatatgtgttttggaggcttgttggggaagacagtgtgactgaggcagagagtgagggagaacagggaagaaataagaacaaagaggtagacagactggttcacataagaccttgtggatcaagttaaggtttctggactttatcctgagtgtgaagggaagcccatcaaaaagtagagcagaggcactatcagatatgccttttaggaaagccac

SEQ ID NO: 933204 - DNA, 743 bp, Homo sapiens
cctaagttacctccacatgggcctctccatgtgttctgggcttcctcacagcatagagactgggtttcaagggtgagtgtccaagagaaaccagtggaagtgatatggtttcctaacccagcctcagagggcatgcaatgtcacttttgctgtattctactcatggggacagtcacaaagtccctcttaggtctaagggtaggggaaatagactcctacatggacatttttcagacatgtttaaaaaccattcaggatctaccttggtttatggcatcaagggaggcttttttgtaaacacatttcttcagcagagacgtgaaaaatwggaggaagttatccagggaaggagagggtcggaagagccttctataccatcaatagagaaggtcatttggacagatgagaatatgtgttttggaggcttgttggggaagacagtgtgactgaggcagagagtgagggagaacagggaagaaataagaacaaagaggtagacagactggttcacataagaccttgtggatcaagttaaggtttctggactttatcctgagtgtgaagggaagcccatcaaaaagtagagcagaggcactatcagatatgccttttaggaaagccacattggtcacaatgtgggaaatggcttgaagtggcaccaccagggagggtgctatgggagtggtccatatgagagatgttgggggcttagaaaagatagtgtaaggggatggagaaatgga

SEQ ID NO: 933205 - DNA, 720 bp, Homo sapiens
ctgtgtctttactatgtgctgtgattgttctaacatttagtagtcttcatcactaggattatcttaaagagttcccaggctgggctcaggggctcacgcctgtaatcccaacacttatgggaggcccacgcgggcagatcacctgaggacaggcrttcaagaccagcctggccaacatggtgaaaccccatctctactaaaaatacaaaaattagccaggcacggtggcaggtgcctgtaatcccagctacttgggaggctgaggcatgagatcgtttgaacctgggaggtgaaggttgcaatgggctgagatattgccactgcactctagcctgggtaacagagcgagactccatctcaaaaaaaaaaaaaaaaagaagagaaaagagttaactaaatattaggatcctaggaagaggtacaaagccatcagtgtcacgagcatcatttttaccataacgaacatccaatcattgactatctcagaataaaaaatattagcctgttttctctgcttcccaggagttacatgtctgctcagctcttgctcttatcttaaggtacttgcagcagcaggtggaggatgaagccaaggaggaatcctttcccatggaaccagcctctttccatcttcctctctttggcacttctctgggtacttgatgatgatgttaacctttaaaaaacctcagatcacaccttgagccctacctttgaatt

SEQ ID NO: 933206 - DNA, 640 bp, Homo sapiens
aatatatacatgtatactaacacattgcacatgattataaatattactatttgtaatcatctatgcatatgttaagttaaacatgagtttatactgatgtctccaattctaatccattaccacatgaattggcctcctaatcttggttatcccactacaaaaatgagacaccttgctcccaccatctgtcatccatttatttaattgtttaattgcagtacataagtatagtagtttgagaattgttarcctaacccatgtggaaaataacttttgagttacagcacagtgcttatatacagttccttttgacttcaatcttaatttcactcattccaaagttggttaggtcagtgctttctcccttgtccccaccagtgaggttatttcataaatttgtaacacagttagcttttagtcatactctacactctatcctgggactcttcagcctcataaatgttttttcttaattgcatacatgaaggttcactctttgtactgtaaatttctatgagttatcacaaatgcatagtgccatgaaaccaccatgtaaccaccattagtttcatgcagaatatttttaccttaaaatttcttgcgcttcacctatcagttcttccgtgccacccaaacacct

SEQ ID NO: 933207 - DNA, 595 bp, Homo sapiens
agcttctaaaaagagagtcagcctgtcctttgaagctttaagccaggcattaacttcactctagctttgacagccctagatgacatcttcttccaatacaaggctgattcatccacattgaaaacctgttgtttggtatagccaccttcatcgatcatctttgctagatcttctggacaatttgctacagcttctacatcagcacttgctgcttcatcttgtgcttttatggaggtggcttcttycctcaaacttcatgaaccaacctctgctagcttcaaactttccttctgcagctttctcacctctctcatagttcaaagaattgaagagcattagggccttcttctagagtaggcttggctaaaggagacttgtggctggtttcatcttctatccagagaactgaaactttctccatataagcaataaggctctttcactttatcactcgtgtattcactggagtagcacttttaatttccttcaaaacctttacattcacaacttggctggttggtgcaagaagcctagctttcagcctgtctcaacttttgacatatgttcctcactgaacttcaatcatttctagcat

SEQ ID NO: 933208 - DNA, 722 bp, Homo sapiens
ccttaacgtatgatacatataaaataatttaactttttcttgtaatgtcatgactagtctcagctttttggaagcacttccttcctcaccagtggcactttgtattggtcccatagtgttattctaggtttatggtattgcatgagacactaacactataagaactgcaagagatcatcttttactacaatatgcaatttactggagagacaaactgctcatgcagagatgattagtgtgaaatggtgttttaagcagattgagctcactgcaatagcaatgggagctggctatgaaattattacggtaatatagtatacactaaagttaactttatgcagttgtgatttaatgctacacctttacatttgtttatatttttctcagttgtaaatgkttccatgtctagtctgtgtttgtgcataagttttgataaattttcactttttataatagatttgtatacattttattatagcaaatgatgaatagtatgtacatacatttttgcatctaggacatacctgaccttttttttaaactttttaaaaatatttctagactacaggtttatatgtatatttttttcaacgtgtcacaaatcttcaaaaaatcttccagtatatttattgaaaaaaatccacatataggtagacctgtgcagttcaaatatgtgttgctaaagtcaactgtattaaaatatgggtcagaaaactttttat

SEQ ID NO: 933209 - DNA, 555 bp, Homo sapiens
agaaggactagctaaatatataaaacacaggggaatttttagggtggtgaaaatattttgtataatacagtagtggtgaatgcaagatattaagcattatcaaaatccataggattttatggcaaaatataaaccttaacaggtacaaatttaaaaaaaattagtttggagaatacaaggatggaatgcagaaagtgacaagtctaagtatatgacargtttataaaacaacttcactgaaggtggttagggaataaggtgctgacccacttaacattgggaatgagtgtaatctgtaaagttaaagggaaataaattgtatgtacactgtactgtagctgataaagttgtttcccttaatggtacagattagcaattttgaagtcactaaacatacatactagaattgaacaattaggcaaattgatggcaaatggttggaatcagacttcttgctgctaaaatgaaaggctcaaataagcaagggaagaagactagaaggatccatatggtaatggattagagttggatacatcaataagaacttatatttag

SEQ ID NO: 933210 - DNA, 566 bp, Homo sapiens
tctgtgggacacagctaaaagagtgttaagagggaaatttatagcactaaatacccagatcagaaagctagaaaatctcaagtcaacaccctaacatcacaattaaaagagctagagaatcaaggcaaacaaatccaaaacctagcagaagacaagaattaactaagatcatagcagaactgaaagagatacacacgcacaaaaaaaaagttcaaaaaaatcaatgaatccgggaactgtttttattgaaaacaaaaaacaaaatagatagaccactagctagactaataaagaagaaaagagagragaatcaaatagacacagcaaaaaatagtaaagtggatatcaccactgaccctacagaaatacaaactaccatcaaagaacactataaacacttctatgcaaataaactagaaaatttagaaaatggatagattcctggacacatacaccctcccaagactaaaccaggaagaagttgaatccatgaatagaccaataataagttctgaaattgaggcagtaattagtagcctaccaaccaaaaaaagcccaggacaaga

SEQ ID NO: 933211 - DNA, 550 bp, Homo sapiens
aacataattcagccaaattcttttccatattataacaaagatcgcctttcttccagtttccaaaaatatgtttctcatttcatctgagagctcatcagaattgctcttaacatccatatttctagcatgcacctcaaaatacttccagcctctattcattacccaattccagagccacttccacatgtttaggtatttgttaygacagaactacaaacacttttcagtaccaaaatatgtattggtatgaattatccagagaaacagaatagaagataaagatatagatgaagatgtaaatatagatatatatttattagaagaaattgactcacatggttatggaagctagaaattttcaggatctacagtcatctagcaggaggaccaagaaagccagtgagatacttcttctctgagtccagtgggtaaggaccaggagagccaatggtataagtttcagtctgagttcaaagatctgagaacctgtagatccaaagatgtaagttctagcacaagttctagggcaaagccagggaacaatcaatgt

SEQ ID NO: 933212 - DNA, 550 bp, Homo sapiens
aacataattcagccaaattcttttccatattataacaaagatcgcctttcttccagtttccaaaaatatgtttctcatttcatctgagagctcatcagaattgctcttaacatccatatttctagcatgcacctcaaaatacttccagcctctattcattacccaattccagagccacttccacatgtttaggtatttgttatgacagwactacaaacacttttcagtaccaaaatatgtattggtatgaattatccagagaaacagaatagaagataaagatatagatgaagatgtaaatatagatatatatttattagaagaaattgactcacatggttatggaagctagaaattttcaggatctacagtcatctagcaggaggaccaagaaagccagtgagatacttcttctctgagtccagtgggtaaggaccaggagagccaatggtataagtttcagtctgagttcaaagatctgagaacctgtagatccaaagatgtaagttctagcacaagttctagggcaaagccagggaacaatcaatgt

SEQ ID NO: 933213 - DNA, 594 bp, Homo sapiens
ctaaaccaaaagccacggaacatggagagaacataggacactcctcatgtccacaaaagcaaacacctatccagtaggagagtgaaggaaggaatgcagggagctggtgactataatctccatggggcaagttttggagtctgacaatccagggttcaaatcctgcctctaccctgtaattgaacgtgtgacttygagtgaatggctcgactcaactgtacaagtttcagtctccacatctgcaaagtggtatctctaatgacaaactcacagcattgccctgaagattaaagaaggggtatacataaggcacttggcaccaccccacacatgccatgggtgagcaataaattttacccaaattaatgtgaattaacagaaatattattatgcattggaaacccctgctaagactgaatcttgttcactttcctagtgccagcacctggtataggtcagtcacacagaaggtgctcagtaaataaataaatgttaactctgattaactcatactgattagaaactctgattggaaaataggtacaaatgaataactaaaaataggaaaaggaattgcttgttactttataaaca

SEQ ID NO: 933214 - DNA, 568 bp, Homo sapiens
ggtgggaggatcgcatgagtccaggagttcaaggctgtagtgagcgatgactgtgccattgcactccagcctgggcaacagagcaagaccctgccccagctcagaagagaaaaggacataaagaaaatatttttgtagttgtacaacatgtttatgttttaggctgttattataaaagagtttaaaaaaatttaaaagtttataaagaaaacaaggcacagtaaaccaaggtgaatttattaaagaaaaattaaaaaaataaatttagtgaagcctaaatgtaagatrtttatgaagtctacagtagtgtaatgtcctaggccttcacattcactcaccactcactcactgactcacccagagcaatttccagtcctgcaagatccattcatggcatacacggtatatgtatgtgtgtgtgtgtgtgtatacatatgtgtgtgtgtttatgtatctatatatatagatgcaccatttaaaaaatactgcatttttactgcaccttttctttttagatacacaaatacttaccattgtgttccaactgcctatagtaattcagtgcaga

SEQ ID NO: 933215 - DNA, 566 bp, Homo sapiens
gtcaagtctcaacataatgctcatgtatagaaaggtctgggagggtgtgtactggaatgtcaactgtgcttatctttgagtgtggggaaattatgggtgaattttccttctctgtgctttttggtgttttccaaaatgttctccatgaacacaaattccttctgtaactggggaaaatccaatgaatgttatctaaaagctaaaaggccaggtgcaatggctcatggctataatcctaggactttggaaggctgaagcaggaggatcgcacgagtccaggagtttgagaacaacctgggcaacatagacgttgtttcaaaaaaaaaaaaaaaaagaaaagaaaagaaaaagaaagaaagaaagaaaagaaaaaraaataaaagctaaaaaccaaacaagccaaaaagtaaaaaaaaaaaaaaaaaaaaaaaatagccaggtgtggtggcccccacacctgtggaccagctactcgggaggctgaggtgggaggattgcttgagctcaggaggttgaggctgaagtgagctatgatcgcatcactgcattccaggctgggcaataga

SEQ ID NO: 933216 - DNA, 602 bp, Homo sapiens
gcatcatggttgcttaaaggtatgttaaataacctatcctttgtactttggatgtaagtagccatagtttaaaaagtggtatggtttaaaaaaaaaaaaaaccactctcatttcaatccaaggattatgaagactaaatmggaaaatcagacaaatcagaaacaaatctaactttttttttgagacagagttttgctcttgtcgcccaggccagagtgcagtgcactgcaacctctgcctccaggcttcagcgactctcctgcctcagcttcttgagtagatgggattacaggtgcccaccaccatgcctggctaatttttgtatttttagtagagatggggtttgaccatgttggccaggctggtctcgaactcctgatctcaggtgatgtgcccgcctcggccacccatagtgctgggtttacgggtgtgagccactgcatctggcccaaatctaacttttaataaggtcatggtataaaacaaatatatttgtactctcacctattccatactcaccttgttatactaggttctcagtcctttggaaatacaaaatgttttcaaagttccttgacacctattttgcatttaagggtacc

SEQ ID NO: 933217 - DNA, 653 bp, Homo sapiens
ttattgtcatgcaaattatacctttatacattatgtgatcaccaaaaggtttataattcttgcttcatgcagttatttttttgagacagggtttcattctgttgcccacgcaggacacgatcacagctcagtgcagcctcaaccctccagactcaaagcggtcctcccaggtagctgggaccacaaacatgtgccaccacacctgataaattttttaattttttgtaaagttgaggttctcagtatgttgcccagtctggtgtcgaacctctgggctcaaactgatctcccgttttagcttcccaaagtgttgggattacagaaatgagccactgcacccagcccagttgttctttaattaggagatttatactgtcctttgtatttacctgtgtatctttgccagtagtttttcatacggattcaggtcagtgttcagtgtyttttcatttcagccaggattcttgaatttttcttgtttcagcaggactgctagcaatgaattacctctttttgtatctagggaatatcctaattcctcctgtatctttggggatagctttgccagatgaaggattcctggttggcattccttttctttgaacattttgaatatgctcccccactgctttctgtcctccatggtttctgat

SEQ ID NO: 933218 - DNA, 583 bp, Homo sapiens
tcatgagtttaagttgcatttctccaatgactgatgacatcgagcttacttgttcgcctttttataacctgggttgttcattttcttgtgttttgaaagttctttatttctatttataagacttctaccaaatatgtgatttgcaaatattttcttccagttcgtggcatgtcttttccctctcttaagagcatttttcagagaacagaagtttttcattttgataaagacaaatttattcacactttcttttatgcatcacgctgtgtccagaattagtgggttcttggtctcactgacttcaagaatgaagccgcggacgctcgyggtgagcgttacagttcttaaagatggtgtgttcagggtttgttccttcagatgtgtctggagtttcttccttctggtgggttcatggtcttgctggcctcaggagtgaagctgcagaccttctcggtgagagttacagctcttaaaggtggcgcatctggagttgttcgttcctcccgtccagagttgtttatccctcccggtgcattcatggtctcgctggcttcaggagtgaagctgcagacctttgcggtga

SEQ ID NO: 933219 - DNA, 805 bp, Homo sapiens
gcctgagtctggtggggacttggagaatctttatgtctagctaagggactgtaaatacaccaattggcactctgtatctagctcaaggtttgtaaacacaccaatcagcaccctgtgtgtagctcagcgtttgtgaatgcaccaatcagcactctgtatctagttaatctgctggggacttggagaatctttatgtctagctaagggattgtgaatgcaccaatcggcactctgtgtctagctcaagatttgtaaatgcacmaatcagcactctgtgtctagcttcgggtttataaatacaccaattgacactctgtatctagctaatctagtggggacatggagaacttttgtgtctagctcagggattataaatgcaccaatcagcaccctgtcaaaacggaccaatcagctctctgtaaaacagaccaatcggctctctgtaaaatggaccaatcagcaggatgtgggtggggccagataagagaataaaagcaggctgcccgagccagcagtggcaactctcttgggtacgtttccacactgtggaatctttgttgtttcgctctttgcaataaagcttgctgctgttcactctttgggtccacactgcttttatgagctgtaacactcactgcaaaggtctgcagcttcactcctgaagccagcgagaccaccaaccacctgggaggaacgatcaactccagacatgccaccttaagagctgtaacactcaccgctaagatctgcagcttcactcttgagccagtgagaccacgaacccaccagaagaaagaaactgcga

SEQ ID NO: 933220 - DNA, 608 bp, Homo sapiens
gggagctacagacctggagctcttcttactcagccatcttgccagccaccccagtctctgcttctatattttatatctcacagcttggccattgtctggggactctatctctttctccttcttcagtttgcaaactccaaggaaggattctgattgggcgggtttgaaagcccactcttggatcccaatgatctgtggccagattggagtcaacaatgaaatggccactccattcaacttccacaagcggagtgtgtaagagaacatttcctagaagaaggggtgttgctgttaccacagacctcaaaagcagaaagacaggcagggatgggggctgaataaccaaaatactgatgtttcccacacaggcctgcttttcaggaccccagcatctaccatgtaccctctcctgttaaattttscctccaaatttcttccagtccactaatctactacttgtcttagtccatttgggctgctataataaaataccgtagattcataatttataaagaagagaaatgcatttttcacagttctagagacagagaagtacaaaatcaagatgccagcagattcagtgtctggtcagggctttctctctgctt

SEQ ID NO: 933221 - DNA, 560 bp, Homo sapiens
tgaatgaatcagaggataggattcctctgtctgcttgagacccttcaatgcacttcaacccacgagagcccccttacagccctgtacgatcagctctggctttgcttgggcctctctgccacagcgcttcctcatttgcattctagagccacatgcttcaatgtgcccaggcccttcttccatgtctacccttgttgtccctcctccctgacatgctgtccctgaatctccacaaggrgcttgcttctcatcattcaggtctcagcacacaggtcactatctcagaaaggaccacccaggtctgaattagctttccgtttcctgacttagtgaaggctaaagttggtcagtttctaatcattggcctctttatctcataactctgttttaatctcctgatgtatttgtcactgctaaaacaactttgtgctgggcacggtggttcatgcctgtaatcccagcactttgggaggctgaagcaggtggatcacttgaggtcaggagttggaggccagcccggccaacatgacgaaaccccgtctccactaaacatacaaaaa

SEQ ID NO: 933222 - DNA, 625 bp, Homo sapiens
ttttttttttttcttgagatggagtctcactctttcacccaggttggagtgcagtggtgcaatctcagctcactgcaagctctgcctcccgttttcaagcaattctcctgcctcagcctcctgagtatctgggactacaggtgtgtgctaccacacccagctactttttctttttttctttcttttcttttctttttttttttttttttttggatttttagtagagacagggtttcaccatgttagccaggatggtctcaatctcctgacctcgtgatccgctcgcctcagcctcccaaagtgcggggattacaggcatgagccaycgcacccagccatttctttttttcttgtttcttttttttttttttttttttgagacagagtcttgctctgtcgcccaggccagagtgcagtggctcaatctcggctcactgcaacctctgcctcctgcgttcaagcgattcttgtgcctcagcctcctgagtagctggaactacaggtgcctgccaccacatcaggctaatttgtgtatttttagtagagacagggtttcagcatgttggccaggctggtctcgaactcctggcctcaagtgatccaactgccttggcctcccaaagtg

SEQ ID NO: 933223 - DNA, 567 bp, Homo sapiens
gaatccacatcaaactgtgatacaagtgaaaaacaaacttttattgcatgaagccactgagatttctgggcttctctgtggcagcagttagcattaattaacctaactaatacagctctacaacaaagtaagttgaaatgctcaaatggtttgggcaagggacacatctgcatatcttgccagcctttcacacatcaaattagagaactgaggccgctgcacagagaatttaaattcaatgctcaattatttccaagtgaccattttttataatgtgaaatttgcacagtggccatgatgatctctttgctgctgcttargatgtcttagttctgcttgtggtcatcttttctaggctgttaccaaagagctgatattatgtgattagtttccatttccagcatgacctaataaaatgctttggcagcatgtagttgccaaatatgtgttttacgaatgaatgaatgaatgaatgaatgaattttaagcatctatctgatattttaaatatctatttgatttccagaaatataaatgacaacttagtagcttgttgtctcgtaagac

SEQ ID NO: 933224 - DNA, 614 bp, Homo sapiens
aaaacagtttagtagtttctcaaaatgttaaacatagagttaccatcaggtccagcagttccattcctaggtatatatctacccagtagaaatgaaaacataccttctacaaaaaattacatatgaatattcatagcaacattattcacaatagccaacaagtggaaataactcaaatgtccatcagtgatgtatggttacatacaatgtggcatattcatacaatggaatatcatgtgacaataaaaaagccagtcacaaaacactacatgttataggattctagttctatgaagactctgggattgtcacatctagagaaagtgaaaatagaatattgttttccaggggcaaagttaagagtttgggagtgaagggtaatagtaagtgaatactaattaatataagggtttcttttcttaaatttttccttccttccttccttcatccctctctccctccctctctctctctcycattccctccctctctccttcccttcctttctcttttctttcttcctttttttctatttttctttatccctctctttctctccttttcccttccttccttctttcctttcttgatgatatccaagagacaagaaaagg

SEQ ID NO: 933225 - DNA, 574 bp, Homo sapiens
gaaaggcattttctacactccctgccaaccttctttcagcccctgacccacatttttccctgaaagagttttcttaaactggccaaggactgaagctgagatggctggactgtgaaaacccaagaatcccagggaataggccctgaggctgctaccttatgacttttcccaaattaatcacagtaacaaaaactagtgtttacttagtgtttagactgtgctagacactattctaagtattgtactcatttagtacttaaagtaatcatatgtggtacaggtgccatttttatccctaaaaagggaaaaawgggcagaacatagatcaactttagagagggattgattcctgttttactcacatgaggtagaagattctactagtgcaaaaaacattactagtgacaggcaggagcccagaataggacataagcttatgatgaggccttacaagggtcatgtaacatggtgttaggagctcaggtcttggaaccagactcctgggttcaaattccagctctagtatcatctaactatatgactttgggcagaggtccccctactctctgattct

SEQ ID NO: 933226 - DNA, 554 bp, Homo sapiens
tttttttaatcttctttttgtggagaatgggctttcactatgttgcccagcctgatcttaagcatttggattcaagctatcctcctgcctttgcctccctgaatgctgggattaaaggtatgaatcacaatgcccagccccagaatgcccactcttaccactttttttcaacacagtattgcaagtcctagctagagcaaatagtcaggaaaaagacataaaactcwtccaaattggaatagaagaagtaaattgatctctgtttgcagacgacatgatgttatgtaaagaaaaccttaaataatacaccaagaatgttagaagtaataagtgaattcaataaaattgcaggatacaaaattaacataaaaaagtcaccttttaggccaagtgtggtggcttatgcctgtaattccagcactttgggaggccaaggtgggcagaccacttgaattcaggagtttgagaccagcctggccaacatggctaaatcccatctctactaaaaatacaaaaattagccaggcattgtggcacacacctgtaatcccagc

SEQ ID NO: 933227 - DNA, 532 bp, Homo sapiens
aatagttattcccatttcacaagtgatactgtggaagcctgcagaagtcataaaacatctccagtgacaaacggctgctaagtcacagtcaggagggacagaacccaggcatctcaagtccacagccaatacataattatgctctagcagctttagtccttcaaatctttttctagtcgtgccaaggactggtgaatatctagacttggctctgaataaaaagcatcacttttacaacagggaaagaagtacacctgactggtgatgtacgctgctctctcttttacttaattatgmcttaaggaagccagatgtttaaaccattcaggtatgacaagaaaattaaaaacacagcaaagcacaattatgcaccttattaagttgtaatagttagatgcagcttactttaattctggggggaaagaagcggagggcatttactaagcaattacatgtaatttccaggtactttcccatgattatctcatgtagctctgatcacaccctgggatgggggagttctgacagtccc

SEQ ID NO: 933228 - DNA, 532 bp, Homo sapiens
aatagttattcccatttcacaagtgatactgtggaagcctgcagaagtcataaaacatctccagtgacaaacggctgctaagtcacagtcaggagggacagaacccaggcatctcaagtccacagccaatacataattatgctctagcagctttagtccttcaaatctttttctagtcgtgccaaggactggtgaatatctagacttggctctgaataaaaagcatcacttttacaacagggaaagaagtacacctgactggtgatgtacgctgctctctcttttacttaattatgacttaaggaagccagatgtttaaaccattcaggtatgacaagaaaattaaaaacacagcaaagcacaatwatgcaccttattaagttgtaatagttagatgcagcttactttaattctggggggaaagaagcggagggcatttactaagcaattacatgtaatttccaggtactttcccatgattatctcatgtagctctgatcacaccctgggatgggggagttctgacagtccc

SEQ ID NO: 933229 - DNA, 601 bp, Homo sapiens
ttgtctcagttggcacctgctgcataatacggtaccatagactaggtggcttaaacaacacacatttattctctcatacttccagaggctggaagtccaaaatcagtgtcttgcagggttcggtttctggtgattccccacttcctggctgtgggcagtgccctcttgttgtgtgctcacgtgacctcttctttgtgcacatgtggagagaacaggctctccagtgtcttcacttataaggacactcatcctatccgrttgagaccctaccttatcatcgcttaaccttaattacttctgtaaagggcgctatctccaaggacagttatattgggattggggctttaacataagaattttgcagggacatgaattgcagtccatgacagatgtaaactttgagaaacaggaaaaagctggaacctacaagcagaagtgggaacctgtgaggttggactgaaactcagatcagttcttgctgcctctgaccttgatgtatgtatcctggaggagatgctggcatctctcatcatggagctaattgtaggacaggcccagaaatggaagaagctggaagagagtctagtggaaggtggggcag

SEQ ID NO: 933230 - DNA, 551 bp, Homo sapiens
cttaaacaacacacatttattctctcatacttccagaggctggaagtccaaaatcagtgtcttgcagggttcggtttctggtgattccccacttcctggctgtgggcagtgccctcttgttgtgtgctcacgtgacctcttctttgtgcacatgtggagagaacaggctctccagtgtcttcacttataaggacactcatcctatccgattgagaccctaccttatcatcgcttaaccttaattacttctgtaaagggcgctatctccaaggacagttatattgggattggggctttmacataagaattttgcagggacatgaattgcagtccatgacagatgtaaactttgagaaacaggaaaaagctggaacctacaagcagaagtgggaacctgtgaggttggactgaaactcagatcagttcttgctgcctctgaccttgatgtatgtatcctggaggagatgctggcatctctcatcatggagctaattgtaggacaggcccagaaatggaagaagctggaagagagtctagtggaaggtggggca

SEQ ID NO: 933231 - DNA, 551 bp, Homo sapiens
cttaaacaacacacatttattctctcatacttccagaggctggaagtccaaaatcagtgtcttgcagggttcggtttctggtgattccccacttcctggctgtgggcagtgccctcttgttgtgtgctcacgtgacctcttctttgtgcacatgtggagagaacaggctctccagtgtcttcacttataaggacactcatcctatccgattgagaccctaccttatcatcgcttaaccttaattacttctgtaaagggcgctatctccaaggacagttatattgggattggggctttaacataagaattttgcagggacatgaattgcagtccatgacagatgtaaactttgagaaacaggaaaaagctggaacctamaagcagaagtgggaacctgtgaggttggactgaaactcagatcagttcttgctgcctctgaccttgatgtatgtatcctggaggagatgctggcatctctcatcatggagctaattgtaggacaggcccagaaatggaagaagctggaagagagtctagtggaaggtggggca

SEQ ID NO: 933232 - DNA, 548 bp, Homo sapiens
gaatggctttgacaaaaatgctgctgatgatatggacaatgaaatacaggctgaggtggtcttagatggagatgaggaacttgttgggaactggagtaaaggtgactcttgctacatttcagtaaagagactggcagcattttgcccctgccctagatatttatgaaactttgaacttgagggagatgatttagggtatctggcagaataaatttctaattggcaagatttkatttgaaaagcattcagttttaaaagggaagcagagcataaaagtttggaaaattacagcctgatgatgcaataaaaaagaaaaacctatattcttgggagaaattcaagcctgctgcagaaatttgcataagtaacaaggagtcaaatgttaatcaccaagacaatgggaaaaatgtttctagggcatgtaagaggtcttcacagcagccctccccattacaggcctggaggcctaggagaaaaagaatggtttcatgggccaggcccagggaccctctgcttcatgcagcctcggggcttggtgccctgcatcc

SEQ ID NO: 933233 - DNA, 590 bp, Homo sapiens
gtgttctggcccagagtgtgtctatgtgatctgtgatctgggaactagtcttaaacaggtacctcacaactctgacaggtactgtagcctggtgtggctgagctgttatccagggtgcaagacatcgtccactccacttttccctctcctctctttaacgggagggaaagggtctcttttggagatgcgtgctgtgcagcctggttgagaggtgatgccagyactcccttaattgccctaggtggtgtctcagtaggtcacatggctccccagtcctctgtctctgggactagttcaaccctaggactcatttaagatttgcagtccttgtgtcttagactgcttttcaagtatactaacagactcagagaacttcagcccacggtggtgtgctttgcaagaactcaagttccaactgccgggatgggtgattcgcttctggctagagctggtttaaatgcattgtctgtgggtgggcatcggctgagtttggtctagttttcctatctgctctaacaagacagcactgagttcaatgcctcataattgctgtgttctctctccctcagtgcccagagaagttctctgta

SEQ ID NO: 933234 - DNA, 595 bp, Homo sapiens
ctgccagcattgccccatgcaagcttccagattcgttatatatgttagcagcttgatttttcaggctgctctttgttagaaaataaatgatttttggggctgcttttggttagaaaaggaattctgctaaggactctgttgccctcactatctgcctaaataatttctttctgtctcctgtaccataatcacatgagtcatttcctctaacaagtctcctttcacatatctctcttttcatctatctatctatctatctatctatctatctatctatcwactatctatctagagagagatatcctactgattctgactctctggaaactcataactaatacagattttgataccaggagtagttttagagaaacataattttaaggatgagtttcctgaattgattttggggtttctgcaattggatctctaatctgattggatttaaacatgctaaggactctacttccagtagtagagtgagcactgagagtcgatggtaagaactgtttatagagatattcaaaatatctgcatcagatactcctaatcatccacttataagtgacaaggaacttagtgaccctatatatag

SEQ ID NO: 933235 - DNA, 664 bp, Homo sapiens
ctagttacatctctctttaagtccttatgtttggttccctgggagtttcagcgcatttatatagcagcacccaagtttttataatctgttaagtattactatctaggattagctactgaagaatcaagaaccggtagttgatgaacttgaaagacaattatcctatatagtgtttcttgaggacactaatttcttaagatagaatgagaggaaaacataatatccacaaacagaaataaattttggaatattatatgctttagcttcctcttggatatttacaaaaatattagcatattaacgattacagaatgaagaaacctttttagctacatttaaactagtcctagagtttgaatatatttcctccaaattcatgtttaagtttaatcctcaaagtgatgaggaagtggggcctttggaggcaattaagtcatgatggctrtgcactcataatgagattaatatcctaattaaggaagcttctgagagcttcctggctcttccatttcttctgccatgtgacaacatggcatttgtccattttgtccctttgcttttcctaccatgtgattaagtcatgcaaaatgacatctatgaaacaggccctcatcagacaatgaatatgttggtgccataatcttgaacttcccaactcctgaac

SEQ ID NO: 933236 - DNA, 608 bp, Homo sapiens
taactaaaatttttcccaccagcttgactgaacccccacatctctcccttttttgttttctgcatcaggtcttttgcattggagactgcagatgtgtgcagcaacaggtttgtcgggcatggcagtcattgctcttattccagctttgcrtcctagaattagcaaataacataaaacaatcatgagtacaatttgcaacattcagttccagtcagagtgacctccaggagtgggggtctaaccaggagagatgattttgcacacctttccatatggctgtttgttgggtgtgtagatctatggtgtgaggggattctaaaatttttgttttaagttgctttatgtctgctgttaaattgtcatgaaaggttccccagaggtgttgtttcacctcatctcaactatgtatagattgattctatggtagagaagtgacacagatatgtttatgctcccagtcacagtttaattgctgtcggaatgccagtgcatcttgtcgctcccccacgtattctaaagctgccttgtgggcttgcagacgtgcaagaattttttgatctataccttgctgtaagacttcattagacacatttttggccagattatct

SEQ ID NO: 933237 - DNA, 606 bp, Homo sapiens
ttgcatgaattactttttctctattgcagttccttgtcttgatgaattggctctgtctacgcagtgggcaaggtgaaccccttgggcagttacagtgttggcccagattacttgaggtcaggagtgcaagaccagcctrgccaacagggtttgtgtgtgactatgcccggttaattttggtatttttagtggagactgggccacctgcctcagcctcccaaagtgctgggattacaggcatcagccactgtgcctggctcctttttttttttttttttttttttttgagaaggagtttcgctcttgttgctgaggctggagtgcagtgatgtgatctcggctcactgcaacctccgcctcctgggtttaagctattctcctgcctcagcctcctgagtagctgggatgacaggcatgtgccaccacgcctggctaattttgtatttttagtaaagacgggatttctccatatttgtcaggctggccttgaactcccgacctcaggtgatccacccgccttggtctcccaaagtgctgggattacaggagtgagccactgtgcctggcccatttaaaaattcttagttggctttgtgattctcaaat
